United States Patent Application Publication US 2007/0042381 A1 - sequence listing, part 73

SEQ ID NO: 3326097 - RNA, 18 nt, Human
ccccucagggucccuggu

SEQ ID NO: 3326098 - RNA, 15 nt, Human
cccugguggcagugg

SEQ ID NO: 3326099 - RNA, 16 nt, Human
cccugguggcaguggg

SEQ ID NO: 3326100 - RNA, 19 nt, Human
cccugguggcagugggagc

SEQ ID NO: 3326101 - RNA, 16 nt, Human
ccccucagggucccug

SEQ ID NO: 3326102 - RNA, 22 nt, Human
ccccaggaggccagccuugacc

SEQ ID NO: 3326103 - RNA, 21 nt, Human
ccccaggaggccagccuugac

SEQ ID NO: 3326104 - RNA, 15 nt, Human
ccccaggaggccagc

SEQ ID NO: 3326105 - RNA, 14 nt, Human
ccccaggaggccag

SEQ ID NO: 3326106 - RNA, 13 nt, Human
ccccaggaggcca

SEQ ID NO: 3326107 - RNA, 13 nt, Human
ccccacuggugac

SEQ ID NO: 3326108 - RNA, 12 nt, Human
ccccacugguga

SEQ ID NO: 3326109 - RNA, 12 nt, Human
cccccagcccca

SEQ ID NO: 3326110 - RNA, 21 nt, Human
cccccgcugucagccauuccu

SEQ ID NO: 3326111 - RNA, 12 nt, Human
cauuuaaaagau

SEQ ID NO: 3326112 - RNA, 16 nt, Human
cauuuaaaagauacag

SEQ ID NO: 3326113 - RNA, 15 nt, Human
cauuuaaaagauaca

SEQ ID NO: 3326114 - RNA, 12 nt, Human
cauuuccugugu

SEQ ID NO: 3326115 - RNA, 13 nt, Human
cauuuccuguguc

SEQ ID NO: 3326116 - RNA, 17 nt, Human
cauuguuggccaaagcc

SEQ ID NO: 3326117 - RNA, 18 nt, Human
cauuguuggccaaagcca

SEQ ID NO: 3326118 - RNA, 15 nt, Human
cacccaagggccugg

SEQ ID NO: 3326119 - RNA, 14 nt, Human
cacccaagggccug

SEQ ID NO: 3326120 - RNA, 13 nt, Human
cacccaagggccu

SEQ ID NO: 3326121 - RNA, 17 nt, Human
ccaaacucaccugcccc

SEQ ID NO: 3326122 - RNA, 14 nt, Human
cauuugcuccuuuc

SEQ ID NO: 3326123 - RNA, 13 nt, Human
cauuugcuccuuu

SEQ ID NO: 3326124 - RNA, 22 nt, Human
cauuuguuugaacugauaaaga

SEQ ID NO: 3326125 - RNA, 20 nt, Human
cauuuguuugaacugauaaa

SEQ ID NO: 3326126 - RNA, 17 nt, Human
cauuuguuugaacugau

SEQ ID NO: 3326127 - RNA, 16 nt, Human
cauuugagcagggcuc

SEQ ID NO: 3326128 - RNA, 20 nt, Human
cauuugagcagggcucagcg

SEQ ID NO: 3326129 - RNA, 17 nt, Human
cauuugagcagggcuca

SEQ ID NO: 3326130 - RNA, 18 nt, Human
cauuugagcagggcucag

SEQ ID NO: 3326131 - RNA, 20 nt, Human
cauuugaaaauuuugauguu

SEQ ID NO: 3326132 - RNA, 22 nt, Human
cauuugaaaauuuugauguuuu

SEQ ID NO: 3326133 - RNA, 14 nt, Human
ccaagcucccaggc

SEQ ID NO: 3326134 - RNA, 17 nt, Human
ccaaggccaaaggaagc

SEQ ID NO: 3326135 - RNA, 22 nt, Human
ccaagcucccaggcauucccca

SEQ ID NO: 3326136 - RNA, 16 nt, Human
ccaagcucccaggcau

SEQ ID NO: 3326137 - RNA, 15 nt, Human
ccaagcucccaggca

SEQ ID NO: 3326138 - RNA, 20 nt, Human
ccaagucaagugaaaaagga

SEQ ID NO: 3326139 - RNA, 13 nt, Human
ccaaggugggagg

SEQ ID NO: 3326140 - RNA, 23 nt, Human
ccaagguuuggggaagaacgaag

SEQ ID NO: 3326141 - RNA, 15 nt, Human
ccaagggccuggccu

SEQ ID NO: 3326142 - RNA, 16 nt, Human
ccaaggccaaaggaag

SEQ ID NO: 3326143 - RNA, 21 nt, Human
ccaaggccaaaggaagcacau

SEQ ID NO: 3326144 - RNA, 18 nt, Human
ccaaggccaaaggaagca

SEQ ID NO: 3326145 - RNA, 18 nt, Human
ccaagggccuggccugag

SEQ ID NO: 3326146 - RNA, 16 nt, Human
ccaagggccuggccug

SEQ ID NO: 3326147 - RNA, 19 nt, Human
ccaagggccuggccugagc

SEQ ID NO: 3326148 - RNA, 22 nt, Human
ccaaggggaauguuugccucug

SEQ ID NO: 3326149 - RNA, 18 nt, Human
ccaaaguacacuguuuca

SEQ ID NO: 3326150 - RNA, 15 nt, Human
ccaaaguacacuguu

SEQ ID NO: 3326151 - RNA, 22 nt, Human
ccaacauacucccaucugugaa

SEQ ID NO: 3326152 - RNA, 21 nt, Human
ccaacauacucccaucuguga

SEQ ID NO: 3326153 - RNA, 16 nt, Human
ccaacauacucccauc

SEQ ID NO: 3326154 - RNA, 20 nt, Human
ccaacauacucccaucugug

SEQ ID NO: 3326155 - RNA, 19 nt, Human
ccaacauacucccaucugu

SEQ ID NO: 3326156 - RNA, 18 nt, Human
ccaacauacucccaucug

SEQ ID NO: 3326157 - RNA, 17 nt, Human
ccaacauacucccaucu

SEQ ID NO: 3326158 - RNA, 23 nt, Human
ccaaaggaagcacaugccucucu

SEQ ID NO: 3326159 - RNA, 15 nt, Human
ccaaaggaagcacau

SEQ ID NO: 3326160 - RNA, 21 nt, Human
ccaaagcuaggccuggccaga

SEQ ID NO: 3326161 - RNA, 16 nt, Human
ccaaagcuaggccugg

SEQ ID NO: 3326162 - RNA, 17 nt, Human
ccaaagcuaggccuggc

SEQ ID NO: 3326163 - RNA, 15 nt, Human
ccaaagcuaggccug

SEQ ID NO: 3326164 - RNA, 19 nt, Human
ccaaagcagugcaugcugu

SEQ ID NO: 3326165 - RNA, 19 nt, Human
ccaaagccaaagcuaggcc

SEQ ID NO: 3326166 - RNA, 23 nt, Human
ccaaagcagugcaugcugucccu

SEQ ID NO: 3326167 - RNA, 22 nt, Human
ccaaagccuccuccagccgcca

SEQ ID NO: 3326168 - RNA, 17 nt, Human
ccaaagccuccuccagc

SEQ ID NO: 3326169 - RNA, 20 nt, Human
ccaaacucaccugccccuca

SEQ ID NO: 3326170 - RNA, 20 nt, Human
ccaagaagcccaggaaaggc

SEQ ID NO: 3326171 - RNA, 19 nt, Human
ccaagaagcccaggaaagg

SEQ ID NO: 3326172 - RNA, 12 nt, Human
ccaacccucauc

SEQ ID NO: 3326173 - RNA, 15 nt, Human
ccaagaagcccagga

SEQ ID NO: 3326174 - RNA, 21 nt, Human
ccacacccagcccacuucugc

SEQ ID NO: 3326175 - RNA, 22 nt, Human
ccacacccagcccacuucugcc

SEQ ID NO: 3326176 - RNA, 20 nt, Human
ccacacccagcccacuucug

SEQ ID NO: 3326177 - RNA, 15 nt, Human
ccacacccagcccac

SEQ ID NO: 3326178 - RNA, 16 nt, Human
ccacaggaucagucug

SEQ ID NO: 3326179 - RNA, 16 nt, Human
ccacaugugcacaugc

SEQ ID NO: 3326180 - RNA, 16 nt, Human
ccacauuccugaugcu

SEQ ID NO: 3326181 - RNA, 19 nt, Human
ccacaucuugcucugcuga

SEQ ID NO: 3326182 - RNA, 18 nt, Human
ccacaucuugcucugcug

SEQ ID NO: 3326183 - RNA, 17 nt, Human
ccacaucuugcucugcu

SEQ ID NO: 3326184 - RNA, 21 nt, Human
ccaccaacauacucccaucug

SEQ ID NO: 3326185 - RNA, 21 nt, Human
ccacccaggagccccgaggcc

SEQ ID NO: 3326186 - RNA, 23 nt, Human
ccacccaggagccccgaggccuu

SEQ ID NO: 3326187 - RNA, 17 nt, Human
ccacccccacccaaggg

SEQ ID NO: 3326188 - RNA, 23 nt, Human
ccacugcacuccagccuggguga

SEQ ID NO: 3326189 - RNA, 14 nt, Human
ccacuucagcugac

SEQ ID NO: 3326190 - RNA, 13 nt, Human
ccacuucagcuga

SEQ ID NO: 3326191 - RNA, 22 nt, Human
ccagaaguuugagaucagccug

SEQ ID NO: 3326192 - RNA, 23 nt, Human
ccagaaguuugagaucagccugg

SEQ ID NO: 3326193 - RNA, 19 nt, Human
ccagaauuucccaaagcag

SEQ ID NO: 3326194 - RNA, 12 nt, Human
ccagaauuuccc

SEQ ID NO: 3326195 - RNA, 18 nt, Human
ccagaauuucccaaagca

SEQ ID NO: 3326196 - RNA, 21 nt, Human
ccagaauuucccaaagcagug

SEQ ID NO: 3326197 - RNA, 21 nt, Human
ccagacaccuugacagggcac

SEQ ID NO: 3326198 - RNA, 20 nt, Human
ccagacaccuugacagggca

SEQ ID NO: 3326199 - RNA, 15 nt, Human
ccaccccacacacgc

SEQ ID NO: 3326200 - RNA, 16 nt, Human
ccacgcuggagugcag

SEQ ID NO: 3326201 - RNA, 13 nt, Human
ccacgcuggagug

SEQ ID NO: 3326202 - RNA, 15 nt, Human
ccacccccacccaag

SEQ ID NO: 3326203 - RNA, 18 nt, Human
ccacgcuggagugcagug

SEQ ID NO: 3326204 - RNA, 16 nt, Human
ccacggccaggccaga

SEQ ID NO: 3326205 - RNA, 18 nt, Human
ccacggccaggccagagg

SEQ ID NO: 3326206 - RNA, 23 nt, Human
ccacggccaggccagagggagug

SEQ ID NO: 3326207 - RNA, 17 nt, Human
ccacuacauucuguuaa

SEQ ID NO: 3326208 - RNA, 16 nt, Human
ccacuacauucuguua

SEQ ID NO: 3326209 - RNA, 14 nt, Human
ccacuacauucugu

SEQ ID NO: 3326210 - RNA, 15 nt, Human
ccacuacauucuguu

SEQ ID NO: 3326211 - RNA, 11 nt, Human
ccacuacauuc

SEQ ID NO: 3326212 - RNA, 20 nt, Human
cccaaaacucuccucugcug

SEQ ID NO: 3326213 - RNA, 22 nt, Human
ccauuuugggguacccacugcu

SEQ ID NO: 3326214 - RNA, 20 nt, Human
ccauuuugggguacccacug

SEQ ID NO: 3326215 - RNA, 23 nt, Human
ccauuuuggauucuuauggacaa

SEQ ID NO: 3326216 - RNA, 15 nt, Human
cccaaagaugcagcc

SEQ ID NO: 3326217 - RNA, 12 nt, Human
cccaaagaugca

SEQ ID NO: 3326218 - RNA, 21 nt, Human
ccauucugccugcccaggccc

SEQ ID NO: 3326219 - RNA, 14 nt, Human
ccauucuccaccug

SEQ ID NO: 3326220 - RNA, 19 nt, Human
ccauucugccugcccaggc

SEQ ID NO: 3326221 - RNA, 20 nt, Human
ccauucugccugcccaggcc

SEQ ID NO: 3326222 - RNA, 16 nt, Human
ccauucugccugccca

SEQ ID NO: 3326223 - RNA, 17 nt, Human
ccauucuccaccugcca

SEQ ID NO: 3326224 - RNA, 17 nt, Human
ccauucugccugcccag

SEQ ID NO: 3326225 - RNA, 18 nt, Human
ccauucugccugcccagg

SEQ ID NO: 3326226 - RNA, 16 nt, Human
ccauucuccaccugcc

SEQ ID NO: 3326227 - RNA, 15 nt, Human
ccauucuccaccugc

SEQ ID NO: 3326228 - RNA, 14 nt, Human
ccauggacuuuguu

SEQ ID NO: 3326229 - RNA, 13 nt, Human
ccauggacuuugu

SEQ ID NO: 3326230 - RNA, 18 nt, Human
ccaugauguuuuccauga

SEQ ID NO: 3326231 - RNA, 21 nt, Human
ccaugauuaaccacuucagcu

SEQ ID NO: 3326232 - RNA, 19 nt, Human
ccaugauuaaccacuucag

SEQ ID NO: 3326233 - RNA, 13 nt, Human
ccaugcugcccug

SEQ ID NO: 3326234 - RNA, 11 nt, Human
ccaugcugccc

SEQ ID NO: 3326235 - RNA, 14 nt, Human
ccaugcugcccugu

SEQ ID NO: 3326236 - RNA, 22 nt, Human
ccaucauugaaaucuuuuugcu

SEQ ID NO: 3326237 - RNA, 17 nt, Human
ccaucauugaaaucuuu

SEQ ID NO: 3326238 - RNA, 19 nt, Human
ccauccucuguacagagcc

SEQ ID NO: 3326239 - RNA, 12 nt, Human
ccauccucugua

SEQ ID NO: 3326240 - RNA, 17 nt, Human
ccagugaggcucugccc

SEQ ID NO: 3326241 - RNA, 20 nt, Human
ccagugaggcucugcccuug

SEQ ID NO: 3326242 - RNA, 19 nt, Human
ccagugaggcucugcccuu

SEQ ID NO: 3326243 - RNA, 18 nt, Human
ccagugaggcucugcccu

SEQ ID NO: 3326244 - RNA, 20 nt, Human
ccauccucuguacagagccc

SEQ ID NO: 3326245 - RNA, 23 nt, Human
ccaguaaaugggggugcauuuga

SEQ ID NO: 3326246 - RNA, 14 nt, Human
ccagguucagcuug

SEQ ID NO: 3326247 - RNA, 19 nt, Human
ccaggugcuaggaacacuc

SEQ ID NO: 3326248 - RNA, 20 nt, Human
ccaggcuguaucccaugagc

SEQ ID NO: 3326249 - RNA, 14 nt, Human
ccaggcuggucuca

SEQ ID NO: 3326250 - RNA, 19 nt, Human
ccaggcuggucucaaacuc

SEQ ID NO: 3326251 - RNA, 13 nt, Human
ccaggaggccagc

SEQ ID NO: 3326252 - RNA, 12 nt, Human
ccaggaggccag

SEQ ID NO: 3326253 - RNA, 12 nt, Human
ccaggagccucc

SEQ ID NO: 3326254 - RNA, 18 nt, Human
ccaggagccuccugcccu

SEQ ID NO: 3326255 - RNA, 14 nt, Human
ccaggagccuccug

SEQ ID NO: 3326256 - RNA, 13 nt, Human
ccaggagccuccu

SEQ ID NO: 3326257 - RNA, 22 nt, Human
ccaggcauuccccaggaggcca

SEQ ID NO: 3326258 - RNA, 23 nt, Human
ccaggcauuccccaggaggccag

SEQ ID NO: 3326259 - RNA, 24 nt, Human
ccaggcauuccccaggaggccagc

SEQ ID NO: 3326260 - RNA, 14 nt, Human
ccaggcauucccca

SEQ ID NO: 3326261 - RNA, 13 nt, Human
ccaggcauggugg

SEQ ID NO: 3326262 - RNA, 15 nt, Human
ccaggagccccgagg

SEQ ID NO: 3326263 - RNA, 16 nt, Human
ccaggagcagccacau

SEQ ID NO: 3326264 - RNA, 15 nt, Human
ccaggagcagccaca

SEQ ID NO: 3326265 - RNA, 11 nt, Human
ccagcucuggu

SEQ ID NO: 3326266 - RNA, 13 nt, Human
ccagcucuggucc

SEQ ID NO: 3326267 - RNA, 12 nt, Human
ccagcucugguc

SEQ ID NO: 3326268 - RNA, 14 nt, Human
ccagcgagcccugg

SEQ ID NO: 3326269 - RNA, 13 nt, Human
ccagcgagcccug

SEQ ID NO: 3326270 - RNA, 15 nt, Human
ccagcgagcccuggu

SEQ ID NO: 3326271 - RNA, 16 nt, Human
ccagcgagcccuggug

SEQ ID NO: 3326272 - RNA, 22 nt, Human
ccagagcccaccuuggcucaag

SEQ ID NO: 3326273 - RNA, 16 nt, Human
ccagagcccaccuugg

SEQ ID NO: 3326274 - RNA, 20 nt, Human
ccagccuugaccauucucca

SEQ ID NO: 3326275 - RNA, 19 nt, Human
ccagccuugaccauucucc

SEQ ID NO: 3326276 - RNA, 23 nt, Human
ccagcugcuugggcuucauccuc

SEQ ID NO: 3326277 - RNA, 20 nt, Human
ccagcugcuugggcuucauc

SEQ ID NO: 3326278 - RNA, 22 nt, Human
ccagcucugguccauagagagc

SEQ ID NO: 3326279 - RNA, 21 nt, Human
ccagcucugguccauagagag

SEQ ID NO: 3326280 - RNA, 17 nt, Human
ccagcucugguccauag

SEQ ID NO: 3326281 - RNA, 14 nt, Human
ccagcucuggucca

SEQ ID NO: 3326282 - RNA, 22 nt, Human
ccaggaagccagcaggcucuca

SEQ ID NO: 3326283 - RNA, 20 nt, Human
ccaggaagccagcaggcucu

SEQ ID NO: 3326284 - RNA, 17 nt, Human
cccaagggccuggccug

SEQ ID NO: 3326285 - RNA, 23 nt, Human
cccaaauggaaaugggcagagca

SEQ ID NO: 3326286 - RNA, 23 nt, Human
cccaagggccuggccugagcugg

SEQ ID NO: 3326287 - RNA, 19 nt, Human
cccaagggccuggccugag

SEQ ID NO: 3326288 - RNA, 18 nt, Human
cccaagggccuggccuga

SEQ ID NO: 3326289 - RNA, 23 nt, Human
cccaaugcacuuuguucuggcuc

SEQ ID NO: 3326290 - RNA, 20 nt, Human
cccagauugcaacaggcugg

SEQ ID NO: 3326291 - RNA, 21 nt, Human
cccagauugcaacaggcuggg

SEQ ID NO: 3326292 - RNA, 22 nt, Human
cccagauugcaacaggcugggc

SEQ ID NO: 3326293 - RNA, 16 nt, Human
cccagcaagugagagc

SEQ ID NO: 3326294 - RNA, 18 nt, Human
cccagcaagugagagcug

SEQ ID NO: 3326295 - RNA, 18 nt, Human
cccagagggccugcaagg

SEQ ID NO: 3326296 - RNA, 20 nt, Human
cccagagggccugcaaggga

SEQ ID NO: 3326297 - RNA, 11 nt, Human
cccagccccuu

SEQ ID NO: 3326298 - RNA, 19 nt, Human
cccagcaagugagagcugg

SEQ ID NO: 3326299 - RNA, 20 nt, Human
cccagcaagugagagcuggg

SEQ ID NO: 3326300 - RNA, 21 nt, Human
cccagcaagugagagcugggu

SEQ ID NO: 3326301 - RNA, 22 nt, Human
cccagcaagugagagcugggug

SEQ ID NO: 3326302 - RNA, 12 nt, Human
cccagccugcua

SEQ ID NO: 3326303 - RNA, 19 nt, Human
cccagcgagcccugguggc

SEQ ID NO: 3326304 - RNA, 23 nt, Human
cccagcgagcccugguggcagug

SEQ ID NO: 3326305 - RNA, 17 nt, Human
cccagcgagcccuggug

SEQ ID NO: 3326306 - RNA, 18 nt, Human
cccagcgagcccuggugg

SEQ ID NO: 3326307 - RNA, 15 nt, Human
cccagcgagcccugg

SEQ ID NO: 3326308 - RNA, 22 nt, Human
cccaggugcuaggaacacuccu

SEQ ID NO: 3326309 - RNA, 23 nt, Human
cccaggugcuaggaacacuccuu

SEQ ID NO: 3326310 - RNA, 20 nt, Human
cccagucuggaaugcagugg

SEQ ID NO: 3326311 - RNA, 13 nt, Human
cccagugcccaca

SEQ ID NO: 3326312 - RNA, 18 nt, Human
cccaggccuccuacagcu

SEQ ID NO: 3326313 - RNA, 17 nt, Human
cccaggccuccuacagc

SEQ ID NO: 3326314 - RNA, 18 nt, Human
cccaggcauuccccagga

SEQ ID NO: 3326315 - RNA, 21 nt, Human
cccaggcauuccccaggaggc

SEQ ID NO: 3326316 - RNA, 20 nt, Human
cccaggcauuccccaggagg

SEQ ID NO: 3326317 - RNA, 23 nt, Human
cccaggcauuccccaggaggcca

SEQ ID NO: 3326318 - RNA, 22 nt, Human
cccaggcauuccccaggaggcc

SEQ ID NO: 3326319 - RNA, 11 nt, Human
cccaggccccu

SEQ ID NO: 3326320 - RNA, 16 nt, Human
cccaggccccugccac

SEQ ID NO: 3326321 - RNA, 18 nt, Human
cccaggccccugccaccc

SEQ ID NO: 3326322 - RNA, 21 nt, Human
cccaggccccugccacccugg

SEQ ID NO: 3326323 - RNA, 22 nt, Human
cccaggccccugccacccuggg

SEQ ID NO: 3326324 - RNA, 21 nt, Human
cccaggagccccgaggccuuc

SEQ ID NO: 3326325 - RNA, 18 nt, Human
cccaggagccccgaggcc

SEQ ID NO: 3326326 - RNA, 22 nt, Human
cccaggaggccagccuugacca

SEQ ID NO: 3326327 - RNA, 18 nt, Human
cccaggaggccagccuug

SEQ ID NO: 3326328 - RNA, 11 nt, Human
cccaggcaggu

SEQ ID NO: 3326329 - RNA, 13 nt, Human
cccaggcaggucu

SEQ ID NO: 3326330 - RNA, 17 nt, Human
ccccaggaggccagccu

SEQ ID NO: 3326331 - RNA, 15 nt, Human
cccagugcccacagg

SEQ ID NO: 3326332 - RNA, 20 nt, Human
cccagugcccacaggaucag

SEQ ID NO: 3326333 - RNA, 17 nt, Human
cccagugccgagaagga

SEQ ID NO: 3326334 - RNA, 18 nt, Human
cccagugccgagaaggaa

SEQ ID NO: 3326335 - RNA, 16 nt, Human
cccaugcugcccugug

SEQ ID NO: 3326336 - RNA, 15 nt, Human
cccaugcugcccugu

SEQ ID NO: 3326337 - RNA, 17 nt, Human
cccaugcugcccuguga

SEQ ID NO: 3326338 - RNA, 20 nt, Human
ccccacccaagggccuggcc

SEQ ID NO: 3326339 - RNA, 14 nt, Human
ccccacccaagggc

SEQ ID NO: 3326340 - RNA, 21 nt, Human
ccccaaauggaaaugggcaga

SEQ ID NO: 3326341 - RNA, 22 nt, Human
ccccaaauggaaaugggcagag

SEQ ID NO: 3326342 - RNA, 16 nt, Human
uugggaggccauuugu

SEQ ID NO: 3326343 - RNA, 22 nt, Human
uuggcuuuggguugcaggaccu

SEQ ID NO: 3326344 - RNA, 16 nt, Human
uuggguggaugccugg

SEQ ID NO: 3326345 - RNA, 21 nt, Human
uuggcugggggccucagugcc

SEQ ID NO: 3326346 - RNA, 22 nt, Human
uuggcugggggccucagugcca

SEQ ID NO: 3326347 - RNA, 18 nt, Human
uuggcugggggccucagu

SEQ ID NO: 3326348 - RNA, 16 nt, Human
uuggcugcugaaggcu

SEQ ID NO: 3326349 - RNA, 14 nt, Human
uuggccaggcuggu

SEQ ID NO: 3326350 - RNA, 24 nt, Human
uuggccaaagccaaagcuaggccu

SEQ ID NO: 3326351 - RNA, 13 nt, Human
uuggcauucccca

SEQ ID NO: 3326352 - RNA, 16 nt, Human
uuggucccccuuccau

SEQ ID NO: 3326353 - RNA, 22 nt, Human
uuggucccccuuccauggacuu

SEQ ID NO: 3326354 - RNA, 12 nt, Human
uugguccugcug

SEQ ID NO: 3326355 - RNA, 13 nt, Human
uuguacagacaac

SEQ ID NO: 3326356 - RNA, 12 nt, Human
uuguacagacaa

SEQ ID NO: 3326357 - RNA, 21 nt, Human
uuguauucucuccuguaccuc

SEQ ID NO: 3326358 - RNA, 14 nt, Human
uuguagagccaggg

SEQ ID NO: 3326359 - RNA, 15 nt, Human
uuguagagccagggu

SEQ ID NO: 3326360 - RNA, 23 nt, Human
uugcccacgcuggagugcaguga

SEQ ID NO: 3326361 - RNA, 13 nt, Human
uugccagucaccc

SEQ ID NO: 3326362 - RNA, 18 nt, Human
uugccagucaccccggcc

SEQ ID NO: 3326363 - RNA, 11 nt, Human
uugccucugcc

SEQ ID NO: 3326364 - RNA, 14 nt, Human
uugccucugccucu

SEQ ID NO: 3326365 - RNA, 16 nt, Human
uugccucugccucuga

SEQ ID NO: 3326366 - RNA, 18 nt, Human
uugccucugccucugaca

SEQ ID NO: 3326367 - RNA, 19 nt, Human
uugcugauggugcaaugac

SEQ ID NO: 3326368 - RNA, 20 nt, Human
uugcugauggugcaaugacc

SEQ ID NO: 3326369 - RNA, 22 nt, Human
uugcugauggugcaaugaccuu

SEQ ID NO: 3326370 - RNA, 20 nt, Human
uugcuggggccgaaagaaca

SEQ ID NO: 3326371 - RNA, 23 nt, Human
uuggaaagaguaggaagacuuug

SEQ ID NO: 3326372 - RNA, 19 nt, Human
uuggaaggaacguccccug

SEQ ID NO: 3326373 - RNA, 11 nt, Human
uuggaaggaac

SEQ ID NO: 3326374 - RNA, 17 nt, Human
uuggcaaaaaggcagga

SEQ ID NO: 3326375 - RNA, 19 nt, Human
uugaagacuuuucuuucag

SEQ ID NO: 3326376 - RNA, 17 nt, Human
uugaagacagagcuaca

SEQ ID NO: 3326377 - RNA, 20 nt, Human
uugaacuuugaccucugcag

SEQ ID NO: 3326378 - RNA, 22 nt, Human
uugaacuuugaccucugcagca

SEQ ID NO: 3326379 - RNA, 19 nt, Human
uugaacucuucaaucucuu

SEQ ID NO: 3326380 - RNA, 16 nt, Human
uugaacugauaaagau

SEQ ID NO: 3326381 - RNA, 18 nt, Human
uucuuuauaauucuacuu

SEQ ID NO: 3326382 - RNA, 21 nt, Human
uugaaaacacuguucucugcc

SEQ ID NO: 3326383 - RNA, 19 nt, Human
uugaaaacacuguucucug

SEQ ID NO: 3326384 - RNA, 21 nt, Human
uucuguccgagcuuugaaaau

SEQ ID NO: 3326385 - RNA, 17 nt, Human
uucuguccgagcuuuga

SEQ ID NO: 3326386 - RNA, 17 nt, Human
uucuguccuacucugug

SEQ ID NO: 3326387 - RNA, 23 nt, Human
uucuguggguuucuaaagcugcc

SEQ ID NO: 3326388 - RNA, 19 nt, Human
uucuuauuuaaugaaagac

SEQ ID NO: 3326389 - RNA, 23 nt, Human
uucuuauuuaaugaaagacugua

SEQ ID NO: 3326390 - RNA, 16 nt, Human
uucuugguuuguaaau

SEQ ID NO: 3326391 - RNA, 13 nt, Human
uucuugguuugua

SEQ ID NO: 3326392 - RNA, 18 nt, Human
uucuugguuuguaaauua

SEQ ID NO: 3326393 - RNA, 17 nt, Human
uucuugguuuguaaauu

SEQ ID NO: 3326394 - RNA, 23 nt, Human
uucuugguuuguaaauuaacuuu

SEQ ID NO: 3326395 - RNA, 20 nt, Human
uugauagcacagacccugcc

SEQ ID NO: 3326396 - RNA, 19 nt, Human
uugauagcacagacccugc

SEQ ID NO: 3326397 - RNA, 20 nt, Human
uugacgccaucccagcccca

SEQ ID NO: 3326398 - RNA, 22 nt, Human
uugaccugaggcccuucucucc

SEQ ID NO: 3326399 - RNA, 19 nt, Human
uugaccugaggcccuucuc

SEQ ID NO: 3326400 - RNA, 12 nt, Human
uugaccugaggc

SEQ ID NO: 3326401 - RNA, 22 nt, Human
uugacgccaucccagccccaau

SEQ ID NO: 3326402 - RNA, 14 nt, Human
uugacgccauccca

SEQ ID NO: 3326403 - RNA, 15 nt, Human
uugaccucaggugau

SEQ ID NO: 3326404 - RNA, 16 nt, Human
uugaccucugcagcaa

SEQ ID NO: 3326405 - RNA, 17 nt, Human
uugaccgugaggccaga

SEQ ID NO: 3326406 - RNA, 21 nt, Human
uugaccgugaggccagagaca

SEQ ID NO: 3326407 - RNA, 20 nt, Human
uugaccgugaggccagagac

SEQ ID NO: 3326408 - RNA, 16 nt, Human
uugcagacaggcaagc

SEQ ID NO: 3326409 - RNA, 21 nt, Human
uugauagcacagacccugccc

SEQ ID NO: 3326410 - RNA, 18 nt, Human
uugauagcacagacccug

SEQ ID NO: 3326411 - RNA, 14 nt, Human
uugcaacaggcugg

SEQ ID NO: 3326412 - RNA, 17 nt, Human
uugcaacaggcugggcu

SEQ ID NO: 3326413 - RNA, 18 nt, Human
uugauuuccguuaaaaua

SEQ ID NO: 3326414 - RNA, 17 nt, Human
uuccaugaguccccugu

SEQ ID NO: 3326415 - RNA, 11 nt, Human
uucaucuugaa

SEQ ID NO: 3326416 - RNA, 20 nt, Human
uucaucuuccaacucaaacu

SEQ ID NO: 3326417 - RNA, 12 nt, Human
uucaucuugaau

SEQ ID NO: 3326418 - RNA, 19 nt, Human
uucauuuaggugaggaagc

SEQ ID NO: 3326419 - RNA, 18 nt, Human
uucauuuaggugaggaag

SEQ ID NO: 3326420 - RNA, 18 nt, Human
uucagugccuuauggaac

SEQ ID NO: 3326421 - RNA, 21 nt, Human
uucagugccuuauggaacacu

SEQ ID NO: 3326422 - RNA, 19 nt, Human
uucagugccuuauggaaca

SEQ ID NO: 3326423 - RNA, 23 nt, Human
uucauaaugacuuaagcacacuu

SEQ ID NO: 3326424 - RNA, 13 nt, Human
uucauaaugacuu

SEQ ID NO: 3326425 - RNA, 19 nt, Human
uucaggaagcucagggccu

SEQ ID NO: 3326426 - RNA, 17 nt, Human
uucaggaagcucagggc

SEQ ID NO: 3326427 - RNA, 20 nt, Human
uucaggaagcucagggccug

SEQ ID NO: 3326428 - RNA, 15 nt, Human
uucaggaagcucagg

SEQ ID NO: 3326429 - RNA, 23 nt, Human
uucagcuccagcucaccagcccc

SEQ ID NO: 3326430 - RNA, 24 nt, Human
uucagcucugcaagaauugaagca

SEQ ID NO: 3326431 - RNA, 17 nt, Human
uucagcucugcaagaau

SEQ ID NO: 3326432 - RNA, 16 nt, Human
uucaggaagcucaggg

SEQ ID NO: 3326433 - RNA, 17 nt, Human
uucagcugacuuuucug

SEQ ID NO: 3326434 - RNA, 18 nt, Human
uucagcugcauacaguuu

SEQ ID NO: 3326435 - RNA, 15 nt, Human
uucagagacuccugc

SEQ ID NO: 3326436 - RNA, 22 nt, Human
uucagcuccagcucaccagccc

SEQ ID NO: 3326437 - RNA, 14 nt, Human
uucacucuccuugg

SEQ ID NO: 3326438 - RNA, 18 nt, Human
uucaauucucauuuguca

SEQ ID NO: 3326439 - RNA, 14 nt, Human
uuacgugaguccug

SEQ ID NO: 3326440 - RNA, 13 nt, Human
uuacgugaguccu

SEQ ID NO: 3326441 - RNA, 13 nt, Human
uucaaagauauuu

SEQ ID NO: 3326442 - RNA, 18 nt, Human
uucuaaaggcuaccuuug

SEQ ID NO: 3326443 - RNA, 17 nt, Human
uucuaaaggcuaccuuu

SEQ ID NO: 3326444 - RNA, 17 nt, Human
uucuaaagcugccagcc

SEQ ID NO: 3326445 - RNA, 16 nt, Human
uucuaaaggcuaccuu

SEQ ID NO: 3326446 - RNA, 15 nt, Human
uuccuucagugccuu

SEQ ID NO: 3326447 - RNA, 19 nt, Human
uuccuucagugccuuaugg

SEQ ID NO: 3326448 - RNA, 16 nt, Human
uuccuucagugccuua

SEQ ID NO: 3326449 - RNA, 23 nt, Human
uuccuucagugccuuauggaaca

SEQ ID NO: 3326450 - RNA, 19 nt, Human
uuccuucauucaacccacc

SEQ ID NO: 3326451 - RNA, 19 nt, Human
uucccuuugacgccauccc

SEQ ID NO: 3326452 - RNA, 22 nt, Human
uuccccacuugagaauuacccu

SEQ ID NO: 3326453 - RNA, 23 nt, Human
uuccucauaguaugguggcuggg

SEQ ID NO: 3326454 - RNA, 12 nt, Human
uuccucccuccc

SEQ ID NO: 3326455 - RNA, 19 nt, Human
uuccucccucccucuuucc

SEQ ID NO: 3326456 - RNA, 21 nt, Human
uuccucccucccucuuucccu

SEQ ID NO: 3326457 - RNA, 22 nt, Human
uuccucccucccucuuucccuc

SEQ ID NO: 3326458 - RNA, 17 nt, Human
uucuaugacacaugcaa

SEQ ID NO: 3326459 - RNA, 16 nt, Human
uucuaugacacaugca

SEQ ID NO: 3326460 - RNA, 14 nt, Human
uucuauuguuucuu

SEQ ID NO: 3326461 - RNA, 17 nt, Human
uucucugcccuccaaga

SEQ ID NO: 3326462 - RNA, 20 nt, Human
uucucugaggacacuaacca

SEQ ID NO: 3326463 - RNA, 21 nt, Human
uucugacccugcuucaaauau

SEQ ID NO: 3326464 - RNA, 21 nt, Human
uucugacccaugcugcccugu

SEQ ID NO: 3326465 - RNA, 20 nt, Human
uucugacccaugcugcccug

SEQ ID NO: 3326466 - RNA, 18 nt, Human
uucugacccaugcugccc

SEQ ID NO: 3326467 - RNA, 16 nt, Human
uucugacccaugcugc

SEQ ID NO: 3326468 - RNA, 11 nt, Human
uucuccaggcu

SEQ ID NO: 3326469 - RNA, 13 nt, Human
uucuccacccugc

SEQ ID NO: 3326470 - RNA, 16 nt, Human
uucuccaagcaggaca

SEQ ID NO: 3326471 - RNA, 22 nt, Human
uucucuccuguaccucuugagc

SEQ ID NO: 3326472 - RNA, 18 nt, Human
uucucuccagccccugga

SEQ ID NO: 3326473 - RNA, 16 nt, Human
uucucuccagccccug

SEQ ID NO: 3326474 - RNA, 18 nt, Human
uuuuaucgucacugcuua

SEQ ID NO: 3326475 - RNA, 15 nt, Human
uuuucacaguucucu

SEQ ID NO: 3326476 - RNA, 19 nt, Human
uuuuccaugaguccccugu

SEQ ID NO: 3326477 - RNA, 18 nt, Human
uuuuccaugaguccccug

SEQ ID NO: 3326478 - RNA, 15 nt, Human
uuuuccuucagugcc

SEQ ID NO: 3326479 - RNA, 17 nt, Human
uuuucuugcaugaggcu

SEQ ID NO: 3326480 - RNA, 14 nt, Human
uuuucuucucccuc

SEQ ID NO: 3326481 - RNA, 18 nt, Human
uuugccauguuggccagg

SEQ ID NO: 3326482 - RNA, 14 nt, Human
uuugcagacaggca

SEQ ID NO: 3326483 - RNA, 15 nt, Human
uuugagcagggcuca

SEQ ID NO: 3326484 - RNA, 22 nt, Human
uuugaggucuguucuuuccaaa

SEQ ID NO: 3326485 - RNA, 17 nt, Human
uuugaggucuguucuuu

SEQ ID NO: 3326486 - RNA, 16 nt, Human
uuuguugucagcugaa

SEQ ID NO: 3326487 - RNA, 21 nt, Human
uuuguccccaccgcagacagg

SEQ ID NO: 3326488 - RNA, 13 nt, Human
uuuguccccaccg

SEQ ID NO: 3326489 - RNA, 19 nt, Human
uuuggugguuucagaaaug

SEQ ID NO: 3326490 - RNA, 15 nt, Human
uuuguaaauuaacuu

SEQ ID NO: 3326491 - RNA, 17 nt, Human
uuuguaaauuaacuuuu

SEQ ID NO: 3326492 - RNA, 16 nt, Human
uuuguaaauuaacuuu

SEQ ID NO: 3326493 - RNA, 15 nt, Human
uuuacuuuguguuca

SEQ ID NO: 3326494 - RNA, 21 nt, Human
uuuaucgucacugcuuaacuu

SEQ ID NO: 3326495 - RNA, 16 nt, Human
uuuauaaacuuuaccu

SEQ ID NO: 3326496 - RNA, 16 nt, Human
uuuaucgucacugcuu

SEQ ID NO: 3326497 - RNA, 14 nt, Human
uuuauaaacuuuac

SEQ ID NO: 3326498 - RNA, 19 nt, Human
uuuauuuaguuccuugagu

SEQ ID NO: 3326499 - RNA, 16 nt, Human
uuuauugucaaagugg

SEQ ID NO: 3326500 - RNA, 14 nt, Human
uuuauugucaaagu

SEQ ID NO: 3326501 - RNA, 17 nt, Human
uuucuaaagcugccagc

SEQ ID NO: 3326502 - RNA, 14 nt, Human
uuucuaaagcugcc

SEQ ID NO: 3326503 - RNA, 14 nt, Human
uuucuaaaggcuac

SEQ ID NO: 3326504 - RNA, 21 nt, Human
uuuccucuuuggucuacacug

SEQ ID NO: 3326505 - RNA, 15 nt, Human
uuucuagccagagga

SEQ ID NO: 3326506 - RNA, 15 nt, Human
uuuccaaaguacacu

SEQ ID NO: 3326507 - RNA, 12 nt, Human
uuuccaaaguac

SEQ ID NO: 3326508 - RNA, 13 nt, Human
uuuccaggaaggc

SEQ ID NO: 3326509 - RNA, 15 nt, Human
uuucagccaagaauu

SEQ ID NO: 3326510 - RNA, 22 nt, Human
uuucauugcugggcuugucugu

SEQ ID NO: 3326511 - RNA, 19 nt, Human
uuucaauaggaaaaacuga

SEQ ID NO: 3326512 - RNA, 22 nt, Human
uuucaauaggaaaaacugauuu

SEQ ID NO: 3326513 - RNA, 20 nt, Human
uuucaauaggaaaaacugau

SEQ ID NO: 3326514 - RNA, 17 nt, Human
uuuuuuccuucagugcc

SEQ ID NO: 3326515 - RNA, 12 nt, Human
uuuuuuacuaau

SEQ ID NO: 3326516 - RNA, 16 nt, Human
uguguagggcgggagg

SEQ ID NO: 3326517 - RNA, 14 nt, Human
uguucagcuccagc

SEQ ID NO: 3326518 - RNA, 15 nt, Human
uguucagcuccagcu

SEQ ID NO: 3326519 - RNA, 16 nt, Human
uguucagcuccagcuc

SEQ ID NO: 3326520 - RNA, 22 nt, Human
uguucagcuccagcucaccagc

SEQ ID NO: 3326521 - RNA, 11 nt, Human
uguucagcugg

SEQ ID NO: 3326522 - RNA, 16 nt, Human
uguuacugucuucagu

SEQ ID NO: 3326523 - RNA, 15 nt, Human
uguuacugucuucag

SEQ ID NO: 3326524 - RNA, 19 nt, Human
uguuacauaagauaaaugu

SEQ ID NO: 3326525 - RNA, 13 nt, Human
uguuacauuuuua

SEQ ID NO: 3326526 - RNA, 22 nt, Human
uguuacauuuuuaagugcugca

SEQ ID NO: 3326527 - RNA, 14 nt, Human
uguuggccaggcug

SEQ ID NO: 3326528 - RNA, 15 nt, Human
uguuggccaaagcca

SEQ ID NO: 3326529 - RNA, 11 nt, Human
uguuggccagg

SEQ ID NO: 3326530 - RNA, 14 nt, Human
uguucuuucuggcu

SEQ ID NO: 3326531 - RNA, 18 nt, Human
uguucugacccugcuuca

SEQ ID NO: 3326532 - RNA, 19 nt, Human
uguucucugcccuccaaga

SEQ ID NO: 3326533 - RNA, 15 nt, Human
uguucugacccugcu

SEQ ID NO: 3326534 - RNA, 11 nt, Human
uguugaaagau

SEQ ID NO: 3326535 - RNA, 20 nt, Human
uguucuuuccaaaguacacu

SEQ ID NO: 3326536 - RNA, 22 nt, Human
uguucuuucuggcuaugcauuu

SEQ ID NO: 3326537 - RNA, 20 nt, Human
uguucuuucuggcuaugcau

SEQ ID NO: 3326538 - RNA, 13 nt, Human
uguucucugagga

SEQ ID NO: 3326539 - RNA, 16 nt, Human
uguucucugaggacac

SEQ ID NO: 3326540 - RNA, 18 nt, Human
uguucucugaggacacua

SEQ ID NO: 3326541 - RNA, 16 nt, Human
uguucucugcccucca

SEQ ID NO: 3326542 - RNA, 22 nt, Human
uuacauuuuuaagugcugcauu

SEQ ID NO: 3326543 - RNA, 21 nt, Human
uuacauuuuuaagugcugcau

SEQ ID NO: 3326544 - RNA, 20 nt, Human
uuacauuuuuaagugcugca

SEQ ID NO: 3326545 - RNA, 20 nt, Human
uuacgguuuuccagguuuaa

SEQ ID NO: 3326546 - RNA, 20 nt, Human
uuaccuuuuuuauacauaaa

SEQ ID NO: 3326547 - RNA, 19 nt, Human
uuaccuuuuuuauacauaa

SEQ ID NO: 3326548 - RNA, 22 nt, Human
uuaccuuuuuuauacauaaaca

SEQ ID NO: 3326549 - RNA, 17 nt, Human
uuaaugucacaggcagg

SEQ ID NO: 3326550 - RNA, 18 nt, Human
uuaaugucacaggcaggu

SEQ ID NO: 3326551 - RNA, 22 nt, Human
uuaaggaugcuuguacauaaug

SEQ ID NO: 3326552 - RNA, 21 nt, Human
uuaaggaagacaaugugaaaa

SEQ ID NO: 3326553 - RNA, 20 nt, Human
uuaaggaugcuuguacauaa

SEQ ID NO: 3326554 - RNA, 19 nt, Human
uuaaggaugcuuguacaua

SEQ ID NO: 3326555 - RNA, 18 nt, Human
uuaaggaugcuuguacau

SEQ ID NO: 3326556 - RNA, 17 nt, Human
uuaaggaugcuuguaca

SEQ ID NO: 3326557 - RNA, 20 nt, Human
uuaaacuuaaucuaaaugga

SEQ ID NO: 3326558 - RNA, 18 nt, Human
uuaaacuuaaucuaaaug

SEQ ID NO: 3326559 - RNA, 16 nt, Human
uuaaacuuaaucuaaa

SEQ ID NO: 3326560 - RNA, 11 nt, Human
uuaaaugcacc

SEQ ID NO: 3326561 - RNA, 16 nt, Human
uuaaaugcaccuggaa

SEQ ID NO: 3326562 - RNA, 18 nt, Human
uuaaaugcaccuggaaua

SEQ ID NO: 3326563 - RNA, 17 nt, Human
uuaaaugcaccuggaau

SEQ ID NO: 3326564 - RNA, 18 nt, Human
uuaaaugcccagccccuu

SEQ ID NO: 3326565 - RNA, 17 nt, Human
uuaaaugcccagccccu

SEQ ID NO: 3326566 - RNA, 16 nt, Human
uguuuguugucagcug

SEQ ID NO: 3326567 - RNA, 17 nt, Human
uguuuguugucagcuga

SEQ ID NO: 3326568 - RNA, 15 nt, Human
uguuuccuggcacug

SEQ ID NO: 3326569 - RNA, 22 nt, Human
uguuuccuggcacugcuuccag

SEQ ID NO: 3326570 - RNA, 21 nt, Human
uguuuccuggcacugcuucca

SEQ ID NO: 3326571 - RNA, 20 nt, Human
uguuuccuggcacugcuucc

SEQ ID NO: 3326572 - RNA, 13 nt, Human
uguuuuugucuua

SEQ ID NO: 3326573 - RNA, 22 nt, Human
ugugggcuaguugggcuuccuc

SEQ ID NO: 3326574 - RNA, 12 nt, Human
ugugggaagggg

SEQ ID NO: 3326575 - RNA, 15 nt, Human
uguggacacagcucu

SEQ ID NO: 3326576 - RNA, 12 nt, Human
uguggagaagcg

SEQ ID NO: 3326577 - RNA, 14 nt, Human
uguggacacagcuc

SEQ ID NO: 3326578 - RNA, 13 nt, Human
uguggacacagcu

SEQ ID NO: 3326579 - RNA, 16 nt, Human
ugugcacaugcacgug

SEQ ID NO: 3326580 - RNA, 22 nt, Human
ugugcacaugcacgugugugca

SEQ ID NO: 3326581 - RNA, 13 nt, Human
ugugccucuggga

SEQ ID NO: 3326582 - RNA, 15 nt, Human
ugugccucugggacu

SEQ ID NO: 3326583 - RNA, 16 nt, Human
ugugccucugggacug

SEQ ID NO: 3326584 - RNA, 17 nt, Human
ugugccucugggacugg

SEQ ID NO: 3326585 - RNA, 20 nt, Human
ugugcgugcauguguguuca

SEQ ID NO: 3326586 - RNA, 14 nt, Human
ugugaaaggaaaga

SEQ ID NO: 3326587 - RNA, 13 nt, Human
ugugaaaggaaag

SEQ ID NO: 3326588 - RNA, 18 nt, Human
ugucuuuggacccugagg

SEQ ID NO: 3326589 - RNA, 17 nt, Human
ugucuuuggacccugag

SEQ ID NO: 3326590 - RNA, 22 nt, Human
ugucuuuggacccugaggccca

SEQ ID NO: 3326591 - RNA, 19 nt, Human
ugucuuuggacccugaggc

SEQ ID NO: 3326592 - RNA, 16 nt, Human
ugucuuuuuucacuac

SEQ ID NO: 3326593 - RNA, 21 nt, Human
ugugacaaggauugcuacugu

SEQ ID NO: 3326594 - RNA, 18 nt, Human
ugugaguacuacaguccu

SEQ ID NO: 3326595 - RNA, 23 nt, Human
ugugaguacuacaguccucccau

SEQ ID NO: 3326596 - RNA, 20 nt, Human
ugugaguacuacaguccucc

SEQ ID NO: 3326597 - RNA, 19 nt, Human
ugugaguacuacaguccuc

SEQ ID NO: 3326598 - RNA, 21 nt, Human
ugugauacaaugcugugcccu

SEQ ID NO: 3326599 - RNA, 17 nt, Human
uguaaauuaacuuuuau

SEQ ID NO: 3326600 - RNA, 16 nt, Human
uguaaauuaacuuuua

SEQ ID NO: 3326601 - RNA, 15 nt, Human
uguaaauuaacuuuu

SEQ ID NO: 3326602 - RNA, 14 nt, Human
uguaaauuaacuuu

SEQ ID NO: 3326603 - RNA, 13 nt, Human
uguaaauuaacuu

SEQ ID NO: 3326604 - RNA, 14 nt, Human
uguaccucuugagc

SEQ ID NO: 3326605 - RNA, 22 nt, Human
uguaccucuugagccuugaacu

SEQ ID NO: 3326606 - RNA, 23 nt, Human
uguaccucuugagccuugaacuu

SEQ ID NO: 3326607 - RNA, 14 nt, Human
uguagagugggagc

SEQ ID NO: 3326608 - RNA, 17 nt, Human
uguacgucugacaggca

SEQ ID NO: 3326609 - RNA, 16 nt, Human
uguacgucugacaggc

SEQ ID NO: 3326610 - RNA, 20 nt, Human
ugucagugugacugaucucu

SEQ ID NO: 3326611 - RNA, 12 nt, Human
ugucagugugac

SEQ ID NO: 3326612 - RNA, 16 nt, Human
uguaucccaugagccu

SEQ ID NO: 3326613 - RNA, 19 nt, Human
uguaucccaugagccucag

SEQ ID NO: 3326614 - RNA, 23 nt, Human
uguaucccaugagccucagcauc

SEQ ID NO: 3326615 - RNA, 15 nt, Human
ugcgugcauaccacu

SEQ ID NO: 3326616 - RNA, 19 nt, Human
ugcuaggaacacuccuuca

SEQ ID NO: 3326617 - RNA, 17 nt, Human
ugcuaggaacacuccuu

SEQ ID NO: 3326618 - RNA, 16 nt, Human
ugcuaggaacacuccu

SEQ ID NO: 3326619 - RNA, 18 nt, Human
ugcuccucuccccagcaa

SEQ ID NO: 3326620 - RNA, 19 nt, Human
ugcuccucuccccagcaag

SEQ ID NO: 3326621 - RNA, 15 nt, Human
ugcugcaguugccag

SEQ ID NO: 3326622 - RNA, 23 nt, Human
ugcugauggugcaaugaccuuuc

SEQ ID NO: 3326623 - RNA, 20 nt, Human
ugcugauggugcaaugaccu

SEQ ID NO: 3326624 - RNA, 18 nt, Human
ugcugauggugcaaugac

SEQ ID NO: 3326625 - RNA, 15 nt, Human
ugcugacagacacag

SEQ ID NO: 3326626 - RNA, 23 nt, Human
ugcugagucugaaggcuggguuc

SEQ ID NO: 3326627 - RNA, 16 nt, Human
ugcugacagacacagg

SEQ ID NO: 3326628 - RNA, 21 nt, Human
ugcugaaggcucgagcaugcc

SEQ ID NO: 3326629 - RNA, 23 nt, Human
ugcugaauacagaggcaacugca

SEQ ID NO: 3326630 - RNA, 18 nt, Human
ugcugaauacagaggcaa

SEQ ID NO: 3326631 - RNA, 17 nt, Human
ugcugaaugguuuucaa

SEQ ID NO: 3326632 - RNA, 18 nt, Human
ugcugaaugguuuucaaa

SEQ ID NO: 3326633 - RNA, 22 nt, Human
ugcugaaugguuuucaaaauaa

SEQ ID NO: 3326634 - RNA, 19 nt, Human
ugcuccuggcccacugcau

SEQ ID NO: 3326635 - RNA, 21 nt, Human
ugcggugcuaucucccccagc

SEQ ID NO: 3326636 - RNA, 23 nt, Human
ugcggugcuaucucccccagccc

SEQ ID NO: 3326637 - RNA, 21 nt, Human
ugccuggauggggcugcaccg

SEQ ID NO: 3326638 - RNA, 22 nt, Human
ugccuuauggaacacucugaga

SEQ ID NO: 3326639 - RNA, 21 nt, Human
ugccuuauggaacacucugag

SEQ ID NO: 3326640 - RNA, 20 nt, Human
ugccuuauggaacacucuga

SEQ ID NO: 3326641 - RNA, 18 nt, Human
ugccuuauggaacacucu

SEQ ID NO: 3326642 - RNA, 23 nt, Human
ugcccaggcuggcgugcaguggu

SEQ ID NO: 3326643 - RNA, 11 nt, Human
ugcccagcccc

SEQ ID NO: 3326644 - RNA, 22 nt, Human
ugccugaagucacacagugagu

SEQ ID NO: 3326645 - RNA, 18 nt, Human
ugccugaagucacacagu

SEQ ID NO: 3326646 - RNA, 17 nt, Human
ugccugaagucacacag

SEQ ID NO: 3326647 - RNA, 14 nt, Human
ugccucugggacug

SEQ ID NO: 3326648 - RNA, 18 nt, Human
ugccuccuuugugaggaa

SEQ ID NO: 3326649 - RNA, 17 nt, Human
ugccuccuuugugagga

SEQ ID NO: 3326650 - RNA, 16 nt, Human
ugccuccuuugugagg

SEQ ID NO: 3326651 - RNA, 19 nt, Human
ugcacuuuguucuggcucu

SEQ ID NO: 3326652 - RNA, 18 nt, Human
ugcacuuuguucuggcuc

SEQ ID NO: 3326653 - RNA, 15 nt, Human
ugcacuuuguucugg

SEQ ID NO: 3326654 - RNA, 21 nt, Human
ugcacuugcagacucuacaga

SEQ ID NO: 3326655 - RNA, 16 nt, Human
ugcacuugcagacucu

SEQ ID NO: 3326656 - RNA, 16 nt, Human
ugcacguacacacaca

SEQ ID NO: 3326657 - RNA, 16 nt, Human
ugcagcaauaaagcag

SEQ ID NO: 3326658 - RNA, 15 nt, Human
ugcagcaauaaagca

SEQ ID NO: 3326659 - RNA, 14 nt, Human
ugcagcaauaaagc

SEQ ID NO: 3326660 - RNA, 18 nt, Human
ugcaggaccucaggugag

SEQ ID NO: 3326661 - RNA, 16 nt, Human
ugcaggaccucaggug

SEQ ID NO: 3326662 - RNA, 15 nt, Human
ugcaggaccucaggu

SEQ ID NO: 3326663 - RNA, 14 nt, Human
ugcaggaccucagg

SEQ ID NO: 3326664 - RNA, 23 nt, Human
ugcacagcuaacauggaaguacu

SEQ ID NO: 3326665 - RNA, 20 nt, Human
ugcacagcuaacauggaagu

SEQ ID NO: 3326666 - RNA, 18 nt, Human
ugcacagcuaacauggaa

SEQ ID NO: 3326667 - RNA, 20 nt, Human
ugaagucuuuguacagacaa

SEQ ID NO: 3326668 - RNA, 17 nt, Human
ugaagucuuuguacaga

SEQ ID NO: 3326669 - RNA, 22 nt, Human
ugaagucuuuguacagacaaca

SEQ ID NO: 3326670 - RNA, 17 nt, Human
ugcacagcuaacaugga

SEQ ID NO: 3326671 - RNA, 23 nt, Human
ugcacagaguuguuacauuuuua

SEQ ID NO: 3326672 - RNA, 20 nt, Human
ugcacagaguuguuacauuu

SEQ ID NO: 3326673 - RNA, 22 nt, Human
ugcacagaguuguuacauuuuu

SEQ ID NO: 3326674 - RNA, 21 nt, Human
ugcacagaguuguuacauuuu

SEQ ID NO: 3326675 - RNA, 18 nt, Human
ugcaggcagccaggccac

SEQ ID NO: 3326676 - RNA, 17 nt, Human
ugcaggcagccaggcca

SEQ ID NO: 3326677 - RNA, 16 nt, Human
ugcaggcagccaggcc

SEQ ID NO: 3326678 - RNA, 15 nt, Human
ugcaggcagccaggc

SEQ ID NO: 3326679 - RNA, 15 nt, Human
ugcaucguuucaucu

SEQ ID NO: 3326680 - RNA, 10 nt, Human
ugcccagccc

SEQ ID NO: 3326681 - RNA, 14 nt, Human
ugcccaccuggccu

SEQ ID NO: 3326682 - RNA, 18 nt, Human
ugcccaccuggccucugc

SEQ ID NO: 3326683 - RNA, 17 nt, Human
ugcccaccuggccucug

SEQ ID NO: 3326684 - RNA, 15 nt, Human
ugcccaccuggccuc

SEQ ID NO: 3326685 - RNA, 22 nt, Human
ugccagggacagaggggguggc

SEQ ID NO: 3326686 - RNA, 11 nt, Human
ugccagggaca

SEQ ID NO: 3326687 - RNA, 24 nt, Human
ugccagguuuuuggucugacccac

SEQ ID NO: 3326688 - RNA, 14 nt, Human
ugccagucaccccg

SEQ ID NO: 3326689 - RNA, 12 nt, Human
uggaagacagcu

SEQ ID NO: 3326690 - RNA, 11 nt, Human
uggaagacagc

SEQ ID NO: 3326691 - RNA, 15 nt, Human
uggaaaauaaauuau

SEQ ID NO: 3326692 - RNA, 16 nt, Human
uggaaaauaaauuauu

SEQ ID NO: 3326693 - RNA, 14 nt, Human
uggaagacagcucu

SEQ ID NO: 3326694 - RNA, 16 nt, Human
ugcuucuucagagacu

SEQ ID NO: 3326695 - RNA, 18 nt, Human
ugcuuccagugaggcucu

SEQ ID NO: 3326696 - RNA, 16 nt, Human
ugcuuccagugaggcu

SEQ ID NO: 3326697 - RNA, 20 nt, Human
ugcuuccagugaggcucugc

SEQ ID NO: 3326698 - RNA, 19 nt, Human
ugcuuccagugaggcucug

SEQ ID NO: 3326699 - RNA, 18 nt, Human
uggcacugcuuccaguga

SEQ ID NO: 3326700 - RNA, 16 nt, Human
uggcacugcuuccagu

SEQ ID NO: 3326701 - RNA, 14 nt, Human
uggcacugcuucca

SEQ ID NO: 3326702 - RNA, 14 nt, Human
uggaugccuggugg

SEQ ID NO: 3326703 - RNA, 19 nt, Human
uggcagcugcgguccaccc

SEQ ID NO: 3326704 - RNA, 21 nt, Human
uggcagcugcgguccacccag

SEQ ID NO: 3326705 - RNA, 22 nt, Human
uggcagcugcgguccacccagg

SEQ ID NO: 3326706 - RNA, 13 nt, Human
uggcagugggagc

SEQ ID NO: 3326707 - RNA, 14 nt, Human
uggcagugggagcu

SEQ ID NO: 3326708 - RNA, 15 nt, Human
uggcagugggagcug

SEQ ID NO: 3326709 - RNA, 16 nt, Human
uggcagugggagcugc

SEQ ID NO: 3326710 - RNA, 19 nt, Human
uggcagugggagcugccug

SEQ ID NO: 3326711 - RNA, 20 nt, Human
uggcagugggagcugccugu

SEQ ID NO: 3326712 - RNA, 22 nt, Human
uggaggcaugugaugagaggaa

SEQ ID NO: 3326713 - RNA, 12 nt, Human
uggacaggcaug

SEQ ID NO: 3326714 - RNA, 16 nt, Human
uggacaggcauguucu

SEQ ID NO: 3326715 - RNA, 16 nt, Human
ugggacaugggaaagg

SEQ ID NO: 3326716 - RNA, 23 nt, Human
ugggagcugccuguucagcucca

SEQ ID NO: 3326717 - RNA, 22 nt, Human
ugggaaugaaugucagugugac

SEQ ID NO: 3326718 - RNA, 21 nt, Human
ugggaaugaaugucaguguga

SEQ ID NO: 3326719 - RNA, 14 nt, Human
uggcugggggccuc

SEQ ID NO: 3326720 - RNA, 22 nt, Human
uggcugguuagagguucccuuu

SEQ ID NO: 3326721 - RNA, 22 nt, Human
uggcgugcaguggugcgaucug

SEQ ID NO: 3326722 - RNA, 14 nt, Human
uggcgcugccccug

SEQ ID NO: 3326723 - RNA, 22 nt, Human
uggcucagguggggucacucug

SEQ ID NO: 3326724 - RNA, 20 nt, Human
uggcucagguggggucacuc

SEQ ID NO: 3326725 - RNA, 16 nt, Human
uggcucuuccaggcug

SEQ ID NO: 3326726 - RNA, 12 nt, Human
uggcugggggcc

SEQ ID NO: 3326727 - RNA, 15 nt, Human
uggcucuuccaggcu

SEQ ID NO: 3326728 - RNA, 13 nt, Human
uggcucuuccagg

SEQ ID NO: 3326729 - RNA, 17 nt, Human
ugggguggggaccucag

SEQ ID NO: 3326730 - RNA, 23 nt, Human
uggguucaagcgauucuucugcu

SEQ ID NO: 3326731 - RNA, 16 nt, Human
uggguucacugcaacc

SEQ ID NO: 3326732 - RNA, 21 nt, Human
ugggugucaagagggucugag

SEQ ID NO: 3326733 - RNA, 23 nt, Human
ugggugucaagagggucugagga

SEQ ID NO: 3326734 - RNA, 17 nt, Human
ugggcuucaguggcagc

SEQ ID NO: 3326735 - RNA, 20 nt, Human
ugggcuucaguggcagcugc

SEQ ID NO: 3326736 - RNA, 19 nt, Human
ugggcuuggggaccagagc

SEQ ID NO: 3326737 - RNA, 16 nt, Human
uggggcagcuugaggg

SEQ ID NO: 3326738 - RNA, 21 nt, Human
ugggcuuggggaccagagcug

SEQ ID NO: 3326739 - RNA, 13 nt, Human
uggggcagcuuga

SEQ ID NO: 3326740 - RNA, 18 nt, Human
ugggcuucaguggcagcu

SEQ ID NO: 3326741 - RNA, 19 nt, Human
ugggcuucaguggcagcug

SEQ ID NO: 3326742 - RNA, 24 nt, Human
ugggagcugccuguucagcuccag

SEQ ID NO: 3326743 - RNA, 14 nt, Human
ugggccuccugugu

SEQ ID NO: 3326744 - RNA, 16 nt, Human
ugggccuccugugugu

SEQ ID NO: 3326745 - RNA, 15 nt, Human
guuuagauaauacac

SEQ ID NO: 3326746 - RNA, 18 nt, Human
gguuggcaaaaaggcagg

SEQ ID NO: 3326747 - RNA, 21 nt, Human
gguuggccccugcccggcugc

SEQ ID NO: 3326748 - RNA, 18 nt, Human
guuucagaaauguguuau

SEQ ID NO: 3326749 - RNA, 14 nt, Human
guuucagaaaugug

SEQ ID NO: 3326750 - RNA, 20 nt, Human
guuuccuggcacugcuucca

SEQ ID NO: 3326751 - RNA, 16 nt, Human
guuuccuggcacugcu

SEQ ID NO: 3326752 - RNA, 22 nt, Human
guuuccuggcacugcuuccagu

SEQ ID NO: 3326753 - RNA, 21 nt, Human
guuuccuggcacugcuuccag

SEQ ID NO: 3326754 - RNA, 22 nt, Human
guuugauuaaauucuugcaaag

SEQ ID NO: 3326755 - RNA, 19 nt, Human
guuugauuaaauucuugca

SEQ ID NO: 3326756 - RNA, 17 nt, Human
guuugauuaaauucuug

SEQ ID NO: 3326757 - RNA, 17 nt, Human
guuuguaaauuaacuuu

SEQ ID NO: 3326758 - RNA, 19 nt, Human
guuuguaaauuaacuuuua

SEQ ID NO: 3326759 - RNA, 16 nt, Human
guuucuaaagcugcca

SEQ ID NO: 3326760 - RNA, 15 nt, Human
guuucuaaagcugcc

SEQ ID NO: 3326761 - RNA, 14 nt, Human
guuucuaaagcugc

SEQ ID NO: 3326762 - RNA, 18 nt, Human
guuugagaucagccuggg

SEQ ID NO: 3326763 - RNA, 16 nt, Human
guuugaaccaagaacu

SEQ ID NO: 3326764 - RNA, 23 nt, Human
uaaaaaacugcugacuguuuucu

SEQ ID NO: 3326765 - RNA, 20 nt, Human
uaaaaaacugcugacuguuu

SEQ ID NO: 3326766 - RNA, 22 nt, Human
uaaaaaugagguacucuccugg

SEQ ID NO: 3326767 - RNA, 13 nt, Human
guuuuccugaaga

SEQ ID NO: 3326768 - RNA, 16 nt, Human
guuuucaguguacaug

SEQ ID NO: 3326769 - RNA, 17 nt, Human
guuuucaguguacaugg

SEQ ID NO: 3326770 - RNA, 19 nt, Human
guuuucucuugagagggug

SEQ ID NO: 3326771 - RNA, 12 nt, Human
guuuucucuuga

SEQ ID NO: 3326772 - RNA, 23 nt, Human
guuuuuauggcuuuugugcauua

SEQ ID NO: 3326773 - RNA, 22 nt, Human
guuuuuauggcuuuugugcauu

SEQ ID NO: 3326774 - RNA, 19 nt, Human
guuuuuauggcuuuugugc

SEQ ID NO: 3326775 - RNA, 13 nt, Human
uaaaguuucuguu

SEQ ID NO: 3326776 - RNA, 20 nt, Human
uaaaguguauuuuuuuacua

SEQ ID NO: 3326777 - RNA, 23 nt, Human
uaaaguguauuuuuuuacuaaua

SEQ ID NO: 3326778 - RNA, 22 nt, Human
uaaaguguauuuuuuuacuaau

SEQ ID NO: 3326779 - RNA, 21 nt, Human
uaaaguguauuuuuuuacuaa

SEQ ID NO: 3326780 - RNA, 19 nt, Human
uaaaucagccguguaacca

SEQ ID NO: 3326781 - RNA, 19 nt, Human
uaaacuuaaucuaaaugga

SEQ ID NO: 3326782 - RNA, 18 nt, Human
uaaacuuaaucuaaaugg

SEQ ID NO: 3326783 - RNA, 13 nt, Human
uaaacuuaaucua

SEQ ID NO: 3326784 - RNA, 14 nt, Human
uaaacuuaaucuaa

SEQ ID NO: 3326785 - RNA, 22 nt, Human
uaaacuuuaccuuuuuuauaca

SEQ ID NO: 3326786 - RNA, 16 nt, Human
uaaacuuuaccuuuuu

SEQ ID NO: 3326787 - RNA, 18 nt, Human
uaaacaagaccacguuuc

SEQ ID NO: 3326788 - RNA, 23 nt, Human
uaaacaagaccacguuucuaaag

SEQ ID NO: 3326789 - RNA, 13 nt, Human
uaacagaaaugua

SEQ ID NO: 3326790 - RNA, 15 nt, Human
uaacagaaauguaca

SEQ ID NO: 3326791 - RNA, 14 nt, Human
uaacagaaauguac

SEQ ID NO: 3326792 - RNA, 12 nt, Human
uaacagaaaugu

SEQ ID NO: 3326793 - RNA, 20 nt, Human
uaacuuuuauaaacuuuacc

SEQ ID NO: 3326794 - RNA, 19 nt, Human
uaaccagcagaaaugccuu

SEQ ID NO: 3326795 - RNA, 16 nt, Human
uaaccagcagaaaugc

SEQ ID NO: 3326796 - RNA, 14 nt, Human
uaaccagcagaaau

SEQ ID NO: 3326797 - RNA, 19 nt, Human
uaacaggcagauacaggaa

SEQ ID NO: 3326798 - RNA, 19 nt, Human
uaaggaugcuuguacauaa

SEQ ID NO: 3326799 - RNA, 18 nt, Human
uaaggaugcuuguacaua

SEQ ID NO: 3326800 - RNA, 23 nt, Human
uaaggaugcuuguacauaaugcg

SEQ ID NO: 3326801 - RNA, 22 nt, Human
uaaggaugcuuguacauaaugc

SEQ ID NO: 3326802 - RNA, 21 nt, Human
uaaggaugcuuguacauaaug

SEQ ID NO: 3326803 - RNA, 20 nt, Human
uaaggaugcuuguacauaau

SEQ ID NO: 3326804 - RNA, 22 nt, Human
uaagaggcagggucucacucug

SEQ ID NO: 3326805 - RNA, 22 nt, Human
uaagaaccuuuugagugccuua

SEQ ID NO: 3326806 - RNA, 24 nt, Human
uaagaaagacuaucuaaauguuga

SEQ ID NO: 3326807 - RNA, 19 nt, Human
uaacuuuuauaaacuuuac

SEQ ID NO: 3326808 - RNA, 22 nt, Human
uaacuuuuauaaacuuuaccuu

SEQ ID NO: 3326809 - RNA, 21 nt, Human
uaacuuuuauaaacuuuaccu

SEQ ID NO: 3326810 - RNA, 23 nt, Human
uaagagggagggagggcuccaga

SEQ ID NO: 3326811 - RNA, 22 nt, Human
uaagagggagggagggcuccag

SEQ ID NO: 3326812 - RNA, 12 nt, Human
uaagagggaggg

SEQ ID NO: 3326813 - RNA, 14 nt, Human
uaagauaaaugugc

SEQ ID NO: 3326814 - RNA, 16 nt, Human
uaagauaaaugugcug

SEQ ID NO: 3326815 - RNA, 17 nt, Human
uaagauaaaugugcuga

SEQ ID NO: 3326816 - RNA, 11 nt, Human
uaaucuaaaug

SEQ ID NO: 3326817 - RNA, 20 nt, Human
uaauccucuaggaggucucu

SEQ ID NO: 3326818 - RNA, 21 nt, Human
uaauaguucagguaacaggca

SEQ ID NO: 3326819 - RNA, 22 nt, Human
uaauugacaggauuauuggaaa

SEQ ID NO: 3326820 - RNA, 20 nt, Human
uaauugacaggauuauugga

SEQ ID NO: 3326821 - RNA, 18 nt, Human
uaauucuuagcucauucu

SEQ ID NO: 3326822 - RNA, 17 nt, Human
uaauuaaaacacaacau

SEQ ID NO: 3326823 - RNA, 20 nt, Human
uaauuaaguacuauguauca

SEQ ID NO: 3326824 - RNA, 14 nt, Human
uaaugcgugcauac

SEQ ID NO: 3326825 - RNA, 22 nt, Human
uaauuugugauacaaugcugug

SEQ ID NO: 3326826 - RNA, 19 nt, Human
uaauuugugauacaaugcu

SEQ ID NO: 3326827 - RNA, 14 nt, Human
uaauuugugauaca

SEQ ID NO: 3326828 - RNA, 18 nt, Human
uaauuugugauacaaugc

SEQ ID NO: 3326829 - RNA, 15 nt, Human
uaauuugugauacaa

SEQ ID NO: 3326830 - RNA, 15 nt, Human
uacugaggugcuaug

SEQ ID NO: 3326831 - RNA, 17 nt, Human
uacucccaucugugaaa

SEQ ID NO: 3326832 - RNA, 16 nt, Human
uacucccaucugugaa

SEQ ID NO: 3326833 - RNA, 14 nt, Human
uacucccaucugug

SEQ ID NO: 3326834 - RNA, 12 nt, Human
uacucccaucug

SEQ ID NO: 3326835 - RNA, 12 nt, Human
uacucaccucac

SEQ ID NO: 3326836 - RNA, 14 nt, Human
uacucaccucaccc

SEQ ID NO: 3326837 - RNA, 20 nt, Human
uacuacaguuuguuaguaug

SEQ ID NO: 3326838 - RNA, 22 nt, Human
uacucagaauucucuaguuuga

SEQ ID NO: 3326839 - RNA, 16 nt, Human
uacucagaauucucua

SEQ ID NO: 3326840 - RNA, 19 nt, Human
uacuaaccagcagaaaugc

SEQ ID NO: 3326841 - RNA, 17 nt, Human
uacuaaccagcagaaau

SEQ ID NO: 3326842 - RNA, 18 nt, Human
uacuaaccagcagaaaug

SEQ ID NO: 3326843 - RNA, 22 nt, Human
uacuaauaaaauuuaaaagucu

SEQ ID NO: 3326844 - RNA, 17 nt, Human
uacuaauagacaauuua

SEQ ID NO: 3326845 - RNA, 15 nt, Human
uacuaauagacaauu

SEQ ID NO: 3326846 - RNA, 17 nt, Human
uacuacaguccucccau

SEQ ID NO: 3326847 - RNA, 12 nt, Human
uacuacaguccu

SEQ ID NO: 3326848 - RNA, 22 nt, Human
uacccaucccauaugccugggc

SEQ ID NO: 3326849 - RNA, 18 nt, Human
uaccuuuuuuauacauaa

SEQ ID NO: 3326850 - RNA, 20 nt, Human
uaccuuuuuuauacauaaac

SEQ ID NO: 3326851 - RNA, 19 nt, Human
uaccuuuuuuauacauaaa

SEQ ID NO: 3326852 - RNA, 20 nt, Human
uaccuuuguauucucuccug

SEQ ID NO: 3326853 - RNA, 15 nt, Human
uagaaauauaauuga

SEQ ID NO: 3326854 - RNA, 20 nt, Human
uagaaauaucugaaaaugua

SEQ ID NO: 3326855 - RNA, 21 nt, Human
uagaaauaucugaaaauguau

SEQ ID NO: 3326856 - RNA, 23 nt, Human
uagaaauaucugaaaauguaugu

SEQ ID NO: 3326857 - RNA, 21 nt, Human
uacuguaucaugacaaagacu

SEQ ID NO: 3326858 - RNA, 19 nt, Human
uacuuguggacacagcucu

SEQ ID NO: 3326859 - RNA, 15 nt, Human
uacuuguggacacag

SEQ ID NO: 3326860 - RNA, 18 nt, Human
uacuuguggacacagcuc

SEQ ID NO: 3326861 - RNA, 14 nt, Human
uacuuguggacaca

SEQ ID NO: 3326862 - RNA, 22 nt, Human
uacauaagauaaaugugcugaa

SEQ ID NO: 3326863 - RNA, 17 nt, Human
uacauaagauaaaugug

SEQ ID NO: 3326864 - RNA, 18 nt, Human
uacauaagauaaaugugc

SEQ ID NO: 3326865 - RNA, 19 nt, Human
uacauaagauaaaugugcu

SEQ ID NO: 3326866 - RNA, 23 nt, Human
uacaguuacucagaauucucuag

SEQ ID NO: 3326867 - RNA, 19 nt, Human
uacaguuacucagaauucu

SEQ ID NO: 3326868 - RNA, 23 nt, Human
uaccauuuugggguacccacugc

SEQ ID NO: 3326869 - RNA, 13 nt, Human
uaccacagacaua

SEQ ID NO: 3326870 - RNA, 15 nt, Human
uacccacccccaccc

SEQ ID NO: 3326871 - RNA, 12 nt, Human
uacccaccccca

SEQ ID NO: 3326872 - RNA, 23 nt, Human
uacccacccccacccaagggccu

SEQ ID NO: 3326873 - RNA, 19 nt, Human
uacccacccccacccaagg

SEQ ID NO: 3326874 - RNA, 17 nt, Human
uacccacccccacccaa

SEQ ID NO: 3326875 - RNA, 11 nt, Human
uacccacugcu

SEQ ID NO: 3326876 - RNA, 12 nt, Human
uacccacugcuc

SEQ ID NO: 3326877 - RNA, 13 nt, Human
uacccacugcucu

SEQ ID NO: 3326878 - RNA, 14 nt, Human
uacccacugcucug

SEQ ID NO: 3326879 - RNA, 16 nt, Human
uacccagcgagcccug

SEQ ID NO: 3326880 - RNA, 18 nt, Human
uacccagcgagcccuggu

SEQ ID NO: 3326881 - RNA, 22 nt, Human
uacccaggugcuaggaacacuc

SEQ ID NO: 3326882 - RNA, 16 nt, Human
uacaggcacccaccau

SEQ ID NO: 3326883 - RNA, 19 nt, Human
uacaggaaaagcugcugac

SEQ ID NO: 3326884 - RNA, 23 nt, Human
uacagcuugaccgugaggccaga

SEQ ID NO: 3326885 - RNA, 17 nt, Human
uacaggaaaagcugcug

SEQ ID NO: 3326886 - RNA, 18 nt, Human
uacaggaaaagcugcuga

SEQ ID NO: 3326887 - RNA, 22 nt, Human
uacagcuugaccgugaggccag

SEQ ID NO: 3326888 - RNA, 21 nt, Human
uacagcuugaccgugaggcca

SEQ ID NO: 3326889 - RNA, 13 nt, Human
uacacuuuaugca

SEQ ID NO: 3326890 - RNA, 18 nt, Human
uacacuguuucaaacuuu

SEQ ID NO: 3326891 - RNA, 17 nt, Human
uacacuguuucaaacuu

SEQ ID NO: 3326892 - RNA, 24 nt, Human
uacagcaaggagauuuacaacugg

SEQ ID NO: 3326893 - RNA, 22 nt, Human
uacacacugcauguuugugauu

SEQ ID NO: 3326894 - RNA, 14 nt, Human
uacacuguuucaaa

SEQ ID NO: 3326895 - RNA, 17 nt, Human
uacacaaugguuuucuu

SEQ ID NO: 3326896 - RNA, 21 nt, Human
uacacaaugguuuucuugugu

SEQ ID NO: 3326897 - RNA, 21 nt, Human
uacacacacacgcgugcacac

SEQ ID NO: 3326898 - RNA, 15 nt, Human
uacacacacauacac

SEQ ID NO: 3326899 - RNA, 17 nt, Human
uacacacugcauguuug

SEQ ID NO: 3326900 - RNA, 12 nt, Human
uagauguauaua

SEQ ID NO: 3326901 - RNA, 18 nt, Human
uagauaauacaccacuac

SEQ ID NO: 3326902 - RNA, 19 nt, Human
uagcagagaaugaaagggc

SEQ ID NO: 3326903 - RNA, 23 nt, Human
uagcagagaaugaaagggcccag

SEQ ID NO: 3326904 - RNA, 16 nt, Human
uagcacuuugggaggc

SEQ ID NO: 3326905 - RNA, 21 nt, Human
uagagguucaaagauauuuug

SEQ ID NO: 3326906 - RNA, 16 nt, Human
uagagguucaaagaua

SEQ ID NO: 3326907 - RNA, 19 nt, Human
uagagguucaaagauauuu

SEQ ID NO: 3326908 - RNA, 16 nt, Human
uagagagagaccacuu

SEQ ID NO: 3326909 - RNA, 11 nt, Human
uagagacaggg

SEQ ID NO: 3326910 - RNA, 13 nt, Human
uaggccuggccag

SEQ ID NO: 3326911 - RNA, 14 nt, Human
uaggccuggccaga

SEQ ID NO: 3326912 - RNA, 15 nt, Human
uaggaagguuaaugu

SEQ ID NO: 3326913 - RNA, 21 nt, Human
uaggaacuuaaauaaugugaa

SEQ ID NO: 3326914 - RNA, 17 nt, Human
uaggaacacuccuucac

SEQ ID NO: 3326915 - RNA, 14 nt, Human
uaggaacacuccuu

SEQ ID NO: 3326916 - RNA, 13 nt, Human
uaggaacacuccu

SEQ ID NO: 3326917 - RNA, 13 nt, Human
uaggaagacuuug

SEQ ID NO: 3326918 - RNA, 15 nt, Human
uaggaagacuuugga

SEQ ID NO: 3326919 - RNA, 14 nt, Human
uaggaagacuuugg

SEQ ID NO: 3326920 - RNA, 17 nt, Human
uaggaagacuuuggaaa

SEQ ID NO: 3326921 - RNA, 16 nt, Human
uaggaagacuuuggaa

SEQ ID NO: 3326922 - RNA, 21 nt, Human
uagcucuaggagggcuggcaa

SEQ ID NO: 3326923 - RNA, 22 nt, Human
uagcucauucuccuuguguuac

SEQ ID NO: 3326924 - RNA, 18 nt, Human
uagcugggacuacaggug

SEQ ID NO: 3326925 - RNA, 20 nt, Human
uagcugggacuacaggcacc

SEQ ID NO: 3326926 - RNA, 19 nt, Human
uagcugggacuacaggcac

SEQ ID NO: 3326927 - RNA, 11 nt, Human
uagcugggacu

SEQ ID NO: 3326928 - RNA, 14 nt, Human
uagcccaaaaccaa

SEQ ID NO: 3326929 - RNA, 16 nt, Human
uagccuaggugacaga

SEQ ID NO: 3326930 - RNA, 16 nt, Human
uaucaugacaaagacu

SEQ ID NO: 3326931 - RNA, 19 nt, Human
uaucgucacugcuuaacuu

SEQ ID NO: 3326932 - RNA, 16 nt, Human
uaucgucacugcuuaa

SEQ ID NO: 3326933 - RNA, 15 nt, Human
uaucuaaauguugaa

SEQ ID NO: 3326934 - RNA, 13 nt, Human
uaguuucuccaag

SEQ ID NO: 3326935 - RNA, 12 nt, Human
uaguuugcaguu

SEQ ID NO: 3326936 - RNA, 23 nt, Human
uaguuugauuaaauucuugcaaa

SEQ ID NO: 3326937 - RNA, 15 nt, Human
uaguggauguucuga

SEQ ID NO: 3326938 - RNA, 17 nt, Human
uauaauucuacuuugag

SEQ ID NO: 3326939 - RNA, 14 nt, Human
uauaauguaagcuc

SEQ ID NO: 3326940 - RNA, 19 nt, Human
uauaauguaagcucuacug

SEQ ID NO: 3326941 - RNA, 20 nt, Human
uauaauguaagcucuacuga

SEQ ID NO: 3326942 - RNA, 18 nt, Human
uauaaugaaugaaacauu

SEQ ID NO: 3326943 - RNA, 20 nt, Human
uauaaugaaugaaacauuuu

SEQ ID NO: 3326944 - RNA, 21 nt, Human
uaguuugauuaaauucuugca

SEQ ID NO: 3326945 - RNA, 14 nt, Human
ucuggcuaugcauu

SEQ ID NO: 3326946 - RNA, 17 nt, Human
ucuggcucuuccaggcu

SEQ ID NO: 3326947 - RNA, 16 nt, Human
ucuggcucuuccaggc

SEQ ID NO: 3326948 - RNA, 15 nt, Human
ucuggcucuuccagg

SEQ ID NO: 3326949 - RNA, 12 nt, Human
ucugggacacag

SEQ ID NO: 3326950 - RNA, 23 nt, Human
ucuguacagagcccacgccccca

SEQ ID NO: 3326951 - RNA, 22 nt, Human
ucugugucagguggggcagcuu

SEQ ID NO: 3326952 - RNA, 23 nt, Human
ucuguggguuucuaaagcugcca

SEQ ID NO: 3326953 - RNA, 19 nt, Human
ucuguccgagcuuugaaaa

SEQ ID NO: 3326954 - RNA, 22 nt, Human
ucuguggguuucuaaagcugcc

SEQ ID NO: 3326955 - RNA, 17 nt, Human
ucuguacgucugacagg

SEQ ID NO: 3326956 - RNA, 18 nt, Human
ucuuaaaaaguggaaaaa

SEQ ID NO: 3326957 - RNA, 16 nt, Human
ucuugaacuccuggcc

SEQ ID NO: 3326958 - RNA, 17 nt, Human
ucuugaacuccuggccu

SEQ ID NO: 3326959 - RNA, 18 nt, Human
ucuugaacuccuggccuc

SEQ ID NO: 3326960 - RNA, 13 nt, Human
ucuucuccaggcu

SEQ ID NO: 3326961 - RNA, 14 nt, Human
ucuucuccaggcug

SEQ ID NO: 3326962 - RNA, 12 nt, Human
ucuucuccaggc

SEQ ID NO: 3326963 - RNA, 21 nt, Human
ucuugaauuguaaggaaugau

SEQ ID NO: 3326964 - RNA, 17 nt, Human
ucuugaauuguaaggaa

SEQ ID NO: 3326965 - RNA, 12 nt, Human
ucuugcucugcu

SEQ ID NO: 3326966 - RNA, 13 nt, Human
ucuugcucugcug

SEQ ID NO: 3326967 - RNA, 11 nt, Human
ucuugcucugc

SEQ ID NO: 3326968 - RNA, 21 nt, Human
ucuucuccacuuucuagccag

SEQ ID NO: 3326969 - RNA, 19 nt, Human
ucuucuccacuuucuagcc

SEQ ID NO: 3326970 - RNA, 14 nt, Human
ucuuccaggcuggg

SEQ ID NO: 3326971 - RNA, 21 nt, Human
ucuuccacaagagcccaggcc

SEQ ID NO: 3326972 - RNA, 16 nt, Human
ucuucaguaagccgug

SEQ ID NO: 3326973 - RNA, 15 nt, Human
ucuucaguaagccgu

SEQ ID NO: 3326974 - RNA, 13 nt, Human
ucuuaaaaagugg

SEQ ID NO: 3326975 - RNA, 14 nt, Human
ucuuagugugugca

SEQ ID NO: 3326976 - RNA, 16 nt, Human
ucuuaguggauguucu

SEQ ID NO: 3326977 - RNA, 15 nt, Human
ucuuauacauuugau

SEQ ID NO: 3326978 - RNA, 14 nt, Human
ucuuauacauuuga

SEQ ID NO: 3326979 - RNA, 12 nt, Human
ugaaaggaaaga

SEQ ID NO: 3326980 - RNA, 17 nt, Human
ugaaaggaaagaggcuc

SEQ ID NO: 3326981 - RNA, 19 nt, Human
ugaaaugaggucagagccu

SEQ ID NO: 3326982 - RNA, 20 nt, Human
ugaaaugaggucagagccug

SEQ ID NO: 3326983 - RNA, 23 nt, Human
ugaaaugaggucagagccugcag

SEQ ID NO: 3326984 - RNA, 21 nt, Human
ugaaaugaggucagagccugc

SEQ ID NO: 3326985 - RNA, 22 nt, Human
ugaaaugaggucagagccugca

SEQ ID NO: 3326986 - RNA, 15 nt, Human
ugaaagggcccagag

SEQ ID NO: 3326987 - RNA, 16 nt, Human
ugaaagggcccagaga

SEQ ID NO: 3326988 - RNA, 17 nt, Human
ugaaagggcccagagag

SEQ ID NO: 3326989 - RNA, 17 nt, Human
ugaaaucuuuuugcuuu

SEQ ID NO: 3326990 - RNA, 22 nt, Human
ugaaaagaaaaaugagccuggc

SEQ ID NO: 3326991 - RNA, 16 nt, Human
ucuuuuugcuuugcuu

SEQ ID NO: 3326992 - RNA, 19 nt, Human
ucuuuugccguuauuaaaa

SEQ ID NO: 3326993 - RNA, 17 nt, Human
ucuuuugccguuauuaa

SEQ ID NO: 3326994 - RNA, 19 nt, Human
ugaaccacaucuugcucug

SEQ ID NO: 3326995 - RNA, 18 nt, Human
ugaacucuucaaucucuu

SEQ ID NO: 3326996 - RNA, 20 nt, Human
ugaaccacaucuugcucugc

SEQ ID NO: 3326997 - RNA, 21 nt, Human
ugaaccacaucuugcucugcu

SEQ ID NO: 3326998 - RNA, 15 nt, Human
ugaacucuucaaucu

SEQ ID NO: 3326999 - RNA, 15 nt, Human
ugaacugauaaagau

SEQ ID NO: 3327000 - RNA, 13 nt, Human
ugaacugauaaag

SEQ ID NO: 3327001 - RNA, 21 nt, Human
ugaaggcucgagcaugccugg

SEQ ID NO: 3327002 - RNA, 20 nt, Human
ugaaggcucgagcaugccug

SEQ ID NO: 3327003 - RNA, 14 nt, Human
ugaagacuuuucuu

SEQ ID NO: 3327004 - RNA, 22 nt, Human
ugaagacuuuucuuucagccaa

SEQ ID NO: 3327005 - RNA, 17 nt, Human
ugaagacuuuucuuuca

SEQ ID NO: 3327006 - RNA, 19 nt, Human
ugaacuggguacuugugga

SEQ ID NO: 3327007 - RNA, 12 nt, Human
ugaacuugguuc

SEQ ID NO: 3327008 - RNA, 14 nt, Human
ugaacuuggcgcug

SEQ ID NO: 3327009 - RNA, 13 nt, Human
ugaagacagagcu

SEQ ID NO: 3327010 - RNA, 16 nt, Human
ugaagacagagcuaca

SEQ ID NO: 3327011 - RNA, 14 nt, Human
ugaagacagagcua

SEQ ID NO: 3327012 - RNA, 16 nt, Human
ucugaaaauguaugug

SEQ ID NO: 3327013 - RNA, 15 nt, Human
ucucuuuucaaaaca

SEQ ID NO: 3327014 - RNA, 16 nt, Human
ucucuuuucaaaacau

SEQ ID NO: 3327015 - RNA, 14 nt, Human
ucugaaaauguaug

SEQ ID NO: 3327016 - RNA, 23 nt, Human
ucugaaaauguauguguaaguau

SEQ ID NO: 3327017 - RNA, 13 nt, Human
ucugaaagggacg

SEQ ID NO: 3327018 - RNA, 14 nt, Human
ucugacccaugcug

SEQ ID NO: 3327019 - RNA, 15 nt, Human
ucugacccacugcuu

SEQ ID NO: 3327020 - RNA, 20 nt, Human
ucugaacuuggcgcugcccc

SEQ ID NO: 3327021 - RNA, 24 nt, Human
ucugagaucaaaacgguuuuacug

SEQ ID NO: 3327022 - RNA, 18 nt, Human
ucugacccaugcugcccu

SEQ ID NO: 3327023 - RNA, 17 nt, Human
ucugacccaugcugccc

SEQ ID NO: 3327024 - RNA, 16 nt, Human
ucugacccaugcugcc

SEQ ID NO: 3327025 - RNA, 15 nt, Human
ucugacccaugcugc

SEQ ID NO: 3327026 - RNA, 19 nt, Human
ucugcacaagcugcacccu

SEQ ID NO: 3327027 - RNA, 14 nt, Human
ucugcacaagcugc

SEQ ID NO: 3327028 - RNA, 21 nt, Human
ucugauucccaagcucugcuc

SEQ ID NO: 3327029 - RNA, 23 nt, Human
ucugauucccaagcucugcuccu

SEQ ID NO: 3327030 - RNA, 16 nt, Human
ucugaggaauccagac

SEQ ID NO: 3327031 - RNA, 17 nt, Human
ucugaggaauccagacc

SEQ ID NO: 3327032 - RNA, 20 nt, Human
ucugaggacacuaaccacgc

SEQ ID NO: 3327033 - RNA, 23 nt, Human
ucugaggacacuaaccacgcugg

SEQ ID NO: 3327034 - RNA, 14 nt, Human
ucucccccagcccc

SEQ ID NO: 3327035 - RNA, 17 nt, Human
ucucccccagccccauc

SEQ ID NO: 3327036 - RNA, 15 nt, Human
ucucccccagcccca

SEQ ID NO: 3327037 - RNA, 20 nt, Human
ucucccccagccccauccuc

SEQ ID NO: 3327038 - RNA, 18 nt, Human
ucucccccagccccaucc

SEQ ID NO: 3327039 - RNA, 13 nt, Human
ucucccccagccc

SEQ ID NO: 3327040 - RNA, 22 nt, Human
ucucccccagccccauccucug

SEQ ID NO: 3327041 - RNA, 22 nt, Human
ucuccugccucagccucccaaa

SEQ ID NO: 3327042 - RNA, 19 nt, Human
ucuccugccucagccuccc

SEQ ID NO: 3327043 - RNA, 16 nt, Human
ucucuaguuugauuaa

SEQ ID NO: 3327044 - RNA, 19 nt, Human
ucucuaguuugauuaaauu

SEQ ID NO: 3327045 - RNA, 18 nt, Human
ucucuaguuugauuaaau

SEQ ID NO: 3327046 - RNA, 15 nt, Human
ucucuacaaaaagca

SEQ ID NO: 3327047 - RNA, 13 nt, Human
ucucugaggacac

SEQ ID NO: 3327048 - RNA, 14 nt, Human
ucuacacugugcug

SEQ ID NO: 3327049 - RNA, 12 nt, Human
ucuacacugugc

SEQ ID NO: 3327050 - RNA, 15 nt, Human
ucuacacugugcuga

SEQ ID NO: 3327051 - RNA, 18 nt, Human
ucuacugaggugcuaugu

SEQ ID NO: 3327052 - RNA, 19 nt, Human
ucuacugaggugcuauguu

SEQ ID NO: 3327053 - RNA, 19 nt, Human
ucuagggaaaaaccagcgu

SEQ ID NO: 3327054 - RNA, 22 nt, Human
ucuagggaaaaaccagcgugug

SEQ ID NO: 3327055 - RNA, 22 nt, Human
ucuacugaggugcuauguucuu

SEQ ID NO: 3327056 - RNA, 16 nt, Human
ucuaacuucaccauau

SEQ ID NO: 3327057 - RNA, 15 nt, Human
ucuaacuucaccaua

SEQ ID NO: 3327058 - RNA, 22 nt, Human
ucuaaaucuccaaaauaaaacu

SEQ ID NO: 3327059 - RNA, 18 nt, Human
ucucaaauuucuaaaucu

SEQ ID NO: 3327060 - RNA, 22 nt, Human
ucucaaacucuugaccucaggu

SEQ ID NO: 3327061 - RNA, 13 nt, Human
ucucaaacucuug

SEQ ID NO: 3327062 - RNA, 21 nt, Human
ucucaaacucuugaccucagg

SEQ ID NO: 3327063 - RNA, 17 nt, Human
ucucacuguugcccagg

SEQ ID NO: 3327064 - RNA, 17 nt, Human
ucucagaaucucaaaua

SEQ ID NO: 3327065 - RNA, 21 nt, Human
ucucagaaucucaaauaacua

SEQ ID NO: 3327066 - RNA, 18 nt, Human
ucucacuguugcccaggc

SEQ ID NO: 3327067 - RNA, 19 nt, Human
ucucacuguugcccaggcu

SEQ ID NO: 3327068 - RNA, 20 nt, Human
ucucacuguugcccaggcug

SEQ ID NO: 3327069 - RNA, 21 nt, Human
ucucacuguugcccaggcugg

SEQ ID NO: 3327070 - RNA, 18 nt, Human
ucucacucugucgcccag

SEQ ID NO: 3327071 - RNA, 16 nt, Human
ucucacucugucgccc

SEQ ID NO: 3327072 - RNA, 17 nt, Human
ucucacucugucgccca

SEQ ID NO: 3327073 - RNA, 19 nt, Human
uccuucuguccuacucugu

SEQ ID NO: 3327074 - RNA, 12 nt, Human
uccuucuguccu

SEQ ID NO: 3327075 - RNA, 15 nt, Human
uccugguguggaaga

SEQ ID NO: 3327076 - RNA, 17 nt, Human
uccuggcccacugcauc

SEQ ID NO: 3327077 - RNA, 22 nt, Human
uccuggcaugggaaugaauguc

SEQ ID NO: 3327078 - RNA, 10 nt, Human
ucccucccuu

SEQ ID NO: 3327079 - RNA, 23 nt, Human
ucgcugugucagcauagaaguaa

SEQ ID NO: 3327080 - RNA, 17 nt, Human
ucgaguuacagacaaag

SEQ ID NO: 3327081 - RNA, 15 nt, Human
ucgaguuacagacaa

SEQ ID NO: 3327082 - RNA, 13 nt, Human
uccaccugccagg

SEQ ID NO: 3327083 - RNA, 18 nt, Human
uccagcucaccagcccca

SEQ ID NO: 3327084 - RNA, 12 nt, Human
uccaccugccag

SEQ ID NO: 3327085 - RNA, 14 nt, Human
uccacaagagccca

SEQ ID NO: 3327086 - RNA, 22 nt, Human
uccaagcaggacauggacaagg

SEQ ID NO: 3327087 - RNA, 19 nt, Human
uccaagaagcccaggaaag

SEQ ID NO: 3327088 - RNA, 22 nt, Human
uccaagaagcccaggaaaggcu

SEQ ID NO: 3327089 - RNA, 20 nt, Human
uccaagaagcccaggaaagg

SEQ ID NO: 3327090 - RNA, 17 nt, Human
uccaaaauaaaacuuuu

SEQ ID NO: 3327091 - RNA, 16 nt, Human
uccaaaauaaaacuuu

SEQ ID NO: 3327092 - RNA, 13 nt, Human
ucauaaugacuua

SEQ ID NO: 3327093 - RNA, 13 nt, Human
ucauacccacccc

SEQ ID NO: 3327094 - RNA, 24 nt, Human
ucagucugauucccaagcucugcu

SEQ ID NO: 3327095 - RNA, 15 nt, Human
ucagucuggcccuuc

SEQ ID NO: 3327096 - RNA, 23 nt, Human
ucagucugauucccaagcucugc

SEQ ID NO: 3327097 - RNA, 23 nt, Human
ucagugguuggcaauuguuucaa

SEQ ID NO: 3327098 - RNA, 13 nt, Human
ucagugugacuga

SEQ ID NO: 3327099 - RNA, 17 nt, Human
ucagugugacugaucuc

SEQ ID NO: 3327100 - RNA, 15 nt, Human
ucauacccaccccca

SEQ ID NO: 3327101 - RNA, 14 nt, Human
ucauacccaccccc

SEQ ID NO: 3327102 - RNA, 20 nt, Human
ucauacccacccccacccaa

SEQ ID NO: 3327103 - RNA, 16 nt, Human
ucauuaggugugacug

SEQ ID NO: 3327104 - RNA, 21 nt, Human
ucauuaggugugacugaauuu

SEQ ID NO: 3327105 - RNA, 18 nt, Human
ucauuaggugugacugaa

SEQ ID NO: 3327106 - RNA, 13 nt, Human
uccauggacuuug

SEQ ID NO: 3327107 - RNA, 15 nt, Human
uccauggacuuuguu

SEQ ID NO: 3327108 - RNA, 14 nt, Human
uccauggacuuugu

SEQ ID NO: 3327109 - RNA, 21 nt, Human
ucccaaagugcugggauuaca

SEQ ID NO: 3327110 - RNA, 23 nt, Human
uccagcucaccagccccagugcc

SEQ ID NO: 3327111 - RNA, 13 nt, Human
ucccaacucaccc

SEQ ID NO: 3327112 - RNA, 16 nt, Human
ucccaacucaccccag

SEQ ID NO: 3327113 - RNA, 15 nt, Human
ucccaacucacccca

SEQ ID NO: 3327114 - RNA, 14 nt, Human
ucccaacucacccc

SEQ ID NO: 3327115 - RNA, 17 nt, Human
ucccaagcucugcuccu

SEQ ID NO: 3327116 - RNA, 12 nt, Human
ucccaagcucug

SEQ ID NO: 3327117 - RNA, 13 nt, Human
ucccaagcucugc

SEQ ID NO: 3327118 - RNA, 14 nt, Human
ucccaagcucugcu

SEQ ID NO: 3327119 - RNA, 15 nt, Human
ucccaagcucugcuc

SEQ ID NO: 3327120 - RNA, 13 nt, Human
ucccaccucagcc

SEQ ID NO: 3327121 - RNA, 14 nt, Human
ucccaccucagccu

SEQ ID NO: 3327122 - RNA, 15 nt, Human
ucccaccucagccuc

SEQ ID NO: 3327123 - RNA, 21 nt, Human
ucccaggcauuccccaggagg

SEQ ID NO: 3327124 - RNA, 20 nt, Human
ucccaggcauuccccaggag

SEQ ID NO: 3327125 - RNA, 19 nt, Human
ucccaggcauuccccagga

SEQ ID NO: 3327126 - RNA, 22 nt, Human
ucccaggcauuccccaggaggc

SEQ ID NO: 3327127 - RNA, 23 nt, Human
ucccaucucacacaugagcauca

SEQ ID NO: 3327128 - RNA, 20 nt, Human
ucccaucucacacaugagca

SEQ ID NO: 3327129 - RNA, 22 nt, Human
uccccacuugagaauuacccuu

SEQ ID NO: 3327130 - RNA, 19 nt, Human
uccccuguagagugggagc

SEQ ID NO: 3327131 - RNA, 24 nt, Human
uccccugcuggguguggcgcagca

SEQ ID NO: 3327132 - RNA, 23 nt, Human
uccccuguccccgcacugggcuu

SEQ ID NO: 3327133 - RNA, 22 nt, Human
uccccuguagagugggagcuga

SEQ ID NO: 3327134 - RNA, 21 nt, Human
uccccugcuggguguggcgca

SEQ ID NO: 3327135 - RNA, 20 nt, Human
uccccugcuggguguggcgc

SEQ ID NO: 3327136 - RNA, 15 nt, Human
uccccugcugggugu

SEQ ID NO: 3327137 - RNA, 14 nt, Human
uccccugcugggug

SEQ ID NO: 3327138 - RNA, 15 nt, Human
ucccucccucuuucc

SEQ ID NO: 3327139 - RNA, 17 nt, Human
ucccucccucuuucccu

SEQ ID NO: 3327140 - RNA, 15 nt, Human
ucccuacuguaauuu

SEQ ID NO: 3327141 - RNA, 21 nt, Human
ucccccuuccauggacuuugu

SEQ ID NO: 3327142 - RNA, 20 nt, Human
uccccgcacugggcuugggg

SEQ ID NO: 3327143 - RNA, 22 nt, Human
ucccccagccccauccucugua

SEQ ID NO: 3327144 - RNA, 11 nt, Human
ucacaggcagg

SEQ ID NO: 3327145 - RNA, 21 nt, Human
ucacacaugagcaucaggcca

SEQ ID NO: 3327146 - RNA, 22 nt, Human
ucacacagugagucgaggacag

SEQ ID NO: 3327147 - RNA, 23 nt, Human
ucacacagugagucgaggacagg

SEQ ID NO: 3327148 - RNA, 19 nt, Human
ucaauuacaggaaguacug

SEQ ID NO: 3327149 - RNA, 21 nt, Human
ucacacaguauuacuucugcu

SEQ ID NO: 3327150 - RNA, 22 nt, Human
ucacacaguauuacuucugcua

SEQ ID NO: 3327151 - RNA, 13 nt, Human
ucacacagugagu

SEQ ID NO: 3327152 - RNA, 13 nt, Human
ucaauaggaaaaa

SEQ ID NO: 3327153 - RNA, 14 nt, Human
ucaaugcacugaca

SEQ ID NO: 3327154 - RNA, 14 nt, Human
ucaauaggaaaaac

SEQ ID NO: 3327155 - RNA, 18 nt, Human
ucaaugcacugacauugu

SEQ ID NO: 3327156 - RNA, 18 nt, Human
ucaauuacaggaaguacu

SEQ ID NO: 3327157 - RNA, 13 nt, Human
ucaauuacaggaa

SEQ ID NO: 3327158 - RNA, 19 nt, Human
ucaaggauccugagccaga

SEQ ID NO: 3327159 - RNA, 18 nt, Human
ucaaggauccugagccag

SEQ ID NO: 3327160 - RNA, 22 nt, Human
ucaagugauucuccugccucag

SEQ ID NO: 3327161 - RNA, 17 nt, Human
ucaaggauccugagcca

SEQ ID NO: 3327162 - RNA, 21 nt, Human
ucaagugauucuccugccuca

SEQ ID NO: 3327163 - RNA, 20 nt, Human
ucaaggauccugagccagau

SEQ ID NO: 3327164 - RNA, 16 nt, Human
ucaagcgauucuucug

SEQ ID NO: 3327165 - RNA, 21 nt, Human
ucaagcgauucuucugcuuca

SEQ ID NO: 3327166 - RNA, 13 nt, Human
ucaaccuccuggg

SEQ ID NO: 3327167 - RNA, 22 nt, Human
ucaaacucuugaccucagguga

SEQ ID NO: 3327168 - RNA, 13 nt, Human
ucaaacuuuacua

SEQ ID NO: 3327169 - RNA, 15 nt, Human
ucaaacuuuacuaug

SEQ ID NO: 3327170 - RNA, 16 nt, Human
ucaaacuuuacuaugg

SEQ ID NO: 3327171 - RNA, 14 nt, Human
ucaaacucuuaaaa

SEQ ID NO: 3327172 - RNA, 22 nt, Human
ucaaaacgguuuuacugcagcu

SEQ ID NO: 3327173 - RNA, 15 nt, Human
uauuuuuuuacuaau

SEQ ID NO: 3327174 - RNA, 20 nt, Human
uaucugaaaauguaugugua

SEQ ID NO: 3327175 - RNA, 14 nt, Human
uaucugaaaaugua

SEQ ID NO: 3327176 - RNA, 15 nt, Human
uaucugaaaauguau

SEQ ID NO: 3327177 - RNA, 23 nt, Human
uauuuauuaaaugcccagccccu

SEQ ID NO: 3327178 - RNA, 14 nt, Human
ucagacagcugccu

SEQ ID NO: 3327179 - RNA, 20 nt, Human
ucagacagcugccugggauc

SEQ ID NO: 3327180 - RNA, 19 nt, Human
ucagacagcugccugggau

SEQ ID NO: 3327181 - RNA, 18 nt, Human
ucagacagcugccuggga

SEQ ID NO: 3327182 - RNA, 17 nt, Human
ucagacagcugccuggg

SEQ ID NO: 3327183 - RNA, 16 nt, Human
ucagacagcugccugg

SEQ ID NO: 3327184 - RNA, 15 nt, Human
ucagacagcugccug

SEQ ID NO: 3327185 - RNA, 18 nt, Human
ucagcacgauuucuguuu

SEQ ID NO: 3327186 - RNA, 19 nt, Human
ucagcacgauuucuguuua

SEQ ID NO: 3327187 - RNA, 19 nt, Human
ucacucugucgcccagucu

SEQ ID NO: 3327188 - RNA, 12 nt, Human
ucacucugucgc

SEQ ID NO: 3327189 - RNA, 16 nt, Human
ucacucugucgcccag

SEQ ID NO: 3327190 - RNA, 18 nt, Human
ucacugcuuaacuucaca

SEQ ID NO: 3327191 - RNA, 17 nt, Human
ucacugcuuaacuucac

SEQ ID NO: 3327192 - RNA, 15 nt, Human
ucacugcuuaacuuc

SEQ ID NO: 3327193 - RNA, 16 nt, Human
ucacgccacugcacua

SEQ ID NO: 3327194 - RNA, 13 nt, Human
ucacgccacugca

SEQ ID NO: 3327195 - RNA, 14 nt, Human
ucacgccacugcac

SEQ ID NO: 3327196 - RNA, 19 nt, Human
ucacgccuguaauccuagc

SEQ ID NO: 3327197 - RNA, 20 nt, Human
ucacgccuguaauccuagca

SEQ ID NO: 3327198 - RNA, 22 nt, Human
ucaccuuuguccccaccgcaga

SEQ ID NO: 3327199 - RNA, 18 nt, Human
ucaccuuuguccccaccg

SEQ ID NO: 3327200 - RNA, 17 nt, Human
ucaccuuuguccccacc

SEQ ID NO: 3327201 - RNA, 15 nt, Human
ucaccuuugucccca

SEQ ID NO: 3327202 - RNA, 14 nt, Human
ucaccuuugucccc

SEQ ID NO: 3327203 - RNA, 12 nt, Human
ucaccuuugucc

SEQ ID NO: 3327204 - RNA, 14 nt, Human
ucaccuuucccauc

SEQ ID NO: 3327205 - RNA, 19 nt, Human
ucacaggcagguccagggu

SEQ ID NO: 3327206 - RNA, 12 nt, Human
ucacaggcaggu

SEQ ID NO: 3327207 - RNA, 15 nt, Human
ucacaggcaggucca

SEQ ID NO: 3327208 - RNA, 14 nt, Human
ucacggaagagccu

SEQ ID NO: 3327209 - RNA, 17 nt, Human
ucacggaagagccuugc

SEQ ID NO: 3327210 - RNA, 16 nt, Human
ucacggaagagccuug

SEQ ID NO: 3327211 - RNA, 13 nt, Human
ucacggcucacug

SEQ ID NO: 3327212 - RNA, 15 nt, Human
ucacggcucacugca

SEQ ID NO: 3327213 - RNA, 20 nt, Human
ucacggcucacugcagccuc

SEQ ID NO: 3327214 - RNA, 13 nt, Human
ucacuccuugaaa

SEQ ID NO: 3327215 - RNA, 22 nt, Human
ucacucuggcagcucagagagg

SEQ ID NO: 3327216 - RNA, 20 nt, Human
ucacucuggcagcucagaga

SEQ ID NO: 3327217 - RNA, 19 nt, Human
ucacucuggcagcucagag

SEQ ID NO: 3327218 - RNA, 18 nt, Human
ucacucuggcagcucaga

SEQ ID NO: 3327219 - RNA, 17 nt, Human
ucacucuggcagcucag

SEQ ID NO: 3327220 - RNA, 16 nt, Human
ucacucuggcagcuca

SEQ ID NO: 3327221 - RNA, 15 nt, Human
ucacucuggcagcuc

SEQ ID NO: 3327222 - RNA, 14 nt, Human
ucacucuggcagcu

SEQ ID NO: 3327223 - RNA, 23 nt, Human
ucacucuccuuggugucgggcau

SEQ ID NO: 3327224 - RNA, 13 nt, Human
ucacucuggcagc

SEQ ID NO: 3327225 - RNA, 12 nt, Human
ucacucuggcag

SEQ ID NO: 3327226 - RNA, 14 nt, Human
ucacucuccuuggu

SEQ ID NO: 3327227 - RNA, 12 nt, Human
ucacucuccuug

SEQ ID NO: 3327228 - RNA, 18 nt, West Nile virus
cuagagguuagaggagac

SEQ ID NO: 3327229 - RNA, 19 nt, West Nile virus
gcuaugguguuaaccaggg

SEQ ID NO: 3327230 - RNA, 13 nt, West Nile virus
acauagguggcug

SEQ ID NO: 3327231 - RNA, 18 nt, West Nile virus
accccaggaggacugggu

SEQ ID NO: 3327232 - RNA, 22 nt, West Nile virus
accccgcguaaaaaagugcacg

SEQ ID NO: 3327233 - RNA, 17 nt, West Nile virus
cgucucggaaggaggac

SEQ ID NO: 3327234 - RNA, 19 nt, West Nile virus
cagccacacggcacagugc

SEQ ID NO: 3327235 - RNA, 14 nt, West Nile virus
cauagguggcuggu

SEQ ID NO: 3327236 - RNA, 17 nt, West Nile virus
uuagccucaaagcccag

SEQ ID NO: 3327237 - RNA, 15 nt, West Nile virus
aaggacuagagguua

SEQ ID NO: 3327238 - RNA, 19 nt, West Nile virus
ccacgugcuuuagccucaa

SEQ ID NO: 3327239 - RNA, 15 nt, West Nile virus
cacguaagcccucag

SEQ ID NO: 3327240 - RNA, 13 nt, West Nile virus
agaccccgugcca

SEQ ID NO: 3327241 - RNA, 14 nt, West Nile virus
guguuaaccaggga

SEQ ID NO: 3327242 - RNA, 13 nt, West Nile virus
ccagguggacugg

SEQ ID NO: 3327243 - RNA, 20 nt, West Nile virus
gccagauuaaugcugccacc

SEQ ID NO: 3327244 - RNA, 20 nt, West Nile virus
cgcguaaaaaagugcacggc

SEQ ID NO: 3327245 - RNA, 20 nt, West Nile virus
ccugcggcucaaccccagga

SEQ ID NO: 3327246 - RNA, 22 nt, West Nile virus
ugcggcucaaccccaggaggac

SEQ ID NO: 3327247 - RNA, 21 nt, West Nile virus
uugagaauggaagucaggcca

SEQ ID NO: 3327248 - RNA, 14 nt, West Nile virus
gugucagaccacac

SEQ ID NO: 3327249 - RNA, 22 nt, West Nile virus
gcggcucaaccccaggaggacu

SEQ ID NO: 3327250 - RNA, 13 nt, West Nile virus
aaccccaggagga

SEQ ID NO: 3327251 - RNA, 23 nt, West Nile virus
cugccugcggcucaaccccagga

SEQ ID NO: 3327252 - RNA, 11 nt, West Nile virus
accaaagcugc

SEQ ID NO: 3327253 - RNA, 17 nt, West Nile virus
uaaccagggagaaggga

SEQ ID NO: 3327254 - RNA, 22 nt, West Nile virus
agugccccagguggacuggguu

SEQ ID NO: 3327255 - RNA, 17 nt, West Nile virus
cauagguggcugguggu

SEQ ID NO: 3327256 - RNA, 15 nt, West Nile virus
cacacggcacagugc

SEQ ID NO: 3327257 - RNA, 22 nt, West Nile virus
gcccaacuuggcugaagcugua

SEQ ID NO: 3327258 - RNA, 15 nt, West Nile virus
uguaagccaagggaa

SEQ ID NO: 3327259 - RNA, 22 nt, West Nile virus
gccauaacccuggcuauggugu

SEQ ID NO: 3327260 - RNA, 23 nt, West Nile virus
acggcccaacuuggcugaagcug

SEQ ID NO: 3327261 - RNA, 15 nt, West Nile virus
cugcgauagugcccc

SEQ ID NO: 3327262 - RNA, 20 nt, West Nile virus
ccccgcguaaaaaagugcac

SEQ ID NO: 3327263 - RNA, 22 nt, West Nile virus
aggacuagagguuagaggagac

SEQ ID NO: 3327264 - RNA, 19 nt, West Nile virus
auuuauugagaauggaagu

SEQ ID NO: 3327265 - RNA, 16 nt, West Nile virus
acacuuuaaugugcca

SEQ ID NO: 3327266 - RNA, 21 nt, West Nile virus
ccagauuaaugcugccaccgg

SEQ ID NO: 3327267 - RNA, 13 nt, West Nile virus
caaccccaggagg

SEQ ID NO: 3327268 - RNA, 19 nt, West Nile virus
gagguuagaggagaccccg

SEQ ID NO: 3327269 - RNA, 14 nt, West Nile virus
cagguggacugggu

SEQ ID NO: 3327270 - RNA, 16 nt, West Nile virus
cgauagugccccaggu

SEQ ID NO: 3327271 - RNA, 21 nt, West Nile virus
cugcacaaccagccacacggc

SEQ ID NO: 3327272 - RNA, 15 nt, West Nile virus
ugaccaaagcugcga

SEQ ID NO: 3327273 - RNA, 22 nt, West Nile virus
gcuguaagccaagggaaggacu

SEQ ID NO: 3327274 - RNA, 15 nt, West Nile virus
ucucggaaggaggac

SEQ ID NO: 3327275 - RNA, 20 nt, West Nile virus
aggccagauuaaugcugcca

SEQ ID NO: 3327276 - RNA, 18 nt, West Nile virus
ccaagggaaggacuagag

SEQ ID NO: 3327277 - RNA, 13 nt, West Nile virus
aagggaaggacua

SEQ ID NO: 3327278 - RNA, 20 nt, West Nile virus
ccacacuuuaaugugccacu

SEQ ID NO: 3327279 - RNA, 20 nt, West Nile virus
ccacgcggccauaacccugg

SEQ ID NO: 3327280 - RNA, 12 nt, West Nile virus
ugcagucugcga

SEQ ID NO: 3327281 - RNA, 18 nt, West Nile virus
acuagagguuagaggaga

SEQ ID NO: 3327282 - RNA, 16 nt, West Nile virus
agagguuagaggagac

SEQ ID NO: 3327283 - RNA, 20 nt, West Nile virus
ccagggagaagggacuagag

SEQ ID NO: 3327284 - RNA, 18 nt, West Nile virus
aggagaccccgugccaaa

SEQ ID NO: 3327285 - RNA, 16 nt, West Nile virus
cacuuuaaugugccac

SEQ ID NO: 3327286 - RNA, 19 nt, West Nile virus
gauccacguaagcccucag

SEQ ID NO: 3327287 - RNA, 16 nt, West Nile virus
agccucaaagcccagu

SEQ ID NO: 3327288 - RNA, 15 nt, West Nile virus
agaagggacuagagg

SEQ ID NO: 3327289 - RNA, 19 nt, West Nile virus
agaggagaccccgcguaaa

SEQ ID NO: 3327290 - RNA, 20 nt, West Nile virus
agucugcgauagugccccag

SEQ ID NO: 3327291 - RNA, 13 nt, West Nile virus
cccagguggacug

SEQ ID NO: 3327292 - RNA, 18 nt, West Nile virus
cgauagugccccaggugg

SEQ ID NO: 3327293 - RNA, 20 nt, West Nile virus
uugaguagacggugcugccu

SEQ ID NO: 3327294 - RNA, 22 nt, West Nile virus
ggacuagagguuagaggagacc

SEQ ID NO: 3327295 - RNA, 16 nt, West Nile virus
gauagugccccaggug

SEQ ID NO: 3327296 - RNA, 19 nt, West Nile virus
cacacuuuaaugugccacu

SEQ ID NO: 3327297 - RNA, 19 nt, West Nile virus
agucugcgauagugcccca

SEQ ID NO: 3327298 - RNA, 16 nt, West Nile virus
cagauuaaugcugcca

SEQ ID NO: 3327299 - RNA, 13 nt, West Nile virus
uagagguuagagg

SEQ ID NO: 3327300 - RNA, 22 nt, West Nile virus
agcuguaagccaagggaaggac

SEQ ID NO: 3327301 - RNA, 13 nt, West Nile virus
acaaccagccaca

SEQ ID NO: 3327302 - RNA, 15 nt, West Nile virus
auuaaugcugccacc

SEQ ID NO: 3327303 - RNA, 17 nt, West Nile virus
acugggugaccaaagcu

SEQ ID NO: 3327304 - RNA, 19 nt, West Nile virus
acuuggcugaagcuguaag

SEQ ID NO: 3327305 - RNA, 17 nt, West Nile virus
cggaaggaggaccccac

SEQ ID NO: 3327306 - RNA, 15 nt, West Nile virus
cugggauagacuagg

SEQ ID NO: 3327307 - RNA, 22 nt, West Nile virus
gugcagucugcgauagugcccc

SEQ ID NO: 3327308 - RNA, 14 nt, West Nile virus
ugcggcucaacccc

SEQ ID NO: 3327309 - RNA, 22 nt, West Nile virus
ucaggccagauuaaugcugcca

SEQ ID NO: 3327310 - RNA, 20 nt, West Nile virus
cacucugcggagagugcagu

SEQ ID NO: 3327311 - RNA, 21 nt, West Nile virus
augugccacucugcggagagu

SEQ ID NO: 3327312 - RNA, 16 nt, West Nile virus
cucaaccccaggagga

SEQ ID NO: 3327313 - RNA, 22 nt, West Nile virus
agucaggccagauuaaugcugc

SEQ ID NO: 3327314 - RNA, 15 nt, West Nile virus
guguuaaccagggag

SEQ ID NO: 3327315 - RNA, 20 nt, West Nile virus
aagggaaggacuagagguua

SEQ ID NO: 3327316 - RNA, 18 nt, West Nile virus
aggccagauuaaugcugc

SEQ ID NO: 3327317 - RNA, 16 nt, West Nile virus
aagggacuagagguua

SEQ ID NO: 3327318 - RNA, 17 nt, West Nile virus
aaccccaggaggacugg

SEQ ID NO: 3327319 - RNA, 14 nt, West Nile virus
agggagaagggacu

SEQ ID NO: 3327320 - RNA, 15 nt, West Nile virus
cagguggacuggguu

SEQ ID NO: 3327321 - RNA, 15 nt, West Nile virus
agugccccaggugga

SEQ ID NO: 3327322 - RNA, 21 nt, West Nile virus
agaaccgucucggaaggagga

SEQ ID NO: 3327323 - RNA, 13 nt, West Nile virus
cuagaacacagga

SEQ ID NO: 3327324 - RNA, 16 nt, West Nile virus
ccacguaagcccucag

SEQ ID NO: 3327325 - RNA, 20 nt, West Nile virus
uggcuaugguguuaaccagg

SEQ ID NO: 3327326 - RNA, 15 nt, West Nile virus
caggaggacugggug

SEQ ID NO: 3327327 - RNA, 19 nt, West Nile virus
ugauccacguaagcccuca

SEQ ID NO: 3327328 - RNA, 15 nt, West Nile virus
cucaaagcccagugu

SEQ ID NO: 3327329 - RNA, 21 nt, West Nile virus
cuagagguuagaggagacccc

SEQ ID NO: 3327330 - RNA, 19 nt, West Nile virus
gcauauugacaccugggau

SEQ ID NO: 3327331 - RNA, 23 nt, West Nile virus
cuuggcugaagcuguaagccaag

SEQ ID NO: 3327332 - RNA, 17 nt, West Nile virus
gccccacgcggccauaa

SEQ ID NO: 3327333 - RNA, 21 nt, West Nile virus
agaccacacuuuaaugugcca

SEQ ID NO: 3327334 - RNA, 20 nt, West Nile virus
aguugaguagacggugcugc

SEQ ID NO: 3327335 - RNA, 15 nt, West Nile virus
agggacuagagguua

SEQ ID NO: 3327336 - RNA, 14 nt, West Nile virus
gcgauagugcccca

SEQ ID NO: 3327337 - RNA, 16 nt, West Nile virus
cuguaagccaagggaa

SEQ ID NO: 3327338 - RNA, 14 nt, West Nile virus
ggcucaaccccagg

SEQ ID NO: 3327339 - RNA, 21 nt, West Nile virus
gugaccaaagcugcgagguga

SEQ ID NO: 3327340 - RNA, 18 nt, West Nile virus
ucugcgauagugccccag

SEQ ID NO: 3327341 - RNA, 15 nt, West Nile virus
cgugcuuuagccuca

SEQ ID NO: 3327342 - RNA, 23 nt, West Nile virus
agaccacacuuuaaugugccacu

SEQ ID NO: 3327343 - RNA, 17 nt, West Nile virus
augcugccaccggaagu

SEQ ID NO: 3327344 - RNA, 16 nt, West Nile virus
ggcccaacuuggcuga

SEQ ID NO: 3327345 - RNA, 16 nt, West Nile virus
ccacacggcacagugc

SEQ ID NO: 3327346 - RNA, 14 nt, West Nile virus
ccacucugcggaga

SEQ ID NO: 3327347 - RNA, 15 nt, West Nile virus
cauauugacaccugg

SEQ ID NO: 3327348 - RNA, 21 nt, West Nile virus
ccagccacacggcacagugcg

SEQ ID NO: 3327349 - RNA, 16 nt, West Nile virus
auagugccccaggugg

SEQ ID NO: 3327350 - RNA, 15 nt, West Nile virus
cucaaccccaggagg

SEQ ID NO: 3327351 - RNA, 16 nt, West Nile virus
ugauccacguaagccc

SEQ ID NO: 3327352 - RNA, 19 nt, West Nile virus
cugcgauagugccccaggu

SEQ ID NO: 3327353 - RNA, 13 nt, West Nile virus
gcugccaccggaa

SEQ ID NO: 3327354 - RNA, 13 nt, West Nile virus
agguggacugggu

SEQ ID NO: 3327355 - RNA, 15 nt, West Nile virus
cggcucaaccccagg

SEQ ID NO: 3327356 - RNA, 18 nt, West Nile virus
cugcgauagugccccagg

SEQ ID NO: 3327357 - RNA, 13 nt, West Nile virus
gucucggaaggag

SEQ ID NO: 3327358 - RNA, 13 nt, West Nile virus
ucgccccacgcgg

SEQ ID NO: 3327359 - RNA, 13 nt, West Nile virus
agagguuagagga

SEQ ID NO: 3327360 - RNA, 18 nt, West Nile virus
cugcggcucaaccccagg

SEQ ID NO: 3327361 - RNA, 21 nt, West Nile virus
ugcggcucaaccccaggagga

SEQ ID NO: 3327362 - RNA, 20 nt, West Nile virus
cggcucaaccccaggaggac

SEQ ID NO: 3327363 - RNA, 18 nt, West Nile virus
guaagccaagggaaggac

SEQ ID NO: 3327364 - RNA, 23 nt, West Nile virus
gaccccgcguaaaaaagugcacg

SEQ ID NO: 3327365 - RNA, 15 nt, West Nile virus
ccuggcuaugguguu

SEQ ID NO: 3327366 - RNA, 17 nt, West Nile virus
ggugcuagaacacagga

SEQ ID NO: 3327367 - RNA, 13 nt, West Nile virus
caaccagccacac

SEQ ID NO: 3327368 - RNA, 14 nt, West Nile virus
caggaggacugggu

SEQ ID NO: 3327369 - RNA, 14 nt, West Nile virus
ugcuagaacacagg

SEQ ID NO: 3327370 - RNA, 15 nt, West Nile virus
auugacaccugggau

SEQ ID NO: 3327371 - RNA, 13 nt, West Nile virus
gcggcucaacccc

SEQ ID NO: 3327372 - RNA, 19 nt, West Nile virus
gccgacauagguggcuggu

SEQ ID NO: 3327373 - RNA, 13 nt, West Nile virus
cucggaaggagga

SEQ ID NO: 3327374 - RNA, 21 nt, West Nile virus
gccagauuaaugcugccaccg

SEQ ID NO: 3327375 - RNA, 21 nt, West Nile virus
gucugcgauagugccccaggu

SEQ ID NO: 3327376 - RNA, 16 nt, West Nile virus
uagagguuagaggaga

SEQ ID NO: 3327377 - RNA, 22 nt, West Nile virus
cagucugcgauagugccccagg

SEQ ID NO: 3327378 - RNA, 18 nt, West Nile virus
agugccccagguggacug

SEQ ID NO: 3327379 - RNA, 20 nt, West Nile virus
ggacuagagguuagaggaga

SEQ ID NO: 3327380 - RNA, 23 nt, West Nile virus
cagucugcgauagugccccaggu

SEQ ID NO: 3327381 - RNA, 14 nt, West Nile virus
gcggccauaacccu

SEQ ID NO: 3327382 - RNA, 19 nt, West Nile virus
cgacauagguggcuggugg

SEQ ID NO: 3327383 - RNA, 19 nt, West Nile virus
uuaaccagggagaagggac

SEQ ID NO: 3327384 - RNA, 15 nt, West Nile virus
ccagugucagaccac

SEQ ID NO: 3327385 - RNA, 13 nt, West Nile virus
accccgugccaaa

SEQ ID NO: 3327386 - RNA, 17 nt, West Nile virus
cacaaccagccacacgg

SEQ ID NO: 3327387 - RNA, 13 nt, West Nile virus
gacggugcugccu

SEQ ID NO: 3327388 - RNA, 22 nt, West Nile virus
cuguaagccaagggaaggacua

SEQ ID NO: 3327389 - RNA, 21 nt, West Nile virus
cacggcccaacuuggcugaag

SEQ ID NO: 3327390 - RNA, 14 nt, West Nile virus
gauuaaugcugcca

SEQ ID NO: 3327391 - RNA, 14 nt, West Nile virus
uaagccaagggaag

SEQ ID NO: 3327392 - RNA, 17 nt, West Nile virus
cacacggcacagugcgc

SEQ ID NO: 3327393 - RNA, 16 nt, West Nile virus
cggcucaaccccagga

SEQ ID NO: 3327394 - RNA, 23 nt, West Nile virus
caaagcccagugucagaccacac

SEQ ID NO: 3327395 - RNA, 19 nt, West Nile virus
cugaagcuguaagccaagg

SEQ ID NO: 3327396 - RNA, 14 nt, West Nile virus
gcuguaagccaagg

SEQ ID NO: 3327397 - RNA, 16 nt, West Nile virus
cugaagcuguaagcca

SEQ ID NO: 3327398 - RNA, 14 nt, West Nile virus
agacggugcugccu

SEQ ID NO: 3327399 - RNA, 13 nt, West Nile virus
ccaggaggacugg

SEQ ID NO: 3327400 - RNA, 22 nt, West Nile virus
gacauagguggcugguggugcu

SEQ ID NO: 3327401 - RNA, 16 nt, West Nile virus
ccucaaagcccagugu

SEQ ID NO: 3327402 - RNA, 18 nt, West Nile virus
cagcauauugacaccugg

SEQ ID NO: 3327403 - RNA, 14 nt, West Nile virus
ucucggaaggagga

SEQ ID NO: 3327404 - RNA, 23 nt, West Nile virus
ggggaucuucugcucugcacaac

SEQ ID NO: 3327405 - RNA, 22 nt, West Nile virus
cucaaagcccagugucagacca

SEQ ID NO: 3327406 - RNA, 23 nt, West Nile virus
uggcuaugguguuaaccagggag

SEQ ID NO: 3327407 - RNA, 11 nt, West Nile virus
cggugcugccu

SEQ ID NO: 3327408 - RNA, 22 nt, West Nile virus
cagcauauugacaccugggaua

SEQ ID NO: 3327409 - RNA, 19 nt, West Nile virus
ccagauuaaugcugccacc

SEQ ID NO: 3327410 - RNA, 19 nt, West Nile virus
cacggcccaacuuggcuga

SEQ ID NO: 3327411 - RNA, 16 nt, West Nile virus
agggaaggacuagagg

SEQ ID NO: 3327412 - RNA, 21 nt, West Nile virus
ugccugcggcucaaccccagg

SEQ ID NO: 3327413 - RNA, 21 nt, West Nile virus
auuaaugcugccaccggaagu

SEQ ID NO: 3327414 - RNA, 23 nt, West Nile virus
agggacuagagguuagaggagac

SEQ ID NO: 3327415 - RNA, 21 nt, West Nile virus
gccugcggcucaaccccagga

SEQ ID NO: 3327416 - RNA, 17 nt, West Nile virus
cuagagguuagaggaga

SEQ ID NO: 3327417 - RNA, 17 nt, West Nile virus
aguguaaauaggauuua

SEQ ID NO: 3327418 - RNA, 12 nt, West Nile virus
cucaaccccagg

SEQ ID NO: 3327419 - RNA, 19 nt, West Nile virus
gagaagggacuagagguua

SEQ ID NO: 3327420 - RNA, 17 nt, West Nile virus
aaccagggagaagggac

SEQ ID NO: 3327421 - RNA, 18 nt, West Nile virus
caagggaaggacuagagg

SEQ ID NO: 3327422 - RNA, 20 nt, West Nile virus
gucugcgauagugccccagg

SEQ ID NO: 3327423 - RNA, 10 nt, West Nile virus
ccgugccaaa

SEQ ID NO: 3327424 - RNA, 15 nt, West Nile virus
ucaaccccaggagga

SEQ ID NO: 3327425 - RNA, 20 nt, West Nile virus
ugcucugcacaaccagccac

SEQ ID NO: 3327426 - RNA, 20 nt, West Nile virus
ggcugguggugcuagaacac

SEQ ID NO: 3327427 - RNA, 14 nt, Human
aaaaacacaaaagu

SEQ ID NO: 3327428 - RNA, 15 nt, Human
aaaaacugauuuuuu

SEQ ID NO: 3327429 - RNA, 14 nt, Human
aaaaacauggccuu

SEQ ID NO: 3327430 - RNA, 13 nt, Human
aaaaacugauuuu

SEQ ID NO: 3327431 - RNA, 12 nt, Human
aaaaagaggcua

SEQ ID NO: 3327432 - RNA, 12 nt, Human
aaaacacauuuu

SEQ ID NO: 3327433 - RNA, 17 nt, Human
aucuugaagacuuuucu

SEQ ID NO: 3327434 - RNA, 14 nt, Human
aucuucuuuauaau

SEQ ID NO: 3327435 - RNA, 17 nt, Human
aucuucuuuauaauucu

SEQ ID NO: 3327436 - RNA, 22 nt, Human
aucucucgugauugauaagaac

SEQ ID NO: 3327437 - RNA, 19 nt, Human
aucuuccaacucaaacucu

SEQ ID NO: 3327438 - RNA, 13 nt, Human
augagccuggcaa

SEQ ID NO: 3327439 - RNA, 14 nt, Human
augagccuggcaag

SEQ ID NO: 3327440 - RNA, 12 nt, Human
augacccagugg

SEQ ID NO: 3327441 - RNA, 12 nt, Human
augacuccagaa

SEQ ID NO: 3327442 - RNA, 16 nt, Human
augacuccagaauuuc

SEQ ID NO: 3327443 - RNA, 17 nt, Human
augacuccagaauuucc

SEQ ID NO: 3327444 - RNA, 12 nt, Human
augagccuggca

SEQ ID NO: 3327445 - RNA, 11 nt, Human
aucagccuggg

SEQ ID NO: 3327446 - RNA, 20 nt, Human
aucagccugggcaaugugau

SEQ ID NO: 3327447 - RNA, 21 nt, Human
aucagccugggcaaugugaua

SEQ ID NO: 3327448 - RNA, 12 nt, Human
aucagcugcuac

SEQ ID NO: 3327449 - RNA, 23 nt, Human
aucagcugcuacuacuccuguag

SEQ ID NO: 3327450 - RNA, 13 nt, Human
aucagcugcuacu

SEQ ID NO: 3327451 - RNA, 20 nt, Human
aucagccugcuccagcuguu

SEQ ID NO: 3327452 - RNA, 19 nt, Human
aucauggagguuugaagau

SEQ ID NO: 3327453 - RNA, 16 nt, Human
auccacccaccucagc

SEQ ID NO: 3327454 - RNA, 20 nt, Human
auccacccaccucagccucc

SEQ ID NO: 3327455 - RNA, 18 nt, Human
auccacccaccucagccu

SEQ ID NO: 3327456 - RNA, 18 nt, Human
auccucauacccaccccc

SEQ ID NO: 3327457 - RNA, 17 nt, Human
auccucauacccacccc

SEQ ID NO: 3327458 - RNA, 19 nt, Human
auccucauacccaccccca

SEQ ID NO: 3327459 - RNA, 22 nt, Human
auccucauacccacccccaccc

SEQ ID NO: 3327460 - RNA, 15 nt, Human
aucccuacuguaauu

SEQ ID NO: 3327461 - RNA, 13 nt, Human
auccuccaggugc

SEQ ID NO: 3327462 - RNA, 14 nt, Human
auccuccaggugca

SEQ ID NO: 3327463 - RNA, 19 nt, Human
auccuccaggugcacaagc

SEQ ID NO: 3327464 - RNA, 22 nt, Human
auccuccaggugcacaagcucc

SEQ ID NO: 3327465 - RNA, 11 nt, Human
auccuccucag

SEQ ID NO: 3327466 - RNA, 13 nt, Human
aucgaugcagugc

SEQ ID NO: 3327467 - RNA, 21 nt, Human
augccuggauggggcugcacc

SEQ ID NO: 3327468 - RNA, 23 nt, Human
augccuggauggggcugcaccgg

SEQ ID NO: 3327469 - RNA, 14 nt, Human
augccugguggcag

SEQ ID NO: 3327470 - RNA, 17 nt, Human
augccugggcagaagga

SEQ ID NO: 3327471 - RNA, 17 nt, Human
augccugguggcagcug

SEQ ID NO: 3327472 - RNA, 16 nt, Human
augccugguggcagcu

SEQ ID NO: 3327473 - RNA, 15 nt, Human
augccugguggcagc

SEQ ID NO: 3327474 - RNA, 18 nt, Human
augcauuugaaaauuuug

SEQ ID NO: 3327475 - RNA, 10 nt, Human
augcauuuga

SEQ ID NO: 3327476 - RNA, 12 nt, Human
augcauuugaaa

SEQ ID NO: 3327477 - RNA, 20 nt, Human
augcaugaaguaauaugcac

SEQ ID NO: 3327478 - RNA, 23 nt, Human
augcaugaaguaauaugcacaca

SEQ ID NO: 3327479 - RNA, 17 nt, Human
augcacacauuuuuuaa

SEQ ID NO: 3327480 - RNA, 19 nt, Human
augcacacauuuuuuaaau

SEQ ID NO: 3327481 - RNA, 22 nt, Human
augcacacauuuuuuaaaugca

SEQ ID NO: 3327482 - RNA, 23 nt, Human
augcacagaguuguuacauuuuu

SEQ ID NO: 3327483 - RNA, 14 nt, Human
augcacagcuaaca

SEQ ID NO: 3327484 - RNA, 21 nt, Human
augcacagcuaacauggaagu

SEQ ID NO: 3327485 - RNA, 15 nt, Human
augcacacauuuuuu

SEQ ID NO: 3327486 - RNA, 23 nt, Human
auggcugccaaugggagcucaug

SEQ ID NO: 3327487 - RNA, 15 nt, Human
augggaaugaauguc

SEQ ID NO: 3327488 - RNA, 22 nt, Human
augcuucuucagagacuccugc

SEQ ID NO: 3327489 - RNA, 19 nt, Human
auggaaaugggcagagcag

SEQ ID NO: 3327490 - RNA, 20 nt, Human
auggaaaugggcagagcaga

SEQ ID NO: 3327491 - RNA, 16 nt, Human
augucacaggcagguc

SEQ ID NO: 3327492 - RNA, 14 nt, Human
augucacaggcagg

SEQ ID NO: 3327493 - RNA, 15 nt, Human
augucacaggcaggu

SEQ ID NO: 3327494 - RNA, 15 nt, Human
auggucggaaaacau

SEQ ID NO: 3327495 - RNA, 17 nt, Human
auguaagcucuacugag

SEQ ID NO: 3327496 - RNA, 14 nt, Human
auguucuuaauucu

SEQ ID NO: 3327497 - RNA, 22 nt, Human
auguucugacccugcuucaaau

SEQ ID NO: 3327498 - RNA, 15 nt, Human
auguucuuaauucuu

SEQ ID NO: 3327499 - RNA, 20 nt, Human
auguucuuaguggauguucu

SEQ ID NO: 3327500 - RNA, 17 nt, Human
auguucucugaggacac

SEQ ID NO: 3327501 - RNA, 18 nt, Human
auguucucugaggacacu

SEQ ID NO: 3327502 - RNA, 18 nt, Human
auguuuuaagaggcaggg

SEQ ID NO: 3327503 - RNA, 16 nt, Human
auguuuuaagaggcag

SEQ ID NO: 3327504 - RNA, 14 nt, Human
auuaaaugcccagc

SEQ ID NO: 3327505 - RNA, 15 nt, Human
auuaaaugcccagcc

SEQ ID NO: 3327506 - RNA, 13 nt, Human
auuaaauucuugc

SEQ ID NO: 3327507 - RNA, 16 nt, Human
auuaaaugcccagccc

SEQ ID NO: 3327508 - RNA, 11 nt, Human
auuaaauuaug

SEQ ID NO: 3327509 - RNA, 14 nt, Human
auguguaaguauuc

SEQ ID NO: 3327510 - RNA, 20 nt, Human
augugggcuaguugggcuuc

SEQ ID NO: 3327511 - RNA, 20 nt, Human
agucaagugaaaaaggagga

SEQ ID NO: 3327512 - RNA, 16 nt, Human
agucaagugaaaaagg

SEQ ID NO: 3327513 - RNA, 13 nt, Human
aguuguuacauuu

SEQ ID NO: 3327514 - RNA, 15 nt, Human
aguuguuacauuuuu

SEQ ID NO: 3327515 - RNA, 16 nt, Human
aguuguuacauuuuua

SEQ ID NO: 3327516 - RNA, 17 nt, Human
aguuacagacaaagcgu

SEQ ID NO: 3327517 - RNA, 18 nt, Human
aguuacagacaaagcgug

SEQ ID NO: 3327518 - RNA, 23 nt, Human
agugugacaaggauugcuacugu

SEQ ID NO: 3327519 - RNA, 18 nt, Human
auaaugugaaacuggauu

SEQ ID NO: 3327520 - RNA, 19 nt, Human
auaaugugaaacuggauua

SEQ ID NO: 3327521 - RNA, 21 nt, Human
auaaugugaaacuggauuaaa

SEQ ID NO: 3327522 - RNA, 12 nt, Human
auaccugucccc

SEQ ID NO: 3327523 - RNA, 15 nt, Human
auaguaugguggcug

SEQ ID NO: 3327524 - RNA, 16 nt, Human
auauacgaacaaaaca

SEQ ID NO: 3327525 - RNA, 14 nt, Human
auauucaggaagcu

SEQ ID NO: 3327526 - RNA, 16 nt, Human
auauucaggaagcuca

SEQ ID NO: 3327527 - RNA, 13 nt, Human
auauucaggaagc

SEQ ID NO: 3327528 - RNA, 16 nt, Human
auaugcuuauacacuu

SEQ ID NO: 3327529 - RNA, 14 nt, Human
auaugcuuauacac

SEQ ID NO: 3327530 - RNA, 19 nt, Human
auaugcuuauacacuuaca

SEQ ID NO: 3327531 - RNA, 22 nt, Human
auaugccugggcagaaggaaga

SEQ ID NO: 3327532 - RNA, 17 nt, Human
agguaaggaauaccugu

SEQ ID NO: 3327533 - RNA, 13 nt, Human
agguucagcuugu

SEQ ID NO: 3327534 - RNA, 15 nt, Human
agguuaauaaaguaa

SEQ ID NO: 3327535 - RNA, 15 nt, Human
agguucaaagauauu

SEQ ID NO: 3327536 - RNA, 17 nt, Human
agguucaaagauauuuu

SEQ ID NO: 3327537 - RNA, 14 nt, Human
agguuaauguucau

SEQ ID NO: 3327538 - RNA, 14 nt, Human
aggucgaggcagga

SEQ ID NO: 3327539 - RNA, 16 nt, Human
aggugcugccauccag

SEQ ID NO: 3327540 - RNA, 17 nt, Human
aggugcugccauccagg

SEQ ID NO: 3327541 - RNA, 15 nt, Human
aggggcacagggucu

SEQ ID NO: 3327542 - RNA, 21 nt, Human
aggggauagagagagaccacu

SEQ ID NO: 3327543 - RNA, 16 nt, Human
aggggauagagagaga

SEQ ID NO: 3327544 - RNA, 19 nt, Human
agggcgggaggauguucug

SEQ ID NO: 3327545 - RNA, 14 nt, Human
agggccuggccuga

SEQ ID NO: 3327546 - RNA, 15 nt, Human
agggccuggccugag

SEQ ID NO: 3327547 - RNA, 16 nt, Human
agggccuggccugagc

SEQ ID NO: 3327548 - RNA, 17 nt, Human
agggccuggccugagcu

SEQ ID NO: 3327549 - RNA, 22 nt, Human
agggcacagaaaauggaagaca

SEQ ID NO: 3327550 - RNA, 21 nt, Human
agggcacaccgggcacucaga

SEQ ID NO: 3327551 - RNA, 20 nt, Human
agggcacaccgggcacucag

SEQ ID NO: 3327552 - RNA, 17 nt, Human
agggcacaccgggcacu

SEQ ID NO: 3327553 - RNA, 18 nt, Human
aggcugccucucccauca

SEQ ID NO: 3327554 - RNA, 12 nt, Human
agggacagaggg

SEQ ID NO: 3327555 - RNA, 13 nt, Human
agggacagagggg

SEQ ID NO: 3327556 - RNA, 21 nt, Human
agggacgcuacccgggaaggg

SEQ ID NO: 3327557 - RNA, 17 nt, Human
agggacgcuacccggga

SEQ ID NO: 3327558 - RNA, 23 nt, Human
aggcuagugugguguuuccuggc

SEQ ID NO: 3327559 - RNA, 19 nt, Human
agcuggucccacucagucc

SEQ ID NO: 3327560 - RNA, 21 nt, Human
agcuggucccacucaguccau

SEQ ID NO: 3327561 - RNA, 22 nt, Human
agcugggugucaagagggucug

SEQ ID NO: 3327562 - RNA, 17 nt, Human
agcugggugucaagagg

SEQ ID NO: 3327563 - RNA, 13 nt, Human
aggaaaaacugau

SEQ ID NO: 3327564 - RNA, 15 nt, Human
aggaaaaacugauuu

SEQ ID NO: 3327565 - RNA, 18 nt, Human
aggagaggggcacagggu

SEQ ID NO: 3327566 - RNA, 14 nt, Human
aggagaggggcaca

SEQ ID NO: 3327567 - RNA, 16 nt, Human
aggagaggggcacagg

SEQ ID NO: 3327568 - RNA, 15 nt, Human
aggagagcuagcagc

SEQ ID NO: 3327569 - RNA, 14 nt, Human
aggaccucagguga

SEQ ID NO: 3327570 - RNA, 20 nt, Human
aggaccucaggugagaagca

SEQ ID NO: 3327571 - RNA, 20 nt, Human
aggaccccuccaugugggcu

SEQ ID NO: 3327572 - RNA, 12 nt, Human
aggauucuuccu

SEQ ID NO: 3327573 - RNA, 17 nt, Human
aggaggggauagagaga

SEQ ID NO: 3327574 - RNA, 18 nt, Human
aggauguucugggacaca

SEQ ID NO: 3327575 - RNA, 20 nt, Human
aggauguucugggacacagu

SEQ ID NO: 3327576 - RNA, 15 nt, Human
agauagccaaggcca

SEQ ID NO: 3327577 - RNA, 16 nt, Human
agauagccaaggccaa

SEQ ID NO: 3327578 - RNA, 22 nt, Human
agaggggaacagacuggaagca

SEQ ID NO: 3327579 - RNA, 16 nt, Human
agaggggaagagacuu

SEQ ID NO: 3327580 - RNA, 13 nt, Human
agaggagaggggc

SEQ ID NO: 3327581 - RNA, 22 nt, Human
agauacuuggggggcugaggug

SEQ ID NO: 3327582 - RNA, 16 nt, Human
agauacuguaucauga

SEQ ID NO: 3327583 - RNA, 13 nt, Human
agauagccaaggc

SEQ ID NO: 3327584 - RNA, 23 nt, Human
agaggguggugaccucugccuga

SEQ ID NO: 3327585 - RNA, 23 nt, Human
agacugaguacguugugcauuug

SEQ ID NO: 3327586 - RNA, 23 nt, Human
agagaggguggugaccucugccu

SEQ ID NO: 3327587 - RNA, 10 nt, Human
agagaagaga

SEQ ID NO: 3327588 - RNA, 21 nt, Human
agagaagagauugugguuuca

SEQ ID NO: 3327589 - RNA, 14 nt, Human
agacaauuuauuau

SEQ ID NO: 3327590 - RNA, 15 nt, Human
agacaauuuauuaug

SEQ ID NO: 3327591 - RNA, 21 nt, Human
agacaauuuauuauggcacau

SEQ ID NO: 3327592 - RNA, 13 nt, Human
agacaaugacuua

SEQ ID NO: 3327593 - RNA, 17 nt, Human
agacaaugacuuacugu

SEQ ID NO: 3327594 - RNA, 13 nt, Human
agaccaucccuga

SEQ ID NO: 3327595 - RNA, 14 nt, Human
agaccaucccugaa

SEQ ID NO: 3327596 - RNA, 17 nt, Human
agaccaucccugaaggc

SEQ ID NO: 3327597 - RNA, 18 nt, Human
agaccaucccugaaggcc

SEQ ID NO: 3327598 - RNA, 18 nt, Human
agacagcccgggcucugc

SEQ ID NO: 3327599 - RNA, 20 nt, Human
agacagcccgggcucugccu

SEQ ID NO: 3327600 - RNA, 17 nt, Human
agacagcccgggcucug

SEQ ID NO: 3327601 - RNA, 16 nt, Human
agacagcccgggcucu

SEQ ID NO: 3327602 - RNA, 18 nt, Human
agacggagucccaccuug

SEQ ID NO: 3327603 - RNA, 19 nt, Human
agacggagucccaccuugg

SEQ ID NO: 3327604 - RNA, 12 nt, Human
agcaugccugga

SEQ ID NO: 3327605 - RNA, 20 nt, Human
agccaaagcuaggccuggcc

SEQ ID NO: 3327606 - RNA, 19 nt, Human
agccaaagcuaggccuggc

SEQ ID NO: 3327607 - RNA, 18 nt, Human
agccaaagcuaggccugg

SEQ ID NO: 3327608 - RNA, 23 nt, Human
agccaaggccaaaggaagcacau

SEQ ID NO: 3327609 - RNA, 22 nt, Human
agccaaggccaaaggaagcaca

SEQ ID NO: 3327610 - RNA, 20 nt, Human
agccaaggccaaaggaagca

SEQ ID NO: 3327611 - RNA, 18 nt, Human
agccagaggagagaggac

SEQ ID NO: 3327612 - RNA, 20 nt, Human
agccagaggagagaggaccc

SEQ ID NO: 3327613 - RNA, 22 nt, Human
agccagauuucacucuccuugg

SEQ ID NO: 3327614 - RNA, 19 nt, Human
agcacuaaggugugcucug

SEQ ID NO: 3327615 - RNA, 21 nt, Human
agcagccacauuccugaugcu

SEQ ID NO: 3327616 - RNA, 15 nt, Human
agcagccacauuccu

SEQ ID NO: 3327617 - RNA, 20 nt, Human
agccgagaucacgccacugc

SEQ ID NO: 3327618 - RNA, 19 nt, Human
agccgagaucacgccacug

SEQ ID NO: 3327619 - RNA, 15 nt, Human
agcccugagcuuucu

SEQ ID NO: 3327620 - RNA, 20 nt, Human
agccccaucccaaacccuuc

SEQ ID NO: 3327621 - RNA, 16 nt, Human
agccccagugcccaca

SEQ ID NO: 3327622 - RNA, 22 nt, Human
agccucccgaauagcugggacu

SEQ ID NO: 3327623 - RNA, 20 nt, Human
agccucccgaauagcuggga

SEQ ID NO: 3327624 - RNA, 19 nt, Human
agccucccgaauagcuggg

SEQ ID NO: 3327625 - RNA, 18 nt, Human
agccucccgaauagcugg

SEQ ID NO: 3327626 - RNA, 17 nt, Human
agccucccaaagugcug

SEQ ID NO: 3327627 - RNA, 22 nt, Human
agccucccgaguagcugggacu

SEQ ID NO: 3327628 - RNA, 14 nt, Human
agccgcuggggcca

SEQ ID NO: 3327629 - RNA, 22 nt, Human
agccgcuggggccaguuggucc

SEQ ID NO: 3327630 - RNA, 13 nt, Human
agccgcuggggcc

SEQ ID NO: 3327631 - RNA, 18 nt, Human
agccgagaucacgccacu

SEQ ID NO: 3327632 - RNA, 20 nt, Human
agccgagauugcaccacugc

SEQ ID NO: 3327633 - RNA, 19 nt, Human
agccgagauugcaccacug

SEQ ID NO: 3327634 - RNA, 21 nt, Human
agccgagaucacgccacugca

SEQ ID NO: 3327635 - RNA, 19 nt, Human
agccucccaaagugcuggg

SEQ ID NO: 3327636 - RNA, 18 nt, Human
agccucccaaagugcugg

SEQ ID NO: 3327637 - RNA, 14 nt, Human
accaucaugucugg

SEQ ID NO: 3327638 - RNA, 18 nt, Human
accaucccugaaggcccc

SEQ ID NO: 3327639 - RNA, 16 nt, Human
accaucccugaaggcc

SEQ ID NO: 3327640 - RNA, 17 nt, Human
accaucaugucuggcua

SEQ ID NO: 3327641 - RNA, 16 nt, Human
accaucaugucuggcu

SEQ ID NO: 3327642 - RNA, 21 nt, Human
accaucccugaaggccccgcc

SEQ ID NO: 3327643 - RNA, 22 nt, Human
accaucccugaaggccccgccc

SEQ ID NO: 3327644 - RNA, 17 nt, Human
acccaugcugcccugug

SEQ ID NO: 3327645 - RNA, 18 nt, Human
acccaugcugcccuguga

SEQ ID NO: 3327646 - RNA, 19 nt, Human
acccaugcugcccugugag

SEQ ID NO: 3327647 - RNA, 16 nt, Human
acccaugcugcccugu

SEQ ID NO: 3327648 - RNA, 13 nt, Human
acccaagggccug

SEQ ID NO: 3327649 - RNA, 16 nt, Human
acccaagggccuggcc

SEQ ID NO: 3327650 - RNA, 23 nt, Human
acccaagggccuggccugagcug

SEQ ID NO: 3327651 - RNA, 15 nt, Human
accccggccaccugc

SEQ ID NO: 3327652 - RNA, 15 nt, Human
accacguuucuaaag

SEQ ID NO: 3327653 - RNA, 19 nt, Human
accacguuucuaaaggcua

SEQ ID NO: 3327654 - RNA, 14 nt, Human
accacuacauucug

SEQ ID NO: 3327655 - RNA, 13 nt, Human
accagcagccugg

SEQ ID NO: 3327656 - RNA, 14 nt, Human
accagcagccugga

SEQ ID NO: 3327657 - RNA, 17 nt, Human
accagcagccuggaccc

SEQ ID NO: 3327658 - RNA, 21 nt, Human
accaacgucugugccauuuug

SEQ ID NO: 3327659 - RNA, 20 nt, Human
acaucagcacgauuucuguu

SEQ ID NO: 3327660 - RNA, 21 nt, Human
acaucagcacgauuucuguuu

SEQ ID NO: 3327661 - RNA, 22 nt, Human
acaucagcacgauuucuguuua

SEQ ID NO: 3327662 - RNA, 19 nt, Human
acaucagcacgauuucugu

SEQ ID NO: 3327663 - RNA, 23 nt, Human
acauaaacaagaccacguuucua

SEQ ID NO: 3327664 - RNA, 19 nt, Human
acauguuuuucuucucccu

SEQ ID NO: 3327665 - RNA, 19 nt, Human
acaugcaaggucauuuuuu

SEQ ID NO: 3327666 - RNA, 18 nt, Human
acaugcaaggucauuuuu

SEQ ID NO: 3327667 - RNA, 20 nt, Human
acaugcacagcuaacaugga

SEQ ID NO: 3327668 - RNA, 21 nt, Human
acauguuuuucuucucccuca

SEQ ID NO: 3327669 - RNA, 18 nt, Human
acacaaacgggcucagca

SEQ ID NO: 3327670 - RNA, 15 nt, Human
acaauuuauuauggc

SEQ ID NO: 3327671 - RNA, 16 nt, Human
acaauuuauuauggca

SEQ ID NO: 3327672 - RNA, 14 nt, Human
acaauuuauuaugg

SEQ ID NO: 3327673 - RNA, 21 nt, Human
acaccacuacauucuguuaau

SEQ ID NO: 3327674 - RNA, 12 nt, Human
acaccagagccc

SEQ ID NO: 3327675 - RNA, 12 nt, Human
acacagcucugu

SEQ ID NO: 3327676 - RNA, 11 nt, Human
acacagcucug

SEQ ID NO: 3327677 - RNA, 14 nt, Human
acacuaaccacgcu

SEQ ID NO: 3327678 - RNA, 15 nt, Human
acacggacacucaaa

SEQ ID NO: 3327679 - RNA, 15 nt, Human
acaaacgggcucagc

SEQ ID NO: 3327680 - RNA, 21 nt, Human
acaaaccuguuucugcagcca

SEQ ID NO: 3327681 - RNA, 13 nt, Human
acaaagacugagu

SEQ ID NO: 3327682 - RNA, 15 nt, Human
acagccaugauucuu

SEQ ID NO: 3327683 - RNA, 19 nt, Human
acagccacggccaggccag

SEQ ID NO: 3327684 - RNA, 19 nt, Human
acagagucucacuguugcc

SEQ ID NO: 3327685 - RNA, 17 nt, Human
acagagucucacuguug

SEQ ID NO: 3327686 - RNA, 14 nt, Human
acagagucucacug

SEQ ID NO: 3327687 - RNA, 12 nt, Human
acagagucucac

SEQ ID NO: 3327688 - RNA, 22 nt, Human
acagaggggguggccucccaac

SEQ ID NO: 3327689 - RNA, 21 nt, Human
acagaggggguggccucccaa

SEQ ID NO: 3327690 - RNA, 16 nt, Human
acaggcaagcaccucc

SEQ ID NO: 3327691 - RNA, 15 nt, Human
acaggcaagcaccuc

SEQ ID NO: 3327692 - RNA, 18 nt, Human
acaggcaagcaccuccug

SEQ ID NO: 3327693 - RNA, 23 nt, Human
acaggugugaaccaccacaccca

SEQ ID NO: 3327694 - RNA, 20 nt, Human
acaggugugaaccaccacac

SEQ ID NO: 3327695 - RNA, 19 nt, Human
acaggugugaaccaccaca

SEQ ID NO: 3327696 - RNA, 14 nt, Human
acagcuccuucugu

SEQ ID NO: 3327697 - RNA, 13 nt, Human
acagcuccuucug

SEQ ID NO: 3327698 - RNA, 12 nt, Human
acagcuccuucu

SEQ ID NO: 3327699 - RNA, 14 nt, Human
acagcugccuggga

SEQ ID NO: 3327700 - RNA, 13 nt, Human
acagcugccuggg

SEQ ID NO: 3327701 - RNA, 23 nt, Human
acagcugccugggaucccucauc

SEQ ID NO: 3327702 - RNA, 23 nt, Human
acagcuccuucuguccuacucug

SEQ ID NO: 3327703 - RNA, 12 nt, Human
accuuggcugca

SEQ ID NO: 3327704 - RNA, 14 nt, Human
accuuggcucaagu

SEQ ID NO: 3327705 - RNA, 12 nt, Human
accuuggcucaa

SEQ ID NO: 3327706 - RNA, 16 nt, Human
accuuucaauaggaaa

SEQ ID NO: 3327707 - RNA, 17 nt, Human
accuuucaauaggaaaa

SEQ ID NO: 3327708 - RNA, 21 nt, Human
accuuucaauaggaaaaacug

SEQ ID NO: 3327709 - RNA, 23 nt, Human
accuuucaauaggaaaaacugau

SEQ ID NO: 3327710 - RNA, 16 nt, Human
accucugcacaagcug

SEQ ID NO: 3327711 - RNA, 18 nt, Human
accucugcacaagcugca

SEQ ID NO: 3327712 - RNA, 21 nt, Human
accucugcacaagcugcaccc

SEQ ID NO: 3327713 - RNA, 12 nt, Human
accucugcacaa

SEQ ID NO: 3327714 - RNA, 23 nt, Human
accugccccucaacucuccucca

SEQ ID NO: 3327715 - RNA, 20 nt, Human
accugccccucaacucuccu

SEQ ID NO: 3327716 - RNA, 14 nt, Human
acgauuucuguuua

SEQ ID NO: 3327717 - RNA, 17 nt, Human
acgauuucuguuuagau

SEQ ID NO: 3327718 - RNA, 18 nt, Human
acgccacugcacuauagc

SEQ ID NO: 3327719 - RNA, 12 nt, Human
acgauuucuguu

SEQ ID NO: 3327720 - RNA, 13 nt, Human
acgauuucuguuu

SEQ ID NO: 3327721 - RNA, 15 nt, Human
acuaaguuuuuaugg

SEQ ID NO: 3327722 - RNA, 22 nt, Human
acuaaguuuuuauggcuuuugu

SEQ ID NO: 3327723 - RNA, 13 nt, Human
acguggcugcuuc

SEQ ID NO: 3327724 - RNA, 14 nt, Human
acguggcugcuuca

SEQ ID NO: 3327725 - RNA, 15 nt, Human
acguggcugcuucaa

SEQ ID NO: 3327726 - RNA, 11 nt, Human
acguggcugcu

SEQ ID NO: 3327727 - RNA, 18 nt, Human
acgcugugcugcccugcc

SEQ ID NO: 3327728 - RNA, 16 nt, Human
acgcugugcugcccug

SEQ ID NO: 3327729 - RNA, 17 nt, Human
acgcugugcugcccugc

SEQ ID NO: 3327730 - RNA, 15 nt, Human
acgcugugcugcccu

SEQ ID NO: 3327731 - RNA, 17 nt, Human
acucaaacucuuaaaac

SEQ ID NO: 3327732 - RNA, 16 nt, Human
acucaaacucuuaaaa

SEQ ID NO: 3327733 - RNA, 18 nt, Human
acucaaaagcugggcagg

SEQ ID NO: 3327734 - RNA, 13 nt, Human
acuccccugcugg

SEQ ID NO: 3327735 - RNA, 17 nt, Human
acuccccugcugggugu

SEQ ID NO: 3327736 - RNA, 14 nt, Human
acucccccaggugg

SEQ ID NO: 3327737 - RNA, 21 nt, Human
acucuacccucuuagaaaaac

SEQ ID NO: 3327738 - RNA, 13 nt, Human
acucuacccucuu

SEQ ID NO: 3327739 - RNA, 18 nt, Human
acucuacccucuuagaaa

SEQ ID NO: 3327740 - RNA, 16 nt, Human
acucugugucaggugg

SEQ ID NO: 3327741 - RNA, 11 nt, Human
acucuuaaaac

SEQ ID NO: 3327742 - RNA, 18 nt, Human
acucuuaaaacccaagug

SEQ ID NO: 3327743 - RNA, 16 nt, Human
acucuaucaaguauua

SEQ ID NO: 3327744 - RNA, 20 nt, Human
acucuggcagcucagagagg

SEQ ID NO: 3327745 - RNA, 14 nt, Human
acucuaucaaguau

SEQ ID NO: 3327746 - RNA, 18 nt, Human
agaaauaaaguuucuguu

SEQ ID NO: 3327747 - RNA, 15 nt, Human
agaaauaaaguuucu

SEQ ID NO: 3327748 - RNA, 23 nt, Human
agaaaggaggggauagagagaga

SEQ ID NO: 3327749 - RNA, 20 nt, Human
agaaaggaggggauagagag

SEQ ID NO: 3327750 - RNA, 23 nt, Human
acuuuccuucauucaacccaccu

SEQ ID NO: 3327751 - RNA, 21 nt, Human
acuuuccucuuuggucuacac

SEQ ID NO: 3327752 - RNA, 20 nt, Human
acuuuguucuggcucuucca

SEQ ID NO: 3327753 - RNA, 23 nt, Human
acuuuguucuggcucuuccaggc

SEQ ID NO: 3327754 - RNA, 15 nt, Human
acuuuuauaaacuuu

SEQ ID NO: 3327755 - RNA, 19 nt, Human
acuuuuauaaacuuuaccu

SEQ ID NO: 3327756 - RNA, 22 nt, Human
acuuuuauaaacuuuaccuuuu

SEQ ID NO: 3327757 - RNA, 23 nt, Human
agaaaauggaagacagcucuuau

SEQ ID NO: 3327758 - RNA, 15 nt, Human
agaaaauggacgugu

SEQ ID NO: 3327759 - RNA, 20 nt, Human
agaaaauggacguguuauga

SEQ ID NO: 3327760 - RNA, 22 nt, Human
agaaaauggacguguuaugacu

SEQ ID NO: 3327761 - RNA, 23 nt, Human
agaaaauggacguguuaugacuc

SEQ ID NO: 3327762 - RNA, 13 nt, Human
agaaacaaacuuu

SEQ ID NO: 3327763 - RNA, 12 nt, Human
agaaacaaacuu

SEQ ID NO: 3327764 - RNA, 22 nt, Human
agaaacaaacuuuucaaggcuu

SEQ ID NO: 3327765 - RNA, 19 nt, Human
acuucacauauugauuucc

SEQ ID NO: 3327766 - RNA, 18 nt, Human
acuucugccauauucugu

SEQ ID NO: 3327767 - RNA, 12 nt, Human
acugucuucagu

SEQ ID NO: 3327768 - RNA, 15 nt, Human
acuggaagcacagcu

SEQ ID NO: 3327769 - RNA, 14 nt, Human
acuggaagcacagc

SEQ ID NO: 3327770 - RNA, 23 nt, Human
acuggguacuuguggacacagcu

SEQ ID NO: 3327771 - RNA, 19 nt, Human
aaacacuguucucugcccu

SEQ ID NO: 3327772 - RNA, 22 nt, Human
aaacacuguucucugcccucca

SEQ ID NO: 3327773 - RNA, 16 nt, Human
aaacacuguucucugc

SEQ ID NO: 3327774 - RNA, 18 nt, Human
aaacacuguucucugccc

SEQ ID NO: 3327775 - RNA, 13 nt, Human
aaaauucagugga

SEQ ID NO: 3327776 - RNA, 13 nt, Human
aaaacacauuuuu

SEQ ID NO: 3327777 - RNA, 22 nt, Human
aaaacacacgcgcgcacacaca

SEQ ID NO: 3327778 - RNA, 11 nt, Human
aaagagguuuu

SEQ ID NO: 3327779 - RNA, 11 nt, Human
aaagugcuggg

SEQ ID NO: 3327780 - RNA, 21 nt, Human
aaauggacguguuaugacucc

SEQ ID NO: 3327781 - RNA, 22 nt, Human
aaauggacguguuaugacucca

SEQ ID NO: 3327782 - RNA, 20 nt, Human
aaauggacguguuaugacuc

SEQ ID NO: 3327783 - RNA, 16 nt, Human
aaauggaaaugggcag

SEQ ID NO: 3327784 - RNA, 18 nt, Human
aaauggaagacagcucuu

SEQ ID NO: 3327785 - RNA, 17 nt, Human
aacugauuuuuuuuucc

SEQ ID NO: 3327786 - RNA, 19 nt, Human
aacugauuuuuuuuuccuu

SEQ ID NO: 3327787 - RNA, 17 nt, Human
aacuuaaauaaugugaa

SEQ ID NO: 3327788 - RNA, 12 nt, Human
aacucaccccag

SEQ ID NO: 3327789 - RNA, 15 nt, Human
aacucaccugccccu

SEQ ID NO: 3327790 - RNA, 16 nt, Human
aacucaccugccccuc

SEQ ID NO: 3327791 - RNA, 16 nt, Human
aacuuuuauaaacuuu

SEQ ID NO: 3327792 - RNA, 19 nt, Human
aacuuuuauaaacuuuacc

SEQ ID NO: 3327793 - RNA, 20 nt, Human
aacuuuucaaggcuuauauu

SEQ ID NO: 3327794 - RNA, 14 nt, Human
aacuuugaccucug

SEQ ID NO: 3327795 - RNA, 17 nt, Human
aacuuugaccucugcag

SEQ ID NO: 3327796 - RNA, 13 nt, Human
aacuuugaccucu

SEQ ID NO: 3327797 - RNA, 12 nt, Human
aacuuuuauaaa

SEQ ID NO: 3327798 - RNA, 15 nt, Human
aacuuuuauaaacuu

SEQ ID NO: 3327799 - RNA, 19 nt, Human
aacuuugaccucugcagca

SEQ ID NO: 3327800 - RNA, 20 nt, Human
aacuuugaccucugcagcaa

SEQ ID NO: 3327801 - RNA, 14 nt, Human
aacaucaacaucuu

SEQ ID NO: 3327802 - RNA, 22 nt, Human
aaccacucuaucaaguauuaua

SEQ ID NO: 3327803 - RNA, 21 nt, Human
aacauguaauuaaguacuaug

SEQ ID NO: 3327804 - RNA, 14 nt, Human
aacauguaauuaag

SEQ ID NO: 3327805 - RNA, 14 nt, Human
aacccuggugacca

SEQ ID NO: 3327806 - RNA, 19 nt, Human
aacacauuuuucuuaggga

SEQ ID NO: 3327807 - RNA, 19 nt, Human
aacaccucugcacaagcug

SEQ ID NO: 3327808 - RNA, 22 nt, Human
aacaaacuuuucaaggcuuaua

SEQ ID NO: 3327809 - RNA, 20 nt, Human
aauauaggaacuuaaauaau

SEQ ID NO: 3327810 - RNA, 21 nt, Human
aauauaggaacuuaaauaaug

SEQ ID NO: 3327811 - RNA, 16 nt, Human
aauauaggaacuuaaa

SEQ ID NO: 3327812 - RNA, 18 nt, Human
aauauaggaacuuaaaua

SEQ ID NO: 3327813 - RNA, 23 nt, Human
aaugaaccacaucuugcucugcu

SEQ ID NO: 3327814 - RNA, 17 nt, Human
aaugaaccacaucuugc

SEQ ID NO: 3327815 - RNA, 16 nt, Human
aaugaaccacaucuug

SEQ ID NO: 3327816 - RNA, 22 nt, Human
aaucugcuuuuuaaagaaugcu

SEQ ID NO: 3327817 - RNA, 21 nt, Human
aaugaugauccuaggcauuug

SEQ ID NO: 3327818 - RNA, 14 nt, Human
aaucuccaaaauaa

SEQ ID NO: 3327819 - RNA, 13 nt, Human
aaucuccaaaaua

SEQ ID NO: 3327820 - RNA, 18 nt, Human
aauuaguggcacuugcuu

SEQ ID NO: 3327821 - RNA, 18 nt, Human
aauguuugccucugccuc

SEQ ID NO: 3327822 - RNA, 16 nt, Human
aauguuugccucugcc

SEQ ID NO: 3327823 - RNA, 19 nt, Human
aauguuugccucugccucu

SEQ ID NO: 3327824 - RNA, 18 nt, Human
aauuaaaacacaacaucu

SEQ ID NO: 3327825 - RNA, 15 nt, Human
aaugggcagagcaga

SEQ ID NO: 3327826 - RNA, 13 nt, Human
aaugggcagagca

SEQ ID NO: 3327827 - RNA, 20 nt, Human
aaugucucuuuaaugucaca

SEQ ID NO: 3327828 - RNA, 17 nt, Human
aaugucagugugacuga

SEQ ID NO: 3327829 - RNA, 21 nt, Human
aaugucagugugacugaucuc

SEQ ID NO: 3327830 - RNA, 22 nt, Human
aaugucuaguuguaacaccaug

SEQ ID NO: 3327831 - RNA, 15 nt, Human
aaugucagugugacu

SEQ ID NO: 3327832 - RNA, 16 nt, Human
aaugucagugugacug

SEQ ID NO: 3327833 - RNA, 13 nt, Human
aaugucaguguga

SEQ ID NO: 3327834 - RNA, 21 nt, Human
aagcgugagccacugcaccgg

SEQ ID NO: 3327835 - RNA, 12 nt, Human
aagcguggugga

SEQ ID NO: 3327836 - RNA, 22 nt, Human
aagcugcacccucaggcaggug

SEQ ID NO: 3327837 - RNA, 21 nt, Human
aagcugcacccucaggcaggu

SEQ ID NO: 3327838 - RNA, 20 nt, Human
aagcugcacccucaggcagg

SEQ ID NO: 3327839 - RNA, 18 nt, Human
aaggacauugcggacagc

SEQ ID NO: 3327840 - RNA, 13 nt, Human
aagcugggcaggu

SEQ ID NO: 3327841 - RNA, 11 nt, Human
aagcugggcag

SEQ ID NO: 3327842 - RNA, 17 nt, Human
aaggcaaggcugucaau

SEQ ID NO: 3327843 - RNA, 18 nt, Human
aaggcaaggcugucaauu

SEQ ID NO: 3327844 - RNA, 16 nt, Human
aaggcaaggcugucaa

SEQ ID NO: 3327845 - RNA, 18 nt, Human
aagccauaauuguucuua

SEQ ID NO: 3327846 - RNA, 14 nt, Human
aagcagaggaagga

SEQ ID NO: 3327847 - RNA, 16 nt, Human
aaguaucccuacugua

SEQ ID NO: 3327848 - RNA, 11 nt, Human
aaguacuucuu

SEQ ID NO: 3327849 - RNA, 23 nt, Human
aaguacuucuccacccugcucuc

SEQ ID NO: 3327850 - RNA, 11 nt, Human
aaggugggagg

SEQ ID NO: 3327851 - RNA, 16 nt, Human
aagguuaauaaaguaa

SEQ ID NO: 3327852 - RNA, 15 nt, Human
aagguuaauaaagua

SEQ ID NO: 3327853 - RNA, 16 nt, Human
aagucuuagauguaua

SEQ ID NO: 3327854 - RNA, 22 nt, Human
aagugcugggauuacaggugug

SEQ ID NO: 3327855 - RNA, 22 nt, Human
aaguuguaggcauaaagucagg

SEQ ID NO: 3327856 - RNA, 21 nt, Human
cugagaucaaaacgguuuuac

SEQ ID NO: 3327857 - RNA, 14 nt, Human
cugagcuuucugcu

SEQ ID NO: 3327858 - RNA, 15 nt, Human
cugagcuuucugcua

SEQ ID NO: 3327859 - RNA, 14 nt, Human
cugaggaauccaga

SEQ ID NO: 3327860 - RNA, 20 nt, Human
cugaggaauccagacccggc

SEQ ID NO: 3327861 - RNA, 17 nt, Human
cugaggaauccagaccc

SEQ ID NO: 3327862 - RNA, 20 nt, Human
cugaggacacuaaccacgcu

SEQ ID NO: 3327863 - RNA, 23 nt, Human
cugaggacacuaaccacgcugga

SEQ ID NO: 3327864 - RNA, 21 nt, Human
cugaguacguugugcauuugg

SEQ ID NO: 3327865 - RNA, 18 nt, Human
cugaguacguugugcauu

SEQ ID NO: 3327866 - RNA, 17 nt, Human
cugaguacguugugcau

SEQ ID NO: 3327867 - RNA, 19 nt, Human
cugaguacguugugcauuu

SEQ ID NO: 3327868 - RNA, 20 nt, Human
cugaguacguugugcauuug

SEQ ID NO: 3327869 - RNA, 23 nt, Human
cugagacagcccgggcucugccu

SEQ ID NO: 3327870 - RNA, 22 nt, Human
cugagacagcccgggcucugcc

SEQ ID NO: 3327871 - RNA, 21 nt, Human
cugagacucgcgacaaugcaa

SEQ ID NO: 3327872 - RNA, 20 nt, Human
cugagacucgcgacaaugca

SEQ ID NO: 3327873 - RNA, 21 nt, Human
cugacccaugcugcccuguga

SEQ ID NO: 3327874 - RNA, 22 nt, Human
cugacccaugcugcccugugag

SEQ ID NO: 3327875 - RNA, 20 nt, Human
cugacccaugcugcccugug

SEQ ID NO: 3327876 - RNA, 22 nt, Human
cugagacucgcgacaaugcaaa

SEQ ID NO: 3327877 - RNA, 17 nt, Human
cugagaguagagucacu

SEQ ID NO: 3327878 - RNA, 22 nt, Human
cugagaggacuuuucuuugugg

SEQ ID NO: 3327879 - RNA, 21 nt, Human
cugagaggacuuuucuuugug

SEQ ID NO: 3327880 - RNA, 16 nt, Human
cucuugagccuugaac

SEQ ID NO: 3327881 - RNA, 17 nt, Human
cucuugagccuugaacu

SEQ ID NO: 3327882 - RNA, 18 nt, Human
cucuugagccuugaacuu

SEQ ID NO: 3327883 - RNA, 16 nt, Human
cucuugagccugggag

SEQ ID NO: 3327884 - RNA, 21 nt, Human
cugaaggacauugcggacagc

SEQ ID NO: 3327885 - RNA, 23 nt, Human
cugaaggacauugcggacagcca

SEQ ID NO: 3327886 - RNA, 18 nt, Human
cugaaggccccgcccagg

SEQ ID NO: 3327887 - RNA, 19 nt, Human
cugaaggccccgcccaggc

SEQ ID NO: 3327888 - RNA, 21 nt, Human
cugaaggccccgcccaggcuu

SEQ ID NO: 3327889 - RNA, 22 nt, Human
cugacaacacucauugaccuga

SEQ ID NO: 3327890 - RNA, 23 nt, Human
cugacaacacucauugaccugag

SEQ ID NO: 3327891 - RNA, 18 nt, Human
cucugcuccucuccccag

SEQ ID NO: 3327892 - RNA, 13 nt, Human
cucugcuccucuc

SEQ ID NO: 3327893 - RNA, 21 nt, Human
cucugcacuccccugcugggu

SEQ ID NO: 3327894 - RNA, 20 nt, Human
cucugcacuccccugcuggg

SEQ ID NO: 3327895 - RNA, 18 nt, Human
cucugcacuccccugcug

SEQ ID NO: 3327896 - RNA, 14 nt, Human
cucugguccauaga

SEQ ID NO: 3327897 - RNA, 14 nt, Human
cucugcugacagac

SEQ ID NO: 3327898 - RNA, 13 nt, Human
cucugcugacaga

SEQ ID NO: 3327899 - RNA, 18 nt, Human
cucuucagaucucuaacu

SEQ ID NO: 3327900 - RNA, 19 nt, Human
cucuucagaucucuaacuu

SEQ ID NO: 3327901 - RNA, 14 nt, Human
cucuucaaucucuu

SEQ ID NO: 3327902 - RNA, 20 nt, Human
cucuuauugcccacgcugga

SEQ ID NO: 3327903 - RNA, 19 nt, Human
cucuuauugcccacgcugg

SEQ ID NO: 3327904 - RNA, 15 nt, Human
cucuuauugcccacg

SEQ ID NO: 3327905 - RNA, 14 nt, Human
cucuuauugcccac

SEQ ID NO: 3327906 - RNA, 13 nt, Human
cucuuauugccca

SEQ ID NO: 3327907 - RNA, 13 nt, Human
cuccaagcaggac

SEQ ID NO: 3327908 - RNA, 14 nt, Human
cuccaagcaggaca

SEQ ID NO: 3327909 - RNA, 22 nt, Human
cuccaagcaggacauggacaag

SEQ ID NO: 3327910 - RNA, 24 nt, Human
cuccaagcaggacauggacaagga

SEQ ID NO: 3327911 - RNA, 22 nt, Human
cuccaagaccuucuccuucacc

SEQ ID NO: 3327912 - RNA, 21 nt, Human
cuccaagaccuucuccuucac

SEQ ID NO: 3327913 - RNA, 13 nt, Human
cuccaagcuccca

SEQ ID NO: 3327914 - RNA, 14 nt, Human
cuccaagcucccag

SEQ ID NO: 3327915 - RNA, 15 nt, Human
cuccaagcucccagg

SEQ ID NO: 3327916 - RNA, 16 nt, Human
cuccaagcucccaggc

SEQ ID NO: 3327917 - RNA, 16 nt, Human
cuccacuuucuagcca

SEQ ID NO: 3327918 - RNA, 19 nt, Human
cuccacuuucuagccagag

SEQ ID NO: 3327919 - RNA, 17 nt, Human
cucccaccucagccucc

SEQ ID NO: 3327920 - RNA, 14 nt, Human
cucgaacuggcugc

SEQ ID NO: 3327921 - RNA, 13 nt, Human
cucgaacuggcug

SEQ ID NO: 3327922 - RNA, 15 nt, Human
cucgaacuggcugca

SEQ ID NO: 3327923 - RNA, 15 nt, Human
cucccccagccccau

SEQ ID NO: 3327924 - RNA, 20 nt, Human
cucccccagccccauccucu

SEQ ID NO: 3327925 - RNA, 22 nt, Human
cucccccagccccauccucugu

SEQ ID NO: 3327926 - RNA, 16 nt, Human
cuccuggcccacugca

SEQ ID NO: 3327927 - RNA, 18 nt, Human
cuccucugcugcuggcug

SEQ ID NO: 3327928 - RNA, 15 nt, Human
cuccucugcugcugg

SEQ ID NO: 3327929 - RNA, 16 nt, Human
cuccucugcugcuggc

SEQ ID NO: 3327930 - RNA, 16 nt, Human
cgguuuuacugcagcu

SEQ ID NO: 3327931 - RNA, 20 nt, Human
cguguaaccauggacccaau

SEQ ID NO: 3327932 - RNA, 17 nt, Human
cgugaggccagagacac

SEQ ID NO: 3327933 - RNA, 16 nt, Human
cgugaguccuggcaug

SEQ ID NO: 3327934 - RNA, 17 nt, Human
cgugaguccuggcaugg

SEQ ID NO: 3327935 - RNA, 16 nt, Human
cgugaggccagagaca

SEQ ID NO: 3327936 - RNA, 16 nt, Human
cggagucccaccuugg

SEQ ID NO: 3327937 - RNA, 11 nt, Human
cgggcucagca

SEQ ID NO: 3327938 - RNA, 14 nt, Human
cgggcucugccucc

SEQ ID NO: 3327939 - RNA, 16 nt, Human
cgggcucugccuccca

SEQ ID NO: 3327940 - RNA, 15 nt, Human
cgggcucagcaaaag

SEQ ID NO: 3327941 - RNA, 13 nt, Human
cgggcucugccuc

SEQ ID NO: 3327942 - RNA, 17 nt, Human
cgggcucugccucccau

SEQ ID NO: 3327943 - RNA, 14 nt, Human
cggggacagcuccu

SEQ ID NO: 3327944 - RNA, 18 nt, Human
cgguguggagaagcggcu

SEQ ID NO: 3327945 - RNA, 13 nt, Human
cgguguggagaag

SEQ ID NO: 3327946 - RNA, 15 nt, Human
cggggacagcuccuu

SEQ ID NO: 3327947 - RNA, 14 nt, Human
cggcucacugcagc

SEQ ID NO: 3327948 - RNA, 15 nt, Human
cggcucacugcagcc

SEQ ID NO: 3327949 - RNA, 20 nt, Human
cggagucccaccuuggcugc

SEQ ID NO: 3327950 - RNA, 18 nt, Human
cggagucccaccuuggcu

SEQ ID NO: 3327951 - RNA, 16 nt, Human
cggcucacugcagccu

SEQ ID NO: 3327952 - RNA, 14 nt, Human
cggagucccaccuu

SEQ ID NO: 3327953 - RNA, 12 nt, Human
cggcuccaggcu

SEQ ID NO: 3327954 - RNA, 16 nt, Human
cggcuccaggcuccuu

SEQ ID NO: 3327955 - RNA, 15 nt, Human
cggcuccaggcuccu

SEQ ID NO: 3327956 - RNA, 14 nt, Human
cggcuccaggcucc

SEQ ID NO: 3327957 - RNA, 13 nt, Human
cggcuccaggcuc

SEQ ID NO: 3327958 - RNA, 14 nt, Human
cgggccacagagaa

SEQ ID NO: 3327959 - RNA, 12 nt, Human
cgggccacagag

SEQ ID NO: 3327960 - RNA, 12 nt, Human
cgacaaugcaaa

SEQ ID NO: 3327961 - RNA, 13 nt, Human
cgacaaugcaaac

SEQ ID NO: 3327962 - RNA, 19 nt, Human
cgacccuugccgucuaccu

SEQ ID NO: 3327963 - RNA, 20 nt, Human
cgacccuugccgucuaccug

SEQ ID NO: 3327964 - RNA, 17 nt, Human
cgacugcccggcagggu

SEQ ID NO: 3327965 - RNA, 15 nt, Human
ccuuuugagugccuu

SEQ ID NO: 3327966 - RNA, 17 nt, Human
ccuuuugagugccuuac

SEQ ID NO: 3327967 - RNA, 21 nt, Human
ccuuucaauaggaaaaacuga

SEQ ID NO: 3327968 - RNA, 18 nt, Human
ccuuucaauaggaaaaac

SEQ ID NO: 3327969 - RNA, 14 nt, Human
ccuuuaagagaaau

SEQ ID NO: 3327970 - RNA, 16 nt, Human
ccuugccgucuaccug

SEQ ID NO: 3327971 - RNA, 14 nt, Human
cgauagugguggug

SEQ ID NO: 3327972 - RNA, 16 nt, Human
cgaguagcugggacua

SEQ ID NO: 3327973 - RNA, 22 nt, Human
cgcaggauucuuccucccuccc

SEQ ID NO: 3327974 - RNA, 14 nt, Human
cgccuacaggagug

SEQ ID NO: 3327975 - RNA, 14 nt, Human
cuaucuaaauguug

SEQ ID NO: 3327976 - RNA, 15 nt, Human
cuaucucccccagcc

SEQ ID NO: 3327977 - RNA, 14 nt, Human
cuaucucccccagc

SEQ ID NO: 3327978 - RNA, 21 nt, Human
cuaguuugauuaaauucuugc

SEQ ID NO: 3327979 - RNA, 22 nt, Human
cuaguuugauuaaauucuugca

SEQ ID NO: 3327980 - RNA, 12 nt, Human
cuagccagagga

SEQ ID NO: 3327981 - RNA, 13 nt, Human
cuagccagaggag

SEQ ID NO: 3327982 - RNA, 15 nt, Human
cuagccagaggagag

SEQ ID NO: 3327983 - RNA, 13 nt, Human
cuaguuugauuaa

SEQ ID NO: 3327984 - RNA, 22 nt, Human
cuaguuguuugauucagacagc

SEQ ID NO: 3327985 - RNA, 23 nt, Human
cuaguuguuugauucagacagcu

SEQ ID NO: 3327986 - RNA, 15 nt, Human
cucaaugcacugaca

SEQ ID NO: 3327987 - RNA, 13 nt, Human
cucaaugcacuga

SEQ ID NO: 3327988 - RNA, 20 nt, Human
cucaaacucuugaccucagg

SEQ ID NO: 3327989 - RNA, 16 nt, Human
cuaucucccccagccc

SEQ ID NO: 3327990 - RNA, 17 nt, Human
cuaucucccccagcccc

SEQ ID NO: 3327991 - RNA, 18 nt, Human
cucaaaagcugggcaggu

SEQ ID NO: 3327992 - RNA, 20 nt, Human
cuaaguuuuuauggcuuuug

SEQ ID NO: 3327993 - RNA, 21 nt, Human
cuaagugguacuaacuuuccu

SEQ ID NO: 3327994 - RNA, 23 nt, Human
cuaagugauccucccaccucagc

SEQ ID NO: 3327995 - RNA, 23 nt, Human
cuaaguuuuuauggcuuuugugc

SEQ ID NO: 3327996 - RNA, 19 nt, Human
cuacaguccucccaucuca

SEQ ID NO: 3327997 - RNA, 19 nt, Human
cuacaguugaaaaacagcu

SEQ ID NO: 3327998 - RNA, 21 nt, Human
cuacaguugaaaaacagcuga

SEQ ID NO: 3327999 - RNA, 20 nt, Human
cuacaguccucccaucucac

SEQ ID NO: 3328000 - RNA, 18 nt, Human
cuacaguccucccaucuc

SEQ ID NO: 3328001 - RNA, 22 nt, Human
cuacaguugaaaaacagcugag

SEQ ID NO: 3328002 - RNA, 18 nt, Human
cuacauacaauuccaaac

SEQ ID NO: 3328003 - RNA, 17 nt, Human
cuaccuuuguauucucu

SEQ ID NO: 3328004 - RNA, 21 nt, Human
cuagcauacguacacauuuua

SEQ ID NO: 3328005 - RNA, 23 nt, Human
cuagcauacguacacauuuuauu

SEQ ID NO: 3328006 - RNA, 20 nt, Human
cuagcauacguacacauuuu

SEQ ID NO: 3328007 - RNA, 22 nt, Human
cuagaagauuuugaaauuuuua

SEQ ID NO: 3328008 - RNA, 12 nt, Human
ccagucaccccg

SEQ ID NO: 3328009 - RNA, 20 nt, Human
ccagucaccccggccaccug

SEQ ID NO: 3328010 - RNA, 21 nt, Human
ccagucaccccggccaccugc

SEQ ID NO: 3328011 - RNA, 19 nt, Human
ccagucaccccggccaccu

SEQ ID NO: 3328012 - RNA, 19 nt, Human
ccaggcuggcgugcagugg

SEQ ID NO: 3328013 - RNA, 22 nt, Human
ccaggcugggagagccuuccag

SEQ ID NO: 3328014 - RNA, 15 nt, Human
ccaggcugggagagc

SEQ ID NO: 3328015 - RNA, 17 nt, Human
ccaggcugggagagccu

SEQ ID NO: 3328016 - RNA, 18 nt, Human
ccaggcugggagagccuu

SEQ ID NO: 3328017 - RNA, 21 nt, Human
ccaggcugggagagccuucca

SEQ ID NO: 3328018 - RNA, 13 nt, Human
ccaggcugggaga

SEQ ID NO: 3328019 - RNA, 14 nt, Human
ccaggcugggagag

SEQ ID NO: 3328020 - RNA, 21 nt, Human
ccagccccuggaugcagccuc

SEQ ID NO: 3328021 - RNA, 10 nt, Human
ccagccccuu

SEQ ID NO: 3328022 - RNA, 19 nt, Human
ccagcagccuggacccugu

SEQ ID NO: 3328023 - RNA, 18 nt, Human
ccagccccuggaugcagc

SEQ ID NO: 3328024 - RNA, 15 nt, Human
ccagcagccuggacc

SEQ ID NO: 3328025 - RNA, 14 nt, Human
ccagcagccuggac

SEQ ID NO: 3328026 - RNA, 22 nt, Human
ccaggaaaggcuccaggagcag

SEQ ID NO: 3328027 - RNA, 23 nt, Human
ccaggaaaggcuccaggagcagc

SEQ ID NO: 3328028 - RNA, 21 nt, Human
ccaggaaaggcuccaggagca

SEQ ID NO: 3328029 - RNA, 20 nt, Human
ccaggaaaggcuccaggagc

SEQ ID NO: 3328030 - RNA, 16 nt, Human
ccagcuuaucucaggg

SEQ ID NO: 3328031 - RNA, 23 nt, Human
ccagcagagcaccuuagacaguc

SEQ ID NO: 3328032 - RNA, 14 nt, Human
ccagcagagcaccu

SEQ ID NO: 3328033 - RNA, 19 nt, Human
ccagcagagcaccuuagac

SEQ ID NO: 3328034 - RNA, 13 nt, Human
ccaugagccucag

SEQ ID NO: 3328035 - RNA, 20 nt, Human
ccaucccugaaggccccgcc

SEQ ID NO: 3328036 - RNA, 16 nt, Human
ccauccccuguagagu

SEQ ID NO: 3328037 - RNA, 14 nt, Human
ccaugaguccccug

SEQ ID NO: 3328038 - RNA, 15 nt, Human
ccaugaguccccugu

SEQ ID NO: 3328039 - RNA, 16 nt, Human
ccaugaguccccuguu

SEQ ID NO: 3328040 - RNA, 13 nt, Human
ccaugggccuccu

SEQ ID NO: 3328041 - RNA, 13 nt, Human
ccaugaguccccu

SEQ ID NO: 3328042 - RNA, 19 nt, Human
ccaugagccucagcauccu

SEQ ID NO: 3328043 - RNA, 18 nt, Human
ccaugagccucagcaucc

SEQ ID NO: 3328044 - RNA, 14 nt, Human
ccaugagccucagc

SEQ ID NO: 3328045 - RNA, 12 nt, Human
ccaucccagccc

SEQ ID NO: 3328046 - RNA, 23 nt, Human
ccaucccaaacccuucagugcca

SEQ ID NO: 3328047 - RNA, 20 nt, Human
ccaucccaaacccuucagug

SEQ ID NO: 3328048 - RNA, 15 nt, Human
ccaugggccuccugu

SEQ ID NO: 3328049 - RNA, 14 nt, Human
ccaugggccuccug

SEQ ID NO: 3328050 - RNA, 22 nt, Human
cccauucugccugcccaggccc

SEQ ID NO: 3328051 - RNA, 21 nt, Human
cccauucugccugcccaggcc

SEQ ID NO: 3328052 - RNA, 20 nt, Human
cccauucugccugcccaggc

SEQ ID NO: 3328053 - RNA, 19 nt, Human
ccccauccucuguacagag

SEQ ID NO: 3328054 - RNA, 21 nt, Human
ccccauccucuguacagagcc

SEQ ID NO: 3328055 - RNA, 17 nt, Human
ccccauccucuguacag

SEQ ID NO: 3328056 - RNA, 20 nt, Human
ccccagcaagugagagcugg

SEQ ID NO: 3328057 - RNA, 19 nt, Human
ccccagcaagugagagcug

SEQ ID NO: 3328058 - RNA, 17 nt, Human
ccccagcaagugagagc

SEQ ID NO: 3328059 - RNA, 23 nt, Human
ccccagauugcaacaggcugggc

SEQ ID NO: 3328060 - RNA, 22 nt, Human
ccccagauugcaacaggcuggg

SEQ ID NO: 3328061 - RNA, 21 nt, Human
ccccagauugcaacaggcugg

SEQ ID NO: 3328062 - RNA, 15 nt, Human
cccaggcuuagucac

SEQ ID NO: 3328063 - RNA, 21 nt, Human
cccaggcuggcgugcaguggu

SEQ ID NO: 3328064 - RNA, 19 nt, Human
cccaggaaaggcuccagga

SEQ ID NO: 3328065 - RNA, 23 nt, Human
cccagcugugcucuggacaggca

SEQ ID NO: 3328066 - RNA, 21 nt, Human
cccagcugugcucuggacagg

SEQ ID NO: 3328067 - RNA, 21 nt, Human
cccaggaaaggcuccaggagc

SEQ ID NO: 3328068 - RNA, 22 nt, Human
cccaggaaaggcuccaggagca

SEQ ID NO: 3328069 - RNA, 23 nt, Human
cccaggaaaggcuccaggagcag

SEQ ID NO: 3328070 - RNA, 14 nt, Human
cccagcccacuucu

SEQ ID NO: 3328071 - RNA, 12 nt, Human
cccggcugcgga

SEQ ID NO: 3328072 - RNA, 16 nt, Human
ccccuucugacccaug

SEQ ID NO: 3328073 - RNA, 17 nt, Human
ccccuucugacccaugc

SEQ ID NO: 3328074 - RNA, 20 nt, Human
cccucaacucuccuccagag

SEQ ID NO: 3328075 - RNA, 14 nt, Human
ccccauucugccug

SEQ ID NO: 3328076 - RNA, 13 nt, Human
ccccauucugccu

SEQ ID NO: 3328077 - RNA, 15 nt, Human
ccccauucugccugc

SEQ ID NO: 3328078 - RNA, 17 nt, Human
ccccuucgcuccugugu

SEQ ID NO: 3328079 - RNA, 15 nt, Human
ccccuucgcuccugu

SEQ ID NO: 3328080 - RNA, 14 nt, Human
ccccuucgcuccug

SEQ ID NO: 3328081 - RNA, 19 nt, Human
ccccuucgcuccugugucu

SEQ ID NO: 3328082 - RNA, 17 nt, Human
cccugugauggggcccu

SEQ ID NO: 3328083 - RNA, 18 nt, Human
cccugugauggggcccug

SEQ ID NO: 3328084 - RNA, 19 nt, Human
cccugugauggggcccugc

SEQ ID NO: 3328085 - RNA, 13 nt, Human
cccuucgcuccug

SEQ ID NO: 3328086 - RNA, 20 nt, Human
cccugucucaaaaaaagaaa

SEQ ID NO: 3328087 - RNA, 23 nt, Human
cccugucucaaaaaaagaaaaag

SEQ ID NO: 3328088 - RNA, 16 nt, Human
cccugucuaaugaaac

SEQ ID NO: 3328089 - RNA, 13 nt, Human
cccugucuaauga

SEQ ID NO: 3328090 - RNA, 13 nt, Human
ccggccccugcug

SEQ ID NO: 3328091 - RNA, 22 nt, Human
cccuucucuccagccccuggau

SEQ ID NO: 3328092 - RNA, 23 nt, Human
ccgcagcccugcagagggcacag

SEQ ID NO: 3328093 - RNA, 21 nt, Human
cccuucucuccagccccugga

SEQ ID NO: 3328094 - RNA, 19 nt, Human
cccuucucuccagccccug

SEQ ID NO: 3328095 - RNA, 15 nt, Human
cccuucgcuccugug

SEQ ID NO: 3328096 - RNA, 14 nt, Human
cccuucgcuccugu

SEQ ID NO: 3328097 - RNA, 14 nt, Human
ccggccccugcugg

SEQ ID NO: 3328098 - RNA, 15 nt, Human
ccucccaccucagcc

SEQ ID NO: 3328099 - RNA, 13 nt, Human
ccucccaucucac

SEQ ID NO: 3328100 - RNA, 16 nt, Human
ccucccaucucacaca

SEQ ID NO: 3328101 - RNA, 19 nt, Human
ccugcccaccuggccucug

SEQ ID NO: 3328102 - RNA, 12 nt, Human
ccugcccaccug

SEQ ID NO: 3328103 - RNA, 14 nt, Human
ccugcccaccuggc

SEQ ID NO: 3328104 - RNA, 20 nt, Human
ccugcccaccuggccucugc

SEQ ID NO: 3328105 - RNA, 13 nt, Human
ccugcccaccugg

SEQ ID NO: 3328106 - RNA, 17 nt, Human
ccugcugcaguugccag

SEQ ID NO: 3328107 - RNA, 19 nt, Human
ccugcugcaguugccaguc

SEQ ID NO: 3328108 - RNA, 23 nt, Human
ccugccucgaacuggcugcaaag

SEQ ID NO: 3328109 - RNA, 21 nt, Human
ccugccucgaacuggcugcaa

SEQ ID NO: 3328110 - RNA, 19 nt, Human
ccugccucgaacuggcugc

SEQ ID NO: 3328111 - RNA, 16 nt, Human
ccugcugcaguugcca

SEQ ID NO: 3328112 - RNA, 20 nt, Human
ccugcugcaguugccaguca

SEQ ID NO: 3328113 - RNA, 13 nt, Human
ccucuuucccucc

SEQ ID NO: 3328114 - RNA, 17 nt, Human
ccugcacuugcagacuc

SEQ ID NO: 3328115 - RNA, 16 nt, Human
ccugcacuugcagacu

SEQ ID NO: 3328116 - RNA, 14 nt, Human
ccugcagagggcac

SEQ ID NO: 3328117 - RNA, 18 nt, Human
ccugcacuugcagacucu

SEQ ID NO: 3328118 - RNA, 11 nt, Human
ccucuuucccu

SEQ ID NO: 3328119 - RNA, 22 nt, Human
ccuggccuagcauacguacaca

SEQ ID NO: 3328120 - RNA, 16 nt, Human
ccuggccucugcacuc

SEQ ID NO: 3328121 - RNA, 20 nt, Human
ccuggccucugcacuccccu

SEQ ID NO: 3328122 - RNA, 21 nt, Human
ccuggccucugcacuccccug

SEQ ID NO: 3328123 - RNA, 22 nt, Human
ccuggccucugcacuccccugc

SEQ ID NO: 3328124 - RNA, 15 nt, Human
ccugucuaaugaaac

SEQ ID NO: 3328125 - RNA, 22 nt, Human
ccugucuaaugaaaccuguguc

SEQ ID NO: 3328126 - RNA, 21 nt, Human
ccugguggcagugggagcugc

SEQ ID NO: 3328127 - RNA, 20 nt, Human
ccugguggcagugggagcug

SEQ ID NO: 3328128 - RNA, 14 nt, Human
auuucuguuuagau

SEQ ID NO: 3328129 - RNA, 16 nt, Human
auuucuguuuagauaa

SEQ ID NO: 3328130 - RNA, 12 nt, Human
auuucuguuuag

SEQ ID NO: 3328131 - RNA, 14 nt, Human
auuuaaugaaagac

SEQ ID NO: 3328132 - RNA, 21 nt, Human
auuuaaugaaagacuguacaa

SEQ ID NO: 3328133 - RNA, 19 nt, Human
auuguucuuaguuugcagu

SEQ ID NO: 3328134 - RNA, 15 nt, Human
auuguaaggaaugau

SEQ ID NO: 3328135 - RNA, 16 nt, Human
auuguaaggaaugauu

SEQ ID NO: 3328136 - RNA, 17 nt, Human
auugauaugcuuauaca

SEQ ID NO: 3328137 - RNA, 19 nt, Human
auucucuccuguaccucuu

SEQ ID NO: 3328138 - RNA, 21 nt, Human
auucucuccuguaccucuuga

SEQ ID NO: 3328139 - RNA, 21 nt, Human
auuccugaugcuucuucagag

SEQ ID NO: 3328140 - RNA, 16 nt, Human
auucucuccuguaccu

SEQ ID NO: 3328141 - RNA, 17 nt, Human
auucuuuccugaggcug

SEQ ID NO: 3328142 - RNA, 22 nt, Human
auucuuuccugaggcugggcuc

SEQ ID NO: 3328143 - RNA, 13 nt, Human
auucuuuccugag

SEQ ID NO: 3328144 - RNA, 19 nt, Human
auucauauuuacuucuuau

SEQ ID NO: 3328145 - RNA, 18 nt, Human
auucauauuuacuucuua

SEQ ID NO: 3328146 - RNA, 20 nt, Human
auucauauuuacuucuuaua

SEQ ID NO: 3328147 - RNA, 14 nt, Human
auucauauuuacuu

SEQ ID NO: 3328148 - RNA, 14 nt, Human
auuaaauucuugca

SEQ ID NO: 3328149 - RNA, 18 nt, Human
auuaaauucuugcaaagu

SEQ ID NO: 3328150 - RNA, 20 nt, Human
auuaaauucuugcaaaguau

SEQ ID NO: 3328151 - RNA, 21 nt, Human
auucaaccauggacuuuauaa

SEQ ID NO: 3328152 - RNA, 20 nt, Human
auucaaccauggacuuuaua

SEQ ID NO: 3328153 - RNA, 19 nt, Human
auucaaccauggacuuuau

SEQ ID NO: 3328154 - RNA, 18 nt, Human
auucaaccauggacuuua

SEQ ID NO: 3328155 - RNA, 13 nt, Human
auuuguuugaacu

SEQ ID NO: 3328156 - RNA, 14 nt, Human
auuuguuugaacug

SEQ ID NO: 3328157 - RNA, 16 nt, Human
auuuguuugaacugau

SEQ ID NO: 3328158 - RNA, 15 nt, Human
caaaagcugggcagg

SEQ ID NO: 3328159 - RNA, 13 nt, Human
auuuuuuuuuccu

SEQ ID NO: 3328160 - RNA, 16 nt, Human
auuuuuuuuuccuuca

SEQ ID NO: 3328161 - RNA, 12 nt, Human
auuuuuuuuucc

SEQ ID NO: 3328162 - RNA, 23 nt, Human
caacaaaccuguuucugcagcca

SEQ ID NO: 3328163 - RNA, 16 nt, Human
caaaguacacuguuuc

SEQ ID NO: 3328164 - RNA, 20 nt, Human
caaaguacacuguuucaaac

SEQ ID NO: 3328165 - RNA, 21 nt, Human
caaaguacacuguuucaaacu

SEQ ID NO: 3328166 - RNA, 13 nt, Human
caaagaugcagcc

SEQ ID NO: 3328167 - RNA, 17 nt, Human
caaaucagcugcuacua

SEQ ID NO: 3328168 - RNA, 20 nt, Human
caacaccuuguuucccucuc

SEQ ID NO: 3328169 - RNA, 22 nt, Human
caacaccucugcacaagcugca

SEQ ID NO: 3328170 - RNA, 20 nt, Human
caacaccucugcacaagcug

SEQ ID NO: 3328171 - RNA, 18 nt, Human
caaccacugcgaccacaa

SEQ ID NO: 3328172 - RNA, 18 nt, Human
caagacccuugugguccc

SEQ ID NO: 3328173 - RNA, 19 nt, Human
caagacccuugugguccca

SEQ ID NO: 3328174 - RNA, 22 nt, Human
caagacccuuguggucccaccc

SEQ ID NO: 3328175 - RNA, 16 nt, Human
caacucaccccagccc

SEQ ID NO: 3328176 - RNA, 13 nt, Human
caacucaccccag

SEQ ID NO: 3328177 - RNA, 15 nt, Human
caacucaccccagcc

SEQ ID NO: 3328178 - RNA, 17 nt, Human
caacccccagccugcua

SEQ ID NO: 3328179 - RNA, 16 nt, Human
caacccccagccugcu

SEQ ID NO: 3328180 - RNA, 15 nt, Human
caacccccagccugc

SEQ ID NO: 3328181 - RNA, 14 nt, Human
caacccccagccug

SEQ ID NO: 3328182 - RNA, 17 nt, Human
caaccauggacuuuaua

SEQ ID NO: 3328183 - RNA, 18 nt, Human
caaccauggacuuuauaa

SEQ ID NO: 3328184 - RNA, 17 nt, Human
cagaaauguguuaucac

SEQ ID NO: 3328185 - RNA, 19 nt, Human
cagaaguuucugccgcagc

SEQ ID NO: 3328186 - RNA, 23 nt, Human
cagaaguuugagaucagccuggg

SEQ ID NO: 3328187 - RNA, 22 nt, Human
cagaaguuucugccgcagcccu

SEQ ID NO: 3328188 - RNA, 20 nt, Human
cagaaguuucugccgcagcc

SEQ ID NO: 3328189 - RNA, 21 nt, Human
cagaaguuucugccgcagccc

SEQ ID NO: 3328190 - RNA, 23 nt, Human
cacugggcuuggggaccagagcu

SEQ ID NO: 3328191 - RNA, 22 nt, Human
cacugggcuuggggaccagagc

SEQ ID NO: 3328192 - RNA, 20 nt, Human
cacugggcuuggggaccaga

SEQ ID NO: 3328193 - RNA, 16 nt, Human
cacuguugcccaggcu

SEQ ID NO: 3328194 - RNA, 15 nt, Human
cacuguugcccaggc

SEQ ID NO: 3328195 - RNA, 14 nt, Human
cacuguugcccagg

SEQ ID NO: 3328196 - RNA, 17 nt, Human
cacuggugacaugucuu

SEQ ID NO: 3328197 - RNA, 19 nt, Human
cacuguuucaaacuuuacu

SEQ ID NO: 3328198 - RNA, 17 nt, Human
cacucuuauugcccacg

SEQ ID NO: 3328199 - RNA, 18 nt, Human
cacucuuauugcccacgc

SEQ ID NO: 3328200 - RNA, 23 nt, Human
cacuacggaauaguuggcuagga

SEQ ID NO: 3328201 - RNA, 13 nt, Human
cacggccaggcca

SEQ ID NO: 3328202 - RNA, 16 nt, Human
cacggccaggccagag

SEQ ID NO: 3328203 - RNA, 15 nt, Human
cacggccaggccaga

SEQ ID NO: 3328204 - RNA, 14 nt, Human
cacggccaggccag

SEQ ID NO: 3328205 - RNA, 20 nt, Human
cacggagggugacgggggug

SEQ ID NO: 3328206 - RNA, 18 nt, Human
caccuugacagggcacac

SEQ ID NO: 3328207 - RNA, 17 nt, Human
caccugccagggacaga

SEQ ID NO: 3328208 - RNA, 19 nt, Human
caccuugacagggcacacc

SEQ ID NO: 3328209 - RNA, 13 nt, Human
caccuuggcucaa

SEQ ID NO: 3328210 - RNA, 14 nt, Human
caccuuugucccca

SEQ ID NO: 3328211 - RNA, 15 nt, Human
caccuuuguccccac

SEQ ID NO: 3328212 - RNA, 14 nt, Human
caccuuugaagaag

SEQ ID NO: 3328213 - RNA, 14 nt, Human
caccugccagggac

SEQ ID NO: 3328214 - RNA, 16 nt, Human
caccugccagggacag

SEQ ID NO: 3328215 - RNA, 13 nt, Human
caccugccaggga

SEQ ID NO: 3328216 - RNA, 17 nt, Human
cacccagcccacuucug

SEQ ID NO: 3328217 - RNA, 16 nt, Human
cacccagcccacuucu

SEQ ID NO: 3328218 - RNA, 23 nt, Human
caccaacauacucccaucuguga

SEQ ID NO: 3328219 - RNA, 14 nt, Human
caccagcagccugg

SEQ ID NO: 3328220 - RNA, 12 nt, Human
caccagcagccu

SEQ ID NO: 3328221 - RNA, 15 nt, Human
caccagcagccugga

SEQ ID NO: 3328222 - RNA, 21 nt, Human
caccagcccuuagcagggaaa

SEQ ID NO: 3328223 - RNA, 23 nt, Human
cacccaggagccccgaggccuuc

SEQ ID NO: 3328224 - RNA, 20 nt, Human
cacccaggagccccgaggcc

SEQ ID NO: 3328225 - RNA, 19 nt, Human
cacccagcccacuucugcc

SEQ ID NO: 3328226 - RNA, 24 nt, Human
cacccaggagccccgaggccuucu

SEQ ID NO: 3328227 - RNA, 16 nt, Human
cacccaggagccccga

SEQ ID NO: 3328228 - RNA, 13 nt, Human
cacauuuuucuua

SEQ ID NO: 3328229 - RNA, 14 nt, Human
cacauuuuucuuag

SEQ ID NO: 3328230 - RNA, 17 nt, Human
cacauuuuuuaaaugca

SEQ ID NO: 3328231 - RNA, 21 nt, Human
cacauuuuuuaaaugcaccug

SEQ ID NO: 3328232 - RNA, 20 nt, Human
caccaacauacucccaucug

SEQ ID NO: 3328233 - RNA, 21 nt, Human
caccaacauacucccaucugu

SEQ ID NO: 3328234 - RNA, 17 nt, Human
caccaacauacucccau

SEQ ID NO: 3328235 - RNA, 15 nt, Human
cacauuuuauuuuau

SEQ ID NO: 3328236 - RNA, 21 nt, Human
cacauuuuauuuuauuaugca

SEQ ID NO: 3328237 - RNA, 18 nt, Human
cacaucuugcucugcuga

SEQ ID NO: 3328238 - RNA, 19 nt, Human
cacaucagcacgauuucug

SEQ ID NO: 3328239 - RNA, 20 nt, Human
cacaucagcacgauuucugu

SEQ ID NO: 3328240 - RNA, 21 nt, Human
cacaucagcacgauuucuguu

SEQ ID NO: 3328241 - RNA, 22 nt, Human
cacaucagcacgauuucuguuu

SEQ ID NO: 3328242 - RNA, 17 nt, Human
cacaucuugcucugcug

SEQ ID NO: 3328243 - RNA, 16 nt, Human
cacaucuugcucugcu

SEQ ID NO: 3328244 - RNA, 18 nt, Human
cacaguauuacuucugcu

SEQ ID NO: 3328245 - RNA, 16 nt, Human
cacaguauuacuucug

SEQ ID NO: 3328246 - RNA, 20 nt, Human
cacagacccugcccuguggg

SEQ ID NO: 3328247 - RNA, 21 nt, Human
cacagacccugcccugugggc

SEQ ID NO: 3328248 - RNA, 19 nt, Human
cacagacccugcccugugg

SEQ ID NO: 3328249 - RNA, 15 nt, Human
cacagcuaacaugga

SEQ ID NO: 3328250 - RNA, 16 nt, Human
cacagcuaacauggaa

SEQ ID NO: 3328251 - RNA, 18 nt, Human
cacagacccugcccugug

SEQ ID NO: 3328252 - RNA, 19 nt, Human
cacagcucuguccugggag

SEQ ID NO: 3328253 - RNA, 23 nt, Human
cacagcucuguccugggagugag

SEQ ID NO: 3328254 - RNA, 20 nt, Human
cacagcucuguccugggagu

SEQ ID NO: 3328255 - RNA, 22 nt, Human
cacagcuaacauggaaguacua

SEQ ID NO: 3328256 - RNA, 22 nt, Human
caaugcugugcccuaaagugua

SEQ ID NO: 3328257 - RNA, 23 nt, Human
caaugcuggcuguuggcuggggg

SEQ ID NO: 3328258 - RNA, 22 nt, Human
caaugcuggcuguuggcugggg

SEQ ID NO: 3328259 - RNA, 21 nt, Human
caaugcuggcuguuggcuggg

SEQ ID NO: 3328260 - RNA, 14 nt, Human
cacaagccuucggc

SEQ ID NO: 3328261 - RNA, 14 nt, Human
cacaagacccuugu

SEQ ID NO: 3328262 - RNA, 16 nt, Human
cacaagacccuugugg

SEQ ID NO: 3328263 - RNA, 15 nt, Human
caggccagagggagu

SEQ ID NO: 3328264 - RNA, 13 nt, Human
caggccagaggga

SEQ ID NO: 3328265 - RNA, 18 nt, Human
caggcagauacaggaaaa

SEQ ID NO: 3328266 - RNA, 19 nt, Human
caggccaggcccucugccc

SEQ ID NO: 3328267 - RNA, 17 nt, Human
caggccaggcccucugc

SEQ ID NO: 3328268 - RNA, 18 nt, Human
caggccaggcccucugcc

SEQ ID NO: 3328269 - RNA, 17 nt, Human
caggccagcugcuuggg

SEQ ID NO: 3328270 - RNA, 19 nt, Human
caggccagcugcuugggcu

SEQ ID NO: 3328271 - RNA, 21 nt, Human
caggccagcugcuugggcuuc

SEQ ID NO: 3328272 - RNA, 16 nt, Human
caggccaggcccucug

SEQ ID NO: 3328273 - RNA, 12 nt, Human
caggcugggaga

SEQ ID NO: 3328274 - RNA, 14 nt, Human
caggcugggagagc

SEQ ID NO: 3328275 - RNA, 20 nt, Human
caggcugggcuucaguggca

SEQ ID NO: 3328276 - RNA, 19 nt, Human
caggcugggcuucaguggc

SEQ ID NO: 3328277 - RNA, 22 nt, Human
caggcugggcuucaguggcagc

SEQ ID NO: 3328278 - RNA, 21 nt, Human
caggcugggcuucaguggcag

SEQ ID NO: 3328279 - RNA, 20 nt, Human
cagggcucagcggggacagc

SEQ ID NO: 3328280 - RNA, 23 nt, Human
cagggcucagcggggacagcucc

SEQ ID NO: 3328281 - RNA, 21 nt, Human
cagggcucagcggggacagcu

SEQ ID NO: 3328282 - RNA, 19 nt, Human
caggggaaaaucagccugc

SEQ ID NO: 3328283 - RNA, 17 nt, Human
caggggaaaaucagccu

SEQ ID NO: 3328284 - RNA, 20 nt, Human
caggggaaaaucagccugcu

SEQ ID NO: 3328285 - RNA, 18 nt, Human
caguggugguuuucuguu

SEQ ID NO: 3328286 - RNA, 21 nt, Human
caguggugcgaucuggguuca

SEQ ID NO: 3328287 - RNA, 20 nt, Human
caguggugcgaucuggguuc

SEQ ID NO: 3328288 - RNA, 23 nt, Human
cagugggagcugccuguucagcu

SEQ ID NO: 3328289 - RNA, 12 nt, Human
cagugcccacag

SEQ ID NO: 3328290 - RNA, 18 nt, Human
cagugggagcugccuguu

SEQ ID NO: 3328291 - RNA, 20 nt, Human
cagugggagcugccuguuca

SEQ ID NO: 3328292 - RNA, 17 nt, Human
cagugcccacaggauca

SEQ ID NO: 3328293 - RNA, 16 nt, Human
cagugcaugcuguccc

SEQ ID NO: 3328294 - RNA, 17 nt, Human
cagugcaugcugucccu

SEQ ID NO: 3328295 - RNA, 15 nt, Human
cagugcccacaggau

SEQ ID NO: 3328296 - RNA, 13 nt, Human
cagugcccacagg

SEQ ID NO: 3328297 - RNA, 17 nt, Human
cagucuggaaugcagug

SEQ ID NO: 3328298 - RNA, 15 nt, Human
cagucuggaaugcag

SEQ ID NO: 3328299 - RNA, 13 nt, Human
cagugcaugcugu

SEQ ID NO: 3328300 - RNA, 14 nt, Human
cagugcaugcuguc

SEQ ID NO: 3328301 - RNA, 20 nt, Human
caggugauccacccaccuca

SEQ ID NO: 3328302 - RNA, 21 nt, Human
caggugauccacccaccucag

SEQ ID NO: 3328303 - RNA, 17 nt, Human
caggugcacaagcucca

SEQ ID NO: 3328304 - RNA, 18 nt, Human
caggugcacaagcuccaa

SEQ ID NO: 3328305 - RNA, 19 nt, Human
caggugcacaagcuccaag

SEQ ID NO: 3328306 - RNA, 20 nt, Human
caggugcacaagcuccaagc

SEQ ID NO: 3328307 - RNA, 23 nt, Human
caggugauccacccaccucagcc

SEQ ID NO: 3328308 - RNA, 22 nt, Human
caggugauccacccaccucagc

SEQ ID NO: 3328309 - RNA, 15 nt, Human
caggugcacaagcuc

SEQ ID NO: 3328310 - RNA, 16 nt, Human
cagguuuuccugaaga

SEQ ID NO: 3328311 - RNA, 12 nt, Human
cagguuuuccug

SEQ ID NO: 3328312 - RNA, 21 nt, Human
cagguuggugggggccucggu

SEQ ID NO: 3328313 - RNA, 21 nt, Human
caggugcacaagcuccaagcu

SEQ ID NO: 3328314 - RNA, 16 nt, Human
caggaaaagcugcuga

SEQ ID NO: 3328315 - RNA, 15 nt, Human
caggaaaagcugcug

SEQ ID NO: 3328316 - RNA, 19 nt, Human
cagcuguucagcugguuga

SEQ ID NO: 3328317 - RNA, 24 nt, Human
cagcugugcucuggacaggcaugu

SEQ ID NO: 3328318 - RNA, 20 nt, Human
cagcugugcucuggacaggc

SEQ ID NO: 3328319 - RNA, 19 nt, Human
cagcugugcucuggacagg

SEQ ID NO: 3328320 - RNA, 13 nt, Human
cagcugccuggga

SEQ ID NO: 3328321 - RNA, 14 nt, Human
cagcugccugggau

SEQ ID NO: 3328322 - RNA, 12 nt, Human
cagcugccuggg

SEQ ID NO: 3328323 - RNA, 19 nt, Human
cagcugagggugagugggu

SEQ ID NO: 3328324 - RNA, 12 nt, Human
cagccugcucca

SEQ ID NO: 3328325 - RNA, 19 nt, Human
cagccugcuaauuccccag

SEQ ID NO: 3328326 - RNA, 21 nt, Human
cagcggggacagcuccuucug

SEQ ID NO: 3328327 - RNA, 17 nt, Human
cagcggggacagcuccu

SEQ ID NO: 3328328 - RNA, 19 nt, Human
cagcggggacagcuccuuc

SEQ ID NO: 3328329 - RNA, 18 nt, Human
cagcggggacagcuccuu

SEQ ID NO: 3328330 - RNA, 19 nt, Human
cagccgagauagccaaggc

SEQ ID NO: 3328331 - RNA, 17 nt, Human
cagccucugaaaaccaa

SEQ ID NO: 3328332 - RNA, 20 nt, Human
cagcaucauggagguuugaa

SEQ ID NO: 3328333 - RNA, 16 nt, Human
cagcacgauuucuguu

SEQ ID NO: 3328334 - RNA, 18 nt, Human
cagcacgauuucuguuua

SEQ ID NO: 3328335 - RNA, 19 nt, Human
cagcacgauuucuguuuag

SEQ ID NO: 3328336 - RNA, 20 nt, Human
cagauucuuuccugaggcug

SEQ ID NO: 3328337 - RNA, 22 nt, Human
cagauucuuuccugaggcuggg

SEQ ID NO: 3328338 - RNA, 15 nt, Human
cagcacgauuucugu

SEQ ID NO: 3328339 - RNA, 15 nt, Human
cagauucuuuccuga

SEQ ID NO: 3328340 - RNA, 17 nt, Human
cagauucuuuccugagg

SEQ ID NO: 3328341 - RNA, 18 nt, Human
cagauucuuuccugaggc

SEQ ID NO: 3328342 - RNA, 19 nt, Human
cagauucuuuccugaggcu

SEQ ID NO: 3328343 - RNA, 22 nt, Human
cagaggggguggccucccaacu

SEQ ID NO: 3328344 - RNA, 23 nt, Human
cagaggggguggccucccaacuc

SEQ ID NO: 3328345 - RNA, 13 nt, Human
cauguuggccagg

SEQ ID NO: 3328346 - RNA, 15 nt, Human
cauguuggccaggcu

SEQ ID NO: 3328347 - RNA, 14 nt, Human
cauguuggccaggc

SEQ ID NO: 3328348 - RNA, 16 nt, Human
cauguuggccaggcug

SEQ ID NO: 3328349 - RNA, 19 nt, Human
cauguuggccaggcugguc

SEQ ID NO: 3328350 - RNA, 14 nt, Human
cauucuccaccugc

SEQ ID NO: 3328351 - RNA, 16 nt, Human
cauucuccaccugcca

SEQ ID NO: 3328352 - RNA, 13 nt, Human
cauucuccaccug

SEQ ID NO: 3328353 - RNA, 14 nt, Human
caugggaaugaaug

SEQ ID NO: 3328354 - RNA, 15 nt, Human
caugggaaugaaugu

SEQ ID NO: 3328355 - RNA, 16 nt, Human
caugggaaugaauguc

SEQ ID NO: 3328356 - RNA, 20 nt, Human
caugcuccuggcccacugca

SEQ ID NO: 3328357 - RNA, 14 nt, Human
caugcuacacacug

SEQ ID NO: 3328358 - RNA, 20 nt, Human
caugcuacacacugcauguu

SEQ ID NO: 3328359 - RNA, 23 nt, Human
caugcuacacacugcauguuugu

SEQ ID NO: 3328360 - RNA, 13 nt, Human
caugauguuuucc

SEQ ID NO: 3328361 - RNA, 15 nt, Human
cauccuggcacccgg

SEQ ID NO: 3328362 - RNA, 14 nt, Human
caucacuucccuac

SEQ ID NO: 3328363 - RNA, 12 nt, Human
caucacuucccu

SEQ ID NO: 3328364 - RNA, 21 nt, Human
cauccccuguagagugggagc

SEQ ID NO: 3328365 - RNA, 22 nt, Human
cauccuggcacccggccccugc

SEQ ID NO: 3328366 - RNA, 17 nt, Human
cauauucuguuggccag

SEQ ID NO: 3328367 - RNA, 22 nt, Human
cauauucaggaagcucagggcc

SEQ ID NO: 3328368 - RNA, 19 nt, Human
caguggugguuuucuguuc

SEQ ID NO: 3328369 - RNA, 20 nt, Human
caguggugguuuucuguucu

SEQ ID NO: 3328370 - RNA, 21 nt, Human
caguggugguuuucuguucuu

SEQ ID NO: 3328371 - RNA, 17 nt, Human
ccacucccugcaaccug

SEQ ID NO: 3328372 - RNA, 21 nt, Human
ccaccuuugaagaaguaagga

SEQ ID NO: 3328373 - RNA, 22 nt, Human
ccaccgcagacaggaccaggga

SEQ ID NO: 3328374 - RNA, 19 nt, Human
ccaccgcagacaggaccag

SEQ ID NO: 3328375 - RNA, 16 nt, Human
ccacgcccccacuggu

SEQ ID NO: 3328376 - RNA, 17 nt, Human
ccacgcccccacuggug

SEQ ID NO: 3328377 - RNA, 18 nt, Human
ccacgcccccacugguga

SEQ ID NO: 3328378 - RNA, 19 nt, Human
ccacgcccccacuggugac

SEQ ID NO: 3328379 - RNA, 13 nt, Human
ccacgcccccacu

SEQ ID NO: 3328380 - RNA, 17 nt, Human
ccaccacacccagccca

SEQ ID NO: 3328381 - RNA, 13 nt, Human
ccaccaucaagcc

SEQ ID NO: 3328382 - RNA, 14 nt, Human
ccaccaucaagcca

SEQ ID NO: 3328383 - RNA, 21 nt, Human
ccaaaacucuccucugcugcu

SEQ ID NO: 3328384 - RNA, 20 nt, Human
ccaaaacucuccucugcugc

SEQ ID NO: 3328385 - RNA, 17 nt, Human
ccaaugggagcucaugg

SEQ ID NO: 3328386 - RNA, 14 nt, Human
ccaaugggagcuca

SEQ ID NO: 3328387 - RNA, 17 nt, Human
ccaagcucugcuccucu

SEQ ID NO: 3328388 - RNA, 12 nt, Human
ccaagcucugcu

SEQ ID NO: 3328389 - RNA, 18 nt, Human
ccaagcucugcuccucuc

SEQ ID NO: 3328390 - RNA, 15 nt, Human
ccaaugauggucacc

SEQ ID NO: 3328391 - RNA, 17 nt, Human
ccaauauuuaccagacc

SEQ ID NO: 3328392 - RNA, 16 nt, Human
ccaacucaccccagcc

SEQ ID NO: 3328393 - RNA, 17 nt, Human
ccaacucaccccagccc

SEQ ID NO: 3328394 - RNA, 18 nt, Human
ccaacucaccccagcccc

SEQ ID NO: 3328395 - RNA, 22 nt, Human
ccaagcucccaggcauucccca

SEQ ID NO: 3328396 - RNA, 23 nt, Human
ccaaauggaaaugggcagagcag

SEQ ID NO: 3328397 - RNA, 14 nt, Human
ccaacucaccccag

SEQ ID NO: 3328398 - RNA, 20 nt, Human
cuggcagaguugaagacaga

SEQ ID NO: 3328399 - RNA, 21 nt, Human
cuggcagaguugaagacagag

SEQ ID NO: 3328400 - RNA, 19 nt, Human
cuggcagaguugaagacag

SEQ ID NO: 3328401 - RNA, 23 nt, Human
cuggcagccccuguucuggcaga

SEQ ID NO: 3328402 - RNA, 22 nt, Human
cuggcagaguugaagacagagc

SEQ ID NO: 3328403 - RNA, 13 nt, Human
cuggcagccccug

SEQ ID NO: 3328404 - RNA, 17 nt, Human
cuggcagcucagagagg

SEQ ID NO: 3328405 - RNA, 19 nt, Human
cuggcagcucagagagggu

SEQ ID NO: 3328406 - RNA, 16 nt, Human
cuggcagcucagagag

SEQ ID NO: 3328407 - RNA, 15 nt, Human
cuggcagcucagaga

SEQ ID NO: 3328408 - RNA, 17 nt, Human
cugggacuacaggugug

SEQ ID NO: 3328409 - RNA, 21 nt, Human
cugggacuacaggcacccacc

SEQ ID NO: 3328410 - RNA, 17 nt, Human
cugggacuacaggcacc

SEQ ID NO: 3328411 - RNA, 16 nt, Human
cugggacuacaggcac

SEQ ID NO: 3328412 - RNA, 14 nt, Human
cuggcucuuccagg

SEQ ID NO: 3328413 - RNA, 15 nt, Human
cuggcucuuccaggc

SEQ ID NO: 3328414 - RNA, 13 nt, Human
cuggcucuuccag

SEQ ID NO: 3328415 - RNA, 14 nt, Human
cuggagaaaaugga

SEQ ID NO: 3328416 - RNA, 21 nt, Human
cuggagaaaauggacguguua

SEQ ID NO: 3328417 - RNA, 14 nt, Human
cugcuuccagugag

SEQ ID NO: 3328418 - RNA, 23 nt, Human
cugcuucagccucccgaguagcu

SEQ ID NO: 3328419 - RNA, 14 nt, Human
cugcuucaaggauc

SEQ ID NO: 3328420 - RNA, 16 nt, Human
cugcuucaaggauccu

SEQ ID NO: 3328421 - RNA, 19 nt, Human
cugcuucaaggauccugag

SEQ ID NO: 3328422 - RNA, 13 nt, Human
cugcuucaaggau

SEQ ID NO: 3328423 - RNA, 16 nt, Human
cuggaugcagccucac

SEQ ID NO: 3328424 - RNA, 17 nt, Human
cuggaugcagccucaca

SEQ ID NO: 3328425 - RNA, 18 nt, Human
cuggaugcagccucacag

SEQ ID NO: 3328426 - RNA, 15 nt, Human
cuggaugcagccuca

SEQ ID NO: 3328427 - RNA, 23 nt, Human
cugccuguucagcuccagcucac

SEQ ID NO: 3328428 - RNA, 20 nt, Human
cugccuguucagcuccagcu

SEQ ID NO: 3328429 - RNA, 24 nt, Human
cugcugaaggcucgagcaugccug

SEQ ID NO: 3328430 - RNA, 23 nt, Human
cugcugaaggcucgagcaugccu

SEQ ID NO: 3328431 - RNA, 18 nt, Human
cugcugaaggcucgagca

SEQ ID NO: 3328432 - RNA, 17 nt, Human
cugcuaucaaagagguu

SEQ ID NO: 3328433 - RNA, 14 nt, Human
cugccuccuuugug

SEQ ID NO: 3328434 - RNA, 17 nt, Human
cugccuccuuugugagg

SEQ ID NO: 3328435 - RNA, 21 nt, Human
cugccuccuuugugaggaagc

SEQ ID NO: 3328436 - RNA, 23 nt, Human
cugccuccuuugugaggaagccg

SEQ ID NO: 3328437 - RNA, 14 nt, Human
cugccucgaacugg

SEQ ID NO: 3328438 - RNA, 20 nt, Human
cugccucgaacuggcugcaa

SEQ ID NO: 3328439 - RNA, 19 nt, Human
cugccucgaacuggcugca

SEQ ID NO: 3328440 - RNA, 24 nt, Human
cugcccugugaguacuacaguccu

SEQ ID NO: 3328441 - RNA, 13 nt, Human
cugcccugugagu

SEQ ID NO: 3328442 - RNA, 19 nt, Human
cugcccuuaccugccagga

SEQ ID NO: 3328443 - RNA, 17 nt, Human
cugcccuuaccugccag

SEQ ID NO: 3328444 - RNA, 12 nt, Human
cugcccuguggg

SEQ ID NO: 3328445 - RNA, 11 nt, Human
cugcccugugg

SEQ ID NO: 3328446 - RNA, 22 nt, Human
cugcccuuaccugccaggaagc

SEQ ID NO: 3328447 - RNA, 23 nt, Human
cugcccuuaccugccaggaagcc

SEQ ID NO: 3328448 - RNA, 13 nt, Human
cuuaaauaaugug

SEQ ID NO: 3328449 - RNA, 14 nt, Human
cuuaaauaauguga

SEQ ID NO: 3328450 - RNA, 16 nt, Human
cuuaaauaaugugaaa

SEQ ID NO: 3328451 - RNA, 19 nt, Human
cuuaaauaaugugaaacug

SEQ ID NO: 3328452 - RNA, 12 nt, Human
cuguuggccagu

SEQ ID NO: 3328453 - RNA, 18 nt, Human
cuguugcccaggcuggcg

SEQ ID NO: 3328454 - RNA, 22 nt, Human
cugugucagguggggcagcuug

SEQ ID NO: 3328455 - RNA, 18 nt, Human
cugugcucuggacaggca

SEQ ID NO: 3328456 - RNA, 17 nt, Human
cuguuacugucuucagu

SEQ ID NO: 3328457 - RNA, 13 nt, Human
cuguuacugucuu

SEQ ID NO: 3328458 - RNA, 15 nt, Human
cuguucagcuccagc

SEQ ID NO: 3328459 - RNA, 14 nt, Human
cuguucagcuccag

SEQ ID NO: 3328460 - RNA, 22 nt, Human
cuguucagcuccagcucaccag

SEQ ID NO: 3328461 - RNA, 19 nt, Human
cuguucagcuccagcucac

SEQ ID NO: 3328462 - RNA, 18 nt, Human
cuguucagcuccagcuca

SEQ ID NO: 3328463 - RNA, 16 nt, Human
cuguucagcuccagcu

SEQ ID NO: 3328464 - RNA, 12 nt, Human
cuguucagcugg

SEQ ID NO: 3328465 - RNA, 15 nt, Human
cugugcucuggacag

SEQ ID NO: 3328466 - RNA, 17 nt, Human
cugugcucuggacaggc

SEQ ID NO: 3328467 - RNA, 14 nt, Human
cugucauuugagca

SEQ ID NO: 3328468 - RNA, 14 nt, Human
cuguccugggagug

SEQ ID NO: 3328469 - RNA, 13 nt, Human
cuguccugggagu

SEQ ID NO: 3328470 - RNA, 20 nt, Human
cuguccugggagugagcugg

SEQ ID NO: 3328471 - RNA, 22 nt, Human
cugucuaaugaaaccugugucu

SEQ ID NO: 3328472 - RNA, 15 nt, Human
cuguagagugggagc

SEQ ID NO: 3328473 - RNA, 22 nt, Human
cuggugacaugucuuuucuugc

SEQ ID NO: 3328474 - RNA, 18 nt, Human
cuggucuuauuuguaaag

SEQ ID NO: 3328475 - RNA, 18 nt, Human
cuucugacccaugcugcc

SEQ ID NO: 3328476 - RNA, 16 nt, Human
cuucugacccaugcug

SEQ ID NO: 3328477 - RNA, 17 nt, Human
cuucugacccaugcugc

SEQ ID NO: 3328478 - RNA, 16 nt, Human
cuucuuauacauuuga

SEQ ID NO: 3328479 - RNA, 13 nt, Human
cuucuuauacauu

SEQ ID NO: 3328480 - RNA, 15 nt, Human
cuucugacccaugcu

SEQ ID NO: 3328481 - RNA, 22 nt, Human
cuucugaacuuggcgcugcccc

SEQ ID NO: 3328482 - RNA, 19 nt, Human
cuucugaacuuggcgcugc

SEQ ID NO: 3328483 - RNA, 13 nt, Human
cuuccucccuccc

SEQ ID NO: 3328484 - RNA, 12 nt, Human
cuuccucccucc

SEQ ID NO: 3328485 - RNA, 14 nt, Human
cuuccucccucccu

SEQ ID NO: 3328486 - RNA, 20 nt, Human
cuuggcgcugccccuggcag

SEQ ID NO: 3328487 - RNA, 23 nt, Human
cuuggcgcugccccuggcagccc

SEQ ID NO: 3328488 - RNA, 21 nt, Human
cuuggcgcugccccuggcagc

SEQ ID NO: 3328489 - RNA, 22 nt, Human
cuuggcgcugccccuggcagcc

SEQ ID NO: 3328490 - RNA, 14 nt, Human
cuuggauugucccc

SEQ ID NO: 3328491 - RNA, 18 nt, Human
cuuggauuguccccgacc

SEQ ID NO: 3328492 - RNA, 20 nt, Human
cuuggauuguccccgacccu

SEQ ID NO: 3328493 - RNA, 15 nt, Human
cuuggauuguccccg

SEQ ID NO: 3328494 - RNA, 18 nt, Human
cuugccgucuaccugagg

SEQ ID NO: 3328495 - RNA, 19 nt, Human
cuugauucauaaugacuua

SEQ ID NO: 3328496 - RNA, 12 nt, Human
cuugauucauaa

SEQ ID NO: 3328497 - RNA, 20 nt, Human
cuuuaaugucacaggcaggu

SEQ ID NO: 3328498 - RNA, 19 nt, Human
cuuuaaugucacaggcagg

SEQ ID NO: 3328499 - RNA, 18 nt, Human
cuuuaaugucacaggcag

SEQ ID NO: 3328500 - RNA, 17 nt, Human
cuuuaaugucacaggca

SEQ ID NO: 3328501 - RNA, 14 nt, Human
cuuucaauaggaaa

SEQ ID NO: 3328502 - RNA, 15 nt, Human
cuuucaauaggaaaa

SEQ ID NO: 3328503 - RNA, 22 nt, Human
cuuuaaugucacaggcaggucc

SEQ ID NO: 3328504 - RNA, 21 nt, Human
cuugucuuuggacccugaggc

SEQ ID NO: 3328505 - RNA, 22 nt, Human
cuugucuuuggacccugaggcc

SEQ ID NO: 3328506 - RNA, 17 nt, Human
cuuucaauaggaaaaac

SEQ ID NO: 3328507 - RNA, 16 nt, Human
cuugguccugcugcag

SEQ ID NO: 3328508 - RNA, 17 nt, Human
cuugguccugcugcagu

SEQ ID NO: 3328509 - RNA, 18 nt, Human
cuugguccugcugcaguu

SEQ ID NO: 3328510 - RNA, 20 nt, Human
cuugguccugcugcaguugc

SEQ ID NO: 3328511 - RNA, 15 nt, Human
cuugguccugcugca

SEQ ID NO: 3328512 - RNA, 19 nt, Human
cuugucuuuggacccugag

SEQ ID NO: 3328513 - RNA, 20 nt, Human
cuugucuuuggacccugagg

SEQ ID NO: 3328514 - RNA, 13 nt, Human
cuugucuguagau

SEQ ID NO: 3328515 - RNA, 20 nt, Human
cuugguucccauuugcuccu

SEQ ID NO: 3328516 - RNA, 16 nt, Human
cuugguucccauuugc

SEQ ID NO: 3328517 - RNA, 22 nt, Human
cuugguccugcugcaguugcca

SEQ ID NO: 3328518 - RNA, 20 nt, Human
cuuggugucgggcaugacac

SEQ ID NO: 3328519 - RNA, 14 nt, Human
gaacaaggcaaggc

SEQ ID NO: 3328520 - RNA, 15 nt, Human
gaacaaggcaaggcu

SEQ ID NO: 3328521 - RNA, 17 nt, Human
gaacaaggcaaggcugu

SEQ ID NO: 3328522 - RNA, 18 nt, Human
gaacaaggcaaggcuguc

SEQ ID NO: 3328523 - RNA, 21 nt, Human
gaacaaggcaaggcugucaau

SEQ ID NO: 3328524 - RNA, 17 nt, Human
gaaaggcuccaggagca

SEQ ID NO: 3328525 - RNA, 18 nt, Human
gaaaggcuccaggagcag

SEQ ID NO: 3328526 - RNA, 19 nt, Human
gaaaggcuccaggagcagc

SEQ ID NO: 3328527 - RNA, 16 nt, Human
gaaaggcuccaggagc

SEQ ID NO: 3328528 - RNA, 18 nt, Human
gaaagacuaucuaaaugu

SEQ ID NO: 3328529 - RNA, 21 nt, Human
gaaaguacuucuccacccugc

SEQ ID NO: 3328530 - RNA, 19 nt, Human
gaaauuuuuauuaaauuau

SEQ ID NO: 3328531 - RNA, 18 nt, Human
gaaauuuuuauuaaauua

SEQ ID NO: 3328532 - RNA, 17 nt, Human
gaaaucaccgaaaacgu

SEQ ID NO: 3328533 - RNA, 18 nt, Human
gaaaauuuugauguuuua

SEQ ID NO: 3328534 - RNA, 14 nt, Human
gaaaauuuuaaaaa

SEQ ID NO: 3328535 - RNA, 12 nt, Human
gaaacaaacuuu

SEQ ID NO: 3328536 - RNA, 19 nt, Human
gaaaaaauauuuuccugcc

SEQ ID NO: 3328537 - RNA, 21 nt, Human
cuuuuuuuuuuuuuuugacaa

SEQ ID NO: 3328538 - RNA, 14 nt, Human
cuuuugugcauuau

SEQ ID NO: 3328539 - RNA, 18 nt, Human
cuuuugugcauuaucuag

SEQ ID NO: 3328540 - RNA, 16 nt, Human
cuuuuggucuguguga

SEQ ID NO: 3328541 - RNA, 15 nt, Human
cuuuuggucugugug

SEQ ID NO: 3328542 - RNA, 16 nt, Human
cuuuugccguuauuaa

SEQ ID NO: 3328543 - RNA, 18 nt, Human
cuuuugccguuauuaaaa

SEQ ID NO: 3328544 - RNA, 17 nt, Human
gagggccugcaagggag

SEQ ID NO: 3328545 - RNA, 21 nt, Human
gagggccugcaagggagugag

SEQ ID NO: 3328546 - RNA, 14 nt, Human
gagggccugcaagg

SEQ ID NO: 3328547 - RNA, 19 nt, Human
gaggcauuuguuugaacug

SEQ ID NO: 3328548 - RNA, 22 nt, Human
gaggcaugugaugagaggaaau

SEQ ID NO: 3328549 - RNA, 20 nt, Human
gaggcaugugaugagaggaa

SEQ ID NO: 3328550 - RNA, 21 nt, Human
gaggcaugugaugagaggaaa

SEQ ID NO: 3328551 - RNA, 21 nt, Human
gaggcauuuguuugaacugau

SEQ ID NO: 3328552 - RNA, 20 nt, Human
gaggcagggucucacucugu

SEQ ID NO: 3328553 - RNA, 19 nt, Human
gaggcagggucucacucug

SEQ ID NO: 3328554 - RNA, 18 nt, Human
gaggcagggucucacucu

SEQ ID NO: 3328555 - RNA, 14 nt, Human
gaggagagaggacc

SEQ ID NO: 3328556 - RNA, 15 nt, Human
gaggagagaggaccc

SEQ ID NO: 3328557 - RNA, 12 nt, Human
gaggagagagga

SEQ ID NO: 3328558 - RNA, 16 nt, Human
gaggacuuuucuuugu

SEQ ID NO: 3328559 - RNA, 23 nt, Human
gaggacuuuucuuuguggcuucc

SEQ ID NO: 3328560 - RNA, 20 nt, Human
gaggacuuuucuuuguggcu

SEQ ID NO: 3328561 - RNA, 23 nt, Human
gaggacagggaggugaccccagg

SEQ ID NO: 3328562 - RNA, 13 nt, Human
gagcccugguggc

SEQ ID NO: 3328563 - RNA, 14 nt, Human
gagccccgaggccu

SEQ ID NO: 3328564 - RNA, 13 nt, Human
gagccccgaggcc

SEQ ID NO: 3328565 - RNA, 17 nt, Human
gagccccgaggccuucu

SEQ ID NO: 3328566 - RNA, 13 nt, Human
gagcaugccugga

SEQ ID NO: 3328567 - RNA, 15 nt, Human
gagcaucaggccagg

SEQ ID NO: 3328568 - RNA, 16 nt, Human
gagcaucaggccaggc

SEQ ID NO: 3328569 - RNA, 13 nt, Human
gagcaucaggcca

SEQ ID NO: 3328570 - RNA, 14 nt, Human
gagcaucaggccag

SEQ ID NO: 3328571 - RNA, 21 nt, Human
gagcagggcucagcggggaca

SEQ ID NO: 3328572 - RNA, 14 nt, Human
gacuuuuccaaccc

SEQ ID NO: 3328573 - RNA, 19 nt, Human
gacuuuuccaacccucauc

SEQ ID NO: 3328574 - RNA, 22 nt, Human
gacuuuguuaguuucuccaagc

SEQ ID NO: 3328575 - RNA, 14 nt, Human
gagacggaguccca

SEQ ID NO: 3328576 - RNA, 19 nt, Human
gagacggagucccaccuug

SEQ ID NO: 3328577 - RNA, 16 nt, Human
gagacggagucccacc

SEQ ID NO: 3328578 - RNA, 18 nt, Human
gagacgggggcagagagg

SEQ ID NO: 3328579 - RNA, 21 nt, Human
gagacccugucucaaaaaaag

SEQ ID NO: 3328580 - RNA, 23 nt, Human
gagaaugaaagggcccagagagg

SEQ ID NO: 3328581 - RNA, 15 nt, Human
gagaaugaaagggcc

SEQ ID NO: 3328582 - RNA, 15 nt, Human
gagaggacccccuga

SEQ ID NO: 3328583 - RNA, 20 nt, Human
gagagcugggugucaagagg

SEQ ID NO: 3328584 - RNA, 12 nt, Human
gagaggaaauca

SEQ ID NO: 3328585 - RNA, 22 nt, Human
gagaggcauccaguaucuugaa

SEQ ID NO: 3328586 - RNA, 18 nt, Human
gagagccuuccaggggug

SEQ ID NO: 3328587 - RNA, 20 nt, Human
gagagccuuccagggguggg

SEQ ID NO: 3328588 - RNA, 15 nt, Human
gagagcuagcagcag

SEQ ID NO: 3328589 - RNA, 21 nt, Human
gagagcuagcagcagggaggg

SEQ ID NO: 3328590 - RNA, 13 nt, Human
gagagcugggugu

SEQ ID NO: 3328591 - RNA, 13 nt, Human
gagacuccugcag

SEQ ID NO: 3328592 - RNA, 14 nt, Human
gagagccuuccagg

SEQ ID NO: 3328593 - RNA, 15 nt, Human
gagagccuuccaggg

SEQ ID NO: 3328594 - RNA, 16 nt, Human
gagagccuuccagggg

SEQ ID NO: 3328595 - RNA, 21 nt, Human
gagauugcaccacugcacucc

SEQ ID NO: 3328596 - RNA, 14 nt, Human
gagauuggaaggaa

SEQ ID NO: 3328597 - RNA, 23 nt, Human
gacauugcggacagccacggcca

SEQ ID NO: 3328598 - RNA, 17 nt, Human
gacauugcggacagcca

SEQ ID NO: 3328599 - RNA, 14 nt, Human
gacagucccugcca

SEQ ID NO: 3328600 - RNA, 15 nt, Human
gacagucccugccaa

SEQ ID NO: 3328601 - RNA, 16 nt, Human
gacagucccugccaau

SEQ ID NO: 3328602 - RNA, 20 nt, Human
gacagucccugccaauggac

SEQ ID NO: 3328603 - RNA, 11 nt, Human
gacagcucuua

SEQ ID NO: 3328604 - RNA, 12 nt, Human
gacagucccugc

SEQ ID NO: 3328605 - RNA, 10 nt, Human
gacagcucuu

SEQ ID NO: 3328606 - RNA, 19 nt, Human
gacagcuccuucuguccua

SEQ ID NO: 3328607 - RNA, 14 nt, Human
gacagcccgggcuc

SEQ ID NO: 3328608 - RNA, 18 nt, Human
gacagcuccuucuguccu

SEQ ID NO: 3328609 - RNA, 17 nt, Human
gacagcuccuucugucc

SEQ ID NO: 3328610 - RNA, 16 nt, Human
gacagcuccuucuguc

SEQ ID NO: 3328611 - RNA, 18 nt, Human
gaccucaggugagaagca

SEQ ID NO: 3328612 - RNA, 19 nt, Human
gaccucaggugagaagcag

SEQ ID NO: 3328613 - RNA, 19 nt, Human
gaccucaggccugggggcu

SEQ ID NO: 3328614 - RNA, 21 nt, Human
gaccucaggugauccacccac

SEQ ID NO: 3328615 - RNA, 20 nt, Human
gaccucaggugauccaccca

SEQ ID NO: 3328616 - RNA, 21 nt, Human
gaccucaggugagaagcagag

SEQ ID NO: 3328617 - RNA, 19 nt, Human
gaccucaggugauccaccc

SEQ ID NO: 3328618 - RNA, 14 nt, Human
gaccucaggccugg

SEQ ID NO: 3328619 - RNA, 13 nt, Human
gaccucaggccug

SEQ ID NO: 3328620 - RNA, 16 nt, Human
gaccucugcagcaaua

SEQ ID NO: 3328621 - RNA, 18 nt, Human
gaccucugcagcaauaaa

SEQ ID NO: 3328622 - RNA, 22 nt, Human
gaccucugcagcaauaaagcag

SEQ ID NO: 3328623 - RNA, 12 nt, Human
gacgccauccca

SEQ ID NO: 3328624 - RNA, 13 nt, Human
gacgccaucccag

SEQ ID NO: 3328625 - RNA, 14 nt, Human
gaccucugcagcaa

SEQ ID NO: 3328626 - RNA, 19 nt, Human
gacgccaucccagccccaa

SEQ ID NO: 3328627 - RNA, 21 nt, Human
gacgccaucccagccccaaug

SEQ ID NO: 3328628 - RNA, 16 nt, Human
gacgcugugcugcccu

SEQ ID NO: 3328629 - RNA, 17 nt, Human
gacgcugugcugcccug

SEQ ID NO: 3328630 - RNA, 18 nt, Human
gacgcugugcugcccugc

SEQ ID NO: 3328631 - RNA, 15 nt, Human
gacgcugugcugccc

SEQ ID NO: 3328632 - RNA, 22 nt, Human
gacgcuacccgggaagggggcu

SEQ ID NO: 3328633 - RNA, 19 nt, Human
gacgcuacccgggaagggg

SEQ ID NO: 3328634 - RNA, 23 nt, Human
gacgcuacccgggaagggggcug

SEQ ID NO: 3328635 - RNA, 12 nt, Human
gaauauugcuga

SEQ ID NO: 3328636 - RNA, 11 nt, Human
gaauauugcug

SEQ ID NO: 3328637 - RNA, 15 nt, Human
gaauauauaaccagu

SEQ ID NO: 3328638 - RNA, 20 nt, Human
gaauauugcugauggugcaa

SEQ ID NO: 3328639 - RNA, 24 nt, Human
gaauauugcugauggugcaaugac

SEQ ID NO: 3328640 - RNA, 22 nt, Human
gaauauugcugauggugcaaug

SEQ ID NO: 3328641 - RNA, 23 nt, Human
gaauauugcugauggugcaauga

SEQ ID NO: 3328642 - RNA, 20 nt, Human
gacacagcucuucuccaggc

SEQ ID NO: 3328643 - RNA, 19 nt, Human
gacacagcucuucuccagg

SEQ ID NO: 3328644 - RNA, 12 nt, Human
gacacagcucuu

SEQ ID NO: 3328645 - RNA, 17 nt, Human
gacacagcucuucucca

SEQ ID NO: 3328646 - RNA, 19 nt, Human
gaauguuugccucugccuc

SEQ ID NO: 3328647 - RNA, 18 nt, Human
gaauguuugccucugccu

SEQ ID NO: 3328648 - RNA, 17 nt, Human
gaauguuugccucugcc

SEQ ID NO: 3328649 - RNA, 16 nt, Human
gaauguuugccucugc

SEQ ID NO: 3328650 - RNA, 19 nt, Human
gaaugcacaaacagaggcc

SEQ ID NO: 3328651 - RNA, 15 nt, Human
gaauguuugccucug

SEQ ID NO: 3328652 - RNA, 18 nt, Human
gaaugcacaaacagaggc

SEQ ID NO: 3328653 - RNA, 20 nt, Human
gaaugaugauccuaggcauu

SEQ ID NO: 3328654 - RNA, 14 nt, Human
gaaugaugccauga

SEQ ID NO: 3328655 - RNA, 14 nt, Human
gaaugauuaauuaa

SEQ ID NO: 3328656 - RNA, 16 nt, Human
gcauacguacacauuu

SEQ ID NO: 3328657 - RNA, 17 nt, Human
gcauacguacacauuuu

SEQ ID NO: 3328658 - RNA, 15 nt, Human
gcauacguacacauu

SEQ ID NO: 3328659 - RNA, 14 nt, Human
gcauacguacacau

SEQ ID NO: 3328660 - RNA, 18 nt, Human
gcauccaguaucuugaag

SEQ ID NO: 3328661 - RNA, 14 nt, Human
gcauccaguaucuu

SEQ ID NO: 3328662 - RNA, 17 nt, Human
gcauccaguaucuugaa

SEQ ID NO: 3328663 - RNA, 16 nt, Human
gcauuuaaaagauaca

SEQ ID NO: 3328664 - RNA, 17 nt, Human
gcauuuaaaagauacag

SEQ ID NO: 3328665 - RNA, 16 nt, Human
gcauugugggaagggg

SEQ ID NO: 3328666 - RNA, 15 nt, Human
gcauuuaaaagauac

SEQ ID NO: 3328667 - RNA, 18 nt, Human
gcauuuaaaagauacagu

SEQ ID NO: 3328668 - RNA, 22 nt, Human
gcauuuaaaagauacaguuacu

SEQ ID NO: 3328669 - RNA, 15 nt, Human
gcauuuacuuugugu

SEQ ID NO: 3328670 - RNA, 13 nt, Human
gcauugugggaag

SEQ ID NO: 3328671 - RNA, 15 nt, Human
gcauugugggaaggg

SEQ ID NO: 3328672 - RNA, 21 nt, Human
gcaugugaugagaggaaauca

SEQ ID NO: 3328673 - RNA, 18 nt, Human
gcaugugaugagaggaaa

SEQ ID NO: 3328674 - RNA, 19 nt, Human
gcaugugaugagaggaaau

SEQ ID NO: 3328675 - RNA, 21 nt, Human
gcauggcugccaaugggagcu

SEQ ID NO: 3328676 - RNA, 13 nt, Human
gcauccuggcacc

SEQ ID NO: 3328677 - RNA, 16 nt, Human
gcagccaggccacaag

SEQ ID NO: 3328678 - RNA, 14 nt, Human
gcagagggcacaga

SEQ ID NO: 3328679 - RNA, 17 nt, Human
gcagcauauucaggaag

SEQ ID NO: 3328680 - RNA, 18 nt, Human
gcagcauauucaggaagc

SEQ ID NO: 3328681 - RNA, 19 nt, Human
gcagcauauucaggaagcu

SEQ ID NO: 3328682 - RNA, 23 nt, Human
gcagcauauucaggaagcucagg

SEQ ID NO: 3328683 - RNA, 13 nt, Human
gcagaggaaagca

SEQ ID NO: 3328684 - RNA, 14 nt, Human
gcagaggaaagcaa

SEQ ID NO: 3328685 - RNA, 18 nt, Human
gcagaggaaagcaaagga

SEQ ID NO: 3328686 - RNA, 20 nt, Human
gcagaggaaagcaaaggaga

SEQ ID NO: 3328687 - RNA, 21 nt, Human
gcagaggaaagcaaaggagau

SEQ ID NO: 3328688 - RNA, 16 nt, Human
gcacuuuguucuggcu

SEQ ID NO: 3328689 - RNA, 12 nt, Human
gcacuccccugc

SEQ ID NO: 3328690 - RNA, 15 nt, Human
gcacuccccugcugg

SEQ ID NO: 3328691 - RNA, 18 nt, Human
gcacuuuguucuggcucu

SEQ ID NO: 3328692 - RNA, 19 nt, Human
gcacuuuguucuggcucuu

SEQ ID NO: 3328693 - RNA, 13 nt, Human
gcacuccccugcu

SEQ ID NO: 3328694 - RNA, 14 nt, Human
gcacuccccugcug

SEQ ID NO: 3328695 - RNA, 14 nt, Human
gcacuccagccugg

SEQ ID NO: 3328696 - RNA, 22 nt, Human
gcacuuuguucuggcucuucca

SEQ ID NO: 3328697 - RNA, 18 nt, Human
gcaagugagagcugggug

SEQ ID NO: 3328698 - RNA, 20 nt, Human
gcacucagaagacacugaug

SEQ ID NO: 3328699 - RNA, 17 nt, Human
gcacucagaagacacug

SEQ ID NO: 3328700 - RNA, 21 nt, Human
gaugcuucuucagagacuccu

SEQ ID NO: 3328701 - RNA, 23 nt, Human
gaugcuucucacugccaugccag

SEQ ID NO: 3328702 - RNA, 17 nt, Human
gaugcuucuucagagac

SEQ ID NO: 3328703 - RNA, 20 nt, Human
gaugcuucuucagagacucc

SEQ ID NO: 3328704 - RNA, 22 nt, Human
gaugauuggaggggggaggugg

SEQ ID NO: 3328705 - RNA, 13 nt, Human
gaugauccuaggc

SEQ ID NO: 3328706 - RNA, 18 nt, Human
gaucucuugagccuggga

SEQ ID NO: 3328707 - RNA, 19 nt, Human
gaucucuugagccugggag

SEQ ID NO: 3328708 - RNA, 15 nt, Human
gaucucuaacuucac

SEQ ID NO: 3328709 - RNA, 17 nt, Human
gauauuuuuuucuuuuc

SEQ ID NO: 3328710 - RNA, 20 nt, Human
gaucaaaagguuaauaaagu

SEQ ID NO: 3328711 - RNA, 23 nt, Human
gaucaaaagguuaauaaaguaau

SEQ ID NO: 3328712 - RNA, 19 nt, Human
gauccacccaccucagccu

SEQ ID NO: 3328713 - RNA, 18 nt, Human
gauccacccaccucagcc

SEQ ID NO: 3328714 - RNA, 21 nt, Human
gauccaagcuggucccacuca

SEQ ID NO: 3328715 - RNA, 21 nt, Human
gauccacccaccucagccucc

SEQ ID NO: 3328716 - RNA, 20 nt, Human
gauccacccaccucagccuc

SEQ ID NO: 3328717 - RNA, 22 nt, Human
gauccacccaccucagccuccc

SEQ ID NO: 3328718 - RNA, 19 nt, Human
gauccaagcuggucccacu

SEQ ID NO: 3328719 - RNA, 17 nt, Human
gauccaagcugguccca

SEQ ID NO: 3328720 - RNA, 16 nt, Human
gauccaagcugguccc

SEQ ID NO: 3328721 - RNA, 12 nt, Human
gauccaagcugg

SEQ ID NO: 3328722 - RNA, 21 nt, Human
gauacuguaucaugacaaaga

SEQ ID NO: 3328723 - RNA, 17 nt, Human
gauacuguaucaugaca

SEQ ID NO: 3328724 - RNA, 23 nt, Human
gauacaggaaaagcugcugacag

SEQ ID NO: 3328725 - RNA, 19 nt, Human
gauacaguuacucagaauu

SEQ ID NO: 3328726 - RNA, 23 nt, Human
gauacaguuacucagaauucucu

SEQ ID NO: 3328727 - RNA, 16 nt, Human
gauacaguuacucaga

SEQ ID NO: 3328728 - RNA, 14 nt, Human
gcaaaaaggcagga

SEQ ID NO: 3328729 - RNA, 22 nt, Human
gcaaaagaugcuucucacugcc

SEQ ID NO: 3328730 - RNA, 17 nt, Human
gcaaaagaugcuucuca

SEQ ID NO: 3328731 - RNA, 16 nt, Human
gauuuuuuuuuccuuc

SEQ ID NO: 3328732 - RNA, 17 nt, Human
gauuuuuuuuuccuuca

SEQ ID NO: 3328733 - RNA, 18 nt, Human
gauuuuuuuuuccuucag

SEQ ID NO: 3328734 - RNA, 11 nt, Human
gauuucacucu

SEQ ID NO: 3328735 - RNA, 16 nt, Human
gauuuaacagaaaugu

SEQ ID NO: 3328736 - RNA, 17 nt, Human
gauuuaacagaaaugua

SEQ ID NO: 3328737 - RNA, 18 nt, Human
gauuuaacagaaauguac

SEQ ID NO: 3328738 - RNA, 15 nt, Human
gauucuucugcuuca

SEQ ID NO: 3328739 - RNA, 13 nt, Human
gauucuucugcuu

SEQ ID NO: 3328740 - RNA, 12 nt, Human
gauucuucugcu

SEQ ID NO: 3328741 - RNA, 13 nt, Human
gcaacaggcuggg

SEQ ID NO: 3328742 - RNA, 15 nt, Human
gcaacaggcugggcu

SEQ ID NO: 3328743 - RNA, 14 nt, Human
gcaacaggcugggc

SEQ ID NO: 3328744 - RNA, 19 nt, Human
gcaacaggcugggcuucag

SEQ ID NO: 3328745 - RNA, 16 nt, Human
gcaacaggcugggcuu

SEQ ID NO: 3328746 - RNA, 16 nt, Human
gcaaccaccaccaacc

SEQ ID NO: 3328747 - RNA, 18 nt, Human
gcaaccaccaccaaccac

SEQ ID NO: 3328748 - RNA, 13 nt, Human
gcaaccaccacca

SEQ ID NO: 3328749 - RNA, 19 nt, Human
gcaaccuccgccucuuggg

SEQ ID NO: 3328750 - RNA, 16 nt, Human
gcaacccccagccugc

SEQ ID NO: 3328751 - RNA, 15 nt, Human
gcaacccccagccug

SEQ ID NO: 3328752 - RNA, 14 nt, Human
gcaacccccagccu

SEQ ID NO: 3328753 - RNA, 20 nt, Human
gcaaccuccgccucuugggu

SEQ ID NO: 3328754 - RNA, 15 nt, Human
gcaagugagagcugg

SEQ ID NO: 3328755 - RNA, 16 nt, Human
gcaagugagagcuggg

SEQ ID NO: 3328756 - RNA, 14 nt, Human
ggcucacugcagcc

SEQ ID NO: 3328757 - RNA, 13 nt, Human
ggcucacugcagc

SEQ ID NO: 3328758 - RNA, 15 nt, Human
ggcucacugcagccu

SEQ ID NO: 3328759 - RNA, 14 nt, Human
ggcucuuccaggcu

SEQ ID NO: 3328760 - RNA, 15 nt, Human
ggcucuuccaggcug

SEQ ID NO: 3328761 - RNA, 17 nt, Human
ggcucuuccaggcuggg

SEQ ID NO: 3328762 - RNA, 18 nt, Human
ggcucuuccaggcuggga

SEQ ID NO: 3328763 - RNA, 14 nt, Human
ggcuggccuggccc

SEQ ID NO: 3328764 - RNA, 13 nt, Human
ggcuggccuggcc

SEQ ID NO: 3328765 - RNA, 14 nt, Human
aaaaaggaggaaga

SEQ ID NO: 3328766 - RNA, 21 nt, Human
aaaaaggaugcacagaguugu

SEQ ID NO: 3328767 - RNA, 12 nt, Human
aaaaaggcagga

SEQ ID NO: 3328768 - RNA, 22 nt, Human
ggcuggguucuacccaggugcu

SEQ ID NO: 3328769 - RNA, 14 nt, Human
ggcuggguuggagg

SEQ ID NO: 3328770 - RNA, 22 nt, Human
aaaaaacugcugacuguuuucu

SEQ ID NO: 3328771 - RNA, 13 nt, Human
aaaaaaacacaaa

SEQ ID NO: 3328772 - RNA, 16 nt, Human
ggccagaugcaccagc

SEQ ID NO: 3328773 - RNA, 15 nt, Human
ggccagaugcaccag

SEQ ID NO: 3328774 - RNA, 18 nt, Human
ggccucccaacucacccc

SEQ ID NO: 3328775 - RNA, 19 nt, Human
ggccucccaacucacccca

SEQ ID NO: 3328776 - RNA, 17 nt, Human
ggccucccaacucaccc

SEQ ID NO: 3328777 - RNA, 13 nt, Human
ggccucagugcca

SEQ ID NO: 3328778 - RNA, 20 nt, Human
ggccucccaacucaccccag

SEQ ID NO: 3328779 - RNA, 22 nt, Human
ggccucccaacucaccccagcc

SEQ ID NO: 3328780 - RNA, 23 nt, Human
ggccucccaacucaccccagccc

SEQ ID NO: 3328781 - RNA, 14 nt, Human
ggcuaccuuuguau

SEQ ID NO: 3328782 - RNA, 13 nt, Human
ggcuaccuuugua

SEQ ID NO: 3328783 - RNA, 16 nt, Human
ggcuaauguacugcau

SEQ ID NO: 3328784 - RNA, 20 nt, Human
ggcuaagugauccucccacc

SEQ ID NO: 3328785 - RNA, 15 nt, Human
ggccuggccagaugc

SEQ ID NO: 3328786 - RNA, 12 nt, Human
ggccuggccaga

SEQ ID NO: 3328787 - RNA, 16 nt, Human
ggccugcaagggagug

SEQ ID NO: 3328788 - RNA, 17 nt, Human
ggccagagacacaagcc

SEQ ID NO: 3328789 - RNA, 18 nt, Human
ggccagagacacaagccu

SEQ ID NO: 3328790 - RNA, 19 nt, Human
ggccagagggagugacaga

SEQ ID NO: 3328791 - RNA, 17 nt, Human
ggccagagggagugaca

SEQ ID NO: 3328792 - RNA, 17 nt, Human
ggcauuuguuugaacug

SEQ ID NO: 3328793 - RNA, 13 nt, Human
ggccaaaggaagc

SEQ ID NO: 3328794 - RNA, 14 nt, Human
ggccaaaggaagca

SEQ ID NO: 3328795 - RNA, 16 nt, Human
ggccaaaggaagcaca

SEQ ID NO: 3328796 - RNA, 19 nt, Human
ggccaaaggaagcacaugc

SEQ ID NO: 3328797 - RNA, 14 nt, Human
ggcauuugcugaau

SEQ ID NO: 3328798 - RNA, 20 nt, Human
ggcacugcuuccagugaggc

SEQ ID NO: 3328799 - RNA, 13 nt, Human
ggcagccaggcca

SEQ ID NO: 3328800 - RNA, 22 nt, Human
ggcagccccauucugccugccc

SEQ ID NO: 3328801 - RNA, 21 nt, Human
ggcagccccauucugccugcc

SEQ ID NO: 3328802 - RNA, 20 nt, Human
ggcagccccauucugccugc

SEQ ID NO: 3328803 - RNA, 16 nt, Human
ggcagccccauucugc

SEQ ID NO: 3328804 - RNA, 18 nt, Human
ggcaggaggaucacuuga

SEQ ID NO: 3328805 - RNA, 16 nt, Human
ggcacugcuuccagug

SEQ ID NO: 3328806 - RNA, 18 nt, Human
ggcacaucagcacgauuu

SEQ ID NO: 3328807 - RNA, 18 nt, Human
ggcacaccgggcacucag

SEQ ID NO: 3328808 - RNA, 15 nt, Human
ggcaaaaaggcagga

SEQ ID NO: 3328809 - RNA, 21 nt, Human
ggagggugacgggggugaacu

SEQ ID NO: 3328810 - RNA, 22 nt, Human
ggaggugggauccuccaggugc

SEQ ID NO: 3328811 - RNA, 23 nt, Human
ggaggugggauccuccaggugca

SEQ ID NO: 3328812 - RNA, 13 nt, Human
ggaggggggaggu

SEQ ID NO: 3328813 - RNA, 16 nt, Human
ggaguucaucuugaau

SEQ ID NO: 3328814 - RNA, 15 nt, Human
ggauccugagccaga

SEQ ID NO: 3328815 - RNA, 16 nt, Human
ggauccugagccagau

SEQ ID NO: 3328816 - RNA, 18 nt, Human
ggauccugagccagauuu

SEQ ID NO: 3328817 - RNA, 19 nt, Human
ggauccugagccagauuuc

SEQ ID NO: 3328818 - RNA, 20 nt, Human
ggauccugagccagauuuca

SEQ ID NO: 3328819 - RNA, 23 nt, Human
ggauccugagccagauuucacuc

SEQ ID NO: 3328820 - RNA, 13 nt, Human
ggauuguccccga

SEQ ID NO: 3328821 - RNA, 14 nt, Human
ggaugaaaaaauaa

SEQ ID NO: 3328822 - RNA, 22 nt, Human
ggauuuaacagaaauguacagc

SEQ ID NO: 3328823 - RNA, 16 nt, Human
ggauuuaacagaaaug

SEQ ID NO: 3328824 - RNA, 17 nt, Human
ggauuuaacagaaaugu

SEQ ID NO: 3328825 - RNA, 16 nt, Human
ggauuguccccgaccc

SEQ ID NO: 3328826 - RNA, 20 nt, Human
ggauuguccccgacccuugc

SEQ ID NO: 3328827 - RNA, 12 nt, Human
ggauuuaacaga

SEQ ID NO: 3328828 - RNA, 16 nt, Human
ggaguggccacagaaa

SEQ ID NO: 3328829 - RNA, 12 nt, Human
ggagugggccca

SEQ ID NO: 3328830 - RNA, 22 nt, Human
ggagugggcccaaugcacuuug

SEQ ID NO: 3328831 - RNA, 14 nt, Human
ggaguggccacaga

SEQ ID NO: 3328832 - RNA, 15 nt, Human
ggaguggccacagaa

SEQ ID NO: 3328833 - RNA, 15 nt, Human
aaauauaggaacuua

SEQ ID NO: 3328834 - RNA, 14 nt, Human
aaauauauauagaa

SEQ ID NO: 3328835 - RNA, 18 nt, Human
aaauauauacgaacaaaa

SEQ ID NO: 3328836 - RNA, 19 nt, Human
aaauaccagccaguaaaug

SEQ ID NO: 3328837 - RNA, 16 nt, Human
guacacacacauacac

SEQ ID NO: 3328838 - RNA, 20 nt, Human
aaauaccagccaguaaaugg

SEQ ID NO: 3328839 - RNA, 21 nt, Human
aaauaccagccaguaaauggg

SEQ ID NO: 3328840 - RNA, 18 nt, Human
aaauaccagccaguaaau

SEQ ID NO: 3328841 - RNA, 23 nt, Human
aaauaucugaaaauguaugugua

SEQ ID NO: 3328842 - RNA, 22 nt, Human
aaauaucugaaaauguaugugu

SEQ ID NO: 3328843 - RNA, 21 nt, Human
aaauaucugaaaauguaugug

SEQ ID NO: 3328844 - RNA, 19 nt, Human
aaauaucugaaaauguaug

SEQ ID NO: 3328845 - RNA, 18 nt, Human
aaauaucugaaaauguau

SEQ ID NO: 3328846 - RNA, 17 nt, Human
aaauaucugaaaaugua

SEQ ID NO: 3328847 - RNA, 14 nt, Human
aaauaucugaaaau

SEQ ID NO: 3328848 - RNA, 12 nt, Human
aaauaucugaaa

SEQ ID NO: 3328849 - RNA, 19 nt, Human
aaaucagccugcuccagcu

SEQ ID NO: 3328850 - RNA, 21 nt, Human
aaaucagccugcuccagcugu

SEQ ID NO: 3328851 - RNA, 23 nt, Human
aaaucagccugcuccagcuguuc

SEQ ID NO: 3328852 - RNA, 18 nt, Human
aaaucagccugcuccagc

SEQ ID NO: 3328853 - RNA, 22 nt, Human
aaaguguauuuuuuuacuaaua

SEQ ID NO: 3328854 - RNA, 14 nt, Human
aaauaaugugaaac

SEQ ID NO: 3328855 - RNA, 22 nt, Human
aaauaaugugaaacuggauuaa

SEQ ID NO: 3328856 - RNA, 16 nt, Human
guaacaagccacccca

SEQ ID NO: 3328857 - RNA, 19 nt, Human
guaacaggaaaauuuuaaa

SEQ ID NO: 3328858 - RNA, 21 nt, Human
guaauuuuuuuaucgucacug

SEQ ID NO: 3328859 - RNA, 15 nt, Human
guaauuugugauaca

SEQ ID NO: 3328860 - RNA, 17 nt, Human
guaauuugugauacaau

SEQ ID NO: 3328861 - RNA, 20 nt, Human
guaauuugugauacaaugcu

SEQ ID NO: 3328862 - RNA, 23 nt, Human
guaauccuagcacuuugggaggc

SEQ ID NO: 3328863 - RNA, 17 nt, Human
gguucccauuugcuccu

SEQ ID NO: 3328864 - RNA, 17 nt, Human
gguguuuccuggcacug

SEQ ID NO: 3328865 - RNA, 19 nt, Human
gguguuuccuggcacugcu

SEQ ID NO: 3328866 - RNA, 22 nt, Human
gguucccuuuuuuggcugcuga

SEQ ID NO: 3328867 - RNA, 23 nt, Human
gguucccuuugacgccaucccag

SEQ ID NO: 3328868 - RNA, 22 nt, Human
gguucccuuugacgccauccca

SEQ ID NO: 3328869 - RNA, 11 nt, Human
gguguggggga

SEQ ID NO: 3328870 - RNA, 13 nt, Human
ggugugggggaag

SEQ ID NO: 3328871 - RNA, 13 nt, Human
ggugggggccucg

SEQ ID NO: 3328872 - RNA, 14 nt, Human
gguguggagaagcg

SEQ ID NO: 3328873 - RNA, 23 nt, Human
gguguggagaagcggcuggcagc

SEQ ID NO: 3328874 - RNA, 12 nt, Human
gguguggagaag

SEQ ID NO: 3328875 - RNA, 19 nt, Human
aaaguacacuguuucaaac

SEQ ID NO: 3328876 - RNA, 23 nt, Human
aaaguacuucuccacccugcucu

SEQ ID NO: 3328877 - RNA, 18 nt, Human
aaaguacacuguuucaaa

SEQ ID NO: 3328878 - RNA, 22 nt, Human
aaaguagaagucuuagauguau

SEQ ID NO: 3328879 - RNA, 20 nt, Human
aaaguagaagucuuagaugu

SEQ ID NO: 3328880 - RNA, 21 nt, Human
aaaguaucccuacuguaauuu

SEQ ID NO: 3328881 - RNA, 14 nt, Human
aaaguguauuuuuu

SEQ ID NO: 3328882 - RNA, 21 nt, Human
aaaguguauuuuuuuacuaau

SEQ ID NO: 3328883 - RNA, 18 nt, Human
aaaguaucccuacuguaa

SEQ ID NO: 3328884 - RNA, 22 nt, Human
gguuucuaaagcugccagccga

SEQ ID NO: 3328885 - RNA, 16 nt, Human
gguuucuaaagcugcc

SEQ ID NO: 3328886 - RNA, 15 nt, Human
gguuucagaaaugug

SEQ ID NO: 3328887 - RNA, 20 nt, Human
gguuuguaaauuaacuuuua

SEQ ID NO: 3328888 - RNA, 12 nt, Human
gguggcuggguu

SEQ ID NO: 3328889 - RNA, 18 nt, Human
gguggcuggguuggaggg

SEQ ID NO: 3328890 - RNA, 17 nt, Human
ggugggacacccuguga

SEQ ID NO: 3328891 - RNA, 13 nt, Human
ggugggacacccu

SEQ ID NO: 3328892 - RNA, 16 nt, Human
ggugggacacccugug

SEQ ID NO: 3328893 - RNA, 19 nt, Human
gguggggaccucaggccug

SEQ ID NO: 3328894 - RNA, 20 nt, Human
aaagggcccagagagggugg

SEQ ID NO: 3328895 - RNA, 12 nt, Human
aaagcugccagc

SEQ ID NO: 3328896 - RNA, 13 nt, Human
aaagcugccagcc

SEQ ID NO: 3328897 - RNA, 13 nt, Human
aaagcagugcaug

SEQ ID NO: 3328898 - RNA, 16 nt, Human
aaagcuaggccuggcc

SEQ ID NO: 3328899 - RNA, 14 nt, Human
aaagcuaggccugg

SEQ ID NO: 3328900 - RNA, 14 nt, Human
gguggcaccagcag

SEQ ID NO: 3328901 - RNA, 20 nt, Human
gguggcaccagcagccugga

SEQ ID NO: 3328902 - RNA, 21 nt, Human
ggugcugccauccagguucag

SEQ ID NO: 3328903 - RNA, 19 nt, Human
aaacuuaaucuaaauggaa

SEQ ID NO: 3328904 - RNA, 15 nt, Human
gggugggacacccug

SEQ ID NO: 3328905 - RNA, 18 nt, Human
gggugggacacccuguga

SEQ ID NO: 3328906 - RNA, 14 nt, Human
ggguggccucccaa

SEQ ID NO: 3328907 - RNA, 19 nt, Human
aaacuguuaauaguucagg

SEQ ID NO: 3328908 - RNA, 20 nt, Human
aaacguggcugcuucaagga

SEQ ID NO: 3328909 - RNA, 21 nt, Human
aaacguggcugcuucaaggau

SEQ ID NO: 3328910 - RNA, 18 nt, Human
gguaacuagggaagauaa

SEQ ID NO: 3328911 - RNA, 23 nt, Human
ggguuuugccauguuggccaggc

SEQ ID NO: 3328912 - RNA, 20 nt, Human
ggguuuugccauguuggcca

SEQ ID NO: 3328913 - RNA, 12 nt, Human
ggguggugaccu

SEQ ID NO: 3328914 - RNA, 19 nt, Human
gguaucaggugcugccauc

SEQ ID NO: 3328915 - RNA, 18 nt, Human
aaacuuuacuauggcccu

SEQ ID NO: 3328916 - RNA, 14 nt, Human
gguaucaggugcug

SEQ ID NO: 3328917 - RNA, 20 nt, Human
gguaggguaagugagagagg

SEQ ID NO: 3328918 - RNA, 20 nt, Human
gguaaggaauaccugucccc

SEQ ID NO: 3328919 - RNA, 19 nt, Human
ggggccaguuggucccccu

SEQ ID NO: 3328920 - RNA, 14 nt, Human
ggggaccagagcug

SEQ ID NO: 3328921 - RNA, 18 nt, Human
aaaauguauguguaagua

SEQ ID NO: 3328922 - RNA, 12 nt, Human
ggggaccagagc

SEQ ID NO: 3328923 - RNA, 13 nt, Human
ggggaccagagcu

SEQ ID NO: 3328924 - RNA, 15 nt, Human
gggggcugggcagag

SEQ ID NO: 3328925 - RNA, 13 nt, Human
ggggguggccucc

SEQ ID NO: 3328926 - RNA, 21 nt, Human
ggggucacucuggcagcucag

SEQ ID NO: 3328927 - RNA, 17 nt, Human
gggggaucacagccucu

SEQ ID NO: 3328928 - RNA, 11 nt, Human
gggggcuggga

SEQ ID NO: 3328929 - RNA, 22 nt, Human
aaaccugugucucugagaguag

SEQ ID NO: 3328930 - RNA, 19 nt, Human
aaacauuuugucauauaag

SEQ ID NO: 3328931 - RNA, 14 nt, Human
gggucacucuggca

SEQ ID NO: 3328932 - RNA, 20 nt, Human
gggucacucuggcagcucag

SEQ ID NO: 3328933 - RNA, 16 nt, Human
aaaagguuaauaaagu

SEQ ID NO: 3328934 - RNA, 17 nt, Human
aaaagguuaauaaagua

SEQ ID NO: 3328935 - RNA, 11 nt, Human
aaaaggcagga

SEQ ID NO: 3328936 - RNA, 19 nt, Human
aaaagguaugcaaucaaau

SEQ ID NO: 3328937 - RNA, 14 nt, Human
aaaaggaugcacag

SEQ ID NO: 3328938 - RNA, 15 nt, Human
aaaaggaugcacaga

SEQ ID NO: 3328939 - RNA, 19 nt, Human
aaaaggaugcacagaguug

SEQ ID NO: 3328940 - RNA, 22 nt, Human
aaaaggaugcacagaguuguua

SEQ ID NO: 3328941 - RNA, 13 nt, Human
aaaaggaugcaca

SEQ ID NO: 3328942 - RNA, 22 nt, Human
aaaaggagccaauuuaaagaaa

SEQ ID NO: 3328943 - RNA, 13 nt, Human
aaaauaccaagga

SEQ ID NO: 3328944 - RNA, 16 nt, Human
aaaauauuuuccugcc

SEQ ID NO: 3328945 - RNA, 14 nt, Human
gggccucagugcca

SEQ ID NO: 3328946 - RNA, 13 nt, Human
gggccucagugcc

SEQ ID NO: 3328947 - RNA, 22 nt, Human
gggccucgguguggagaagcgg

SEQ ID NO: 3328948 - RNA, 18 nt, Human
gggccucuuaugggcugg

SEQ ID NO: 3328949 - RNA, 21 nt, Human
gggcggugagaggggaacaga

SEQ ID NO: 3328950 - RNA, 12 nt, Human
gggccaggagcc

SEQ ID NO: 3328951 - RNA, 13 nt, Human
gggccaggagccu

SEQ ID NO: 3328952 - RNA, 14 nt, Human
gggccaggagccuc

SEQ ID NO: 3328953 - RNA, 19 nt, Human
gggcucagcggggacagcu

SEQ ID NO: 3328954 - RNA, 17 nt, Human
gggcucagcggggacag

SEQ ID NO: 3328955 - RNA, 15 nt, Human
gggcuaguugggcuu

SEQ ID NO: 3328956 - RNA, 18 nt, Human
gggcucagcaaaagaugc

SEQ ID NO: 3328957 - RNA, 22 nt, Human
gggcucagcaaaagaugcuucu

SEQ ID NO: 3328958 - RNA, 21 nt, Human
gggcucagcggggacagcucc

SEQ ID NO: 3328959 - RNA, 10 nt, Human
gggcuccaga

SEQ ID NO: 3328960 - RNA, 13 nt, Human
gggcuccagacac

SEQ ID NO: 3328961 - RNA, 17 nt, Human
gggcugcaccggcuggc

SEQ ID NO: 3328962 - RNA, 19 nt, Human
gggcugcaccggcuggccu

SEQ ID NO: 3328963 - RNA, 12 nt, Human
gggcugggcaga

SEQ ID NO: 3328964 - RNA, 15 nt, Human
gggcugggcagagga

SEQ ID NO: 3328965 - RNA, 20 nt, Human
gggcugcaccggcuggccug

SEQ ID NO: 3328966 - RNA, 21 nt, Human
gggcugcaccggcuggccugg

SEQ ID NO: 3328967 - RNA, 20 nt, Human
gcuaggaccccuccaugugg

SEQ ID NO: 3328968 - RNA, 16 nt, Human
gcuaguugggcuuccu

SEQ ID NO: 3328969 - RNA, 14 nt, Human
gcuaguugggcuuc

SEQ ID NO: 3328970 - RNA, 22 nt, Human
gcuagugugguguuuccuggca

SEQ ID NO: 3328971 - RNA, 22 nt, Human
gcuaagugauccucccaccuca

SEQ ID NO: 3328972 - RNA, 18 nt, Human
gcuaagugauccucccac

SEQ ID NO: 3328973 - RNA, 22 nt, Human
gcucagagagggugggaguggg

SEQ ID NO: 3328974 - RNA, 18 nt, Human
gcucagggccuggcucag

SEQ ID NO: 3328975 - RNA, 19 nt, Human
gcucagggccuggcucagg

SEQ ID NO: 3328976 - RNA, 17 nt, Human
gcucagggccuggcuca

SEQ ID NO: 3328977 - RNA, 20 nt, Human
gcucagggccuggcucaggu

SEQ ID NO: 3328978 - RNA, 15 nt, Human
gcggcuggcagccca

SEQ ID NO: 3328979 - RNA, 16 nt, Human
gcggccuuuggcuuca

SEQ ID NO: 3328980 - RNA, 19 nt, Human
gccugugccucugggacug

SEQ ID NO: 3328981 - RNA, 23 nt, Human
gccugggaucccucauccucaua

SEQ ID NO: 3328982 - RNA, 21 nt, Human
gccugggaucccucauccuca

SEQ ID NO: 3328983 - RNA, 14 nt, Human
gccuugaacuuuga

SEQ ID NO: 3328984 - RNA, 16 nt, Human
gccuguucagcuccag

SEQ ID NO: 3328985 - RNA, 14 nt, Human
gccuguucagcucc

SEQ ID NO: 3328986 - RNA, 15 nt, Human
gccuguucagcucca

SEQ ID NO: 3328987 - RNA, 16 nt, Human
gccuucucugaaggac

SEQ ID NO: 3328988 - RNA, 15 nt, Human
gccuucucugaagga

SEQ ID NO: 3328989 - RNA, 23 nt, Human
gccuugaacuuugaccucugcag

SEQ ID NO: 3328990 - RNA, 21 nt, Human
gccuugaccauucuccaccug

SEQ ID NO: 3328991 - RNA, 22 nt, Human
gccuugaccauucuccaccugc

SEQ ID NO: 3328992 - RNA, 17 nt, Human
gcgauucuucugcuuca

SEQ ID NO: 3328993 - RNA, 22 nt, Human
gcgauucuucugcuucagccuc

SEQ ID NO: 3328994 - RNA, 23 nt, Human
gccuugaccauucuccaccugcc

SEQ ID NO: 3328995 - RNA, 23 nt, Human
gcgauucuucugcuucagccucc

SEQ ID NO: 3328996 - RNA, 20 nt, Human
gcgcagcauauucaggaagc

SEQ ID NO: 3328997 - RNA, 21 nt, Human
gcgcagcauauucaggaagcu

SEQ ID NO: 3328998 - RNA, 12 nt, Human
gccccuggcagc

SEQ ID NO: 3328999 - RNA, 15 nt, Human
gccccuggcagcccc

SEQ ID NO: 3329000 - RNA, 16 nt, Human
gccccugcugguucag

SEQ ID NO: 3329001 - RNA, 15 nt, Human
gccccugcugguuca

SEQ ID NO: 3329002 - RNA, 12 nt, Human
gccccugcuggu

SEQ ID NO: 3329003 - RNA, 12 nt, Human
gcccccacuggu

SEQ ID NO: 3329004 - RNA, 20 nt, Human
gccccaaaacucuccucugc

SEQ ID NO: 3329005 - RNA, 21 nt, Human
gccccaaaacucuccucugcu

SEQ ID NO: 3329006 - RNA, 19 nt, Human
gccccaaaacucuccucug

SEQ ID NO: 3329007 - RNA, 21 nt, Human
gcccacgcuggagugcaguga

SEQ ID NO: 3329008 - RNA, 19 nt, Human
gcccacgcuggagugcagu

SEQ ID NO: 3329009 - RNA, 23 nt, Human
gcccacgcuggagugcagugagc

SEQ ID NO: 3329010 - RNA, 24 nt, Human
gcccaggaaaggcuccaggagcag

SEQ ID NO: 3329011 - RNA, 21 nt, Human
gcccaggaaaggcuccaggag

SEQ ID NO: 3329012 - RNA, 22 nt, Human
gcccaggaaaggcuccaggagc

SEQ ID NO: 3329013 - RNA, 23 nt, Human
gcccaggaaaggcuccaggagca

SEQ ID NO: 3329014 - RNA, 13 nt, Human
gcccacuucugcc

SEQ ID NO: 3329015 - RNA, 15 nt, Human
gcccacgcccccacu

SEQ ID NO: 3329016 - RNA, 16 nt, Human
gcccacgcccccacug

SEQ ID NO: 3329017 - RNA, 17 nt, Human
gcccacgcccccacugg

SEQ ID NO: 3329018 - RNA, 21 nt, Human
gcccacgcccccacuggugac

SEQ ID NO: 3329019 - RNA, 18 nt, Human
gcauuuacuuuguguuca

SEQ ID NO: 3329020 - RNA, 11 nt, Human
gcccaggcagg

SEQ ID NO: 3329021 - RNA, 16 nt, Human
gcccaggcaggucuug

SEQ ID NO: 3329022 - RNA, 12 nt, Human
gcccaggccccu

SEQ ID NO: 3329023 - RNA, 11 nt, Human
gcccaggcccc

SEQ ID NO: 3329024 - RNA, 21 nt, Human
gcccaggccccugccacccug

SEQ ID NO: 3329025 - RNA, 20 nt, Human
gcccaggccccugccacccu

SEQ ID NO: 3329026 - RNA, 18 nt, Human
gcccaggccccugccacc

SEQ ID NO: 3329027 - RNA, 17 nt, Human
gccuacaggagugagca

SEQ ID NO: 3329028 - RNA, 12 nt, Human
gccuagcauacg

SEQ ID NO: 3329029 - RNA, 22 nt, Human
gccuccuuugugaggaagccgc

SEQ ID NO: 3329030 - RNA, 13 nt, Human
gccucgaacuggc

SEQ ID NO: 3329031 - RNA, 16 nt, Human
gccucgaacuggcugc

SEQ ID NO: 3329032 - RNA, 14 nt, Human
gccucugggacugg

SEQ ID NO: 3329033 - RNA, 21 nt, Human
gccuccuuugugaggaagccg

SEQ ID NO: 3329034 - RNA, 16 nt, Human
gccuacaggagugagc

SEQ ID NO: 3329035 - RNA, 16 nt, Human
gcccugugggccccca

SEQ ID NO: 3329036 - RNA, 17 nt, Human
gcccugugggcccccaa

SEQ ID NO: 3329037 - RNA, 21 nt, Human
gcccuuaccugccaggaagcc

SEQ ID NO: 3329038 - RNA, 22 nt, Human
gcccuuaccugccaggaagcca

SEQ ID NO: 3329039 - RNA, 23 nt, Human
gcccuuaccugccaggaagccag

SEQ ID NO: 3329040 - RNA, 14 nt, Human
gcccugcccaccug

SEQ ID NO: 3329041 - RNA, 16 nt, Human
gccccuggcagccccu

SEQ ID NO: 3329042 - RNA, 23 nt, Human
ggaaaucaccgaaaacguggcug

SEQ ID NO: 3329043 - RNA, 18 nt, Human
ggaagccgcuggggccag

SEQ ID NO: 3329044 - RNA, 15 nt, Human
ggaagccgcuggggc

SEQ ID NO: 3329045 - RNA, 22 nt, Human
ggaagccagcaggcucucaggc

SEQ ID NO: 3329046 - RNA, 23 nt, Human
ggaagccagcaggcucucaggcc

SEQ ID NO: 3329047 - RNA, 21 nt, Human
ggaagccagcaggcucucagg

SEQ ID NO: 3329048 - RNA, 16 nt, Human
ggaagcucagggccug

SEQ ID NO: 3329049 - RNA, 17 nt, Human
ggaagcucagggccugg

SEQ ID NO: 3329050 - RNA, 21 nt, Human
ggaagcucagggccuggcuca

SEQ ID NO: 3329051 - RNA, 15 nt, Human
ggaauaccugucccc

SEQ ID NO: 3329052 - RNA, 15 nt, Human
ggaagcucagggccu

SEQ ID NO: 3329053 - RNA, 16 nt, Human
ggaauaccuguccccc

SEQ ID NO: 3329054 - RNA, 19 nt, Human
ggaauaccugucccccuga

SEQ ID NO: 3329055 - RNA, 16 nt, Human
ggaauauauaaccagu

SEQ ID NO: 3329056 - RNA, 19 nt, Human
ggaaugaaugucaguguga

SEQ ID NO: 3329057 - RNA, 12 nt, Human
ggacacagcucu

SEQ ID NO: 3329058 - RNA, 21 nt, Human
ggacacagcucuucuccaggc

SEQ ID NO: 3329059 - RNA, 13 nt, Human
ggacacagcucuu

SEQ ID NO: 3329060 - RNA, 12 nt, Human
ggacacccugug

SEQ ID NO: 3329061 - RNA, 17 nt, Human
ggacagggaggugaccc

SEQ ID NO: 3329062 - RNA, 23 nt, Human
ggacaggcauguucucugaggac

SEQ ID NO: 3329063 - RNA, 13 nt, Human
ggacacccuguga

SEQ ID NO: 3329064 - RNA, 23 nt, Human
ggacacccugugauggggcccug

SEQ ID NO: 3329065 - RNA, 13 nt, Human
ggacauggacaag

SEQ ID NO: 3329066 - RNA, 19 nt, Human
ggaaagcaaaggagauugg

SEQ ID NO: 3329067 - RNA, 16 nt, Human
ggaaagaguaggaaga

SEQ ID NO: 3329068 - RNA, 17 nt, Human
ggaaagaguaggaagac

SEQ ID NO: 3329069 - RNA, 20 nt, Human
ggaaagacuuuuccaacccu

SEQ ID NO: 3329070 - RNA, 14 nt, Human
ggaaagaggcucug

SEQ ID NO: 3329071 - RNA, 13 nt, Human
gcuuuugugcauu

SEQ ID NO: 3329072 - RNA, 19 nt, Human
gcuuuugugcauuaucuag

SEQ ID NO: 3329073 - RNA, 12 nt, Human
gcuuuugugcau

SEQ ID NO: 3329074 - RNA, 20 nt, Human
ggaaacagcuaaugggacac

SEQ ID NO: 3329075 - RNA, 16 nt, Human
gcuuaacuucacauau

SEQ ID NO: 3329076 - RNA, 16 nt, Human
gcuucuucagagacuc

SEQ ID NO: 3329077 - RNA, 15 nt, Human
gcuucuucagagacu

SEQ ID NO: 3329078 - RNA, 17 nt, Human
gcuuaacuucacauauu

SEQ ID NO: 3329079 - RNA, 14 nt, Human
gcuuaacuucacau

SEQ ID NO: 3329080 - RNA, 19 nt, Human
gcuucuucagagacuccug

SEQ ID NO: 3329081 - RNA, 21 nt, Human
gcuucuucagagacuccugca

SEQ ID NO: 3329082 - RNA, 16 nt, Human
gcuugaccgugaggcc

SEQ ID NO: 3329083 - RNA, 17 nt, Human
gcuugaccgugaggcca

SEQ ID NO: 3329084 - RNA, 18 nt, Human
gcuugaccgugaggccag

SEQ ID NO: 3329085 - RNA, 19 nt, Human
gcuugaccgugaggccaga

SEQ ID NO: 3329086 - RNA, 23 nt, Human
gcuugggcuucauccuccucaga

SEQ ID NO: 3329087 - RNA, 16 nt, Human
gcuuggggaccagagc

SEQ ID NO: 3329088 - RNA, 22 nt, Human
gcuuucuacccagcgagcccug

SEQ ID NO: 3329089 - RNA, 19 nt, Human
gcuuucuacccagcgagcc

SEQ ID NO: 3329090 - RNA, 13 nt, Human
gcuuucuacccag

SEQ ID NO: 3329091 - RNA, 17 nt, Human
gcuuggggaccagagcu

SEQ ID NO: 3329092 - RNA, 18 nt, Human
gcuuggggaccagagcug

SEQ ID NO: 3329093 - RNA, 20 nt, Human
gcuuggggaccagagcugcc

SEQ ID NO: 3329094 - RNA, 21 nt, Human
gcuuggggaccagagcugcca

SEQ ID NO: 3329095 - RNA, 19 nt, Human
gcuugggcuucauccuccu

SEQ ID NO: 3329096 - RNA, 18 nt, Human
gcugagggugagugggug

SEQ ID NO: 3329097 - RNA, 23 nt, Human
gcugagggugagugggugaauaa

SEQ ID NO: 3329098 - RNA, 14 nt, Human
gcugaggugggagg

SEQ ID NO: 3329099 - RNA, 17 nt, Human
gcugccccuggcagccc

SEQ ID NO: 3329100 - RNA, 20 nt, Human
gcugccccuggcagccccug

SEQ ID NO: 3329101 - RNA, 18 nt, Human
gcugccccuggcagcccc

SEQ ID NO: 3329102 - RNA, 19 nt, Human
gcugccccuggcagccccu

SEQ ID NO: 3329103 - RNA, 17 nt, Human
gcugccuguucagcucc

SEQ ID NO: 3329104 - RNA, 13 nt, Human
gcugccuguucag

SEQ ID NO: 3329105 - RNA, 12 nt, Human
gcugccuguuca

SEQ ID NO: 3329106 - RNA, 21 nt, Human
gcugccugggaucccucaucc

SEQ ID NO: 3329107 - RNA, 16 nt, Human
gcugccucucccauca

SEQ ID NO: 3329108 - RNA, 20 nt, Human
gcugccugggaucccucauc

SEQ ID NO: 3329109 - RNA, 16 nt, Human
gcugcacccucaggca

SEQ ID NO: 3329110 - RNA, 18 nt, Human
gcugcacccucaggcagg

SEQ ID NO: 3329111 - RNA, 19 nt, Human
gcugcacccucaggcaggu

SEQ ID NO: 3329112 - RNA, 13 nt, Human
gcugcaccggcug

SEQ ID NO: 3329113 - RNA, 23 nt, Human
gcugcaaaggguaucaggugcug

SEQ ID NO: 3329114 - RNA, 15 nt, Human
gcugugcugcccugc

SEQ ID NO: 3329115 - RNA, 16 nt, Human
gcugugcugcccugcc

SEQ ID NO: 3329116 - RNA, 15 nt, Human
gcuguuggcuggggg

SEQ ID NO: 3329117 - RNA, 20 nt, Human
gcuguuggcugggggccuca

SEQ ID NO: 3329118 - RNA, 16 nt, Human
gcuguuggcugggggc

SEQ ID NO: 3329119 - RNA, 14 nt, Human
gcuguuggcugggg

SEQ ID NO: 3329120 - RNA, 16 nt, Human
gcugugcucuggacag

SEQ ID NO: 3329121 - RNA, 15 nt, Human
gcugugcucuggaca

SEQ ID NO: 3329122 - RNA, 14 nt, Human
gcugugcugcccug

SEQ ID NO: 3329123 - RNA, 13 nt, Human
gcugugcucugga

SEQ ID NO: 3329124 - RNA, 17 nt, Human
gcuguaucccaugagcc

SEQ ID NO: 3329125 - RNA, 19 nt, Human
gcuggcuguuggcuggggg

SEQ ID NO: 3329126 - RNA, 18 nt, Human
gcuggcuguuggcugggg

SEQ ID NO: 3329127 - RNA, 18 nt, Human
gcuggcgugcaguggugc

SEQ ID NO: 3329128 - RNA, 15 nt, Human
gcuggcgugcagugg

SEQ ID NO: 3329129 - RNA, 14 nt, Human
gcuggcgugcagug

SEQ ID NO: 3329130 - RNA, 17 nt, Human
gcugggguggggaccuc

SEQ ID NO: 3329131 - RNA, 19 nt, Human
gcugggguggggaccucag

SEQ ID NO: 3329132 - RNA, 23 nt, Human
gcuggcuguuggcugggggccuc

SEQ ID NO: 3329133 - RNA, 20 nt, Human
gcuggcuguuggcugggggc

SEQ ID NO: 3329134 - RNA, 17 nt, Human
gcuggcuguuggcuggg

SEQ ID NO: 3329135 - RNA, 14 nt, Human
gcugggcagguugg

SEQ ID NO: 3329136 - RNA, 22 nt, Human
gcugggguggggaccucaggcc

SEQ ID NO: 3329137 - RNA, 18 nt, Human
gcuggguucuacccaggu

SEQ ID NO: 3329138 - RNA, 17 nt, Human
gcuggguucuacccagg

SEQ ID NO: 3329139 - RNA, 20 nt, Human
gcuggguucuacccaggugc

SEQ ID NO: 3329140 - RNA, 22 nt, Human
agugagcacuaaggugugcucu

SEQ ID NO: 3329141 - RNA, 15 nt, Human
ugugauggggcccug

SEQ ID NO: 3329142 - RNA, 16 nt, Human
ugugauggggcccugc

SEQ ID NO: 3329143 - RNA, 17 nt, Human
ugugauggggcccugcc

SEQ ID NO: 3329144 - RNA, 17 nt, Human
agugagacucugucuca

SEQ ID NO: 3329145 - RNA, 16 nt, Human
agugagacucugucuc

SEQ ID NO: 3329146 - RNA, 22 nt, Human
agugagacucugucucaaaaaa

SEQ ID NO: 3329147 - RNA, 17 nt, Human
agugagacccugucuca

SEQ ID NO: 3329148 - RNA, 21 nt, Human
agugagacccugucucaaaaa

SEQ ID NO: 3329149 - RNA, 13 nt, Human
agugagacucugu

SEQ ID NO: 3329150 - RNA, 11 nt, Human
agugaaaaagg

SEQ ID NO: 3329151 - RNA, 17 nt, Human
agugaaaaaggaggaag

SEQ ID NO: 3329152 - RNA, 20 nt, Human
agugaaaaaggaggaagaga

SEQ ID NO: 3329153 - RNA, 23 nt, Human
agugaaaaaggaggaagagaaaa

SEQ ID NO: 3329154 - RNA, 14 nt, Human
ugugaagagaacca

SEQ ID NO: 3329155 - RNA, 19 nt, Human
ugugagcacaaagguagcu

SEQ ID NO: 3329156 - RNA, 15 nt, Human
ugugaaccaccacac

SEQ ID NO: 3329157 - RNA, 23 nt, Human
ugugaaccaccacacccagccca

SEQ ID NO: 3329158 - RNA, 22 nt, Human
ugugaaccaccacacccagccc

SEQ ID NO: 3329159 - RNA, 21 nt, Human
ugugaaccaccacacccagcc

SEQ ID NO: 3329160 - RNA, 16 nt, Human
ugugaaccaccacacc

SEQ ID NO: 3329161 - RNA, 21 nt, Human
ugucuugcaauggcagccuug

SEQ ID NO: 3329162 - RNA, 20 nt, Human
ugucuugcaauggcagccuu

SEQ ID NO: 3329163 - RNA, 18 nt, Human
ugucuugcaauggcagcc

SEQ ID NO: 3329164 - RNA, 17 nt, Human
ugucuugcaauggcagc

SEQ ID NO: 3329165 - RNA, 15 nt, Human
ugucuugcaauggca

SEQ ID NO: 3329166 - RNA, 18 nt, Human
ugucucuugguccugcug

SEQ ID NO: 3329167 - RNA, 19 nt, Human
ugucucuugguccugcugc

SEQ ID NO: 3329168 - RNA, 20 nt, Human
ugucucuugguccugcugca

SEQ ID NO: 3329169 - RNA, 21 nt, Human
ugucucuugguccugcugcag

SEQ ID NO: 3329170 - RNA, 22 nt, Human
ugucucuugguccugcugcagu

SEQ ID NO: 3329171 - RNA, 21 nt, Human
ugucucuuuaaugucacaggc

SEQ ID NO: 3329172 - RNA, 22 nt, Human
ugucucuuuaaugucacaggca

SEQ ID NO: 3329173 - RNA, 23 nt, Human
aguccccuguuuguuucugaaag

SEQ ID NO: 3329174 - RNA, 13 nt, Human
agucccugccaau

SEQ ID NO: 3329175 - RNA, 14 nt, Human
agucccugccaaug

SEQ ID NO: 3329176 - RNA, 16 nt, Human
agucccugccaaugga

SEQ ID NO: 3329177 - RNA, 12 nt, Human
agucccugccaa

SEQ ID NO: 3329178 - RNA, 13 nt, Human
ugucucugagagu

SEQ ID NO: 3329179 - RNA, 12 nt, Human
ugucccuuuucc

SEQ ID NO: 3329180 - RNA, 16 nt, Human
ugucagccauuccugu

SEQ ID NO: 3329181 - RNA, 19 nt, Human
agucagggguucccuuuuu

SEQ ID NO: 3329182 - RNA, 14 nt, Human
aguccccuguuugu

SEQ ID NO: 3329183 - RNA, 19 nt, Human
aguccccuguuuguuucug

SEQ ID NO: 3329184 - RNA, 23 nt, Human
agucccaccuuggcugcagggag

SEQ ID NO: 3329185 - RNA, 21 nt, Human
agucccaccuuggcugcaggg

SEQ ID NO: 3329186 - RNA, 20 nt, Human
agucccaccuuggcugcagg

SEQ ID NO: 3329187 - RNA, 14 nt, Human
aguagcugggacua

SEQ ID NO: 3329188 - RNA, 13 nt, Human
aguagcugggacu

SEQ ID NO: 3329189 - RNA, 16 nt, Human
ugucaaaguggugaga

SEQ ID NO: 3329190 - RNA, 19 nt, Human
ugucaaaguggugagaggc

SEQ ID NO: 3329191 - RNA, 14 nt, Human
ugucaaagugguga

SEQ ID NO: 3329192 - RNA, 15 nt, Human
ugucaaaguggugag

SEQ ID NO: 3329193 - RNA, 12 nt, Human
uguagagccagg

SEQ ID NO: 3329194 - RNA, 14 nt, Human
uguauguguaagua

SEQ ID NO: 3329195 - RNA, 15 nt, Human
uguaucccaugagcc

SEQ ID NO: 3329196 - RNA, 15 nt, Human
aguauuauaccuuuu

SEQ ID NO: 3329197 - RNA, 14 nt, Human
aguauuauaccuuu

SEQ ID NO: 3329198 - RNA, 21 nt, Human
aguagcugggacuacaggcac

SEQ ID NO: 3329199 - RNA, 19 nt, Human
aguagcugggacuacaggc

SEQ ID NO: 3329200 - RNA, 22 nt, Human
aguagcugggacuacaggcacc

SEQ ID NO: 3329201 - RNA, 15 nt, Human
ugucagcauagaagu

SEQ ID NO: 3329202 - RNA, 17 nt, Human
agucacugagacagccc

SEQ ID NO: 3329203 - RNA, 15 nt, Human
agucacugagacagc

SEQ ID NO: 3329204 - RNA, 16 nt, Human
agucacugagacagcc

SEQ ID NO: 3329205 - RNA, 16 nt, Human
aggguaucaggugcug

SEQ ID NO: 3329206 - RNA, 19 nt, Human
aggguacuaaggaaucuuu

SEQ ID NO: 3329207 - RNA, 13 nt, Human
agggggcugggac

SEQ ID NO: 3329208 - RNA, 15 nt, Human
ugguccauagagagc

SEQ ID NO: 3329209 - RNA, 16 nt, Human
ugguccauagagagca

SEQ ID NO: 3329210 - RNA, 21 nt, Human
uggucaccaaaucagcugcua

SEQ ID NO: 3329211 - RNA, 23 nt, Human
uggucaccaaaucagcugcuacu

SEQ ID NO: 3329212 - RNA, 20 nt, Human
uggucaccaaaucagcugcu

SEQ ID NO: 3329213 - RNA, 14 nt, Human
uggguggaugccug

SEQ ID NO: 3329214 - RNA, 22 nt, Human
ugggugcuuggaggaaggaaac

SEQ ID NO: 3329215 - RNA, 15 nt, Human
aggguugggcuggug

SEQ ID NO: 3329216 - RNA, 13 nt, Human
aggguugggcugg

SEQ ID NO: 3329217 - RNA, 14 nt, Human
aggguuggccccug

SEQ ID NO: 3329218 - RNA, 13 nt, Human
aggguuggccccu

SEQ ID NO: 3329219 - RNA, 19 nt, Human
uggugaacagaacaaaagg

SEQ ID NO: 3329220 - RNA, 18 nt, Human
aggguggugaccucugcc

SEQ ID NO: 3329221 - RNA, 17 nt, Human
aggguggugaccucugc

SEQ ID NO: 3329222 - RNA, 19 nt, Human
aggguggugaccucugccu

SEQ ID NO: 3329223 - RNA, 19 nt, Human
ugguccauagagagcaaga

SEQ ID NO: 3329224 - RNA, 18 nt, Human
uggucugacccacugcuu

SEQ ID NO: 3329225 - RNA, 16 nt, Human
uggucuuauuuguaaa

SEQ ID NO: 3329226 - RNA, 12 nt, Human
uggucuguguga

SEQ ID NO: 3329227 - RNA, 21 nt, Human
aggucuugaacuccuggccuc

SEQ ID NO: 3329228 - RNA, 20 nt, Human
aggucuugaacuccuggccu

SEQ ID NO: 3329229 - RNA, 20 nt, Human
aggucauuuuuuuuaagaaa

SEQ ID NO: 3329230 - RNA, 18 nt, Human
aggucuugaacuccuggc

SEQ ID NO: 3329231 - RNA, 22 nt, Human
aggucauuuuuuuuaagaaaaa

SEQ ID NO: 3329232 - RNA, 23 nt, Human
aggucauuuuuuuuaagaaaaag

SEQ ID NO: 3329233 - RNA, 21 nt, Human
aggucaaggcugcagugagcc

SEQ ID NO: 3329234 - RNA, 17 nt, Human
aggguugggcugguguc

SEQ ID NO: 3329235 - RNA, 14 nt, Human
aggugugagucacc

SEQ ID NO: 3329236 - RNA, 20 nt, Human
aggugugacugaauuucuuu

SEQ ID NO: 3329237 - RNA, 17 nt, Human
aggugugaaccaccaca

SEQ ID NO: 3329238 - RNA, 22 nt, Human
aggugugaaccaccacacccag

SEQ ID NO: 3329239 - RNA, 18 nt, Human
aggugugacugaauuucu

SEQ ID NO: 3329240 - RNA, 23 nt, Human
aggugugaaccaccacacccagc

SEQ ID NO: 3329241 - RNA, 13 nt, Human
agguggggcagcu

SEQ ID NO: 3329242 - RNA, 23 nt, Human
agguggggucacucuggcagcuc

SEQ ID NO: 3329243 - RNA, 14 nt, Human
agguggggcagcuu

SEQ ID NO: 3329244 - RNA, 14 nt, Human
uguaaggaaugauu

SEQ ID NO: 3329245 - RNA, 15 nt, Human
uguaaggaaugauua

SEQ ID NO: 3329246 - RNA, 13 nt, Human
uguaaggaaugau

SEQ ID NO: 3329247 - RNA, 22 nt, Human
uguaagcucuacugaggugcua

SEQ ID NO: 3329248 - RNA, 16 nt, Human
uguaauuugugauaca

SEQ ID NO: 3329249 - RNA, 18 nt, Human
uguaaggaaugauuaauu

SEQ ID NO: 3329250 - RNA, 17 nt, Human
uguaauuugugauacaa

SEQ ID NO: 3329251 - RNA, 21 nt, Human
uguaauuugugauacaaugcu

SEQ ID NO: 3329252 - RNA, 23 nt, Human
uguacaaaguagaagucuuagau

SEQ ID NO: 3329253 - RNA, 19 nt, Human
uguacaaaguagaagucuu

SEQ ID NO: 3329254 - RNA, 19 nt, Human
uguacaugaaaacacauuu

SEQ ID NO: 3329255 - RNA, 17 nt, Human
uguacaugaaaacacau

SEQ ID NO: 3329256 - RNA, 18 nt, Human
uguacaugaaaacacauu

SEQ ID NO: 3329257 - RNA, 16 nt, Human
uguacaugaaaacaca

SEQ ID NO: 3329258 - RNA, 12 nt, Human
ugguuuucuguu

SEQ ID NO: 3329259 - RNA, 21 nt, Human
ugguuuguaaauuaacuuuua

SEQ ID NO: 3329260 - RNA, 14 nt, Human
ugguuucagaaaug

SEQ ID NO: 3329261 - RNA, 15 nt, Human
ugguuucagaaaugu

SEQ ID NO: 3329262 - RNA, 23 nt, Human
aggugauccacccaccucagccu

SEQ ID NO: 3329263 - RNA, 21 nt, Human
aggugauccacccaccucagc

SEQ ID NO: 3329264 - RNA, 13 nt, Human
ugguuuucuguuc

SEQ ID NO: 3329265 - RNA, 14 nt, Human
ugguuauggagagg

SEQ ID NO: 3329266 - RNA, 15 nt, Human
ugguguuuccuggca

SEQ ID NO: 3329267 - RNA, 17 nt, Human
ugguguuuccuggcacu

SEQ ID NO: 3329268 - RNA, 22 nt, Human
ugguucaggguuggccccugcc

SEQ ID NO: 3329269 - RNA, 20 nt, Human
ugguucaggguuggccccug

SEQ ID NO: 3329270 - RNA, 15 nt, Human
ugguggcagagugga

SEQ ID NO: 3329271 - RNA, 12 nt, Human
ugguggcagcuc

SEQ ID NO: 3329272 - RNA, 16 nt, Human
ugguggcagcucaccu

SEQ ID NO: 3329273 - RNA, 19 nt, Human
ugguggcagcucaccucuc

SEQ ID NO: 3329274 - RNA, 20 nt, Human
ugguggcagcucaccucucc

SEQ ID NO: 3329275 - RNA, 23 nt, Human
ugguggcagcucaccucucccuu

SEQ ID NO: 3329276 - RNA, 12 nt, Human
ugguggcagcug

SEQ ID NO: 3329277 - RNA, 13 nt, Human
auaaacuuuaccu

SEQ ID NO: 3329278 - RNA, 15 nt, Human
auaaacuuuaccuuu

SEQ ID NO: 3329279 - RNA, 20 nt, Human
auaacauguaauuaaguacu

SEQ ID NO: 3329280 - RNA, 23 nt, Human
uuaccauuuugggguacccacug

SEQ ID NO: 3329281 - RNA, 18 nt, Human
uuacaggaaguacuggag

SEQ ID NO: 3329282 - RNA, 15 nt, Human
uuacaggaaguacug

SEQ ID NO: 3329283 - RNA, 16 nt, Human
uuacaggaaguacugg

SEQ ID NO: 3329284 - RNA, 22 nt, Human
auaagaaccuuuugagugccuu

SEQ ID NO: 3329285 - RNA, 17 nt, Human
auaaguuaacuuccaau

SEQ ID NO: 3329286 - RNA, 23 nt, Human
auaagaaccuuuugagugccuua

SEQ ID NO: 3329287 - RNA, 23 nt, Human
auaauacaccacuacauucuguu

SEQ ID NO: 3329288 - RNA, 21 nt, Human
auaauacaccacuacauucug

SEQ ID NO: 3329289 - RNA, 22 nt, Human
auaaguuaacuuccaauuuaca

SEQ ID NO: 3329290 - RNA, 19 nt, Human
auaauacaguaucucaggg

SEQ ID NO: 3329291 - RNA, 14 nt, Human
auaauucuacuuug

SEQ ID NO: 3329292 - RNA, 20 nt, Human
auacaggaaaagcugcugac

SEQ ID NO: 3329293 - RNA, 19 nt, Human
auacaggaaaagcugcuga

SEQ ID NO: 3329294 - RNA, 14 nt, Human
auacaggaaaagcu

SEQ ID NO: 3329295 - RNA, 16 nt, Human
auacauuugauaaagu

SEQ ID NO: 3329296 - RNA, 17 nt, Human
auaccagccaguaaaug

SEQ ID NO: 3329297 - RNA, 19 nt, Human
auaccagccaguaaauggg

SEQ ID NO: 3329298 - RNA, 21 nt, Human
auacuaaccagcagaaaugcc

SEQ ID NO: 3329299 - RNA, 13 nt, Human
auacuacaguuug

SEQ ID NO: 3329300 - RNA, 15 nt, Human
auacuacaguuuguu

SEQ ID NO: 3329301 - RNA, 16 nt, Human
auacuacaguuuguua

SEQ ID NO: 3329302 - RNA, 20 nt, Human
auacuacaguuuguuaguau

SEQ ID NO: 3329303 - RNA, 13 nt, Human
uuauacauaaaca

SEQ ID NO: 3329304 - RNA, 13 nt, Human
auacaaaagcaug

SEQ ID NO: 3329305 - RNA, 15 nt, Human
auacaaaagcaugug

SEQ ID NO: 3329306 - RNA, 12 nt, Human
auacaaaagcau

SEQ ID NO: 3329307 - RNA, 13 nt, Human
uguucugggacac

SEQ ID NO: 3329308 - RNA, 12 nt, Human
uguucugggaca

SEQ ID NO: 3329309 - RNA, 14 nt, Human
uguucuuaauucuu

SEQ ID NO: 3329310 - RNA, 16 nt, Human
uguucuuaauucuuag

SEQ ID NO: 3329311 - RNA, 14 nt, Human
uguucugggacaca

SEQ ID NO: 3329312 - RNA, 17 nt, Human
uguucuugguuuguaaa

SEQ ID NO: 3329313 - RNA, 18 nt, Human
uguucuugguuuguaaau

SEQ ID NO: 3329314 - RNA, 13 nt, Human
uguucuuuccaaa

SEQ ID NO: 3329315 - RNA, 14 nt, Human
uguucuuuccaaag

SEQ ID NO: 3329316 - RNA, 19 nt, Human
uguucuuucacccuuuucu

SEQ ID NO: 3329317 - RNA, 23 nt, Human
aguguacauggaauaacauguaa

SEQ ID NO: 3329318 - RNA, 22 nt, Human
aguguacauggaauaacaugua

SEQ ID NO: 3329319 - RNA, 21 nt, Human
aguguacauggaauaacaugu

SEQ ID NO: 3329320 - RNA, 21 nt, Human
agugguuccuaauccucuagg

SEQ ID NO: 3329321 - RNA, 19 nt, Human
agugggugaauaauacagu

SEQ ID NO: 3329322 - RNA, 20 nt, Human
aguggcagcugcuuuugucu

SEQ ID NO: 3329323 - RNA, 14 nt, Human
aguggcagcugcuu

SEQ ID NO: 3329324 - RNA, 13 nt, Human
aguggcagcugcu

SEQ ID NO: 3329325 - RNA, 12 nt, Human
aguggcagcugc

SEQ ID NO: 3329326 - RNA, 11 nt, Human
aguggcagcug

SEQ ID NO: 3329327 - RNA, 13 nt, Human
agugggugaauaa

SEQ ID NO: 3329328 - RNA, 18 nt, Human
agugggugaauaauacag

SEQ ID NO: 3329329 - RNA, 19 nt, Human
agugggggaguggccacag

SEQ ID NO: 3329330 - RNA, 20 nt, Human
agugggggaguggccacaga

SEQ ID NO: 3329331 - RNA, 18 nt, Human
uguucuuuccaaaguaca

SEQ ID NO: 3329332 - RNA, 21 nt, Human
aguuauuuuuauuuauuuaaa

SEQ ID NO: 3329333 - RNA, 13 nt, Human
uguugucagcuga

SEQ ID NO: 3329334 - RNA, 16 nt, Human
uguugggccaggagcc

SEQ ID NO: 3329335 - RNA, 13 nt, Human
uguugggccagga

SEQ ID NO: 3329336 - RNA, 15 nt, Human
aguugauagcacaga

SEQ ID NO: 3329337 - RNA, 19 nt, Human
aguugauagcacagacccu

SEQ ID NO: 3329338 - RNA, 20 nt, Human
aguugauagcacagacccug

SEQ ID NO: 3329339 - RNA, 21 nt, Human
aguugauagcacagacccugc

SEQ ID NO: 3329340 - RNA, 14 nt, Human
aguugauagcacag

SEQ ID NO: 3329341 - RNA, 23 nt, Human
aguugauucagcucugcaagaau

SEQ ID NO: 3329342 - RNA, 14 nt, Human
aguugauucagcuc

SEQ ID NO: 3329343 - RNA, 15 nt, Human
aguugauucagcucu

SEQ ID NO: 3329344 - RNA, 17 nt, Human
aguugauucagcucugc

SEQ ID NO: 3329345 - RNA, 18 nt, Human
aguugauucagcucugca

SEQ ID NO: 3329346 - RNA, 13 nt, Human
aguugauucagcu

SEQ ID NO: 3329347 - RNA, 22 nt, Human
aguugauagcacagacccugcc

SEQ ID NO: 3329348 - RNA, 23 nt, Human
aguugauagcacagacccugccc

SEQ ID NO: 3329349 - RNA, 15 nt, Human
uguuuggggaugaga

SEQ ID NO: 3329350 - RNA, 14 nt, Human
uguugucagcugaa

SEQ ID NO: 3329351 - RNA, 14 nt, Human
uguuugccucugcc

SEQ ID NO: 3329352 - RNA, 16 nt, Human
uguuugccucugccuc

SEQ ID NO: 3329353 - RNA, 16 nt, Human
aguucucuccuucuuc

SEQ ID NO: 3329354 - RNA, 13 nt, Human
aguucucuccuuc

SEQ ID NO: 3329355 - RNA, 12 nt, Human
aguucucuccuu

SEQ ID NO: 3329356 - RNA, 21 nt, Human
uguuuuauuuuaauucaguug

SEQ ID NO: 3329357 - RNA, 15 nt, Human
uguuuucaguguaca

SEQ ID NO: 3329358 - RNA, 13 nt, Human
aguuucuccaagc

SEQ ID NO: 3329359 - RNA, 15 nt, Human
aguuucuccaagcag

SEQ ID NO: 3329360 - RNA, 16 nt, Human
uuaaauucuugcaaag

SEQ ID NO: 3329361 - RNA, 13 nt, Human
uuaaauucuugca

SEQ ID NO: 3329362 - RNA, 22 nt, Human
aguuuucacucuuauugcccac

SEQ ID NO: 3329363 - RNA, 17 nt, Human
uuaaaccgccaaggcug

SEQ ID NO: 3329364 - RNA, 19 nt, Human
uuaaauaaugugaaacugg

SEQ ID NO: 3329365 - RNA, 22 nt, Human
uuaaauaaugugaaacuggauu

SEQ ID NO: 3329366 - RNA, 20 nt, Human
uuaaauaaugugaaacugga

SEQ ID NO: 3329367 - RNA, 21 nt, Human
uuaaauaaugugaaacuggau

SEQ ID NO: 3329368 - RNA, 15 nt, Human
uuaaauaaaucauaa

SEQ ID NO: 3329369 - RNA, 13 nt, Human
uuaaauaaaucau

SEQ ID NO: 3329370 - RNA, 18 nt, Human
uuaaaaaguggaaaaaua

SEQ ID NO: 3329371 - RNA, 23 nt, Human
agcggcuggcagcccaccccuca

SEQ ID NO: 3329372 - RNA, 20 nt, Human
agcggggacagcuccuucug

SEQ ID NO: 3329373 - RNA, 19 nt, Human
agcggggacagcuccuucu

SEQ ID NO: 3329374 - RNA, 22 nt, Human
agcggggacagcuccuucuguc

SEQ ID NO: 3329375 - RNA, 13 nt, Human
agcggcuggcagc

SEQ ID NO: 3329376 - RNA, 18 nt, Human
ugccagcuuaucucaggg

SEQ ID NO: 3329377 - RNA, 20 nt, Human
ugcauuugaggucuguucuu

SEQ ID NO: 3329378 - RNA, 21 nt, Human
ugcauuugaggucuguucuuu

SEQ ID NO: 3329379 - RNA, 15 nt, Human
agccuugaacuuuga

SEQ ID NO: 3329380 - RNA, 18 nt, Human
agccuuccagggguggga

SEQ ID NO: 3329381 - RNA, 16 nt, Human
agccuugaacuuugac

SEQ ID NO: 3329382 - RNA, 22 nt, Human
agccuugaacuuugaccucugc

SEQ ID NO: 3329383 - RNA, 13 nt, Human
agccuugaacuuu

SEQ ID NO: 3329384 - RNA, 22 nt, Human
agccuugaccauucuccaccug

SEQ ID NO: 3329385 - RNA, 23 nt, Human
agccuugaccauucuccaccugc

SEQ ID NO: 3329386 - RNA, 22 nt, Human
agcgauucuucugcuucagccu

SEQ ID NO: 3329387 - RNA, 19 nt, Human
agcgauucuucugcuucag

SEQ ID NO: 3329388 - RNA, 20 nt, Human
ugcauuuaaaagauacaguu

SEQ ID NO: 3329389 - RNA, 19 nt, Human
ugcauuugaggucuguucu

SEQ ID NO: 3329390 - RNA, 18 nt, Human
ugcauuugaggucuguuc

SEQ ID NO: 3329391 - RNA, 18 nt, Human
ugcccaggccccugccac

SEQ ID NO: 3329392 - RNA, 17 nt, Human
ugcccaggccccugcca

SEQ ID NO: 3329393 - RNA, 15 nt, Human
ugcccaggccccugc

SEQ ID NO: 3329394 - RNA, 14 nt, Human
ugcccaggccccug

SEQ ID NO: 3329395 - RNA, 13 nt, Human
ugcccagccccuu

SEQ ID NO: 3329396 - RNA, 12 nt, Human
ugcccagccccu

SEQ ID NO: 3329397 - RNA, 16 nt, Human
ugcccagccccuucug

SEQ ID NO: 3329398 - RNA, 17 nt, Human
ugcccagccccuucuga

SEQ ID NO: 3329399 - RNA, 17 nt, Human
ugcccaaagaugcagcc

SEQ ID NO: 3329400 - RNA, 20 nt, Human
ugcccaaagaugcagccggu

SEQ ID NO: 3329401 - RNA, 20 nt, Human
ugcccuaaaguguauuuuuu

SEQ ID NO: 3329402 - RNA, 23 nt, Human
ugccccgaacauguuuuucuucu

SEQ ID NO: 3329403 - RNA, 20 nt, Human
agcucagggccuggcucagg

SEQ ID NO: 3329404 - RNA, 18 nt, Human
agcucagggccuggcuca

SEQ ID NO: 3329405 - RNA, 19 nt, Human
agcucagggccuggcucag

SEQ ID NO: 3329406 - RNA, 12 nt, Human
agcucagggccu

SEQ ID NO: 3329407 - RNA, 13 nt, Human
agcucagggccug

SEQ ID NO: 3329408 - RNA, 19 nt, Human
agcuauucaguaauaacuc

SEQ ID NO: 3329409 - RNA, 15 nt, Human
agcuccaagcuccca

SEQ ID NO: 3329410 - RNA, 16 nt, Human
agcuaggccuggccag

SEQ ID NO: 3329411 - RNA, 21 nt, Human
agcuaggccuggccagaugca

SEQ ID NO: 3329412 - RNA, 11 nt, Human
ugccucugccu

SEQ ID NO: 3329413 - RNA, 16 nt, Human
ugccucugacacacag

SEQ ID NO: 3329414 - RNA, 14 nt, Human
ugccucugacacac

SEQ ID NO: 3329415 - RNA, 19 nt, Human
ugccugcccaggccccugc

SEQ ID NO: 3329416 - RNA, 18 nt, Human
ugccugcccaggccccug

SEQ ID NO: 3329417 - RNA, 16 nt, Human
ugccugcccaggcccc

SEQ ID NO: 3329418 - RNA, 17 nt, Human
ugccugcccaggccccu

SEQ ID NO: 3329419 - RNA, 22 nt, Human
agcugcuuuugucuaugggacu

SEQ ID NO: 3329420 - RNA, 13 nt, Human
agcugccuguuca

SEQ ID NO: 3329421 - RNA, 10 nt, Human
agcugccugu

SEQ ID NO: 3329422 - RNA, 15 nt, Human
agcugggacuacagg

SEQ ID NO: 3329423 - RNA, 24 nt, Human
agcugcuuuugucuaugggacuca

SEQ ID NO: 3329424 - RNA, 23 nt, Human
agcugcuuuugucuaugggacuc

SEQ ID NO: 3329425 - RNA, 17 nt, Human
ugccucucucaggccaa

SEQ ID NO: 3329426 - RNA, 16 nt, Human
ugccucucucaggcca

SEQ ID NO: 3329427 - RNA, 22 nt, Human
ugccucccaucacccgcuaaga

SEQ ID NO: 3329428 - RNA, 19 nt, Human
ugccucccaucacccgcua

SEQ ID NO: 3329429 - RNA, 23 nt, Human
ugcccugugaguacuacaguccu

SEQ ID NO: 3329430 - RNA, 16 nt, Human
agcucuucuccaggcu

SEQ ID NO: 3329431 - RNA, 15 nt, Human
agcucuucuccaggc

SEQ ID NO: 3329432 - RNA, 15 nt, Human
ugcccugugggcccc

SEQ ID NO: 3329433 - RNA, 18 nt, Human
ugcccugugggcccccaa

SEQ ID NO: 3329434 - RNA, 22 nt, Human
ugcccuuaccugccaggaagcc

SEQ ID NO: 3329435 - RNA, 14 nt, Human
ugccgcagcccugc

SEQ ID NO: 3329436 - RNA, 20 nt, Human
ugccgcagcccugcagaggg

SEQ ID NO: 3329437 - RNA, 19 nt, Human
ugcccuuaccugccaggaa

SEQ ID NO: 3329438 - RNA, 19 nt, Human
ugcccuaaaguguauuuuu

SEQ ID NO: 3329439 - RNA, 17 nt, Human
agcuccaagcucccagg

SEQ ID NO: 3329440 - RNA, 16 nt, Human
agcuccaagcucccag

SEQ ID NO: 3329441 - RNA, 18 nt, Human
agcuccaagcucccaggc

SEQ ID NO: 3329442 - RNA, 19 nt, Human
agcuccaagcucccaggca

SEQ ID NO: 3329443 - RNA, 17 nt, Human
agcuccagcucaccagc

SEQ ID NO: 3329444 - RNA, 13 nt, Human
agcuccagcucac

SEQ ID NO: 3329445 - RNA, 19 nt, Human
agcuccagcucaccagccc

SEQ ID NO: 3329446 - RNA, 18 nt, Human
agcuccagcucaccagcc

SEQ ID NO: 3329447 - RNA, 21 nt, Human
agcuccagcucaccagcccca

SEQ ID NO: 3329448 - RNA, 23 nt, Human
agcuccuucuguccuacucugug

SEQ ID NO: 3329449 - RNA, 22 nt, Human
agcuccuucuguccuacucugu

SEQ ID NO: 3329450 - RNA, 23 nt, Human
agcucuguccugggagugagcug

SEQ ID NO: 3329451 - RNA, 15 nt, Human
agcccacuucugcca

SEQ ID NO: 3329452 - RNA, 14 nt, Human
agcccacuucugcc

SEQ ID NO: 3329453 - RNA, 13 nt, Human
agcccacuucugc

SEQ ID NO: 3329454 - RNA, 21 nt, Human
agccaguaaaugggggugcau

SEQ ID NO: 3329455 - RNA, 13 nt, Human
agccaguaaaugg

SEQ ID NO: 3329456 - RNA, 18 nt, Human
ugauuuccguuaaaauac

SEQ ID NO: 3329457 - RNA, 22 nt, Human
ugauuuccguuaaaauaccagc

SEQ ID NO: 3329458 - RNA, 17 nt, Human
ugauuuggggauauuuu

SEQ ID NO: 3329459 - RNA, 14 nt, Human
agcccaggaaaggc

SEQ ID NO: 3329460 - RNA, 15 nt, Human
ugauucauaaugacu

SEQ ID NO: 3329461 - RNA, 16 nt, Human
ugauucauaaugacuu

SEQ ID NO: 3329462 - RNA, 21 nt, Human
ugauucauaaugacuuaagca

SEQ ID NO: 3329463 - RNA, 23 nt, Human
ugauucccaagcucugcuccucu

SEQ ID NO: 3329464 - RNA, 22 nt, Human
ugauucccaagcucugcuccuc

SEQ ID NO: 3329465 - RNA, 21 nt, Human
ugauucccaagcucugcuccu

SEQ ID NO: 3329466 - RNA, 10 nt, Human
agccagagga

SEQ ID NO: 3329467 - RNA, 19 nt, Human
agccacugcaccgggccac

SEQ ID NO: 3329468 - RNA, 18 nt, Human
agccacugcaccgggcca

SEQ ID NO: 3329469 - RNA, 19 nt, Human
ugauuaaauucuugcaaag

SEQ ID NO: 3329470 - RNA, 17 nt, Human
ugauuaaauucuugcaa

SEQ ID NO: 3329471 - RNA, 13 nt, Human
ugauggugcaaug

SEQ ID NO: 3329472 - RNA, 20 nt, Human
ugauuaaauucuugcaaagu

SEQ ID NO: 3329473 - RNA, 19 nt, Human
ugauuaaccacuucagcug

SEQ ID NO: 3329474 - RNA, 16 nt, Human
agccacugcaccgggc

SEQ ID NO: 3329475 - RNA, 16 nt, Human
ugauccuaguuccacc

SEQ ID NO: 3329476 - RNA, 15 nt, Human
ugauccucccaccuc

SEQ ID NO: 3329477 - RNA, 21 nt, Human
ugauccucccaccucagccuc

SEQ ID NO: 3329478 - RNA, 22 nt, Human
ugauccucccaccucagccucc

SEQ ID NO: 3329479 - RNA, 13 nt, Human
ugaugagaggaaa

SEQ ID NO: 3329480 - RNA, 14 nt, Human
ugaugagaggaaau

SEQ ID NO: 3329481 - RNA, 15 nt, Human
ugaugagaggaaauc

SEQ ID NO: 3329482 - RNA, 16 nt, Human
ugaugagaggaaauca

SEQ ID NO: 3329483 - RNA, 23 nt, Human
ugaugcuucuucagagacuccug

SEQ ID NO: 3329484 - RNA, 14 nt, Human
ugauggggcccugc

SEQ ID NO: 3329485 - RNA, 15 nt, Human
ugauggggcccugcc

SEQ ID NO: 3329486 - RNA, 16 nt, Human
ugauggggcccugccu

SEQ ID NO: 3329487 - RNA, 19 nt, Human
ugauggggcccugccuccu

SEQ ID NO: 3329488 - RNA, 16 nt, Human
agcccuuagcagggaa

SEQ ID NO: 3329489 - RNA, 17 nt, Human
ugcagacucuacagagg

SEQ ID NO: 3329490 - RNA, 16 nt, Human
ugcagacucuacagag

SEQ ID NO: 3329491 - RNA, 20 nt, Human
agccgagauagccaaggcca

SEQ ID NO: 3329492 - RNA, 21 nt, Human
agccgagauagccaaggccaa

SEQ ID NO: 3329493 - RNA, 17 nt, Human
agccgagaucacgccac

SEQ ID NO: 3329494 - RNA, 21 nt, Human
agcccuuagcagggaaacagc

SEQ ID NO: 3329495 - RNA, 11 nt, Human
ugcacacauuu

SEQ ID NO: 3329496 - RNA, 12 nt, Human
ugcacacauuuu

SEQ ID NO: 3329497 - RNA, 13 nt, Human
ugcacacauuuuu

SEQ ID NO: 3329498 - RNA, 15 nt, Human
ugcacacauuuuuua

SEQ ID NO: 3329499 - RNA, 16 nt, Human
ugcacuccccugcugg

SEQ ID NO: 3329500 - RNA, 17 nt, Human
ugcacuccccugcuggg

SEQ ID NO: 3329501 - RNA, 19 nt, Human
ugcacuccccugcugggug

SEQ ID NO: 3329502 - RNA, 15 nt, Human
ugcacuccccugcug

SEQ ID NO: 3329503 - RNA, 22 nt, Human
ugcagacaggcaagcaccuccu

SEQ ID NO: 3329504 - RNA, 19 nt, Human
agccucaaccuccugggcu

SEQ ID NO: 3329505 - RNA, 20 nt, Human
agccucaaccuccugggcua

SEQ ID NO: 3329506 - RNA, 17 nt, Human
agccucacaguccuuac

SEQ ID NO: 3329507 - RNA, 18 nt, Human
agccucacaguccuuacc

SEQ ID NO: 3329508 - RNA, 21 nt, Human
ugcagccucaaccuccugggc

SEQ ID NO: 3329509 - RNA, 20 nt, Human
ugcagccucaaccuccuggg

SEQ ID NO: 3329510 - RNA, 22 nt, Human
ugcagccucaaccuccugggcu

SEQ ID NO: 3329511 - RNA, 23 nt, Human
agccucugaaaaccaauguucuc

SEQ ID NO: 3329512 - RNA, 18 nt, Human
ugcacacaccagagccca

SEQ ID NO: 3329513 - RNA, 17 nt, Human
ugcacacaccagagccc

SEQ ID NO: 3329514 - RNA, 21 nt, Human
ugcacacaccagagcccaccu

SEQ ID NO: 3329515 - RNA, 16 nt, Human
agcccugguggcagug

SEQ ID NO: 3329516 - RNA, 15 nt, Human
agcccugguggcagu

SEQ ID NO: 3329517 - RNA, 14 nt, Human
agcccugguggcag

SEQ ID NO: 3329518 - RNA, 21 nt, Human
ugcaaaccaucauugaaaucu

SEQ ID NO: 3329519 - RNA, 20 nt, Human
ugcaaaccaucauugaaauc

SEQ ID NO: 3329520 - RNA, 22 nt, Human
agccccauucugccugcccagg

SEQ ID NO: 3329521 - RNA, 21 nt, Human
agccccauucugccugcccag

SEQ ID NO: 3329522 - RNA, 18 nt, Human
agccccaaaacucuccuc

SEQ ID NO: 3329523 - RNA, 20 nt, Human
agccccauucugccugccca

SEQ ID NO: 3329524 - RNA, 16 nt, Human
agccccaaaacucucc

SEQ ID NO: 3329525 - RNA, 17 nt, Human
agccccaaaacucuccu

SEQ ID NO: 3329526 - RNA, 21 nt, Human
agcccaggccuccuacagcuu

SEQ ID NO: 3329527 - RNA, 15 nt, Human
aggauccugagccag

SEQ ID NO: 3329528 - RNA, 16 nt, Human
aggauccugagccaga

SEQ ID NO: 3329529 - RNA, 21 nt, Human
aggaucucuugagccugggag

SEQ ID NO: 3329530 - RNA, 22 nt, Human
aggaucucuugagccugggagg

SEQ ID NO: 3329531 - RNA, 17 nt, Human
aggauccugagccagau

SEQ ID NO: 3329532 - RNA, 16 nt, Human
aggaugaucuaggaag

SEQ ID NO: 3329533 - RNA, 17 nt, Human
aggaugaucuaggaaga

SEQ ID NO: 3329534 - RNA, 23 nt, Human
uggaaaugggcagagcagagacc

SEQ ID NO: 3329535 - RNA, 18 nt, Human
uggaaaugggcagagcag

SEQ ID NO: 3329536 - RNA, 20 nt, Human
uggaaauauuaagaaagacu

SEQ ID NO: 3329537 - RNA, 14 nt, Human
aggaugcccaaaga

SEQ ID NO: 3329538 - RNA, 19 nt, Human
aggaugcccaaagaugcag

SEQ ID NO: 3329539 - RNA, 19 nt, Human
aggauuuugauccaagcug

SEQ ID NO: 3329540 - RNA, 17 nt, Human
aggcaacucaucuuagg

SEQ ID NO: 3329541 - RNA, 14 nt, Human
uggacccugaggcc

SEQ ID NO: 3329542 - RNA, 12 nt, Human
uggacccugagg

SEQ ID NO: 3329543 - RNA, 13 nt, Human
uggacccugaggc

SEQ ID NO: 3329544 - RNA, 16 nt, Human
uggacacagcucuucu

SEQ ID NO: 3329545 - RNA, 15 nt, Human
uggacacagcucuuc

SEQ ID NO: 3329546 - RNA, 18 nt, Human
uggacacagcucuucucc

SEQ ID NO: 3329547 - RNA, 17 nt, Human
aggagccuccugcccuu

SEQ ID NO: 3329548 - RNA, 16 nt, Human
ugcuuggaggaaggaa

SEQ ID NO: 3329549 - RNA, 12 nt, Human
ugcuugggcuuc

SEQ ID NO: 3329550 - RNA, 16 nt, Human
ugcuugggcuucaucc

SEQ ID NO: 3329551 - RNA, 21 nt, Human
ugcuuggaggaaggaaaccca

SEQ ID NO: 3329552 - RNA, 15 nt, Human
uggaaauauuaagaa

SEQ ID NO: 3329553 - RNA, 19 nt, Human
ugcuugggcuucauccucc

SEQ ID NO: 3329554 - RNA, 18 nt, Human
aggacauugcggacagcc

SEQ ID NO: 3329555 - RNA, 17 nt, Human
aggacauugcggacagc

SEQ ID NO: 3329556 - RNA, 15 nt, Human
aggacauugcggaca

SEQ ID NO: 3329557 - RNA, 23 nt, Human
aggacauugcggacagccacggc

SEQ ID NO: 3329558 - RNA, 19 nt, Human
aggacauugcggacagcca

SEQ ID NO: 3329559 - RNA, 17 nt, Human
aggagccccgaggccuu

SEQ ID NO: 3329560 - RNA, 22 nt, Human
aggagccccgaggccuucucug

SEQ ID NO: 3329561 - RNA, 14 nt, Human
aggagcagccacau

SEQ ID NO: 3329562 - RNA, 17 nt, Human
aggagauuggaaggaac

SEQ ID NO: 3329563 - RNA, 23 nt, Human
aggacuuuucuuuguggcuuccu

SEQ ID NO: 3329564 - RNA, 15 nt, Human
ugcugagucugaagg

SEQ ID NO: 3329565 - RNA, 14 nt, Human
ugcugagucugaag

SEQ ID NO: 3329566 - RNA, 16 nt, Human
ugcucugcugacagac

SEQ ID NO: 3329567 - RNA, 22 nt, Human
ugcucugcugacagacacaggc

SEQ ID NO: 3329568 - RNA, 21 nt, Human
ugcucugcugacagacacagg

SEQ ID NO: 3329569 - RNA, 16 nt, Human
ugcuccagcuguucag

SEQ ID NO: 3329570 - RNA, 19 nt, Human
ugcuccagcuguucagcug

SEQ ID NO: 3329571 - RNA, 18 nt, Human
agcugggacuacaggcac

SEQ ID NO: 3329572 - RNA, 16 nt, Human
agcugggacuacaggc

SEQ ID NO: 3329573 - RNA, 16 nt, Human
ugcugagucugaaggc

SEQ ID NO: 3329574 - RNA, 17 nt, Human
ugcugagucugaaggcu

SEQ ID NO: 3329575 - RNA, 18 nt, Human
ugcugagucugaaggcug

SEQ ID NO: 3329576 - RNA, 21 nt, Human
ugcugagucugaaggcugggu

SEQ ID NO: 3329577 - RNA, 22 nt, Human
ugcugagucugaaggcuggguu

SEQ ID NO: 3329578 - RNA, 13 nt, Human
aggaagacuucau

SEQ ID NO: 3329579 - RNA, 19 nt, Human
aggaagacuucaucccucu

SEQ ID NO: 3329580 - RNA, 13 nt, Human
aggaagacuuugg

SEQ ID NO: 3329581 - RNA, 23 nt, Human
aggaagcacaugccucucucagg

SEQ ID NO: 3329582 - RNA, 24 nt, Human
aggaagcacaugccucucucaggc

SEQ ID NO: 3329583 - RNA, 14 nt, Human
aggaagccagcagg

SEQ ID NO: 3329584 - RNA, 15 nt, Human
aggaagccagcaggc

SEQ ID NO: 3329585 - RNA, 22 nt, Human
aggaagcacaugccucucucag

SEQ ID NO: 3329586 - RNA, 18 nt, Human
aggaaggaaacccagcuc

SEQ ID NO: 3329587 - RNA, 17 nt, Human
aggaagccagcaggcuc

SEQ ID NO: 3329588 - RNA, 13 nt, Human
aggaagccagcag

SEQ ID NO: 3329589 - RNA, 19 nt, Human
aggaaggaaacccagcucu

SEQ ID NO: 3329590 - RNA, 15 nt, Human
aggaaggagaggaga

SEQ ID NO: 3329591 - RNA, 16 nt, Human
ugcuucaaggauccug

SEQ ID NO: 3329592 - RNA, 18 nt, Human
ugcuucaaggauccugag

SEQ ID NO: 3329593 - RNA, 19 nt, Human
ugcuucaaggauccugagc

SEQ ID NO: 3329594 - RNA, 14 nt, Human
ugcuucagccuccc

SEQ ID NO: 3329595 - RNA, 13 nt, Human
ugcuucagccucc

SEQ ID NO: 3329596 - RNA, 12 nt, Human
ugcuucaaggau

SEQ ID NO: 3329597 - RNA, 13 nt, Human
ugcuuauacacuu

SEQ ID NO: 3329598 - RNA, 19 nt, Human
aggacacuaaccacgcugg

SEQ ID NO: 3329599 - RNA, 23 nt, Human
aggacacuaaccacgcuggaccu

SEQ ID NO: 3329600 - RNA, 18 nt, Human
ugcuguaacuuucugaaa

SEQ ID NO: 3329601 - RNA, 17 nt, Human
ugcugucccuuuuccuu

SEQ ID NO: 3329602 - RNA, 16 nt, Human
ugcuggcugguuagag

SEQ ID NO: 3329603 - RNA, 12 nt, Human
ugcugcccugug

SEQ ID NO: 3329604 - RNA, 13 nt, Human
ugcugcccuguga

SEQ ID NO: 3329605 - RNA, 14 nt, Human
ugcugcccugugag

SEQ ID NO: 3329606 - RNA, 15 nt, Human
ugcugcccugugagu

SEQ ID NO: 3329607 - RNA, 21 nt, Human
uggcagaguugaagacagagc

SEQ ID NO: 3329608 - RNA, 19 nt, Human
uggcagaguugaagacaga

SEQ ID NO: 3329609 - RNA, 15 nt, Human
uggcacccggccccu

SEQ ID NO: 3329610 - RNA, 22 nt, Human
uggcagaguugaagacagagcu

SEQ ID NO: 3329611 - RNA, 20 nt, Human
uggcacaucagcacgauuuc

SEQ ID NO: 3329612 - RNA, 18 nt, Human
uggcaccagcagccugga

SEQ ID NO: 3329613 - RNA, 12 nt, Human
uggauguucuga

SEQ ID NO: 3329614 - RNA, 20 nt, Human
aggccacaagacccuugugg

SEQ ID NO: 3329615 - RNA, 12 nt, Human
uggcagccccug

SEQ ID NO: 3329616 - RNA, 19 nt, Human
uggaugccugguggcagcu

SEQ ID NO: 3329617 - RNA, 18 nt, Human
uggaugccugguggcagc

SEQ ID NO: 3329618 - RNA, 16 nt, Human
uggaguucaucuugaa

SEQ ID NO: 3329619 - RNA, 17 nt, Human
uggaguucaucuugaau

SEQ ID NO: 3329620 - RNA, 20 nt, Human
uggaguucaucuugaauugu

SEQ ID NO: 3329621 - RNA, 15 nt, Human
uggaugccugguggc

SEQ ID NO: 3329622 - RNA, 15 nt, Human
aggccacaagacccu

SEQ ID NO: 3329623 - RNA, 14 nt, Human
uggaguauauguca

SEQ ID NO: 3329624 - RNA, 14 nt, Human
aggccaaaggaagc

SEQ ID NO: 3329625 - RNA, 20 nt, Human
aggccaaacucaccugcccc

SEQ ID NO: 3329626 - RNA, 23 nt, Human
aggccaaaggaagcacaugccuc

SEQ ID NO: 3329627 - RNA, 20 nt, Human
aggccaaaggaagcacaugc

SEQ ID NO: 3329628 - RNA, 18 nt, Human
aggccaaggugggaggau

SEQ ID NO: 3329629 - RNA, 16 nt, Human
aggccaaacucaccug

SEQ ID NO: 3329630 - RNA, 18 nt, Human
aggcauuuguuugaacug

SEQ ID NO: 3329631 - RNA, 20 nt, Human
aggcauuugcugaauacaga

SEQ ID NO: 3329632 - RNA, 20 nt, Human
uggaccuugaacuggguacu

SEQ ID NO: 3329633 - RNA, 12 nt, Human
uggcaugggaau

SEQ ID NO: 3329634 - RNA, 15 nt, Human
uggcaugggaaugaa

SEQ ID NO: 3329635 - RNA, 17 nt, Human
uggccaggcuggucuca

SEQ ID NO: 3329636 - RNA, 15 nt, Human
uggccaggcuggucu

SEQ ID NO: 3329637 - RNA, 13 nt, Human
aggcccucugccc

SEQ ID NO: 3329638 - RNA, 14 nt, Human
aggcccucugccca

SEQ ID NO: 3329639 - RNA, 14 nt, Human
uggccucugcacuc

SEQ ID NO: 3329640 - RNA, 15 nt, Human
uggccucugcacucc

SEQ ID NO: 3329641 - RNA, 17 nt, Human
uggccucugcacucccc

SEQ ID NO: 3329642 - RNA, 13 nt, Human
uggccucugcacu

SEQ ID NO: 3329643 - RNA, 21 nt, Human
aggccuggccagaugcaccag

SEQ ID NO: 3329644 - RNA, 17 nt, Human
aggccuggccagaugca

SEQ ID NO: 3329645 - RNA, 16 nt, Human
aggccuggccagaugc

SEQ ID NO: 3329646 - RNA, 15 nt, Human
aggccuggccagaug

SEQ ID NO: 3329647 - RNA, 23 nt, Human
aggccugggggcugggcagagga

SEQ ID NO: 3329648 - RNA, 23 nt, Human
aggccuggccagaugcaccagcc

SEQ ID NO: 3329649 - RNA, 22 nt, Human
aggccuggccagaugcaccagc

SEQ ID NO: 3329650 - RNA, 21 nt, Human
uggccccugcccggcugcgga

SEQ ID NO: 3329651 - RNA, 20 nt, Human
uggccccugcccggcugcgg

SEQ ID NO: 3329652 - RNA, 16 nt, Human
aggcucugcccuuggu

SEQ ID NO: 3329653 - RNA, 17 nt, Human
aggcuggcgugcagugg

SEQ ID NO: 3329654 - RNA, 13 nt, Human
aggcuggcgugca

SEQ ID NO: 3329655 - RNA, 21 nt, Human
aggcucgagcaugccuggaug

SEQ ID NO: 3329656 - RNA, 15 nt, Human
aggcucgagcaugcc

SEQ ID NO: 3329657 - RNA, 17 nt, Human
aggcucgagcaugccug

SEQ ID NO: 3329658 - RNA, 18 nt, Human
aggcucgagcaugccugg

SEQ ID NO: 3329659 - RNA, 19 nt, Human
aggcucgagcaugccugga

SEQ ID NO: 3329660 - RNA, 12 nt, Human
aggcucgagcau

SEQ ID NO: 3329661 - RNA, 19 nt, Human
aggcuccuuuagcgcccag

SEQ ID NO: 3329662 - RNA, 20 nt, Human
aggccugggggcugggcaga

SEQ ID NO: 3329663 - RNA, 11 nt, Human
aggcucucagg

SEQ ID NO: 3329664 - RNA, 12 nt, Human
aggcucucaggc

SEQ ID NO: 3329665 - RNA, 14 nt, Human
aggcucucaggcca

SEQ ID NO: 3329666 - RNA, 15 nt, Human
aggcucucaggccag

SEQ ID NO: 3329667 - RNA, 16 nt, Human
aggcucucaggccagc

SEQ ID NO: 3329668 - RNA, 18 nt, Human
aggcucucaggccagcug

SEQ ID NO: 3329669 - RNA, 19 nt, Human
aggcucucaggccagcugc

SEQ ID NO: 3329670 - RNA, 20 nt, Human
aggcucucaggccagcugcu

SEQ ID NO: 3329671 - RNA, 14 nt, Human
aggcucugcccuug

SEQ ID NO: 3329672 - RNA, 15 nt, Human
aggcucugcccuugg

SEQ ID NO: 3329673 - RNA, 13 nt, Human
aggcucugcccuu

SEQ ID NO: 3329674 - RNA, 12 nt, Human
aggcucugcccu

SEQ ID NO: 3329675 - RNA, 11 nt, Human
aggcucugccc

SEQ ID NO: 3329676 - RNA, 21 nt, Human
aggcucucaggccagcugcuu

SEQ ID NO: 3329677 - RNA, 12 nt, Human
uggcugcaaagg

SEQ ID NO: 3329678 - RNA, 20 nt, Human
uggcucuuccaggcugggag

SEQ ID NO: 3329679 - RNA, 21 nt, Human
uggcucuuccaggcugggaga

SEQ ID NO: 3329680 - RNA, 19 nt, Human
uggcucuuccaggcuggga

SEQ ID NO: 3329681 - RNA, 18 nt, Human
uggcugccaaugggagcu

SEQ ID NO: 3329682 - RNA, 20 nt, Human
uggcugccaaugggagcuca

SEQ ID NO: 3329683 - RNA, 14 nt, Human
uggcugcagggagu

SEQ ID NO: 3329684 - RNA, 13 nt, Human
uggcugcagggag

SEQ ID NO: 3329685 - RNA, 15 nt, Human
uggcugcagggaguc

SEQ ID NO: 3329686 - RNA, 15 nt, Human
uggcuaugcauuuga

SEQ ID NO: 3329687 - RNA, 17 nt, Human
uggcuaugcauuugaaa

SEQ ID NO: 3329688 - RNA, 14 nt, Human
uggcuaugcauuug

SEQ ID NO: 3329689 - RNA, 19 nt, Human
uggcuaugcauuugaaaau

SEQ ID NO: 3329690 - RNA, 22 nt, Human
uggcuauuagagaucaaccccu

SEQ ID NO: 3329691 - RNA, 20 nt, Human
aggcuggcgugcaguggugc

SEQ ID NO: 3329692 - RNA, 18 nt, Human
aggcuggcgugcaguggu

SEQ ID NO: 3329693 - RNA, 22 nt, Human
uggcuagagguucaaagauauu

SEQ ID NO: 3329694 - RNA, 14 nt, Human
aggcugggagagcc

SEQ ID NO: 3329695 - RNA, 16 nt, Human
ugggaaaggggaaguu

SEQ ID NO: 3329696 - RNA, 22 nt, Human
uggcuucacggaagagccuugc

SEQ ID NO: 3329697 - RNA, 23 nt, Human
uggcuucacggaagagccuugcg

SEQ ID NO: 3329698 - RNA, 17 nt, Human
uggcuuaaaacaacacu

SEQ ID NO: 3329699 - RNA, 14 nt, Human
uggcugugucuccc

SEQ ID NO: 3329700 - RNA, 13 nt, Human
uggcuguuggcug

SEQ ID NO: 3329701 - RNA, 14 nt, Human
uuguaaggaaugau

SEQ ID NO: 3329702 - RNA, 19 nt, Human
uugguuaggcauuguggga

SEQ ID NO: 3329703 - RNA, 22 nt, Human
uugggguacccacugcucuggu

SEQ ID NO: 3329704 - RNA, 19 nt, Human
uuggggaagaacgaagcca

SEQ ID NO: 3329705 - RNA, 17 nt, Human
uugggguacccacugcu

SEQ ID NO: 3329706 - RNA, 13 nt, Human
augaaccacaucu

SEQ ID NO: 3329707 - RNA, 20 nt, Human
augaaccacaucuugcucug

SEQ ID NO: 3329708 - RNA, 19 nt, Human
augacacgaauauugcuga

SEQ ID NO: 3329709 - RNA, 20 nt, Human
augacacgaauauugcugau

SEQ ID NO: 3329710 - RNA, 20 nt, Human
uuguaaggaaugauuaauua

SEQ ID NO: 3329711 - RNA, 11 nt, Human
uuggcugcuga

SEQ ID NO: 3329712 - RNA, 15 nt, Human
uuggcugcugaaggc

SEQ ID NO: 3329713 - RNA, 14 nt, Human
uuggcugcagggag

SEQ ID NO: 3329714 - RNA, 13 nt, Human
uuggcugcaggga

SEQ ID NO: 3329715 - RNA, 22 nt, Human
uuggcuagagguucaaagauau

SEQ ID NO: 3329716 - RNA, 22 nt, Human
uuggcuaggaccccuccaugug

SEQ ID NO: 3329717 - RNA, 21 nt, Human
uuggcuagagguucaaagaua

SEQ ID NO: 3329718 - RNA, 18 nt, Human
uuggaaagaguaggaaga

SEQ ID NO: 3329719 - RNA, 21 nt, Human
uuggacccugaggcccagagg

SEQ ID NO: 3329720 - RNA, 19 nt, Human
augaaagacuguacaaagu

SEQ ID NO: 3329721 - RNA, 20 nt, Human
augaaagacuguacaaagua

SEQ ID NO: 3329722 - RNA, 17 nt, Human
uuggaaagaguaggaag

SEQ ID NO: 3329723 - RNA, 17 nt, Human
uugcugauggugcaaug

SEQ ID NO: 3329724 - RNA, 18 nt, Human
uugcugauggugcaauga

SEQ ID NO: 3329725 - RNA, 20 nt, Human
uugcuaagugaggaugaaaa

SEQ ID NO: 3329726 - RNA, 19 nt, Human
uugcugaauacagaggcaa

SEQ ID NO: 3329727 - RNA, 16 nt, Human
augagccucagcaucc

SEQ ID NO: 3329728 - RNA, 15 nt, Human
augagccucagcauc

SEQ ID NO: 3329729 - RNA, 12 nt, Human
augagccucagc

SEQ ID NO: 3329730 - RNA, 22 nt, Human
augagcaucaggccaggcccuc

SEQ ID NO: 3329731 - RNA, 18 nt, Human
augagcaucaggccaggc

SEQ ID NO: 3329732 - RNA, 19 nt, Human
augagcaucaggccaggcc

SEQ ID NO: 3329733 - RNA, 20 nt, Human
augagcaucaggccaggccc

SEQ ID NO: 3329734 - RNA, 21 nt, Human
augagcaucaggccaggcccu

SEQ ID NO: 3329735 - RNA, 16 nt, Human
augagcaucaggccag

SEQ ID NO: 3329736 - RNA, 17 nt, Human
augagcaucaggccagg

SEQ ID NO: 3329737 - RNA, 15 nt, Human
augagcaucaggcca

SEQ ID NO: 3329738 - RNA, 14 nt, Human
augagaggaaauca

SEQ ID NO: 3329739 - RNA, 15 nt, Human
augagaggaaaucac

SEQ ID NO: 3329740 - RNA, 16 nt, Human
augagaggaaaucacc

SEQ ID NO: 3329741 - RNA, 12 nt, Human
augagaggaaau

SEQ ID NO: 3329742 - RNA, 13 nt, Human
augagaggaaauc

SEQ ID NO: 3329743 - RNA, 18 nt, Human
augagccucagcauccug

SEQ ID NO: 3329744 - RNA, 17 nt, Human
augagccucagcauccu

SEQ ID NO: 3329745 - RNA, 22 nt, Human
augaggucagagccugcaguua

SEQ ID NO: 3329746 - RNA, 23 nt, Human
augaguccccuguuuguuucuga

SEQ ID NO: 3329747 - RNA, 15 nt, Human
augauaaaacacaaa

SEQ ID NO: 3329748 - RNA, 18 nt, Human
uugucacacacuuuggcu

SEQ ID NO: 3329749 - RNA, 16 nt, Human
uuguccccgacccuug

SEQ ID NO: 3329750 - RNA, 14 nt, Human
augcaaggucauuu

SEQ ID NO: 3329751 - RNA, 16 nt, Human
augcaaggucauuuuu

SEQ ID NO: 3329752 - RNA, 16 nt, Human
augcaccuggaauaua

SEQ ID NO: 3329753 - RNA, 14 nt, Human
augcaccuggaaua

SEQ ID NO: 3329754 - RNA, 22 nt, Human
augcaaggucauuuuuuuuaag

SEQ ID NO: 3329755 - RNA, 15 nt, Human
augaucuucuuuaua

SEQ ID NO: 3329756 - RNA, 16 nt, Human
augcaaaccaucauug

SEQ ID NO: 3329757 - RNA, 18 nt, Human
augcaaaccaucauugaa

SEQ ID NO: 3329758 - RNA, 19 nt, Human
augcaaaccaucauugaaa

SEQ ID NO: 3329759 - RNA, 20 nt, Human
augcaaaccaucauugaaau

SEQ ID NO: 3329760 - RNA, 21 nt, Human
augcaaaccaucauugaaauc

SEQ ID NO: 3329761 - RNA, 22 nt, Human
augcaaaccaucauugaaaucu

SEQ ID NO: 3329762 - RNA, 19 nt, Human
augcaccuggaauauauaa

SEQ ID NO: 3329763 - RNA, 14 nt, Human
augaucuucuuuau

SEQ ID NO: 3329764 - RNA, 16 nt, Human
augauccuaggcauuu

SEQ ID NO: 3329765 - RNA, 23 nt, Human
augaucacggcucacugcagccu

SEQ ID NO: 3329766 - RNA, 15 nt, Human
augaucacggcucac

SEQ ID NO: 3329767 - RNA, 19 nt, Human
augaucacggcucacugca

SEQ ID NO: 3329768 - RNA, 18 nt, Human
augaucacggcucacugc

SEQ ID NO: 3329769 - RNA, 18 nt, Human
uuucgcaggauucuuccu

SEQ ID NO: 3329770 - RNA, 22 nt, Human
uuucgcaggauucuuccucccu

SEQ ID NO: 3329771 - RNA, 21 nt, Human
uuuccuucauucaacccaccu

SEQ ID NO: 3329772 - RNA, 22 nt, Human
uuuccuucagugccuuauggaa

SEQ ID NO: 3329773 - RNA, 18 nt, Human
uuuccuucagugccuuau

SEQ ID NO: 3329774 - RNA, 21 nt, Human
uuuccuucagugccuuaugga

SEQ ID NO: 3329775 - RNA, 23 nt, Human
uuuccuucauucaacccaccugc

SEQ ID NO: 3329776 - RNA, 12 nt, Human
uuuccugugucu

SEQ ID NO: 3329777 - RNA, 12 nt, Human
uuuccuucagug

SEQ ID NO: 3329778 - RNA, 15 nt, Human
uuuccuucagugccu

SEQ ID NO: 3329779 - RNA, 11 nt, Human
uuuccuucagu

SEQ ID NO: 3329780 - RNA, 18 nt, Human
auggccucuucagaucuc

SEQ ID NO: 3329781 - RNA, 21 nt, Human
auggacccaauauuuaccaga

SEQ ID NO: 3329782 - RNA, 19 nt, Human
auggacaugaucuucuuua

SEQ ID NO: 3329783 - RNA, 13 nt, Human
augggcagagcag

SEQ ID NO: 3329784 - RNA, 14 nt, Human
augggcagagcaga

SEQ ID NO: 3329785 - RNA, 15 nt, Human
augggcagagcagag

SEQ ID NO: 3329786 - RNA, 15 nt, Human
augggccuccugugu

SEQ ID NO: 3329787 - RNA, 21 nt, Human
augggcaacccccagccugcu

SEQ ID NO: 3329788 - RNA, 19 nt, Human
augggcaacccccagccug

SEQ ID NO: 3329789 - RNA, 18 nt, Human
augggcaacccccagccu

SEQ ID NO: 3329790 - RNA, 13 nt, Human
augggagcucaug

SEQ ID NO: 3329791 - RNA, 15 nt, Human
uuucuaugacacaug

SEQ ID NO: 3329792 - RNA, 21 nt, Human
uuucuaugacacaugcaaggu

SEQ ID NO: 3329793 - RNA, 21 nt, Human
uuucugcagccacuauuguua

SEQ ID NO: 3329794 - RNA, 14 nt, Human
uuucugccgcagcc

SEQ ID NO: 3329795 - RNA, 16 nt, Human
uuucugccgcagcccu

SEQ ID NO: 3329796 - RNA, 13 nt, Human
uuucuuuguggcu

SEQ ID NO: 3329797 - RNA, 14 nt, Human
auggggcccugccu

SEQ ID NO: 3329798 - RNA, 13 nt, Human
auggggcccugcc

SEQ ID NO: 3329799 - RNA, 23 nt, Human
augggcuggguucuacccaggug

SEQ ID NO: 3329800 - RNA, 19 nt, Human
uuuccagguuuaagcuguu

SEQ ID NO: 3329801 - RNA, 14 nt, Human
uuucacucuccuug

SEQ ID NO: 3329802 - RNA, 15 nt, Human
uuucacucuccuugg

SEQ ID NO: 3329803 - RNA, 15 nt, Human
auggaauaacaugua

SEQ ID NO: 3329804 - RNA, 14 nt, Human
auggaauaacaugu

SEQ ID NO: 3329805 - RNA, 18 nt, Human
auggaacacucugagacu

SEQ ID NO: 3329806 - RNA, 17 nt, Human
auggaacacucugagac

SEQ ID NO: 3329807 - RNA, 21 nt, Human
auggaaguacuauaauuuacc

SEQ ID NO: 3329808 - RNA, 19 nt, Human
augcugugcccuaaagugu

SEQ ID NO: 3329809 - RNA, 22 nt, Human
augcuggcuguuggcugggggc

SEQ ID NO: 3329810 - RNA, 15 nt, Human
uuuagauaauacacc

SEQ ID NO: 3329811 - RNA, 18 nt, Human
uuuagaguugauacuaca

SEQ ID NO: 3329812 - RNA, 13 nt, Human
uuuagauaauaca

SEQ ID NO: 3329813 - RNA, 19 nt, Human
uuuauuaaaugcccagccc

SEQ ID NO: 3329814 - RNA, 18 nt, Human
uuuacuaauagacaauuu

SEQ ID NO: 3329815 - RNA, 14 nt, Human
uuuacuaauagaca

SEQ ID NO: 3329816 - RNA, 17 nt, Human
uuuacuaauagacaauu

SEQ ID NO: 3329817 - RNA, 21 nt, Human
uuuaccuuuuuuauacauaaa

SEQ ID NO: 3329818 - RNA, 18 nt, Human
augcuacacacugcaugu

SEQ ID NO: 3329819 - RNA, 22 nt, Human
uuuaccugaagucuuuguacag

SEQ ID NO: 3329820 - RNA, 17 nt, Human
augcuacacacugcaug

SEQ ID NO: 3329821 - RNA, 19 nt, Human
uuuaccuuuuuuauacaua

SEQ ID NO: 3329822 - RNA, 20 nt, Human
uuuaccuuuuuuauacauaa

SEQ ID NO: 3329823 - RNA, 14 nt, Human
uuuaccuuuuuuau

SEQ ID NO: 3329824 - RNA, 21 nt, Human
auccuggcacccggccccugc

SEQ ID NO: 3329825 - RNA, 20 nt, Human
auccuggcacccggccccug

SEQ ID NO: 3329826 - RNA, 19 nt, Human
auccuggcacccggccccu

SEQ ID NO: 3329827 - RNA, 17 nt, Human
auccuggcacccggccc

SEQ ID NO: 3329828 - RNA, 15 nt, Human
auccuggaguucugg

SEQ ID NO: 3329829 - RNA, 23 nt, Human
auccuggcacccggccccugcug

SEQ ID NO: 3329830 - RNA, 22 nt, Human
auccuggcacccggccccugcu

SEQ ID NO: 3329831 - RNA, 20 nt, Human
uucuuuugccguuauuaaaa

SEQ ID NO: 3329832 - RNA, 18 nt, Human
auccucuguacagagccc

SEQ ID NO: 3329833 - RNA, 20 nt, Human
auccucuguacagagcccac

SEQ ID NO: 3329834 - RNA, 17 nt, Human
auccucuuugagugaag

SEQ ID NO: 3329835 - RNA, 12 nt, Human
auccugagccag

SEQ ID NO: 3329836 - RNA, 13 nt, Human
auccugagccaga

SEQ ID NO: 3329837 - RNA, 11 nt, Human
auccugagcca

SEQ ID NO: 3329838 - RNA, 14 nt, Human
auccugagccagau

SEQ ID NO: 3329839 - RNA, 15 nt, Human
auccugagccagauu

SEQ ID NO: 3329840 - RNA, 17 nt, Human
auccugagccagauuuc

SEQ ID NO: 3329841 - RNA, 21 nt, Human
auccugagccagauuucacuc

SEQ ID NO: 3329842 - RNA, 19 nt, Human
auccugagguguaccagga

SEQ ID NO: 3329843 - RNA, 17 nt, Human
uugaccauucuccaccu

SEQ ID NO: 3329844 - RNA, 18 nt, Human
uugaccauucuccaccug

SEQ ID NO: 3329845 - RNA, 19 nt, Human
uugaccauucuccaccugc

SEQ ID NO: 3329846 - RNA, 19 nt, Human
uugacagggcacaccgggc

SEQ ID NO: 3329847 - RNA, 24 nt, Human
uugaccauucuccaccugccaggg

SEQ ID NO: 3329848 - RNA, 15 nt, Human
uugaggucuguucuu

SEQ ID NO: 3329849 - RNA, 16 nt, Human
uugaggucuguucuuu

SEQ ID NO: 3329850 - RNA, 12 nt, Human
uugauaaaguaa

SEQ ID NO: 3329851 - RNA, 14 nt, Human
aucgucacugcuua

SEQ ID NO: 3329852 - RNA, 18 nt, Human
aucgucacugcuuaacuu

SEQ ID NO: 3329853 - RNA, 15 nt, Human
aucgugacaacacuu

SEQ ID NO: 3329854 - RNA, 14 nt, Human
aucgugacaacacu

SEQ ID NO: 3329855 - RNA, 19 nt, Human
aucuaaauggaaccacucu

SEQ ID NO: 3329856 - RNA, 15 nt, Human
aucuaaauguugaaa

SEQ ID NO: 3329857 - RNA, 12 nt, Human
aucauugaaauc

SEQ ID NO: 3329858 - RNA, 19 nt, Human
uucugcagccacuauuguu

SEQ ID NO: 3329859 - RNA, 20 nt, Human
uucucuaguuugauuaaauu

SEQ ID NO: 3329860 - RNA, 21 nt, Human
uucucuaguuugauuaaauuc

SEQ ID NO: 3329861 - RNA, 23 nt, Human
aucauaguggcuuaaaacaacac

SEQ ID NO: 3329862 - RNA, 15 nt, Human
aucauaaaacuugau

SEQ ID NO: 3329863 - RNA, 22 nt, Human
aucauuaaagccugaguuugcu

SEQ ID NO: 3329864 - RNA, 21 nt, Human
aucauccacugugccaugugc

SEQ ID NO: 3329865 - RNA, 16 nt, Human
aucauuaggugugacu

SEQ ID NO: 3329866 - RNA, 19 nt, Human
aucagucugauucccaagc

SEQ ID NO: 3329867 - RNA, 14 nt, Human
aucaggugcugcca

SEQ ID NO: 3329868 - RNA, 17 nt, Human
aucaggugcugccaucc

SEQ ID NO: 3329869 - RNA, 15 nt, Human
aucaggugcugccau

SEQ ID NO: 3329870 - RNA, 13 nt, Human
uucuugcaaagua

SEQ ID NO: 3329871 - RNA, 22 nt, Human
uucuucuccacuuucuagccag

SEQ ID NO: 3329872 - RNA, 17 nt, Human
uucuuucuggcuaugca

SEQ ID NO: 3329873 - RNA, 20 nt, Human
uucuuucuggcuaugcauuu

SEQ ID NO: 3329874 - RNA, 12 nt, Human
uucuuucuggcu

SEQ ID NO: 3329875 - RNA, 13 nt, Human
uucuguuuagaua

SEQ ID NO: 3329876 - RNA, 18 nt, Human
uucuguuuagauaauaca

SEQ ID NO: 3329877 - RNA, 21 nt, Human
uucuguuggccagugugacaa

SEQ ID NO: 3329878 - RNA, 16 nt, Human
uucugccugcccaggc

SEQ ID NO: 3329879 - RNA, 15 nt, Human
uucugccugcccagg

SEQ ID NO: 3329880 - RNA, 14 nt, Human
auccaguaucuuga

SEQ ID NO: 3329881 - RNA, 17 nt, Human
auccagguucagcuugu

SEQ ID NO: 3329882 - RNA, 17 nt, Human
aucccugaaggccccgc

SEQ ID NO: 3329883 - RNA, 22 nt, Human
aucccugaaggccccgcccagg

SEQ ID NO: 3329884 - RNA, 17 nt, Human
aucccaugagccucagc

SEQ ID NO: 3329885 - RNA, 16 nt, Human
aucccaugagccucag

SEQ ID NO: 3329886 - RNA, 13 nt, Human
aucccaugagccu

SEQ ID NO: 3329887 - RNA, 11 nt, Human
aucccagcccc

SEQ ID NO: 3329888 - RNA, 16 nt, Human
uucagguaacaggcag

SEQ ID NO: 3329889 - RNA, 15 nt, Human
uucagguaacaggca

SEQ ID NO: 3329890 - RNA, 22 nt, Human
uucaggguuggccccugcccgg

SEQ ID NO: 3329891 - RNA, 19 nt, Human
uucaggguuggccccugcc

SEQ ID NO: 3329892 - RNA, 17 nt, Human
uucaggguuggccccug

SEQ ID NO: 3329893 - RNA, 16 nt, Human
uucaggguuggccccu

SEQ ID NO: 3329894 - RNA, 14 nt, Human
uucaggguuggccc

SEQ ID NO: 3329895 - RNA, 16 nt, Human
uucagaaauguguuau

SEQ ID NO: 3329896 - RNA, 13 nt, Human
uucagaaaugugu

SEQ ID NO: 3329897 - RNA, 14 nt, Human
uucaguaagccgug

SEQ ID NO: 3329898 - RNA, 17 nt, Human
uucagguaacaggcaga

SEQ ID NO: 3329899 - RNA, 22 nt, Human
auauauguuuuaagaggcaggg

SEQ ID NO: 3329900 - RNA, 21 nt, Human
auauauguuuuaagaggcagg

SEQ ID NO: 3329901 - RNA, 21 nt, Human
uuccacaagagcccaggccuc

SEQ ID NO: 3329902 - RNA, 13 nt, Human
uuccaggcuggga

SEQ ID NO: 3329903 - RNA, 15 nt, Human
uuccaggcugggaga

SEQ ID NO: 3329904 - RNA, 17 nt, Human
uuccaggcugggagagc

SEQ ID NO: 3329905 - RNA, 18 nt, Human
uuccagguuuaagcuguu

SEQ ID NO: 3329906 - RNA, 17 nt, Human
uuccagguuuaagcugu

SEQ ID NO: 3329907 - RNA, 22 nt, Human
uuccaauuuacauacucugcuu

SEQ ID NO: 3329908 - RNA, 20 nt, Human
auauguggaguucaucuuga

SEQ ID NO: 3329909 - RNA, 21 nt, Human
auauguggaguucaucuugaa

SEQ ID NO: 3329910 - RNA, 20 nt, Human
auaugauuuaaaucagccgu

SEQ ID NO: 3329911 - RNA, 15 nt, Human
auauugauaugcuua

SEQ ID NO: 3329912 - RNA, 22 nt, Human
auauugcugauggugcaaugac

SEQ ID NO: 3329913 - RNA, 21 nt, Human
auauugcugauggugcaauga

SEQ ID NO: 3329914 - RNA, 13 nt, Human
auauuguuuucag

SEQ ID NO: 3329915 - RNA, 17 nt, Human
auauuaccacagacaua

SEQ ID NO: 3329916 - RNA, 17 nt, Human
auauuaagaaagacuau

SEQ ID NO: 3329917 - RNA, 15 nt, Human
auauuaagaaagacu

SEQ ID NO: 3329918 - RNA, 16 nt, Human
auauuaagaaagacua

SEQ ID NO: 3329919 - RNA, 15 nt, Human
uuccagugaggcucu

SEQ ID NO: 3329920 - RNA, 16 nt, Human
uuccagugaggcucug

SEQ ID NO: 3329921 - RNA, 22 nt, Human
uuccucuuuuuauuuaguuccu

SEQ ID NO: 3329922 - RNA, 19 nt, Human
uuccuggcacugcuuccag

SEQ ID NO: 3329923 - RNA, 20 nt, Human
uuccuggcacugcuuccagu

SEQ ID NO: 3329924 - RNA, 22 nt, Human
uuccuggcacugcuuccaguga

SEQ ID NO: 3329925 - RNA, 20 nt, Human
uucccuuuuuuggcugcuga

SEQ ID NO: 3329926 - RNA, 21 nt, Human
aucaacugcaucaagauguga

SEQ ID NO: 3329927 - RNA, 22 nt, Human
aucaaccccuucgcuccugugu

SEQ ID NO: 3329928 - RNA, 14 nt, Human
aucacgccacugca

SEQ ID NO: 3329929 - RNA, 17 nt, Human
aucacgccacugcacua

SEQ ID NO: 3329930 - RNA, 15 nt, Human
aucacgccacugcac

SEQ ID NO: 3329931 - RNA, 15 nt, Human
auuuuaauucaguug

SEQ ID NO: 3329932 - RNA, 21 nt, Human
auuuuacuuuaaaaggagcca

SEQ ID NO: 3329933 - RNA, 14 nt, Human
auuugugauacaau

SEQ ID NO: 3329934 - RNA, 14 nt, Human
auuuauucugcuca

SEQ ID NO: 3329935 - RNA, 15 nt, Human
auuuagaaauauaau

SEQ ID NO: 3329936 - RNA, 16 nt, Human
auuuacuucuuauaca

SEQ ID NO: 3329937 - RNA, 14 nt, Human
auuuacuucuuaua

SEQ ID NO: 3329938 - RNA, 12 nt, Human
auuuaacagaaa

SEQ ID NO: 3329939 - RNA, 14 nt, Human
auuuaacagaaaug

SEQ ID NO: 3329940 - RNA, 22 nt, Human
auuuauuaaaugcccagccccu

SEQ ID NO: 3329941 - RNA, 13 nt, Human
auuuauucugcuc

SEQ ID NO: 3329942 - RNA, 17 nt, Human
auuuccagccaaagccu

SEQ ID NO: 3329943 - RNA, 14 nt, Human
auuugaaaauuuug

SEQ ID NO: 3329944 - RNA, 15 nt, Human
auuuccguuaaaaua

SEQ ID NO: 3329945 - RNA, 16 nt, Human
auuuccguuaaaauac

SEQ ID NO: 3329946 - RNA, 14 nt, Human
auuuaaaaaaaauc

SEQ ID NO: 3329947 - RNA, 14 nt, Human
auugugucucuugg

SEQ ID NO: 3329948 - RNA, 17 nt, Human
auuguccccgacccuug

SEQ ID NO: 3329949 - RNA, 19 nt, Human
auuguccccgacccuugcc

SEQ ID NO: 3329950 - RNA, 21 nt, Human
auucuguuggccagugugaca

SEQ ID NO: 3329951 - RNA, 18 nt, Human
auucuuauuuaaugaaag

SEQ ID NO: 3329952 - RNA, 14 nt, Human
auucuuauuuaaug

SEQ ID NO: 3329953 - RNA, 13 nt, Human
auucuuauuuaau

SEQ ID NO: 3329954 - RNA, 22 nt, Human
auucuuccucccucccucuuuc

SEQ ID NO: 3329955 - RNA, 13 nt, Human
auucuuccucccu

SEQ ID NO: 3329956 - RNA, 13 nt, Human
auucuucuccacu

SEQ ID NO: 3329957 - RNA, 15 nt, Human
auugaaaaaccauuu

SEQ ID NO: 3329958 - RNA, 18 nt, Human
auugacaggauuauugga

SEQ ID NO: 3329959 - RNA, 14 nt, Human
auucaggaagcuca

SEQ ID NO: 3329960 - RNA, 19 nt, Human
auucagacagcugccuggg

SEQ ID NO: 3329961 - RNA, 17 nt, Human
auucaggaagcucaggg

SEQ ID NO: 3329962 - RNA, 19 nt, Human
auucaggaagcucagggcc

SEQ ID NO: 3329963 - RNA, 13 nt, Human
auucaggaagcuc

SEQ ID NO: 3329964 - RNA, 19 nt, Human
auucaguaauaacucuacc

SEQ ID NO: 3329965 - RNA, 15 nt, Human
auucaguaauaacuc

SEQ ID NO: 3329966 - RNA, 15 nt, Human
auucccaagcucugc

SEQ ID NO: 3329967 - RNA, 14 nt, Human
auucccaagcucug

SEQ ID NO: 3329968 - RNA, 16 nt, Human
auucccaagcucugcu

SEQ ID NO: 3329969 - RNA, 18 nt, Human
auucuccaccugccaggg

SEQ ID NO: 3329970 - RNA, 21 nt, Human
auucuccaccugccagggaca

SEQ ID NO: 3329971 - RNA, 13 nt, Human
auucuccugccuc

SEQ ID NO: 3329972 - RNA, 14 nt, Human
auucuccugccuca

SEQ ID NO: 3329973 - RNA, 11 nt, Human
auucuccugcc

SEQ ID NO: 3329974 - RNA, 16 nt, Human
auucuccuuguguuac

SEQ ID NO: 3329975 - RNA, 17 nt, Human
auucuccugccucagcc

SEQ ID NO: 3329976 - RNA, 15 nt, Human
auucuccugccucag

SEQ ID NO: 3329977 - RNA, 19 nt, Human
auucuccugccucagccuc

SEQ ID NO: 3329978 - RNA, 20 nt, Human
auucuccugccucagccucc

SEQ ID NO: 3329979 - RNA, 19 nt, Human
auucuccaccugccaggga

SEQ ID NO: 3329980 - RNA, 20 nt, Human
auucuccaccugccagggac

SEQ ID NO: 3329981 - RNA, 23 nt, Human
uuuugccauguuggccaggcugg

SEQ ID NO: 3329982 - RNA, 17 nt, Human
uuuugagugccuuacac

SEQ ID NO: 3329983 - RNA, 17 nt, Human
uuuugauccaagcuggu

SEQ ID NO: 3329984 - RNA, 11 nt, Human
uuuuuacuaau

SEQ ID NO: 3329985 - RNA, 22 nt, Human
uuuuuagacagagucucacugu

SEQ ID NO: 3329986 - RNA, 20 nt, Human
uuuuuaucgucacugcuuaa

SEQ ID NO: 3329987 - RNA, 12 nt, Human
uuuuuauggcuu

SEQ ID NO: 3329988 - RNA, 17 nt, Human
uuuugugcauuaucuag

SEQ ID NO: 3329989 - RNA, 20 nt, Human
uuuugugcauuaucuagaua

SEQ ID NO: 3329990 - RNA, 15 nt, Human
uuuuguuccacaagu

SEQ ID NO: 3329991 - RNA, 20 nt, Human
uuuuuauggcuuuugugcau

SEQ ID NO: 3329992 - RNA, 21 nt, Human
uuuuuauggcuuuugugcauu

SEQ ID NO: 3329993 - RNA, 22 nt, Human
uuuuuauggcuuuugugcauua

SEQ ID NO: 3329994 - RNA, 20 nt, Human
uuuuuguagagccagggucu

SEQ ID NO: 3329995 - RNA, 19 nt, Human
uuuuuguagagccaggguc

SEQ ID NO: 3329996 - RNA, 14 nt, Human
auuaaguacuaugu

SEQ ID NO: 3329997 - RNA, 20 nt, Human
auuaaaaaucucaaauuucu

SEQ ID NO: 3329998 - RNA, 23 nt, Human
auuaaaacacaacaucuuuuucu

SEQ ID NO: 3329999 - RNA, 14 nt, Human
auuaaaacauugga

SEQ ID NO: 3330000 - RNA, 13 nt, Human
auuaaaacauugg

SEQ ID NO: 3330001 - RNA, 15 nt, Human
auuaaaaaucucaaa

SEQ ID NO: 3330002 - RNA, 19 nt, Human
auuaaaaaucucaaauuuc

SEQ ID NO: 3330003 - RNA, 21 nt, Human
auuaaacuuaaucuaaaugga

SEQ ID NO: 3330004 - RNA, 20 nt, Human
auuaaaacauuggauuaucc

SEQ ID NO: 3330005 - RNA, 13 nt, Human
uuuuauuaugcau

SEQ ID NO: 3330006 - RNA, 11 nt, Human
uuuuauuuuau

SEQ ID NO: 3330007 - RNA, 14 nt, Human
uuuucaguguacau

SEQ ID NO: 3330008 - RNA, 20 nt, Human
uuuucauuuaggugaggaag

SEQ ID NO: 3330009 - RNA, 20 nt, Human
auguugcccaggcaggucuu

SEQ ID NO: 3330010 - RNA, 12 nt, Human
auguugcccagg

SEQ ID NO: 3330011 - RNA, 17 nt, Human
auguugcccaggcaggu

SEQ ID NO: 3330012 - RNA, 16 nt, Human
auguugcccaggcagg

SEQ ID NO: 3330013 - RNA, 21 nt, Human
augugccagguuuuuggucug

SEQ ID NO: 3330014 - RNA, 22 nt, Human
augugccagguuuuuggucuga

SEQ ID NO: 3330015 - RNA, 20 nt, Human
auggggcccugccuccuuug

SEQ ID NO: 3330016 - RNA, 20 nt, Human
auguggaguucaucuugaau

SEQ ID NO: 3330017 - RNA, 24 nt, Human
auguggaguucaucuugaauugua

SEQ ID NO: 3330018 - RNA, 16 nt, Human
agcaccuccugccucg

SEQ ID NO: 3330019 - RNA, 14 nt, Human
agcaccuccugccu

SEQ ID NO: 3330020 - RNA, 13 nt, Human
agcaccuccugcc

SEQ ID NO: 3330021 - RNA, 16 nt, Human
agcaccaucucuccuc

SEQ ID NO: 3330022 - RNA, 23 nt, Human
agcacaugccucucucaggccaa

SEQ ID NO: 3330023 - RNA, 19 nt, Human
agcacaugccucucucagg

SEQ ID NO: 3330024 - RNA, 20 nt, Human
agcacaugccucucucaggc

SEQ ID NO: 3330025 - RNA, 21 nt, Human
agcacaugccucucucaggcc

SEQ ID NO: 3330026 - RNA, 22 nt, Human
agcacaugccucucucaggcca

SEQ ID NO: 3330027 - RNA, 18 nt, Human
agcacaugccucucucag

SEQ ID NO: 3330028 - RNA, 16 nt, Human
agcacaugccucucuc

SEQ ID NO: 3330029 - RNA, 21 nt, Human
agcacagcuucauuuccugug

SEQ ID NO: 3330030 - RNA, 16 nt, Human
agcacagcuucauuuc

SEQ ID NO: 3330031 - RNA, 17 nt, Human
agcaagugagagcuggg

SEQ ID NO: 3330032 - RNA, 13 nt, Human
ugagccacugcac

SEQ ID NO: 3330033 - RNA, 12 nt, Human
ugagccacugca

SEQ ID NO: 3330034 - RNA, 18 nt, Human
ugagccagauuucacucu

SEQ ID NO: 3330035 - RNA, 19 nt, Human
ugagccagauuucacucuc

SEQ ID NO: 3330036 - RNA, 14 nt, Human
ugagccacugcacc

SEQ ID NO: 3330037 - RNA, 20 nt, Human
ugagccagauuucacucucc

SEQ ID NO: 3330038 - RNA, 17 nt, Human
agcaaggagauuuacaa

SEQ ID NO: 3330039 - RNA, 19 nt, Human
agcaaggagauuuacaacu

SEQ ID NO: 3330040 - RNA, 14 nt, Human
agcaaggagauuua

SEQ ID NO: 3330041 - RNA, 14 nt, Human
agcaagugagagcu

SEQ ID NO: 3330042 - RNA, 16 nt, Human
agcaagugagagcugg

SEQ ID NO: 3330043 - RNA, 15 nt, Human
agcaagugagagcug

SEQ ID NO: 3330044 - RNA, 10 nt, Human
ugagaggaaa

SEQ ID NO: 3330045 - RNA, 14 nt, Human
ugagagcugggugu

SEQ ID NO: 3330046 - RNA, 11 nt, Human
ugagaggaaau

SEQ ID NO: 3330047 - RNA, 12 nt, Human
ugagaggaaauc

SEQ ID NO: 3330048 - RNA, 13 nt, Human
ugagaggaaauca

SEQ ID NO: 3330049 - RNA, 14 nt, Human
ugagaggaaaucac

SEQ ID NO: 3330050 - RNA, 17 nt, Human
ugagaggaaaucaccga

SEQ ID NO: 3330051 - RNA, 23 nt, Human
ugagaggacuuuucuuuguggcu

SEQ ID NO: 3330052 - RNA, 13 nt, Human
ugagacagcccgg

SEQ ID NO: 3330053 - RNA, 21 nt, Human
ugagacagaguuuucacucuu

SEQ ID NO: 3330054 - RNA, 11 nt, Human
ugagacagagu

SEQ ID NO: 3330055 - RNA, 20 nt, Human
ugagaagcagaggaaggaga

SEQ ID NO: 3330056 - RNA, 17 nt, Human
ugagacagcccgggcuc

SEQ ID NO: 3330057 - RNA, 18 nt, Human
ugagacagcccgggcucu

SEQ ID NO: 3330058 - RNA, 19 nt, Human
ugagacagcccgggcucug

SEQ ID NO: 3330059 - RNA, 20 nt, Human
ugagacagcccgggcucugc

SEQ ID NO: 3330060 - RNA, 22 nt, Human
ugagacagcccgggcucugccu

SEQ ID NO: 3330061 - RNA, 20 nt, Human
ugagacucugucucaaaaaa

SEQ ID NO: 3330062 - RNA, 22 nt, Human
ugacagggcacaccgggcacuc

SEQ ID NO: 3330063 - RNA, 21 nt, Human
ugacagggcacaccgggcacu

SEQ ID NO: 3330064 - RNA, 19 nt, Human
ugacaggcaaugcuggcug

SEQ ID NO: 3330065 - RNA, 17 nt, Human
ugacaggcaaugcuggc

SEQ ID NO: 3330066 - RNA, 13 nt, Human
ugacauguuuuau

SEQ ID NO: 3330067 - RNA, 16 nt, Human
ugacacgaauauugcu

SEQ ID NO: 3330068 - RNA, 19 nt, Human
ugacacgaauauugcugau

SEQ ID NO: 3330069 - RNA, 22 nt, Human
ugacagagugagacucugucuc

SEQ ID NO: 3330070 - RNA, 15 nt, Human
ugaccuuuaagagaa

SEQ ID NO: 3330071 - RNA, 21 nt, Human
ugacuguuuucucuugagagg

SEQ ID NO: 3330072 - RNA, 12 nt, Human
ugaccuuucaau

SEQ ID NO: 3330073 - RNA, 20 nt, Human
ugacuuacuguacaugaaaa

SEQ ID NO: 3330074 - RNA, 19 nt, Human
ugacuuacuguacaugaaa

SEQ ID NO: 3330075 - RNA, 16 nt, Human
agauucauauuuacuu

SEQ ID NO: 3330076 - RNA, 13 nt, Human
agauucauauuua

SEQ ID NO: 3330077 - RNA, 19 nt, Human
agauuucacucuccuuggu

SEQ ID NO: 3330078 - RNA, 17 nt, Human
agauuucacucuccuug

SEQ ID NO: 3330079 - RNA, 14 nt, Human
ugaaaacacauuuu

SEQ ID NO: 3330080 - RNA, 12 nt, Human
ugaaaacacauu

SEQ ID NO: 3330081 - RNA, 13 nt, Human
ugaaaacacauuu

SEQ ID NO: 3330082 - RNA, 15 nt, Human
ugaaaacacauuuuu

SEQ ID NO: 3330083 - RNA, 17 nt, Human
ugaaaacacauuuuucu

SEQ ID NO: 3330084 - RNA, 19 nt, Human
ugaaaacacauuuuucuua

SEQ ID NO: 3330085 - RNA, 17 nt, Human
ugaaacuggauuaaacu

SEQ ID NO: 3330086 - RNA, 18 nt, Human
ugaaacuggauuaaacuu

SEQ ID NO: 3330087 - RNA, 13 nt, Human
agagacuccugca

SEQ ID NO: 3330088 - RNA, 14 nt, Human
agagacuccugcag

SEQ ID NO: 3330089 - RNA, 12 nt, Human
agagacuccugc

SEQ ID NO: 3330090 - RNA, 23 nt, Human
agagacuccugcaggcagccagg

SEQ ID NO: 3330091 - RNA, 11 nt, Human
agagacuccug

SEQ ID NO: 3330092 - RNA, 18 nt, Human
agagaccaucccugaagg

SEQ ID NO: 3330093 - RNA, 19 nt, Human
agagaccaucccugaaggc

SEQ ID NO: 3330094 - RNA, 21 nt, Human
agagaccaucccugaaggccc

SEQ ID NO: 3330095 - RNA, 22 nt, Human
agagaccaucccugaaggcccc

SEQ ID NO: 3330096 - RNA, 23 nt, Human
agagaccaucccugaaggccccg

SEQ ID NO: 3330097 - RNA, 22 nt, Human
ugaaagaaaauaccaaggaaca

SEQ ID NO: 3330098 - RNA, 16 nt, Human
ugaaagacuguacaaa

SEQ ID NO: 3330099 - RNA, 19 nt, Human
ugaaagacuguacaaagua

SEQ ID NO: 3330100 - RNA, 18 nt, Human
ugaaagacuguacaaagu

SEQ ID NO: 3330101 - RNA, 22 nt, Human
ugaaagacuguacaaaguagaa

SEQ ID NO: 3330102 - RNA, 13 nt, Human
agacuccugcagg

SEQ ID NO: 3330103 - RNA, 19 nt, Human
agacucuacagaggccaug

SEQ ID NO: 3330104 - RNA, 20 nt, Human
agacaggcaagcaccuccug

SEQ ID NO: 3330105 - RNA, 15 nt, Human
ucuuuaaugucacag

SEQ ID NO: 3330106 - RNA, 18 nt, Human
ucuuuaaugucacaggca

SEQ ID NO: 3330107 - RNA, 23 nt, Human
ucuuucccucccuuccucuuucc

SEQ ID NO: 3330108 - RNA, 15 nt, Human
agacuuuuccaaccc

SEQ ID NO: 3330109 - RNA, 19 nt, Human
agacuuuggaaagaguagg

SEQ ID NO: 3330110 - RNA, 16 nt, Human
agagacacaagccuuc

SEQ ID NO: 3330111 - RNA, 19 nt, Human
agagacacaagccuucggc

SEQ ID NO: 3330112 - RNA, 15 nt, Human
agagacacaagccuu

SEQ ID NO: 3330113 - RNA, 20 nt, Human
agacugguuccauggccucu

SEQ ID NO: 3330114 - RNA, 17 nt, Human
agacuuuggaaagacuu

SEQ ID NO: 3330115 - RNA, 15 nt, Human
agacuuuggaaagag

SEQ ID NO: 3330116 - RNA, 15 nt, Human
agacuuuggaaagac

SEQ ID NO: 3330117 - RNA, 14 nt, Human
ucuuuguacagaca

SEQ ID NO: 3330118 - RNA, 15 nt, Human
ucuuuguacagacaa

SEQ ID NO: 3330119 - RNA, 20 nt, Human
ucuuuguacagacaacaaac

SEQ ID NO: 3330120 - RNA, 22 nt, Human
agaggcugccucucccaucacu

SEQ ID NO: 3330121 - RNA, 13 nt, Human
agagguucaaaga

SEQ ID NO: 3330122 - RNA, 20 nt, Human
agagggagugacagaggcag

SEQ ID NO: 3330123 - RNA, 15 nt, Human
agagggagugacaga

SEQ ID NO: 3330124 - RNA, 15 nt, Human
agagggagguaagga

SEQ ID NO: 3330125 - RNA, 16 nt, Human
agagguucaaagauau

SEQ ID NO: 3330126 - RNA, 19 nt, Human
agagguucaaagauauuuu

SEQ ID NO: 3330127 - RNA, 23 nt, Human
agaggcagccccauucugccugc

SEQ ID NO: 3330128 - RNA, 21 nt, Human
agaggcagggucucacucugu

SEQ ID NO: 3330129 - RNA, 22 nt, Human
agaggcagccccauucugccug

SEQ ID NO: 3330130 - RNA, 21 nt, Human
agaggcagccccauucugccu

SEQ ID NO: 3330131 - RNA, 16 nt, Human
ugaaguaauaugcaca

SEQ ID NO: 3330132 - RNA, 20 nt, Human
ugaaguaauaugcacacauu

SEQ ID NO: 3330133 - RNA, 21 nt, Human
ugaaguaauaugcacacauuu

SEQ ID NO: 3330134 - RNA, 22 nt, Human
ugaaguaauaugcacacauuuu

SEQ ID NO: 3330135 - RNA, 15 nt, Human
ugaaguaauaugcac

SEQ ID NO: 3330136 - RNA, 13 nt, Human
ugaauaauacagu

SEQ ID NO: 3330137 - RNA, 12 nt, Human
ugaauaauacag

SEQ ID NO: 3330138 - RNA, 13 nt, Human
ugaagucacacag

SEQ ID NO: 3330139 - RNA, 17 nt, Human
ugaaauaacauggccuu

SEQ ID NO: 3330140 - RNA, 16 nt, Human
ugaaauaacauggccu

SEQ ID NO: 3330141 - RNA, 20 nt, Human
ugaaauuuuuauuaaauuau

SEQ ID NO: 3330142 - RNA, 19 nt, Human
ugaaauuuuuauuaaauua

SEQ ID NO: 3330143 - RNA, 22 nt, Human
ugaagacaaugacuuacuguac

SEQ ID NO: 3330144 - RNA, 23 nt, Human
ugaagacaaugacuuacuguaca

SEQ ID NO: 3330145 - RNA, 21 nt, Human
ugaagacaaugacuuacugua

SEQ ID NO: 3330146 - RNA, 22 nt, Human
ugaaccaccacacccagcccac

SEQ ID NO: 3330147 - RNA, 21 nt, Human
ugaaccaccacacccagccca

SEQ ID NO: 3330148 - RNA, 17 nt, Human
ucuccgaccagacaccu

SEQ ID NO: 3330149 - RNA, 21 nt, Human
ucucccuuggauuguccccga

SEQ ID NO: 3330150 - RNA, 23 nt, Human
ucuccccagcaagugagagcugg

SEQ ID NO: 3330151 - RNA, 18 nt, Human
ucuccaagcaggacaugg

SEQ ID NO: 3330152 - RNA, 19 nt, Human
ucuccaagcaggacaugga

SEQ ID NO: 3330153 - RNA, 20 nt, Human
acuuucugaaauaacauggc

SEQ ID NO: 3330154 - RNA, 14 nt, Human
acuuucugaaauaa

SEQ ID NO: 3330155 - RNA, 17 nt, Human
ucuccucugcugcuggc

SEQ ID NO: 3330156 - RNA, 18 nt, Human
ucuccucugcugcuggcu

SEQ ID NO: 3330157 - RNA, 15 nt, Human
ucuccucugcugcug

SEQ ID NO: 3330158 - RNA, 16 nt, Human
ucuccucugcugcugg

SEQ ID NO: 3330159 - RNA, 15 nt, Human
ucuccuccagaguca

SEQ ID NO: 3330160 - RNA, 13 nt, Human
ucuccuuguguua

SEQ ID NO: 3330161 - RNA, 21 nt, Human
ucuccuuguguuacuaaguuu

SEQ ID NO: 3330162 - RNA, 16 nt, Human
ucuccuucaccuuugu

SEQ ID NO: 3330163 - RNA, 14 nt, Human
ucuccuucaccuuu

SEQ ID NO: 3330164 - RNA, 15 nt, Human
ucuccuucaccuuug

SEQ ID NO: 3330165 - RNA, 17 nt, Human
agaaaaaauauuuuccc

SEQ ID NO: 3330166 - RNA, 15 nt, Human
acuuuuguucuuggu

SEQ ID NO: 3330167 - RNA, 23 nt, Human
acuuuuguucuugguuuguaaau

SEQ ID NO: 3330168 - RNA, 12 nt, Human
acuuuuguucuu

SEQ ID NO: 3330169 - RNA, 13 nt, Human
acuuuuguucuug

SEQ ID NO: 3330170 - RNA, 21 nt, Human
acuuuguuaguuucuccaagc

SEQ ID NO: 3330171 - RNA, 20 nt, Human
acuuuguuaguuucuccaag

SEQ ID NO: 3330172 - RNA, 18 nt, Human
acuuuguguucaccuugu

SEQ ID NO: 3330173 - RNA, 12 nt, Human
acuuugaccucu

SEQ ID NO: 3330174 - RNA, 13 nt, Human
acuuugaccucug

SEQ ID NO: 3330175 - RNA, 12 nt, Human
ucucaggccagc

SEQ ID NO: 3330176 - RNA, 13 nt, Human
ucucaggccagcu

SEQ ID NO: 3330177 - RNA, 12 nt, Human
ucucaggccaaa

SEQ ID NO: 3330178 - RNA, 10 nt, Human
ucucaggcca

SEQ ID NO: 3330179 - RNA, 17 nt, Human
ucucaggccagcugcuu

SEQ ID NO: 3330180 - RNA, 18 nt, Human
ucucaggccagcugcuug

SEQ ID NO: 3330181 - RNA, 21 nt, Human
ucucaggccagcugcuugggc

SEQ ID NO: 3330182 - RNA, 15 nt, Human
ucuccaagcaggaca

SEQ ID NO: 3330183 - RNA, 16 nt, Human
ucuccaagcaggacau

SEQ ID NO: 3330184 - RNA, 16 nt, Human
ucucauuugucacaca

SEQ ID NO: 3330185 - RNA, 14 nt, Human
ucucauuugucaca

SEQ ID NO: 3330186 - RNA, 23 nt, Human
acuugcagacucuacagaggcca

SEQ ID NO: 3330187 - RNA, 22 nt, Human
acuugcagacucuacagaggcc

SEQ ID NO: 3330188 - RNA, 19 nt, Human
acuugcagacucuacagag

SEQ ID NO: 3330189 - RNA, 23 nt, Human
ucucacuauguugcccaggcagg

SEQ ID NO: 3330190 - RNA, 22 nt, Human
ucucacuauguugcccaggcag

SEQ ID NO: 3330191 - RNA, 21 nt, Human
ucucacuauguugcccaggca

SEQ ID NO: 3330192 - RNA, 20 nt, Human
ucucacuauguugcccaggc

SEQ ID NO: 3330193 - RNA, 18 nt, Human
acuuguggacacagcucu

SEQ ID NO: 3330194 - RNA, 22 nt, Human
acuuguggacacagcucuucuc

SEQ ID NO: 3330195 - RNA, 19 nt, Human
acuuguggacacagcucuu

SEQ ID NO: 3330196 - RNA, 20 nt, Human
acuugucuuuggacccugag

SEQ ID NO: 3330197 - RNA, 18 nt, Human
acuugucuuuggacccug

SEQ ID NO: 3330198 - RNA, 21 nt, Human
acuugucuuuggacccugagg

SEQ ID NO: 3330199 - RNA, 14 nt, Human
ucuacccuggcacu

SEQ ID NO: 3330200 - RNA, 19 nt, Human
ucuacccuggcacuauaau

SEQ ID NO: 3330201 - RNA, 20 nt, Human
ucuacccagcgagcccuggu

SEQ ID NO: 3330202 - RNA, 21 nt, Human
ucuacccuggcacuauaaugu

SEQ ID NO: 3330203 - RNA, 16 nt, Human
acuguucucugcccuc

SEQ ID NO: 3330204 - RNA, 17 nt, Human
acuguucucugcccucc

SEQ ID NO: 3330205 - RNA, 18 nt, Human
acuguucucugcccucca

SEQ ID NO: 3330206 - RNA, 15 nt, Human
acuguucucugcccu

SEQ ID NO: 3330207 - RNA, 16 nt, Human
ucuacagaggccaugg

SEQ ID NO: 3330208 - RNA, 19 nt, Human
ucuacccagcgagcccugg

SEQ ID NO: 3330209 - RNA, 21 nt, Human
ucuacagaggccaugggccuc

SEQ ID NO: 3330210 - RNA, 18 nt, Human
uccugggagugagcuggu

SEQ ID NO: 3330211 - RNA, 21 nt, Human
acuuacuguacaugaaaacac

SEQ ID NO: 3330212 - RNA, 16 nt, Human
acuuacuguacaugaa

SEQ ID NO: 3330213 - RNA, 17 nt, Human
acuuacacuuuaugcac

SEQ ID NO: 3330214 - RNA, 22 nt, Human
acuuacuguacaugaaaacaca

SEQ ID NO: 3330215 - RNA, 15 nt, Human
acuuagguguggggg

SEQ ID NO: 3330216 - RNA, 22 nt, Human
acuuaaucuaaauggaaccacu

SEQ ID NO: 3330217 - RNA, 16 nt, Human
acuuacacuuuaugca

SEQ ID NO: 3330218 - RNA, 17 nt, Human
acuuaaucuaaauggaa

SEQ ID NO: 3330219 - RNA, 19 nt, Human
acuuaaucuaaauggaacc

SEQ ID NO: 3330220 - RNA, 13 nt, Human
acuuaagcacacu

SEQ ID NO: 3330221 - RNA, 20 nt, Human
acuuaaauaaugugaaacug

SEQ ID NO: 3330222 - RNA, 16 nt, Human
ucucacuauguugccc

SEQ ID NO: 3330223 - RNA, 19 nt, Human
ucucacuauguugcccagg

SEQ ID NO: 3330224 - RNA, 17 nt, Human
ucucacuauguugccca

SEQ ID NO: 3330225 - RNA, 23 nt, Human
ucuaugggacucaaugcacugac

SEQ ID NO: 3330226 - RNA, 18 nt, Human
ucuagcauggcugccaau

SEQ ID NO: 3330227 - RNA, 21 nt, Human
ucuaguuugauuaaauucuug

SEQ ID NO: 3330228 - RNA, 23 nt, Human
ucuaguuguuugauucagacagc

SEQ ID NO: 3330229 - RNA, 22 nt, Human
ucuaguuguuugauucagacag

SEQ ID NO: 3330230 - RNA, 15 nt, Human
ucugcuucagccucc

SEQ ID NO: 3330231 - RNA, 14 nt, Human
ucugcuucagccuc

SEQ ID NO: 3330232 - RNA, 13 nt, Human
ucugcuucagccu

SEQ ID NO: 3330233 - RNA, 20 nt, Human
ucugcucacauaucugucau

SEQ ID NO: 3330234 - RNA, 19 nt, Human
ucugcucacauaucuguca

SEQ ID NO: 3330235 - RNA, 17 nt, Human
ucugcucacauaucugu

SEQ ID NO: 3330236 - RNA, 23 nt, Human
ucugcccuugguuaggcauugug

SEQ ID NO: 3330237 - RNA, 22 nt, Human
ucugccgcagcccugcagaggg

SEQ ID NO: 3330238 - RNA, 22 nt, Human
ucugccugcccaggccccugcc

SEQ ID NO: 3330239 - RNA, 21 nt, Human
ucugccugcccaggccccugc

SEQ ID NO: 3330240 - RNA, 18 nt, Human
ucugcccacucccugcaa

SEQ ID NO: 3330241 - RNA, 21 nt, Human
ucugcccacucccugcaaccu

SEQ ID NO: 3330242 - RNA, 18 nt, Human
ucugcccuccaagaccuu

SEQ ID NO: 3330243 - RNA, 19 nt, Human
ucugcccuccaagaccuuc

SEQ ID NO: 3330244 - RNA, 14 nt, Human
ucugccgcagcccu

SEQ ID NO: 3330245 - RNA, 15 nt, Human
ucugccgcagcccug

SEQ ID NO: 3330246 - RNA, 18 nt, Human
agaagauuuugaaauuuu

SEQ ID NO: 3330247 - RNA, 12 nt, Human
agaagcccagga

SEQ ID NO: 3330248 - RNA, 16 nt, Human
agaagcccaggaaagg

SEQ ID NO: 3330249 - RNA, 18 nt, Human
agaagcccaggaaaggcu

SEQ ID NO: 3330250 - RNA, 20 nt, Human
agaagcccaggaaaggcucc

SEQ ID NO: 3330251 - RNA, 21 nt, Human
agaagcccaggaaaggcucca

SEQ ID NO: 3330252 - RNA, 22 nt, Human
agaagcccaggaaaggcuccag

SEQ ID NO: 3330253 - RNA, 16 nt, Human
ucugcccacucccugc

SEQ ID NO: 3330254 - RNA, 17 nt, Human
ucugcccacucccugca

SEQ ID NO: 3330255 - RNA, 21 nt, Human
ucugaucauccacugugccau

SEQ ID NO: 3330256 - RNA, 17 nt, Human
ucugaucauccacugug

SEQ ID NO: 3330257 - RNA, 21 nt, Human
ucugagacucgcgacaaugca

SEQ ID NO: 3330258 - RNA, 14 nt, Human
agaaauguacagca

SEQ ID NO: 3330259 - RNA, 15 nt, Human
agaaauguacagcaa

SEQ ID NO: 3330260 - RNA, 14 nt, Human
ucugcacuccccug

SEQ ID NO: 3330261 - RNA, 15 nt, Human
ucugcacuccccugc

SEQ ID NO: 3330262 - RNA, 16 nt, Human
ucugcacuccccugcu

SEQ ID NO: 3330263 - RNA, 17 nt, Human
ucugcagcaauaaagca

SEQ ID NO: 3330264 - RNA, 13 nt, Human
ucugcacuccccu

SEQ ID NO: 3330265 - RNA, 21 nt, Human
ucugaaggacauugcggacag

SEQ ID NO: 3330266 - RNA, 12 nt, Human
ucugacacacag

SEQ ID NO: 3330267 - RNA, 14 nt, Human
ucugacacacagcu

SEQ ID NO: 3330268 - RNA, 13 nt, Human
ucugacacacagc

SEQ ID NO: 3330269 - RNA, 15 nt, Human
ucugacacacagcuc

SEQ ID NO: 3330270 - RNA, 16 nt, Human
agacaggaccagggau

SEQ ID NO: 3330271 - RNA, 16 nt, Human
agacacauguccaaga

SEQ ID NO: 3330272 - RNA, 18 nt, Human
agacaccuugacagggca

SEQ ID NO: 3330273 - RNA, 17 nt, Human
agacaccuugacagggc

SEQ ID NO: 3330274 - RNA, 13 nt, Human
agacacaggcccg

SEQ ID NO: 3330275 - RNA, 12 nt, Human
agacacaggccc

SEQ ID NO: 3330276 - RNA, 22 nt, Human
ucuguucuuuccaaaguacacu

SEQ ID NO: 3330277 - RNA, 13 nt, Human
ucuguucuuucca

SEQ ID NO: 3330278 - RNA, 17 nt, Human
ucuguuggccaguguga

SEQ ID NO: 3330279 - RNA, 12 nt, Human
ucuguuggccag

SEQ ID NO: 3330280 - RNA, 22 nt, Human
ucugugaaaggaaagagggagg

SEQ ID NO: 3330281 - RNA, 21 nt, Human
agaaguuucugccgcagcccu

SEQ ID NO: 3330282 - RNA, 22 nt, Human
agaaguuucugccgcagcccug

SEQ ID NO: 3330283 - RNA, 12 nt, Human
ucagcuccagcu

SEQ ID NO: 3330284 - RNA, 23 nt, Human
ucagcggggacagcuccuucugu

SEQ ID NO: 3330285 - RNA, 21 nt, Human
ucagcggggacagcuccuucu

SEQ ID NO: 3330286 - RNA, 20 nt, Human
ucagcggggacagcuccuuc

SEQ ID NO: 3330287 - RNA, 19 nt, Human
ucagcggggacagcuccuu

SEQ ID NO: 3330288 - RNA, 18 nt, Human
ucagcggggacagcuccu

SEQ ID NO: 3330289 - RNA, 18 nt, Human
accccaucucuacaaaaa

SEQ ID NO: 3330290 - RNA, 23 nt, Human
acccaggagccccgaggccuucu

SEQ ID NO: 3330291 - RNA, 19 nt, Human
acccaggagccccgaggcc

SEQ ID NO: 3330292 - RNA, 13 nt, Human
accccagccccaa

SEQ ID NO: 3330293 - RNA, 22 nt, Human
accccagccccaaaacucuccu

SEQ ID NO: 3330294 - RNA, 17 nt, Human
accccacacacgccaga

SEQ ID NO: 3330295 - RNA, 21 nt, Human
ucagauuugaacucuucaauc

SEQ ID NO: 3330296 - RNA, 12 nt, Human
ucagauuugaac

SEQ ID NO: 3330297 - RNA, 15 nt, Human
ucagcaaaagaugcu

SEQ ID NO: 3330298 - RNA, 13 nt, Human
acccugaggccca

SEQ ID NO: 3330299 - RNA, 14 nt, Human
acccugaggcccag

SEQ ID NO: 3330300 - RNA, 16 nt, Human
acccugaaagcccuga

SEQ ID NO: 3330301 - RNA, 18 nt, Human
acccugaaagcccugagc

SEQ ID NO: 3330302 - RNA, 20 nt, Human
acccuuguggucccacccca

SEQ ID NO: 3330303 - RNA, 23 nt, Human
acccuuguggucccaccccacac

SEQ ID NO: 3330304 - RNA, 17 nt, Human
acccuugccgucuaccu

SEQ ID NO: 3330305 - RNA, 15 nt, Human
accgaaaacguggcu

SEQ ID NO: 3330306 - RNA, 15 nt, Human
acccugaggcccaga

SEQ ID NO: 3330307 - RNA, 16 nt, Human
acccugaggcccagag

SEQ ID NO: 3330308 - RNA, 15 nt, Human
acccugcccuguggg

SEQ ID NO: 3330309 - RNA, 14 nt, Human
acccugcccugugg

SEQ ID NO: 3330310 - RNA, 17 nt, Human
acccugcccugugggcc

SEQ ID NO: 3330311 - RNA, 22 nt, Human
acccugcccugugggcccccaa

SEQ ID NO: 3330312 - RNA, 18 nt, Human
ucagggucccugguggca

SEQ ID NO: 3330313 - RNA, 19 nt, Human
ucagggucccugguggcag

SEQ ID NO: 3330314 - RNA, 16 nt, Human
ucaggguuggccccug

SEQ ID NO: 3330315 - RNA, 22 nt, Human
ucagcuuguaaauagcucaggu

SEQ ID NO: 3330316 - RNA, 21 nt, Human
ucagcuuguaaauagcucagg

SEQ ID NO: 3330317 - RNA, 14 nt, Human
ucagcuccagcuca

SEQ ID NO: 3330318 - RNA, 20 nt, Human
ucagcuuguaaauagcucag

SEQ ID NO: 3330319 - RNA, 21 nt, Human
ucaggccaggcccucugccca

SEQ ID NO: 3330320 - RNA, 22 nt, Human
ucaggccaggcccucugcccac

SEQ ID NO: 3330321 - RNA, 20 nt, Human
ucaggccaggcccucugccc

SEQ ID NO: 3330322 - RNA, 16 nt, Human
acccggccccugcugg

SEQ ID NO: 3330323 - RNA, 15 nt, Human
acccggccccugcug

SEQ ID NO: 3330324 - RNA, 14 nt, Human
acccggccccugcu

SEQ ID NO: 3330325 - RNA, 22 nt, Human
ucagguaacaggcagauacagg

SEQ ID NO: 3330326 - RNA, 21 nt, Human
ucagguaacaggcagauacag

SEQ ID NO: 3330327 - RNA, 23 nt, Human
ucagguaacaggcagauacagga

SEQ ID NO: 3330328 - RNA, 16 nt, Human
ucagguaacaggcaga

SEQ ID NO: 3330329 - RNA, 20 nt, Human
acccggccccugcugguuca

SEQ ID NO: 3330330 - RNA, 17 nt, Human
acccggccccugcuggu

SEQ ID NO: 3330331 - RNA, 22 nt, Human
acccggccccugcugguucagg

SEQ ID NO: 3330332 - RNA, 12 nt, Human
acccgggaaggg

SEQ ID NO: 3330333 - RNA, 16 nt, Human
ucagugccuuauggaa

SEQ ID NO: 3330334 - RNA, 11 nt, Human
ucaguggcagc

SEQ ID NO: 3330335 - RNA, 12 nt, Human
ucaguggcagcu

SEQ ID NO: 3330336 - RNA, 16 nt, Human
ucaguggcagcugcuu

SEQ ID NO: 3330337 - RNA, 11 nt, Human
ucagugccuua

SEQ ID NO: 3330338 - RNA, 12 nt, Human
ucagugccuuau

SEQ ID NO: 3330339 - RNA, 14 nt, Human
ucagugccuuaugg

SEQ ID NO: 3330340 - RNA, 15 nt, Human
ucagugccuuaugga

SEQ ID NO: 3330341 - RNA, 9 nt, Human
ucagugccu

SEQ ID NO: 3330342 - RNA, 10 nt, Human
ucagugccuu

SEQ ID NO: 3330343 - RNA, 17 nt, Human
accgaaaacguggcugc

SEQ ID NO: 3330344 - RNA, 19 nt, Human
accgaaaacguggcugcuu

SEQ ID NO: 3330345 - RNA, 16 nt, Human
ucagugccaaaaacaa

SEQ ID NO: 3330346 - RNA, 12 nt, Human
ucagugccacua

SEQ ID NO: 3330347 - RNA, 23 nt, Human
ucauauuuacuucuuauacauuu

SEQ ID NO: 3330348 - RNA, 15 nt, Human
ucauauuuacuucuu

SEQ ID NO: 3330349 - RNA, 22 nt, Human
ucauauuuacuucuuauacauu

SEQ ID NO: 3330350 - RNA, 21 nt, Human
ucauaguaugguggcuggguu

SEQ ID NO: 3330351 - RNA, 18 nt, Human
ucauauaagauucauauu

SEQ ID NO: 3330352 - RNA, 19 nt, Human
ucauaguaugguggcuggg

SEQ ID NO: 3330353 - RNA, 18 nt, Human
ucauaguaugguggcugg

SEQ ID NO: 3330354 - RNA, 15 nt, Human
ucauaguaugguggc

SEQ ID NO: 3330355 - RNA, 14 nt, Human
ucauaaccuagccu

SEQ ID NO: 3330356 - RNA, 20 nt, Human
accucccacaaaggagagcu

SEQ ID NO: 3330357 - RNA, 12 nt, Human
accgcagacagg

SEQ ID NO: 3330358 - RNA, 16 nt, Human
accgcagacaggacca

SEQ ID NO: 3330359 - RNA, 23 nt, Human
ucauccacugugccaugugccag

SEQ ID NO: 3330360 - RNA, 16 nt, Human
accacaucuugcucug

SEQ ID NO: 3330361 - RNA, 18 nt, Human
accacaugugcacaugca

SEQ ID NO: 3330362 - RNA, 20 nt, Human
accaccacacccagcccacu

SEQ ID NO: 3330363 - RNA, 15 nt, Human
accaccacacccagc

SEQ ID NO: 3330364 - RNA, 18 nt, Human
accacaucuugcucugcu

SEQ ID NO: 3330365 - RNA, 17 nt, Human
accacaucuugcucugc

SEQ ID NO: 3330366 - RNA, 17 nt, Human
ucacaaaggaugcccaa

SEQ ID NO: 3330367 - RNA, 20 nt, Human
ucacagaugggugcuuggag

SEQ ID NO: 3330368 - RNA, 16 nt, Human
ucacaguucucuccuu

SEQ ID NO: 3330369 - RNA, 20 nt, Human
ucacaguucucuccuucuuc

SEQ ID NO: 3330370 - RNA, 13 nt, Human
ucacagccucuga

SEQ ID NO: 3330371 - RNA, 17 nt, Human
accacuacauucuguua

SEQ ID NO: 3330372 - RNA, 16 nt, Human
accacuacauucuguu

SEQ ID NO: 3330373 - RNA, 15 nt, Human
accacuacauucugu

SEQ ID NO: 3330374 - RNA, 22 nt, Human
accagcgugugacuacuccccc

SEQ ID NO: 3330375 - RNA, 19 nt, Human
accaggaaaggauuuuaua

SEQ ID NO: 3330376 - RNA, 21 nt, Human
accaggaaaggauuuuauaau

SEQ ID NO: 3330377 - RNA, 17 nt, Human
ucacugagacagcccgg

SEQ ID NO: 3330378 - RNA, 21 nt, Human
ucacugagacagcccgggcuc

SEQ ID NO: 3330379 - RNA, 14 nt, Human
ucacugcagccuca

SEQ ID NO: 3330380 - RNA, 16 nt, Human
ucacugagacagcccg

SEQ ID NO: 3330381 - RNA, 13 nt, Human
ucacugcagccuc

SEQ ID NO: 3330382 - RNA, 15 nt, Human
ucacugcagccucaa

SEQ ID NO: 3330383 - RNA, 19 nt, Human
ucacuguugcccaggcugg

SEQ ID NO: 3330384 - RNA, 23 nt, Human
ucacuguugcccaggcuggcgug

SEQ ID NO: 3330385 - RNA, 15 nt, Human
accaguguuguggau

SEQ ID NO: 3330386 - RNA, 17 nt, Human
accaguguuguggauuu

SEQ ID NO: 3330387 - RNA, 10 nt, Human
ucacuugagu

SEQ ID NO: 3330388 - RNA, 21 nt, Human
acauuuuuaagugcugcauuu

SEQ ID NO: 3330389 - RNA, 22 nt, Human
acauuuuuaagugcugcauuua

SEQ ID NO: 3330390 - RNA, 23 nt, Human
acauuuuuaagugcugcauuuaa

SEQ ID NO: 3330391 - RNA, 19 nt, Human
acauuuuuaagugcugcau

SEQ ID NO: 3330392 - RNA, 23 nt, Human
acauuuuucuuagggaaggauac

SEQ ID NO: 3330393 - RNA, 14 nt, Human
acauuuuuuaaaug

SEQ ID NO: 3330394 - RNA, 16 nt, Human
acauuuuuuaaaugca

SEQ ID NO: 3330395 - RNA, 17 nt, Human
acauuuuuuaaaugcac

SEQ ID NO: 3330396 - RNA, 18 nt, Human
acauuuuauuuuauuaug

SEQ ID NO: 3330397 - RNA, 14 nt, Human
acauuuuauuuuau

SEQ ID NO: 3330398 - RNA, 19 nt, Human
acauuuuauuuuauuaugc

SEQ ID NO: 3330399 - RNA, 20 nt, Human
acauuuuauuuuauuaugca

SEQ ID NO: 3330400 - RNA, 22 nt, Human
ucaaguccucuuuucugagagg

SEQ ID NO: 3330401 - RNA, 14 nt, Human
ucaaccagcagaug

SEQ ID NO: 3330402 - RNA, 15 nt, Human
ucaaccauggacuuu

SEQ ID NO: 3330403 - RNA, 20 nt, Human
ucaacugcaucaagauguga

SEQ ID NO: 3330404 - RNA, 17 nt, Human
ucaaccauggacuuuau

SEQ ID NO: 3330405 - RNA, 13 nt, Human
ucaaauuucuaaa

SEQ ID NO: 3330406 - RNA, 23 nt, Human
acauguaauuaaguacuauguau

SEQ ID NO: 3330407 - RNA, 15 nt, Human
acauguccaagaagc

SEQ ID NO: 3330408 - RNA, 14 nt, Human
acauuccugaugcu

SEQ ID NO: 3330409 - RNA, 22 nt, Human
acauguaauuaaguacuaugua

SEQ ID NO: 3330410 - RNA, 21 nt, Human
acauguaauuaaguacuaugu

SEQ ID NO: 3330411 - RNA, 19 nt, Human
acauguaauuaaguacuau

SEQ ID NO: 3330412 - RNA, 17 nt, Human
acauguaauuaaguacu

SEQ ID NO: 3330413 - RNA, 15 nt, Human
acauguaauuaagua

SEQ ID NO: 3330414 - RNA, 15 nt, Human
acaugcuacacacug

SEQ ID NO: 3330415 - RNA, 21 nt, Human
acaugcuacacacugcauguu

SEQ ID NO: 3330416 - RNA, 21 nt, Human
uccugcugcaguugccaguca

SEQ ID NO: 3330417 - RNA, 12 nt, Human
uccugcaggcag

SEQ ID NO: 3330418 - RNA, 13 nt, Human
uccugcaggcagc

SEQ ID NO: 3330419 - RNA, 14 nt, Human
uccugcaggcagcc

SEQ ID NO: 3330420 - RNA, 21 nt, Human
uccugccucgaacuggcugca

SEQ ID NO: 3330421 - RNA, 17 nt, Human
uccugggagugagcugg

SEQ ID NO: 3330422 - RNA, 14 nt, Human
uccugggagugagc

SEQ ID NO: 3330423 - RNA, 12 nt, Human
uccugggaguga

SEQ ID NO: 3330424 - RNA, 15 nt, Human
uccuggaaauauuaa

SEQ ID NO: 3330425 - RNA, 20 nt, Human
acugcacuauagccuaggug

SEQ ID NO: 3330426 - RNA, 16 nt, Human
acugcaccgggccaca

SEQ ID NO: 3330427 - RNA, 14 nt, Human
acugcaccgggcca

SEQ ID NO: 3330428 - RNA, 13 nt, Human
acugauaaagaug

SEQ ID NO: 3330429 - RNA, 21 nt, Human
acugauaaagaugagugagca

SEQ ID NO: 3330430 - RNA, 19 nt, Human
acugcacuccagccugggu

SEQ ID NO: 3330431 - RNA, 20 nt, Human
acugcacuccagccugggug

SEQ ID NO: 3330432 - RNA, 18 nt, Human
acugcacuccagccuggg

SEQ ID NO: 3330433 - RNA, 17 nt, Human
acugcacuccagccugg

SEQ ID NO: 3330434 - RNA, 14 nt, Human
acugcacuccagcc

SEQ ID NO: 3330435 - RNA, 21 nt, Human
acugcacuauagccuagguga

SEQ ID NO: 3330436 - RNA, 20 nt, Human
uccugaugcuucuucagaga

SEQ ID NO: 3330437 - RNA, 19 nt, Human
uccugaugcuucuucagag

SEQ ID NO: 3330438 - RNA, 12 nt, Human
uccucuuuccau

SEQ ID NO: 3330439 - RNA, 11 nt, Human
uccucuuucca

SEQ ID NO: 3330440 - RNA, 14 nt, Human
uccucccucccucu

SEQ ID NO: 3330441 - RNA, 11 nt, Human
uccucccuccc

SEQ ID NO: 3330442 - RNA, 19 nt, Human
uccucuuuggucuacacug

SEQ ID NO: 3330443 - RNA, 21 nt, Human
uccucuuuggucuacacugug

SEQ ID NO: 3330444 - RNA, 19 nt, Human
uccucuuuccaucuacccu

SEQ ID NO: 3330445 - RNA, 22 nt, Human
uccucuuuggucuacacugugc

SEQ ID NO: 3330446 - RNA, 15 nt, Human
acugagacagcccgg

SEQ ID NO: 3330447 - RNA, 18 nt, Human
acugagacagcccgggcu

SEQ ID NO: 3330448 - RNA, 21 nt, Human
acugagacagcccgggcucug

SEQ ID NO: 3330449 - RNA, 22 nt, Human
acugagacagcccgggcucugc

SEQ ID NO: 3330450 - RNA, 23 nt, Human
acugagacagcccgggcucugcc

SEQ ID NO: 3330451 - RNA, 22 nt, Human
uccucauacccacccccaccca

SEQ ID NO: 3330452 - RNA, 22 nt, Human
uccucauaguaugguggcuggg

SEQ ID NO: 3330453 - RNA, 23 nt, Human
uccucauacccacccccacccaa

SEQ ID NO: 3330454 - RNA, 16 nt, Human
acucuugaccucaggu

SEQ ID NO: 3330455 - RNA, 15 nt, Human
acucuugaccucagg

SEQ ID NO: 3330456 - RNA, 14 nt, Human
acucuugaccucag

SEQ ID NO: 3330457 - RNA, 23 nt, Human
acuccuugaaaacacuguucucu

SEQ ID NO: 3330458 - RNA, 24 nt, Human
acuccuugaaaacacuguucucug

SEQ ID NO: 3330459 - RNA, 14 nt, Human
acucuccuccagag

SEQ ID NO: 3330460 - RNA, 17 nt, Human
acucuccuccagaguca

SEQ ID NO: 3330461 - RNA, 18 nt, Human
acucuccuggaaauauua

SEQ ID NO: 3330462 - RNA, 15 nt, Human
acucuccuugguguc

SEQ ID NO: 3330463 - RNA, 21 nt, Human
acucuccucugcugcuggcug

SEQ ID NO: 3330464 - RNA, 13 nt, Human
acucuccucugcu

SEQ ID NO: 3330465 - RNA, 14 nt, Human
acucuccucugcug

SEQ ID NO: 3330466 - RNA, 12 nt, Human
acucuccucugc

SEQ ID NO: 3330467 - RNA, 16 nt, Human
acucuccuuggugucg

SEQ ID NO: 3330468 - RNA, 23 nt, Human
acucuccuuggugucgggcauga

SEQ ID NO: 3330469 - RNA, 11 nt, Human
acucugagacu

SEQ ID NO: 3330470 - RNA, 22 nt, Human
acucugagacucgcgacaaugc

SEQ ID NO: 3330471 - RNA, 13 nt, Human
acucuggcagcuc

SEQ ID NO: 3330472 - RNA, 15 nt, Human
acucuggcagcucag

SEQ ID NO: 3330473 - RNA, 14 nt, Human
uccuacucuguguc

SEQ ID NO: 3330474 - RNA, 13 nt, Human
uccuacucugugu

SEQ ID NO: 3330475 - RNA, 12 nt, Human
uccuacucugug

SEQ ID NO: 3330476 - RNA, 15 nt, Human
uccuacucuguguca

SEQ ID NO: 3330477 - RNA, 14 nt, Human
acuccuggccucaa

SEQ ID NO: 3330478 - RNA, 13 nt, Human
acuccuggccuca

SEQ ID NO: 3330479 - RNA, 13 nt, Human
uccuaggcauuug

SEQ ID NO: 3330480 - RNA, 12 nt, Human
acuccuggccuc

SEQ ID NO: 3330481 - RNA, 23 nt, Human
ucccuuuuuuggcugcugaaggc

SEQ ID NO: 3330482 - RNA, 20 nt, Human
ucccuuuuuuggcugcugaa

SEQ ID NO: 3330483 - RNA, 22 nt, Human
ucccuuuuuuggcugcugaagg

SEQ ID NO: 3330484 - RNA, 19 nt, Human
ucccuuugacgccauccca

SEQ ID NO: 3330485 - RNA, 17 nt, Human
ucccuuuuuuggcugcu

SEQ ID NO: 3330486 - RNA, 19 nt, Human
ucccuuuuuuggcugcuga

SEQ ID NO: 3330487 - RNA, 22 nt, Human
ucccugguggcagcucaccucu

SEQ ID NO: 3330488 - RNA, 19 nt, Human
ucccuuggauuguccccga

SEQ ID NO: 3330489 - RNA, 20 nt, Human
ucccuuggauuguccccgac

SEQ ID NO: 3330490 - RNA, 16 nt, Human
ucccuuugacgccauc

SEQ ID NO: 3330491 - RNA, 18 nt, Human
ucccuuugacgccauccc

SEQ ID NO: 3330492 - RNA, 18 nt, Human
ucccugguggcagcucac

SEQ ID NO: 3330493 - RNA, 19 nt, Human
ucccugguggcagcucacc

SEQ ID NO: 3330494 - RNA, 20 nt, Human
ucccugguggcagcucaccu

SEQ ID NO: 3330495 - RNA, 21 nt, Human
ucccugguggcagcucaccuc

SEQ ID NO: 3330496 - RNA, 16 nt, Human
ucccugguggcagcuc

SEQ ID NO: 3330497 - RNA, 17 nt, Human
ucccugguggcagcuca

SEQ ID NO: 3330498 - RNA, 11 nt, Human
acuccuggccu

SEQ ID NO: 3330499 - RNA, 15 nt, Human
acuccugcaggcagc

SEQ ID NO: 3330500 - RNA, 16 nt, Human
acuccugcaggcagcc

SEQ ID NO: 3330501 - RNA, 22 nt, Human
acuccugcaggcagccaggcca

SEQ ID NO: 3330502 - RNA, 21 nt, Human
acuccugcaggcagccaggcc

SEQ ID NO: 3330503 - RNA, 12 nt, Human
acuccugcaggc

SEQ ID NO: 3330504 - RNA, 14 nt, Human
acuccugcaggcag

SEQ ID NO: 3330505 - RNA, 14 nt, Human
acucaccccagccc

SEQ ID NO: 3330506 - RNA, 15 nt, Human
acucaccccagcccc

SEQ ID NO: 3330507 - RNA, 13 nt, Human
acucaccccagcc

SEQ ID NO: 3330508 - RNA, 23 nt, Human
uccccacccugaaagcccugagc

SEQ ID NO: 3330509 - RNA, 15 nt, Human
uccccaccgcagaca

SEQ ID NO: 3330510 - RNA, 18 nt, Human
uccccaggaggccagccu

SEQ ID NO: 3330511 - RNA, 12 nt, Human
uccccacccuga

SEQ ID NO: 3330512 - RNA, 17 nt, Human
uccccaggaggccagcc

SEQ ID NO: 3330513 - RNA, 20 nt, Human
uccccaggaggccagccuug

SEQ ID NO: 3330514 - RNA, 21 nt, Human
uccccaggaggccagccuuga

SEQ ID NO: 3330515 - RNA, 11 nt, Human
ucccccagccc

SEQ ID NO: 3330516 - RNA, 13 nt, Human
ucccccagcccca

SEQ ID NO: 3330517 - RNA, 15 nt, Human
ucccccagccccauc

SEQ ID NO: 3330518 - RNA, 16 nt, Human
ucccccagccccaucc

SEQ ID NO: 3330519 - RNA, 16 nt, Human
acucaaugcacugaca

SEQ ID NO: 3330520 - RNA, 16 nt, Human
acuauguugcccaggc

SEQ ID NO: 3330521 - RNA, 15 nt, Human
acuauguugcccagg

SEQ ID NO: 3330522 - RNA, 22 nt, Human
acuauggcccuggccuagcaua

SEQ ID NO: 3330523 - RNA, 14 nt, Human
acuauguugcccag

SEQ ID NO: 3330524 - RNA, 21 nt, Human
acuaucuaaauguugaaagau

SEQ ID NO: 3330525 - RNA, 16 nt, Human
acuaucuaaauguuga

SEQ ID NO: 3330526 - RNA, 22 nt, Human
acuauagccuaggugacagagu

SEQ ID NO: 3330527 - RNA, 20 nt, Human
acuauagccuaggugacaga

SEQ ID NO: 3330528 - RNA, 18 nt, Human
acuauagccuaggugaca

SEQ ID NO: 3330529 - RNA, 16 nt, Human
ucccagauacuugggg

SEQ ID NO: 3330530 - RNA, 12 nt, Human
ucccagccccaa

SEQ ID NO: 3330531 - RNA, 18 nt, Human
ucccagauacuugggggg

SEQ ID NO: 3330532 - RNA, 22 nt, Human
acguuucuaaaggcuaccuuug

SEQ ID NO: 3330533 - RNA, 15 nt, Human
acguuucuaaaggcu

SEQ ID NO: 3330534 - RNA, 16 nt, Human
acguuucuaaaggcua

SEQ ID NO: 3330535 - RNA, 14 nt, Human
acguugugcauuug

SEQ ID NO: 3330536 - RNA, 15 nt, Human
acguugugcauuugg

SEQ ID NO: 3330537 - RNA, 13 nt, Human
acguugugcauuu

SEQ ID NO: 3330538 - RNA, 17 nt, Human
acguggcugcuucaagg

SEQ ID NO: 3330539 - RNA, 18 nt, Human
acguggcugcuucaagga

SEQ ID NO: 3330540 - RNA, 19 nt, Human
acguggcugcuucaaggau

SEQ ID NO: 3330541 - RNA, 21 nt, Human
acguggcugcuucaaggaucc

SEQ ID NO: 3330542 - RNA, 17 nt, Human
acgguuuuacugcagcu

SEQ ID NO: 3330543 - RNA, 14 nt, Human
uccagaauuuccca

SEQ ID NO: 3330544 - RNA, 15 nt, Human
uccagaauuucccaa

SEQ ID NO: 3330545 - RNA, 13 nt, Human
uccagacacaugu

SEQ ID NO: 3330546 - RNA, 22 nt, Human
uccaggagcagccacauuccug

SEQ ID NO: 3330547 - RNA, 20 nt, Human
uccaggcugggagagccuuc

SEQ ID NO: 3330548 - RNA, 21 nt, Human
uccaggcugggagagccuucc

SEQ ID NO: 3330549 - RNA, 12 nt, Human
uccaggcuccuu

SEQ ID NO: 3330550 - RNA, 10 nt, Human
uccaggcucc

SEQ ID NO: 3330551 - RNA, 22 nt, Human
accuuuuuuauacauaaacaag

SEQ ID NO: 3330552 - RNA, 14 nt, Human
acgaaagagagaga

SEQ ID NO: 3330553 - RNA, 12 nt, Human
acgaaagagaga

SEQ ID NO: 3330554 - RNA, 23 nt, Human
uccaggcugggagagccuuccag

SEQ ID NO: 3330555 - RNA, 15 nt, Human
acgaauauugcugau

SEQ ID NO: 3330556 - RNA, 18 nt, Human
acgaauauugcugauggu

SEQ ID NO: 3330557 - RNA, 12 nt, Human
acgaacaaaaca

SEQ ID NO: 3330558 - RNA, 13 nt, Human
acgaacaaaacac

SEQ ID NO: 3330559 - RNA, 23 nt, Human
acgaaagagagagaaacaaacuu

SEQ ID NO: 3330560 - RNA, 17 nt, Human
accuuuguccccaccgc

SEQ ID NO: 3330561 - RNA, 18 nt, Human
accuuuguccccaccgca

SEQ ID NO: 3330562 - RNA, 20 nt, Human
accuugaacuggguacuugu

SEQ ID NO: 3330563 - RNA, 13 nt, Human
accuuuuuuauac

SEQ ID NO: 3330564 - RNA, 21 nt, Human
acgaauauugcugauggugca

SEQ ID NO: 3330565 - RNA, 14 nt, Human
acgaauauugcuga

SEQ ID NO: 3330566 - RNA, 21 nt, Human
acgcuacccgggaagggggcu

SEQ ID NO: 3330567 - RNA, 18 nt, Human
acgcuacccgggaagggg

SEQ ID NO: 3330568 - RNA, 15 nt, Human
acgcgcgcacacaca

SEQ ID NO: 3330569 - RNA, 14 nt, Human
acgcgcgcacacac

SEQ ID NO: 3330570 - RNA, 16 nt, Human
acgcuggagugcagug

SEQ ID NO: 3330571 - RNA, 15 nt, Human
acgcuggagugcagu

SEQ ID NO: 3330572 - RNA, 23 nt, Human
acgcuggaccuugaacuggguac

SEQ ID NO: 3330573 - RNA, 20 nt, Human
acgcuggaccuugaacuggg

SEQ ID NO: 3330574 - RNA, 17 nt, Human
acgcuggagugcaguga

SEQ ID NO: 3330575 - RNA, 21 nt, Human
acggagucccaccuuggcugc

SEQ ID NO: 3330576 - RNA, 23 nt, Human
acggagucccaccuuggcugcag

SEQ ID NO: 3330577 - RNA, 13 nt, Human
acgcuggaccuug

SEQ ID NO: 3330578 - RNA, 12 nt, Human
acggccaggcca

SEQ ID NO: 3330579 - RNA, 18 nt, Human
acggcucacugcagccuc

SEQ ID NO: 3330580 - RNA, 17 nt, Human
acggcucacugcagccu

SEQ ID NO: 3330581 - RNA, 15 nt, Human
acggcucacugcagc

SEQ ID NO: 3330582 - RNA, 16 nt, Human
acggcucacugcagcc

SEQ ID NO: 3330583 - RNA, 18 nt, Human
acggcuuuuacuuaaacc

SEQ ID NO: 3330584 - RNA, 14 nt, Human
uccaguaucuugaa

SEQ ID NO: 3330585 - RNA, 15 nt, Human
uccaguaucuugaag

SEQ ID NO: 3330586 - RNA, 16 nt, Human
uccaguaucuugaaga

SEQ ID NO: 3330587 - RNA, 18 nt, Human
uccaguaucuugaagacu

SEQ ID NO: 3330588 - RNA, 22 nt, Human
uccagugaggcucugcccuugg

SEQ ID NO: 3330589 - RNA, 23 nt, Human
uccagugaggcucugcccuuggu

SEQ ID NO: 3330590 - RNA, 15 nt, Human
uccagugaggcucug

SEQ ID NO: 3330591 - RNA, 16 nt, Human
uccagugaggcucugc

SEQ ID NO: 3330592 - RNA, 23 nt, Human
uaacauggacaugaucuucuuua

SEQ ID NO: 3330593 - RNA, 18 nt, Human
uaacauggacaugaucuu

SEQ ID NO: 3330594 - RNA, 16 nt, Human
uaacauggaaguacua

SEQ ID NO: 3330595 - RNA, 13 nt, Human
aauaguuggcuag

SEQ ID NO: 3330596 - RNA, 21 nt, Human
aauaguucagguaacaggcag

SEQ ID NO: 3330597 - RNA, 22 nt, Human
aauaguggugugauuuggggau

SEQ ID NO: 3330598 - RNA, 16 nt, Human
aauaguggugugauuu

SEQ ID NO: 3330599 - RNA, 14 nt, Human
uaacuucaccauau

SEQ ID NO: 3330600 - RNA, 21 nt, Human
uaacuucacauauugauuucc

SEQ ID NO: 3330601 - RNA, 13 nt, Human
uaacuucacauau

SEQ ID NO: 3330602 - RNA, 16 nt, Human
uaacuuucugaaauaa

SEQ ID NO: 3330603 - RNA, 15 nt, Human
uaagagaaaugagcu

SEQ ID NO: 3330604 - RNA, 16 nt, Human
aauaugcacacauuuu

SEQ ID NO: 3330605 - RNA, 17 nt, Human
aauaugcacacauuuuu

SEQ ID NO: 3330606 - RNA, 22 nt, Human
aauaugcacacauuuuuuaaau

SEQ ID NO: 3330607 - RNA, 15 nt, Human
aauaugcacacauuu

SEQ ID NO: 3330608 - RNA, 22 nt, Human
uaagcuguuacugucuucagua

SEQ ID NO: 3330609 - RNA, 18 nt, Human
uaagcacacuugacauca

SEQ ID NO: 3330610 - RNA, 14 nt, Human
uaagauucauauuu

SEQ ID NO: 3330611 - RNA, 16 nt, Human
uaaguacuauguauca

SEQ ID NO: 3330612 - RNA, 13 nt, Human
uaaguacuaugua

SEQ ID NO: 3330613 - RNA, 17 nt, Human
uaaguacuauguaucaa

SEQ ID NO: 3330614 - RNA, 17 nt, Human
uaaguauuaaaacauug

SEQ ID NO: 3330615 - RNA, 20 nt, Human
uaaguauucuuauuuaauga

SEQ ID NO: 3330616 - RNA, 19 nt, Human
uaaguauucuuauuuaaug

SEQ ID NO: 3330617 - RNA, 19 nt, Human
uaaguauuaaaacauugga

SEQ ID NO: 3330618 - RNA, 18 nt, Human
uaaguauuaaaacauugg

SEQ ID NO: 3330619 - RNA, 17 nt, Human
aaucauuaggugugacu

SEQ ID NO: 3330620 - RNA, 23 nt, Human
aaucauuaggugugacugaauuu

SEQ ID NO: 3330621 - RNA, 15 nt, Human
aaucauuagguguga

SEQ ID NO: 3330622 - RNA, 17 nt, Human
uaaugaaugaaacauuu

SEQ ID NO: 3330623 - RNA, 18 nt, Human
uaauacaccacuacauuc

SEQ ID NO: 3330624 - RNA, 19 nt, Human
uaauacaccacuacauucu

SEQ ID NO: 3330625 - RNA, 14 nt, Human
uaauagacaauuua

SEQ ID NO: 3330626 - RNA, 16 nt, Human
uaauagacaauuuauu

SEQ ID NO: 3330627 - RNA, 16 nt, Human
uaauacaccacuacau

SEQ ID NO: 3330628 - RNA, 14 nt, Human
uaauacaccacuac

SEQ ID NO: 3330629 - RNA, 18 nt, Human
uaauagacaauuuauuau

SEQ ID NO: 3330630 - RNA, 22 nt, Human
uaauagacaauuuauuauggca

SEQ ID NO: 3330631 - RNA, 18 nt, Human
uaaugucacaggcagguc

SEQ ID NO: 3330632 - RNA, 17 nt, Human
uaaugucacaggcaggu

SEQ ID NO: 3330633 - RNA, 13 nt, Human
uaauguacugcau

SEQ ID NO: 3330634 - RNA, 17 nt, Human
aaugaaaccugugucuc

SEQ ID NO: 3330635 - RNA, 17 nt, Human
aaugaaagacuguacaa

SEQ ID NO: 3330636 - RNA, 16 nt, Human
aaugaaagacuguaca

SEQ ID NO: 3330637 - RNA, 17 nt, Human
aaugaaacauuuuguca

SEQ ID NO: 3330638 - RNA, 22 nt, Human
aaugaaugucagugugacugau

SEQ ID NO: 3330639 - RNA, 15 nt, Human
aaugaccuuucaaua

SEQ ID NO: 3330640 - RNA, 13 nt, Human
aaugaaugucagu

SEQ ID NO: 3330641 - RNA, 20 nt, Human
aauguauguguaaguauucu

SEQ ID NO: 3330642 - RNA, 17 nt, Human
aaugugaaaagaaaaau

SEQ ID NO: 3330643 - RNA, 19 nt, Human
aauguauguguaaguauuc

SEQ ID NO: 3330644 - RNA, 15 nt, Human
aaugugaaacuggau

SEQ ID NO: 3330645 - RNA, 14 nt, Human
aaugugaaacugga

SEQ ID NO: 3330646 - RNA, 19 nt, Human
aaugugaaaagaaaaauga

SEQ ID NO: 3330647 - RNA, 24 nt, Human
uacauaaugcgugcauaccacuuu

SEQ ID NO: 3330648 - RNA, 21 nt, Human
uacauaaugcgugcauaccac

SEQ ID NO: 3330649 - RNA, 23 nt, Human
uacauaaugcgugcauaccacuu

SEQ ID NO: 3330650 - RNA, 16 nt, Human
uacaggugugagucac

SEQ ID NO: 3330651 - RNA, 13 nt, Human
uacauucuguuaa

SEQ ID NO: 3330652 - RNA, 12 nt, Human
uacauucuguua

SEQ ID NO: 3330653 - RNA, 21 nt, Human
aauguucucucuucuccaccu

SEQ ID NO: 3330654 - RNA, 16 nt, Human
aauggcagccuuggca

SEQ ID NO: 3330655 - RNA, 12 nt, Human
aauggcagccuu

SEQ ID NO: 3330656 - RNA, 22 nt, Human
uacagacaacaaaccuguuucu

SEQ ID NO: 3330657 - RNA, 19 nt, Human
uacagacaaagcguggugg

SEQ ID NO: 3330658 - RNA, 18 nt, Human
uacagaggccaugggccu

SEQ ID NO: 3330659 - RNA, 21 nt, Human
uacacauuuuauuuuauuaug

SEQ ID NO: 3330660 - RNA, 22 nt, Human
uacacauuuuauuuuauuaugc

SEQ ID NO: 3330661 - RNA, 19 nt, Human
uacacauuuuauuuuauua

SEQ ID NO: 3330662 - RNA, 15 nt, Human
uacacuaaaagguga

SEQ ID NO: 3330663 - RNA, 22 nt, Human
aaugcacuuuguucuggcucuu

SEQ ID NO: 3330664 - RNA, 20 nt, Human
aaugcacuuuguucuggcuc

SEQ ID NO: 3330665 - RNA, 21 nt, Human
uacaaugcugugcccuaaagu

SEQ ID NO: 3330666 - RNA, 18 nt, Human
aaugaccuuucaauagga

SEQ ID NO: 3330667 - RNA, 16 nt, Human
aaugaccuuucaauag

SEQ ID NO: 3330668 - RNA, 17 nt, Human
aaugaccuuucaauagg

SEQ ID NO: 3330669 - RNA, 21 nt, Human
aaugcacuuuguucuggcucu

SEQ ID NO: 3330670 - RNA, 16 nt, Human
uacaaugcugugcccu

SEQ ID NO: 3330671 - RNA, 20 nt, Human
aauggaaaugggcagagcag

SEQ ID NO: 3330672 - RNA, 21 nt, Human
aauggaaaugggcagagcaga

SEQ ID NO: 3330673 - RNA, 23 nt, Human
aauggacguguuaugacuccaga

SEQ ID NO: 3330674 - RNA, 20 nt, Human
aauggacuaacuugucuuug

SEQ ID NO: 3330675 - RNA, 21 nt, Human
aauggacguguuaugacucca

SEQ ID NO: 3330676 - RNA, 11 nt, Human
aaugcccagcc

SEQ ID NO: 3330677 - RNA, 12 nt, Human
aaugcccagccc

SEQ ID NO: 3330678 - RNA, 22 nt, Human
uacgccaggggaaaaucagccu

SEQ ID NO: 3330679 - RNA, 14 nt, Human
uacguugugcauuu

SEQ ID NO: 3330680 - RNA, 13 nt, Human
uacguacacauuu

SEQ ID NO: 3330681 - RNA, 15 nt, Human
uacguugugcauuug

SEQ ID NO: 3330682 - RNA, 16 nt, Human
uacguugugcauuugg

SEQ ID NO: 3330683 - RNA, 12 nt, Human
uacguacacauu

SEQ ID NO: 3330684 - RNA, 18 nt, Human
uacgggaggguaaggcug

SEQ ID NO: 3330685 - RNA, 23 nt, Human
uacucuccuggaaauauuaagaa

SEQ ID NO: 3330686 - RNA, 22 nt, Human
uacucuccuggaaauauuaaga

SEQ ID NO: 3330687 - RNA, 13 nt, Human
uacuauguaucaa

SEQ ID NO: 3330688 - RNA, 12 nt, Human
uacuauguauca

SEQ ID NO: 3330689 - RNA, 23 nt, Human
uacuauggcccuggccuagcaua

SEQ ID NO: 3330690 - RNA, 17 nt, Human
uacuacuccuguaggaa

SEQ ID NO: 3330691 - RNA, 13 nt, Human
uacuacuccugua

SEQ ID NO: 3330692 - RNA, 16 nt, Human
uacuggagaaaaugga

SEQ ID NO: 3330693 - RNA, 12 nt, Human
uacucuguguca

SEQ ID NO: 3330694 - RNA, 19 nt, Human
uacuguaauuugugauaca

SEQ ID NO: 3330695 - RNA, 20 nt, Human
uacuguaauuugugauacaa

SEQ ID NO: 3330696 - RNA, 18 nt, Human
uacuguaauuugugauac

SEQ ID NO: 3330697 - RNA, 21 nt, Human
uacuguacaugaaaacacauu

SEQ ID NO: 3330698 - RNA, 22 nt, Human
uacuguacaugaaaacacauuu

SEQ ID NO: 3330699 - RNA, 18 nt, Human
uacuguacaugaaaacac

SEQ ID NO: 3330700 - RNA, 17 nt, Human
uacuguaauuugugaua

SEQ ID NO: 3330701 - RNA, 15 nt, Human
aauuagccaagugug

SEQ ID NO: 3330702 - RNA, 13 nt, Human
uaccugucccccu

SEQ ID NO: 3330703 - RNA, 14 nt, Human
uaccugucccccug

SEQ ID NO: 3330704 - RNA, 16 nt, Human
uaccugucccccugac

SEQ ID NO: 3330705 - RNA, 17 nt, Human
uaccugucccccugaca

SEQ ID NO: 3330706 - RNA, 10 nt, Human
uaccuguccc

SEQ ID NO: 3330707 - RNA, 18 nt, Human
uaccugccaggaagccag

SEQ ID NO: 3330708 - RNA, 20 nt, Human
uaccugccaggaagccagca

SEQ ID NO: 3330709 - RNA, 23 nt, Human
uaccugccaggaagccagcaggc

SEQ ID NO: 3330710 - RNA, 16 nt, Human
uaccugccaggaagcc

SEQ ID NO: 3330711 - RNA, 14 nt, Human
aauuccccacccug

SEQ ID NO: 3330712 - RNA, 12 nt, Human
aauuccccagau

SEQ ID NO: 3330713 - RNA, 16 nt, Human
acacaguauuacuucu

SEQ ID NO: 3330714 - RNA, 18 nt, Human
acacaguauuacuucugc

SEQ ID NO: 3330715 - RNA, 19 nt, Human
acacaguauuacuucugcu

SEQ ID NO: 3330716 - RNA, 13 nt, Human
acacagugagucg

SEQ ID NO: 3330717 - RNA, 14 nt, Human
acacacagcucugu

SEQ ID NO: 3330718 - RNA, 13 nt, Human
acacacagcucug

SEQ ID NO: 3330719 - RNA, 17 nt, Human
acacacagcucuguccu

SEQ ID NO: 3330720 - RNA, 17 nt, Human
acacacacauacacgaa

SEQ ID NO: 3330721 - RNA, 21 nt, Human
acacacgcgugcacacaccag

SEQ ID NO: 3330722 - RNA, 20 nt, Human
acacaccagagcccaccuug

SEQ ID NO: 3330723 - RNA, 15 nt, Human
acacaccagagccca

SEQ ID NO: 3330724 - RNA, 14 nt, Human
acacaccagagccc

SEQ ID NO: 3330725 - RNA, 21 nt, Human
acacacugcauguuugugauu

SEQ ID NO: 3330726 - RNA, 16 nt, Human
acacacgcgcgcacac

SEQ ID NO: 3330727 - RNA, 15 nt, Human
acacacgcgcgcaca

SEQ ID NO: 3330728 - RNA, 14 nt, Human
acacacacauacac

SEQ ID NO: 3330729 - RNA, 19 nt, Human
acaaugugaaaagaaaaau

SEQ ID NO: 3330730 - RNA, 17 nt, Human
acaaugugaaaagaaaa

SEQ ID NO: 3330731 - RNA, 22 nt, Human
acaaugcugugcccuaaagugu

SEQ ID NO: 3330732 - RNA, 23 nt, Human
acaaugcugugcccuaaagugua

SEQ ID NO: 3330733 - RNA, 24 nt, Human
acaaugcugugcccuaaaguguau

SEQ ID NO: 3330734 - RNA, 21 nt, Human
acaaugcugugcccuaaagug

SEQ ID NO: 3330735 - RNA, 20 nt, Human
acacucacauuuauucugcu

SEQ ID NO: 3330736 - RNA, 20 nt, Human
acacuaaccacgcuggaccu

SEQ ID NO: 3330737 - RNA, 13 nt, Human
acacgaaagagag

SEQ ID NO: 3330738 - RNA, 15 nt, Human
acacgaaagagagag

SEQ ID NO: 3330739 - RNA, 14 nt, Human
acacgaaagagaga

SEQ ID NO: 3330740 - RNA, 19 nt, Human
acacccugugauggggccc

SEQ ID NO: 3330741 - RNA, 16 nt, Human
acaccgggcacucaga

SEQ ID NO: 3330742 - RNA, 19 nt, Human
acaccucugcacaagcugc

SEQ ID NO: 3330743 - RNA, 21 nt, Human
acaccucugcacaagcugcac

SEQ ID NO: 3330744 - RNA, 18 nt, Human
uaguucagguaacaggca

SEQ ID NO: 3330745 - RNA, 20 nt, Human
uaguuccaccaucaagccac

SEQ ID NO: 3330746 - RNA, 13 nt, Human
acacauuuuauuu

SEQ ID NO: 3330747 - RNA, 14 nt, Human
acacauuuuauuuu

SEQ ID NO: 3330748 - RNA, 19 nt, Human
acacauuuuauuuuauuau

SEQ ID NO: 3330749 - RNA, 20 nt, Human
acacauuuuauuuuauuaug

SEQ ID NO: 3330750 - RNA, 21 nt, Human
acacaugagcaucaggccagg

SEQ ID NO: 3330751 - RNA, 18 nt, Human
acaagaccacguuucuaa

SEQ ID NO: 3330752 - RNA, 17 nt, Human
acaaugacuuacuguac

SEQ ID NO: 3330753 - RNA, 18 nt, Human
acaaugacuuacuguaca

SEQ ID NO: 3330754 - RNA, 12 nt, Human
acaaugacuuac

SEQ ID NO: 3330755 - RNA, 21 nt, Human
uagggaaggauacaaaagcau

SEQ ID NO: 3330756 - RNA, 16 nt, Human
uaggcauuugcugaau

SEQ ID NO: 3330757 - RNA, 20 nt, Human
uaggcauuugcugaauacag

SEQ ID NO: 3330758 - RNA, 14 nt, Human
uaggcauuguggga

SEQ ID NO: 3330759 - RNA, 11 nt, Human
acaaaagcaug

SEQ ID NO: 3330760 - RNA, 22 nt, Human
acaaaagcaugugagacugguu

SEQ ID NO: 3330761 - RNA, 22 nt, Human
acaaaggaugcccaaagaugca

SEQ ID NO: 3330762 - RNA, 19 nt, Human
uagauauaugcucugcaug

SEQ ID NO: 3330763 - RNA, 15 nt, Human
uagauauaugcucug

SEQ ID NO: 3330764 - RNA, 21 nt, Human
uagccaaggccaaaggaagca

SEQ ID NO: 3330765 - RNA, 22 nt, Human
uagcauuuugcuaaaugugaau

SEQ ID NO: 3330766 - RNA, 14 nt, Human
uagccaaggccaaa

SEQ ID NO: 3330767 - RNA, 16 nt, Human
uagcauuuugcuaaau

SEQ ID NO: 3330768 - RNA, 19 nt, Human
uagcauggcugccaauggg

SEQ ID NO: 3330769 - RNA, 23 nt, Human
acaacacucauugaccugaggcc

SEQ ID NO: 3330770 - RNA, 21 nt, Human
acaacacucauugaccugagg

SEQ ID NO: 3330771 - RNA, 19 nt, Human
acaagaccacguuucuaaa

SEQ ID NO: 3330772 - RNA, 19 nt, Human
acaagacccuugugguccc

SEQ ID NO: 3330773 - RNA, 11 nt, Human
uagccagagga

SEQ ID NO: 3330774 - RNA, 15 nt, Human
uagccagaggagaga

SEQ ID NO: 3330775 - RNA, 22 nt, Human
acaggcauguucucugaggaca

SEQ ID NO: 3330776 - RNA, 20 nt, Human
acaggcauguucucugagga

SEQ ID NO: 3330777 - RNA, 19 nt, Human
acaggcauguucucugagg

SEQ ID NO: 3330778 - RNA, 18 nt, Human
acaggcauguucucugag

SEQ ID NO: 3330779 - RNA, 15 nt, Human
acaggcauguucucu

SEQ ID NO: 3330780 - RNA, 20 nt, Human
uauguggaguucaucuugaa

SEQ ID NO: 3330781 - RNA, 23 nt, Human
acaggaccagggauuuccaugau

SEQ ID NO: 3330782 - RNA, 13 nt, Human
acaggcaggucca

SEQ ID NO: 3330783 - RNA, 14 nt, Human
acaggaucagucug

SEQ ID NO: 3330784 - RNA, 16 nt, Human
acaggagugagcacua

SEQ ID NO: 3330785 - RNA, 16 nt, Human
acaggcagguccaggg

SEQ ID NO: 3330786 - RNA, 14 nt, Human
acaggcagguccag

SEQ ID NO: 3330787 - RNA, 14 nt, Human
acaggcauguucuc

SEQ ID NO: 3330788 - RNA, 13 nt, Human
acagcuaacaugg

SEQ ID NO: 3330789 - RNA, 16 nt, Human
acaggaaaagcugcug

SEQ ID NO: 3330790 - RNA, 15 nt, Human
acaggaaaagcugcu

SEQ ID NO: 3330791 - RNA, 17 nt, Human
acaggaaaagcugcuga

SEQ ID NO: 3330792 - RNA, 13 nt, Human
acaggaaguacug

SEQ ID NO: 3330793 - RNA, 14 nt, Human
uauucaggaagcuc

SEQ ID NO: 3330794 - RNA, 20 nt, Human
uauucaguaauaacucuacc

SEQ ID NO: 3330795 - RNA, 14 nt, Human
uauuacuucugcua

SEQ ID NO: 3330796 - RNA, 13 nt, Human
uauuacuucugcu

SEQ ID NO: 3330797 - RNA, 12 nt, Human
acagggcacacc

SEQ ID NO: 3330798 - RNA, 22 nt, Human
acaggcugggcuucaguggcag

SEQ ID NO: 3330799 - RNA, 21 nt, Human
acaggcugggcuucaguggca

SEQ ID NO: 3330800 - RNA, 23 nt, Human
acaggcugggcuucaguggcagc

SEQ ID NO: 3330801 - RNA, 14 nt, Human
uaucucccccagcc

SEQ ID NO: 3330802 - RNA, 13 nt, Human
uaucucccccagc

SEQ ID NO: 3330803 - RNA, 15 nt, Human
uaucucagggccugg

SEQ ID NO: 3330804 - RNA, 18 nt, Human
acagagaaaguacuucuc

SEQ ID NO: 3330805 - RNA, 11 nt, Human
acagagaaagu

SEQ ID NO: 3330806 - RNA, 20 nt, Human
acagaaaauggaagacagcu

SEQ ID NO: 3330807 - RNA, 13 nt, Human
acagaaauguaca

SEQ ID NO: 3330808 - RNA, 17 nt, Human
acagaaaauucuucucc

SEQ ID NO: 3330809 - RNA, 14 nt, Human
acagaaauguacag

SEQ ID NO: 3330810 - RNA, 16 nt, Human
acagaaauguacagca

SEQ ID NO: 3330811 - RNA, 17 nt, Human
acagaaauguacagcaa

SEQ ID NO: 3330812 - RNA, 13 nt, Human
acagacccugccc

SEQ ID NO: 3330813 - RNA, 14 nt, Human
acagacccugcccu

SEQ ID NO: 3330814 - RNA, 15 nt, Human
acagacccugcccug

SEQ ID NO: 3330815 - RNA, 18 nt, Human
acagcccgggcucugccu

SEQ ID NO: 3330816 - RNA, 19 nt, Human
acagcccgggcucugccuc

SEQ ID NO: 3330817 - RNA, 16 nt, Human
acagcaaggagauuua

SEQ ID NO: 3330818 - RNA, 21 nt, Human
acagcaaggagauuuacaacu

SEQ ID NO: 3330819 - RNA, 17 nt, Human
acagcccgggcucugcc

SEQ ID NO: 3330820 - RNA, 16 nt, Human
acagcccgggcucugc

SEQ ID NO: 3330821 - RNA, 18 nt, Human
acagagcccacgccccca

SEQ ID NO: 3330822 - RNA, 19 nt, Human
acagagcccacgcccccac

SEQ ID NO: 3330823 - RNA, 15 nt, Human
acagagcccacgccc

SEQ ID NO: 3330824 - RNA, 14 nt, Human
acagagcccacgcc

SEQ ID NO: 3330825 - RNA, 17 nt, Human
acagcaaggagauuuac

SEQ ID NO: 3330826 - RNA, 17 nt, Human
uaugccugggcagaagg

SEQ ID NO: 3330827 - RNA, 23 nt, Human
uaugcauuugaaaauuuugaugu

SEQ ID NO: 3330828 - RNA, 24 nt, Human
uaugcauuugaaaauuuugauguu

SEQ ID NO: 3330829 - RNA, 11 nt, Human
uaugcauuuga

SEQ ID NO: 3330830 - RNA, 18 nt, Human
uauggcuuuugugcauua

SEQ ID NO: 3330831 - RNA, 21 nt, Human
uauggcuuuugugcauuaucu

SEQ ID NO: 3330832 - RNA, 16 nt, Human
uauggcuuuugugcau

SEQ ID NO: 3330833 - RNA, 17 nt, Human
uauggcuuuugugcauu

SEQ ID NO: 3330834 - RNA, 15 nt, Human
uaugcuuauacacuu

SEQ ID NO: 3330835 - RNA, 19 nt, Human
guucuagcauggcugccaa

SEQ ID NO: 3330836 - RNA, 13 nt, Human
guucucuccuucu

SEQ ID NO: 3330837 - RNA, 13 nt, Human
guucucugcccuc

SEQ ID NO: 3330838 - RNA, 15 nt, Human
guucucugcccucca

SEQ ID NO: 3330839 - RNA, 15 nt, Human
guucucucuucucca

SEQ ID NO: 3330840 - RNA, 12 nt, Human
guucucugagga

SEQ ID NO: 3330841 - RNA, 13 nt, Human
guucuuaauucuu

SEQ ID NO: 3330842 - RNA, 17 nt, Human
guucucugcccuccaag

SEQ ID NO: 3330843 - RNA, 18 nt, Human
guucucugcccuccaaga

SEQ ID NO: 3330844 - RNA, 14 nt, Human
guucuuaauucuua

SEQ ID NO: 3330845 - RNA, 17 nt, Human
guucuuaauucuuagcu

SEQ ID NO: 3330846 - RNA, 14 nt, Human
guucuugguuugua

SEQ ID NO: 3330847 - RNA, 15 nt, Human
guucuugguuuguaa

SEQ ID NO: 3330848 - RNA, 14 nt, Human
guugauagcacaga

SEQ ID NO: 3330849 - RNA, 19 nt, Human
guugauagcacagacccug

SEQ ID NO: 3330850 - RNA, 17 nt, Human
aagcucugcuccucucc

SEQ ID NO: 3330851 - RNA, 22 nt, Human
guucccuuugacgccaucccag

SEQ ID NO: 3330852 - RNA, 21 nt, Human
guucccuuuuuuggcugcuga

SEQ ID NO: 3330853 - RNA, 22 nt, Human
guucccuuuuuuggcugcugaa

SEQ ID NO: 3330854 - RNA, 15 nt, Human
aagccuccuccagcc

SEQ ID NO: 3330855 - RNA, 16 nt, Human
aagccucccacgacug

SEQ ID NO: 3330856 - RNA, 22 nt, Human
aagcuaggccuggccagaugca

SEQ ID NO: 3330857 - RNA, 23 nt, Human
guucagcuuguaaauagcucagg

SEQ ID NO: 3330858 - RNA, 18 nt, Human
guucagcuccagcucacc

SEQ ID NO: 3330859 - RNA, 22 nt, Human
guucaggguuggccccugcccg

SEQ ID NO: 3330860 - RNA, 21 nt, Human
guucaggguuggccccugccc

SEQ ID NO: 3330861 - RNA, 20 nt, Human
guucaggguuggccccugcc

SEQ ID NO: 3330862 - RNA, 18 nt, Human
guucagguaacaggcaga

SEQ ID NO: 3330863 - RNA, 17 nt, Human
guucagguaacaggcag

SEQ ID NO: 3330864 - RNA, 21 nt, Human
aagccgugauuuucauugcug

SEQ ID NO: 3330865 - RNA, 19 nt, Human
guuagagguucccuuugac

SEQ ID NO: 3330866 - RNA, 14 nt, Human
aagcacaugccucu

SEQ ID NO: 3330867 - RNA, 15 nt, Human
aagcacaugccucuc

SEQ ID NO: 3330868 - RNA, 16 nt, Human
aagcacaugccucucu

SEQ ID NO: 3330869 - RNA, 19 nt, Human
aagcacaugccucucucag

SEQ ID NO: 3330870 - RNA, 20 nt, Human
aagcacaugccucucucagg

SEQ ID NO: 3330871 - RNA, 16 nt, Human
aagcacacuugacauc

SEQ ID NO: 3330872 - RNA, 16 nt, Human
aagcaccuccugccuc

SEQ ID NO: 3330873 - RNA, 15 nt, Human
aagcaccuccugccu

SEQ ID NO: 3330874 - RNA, 14 nt, Human
aagcaccuccugcc

SEQ ID NO: 3330875 - RNA, 13 nt, Human
aagcaccuccugc

SEQ ID NO: 3330876 - RNA, 21 nt, Human
aagcacaugccucucucaggc

SEQ ID NO: 3330877 - RNA, 17 nt, Human
aagcaccuccugccucg

SEQ ID NO: 3330878 - RNA, 18 nt, Human
aagccaaagcuaggccug

SEQ ID NO: 3330879 - RNA, 17 nt, Human
aagccaaagcuaggccu

SEQ ID NO: 3330880 - RNA, 12 nt, Human
aagcaugugaga

SEQ ID NO: 3330881 - RNA, 11 nt, Human
aagaggcaggg

SEQ ID NO: 3330882 - RNA, 14 nt, Human
aagaggcagggucu

SEQ ID NO: 3330883 - RNA, 21 nt, Human
aagagggagggagggcuccag

SEQ ID NO: 3330884 - RNA, 22 nt, Human
aagagggucugaggaauccaga

SEQ ID NO: 3330885 - RNA, 22 nt, Human
aagauauuuugcuuugugauuu

SEQ ID NO: 3330886 - RNA, 15 nt, Human
gugguuucagaaaug

SEQ ID NO: 3330887 - RNA, 21 nt, Human
gugcugcccugcccaccuggc

SEQ ID NO: 3330888 - RNA, 23 nt, Human
gugcugcccugcccaccuggccu

SEQ ID NO: 3330889 - RNA, 14 nt, Human
gugucaccugaaga

SEQ ID NO: 3330890 - RNA, 18 nt, Human
gugucagguggggcagcu

SEQ ID NO: 3330891 - RNA, 14 nt, Human
gugucagguggggc

SEQ ID NO: 3330892 - RNA, 22 nt, Human
gugucaccugaagacucauucu

SEQ ID NO: 3330893 - RNA, 23 nt, Human
gugugaaccaccacacccagccc

SEQ ID NO: 3330894 - RNA, 19 nt, Human
gugucagguggggcagcuu

SEQ ID NO: 3330895 - RNA, 20 nt, Human
aagaucaaaagguuaauaaa

SEQ ID NO: 3330896 - RNA, 23 nt, Human
aagaucaaaagguuaauaaagua

SEQ ID NO: 3330897 - RNA, 19 nt, Human
aaguuucugccgcagcccu

SEQ ID NO: 3330898 - RNA, 21 nt, Human
aaguuucugccgcagcccugc

SEQ ID NO: 3330899 - RNA, 20 nt, Human
aaguuugagaucagccuggg

SEQ ID NO: 3330900 - RNA, 23 nt, Human
aaguguauuuuuuuacuaauaga

SEQ ID NO: 3330901 - RNA, 13 nt, Human
aagugugguagag

SEQ ID NO: 3330902 - RNA, 20 nt, Human
aagugauccucccaccucag

SEQ ID NO: 3330903 - RNA, 19 nt, Human
aagugauccucccaccuca

SEQ ID NO: 3330904 - RNA, 13 nt, Human
aagugauccuccc

SEQ ID NO: 3330905 - RNA, 20 nt, Human
aagugauucuccugccucag

SEQ ID NO: 3330906 - RNA, 23 nt, Human
aagugauccucccaccucagccu

SEQ ID NO: 3330907 - RNA, 13 nt, Human
uaaaagucuugug

SEQ ID NO: 3330908 - RNA, 19 nt, Human
uaaaaggugaccaaugaug

SEQ ID NO: 3330909 - RNA, 12 nt, Human
uaaaacuuuuua

SEQ ID NO: 3330910 - RNA, 15 nt, Human
uaaaacuuuuuaaaa

SEQ ID NO: 3330911 - RNA, 13 nt, Human
uaaaacccaagug

SEQ ID NO: 3330912 - RNA, 15 nt, Human
uaaaaaugagguacu

SEQ ID NO: 3330913 - RNA, 23 nt, Human
uaaaaaucucaaauuucuaaauc

SEQ ID NO: 3330914 - RNA, 18 nt, Human
aaguaauaugcacacauu

SEQ ID NO: 3330915 - RNA, 20 nt, Human
aaguaauaugcacacauuuu

SEQ ID NO: 3330916 - RNA, 17 nt, Human
aaguaauaugcacacau

SEQ ID NO: 3330917 - RNA, 18 nt, Human
guuuuaaggaugcuugua

SEQ ID NO: 3330918 - RNA, 22 nt, Human
guuuuaaggaugcuuguacaua

SEQ ID NO: 3330919 - RNA, 15 nt, Human
guuuucuguucuuuc

SEQ ID NO: 3330920 - RNA, 16 nt, Human
guuuucuguucuuucu

SEQ ID NO: 3330921 - RNA, 14 nt, Human
guuuucuguucuuu

SEQ ID NO: 3330922 - RNA, 12 nt, Human
guuuucuguucu

SEQ ID NO: 3330923 - RNA, 13 nt, Human
aaguacuauguau

SEQ ID NO: 3330924 - RNA, 17 nt, Human
aaguacuauaauuuacc

SEQ ID NO: 3330925 - RNA, 14 nt, Human
aaguacuauaauuu

SEQ ID NO: 3330926 - RNA, 15 nt, Human
aaguauuauaccuuu

SEQ ID NO: 3330927 - RNA, 18 nt, Human
aaguacuucuccacccug

SEQ ID NO: 3330928 - RNA, 19 nt, Human
aaguacuucuccacccugc

SEQ ID NO: 3330929 - RNA, 16 nt, Human
aaguauuauaccuuuu

SEQ ID NO: 3330930 - RNA, 19 nt, Human
aaguauuauaccuuuuuua

SEQ ID NO: 3330931 - RNA, 19 nt, Human
aaguauucuuauuuaauga

SEQ ID NO: 3330932 - RNA, 21 nt, Human
aaguauucuuauuuaaugaaa

SEQ ID NO: 3330933 - RNA, 23 nt, Human
aaguauucuuauuuaaugaaaga

SEQ ID NO: 3330934 - RNA, 11 nt, Human
guuucagaaau

SEQ ID NO: 3330935 - RNA, 13 nt, Human
guuucagaaaugu

SEQ ID NO: 3330936 - RNA, 16 nt, Human
aaggcugggggaagaa

SEQ ID NO: 3330937 - RNA, 14 nt, Human
aaggcugggggaag

SEQ ID NO: 3330938 - RNA, 19 nt, Human
aaggcugggggaagaagcu

SEQ ID NO: 3330939 - RNA, 22 nt, Human
aaggcugggggaagaagcucuc

SEQ ID NO: 3330940 - RNA, 20 nt, Human
aaggcugucaauuacaggaa

SEQ ID NO: 3330941 - RNA, 12 nt, Human
aagggggcuggg

SEQ ID NO: 3330942 - RNA, 23 nt, Human
aagggggcugggacaugggaaag

SEQ ID NO: 3330943 - RNA, 13 nt, Human
aaggggagaguaa

SEQ ID NO: 3330944 - RNA, 21 nt, Human
guuuaagugacugauggcuaa

SEQ ID NO: 3330945 - RNA, 17 nt, Human
aaggaaacccagcucug

SEQ ID NO: 3330946 - RNA, 22 nt, Human
aaggaaacccagcucuggucca

SEQ ID NO: 3330947 - RNA, 23 nt, Human
guuguuugauucagacagcugcc

SEQ ID NO: 3330948 - RNA, 20 nt, Human
guuguuugauucagacagcu

SEQ ID NO: 3330949 - RNA, 16 nt, Human
aaggaaacccagcucu

SEQ ID NO: 3330950 - RNA, 17 nt, Human
guuucaaacuuuacuau

SEQ ID NO: 3330951 - RNA, 16 nt, Human
gugcucugaucaucca

SEQ ID NO: 3330952 - RNA, 13 nt, Human
gugcucuggacag

SEQ ID NO: 3330953 - RNA, 12 nt, Human
gugcugcccugc

SEQ ID NO: 3330954 - RNA, 13 nt, Human
gugcugcccugcc

SEQ ID NO: 3330955 - RNA, 14 nt, Human
gugcugcccugccc

SEQ ID NO: 3330956 - RNA, 15 nt, Human
gugcugcccugccca

SEQ ID NO: 3330957 - RNA, 15 nt, Human
gugcuaucuccccca

SEQ ID NO: 3330958 - RNA, 18 nt, Human
gugcuaucucccccagcc

SEQ ID NO: 3330959 - RNA, 21 nt, Human
aacuuuaccuuuuuuauacau

SEQ ID NO: 3330960 - RNA, 22 nt, Human
aacuuuaccuuuuuuauacaua

SEQ ID NO: 3330961 - RNA, 23 nt, Human
aacuuuaccuuuuuuauacauaa

SEQ ID NO: 3330962 - RNA, 13 nt, Human
aagaaaaagaaaa

SEQ ID NO: 3330963 - RNA, 19 nt, Human
aagaaaaaauauuuucccu

SEQ ID NO: 3330964 - RNA, 17 nt, Human
aagaaaaaugagccugg

SEQ ID NO: 3330965 - RNA, 18 nt, Human
aagaaaaaugagccuggc

SEQ ID NO: 3330966 - RNA, 21 nt, Human
aagaaaauaguggugugauuu

SEQ ID NO: 3330967 - RNA, 15 nt, Human
aagaaaauaguggug

SEQ ID NO: 3330968 - RNA, 16 nt, Human
aagaaaauaccaagga

SEQ ID NO: 3330969 - RNA, 17 nt, Human
gugcauuugaggucugu

SEQ ID NO: 3330970 - RNA, 19 nt, Human
gugcauuugaggucuguuc

SEQ ID NO: 3330971 - RNA, 21 nt, Human
gugcauuuggugguuucagaa

SEQ ID NO: 3330972 - RNA, 15 nt, Human
gugcauuuggugguu

SEQ ID NO: 3330973 - RNA, 23 nt, Human
gugccaaaaacaacaacaaaaug

SEQ ID NO: 3330974 - RNA, 18 nt, Human
gugcaaugaccuuucaau

SEQ ID NO: 3330975 - RNA, 13 nt, Human
gugcacaagcucc

SEQ ID NO: 3330976 - RNA, 16 nt, Human
gugcacaagcuccaag

SEQ ID NO: 3330977 - RNA, 21 nt, Human
gugcacaagcuccaagcuccc

SEQ ID NO: 3330978 - RNA, 21 nt, Human
gugcacaugcacgugugugca

SEQ ID NO: 3330979 - RNA, 23 nt, Human
gugauccucccaccucagccucc

SEQ ID NO: 3330980 - RNA, 22 nt, Human
aacuucacauauugauuuccgu

SEQ ID NO: 3330981 - RNA, 22 nt, Human
aacuucaccauauuaccacaga

SEQ ID NO: 3330982 - RNA, 14 nt, Human
aacuucacauauug

SEQ ID NO: 3330983 - RNA, 13 nt, Human
aacuucacauauu

SEQ ID NO: 3330984 - RNA, 13 nt, Human
aacgucugugcca

SEQ ID NO: 3330985 - RNA, 17 nt, Human
aacuagggaagauaaua

SEQ ID NO: 3330986 - RNA, 12 nt, Human
aacguggcugcu

SEQ ID NO: 3330987 - RNA, 13 nt, Human
aacguggcugcuu

SEQ ID NO: 3330988 - RNA, 14 nt, Human
gucugacaggcaau

SEQ ID NO: 3330989 - RNA, 13 nt, Human
gucugacaggcaa

SEQ ID NO: 3330990 - RNA, 12 nt, Human
gucugacaggca

SEQ ID NO: 3330991 - RNA, 18 nt, Human
gucugacaggcaaugcug

SEQ ID NO: 3330992 - RNA, 15 nt, Human
gucugacaggcaaug

SEQ ID NO: 3330993 - RNA, 23 nt, Human
gucucuuuaaugucacaggcagg

SEQ ID NO: 3330994 - RNA, 17 nt, Human
gucucaaaaaaagaaaa

SEQ ID NO: 3330995 - RNA, 14 nt, Human
gucucaaaaaaaca

SEQ ID NO: 3330996 - RNA, 16 nt, Human
gucuggaaugcagugg

SEQ ID NO: 3330997 - RNA, 15 nt, Human
gucuggaaugcagug

SEQ ID NO: 3330998 - RNA, 21 nt, Human
gucuuaaaaaguggaaaaaua

SEQ ID NO: 3330999 - RNA, 14 nt, Human
gugaggcucugccc

SEQ ID NO: 3331000 - RNA, 15 nt, Human
gugaggcucugcccu

SEQ ID NO: 3331001 - RNA, 16 nt, Human
gugaggcucugcccuu

SEQ ID NO: 3331002 - RNA, 17 nt, Human
gugaggcucugcccuug

SEQ ID NO: 3331003 - RNA, 12 nt, Human
gugaggcucugc

SEQ ID NO: 3331004 - RNA, 13 nt, Human
gugaggcucugcc

SEQ ID NO: 3331005 - RNA, 18 nt, Human
gugagacucugucucaaa

SEQ ID NO: 3331006 - RNA, 19 nt, Human
aacucuccucugcugcugg

SEQ ID NO: 3331007 - RNA, 21 nt, Human
aacucuccucugcugcuggcu

SEQ ID NO: 3331008 - RNA, 21 nt, Human
gugaguacuacaguccuccca

SEQ ID NO: 3331009 - RNA, 17 nt, Human
aacucuccucugcugcu

SEQ ID NO: 3331010 - RNA, 23 nt, Human
gugaguacuacaguccucccauc

SEQ ID NO: 3331011 - RNA, 17 nt, Human
gugagucaccaagccca

SEQ ID NO: 3331012 - RNA, 18 nt, Human
gugaggcucugcccuugg

SEQ ID NO: 3331013 - RNA, 22 nt, Human
aacucuccucugcugcuggcug

SEQ ID NO: 3331014 - RNA, 23 nt, Human
aacucuccucugcugcuggcugg

SEQ ID NO: 3331015 - RNA, 20 nt, Human
aacugauuuuuuuuuccuuc

SEQ ID NO: 3331016 - RNA, 21 nt, Human
aacugauuuuuuuuuccuuca

SEQ ID NO: 3331017 - RNA, 22 nt, Human
aacugauuuuuuuuuccuucag

SEQ ID NO: 3331018 - RNA, 16 nt, Human
aacugcauuggcuuug

SEQ ID NO: 3331019 - RNA, 19 nt, Human
gugacaugucuuuucuugc

SEQ ID NO: 3331020 - RNA, 16 nt, Human
gugagacucugucuca

SEQ ID NO: 3331021 - RNA, 14 nt, Human
gugagacucugucu

SEQ ID NO: 3331022 - RNA, 22 nt, Human
gugagacccugucucaaaaaaa

SEQ ID NO: 3331023 - RNA, 22 nt, Human
gugacagagugagacucugucu

SEQ ID NO: 3331024 - RNA, 20 nt, Human
gugacagagugagacucugu

SEQ ID NO: 3331025 - RNA, 23 nt, Human
gugacagaggcagccccauucug

SEQ ID NO: 3331026 - RNA, 14 nt, Human
gugacaugucuuuu

SEQ ID NO: 3331027 - RNA, 23 nt, Human
gugaauaauacaguaucucaggg

SEQ ID NO: 3331028 - RNA, 14 nt, Human
gucuaccugagggg

SEQ ID NO: 3331029 - RNA, 13 nt, Human
gucuaccugaggg

SEQ ID NO: 3331030 - RNA, 15 nt, Human
gucuaccugaggggc

SEQ ID NO: 3331031 - RNA, 16 nt, Human
gucuaccugaggggcc

SEQ ID NO: 3331032 - RNA, 22 nt, Human
gucuaugggacucaaugcacug

SEQ ID NO: 3331033 - RNA, 15 nt, Human
gucuaugggacucaa

SEQ ID NO: 3331034 - RNA, 16 nt, Human
gucgaggacagggagg

SEQ ID NO: 3331035 - RNA, 12 nt, Human
gucgaggcagga

SEQ ID NO: 3331036 - RNA, 19 nt, Human
guccugcugcaguugccag

SEQ ID NO: 3331037 - RNA, 17 nt, Human
guccugcugcaguugcc

SEQ ID NO: 3331038 - RNA, 16 nt, Human
guccuggcaugggaau

SEQ ID NO: 3331039 - RNA, 14 nt, Human
guccucuuuucuga

SEQ ID NO: 3331040 - RNA, 23 nt, Human
aacauguaauuaaguacuaugua

SEQ ID NO: 3331041 - RNA, 12 nt, Human
aacauuggauua

SEQ ID NO: 3331042 - RNA, 16 nt, Human
aacauuggauuauccu

SEQ ID NO: 3331043 - RNA, 21 nt, Human
guccggucccugucccagugc

SEQ ID NO: 3331044 - RNA, 18 nt, Human
aacaguccauugaaaggg

SEQ ID NO: 3331045 - RNA, 21 nt, Human
aacacucacauuuauucugcu

SEQ ID NO: 3331046 - RNA, 17 nt, Human
gucauuugagcagggcu

SEQ ID NO: 3331047 - RNA, 17 nt, Human
aacacuguucucugccc

SEQ ID NO: 3331048 - RNA, 18 nt, Human
aacacuguucucugcccu

SEQ ID NO: 3331049 - RNA, 16 nt, Human
aacacuguucucugcc

SEQ ID NO: 3331050 - RNA, 19 nt, Human
aacacaaacgggcucagca

SEQ ID NO: 3331051 - RNA, 19 nt, Human
aaauuucuaaaucuccaaa

SEQ ID NO: 3331052 - RNA, 19 nt, Human
gucccugguggcagcucac

SEQ ID NO: 3331053 - RNA, 18 nt, Human
gucccugguggcagcuca

SEQ ID NO: 3331054 - RNA, 18 nt, Human
gucccuuacgugaguccu

SEQ ID NO: 3331055 - RNA, 19 nt, Human
gucccuuacgugaguccug

SEQ ID NO: 3331056 - RNA, 18 nt, Human
guccccuguuuguuucug

SEQ ID NO: 3331057 - RNA, 22 nt, Human
guccccaccgcagacaggacca

SEQ ID NO: 3331058 - RNA, 18 nt, Human
guccccaccgcagacagg

SEQ ID NO: 3331059 - RNA, 17 nt, Human
guccccaccgcagacag

SEQ ID NO: 3331060 - RNA, 15 nt, Human
gucccaccccacaca

SEQ ID NO: 3331061 - RNA, 21 nt, Human
aaaugucucuuuaaugucaca

SEQ ID NO: 3331062 - RNA, 24 nt, Human
aaaugucuaguuguaacaccauga

SEQ ID NO: 3331063 - RNA, 18 nt, Human
guauucucuccuguaccu

SEQ ID NO: 3331064 - RNA, 13 nt, Human
aaauuucuaaauc

SEQ ID NO: 3331065 - RNA, 15 nt, Human
aaauuucuaaaucuc

SEQ ID NO: 3331066 - RNA, 12 nt, Human
aaauuucuaaau

SEQ ID NO: 3331067 - RNA, 22 nt, Human
gucagguggggcagcuugaggg

SEQ ID NO: 3331068 - RNA, 18 nt, Human
gucagguggggcagcuug

SEQ ID NO: 3331069 - RNA, 17 nt, Human
gucagguggggcagcuu

SEQ ID NO: 3331070 - RNA, 16 nt, Human
gucagguggggcagcu

SEQ ID NO: 3331071 - RNA, 15 nt, Human
gucacugcuuaacuu

SEQ ID NO: 3331072 - RNA, 21 nt, Human
gucacugcuuaacuucacaua

SEQ ID NO: 3331073 - RNA, 21 nt, Human
gucagaaguuucugccgcagc

SEQ ID NO: 3331074 - RNA, 10 nt, Human
gucacugcuu

SEQ ID NO: 3331075 - RNA, 17 nt, Human
gucacugagacagcccg

SEQ ID NO: 3331076 - RNA, 18 nt, Human
gucacugagacagcccgg

SEQ ID NO: 3331077 - RNA, 21 nt, Human
gucacugagacagcccgggcu

SEQ ID NO: 3331078 - RNA, 23 nt, Human
gucacugagacagcccgggcucu

SEQ ID NO: 3331079 - RNA, 22 nt, Human
gucacucuggcagcucagagag

SEQ ID NO: 3331080 - RNA, 14 nt, Human
gucacugagacagc

SEQ ID NO: 3331081 - RNA, 15 nt, Human
gucacugagacagcc

SEQ ID NO: 3331082 - RNA, 16 nt, Human
gucacugagacagccc

SEQ ID NO: 3331083 - RNA, 23 nt, Human
gucacucuggcagcucagagagg

SEQ ID NO: 3331084 - RNA, 15 nt, Human
gucaccaagcccagu

SEQ ID NO: 3331085 - RNA, 12 nt, Human
gucaccaagccc

SEQ ID NO: 3331086 - RNA, 22 nt, Human
gucaccaaaucagcugcuacua

SEQ ID NO: 3331087 - RNA, 22 nt, Human
gucaauuacaggaaguacugga

SEQ ID NO: 3331088 - RNA, 16 nt, Human
gucaauuacaggaagu

SEQ ID NO: 3331089 - RNA, 22 nt, Human
cacagcuucauuuccugugucu

SEQ ID NO: 3331090 - RNA, 21 nt, Human
cacagcuucauuuccuguguc

SEQ ID NO: 3331091 - RNA, 22 nt, Human
cacagcugggguggggaccuca

SEQ ID NO: 3331092 - RNA, 23 nt, Human
cacagcugggguggggaccucag

SEQ ID NO: 3331093 - RNA, 15 nt, Human
cacaggcagguccag

SEQ ID NO: 3331094 - RNA, 14 nt, Human
cacaggcaggucca

SEQ ID NO: 3331095 - RNA, 11 nt, Human
cacaggcaggu

SEQ ID NO: 3331096 - RNA, 13 nt, Human
cacaguccuuacc

SEQ ID NO: 3331097 - RNA, 15 nt, Human
cacaguccuuaccag

SEQ ID NO: 3331098 - RNA, 21 nt, Human
cacaguccuuaccagcagagc

SEQ ID NO: 3331099 - RNA, 21 nt, Human
cacagugagucgaggacaggg

SEQ ID NO: 3331100 - RNA, 22 nt, Human
cacagugagucgaggacaggga

SEQ ID NO: 3331101 - RNA, 15 nt, Human
cacaguucucuccuu

SEQ ID NO: 3331102 - RNA, 14 nt, Human
cacaguucucuccu

SEQ ID NO: 3331103 - RNA, 14 nt, Human
cacauaucugucau

SEQ ID NO: 3331104 - RNA, 16 nt, Human
caagagcccaggccuc

SEQ ID NO: 3331105 - RNA, 17 nt, Human
caagcaccuccugccuc

SEQ ID NO: 3331106 - RNA, 16 nt, Human
caagcaccuccugccu

SEQ ID NO: 3331107 - RNA, 15 nt, Human
caagcaccuccugcc

SEQ ID NO: 3331108 - RNA, 18 nt, Human
caagacucuuuggacacu

SEQ ID NO: 3331109 - RNA, 13 nt, Human
caagagcccaggc

SEQ ID NO: 3331110 - RNA, 14 nt, Human
caagagcccaggcc

SEQ ID NO: 3331111 - RNA, 15 nt, Human
caagagcccaggccu

SEQ ID NO: 3331112 - RNA, 23 nt, Human
caagacgcugugcugcccugccc

SEQ ID NO: 3331113 - RNA, 15 nt, Human
caagacgcugugcug

SEQ ID NO: 3331114 - RNA, 18 nt, Human
caagacgcugugcugccc

SEQ ID NO: 3331115 - RNA, 17 nt, Human
caagaccuucuccuuca

SEQ ID NO: 3331116 - RNA, 18 nt, Human
caagaccuucuccuucac

SEQ ID NO: 3331117 - RNA, 16 nt, Human
caagacgcugugcugc

SEQ ID NO: 3331118 - RNA, 17 nt, Human
caagacgcugugcugcc

SEQ ID NO: 3331119 - RNA, 14 nt, Human
caagaccuucuccu

SEQ ID NO: 3331120 - RNA, 16 nt, Human
caagaccuucuccuuc

SEQ ID NO: 3331121 - RNA, 20 nt, Human
caagaacuuuccaggaaggc

SEQ ID NO: 3331122 - RNA, 13 nt, Human
caacgucugugcc

SEQ ID NO: 3331123 - RNA, 14 nt, Human
caacgucugugcca

SEQ ID NO: 3331124 - RNA, 15 nt, Human
caaccuccugggcua

SEQ ID NO: 3331125 - RNA, 14 nt, Human
caaccuccugggcu

SEQ ID NO: 3331126 - RNA, 20 nt, Human
caacacucauugaccugagg

SEQ ID NO: 3331127 - RNA, 22 nt, Human
caacacucauugaccugaggcc

SEQ ID NO: 3331128 - RNA, 18 nt, Human
caacacucauugaccuga

SEQ ID NO: 3331129 - RNA, 22 nt, Human
caacacucacauuuauucugcu

SEQ ID NO: 3331130 - RNA, 22 nt, Human
caaccccuucgcuccugugucu

SEQ ID NO: 3331131 - RNA, 18 nt, Human
caaggggcccaaauucuu

SEQ ID NO: 3331132 - RNA, 17 nt, Human
caaggggcccaaauucu

SEQ ID NO: 3331133 - RNA, 12 nt, Human
caaggcugcagu

SEQ ID NO: 3331134 - RNA, 23 nt, Human
caaggcugucaauuacaggaagu

SEQ ID NO: 3331135 - RNA, 21 nt, Human
caaggcugucaauuacaggaa

SEQ ID NO: 3331136 - RNA, 14 nt, Human
caaguccucuuuuc

SEQ ID NO: 3331137 - RNA, 14 nt, Human
caaggucauuuuuu

SEQ ID NO: 3331138 - RNA, 20 nt, Human
caaggucauuuuuuuuaaga

SEQ ID NO: 3331139 - RNA, 13 nt, Human
caaggucauuuuu

SEQ ID NO: 3331140 - RNA, 14 nt, Human
caaguuaaauaaau

SEQ ID NO: 3331141 - RNA, 17 nt, Human
caagugagagcugggug

SEQ ID NO: 3331142 - RNA, 15 nt, Human
caagugagagcuggg

SEQ ID NO: 3331143 - RNA, 14 nt, Human
caagugagagcugg

SEQ ID NO: 3331144 - RNA, 21 nt, Human
caaguccucuuuucugagagg

SEQ ID NO: 3331145 - RNA, 19 nt, Human
caagugagacccugucuca

SEQ ID NO: 3331146 - RNA, 18 nt, Human
caagugagagcugggugu

SEQ ID NO: 3331147 - RNA, 19 nt, Human
caagcgauucuucugcuuc

SEQ ID NO: 3331148 - RNA, 22 nt, Human
caagcgauucuucugcuucagc

SEQ ID NO: 3331149 - RNA, 20 nt, Human
caagcgauucuucugcuuca

SEQ ID NO: 3331150 - RNA, 14 nt, Human
caagcaccuccugc

SEQ ID NO: 3331151 - RNA, 14 nt, Human
caagcaggacaugg

SEQ ID NO: 3331152 - RNA, 18 nt, Human
caagcaggacauggacaa

SEQ ID NO: 3331153 - RNA, 22 nt, Human
caagccaccaacauacucccau

SEQ ID NO: 3331154 - RNA, 19 nt, Human
caagcuggucccacucagu

SEQ ID NO: 3331155 - RNA, 17 nt, Human
caagcuggucccacuca

SEQ ID NO: 3331156 - RNA, 17 nt, Human
caauauucgcuguguca

SEQ ID NO: 3331157 - RNA, 17 nt, Human
caaugacuuacuguaca

SEQ ID NO: 3331158 - RNA, 18 nt, Human
caaugacuuacuguacau

SEQ ID NO: 3331159 - RNA, 15 nt, Human
caaugacuuacugua

SEQ ID NO: 3331160 - RNA, 21 nt, Human
caaugaccuuucaauaggaaa

SEQ ID NO: 3331161 - RNA, 23 nt, Human
caaugaccuuucaauaggaaaaa

SEQ ID NO: 3331162 - RNA, 12 nt, Human
caauaggaaaaa

SEQ ID NO: 3331163 - RNA, 13 nt, Human
caauaggaaaaac

SEQ ID NO: 3331164 - RNA, 15 nt, Human
caaugugauaaaacc

SEQ ID NO: 3331165 - RNA, 17 nt, Human
caaugugauaaaacccc

SEQ ID NO: 3331166 - RNA, 16 nt, Human
caauuacaggaaguac

SEQ ID NO: 3331167 - RNA, 23 nt, Human
caauucucauuugucacacacuu

SEQ ID NO: 3331168 - RNA, 20 nt, Human
caaugcacuuuguucuggcu

SEQ ID NO: 3331169 - RNA, 21 nt, Human
caaugcacuuuguucuggcuc

SEQ ID NO: 3331170 - RNA, 15 nt, Human
caaugggagcucaug

SEQ ID NO: 3331171 - RNA, 14 nt, Human
caaugcacuuuguu

SEQ ID NO: 3331172 - RNA, 17 nt, Human
caaugcacuuuguucug

SEQ ID NO: 3331173 - RNA, 12 nt, Human
caaauuucuaaa

SEQ ID NO: 3331174 - RNA, 11 nt, Human
caaauuucuaa

SEQ ID NO: 3331175 - RNA, 19 nt, Human
caaagugcugggauuacag

SEQ ID NO: 3331176 - RNA, 23 nt, Human
caaagugcugggauuacaggugu

SEQ ID NO: 3331177 - RNA, 14 nt, Human
caaacccuucagug

SEQ ID NO: 3331178 - RNA, 20 nt, Human
caaacccuucagugccaaaa

SEQ ID NO: 3331179 - RNA, 15 nt, Human
caaacacauacagga

SEQ ID NO: 3331180 - RNA, 12 nt, Human
caaaauaaaacu

SEQ ID NO: 3331181 - RNA, 15 nt, Human
caaaauguaggguua

SEQ ID NO: 3331182 - RNA, 17 nt, Human
caaagccuccuccagcc

SEQ ID NO: 3331183 - RNA, 18 nt, Human
caaagccuccuccagccg

SEQ ID NO: 3331184 - RNA, 22 nt, Human
caaagccaaagcuaggccuggc

SEQ ID NO: 3331185 - RNA, 17 nt, Human
caaacucaccugccccu

SEQ ID NO: 3331186 - RNA, 18 nt, Human
caaaggguaucaggugcu

SEQ ID NO: 3331187 - RNA, 16 nt, Human
caaaggguaucaggug

SEQ ID NO: 3331188 - RNA, 14 nt, Human
caaaggaagcacau

SEQ ID NO: 3331189 - RNA, 18 nt, Human
caaagcuaggccuggcca

SEQ ID NO: 3331190 - RNA, 19 nt, Human
caaagcuaggccuggccag

SEQ ID NO: 3331191 - RNA, 14 nt, Human
caaagcuaggccug

SEQ ID NO: 3331192 - RNA, 13 nt, Human
caaagcuaggccu

SEQ ID NO: 3331193 - RNA, 12 nt, Human
caaaggaagcac

SEQ ID NO: 3331194 - RNA, 13 nt, Human
caaaggaagcaca

SEQ ID NO: 3331195 - RNA, 13 nt, Human
caaaaaggcagga

SEQ ID NO: 3331196 - RNA, 20 nt, Human
caaaaacauggccuuugcuu

SEQ ID NO: 3331197 - RNA, 16 nt, Human
caaaaaaugcuugcuu

SEQ ID NO: 3331198 - RNA, 23 nt, Human
auuuugggguacccacugcucug

SEQ ID NO: 3331199 - RNA, 22 nt, Human
auuuugggguacccacugcucu

SEQ ID NO: 3331200 - RNA, 21 nt, Human
auuuugggguacccacugcuc

SEQ ID NO: 3331201 - RNA, 19 nt, Human
caaaacucuccucugcugc

SEQ ID NO: 3331202 - RNA, 22 nt, Human
caaaacacacgcgcgcacacac

SEQ ID NO: 3331203 - RNA, 23 nt, Human
caaaacacacgcgcgcacacaca

SEQ ID NO: 3331204 - RNA, 20 nt, Human
caaaacucuccucugcugcu

SEQ ID NO: 3331205 - RNA, 21 nt, Human
caaaacucuccucugcugcug

SEQ ID NO: 3331206 - RNA, 22 nt, Human
caaaacucuccucugcugcugg

SEQ ID NO: 3331207 - RNA, 17 nt, Human
caaaauaaaaaugaggu

SEQ ID NO: 3331208 - RNA, 13 nt, Human
gggaguggccaca

SEQ ID NO: 3331209 - RNA, 15 nt, Human
gggaguggccacaga

SEQ ID NO: 3331210 - RNA, 12 nt, Human
uauuaaauuaug

SEQ ID NO: 3331211 - RNA, 24 nt, Human
uauuaagaaagacuaucuaaaugu

SEQ ID NO: 3331212 - RNA, 13 nt, Human
uauguugcccagg

SEQ ID NO: 3331213 - RNA, 19 nt, Human
uauguugcccaggcagguc

SEQ ID NO: 3331214 - RNA, 16 nt, Human
uauguugcccaggcag

SEQ ID NO: 3331215 - RNA, 22 nt, Human
uauuguuuucaguguacaugga

SEQ ID NO: 3331216 - RNA, 20 nt, Human
uauuguuuucaguguacaug

SEQ ID NO: 3331217 - RNA, 18 nt, Human
uauuguuuucaguguaca

SEQ ID NO: 3331218 - RNA, 12 nt, Human
uauuguuuucag

SEQ ID NO: 3331219 - RNA, 21 nt, Human
uauugauaugcuuauacacuu

SEQ ID NO: 3331220 - RNA, 17 nt, Human
uauucucuccuguaccu

SEQ ID NO: 3331221 - RNA, 17 nt, Human
uauugcugauggugcaa

SEQ ID NO: 3331222 - RNA, 22 nt, Human
uauuggaaauuuguuauaauga

SEQ ID NO: 3331223 - RNA, 14 nt, Human
uauuuuauuaugca

SEQ ID NO: 3331224 - RNA, 17 nt, Human
uauuuuauuaugcauga

SEQ ID NO: 3331225 - RNA, 14 nt, Human
uauuuuuuuacuaa

SEQ ID NO: 3331226 - RNA, 17 nt, Human
uauuuuuuucuuuucuu

SEQ ID NO: 3331227 - RNA, 14 nt, Human
ucaaaaaaagaaaa

SEQ ID NO: 3331228 - RNA, 15 nt, Human
ucaaaaaaagaaaaa

SEQ ID NO: 3331229 - RNA, 22 nt, Human
uauuuucccuauuagagaagag

SEQ ID NO: 3331230 - RNA, 23 nt, Human
ucaaccccuucgcuccugugucu

SEQ ID NO: 3331231 - RNA, 20 nt, Human
ucaaccccuucgcuccugug

SEQ ID NO: 3331232 - RNA, 20 nt, Human
ucaagugauucuccugccuc

SEQ ID NO: 3331233 - RNA, 18 nt, Human
ucaagugauucuccugcc

SEQ ID NO: 3331234 - RNA, 21 nt, Human
ucaauuacaggaaguacugga

SEQ ID NO: 3331235 - RNA, 23 nt, Human
ucaauuacaggaaguacuggaga

SEQ ID NO: 3331236 - RNA, 17 nt, Human
ucacauuuauucugcuc

SEQ ID NO: 3331237 - RNA, 19 nt, Human
ucacauuuauucugcucac

SEQ ID NO: 3331238 - RNA, 18 nt, Human
ucacauuuauucugcuca

SEQ ID NO: 3331239 - RNA, 20 nt, Human
ucaccaaaucagcugcuacu

SEQ ID NO: 3331240 - RNA, 19 nt, Human
ucaccaaaucagcugcuac

SEQ ID NO: 3331241 - RNA, 13 nt, Human
ucaccaagcccag

SEQ ID NO: 3331242 - RNA, 18 nt, Human
ucacaggcagguccaggg

SEQ ID NO: 3331243 - RNA, 17 nt, Human
ucacaggcagguccagg

SEQ ID NO: 3331244 - RNA, 16 nt, Human
ucacaggcagguccag

SEQ ID NO: 3331245 - RNA, 22 nt, Human
ucacaguccuuaccagcagagc

SEQ ID NO: 3331246 - RNA, 23 nt, Human
ucacaguccuuaccagcagagca

SEQ ID NO: 3331247 - RNA, 19 nt, Human
ucacaguccuuaccagcag

SEQ ID NO: 3331248 - RNA, 20 nt, Human
ucaauuacaggaaguacugg

SEQ ID NO: 3331249 - RNA, 19 nt, Human
ucagccucccaaagugcug

SEQ ID NO: 3331250 - RNA, 14 nt, Human
ucagccucccaaag

SEQ ID NO: 3331251 - RNA, 13 nt, Human
ucagccucccaaa

SEQ ID NO: 3331252 - RNA, 22 nt, Human
ucagccucccgaauagcuggga

SEQ ID NO: 3331253 - RNA, 21 nt, Human
ucagccucccgaauagcuggg

SEQ ID NO: 3331254 - RNA, 18 nt, Human
ucagccucccgaguagcu

SEQ ID NO: 3331255 - RNA, 20 nt, Human
ucagccucccgaguagcugg

SEQ ID NO: 3331256 - RNA, 22 nt, Human
ucagccucccgaguagcuggga

SEQ ID NO: 3331257 - RNA, 21 nt, Human
ucagccucccgaguagcuggg

SEQ ID NO: 3331258 - RNA, 20 nt, Human
ucagccucccgaauagcugg

SEQ ID NO: 3331259 - RNA, 18 nt, Human
ucagccugcuccagcugu

SEQ ID NO: 3331260 - RNA, 19 nt, Human
ucagccugcuccagcuguu

SEQ ID NO: 3331261 - RNA, 15 nt, Human
ucagcugaaccuggg

SEQ ID NO: 3331262 - RNA, 16 nt, Human
ucagcugaaccugggu

SEQ ID NO: 3331263 - RNA, 15 nt, Human
ucaggugagaagcag

SEQ ID NO: 3331264 - RNA, 16 nt, Human
ucaggugagaagcaga

SEQ ID NO: 3331265 - RNA, 14 nt, Human
ucagggccuggcuc

SEQ ID NO: 3331266 - RNA, 16 nt, Human
ucagggccuggcucag

SEQ ID NO: 3331267 - RNA, 18 nt, Human
ucacugccaugccagcuu

SEQ ID NO: 3331268 - RNA, 20 nt, Human
ucacucuuauugcccacgcu

SEQ ID NO: 3331269 - RNA, 22 nt, Human
ucaccccggccaccugcggugc

SEQ ID NO: 3331270 - RNA, 13 nt, Human
ucaccagccccag

SEQ ID NO: 3331271 - RNA, 22 nt, Human
ucacucugucgcccagucugga

SEQ ID NO: 3331272 - RNA, 17 nt, Human
ucacucuuauugcccac

SEQ ID NO: 3331273 - RNA, 20 nt, Human
ucacugcuuaacuucacaua

SEQ ID NO: 3331274 - RNA, 14 nt, Human
ucacugcuuaacuu

SEQ ID NO: 3331275 - RNA, 23 nt, Human
ucagaauucucuaguuugauuaa

SEQ ID NO: 3331276 - RNA, 15 nt, Human
ucagaaauguguuau

SEQ ID NO: 3331277 - RNA, 16 nt, Human
ucagaauucucuaguu

SEQ ID NO: 3331278 - RNA, 10 nt, Human
ucagaaaugu

SEQ ID NO: 3331279 - RNA, 13 nt, Human
ucagacagcugcc

SEQ ID NO: 3331280 - RNA, 16 nt, Human
ucauuuccugugucuu

SEQ ID NO: 3331281 - RNA, 13 nt, Human
ucauuuccugugu

SEQ ID NO: 3331282 - RNA, 22 nt, Human
ucauuaggugugacugaauuuc

SEQ ID NO: 3331283 - RNA, 21 nt, Human
ucauucaacccaccugcgucu

SEQ ID NO: 3331284 - RNA, 23 nt, Human
ucaucuuagguuggcaaaaaggc

SEQ ID NO: 3331285 - RNA, 21 nt, Human
ucaggugagaagcagaggaag

SEQ ID NO: 3331286 - RNA, 23 nt, Human
ucaggugccucaagagaaggcaa

SEQ ID NO: 3331287 - RNA, 14 nt, Human
ucaggugcugccau

SEQ ID NO: 3331288 - RNA, 13 nt, Human
ucaggugcugcca

SEQ ID NO: 3331289 - RNA, 21 nt, Human
ucauacccacccccacccaag

SEQ ID NO: 3331290 - RNA, 19 nt, Human
ucaucaccaacgucugugc

SEQ ID NO: 3331291 - RNA, 20 nt, Human
ucaucaccaacgucugugcc

SEQ ID NO: 3331292 - RNA, 21 nt, Human
ucaucaccaacgucugugcca

SEQ ID NO: 3331293 - RNA, 17 nt, Human
uccaccugccagggaca

SEQ ID NO: 3331294 - RNA, 15 nt, Human
uccaccugccaggga

SEQ ID NO: 3331295 - RNA, 18 nt, Human
uccaccugccagggacag

SEQ ID NO: 3331296 - RNA, 21 nt, Human
uccaccugccagggacagagg

SEQ ID NO: 3331297 - RNA, 12 nt, Human
uccacccugcuc

SEQ ID NO: 3331298 - RNA, 16 nt, Human
uccacaagagcccagg

SEQ ID NO: 3331299 - RNA, 17 nt, Human
uccacaagagcccaggc

SEQ ID NO: 3331300 - RNA, 18 nt, Human
uccacaagagcccaggcc

SEQ ID NO: 3331301 - RNA, 15 nt, Human
uccacaagagcccag

SEQ ID NO: 3331302 - RNA, 18 nt, Human
uccacaaguuaaauaaau

SEQ ID NO: 3331303 - RNA, 17 nt, Human
uccacaaguuaaauaaa

SEQ ID NO: 3331304 - RNA, 18 nt, Human
uccaauuuacauacucug

SEQ ID NO: 3331305 - RNA, 17 nt, Human
uccaauuuacauacucu

SEQ ID NO: 3331306 - RNA, 20 nt, Human
uccaaaauaaaacuuuuuaa

SEQ ID NO: 3331307 - RNA, 18 nt, Human
uccaaaauaaaacuuuuu

SEQ ID NO: 3331308 - RNA, 16 nt, Human
uccagguucagcuugu

SEQ ID NO: 3331309 - RNA, 15 nt, Human
uccagguucagcuug

SEQ ID NO: 3331310 - RNA, 18 nt, Human
uccaggugcacaagcucc

SEQ ID NO: 3331311 - RNA, 20 nt, Human
uccaggugcacaagcuccaa

SEQ ID NO: 3331312 - RNA, 21 nt, Human
uccaggugcacaagcuccaag

SEQ ID NO: 3331313 - RNA, 22 nt, Human
uccaggugcacaagcuccaagc

SEQ ID NO: 3331314 - RNA, 23 nt, Human
uccaggggugggacacccuguga

SEQ ID NO: 3331315 - RNA, 15 nt, Human
uccaggugcacaagc

SEQ ID NO: 3331316 - RNA, 17 nt, Human
uccaggagcagccacau

SEQ ID NO: 3331317 - RNA, 18 nt, Human
uccaggagcagccacauu

SEQ ID NO: 3331318 - RNA, 22 nt, Human
uccaggggugggacacccugug

SEQ ID NO: 3331319 - RNA, 17 nt, Human
uccagcucaccagcccc

SEQ ID NO: 3331320 - RNA, 16 nt, Human
uccagcucaccagccc

SEQ ID NO: 3331321 - RNA, 15 nt, Human
uccagcucaccagcc

SEQ ID NO: 3331322 - RNA, 17 nt, Human
uccagcuguucagcugg

SEQ ID NO: 3331323 - RNA, 16 nt, Human
uccaggagcagccaca

SEQ ID NO: 3331324 - RNA, 23 nt, Human
uccagccaaagccuccuccagcc

SEQ ID NO: 3331325 - RNA, 12 nt, Human
ucuugaacuccu

SEQ ID NO: 3331326 - RNA, 15 nt, Human
ucuucuccaggcugu

SEQ ID NO: 3331327 - RNA, 15 nt, Human
ucuucagaucucuaa

SEQ ID NO: 3331328 - RNA, 18 nt, Human
ucuucagaucucuaacuu

SEQ ID NO: 3331329 - RNA, 23 nt, Human
ucuucagaucucuaacuucacca

SEQ ID NO: 3331330 - RNA, 22 nt, Human
ucuuaaauauguggaguucauc

SEQ ID NO: 3331331 - RNA, 22 nt, Human
ucugcugacagacacaggcccg

SEQ ID NO: 3331332 - RNA, 21 nt, Human
ucugcugacagacacaggccc

SEQ ID NO: 3331333 - RNA, 20 nt, Human
ucugcugacagacacaggcc

SEQ ID NO: 3331334 - RNA, 19 nt, Human
ucugcugacagacacaggc

SEQ ID NO: 3331335 - RNA, 19 nt, Human
ucuggaauaaggagaauga

SEQ ID NO: 3331336 - RNA, 15 nt, Human
ucuggaaugcagugg

SEQ ID NO: 3331337 - RNA, 14 nt, Human
ucuggacaggcaug

SEQ ID NO: 3331338 - RNA, 21 nt, Human
ucuggacaggcauguucucug

SEQ ID NO: 3331339 - RNA, 17 nt, Human
ucugcugacagacacag

SEQ ID NO: 3331340 - RNA, 18 nt, Human
ucugcugacagacacagg

SEQ ID NO: 3331341 - RNA, 18 nt, Human
ucugcuccucuccccagc

SEQ ID NO: 3331342 - RNA, 15 nt, Human
ucugccugcccaggc

SEQ ID NO: 3331343 - RNA, 13 nt, Human
ucugccugcccag

SEQ ID NO: 3331344 - RNA, 14 nt, Human
ucugccugcccagg

SEQ ID NO: 3331345 - RNA, 14 nt, Human
ucugucgcccaguc

SEQ ID NO: 3331346 - RNA, 19 nt, Human
ucuguccuacucuguguca

SEQ ID NO: 3331347 - RNA, 15 nt, Human
ucuguccuacucugu

SEQ ID NO: 3331348 - RNA, 21 nt, Human
ucuguccugggagugagcugg

SEQ ID NO: 3331349 - RNA, 16 nt, Human
ucuggugacuuuccuc

SEQ ID NO: 3331350 - RNA, 14 nt, Human
ucuguccuacucug

SEQ ID NO: 3331351 - RNA, 18 nt, Human
ucuggcucuuccaggcug

SEQ ID NO: 3331352 - RNA, 23 nt, Human
ucuggcucuuccaggcugggaga

SEQ ID NO: 3331353 - RNA, 23 nt, Human
ucuggugacuuuccucuuugguc

SEQ ID NO: 3331354 - RNA, 13 nt, Human
ucugggacacagu

SEQ ID NO: 3331355 - RNA, 14 nt, Human
ucugggacacaguu

SEQ ID NO: 3331356 - RNA, 19 nt, Human
ucuggcuaugcauuugaaa

SEQ ID NO: 3331357 - RNA, 22 nt, Human
ucuggcuaugcauuugaaaauu

SEQ ID NO: 3331358 - RNA, 17 nt, Human
ucuggcuaugcauuuga

SEQ ID NO: 3331359 - RNA, 13 nt, Human
ucugacccacugc

SEQ ID NO: 3331360 - RNA, 22 nt, Human
ucugacaggcaaugcuggcugu

SEQ ID NO: 3331361 - RNA, 21 nt, Human
ucugacaggcaaugcuggcug

SEQ ID NO: 3331362 - RNA, 12 nt, Human
ucugacaggcaa

SEQ ID NO: 3331363 - RNA, 19 nt, Human
ucugacacacagcucuguc

SEQ ID NO: 3331364 - RNA, 18 nt, Human
ucugacacacagcucugu

SEQ ID NO: 3331365 - RNA, 17 nt, Human
ucugacacacagcucug

SEQ ID NO: 3331366 - RNA, 16 nt, Human
ucugacacacagcucu

SEQ ID NO: 3331367 - RNA, 13 nt, Human
ucugaaaauguau

SEQ ID NO: 3331368 - RNA, 23 nt, Human
ucugaggaauccagacccggcug

SEQ ID NO: 3331369 - RNA, 14 nt, Human
ucugacccacugcu

SEQ ID NO: 3331370 - RNA, 20 nt, Human
ucugcaagaauugaagcagg

SEQ ID NO: 3331371 - RNA, 15 nt, Human
ucuccuguaccucuu

SEQ ID NO: 3331372 - RNA, 21 nt, Human
ucuccuggaaauauuaagaaa

SEQ ID NO: 3331373 - RNA, 15 nt, Human
ucuccugccucagcc

SEQ ID NO: 3331374 - RNA, 17 nt, Human
ucuccugccucagccuc

SEQ ID NO: 3331375 - RNA, 14 nt, Human
ucucgugauugaua

SEQ ID NO: 3331376 - RNA, 22 nt, Human
ucucgugauugauaagaaccuu

SEQ ID NO: 3331377 - RNA, 16 nt, Human
ucuccuguaccucuug

SEQ ID NO: 3331378 - RNA, 17 nt, Human
ucuccuguaccucuuga

SEQ ID NO: 3331379 - RNA, 13 nt, Human
ucuccuguaccuc

SEQ ID NO: 3331380 - RNA, 12 nt, Human
ucucuaacuuca

SEQ ID NO: 3331381 - RNA, 19 nt, Human
ucucuaacuucaccauauu

SEQ ID NO: 3331382 - RNA, 17 nt, Human
ucucugaggacacuaac

SEQ ID NO: 3331383 - RNA, 14 nt, Human
ucucugaggacacu

SEQ ID NO: 3331384 - RNA, 15 nt, Human
ucucuaguuugauua

SEQ ID NO: 3331385 - RNA, 16 nt, Human
uccuaaucuucugaac

SEQ ID NO: 3331386 - RNA, 13 nt, Human
uccgaccagacac

SEQ ID NO: 3331387 - RNA, 18 nt, Human
uccuacccacccuccuuu

SEQ ID NO: 3331388 - RNA, 18 nt, Human
uccuauauuguuuucagu

SEQ ID NO: 3331389 - RNA, 22 nt, Human
uccuaguuccaccaucaagcca

SEQ ID NO: 3331390 - RNA, 12 nt, Human
uccucugcugcu

SEQ ID NO: 3331391 - RNA, 14 nt, Human
uccucugcugcugg

SEQ ID NO: 3331392 - RNA, 15 nt, Human
uccucugcugcuggc

SEQ ID NO: 3331393 - RNA, 16 nt, Human
uccucugcugcuggcu

SEQ ID NO: 3331394 - RNA, 16 nt, Human
uccucuguacagagcc

SEQ ID NO: 3331395 - RNA, 17 nt, Human
uccucuguacagagccc

SEQ ID NO: 3331396 - RNA, 18 nt, Human
uccucuguacagagccca

SEQ ID NO: 3331397 - RNA, 15 nt, Human
uccucuguacagagc

SEQ ID NO: 3331398 - RNA, 14 nt, Human
uccucuaggagguc

SEQ ID NO: 3331399 - RNA, 17 nt, Human
uccagguuuaagcuguu

SEQ ID NO: 3331400 - RNA, 18 nt, Human
uccccuguuuguuucuga

SEQ ID NO: 3331401 - RNA, 20 nt, Human
uccccuguuuguuucugaaa

SEQ ID NO: 3331402 - RNA, 21 nt, Human
uccccuguuuguuucugaaag

SEQ ID NO: 3331403 - RNA, 13 nt, Human
ucccugcacuugc

SEQ ID NO: 3331404 - RNA, 14 nt, Human
ucccugcacuugca

SEQ ID NO: 3331405 - RNA, 13 nt, Human
ucccuucccaccu

SEQ ID NO: 3331406 - RNA, 21 nt, Human
ucuaggaagacuuuggaaaga

SEQ ID NO: 3331407 - RNA, 21 nt, Human
ucuaucaaguauuauaccuuu

SEQ ID NO: 3331408 - RNA, 15 nt, Human
ucuaucaaguauuau

SEQ ID NO: 3331409 - RNA, 17 nt, Human
ucucaaauaacuaaaag

SEQ ID NO: 3331410 - RNA, 21 nt, Human
ucuaaaucuccaaaauaaaac

SEQ ID NO: 3331411 - RNA, 16 nt, Human
ucgugauugauaagaa

SEQ ID NO: 3331412 - RNA, 21 nt, Human
uccuucaccuuuguccccacc

SEQ ID NO: 3331413 - RNA, 22 nt, Human
uccuucaccuuuguccccaccg

SEQ ID NO: 3331414 - RNA, 16 nt, Human
uccuuaccagcagagc

SEQ ID NO: 3331415 - RNA, 17 nt, Human
uccuuaccagcagagca

SEQ ID NO: 3331416 - RNA, 18 nt, Human
uccuuaccagcagagcac

SEQ ID NO: 3331417 - RNA, 18 nt, Human
uccuucacagaugggugc

SEQ ID NO: 3331418 - RNA, 18 nt, Human
uccuucaccuuugucccc

SEQ ID NO: 3331419 - RNA, 20 nt, Human
uccuucaccuuuguccccac

SEQ ID NO: 3331420 - RNA, 19 nt, Human
uccuucacagaugggugcu

SEQ ID NO: 3331421 - RNA, 23 nt, Human
uccuuuucacaguucucuccuuc

SEQ ID NO: 3331422 - RNA, 18 nt, Human
uccuggcacugcuuccag

SEQ ID NO: 3331423 - RNA, 22 nt, Human
uccuggcacugcuuccagugag

SEQ ID NO: 3331424 - RNA, 17 nt, Human
uccuggcacugcuucca

SEQ ID NO: 3331425 - RNA, 21 nt, Human
uccuggcacccggccccugcu

SEQ ID NO: 3331426 - RNA, 20 nt, Human
uccuggcacccggccccugc

SEQ ID NO: 3331427 - RNA, 14 nt, Human
uccuuaccagcaga

SEQ ID NO: 3331428 - RNA, 20 nt, Human
uccuguaccucuugagccuu

SEQ ID NO: 3331429 - RNA, 15 nt, Human
uccugccucagccuc

SEQ ID NO: 3331430 - RNA, 13 nt, Human
uccugccucagcc

SEQ ID NO: 3331431 - RNA, 16 nt, Human
uccugccucagccucc

SEQ ID NO: 3331432 - RNA, 19 nt, Human
uccuggcacccggccccug

SEQ ID NO: 3331433 - RNA, 16 nt, Human
uccuggcacccggccc

SEQ ID NO: 3331434 - RNA, 14 nt, Human
uccuggcacccggc

SEQ ID NO: 3331435 - RNA, 13 nt, Human
uccugagccagau

SEQ ID NO: 3331436 - RNA, 14 nt, Human
uccugccucagccu

SEQ ID NO: 3331437 - RNA, 20 nt, Human
ugcaccuggaauauauaacc

SEQ ID NO: 3331438 - RNA, 22 nt, Human
ugcaccuggaauauauaaccag

SEQ ID NO: 3331439 - RNA, 17 nt, Human
ugcaccuggaauauaua

SEQ ID NO: 3331440 - RNA, 19 nt, Human
ugcaccggcuggccuggcc

SEQ ID NO: 3331441 - RNA, 20 nt, Human
ugcaccggcuggccuggccc

SEQ ID NO: 3331442 - RNA, 18 nt, Human
ugcaccggcuggccuggc

SEQ ID NO: 3331443 - RNA, 21 nt, Human
ugcacugacauuguuggccaa

SEQ ID NO: 3331444 - RNA, 18 nt, Human
ugcacugacauuguuggc

SEQ ID NO: 3331445 - RNA, 16 nt, Human
ugcaauggcagccuug

SEQ ID NO: 3331446 - RNA, 15 nt, Human
ugcaauggcagccuu

SEQ ID NO: 3331447 - RNA, 14 nt, Human
ugcaauggcagccu

SEQ ID NO: 3331448 - RNA, 13 nt, Human
ugcaauggcagcc

SEQ ID NO: 3331449 - RNA, 17 nt, Human
ugcaaugaccuuucaau

SEQ ID NO: 3331450 - RNA, 19 nt, Human
ugcaaugaccuuucaauag

SEQ ID NO: 3331451 - RNA, 22 nt, Human
ugcaaugaccuuucaauaggaa

SEQ ID NO: 3331452 - RNA, 23 nt, Human
ugcaaugaccuuucaauaggaaa

SEQ ID NO: 3331453 - RNA, 13 nt, Human
ugcaaugaccuuu

SEQ ID NO: 3331454 - RNA, 16 nt, Human
ugcaaugaccuuucaa

SEQ ID NO: 3331455 - RNA, 17 nt, Human
ugcacaaacagaggccg

SEQ ID NO: 3331456 - RNA, 19 nt, Human
ugcacaaacagaggccgcc

SEQ ID NO: 3331457 - RNA, 20 nt, Human
ugcacaaacagaggccgcca

SEQ ID NO: 3331458 - RNA, 18 nt, Human
ugcacagaguuguuacau

SEQ ID NO: 3331459 - RNA, 19 nt, Human
ugcacagaguuguuacauu

SEQ ID NO: 3331460 - RNA, 17 nt, Human
ugcacagaguuguuaca

SEQ ID NO: 3331461 - RNA, 15 nt, Human
ugcacaaacagaggc

SEQ ID NO: 3331462 - RNA, 16 nt, Human
ugcacaaacagaggcc

SEQ ID NO: 3331463 - RNA, 22 nt, Human
ugcaaccugauugugucucuug

SEQ ID NO: 3331464 - RNA, 21 nt, Human
ugcaaccuccgccucuugggu

SEQ ID NO: 3331465 - RNA, 20 nt, Human
ugcaaccuccgccucuuggg

SEQ ID NO: 3331466 - RNA, 18 nt, Human
ugcaaccuccgccucuug

SEQ ID NO: 3331467 - RNA, 19 nt, Human
ugcaaccugauugugucuc

SEQ ID NO: 3331468 - RNA, 20 nt, Human
ugcaaccugauugugucucu

SEQ ID NO: 3331469 - RNA, 14 nt, Human
ugcaaccuccgccu

SEQ ID NO: 3331470 - RNA, 13 nt, Human
ugcaaccuccgcc

SEQ ID NO: 3331471 - RNA, 20 nt, Human
ugcaacaggcugggcuucag

SEQ ID NO: 3331472 - RNA, 19 nt, Human
ugcaacaggcugggcuuca

SEQ ID NO: 3331473 - RNA, 17 nt, Human
ugcaacaggcugggcuu

SEQ ID NO: 3331474 - RNA, 16 nt, Human
ugcaacaggcugggcu

SEQ ID NO: 3331475 - RNA, 15 nt, Human
ugcaacaggcugggc

SEQ ID NO: 3331476 - RNA, 14 nt, Human
ugcaacaggcuggg

SEQ ID NO: 3331477 - RNA, 13 nt, Human
ugcaacaggcugg

SEQ ID NO: 3331478 - RNA, 13 nt, Human
ugauuuucauugc

SEQ ID NO: 3331479 - RNA, 15 nt, Human
ugauuuucauugcug

SEQ ID NO: 3331480 - RNA, 22 nt, Human
ugauuuuuuuuuccuucagugc

SEQ ID NO: 3331481 - RNA, 23 nt, Human
ugauuuuuuuuuccuucagugcc

SEQ ID NO: 3331482 - RNA, 16 nt, Human
ugauuuuuuuuuccuu

SEQ ID NO: 3331483 - RNA, 17 nt, Human
ugauuuuuuuuuccuuc

SEQ ID NO: 3331484 - RNA, 19 nt, Human
ugauuuuuuuuuccuucag

SEQ ID NO: 3331485 - RNA, 20 nt, Human
ugauuuuuuuuuccuucagu

SEQ ID NO: 3331486 - RNA, 16 nt, Human
ugccugguggcagcug

SEQ ID NO: 3331487 - RNA, 19 nt, Human
ugccugguggcagcugcgg

SEQ ID NO: 3331488 - RNA, 18 nt, Human
ugccugguggcagcugcg

SEQ ID NO: 3331489 - RNA, 17 nt, Human
ugccugguggcagcugc

SEQ ID NO: 3331490 - RNA, 21 nt, Human
ugccucuucucuacucuaggg

SEQ ID NO: 3331491 - RNA, 21 nt, Human
ugccuccuuugugaggaagcc

SEQ ID NO: 3331492 - RNA, 20 nt, Human
ugccuccuuugugaggaagc

SEQ ID NO: 3331493 - RNA, 22 nt, Human
ugccuccuuugugaggaagccg

SEQ ID NO: 3331494 - RNA, 13 nt, Human
ugccucugggacu

SEQ ID NO: 3331495 - RNA, 15 nt, Human
ugccgucuaccugag

SEQ ID NO: 3331496 - RNA, 16 nt, Human
ugccgucuaccugagg

SEQ ID NO: 3331497 - RNA, 17 nt, Human
ugccgucuaccugaggg

SEQ ID NO: 3331498 - RNA, 19 nt, Human
ugccgucuaccugaggggc

SEQ ID NO: 3331499 - RNA, 17 nt, Human
ugcccuaaaguguauuu

SEQ ID NO: 3331500 - RNA, 22 nt, Human
ugcccugcccaccuggccucug

SEQ ID NO: 3331501 - RNA, 23 nt, Human
ugcccugcccaccuggccucugc

SEQ ID NO: 3331502 - RNA, 21 nt, Human
ugcccugcccaccuggccucu

SEQ ID NO: 3331503 - RNA, 12 nt, Human
ugcauuaucuag

SEQ ID NO: 3331504 - RNA, 17 nt, Human
ugcauuaucuagauacu

SEQ ID NO: 3331505 - RNA, 15 nt, Human
ugcauguuugugauu

SEQ ID NO: 3331506 - RNA, 19 nt, Human
ugcauguuacauaagauaa

SEQ ID NO: 3331507 - RNA, 12 nt, Human
ugccaggaagcc

SEQ ID NO: 3331508 - RNA, 16 nt, Human
ugccaggaagccagca

SEQ ID NO: 3331509 - RNA, 18 nt, Human
ugccaggaagccagcagg

SEQ ID NO: 3331510 - RNA, 17 nt, Human
ugccagguuuuuggucu

SEQ ID NO: 3331511 - RNA, 15 nt, Human
ugccauccagguuca

SEQ ID NO: 3331512 - RNA, 12 nt, Human
ugccauccaggu

SEQ ID NO: 3331513 - RNA, 21 nt, Human
ugcccacucccugcaaccuga

SEQ ID NO: 3331514 - RNA, 19 nt, Human
ugcccaccuggccucugca

SEQ ID NO: 3331515 - RNA, 18 nt, Human
ugcccacgcuggagugca

SEQ ID NO: 3331516 - RNA, 20 nt, Human
ugcccaccuggccucugcac

SEQ ID NO: 3331517 - RNA, 12 nt, Human
ugccauguuggc

SEQ ID NO: 3331518 - RNA, 15 nt, Human
ugccauguuggccag

SEQ ID NO: 3331519 - RNA, 14 nt, Human
ugccaugugccagg

SEQ ID NO: 3331520 - RNA, 15 nt, Human
ugccaugugccaggu

SEQ ID NO: 3331521 - RNA, 23 nt, Human
ugccaugaggaacaaggcaaggc

SEQ ID NO: 3331522 - RNA, 20 nt, Human
ugccaugaggaacaaggcaa

SEQ ID NO: 3331523 - RNA, 20 nt, Human
ugaggucuguucuuuccaaa

SEQ ID NO: 3331524 - RNA, 14 nt, Human
ugaggucuguucuu

SEQ ID NO: 3331525 - RNA, 15 nt, Human
ugaggucuguucuuu

SEQ ID NO: 3331526 - RNA, 11 nt, Human
ugaggcugggc

SEQ ID NO: 3331527 - RNA, 15 nt, Human
ugaggugcuauguuc

SEQ ID NO: 3331528 - RNA, 16 nt, Human
ugaggugcuauguucu

SEQ ID NO: 3331529 - RNA, 19 nt, Human
ugagguuucaaaccucccu

SEQ ID NO: 3331530 - RNA, 21 nt, Human
ugaguccccuguuuguuucug

SEQ ID NO: 3331531 - RNA, 19 nt, Human
ugaguccuggcaugggaau

SEQ ID NO: 3331532 - RNA, 22 nt, Human
ugaguccuggcaugggaaugaa

SEQ ID NO: 3331533 - RNA, 14 nt, Human
ugagucgaggacag

SEQ ID NO: 3331534 - RNA, 11 nt, Human
ugaguccuggc

SEQ ID NO: 3331535 - RNA, 18 nt, Human
ugaguccuggcaugggaa

SEQ ID NO: 3331536 - RNA, 20 nt, Human
ugaguccccuguuuguuucu

SEQ ID NO: 3331537 - RNA, 17 nt, Human
ugauagcacagacccug

SEQ ID NO: 3331538 - RNA, 18 nt, Human
ugauagcacagacccugc

SEQ ID NO: 3331539 - RNA, 20 nt, Human
ugauagcacagacccugccc

SEQ ID NO: 3331540 - RNA, 21 nt, Human
ugauagcacagacccugcccu

SEQ ID NO: 3331541 - RNA, 14 nt, Human
ugauagcacagacc

SEQ ID NO: 3331542 - RNA, 15 nt, Human
ugauagcacagaccc

SEQ ID NO: 3331543 - RNA, 16 nt, Human
ugauagcacagacccu

SEQ ID NO: 3331544 - RNA, 22 nt, Human
ugauagcacagacccugcccug

SEQ ID NO: 3331545 - RNA, 23 nt, Human
ugauagcacagacccugcccugu

SEQ ID NO: 3331546 - RNA, 21 nt, Human
ugaguugauagcacagacccu

SEQ ID NO: 3331547 - RNA, 23 nt, Human
ugaguugauagcacagacccugc

SEQ ID NO: 3331548 - RNA, 16 nt, Human
ugagucgaggacaggg

SEQ ID NO: 3331549 - RNA, 15 nt, Human
ugagucgaggacagg

SEQ ID NO: 3331550 - RNA, 16 nt, Human
ugaguugauucagcuc

SEQ ID NO: 3331551 - RNA, 19 nt, Human
ugaguugauucagcucugc

SEQ ID NO: 3331552 - RNA, 22 nt, Human
ugaugaucuuugcagacaggca

SEQ ID NO: 3331553 - RNA, 20 nt, Human
ugaugaugaaaugaggucag

SEQ ID NO: 3331554 - RNA, 23 nt, Human
ugaugaucuuugcagacaggcaa

SEQ ID NO: 3331555 - RNA, 14 nt, Human
ugaugccaugagga

SEQ ID NO: 3331556 - RNA, 20 nt, Human
ugaucuuugcagacaggcaa

SEQ ID NO: 3331557 - RNA, 19 nt, Human
ugaucuuugcagacaggca

SEQ ID NO: 3331558 - RNA, 23 nt, Human
ugaucuuugcagacaggcaagca

SEQ ID NO: 3331559 - RNA, 21 nt, Human
ugaucuuugcagacaggcaag

SEQ ID NO: 3331560 - RNA, 18 nt, Human
ugaucuuugcagacaggc

SEQ ID NO: 3331561 - RNA, 18 nt, Human
ugaugcuucuucagagac

SEQ ID NO: 3331562 - RNA, 19 nt, Human
ugaugcuucuucagagacu

SEQ ID NO: 3331563 - RNA, 21 nt, Human
ugaugcuucuucagagacucc

SEQ ID NO: 3331564 - RNA, 22 nt, Human
ugaugcuucuucagagacuccu

SEQ ID NO: 3331565 - RNA, 19 nt, Human
ugauccacccaccucagcc

SEQ ID NO: 3331566 - RNA, 20 nt, Human
ugauccacccaccucagccu

SEQ ID NO: 3331567 - RNA, 15 nt, Human
ugauccacccaccuc

SEQ ID NO: 3331568 - RNA, 21 nt, Human
ugauccaagcuggucccacuc

SEQ ID NO: 3331569 - RNA, 17 nt, Human
ugauccaagcugguccc

SEQ ID NO: 3331570 - RNA, 24 nt, Human
ugaucauccacugugccaugugcc

SEQ ID NO: 3331571 - RNA, 13 nt, Human
ugaucauccacug

SEQ ID NO: 3331572 - RNA, 15 nt, Human
ugaucuaggaagacu

SEQ ID NO: 3331573 - RNA, 17 nt, Human
ugaucucucgugauuga

SEQ ID NO: 3331574 - RNA, 19 nt, Human
ugaucuaggaagacuuugg

SEQ ID NO: 3331575 - RNA, 21 nt, Human
ugaucuaggaagacuuuggaa

SEQ ID NO: 3331576 - RNA, 22 nt, Human
ugauccacccaccucagccucc

SEQ ID NO: 3331577 - RNA, 21 nt, Human
ugauccacccaccucagccuc

SEQ ID NO: 3331578 - RNA, 22 nt, Human
ugaucacggcucacugcagccu

SEQ ID NO: 3331579 - RNA, 21 nt, Human
ugaucacggcucacugcagcc

SEQ ID NO: 3331580 - RNA, 13 nt, Human
ugacgccauccca

SEQ ID NO: 3331581 - RNA, 14 nt, Human
ugacgccaucccag

SEQ ID NO: 3331582 - RNA, 15 nt, Human
ugacgccaucccagc

SEQ ID NO: 3331583 - RNA, 16 nt, Human
ugacgccaucccagcc

SEQ ID NO: 3331584 - RNA, 18 nt, Human
ugaccuuucaauaggaaa

SEQ ID NO: 3331585 - RNA, 22 nt, Human
ugaccuuucaauaggaaaaacu

SEQ ID NO: 3331586 - RNA, 17 nt, Human
ugacgccaucccagccc

SEQ ID NO: 3331587 - RNA, 18 nt, Human
ugacgccaucccagcccc

SEQ ID NO: 3331588 - RNA, 19 nt, Human
ugacgccaucccagcccca

SEQ ID NO: 3331589 - RNA, 20 nt, Human
ugacgccaucccagccccaa

SEQ ID NO: 3331590 - RNA, 14 nt, Human
ugacugaauuucuu

SEQ ID NO: 3331591 - RNA, 15 nt, Human
ugacugaauuucuuu

SEQ ID NO: 3331592 - RNA, 13 nt, Human
ugacugaauuucu

SEQ ID NO: 3331593 - RNA, 18 nt, Human
ugaccucugcagcaauaa

SEQ ID NO: 3331594 - RNA, 21 nt, Human
ugaccucugcagcaauaaagc

SEQ ID NO: 3331595 - RNA, 23 nt, Human
ugaccucugcagcaauaaagcag

SEQ ID NO: 3331596 - RNA, 12 nt, Human
ugaccucugccu

SEQ ID NO: 3331597 - RNA, 15 nt, Human
ugaccuuucaauagg

SEQ ID NO: 3331598 - RNA, 16 nt, Human
ugaccuuucaauagga

SEQ ID NO: 3331599 - RNA, 14 nt, Human
ugaccuuucaauag

SEQ ID NO: 3331600 - RNA, 13 nt, Human
ugaccuuucaaua

SEQ ID NO: 3331601 - RNA, 22 nt, Human
ugaccucaggugauccacccac

SEQ ID NO: 3331602 - RNA, 21 nt, Human
ugaccucaggugauccaccca

SEQ ID NO: 3331603 - RNA, 13 nt, Human
ugaccucugcagc

SEQ ID NO: 3331604 - RNA, 16 nt, Human
ugaccucugcagcaau

SEQ ID NO: 3331605 - RNA, 20 nt, Human
ugaccauucuccaccugcca

SEQ ID NO: 3331606 - RNA, 21 nt, Human
ugaccauucuccaccugccag

SEQ ID NO: 3331607 - RNA, 22 nt, Human
ugaccauucuccaccugccagg

SEQ ID NO: 3331608 - RNA, 19 nt, Human
ugaccauucuccaccugcc

SEQ ID NO: 3331609 - RNA, 12 nt, Human
ugagacucuguc

SEQ ID NO: 3331610 - RNA, 14 nt, Human
ugagacucugucuc

SEQ ID NO: 3331611 - RNA, 13 nt, Human
ugagacucugucu

SEQ ID NO: 3331612 - RNA, 23 nt, Human
ugagaggcauccaguaucuugaa

SEQ ID NO: 3331613 - RNA, 23 nt, Human
ugagacucgcgacaaugcaaacc

SEQ ID NO: 3331614 - RNA, 22 nt, Human
ugagaggcauccaguaucuuga

SEQ ID NO: 3331615 - RNA, 17 nt, Human
ugagaguagagucacug

SEQ ID NO: 3331616 - RNA, 19 nt, Human
ugagaggggaacagacugg

SEQ ID NO: 3331617 - RNA, 15 nt, Human
ugagaucagccuggg

SEQ ID NO: 3331618 - RNA, 12 nt, Human
ugagacccuguc

SEQ ID NO: 3331619 - RNA, 13 nt, Human
ugagccucagcau

SEQ ID NO: 3331620 - RNA, 14 nt, Human
ugagcaucaggcca

SEQ ID NO: 3331621 - RNA, 15 nt, Human
ugagcaucaggccag

SEQ ID NO: 3331622 - RNA, 13 nt, Human
ugagcaucaggcc

SEQ ID NO: 3331623 - RNA, 13 nt, Human
uguaucugagcag

SEQ ID NO: 3331624 - RNA, 21 nt, Human
uguacagagcccacgccccca

SEQ ID NO: 3331625 - RNA, 12 nt, Human
uguacagagccc

SEQ ID NO: 3331626 - RNA, 22 nt, Human
uguacagcaaggagauuuacaa

SEQ ID NO: 3331627 - RNA, 23 nt, Human
uguacagcaaggagauuuacaac

SEQ ID NO: 3331628 - RNA, 16 nt, Human
ugucagugugacugau

SEQ ID NO: 3331629 - RNA, 15 nt, Human
ugucagugugacuga

SEQ ID NO: 3331630 - RNA, 14 nt, Human
ugucagugugacug

SEQ ID NO: 3331631 - RNA, 21 nt, Human
ugucacaggcagguccagggu

SEQ ID NO: 3331632 - RNA, 17 nt, Human
ugucacaggcaggucca

SEQ ID NO: 3331633 - RNA, 16 nt, Human
ugucacaggcaggucc

SEQ ID NO: 3331634 - RNA, 15 nt, Human
ugucacaggcagguc

SEQ ID NO: 3331635 - RNA, 13 nt, Human
ugucacaggcagg

SEQ ID NO: 3331636 - RNA, 14 nt, Human
ugucacaggcaggu

SEQ ID NO: 3331637 - RNA, 21 nt, Human
ugucaauuacaggaaguacug

SEQ ID NO: 3331638 - RNA, 19 nt, Human
ugucaauuacaggaaguac

SEQ ID NO: 3331639 - RNA, 21 nt, Human
ugucucaaaaaaagaaaaaga

SEQ ID NO: 3331640 - RNA, 15 nt, Human
ugucuaguuguuuga

SEQ ID NO: 3331641 - RNA, 23 nt, Human
ugucuaguuguuugauucagaca

SEQ ID NO: 3331642 - RNA, 16 nt, Human
ugucuaugggacucaa

SEQ ID NO: 3331643 - RNA, 15 nt, Human
ugucuaugggacuca

SEQ ID NO: 3331644 - RNA, 14 nt, Human
ugucuaugggacuc

SEQ ID NO: 3331645 - RNA, 23 nt, Human
ugucuuuggacccugaggcccag

SEQ ID NO: 3331646 - RNA, 16 nt, Human
ugucuuuucuugcaug

SEQ ID NO: 3331647 - RNA, 17 nt, Human
uguccccgcacugggcu

SEQ ID NO: 3331648 - RNA, 19 nt, Human
uguccccgcacugggcuug

SEQ ID NO: 3331649 - RNA, 17 nt, Human
uguccccgacccuugcc

SEQ ID NO: 3331650 - RNA, 14 nt, Human
ugucuaaugaaacc

SEQ ID NO: 3331651 - RNA, 20 nt, Human
uguccugggagugagcuggu

SEQ ID NO: 3331652 - RNA, 19 nt, Human
uguccugggagugagcugg

SEQ ID NO: 3331653 - RNA, 12 nt, Human
uguccugggagu

SEQ ID NO: 3331654 - RNA, 17 nt, Human
uggugguuucagaaaug

SEQ ID NO: 3331655 - RNA, 18 nt, Human
uggugguuucagaaaugu

SEQ ID NO: 3331656 - RNA, 19 nt, Human
uggugguuuucuguucuuu

SEQ ID NO: 3331657 - RNA, 13 nt, Human
ugguggcuggguu

SEQ ID NO: 3331658 - RNA, 16 nt, Human
uggugggggccucggu

SEQ ID NO: 3331659 - RNA, 18 nt, Human
uggugggggccucggugu

SEQ ID NO: 3331660 - RNA, 18 nt, Human
ugguggcagugggagcug

SEQ ID NO: 3331661 - RNA, 13 nt, Human
ugguggcaguggg

SEQ ID NO: 3331662 - RNA, 20 nt, Human
ugguggcagugggagcugcc

SEQ ID NO: 3331663 - RNA, 14 nt, Human
uggugcaaugaccu

SEQ ID NO: 3331664 - RNA, 19 nt, Human
uggugcaaugaccuuucaa

SEQ ID NO: 3331665 - RNA, 12 nt, Human
ugguggcagugg

SEQ ID NO: 3331666 - RNA, 23 nt, Human
uggguacuuguggacacagcucu

SEQ ID NO: 3331667 - RNA, 20 nt, Human
uggguacuuguggacacagc

SEQ ID NO: 3331668 - RNA, 23 nt, Human
ugguucaggguuggccccugccc

SEQ ID NO: 3331669 - RNA, 18 nt, Human
uggugucgggcaugacac

SEQ ID NO: 3331670 - RNA, 15 nt, Human
uggugucgggcauga

SEQ ID NO: 3331671 - RNA, 16 nt, Human
uggugucaccugaaga

SEQ ID NO: 3331672 - RNA, 18 nt, Human
ugguugaugaucuuugca

SEQ ID NO: 3331673 - RNA, 14 nt, Human
uguacagacaacaa

SEQ ID NO: 3331674 - RNA, 11 nt, Human
uguacagagcc

SEQ ID NO: 3331675 - RNA, 17 nt, Human
uguaacaagccacccca

SEQ ID NO: 3331676 - RNA, 14 nt, Human
uguaacaagccacc

SEQ ID NO: 3331677 - RNA, 16 nt, Human
ugguuuucuguucuuu

SEQ ID NO: 3331678 - RNA, 23 nt, Human
ugguuuuuaaaaaacugcugacu

SEQ ID NO: 3331679 - RNA, 21 nt, Human
ugguuuuuaaaaaacugcuga

SEQ ID NO: 3331680 - RNA, 19 nt, Human
ugguuuucuuguguguuua

SEQ ID NO: 3331681 - RNA, 15 nt, Human
ugguuuucuguucuu

SEQ ID NO: 3331682 - RNA, 13 nt, Human
ugcuuaacuucac

SEQ ID NO: 3331683 - RNA, 14 nt, Human
ugcuuaacuucaca

SEQ ID NO: 3331684 - RNA, 17 nt, Human
ugcuuaacuucacauau

SEQ ID NO: 3331685 - RNA, 18 nt, Human
ugcuuaacuucacauauu

SEQ ID NO: 3331686 - RNA, 19 nt, Human
ugcuuaacuucacauauug

SEQ ID NO: 3331687 - RNA, 22 nt, Human
ugcuuccagugaggcucugccc

SEQ ID NO: 3331688 - RNA, 23 nt, Human
ugcuuccagugaggcucugcccu

SEQ ID NO: 3331689 - RNA, 21 nt, Human
ugcuuccagugaggcucugcc

SEQ ID NO: 3331690 - RNA, 12 nt, Human
ugcuucucacug

SEQ ID NO: 3331691 - RNA, 14 nt, Human
uggaacacucugag

SEQ ID NO: 3331692 - RNA, 15 nt, Human
uggaacacucugaga

SEQ ID NO: 3331693 - RNA, 17 nt, Human
uggaacacucugagacu

SEQ ID NO: 3331694 - RNA, 18 nt, Human
ugcuugugaaaggaaaga

SEQ ID NO: 3331695 - RNA, 13 nt, Human
uggaugcagccuc

SEQ ID NO: 3331696 - RNA, 21 nt, Human
uggaugcagccucacaguccu

SEQ ID NO: 3331697 - RNA, 22 nt, Human
uggaugcagccucacaguccuu

SEQ ID NO: 3331698 - RNA, 21 nt, Human
uggauuguccccgacccuugc

SEQ ID NO: 3331699 - RNA, 18 nt, Human
uggcagcucagagagggu

SEQ ID NO: 3331700 - RNA, 22 nt, Human
uggcacugcuuccagugaggcu

SEQ ID NO: 3331701 - RNA, 19 nt, Human
uggcacugcuuccagugag

SEQ ID NO: 3331702 - RNA, 22 nt, Human
uggcacuauaauguaagcucua

SEQ ID NO: 3331703 - RNA, 15 nt, Human
uggauuuaacagaaa

SEQ ID NO: 3331704 - RNA, 21 nt, Human
uggcacuauaauguaagcucu

SEQ ID NO: 3331705 - RNA, 17 nt, Human
uggacaggcauguucuc

SEQ ID NO: 3331706 - RNA, 22 nt, Human
uggacaggcauguucucugagg

SEQ ID NO: 3331707 - RNA, 18 nt, Human
uggacaggcauguucucu

SEQ ID NO: 3331708 - RNA, 19 nt, Human
uggacuaacuugucuuugg

SEQ ID NO: 3331709 - RNA, 19 nt, Human
uggacguguuaugacucca

SEQ ID NO: 3331710 - RNA, 23 nt, Human
uggacguguuaugacuccagaau

SEQ ID NO: 3331711 - RNA, 23 nt, Human
uggccuagcauacguacacauuu

SEQ ID NO: 3331712 - RNA, 23 nt, Human
uggccucaagugauucuccugcc

SEQ ID NO: 3331713 - RNA, 18 nt, Human
uggccucaagugauucuc

SEQ ID NO: 3331714 - RNA, 11 nt, Human
uggccucccaa

SEQ ID NO: 3331715 - RNA, 14 nt, Human
uggccucccaacuc

SEQ ID NO: 3331716 - RNA, 19 nt, Human
uggccucccaacucacccc

SEQ ID NO: 3331717 - RNA, 20 nt, Human
uggccucccaacucacccca

SEQ ID NO: 3331718 - RNA, 21 nt, Human
uggccucccaacucaccccag

SEQ ID NO: 3331719 - RNA, 22 nt, Human
uggccucccaacucaccccagc

SEQ ID NO: 3331720 - RNA, 13 nt, Human
uggccccucaggg

SEQ ID NO: 3331721 - RNA, 20 nt, Human
uggccccucagggucccugg

SEQ ID NO: 3331722 - RNA, 17 nt, Human
uggcagcugcgguccac

SEQ ID NO: 3331723 - RNA, 21 nt, Human
uggccccucagggucccuggu

SEQ ID NO: 3331724 - RNA, 22 nt, Human
uggccccucagggucccuggug

SEQ ID NO: 3331725 - RNA, 20 nt, Human
uggccuagcauacguacaca

SEQ ID NO: 3331726 - RNA, 11 nt, Human
uggcugcugaa

SEQ ID NO: 3331727 - RNA, 13 nt, Human
uggcugcugaagg

SEQ ID NO: 3331728 - RNA, 14 nt, Human
uggcugcugaaggc

SEQ ID NO: 3331729 - RNA, 16 nt, Human
ugggggccucagugcc

SEQ ID NO: 3331730 - RNA, 19 nt, Human
uggggggcugaggugggag

SEQ ID NO: 3331731 - RNA, 19 nt, Human
ugggggcugggcagaggaa

SEQ ID NO: 3331732 - RNA, 17 nt, Human
ugggcuugucuguagau

SEQ ID NO: 3331733 - RNA, 23 nt, Human
ugggcuuggggaccagagcugcc

SEQ ID NO: 3331734 - RNA, 22 nt, Human
ugggcuuggggaccagagcugc

SEQ ID NO: 3331735 - RNA, 15 nt, Human
ugggcuucauccucc

SEQ ID NO: 3331736 - RNA, 21 nt, Human
ugggcuucaguggcagcugcu

SEQ ID NO: 3331737 - RNA, 22 nt, Human
ugggcuucaguggcagcugcuu

SEQ ID NO: 3331738 - RNA, 22 nt, Human
ugggccuccugugugugcgccu

SEQ ID NO: 3331739 - RNA, 13 nt, Human
ugggcagagcaga

SEQ ID NO: 3331740 - RNA, 15 nt, Human
ugggcagagcagaga

SEQ ID NO: 3331741 - RNA, 17 nt, Human
ugggcagagcagagacc

SEQ ID NO: 3331742 - RNA, 14 nt, Human
ugggcagagcagag

SEQ ID NO: 3331743 - RNA, 16 nt, Human
ugggaaugaaugucag

SEQ ID NO: 3331744 - RNA, 13 nt, Human
ugggacacccugu

SEQ ID NO: 3331745 - RNA, 14 nt, Human
ugggacacccugug

SEQ ID NO: 3331746 - RNA, 15 nt, Human
ugggacacccuguga

SEQ ID NO: 3331747 - RNA, 16 nt, Human
ugggaggaucucuuga

SEQ ID NO: 3331748 - RNA, 18 nt, Human
ugggaugauuggaggggg

SEQ ID NO: 3331749 - RNA, 12 nt, Human
uuuagacagagu

SEQ ID NO: 3331750 - RNA, 14 nt, Human
uuuagaaauauaau

SEQ ID NO: 3331751 - RNA, 22 nt, Human
uuuacuucuuauacauuugaua

SEQ ID NO: 3331752 - RNA, 19 nt, Human
uuuacuucuuauacauuug

SEQ ID NO: 3331753 - RNA, 15 nt, Human
uuuacuucuuauaca

SEQ ID NO: 3331754 - RNA, 18 nt, Human
uuuaagaaaaaggaugca

SEQ ID NO: 3331755 - RNA, 22 nt, Human
uuuaagaaaaaggaugcacaga

SEQ ID NO: 3331756 - RNA, 19 nt, Human
uuuaagugcugcauuuaaa

SEQ ID NO: 3331757 - RNA, 18 nt, Human
uuuaacagaaauguacag

SEQ ID NO: 3331758 - RNA, 13 nt, Human
uuuauuaugcaug

SEQ ID NO: 3331759 - RNA, 13 nt, Human
uuuauuauggcac

SEQ ID NO: 3331760 - RNA, 14 nt, Human
uuuauggcuuuugu

SEQ ID NO: 3331761 - RNA, 16 nt, Human
uuuauggcuuuugugc

SEQ ID NO: 3331762 - RNA, 22 nt, Human
uuuauaagccaguguugccuaa

SEQ ID NO: 3331763 - RNA, 17 nt, Human
uuucaauaggaaaaacu

SEQ ID NO: 3331764 - RNA, 12 nt, Human
uuucaauaggaa

SEQ ID NO: 3331765 - RNA, 14 nt, Human
uuucaauaggaaaa

SEQ ID NO: 3331766 - RNA, 14 nt, Human
uuucaguguacaug

SEQ ID NO: 3331767 - RNA, 13 nt, Human
uuucaguguacau

SEQ ID NO: 3331768 - RNA, 18 nt, Human
uuucauuuaggugaggaa

SEQ ID NO: 3331769 - RNA, 14 nt, Human
uuucauuuagguga

SEQ ID NO: 3331770 - RNA, 15 nt, Human
uugucuuaaaaagug

SEQ ID NO: 3331771 - RNA, 16 nt, Human
uugugauuuuuguaau

SEQ ID NO: 3331772 - RNA, 17 nt, Human
uugugauuuuuguaauu

SEQ ID NO: 3331773 - RNA, 12 nt, Human
uugugauuuuug

SEQ ID NO: 3331774 - RNA, 20 nt, Human
uugugaaaggaaagaggcuc

SEQ ID NO: 3331775 - RNA, 15 nt, Human
uuguauucucuccug

SEQ ID NO: 3331776 - RNA, 16 nt, Human
uuguauucucuccugu

SEQ ID NO: 3331777 - RNA, 19 nt, Human
uuguauucucuccuguacc

SEQ ID NO: 3331778 - RNA, 15 nt, Human
uuguaaauuaacuuu

SEQ ID NO: 3331779 - RNA, 16 nt, Human
uuguaaauuaacuuuu

SEQ ID NO: 3331780 - RNA, 18 nt, Human
uuguaaauuaacuuuuau

SEQ ID NO: 3331781 - RNA, 23 nt, Human
uuguaaauuaacuuuuauaaacu

SEQ ID NO: 3331782 - RNA, 18 nt, Human
uuguacauaaugcgugca

SEQ ID NO: 3331783 - RNA, 14 nt, Human
uuguacauaaugcg

SEQ ID NO: 3331784 - RNA, 17 nt, Human
uuguaaauagcucaggu

SEQ ID NO: 3331785 - RNA, 22 nt, Human
uuggguucaagcgauucuucug

SEQ ID NO: 3331786 - RNA, 13 nt, Human
uuggucuguguga

SEQ ID NO: 3331787 - RNA, 22 nt, Human
uuguuaguaugaggcauuuguu

SEQ ID NO: 3331788 - RNA, 20 nt, Human
uuguuagugugucuuagugu

SEQ ID NO: 3331789 - RNA, 19 nt, Human
uuguuaguaugaggcauuu

SEQ ID NO: 3331790 - RNA, 21 nt, Human
uuguuaguaugaggcauuugu

SEQ ID NO: 3331791 - RNA, 14 nt, Human
uuguuacauuuuua

SEQ ID NO: 3331792 - RNA, 20 nt, Human
uuguggauuuaacagaaaug

SEQ ID NO: 3331793 - RNA, 21 nt, Human
uuguggauuuaacagaaaugu

SEQ ID NO: 3331794 - RNA, 16 nt, Human
uuguggacacagcucu

SEQ ID NO: 3331795 - RNA, 17 nt, Human
uuguggacacagcucuu

SEQ ID NO: 3331796 - RNA, 22 nt, Human
uuguggauuuaacagaaaugua

SEQ ID NO: 3331797 - RNA, 23 nt, Human
uuguggauuuaacagaaauguac

SEQ ID NO: 3331798 - RNA, 13 nt, Human
uuguguucaccuu

SEQ ID NO: 3331799 - RNA, 21 nt, Human
uuguguuuauauauaagccaa

SEQ ID NO: 3331800 - RNA, 22 nt, Human
uugugcauuaucuagauacugu

SEQ ID NO: 3331801 - RNA, 23 nt, Human
uugugcauuaucuagauacugua

SEQ ID NO: 3331802 - RNA, 12 nt, Human
uugugcauuugg

SEQ ID NO: 3331803 - RNA, 17 nt, Human
uugugcauuaucuagau

SEQ ID NO: 3331804 - RNA, 13 nt, Human
uucaguggcagcu

SEQ ID NO: 3331805 - RNA, 14 nt, Human
uucaguggcagcug

SEQ ID NO: 3331806 - RNA, 15 nt, Human
uucagcuccagcuca

SEQ ID NO: 3331807 - RNA, 12 nt, Human
uucagcuccagc

SEQ ID NO: 3331808 - RNA, 21 nt, Human
uucagcugguugagguuucaa

SEQ ID NO: 3331809 - RNA, 16 nt, Human
uucaguggcagcugcu

SEQ ID NO: 3331810 - RNA, 15 nt, Human
uucaguggcagcugc

SEQ ID NO: 3331811 - RNA, 17 nt, Human
uucaguggcagcugcuu

SEQ ID NO: 3331812 - RNA, 12 nt, Human
uucaguguacau

SEQ ID NO: 3331813 - RNA, 13 nt, Human
uucaguguacaug

SEQ ID NO: 3331814 - RNA, 15 nt, Human
uucauccuccucaga

SEQ ID NO: 3331815 - RNA, 19 nt, Human
uucauccuccucagaucuu

SEQ ID NO: 3331816 - RNA, 15 nt, Human
uucauaaccuagccu

SEQ ID NO: 3331817 - RNA, 14 nt, Human
uuccauggacuuug

SEQ ID NO: 3331818 - RNA, 15 nt, Human
uuccauggacuuugu

SEQ ID NO: 3331819 - RNA, 19 nt, Human
uuccaacccucaucaccaa

SEQ ID NO: 3331820 - RNA, 16 nt, Human
uuccaaaguacacugu

SEQ ID NO: 3331821 - RNA, 13 nt, Human
uuccaaaguacac

SEQ ID NO: 3331822 - RNA, 20 nt, Human
uucaauaggaaaaacugauu

SEQ ID NO: 3331823 - RNA, 22 nt, Human
uucaauaggaaaaacugauuuu

SEQ ID NO: 3331824 - RNA, 21 nt, Human
uucaauaggaaaaacugauuu

SEQ ID NO: 3331825 - RNA, 19 nt, Human
uucaccuuuguccccaccg

SEQ ID NO: 3331826 - RNA, 20 nt, Human
uucaccuuuguccccaccgc

SEQ ID NO: 3331827 - RNA, 14 nt, Human
uucaccuuuguccc

SEQ ID NO: 3331828 - RNA, 13 nt, Human
uucacccuuuucu

SEQ ID NO: 3331829 - RNA, 13 nt, Human
uucacggaagagc

SEQ ID NO: 3331830 - RNA, 22 nt, Human
uucaccuuuguccccaccgcag

SEQ ID NO: 3331831 - RNA, 17 nt, Human
uucacggaagagccuug

SEQ ID NO: 3331832 - RNA, 14 nt, Human
uucagacagcugcc

SEQ ID NO: 3331833 - RNA, 15 nt, Human
uucagacagcugccu

SEQ ID NO: 3331834 - RNA, 16 nt, Human
uucagacagcugccug

SEQ ID NO: 3331835 - RNA, 17 nt, Human
uucagacagcugccugg

SEQ ID NO: 3331836 - RNA, 22 nt, Human
uuauuuuggaaaauaaauuauu

SEQ ID NO: 3331837 - RNA, 18 nt, Human
uucaaaugcuguaacuuu

SEQ ID NO: 3331838 - RNA, 21 nt, Human
uucaacagguuuuccugaaga

SEQ ID NO: 3331839 - RNA, 21 nt, Human
uucaaccauggacuuuauaag

SEQ ID NO: 3331840 - RNA, 15 nt, Human
uucaaccauggacuu

SEQ ID NO: 3331841 - RNA, 14 nt, Human
uucaaccauggacu

SEQ ID NO: 3331842 - RNA, 18 nt, Human
uuauuuuauuaugcauga

SEQ ID NO: 3331843 - RNA, 13 nt, Human
ugugaaaagaaaa

SEQ ID NO: 3331844 - RNA, 15 nt, Human
ugugaaaagaaaaau

SEQ ID NO: 3331845 - RNA, 17 nt, Human
ugugaaaagaaaaauga

SEQ ID NO: 3331846 - RNA, 15 nt, Human
uuauaauaauguuaa

SEQ ID NO: 3331847 - RNA, 18 nt, Human
uuauaauaauguuaacau

SEQ ID NO: 3331848 - RNA, 15 nt, Human
uuauaaugaaugaaa

SEQ ID NO: 3331849 - RNA, 11 nt, Human
uuauacauaaa

SEQ ID NO: 3331850 - RNA, 16 nt, Human
uuauauucaaccaugg

SEQ ID NO: 3331851 - RNA, 15 nt, Human
uuauauucaaccaug

SEQ ID NO: 3331852 - RNA, 14 nt, Human
uuauauucaaccau

SEQ ID NO: 3331853 - RNA, 11 nt, Human
uuauauucaac

SEQ ID NO: 3331854 - RNA, 23 nt, Human
uuauauucaaccauggacuuuau

SEQ ID NO: 3331855 - RNA, 17 nt, Human
uuauauucaaccaugga

SEQ ID NO: 3331856 - RNA, 19 nt, Human
uuauuaaaugcccagcccc

SEQ ID NO: 3331857 - RNA, 21 nt, Human
uuauuaaaugcccagccccuu

SEQ ID NO: 3331858 - RNA, 18 nt, Human
uuauggaacacucugaga

SEQ ID NO: 3331859 - RNA, 20 nt, Human
uuauggaacacucugagacu

SEQ ID NO: 3331860 - RNA, 21 nt, Human
uuauggacaaugacccagugg

SEQ ID NO: 3331861 - RNA, 16 nt, Human
uuauggaacacucuga

SEQ ID NO: 3331862 - RNA, 17 nt, Human
uuauggaacacucugag

SEQ ID NO: 3331863 - RNA, 17 nt, Human
uuauggcuuuugugcau

SEQ ID NO: 3331864 - RNA, 16 nt, Human
uuauggcuuuugugca

SEQ ID NO: 3331865 - RNA, 21 nt, Human
uucuccaccucccacaaagga

SEQ ID NO: 3331866 - RNA, 12 nt, Human
uucuccaccugc

SEQ ID NO: 3331867 - RNA, 14 nt, Human
uucuccaccugcca

SEQ ID NO: 3331868 - RNA, 15 nt, Human
uucuccaccugccag

SEQ ID NO: 3331869 - RNA, 16 nt, Human
uucuccaccugccagg

SEQ ID NO: 3331870 - RNA, 18 nt, Human
uucuccaccugccaggga

SEQ ID NO: 3331871 - RNA, 20 nt, Human
uucuccaccugccagggaca

SEQ ID NO: 3331872 - RNA, 16 nt, Human
uucuccacccugcucu

SEQ ID NO: 3331873 - RNA, 14 nt, Human
uucucuccuguacc

SEQ ID NO: 3331874 - RNA, 18 nt, Human
uucucuccuguaccucuu

SEQ ID NO: 3331875 - RNA, 15 nt, Human
uucucuccagccccu

SEQ ID NO: 3331876 - RNA, 13 nt, Human
uucucuccagccc

SEQ ID NO: 3331877 - RNA, 14 nt, Human
uucucuccagcccc

SEQ ID NO: 3331878 - RNA, 11 nt, Human
uucucugcccu

SEQ ID NO: 3331879 - RNA, 12 nt, Human
uucucugcccuc

SEQ ID NO: 3331880 - RNA, 14 nt, Human
uucucugaggacac

SEQ ID NO: 3331881 - RNA, 19 nt, Human
uucucuccuguaccucuug

SEQ ID NO: 3331882 - RNA, 19 nt, Human
uucugcucacauaucuguc

SEQ ID NO: 3331883 - RNA, 19 nt, Human
uucugauccuaguuccacc

SEQ ID NO: 3331884 - RNA, 16 nt, Human
uucucugcccuccaag

SEQ ID NO: 3331885 - RNA, 23 nt, Human
uucugacccaugcugcccuguga

SEQ ID NO: 3331886 - RNA, 22 nt, Human
uucugacccaugcugcccugug

SEQ ID NO: 3331887 - RNA, 18 nt, Human
uucugacccugcuucaaa

SEQ ID NO: 3331888 - RNA, 22 nt, Human
uucuacucgaguuacagacaaa

SEQ ID NO: 3331889 - RNA, 14 nt, Human
uucuacccaggugc

SEQ ID NO: 3331890 - RNA, 21 nt, Human
uucuacccagcgagcccuggu

SEQ ID NO: 3331891 - RNA, 20 nt, Human
uucuacccagcgagcccugg

SEQ ID NO: 3331892 - RNA, 13 nt, Human
uucuacgccaggg

SEQ ID NO: 3331893 - RNA, 19 nt, Human
uucuacccagcgagcccug

SEQ ID NO: 3331894 - RNA, 12 nt, Human
uucuacccagcg

SEQ ID NO: 3331895 - RNA, 20 nt, Human
uuccuugaguugauucagcu

SEQ ID NO: 3331896 - RNA, 21 nt, Human
uuccuugaguugauucagcuc

SEQ ID NO: 3331897 - RNA, 16 nt, Human
uuccauggccucuuca

SEQ ID NO: 3331898 - RNA, 12 nt, Human
uuccauggccuc

SEQ ID NO: 3331899 - RNA, 18 nt, Human
uuccugaagaauugaaaa

SEQ ID NO: 3331900 - RNA, 23 nt, Human
uuccugaugcuucuucagagacu

SEQ ID NO: 3331901 - RNA, 15 nt, Human
uuccugaggcugggc

SEQ ID NO: 3331902 - RNA, 20 nt, Human
uuccugaggcugggcucccu

SEQ ID NO: 3331903 - RNA, 18 nt, Human
uucuguauuuuguuuuug

SEQ ID NO: 3331904 - RNA, 19 nt, Human
uucuguccuacucuguguc

SEQ ID NO: 3331905 - RNA, 14 nt, Human
uucugcuucagccu

SEQ ID NO: 3331906 - RNA, 16 nt, Human
uucugcuucagccucc

SEQ ID NO: 3331907 - RNA, 15 nt, Human
uucugcuucagccuc

SEQ ID NO: 3331908 - RNA, 19 nt, Human
uucugcuucagccucccga

SEQ ID NO: 3331909 - RNA, 14 nt, Human
uucuuguguguuua

SEQ ID NO: 3331910 - RNA, 13 nt, Human
uucuuccucccuc

SEQ ID NO: 3331911 - RNA, 21 nt, Human
uucuuguguguuuauugucaa

SEQ ID NO: 3331912 - RNA, 14 nt, Human
uucuuuccaaagua

SEQ ID NO: 3331913 - RNA, 12 nt, Human
uucuuucagcca

SEQ ID NO: 3331914 - RNA, 21 nt, Human
uucuuccacaagagcccaggc

SEQ ID NO: 3331915 - RNA, 21 nt, Human
uucuuauacauuugauaaagu

SEQ ID NO: 3331916 - RNA, 22 nt, Human
uugaaaacacuguucucugccc

SEQ ID NO: 3331917 - RNA, 23 nt, Human
uugaaaacacuguucucugcccu

SEQ ID NO: 3331918 - RNA, 21 nt, Human
uucuuuccaaaguacacuguu

SEQ ID NO: 3331919 - RNA, 20 nt, Human
uugaaaaaccauuuugcugu

SEQ ID NO: 3331920 - RNA, 16 nt, Human
uugaacuccuggccuc

SEQ ID NO: 3331921 - RNA, 15 nt, Human
uugaacuccuggccu

SEQ ID NO: 3331922 - RNA, 21 nt, Human
uugcaaaguaucccuacugua

SEQ ID NO: 3331923 - RNA, 16 nt, Human
uugaugaucuuugcag

SEQ ID NO: 3331924 - RNA, 11 nt, Human
uugagccuggg

SEQ ID NO: 3331925 - RNA, 16 nt, Human
uugaggguugggcugg

SEQ ID NO: 3331926 - RNA, 13 nt, Human
uugaggguugggc

SEQ ID NO: 3331927 - RNA, 23 nt, Human
uugauagcacagacccugcccug

SEQ ID NO: 3331928 - RNA, 14 nt, Human
uugaauuguaagga

SEQ ID NO: 3331929 - RNA, 18 nt, Human
uugaacuggguacuugug

SEQ ID NO: 3331930 - RNA, 17 nt, Human
uugacgccaucccagcc

SEQ ID NO: 3331931 - RNA, 18 nt, Human
uugacgccaucccagccc

SEQ ID NO: 3331932 - RNA, 19 nt, Human
uugacgccaucccagcccc

SEQ ID NO: 3331933 - RNA, 15 nt, Human
uugacgccaucccag

SEQ ID NO: 3331934 - RNA, 14 nt, Human
uugaccucugcagc

SEQ ID NO: 3331935 - RNA, 15 nt, Human
uugaccucugcagca

SEQ ID NO: 3331936 - RNA, 21 nt, Human
uugaccucaggugauccaccc

SEQ ID NO: 3331937 - RNA, 13 nt, Human
uuuuuuuugacaa

SEQ ID NO: 3331938 - RNA, 12 nt, Human
uuuuuuuuaaga

SEQ ID NO: 3331939 - RNA, 11 nt, Human
uuuuuuuacua

SEQ ID NO: 3331940 - RNA, 18 nt, Human
uuuuuaagugcugcauuu

SEQ ID NO: 3331941 - RNA, 19 nt, Human
uuuuuaagugcugcauuua

SEQ ID NO: 3331942 - RNA, 22 nt, Human
uuuuuaagugcugcauuuaaaa

SEQ ID NO: 3331943 - RNA, 23 nt, Human
uuuuuaagugcugcauuuaaaag

SEQ ID NO: 3331944 - RNA, 16 nt, Human
uuuuuaagugcugcau

SEQ ID NO: 3331945 - RNA, 17 nt, Human
uuuuuaagugcugcauu

SEQ ID NO: 3331946 - RNA, 12 nt, Human
uuuuuaagaaaa

SEQ ID NO: 3331947 - RNA, 11 nt, Human
uuuuuaaaugc

SEQ ID NO: 3331948 - RNA, 12 nt, Human
uuuggaaaauaa

SEQ ID NO: 3331949 - RNA, 21 nt, Human
uuugagugccuuacacaaugg

SEQ ID NO: 3331950 - RNA, 15 nt, Human
uuuccguuaaaauac

SEQ ID NO: 3331951 - RNA, 17 nt, Human
uuuccguuaaaauacca

SEQ ID NO: 3331952 - RNA, 13 nt, Human
uuugagugccuua

SEQ ID NO: 3331953 - RNA, 22 nt, Human
uuuguuaguaugaggcauuugu

SEQ ID NO: 3331954 - RNA, 15 nt, Human
uuuguugucagcuga

SEQ ID NO: 3331955 - RNA, 15 nt, Human
uuuguauucucuccu

SEQ ID NO: 3331956 - RNA, 22 nt, Human
uuuucuuguguguuuauuguca

SEQ ID NO: 3331957 - RNA, 13 nt, Human
uuuucuucucccu

SEQ ID NO: 3331958 - RNA, 13 nt, Human
uuuucuacucgag

SEQ ID NO: 3331959 - RNA, 20 nt, Human
uuuucuacucgaguuacaga

SEQ ID NO: 3331960 - RNA, 22 nt, Human
uuuucuacucgaguuacagaca

SEQ ID NO: 3331961 - RNA, 18 nt, Human
uuuucccuauuagagaag

SEQ ID NO: 3331962 - RNA, 22 nt, Human
uuuucccuauuagagaagagau

SEQ ID NO: 3331963 - RNA, 15 nt, Human
uuuuacuaauagaca

SEQ ID NO: 3331964 - RNA, 13 nt, Human
uuuuauacauaaa

SEQ ID NO: 3331965 - RNA, 21 nt, Human
uuuuauacauaaacaagacca

SEQ ID NO: 3331966 - RNA, 19 nt, Human
uuuuaucgucacugcuuaa

SEQ ID NO: 3331967 - RNA, 17 nt, Human
uuuucaaaauaaaaaug

SEQ ID NO: 3331968 - RNA, 18 nt, Human
uuuuauuuuuagacagag

SEQ ID NO: 3331969 - RNA, 17 nt, Human
cauuuuuaguagagaca

SEQ ID NO: 3331970 - RNA, 21 nt, Human
cauuuuuaagugcugcauuua

SEQ ID NO: 3331971 - RNA, 23 nt, Human
cauuuuauuuuauuaugcaugaa

SEQ ID NO: 3331972 - RNA, 22 nt, Human
cauuuuauuuuauuaugcauga

SEQ ID NO: 3331973 - RNA, 13 nt, Human
cauuugcugaaua

SEQ ID NO: 3331974 - RNA, 22 nt, Human
cauuugaggucuguucuuucca

SEQ ID NO: 3331975 - RNA, 17 nt, Human
cauuugaaaauuuugau

SEQ ID NO: 3331976 - RNA, 19 nt, Human
cauuugaaaauuuugaugu

SEQ ID NO: 3331977 - RNA, 15 nt, Human
cauugaccugaggcc

SEQ ID NO: 3331978 - RNA, 17 nt, Human
cauugaccugaggcccu

SEQ ID NO: 3331979 - RNA, 14 nt, Human
cauugaccugaggc

SEQ ID NO: 3331980 - RNA, 18 nt, Human
cauugaccugaggcccuu

SEQ ID NO: 3331981 - RNA, 15 nt, Human
cauuuaaaaaaaauc

SEQ ID NO: 3331982 - RNA, 15 nt, Human
cauugugggaagggg

SEQ ID NO: 3331983 - RNA, 13 nt, Human
cauugugggaagg

SEQ ID NO: 3331984 - RNA, 14 nt, Human
cauuccugaugcuu

SEQ ID NO: 3331985 - RNA, 16 nt, Human
cauuccugaugcuucu

SEQ ID NO: 3331986 - RNA, 19 nt, Human
cauuccugaugcuucuuca

SEQ ID NO: 3331987 - RNA, 22 nt, Human
cauuccugaugcuucuucagag

SEQ ID NO: 3331988 - RNA, 23 nt, Human
cauuccugaugcuucuucagaga

SEQ ID NO: 3331989 - RNA, 20 nt, Human
cauucugccugcccaggccc

SEQ ID NO: 3331990 - RNA, 19 nt, Human
cauucugccugcccaggcc

SEQ ID NO: 3331991 - RNA, 18 nt, Human
cauucugccugcccaggc

SEQ ID NO: 3331992 - RNA, 17 nt, Human
cauucugccugcccagg

SEQ ID NO: 3331993 - RNA, 16 nt, Human
cauucugccugcccag

SEQ ID NO: 3331994 - RNA, 15 nt, Human
cauucugccugccca

SEQ ID NO: 3331995 - RNA, 13 nt, Human
cauucugccugcc

SEQ ID NO: 3331996 - RNA, 12 nt, Human
cauucugccugc

SEQ ID NO: 3331997 - RNA, 17 nt, Human
cauucuguuaaucauua

SEQ ID NO: 3331998 - RNA, 21 nt, Human
cauucuuacuuacuaaaauau

SEQ ID NO: 3331999 - RNA, 12 nt, Human
cauucuuacuua

SEQ ID NO: 3332000 - RNA, 23 nt, Human
cauucuuacuuacuaaaauauau

SEQ ID NO: 3332001 - RNA, 22 nt, Human
cauucuuacuuacuaaaauaua

SEQ ID NO: 3332002 - RNA, 23 nt, Human
cauucuucuguacgucugacagg

SEQ ID NO: 3332003 - RNA, 18 nt, Human
cauuccccaggaggccag

SEQ ID NO: 3332004 - RNA, 19 nt, Human
cauuccccaggaggccagc

SEQ ID NO: 3332005 - RNA, 20 nt, Human
cauuccccaggaggccagcc

SEQ ID NO: 3332006 - RNA, 15 nt, Human
cauuccccaggaggc

SEQ ID NO: 3332007 - RNA, 17 nt, Human
cauuccccaggaggcca

SEQ ID NO: 3332008 - RNA, 13 nt, Human
cauuccccaggag

SEQ ID NO: 3332009 - RNA, 12 nt, Human
cauguuugugau

SEQ ID NO: 3332010 - RNA, 14 nt, Human
cauguuugugauug

SEQ ID NO: 3332011 - RNA, 23 nt, Human
cauguuugauguaucugagcagg

SEQ ID NO: 3332012 - RNA, 20 nt, Human
cauguuuuucuucucccuca

SEQ ID NO: 3332013 - RNA, 19 nt, Human
cauguuuuucuucucccuc

SEQ ID NO: 3332014 - RNA, 18 nt, Human
cauguuuuucuucucccu

SEQ ID NO: 3332015 - RNA, 17 nt, Human
cauggucggaaaacaug

SEQ ID NO: 3332016 - RNA, 19 nt, Human
cauggucggaaaacaugcu

SEQ ID NO: 3332017 - RNA, 23 nt, Human
cauggucggaaaacaugcuacac

SEQ ID NO: 3332018 - RNA, 14 nt, Human
caugugcacaugca

SEQ ID NO: 3332019 - RNA, 22 nt, Human
caugugccagguuuuuggucug

SEQ ID NO: 3332020 - RNA, 21 nt, Human
caugugaugagaggaaaucac

SEQ ID NO: 3332021 - RNA, 18 nt, Human
caugugaugagaggaaau

SEQ ID NO: 3332022 - RNA, 20 nt, Human
caugugaugagaggaaauca

SEQ ID NO: 3332023 - RNA, 16 nt, Human
caugugaugagaggaa

SEQ ID NO: 3332024 - RNA, 17 nt, Human
caugugaugagaggaaa

SEQ ID NO: 3332025 - RNA, 15 nt, Human
caugugaugagagga

SEQ ID NO: 3332026 - RNA, 12 nt, Human
caugucuggcua

SEQ ID NO: 3332027 - RNA, 13 nt, Human
caugcugucccuu

SEQ ID NO: 3332028 - RNA, 15 nt, Human
caugcugucccuuac

SEQ ID NO: 3332029 - RNA, 15 nt, Human
cauggacuuccacug

SEQ ID NO: 3332030 - RNA, 18 nt, Human
cauggacaugaucuucuu

SEQ ID NO: 3332031 - RNA, 18 nt, Human
caugggccuccugugugu

SEQ ID NO: 3332032 - RNA, 14 nt, Human
caucaacaucuugg

SEQ ID NO: 3332033 - RNA, 23 nt, Human
cauauauauguuuuaagaggcag

SEQ ID NO: 3332034 - RNA, 23 nt, Human
cauauaagauucauauuuacuuc

SEQ ID NO: 3332035 - RNA, 15 nt, Human
cauaguaugguggcu

SEQ ID NO: 3332036 - RNA, 16 nt, Human
cauaguaugguggcug

SEQ ID NO: 3332037 - RNA, 20 nt, Human
cauaguaugguggcuggguu

SEQ ID NO: 3332038 - RNA, 21 nt, Human
cauauugauuuccguuaaaau

SEQ ID NO: 3332039 - RNA, 17 nt, Human
cauauugauuuccguua

SEQ ID NO: 3332040 - RNA, 18 nt, Human
cauauucuguuggccagu

SEQ ID NO: 3332041 - RNA, 22 nt, Human
cauauucuguuggccaguguga

SEQ ID NO: 3332042 - RNA, 22 nt, Human
caucccugaaggccccgcccag

SEQ ID NO: 3332043 - RNA, 23 nt, Human
cauccacugugccaugugccagg

SEQ ID NO: 3332044 - RNA, 17 nt, Human
cauccacugugccaugu

SEQ ID NO: 3332045 - RNA, 14 nt, Human
cauccacugugcca

SEQ ID NO: 3332046 - RNA, 17 nt, Human
cauccagguucagcuug

SEQ ID NO: 3332047 - RNA, 20 nt, Human
caucaccaacgucugugcca

SEQ ID NO: 3332048 - RNA, 12 nt, Human
caucacccgcua

SEQ ID NO: 3332049 - RNA, 16 nt, Human
caucauccuaagcuau

SEQ ID NO: 3332050 - RNA, 13 nt, Human
caucaugucuggc

SEQ ID NO: 3332051 - RNA, 15 nt, Human
caucaugucuggcua

SEQ ID NO: 3332052 - RNA, 14 nt, Human
caucaugucuggcu

SEQ ID NO: 3332053 - RNA, 17 nt, Human
caucuugcucugcugac

SEQ ID NO: 3332054 - RNA, 16 nt, Human
caucuugcucugcuga

SEQ ID NO: 3332055 - RNA, 15 nt, Human
caucuugcucugcug

SEQ ID NO: 3332056 - RNA, 16 nt, Human
caucuugaauuguaag

SEQ ID NO: 3332057 - RNA, 21 nt, Human
caucuugaauuguaaggaaug

SEQ ID NO: 3332058 - RNA, 15 nt, Human
caucucuccuccuuu

SEQ ID NO: 3332059 - RNA, 16 nt, Human
caucucuacaaaaagc

SEQ ID NO: 3332060 - RNA, 12 nt, Human
caugaagacaga

SEQ ID NO: 3332061 - RNA, 19 nt, Human
caugaaaacacauuuuucu

SEQ ID NO: 3332062 - RNA, 21 nt, Human
caugaaaacacauuuuucuua

SEQ ID NO: 3332063 - RNA, 14 nt, Human
caugaaaacacauu

SEQ ID NO: 3332064 - RNA, 15 nt, Human
caugaaaacacauuu

SEQ ID NO: 3332065 - RNA, 16 nt, Human
caugaaaacacauuuu

SEQ ID NO: 3332066 - RNA, 17 nt, Human
caugaaaacacauuuuu

SEQ ID NO: 3332067 - RNA, 13 nt, Human
caugaaaacacau

SEQ ID NO: 3332068 - RNA, 16 nt, Human
caugaggaacaaggca

SEQ ID NO: 3332069 - RNA, 17 nt, Human
caugaggaacaaggcaa

SEQ ID NO: 3332070 - RNA, 20 nt, Human
caugaggaacaaggcaaggc

SEQ ID NO: 3332071 - RNA, 21 nt, Human
caugaggaacaaggcaaggcu

SEQ ID NO: 3332072 - RNA, 23 nt, Human
caugagccucagcauccuggcac

SEQ ID NO: 3332073 - RNA, 22 nt, Human
caugagccucagcauccuggca

SEQ ID NO: 3332074 - RNA, 23 nt, Human
caugaggaacaaggcaaggcugu

SEQ ID NO: 3332075 - RNA, 14 nt, Human
caugaguccccugu

SEQ ID NO: 3332076 - RNA, 15 nt, Human
caugaguccccuguu

SEQ ID NO: 3332077 - RNA, 23 nt, Human
caugaguccccuguuuguuucug

SEQ ID NO: 3332078 - RNA, 13 nt, Human
caugaguccccug

SEQ ID NO: 3332079 - RNA, 15 nt, Human
caugagcaucaggcc

SEQ ID NO: 3332080 - RNA, 16 nt, Human
caugagcaucaggcca

SEQ ID NO: 3332081 - RNA, 17 nt, Human
caugagcaucaggccag

SEQ ID NO: 3332082 - RNA, 18 nt, Human
caugagcaucaggccagg

SEQ ID NO: 3332083 - RNA, 20 nt, Human
caugagcaucaggccaggcc

SEQ ID NO: 3332084 - RNA, 21 nt, Human
caugagcaucaggccaggccc

SEQ ID NO: 3332085 - RNA, 22 nt, Human
caugagcaucaggccaggcccu

SEQ ID NO: 3332086 - RNA, 23 nt, Human
caugagcaucaggccaggcccuc

SEQ ID NO: 3332087 - RNA, 21 nt, Human
caugagccucagcauccuggc

SEQ ID NO: 3332088 - RNA, 20 nt, Human
caugagccucagcauccugg

SEQ ID NO: 3332089 - RNA, 19 nt, Human
caugagccucagcauccug

SEQ ID NO: 3332090 - RNA, 18 nt, Human
caugagccucagcauccu

SEQ ID NO: 3332091 - RNA, 17 nt, Human
caugagccucagcaucc

SEQ ID NO: 3332092 - RNA, 15 nt, Human
caugagccucagcau

SEQ ID NO: 3332093 - RNA, 12 nt, Human
caugagccucag

SEQ ID NO: 3332094 - RNA, 13 nt, Human
caugagcaucagg

SEQ ID NO: 3332095 - RNA, 20 nt, Human
ccaccaacauacucccaucu

SEQ ID NO: 3332096 - RNA, 16 nt, Human
ccaccacacccagccc

SEQ ID NO: 3332097 - RNA, 14 nt, Human
ccaccacacccagc

SEQ ID NO: 3332098 - RNA, 17 nt, Human
ccacccaagggccuggc

SEQ ID NO: 3332099 - RNA, 19 nt, Human
ccacccaagggccuggccu

SEQ ID NO: 3332100 - RNA, 16 nt, Human
ccacccaagggccugg

SEQ ID NO: 3332101 - RNA, 20 nt, Human
ccacccaagggccuggccug

SEQ ID NO: 3332102 - RNA, 21 nt, Human
ccacccaagggccuggccuga

SEQ ID NO: 3332103 - RNA, 22 nt, Human
ccacccaagggccuggccugag

SEQ ID NO: 3332104 - RNA, 13 nt, Human
ccacccaccucag

SEQ ID NO: 3332105 - RNA, 15 nt, Human
ccacccaccucagcc

SEQ ID NO: 3332106 - RNA, 14 nt, Human
ccacccaccucagc

SEQ ID NO: 3332107 - RNA, 16 nt, Human
ccacccaccucagccu

SEQ ID NO: 3332108 - RNA, 14 nt, Human
ccacaucuugcucu

SEQ ID NO: 3332109 - RNA, 23 nt, Human
ccacaucuugcucugcugacaga

SEQ ID NO: 3332110 - RNA, 22 nt, Human
ccacaucuugcucugcugacag

SEQ ID NO: 3332111 - RNA, 20 nt, Human
ccacaucuugcucugcugac

SEQ ID NO: 3332112 - RNA, 16 nt, Human
ccacaucuugcucugc

SEQ ID NO: 3332113 - RNA, 14 nt, Human
ccaccaacauacuc

SEQ ID NO: 3332114 - RNA, 18 nt, Human
ccaccaacauacucccau

SEQ ID NO: 3332115 - RNA, 12 nt, Human
ccacacccagcc

SEQ ID NO: 3332116 - RNA, 14 nt, Human
ccacacccagccca

SEQ ID NO: 3332117 - RNA, 13 nt, Human
ccacacccagccc

SEQ ID NO: 3332118 - RNA, 13 nt, Human
ccacguuucuaaa

SEQ ID NO: 3332119 - RNA, 16 nt, Human
ccacugcgaccacaag

SEQ ID NO: 3332120 - RNA, 20 nt, Human
ccacugcacuccagccuggg

SEQ ID NO: 3332121 - RNA, 19 nt, Human
ccacugcacuccagccugg

SEQ ID NO: 3332122 - RNA, 15 nt, Human
ccacucccugcaacc

SEQ ID NO: 3332123 - RNA, 18 nt, Human
ccacugcacuccagccug

SEQ ID NO: 3332124 - RNA, 18 nt, Human
ccacuacauucuguuaau

SEQ ID NO: 3332125 - RNA, 22 nt, Human
ccacuacggaauaguuggcuag

SEQ ID NO: 3332126 - RNA, 23 nt, Human
ccacuacggaauaguuggcuagg

SEQ ID NO: 3332127 - RNA, 12 nt, Human
ccacucccugca

SEQ ID NO: 3332128 - RNA, 13 nt, Human
ccacucccugcaa

SEQ ID NO: 3332129 - RNA, 18 nt, Human
ccacucaguccauagcag

SEQ ID NO: 3332130 - RNA, 15 nt, Human
ccaccucagccuccc

SEQ ID NO: 3332131 - RNA, 14 nt, Human
ccaccucagccucc

SEQ ID NO: 3332132 - RNA, 13 nt, Human
ccaccucagccuc

SEQ ID NO: 3332133 - RNA, 16 nt, Human
ccacccugaaagcccu

SEQ ID NO: 3332134 - RNA, 17 nt, Human
ccacccugaaagcccug

SEQ ID NO: 3332135 - RNA, 12 nt, Human
ccaccucagccu

SEQ ID NO: 3332136 - RNA, 14 nt, Human
ccacccaggagccc

SEQ ID NO: 3332137 - RNA, 12 nt, Human
ccacccaggagc

SEQ ID NO: 3332138 - RNA, 15 nt, Human
ccacggccaggccag

SEQ ID NO: 3332139 - RNA, 14 nt, Human
ccacggccaggcca

SEQ ID NO: 3332140 - RNA, 13 nt, Human
ccacggccaggcc

SEQ ID NO: 3332141 - RNA, 12 nt, Human
ccacggccaggc

SEQ ID NO: 3332142 - RNA, 17 nt, Human
ccaccuggccucugcac

SEQ ID NO: 3332143 - RNA, 14 nt, Human
ccaccuggccucug

SEQ ID NO: 3332144 - RNA, 19 nt, Human
ccacgcuggagugcaguga

SEQ ID NO: 3332145 - RNA, 22 nt, Human
ccaccugcggugcuaucucccc

SEQ ID NO: 3332146 - RNA, 15 nt, Human
ccaccuggccucugc

SEQ ID NO: 3332147 - RNA, 16 nt, Human
ccaccuggccucugca

SEQ ID NO: 3332148 - RNA, 17 nt, Human
ccaccugccuguugggc

SEQ ID NO: 3332149 - RNA, 20 nt, Human
ccaccugccuguugggccag

SEQ ID NO: 3332150 - RNA, 16 nt, Human
ccaccugccagggaca

SEQ ID NO: 3332151 - RNA, 17 nt, Human
ccaccucccacaaagga

SEQ ID NO: 3332152 - RNA, 12 nt, Human
ccagauuucacu

SEQ ID NO: 3332153 - RNA, 18 nt, Human
ccagauugcaacaggcug

SEQ ID NO: 3332154 - RNA, 20 nt, Human
ccagauugcaacaggcuggg

SEQ ID NO: 3332155 - RNA, 19 nt, Human
ccagauugcaacaggcugg

SEQ ID NO: 3332156 - RNA, 15 nt, Human
ccagagggccugcaa

SEQ ID NO: 3332157 - RNA, 16 nt, Human
ccagagggccugcaag

SEQ ID NO: 3332158 - RNA, 23 nt, Human
ccagaugcaccagcccuuagcag

SEQ ID NO: 3332159 - RNA, 23 nt, Human
ccagagggagugacagaggcagc

SEQ ID NO: 3332160 - RNA, 22 nt, Human
ccagagggagugacagaggcag

SEQ ID NO: 3332161 - RNA, 13 nt, Human
ccagagggccugc

SEQ ID NO: 3332162 - RNA, 19 nt, Human
ccagauucuuuccugaggc

SEQ ID NO: 3332163 - RNA, 20 nt, Human
ccagauucuuuccugaggcu

SEQ ID NO: 3332164 - RNA, 21 nt, Human
ccagauucuuuccugaggcug

SEQ ID NO: 3332165 - RNA, 22 nt, Human
ccagauucuuuccugaggcugg

SEQ ID NO: 3332166 - RNA, 18 nt, Human
ccagauucuuuccugagg

SEQ ID NO: 3332167 - RNA, 13 nt, Human
ccagagagggugg

SEQ ID NO: 3332168 - RNA, 14 nt, Human
ccagagaggguggu

SEQ ID NO: 3332169 - RNA, 23 nt, Human
ccagagaggguggugaccucugc

SEQ ID NO: 3332170 - RNA, 21 nt, Human
ccagagaggguggugaccucu

SEQ ID NO: 3332171 - RNA, 19 nt, Human
ccagacaccuugacagggc

SEQ ID NO: 3332172 - RNA, 17 nt, Human
ccagacaccuugacagg

SEQ ID NO: 3332173 - RNA, 22 nt, Human
ccagaggagagaggacccccug

SEQ ID NO: 3332174 - RNA, 21 nt, Human
ccagaggagagaggacccccu

SEQ ID NO: 3332175 - RNA, 21 nt, Human
ccagagggagugacagaggca

SEQ ID NO: 3332176 - RNA, 20 nt, Human
ccagagggagugacagaggc

SEQ ID NO: 3332177 - RNA, 19 nt, Human
ccagagggagugacagagg

SEQ ID NO: 3332178 - RNA, 18 nt, Human
ccagagggagugacagag

SEQ ID NO: 3332179 - RNA, 17 nt, Human
ccagagggagugacaga

SEQ ID NO: 3332180 - RNA, 16 nt, Human
ccagagggagugacag

SEQ ID NO: 3332181 - RNA, 14 nt, Human
ccagagcugccacc

SEQ ID NO: 3332182 - RNA, 15 nt, Human
ccagagcugccaccu

SEQ ID NO: 3332183 - RNA, 16 nt, Human
ccagagcugccaccug

SEQ ID NO: 3332184 - RNA, 19 nt, Human
ccagagcugccaccugccu

SEQ ID NO: 3332185 - RNA, 12 nt, Human
ccagagcugcca

SEQ ID NO: 3332186 - RNA, 13 nt, Human
ccagagcugccac

SEQ ID NO: 3332187 - RNA, 11 nt, Human
ccagagcugcc

SEQ ID NO: 3332188 - RNA, 22 nt, Human
ccagcaagugagagcugggugu

SEQ ID NO: 3332189 - RNA, 21 nt, Human
ccagcaagugagagcugggug

SEQ ID NO: 3332190 - RNA, 20 nt, Human
ccagcaagugagagcugggu

SEQ ID NO: 3332191 - RNA, 14 nt, Human
ccagauuucacucu

SEQ ID NO: 3332192 - RNA, 15 nt, Human
ccagcaagugagagc

SEQ ID NO: 3332193 - RNA, 18 nt, Human
ccagccgccaugcuccug

SEQ ID NO: 3332194 - RNA, 14 nt, Human
ccagccgccaugcu

SEQ ID NO: 3332195 - RNA, 23 nt, Human
ccagccgagauagccaaggccaa

SEQ ID NO: 3332196 - RNA, 17 nt, Human
ccagcccuuagcaggga

SEQ ID NO: 3332197 - RNA, 16 nt, Human
ccagcccuuagcaggg

SEQ ID NO: 3332198 - RNA, 16 nt, Human
ccagccccagugccca

SEQ ID NO: 3332199 - RNA, 23 nt, Human
ccagccccaaaacucuccucugc

SEQ ID NO: 3332200 - RNA, 19 nt, Human
ccagccccaaaacucuccu

SEQ ID NO: 3332201 - RNA, 15 nt, Human
ccagccccagugccc

SEQ ID NO: 3332202 - RNA, 13 nt, Human
ccagccccagugc

SEQ ID NO: 3332203 - RNA, 18 nt, Human
ccagccaaagccuccucc

SEQ ID NO: 3332204 - RNA, 19 nt, Human
ccagccaaagccuccucca

SEQ ID NO: 3332205 - RNA, 15 nt, Human
ccagccaaagccucc

SEQ ID NO: 3332206 - RNA, 20 nt, Human
ccagugccgagaaggaagcc

SEQ ID NO: 3332207 - RNA, 22 nt, Human
ccagugguuccuaauccucuag

SEQ ID NO: 3332208 - RNA, 14 nt, Human
ccagugaggcucug

SEQ ID NO: 3332209 - RNA, 15 nt, Human
ccagugaggcucugc

SEQ ID NO: 3332210 - RNA, 16 nt, Human
ccagugaggcucugcc

SEQ ID NO: 3332211 - RNA, 23 nt, Human
ccagugcccacaggaucagucug

SEQ ID NO: 3332212 - RNA, 22 nt, Human
ccaguguuguggauuuaacaga

SEQ ID NO: 3332213 - RNA, 17 nt, Human
ccaguguugccuaagua

SEQ ID NO: 3332214 - RNA, 19 nt, Human
ccaguguugccuaaguauu

SEQ ID NO: 3332215 - RNA, 23 nt, Human
ccauauucuguuggccaguguga

SEQ ID NO: 3332216 - RNA, 20 nt, Human
ccaggcuuagucacugagac

SEQ ID NO: 3332217 - RNA, 14 nt, Human
ccagggacagaggg

SEQ ID NO: 3332218 - RNA, 15 nt, Human
ccagggacagagggg

SEQ ID NO: 3332219 - RNA, 21 nt, Human
ccagggacagaggggguggcc

SEQ ID NO: 3332220 - RNA, 19 nt, Human
ccaggugcacaagcuccaa

SEQ ID NO: 3332221 - RNA, 20 nt, Human
ccaggugcacaagcuccaag

SEQ ID NO: 3332222 - RNA, 18 nt, Human
ccaggugcacaagcucca

SEQ ID NO: 3332223 - RNA, 18 nt, Human
ccagucuggaaugcagug

SEQ ID NO: 3332224 - RNA, 13 nt, Human
ccagugaggcucu

SEQ ID NO: 3332225 - RNA, 20 nt, Human
ccagucuggaaugcaguggu

SEQ ID NO: 3332226 - RNA, 19 nt, Human
ccagucuggaaugcagugg

SEQ ID NO: 3332227 - RNA, 17 nt, Human
ccagguuuuuggucuga

SEQ ID NO: 3332228 - RNA, 15 nt, Human
ccagguucagcuugu

SEQ ID NO: 3332229 - RNA, 20 nt, Human
ccaggcccucugcccacucc

SEQ ID NO: 3332230 - RNA, 21 nt, Human
ccaggcccucugcccacuccc

SEQ ID NO: 3332231 - RNA, 22 nt, Human
ccaggcccucugcccacucccu

SEQ ID NO: 3332232 - RNA, 23 nt, Human
ccaggcccucugcccacucccug

SEQ ID NO: 3332233 - RNA, 17 nt, Human
ccaggcuuagucacuga

SEQ ID NO: 3332234 - RNA, 24 nt, Human
ccaggcuguaucccaugagccuca

SEQ ID NO: 3332235 - RNA, 17 nt, Human
ccaggcauuccccagga

SEQ ID NO: 3332236 - RNA, 18 nt, Human
ccaggcauuccccaggag

SEQ ID NO: 3332237 - RNA, 19 nt, Human
ccaggcauuccccaggagg

SEQ ID NO: 3332238 - RNA, 21 nt, Human
ccaggcauuccccaggaggcc

SEQ ID NO: 3332239 - RNA, 20 nt, Human
ccaggagccccgaggccuuc

SEQ ID NO: 3332240 - RNA, 19 nt, Human
ccaggagccuccugcccuu

SEQ ID NO: 3332241 - RNA, 19 nt, Human
ccaggagccccgaggccuu

SEQ ID NO: 3332242 - RNA, 16 nt, Human
ccaggagccccgaggc

SEQ ID NO: 3332243 - RNA, 14 nt, Human
ccauuuguguuuau

SEQ ID NO: 3332244 - RNA, 19 nt, Human
ccauucuccaccugccagg

SEQ ID NO: 3332245 - RNA, 20 nt, Human
ccauucuccaccugccaggg

SEQ ID NO: 3332246 - RNA, 16 nt, Human
cccaaagcagugcaug

SEQ ID NO: 3332247 - RNA, 16 nt, Human
cccaaaacucuccucu

SEQ ID NO: 3332248 - RNA, 18 nt, Human
cccaaaacucuccucugc

SEQ ID NO: 3332249 - RNA, 15 nt, Human
cccaaagugcuggga

SEQ ID NO: 3332250 - RNA, 13 nt, Human
cccaaagugcugg

SEQ ID NO: 3332251 - RNA, 16 nt, Human
cccaaagugcugggau

SEQ ID NO: 3332252 - RNA, 18 nt, Human
cccaaauggaaaugggca

SEQ ID NO: 3332253 - RNA, 22 nt, Human
cccaaauggaaaugggcagagc

SEQ ID NO: 3332254 - RNA, 19 nt, Human
ccauauucuguuggccagu

SEQ ID NO: 3332255 - RNA, 18 nt, Human
ccauucuccaccugccag

SEQ ID NO: 3332256 - RNA, 16 nt, Human
ccauguuggccaggcu

SEQ ID NO: 3332257 - RNA, 17 nt, Human
ccauguuggccaggcug

SEQ ID NO: 3332258 - RNA, 23 nt, Human
ccugccuguugggccaggagccu

SEQ ID NO: 3332259 - RNA, 22 nt, Human
ccugccccucaacucuccucca

SEQ ID NO: 3332260 - RNA, 16 nt, Human
ccugcggugcuaucuc

SEQ ID NO: 3332261 - RNA, 17 nt, Human
ccugcggugcuaucucc

SEQ ID NO: 3332262 - RNA, 22 nt, Human
ccugcucuccgaccagacaccu

SEQ ID NO: 3332263 - RNA, 22 nt, Human
ccugcggugcuaucucccccag

SEQ ID NO: 3332264 - RNA, 21 nt, Human
ccugcucuccgaccagacacc

SEQ ID NO: 3332265 - RNA, 14 nt, Human
ccugcuucaaauau

SEQ ID NO: 3332266 - RNA, 15 nt, Human
ccuggccagaugcac

SEQ ID NO: 3332267 - RNA, 18 nt, Human
ccuggaauauauaaccag

SEQ ID NO: 3332268 - RNA, 12 nt, Human
ccuggcagcccc

SEQ ID NO: 3332269 - RNA, 13 nt, Human
ccuggcagccccu

SEQ ID NO: 3332270 - RNA, 23 nt, Human
ccuggcacccggccccugcuggu

SEQ ID NO: 3332271 - RNA, 21 nt, Human
ccuggcacccggccccugcug

SEQ ID NO: 3332272 - RNA, 22 nt, Human
ccuggcacccggccccugcugg

SEQ ID NO: 3332273 - RNA, 13 nt, Human
ccugccaggaagc

SEQ ID NO: 3332274 - RNA, 14 nt, Human
ccugccaggaagcc

SEQ ID NO: 3332275 - RNA, 15 nt, Human
ccugccaggaagcca

SEQ ID NO: 3332276 - RNA, 17 nt, Human
ccugccaggaagccagc

SEQ ID NO: 3332277 - RNA, 15 nt, Human
ccugccaggcauggu

SEQ ID NO: 3332278 - RNA, 23 nt, Human
ccugccaggaagccagcaggcuc

SEQ ID NO: 3332279 - RNA, 16 nt, Human
ccugccaggcauggug

SEQ ID NO: 3332280 - RNA, 11 nt, Human
ccugccaggga

SEQ ID NO: 3332281 - RNA, 18 nt, Human
ccugccaggaagccagca

SEQ ID NO: 3332282 - RNA, 19 nt, Human
ccugccaggaagccagcag

SEQ ID NO: 3332283 - RNA, 21 nt, Human
ccugccaggaagccagcaggc

SEQ ID NO: 3332284 - RNA, 22 nt, Human
ccugccaggaagccagcaggcu

SEQ ID NO: 3332285 - RNA, 12 nt, Human
ccugccagggac

SEQ ID NO: 3332286 - RNA, 13 nt, Human
ccugccagggaca

SEQ ID NO: 3332287 - RNA, 14 nt, Human
ccugccagggacag

SEQ ID NO: 3332288 - RNA, 15 nt, Human
ccugccagggacaga

SEQ ID NO: 3332289 - RNA, 16 nt, Human
ccugccagggacagag

SEQ ID NO: 3332290 - RNA, 22 nt, Human
ccugcaaccugauugugucucu

SEQ ID NO: 3332291 - RNA, 21 nt, Human
ccugcaaccugauugugucuc

SEQ ID NO: 3332292 - RNA, 17 nt, Human
ccugauugugucucuug

SEQ ID NO: 3332293 - RNA, 11 nt, Human
ccugaggcccu

SEQ ID NO: 3332294 - RNA, 12 nt, Human
ccugaggcccuu

SEQ ID NO: 3332295 - RNA, 19 nt, Human
ccugaugcuucuucagaga

SEQ ID NO: 3332296 - RNA, 20 nt, Human
ccugaugcuucuucagagac

SEQ ID NO: 3332297 - RNA, 21 nt, Human
ccugaugcuucuucagagacu

SEQ ID NO: 3332298 - RNA, 15 nt, Human
ccugauugugucucu

SEQ ID NO: 3332299 - RNA, 23 nt, Human
ccugcaggcagccaggccacaag

SEQ ID NO: 3332300 - RNA, 14 nt, Human
ccugcaagaacaag

SEQ ID NO: 3332301 - RNA, 23 nt, Human
ccugacaacacucauugaccuga

SEQ ID NO: 3332302 - RNA, 21 nt, Human
ccugaggcccagagggccugc

SEQ ID NO: 3332303 - RNA, 18 nt, Human
ccugaggcccagagggcc

SEQ ID NO: 3332304 - RNA, 16 nt, Human
ccugagcuuucugcua

SEQ ID NO: 3332305 - RNA, 20 nt, Human
ccugagccagauuucacucu

SEQ ID NO: 3332306 - RNA, 14 nt, Human
ccugagcuuucugc

SEQ ID NO: 3332307 - RNA, 17 nt, Human
cgccaugcuccuggccc

SEQ ID NO: 3332308 - RNA, 17 nt, Human
cgccagauucuuuccug

SEQ ID NO: 3332309 - RNA, 19 nt, Human
cgccagauucuuuccugag

SEQ ID NO: 3332310 - RNA, 20 nt, Human
cgccagauucuuuccugagg

SEQ ID NO: 3332311 - RNA, 21 nt, Human
cgccagauucuuuccugaggc

SEQ ID NO: 3332312 - RNA, 15 nt, Human
cgcagacaggaccag

SEQ ID NO: 3332313 - RNA, 16 nt, Human
cgcagacaggaccagg

SEQ ID NO: 3332314 - RNA, 14 nt, Human
cgcagcccugcaga

SEQ ID NO: 3332315 - RNA, 20 nt, Human
cgauuucuguuuagauaaua

SEQ ID NO: 3332316 - RNA, 18 nt, Human
cgcacacacacacauaca

SEQ ID NO: 3332317 - RNA, 16 nt, Human
cgcacacacacacaua

SEQ ID NO: 3332318 - RNA, 18 nt, Human
cgagcaugccuggauggg

SEQ ID NO: 3332319 - RNA, 16 nt, Human
cgagcccugguggcag

SEQ ID NO: 3332320 - RNA, 15 nt, Human
cgagcccugguggca

SEQ ID NO: 3332321 - RNA, 20 nt, Human
ccuuugacgccaucccagcc

SEQ ID NO: 3332322 - RNA, 21 nt, Human
ccuuugacgccaucccagccc

SEQ ID NO: 3332323 - RNA, 22 nt, Human
ccuuugacgccaucccagcccc

SEQ ID NO: 3332324 - RNA, 18 nt, Human
cgaaaacguggcugcuuc

SEQ ID NO: 3332325 - RNA, 19 nt, Human
cgaaaacguggcugcuuca

SEQ ID NO: 3332326 - RNA, 15 nt, Human
cgaaaacguggcugc

SEQ ID NO: 3332327 - RNA, 20 nt, Human
cgaaaacguggcugcuucaa

SEQ ID NO: 3332328 - RNA, 21 nt, Human
cgaaagaacaguccauugaaa

SEQ ID NO: 3332329 - RNA, 12 nt, Human
cgaaagaacagu

SEQ ID NO: 3332330 - RNA, 23 nt, Human
cgaaagagagagaaacaaacuuu

SEQ ID NO: 3332331 - RNA, 22 nt, Human
cgaaagagagagaaacaaacuu

SEQ ID NO: 3332332 - RNA, 13 nt, Human
cgaaagagagaga

SEQ ID NO: 3332333 - RNA, 12 nt, Human
cgaaagagagag

SEQ ID NO: 3332334 - RNA, 11 nt, Human
cgaaagagaga

SEQ ID NO: 3332335 - RNA, 23 nt, Human
cgaacauguuuuucuucucccuc

SEQ ID NO: 3332336 - RNA, 22 nt, Human
cgaaagggacuuggaagcuccg

SEQ ID NO: 3332337 - RNA, 20 nt, Human
cgaaaggaugaaagugacca

SEQ ID NO: 3332338 - RNA, 19 nt, Human
cgaaagggacuuggaagcu

SEQ ID NO: 3332339 - RNA, 14 nt, Human
cgaacuggcugcaa

SEQ ID NO: 3332340 - RNA, 12 nt, Human
cgaacuggcugc

SEQ ID NO: 3332341 - RNA, 18 nt, Human
cgagauagccaaggccaa

SEQ ID NO: 3332342 - RNA, 17 nt, Human
cgagaucacgccacugc

SEQ ID NO: 3332343 - RNA, 14 nt, Human
cgaauagcugggac

SEQ ID NO: 3332344 - RNA, 13 nt, Human
cgaauagcuggga

SEQ ID NO: 3332345 - RNA, 14 nt, Human
cgagcaugccugga

SEQ ID NO: 3332346 - RNA, 13 nt, Human
cgagcaugccugg

SEQ ID NO: 3332347 - RNA, 16 nt, Human
cgagcaugccuggaug

SEQ ID NO: 3332348 - RNA, 17 nt, Human
cgagcaugccuggaugg

SEQ ID NO: 3332349 - RNA, 20 nt, Human
cgagcaggcuucuucccccc

SEQ ID NO: 3332350 - RNA, 20 nt, Human
cgagaucacgccacugcacu

SEQ ID NO: 3332351 - RNA, 18 nt, Human
cgagaucacgccacugca

SEQ ID NO: 3332352 - RNA, 20 nt, Human
cgagauugcaccacugcacu

SEQ ID NO: 3332353 - RNA, 21 nt, Human
ccugugugugcgccuacagga

SEQ ID NO: 3332354 - RNA, 20 nt, Human
ccugugugugcgccuacagg

SEQ ID NO: 3332355 - RNA, 22 nt, Human
ccugugucuugcaauggcagcc

SEQ ID NO: 3332356 - RNA, 21 nt, Human
ccugugucuugcaauggcagc

SEQ ID NO: 3332357 - RNA, 19 nt, Human
ccugugucuugcaauggca

SEQ ID NO: 3332358 - RNA, 17 nt, Human
ccugugucuugcaaugg

SEQ ID NO: 3332359 - RNA, 14 nt, Human
ccuguuuguuucug

SEQ ID NO: 3332360 - RNA, 18 nt, Human
ccuguuuguuucugaaag

SEQ ID NO: 3332361 - RNA, 16 nt, Human
ccuguuucugcagcca

SEQ ID NO: 3332362 - RNA, 23 nt, Human
ccuguugggccaggagccuccug

SEQ ID NO: 3332363 - RNA, 15 nt, Human
ccuuacccucauguu

SEQ ID NO: 3332364 - RNA, 17 nt, Human
ccuuaccagcagagcac

SEQ ID NO: 3332365 - RNA, 20 nt, Human
ccuuaccagcagagcaccuu

SEQ ID NO: 3332366 - RNA, 14 nt, Human
ccuuaccugccagg

SEQ ID NO: 3332367 - RNA, 19 nt, Human
ccuuaccugccaggaagcc

SEQ ID NO: 3332368 - RNA, 18 nt, Human
ccuuagaagucacacagu

SEQ ID NO: 3332369 - RNA, 17 nt, Human
ccuuagaagucacacag

SEQ ID NO: 3332370 - RNA, 14 nt, Human
ccuuacacaauggu

SEQ ID NO: 3332371 - RNA, 20 nt, Human
ccuuacacaaugguuuucuu

SEQ ID NO: 3332372 - RNA, 21 nt, Human
ccuugguuaggcauuguggga

SEQ ID NO: 3332373 - RNA, 22 nt, Human
ccuugguuaggcauugugggaa

SEQ ID NO: 3332374 - RNA, 22 nt, Human
ccuuggugucgggcaugacacg

SEQ ID NO: 3332375 - RNA, 21 nt, Human
ccuuggugucgggcaugacac

SEQ ID NO: 3332376 - RNA, 16 nt, Human
ccuuugacgccauccc

SEQ ID NO: 3332377 - RNA, 17 nt, Human
ccuuugacgccauccca

SEQ ID NO: 3332378 - RNA, 18 nt, Human
ccuuugacgccaucccag

SEQ ID NO: 3332379 - RNA, 15 nt, Human
ccuucuccuucaccu

SEQ ID NO: 3332380 - RNA, 19 nt, Human
ccuucuccuucaccuuugu

SEQ ID NO: 3332381 - RNA, 15 nt, Human
ccuucggcgccuuaa

SEQ ID NO: 3332382 - RNA, 13 nt, Human
ccuugacucuuuc

SEQ ID NO: 3332383 - RNA, 22 nt, Human
ccuugaccauucuccaccugcc

SEQ ID NO: 3332384 - RNA, 23 nt, Human
ccuugaccauucuccaccugcca

SEQ ID NO: 3332385 - RNA, 19 nt, Human
ccuugaacuuugaccucug

SEQ ID NO: 3332386 - RNA, 19 nt, Human
ccuucauuuggcauucccc

SEQ ID NO: 3332387 - RNA, 14 nt, Human
ccuucagugccaaa

SEQ ID NO: 3332388 - RNA, 11 nt, Human
ccuucagugcc

SEQ ID NO: 3332389 - RNA, 10 nt, Human
ccuucagugc

SEQ ID NO: 3332390 - RNA, 21 nt, Human
ccuucaccuuuguccccaccg

SEQ ID NO: 3332391 - RNA, 19 nt, Human
ccuucaccuuuguccccac

SEQ ID NO: 3332392 - RNA, 20 nt, Human
ccuucaccuuuguccccacc

SEQ ID NO: 3332393 - RNA, 17 nt, Human
ccuucacagaugggugc

SEQ ID NO: 3332394 - RNA, 22 nt, Human
ccuucauuuggcauuccccacu

SEQ ID NO: 3332395 - RNA, 18 nt, Human
ccuucgcuccugugucuu

SEQ ID NO: 3332396 - RNA, 17 nt, Human
ccucccgaauagcuggg

SEQ ID NO: 3332397 - RNA, 10 nt, Human
ccucccuccc

SEQ ID NO: 3332398 - RNA, 14 nt, Human
ccuccucagaucuu

SEQ ID NO: 3332399 - RNA, 21 nt, Human
ccucccgaguagcugggacua

SEQ ID NO: 3332400 - RNA, 20 nt, Human
ccucccgaguagcugggacu

SEQ ID NO: 3332401 - RNA, 19 nt, Human
ccucccgaguagcugggac

SEQ ID NO: 3332402 - RNA, 14 nt, Human
ccuccugggcuaag

SEQ ID NO: 3332403 - RNA, 23 nt, Human
ccuccugccucgaacuggcugca

SEQ ID NO: 3332404 - RNA, 13 nt, Human
ccuccugccucga

SEQ ID NO: 3332405 - RNA, 16 nt, Human
ccucggugccuuccuc

SEQ ID NO: 3332406 - RNA, 14 nt, Human
ccucgguguggaga

SEQ ID NO: 3332407 - RNA, 16 nt, Human
ccucuaggaggucucu

SEQ ID NO: 3332408 - RNA, 13 nt, Human
ccucauccucaua

SEQ ID NO: 3332409 - RNA, 20 nt, Human
ccucauccucauacccaccc

SEQ ID NO: 3332410 - RNA, 13 nt, Human
ccucaucaccaac

SEQ ID NO: 3332411 - RNA, 14 nt, Human
ccucaucaccaacg

SEQ ID NO: 3332412 - RNA, 22 nt, Human
ccucauaguaugguggcugggu

SEQ ID NO: 3332413 - RNA, 21 nt, Human
ccucauaguaugguggcuggg

SEQ ID NO: 3332414 - RNA, 13 nt, Human
ccucauacccacc

SEQ ID NO: 3332415 - RNA, 20 nt, Human
ccucauaguaugguggcugg

SEQ ID NO: 3332416 - RNA, 20 nt, Human
ccucagucuggcccuuccuu

SEQ ID NO: 3332417 - RNA, 12 nt, Human
ccucauacccac

SEQ ID NO: 3332418 - RNA, 11 nt, Human
ccucagugcca

SEQ ID NO: 3332419 - RNA, 19 nt, Human
ccucagucuggcccuuccu

SEQ ID NO: 3332420 - RNA, 15 nt, Human
ccucccaaagugcug

SEQ ID NO: 3332421 - RNA, 23 nt, Human
ccuccaugugggcuaguugggcu

SEQ ID NO: 3332422 - RNA, 19 nt, Human
ccuccaggugcacaagcuc

SEQ ID NO: 3332423 - RNA, 21 nt, Human
ccuccaggugcacaagcucca

SEQ ID NO: 3332424 - RNA, 22 nt, Human
ccuccaggugcacaagcuccaa

SEQ ID NO: 3332425 - RNA, 17 nt, Human
ccuccaggugcacaagc

SEQ ID NO: 3332426 - RNA, 14 nt, Human
ccuaaaguguauuu

SEQ ID NO: 3332427 - RNA, 13 nt, Human
ccuaguuccacca

SEQ ID NO: 3332428 - RNA, 21 nt, Human
ccuaguuccaccaucaagcca

SEQ ID NO: 3332429 - RNA, 23 nt, Human
ccuaguuccaccaucaagccacc

SEQ ID NO: 3332430 - RNA, 18 nt, Human
ccuauauuguuuucagug

SEQ ID NO: 3332431 - RNA, 22 nt, Human
ccuauauuguuuucaguguaca

SEQ ID NO: 3332432 - RNA, 23 nt, Human
ccgcuaagagggagggagggcuc

SEQ ID NO: 3332433 - RNA, 21 nt, Human
ccgcuaagagggagggagggc

SEQ ID NO: 3332434 - RNA, 14 nt, Human
ccgcacugggcuug

SEQ ID NO: 3332435 - RNA, 17 nt, Human
ccgaguagcugggacua

SEQ ID NO: 3332436 - RNA, 16 nt, Human
ccgaguagcugggacu

SEQ ID NO: 3332437 - RNA, 20 nt, Human
ccgaguagcugggacuacag

SEQ ID NO: 3332438 - RNA, 14 nt, Human
ccgaggccuucucu

SEQ ID NO: 3332439 - RNA, 12 nt, Human
ccgcuuucuacc

SEQ ID NO: 3332440 - RNA, 17 nt, Human
ccggcuggccuggcccc

SEQ ID NO: 3332441 - RNA, 18 nt, Human
ccggcuggccuggccccu

SEQ ID NO: 3332442 - RNA, 15 nt, Human
ccggcuggccuggcc

SEQ ID NO: 3332443 - RNA, 19 nt, Human
ccgcuuucuacccagcgag

SEQ ID NO: 3332444 - RNA, 20 nt, Human
ccgggaagggggcugggaca

SEQ ID NO: 3332445 - RNA, 22 nt, Human
ccgggcucugccucccaucacc

SEQ ID NO: 3332446 - RNA, 20 nt, Human
ccgggcgcgguggcucacgc

SEQ ID NO: 3332447 - RNA, 12 nt, Human
cccucuggggcu

SEQ ID NO: 3332448 - RNA, 16 nt, Human
cccucuggggcuguuc

SEQ ID NO: 3332449 - RNA, 13 nt, Human
cccugaggcccag

SEQ ID NO: 3332450 - RNA, 15 nt, Human
cccugaaagcccuga

SEQ ID NO: 3332451 - RNA, 14 nt, Human
cccugaggcccaga

SEQ ID NO: 3332452 - RNA, 15 nt, Human
cccugaggcccagag

SEQ ID NO: 3332453 - RNA, 16 nt, Human
cccugaggcccagagg

SEQ ID NO: 3332454 - RNA, 17 nt, Human
cccugaggcccagaggg

SEQ ID NO: 3332455 - RNA, 18 nt, Human
cccugaggcccagagggc

SEQ ID NO: 3332456 - RNA, 19 nt, Human
cccugaggcccagagggcc

SEQ ID NO: 3332457 - RNA, 20 nt, Human
cccugaggcccagagggccu

SEQ ID NO: 3332458 - RNA, 23 nt, Human
cccugaggcccagagggccugca

SEQ ID NO: 3332459 - RNA, 19 nt, Human
cccugcacuugcagacucu

SEQ ID NO: 3332460 - RNA, 12 nt, Human
cccugcacuugc

SEQ ID NO: 3332461 - RNA, 13 nt, Human
cccugcccaccug

SEQ ID NO: 3332462 - RNA, 14 nt, Human
cccugcccaccugg

SEQ ID NO: 3332463 - RNA, 17 nt, Human
cccugcccaccuggccu

SEQ ID NO: 3332464 - RNA, 18 nt, Human
cccugcccaccuggccuc

SEQ ID NO: 3332465 - RNA, 16 nt, Human
cccugcuggguguggc

SEQ ID NO: 3332466 - RNA, 21 nt, Human
cccugcuggguguggcgcagc

SEQ ID NO: 3332467 - RNA, 16 nt, Human
cccugguggcagcuca

SEQ ID NO: 3332468 - RNA, 17 nt, Human
cccugguggcagcucac

SEQ ID NO: 3332469 - RNA, 15 nt, Human
cccugguggcagcuc

SEQ ID NO: 3332470 - RNA, 14 nt, Human
cccgggcucugccu

SEQ ID NO: 3332471 - RNA, 15 nt, Human
cccgggcucugccuc

SEQ ID NO: 3332472 - RNA, 12 nt, Human
cccgggcucugc

SEQ ID NO: 3332473 - RNA, 22 nt, Human
cccgaguagcugggacuacagg

SEQ ID NO: 3332474 - RNA, 22 nt, Human
cccgcccaggcuuagucacuga

SEQ ID NO: 3332475 - RNA, 19 nt, Human
cccgcugucagccauuccu

SEQ ID NO: 3332476 - RNA, 20 nt, Human
cccgcugucagccauuccug

SEQ ID NO: 3332477 - RNA, 21 nt, Human
cccgaguagcugggacuacag

SEQ ID NO: 3332478 - RNA, 18 nt, Human
cccgaguagcugggacua

SEQ ID NO: 3332479 - RNA, 17 nt, Human
cccgaguagcugggacu

SEQ ID NO: 3332480 - RNA, 16 nt, Human
cccgaguagcugggac

SEQ ID NO: 3332481 - RNA, 15 nt, Human
cccgaguagcuggga

SEQ ID NO: 3332482 - RNA, 14 nt, Human
cccgaguagcuggg

SEQ ID NO: 3332483 - RNA, 13 nt, Human
cccgaguagcugg

SEQ ID NO: 3332484 - RNA, 15 nt, Human
cccagagggccugca

SEQ ID NO: 3332485 - RNA, 21 nt, Human
cccgaggccuucucugaagga

SEQ ID NO: 3332486 - RNA, 14 nt, Human
cccagagggccugc

SEQ ID NO: 3332487 - RNA, 20 nt, Human
cccuacaguugaaaaacagc

SEQ ID NO: 3332488 - RNA, 16 nt, Human
cccgggcucugccucc

SEQ ID NO: 3332489 - RNA, 19 nt, Human
cccaccgcagacaggacca

SEQ ID NO: 3332490 - RNA, 20 nt, Human
cccaccgcagacaggaccag

SEQ ID NO: 3332491 - RNA, 19 nt, Human
cccaccucucucacuccuu

SEQ ID NO: 3332492 - RNA, 22 nt, Human
cccaccucucucacuccuugaa

SEQ ID NO: 3332493 - RNA, 17 nt, Human
cccaccucagccucccg

SEQ ID NO: 3332494 - RNA, 20 nt, Human
cccacgcuggagugcaguga

SEQ ID NO: 3332495 - RNA, 19 nt, Human
cccacgcuggagugcagug

SEQ ID NO: 3332496 - RNA, 14 nt, Human
cccacgcuggagug

SEQ ID NO: 3332497 - RNA, 23 nt, Human
cccacuugagaauuacccuuuug

SEQ ID NO: 3332498 - RNA, 12 nt, Human
cccacuucugcc

SEQ ID NO: 3332499 - RNA, 20 nt, Human
cccacgacugcccggcaggg

SEQ ID NO: 3332500 - RNA, 21 nt, Human
cccacgacugcccggcagggu

SEQ ID NO: 3332501 - RNA, 20 nt, Human
cccaccuuggcugcagggag

SEQ ID NO: 3332502 - RNA, 16 nt, Human
cccaccuggccucugc

SEQ ID NO: 3332503 - RNA, 19 nt, Human
cccaccuggccucugcacu

SEQ ID NO: 3332504 - RNA, 21 nt, Human
cccaccuggccucugcacucc

SEQ ID NO: 3332505 - RNA, 17 nt, Human
cccaccuggccucugca

SEQ ID NO: 3332506 - RNA, 16 nt, Human
cccaaugcacuuuguu

SEQ ID NO: 3332507 - RNA, 20 nt, Human
cccaaugcacuuuguucugg

SEQ ID NO: 3332508 - RNA, 21 nt, Human
cccacaaaggagagcuagcag

SEQ ID NO: 3332509 - RNA, 21 nt, Human
cugggauuacaagcgugagcc

SEQ ID NO: 3332510 - RNA, 18 nt, Human
cugggggccucagugcca

SEQ ID NO: 3332511 - RNA, 14 nt, Human
cugggggcugggca

SEQ ID NO: 3332512 - RNA, 18 nt, Human
cugggcuugucuguagau

SEQ ID NO: 3332513 - RNA, 22 nt, Human
cugggcuuggggaccagagcug

SEQ ID NO: 3332514 - RNA, 21 nt, Human
cugggcuuggggaccagagcu

SEQ ID NO: 3332515 - RNA, 15 nt, Human
cugggcuucaguggc

SEQ ID NO: 3332516 - RNA, 17 nt, Human
cuguacaugaaaacaca

SEQ ID NO: 3332517 - RNA, 20 nt, Human
cuguacaugaaaacacauuu

SEQ ID NO: 3332518 - RNA, 21 nt, Human
cuguacaugaaaacacauuuu

SEQ ID NO: 3332519 - RNA, 18 nt, Human
cuguacgucugacaggca

SEQ ID NO: 3332520 - RNA, 16 nt, Human
cuguacgucugacagg

SEQ ID NO: 3332521 - RNA, 15 nt, Human
cuguacgucugacag

SEQ ID NO: 3332522 - RNA, 14 nt, Human
cuguacgucugaca

SEQ ID NO: 3332523 - RNA, 20 nt, Human
cuguacgucugacaggcaau

SEQ ID NO: 3332524 - RNA, 19 nt, Human
cuguacgucugacaggcaa

SEQ ID NO: 3332525 - RNA, 19 nt, Human
cuguaucccaugagccuca

SEQ ID NO: 3332526 - RNA, 20 nt, Human
cuguaucccaugagccucag

SEQ ID NO: 3332527 - RNA, 21 nt, Human
cuguaucccaugagccucagc

SEQ ID NO: 3332528 - RNA, 15 nt, Human
cugucaauuacagga

SEQ ID NO: 3332529 - RNA, 16 nt, Human
cugucaauuacaggaa

SEQ ID NO: 3332530 - RNA, 13 nt, Human
cugucaauuacag

SEQ ID NO: 3332531 - RNA, 20 nt, Human
cuguauuuuguuuuugucuu

SEQ ID NO: 3332532 - RNA, 21 nt, Human
cugguuagagguucccuuuga

SEQ ID NO: 3332533 - RNA, 22 nt, Human
cugguuagagguucccuuugac

SEQ ID NO: 3332534 - RNA, 14 nt, Human
cuguacagagccca

SEQ ID NO: 3332535 - RNA, 15 nt, Human
cuguacagagcccac

SEQ ID NO: 3332536 - RNA, 18 nt, Human
cuguacagagcccacgcc

SEQ ID NO: 3332537 - RNA, 14 nt, Human
cuguaauuugugau

SEQ ID NO: 3332538 - RNA, 15 nt, Human
cuguaauuugugaua

SEQ ID NO: 3332539 - RNA, 18 nt, Human
cugguggcagugggagcu

SEQ ID NO: 3332540 - RNA, 14 nt, Human
cugguggcaguggg

SEQ ID NO: 3332541 - RNA, 20 nt, Human
cugguggcagcucaccucuc

SEQ ID NO: 3332542 - RNA, 15 nt, Human
cugguggcagcugcg

SEQ ID NO: 3332543 - RNA, 17 nt, Human
cugguggcagcucaccu

SEQ ID NO: 3332544 - RNA, 18 nt, Human
cugguggcagcucaccuc

SEQ ID NO: 3332545 - RNA, 16 nt, Human
cugguggcagcucacc

SEQ ID NO: 3332546 - RNA, 14 nt, Human
cugguggcagcugc

SEQ ID NO: 3332547 - RNA, 18 nt, Human
cugucaauuacaggaagu

SEQ ID NO: 3332548 - RNA, 20 nt, Human
cugucauuugagcagggcuc

SEQ ID NO: 3332549 - RNA, 22 nt, Human
cugucauuugagcagggcucag

SEQ ID NO: 3332550 - RNA, 21 nt, Human
cugucauuugagcagggcuca

SEQ ID NO: 3332551 - RNA, 15 nt, Human
cugugaaaggaaaga

SEQ ID NO: 3332552 - RNA, 18 nt, Human
cugucuucaguaagccgu

SEQ ID NO: 3332553 - RNA, 22 nt, Human
cugugccauuuuguauuuuacu

SEQ ID NO: 3332554 - RNA, 19 nt, Human
cugugcccuaaaguguauu

SEQ ID NO: 3332555 - RNA, 14 nt, Human
cugugccaugugcc

SEQ ID NO: 3332556 - RNA, 15 nt, Human
cugugauggggcccu

SEQ ID NO: 3332557 - RNA, 16 nt, Human
cugugauggggcccug

SEQ ID NO: 3332558 - RNA, 21 nt, Human
cugugauggggcccugccucc

SEQ ID NO: 3332559 - RNA, 23 nt, Human
cugugauggggcccugccuccuu

SEQ ID NO: 3332560 - RNA, 20 nt, Human
cugugauggggcccugccuc

SEQ ID NO: 3332561 - RNA, 16 nt, Human
cugugaaaggaaagag

SEQ ID NO: 3332562 - RNA, 22 nt, Human
cugugaaaggaaagagggaggu

SEQ ID NO: 3332563 - RNA, 21 nt, Human
cuguggguuucuaaagcugcc

SEQ ID NO: 3332564 - RNA, 22 nt, Human
cuguggguuucuaaagcugcca

SEQ ID NO: 3332565 - RNA, 20 nt, Human
cugugucuuuuuucacuaca

SEQ ID NO: 3332566 - RNA, 23 nt, Human
cugugucuugcaauggcagccuu

SEQ ID NO: 3332567 - RNA, 23 nt, Human
cuguucuuucuggcuaugcauuu

SEQ ID NO: 3332568 - RNA, 16 nt, Human
cuguugcccaggcugg

SEQ ID NO: 3332569 - RNA, 15 nt, Human
cuguugcccaggcug

SEQ ID NO: 3332570 - RNA, 14 nt, Human
cuguugcccaggcu

SEQ ID NO: 3332571 - RNA, 13 nt, Human
cuguugcccaggc

SEQ ID NO: 3332572 - RNA, 12 nt, Human
cuguugcccagg

SEQ ID NO: 3332573 - RNA, 15 nt, Human
cuguucuuuccaaag

SEQ ID NO: 3332574 - RNA, 16 nt, Human
cuguucuuuccaaagu

SEQ ID NO: 3332575 - RNA, 19 nt, Human
cuguucuuuccaaaguaca

SEQ ID NO: 3332576 - RNA, 21 nt, Human
cuguucuuuccaaaguacacu

SEQ ID NO: 3332577 - RNA, 13 nt, Human
cuguucuuucugg

SEQ ID NO: 3332578 - RNA, 14 nt, Human
cuguucuuucuggc

SEQ ID NO: 3332579 - RNA, 21 nt, Human
cuguucuuucuggcuaugcau

SEQ ID NO: 3332580 - RNA, 16 nt, Human
cuguuaauaguucagg

SEQ ID NO: 3332581 - RNA, 17 nt, Human
cuguuugcuaagugagg

SEQ ID NO: 3332582 - RNA, 19 nt, Human
cuguuugcuaagugaggau

SEQ ID NO: 3332583 - RNA, 15 nt, Human
cuguuucaaacuuua

SEQ ID NO: 3332584 - RNA, 17 nt, Human
cuguuucaaacuuuacu

SEQ ID NO: 3332585 - RNA, 18 nt, Human
cuguuuagauaauacacc

SEQ ID NO: 3332586 - RNA, 14 nt, Human
cuguuuagauaaua

SEQ ID NO: 3332587 - RNA, 17 nt, Human
cuguuuagauaauacac

SEQ ID NO: 3332588 - RNA, 17 nt, Human
cuguugcccaggcuggc

SEQ ID NO: 3332589 - RNA, 16 nt, Human
cuuaaaaaguggaaaa

SEQ ID NO: 3332590 - RNA, 17 nt, Human
cuuaaaaaguggaaaaa

SEQ ID NO: 3332591 - RNA, 21 nt, Human
cuguuuuauuuuaauucaguu

SEQ ID NO: 3332592 - RNA, 23 nt, Human
cuuagguuggcaaaaaggcagga

SEQ ID NO: 3332593 - RNA, 21 nt, Human
cuuagguuggcaaaaaggcag

SEQ ID NO: 3332594 - RNA, 19 nt, Human
cuuagaauuaguggcacuu

SEQ ID NO: 3332595 - RNA, 20 nt, Human
cuuagaagucacacaguauu

SEQ ID NO: 3332596 - RNA, 17 nt, Human
cuuagaagucacacagu

SEQ ID NO: 3332597 - RNA, 20 nt, Human
cuuagaaaaaccaccaccau

SEQ ID NO: 3332598 - RNA, 13 nt, Human
cuuaccugccagg

SEQ ID NO: 3332599 - RNA, 20 nt, Human
cuuaccugccaggaagccag

SEQ ID NO: 3332600 - RNA, 16 nt, Human
cuuaaucuaaauggaa

SEQ ID NO: 3332601 - RNA, 20 nt, Human
cuuaauucuuagcucauucu

SEQ ID NO: 3332602 - RNA, 14 nt, Human
cuucacauauugau

SEQ ID NO: 3332603 - RNA, 23 nt, Human
cuucacauauugauuuccguuaa

SEQ ID NO: 3332604 - RNA, 24 nt, Human
cuucagagacuccugcaggcagcc

SEQ ID NO: 3332605 - RNA, 21 nt, Human
cuucaaggauccugagccaga

SEQ ID NO: 3332606 - RNA, 22 nt, Human
cuucaaggauccugagccagau

SEQ ID NO: 3332607 - RNA, 23 nt, Human
cuucaaggauccugagccagauu

SEQ ID NO: 3332608 - RNA, 17 nt, Human
cuucaaggauccugagc

SEQ ID NO: 3332609 - RNA, 18 nt, Human
cuucaaggauccugagcc

SEQ ID NO: 3332610 - RNA, 19 nt, Human
cuucaaggauccugagcca

SEQ ID NO: 3332611 - RNA, 20 nt, Human
cuucaaggauccugagccag

SEQ ID NO: 3332612 - RNA, 16 nt, Human
cuucaaggauccugag

SEQ ID NO: 3332613 - RNA, 21 nt, Human
cuuagucacugagacagcccg

SEQ ID NO: 3332614 - RNA, 20 nt, Human
cuuagucacugagacagccc

SEQ ID NO: 3332615 - RNA, 22 nt, Human
cuuagucacugagacagcccgg

SEQ ID NO: 3332616 - RNA, 15 nt, Human
cuucaaauauuuccc

SEQ ID NO: 3332617 - RNA, 14 nt, Human
cuucagugccaaaa

SEQ ID NO: 3332618 - RNA, 14 nt, Human
cuuccacaagagcc

SEQ ID NO: 3332619 - RNA, 15 nt, Human
cuuccacaagagccc

SEQ ID NO: 3332620 - RNA, 13 nt, Human
cuuccacaagagc

SEQ ID NO: 3332621 - RNA, 14 nt, Human
cuucaguaagccgu

SEQ ID NO: 3332622 - RNA, 15 nt, Human
cuucagcugacuuuu

SEQ ID NO: 3332623 - RNA, 19 nt, Human
cuucagcugacuuuucugu

SEQ ID NO: 3332624 - RNA, 14 nt, Human
cuucagccucccga

SEQ ID NO: 3332625 - RNA, 20 nt, Human
cuucagccucccgaguagcu

SEQ ID NO: 3332626 - RNA, 16 nt, Human
cuucagccucccgagu

SEQ ID NO: 3332627 - RNA, 17 nt, Human
cuucccuacaguugaaa

SEQ ID NO: 3332628 - RNA, 17 nt, Human
cuucgcuccugugucuu

SEQ ID NO: 3332629 - RNA, 16 nt, Human
cuucgcuccugugucu

SEQ ID NO: 3332630 - RNA, 21 nt, Human
cuucucacugccaugccagcu

SEQ ID NO: 3332631 - RNA, 16 nt, Human
cuucucacugccaugc

SEQ ID NO: 3332632 - RNA, 18 nt, Human
cuuuguuuguugucagcu

SEQ ID NO: 3332633 - RNA, 20 nt, Human
cuuuucauaaccuagccuua

SEQ ID NO: 3332634 - RNA, 22 nt, Human
cuuuucauaaccuagccuuaga

SEQ ID NO: 3332635 - RNA, 18 nt, Human
cuuuucuguccgagcuuu

SEQ ID NO: 3332636 - RNA, 18 nt, Human
cuuuucuugcaugaggcu

SEQ ID NO: 3332637 - RNA, 23 nt, Human
cuuuucuugcaugaggcuagugu

SEQ ID NO: 3332638 - RNA, 19 nt, Human
cuuuggacccugaggccca

SEQ ID NO: 3332639 - RNA, 17 nt, Human
cuuuggacccugaggcc

SEQ ID NO: 3332640 - RNA, 18 nt, Human
cuuuggacccugaggccc

SEQ ID NO: 3332641 - RNA, 15 nt, Human
cuuuggacccugagg

SEQ ID NO: 3332642 - RNA, 16 nt, Human
cuuuggacccugaggc

SEQ ID NO: 3332643 - RNA, 16 nt, Human
cuuucccaucuuccaa

SEQ ID NO: 3332644 - RNA, 17 nt, Human
cuuugugauuuuuguaa

SEQ ID NO: 3332645 - RNA, 18 nt, Human
cuuugugauuuuuguaau

SEQ ID NO: 3332646 - RNA, 12 nt, Human
cuuugugauuuu

SEQ ID NO: 3332647 - RNA, 14 nt, Human
cuuuguucuggcuc

SEQ ID NO: 3332648 - RNA, 13 nt, Human
cuuugggaggcca

SEQ ID NO: 3332649 - RNA, 18 nt, Human
cuuuguccccaccgcaga

SEQ ID NO: 3332650 - RNA, 15 nt, Human
cuuuguccccaccgc

SEQ ID NO: 3332651 - RNA, 22 nt, Human
cuuuguccccaccgcagacagg

SEQ ID NO: 3332652 - RNA, 14 nt, Human
cuuugugauuuuug

SEQ ID NO: 3332653 - RNA, 15 nt, Human
cuuuuuucacuacau

SEQ ID NO: 3332654 - RNA, 16 nt, Human
cuuuugagcauuuaga

SEQ ID NO: 3332655 - RNA, 21 nt, Human
cuuuugagugccuuacacaau

SEQ ID NO: 3332656 - RNA, 23 nt, Human
gaaaaaggaugcacagaguuguu

SEQ ID NO: 3332657 - RNA, 17 nt, Human
gaaaaaggaugcacaga

SEQ ID NO: 3332658 - RNA, 14 nt, Human
cuuuuuuggcugcu

SEQ ID NO: 3332659 - RNA, 15 nt, Human
cuuuuuuggcugcug

SEQ ID NO: 3332660 - RNA, 15 nt, Human
gaaaacguggcugcu

SEQ ID NO: 3332661 - RNA, 16 nt, Human
gaaaacguggcugcuu

SEQ ID NO: 3332662 - RNA, 18 nt, Human
gaaaacguggcugcuuca

SEQ ID NO: 3332663 - RNA, 14 nt, Human
gaaaacguggcugc

SEQ ID NO: 3332664 - RNA, 14 nt, Human
gaaaacaugcuaca

SEQ ID NO: 3332665 - RNA, 15 nt, Human
gaaaacaugcuacac

SEQ ID NO: 3332666 - RNA, 12 nt, Human
gaaaacaugcua

SEQ ID NO: 3332667 - RNA, 13 nt, Human
gaaaacacauuuu

SEQ ID NO: 3332668 - RNA, 18 nt, Human
gaaacagcuaaugggaca

SEQ ID NO: 3332669 - RNA, 17 nt, Human
gaaaagcugcugacagu

SEQ ID NO: 3332670 - RNA, 13 nt, Human
gaaaagcugcuga

SEQ ID NO: 3332671 - RNA, 16 nt, Human
gaaaaucagccugcuc

SEQ ID NO: 3332672 - RNA, 14 nt, Human
gaaaaucagccugc

SEQ ID NO: 3332673 - RNA, 16 nt, Human
cuucuccacccugcuc

SEQ ID NO: 3332674 - RNA, 18 nt, Human
cuucuccacccugcucuc

SEQ ID NO: 3332675 - RNA, 17 nt, Human
cuucuccacccugcucu

SEQ ID NO: 3332676 - RNA, 14 nt, Human
cuugcucugcugac

SEQ ID NO: 3332677 - RNA, 13 nt, Human
cuugcucugcuga

SEQ ID NO: 3332678 - RNA, 16 nt, Human
cuuggaaaugggagac

SEQ ID NO: 3332679 - RNA, 13 nt, Human
cuuggaggaagga

SEQ ID NO: 3332680 - RNA, 13 nt, Human
cuuggaagcuccg

SEQ ID NO: 3332681 - RNA, 16 nt, Human
cuugcucugcugacag

SEQ ID NO: 3332682 - RNA, 16 nt, Human
cuuggcugcagggagu

SEQ ID NO: 3332683 - RNA, 23 nt, Human
cuuggagggcaugaagacagaua

SEQ ID NO: 3332684 - RNA, 12 nt, Human
cuuggagggcau

SEQ ID NO: 3332685 - RNA, 22 nt, Human
cuuggaggaaggaaacccagcu

SEQ ID NO: 3332686 - RNA, 17 nt, Human
cuuggcugcagggaguc

SEQ ID NO: 3332687 - RNA, 14 nt, Human
cuuggcugcaggga

SEQ ID NO: 3332688 - RNA, 22 nt, Human
cuugggcuucauccuccucaga

SEQ ID NO: 3332689 - RNA, 20 nt, Human
cuuggggaccagagcugcca

SEQ ID NO: 3332690 - RNA, 21 nt, Human
cuuggggaccagagcugccac

SEQ ID NO: 3332691 - RNA, 14 nt, Human
cuugggccacugug

SEQ ID NO: 3332692 - RNA, 13 nt, Human
cuugggcuucauc

SEQ ID NO: 3332693 - RNA, 15 nt, Human
cuuggggggcugagg

SEQ ID NO: 3332694 - RNA, 22 nt, Human
cuuggggaccagagcugccacc

SEQ ID NO: 3332695 - RNA, 16 nt, Human
cuuggggggcugaggu

SEQ ID NO: 3332696 - RNA, 20 nt, Human
cuuguguguuuauugucaaa

SEQ ID NO: 3332697 - RNA, 21 nt, Human
cuuguggacacagcucuucuc

SEQ ID NO: 3332698 - RNA, 21 nt, Human
cuuguguguuuauugucaaag

SEQ ID NO: 3332699 - RNA, 16 nt, Human
cuuuccaaaugcccag

SEQ ID NO: 3332700 - RNA, 18 nt, Human
cuuuccaaaugcccagcu

SEQ ID NO: 3332701 - RNA, 19 nt, Human
cuuuccaaaugcccagcuu

SEQ ID NO: 3332702 - RNA, 22 nt, Human
cuuuccaaaugcccagcuuaaa

SEQ ID NO: 3332703 - RNA, 15 nt, Human
gaagccagcaggcuc

SEQ ID NO: 3332704 - RNA, 16 nt, Human
gaagccagcaggcucu

SEQ ID NO: 3332705 - RNA, 21 nt, Human
gaagacucauucuucuguacg

SEQ ID NO: 3332706 - RNA, 19 nt, Human
gaagacucauucuucugua

SEQ ID NO: 3332707 - RNA, 18 nt, Human
gaagacucauucuucugu

SEQ ID NO: 3332708 - RNA, 23 nt, Human
gaagccagcaggcucucaggcca

SEQ ID NO: 3332709 - RNA, 20 nt, Human
gaagcccaggaaaggcucca

SEQ ID NO: 3332710 - RNA, 19 nt, Human
gaagcccaggaaaggcucc

SEQ ID NO: 3332711 - RNA, 21 nt, Human
gaagcccaggaaaggcuccag

SEQ ID NO: 3332712 - RNA, 22 nt, Human
gaagcccaggaaaggcuccagg

SEQ ID NO: 3332713 - RNA, 21 nt, Human
gaagccgcuggggccaguugg

SEQ ID NO: 3332714 - RNA, 14 nt, Human
gaaggccccgccca

SEQ ID NO: 3332715 - RNA, 15 nt, Human
gaaggccccgcccag

SEQ ID NO: 3332716 - RNA, 16 nt, Human
gaaggccccgcccagg

SEQ ID NO: 3332717 - RNA, 14 nt, Human
gaaggaaacccagc

SEQ ID NO: 3332718 - RNA, 17 nt, Human
gaaggaaacccagcucu

SEQ ID NO: 3332719 - RNA, 18 nt, Human
gaaggaaacccagcucug

SEQ ID NO: 3332720 - RNA, 12 nt, Human
gaaggauacaaa

SEQ ID NO: 3332721 - RNA, 19 nt, Human
gaaggauacaaaagcaugu

SEQ ID NO: 3332722 - RNA, 21 nt, Human
gaaggauacaaaagcauguga

SEQ ID NO: 3332723 - RNA, 12 nt, Human
gaaguuucugcc

SEQ ID NO: 3332724 - RNA, 14 nt, Human
gaauagcugggacu

SEQ ID NO: 3332725 - RNA, 16 nt, Human
gaaucucaaauaacua

SEQ ID NO: 3332726 - RNA, 14 nt, Human
gaaugaaagggccc

SEQ ID NO: 3332727 - RNA, 19 nt, Human
gaaugaaagggcccagaga

SEQ ID NO: 3332728 - RNA, 21 nt, Human
gaaauaucugaaaauguaugu

SEQ ID NO: 3332729 - RNA, 13 nt, Human
gaaauauaauuga

SEQ ID NO: 3332730 - RNA, 20 nt, Human
gaaauaucugaaaauguaug

SEQ ID NO: 3332731 - RNA, 20 nt, Human
gaaaugggcagagcagagac

SEQ ID NO: 3332732 - RNA, 19 nt, Human
gaaaugggcagagcagaga

SEQ ID NO: 3332733 - RNA, 14 nt, Human
gaaaugggcagagc

SEQ ID NO: 3332734 - RNA, 17 nt, Human
gaaauuuguuauaauga

SEQ ID NO: 3332735 - RNA, 21 nt, Human
gaaccacaucuugcucugcug

SEQ ID NO: 3332736 - RNA, 20 nt, Human
gaaccacaucuugcucugcu

SEQ ID NO: 3332737 - RNA, 16 nt, Human
gaacagacuggaagca

SEQ ID NO: 3332738 - RNA, 15 nt, Human
gaacagacuggaagc

SEQ ID NO: 3332739 - RNA, 16 nt, Human
gaaccaccacacccag

SEQ ID NO: 3332740 - RNA, 15 nt, Human
gaacuuggcgcugcc

SEQ ID NO: 3332741 - RNA, 16 nt, Human
gaacuuggcgcugccc

SEQ ID NO: 3332742 - RNA, 13 nt, Human
gaacuuggcgcug

SEQ ID NO: 3332743 - RNA, 23 nt, Human
gaacuugguucccauuugcuccu

SEQ ID NO: 3332744 - RNA, 12 nt, Human
gaacuugguucc

SEQ ID NO: 3332745 - RNA, 22 nt, Human
gaacuggguacuuguggacaca

SEQ ID NO: 3332746 - RNA, 17 nt, Human
gaacuuaaauaauguga

SEQ ID NO: 3332747 - RNA, 23 nt, Human
cgcccaguuggguggaugccugg

SEQ ID NO: 3332748 - RNA, 15 nt, Human
cgccaugcuccuggc

SEQ ID NO: 3332749 - RNA, 20 nt, Human
cgccaucccagccccaauga

SEQ ID NO: 3332750 - RNA, 17 nt, Human
cgccaucccagccccaa

SEQ ID NO: 3332751 - RNA, 21 nt, Human
cgcccagucuggaaugcagug

SEQ ID NO: 3332752 - RNA, 22 nt, Human
cgcccaguuggguggaugccug

SEQ ID NO: 3332753 - RNA, 18 nt, Human
cuaggugacagagugaga

SEQ ID NO: 3332754 - RNA, 14 nt, Human
cuaggugacagagu

SEQ ID NO: 3332755 - RNA, 24 nt, Human
cuaggugacagagugagacucugu

SEQ ID NO: 3332756 - RNA, 23 nt, Human
cuaugggacucaaugcacugaca

SEQ ID NO: 3332757 - RNA, 22 nt, Human
cuaugggacucaaugcacugac

SEQ ID NO: 3332758 - RNA, 18 nt, Human
cuaugggacucaaugcac

SEQ ID NO: 3332759 - RNA, 15 nt, Human
cuauuagagaagaga

SEQ ID NO: 3332760 - RNA, 17 nt, Human
cuauagccuaggugaca

SEQ ID NO: 3332761 - RNA, 16 nt, Human
cuauaauguaagcucu

SEQ ID NO: 3332762 - RNA, 22 nt, Human
cuauaauuuaccugaagucuuu

SEQ ID NO: 3332763 - RNA, 21 nt, Human
cuauaauguaagcucuacuga

SEQ ID NO: 3332764 - RNA, 15 nt, Human
cucagaucuucugug

SEQ ID NO: 3332765 - RNA, 21 nt, Human
cucagcaaaagaugcuucuca

SEQ ID NO: 3332766 - RNA, 17 nt, Human
cucagcauccuggcacc

SEQ ID NO: 3332767 - RNA, 16 nt, Human
cucagcauccuggcac

SEQ ID NO: 3332768 - RNA, 14 nt, Human
cucagagagggugg

SEQ ID NO: 3332769 - RNA, 22 nt, Human
cucacuguugcccaggcuggcg

SEQ ID NO: 3332770 - RNA, 21 nt, Human
cucacuguugcccaggcuggc

SEQ ID NO: 3332771 - RNA, 19 nt, Human
cucacuguugcccaggcug

SEQ ID NO: 3332772 - RNA, 19 nt, Human
cucacugccaugccagcuu

SEQ ID NO: 3332773 - RNA, 22 nt, Human
cucacugccaugccagcuuauc

SEQ ID NO: 3332774 - RNA, 20 nt, Human
cucacuguugcccaggcugg

SEQ ID NO: 3332775 - RNA, 22 nt, Human
cucacuauguugcccaggcagg

SEQ ID NO: 3332776 - RNA, 21 nt, Human
cucacuauguugcccaggcag

SEQ ID NO: 3332777 - RNA, 23 nt, Human
cucacuauguugcccaggcaggu

SEQ ID NO: 3332778 - RNA, 20 nt, Human
cucacuauguugcccaggca

SEQ ID NO: 3332779 - RNA, 19 nt, Human
cucacuauguugcccaggc

SEQ ID NO: 3332780 - RNA, 15 nt, Human
cucaccccagcccca

SEQ ID NO: 3332781 - RNA, 14 nt, Human
cucaccccagcccc

SEQ ID NO: 3332782 - RNA, 21 nt, Human
cucacucugucgcccagucug

SEQ ID NO: 3332783 - RNA, 13 nt, Human
cucacucugucgc

SEQ ID NO: 3332784 - RNA, 22 nt, Human
cucacucugucgcccagucugg

SEQ ID NO: 3332785 - RNA, 12 nt, Human
cucacugcagcc

SEQ ID NO: 3332786 - RNA, 13 nt, Human
cucacugcagccu

SEQ ID NO: 3332787 - RNA, 13 nt, Human
cucacuccuugaa

SEQ ID NO: 3332788 - RNA, 12 nt, Human
cucacucugucg

SEQ ID NO: 3332789 - RNA, 11 nt, Human
cucacucuguc

SEQ ID NO: 3332790 - RNA, 22 nt, Human
cucacacaugagcaucaggcca

SEQ ID NO: 3332791 - RNA, 24 nt, Human
cucacacaugagcaucaggccagg

SEQ ID NO: 3332792 - RNA, 21 nt, Human
cucacacaugagcaucaggcc

SEQ ID NO: 3332793 - RNA, 15 nt, Human
cucacaguccuuacc

SEQ ID NO: 3332794 - RNA, 14 nt, Human
cucaaguccucuuu

SEQ ID NO: 3332795 - RNA, 21 nt, Human
cucaaguccucuuuucugaga

SEQ ID NO: 3332796 - RNA, 18 nt, Human
cucaccagccccagugcc

SEQ ID NO: 3332797 - RNA, 17 nt, Human
cucaccagccccagugc

SEQ ID NO: 3332798 - RNA, 15 nt, Human
cucaccagccccagu

SEQ ID NO: 3332799 - RNA, 14 nt, Human
cucaccagccccag

SEQ ID NO: 3332800 - RNA, 13 nt, Human
cucaccagcccca

SEQ ID NO: 3332801 - RNA, 22 nt, Human
cucacauuuauucugcucacau

SEQ ID NO: 3332802 - RNA, 19 nt, Human
cucacauuuauucugcuca

SEQ ID NO: 3332803 - RNA, 15 nt, Human
cucacauuuauucug

SEQ ID NO: 3332804 - RNA, 17 nt, Human
cucacaguccuuaccag

SEQ ID NO: 3332805 - RNA, 19 nt, Human
cucacaguccuuaccagca

SEQ ID NO: 3332806 - RNA, 22 nt, Human
cucacaguccuuaccagcagag

SEQ ID NO: 3332807 - RNA, 15 nt, Human
cucaaccuccugggc

SEQ ID NO: 3332808 - RNA, 13 nt, Human
cucaaccuccugg

SEQ ID NO: 3332809 - RNA, 21 nt, Human
cucaacaccucugcacaagcu

SEQ ID NO: 3332810 - RNA, 20 nt, Human
cuccugugugugcgccuaca

SEQ ID NO: 3332811 - RNA, 24 nt, Human
cuccugugugugcgccuacaggag

SEQ ID NO: 3332812 - RNA, 23 nt, Human
cuccugugugugcgccuacagga

SEQ ID NO: 3332813 - RNA, 21 nt, Human
cuccugugugugcgccuacag

SEQ ID NO: 3332814 - RNA, 14 nt, Human
cuccuggaaauauu

SEQ ID NO: 3332815 - RNA, 15 nt, Human
cuccucuccccagca

SEQ ID NO: 3332816 - RNA, 13 nt, Human
cuccucuccccag

SEQ ID NO: 3332817 - RNA, 11 nt, Human
cuccugccuca

SEQ ID NO: 3332818 - RNA, 12 nt, Human
cuccugccucag

SEQ ID NO: 3332819 - RNA, 16 nt, Human
cuccugccucagccuc

SEQ ID NO: 3332820 - RNA, 17 nt, Human
cuccugccucagccucc

SEQ ID NO: 3332821 - RNA, 21 nt, Human
cuccugccucgaacuggcugc

SEQ ID NO: 3332822 - RNA, 20 nt, Human
cuccugccucgaacuggcug

SEQ ID NO: 3332823 - RNA, 18 nt, Human
cuccugccucgaacuggc

SEQ ID NO: 3332824 - RNA, 22 nt, Human
cucgagcaugccuggauggggc

SEQ ID NO: 3332825 - RNA, 23 nt, Human
cuccuuggugucgggcaugacac

SEQ ID NO: 3332826 - RNA, 13 nt, Human
cucgagcaugccu

SEQ ID NO: 3332827 - RNA, 15 nt, Human
cucgagcaugccugg

SEQ ID NO: 3332828 - RNA, 16 nt, Human
cucgagcaugccugga

SEQ ID NO: 3332829 - RNA, 19 nt, Human
cucgagcaugccuggaugg

SEQ ID NO: 3332830 - RNA, 15 nt, Human
cuccuccagccgcca

SEQ ID NO: 3332831 - RNA, 13 nt, Human
cuccuccagaguc

SEQ ID NO: 3332832 - RNA, 15 nt, Human
cuccuccagagucag

SEQ ID NO: 3332833 - RNA, 15 nt, Human
cuccgaccagacacc

SEQ ID NO: 3332834 - RNA, 20 nt, Human
cucccuuggauuguccccga

SEQ ID NO: 3332835 - RNA, 18 nt, Human
cuccucagaucuucugug

SEQ ID NO: 3332836 - RNA, 20 nt, Human
cucccgaguagcugggacua

SEQ ID NO: 3332837 - RNA, 19 nt, Human
cucccgaguagcugggacu

SEQ ID NO: 3332838 - RNA, 18 nt, Human
cucccgaguagcugggac

SEQ ID NO: 3332839 - RNA, 21 nt, Human
cuccccagcaagugagagcug

SEQ ID NO: 3332840 - RNA, 23 nt, Human
cuccccagcaagugagagcuggg

SEQ ID NO: 3332841 - RNA, 22 nt, Human
cuccccagcaagugagagcugg

SEQ ID NO: 3332842 - RNA, 20 nt, Human
cucauaguaugguggcuggg

SEQ ID NO: 3332843 - RNA, 23 nt, Human
cucauaguaugguggcuggguug

SEQ ID NO: 3332844 - RNA, 21 nt, Human
cucaucaccaacgucugugcc

SEQ ID NO: 3332845 - RNA, 22 nt, Human
cucaucaccaacgucugugcca

SEQ ID NO: 3332846 - RNA, 15 nt, Human
cucauccucauaccc

SEQ ID NO: 3332847 - RNA, 16 nt, Human
cucauacccaccccca

SEQ ID NO: 3332848 - RNA, 18 nt, Human
cucauacccacccccacc

SEQ ID NO: 3332849 - RNA, 19 nt, Human
cucauacccacccccaccc

SEQ ID NO: 3332850 - RNA, 21 nt, Human
cucauacccacccccacccaa

SEQ ID NO: 3332851 - RNA, 19 nt, Human
cucaggugauccacccacc

SEQ ID NO: 3332852 - RNA, 18 nt, Human
cucaggugauccacccac

SEQ ID NO: 3332853 - RNA, 14 nt, Human
cucagggucccugg

SEQ ID NO: 3332854 - RNA, 20 nt, Human
cucaggugauccacccaccu

SEQ ID NO: 3332855 - RNA, 22 nt, Human
cucauacucaccucaccccacu

SEQ ID NO: 3332856 - RNA, 14 nt, Human
cucauacucaccuc

SEQ ID NO: 3332857 - RNA, 15 nt, Human
cucauacccaccccc

SEQ ID NO: 3332858 - RNA, 21 nt, Human
cucauaguaugguggcugggu

SEQ ID NO: 3332859 - RNA, 16 nt, Human
cucaggugagaagcag

SEQ ID NO: 3332860 - RNA, 14 nt, Human
cucaggugagaagc

SEQ ID NO: 3332861 - RNA, 19 nt, Human
cucaggugagaagcagagg

SEQ ID NO: 3332862 - RNA, 20 nt, Human
cucaggugagaagcagagga

SEQ ID NO: 3332863 - RNA, 15 nt, Human
cucagggucccuggu

SEQ ID NO: 3332864 - RNA, 16 nt, Human
cucagggucccuggug

SEQ ID NO: 3332865 - RNA, 17 nt, Human
cucagggucccuggugg

SEQ ID NO: 3332866 - RNA, 14 nt, Human
cucagggccugguc

SEQ ID NO: 3332867 - RNA, 15 nt, Human
cucagggccuggucg

SEQ ID NO: 3332868 - RNA, 16 nt, Human
cucagggccuggcuca

SEQ ID NO: 3332869 - RNA, 14 nt, Human
cucagggccuggcu

SEQ ID NO: 3332870 - RNA, 15 nt, Human
cucagggccuggcuc

SEQ ID NO: 3332871 - RNA, 13 nt, Human
cucagggccuggc

SEQ ID NO: 3332872 - RNA, 18 nt, Human
cucaggaguuugagacca

SEQ ID NO: 3332873 - RNA, 23 nt, Human
cucaggaguuugagaccaaccug

SEQ ID NO: 3332874 - RNA, 18 nt, Human
cucagcauccuggcaccc

SEQ ID NO: 3332875 - RNA, 15 nt, Human
cucagcauccuggca

SEQ ID NO: 3332876 - RNA, 13 nt, Human
cuccacccugcuc

SEQ ID NO: 3332877 - RNA, 15 nt, Human
cuccacccugcucuc

SEQ ID NO: 3332878 - RNA, 15 nt, Human
cuccaaaauaaaacu

SEQ ID NO: 3332879 - RNA, 16 nt, Human
cuccaaaauaaaacuu

SEQ ID NO: 3332880 - RNA, 17 nt, Human
cucauuugucacacacu

SEQ ID NO: 3332881 - RNA, 15 nt, Human
cuccagccccuggau

SEQ ID NO: 3332882 - RNA, 12 nt, Human
cuccaccugcca

SEQ ID NO: 3332883 - RNA, 13 nt, Human
cuccaccugccag

SEQ ID NO: 3332884 - RNA, 14 nt, Human
cuccaccugccagg

SEQ ID NO: 3332885 - RNA, 20 nt, Human
cuccagccccuggaugcagc

SEQ ID NO: 3332886 - RNA, 16 nt, Human
cuccagccccuggaug

SEQ ID NO: 3332887 - RNA, 17 nt, Human
cuccagccccuggaugc

SEQ ID NO: 3332888 - RNA, 12 nt, Human
cuccagccuggg

SEQ ID NO: 3332889 - RNA, 14 nt, Human
cuccaggagcagcc

SEQ ID NO: 3332890 - RNA, 15 nt, Human
cuccaggagcagcca

SEQ ID NO: 3332891 - RNA, 16 nt, Human
cuccaggagcagccac

SEQ ID NO: 3332892 - RNA, 17 nt, Human
cuccaggagcagccaca

SEQ ID NO: 3332893 - RNA, 11 nt, Human
cuccaggagca

SEQ ID NO: 3332894 - RNA, 13 nt, Human
cuccaggagcagc

SEQ ID NO: 3332895 - RNA, 18 nt, Human
cuccaggagcagccacau

SEQ ID NO: 3332896 - RNA, 23 nt, Human
cuccaggagcagccacauuccug

SEQ ID NO: 3332897 - RNA, 11 nt, Human
cugccaggcau

SEQ ID NO: 3332898 - RNA, 13 nt, Human
cugccaggcaugg

SEQ ID NO: 3332899 - RNA, 14 nt, Human
cugcccaccuggcc

SEQ ID NO: 3332900 - RNA, 15 nt, Human
cugcccaccuggccu

SEQ ID NO: 3332901 - RNA, 13 nt, Human
cugcccaccuggc

SEQ ID NO: 3332902 - RNA, 14 nt, Human
cugccaugccagcu

SEQ ID NO: 3332903 - RNA, 17 nt, Human
cugcccaccuggccucu

SEQ ID NO: 3332904 - RNA, 18 nt, Human
cugcccaccuggccucug

SEQ ID NO: 3332905 - RNA, 19 nt, Human
cugcccaccuggccucugc

SEQ ID NO: 3332906 - RNA, 20 nt, Human
cugcccaccuggccucugca

SEQ ID NO: 3332907 - RNA, 22 nt, Human
cugcccaccuggccucugcacu

SEQ ID NO: 3332908 - RNA, 14 nt, Human
cugcccacucccug

SEQ ID NO: 3332909 - RNA, 15 nt, Human
cugcccacucccugc

SEQ ID NO: 3332910 - RNA, 16 nt, Human
cugcccacucccugca

SEQ ID NO: 3332911 - RNA, 18 nt, Human
cugcccacucccugcaac

SEQ ID NO: 3332912 - RNA, 17 nt, Human
cugccaaugggagcuca

SEQ ID NO: 3332913 - RNA, 18 nt, Human
cugccaaugggagcucau

SEQ ID NO: 3332914 - RNA, 19 nt, Human
cugccaaugggagcucaug

SEQ ID NO: 3332915 - RNA, 18 nt, Human
cugcaugcgggcuuccuc

SEQ ID NO: 3332916 - RNA, 22 nt, Human
cugcaugcgggcuuccuccugg

SEQ ID NO: 3332917 - RNA, 16 nt, Human
cugcaucguuucaucu

SEQ ID NO: 3332918 - RNA, 22 nt, Human
cugcaucguuucaucuuccaac

SEQ ID NO: 3332919 - RNA, 19 nt, Human
cugcaguugccagucaccc

SEQ ID NO: 3332920 - RNA, 23 nt, Human
cugcacuugcagacucuacagag

SEQ ID NO: 3332921 - RNA, 17 nt, Human
cugcacuugcagacucu

SEQ ID NO: 3332922 - RNA, 21 nt, Human
cugcaguugccagucaccccg

SEQ ID NO: 3332923 - RNA, 22 nt, Human
cugcaguugccagucaccccgg

SEQ ID NO: 3332924 - RNA, 17 nt, Human
cugcaguugccagucac

SEQ ID NO: 3332925 - RNA, 14 nt, Human
cugccucagccucc

SEQ ID NO: 3332926 - RNA, 15 nt, Human
cugccucagccuccc

SEQ ID NO: 3332927 - RNA, 19 nt, Human
cugccucagccucccaaag

SEQ ID NO: 3332928 - RNA, 19 nt, Human
cugccgcagcccugcagag

SEQ ID NO: 3332929 - RNA, 20 nt, Human
cugccgcagcccugcagagg

SEQ ID NO: 3332930 - RNA, 21 nt, Human
cugccgcagcccugcagaggg

SEQ ID NO: 3332931 - RNA, 22 nt, Human
cugccgcagcccugcagagggc

SEQ ID NO: 3332932 - RNA, 23 nt, Human
cugccgcagcccugcagagggca

SEQ ID NO: 3332933 - RNA, 12 nt, Human
cugccgcagccc

SEQ ID NO: 3332934 - RNA, 13 nt, Human
cugccgcagcccu

SEQ ID NO: 3332935 - RNA, 18 nt, Human
cugcgguccacccaggag

SEQ ID NO: 3332936 - RNA, 17 nt, Human
cugcgguccacccagga

SEQ ID NO: 3332937 - RNA, 19 nt, Human
cugcgguccacccaggagc

SEQ ID NO: 3332938 - RNA, 21 nt, Human
cugccucugacacacagcucu

SEQ ID NO: 3332939 - RNA, 18 nt, Human
cugccucugacacacagc

SEQ ID NO: 3332940 - RNA, 15 nt, Human
cugccucugacacac

SEQ ID NO: 3332941 - RNA, 17 nt, Human
cugccucugacacacag

SEQ ID NO: 3332942 - RNA, 22 nt, Human
cugccugcccaggccccugcca

SEQ ID NO: 3332943 - RNA, 21 nt, Human
cugccugcccaggccccugcc

SEQ ID NO: 3332944 - RNA, 18 nt, Human
cugcaauaaggggagagu

SEQ ID NO: 3332945 - RNA, 22 nt, Human
cugcacaagcugcacccucagg

SEQ ID NO: 3332946 - RNA, 18 nt, Human
cugcacaagcugcacccu

SEQ ID NO: 3332947 - RNA, 16 nt, Human
cugcacuccccugcug

SEQ ID NO: 3332948 - RNA, 17 nt, Human
cugcacuccccugcugg

SEQ ID NO: 3332949 - RNA, 18 nt, Human
cugcacuugcagacucua

SEQ ID NO: 3332950 - RNA, 13 nt, Human
cugcacccucagg

SEQ ID NO: 3332951 - RNA, 14 nt, Human
cugcacccucaggc

SEQ ID NO: 3332952 - RNA, 20 nt, Human
cugcaccggcuggccuggcc

SEQ ID NO: 3332953 - RNA, 22 nt, Human
cugcaccggcuggccuggcccc

SEQ ID NO: 3332954 - RNA, 14 nt, Human
cugcacuccccugc

SEQ ID NO: 3332955 - RNA, 15 nt, Human
cugcacuccccugcu

SEQ ID NO: 3332956 - RNA, 23 nt, Human
cugcaccggcuggccuggccccu

SEQ ID NO: 3332957 - RNA, 12 nt, Human
cugcaccgggcc

SEQ ID NO: 3332958 - RNA, 16 nt, Human
cugauuuuuuuuuccu

SEQ ID NO: 3332959 - RNA, 18 nt, Human
cugauuuuuuuuuccuuc

SEQ ID NO: 3332960 - RNA, 19 nt, Human
cugauuuuuuuuuccuuca

SEQ ID NO: 3332961 - RNA, 20 nt, Human
cugauuuuuuuuuccuucag

SEQ ID NO: 3332962 - RNA, 21 nt, Human
cugauuuuuuuuuccuucagu

SEQ ID NO: 3332963 - RNA, 22 nt, Human
cugauuuuuuuuuccuucagug

SEQ ID NO: 3332964 - RNA, 23 nt, Human
cugauuuuuuuuuccuucagugc

SEQ ID NO: 3332965 - RNA, 21 nt, Human
cugauugugucucuugguccu

SEQ ID NO: 3332966 - RNA, 17 nt, Human
cugauggugcaaugacc

SEQ ID NO: 3332967 - RNA, 19 nt, Human
cugauggugcaaugaccuu

SEQ ID NO: 3332968 - RNA, 20 nt, Human
cugauggugcaaugaccuuu

SEQ ID NO: 3332969 - RNA, 21 nt, Human
cugauggugcaaugaccuuuc

SEQ ID NO: 3332970 - RNA, 17 nt, Human
cugauugugucucuugg

SEQ ID NO: 3332971 - RNA, 22 nt, Human
cugagugggggaucacagccuc

SEQ ID NO: 3332972 - RNA, 18 nt, Human
cugagucugaaggcuggg

SEQ ID NO: 3332973 - RNA, 19 nt, Human
cugagucugaaggcugggu

SEQ ID NO: 3332974 - RNA, 17 nt, Human
cugagucugaaggcugg

SEQ ID NO: 3332975 - RNA, 21 nt, Human
cugauaaagaugagugagcau

SEQ ID NO: 3332976 - RNA, 20 nt, Human
cugauccuaguuccaccauc

SEQ ID NO: 3332977 - RNA, 21 nt, Human
cugauccuaguuccaccauca

SEQ ID NO: 3332978 - RNA, 15 nt, Human
cugauggugcaauga

SEQ ID NO: 3332979 - RNA, 16 nt, Human
cugauggugcaaugac

SEQ ID NO: 3332980 - RNA, 14 nt, Human
cugauggugcaaug

SEQ ID NO: 3332981 - RNA, 15 nt, Human
cugaggcugggcucc

SEQ ID NO: 3332982 - RNA, 16 nt, Human
cugaggcugggcuccc

SEQ ID NO: 3332983 - RNA, 17 nt, Human
cugaggcugggcucccu

SEQ ID NO: 3332984 - RNA, 22 nt, Human
cugaggcugggcucccuuccca

SEQ ID NO: 3332985 - RNA, 13 nt, Human
cugaggcugggcu

SEQ ID NO: 3332986 - RNA, 24 nt, Human
cugaggcccuucucuccagccccu

SEQ ID NO: 3332987 - RNA, 14 nt, Human
cucugaggacacua

SEQ ID NO: 3332988 - RNA, 12 nt, Human
cucugaggacac

SEQ ID NO: 3332989 - RNA, 20 nt, Human
cucugagacucgcgacaaug

SEQ ID NO: 3332990 - RNA, 23 nt, Human
cucugagacucgcgacaaugcaa

SEQ ID NO: 3332991 - RNA, 21 nt, Human
cucugagacucgcgacaaugc

SEQ ID NO: 3332992 - RNA, 23 nt, Human
cucugacagaagaaccccagggu

SEQ ID NO: 3332993 - RNA, 19 nt, Human
cucugacacacagcucugu

SEQ ID NO: 3332994 - RNA, 18 nt, Human
cucugacacacagcucug

SEQ ID NO: 3332995 - RNA, 17 nt, Human
cucugacacacagcucu

SEQ ID NO: 3332996 - RNA, 16 nt, Human
cucugacacacagcuc

SEQ ID NO: 3332997 - RNA, 15 nt, Human
cucugacacacagcu

SEQ ID NO: 3332998 - RNA, 14 nt, Human
cucugacacacagc

SEQ ID NO: 3332999 - RNA, 22 nt, Human
cucugaaggacauugcggacag

SEQ ID NO: 3333000 - RNA, 14 nt, Human
cucugcacaagcug

SEQ ID NO: 3333001 - RNA, 15 nt, Human
cucugcacaagcugc

SEQ ID NO: 3333002 - RNA, 10 nt, Human
cucugcacaa

SEQ ID NO: 3333003 - RNA, 13 nt, Human
cucugcacaagcu

SEQ ID NO: 3333004 - RNA, 13 nt, Human
cucugcccacucc

SEQ ID NO: 3333005 - RNA, 15 nt, Human
cucugcccacucccu

SEQ ID NO: 3333006 - RNA, 16 nt, Human
cucugcccacucccug

SEQ ID NO: 3333007 - RNA, 17 nt, Human
cucugcccacucccugc

SEQ ID NO: 3333008 - RNA, 18 nt, Human
cucugcccacucccugca

SEQ ID NO: 3333009 - RNA, 13 nt, Human
cucugccucccau

SEQ ID NO: 3333010 - RNA, 14 nt, Human
cucugccucccauc

SEQ ID NO: 3333011 - RNA, 16 nt, Human
cucugccucccaucac

SEQ ID NO: 3333012 - RNA, 17 nt, Human
cucugccucccaucacc

SEQ ID NO: 3333013 - RNA, 12 nt, Human
cucugcccuugg

SEQ ID NO: 3333014 - RNA, 13 nt, Human
cucuucuccaggc

SEQ ID NO: 3333015 - RNA, 15 nt, Human
cucuucuccaggcug

SEQ ID NO: 3333016 - RNA, 23 nt, Human
cucugugucagguggggcagcuu

SEQ ID NO: 3333017 - RNA, 22 nt, Human
cucugugucagguggggcagcu

SEQ ID NO: 3333018 - RNA, 21 nt, Human
cucugugucagguggggcagc

SEQ ID NO: 3333019 - RNA, 20 nt, Human
cucugugucagguggggcag

SEQ ID NO: 3333020 - RNA, 19 nt, Human
cucugugucagguggggca

SEQ ID NO: 3333021 - RNA, 13 nt, Human
cucugucgcccag

SEQ ID NO: 3333022 - RNA, 17 nt, Human
cucugucgcccagucug

SEQ ID NO: 3333023 - RNA, 19 nt, Human
cucugucgcccagucugga

SEQ ID NO: 3333024 - RNA, 18 nt, Human
cucugucgcccagucugg

SEQ ID NO: 3333025 - RNA, 22 nt, Human
cucuguccugggagugagcugg

SEQ ID NO: 3333026 - RNA, 15 nt, Human
cucuguccugggagu

SEQ ID NO: 3333027 - RNA, 13 nt, Human
cucuguccuggga

SEQ ID NO: 3333028 - RNA, 14 nt, Human
cucuguccugggag

SEQ ID NO: 3333029 - RNA, 20 nt, Human
cucugccucugacacacagc

SEQ ID NO: 3333030 - RNA, 19 nt, Human
cucugccucugacacacag

SEQ ID NO: 3333031 - RNA, 21 nt, Human
cucugccucccaucacccgcu

SEQ ID NO: 3333032 - RNA, 16 nt, Human
cucugccucugacaca

SEQ ID NO: 3333033 - RNA, 23 nt, Human
cucuggcagcucagagagggugg

SEQ ID NO: 3333034 - RNA, 20 nt, Human
cucuggcagcucagagaggg

SEQ ID NO: 3333035 - RNA, 12 nt, Human
cugaauuucuuu

SEQ ID NO: 3333036 - RNA, 20 nt, Human
cugaaugguuuucaaaauaa

SEQ ID NO: 3333037 - RNA, 19 nt, Human
cugaaugguuuucaaaaua

SEQ ID NO: 3333038 - RNA, 17 nt, Human
cugaaguucagcugcau

SEQ ID NO: 3333039 - RNA, 22 nt, Human
cugaagucccagauacuugggg

SEQ ID NO: 3333040 - RNA, 17 nt, Human
cugaagucuuuguacag

SEQ ID NO: 3333041 - RNA, 20 nt, Human
cugaagucuuuguacagaca

SEQ ID NO: 3333042 - RNA, 17 nt, Human
cugaagucacacaguga

SEQ ID NO: 3333043 - RNA, 19 nt, Human
cugaagucacacagugagu

SEQ ID NO: 3333044 - RNA, 18 nt, Human
cugaagucacacagugag

SEQ ID NO: 3333045 - RNA, 21 nt, Human
cugaagucacacagugagucg

SEQ ID NO: 3333046 - RNA, 16 nt, Human
cugaagucacacagug

SEQ ID NO: 3333047 - RNA, 23 nt, Human
cugaaagggacgcuacccgggaa

SEQ ID NO: 3333048 - RNA, 14 nt, Human
cucuuuucaaaaca

SEQ ID NO: 3333049 - RNA, 22 nt, Human
cucuuuggucuacacugugcug

SEQ ID NO: 3333050 - RNA, 23 nt, Human
cucuuuggucuacacugugcuga

SEQ ID NO: 3333051 - RNA, 21 nt, Human
cucuuuggucuacacugugcu

SEQ ID NO: 3333052 - RNA, 16 nt, Human
cucuucuccaggcugu

SEQ ID NO: 3333053 - RNA, 18 nt, Human
cugacagacacaggcccg

SEQ ID NO: 3333054 - RNA, 17 nt, Human
cugacagacacaggccc

SEQ ID NO: 3333055 - RNA, 15 nt, Human
cugacagacacaggc

SEQ ID NO: 3333056 - RNA, 14 nt, Human
cugaauuucuuuug

SEQ ID NO: 3333057 - RNA, 16 nt, Human
cugacagacacaggcc

SEQ ID NO: 3333058 - RNA, 21 nt, Human
cugagacagcccgggcucugc

SEQ ID NO: 3333059 - RNA, 20 nt, Human
cugagacagcccgggcucug

SEQ ID NO: 3333060 - RNA, 19 nt, Human
cugagacagcccgggcucu

SEQ ID NO: 3333061 - RNA, 13 nt, Human
cugagccagauuu

SEQ ID NO: 3333062 - RNA, 14 nt, Human
cugagccagauuuc

SEQ ID NO: 3333063 - RNA, 19 nt, Human
gauucaacagguuuuccug

SEQ ID NO: 3333064 - RNA, 19 nt, Human
gauuaaccacuucagcuga

SEQ ID NO: 3333065 - RNA, 21 nt, Human
gauuaaccacuucagcugacu

SEQ ID NO: 3333066 - RNA, 18 nt, Human
gauuaaccacuucagcug

SEQ ID NO: 3333067 - RNA, 12 nt, Human
gauuaaauucuu

SEQ ID NO: 3333068 - RNA, 19 nt, Human
gauuaaauucuugcaaagu

SEQ ID NO: 3333069 - RNA, 15 nt, Human
gauguuuuccaugag

SEQ ID NO: 3333070 - RNA, 14 nt, Human
gauguuuuccauga

SEQ ID NO: 3333071 - RNA, 21 nt, Human
gauguuuuaaggaugcuugua

SEQ ID NO: 3333072 - RNA, 21 nt, Human
gauguucuuucacccuuuucu

SEQ ID NO: 3333073 - RNA, 17 nt, Human
gauggugcaaugaccuu

SEQ ID NO: 3333074 - RNA, 23 nt, Human
gauggugcaaugaccuuucaaua

SEQ ID NO: 3333075 - RNA, 20 nt, Human
gauggugcaaugaccuuuca

SEQ ID NO: 3333076 - RNA, 16 nt, Human
gauguucugggacaca

SEQ ID NO: 3333077 - RNA, 14 nt, Human
gauguucugggaca

SEQ ID NO: 3333078 - RNA, 22 nt, Human
gauucccaagcucugcuccucu

SEQ ID NO: 3333079 - RNA, 21 nt, Human
gauucccaagcucugcuccuc

SEQ ID NO: 3333080 - RNA, 23 nt, Human
gauugacgggacuguugguauug

SEQ ID NO: 3333081 - RNA, 18 nt, Human
gauugcuugagcucagga

SEQ ID NO: 3333082 - RNA, 15 nt, Human
gauuguccccgaccc

SEQ ID NO: 3333083 - RNA, 20 nt, Human
gauuguccccgacccuugcc

SEQ ID NO: 3333084 - RNA, 13 nt, Human
gauccugagccag

SEQ ID NO: 3333085 - RNA, 14 nt, Human
gauccugagccaga

SEQ ID NO: 3333086 - RNA, 15 nt, Human
gauccugagccagau

SEQ ID NO: 3333087 - RNA, 19 nt, Human
gauccugagccagauuuca

SEQ ID NO: 3333088 - RNA, 20 nt, Human
gauccucccaccucagccuc

SEQ ID NO: 3333089 - RNA, 19 nt, Human
gauccucccaccucagccu

SEQ ID NO: 3333090 - RNA, 11 nt, Human
gauccuccagg

SEQ ID NO: 3333091 - RNA, 18 nt, Human
gauccuaggcauuugcug

SEQ ID NO: 3333092 - RNA, 18 nt, Human
gauccuaguuccaccauc

SEQ ID NO: 3333093 - RNA, 15 nt, Human
gaucacgccacugca

SEQ ID NO: 3333094 - RNA, 14 nt, Human
gaucacgccacugc

SEQ ID NO: 3333095 - RNA, 13 nt, Human
gaucacgccacug

SEQ ID NO: 3333096 - RNA, 23 nt, Human
gaucaaccccuucgcuccugugu

SEQ ID NO: 3333097 - RNA, 15 nt, Human
gaugaaaaaauaaca

SEQ ID NO: 3333098 - RNA, 16 nt, Human
gaucuuugcagacagg

SEQ ID NO: 3333099 - RNA, 18 nt, Human
gauccucccaccucagcc

SEQ ID NO: 3333100 - RNA, 20 nt, Human
gaugaccuugaaugaugcca

SEQ ID NO: 3333101 - RNA, 11 nt, Human
gaugagaaagg

SEQ ID NO: 3333102 - RNA, 22 nt, Human
gaugagaaagguugaagcacca

SEQ ID NO: 3333103 - RNA, 22 nt, Human
gaugggcaacccccagccugcu

SEQ ID NO: 3333104 - RNA, 23 nt, Human
gagucucacuguugcccaggcug

SEQ ID NO: 3333105 - RNA, 22 nt, Human
gagucucacuguugcccaggcu

SEQ ID NO: 3333106 - RNA, 21 nt, Human
gagucugaaggcuggguucug

SEQ ID NO: 3333107 - RNA, 21 nt, Human
gagucucacuguugcccaggc

SEQ ID NO: 3333108 - RNA, 20 nt, Human
gagucucacuguugcccagg

SEQ ID NO: 3333109 - RNA, 19 nt, Human
gagucucacuguugcccag

SEQ ID NO: 3333110 - RNA, 16 nt, Human
gagucgaggacaggga

SEQ ID NO: 3333111 - RNA, 17 nt, Human
gagucgaggacagggag

SEQ ID NO: 3333112 - RNA, 14 nt, Human
gaguagcugggacu

SEQ ID NO: 3333113 - RNA, 12 nt, Human
gaguagcuggga

SEQ ID NO: 3333114 - RNA, 21 nt, Human
gagucccaccuuggcugcagg

SEQ ID NO: 3333115 - RNA, 12 nt, Human
gaguccccuguu

SEQ ID NO: 3333116 - RNA, 14 nt, Human
gaguccccuguuug

SEQ ID NO: 3333117 - RNA, 23 nt, Human
gaguccccuguuuguuucugaaa

SEQ ID NO: 3333118 - RNA, 21 nt, Human
gaggugggauccuccaggugc

SEQ ID NO: 3333119 - RNA, 22 nt, Human
gaggugggauccuccaggugca

SEQ ID NO: 3333120 - RNA, 18 nt, Human
gaggugggauccuccagg

SEQ ID NO: 3333121 - RNA, 15 nt, Human
gaggggggagguggg

SEQ ID NO: 3333122 - RNA, 22 nt, Human
gaggggggaggugggauccucc

SEQ ID NO: 3333123 - RNA, 17 nt, Human
gaguacguugugcauuu

SEQ ID NO: 3333124 - RNA, 18 nt, Human
gaguacguugugcauuug

SEQ ID NO: 3333125 - RNA, 20 nt, Human
gaguacguugugcauuuggu

SEQ ID NO: 3333126 - RNA, 15 nt, Human
gaguacuacaguccu

SEQ ID NO: 3333127 - RNA, 18 nt, Human
gaguacuacaguccuccc

SEQ ID NO: 3333128 - RNA, 19 nt, Human
gaguacuacaguccuccca

SEQ ID NO: 3333129 - RNA, 16 nt, Human
gaguacguugugcauu

SEQ ID NO: 3333130 - RNA, 19 nt, Human
gagguuuuaaaaaaauccc

SEQ ID NO: 3333131 - RNA, 19 nt, Human
gagguucaaagauauuuug

SEQ ID NO: 3333132 - RNA, 14 nt, Human
gagguucccuuuga

SEQ ID NO: 3333133 - RNA, 22 nt, Human
gaucaaccccuucgcuccugug

SEQ ID NO: 3333134 - RNA, 21 nt, Human
gaucaaccccuucgcuccugu

SEQ ID NO: 3333135 - RNA, 23 nt, Human
gauauaugcucugcauguuacau

SEQ ID NO: 3333136 - RNA, 13 nt, Human
gauagccaaggcc

SEQ ID NO: 3333137 - RNA, 16 nt, Human
gauagcacagacccug

SEQ ID NO: 3333138 - RNA, 12 nt, Human
gauagccaaggc

SEQ ID NO: 3333139 - RNA, 19 nt, Human
gauagcacagacccugccc

SEQ ID NO: 3333140 - RNA, 13 nt, Human
gauacaaugcugu

SEQ ID NO: 3333141 - RNA, 18 nt, Human
gauacaaugcugugcccu

SEQ ID NO: 3333142 - RNA, 17 nt, Human
gauagcacagacccugc

SEQ ID NO: 3333143 - RNA, 18 nt, Human
gauagcacagacccugcc

SEQ ID NO: 3333144 - RNA, 17 nt, Human
gauacaaaagcauguga

SEQ ID NO: 3333145 - RNA, 23 nt, Human
gaguucaucuugaauuguaagga

SEQ ID NO: 3333146 - RNA, 20 nt, Human
gaguucaucuugaauuguaa

SEQ ID NO: 3333147 - RNA, 13 nt, Human
gaguucugguucc

SEQ ID NO: 3333148 - RNA, 12 nt, Human
gagugggcccaa

SEQ ID NO: 3333149 - RNA, 15 nt, Human
gagucugaaggcugg

SEQ ID NO: 3333150 - RNA, 20 nt, Human
gagccacugcaccgggccac

SEQ ID NO: 3333151 - RNA, 18 nt, Human
gagcagccacauuccuga

SEQ ID NO: 3333152 - RNA, 12 nt, Human
gagcccacgccc

SEQ ID NO: 3333153 - RNA, 15 nt, Human
gagcccacgccccca

SEQ ID NO: 3333154 - RNA, 16 nt, Human
gagcccacgcccccac

SEQ ID NO: 3333155 - RNA, 12 nt, Human
gagcccaggccu

SEQ ID NO: 3333156 - RNA, 14 nt, Human
gagcccugguggca

SEQ ID NO: 3333157 - RNA, 13 nt, Human
gagcccaggccuc

SEQ ID NO: 3333158 - RNA, 14 nt, Human
gagcccaggccucc

SEQ ID NO: 3333159 - RNA, 11 nt, Human
gagcccacgcc

SEQ ID NO: 3333160 - RNA, 22 nt, Human
gagccacugcaccgggccacag

SEQ ID NO: 3333161 - RNA, 17 nt, Human
gagcaccuuagacaguc

SEQ ID NO: 3333162 - RNA, 19 nt, Human
gagcaaaaucgaugcagug

SEQ ID NO: 3333163 - RNA, 21 nt, Human
gagcaagacgcugugcugccc

SEQ ID NO: 3333164 - RNA, 18 nt, Human
gagcaagacgcugugcug

SEQ ID NO: 3333165 - RNA, 22 nt, Human
gagcaagacgcugugcugcccu

SEQ ID NO: 3333166 - RNA, 20 nt, Human
gagaucaaccccuucgcucc

SEQ ID NO: 3333167 - RNA, 14 nt, Human
gagaucagccuggg

SEQ ID NO: 3333168 - RNA, 16 nt, Human
gagaucagccugggca

SEQ ID NO: 3333169 - RNA, 13 nt, Human
gagaucagccugg

SEQ ID NO: 3333170 - RNA, 20 nt, Human
gagccuccugcccuuaccug

SEQ ID NO: 3333171 - RNA, 22 nt, Human
gagccuccugcccuuaccugcc

SEQ ID NO: 3333172 - RNA, 17 nt, Human
gagcccugguggcagug

SEQ ID NO: 3333173 - RNA, 19 nt, Human
gagccucagcauccuggca

SEQ ID NO: 3333174 - RNA, 16 nt, Human
gagcccugguggcagu

SEQ ID NO: 3333175 - RNA, 15 nt, Human
gagcccugguggcag

SEQ ID NO: 3333176 - RNA, 13 nt, Human
gagccuccugccc

SEQ ID NO: 3333177 - RNA, 14 nt, Human
gagccuccugcccu

SEQ ID NO: 3333178 - RNA, 21 nt, Human
gagccucagcauccuggcacc

SEQ ID NO: 3333179 - RNA, 20 nt, Human
gagccucagcauccuggcac

SEQ ID NO: 3333180 - RNA, 13 nt, Human
gagccugggaggu

SEQ ID NO: 3333181 - RNA, 21 nt, Human
gagccugggaggucaaggcug

SEQ ID NO: 3333182 - RNA, 10 nt, Human
gagccuggca

SEQ ID NO: 3333183 - RNA, 15 nt, Human
gagccuggcaagaau

SEQ ID NO: 3333184 - RNA, 15 nt, Human
gagcugccaccugcc

SEQ ID NO: 3333185 - RNA, 16 nt, Human
gagcugccaccugccu

SEQ ID NO: 3333186 - RNA, 13 nt, Human
gagcugccaccug

SEQ ID NO: 3333187 - RNA, 23 nt, Human
gagcuacacaggggaaaagagga

SEQ ID NO: 3333188 - RNA, 15 nt, Human
gagggagggagggcu

SEQ ID NO: 3333189 - RNA, 15 nt, Human
gagggagggcuccag

SEQ ID NO: 3333190 - RNA, 14 nt, Human
gagggagggagggc

SEQ ID NO: 3333191 - RNA, 14 nt, Human
gagggagugacaga

SEQ ID NO: 3333192 - RNA, 14 nt, Human
gagggagguaagga

SEQ ID NO: 3333193 - RNA, 13 nt, Human
gagggagugacag

SEQ ID NO: 3333194 - RNA, 14 nt, Human
gagggcacagaaaa

SEQ ID NO: 3333195 - RNA, 22 nt, Human
gagggcacagaaaauggaagac

SEQ ID NO: 3333196 - RNA, 23 nt, Human
gagggcacagaaaauggaagaca

SEQ ID NO: 3333197 - RNA, 22 nt, Human
gaggggccucuuaugggcuggg

SEQ ID NO: 3333198 - RNA, 12 nt, Human
gaggggccucuu

SEQ ID NO: 3333199 - RNA, 13 nt, Human
gaggcugggcucc

SEQ ID NO: 3333200 - RNA, 14 nt, Human
gaggcugggcuccc

SEQ ID NO: 3333201 - RNA, 15 nt, Human
gaggcugggcucccu

SEQ ID NO: 3333202 - RNA, 23 nt, Human
gaggcccuucucuccagccccug

SEQ ID NO: 3333203 - RNA, 24 nt, Human
gaggcccuucucuccagccccugg

SEQ ID NO: 3333204 - RNA, 22 nt, Human
gaggcccuucucuccagccccu

SEQ ID NO: 3333205 - RNA, 15 nt, Human
gaggaauccagaccc

SEQ ID NO: 3333206 - RNA, 22 nt, Human
gaggaaggaaacccagcucugg

SEQ ID NO: 3333207 - RNA, 21 nt, Human
gaggaaggaaacccagcucug

SEQ ID NO: 3333208 - RNA, 14 nt, Human
gaggaauccagacc

SEQ ID NO: 3333209 - RNA, 22 nt, Human
gaggacagggaggugaccccag

SEQ ID NO: 3333210 - RNA, 13 nt, Human
gaggacagggagg

SEQ ID NO: 3333211 - RNA, 23 nt, Human
gaggaguuugggguaugggagag

SEQ ID NO: 3333212 - RNA, 20 nt, Human
gaggauguucugggacacag

SEQ ID NO: 3333213 - RNA, 17 nt, Human
gaggauguucugggaca

SEQ ID NO: 3333214 - RNA, 12 nt, Human
gaggauguucug

SEQ ID NO: 3333215 - RNA, 22 nt, Human
gaggcagccccauucugccugc

SEQ ID NO: 3333216 - RNA, 21 nt, Human
gaggcagccccauucugccug

SEQ ID NO: 3333217 - RNA, 23 nt, Human
gaggcagccccauucugccugcc

SEQ ID NO: 3333218 - RNA, 13 nt, Human
gaggccagccuug

SEQ ID NO: 3333219 - RNA, 12 nt, Human
gaggccagccuu

SEQ ID NO: 3333220 - RNA, 13 nt, Human
gaggcagccccau

SEQ ID NO: 3333221 - RNA, 16 nt, Human
gccacaagacccuugu

SEQ ID NO: 3333222 - RNA, 22 nt, Human
gccacaagacccuugugguccc

SEQ ID NO: 3333223 - RNA, 20 nt, Human
gccacagagaaaguacuucu

SEQ ID NO: 3333224 - RNA, 14 nt, Human
gccacagagaaagu

SEQ ID NO: 3333225 - RNA, 13 nt, Human
gccacagagaaag

SEQ ID NO: 3333226 - RNA, 23 nt, Human
gccacagagaaaguacuucucca

SEQ ID NO: 3333227 - RNA, 19 nt, Human
gcauuugaggucuguucuu

SEQ ID NO: 3333228 - RNA, 20 nt, Human
gcauuugaggucuguucuuu

SEQ ID NO: 3333229 - RNA, 22 nt, Human
gcauuuggugguuucagaaaug

SEQ ID NO: 3333230 - RNA, 23 nt, Human
gcauuuggugguuucagaaaugu

SEQ ID NO: 3333231 - RNA, 21 nt, Human
gccaaggcugggggaagaagc

SEQ ID NO: 3333232 - RNA, 21 nt, Human
gcauuuggugguuucagaaau

SEQ ID NO: 3333233 - RNA, 23 nt, Human
gccaaggugggaggauugcuuga

SEQ ID NO: 3333234 - RNA, 14 nt, Human
gccaaggugggagg

SEQ ID NO: 3333235 - RNA, 15 nt, Human
gccaaggugggagga

SEQ ID NO: 3333236 - RNA, 18 nt, Human
gccagaugcaccagcccu

SEQ ID NO: 3333237 - RNA, 17 nt, Human
gccagaugcaccagccc

SEQ ID NO: 3333238 - RNA, 16 nt, Human
gccagaugcaccagcc

SEQ ID NO: 3333239 - RNA, 23 nt, Human
gccagagggagugacagaggcag

SEQ ID NO: 3333240 - RNA, 12 nt, Human
gccagaggagag

SEQ ID NO: 3333241 - RNA, 13 nt, Human
gccagaggagaga

SEQ ID NO: 3333242 - RNA, 15 nt, Human
gccagaggagagagg

SEQ ID NO: 3333243 - RNA, 17 nt, Human
gccagaggagagaggac

SEQ ID NO: 3333244 - RNA, 19 nt, Human
gccagaggagagaggaccc

SEQ ID NO: 3333245 - RNA, 20 nt, Human
gccagagggagugacagagg

SEQ ID NO: 3333246 - RNA, 22 nt, Human
gccagagggagugacagaggca

SEQ ID NO: 3333247 - RNA, 21 nt, Human
gccagagggagugacagaggc

SEQ ID NO: 3333248 - RNA, 17 nt, Human
gccagagacacaagccu

SEQ ID NO: 3333249 - RNA, 19 nt, Human
gccagagacacaagccuuc

SEQ ID NO: 3333250 - RNA, 16 nt, Human
gccagagacacaagcc

SEQ ID NO: 3333251 - RNA, 10 nt, Human
gccagaggag

SEQ ID NO: 3333252 - RNA, 17 nt, Human
gccaccugccuguuggg

SEQ ID NO: 3333253 - RNA, 19 nt, Human
gccacggccaggccagagg

SEQ ID NO: 3333254 - RNA, 17 nt, Human
gccacggccaggccaga

SEQ ID NO: 3333255 - RNA, 18 nt, Human
gccacggccaggccagag

SEQ ID NO: 3333256 - RNA, 14 nt, Human
gccaccugcggugc

SEQ ID NO: 3333257 - RNA, 20 nt, Human
gccaccugcggugcuaucuc

SEQ ID NO: 3333258 - RNA, 22 nt, Human
gccaccugcggugcuaucuccc

SEQ ID NO: 3333259 - RNA, 20 nt, Human
gcccagagggccugcaaggg

SEQ ID NO: 3333260 - RNA, 21 nt, Human
gcccagagggccugcaaggga

SEQ ID NO: 3333261 - RNA, 22 nt, Human
gcccagagggccugcaagggag

SEQ ID NO: 3333262 - RNA, 11 nt, Human
gcccagccccu

SEQ ID NO: 3333263 - RNA, 12 nt, Human
gcccagccccuu

SEQ ID NO: 3333264 - RNA, 9 nt, Human
gcccagccc

SEQ ID NO: 3333265 - RNA, 14 nt, Human
gcccagagggccug

SEQ ID NO: 3333266 - RNA, 15 nt, Human
gcccagagggccugc

SEQ ID NO: 3333267 - RNA, 18 nt, Human
gcccagagggccugcaag

SEQ ID NO: 3333268 - RNA, 19 nt, Human
gcccagagggccugcaagg

SEQ ID NO: 3333269 - RNA, 12 nt, Human
gcccagagggcc

SEQ ID NO: 3333270 - RNA, 21 nt, Human
gcccaaugcacuuuguucugg

SEQ ID NO: 3333271 - RNA, 18 nt, Human
gcccaggaaaggcuccag

SEQ ID NO: 3333272 - RNA, 19 nt, Human
gcccaggaaaggcuccagg

SEQ ID NO: 3333273 - RNA, 20 nt, Human
gcccaggaaaggcuccagga

SEQ ID NO: 3333274 - RNA, 20 nt, Human
gcccaggcuggcgugcagug

SEQ ID NO: 3333275 - RNA, 19 nt, Human
gcccaggcuggcgugcagu

SEQ ID NO: 3333276 - RNA, 22 nt, Human
gcccaggcuggcgugcaguggu

SEQ ID NO: 3333277 - RNA, 19 nt, Human
gcccaggcuuagucacuga

SEQ ID NO: 3333278 - RNA, 21 nt, Human
gcccaggcuuagucacugaga

SEQ ID NO: 3333279 - RNA, 23 nt, Human
gcccaggcuuagucacugagaca

SEQ ID NO: 3333280 - RNA, 19 nt, Human
gcccagucuggaaugcagu

SEQ ID NO: 3333281 - RNA, 15 nt, Human
gcccaguugggugga

SEQ ID NO: 3333282 - RNA, 13 nt, Human
gcccagccccuuc

SEQ ID NO: 3333283 - RNA, 14 nt, Human
gcccagccccuucu

SEQ ID NO: 3333284 - RNA, 16 nt, Human
gcccagccccuucuga

SEQ ID NO: 3333285 - RNA, 17 nt, Human
gcccagccccuucugac

SEQ ID NO: 3333286 - RNA, 20 nt, Human
gcccagccccuucugaccca

SEQ ID NO: 3333287 - RNA, 24 nt, Human
gcccagccccuucugacccaugcu

SEQ ID NO: 3333288 - RNA, 15 nt, Human
gccagaugcaccagc

SEQ ID NO: 3333289 - RNA, 16 nt, Human
gccagauuucacucuc

SEQ ID NO: 3333290 - RNA, 18 nt, Human
gccagauuucacucuccu

SEQ ID NO: 3333291 - RNA, 21 nt, Human
gccagauuucacucuccuugg

SEQ ID NO: 3333292 - RNA, 23 nt, Human
gccagggacagaggggguggccu

SEQ ID NO: 3333293 - RNA, 15 nt, Human
gccaggcuggucuca

SEQ ID NO: 3333294 - RNA, 16 nt, Human
gccagggacagagggg

SEQ ID NO: 3333295 - RNA, 18 nt, Human
gccagggacagagggggu

SEQ ID NO: 3333296 - RNA, 13 nt, Human
gccagggacagag

SEQ ID NO: 3333297 - RNA, 17 nt, Human
gccagucaccccggcca

SEQ ID NO: 3333298 - RNA, 18 nt, Human
gccagucaccccggccac

SEQ ID NO: 3333299 - RNA, 20 nt, Human
gccagucaccccggccaccu

SEQ ID NO: 3333300 - RNA, 17 nt, Human
gccagguuuuuggucug

SEQ ID NO: 3333301 - RNA, 23 nt, Human
gccaggggaaaaucagccugcuc

SEQ ID NO: 3333302 - RNA, 18 nt, Human
gccaugaggaacaaggca

SEQ ID NO: 3333303 - RNA, 13 nt, Human
gccaugccagcuu

SEQ ID NO: 3333304 - RNA, 18 nt, Human
gccaugccagcuuaucuc

SEQ ID NO: 3333305 - RNA, 19 nt, Human
gccaugccagcuuaucuca

SEQ ID NO: 3333306 - RNA, 24 nt, Human
gccaugcuccuggcccacugcauc

SEQ ID NO: 3333307 - RNA, 16 nt, Human
gccauuuguguuuaua

SEQ ID NO: 3333308 - RNA, 13 nt, Human
gcauguuacauaa

SEQ ID NO: 3333309 - RNA, 14 nt, Human
gcaugccuggaugg

SEQ ID NO: 3333310 - RNA, 22 nt, Human
gcauuaucuagauacuguauca

SEQ ID NO: 3333311 - RNA, 24 nt, Human
gcauuaucuagauacuguaucaug

SEQ ID NO: 3333312 - RNA, 19 nt, Human
gcauuaucuagauacugua

SEQ ID NO: 3333313 - RNA, 12 nt, Human
gcauuccccagg

SEQ ID NO: 3333314 - RNA, 14 nt, Human
gcauuccccaggag

SEQ ID NO: 3333315 - RNA, 15 nt, Human
gcauuccccaggagg

SEQ ID NO: 3333316 - RNA, 16 nt, Human
gcauuccccaggaggc

SEQ ID NO: 3333317 - RNA, 17 nt, Human
gcauuccccaggaggcc

SEQ ID NO: 3333318 - RNA, 18 nt, Human
gcauuccccaggaggcca

SEQ ID NO: 3333319 - RNA, 19 nt, Human
gcauuccccaggaggccag

SEQ ID NO: 3333320 - RNA, 20 nt, Human
gcauuccccaggaggccagc

SEQ ID NO: 3333321 - RNA, 21 nt, Human
gcauuccccaggaggccagcc

SEQ ID NO: 3333322 - RNA, 18 nt, Human
gcauuugaggucuguucu

SEQ ID NO: 3333323 - RNA, 22 nt, Human
gcauuccccaggaggccagccu

SEQ ID NO: 3333324 - RNA, 20 nt, Human
gcaugacacgaauauugcug

SEQ ID NO: 3333325 - RNA, 21 nt, Human
gcaugacacgaauauugcuga

SEQ ID NO: 3333326 - RNA, 18 nt, Human
gcaugaaguaauaugcac

SEQ ID NO: 3333327 - RNA, 22 nt, Human
gcaugacacgaauauugcugau

SEQ ID NO: 3333328 - RNA, 21 nt, Human
gcaugaaguaauaugcacaca

SEQ ID NO: 3333329 - RNA, 22 nt, Human
gcaugaaguaauaugcacacau

SEQ ID NO: 3333330 - RNA, 20 nt, Human
gcaugaaguaauaugcacac

SEQ ID NO: 3333331 - RNA, 23 nt, Human
gcaucaggccaggcccucugccc

SEQ ID NO: 3333332 - RNA, 18 nt, Human
gcaucaggccaggcccuc

SEQ ID NO: 3333333 - RNA, 12 nt, Human
gcaucaggccag

SEQ ID NO: 3333334 - RNA, 19 nt, Human
gcaguggugcgaucugggu

SEQ ID NO: 3333335 - RNA, 18 nt, Human
gcaguggugcgaucuggg

SEQ ID NO: 3333336 - RNA, 11 nt, Human
gcagugggagc

SEQ ID NO: 3333337 - RNA, 20 nt, Human
gcaguggugguuuucuguuc

SEQ ID NO: 3333338 - RNA, 21 nt, Human
gcaguggugguuuucuguucu

SEQ ID NO: 3333339 - RNA, 21 nt, Human
gcaguggugcgaucuggguuc

SEQ ID NO: 3333340 - RNA, 20 nt, Human
gcaguggugcgaucuggguu

SEQ ID NO: 3333341 - RNA, 19 nt, Human
gcaguggugguuuucuguu

SEQ ID NO: 3333342 - RNA, 22 nt, Human
gcaguggugcgaucuggguuca

SEQ ID NO: 3333343 - RNA, 18 nt, Human
gcauacguacacauuuua

SEQ ID NO: 3333344 - RNA, 19 nt, Human
gcauacguacacauuuuau

SEQ ID NO: 3333345 - RNA, 19 nt, Human
gcaggguccuagaaauucc

SEQ ID NO: 3333346 - RNA, 16 nt, Human
gcagggucucacucug

SEQ ID NO: 3333347 - RNA, 22 nt, Human
gcagggcucagcggggacagcu

SEQ ID NO: 3333348 - RNA, 18 nt, Human
gcaggcagccaggccaca

SEQ ID NO: 3333349 - RNA, 17 nt, Human
gcaggcagccaggccac

SEQ ID NO: 3333350 - RNA, 16 nt, Human
gcacccucaggcaggu

SEQ ID NO: 3333351 - RNA, 19 nt, Human
gcacccucaggcagguggg

SEQ ID NO: 3333352 - RNA, 14 nt, Human
gcacgugugugcac

SEQ ID NO: 3333353 - RNA, 20 nt, Human
gcacuaaggugugcucugau

SEQ ID NO: 3333354 - RNA, 19 nt, Human
gcacuaaggugugcucuga

SEQ ID NO: 3333355 - RNA, 12 nt, Human
gcacugcuucca

SEQ ID NO: 3333356 - RNA, 13 nt, Human
gcacugcuuccag

SEQ ID NO: 3333357 - RNA, 14 nt, Human
gcacugcuuccagu

SEQ ID NO: 3333358 - RNA, 15 nt, Human
gcacuauaauguaag

SEQ ID NO: 3333359 - RNA, 14 nt, Human
gcacuauaauguaa

SEQ ID NO: 3333360 - RNA, 20 nt, Human
gcacuauaauguaagcucua

SEQ ID NO: 3333361 - RNA, 12 nt, Human
gcacugggcuug

SEQ ID NO: 3333362 - RNA, 19 nt, Human
gcacuguuuuauuuuaauu

SEQ ID NO: 3333363 - RNA, 17 nt, Human
gcaccaucucuccuccu

SEQ ID NO: 3333364 - RNA, 14 nt, Human
gcaccaucucuccu

SEQ ID NO: 3333365 - RNA, 15 nt, Human
gcaccaucucuccuc

SEQ ID NO: 3333366 - RNA, 13 nt, Human
gcaccagcagccu

SEQ ID NO: 3333367 - RNA, 23 nt, Human
gcacagcuucauuuccugugucu

SEQ ID NO: 3333368 - RNA, 21 nt, Human
gcacagcuucauuuccugugu

SEQ ID NO: 3333369 - RNA, 20 nt, Human
gauugugucucuugguccug

SEQ ID NO: 3333370 - RNA, 18 nt, Human
gcagcucagagagggugg

SEQ ID NO: 3333371 - RNA, 19 nt, Human
gcagcucagagaggguggg

SEQ ID NO: 3333372 - RNA, 17 nt, Human
gcagcucaccucucccu

SEQ ID NO: 3333373 - RNA, 20 nt, Human
gcagcucaccucucccuugg

SEQ ID NO: 3333374 - RNA, 21 nt, Human
gcagcucaccucucccuugga

SEQ ID NO: 3333375 - RNA, 14 nt, Human
gcagcucagagagg

SEQ ID NO: 3333376 - RNA, 16 nt, Human
gcagcucaccucuccc

SEQ ID NO: 3333377 - RNA, 18 nt, Human
gcagcagggagggcuucu

SEQ ID NO: 3333378 - RNA, 19 nt, Human
gcagcagggagggcuucug

SEQ ID NO: 3333379 - RNA, 19 nt, Human
gcagccucacaguccuuac

SEQ ID NO: 3333380 - RNA, 15 nt, Human
gcagccucacagucc

SEQ ID NO: 3333381 - RNA, 17 nt, Human
gcagccucacaguccuu

SEQ ID NO: 3333382 - RNA, 22 nt, Human
gcagagaccaucccugaaggcc

SEQ ID NO: 3333383 - RNA, 20 nt, Human
gcagagaccaucccugaagg

SEQ ID NO: 3333384 - RNA, 21 nt, Human
gcagagaccaucccugaaggc

SEQ ID NO: 3333385 - RNA, 19 nt, Human
gcagagaccaucccugaag

SEQ ID NO: 3333386 - RNA, 22 nt, Human
gcagacucuacagaggccaugg

SEQ ID NO: 3333387 - RNA, 19 nt, Human
gcagacucuacagaggcca

SEQ ID NO: 3333388 - RNA, 18 nt, Human
gcagacucuacagaggcc

SEQ ID NO: 3333389 - RNA, 17 nt, Human
gcagacucuacagaggc

SEQ ID NO: 3333390 - RNA, 14 nt, Human
gcacuugcagacuc

SEQ ID NO: 3333391 - RNA, 22 nt, Human
gcacuucgggaggucgaggcag

SEQ ID NO: 3333392 - RNA, 18 nt, Human
gcagauggagaccccuug

SEQ ID NO: 3333393 - RNA, 21 nt, Human
gcuucauccuccucagaucuu

SEQ ID NO: 3333394 - RNA, 20 nt, Human
gcuucaguggcagcugcuuu

SEQ ID NO: 3333395 - RNA, 19 nt, Human
gcuucaguggcagcugcuu

SEQ ID NO: 3333396 - RNA, 23 nt, Human
gcuuauauucaaccauggacuuu

SEQ ID NO: 3333397 - RNA, 20 nt, Human
gcuuauacacuuacacuuua

SEQ ID NO: 3333398 - RNA, 22 nt, Human
gcuuauauucaaccauggacuu

SEQ ID NO: 3333399 - RNA, 20 nt, Human
gcuuauauucaaccauggac

SEQ ID NO: 3333400 - RNA, 13 nt, Human
gcuuauauucaac

SEQ ID NO: 3333401 - RNA, 18 nt, Human
gcuucauuuccugugucu

SEQ ID NO: 3333402 - RNA, 22 nt, Human
gcuucucacugccaugccagcu

SEQ ID NO: 3333403 - RNA, 17 nt, Human
gcuucucacugccaugc

SEQ ID NO: 3333404 - RNA, 23 nt, Human
gcugucccuuacgugaguccugg

SEQ ID NO: 3333405 - RNA, 22 nt, Human
gcugucccuuacgugaguccug

SEQ ID NO: 3333406 - RNA, 16 nt, Human
gcugucccuuuuccuu

SEQ ID NO: 3333407 - RNA, 15 nt, Human
gcuggugucaccuga

SEQ ID NO: 3333408 - RNA, 14 nt, Human
gcuggugucaccug

SEQ ID NO: 3333409 - RNA, 17 nt, Human
gcugucagccauuccug

SEQ ID NO: 3333410 - RNA, 15 nt, Human
gcugugucucccuuc

SEQ ID NO: 3333411 - RNA, 20 nt, Human
gcuggucccacucaguccau

SEQ ID NO: 3333412 - RNA, 13 nt, Human
gcugggggccuca

SEQ ID NO: 3333413 - RNA, 15 nt, Human
gcugggggccucagu

SEQ ID NO: 3333414 - RNA, 14 nt, Human
gcugggggccucag

SEQ ID NO: 3333415 - RNA, 13 nt, Human
gcuggccuggccc

SEQ ID NO: 3333416 - RNA, 12 nt, Human
gcuggccuggcc

SEQ ID NO: 3333417 - RNA, 14 nt, Human
gcuggccuggcccc

SEQ ID NO: 3333418 - RNA, 15 nt, Human
gcuggccuggccccu

SEQ ID NO: 3333419 - RNA, 19 nt, Human
gcugggaugauuggagggg

SEQ ID NO: 3333420 - RNA, 21 nt, Human
gcugggcucccuucccaccuc

SEQ ID NO: 3333421 - RNA, 20 nt, Human
gcugggcuucaguggcagcu

SEQ ID NO: 3333422 - RNA, 22 nt, Human
gcugggcuucaguggcagcugc

SEQ ID NO: 3333423 - RNA, 21 nt, Human
gcugggcuucaguggcagcug

SEQ ID NO: 3333424 - RNA, 19 nt, Human
gcugggcuucaguggcagc

SEQ ID NO: 3333425 - RNA, 12 nt, Human
gcugcccugccc

SEQ ID NO: 3333426 - RNA, 13 nt, Human
gcugcccugccca

SEQ ID NO: 3333427 - RNA, 14 nt, Human
gcugcccugcccac

SEQ ID NO: 3333428 - RNA, 16 nt, Human
gcugcccugcccaccu

SEQ ID NO: 3333429 - RNA, 18 nt, Human
gcugcccugcccaccugg

SEQ ID NO: 3333430 - RNA, 20 nt, Human
gcugcccugcccaccuggcc

SEQ ID NO: 3333431 - RNA, 21 nt, Human
gcugcccugcccaccuggccu

SEQ ID NO: 3333432 - RNA, 22 nt, Human
gcugcccugcccaccuggccuc

SEQ ID NO: 3333433 - RNA, 23 nt, Human
gcugcccugcccaccuggccucu

SEQ ID NO: 3333434 - RNA, 24 nt, Human
gcugcccugcccaccuggccucug

SEQ ID NO: 3333435 - RNA, 22 nt, Human
gcugcgguccacccaggagccc

SEQ ID NO: 3333436 - RNA, 21 nt, Human
gcugcgguccacccaggagcc

SEQ ID NO: 3333437 - RNA, 19 nt, Human
gcugcgguccacccaggag

SEQ ID NO: 3333438 - RNA, 15 nt, Human
gcugcgguccaccca

SEQ ID NO: 3333439 - RNA, 14 nt, Human
gcugcgguccaccc

SEQ ID NO: 3333440 - RNA, 19 nt, Human
gcugccuguucagcuccag

SEQ ID NO: 3333441 - RNA, 18 nt, Human
gcugccuguucagcucca

SEQ ID NO: 3333442 - RNA, 22 nt, Human
gcugccuguucagcuccagcuc

SEQ ID NO: 3333443 - RNA, 20 nt, Human
gcugccuguucagcuccagc

SEQ ID NO: 3333444 - RNA, 15 nt, Human
gcuggaccuugaacu

SEQ ID NO: 3333445 - RNA, 22 nt, Human
gcugcuugggcuucauccuccu

SEQ ID NO: 3333446 - RNA, 22 nt, Human
gcugcuuuugucuaugggacuc

SEQ ID NO: 3333447 - RNA, 20 nt, Human
gcucucaggccagcugcuug

SEQ ID NO: 3333448 - RNA, 21 nt, Human
gcucucaggccagcugcuugg

SEQ ID NO: 3333449 - RNA, 22 nt, Human
gcugacuguuuucucuugagag

SEQ ID NO: 3333450 - RNA, 19 nt, Human
gcugacagacacaggcccg

SEQ ID NO: 3333451 - RNA, 18 nt, Human
gcugacagacacaggccc

SEQ ID NO: 3333452 - RNA, 17 nt, Human
gcugacagacacaggcc

SEQ ID NO: 3333453 - RNA, 12 nt, Human
gcugccaccugc

SEQ ID NO: 3333454 - RNA, 20 nt, Human
gcugccaaugggagcucaug

SEQ ID NO: 3333455 - RNA, 19 nt, Human
gcugcauuuaaaagauaca

SEQ ID NO: 3333456 - RNA, 17 nt, Human
gcugcauuuaaaagaua

SEQ ID NO: 3333457 - RNA, 18 nt, Human
gcugcauuuaaaagauac

SEQ ID NO: 3333458 - RNA, 13 nt, Human
gcugcaguugcca

SEQ ID NO: 3333459 - RNA, 14 nt, Human
gcugcaguugccag

SEQ ID NO: 3333460 - RNA, 22 nt, Human
gcugcaaaggguaucaggugcu

SEQ ID NO: 3333461 - RNA, 22 nt, Human
gcucagcggggacagcuccuuc

SEQ ID NO: 3333462 - RNA, 23 nt, Human
gcucagcggggacagcuccuucu

SEQ ID NO: 3333463 - RNA, 18 nt, Human
gcucagcggggacagcuc

SEQ ID NO: 3333464 - RNA, 17 nt, Human
gcucagcggggacagcu

SEQ ID NO: 3333465 - RNA, 16 nt, Human
gcucagcggggacagc

SEQ ID NO: 3333466 - RNA, 15 nt, Human
gcucaccagccccag

SEQ ID NO: 3333467 - RNA, 14 nt, Human
gcucaccagcccca

SEQ ID NO: 3333468 - RNA, 13 nt, Human
gcucaccagcccc

SEQ ID NO: 3333469 - RNA, 12 nt, Human
gcucaccagccc

SEQ ID NO: 3333470 - RNA, 16 nt, Human
gcucacauaucuguca

SEQ ID NO: 3333471 - RNA, 14 nt, Human
gcucaccucucccu

SEQ ID NO: 3333472 - RNA, 16 nt, Human
gcucaccucucccuug

SEQ ID NO: 3333473 - RNA, 17 nt, Human
gcucaccucucccuugg

SEQ ID NO: 3333474 - RNA, 18 nt, Human
gcucaccucucccuugga

SEQ ID NO: 3333475 - RNA, 13 nt, Human
gcuaucuccccca

SEQ ID NO: 3333476 - RNA, 18 nt, Human
gcucaaguccucuuuucu

SEQ ID NO: 3333477 - RNA, 14 nt, Human
gcuaucucccccag

SEQ ID NO: 3333478 - RNA, 22 nt, Human
gcucaaguccucuuuucugaga

SEQ ID NO: 3333479 - RNA, 19 nt, Human
gcucaaguccucuuuucug

SEQ ID NO: 3333480 - RNA, 19 nt, Human
gcggugcuaucucccccag

SEQ ID NO: 3333481 - RNA, 22 nt, Human
gcggugcuaucucccccagccc

SEQ ID NO: 3333482 - RNA, 21 nt, Human
gcuaguugggcuuccucauag

SEQ ID NO: 3333483 - RNA, 24 nt, Human
gcuccaggcuccuuuagcgcccag

SEQ ID NO: 3333484 - RNA, 12 nt, Human
gcuccaggcucc

SEQ ID NO: 3333485 - RNA, 15 nt, Human
gcuccaggagcagcc

SEQ ID NO: 3333486 - RNA, 16 nt, Human
gcuccaggagcagcca

SEQ ID NO: 3333487 - RNA, 17 nt, Human
gcuccaggagcagccac

SEQ ID NO: 3333488 - RNA, 18 nt, Human
gcuccaggagcagccaca

SEQ ID NO: 3333489 - RNA, 12 nt, Human
gcuccaggagca

SEQ ID NO: 3333490 - RNA, 14 nt, Human
gcuccaggagcagc

SEQ ID NO: 3333491 - RNA, 11 nt, Human
gcuccaggagc

SEQ ID NO: 3333492 - RNA, 21 nt, Human
gcuccagcuguucagcugguu

SEQ ID NO: 3333493 - RNA, 20 nt, Human
gcuccagcuguucagcuggu

SEQ ID NO: 3333494 - RNA, 23 nt, Human
gcuccgcuuucuacccagcgagc

SEQ ID NO: 3333495 - RNA, 22 nt, Human
gcuccgcuuucuacccagcgag

SEQ ID NO: 3333496 - RNA, 21 nt, Human
gcuccgcuuucuacccagcga

SEQ ID NO: 3333497 - RNA, 18 nt, Human
gcuccgcuuucuacccag

SEQ ID NO: 3333498 - RNA, 20 nt, Human
gcucccuucccaccucucuc

SEQ ID NO: 3333499 - RNA, 19 nt, Human
gcucccuucccaccucucu

SEQ ID NO: 3333500 - RNA, 24 nt, Human
gcuccgcuuucuacccagcgagcc

SEQ ID NO: 3333501 - RNA, 19 nt, Human
gcucgagcaugccuggaug

SEQ ID NO: 3333502 - RNA, 21 nt, Human
gcucgagcaugccuggauggg

SEQ ID NO: 3333503 - RNA, 17 nt, Human
gcucgagcaugccugga

SEQ ID NO: 3333504 - RNA, 17 nt, Human
gcuccuuuagcgcccag

SEQ ID NO: 3333505 - RNA, 13 nt, Human
gcuccuucugucc

SEQ ID NO: 3333506 - RNA, 13 nt, Human
gcuccugugucuu

SEQ ID NO: 3333507 - RNA, 12 nt, Human
gcuccugugucu

SEQ ID NO: 3333508 - RNA, 23 nt, Human
gcgcccaguuggguggaugccug

SEQ ID NO: 3333509 - RNA, 21 nt, Human
gcgccuuaaggauguucuagc

SEQ ID NO: 3333510 - RNA, 14 nt, Human
gcggggacagcucc

SEQ ID NO: 3333511 - RNA, 13 nt, Human
gcggggacagcuc

SEQ ID NO: 3333512 - RNA, 16 nt, Human
gcggagaaaggaaggg

SEQ ID NO: 3333513 - RNA, 17 nt, Human
gcgcugccccuggcagc

SEQ ID NO: 3333514 - RNA, 18 nt, Human
gcgcugccccuggcagcc

SEQ ID NO: 3333515 - RNA, 21 nt, Human
gcgcugccccuggcagccccu

SEQ ID NO: 3333516 - RNA, 14 nt, Human
gcgguccacccagg

SEQ ID NO: 3333517 - RNA, 13 nt, Human
gcgguccacccag

SEQ ID NO: 3333518 - RNA, 19 nt, Human
gcggugagaggggaacaga

SEQ ID NO: 3333519 - RNA, 17 nt, Human
gcggggacagcuccuuc

SEQ ID NO: 3333520 - RNA, 15 nt, Human
gcggggacagcuccu

SEQ ID NO: 3333521 - RNA, 12 nt, Human
gcgacaaugcaa

SEQ ID NO: 3333522 - RNA, 13 nt, Human
gcgacaaugcaaa

SEQ ID NO: 3333523 - RNA, 20 nt, Human
gcgacaaugcaaaccaucau

SEQ ID NO: 3333524 - RNA, 21 nt, Human
gcgacaaugcaaaccaucauu

SEQ ID NO: 3333525 - RNA, 15 nt, Human
gccuuacacaauggu

SEQ ID NO: 3333526 - RNA, 15 nt, Human
gccuguaauccuagc

SEQ ID NO: 3333527 - RNA, 20 nt, Human
gccuguaauccuagcacuuu

SEQ ID NO: 3333528 - RNA, 21 nt, Human
gccuggccagaugcaccagcc

SEQ ID NO: 3333529 - RNA, 16 nt, Human
gccuggccagaugcac

SEQ ID NO: 3333530 - RNA, 20 nt, Human
gccuggccagaugcaccagc

SEQ ID NO: 3333531 - RNA, 13 nt, Human
gccuggccccuca

SEQ ID NO: 3333532 - RNA, 18 nt, Human
gccugggcagaaggaaga

SEQ ID NO: 3333533 - RNA, 20 nt, Human
gccuggauggggcugcaccg

SEQ ID NO: 3333534 - RNA, 16 nt, Human
gccuggauggggcugc

SEQ ID NO: 3333535 - RNA, 18 nt, Human
gccuggauggggcugcac

SEQ ID NO: 3333536 - RNA, 12 nt, Human
gccugagcuggg

SEQ ID NO: 3333537 - RNA, 16 nt, Human
gccugaagucacacag

SEQ ID NO: 3333538 - RNA, 15 nt, Human
gccugaagucacaca

SEQ ID NO: 3333539 - RNA, 21 nt, Human
gcccaguuggguggaugccug

SEQ ID NO: 3333540 - RNA, 19 nt, Human
gcccaguuggguggaugcc

SEQ ID NO: 3333541 - RNA, 17 nt, Human
gccugaagucacacagu

SEQ ID NO: 3333542 - RNA, 14 nt, Human
ggcccagagggccu

SEQ ID NO: 3333543 - RNA, 17 nt, Human
ggcccagagggccugca

SEQ ID NO: 3333544 - RNA, 19 nt, Human
ggcccagagggccugcaag

SEQ ID NO: 3333545 - RNA, 20 nt, Human
ggcccagagggccugcaagg

SEQ ID NO: 3333546 - RNA, 22 nt, Human
ggccucaagugauucuccugcc

SEQ ID NO: 3333547 - RNA, 14 nt, Human
ggccucaagugauu

SEQ ID NO: 3333548 - RNA, 22 nt, Human
ggccuagcauacguacacauuu

SEQ ID NO: 3333549 - RNA, 20 nt, Human
ggccuagcauacguacacau

SEQ ID NO: 3333550 - RNA, 14 nt, Human
ggccuccugugugu

SEQ ID NO: 3333551 - RNA, 20 nt, Human
ggccucgguguggagaagcg

SEQ ID NO: 3333552 - RNA, 16 nt, Human
ggccucugcacucccc

SEQ ID NO: 3333553 - RNA, 23 nt, Human
ggcgcagcauauucaggaagcuc

SEQ ID NO: 3333554 - RNA, 24 nt, Human
ggcgcagcauauucaggaagcuca

SEQ ID NO: 3333555 - RNA, 15 nt, Human
ggccuggccugagcu

SEQ ID NO: 3333556 - RNA, 16 nt, Human
ggccuggccugagcug

SEQ ID NO: 3333557 - RNA, 23 nt, Human
ggccugggggcugggcagaggaa

SEQ ID NO: 3333558 - RNA, 22 nt, Human
ggccugggggcugggcagagga

SEQ ID NO: 3333559 - RNA, 14 nt, Human
ggccuggccccuca

SEQ ID NO: 3333560 - RNA, 15 nt, Human
ggccuggccccucag

SEQ ID NO: 3333561 - RNA, 17 nt, Human
ggccuggccccucaggg

SEQ ID NO: 3333562 - RNA, 18 nt, Human
ggccuggccccucagggu

SEQ ID NO: 3333563 - RNA, 23 nt, Human
ggccuggccccucagggucccug

SEQ ID NO: 3333564 - RNA, 10 nt, Human
ggccuggccu

SEQ ID NO: 3333565 - RNA, 13 nt, Human
ggccuggccugag

SEQ ID NO: 3333566 - RNA, 14 nt, Human
ggccuggccugagc

SEQ ID NO: 3333567 - RNA, 13 nt, Human
ggccuggccccuc

SEQ ID NO: 3333568 - RNA, 18 nt, Human
ggccucugcacuccccug

SEQ ID NO: 3333569 - RNA, 19 nt, Human
ggccucugcacuccccugc

SEQ ID NO: 3333570 - RNA, 22 nt, Human
ggccucugcacuccccugcugg

SEQ ID NO: 3333571 - RNA, 16 nt, Human
ggcucugccucccauc

SEQ ID NO: 3333572 - RNA, 14 nt, Human
ggcucugcccuugg

SEQ ID NO: 3333573 - RNA, 15 nt, Human
ggcucugcccuuggu

SEQ ID NO: 3333574 - RNA, 13 nt, Human
ggcucugccuccc

SEQ ID NO: 3333575 - RNA, 15 nt, Human
ggcucugccucccau

SEQ ID NO: 3333576 - RNA, 12 nt, Human
ggcucugcccuu

SEQ ID NO: 3333577 - RNA, 14 nt, Human
ggcucucaggccag

SEQ ID NO: 3333578 - RNA, 17 nt, Human
ggcucucaggccagcug

SEQ ID NO: 3333579 - RNA, 18 nt, Human
ggcucucaggccagcugc

SEQ ID NO: 3333580 - RNA, 19 nt, Human
ggcucucaggccagcugcu

SEQ ID NO: 3333581 - RNA, 20 nt, Human
ggcucucaggccagcugcuu

SEQ ID NO: 3333582 - RNA, 15 nt, Human
ggcucucaggccagc

SEQ ID NO: 3333583 - RNA, 16 nt, Human
ggcucucaggccagcu

SEQ ID NO: 3333584 - RNA, 14 nt, Human
ggcuccaggcuccu

SEQ ID NO: 3333585 - RNA, 10 nt, Human
ggcuccagac

SEQ ID NO: 3333586 - RNA, 14 nt, Human
ggcuccaggagcag

SEQ ID NO: 3333587 - RNA, 16 nt, Human
ggcuccaggagcagcc

SEQ ID NO: 3333588 - RNA, 17 nt, Human
ggcuccaggagcagcca

SEQ ID NO: 3333589 - RNA, 13 nt, Human
ggcuccaggagca

SEQ ID NO: 3333590 - RNA, 11 nt, Human
ggcuccaggcu

SEQ ID NO: 3333591 - RNA, 13 nt, Human
ggcuccaggcucc

SEQ ID NO: 3333592 - RNA, 12 nt, Human
ggcuccaggcuc

SEQ ID NO: 3333593 - RNA, 12 nt, Human
ggcuaugcauuu

SEQ ID NO: 3333594 - RNA, 13 nt, Human
ggcuaugcauuug

SEQ ID NO: 3333595 - RNA, 9 nt, Human
ggcuccaga

SEQ ID NO: 3333596 - RNA, 15 nt, Human
ggcgcgguggcucac

SEQ ID NO: 3333597 - RNA, 11 nt, Human
ggcgcugcccc

SEQ ID NO: 3333598 - RNA, 17 nt, Human
ggcgcugccccuggcag

SEQ ID NO: 3333599 - RNA, 14 nt, Human
ggcugcuucaagga

SEQ ID NO: 3333600 - RNA, 20 nt, Human
ggcugcuucaaggauccuga

SEQ ID NO: 3333601 - RNA, 15 nt, Human
ggcugcuucaaggau

SEQ ID NO: 3333602 - RNA, 19 nt, Human
ggcugcuucaaggauccug

SEQ ID NO: 3333603 - RNA, 18 nt, Human
ggcugggcuucaguggca

SEQ ID NO: 3333604 - RNA, 22 nt, Human
ggcugggcuucaguggcagcug

SEQ ID NO: 3333605 - RNA, 21 nt, Human
ggcugggcuucaguggcagcu

SEQ ID NO: 3333606 - RNA, 11 nt, Human
ggcugggcuuc

SEQ ID NO: 3333607 - RNA, 16 nt, Human
ggcugggggaagaagc

SEQ ID NO: 3333608 - RNA, 20 nt, Human
ggcugggcucccuucccacc

SEQ ID NO: 3333609 - RNA, 21 nt, Human
ggcugggcucccuucccaccu

SEQ ID NO: 3333610 - RNA, 18 nt, Human
ggcugggcucccuuccca

SEQ ID NO: 3333611 - RNA, 14 nt, Human
ggcuuagucacuga

SEQ ID NO: 3333612 - RNA, 20 nt, Human
ggcuucacggaagagccuug

SEQ ID NO: 3333613 - RNA, 21 nt, Human
ggcuucacggaagagccuugc

SEQ ID NO: 3333614 - RNA, 17 nt, Human
ggcuuggggaccagagc

SEQ ID NO: 3333615 - RNA, 18 nt, Human
ggcuuggggaccagagcu

SEQ ID NO: 3333616 - RNA, 20 nt, Human
ggcuguuggcugggggccuc

SEQ ID NO: 3333617 - RNA, 16 nt, Human
ggcuguuggcuggggg

SEQ ID NO: 3333618 - RNA, 15 nt, Human
ggcuguuggcugggg

SEQ ID NO: 3333619 - RNA, 14 nt, Human
ggcuguuggcuggg

SEQ ID NO: 3333620 - RNA, 22 nt, Human
gggagcugccuguucagcucca

SEQ ID NO: 3333621 - RNA, 21 nt, Human
gggagcugccuguucagcucc

SEQ ID NO: 3333622 - RNA, 13 nt, Human
gggagcugccugu

SEQ ID NO: 3333623 - RNA, 21 nt, Human
gggagugaguugauagcacag

SEQ ID NO: 3333624 - RNA, 23 nt, Human
gggaggauugcuugagcucagga

SEQ ID NO: 3333625 - RNA, 20 nt, Human
gggaggugggauccuccagg

SEQ ID NO: 3333626 - RNA, 21 nt, Human
gggaggauugcuugagcucag

SEQ ID NO: 3333627 - RNA, 22 nt, Human
gggaggauguucugggacacag

SEQ ID NO: 3333628 - RNA, 23 nt, Human
gggaggaucucuugagccuggga

SEQ ID NO: 3333629 - RNA, 21 nt, Human
gggaauguuugccucugccuc

SEQ ID NO: 3333630 - RNA, 19 nt, Human
gggaauguuugccucugcc

SEQ ID NO: 3333631 - RNA, 14 nt, Human
gggacacccuguga

SEQ ID NO: 3333632 - RNA, 19 nt, Human
gggacucaaugcacugaca

SEQ ID NO: 3333633 - RNA, 17 nt, Human
gggacucaaugcacuga

SEQ ID NO: 3333634 - RNA, 23 nt, Human
gggacucaaugcacugacauugu

SEQ ID NO: 3333635 - RNA, 16 nt, Human
gggacucaaugcacug

SEQ ID NO: 3333636 - RNA, 14 nt, Human
ggagccuccugccc

SEQ ID NO: 3333637 - RNA, 15 nt, Human
ggagccuccugcccu

SEQ ID NO: 3333638 - RNA, 12 nt, Human
ggagggagggcu

SEQ ID NO: 3333639 - RNA, 13 nt, Human
ggagggagggcuc

SEQ ID NO: 3333640 - RNA, 16 nt, Human
ggagggagggcuccag

SEQ ID NO: 3333641 - RNA, 17 nt, Human
ggagggagggcuccaga

SEQ ID NO: 3333642 - RNA, 21 nt, Human
ggaggauguucugggacacag

SEQ ID NO: 3333643 - RNA, 18 nt, Human
ggaggauguucugggaca

SEQ ID NO: 3333644 - RNA, 15 nt, Human
ggaggauguucuggg

SEQ ID NO: 3333645 - RNA, 22 nt, Human
ggagucccaccuuggcugcagg

SEQ ID NO: 3333646 - RNA, 21 nt, Human
ggagucccaccuuggcugcag

SEQ ID NO: 3333647 - RNA, 22 nt, Human
ggacacucaaaagcugggcagg

SEQ ID NO: 3333648 - RNA, 16 nt, Human
ggacagaggggguggc

SEQ ID NO: 3333649 - RNA, 16 nt, Human
ggacagcuccuucugu

SEQ ID NO: 3333650 - RNA, 15 nt, Human
ggacagcuccuucug

SEQ ID NO: 3333651 - RNA, 11 nt, Human
ggacagcuccu

SEQ ID NO: 3333652 - RNA, 22 nt, Human
ggacagccacggccaggccaga

SEQ ID NO: 3333653 - RNA, 14 nt, Human
ggaccagagcugcc

SEQ ID NO: 3333654 - RNA, 19 nt, Human
ggaccagagcugccaccug

SEQ ID NO: 3333655 - RNA, 18 nt, Human
ggaccuugaacuggguac

SEQ ID NO: 3333656 - RNA, 18 nt, Human
ggagaagcggcuggcagc

SEQ ID NO: 3333657 - RNA, 22 nt, Human
ggcaugacacgaauauugcuga

SEQ ID NO: 3333658 - RNA, 18 nt, Human
ggcaugugaugagaggaa

SEQ ID NO: 3333659 - RNA, 23 nt, Human
ggcaugugaugagaggaaaucac

SEQ ID NO: 3333660 - RNA, 17 nt, Human
ggcagguuggugggggc

SEQ ID NO: 3333661 - RNA, 17 nt, Human
ggcagggucucacucug

SEQ ID NO: 3333662 - RNA, 12 nt, Human
ggcaggguccua

SEQ ID NO: 3333663 - RNA, 24 nt, Human
ggcagcugcgguccacccaggagc

SEQ ID NO: 3333664 - RNA, 23 nt, Human
ggcagcugcgguccacccaggag

SEQ ID NO: 3333665 - RNA, 21 nt, Human
ggcagcugcgguccacccagg

SEQ ID NO: 3333666 - RNA, 17 nt, Human
ggcagaguugaagacag

SEQ ID NO: 3333667 - RNA, 19 nt, Human
ggcagaguugaagacagag

SEQ ID NO: 3333668 - RNA, 12 nt, Human
ggcccagagagg

SEQ ID NO: 3333669 - RNA, 11 nt, Human
ggccaggagcc

SEQ ID NO: 3333670 - RNA, 13 nt, Human
ggccaggagccuc

SEQ ID NO: 3333671 - RNA, 14 nt, Human
ggccaggcccucug

SEQ ID NO: 3333672 - RNA, 15 nt, Human
ggccaggcccucugc

SEQ ID NO: 3333673 - RNA, 16 nt, Human
ggccaggcccucugcc

SEQ ID NO: 3333674 - RNA, 17 nt, Human
ggccaggcccucugccc

SEQ ID NO: 3333675 - RNA, 20 nt, Human
ggccacugugaagagaacca

SEQ ID NO: 3333676 - RNA, 22 nt, Human
ggccacagaaaauucuucucca

SEQ ID NO: 3333677 - RNA, 20 nt, Human
ggcauguucucugaggacac

SEQ ID NO: 3333678 - RNA, 18 nt, Human
ggaugcccaaagaugcag

SEQ ID NO: 3333679 - RNA, 17 nt, Human
ggaugccugguggcagc

SEQ ID NO: 3333680 - RNA, 13 nt, Human
ggaugccuggugg

SEQ ID NO: 3333681 - RNA, 19 nt, Human
ggaugcccaaagaugcagc

SEQ ID NO: 3333682 - RNA, 23 nt, Human
ggagucccaccuuggcugcaggg

SEQ ID NO: 3333683 - RNA, 18 nt, Human
ggaugaucuaggaagacu

SEQ ID NO: 3333684 - RNA, 22 nt, Human
ggaugaucuaggaagacuuugg

SEQ ID NO: 3333685 - RNA, 16 nt, Human
ggaugaucuaggaaga

SEQ ID NO: 3333686 - RNA, 20 nt, Human
ggaugccugguggcagcugc

SEQ ID NO: 3333687 - RNA, 19 nt, Human
ggaugccugguggcagcug

SEQ ID NO: 3333688 - RNA, 18 nt, Human
ggaugccugguggcagcu

SEQ ID NO: 3333689 - RNA, 13 nt, Human
ggauuauccugag

SEQ ID NO: 3333690 - RNA, 17 nt, Human
ggcaagcaccuccugcc

SEQ ID NO: 3333691 - RNA, 16 nt, Human
ggauucuuccucccuc

SEQ ID NO: 3333692 - RNA, 21 nt, Human
ggauucuuccucccucccucu

SEQ ID NO: 3333693 - RNA, 17 nt, Human
ggcaccagcagccugga

SEQ ID NO: 3333694 - RNA, 16 nt, Human
ggcaccagcagccugg

SEQ ID NO: 3333695 - RNA, 19 nt, Human
ggcaagcaccuccugccuc

SEQ ID NO: 3333696 - RNA, 18 nt, Human
ggcaagcaccuccugccu

SEQ ID NO: 3333697 - RNA, 19 nt, Human
ggcacucagaagacacuga

SEQ ID NO: 3333698 - RNA, 18 nt, Human
ggcacucagaagacacug

SEQ ID NO: 3333699 - RNA, 17 nt, Human
ggcacccggccccugcu

SEQ ID NO: 3333700 - RNA, 19 nt, Human
ggcacccggccccugcugg

SEQ ID NO: 3333701 - RNA, 18 nt, Human
ggcacccggccccugcug

SEQ ID NO: 3333702 - RNA, 22 nt, Human
ggcagagcagagaccaucccug

SEQ ID NO: 3333703 - RNA, 21 nt, Human
cacccggccccugcugguuca

SEQ ID NO: 3333704 - RNA, 18 nt, Human
cacccggccccugcuggu

SEQ ID NO: 3333705 - RNA, 17 nt, Human
cacccggccccugcugg

SEQ ID NO: 3333706 - RNA, 16 nt, Human
cacccggccccugcug

SEQ ID NO: 3333707 - RNA, 14 nt, Human
cacccggccccugc

SEQ ID NO: 3333708 - RNA, 13 nt, Human
cacccggccccug

SEQ ID NO: 3333709 - RNA, 19 nt, Human
cacccgcuaagagggaggg

SEQ ID NO: 3333710 - RNA, 12 nt, Human
cacccggccccu

SEQ ID NO: 3333711 - RNA, 13 nt, Human
cacauauugauuu

SEQ ID NO: 3333712 - RNA, 20 nt, Human
caccccucaacaccucugca

SEQ ID NO: 3333713 - RNA, 11 nt, Human
cacccugugau

SEQ ID NO: 3333714 - RNA, 12 nt, Human
cacccugugaug

SEQ ID NO: 3333715 - RNA, 15 nt, Human
cacccugugaugggg

SEQ ID NO: 3333716 - RNA, 18 nt, Human
cacccugugauggggccc

SEQ ID NO: 3333717 - RNA, 20 nt, Human
cacccugugauggggcccug

SEQ ID NO: 3333718 - RNA, 21 nt, Human
cacccugugauggggcccugc

SEQ ID NO: 3333719 - RNA, 22 nt, Human
cacccugugauggggcccugcc

SEQ ID NO: 3333720 - RNA, 23 nt, Human
cacccugugauggggcccugccu

SEQ ID NO: 3333721 - RNA, 15 nt, Human
caccgaaaacguggc

SEQ ID NO: 3333722 - RNA, 18 nt, Human
caccgaaaacguggcugc

SEQ ID NO: 3333723 - RNA, 19 nt, Human
caccgaaaacguggcugcu

SEQ ID NO: 3333724 - RNA, 21 nt, Human
caccgaaaacguggcugcuuc

SEQ ID NO: 3333725 - RNA, 22 nt, Human
caccgaaaacguggcugcuuca

SEQ ID NO: 3333726 - RNA, 14 nt, Human
caccgcagacagga

SEQ ID NO: 3333727 - RNA, 15 nt, Human
caccgcagacaggac

SEQ ID NO: 3333728 - RNA, 17 nt, Human
caccgcagacaggacca

SEQ ID NO: 3333729 - RNA, 18 nt, Human
caccgcagacaggaccag

SEQ ID NO: 3333730 - RNA, 12 nt, Human
caccgcagacag

SEQ ID NO: 3333731 - RNA, 13 nt, Human
caccgcagacagg

SEQ ID NO: 3333732 - RNA, 20 nt, Human
caccuggaauauauaaccag

SEQ ID NO: 3333733 - RNA, 23 nt, Human
caccugcggugcuaucuccccca

SEQ ID NO: 3333734 - RNA, 20 nt, Human
caccugcggugcuaucuccc

SEQ ID NO: 3333735 - RNA, 23 nt, Human
caccugaagacucauucuucugu

SEQ ID NO: 3333736 - RNA, 15 nt, Human
caccugaagacucau

SEQ ID NO: 3333737 - RNA, 14 nt, Human
caccugaagacuca

SEQ ID NO: 3333738 - RNA, 15 nt, Human
caccucucucacucc

SEQ ID NO: 3333739 - RNA, 17 nt, Human
caccucucucacuccuu

SEQ ID NO: 3333740 - RNA, 18 nt, Human
caccucucucacuccuug

SEQ ID NO: 3333741 - RNA, 19 nt, Human
caccucucucacuccuuga

SEQ ID NO: 3333742 - RNA, 18 nt, Human
caccucugcacaagcugc

SEQ ID NO: 3333743 - RNA, 19 nt, Human
caccucugcacaagcugca

SEQ ID NO: 3333744 - RNA, 12 nt, Human
caccuggccucu

SEQ ID NO: 3333745 - RNA, 13 nt, Human
caccuggccucug

SEQ ID NO: 3333746 - RNA, 14 nt, Human
caccuggccucugc

SEQ ID NO: 3333747 - RNA, 15 nt, Human
caccuggccucugca

SEQ ID NO: 3333748 - RNA, 17 nt, Human
caccuggccucugcacu

SEQ ID NO: 3333749 - RNA, 18 nt, Human
caccuggccucugcacuc

SEQ ID NO: 3333750 - RNA, 19 nt, Human
caccuggccucugcacucc

SEQ ID NO: 3333751 - RNA, 20 nt, Human
caccuggccucugcacuccc

SEQ ID NO: 3333752 - RNA, 23 nt, Human
caccuggccucugcacuccccug

SEQ ID NO: 3333753 - RNA, 14 nt, Human
caccuccugccucg

SEQ ID NO: 3333754 - RNA, 11 nt, Human
caccuccugcc

SEQ ID NO: 3333755 - RNA, 13 nt, Human
caccuccugccuc

SEQ ID NO: 3333756 - RNA, 13 nt, Human
caccucucccuug

SEQ ID NO: 3333757 - RNA, 14 nt, Human
caccucucccuugg

SEQ ID NO: 3333758 - RNA, 17 nt, Human
caccucucccuuggauu

SEQ ID NO: 3333759 - RNA, 21 nt, Human
caccgcagacaggaccaggga

SEQ ID NO: 3333760 - RNA, 15 nt, Human
caccggcuggccugg

SEQ ID NO: 3333761 - RNA, 16 nt, Human
caccggcuggccuggc

SEQ ID NO: 3333762 - RNA, 14 nt, Human
caccggcuggccug

SEQ ID NO: 3333763 - RNA, 17 nt, Human
caccggcuggccuggcc

SEQ ID NO: 3333764 - RNA, 18 nt, Human
caccggcuggccuggccc

SEQ ID NO: 3333765 - RNA, 20 nt, Human
caccggcuggccuggccccu

SEQ ID NO: 3333766 - RNA, 14 nt, Human
caccgggcacucag

SEQ ID NO: 3333767 - RNA, 18 nt, Human
caccgggccacagagaaa

SEQ ID NO: 3333768 - RNA, 15 nt, Human
caccgggccacagag

SEQ ID NO: 3333769 - RNA, 22 nt, Human
caccgggcacucagaagacacu

SEQ ID NO: 3333770 - RNA, 15 nt, Human
caccgggcacucaga

SEQ ID NO: 3333771 - RNA, 14 nt, Human
caccuuagacaguc

SEQ ID NO: 3333772 - RNA, 16 nt, Human
caccuuagacaguccc

SEQ ID NO: 3333773 - RNA, 18 nt, Human
caccuuagacagucccug

SEQ ID NO: 3333774 - RNA, 19 nt, Human
caccuuagacagucccugc

SEQ ID NO: 3333775 - RNA, 21 nt, Human
caccuuagacagucccugcca

SEQ ID NO: 3333776 - RNA, 23 nt, Human
caccuuagacagucccugccaau

SEQ ID NO: 3333777 - RNA, 16 nt, Human
cacgaauauugcugau

SEQ ID NO: 3333778 - RNA, 19 nt, Human
cacgaauauugcugauggu

SEQ ID NO: 3333779 - RNA, 22 nt, Human
cacgaauauugcugauggugca

SEQ ID NO: 3333780 - RNA, 16 nt, Human
cacgacugcccggcag

SEQ ID NO: 3333781 - RNA, 17 nt, Human
cacgacugcccggcagg

SEQ ID NO: 3333782 - RNA, 13 nt, Human
caccuugacaggg

SEQ ID NO: 3333783 - RNA, 16 nt, Human
caccuugacagggcac

SEQ ID NO: 3333784 - RNA, 15 nt, Human
caccuugacagggca

SEQ ID NO: 3333785 - RNA, 20 nt, Human
cacgccagauucuuuccuga

SEQ ID NO: 3333786 - RNA, 22 nt, Human
cacgccagauucuuuccugagg

SEQ ID NO: 3333787 - RNA, 19 nt, Human
cacgccagauucuuuccug

SEQ ID NO: 3333788 - RNA, 15 nt, Human
cacgccacugcacua

SEQ ID NO: 3333789 - RNA, 13 nt, Human
cacgccacugcac

SEQ ID NO: 3333790 - RNA, 13 nt, Human
cacgcccccacug

SEQ ID NO: 3333791 - RNA, 15 nt, Human
cacgcccccacuggu

SEQ ID NO: 3333792 - RNA, 23 nt, Human
cacgccagauucuuuccugaggc

SEQ ID NO: 3333793 - RNA, 17 nt, Human
cacgcccccacugguga

SEQ ID NO: 3333794 - RNA, 18 nt, Human
cacgcccccacuggugac

SEQ ID NO: 3333795 - RNA, 16 nt, Human
cacgccagauucuuuc

SEQ ID NO: 3333796 - RNA, 16 nt, Human
cacgauuucuguuuag

SEQ ID NO: 3333797 - RNA, 12 nt, Human
cacgauuucugu

SEQ ID NO: 3333798 - RNA, 14 nt, Human
cacgauuucuguuu

SEQ ID NO: 3333799 - RNA, 17 nt, Human
cacgcacuucgggaggu

SEQ ID NO: 3333800 - RNA, 23 nt, Human
cacgcgugcacacaccagagccc

SEQ ID NO: 3333801 - RNA, 22 nt, Human
cacgcgcgcacacacacacaua

SEQ ID NO: 3333802 - RNA, 15 nt, Human
cacgcgcgcacacac

SEQ ID NO: 3333803 - RNA, 23 nt, Human
cacgcgcgcacacacacacauac

SEQ ID NO: 3333804 - RNA, 21 nt, Human
cacgcgugcacacaccagagc

SEQ ID NO: 3333805 - RNA, 16 nt, Human
cacgcgugcacacacc

SEQ ID NO: 3333806 - RNA, 15 nt, Human
cacgcgugcacacac

SEQ ID NO: 3333807 - RNA, 13 nt, Human
cacgcgcgcacac

SEQ ID NO: 3333808 - RNA, 19 nt, Human
cacgccuguaauccuagca

SEQ ID NO: 3333809 - RNA, 20 nt, Human
cacgccuguaauccuagcac

SEQ ID NO: 3333810 - RNA, 20 nt, Human
cacggcucacugcagccuca

SEQ ID NO: 3333811 - RNA, 19 nt, Human
cacggcucacugcagccuc

SEQ ID NO: 3333812 - RNA, 17 nt, Human
cacggcucacugcagcc

SEQ ID NO: 3333813 - RNA, 16 nt, Human
cacggcucacugcagc

SEQ ID NO: 3333814 - RNA, 17 nt, Human
cacgcuggaccuugaac

SEQ ID NO: 3333815 - RNA, 20 nt, Human
cacgcuggaccuugaacugg

SEQ ID NO: 3333816 - RNA, 15 nt, Human
cacggcucacugcag

SEQ ID NO: 3333817 - RNA, 14 nt, Human
cacguacacacaca

SEQ ID NO: 3333818 - RNA, 19 nt, Human
cacguacacacacauacac

SEQ ID NO: 3333819 - RNA, 18 nt, Human
cacguacacacacauaca

SEQ ID NO: 3333820 - RNA, 12 nt, Human
cacguuucuaaa

SEQ ID NO: 3333821 - RNA, 14 nt, Human
cacguuucuaaagg

SEQ ID NO: 3333822 - RNA, 23 nt, Human
cacguuucuaaaggcuaccuuug

SEQ ID NO: 3333823 - RNA, 16 nt, Human
cacgugguccuaaucu

SEQ ID NO: 3333824 - RNA, 19 nt, Human
cacgugguccuaaucuucu

SEQ ID NO: 3333825 - RNA, 12 nt, Human
cacucugagacu

SEQ ID NO: 3333826 - RNA, 23 nt, Human
cacucugagacucgcgacaaugc

SEQ ID NO: 3333827 - RNA, 12 nt, Human
cacucuccuugg

SEQ ID NO: 3333828 - RNA, 12 nt, Human
cacucuggcagc

SEQ ID NO: 3333829 - RNA, 13 nt, Human
cacucuggcagcu

SEQ ID NO: 3333830 - RNA, 14 nt, Human
cacucuggcagcuc

SEQ ID NO: 3333831 - RNA, 14 nt, Human
cacuccuucacaga

SEQ ID NO: 3333832 - RNA, 21 nt, Human
cacuccuucacagaugggugc

SEQ ID NO: 3333833 - RNA, 17 nt, Human
cacucccugcaaccuga

SEQ ID NO: 3333834 - RNA, 18 nt, Human
cacucauugaccugaggc

SEQ ID NO: 3333835 - RNA, 19 nt, Human
cacucauugaccugaggcc

SEQ ID NO: 3333836 - RNA, 20 nt, Human
cacucauugaccugaggccc

SEQ ID NO: 3333837 - RNA, 13 nt, Human
cacucccugcaac

SEQ ID NO: 3333838 - RNA, 16 nt, Human
cacucccugcaaccug

SEQ ID NO: 3333839 - RNA, 12 nt, Human
cacucccugcaa

SEQ ID NO: 3333840 - RNA, 15 nt, Human
cacuccccugcuggg

SEQ ID NO: 3333841 - RNA, 16 nt, Human
cacucaguccauagca

SEQ ID NO: 3333842 - RNA, 15 nt, Human
cacucauugaccuga

SEQ ID NO: 3333843 - RNA, 19 nt, Human
cacucagaagacacugaug

SEQ ID NO: 3333844 - RNA, 18 nt, Human
cacucagaagacacugau

SEQ ID NO: 3333845 - RNA, 22 nt, Human
cacucagaagacacugaugggc

SEQ ID NO: 3333846 - RNA, 20 nt, Human
cacucacauuuauucugcuc

SEQ ID NO: 3333847 - RNA, 19 nt, Human
cacucacauuuauucugcu

SEQ ID NO: 3333848 - RNA, 17 nt, Human
cacucagaagacacuga

SEQ ID NO: 3333849 - RNA, 16 nt, Human
cacucagaagacacug

SEQ ID NO: 3333850 - RNA, 12 nt, Human
cacucagaagac

SEQ ID NO: 3333851 - RNA, 15 nt, Human
cacucaaaagcuggg

SEQ ID NO: 3333852 - RNA, 17 nt, Human
cacucaaaagcugggca

SEQ ID NO: 3333853 - RNA, 18 nt, Human
cacucaaaagcugggcag

SEQ ID NO: 3333854 - RNA, 19 nt, Human
cacucaaaagcugggcagg

SEQ ID NO: 3333855 - RNA, 21 nt, Human
cacuauguugcccaggcaggu

SEQ ID NO: 3333856 - RNA, 20 nt, Human
cacuauguugcccaggcagg

SEQ ID NO: 3333857 - RNA, 20 nt, Human
cacucaaaagcugggcaggu

SEQ ID NO: 3333858 - RNA, 15 nt, Human
cacuauguugcccag

SEQ ID NO: 3333859 - RNA, 19 nt, Human
cacuauguugcccaggcag

SEQ ID NO: 3333860 - RNA, 18 nt, Human
cacuauguugcccaggca

SEQ ID NO: 3333861 - RNA, 17 nt, Human
cacuauguugcccaggc

SEQ ID NO: 3333862 - RNA, 16 nt, Human
cacuauguugcccagg

SEQ ID NO: 3333863 - RNA, 21 nt, Human
cacuauagccuaggugacaga

SEQ ID NO: 3333864 - RNA, 18 nt, Human
cacuauaauguaagcucu

SEQ ID NO: 3333865 - RNA, 14 nt, Human
cacuauagccuagg

SEQ ID NO: 3333866 - RNA, 14 nt, Human
cacuauaauguaag

SEQ ID NO: 3333867 - RNA, 18 nt, Human
cacuaaggugugcucuga

SEQ ID NO: 3333868 - RNA, 17 nt, Human
cacuaaggugugcucug

SEQ ID NO: 3333869 - RNA, 18 nt, Human
cacuaaccacgcuggacc

SEQ ID NO: 3333870 - RNA, 16 nt, Human
cacuaaccacgcugga

SEQ ID NO: 3333871 - RNA, 15 nt, Human
cacuaaccacgcugg

SEQ ID NO: 3333872 - RNA, 14 nt, Human
cacuaaccacgcug

SEQ ID NO: 3333873 - RNA, 24 nt, Human
cacugaugggcaacccccagccug

SEQ ID NO: 3333874 - RNA, 18 nt, Human
cacugaugggcaaccccc

SEQ ID NO: 3333875 - RNA, 14 nt, Human
cacugaugggcaac

SEQ ID NO: 3333876 - RNA, 23 nt, Human
cacugagacagcccgggcucugc

SEQ ID NO: 3333877 - RNA, 13 nt, Human
cacugcaaccucc

SEQ ID NO: 3333878 - RNA, 23 nt, Human
cacugcaaccuccgccucuuggg

SEQ ID NO: 3333879 - RNA, 16 nt, Human
cacugcaaccuccgcc

SEQ ID NO: 3333880 - RNA, 14 nt, Human
cacugcaaccuccg

SEQ ID NO: 3333881 - RNA, 14 nt, Human
cacugagacagccc

SEQ ID NO: 3333882 - RNA, 17 nt, Human
cacugagacagcccggg

SEQ ID NO: 3333883 - RNA, 19 nt, Human
cacugagacagcccgggcu

SEQ ID NO: 3333884 - RNA, 22 nt, Human
cacugagacagcccgggcucug

SEQ ID NO: 3333885 - RNA, 12 nt, Human
cacugagacagc

SEQ ID NO: 3333886 - RNA, 13 nt, Human
cacugagacagcc

SEQ ID NO: 3333887 - RNA, 15 nt, Human
cacucuggcagcuca

SEQ ID NO: 3333888 - RNA, 16 nt, Human
cacucuggcagcucag

SEQ ID NO: 3333889 - RNA, 17 nt, Human
cacucuggcagcucaga

SEQ ID NO: 3333890 - RNA, 19 nt, Human
cacucuggcagcucagaga

SEQ ID NO: 3333891 - RNA, 20 nt, Human
cacucuggcagcucagagag

SEQ ID NO: 3333892 - RNA, 21 nt, Human
cacucuggcagcucagagagg

SEQ ID NO: 3333893 - RNA, 23 nt, Human
cacucuggcagcucagagagggu

SEQ ID NO: 3333894 - RNA, 19 nt, Human
cacucugucgcccagucug

SEQ ID NO: 3333895 - RNA, 16 nt, Human
cacucugucgcccagu

SEQ ID NO: 3333896 - RNA, 15 nt, Human
cacucugucgcccag

SEQ ID NO: 3333897 - RNA, 23 nt, Human
cacugacauuguuggccaaagcc

SEQ ID NO: 3333898 - RNA, 18 nt, Human
cacugcuuccagugaggc

SEQ ID NO: 3333899 - RNA, 19 nt, Human
cacugcuuccagugaggcu

SEQ ID NO: 3333900 - RNA, 20 nt, Human
cacugcuuccagugaggcuc

SEQ ID NO: 3333901 - RNA, 21 nt, Human
cacugcuuccagugaggcucu

SEQ ID NO: 3333902 - RNA, 22 nt, Human
cacugcuuccagugaggcucug

SEQ ID NO: 3333903 - RNA, 20 nt, Human
cacugcuuuuggucugugug

SEQ ID NO: 3333904 - RNA, 13 nt, Human
cacugcuuaacuu

SEQ ID NO: 3333905 - RNA, 14 nt, Human
cacugcuuccagug

SEQ ID NO: 3333906 - RNA, 15 nt, Human
cacugcuuccaguga

SEQ ID NO: 3333907 - RNA, 16 nt, Human
cacugcuuccagugag

SEQ ID NO: 3333908 - RNA, 17 nt, Human
cacuggaacacuaauga

SEQ ID NO: 3333909 - RNA, 21 nt, Human
cacugcuuuuggucuguguga

SEQ ID NO: 3333910 - RNA, 18 nt, Human
cacugcacuauagccuag

SEQ ID NO: 3333911 - RNA, 19 nt, Human
cacugcaccgggccacaga

SEQ ID NO: 3333912 - RNA, 18 nt, Human
cacugcaccgggccacag

SEQ ID NO: 3333913 - RNA, 16 nt, Human
cacugcaccgggccac

SEQ ID NO: 3333914 - RNA, 15 nt, Human
cacugcaccgggcca

SEQ ID NO: 3333915 - RNA, 14 nt, Human
cacugcaccgggcc

SEQ ID NO: 3333916 - RNA, 17 nt, Human
cacugccaugccagcuu

SEQ ID NO: 3333917 - RNA, 12 nt, Human
cacugcucuggu

SEQ ID NO: 3333918 - RNA, 16 nt, Human
cacugugccaugugcc

SEQ ID NO: 3333919 - RNA, 15 nt, Human
cacugugccaugugc

SEQ ID NO: 3333920 - RNA, 18 nt, Human
cacugugccaugugccag

SEQ ID NO: 3333921 - RNA, 13 nt, Human
cacugugcugagu

SEQ ID NO: 3333922 - RNA, 15 nt, Human
cacugugcugagucu

SEQ ID NO: 3333923 - RNA, 17 nt, Human
cacugugcugagucuga

SEQ ID NO: 3333924 - RNA, 20 nt, Human
cacugugcugagucugaagg

SEQ ID NO: 3333925 - RNA, 21 nt, Human
cacugugcugagucugaaggc

SEQ ID NO: 3333926 - RNA, 22 nt, Human
cacugugcugagucugaaggcu

SEQ ID NO: 3333927 - RNA, 13 nt, Human
cacuguucucugc

SEQ ID NO: 3333928 - RNA, 14 nt, Human
cacuguucucugcc

SEQ ID NO: 3333929 - RNA, 15 nt, Human
cacuguucucugccc

SEQ ID NO: 3333930 - RNA, 16 nt, Human
cacuguucucugcccu

SEQ ID NO: 3333931 - RNA, 17 nt, Human
cacuguucucugcccuc

SEQ ID NO: 3333932 - RNA, 19 nt, Human
cacuguucucugcccucca

SEQ ID NO: 3333933 - RNA, 21 nt, Human
cacuguucucugcccuccaag

SEQ ID NO: 3333934 - RNA, 22 nt, Human
cacuguucucugcccuccaaga

SEQ ID NO: 3333935 - RNA, 14 nt, Human
cacugugccaugug

SEQ ID NO: 3333936 - RNA, 13 nt, Human
cacugugaagaga

SEQ ID NO: 3333937 - RNA, 12 nt, Human
cacuucagcuga

SEQ ID NO: 3333938 - RNA, 21 nt, Human
cacuucagcugacuuuucugu

SEQ ID NO: 3333939 - RNA, 16 nt, Human
cacuucccuacaugga

SEQ ID NO: 3333940 - RNA, 22 nt, Human
cacuucugccauauucuguugg

SEQ ID NO: 3333941 - RNA, 21 nt, Human
cacuucgggaggucgaggcag

SEQ ID NO: 3333942 - RNA, 23 nt, Human
cacuucgggaggucgaggcagga

SEQ ID NO: 3333943 - RNA, 13 nt, Human
cacuugcagacuc

SEQ ID NO: 3333944 - RNA, 13 nt, Human
cacuugaguccag

SEQ ID NO: 3333945 - RNA, 17 nt, Human
cacuugagaauuacccu

SEQ ID NO: 3333946 - RNA, 19 nt, Human
cacuugacaucaacugcau

SEQ ID NO: 3333947 - RNA, 20 nt, Human
cacuugagaauuacccuuuu

SEQ ID NO: 3333948 - RNA, 16 nt, Human
cacuugacaucaacug

SEQ ID NO: 3333949 - RNA, 24 nt, Human
cacuugcagacucuacagaggcca

SEQ ID NO: 3333950 - RNA, 22 nt, Human
cacuugcagacucuacagaggc

SEQ ID NO: 3333951 - RNA, 19 nt, Human
cacuugcagacucuacaga

SEQ ID NO: 3333952 - RNA, 18 nt, Human
cacuugcagacucuacag

SEQ ID NO: 3333953 - RNA, 14 nt, Human
cacuugcagacucu

SEQ ID NO: 3333954 - RNA, 19 nt, Human
cacuuucuagccagaggag

SEQ ID NO: 3333955 - RNA, 20 nt, Human
cacuuucuagccagaggaga

SEQ ID NO: 3333956 - RNA, 18 nt, Human
cacuuucuagccagagga

SEQ ID NO: 3333957 - RNA, 14 nt, Human
cagaccacaaaacu

SEQ ID NO: 3333958 - RNA, 20 nt, Human
cagaccacaaaacuuuucua

SEQ ID NO: 3333959 - RNA, 22 nt, Human
cagacccugcccugugggcccc

SEQ ID NO: 3333960 - RNA, 15 nt, Human
cagacccugcccugu

SEQ ID NO: 3333961 - RNA, 16 nt, Human
cagacccugcccugug

SEQ ID NO: 3333962 - RNA, 17 nt, Human
cagacccugcccugugg

SEQ ID NO: 3333963 - RNA, 21 nt, Human
cagacccugcccugugggccc

SEQ ID NO: 3333964 - RNA, 14 nt, Human
cagacccggcugcg

SEQ ID NO: 3333965 - RNA, 12 nt, Human
cagacccggcug

SEQ ID NO: 3333966 - RNA, 13 nt, Human
cagacccugcccu

SEQ ID NO: 3333967 - RNA, 14 nt, Human
cagacccugcccug

SEQ ID NO: 3333968 - RNA, 12 nt, Human
cagacccugccc

SEQ ID NO: 3333969 - RNA, 16 nt, Human
cagacccggcugcgug

SEQ ID NO: 3333970 - RNA, 23 nt, Human
cagagaaaguacuucuccacccu

SEQ ID NO: 3333971 - RNA, 19 nt, Human
cagagaaaguacuucucca

SEQ ID NO: 3333972 - RNA, 14 nt, Human
cagaauuucccaaa

SEQ ID NO: 3333973 - RNA, 15 nt, Human
cagaauucucuaguu

SEQ ID NO: 3333974 - RNA, 18 nt, Human
cagaauucucuaguuuga

SEQ ID NO: 3333975 - RNA, 11 nt, Human
cagaauucuca

SEQ ID NO: 3333976 - RNA, 17 nt, Human
cagaauuucccaaagca

SEQ ID NO: 3333977 - RNA, 18 nt, Human
cagaauuucccaaagcag

SEQ ID NO: 3333978 - RNA, 19 nt, Human
cagaauuucccaaagcagu

SEQ ID NO: 3333979 - RNA, 20 nt, Human
cagaauuucccaaagcagug

SEQ ID NO: 3333980 - RNA, 24 nt, Human
cagaauuucccaaagcagugcaug

SEQ ID NO: 3333981 - RNA, 12 nt, Human
cagacaaagcgu

SEQ ID NO: 3333982 - RNA, 20 nt, Human
cagacaacaaaccuguuucu

SEQ ID NO: 3333983 - RNA, 16 nt, Human
cagacaacaaaccugu

SEQ ID NO: 3333984 - RNA, 22 nt, Human
cagacaaagcgugguggacaug

SEQ ID NO: 3333985 - RNA, 14 nt, Human
cagacacaugucca

SEQ ID NO: 3333986 - RNA, 17 nt, Human
cagacacauguccaaga

SEQ ID NO: 3333987 - RNA, 21 nt, Human
cagacacauguccaagaagcc

SEQ ID NO: 3333988 - RNA, 22 nt, Human
cagacacauguccaagaagccc

SEQ ID NO: 3333989 - RNA, 23 nt, Human
cagacacauguccaagaagccca

SEQ ID NO: 3333990 - RNA, 23 nt, Human
cagacacaggcccggcuccaggc

SEQ ID NO: 3333991 - RNA, 22 nt, Human
cagacacaggcccggcuccagg

SEQ ID NO: 3333992 - RNA, 21 nt, Human
cagacacaggcccggcuccag

SEQ ID NO: 3333993 - RNA, 18 nt, Human
cagacacaggcccggcuc

SEQ ID NO: 3333994 - RNA, 17 nt, Human
cagacacaggcccggcu

SEQ ID NO: 3333995 - RNA, 15 nt, Human
cagacacaggcccgg

SEQ ID NO: 3333996 - RNA, 14 nt, Human
cagacacaggcccg

SEQ ID NO: 3333997 - RNA, 13 nt, Human
cagacacaggccc

SEQ ID NO: 3333998 - RNA, 22 nt, Human
cagacaccuugacagggcacac

SEQ ID NO: 3333999 - RNA, 20 nt, Human
cagacaccuugacagggcac

SEQ ID NO: 3334000 - RNA, 19 nt, Human
cagacaccuugacagggca

SEQ ID NO: 3334001 - RNA, 20 nt, Human
cagacaguuaagagaaauga

SEQ ID NO: 3334002 - RNA, 19 nt, Human
cagacauacuaaccagcag

SEQ ID NO: 3334003 - RNA, 18 nt, Human
cagaaucucaaauaacua

SEQ ID NO: 3334004 - RNA, 17 nt, Human
cagaaucucaaauaacu

SEQ ID NO: 3334005 - RNA, 16 nt, Human
cagaaggaagacuuca

SEQ ID NO: 3334006 - RNA, 17 nt, Human
cagaaggaagacuucau

SEQ ID NO: 3334007 - RNA, 18 nt, Human
cagaaggaagacuucauc

SEQ ID NO: 3334008 - RNA, 19 nt, Human
cagaaggaagacuucaucc

SEQ ID NO: 3334009 - RNA, 21 nt, Human
cagaagacacugaugggcaac

SEQ ID NO: 3334010 - RNA, 22 nt, Human
cacuuucuagccagaggagaga

SEQ ID NO: 3334011 - RNA, 13 nt, Human
cacuuuguucugg

SEQ ID NO: 3334012 - RNA, 14 nt, Human
cacuuuguucuggc

SEQ ID NO: 3334013 - RNA, 16 nt, Human
cacuuuguucuggcuc

SEQ ID NO: 3334014 - RNA, 23 nt, Human
cacuuuguucuggcucuuccagg

SEQ ID NO: 3334015 - RNA, 12 nt, Human
cacuuugggagg

SEQ ID NO: 3334016 - RNA, 13 nt, Human
cacuuugggaggc

SEQ ID NO: 3334017 - RNA, 16 nt, Human
cacuuugggaggccaa

SEQ ID NO: 3334018 - RNA, 14 nt, Human
cacuuuuguucuug

SEQ ID NO: 3334019 - RNA, 22 nt, Human
cacuuuuguucuugguuuguaa

SEQ ID NO: 3334020 - RNA, 16 nt, Human
cagaaaauggaagaca

SEQ ID NO: 3334021 - RNA, 20 nt, Human
cagaaaauggaagacagcuc

SEQ ID NO: 3334022 - RNA, 21 nt, Human
cagaaaauggaagacagcucu

SEQ ID NO: 3334023 - RNA, 22 nt, Human
cagaaaauggaagacagcucuu

SEQ ID NO: 3334024 - RNA, 23 nt, Human
cagaaaauggaagacagcucuua

SEQ ID NO: 3334025 - RNA, 13 nt, Human
cagaggcugccuc

SEQ ID NO: 3334026 - RNA, 23 nt, Human
cagaggcugccucucccaucacu

SEQ ID NO: 3334027 - RNA, 19 nt, Human
cagagggagugacagaggc

SEQ ID NO: 3334028 - RNA, 18 nt, Human
cagagggagugacagagg

SEQ ID NO: 3334029 - RNA, 16 nt, Human
cagagggagugacaga

SEQ ID NO: 3334030 - RNA, 14 nt, Human
cagagggagugaca

SEQ ID NO: 3334031 - RNA, 22 nt, Human
cagaggcagccccauucugccu

SEQ ID NO: 3334032 - RNA, 20 nt, Human
cagaggcagccccauucugc

SEQ ID NO: 3334033 - RNA, 19 nt, Human
cagaggcagccccauucug

SEQ ID NO: 3334034 - RNA, 18 nt, Human
cagaggcagccccauucu

SEQ ID NO: 3334035 - RNA, 15 nt, Human
cagaggcagccccau

SEQ ID NO: 3334036 - RNA, 14 nt, Human
cagaggcagcccca

SEQ ID NO: 3334037 - RNA, 13 nt, Human
cagaggcagcccc

SEQ ID NO: 3334038 - RNA, 12 nt, Human
cagaggcagccc

SEQ ID NO: 3334039 - RNA, 16 nt, Human
cagaggccaugggccu

SEQ ID NO: 3334040 - RNA, 19 nt, Human
cagaggccaugggccuccu

SEQ ID NO: 3334041 - RNA, 23 nt, Human
cagaggcagccccauucugccug

SEQ ID NO: 3334042 - RNA, 21 nt, Human
cagaggccaugggccuccugu

SEQ ID NO: 3334043 - RNA, 20 nt, Human
cagaggccaugggccuccug

SEQ ID NO: 3334044 - RNA, 18 nt, Human
cagagugagacucugucu

SEQ ID NO: 3334045 - RNA, 17 nt, Human
cagagugagacucuguc

SEQ ID NO: 3334046 - RNA, 16 nt, Human
cagagugagacucugu

SEQ ID NO: 3334047 - RNA, 23 nt, Human
cagagucucacuguugcccaggc

SEQ ID NO: 3334048 - RNA, 22 nt, Human
cagagucucacuguugcccagg

SEQ ID NO: 3334049 - RNA, 20 nt, Human
cagagugagacucugucuca

SEQ ID NO: 3334050 - RNA, 19 nt, Human
cagagugagacucugucuc

SEQ ID NO: 3334051 - RNA, 23 nt, Human
cagagggagugacagaggcagcc

SEQ ID NO: 3334052 - RNA, 22 nt, Human
cagagggagugacagaggcagc

SEQ ID NO: 3334053 - RNA, 21 nt, Human
cagagggagugacagaggcag

SEQ ID NO: 3334054 - RNA, 20 nt, Human
cagagggagugacagaggca

SEQ ID NO: 3334055 - RNA, 15 nt, Human
cagagggccugcaag

SEQ ID NO: 3334056 - RNA, 21 nt, Human
cagagucucacuguugcccag

SEQ ID NO: 3334057 - RNA, 20 nt, Human
cagagucucacuguugccca

SEQ ID NO: 3334058 - RNA, 19 nt, Human
cagagucucacuguugccc

SEQ ID NO: 3334059 - RNA, 17 nt, Human
cagagucucacuguugc

SEQ ID NO: 3334060 - RNA, 13 nt, Human
cagagucucacug

SEQ ID NO: 3334061 - RNA, 13 nt, Human
cagaugcaccagc

SEQ ID NO: 3334062 - RNA, 16 nt, Human
cagaugcaccagcccu

SEQ ID NO: 3334063 - RNA, 14 nt, Human
cagaugcaccagcc

SEQ ID NO: 3334064 - RNA, 22 nt, Human
cagaugcaccagcccuuagcag

SEQ ID NO: 3334065 - RNA, 17 nt, Human
cagaugcaccagcccuu

SEQ ID NO: 3334066 - RNA, 20 nt, Human
cagaucucuaacuucaccau

SEQ ID NO: 3334067 - RNA, 21 nt, Human
cagauacaggaaaagcugcug

SEQ ID NO: 3334068 - RNA, 20 nt, Human
cagauacaggaaaagcugcu

SEQ ID NO: 3334069 - RNA, 22 nt, Human
cagauacaggaaaagcugcuga

SEQ ID NO: 3334070 - RNA, 15 nt, Human
cagaguugaagacag

SEQ ID NO: 3334071 - RNA, 16 nt, Human
cagaguugaagacaga

SEQ ID NO: 3334072 - RNA, 14 nt, Human
cagaguugaagaca

SEQ ID NO: 3334073 - RNA, 17 nt, Human
cagaguugaagacagag

SEQ ID NO: 3334074 - RNA, 18 nt, Human
cagaguugaagacagagc

SEQ ID NO: 3334075 - RNA, 19 nt, Human
cagaguugaagacagagcu

SEQ ID NO: 3334076 - RNA, 20 nt, Human
cagaguugaagacagagcua

SEQ ID NO: 3334077 - RNA, 14 nt, Human
cagaguuguuacau

SEQ ID NO: 3334078 - RNA, 22 nt, Human
cagaguugaagacagagcuaca

SEQ ID NO: 3334079 - RNA, 19 nt, Human
cagaguuguuacauuuuua

SEQ ID NO: 3334080 - RNA, 15 nt, Human
cagaguuguuacauu

SEQ ID NO: 3334081 - RNA, 18 nt, Human
cagaguuguuacauuuuu

SEQ ID NO: 3334082 - RNA, 21 nt, Human
cagagaccaucccugaaggcc

SEQ ID NO: 3334083 - RNA, 17 nt, Human
cagagaccaucccugaa

SEQ ID NO: 3334084 - RNA, 18 nt, Human
cagagaccaucccugaag

SEQ ID NO: 3334085 - RNA, 19 nt, Human
cagagaccaucccugaagg

SEQ ID NO: 3334086 - RNA, 20 nt, Human
cagagaccaucccugaaggc

SEQ ID NO: 3334087 - RNA, 13 nt, Human
cagagacuccugc

SEQ ID NO: 3334088 - RNA, 14 nt, Human
cagagacuccugca

SEQ ID NO: 3334089 - RNA, 15 nt, Human
cagagacuccugcag

SEQ ID NO: 3334090 - RNA, 16 nt, Human
cagagacuccugcagg

SEQ ID NO: 3334091 - RNA, 17 nt, Human
cagagacuccugcaggc

SEQ ID NO: 3334092 - RNA, 18 nt, Human
cagagacuccugcaggca

SEQ ID NO: 3334093 - RNA, 14 nt, Human
cagagcaagugaga

SEQ ID NO: 3334094 - RNA, 20 nt, Human
cagagcaagugagacccugu

SEQ ID NO: 3334095 - RNA, 16 nt, Human
cagagcaccuuagaca

SEQ ID NO: 3334096 - RNA, 16 nt, Human
cagagacacaagccuu

SEQ ID NO: 3334097 - RNA, 17 nt, Human
cagagacacaagccuuc

SEQ ID NO: 3334098 - RNA, 14 nt, Human
cagagacacaagcc

SEQ ID NO: 3334099 - RNA, 15 nt, Human
cagagacacaagccu

SEQ ID NO: 3334100 - RNA, 14 nt, Human
cagagaccaucccu

SEQ ID NO: 3334101 - RNA, 16 nt, Human
cagagaccaucccuga

SEQ ID NO: 3334102 - RNA, 13 nt, Human
cagagaccauccc

SEQ ID NO: 3334103 - RNA, 21 nt, Human
cagagaaugaaagggcccaga

SEQ ID NO: 3334104 - RNA, 20 nt, Human
cagagaaugaaagggcccag

SEQ ID NO: 3334105 - RNA, 15 nt, Human
cagagaauucucuua

SEQ ID NO: 3334106 - RNA, 19 nt, Human
cagagaaugaaagggccca

SEQ ID NO: 3334107 - RNA, 16 nt, Human
cagagcccacgccccc

SEQ ID NO: 3334108 - RNA, 20 nt, Human
cagagcccaccuuggcucaa

SEQ ID NO: 3334109 - RNA, 19 nt, Human
cagagcccaccuuggcuca

SEQ ID NO: 3334110 - RNA, 17 nt, Human
cagagcccaccuuggcu

SEQ ID NO: 3334111 - RNA, 15 nt, Human
cagagcccaccuugg

SEQ ID NO: 3334112 - RNA, 13 nt, Human
cagagcagagacc

SEQ ID NO: 3334113 - RNA, 14 nt, Human
cagagcagagacca

SEQ ID NO: 3334114 - RNA, 15 nt, Human
cagagcagagaccau

SEQ ID NO: 3334115 - RNA, 17 nt, Human
cagagcagagaccaucc

SEQ ID NO: 3334116 - RNA, 18 nt, Human
cagagcagagaccauccc

SEQ ID NO: 3334117 - RNA, 19 nt, Human
cagagcagagaccaucccu

SEQ ID NO: 3334118 - RNA, 21 nt, Human
cagagcagagaccaucccuga

SEQ ID NO: 3334119 - RNA, 18 nt, Human
cagagcaccuuagacagu

SEQ ID NO: 3334120 - RNA, 19 nt, Human
cagagcaccuuagacaguc

SEQ ID NO: 3334121 - RNA, 21 nt, Human
cagagcaccuuagacaguccc

SEQ ID NO: 3334122 - RNA, 22 nt, Human
cagagcaccuuagacagucccu

SEQ ID NO: 3334123 - RNA, 11 nt, Human
cagagcagaga

SEQ ID NO: 3334124 - RNA, 12 nt, Human
cagagcagagac

SEQ ID NO: 3334125 - RNA, 23 nt, Human
cagagcaccuuagacagucccug

SEQ ID NO: 3334126 - RNA, 12 nt, Human
cagagccugcag

SEQ ID NO: 3334127 - RNA, 20 nt, Human
cagaggaaagcaaaggagau

SEQ ID NO: 3334128 - RNA, 13 nt, Human
cagaggaaggaga

SEQ ID NO: 3334129 - RNA, 23 nt, Human
cagagcccacgcccccacuggug

SEQ ID NO: 3334130 - RNA, 17 nt, Human
cagagcccacgccccca

SEQ ID NO: 3334131 - RNA, 19 nt, Human
cagagcccacgcccccacu

SEQ ID NO: 3334132 - RNA, 20 nt, Human
cagagcccacgcccccacug

SEQ ID NO: 3334133 - RNA, 21 nt, Human
cagagcccacgcccccacugg

SEQ ID NO: 3334134 - RNA, 20 nt, Human
cagaggagagaggacccccu

SEQ ID NO: 3334135 - RNA, 11 nt, Human
cagaggcagcc

SEQ ID NO: 3334136 - RNA, 15 nt, Human
cagaggagagaggac

SEQ ID NO: 3334137 - RNA, 19 nt, Human
cagaggagagaggaccccc

SEQ ID NO: 3334138 - RNA, 13 nt, Human
cagaggagagagg

SEQ ID NO: 3334139 - RNA, 11 nt, Human
cagcagagcac

SEQ ID NO: 3334140 - RNA, 13 nt, Human
cagcagagcaccu

SEQ ID NO: 3334141 - RNA, 19 nt, Human
cagcagaaaugccuuaccc

SEQ ID NO: 3334142 - RNA, 22 nt, Human
cagcagaaaugccuuacccuca

SEQ ID NO: 3334143 - RNA, 15 nt, Human
cagcagaaaugccuu

SEQ ID NO: 3334144 - RNA, 17 nt, Human
cagcagaaaugccuuac

SEQ ID NO: 3334145 - RNA, 13 nt, Human
cagcaauaaagca

SEQ ID NO: 3334146 - RNA, 21 nt, Human
cagcaauaaagcagcguuucu

SEQ ID NO: 3334147 - RNA, 21 nt, Human
cagcaagugagagcugggugu

SEQ ID NO: 3334148 - RNA, 19 nt, Human
cagcaagugagagcugggu

SEQ ID NO: 3334149 - RNA, 22 nt, Human
cagcaauaaagcagcguuucua

SEQ ID NO: 3334150 - RNA, 17 nt, Human
cagcaagugagagcugg

SEQ ID NO: 3334151 - RNA, 16 nt, Human
cagcaagugagagcug

SEQ ID NO: 3334152 - RNA, 15 nt, Human
cagcaagugagagcu

SEQ ID NO: 3334153 - RNA, 14 nt, Human
cagcaagugagagc

SEQ ID NO: 3334154 - RNA, 12 nt, Human
cagcaagugaga

SEQ ID NO: 3334155 - RNA, 18 nt, Human
cagcaaggagauuuacaa

SEQ ID NO: 3334156 - RNA, 17 nt, Human
cagcaaggagauuuaca

SEQ ID NO: 3334157 - RNA, 14 nt, Human
cagauucuuuccug

SEQ ID NO: 3334158 - RNA, 18 nt, Human
cagcaaaagaugcuucuc

SEQ ID NO: 3334159 - RNA, 23 nt, Human
cagaugggugcuuggaggaagga

SEQ ID NO: 3334160 - RNA, 18 nt, Human
cagaugggugcuuggagg

SEQ ID NO: 3334161 - RNA, 15 nt, Human
cagcccacuucugcc

SEQ ID NO: 3334162 - RNA, 15 nt, Human
cagcccaccccucaa

SEQ ID NO: 3334163 - RNA, 20 nt, Human
cagccccaaaacucuccucu

SEQ ID NO: 3334164 - RNA, 21 nt, Human
cagccccaaaacucuccucug

SEQ ID NO: 3334165 - RNA, 22 nt, Human
cagccccaaaacucuccucugc

SEQ ID NO: 3334166 - RNA, 18 nt, Human
cagcccacuucugccaua

SEQ ID NO: 3334167 - RNA, 14 nt, Human
cagccacauuccug

SEQ ID NO: 3334168 - RNA, 15 nt, Human
cagccacauuccuga

SEQ ID NO: 3334169 - RNA, 17 nt, Human
cagccacauuccugaug

SEQ ID NO: 3334170 - RNA, 19 nt, Human
cagccacauuccugaugcu

SEQ ID NO: 3334171 - RNA, 22 nt, Human
cagccacggccaggccagaggg

SEQ ID NO: 3334172 - RNA, 21 nt, Human
cagccacggccaggccagagg

SEQ ID NO: 3334173 - RNA, 19 nt, Human
cagccacggccaggccaga

SEQ ID NO: 3334174 - RNA, 18 nt, Human
cagccacggccaggccag

SEQ ID NO: 3334175 - RNA, 17 nt, Human
cagccacggccaggcca

SEQ ID NO: 3334176 - RNA, 16 nt, Human
cagccacggccaggcc

SEQ ID NO: 3334177 - RNA, 15 nt, Human
cagccacggccaggc

SEQ ID NO: 3334178 - RNA, 14 nt, Human
cagccacggccagg

SEQ ID NO: 3334179 - RNA, 22 nt, Human
cagccaguaaaugggggugcau

SEQ ID NO: 3334180 - RNA, 13 nt, Human
cagccaguaaaug

SEQ ID NO: 3334181 - RNA, 23 nt, Human
cagccacggccaggccagaggga

SEQ ID NO: 3334182 - RNA, 14 nt, Human
cagcaggcucucag

SEQ ID NO: 3334183 - RNA, 15 nt, Human
cagcaggcucucagg

SEQ ID NO: 3334184 - RNA, 12 nt, Human
cagcaggcucuc

SEQ ID NO: 3334185 - RNA, 19 nt, Human
cagcagccuggacccugug

SEQ ID NO: 3334186 - RNA, 22 nt, Human
cagcagccuggacccuguggau

SEQ ID NO: 3334187 - RNA, 12 nt, Human
cagcagccugga

SEQ ID NO: 3334188 - RNA, 14 nt, Human
cagcagccuggacc

SEQ ID NO: 3334189 - RNA, 15 nt, Human
cagcagccuggaccc

SEQ ID NO: 3334190 - RNA, 18 nt, Human
cagcagccuggacccugu

SEQ ID NO: 3334191 - RNA, 18 nt, Human
cagcagggagggcuucug

SEQ ID NO: 3334192 - RNA, 20 nt, Human
cagcaggcucucaggccagc

SEQ ID NO: 3334193 - RNA, 22 nt, Human
cagcaggcucucaggccagcug

SEQ ID NO: 3334194 - RNA, 16 nt, Human
cagcaggcucucaggc

SEQ ID NO: 3334195 - RNA, 17 nt, Human
cagcaggcucucaggcc

SEQ ID NO: 3334196 - RNA, 18 nt, Human
cagcaggcucucaggcca

SEQ ID NO: 3334197 - RNA, 19 nt, Human
cagcaggcucucaggccag

SEQ ID NO: 3334198 - RNA, 20 nt, Human
cagcagggagggcuucugcc

SEQ ID NO: 3334199 - RNA, 17 nt, Human
cagcauccuggcacccg

SEQ ID NO: 3334200 - RNA, 16 nt, Human
cagcauccuggcaccc

SEQ ID NO: 3334201 - RNA, 15 nt, Human
cagcauccuggcacc

SEQ ID NO: 3334202 - RNA, 14 nt, Human
cagcauccuggcac

SEQ ID NO: 3334203 - RNA, 20 nt, Human
cagcauccuggcacccggcc

SEQ ID NO: 3334204 - RNA, 19 nt, Human
cagcauccuggcacccggc

SEQ ID NO: 3334205 - RNA, 21 nt, Human
cagcauccuggcacccggccc

SEQ ID NO: 3334206 - RNA, 18 nt, Human
cagccaaagccuccucca

SEQ ID NO: 3334207 - RNA, 21 nt, Human
cagccaaagccuccuccagcc

SEQ ID NO: 3334208 - RNA, 15 nt, Human
cagccaaagccuccu

SEQ ID NO: 3334209 - RNA, 16 nt, Human
cagccaaagccuccuc

SEQ ID NO: 3334210 - RNA, 20 nt, Human
caggaagcucagggccuggc

SEQ ID NO: 3334211 - RNA, 21 nt, Human
caggaagcucagggccuggcu

SEQ ID NO: 3334212 - RNA, 22 nt, Human
caggaagcucagggccuggcuc

SEQ ID NO: 3334213 - RNA, 23 nt, Human
caggaagcucagggccuggcuca

SEQ ID NO: 3334214 - RNA, 16 nt, Human
caggaagcucagggcc

SEQ ID NO: 3334215 - RNA, 17 nt, Human
caggaagcucagggccu

SEQ ID NO: 3334216 - RNA, 18 nt, Human
caggaagcucagggccug

SEQ ID NO: 3334217 - RNA, 19 nt, Human
caggaagcucagggccugg

SEQ ID NO: 3334218 - RNA, 14 nt, Human
caggaagcucaggg

SEQ ID NO: 3334219 - RNA, 15 nt, Human
caggaagcucagggc

SEQ ID NO: 3334220 - RNA, 13 nt, Human
caggaagcucagg

SEQ ID NO: 3334221 - RNA, 14 nt, Human
caggaagccagcag

SEQ ID NO: 3334222 - RNA, 16 nt, Human
caggaagccagcaggc

SEQ ID NO: 3334223 - RNA, 17 nt, Human
caggaagccagcaggcu

SEQ ID NO: 3334224 - RNA, 18 nt, Human
caggaagccagcaggcuc

SEQ ID NO: 3334225 - RNA, 19 nt, Human
caggaagccagcaggcucu

SEQ ID NO: 3334226 - RNA, 21 nt, Human
caggaagccagcaggcucuca

SEQ ID NO: 3334227 - RNA, 22 nt, Human
caggaagccagcaggcucucag

SEQ ID NO: 3334228 - RNA, 15 nt, Human
caggaaggcuaaagg

SEQ ID NO: 3334229 - RNA, 14 nt, Human
caggaaguacugga

SEQ ID NO: 3334230 - RNA, 16 nt, Human
caggaaguacuggaga

SEQ ID NO: 3334231 - RNA, 12 nt, Human
caggaaguacug

SEQ ID NO: 3334232 - RNA, 17 nt, Human
caggaaguacuggagaa

SEQ ID NO: 3334233 - RNA, 18 nt, Human
caggaaguacuggagaaa

SEQ ID NO: 3334234 - RNA, 20 nt, Human
caggaaguacuggagaaaau

SEQ ID NO: 3334235 - RNA, 21 nt, Human
cagcuugaggguugggcuggu

SEQ ID NO: 3334236 - RNA, 20 nt, Human
cagcuugaggguugggcugg

SEQ ID NO: 3334237 - RNA, 19 nt, Human
cagcuugaggguugggcug

SEQ ID NO: 3334238 - RNA, 18 nt, Human
cagcuugaggguugggcu

SEQ ID NO: 3334239 - RNA, 18 nt, Human
cagcuugaccgugaggcc

SEQ ID NO: 3334240 - RNA, 19 nt, Human
cagcuugaccgugaggcca

SEQ ID NO: 3334241 - RNA, 20 nt, Human
cagcuugaccgugaggccag

SEQ ID NO: 3334242 - RNA, 21 nt, Human
cagcuugaccgugaggccaga

SEQ ID NO: 3334243 - RNA, 15 nt, Human
cagcuugaggguugg

SEQ ID NO: 3334244 - RNA, 14 nt, Human
cagcuugaggguug

SEQ ID NO: 3334245 - RNA, 21 nt, Human
cagcuucauuuccugugucuu

SEQ ID NO: 3334246 - RNA, 20 nt, Human
cagcuucauuuccugugucu

SEQ ID NO: 3334247 - RNA, 19 nt, Human
cagcuucauuuccuguguc

SEQ ID NO: 3334248 - RNA, 12 nt, Human
cagcuuuguuug

SEQ ID NO: 3334249 - RNA, 21 nt, Human
cagcuuuguuuguugucagcu

SEQ ID NO: 3334250 - RNA, 22 nt, Human
cagcuuuguuuguugucagcug

SEQ ID NO: 3334251 - RNA, 23 nt, Human
cagcuuuguuuguugucagcuga

SEQ ID NO: 3334252 - RNA, 22 nt, Human
cagcuuguaaauagcucaggug

SEQ ID NO: 3334253 - RNA, 21 nt, Human
cagcuuguaaauagcucaggu

SEQ ID NO: 3334254 - RNA, 20 nt, Human
cagcuuguaaauagcucagg

SEQ ID NO: 3334255 - RNA, 19 nt, Human
cagcuuguaaauagcucag

SEQ ID NO: 3334256 - RNA, 18 nt, Human
cagcuuguaaauagcuca

SEQ ID NO: 3334257 - RNA, 18 nt, Human
cagcugccugggaucccu

SEQ ID NO: 3334258 - RNA, 23 nt, Human
cagcugccugggaucccucaucc

SEQ ID NO: 3334259 - RNA, 24 nt, Human
cagcugcgguccacccaggagccc

SEQ ID NO: 3334260 - RNA, 23 nt, Human
cagcugcgguccacccaggagcc

SEQ ID NO: 3334261 - RNA, 22 nt, Human
cagcugcgguccacccaggagc

SEQ ID NO: 3334262 - RNA, 21 nt, Human
cagcugcgguccacccaggag

SEQ ID NO: 3334263 - RNA, 20 nt, Human
cagcugcgguccacccagga

SEQ ID NO: 3334264 - RNA, 19 nt, Human
cagcugcgguccacccagg

SEQ ID NO: 3334265 - RNA, 15 nt, Human
cagcugccugggauc

SEQ ID NO: 3334266 - RNA, 18 nt, Human
cagcugcgguccacccag

SEQ ID NO: 3334267 - RNA, 13 nt, Human
cagcugcuugggc

SEQ ID NO: 3334268 - RNA, 14 nt, Human
cagcugcuugggcu

SEQ ID NO: 3334269 - RNA, 15 nt, Human
cagcugcuugggcuu

SEQ ID NO: 3334270 - RNA, 16 nt, Human
cagcugcuugggcuuc

SEQ ID NO: 3334271 - RNA, 18 nt, Human
cagcugcuugggcuucau

SEQ ID NO: 3334272 - RNA, 19 nt, Human
cagcugcuugggcuucauc

SEQ ID NO: 3334273 - RNA, 21 nt, Human
cagcugcuugggcuucauccu

SEQ ID NO: 3334274 - RNA, 22 nt, Human
cagcugcuugggcuucauccuc

SEQ ID NO: 3334275 - RNA, 17 nt, Human
cagcugcuacuacuccu

SEQ ID NO: 3334276 - RNA, 22 nt, Human
cagcugcuuuugucuaugggac

SEQ ID NO: 3334277 - RNA, 23 nt, Human
cagcugcuuuugucuaugggacu

SEQ ID NO: 3334278 - RNA, 21 nt, Human
cagcugggguggggaccucag

SEQ ID NO: 3334279 - RNA, 22 nt, Human
cagcugggguggggaccucagg

SEQ ID NO: 3334280 - RNA, 23 nt, Human
cagcugggguggggaccucaggc

SEQ ID NO: 3334281 - RNA, 18 nt, Human
cagcugguugagguuuca

SEQ ID NO: 3334282 - RNA, 23 nt, Human
cagcucuucuccaggcuguaucc

SEQ ID NO: 3334283 - RNA, 19 nt, Human
cagcucuucuccaggcugu

SEQ ID NO: 3334284 - RNA, 18 nt, Human
cagcucuucuccaggcug

SEQ ID NO: 3334285 - RNA, 17 nt, Human
cagcucuucuccaggcu

SEQ ID NO: 3334286 - RNA, 16 nt, Human
cagcucuucuccaggc

SEQ ID NO: 3334287 - RNA, 15 nt, Human
cagcucuucuccagg

SEQ ID NO: 3334288 - RNA, 14 nt, Human
cagcucuucuccag

SEQ ID NO: 3334289 - RNA, 13 nt, Human
cagcucuucucca

SEQ ID NO: 3334290 - RNA, 10 nt, Human
cagcucuuau

SEQ ID NO: 3334291 - RNA, 21 nt, Human
cagcucuuauauugccauuuc

SEQ ID NO: 3334292 - RNA, 23 nt, Human
cagcucuguccugggagugagcu

SEQ ID NO: 3334293 - RNA, 18 nt, Human
cagcucuguccugggagu

SEQ ID NO: 3334294 - RNA, 17 nt, Human
cagcucuguccugggag

SEQ ID NO: 3334295 - RNA, 16 nt, Human
cagcucuguccuggga

SEQ ID NO: 3334296 - RNA, 14 nt, Human
cagcucuguccugg

SEQ ID NO: 3334297 - RNA, 22 nt, Human
cagcucugguccauagagagca

SEQ ID NO: 3334298 - RNA, 23 nt, Human
cagcucugguccauagagagcaa

SEQ ID NO: 3334299 - RNA, 13 nt, Human
cagcucuguccug

SEQ ID NO: 3334300 - RNA, 12 nt, Human
cagcucuguccu

SEQ ID NO: 3334301 - RNA, 16 nt, Human
cagcucugguccauag

SEQ ID NO: 3334302 - RNA, 17 nt, Human
cagcucugguccauaga

SEQ ID NO: 3334303 - RNA, 18 nt, Human
cagcucugguccauagag

SEQ ID NO: 3334304 - RNA, 21 nt, Human
cagcucugguccauagagagc

SEQ ID NO: 3334305 - RNA, 10 nt, Human
cagcucuggu

SEQ ID NO: 3334306 - RNA, 13 nt, Human
cagcucuggucca

SEQ ID NO: 3334307 - RNA, 13 nt, Human
cagcucagagagg

SEQ ID NO: 3334308 - RNA, 17 nt, Human
cagcucagagagggugg

SEQ ID NO: 3334309 - RNA, 19 nt, Human
cagcucagagaggguggga

SEQ ID NO: 3334310 - RNA, 20 nt, Human
cagcucagagagggugggag

SEQ ID NO: 3334311 - RNA, 23 nt, Human
cagcuccuucuguccuacucugu

SEQ ID NO: 3334312 - RNA, 21 nt, Human
cagcuccuucuguccuacucu

SEQ ID NO: 3334313 - RNA, 17 nt, Human
cagcuccuucuguccua

SEQ ID NO: 3334314 - RNA, 16 nt, Human
cagcuccuucuguccu

SEQ ID NO: 3334315 - RNA, 15 nt, Human
cagcucugcaagaau

SEQ ID NO: 3334316 - RNA, 16 nt, Human
cagcucugcaagaauu

SEQ ID NO: 3334317 - RNA, 21 nt, Human
cagcucugcaagaauugaagc

SEQ ID NO: 3334318 - RNA, 17 nt, Human
cagcccgggcucugccu

SEQ ID NO: 3334319 - RNA, 18 nt, Human
cagcccgggcucugccuc

SEQ ID NO: 3334320 - RNA, 19 nt, Human
cagcccgggcucugccucc

SEQ ID NO: 3334321 - RNA, 20 nt, Human
cagcccgggcucugccuccc

SEQ ID NO: 3334322 - RNA, 21 nt, Human
cagcccgggcucugccuccca

SEQ ID NO: 3334323 - RNA, 22 nt, Human
cagcccgggcucugccucccau

SEQ ID NO: 3334324 - RNA, 13 nt, Human
cagcccgggcucu

SEQ ID NO: 3334325 - RNA, 14 nt, Human
cagcccgggcucug

SEQ ID NO: 3334326 - RNA, 15 nt, Human
cagcccgggcucugc

SEQ ID NO: 3334327 - RNA, 16 nt, Human
cagcccgggcucugcc

SEQ ID NO: 3334328 - RNA, 16 nt, Human
cagccccuucugaccc

SEQ ID NO: 3334329 - RNA, 17 nt, Human
cagccccuucugaccca

SEQ ID NO: 3334330 - RNA, 19 nt, Human
cagccccuucugacccaug

SEQ ID NO: 3334331 - RNA, 21 nt, Human
cagccccuucugacccaugcu

SEQ ID NO: 3334332 - RNA, 22 nt, Human
cagccccuucugacccaugcug

SEQ ID NO: 3334333 - RNA, 23 nt, Human
cagccccuucugacccaugcugc

SEQ ID NO: 3334334 - RNA, 24 nt, Human
cagccccuucugacccaugcugcc

SEQ ID NO: 3334335 - RNA, 22 nt, Human
cagccccaucccaaacccuuca

SEQ ID NO: 3334336 - RNA, 12 nt, Human
cagccccauccu

SEQ ID NO: 3334337 - RNA, 13 nt, Human
cagccccauccuc

SEQ ID NO: 3334338 - RNA, 14 nt, Human
cagccccauccucu

SEQ ID NO: 3334339 - RNA, 16 nt, Human
cagccccauccucugu

SEQ ID NO: 3334340 - RNA, 22 nt, Human
cagccccauccucuguacagag

SEQ ID NO: 3334341 - RNA, 14 nt, Human
cagccccauucugc

SEQ ID NO: 3334342 - RNA, 13 nt, Human
cagccccauucug

SEQ ID NO: 3334343 - RNA, 23 nt, Human
cagccccuggaugcagccucaca

SEQ ID NO: 3334344 - RNA, 17 nt, Human
cagccccauucugccug

SEQ ID NO: 3334345 - RNA, 16 nt, Human
cagccccauucugccu

SEQ ID NO: 3334346 - RNA, 20 nt, Human
cagccccuguucuggcagag

SEQ ID NO: 3334347 - RNA, 22 nt, Human
cagccccuggaugcagccucac

SEQ ID NO: 3334348 - RNA, 21 nt, Human
cagccccuguucuggcagagu

SEQ ID NO: 3334349 - RNA, 11 nt, Human
cagccccaucc

SEQ ID NO: 3334350 - RNA, 21 nt, Human
cagccccaucccaaacccuuc

SEQ ID NO: 3334351 - RNA, 18 nt, Human
cagccccagugcccacag

SEQ ID NO: 3334352 - RNA, 17 nt, Human
cagccccagugcccaca

SEQ ID NO: 3334353 - RNA, 16 nt, Human
cagccccagugcccac

SEQ ID NO: 3334354 - RNA, 15 nt, Human
cagccccagugccca

SEQ ID NO: 3334355 - RNA, 14 nt, Human
cagccccagugccc

SEQ ID NO: 3334356 - RNA, 13 nt, Human
cagccccagugcc

SEQ ID NO: 3334357 - RNA, 18 nt, Human
cagcccugcagagggcac

SEQ ID NO: 3334358 - RNA, 20 nt, Human
cagcccugcagagggcacag

SEQ ID NO: 3334359 - RNA, 13 nt, Human
cagcccugcagag

SEQ ID NO: 3334360 - RNA, 14 nt, Human
cagcccugcagagg

SEQ ID NO: 3334361 - RNA, 15 nt, Human
cagcccugcagaggg

SEQ ID NO: 3334362 - RNA, 16 nt, Human
cagcccugcagagggc

SEQ ID NO: 3334363 - RNA, 21 nt, Human
cagccguguaaccauggaccc

SEQ ID NO: 3334364 - RNA, 14 nt, Human
cagccucacagucc

SEQ ID NO: 3334365 - RNA, 15 nt, Human
cagccucacaguccu

SEQ ID NO: 3334366 - RNA, 20 nt, Human
cagccucacaguccuuacca

SEQ ID NO: 3334367 - RNA, 21 nt, Human
cagccucaaccuccugggcua

SEQ ID NO: 3334368 - RNA, 20 nt, Human
cagccucaaccuccugggcu

SEQ ID NO: 3334369 - RNA, 19 nt, Human
cagccucaaccuccugggc

SEQ ID NO: 3334370 - RNA, 18 nt, Human
cagccucaaccuccuggg

SEQ ID NO: 3334371 - RNA, 17 nt, Human
cagccucaaccuccugg

SEQ ID NO: 3334372 - RNA, 22 nt, Human
cagccucccgaauagcugggac

SEQ ID NO: 3334373 - RNA, 21 nt, Human
cagccucccgaauagcuggga

SEQ ID NO: 3334374 - RNA, 20 nt, Human
cagccucccgaauagcuggg

SEQ ID NO: 3334375 - RNA, 23 nt, Human
cagccucccaaagugcugggauu

SEQ ID NO: 3334376 - RNA, 21 nt, Human
cagccucccaaagugcuggga

SEQ ID NO: 3334377 - RNA, 20 nt, Human
cagccucccaaagugcuggg

SEQ ID NO: 3334378 - RNA, 19 nt, Human
cagccucccaaagugcugg

SEQ ID NO: 3334379 - RNA, 20 nt, Human
cagccuugaccauucuccac

SEQ ID NO: 3334380 - RNA, 21 nt, Human
cagccuugaccauucuccacc

SEQ ID NO: 3334381 - RNA, 17 nt, Human
cagccuugaccauucuc

SEQ ID NO: 3334382 - RNA, 22 nt, Human
cagccuugaccauucuccaccu

SEQ ID NO: 3334383 - RNA, 23 nt, Human
cagccuugaccauucuccaccug

SEQ ID NO: 3334384 - RNA, 24 nt, Human
cagccuugaccauucuccaccugc

SEQ ID NO: 3334385 - RNA, 16 nt, Human
cagccugggcaaugug

SEQ ID NO: 3334386 - RNA, 19 nt, Human
cagccugggcaaugugaua

SEQ ID NO: 3334387 - RNA, 23 nt, Human
cagccucccgaguagcugggacu

SEQ ID NO: 3334388 - RNA, 22 nt, Human
cagccucccgaguagcugggac

SEQ ID NO: 3334389 - RNA, 21 nt, Human
cagccucccgaguagcuggga

SEQ ID NO: 3334390 - RNA, 20 nt, Human
cagccucccgaguagcuggg

SEQ ID NO: 3334391 - RNA, 19 nt, Human
cagccucccgaguagcugg

SEQ ID NO: 3334392 - RNA, 23 nt, Human
cagccucccgaauagcugggacu

SEQ ID NO: 3334393 - RNA, 20 nt, Human
cagccugcuccagcuguuca

SEQ ID NO: 3334394 - RNA, 15 nt, Human
cagccuggacccugu

SEQ ID NO: 3334395 - RNA, 19 nt, Human
cagccuggacccuguggau

SEQ ID NO: 3334396 - RNA, 19 nt, Human
cagccugcuccagcuguuc

SEQ ID NO: 3334397 - RNA, 19 nt, Human
cagcucaccagccccagug

SEQ ID NO: 3334398 - RNA, 17 nt, Human
cagcucaccagccccag

SEQ ID NO: 3334399 - RNA, 16 nt, Human
cagcucaccagcccca

SEQ ID NO: 3334400 - RNA, 15 nt, Human
cagcucaccagcccc

SEQ ID NO: 3334401 - RNA, 13 nt, Human
cagcucaccagcc

SEQ ID NO: 3334402 - RNA, 13 nt, Human
cagcucaccucuc

SEQ ID NO: 3334403 - RNA, 15 nt, Human
cagcucaccucuccc

SEQ ID NO: 3334404 - RNA, 16 nt, Human
cagcucaccucucccu

SEQ ID NO: 3334405 - RNA, 17 nt, Human
cagcucaccucucccuu

SEQ ID NO: 3334406 - RNA, 21 nt, Human
cagcucaccagccccagugcc

SEQ ID NO: 3334407 - RNA, 20 nt, Human
cagcucaccagccccagugc

SEQ ID NO: 3334408 - RNA, 14 nt, Human
cagcucaccagccc

SEQ ID NO: 3334409 - RNA, 22 nt, Human
cagcucaccagccccagugccc

SEQ ID NO: 3334410 - RNA, 19 nt, Human
cagcucaccucucccuugg

SEQ ID NO: 3334411 - RNA, 20 nt, Human
cagcucaccucucccuugga

SEQ ID NO: 3334412 - RNA, 12 nt, Human
cagcucagagag

SEQ ID NO: 3334413 - RNA, 20 nt, Human
cagcgagcccugguggcagu

SEQ ID NO: 3334414 - RNA, 19 nt, Human
cagcgagcccugguggcag

SEQ ID NO: 3334415 - RNA, 17 nt, Human
cagcgagcccugguggc

SEQ ID NO: 3334416 - RNA, 16 nt, Human
cagcgagcccuggugg

SEQ ID NO: 3334417 - RNA, 13 nt, Human
cagcgagcccugg

SEQ ID NO: 3334418 - RNA, 19 nt, Human
cagcuaacauggaaguacu

SEQ ID NO: 3334419 - RNA, 18 nt, Human
cagcuaacauggaaguac

SEQ ID NO: 3334420 - RNA, 21 nt, Human
cagcgagcccugguggcagug

SEQ ID NO: 3334421 - RNA, 16 nt, Human
cagcuaaugggacacu

SEQ ID NO: 3334422 - RNA, 15 nt, Human
cagcuaaugggacac

SEQ ID NO: 3334423 - RNA, 20 nt, Human
cagcuaacauggaaguacua

SEQ ID NO: 3334424 - RNA, 22 nt, Human
caggcuuagucacugagacagc

SEQ ID NO: 3334425 - RNA, 23 nt, Human
caggcuuagucacugagacagcc

SEQ ID NO: 3334426 - RNA, 16 nt, Human
caggcuuagucacuga

SEQ ID NO: 3334427 - RNA, 17 nt, Human
caggcuuagucacugag

SEQ ID NO: 3334428 - RNA, 20 nt, Human
caggcuuagucacugagaca

SEQ ID NO: 3334429 - RNA, 21 nt, Human
caggcuuagucacugagacag

SEQ ID NO: 3334430 - RNA, 23 nt, Human
caggcuguaucccaugagccuca

SEQ ID NO: 3334431 - RNA, 22 nt, Human
caggcuguaucccaugagccuc

SEQ ID NO: 3334432 - RNA, 21 nt, Human
caggcuguaucccaugagccu

SEQ ID NO: 3334433 - RNA, 20 nt, Human
caggcuguaucccaugagcc

SEQ ID NO: 3334434 - RNA, 14 nt, Human
caggcuguauccca

SEQ ID NO: 3334435 - RNA, 19 nt, Human
caggcuggucucaaacucu

SEQ ID NO: 3334436 - RNA, 12 nt, Human
caggcuggucuc

SEQ ID NO: 3334437 - RNA, 23 nt, Human
caggcugggcuucaguggcagcu

SEQ ID NO: 3334438 - RNA, 19 nt, Human
caggcccggcuccaggcuc

SEQ ID NO: 3334439 - RNA, 18 nt, Human
caggcccggcuccaggcu

SEQ ID NO: 3334440 - RNA, 16 nt, Human
caggcccggcuccagg

SEQ ID NO: 3334441 - RNA, 17 nt, Human
caggcccggcuccaggc

SEQ ID NO: 3334442 - RNA, 13 nt, Human
caggcccucugcc

SEQ ID NO: 3334443 - RNA, 14 nt, Human
caggcccucugccc

SEQ ID NO: 3334444 - RNA, 15 nt, Human
caggcccucugccca

SEQ ID NO: 3334445 - RNA, 21 nt, Human
caggcccggcuccaggcuccu

SEQ ID NO: 3334446 - RNA, 20 nt, Human
caggcccggcuccaggcucc

SEQ ID NO: 3334447 - RNA, 22 nt, Human
caggcccggcuccaggcuccuu

SEQ ID NO: 3334448 - RNA, 16 nt, Human
caggcccucugcccac

SEQ ID NO: 3334449 - RNA, 17 nt, Human
caggcccucugcccacu

SEQ ID NO: 3334450 - RNA, 19 nt, Human
caggcccucugcccacucc

SEQ ID NO: 3334451 - RNA, 20 nt, Human
caggcccucugcccacuccc

SEQ ID NO: 3334452 - RNA, 21 nt, Human
caggcccucugcccacucccu

SEQ ID NO: 3334453 - RNA, 22 nt, Human
caggcccucugcccacucccug

SEQ ID NO: 3334454 - RNA, 13 nt, Human
caggcucucaggc

SEQ ID NO: 3334455 - RNA, 14 nt, Human
caggcucucaggcc

SEQ ID NO: 3334456 - RNA, 15 nt, Human
caggcucucaggcca

SEQ ID NO: 3334457 - RNA, 16 nt, Human
caggcucucaggccag

SEQ ID NO: 3334458 - RNA, 20 nt, Human
caggcucgggcuccccagcc

SEQ ID NO: 3334459 - RNA, 12 nt, Human
caggcucucagg

SEQ ID NO: 3334460 - RNA, 21 nt, Human
caggcuccuuuagcgcccagu

SEQ ID NO: 3334461 - RNA, 17 nt, Human
caggcucucaggccagc

SEQ ID NO: 3334462 - RNA, 18 nt, Human
caggcucucaggccagcu

SEQ ID NO: 3334463 - RNA, 19 nt, Human
caggcucucaggccagcug

SEQ ID NO: 3334464 - RNA, 20 nt, Human
caggcucucaggccagcugc

SEQ ID NO: 3334465 - RNA, 21 nt, Human
caggcucucaggccagcugcu

SEQ ID NO: 3334466 - RNA, 23 nt, Human
caggcucucaggccagcugcuug

SEQ ID NO: 3334467 - RNA, 20 nt, Human
caggcuccuuuagcgcccag

SEQ ID NO: 3334468 - RNA, 19 nt, Human
caggcuccuuuagcgccca

SEQ ID NO: 3334469 - RNA, 14 nt, Human
caggcuccuuuagc

SEQ ID NO: 3334470 - RNA, 21 nt, Human
cagggcacaccgggcacucag

SEQ ID NO: 3334471 - RNA, 19 nt, Human
cagggcacaccgggcacuc

SEQ ID NO: 3334472 - RNA, 17 nt, Human
cagggcacaccgggcac

SEQ ID NO: 3334473 - RNA, 15 nt, Human
cagggcacaccgggc

SEQ ID NO: 3334474 - RNA, 23 nt, Human
cagggcacaccgggcacucagaa

SEQ ID NO: 3334475 - RNA, 22 nt, Human
cagggcacaccgggcacucaga

SEQ ID NO: 3334476 - RNA, 14 nt, Human
cagggcacaccggg

SEQ ID NO: 3334477 - RNA, 23 nt, Human
cagggacagaggggguggccucc

SEQ ID NO: 3334478 - RNA, 19 nt, Human
caggggaggguagagcgga

SEQ ID NO: 3334479 - RNA, 14 nt, Human
cagggccuggcuca

SEQ ID NO: 3334480 - RNA, 15 nt, Human
cagggccuggcucag

SEQ ID NO: 3334481 - RNA, 13 nt, Human
cagggccuggcuc

SEQ ID NO: 3334482 - RNA, 16 nt, Human
cagggccuggcucagg

SEQ ID NO: 3334483 - RNA, 19 nt, Human
cagggccuggcucaggugg

SEQ ID NO: 3334484 - RNA, 22 nt, Human
cagggaaacagcuaaugggaca

SEQ ID NO: 3334485 - RNA, 16 nt, Human
cagggaaacagcuaau

SEQ ID NO: 3334486 - RNA, 14 nt, Human
cagggacagagggg

SEQ ID NO: 3334487 - RNA, 20 nt, Human
cagggacagaggggguggcc

SEQ ID NO: 3334488 - RNA, 13 nt, Human
cagggacagaggg

SEQ ID NO: 3334489 - RNA, 20 nt, Human
caggccccugccacccuggg

SEQ ID NO: 3334490 - RNA, 19 nt, Human
caggccccugccacccugg

SEQ ID NO: 3334491 - RNA, 17 nt, Human
caggccccugccacccu

SEQ ID NO: 3334492 - RNA, 15 nt, Human
caggccccugccacc

SEQ ID NO: 3334493 - RNA, 15 nt, Human
caggcccggcuccag

SEQ ID NO: 3334494 - RNA, 14 nt, Human
caggcccggcucca

SEQ ID NO: 3334495 - RNA, 13 nt, Human
caggcccggcucc

SEQ ID NO: 3334496 - RNA, 20 nt, Human
caggccaggcccucugccca

SEQ ID NO: 3334497 - RNA, 21 nt, Human
caggccaggcccucugcccac

SEQ ID NO: 3334498 - RNA, 22 nt, Human
caggccaggcccucugcccacu

SEQ ID NO: 3334499 - RNA, 20 nt, Human
caggccacaagacccuugug

SEQ ID NO: 3334500 - RNA, 17 nt, Human
caggccacaagacccuu

SEQ ID NO: 3334501 - RNA, 18 nt, Human
caggccacaagacccuug

SEQ ID NO: 3334502 - RNA, 13 nt, Human
caggccacaagac

SEQ ID NO: 3334503 - RNA, 18 nt, Human
caggccaaacucaccugc

SEQ ID NO: 3334504 - RNA, 23 nt, Human
caggccaaacucaccugccccuc

SEQ ID NO: 3334505 - RNA, 13 nt, Human
caggccccugcca

SEQ ID NO: 3334506 - RNA, 13 nt, Human
caggaucagucug

SEQ ID NO: 3334507 - RNA, 14 nt, Human
caggaucagucuga

SEQ ID NO: 3334508 - RNA, 23 nt, Human
caggauggccgggcgcgguggcu

SEQ ID NO: 3334509 - RNA, 18 nt, Human
caggauucuuccucccuc

SEQ ID NO: 3334510 - RNA, 17 nt, Human
caggauucuuccucccu

SEQ ID NO: 3334511 - RNA, 13 nt, Human
caggcagguccag

SEQ ID NO: 3334512 - RNA, 16 nt, Human
caggcagccaggccac

SEQ ID NO: 3334513 - RNA, 17 nt, Human
caggcagccaggccaca

SEQ ID NO: 3334514 - RNA, 14 nt, Human
caggcagccaggcc

SEQ ID NO: 3334515 - RNA, 15 nt, Human
caggcagccaggcca

SEQ ID NO: 3334516 - RNA, 21 nt, Human
caggcaagcaccuccugccuc

SEQ ID NO: 3334517 - RNA, 16 nt, Human
caggcaagcaccuccu

SEQ ID NO: 3334518 - RNA, 15 nt, Human
caggcaagcaccucc

SEQ ID NO: 3334519 - RNA, 14 nt, Human
caggcaagcaccuc

SEQ ID NO: 3334520 - RNA, 20 nt, Human
caggauucuuccucccuccc

SEQ ID NO: 3334521 - RNA, 13 nt, Human
caggcauucccca

SEQ ID NO: 3334522 - RNA, 15 nt, Human
caggcauuccccagg

SEQ ID NO: 3334523 - RNA, 16 nt, Human
caggcauuccccagga

SEQ ID NO: 3334524 - RNA, 17 nt, Human
caggcauuccccaggag

SEQ ID NO: 3334525 - RNA, 20 nt, Human
caggcauguucucugaggac

SEQ ID NO: 3334526 - RNA, 19 nt, Human
caggcauguucucugagga

SEQ ID NO: 3334527 - RNA, 18 nt, Human
caggcauguucucugagg

SEQ ID NO: 3334528 - RNA, 15 nt, Human
caggcauguucucug

SEQ ID NO: 3334529 - RNA, 18 nt, Human
caggcauuccccaggagg

SEQ ID NO: 3334530 - RNA, 19 nt, Human
caggcauuccccaggaggc

SEQ ID NO: 3334531 - RNA, 20 nt, Human
caggcauuccccaggaggcc

SEQ ID NO: 3334532 - RNA, 21 nt, Human
caggcauuccccaggaggcca

SEQ ID NO: 3334533 - RNA, 22 nt, Human
caggcauuccccaggaggccag

SEQ ID NO: 3334534 - RNA, 23 nt, Human
caggcauuccccaggaggccagc

SEQ ID NO: 3334535 - RNA, 24 nt, Human
caggcauuccccaggaggccagcc

SEQ ID NO: 3334536 - RNA, 12 nt, Human
caggcaggucuu

SEQ ID NO: 3334537 - RNA, 19 nt, Human
caggcagguccaggguuug

SEQ ID NO: 3334538 - RNA, 15 nt, Human
caggcagguccaggg

SEQ ID NO: 3334539 - RNA, 14 nt, Human
caggcagguccagg

SEQ ID NO: 3334540 - RNA, 22 nt, Human
caggcaggucuugaacuccugg

SEQ ID NO: 3334541 - RNA, 13 nt, Human
caggcaggucuug

SEQ ID NO: 3334542 - RNA, 15 nt, Human
caggcaggugggaug

SEQ ID NO: 3334543 - RNA, 23 nt, Human
caggcaggucuugaacuccuggc

SEQ ID NO: 3334544 - RNA, 17 nt, Human
caggcaugguggcccac

SEQ ID NO: 3334545 - RNA, 21 nt, Human
caggaguuugagaccaaccug

SEQ ID NO: 3334546 - RNA, 22 nt, Human
caggaguuugagaccaaccugg

SEQ ID NO: 3334547 - RNA, 23 nt, Human
caggaguuugagaccaaccuggg

SEQ ID NO: 3334548 - RNA, 23 nt, Human
caggagccccgaggccuucucug

SEQ ID NO: 3334549 - RNA, 22 nt, Human
caggagccccgaggccuucucu

SEQ ID NO: 3334550 - RNA, 20 nt, Human
caggagccccgaggccuucu

SEQ ID NO: 3334551 - RNA, 12 nt, Human
caggagcagcca

SEQ ID NO: 3334552 - RNA, 13 nt, Human
caggagcagccac

SEQ ID NO: 3334553 - RNA, 14 nt, Human
caggagcagccaca

SEQ ID NO: 3334554 - RNA, 19 nt, Human
caggagcagccacauuccu

SEQ ID NO: 3334555 - RNA, 18 nt, Human
caggagccccgaggccuu

SEQ ID NO: 3334556 - RNA, 16 nt, Human
caggagccccgaggcc

SEQ ID NO: 3334557 - RNA, 15 nt, Human
caggagccccgaggc

SEQ ID NO: 3334558 - RNA, 14 nt, Human
caggagccuccugc

SEQ ID NO: 3334559 - RNA, 17 nt, Human
caggagccuccugcccu

SEQ ID NO: 3334560 - RNA, 20 nt, Human
caggagccuccugcccuuac

SEQ ID NO: 3334561 - RNA, 12 nt, Human
caggagugagca

SEQ ID NO: 3334562 - RNA, 23 nt, Human
cagugccuuauggaacacucuga

SEQ ID NO: 3334563 - RNA, 15 nt, Human
caguccuuaccagca

SEQ ID NO: 3334564 - RNA, 18 nt, Human
caguccuuaccagcagag

SEQ ID NO: 3334565 - RNA, 19 nt, Human
caguccuuaccagcagagc

SEQ ID NO: 3334566 - RNA, 20 nt, Human
caguccuuaccagcagagca

SEQ ID NO: 3334567 - RNA, 21 nt, Human
caguccuuaccagcagagcac

SEQ ID NO: 3334568 - RNA, 18 nt, Human
cagucuggaaugcagugg

SEQ ID NO: 3334569 - RNA, 16 nt, Human
caguccucccaucuca

SEQ ID NO: 3334570 - RNA, 17 nt, Human
caguccucccaucucac

SEQ ID NO: 3334571 - RNA, 19 nt, Human
cagucuggaaugcaguggu

SEQ ID NO: 3334572 - RNA, 24 nt, Human
cagugagccgagauugcaccacug

SEQ ID NO: 3334573 - RNA, 12 nt, Human
cagugaggcucu

SEQ ID NO: 3334574 - RNA, 13 nt, Human
cagugaggcucug

SEQ ID NO: 3334575 - RNA, 14 nt, Human
cagugaggcucugc

SEQ ID NO: 3334576 - RNA, 15 nt, Human
cagugaggcucugcc

SEQ ID NO: 3334577 - RNA, 16 nt, Human
cagugaggcucugccc

SEQ ID NO: 3334578 - RNA, 17 nt, Human
cagugaggcucugcccu

SEQ ID NO: 3334579 - RNA, 18 nt, Human
cagugaggcucugcccuu

SEQ ID NO: 3334580 - RNA, 19 nt, Human
cagugaggcucugcccuug

SEQ ID NO: 3334581 - RNA, 20 nt, Human
cagugaggcucugcccuugg

SEQ ID NO: 3334582 - RNA, 18 nt, Human
cagugagucgaggacagg

SEQ ID NO: 3334583 - RNA, 17 nt, Human
cagugagucgaggacag

SEQ ID NO: 3334584 - RNA, 21 nt, Human
cagugaggcucugcccuuggu

SEQ ID NO: 3334585 - RNA, 15 nt, Human
cagugccuuauggaa

SEQ ID NO: 3334586 - RNA, 16 nt, Human
cagugccuuauggaac

SEQ ID NO: 3334587 - RNA, 17 nt, Human
cagugccuuauggaaca

SEQ ID NO: 3334588 - RNA, 18 nt, Human
cagugccuuauggaacac

SEQ ID NO: 3334589 - RNA, 19 nt, Human
cagugccuuauggaacacu

SEQ ID NO: 3334590 - RNA, 20 nt, Human
cagugccuuauggaacacuc

SEQ ID NO: 3334591 - RNA, 21 nt, Human
cagugccuuauggaacacucu

SEQ ID NO: 3334592 - RNA, 22 nt, Human
cagugccuuauggaacacucug

SEQ ID NO: 3334593 - RNA, 15 nt, Human
cagugccgagaagga

SEQ ID NO: 3334594 - RNA, 18 nt, Human
cagugccgagaaggaagc

SEQ ID NO: 3334595 - RNA, 11 nt, Human
cagugccuuau

SEQ ID NO: 3334596 - RNA, 13 nt, Human
cagugccuuaugg

SEQ ID NO: 3334597 - RNA, 23 nt, Human
cagugagucgaggacagggaggu

SEQ ID NO: 3334598 - RNA, 22 nt, Human
cagugagucgaggacagggagg

SEQ ID NO: 3334599 - RNA, 20 nt, Human
cagugagucgaggacaggga

SEQ ID NO: 3334600 - RNA, 19 nt, Human
cagugagucgaggacaggg

SEQ ID NO: 3334601 - RNA, 12 nt, Human
cagucccugcca

SEQ ID NO: 3334602 - RNA, 13 nt, Human
cagucccugccaa

SEQ ID NO: 3334603 - RNA, 14 nt, Human
cagucccugccaau

SEQ ID NO: 3334604 - RNA, 15 nt, Human
cagucccugccaaug

SEQ ID NO: 3334605 - RNA, 16 nt, Human
cagucccugccaaugg

SEQ ID NO: 3334606 - RNA, 12 nt, Human
caguccucccau

SEQ ID NO: 3334607 - RNA, 13 nt, Human
caguccucccauc

SEQ ID NO: 3334608 - RNA, 14 nt, Human
caguccucccaucu

SEQ ID NO: 3334609 - RNA, 15 nt, Human
caguccucccaucuc

SEQ ID NO: 3334610 - RNA, 17 nt, Human
cagucccugccaaugga

SEQ ID NO: 3334611 - RNA, 18 nt, Human
caguauuacuucugcuac

SEQ ID NO: 3334612 - RNA, 16 nt, Human
caguauuacuucugcu

SEQ ID NO: 3334613 - RNA, 16 nt, Human
caguccauagcagaga

SEQ ID NO: 3334614 - RNA, 14 nt, Human
caguccauugaaag

SEQ ID NO: 3334615 - RNA, 13 nt, Human
caguaucucaggg

SEQ ID NO: 3334616 - RNA, 15 nt, Human
caguaucucagggcc

SEQ ID NO: 3334617 - RNA, 12 nt, Human
caguaucuugaa

SEQ ID NO: 3334618 - RNA, 18 nt, Human
caguaucuugaagacuuu

SEQ ID NO: 3334619 - RNA, 21 nt, Human
caguaucuugaagacuuuucu

SEQ ID NO: 3334620 - RNA, 14 nt, Human
cagggucccuggug

SEQ ID NO: 3334621 - RNA, 12 nt, Human
cagggucccugg

SEQ ID NO: 3334622 - RNA, 15 nt, Human
cagggucccuggugg

SEQ ID NO: 3334623 - RNA, 18 nt, Human
cagggucccugguggcag

SEQ ID NO: 3334624 - RNA, 19 nt, Human
cagggucccugguggcagc

SEQ ID NO: 3334625 - RNA, 22 nt, Human
cagggucccugguggcagcuca

SEQ ID NO: 3334626 - RNA, 20 nt, Human
caggguauuccagagugggg

SEQ ID NO: 3334627 - RNA, 21 nt, Human
caggguauuccagagugggga

SEQ ID NO: 3334628 - RNA, 16 nt, Human
cagggucucacucugu

SEQ ID NO: 3334629 - RNA, 16 nt, Human
caggguuuugccaugu

SEQ ID NO: 3334630 - RNA, 17 nt, Human
cagguaacaggcagaua

SEQ ID NO: 3334631 - RNA, 16 nt, Human
cagguaacaggcagau

SEQ ID NO: 3334632 - RNA, 15 nt, Human
cagguaacaggcaga

SEQ ID NO: 3334633 - RNA, 14 nt, Human
cagguaacaggcag

SEQ ID NO: 3334634 - RNA, 18 nt, Human
caggguccuguagcccua

SEQ ID NO: 3334635 - RNA, 23 nt, Human
cagggucccugguggcagcucac

SEQ ID NO: 3334636 - RNA, 15 nt, Human
cagggucucacucug

SEQ ID NO: 3334637 - RNA, 23 nt, Human
cagggucucacuauguugcccag

SEQ ID NO: 3334638 - RNA, 22 nt, Human
cagggucucacuauguugccca

SEQ ID NO: 3334639 - RNA, 21 nt, Human
cagggucucacuauguugccc

SEQ ID NO: 3334640 - RNA, 14 nt, Human
caggggugggacac

SEQ ID NO: 3334641 - RNA, 15 nt, Human
caggggugggacacc

SEQ ID NO: 3334642 - RNA, 20 nt, Human
caggggugggacacccugug

SEQ ID NO: 3334643 - RNA, 21 nt, Human
caggggugggacacccuguga

SEQ ID NO: 3334644 - RNA, 23 nt, Human
caggucuugaacuccuggccuca

SEQ ID NO: 3334645 - RNA, 22 nt, Human
caggucuugaacuccuggccuc

SEQ ID NO: 3334646 - RNA, 21 nt, Human
caggucuugaacuccuggccu

SEQ ID NO: 3334647 - RNA, 20 nt, Human
caggucuugaacuccuggcc

SEQ ID NO: 3334648 - RNA, 19 nt, Human
caggucuugaacuccuggc

SEQ ID NO: 3334649 - RNA, 18 nt, Human
caggucuugaacuccugg

SEQ ID NO: 3334650 - RNA, 13 nt, Human
caggugagaagca

SEQ ID NO: 3334651 - RNA, 20 nt, Human
caggugagaagcagaggaag

SEQ ID NO: 3334652 - RNA, 21 nt, Human
caggugagaagcagaggaagg

SEQ ID NO: 3334653 - RNA, 21 nt, Human
cagguaacaggcagauacagg

SEQ ID NO: 3334654 - RNA, 20 nt, Human
cagguaacaggcagauacag

SEQ ID NO: 3334655 - RNA, 20 nt, Human
caggugguuauggagagggu

SEQ ID NO: 3334656 - RNA, 14 nt, Human
caggugucccugca

SEQ ID NO: 3334657 - RNA, 11 nt, Human
caggugucccu

SEQ ID NO: 3334658 - RNA, 18 nt, Human
cagguggggucacucugg

SEQ ID NO: 3334659 - RNA, 17 nt, Human
cagguggggcagcuuga

SEQ ID NO: 3334660 - RNA, 16 nt, Human
cagguggggcagcuug

SEQ ID NO: 3334661 - RNA, 15 nt, Human
cagguggggcagcuu

SEQ ID NO: 3334662 - RNA, 14 nt, Human
cagguggggcagcu

SEQ ID NO: 3334663 - RNA, 13 nt, Human
cagguggggcagc

SEQ ID NO: 3334664 - RNA, 19 nt, Human
cagguggggucacucuggc

SEQ ID NO: 3334665 - RNA, 20 nt, Human
cagguggggucacucuggca

SEQ ID NO: 3334666 - RNA, 21 nt, Human
cagguggggucacucuggcag

SEQ ID NO: 3334667 - RNA, 22 nt, Human
cagguggggucacucuggcagc

SEQ ID NO: 3334668 - RNA, 23 nt, Human
cagguggggucacucuggcagcu

SEQ ID NO: 3334669 - RNA, 18 nt, Human
caggugguuauggagagg

SEQ ID NO: 3334670 - RNA, 13 nt, Human
cagguucagcuug

SEQ ID NO: 3334671 - RNA, 12 nt, Human
cagguucagcuu

SEQ ID NO: 3334672 - RNA, 20 nt, Human
caguaaaugggggugcauuu

SEQ ID NO: 3334673 - RNA, 21 nt, Human
caguaaaugggggugcauuug

SEQ ID NO: 3334674 - RNA, 22 nt, Human
caguaaaugggggugcauuuga

SEQ ID NO: 3334675 - RNA, 13 nt, Human
caguaauaacucu

SEQ ID NO: 3334676 - RNA, 12 nt, Human
caguaauaacuc

SEQ ID NO: 3334677 - RNA, 12 nt, Human
caggugugaacc

SEQ ID NO: 3334678 - RNA, 19 nt, Human
caggugucccugcacuugc

SEQ ID NO: 3334679 - RNA, 18 nt, Human
caggugucccugcacuug

SEQ ID NO: 3334680 - RNA, 16 nt, Human
caggugucccugcacu

SEQ ID NO: 3334681 - RNA, 15 nt, Human
caggugucccugcac

SEQ ID NO: 3334682 - RNA, 16 nt, Human
caggugugagucacca

SEQ ID NO: 3334683 - RNA, 21 nt, Human
caggugugagucaccaagccc

SEQ ID NO: 3334684 - RNA, 20 nt, Human
caggugugagucaccaagcc

SEQ ID NO: 3334685 - RNA, 23 nt, Human
caggugugaaccaccacacccag

SEQ ID NO: 3334686 - RNA, 22 nt, Human
caggugugaaccaccacaccca

SEQ ID NO: 3334687 - RNA, 19 nt, Human
caggugugaaccaccacac

SEQ ID NO: 3334688 - RNA, 16 nt, Human
caggugugaaccacca

SEQ ID NO: 3334689 - RNA, 23 nt, Human
caggugugagucaccaagcccag

SEQ ID NO: 3334690 - RNA, 22 nt, Human
caggugugagucaccaagccca

SEQ ID NO: 3334691 - RNA, 22 nt, Human
gaaccaccacacccagcccacu

SEQ ID NO: 3334692 - RNA, 21 nt, Human
gaaccaccacacccagcccac

SEQ ID NO: 3334693 - RNA, 20 nt, Human
gaaccaccacacccagccca

SEQ ID NO: 3334694 - RNA, 18 nt, Human
gaaccaccacacccagcc

SEQ ID NO: 3334695 - RNA, 16 nt, Human
gaagacucauucuucu

SEQ ID NO: 3334696 - RNA, 17 nt, Human
gaagacucauucuucug

SEQ ID NO: 3334697 - RNA, 22 nt, Human
gaagcacaugccucucucaggc

SEQ ID NO: 3334698 - RNA, 14 nt, Human
gaagcacagcuuca

SEQ ID NO: 3334699 - RNA, 13 nt, Human
gaagcacagcuuc

SEQ ID NO: 3334700 - RNA, 16 nt, Human
gaagcaccauaacuuu

SEQ ID NO: 3334701 - RNA, 21 nt, Human
gaagcacaugccucucucagg

SEQ ID NO: 3334702 - RNA, 14 nt, Human
gaagacagcucuua

SEQ ID NO: 3334703 - RNA, 15 nt, Human
gaagacagcucuuau

SEQ ID NO: 3334704 - RNA, 13 nt, Human
gaagacagagcua

SEQ ID NO: 3334705 - RNA, 15 nt, Human
gaagacagagcuaca

SEQ ID NO: 3334706 - RNA, 12 nt, Human
gaagacagcucu

SEQ ID NO: 3334707 - RNA, 13 nt, Human
gaagacagcucuu

SEQ ID NO: 3334708 - RNA, 21 nt, Human
gaagacacugaugggcaaccc

SEQ ID NO: 3334709 - RNA, 16 nt, Human
gaagacacugaugggc

SEQ ID NO: 3334710 - RNA, 14 nt, Human
gaacuccuggccuc

SEQ ID NO: 3334711 - RNA, 13 nt, Human
gaacuccuggccu

SEQ ID NO: 3334712 - RNA, 22 nt, Human
gaaccauggucggaaaacaugc

SEQ ID NO: 3334713 - RNA, 23 nt, Human
gaaccaccacacccagcccacuu

SEQ ID NO: 3334714 - RNA, 17 nt, Human
gaaccaccacacccagc

SEQ ID NO: 3334715 - RNA, 16 nt, Human
gaaagggcccagagag

SEQ ID NO: 3334716 - RNA, 15 nt, Human
gaaagggcccagaga

SEQ ID NO: 3334717 - RNA, 23 nt, Human
gaacaaaacacacgcgcgcacac

SEQ ID NO: 3334718 - RNA, 13 nt, Human
gaaagggcccaga

SEQ ID NO: 3334719 - RNA, 12 nt, Human
gaaaggcuccag

SEQ ID NO: 3334720 - RNA, 14 nt, Human
gaaaggcuccagga

SEQ ID NO: 3334721 - RNA, 15 nt, Human
gaaaggcuccaggag

SEQ ID NO: 3334722 - RNA, 13 nt, Human
gaaaggcuccagg

SEQ ID NO: 3334723 - RNA, 21 nt, Human
gaaagaaaauaccaaggaaca

SEQ ID NO: 3334724 - RNA, 13 nt, Human
gaaacuggauuaa

SEQ ID NO: 3334725 - RNA, 17 nt, Human
gaaacuggauuaaacuu

SEQ ID NO: 3334726 - RNA, 23 nt, Human
gaaaagaaaaaugagccuggcaa

SEQ ID NO: 3334727 - RNA, 19 nt, Human
cuuuuauaaacuuuaccuu

SEQ ID NO: 3334728 - RNA, 22 nt, Human
cuuuguauucucuccuguaccu

SEQ ID NO: 3334729 - RNA, 20 nt, Human
cuuuuauaaacuuuaccuuu

SEQ ID NO: 3334730 - RNA, 21 nt, Human
cuuuuauaaacuuuaccuuuu

SEQ ID NO: 3334731 - RNA, 17 nt, Human
cuuuguauucucuccug

SEQ ID NO: 3334732 - RNA, 16 nt, Human
cuuugacgccauccca

SEQ ID NO: 3334733 - RNA, 17 nt, Human
cuuugacgccaucccag

SEQ ID NO: 3334734 - RNA, 16 nt, Human
cuuucuacccagcgag

SEQ ID NO: 3334735 - RNA, 15 nt, Human
cuuucuacccagcga

SEQ ID NO: 3334736 - RNA, 20 nt, Human
cuuucacccuuuucuguuug

SEQ ID NO: 3334737 - RNA, 14 nt, Human
cuuucacccuuuuc

SEQ ID NO: 3334738 - RNA, 15 nt, Human
cuuucacccuuuucu

SEQ ID NO: 3334739 - RNA, 23 nt, Human
cuuuaaugucacaggcaggucca

SEQ ID NO: 3334740 - RNA, 18 nt, Human
cuugucuuuggacccuga

SEQ ID NO: 3334741 - RNA, 13 nt, Human
cuugucuuuggac

SEQ ID NO: 3334742 - RNA, 15 nt, Human
cuugucuuuggaccc

SEQ ID NO: 3334743 - RNA, 19 nt, Human
cuuggugucgggcaugaca

SEQ ID NO: 3334744 - RNA, 22 nt, Human
cuugguagaagcccuucuaccu

SEQ ID NO: 3334745 - RNA, 14 nt, Human
cuugguccugcugc

SEQ ID NO: 3334746 - RNA, 13 nt, Human
cuuccuccuggug

SEQ ID NO: 3334747 - RNA, 21 nt, Human
cuuccucuuuccaucuacccu

SEQ ID NO: 3334748 - RNA, 22 nt, Human
cuuccucuuuccaucuacccuc

SEQ ID NO: 3334749 - RNA, 23 nt, Human
cuucugaacuuggcgcugccccu

SEQ ID NO: 3334750 - RNA, 13 nt, Human
cuucuucagagac

SEQ ID NO: 3334751 - RNA, 14 nt, Human
cuucuucagagacu

SEQ ID NO: 3334752 - RNA, 23 nt, Human
cuuggauuguccccgacccuugc

SEQ ID NO: 3334753 - RNA, 24 nt, Human
cuuggauuguccccgacccuugcc

SEQ ID NO: 3334754 - RNA, 22 nt, Human
cuuggauuguccccgacccuug

SEQ ID NO: 3334755 - RNA, 15 nt, Human
cuugauguguuaucu

SEQ ID NO: 3334756 - RNA, 18 nt, Human
cuugauguguuaucucuu

SEQ ID NO: 3334757 - RNA, 22 nt, Human
cuugauauccucuuugagugaa

SEQ ID NO: 3334758 - RNA, 17 nt, Human
cuugauauccucuuuga

SEQ ID NO: 3334759 - RNA, 16 nt, Human
cuugacaucaacugca

SEQ ID NO: 3334760 - RNA, 20 nt, Human
cuugacagggcacaccgggc

SEQ ID NO: 3334761 - RNA, 23 nt, Human
cuugaaugaugccaugaggaaca

SEQ ID NO: 3334762 - RNA, 11 nt, Human
cuggcagccca

SEQ ID NO: 3334763 - RNA, 12 nt, Human
cuggcagccccu

SEQ ID NO: 3334764 - RNA, 17 nt, Human
cuggcagaguugaagac

SEQ ID NO: 3334765 - RNA, 18 nt, Human
cuggcagaguugaagaca

SEQ ID NO: 3334766 - RNA, 22 nt, Human
cuggccccucagggucccuggu

SEQ ID NO: 3334767 - RNA, 15 nt, Human
cuggguucacugcaa

SEQ ID NO: 3334768 - RNA, 20 nt, Human
cuggguucacugcaaccucc

SEQ ID NO: 3334769 - RNA, 18 nt, Human
cuggguucacugcaaccu

SEQ ID NO: 3334770 - RNA, 14 nt, Human
cuggggagaaagua

SEQ ID NO: 3334771 - RNA, 15 nt, Human
cugggcagaaggaag

SEQ ID NO: 3334772 - RNA, 12 nt, Human
cugggcagaagg

SEQ ID NO: 3334773 - RNA, 15 nt, Human
cugccuguucagcuc

SEQ ID NO: 3334774 - RNA, 21 nt, Human
cugccuguugggccaggagcc

SEQ ID NO: 3334775 - RNA, 22 nt, Human
cugccuguugggccaggagccu

SEQ ID NO: 3334776 - RNA, 18 nt, Human
cugcugacuguuuucucu

SEQ ID NO: 3334777 - RNA, 21 nt, Human
cugcugacuguuuucucuuga

SEQ ID NO: 3334778 - RNA, 20 nt, Human
cugccuguugggccaggagc

SEQ ID NO: 3334779 - RNA, 19 nt, Human
cugccuguucagcuccagc

SEQ ID NO: 3334780 - RNA, 18 nt, Human
cugccuguucagcuccag

SEQ ID NO: 3334781 - RNA, 17 nt, Human
cugccuguucagcucca

SEQ ID NO: 3334782 - RNA, 23 nt, Human
cugccucucccaucacuucccua

SEQ ID NO: 3334783 - RNA, 22 nt, Human
cugccucucccaucacuucccu

SEQ ID NO: 3334784 - RNA, 15 nt, Human
cugccucucccauca

SEQ ID NO: 3334785 - RNA, 21 nt, Human
cugcuuuugucuaugggacuc

SEQ ID NO: 3334786 - RNA, 19 nt, Human
cugcuuuugucuaugggac

SEQ ID NO: 3334787 - RNA, 20 nt, Human
cugcuucaaggauccugagc

SEQ ID NO: 3334788 - RNA, 20 nt, Human
cugcuuuugucuaugggacu

SEQ ID NO: 3334789 - RNA, 22 nt, Human
cugcuucaaggauccugagcca

SEQ ID NO: 3334790 - RNA, 23 nt, Human
cugcuucaaggauccugagccag

SEQ ID NO: 3334791 - RNA, 19 nt, Human
cugcuucaaauauuucccu

SEQ ID NO: 3334792 - RNA, 12 nt, Human
cugcuucaagga

SEQ ID NO: 3334793 - RNA, 21 nt, Human
cugcuucaaggauccugagcc

SEQ ID NO: 3334794 - RNA, 14 nt, Human
cugcuucaaauauu

SEQ ID NO: 3334795 - RNA, 23 nt, Human
cuuagcucauucuccuuguguua

SEQ ID NO: 3334796 - RNA, 22 nt, Human
cuuagcucauucuccuuguguu

SEQ ID NO: 3334797 - RNA, 16 nt, Human
cuuaccagcagagcac

SEQ ID NO: 3334798 - RNA, 21 nt, Human
cuuagcagggaaacagcuaau

SEQ ID NO: 3334799 - RNA, 21 nt, Human
cuuagggaaggauacaaaagc

SEQ ID NO: 3334800 - RNA, 19 nt, Human
cuuagggaaggauacaaaa

SEQ ID NO: 3334801 - RNA, 14 nt, Human
cuguuggcuggggg

SEQ ID NO: 3334802 - RNA, 22 nt, Human
cuguuggcugggggccucagug

SEQ ID NO: 3334803 - RNA, 19 nt, Human
cuguuggcugggggccuca

SEQ ID NO: 3334804 - RNA, 15 nt, Human
cuguuggccagugug

SEQ ID NO: 3334805 - RNA, 14 nt, Human
cuuaaaacaacacu

SEQ ID NO: 3334806 - RNA, 15 nt, Human
cuuaccagcagagca

SEQ ID NO: 3334807 - RNA, 13 nt, Human
cuguagaguggga

SEQ ID NO: 3334808 - RNA, 21 nt, Human
cuguccugggagugagcuggu

SEQ ID NO: 3334809 - RNA, 23 nt, Human
cugucaauuacaggaaguacugg

SEQ ID NO: 3334810 - RNA, 19 nt, Human
cugucaauuacaggaagua

SEQ ID NO: 3334811 - RNA, 20 nt, Human
cugucaauuacaggaaguac

SEQ ID NO: 3334812 - RNA, 16 nt, Human
cugucgcccagucugg

SEQ ID NO: 3334813 - RNA, 15 nt, Human
cugucgcccagucug

SEQ ID NO: 3334814 - RNA, 15 nt, Human
cugugcugcccugcc

SEQ ID NO: 3334815 - RNA, 17 nt, Human
cugugcugcccugccca

SEQ ID NO: 3334816 - RNA, 18 nt, Human
cugugcugcccugcccac

SEQ ID NO: 3334817 - RNA, 19 nt, Human
cugugcugcccugcccacc

SEQ ID NO: 3334818 - RNA, 17 nt, Human
cugugucagcauagaag

SEQ ID NO: 3334819 - RNA, 12 nt, Human
cugugcugcccu

SEQ ID NO: 3334820 - RNA, 13 nt, Human
cugugcugcccug

SEQ ID NO: 3334821 - RNA, 14 nt, Human
cugugcugcccugc

SEQ ID NO: 3334822 - RNA, 18 nt, Human
cugugccucugggacugg

SEQ ID NO: 3334823 - RNA, 23 nt, Human
gauuuuuuuuuccuucagugccu

SEQ ID NO: 3334824 - RNA, 21 nt, Human
gauuuuuuuuuccuucagugc

SEQ ID NO: 3334825 - RNA, 22 nt, Human
gauuuuuuuuuccuucagugcc

SEQ ID NO: 3334826 - RNA, 17 nt, Human
gauuucacucuccuugg

SEQ ID NO: 3334827 - RNA, 18 nt, Human
gauuucacucuccuuggu

SEQ ID NO: 3334828 - RNA, 12 nt, Human
gauuucacucuc

SEQ ID NO: 3334829 - RNA, 19 nt, Human
gauuuaacagaaauguaca

SEQ ID NO: 3334830 - RNA, 13 nt, Human
gauuucacucucc

SEQ ID NO: 3334831 - RNA, 16 nt, Human
gauuucacucuccuug

SEQ ID NO: 3334832 - RNA, 20 nt, Human
gauucuucugcuucagccuc

SEQ ID NO: 3334833 - RNA, 21 nt, Human
gauucuucugcuucagccucc

SEQ ID NO: 3334834 - RNA, 23 nt, Human
gauucuuauggacaaugacccag

SEQ ID NO: 3334835 - RNA, 20 nt, Human
gauuuaacagaaauguacag

SEQ ID NO: 3334836 - RNA, 23 nt, Human
gauuuaacagaaauguacagcaa

SEQ ID NO: 3334837 - RNA, 21 nt, Human
gauucuccugccucagccucc

SEQ ID NO: 3334838 - RNA, 20 nt, Human
gauucuccugccucagccuc

SEQ ID NO: 3334839 - RNA, 19 nt, Human
gauucuccugccucagccu

SEQ ID NO: 3334840 - RNA, 18 nt, Human
gaucuggguucacugcaa

SEQ ID NO: 3334841 - RNA, 14 nt, Human
gaugcuuguacaua

SEQ ID NO: 3334842 - RNA, 16 nt, Human
gaugcuuguacauaau

SEQ ID NO: 3334843 - RNA, 21 nt, Human
gaugaugaaaugaggucagag

SEQ ID NO: 3334844 - RNA, 17 nt, Human
gcacuccagccugggug

SEQ ID NO: 3334845 - RNA, 15 nt, Human
gcacuccagccuggg

SEQ ID NO: 3334846 - RNA, 22 nt, Human
gcacuauagccuaggugacaga

SEQ ID NO: 3334847 - RNA, 22 nt, Human
gcacuauaauguaagcucuacu

SEQ ID NO: 3334848 - RNA, 20 nt, Human
gcacacaccagagcccaccu

SEQ ID NO: 3334849 - RNA, 12 nt, Human
gcacacauuuuu

SEQ ID NO: 3334850 - RNA, 11 nt, Human
gcacacauuuu

SEQ ID NO: 3334851 - RNA, 17 nt, Human
gcaccggcuggccuggc

SEQ ID NO: 3334852 - RNA, 15 nt, Human
gcaccggcuggccug

SEQ ID NO: 3334853 - RNA, 16 nt, Human
gcaccggcuggccugg

SEQ ID NO: 3334854 - RNA, 12 nt, Human
gcaccuccugcc

SEQ ID NO: 3334855 - RNA, 15 nt, Human
gcaaaagaugcuucu

SEQ ID NO: 3334856 - RNA, 18 nt, Human
gcaacccccagccugcua

SEQ ID NO: 3334857 - RNA, 16 nt, Human
gcaaaagaugcuucuc

SEQ ID NO: 3334858 - RNA, 17 nt, Human
gcaacccccagccugcu

SEQ ID NO: 3334859 - RNA, 22 nt, Human
gcaacccuggugaccagcacca

SEQ ID NO: 3334860 - RNA, 18 nt, Human
gcaaccuccgccucuugg

SEQ ID NO: 3334861 - RNA, 19 nt, Human
gcacacaccagagcccacc

SEQ ID NO: 3334862 - RNA, 18 nt, Human
gcacacaccagagcccac

SEQ ID NO: 3334863 - RNA, 17 nt, Human
gcacacaccagagccca

SEQ ID NO: 3334864 - RNA, 16 nt, Human
gcacacaccagagccc

SEQ ID NO: 3334865 - RNA, 15 nt, Human
gcacacaccagagcc

SEQ ID NO: 3334866 - RNA, 14 nt, Human
gcacacaccagagc

SEQ ID NO: 3334867 - RNA, 12 nt, Human
gcacacaccaga

SEQ ID NO: 3334868 - RNA, 23 nt, Human
gcaauaaggggagaguaacccug

SEQ ID NO: 3334869 - RNA, 11 nt, Human
gcaauaaagca

SEQ ID NO: 3334870 - RNA, 22 nt, Human
gcagggaaacagcuaaugggac

SEQ ID NO: 3334871 - RNA, 13 nt, Human
gcagggaaacagc

SEQ ID NO: 3334872 - RNA, 17 nt, Human
gcaggcucucaggccag

SEQ ID NO: 3334873 - RNA, 13 nt, Human
gcaggcucucagg

SEQ ID NO: 3334874 - RNA, 14 nt, Human
gcaggcucucaggc

SEQ ID NO: 3334875 - RNA, 15 nt, Human
gcaggcucucaggcc

SEQ ID NO: 3334876 - RNA, 16 nt, Human
gcaggcucucaggcca

SEQ ID NO: 3334877 - RNA, 22 nt, Human
gcaggcucgggcuccccagccc

SEQ ID NO: 3334878 - RNA, 12 nt, Human
gcaggcucucag

SEQ ID NO: 3334879 - RNA, 21 nt, Human
gcagcuugaggguugggcugg

SEQ ID NO: 3334880 - RNA, 19 nt, Human
gcagcuugaggguugggcu

SEQ ID NO: 3334881 - RNA, 16 nt, Human
gcagcuugaggguugg

SEQ ID NO: 3334882 - RNA, 20 nt, Human
gcagcugcuuuugucuaugg

SEQ ID NO: 3334883 - RNA, 13 nt, Human
gcagcugcuuuug

SEQ ID NO: 3334884 - RNA, 23 nt, Human
gcagcugcgguccacccaggagc

SEQ ID NO: 3334885 - RNA, 22 nt, Human
gcagcugcgguccacccaggag

SEQ ID NO: 3334886 - RNA, 19 nt, Human
gcagcugcgguccacccag

SEQ ID NO: 3334887 - RNA, 14 nt, Human
gcaguugccaguca

SEQ ID NO: 3334888 - RNA, 23 nt, Human
gcaguugccagucaccccggcca

SEQ ID NO: 3334889 - RNA, 15 nt, Human
gcauaaaaauuagcc

SEQ ID NO: 3334890 - RNA, 15 nt, Human
gcauaccacuuuugu

SEQ ID NO: 3334891 - RNA, 17 nt, Human
gccaaggccaaaggaag

SEQ ID NO: 3334892 - RNA, 11 nt, Human
gccaaggccaa

SEQ ID NO: 3334893 - RNA, 14 nt, Human
gccaagaauucuua

SEQ ID NO: 3334894 - RNA, 18 nt, Human
gccaagaauucuuaaaua

SEQ ID NO: 3334895 - RNA, 14 nt, Human
gcauuugaaaauuu

SEQ ID NO: 3334896 - RNA, 16 nt, Human
gcauuugaaaauuuug

SEQ ID NO: 3334897 - RNA, 18 nt, Human
gcauugugggaaggggag

SEQ ID NO: 3334898 - RNA, 12 nt, Human
gcauuuaaaaga

SEQ ID NO: 3334899 - RNA, 13 nt, Human
gcaugggaaugaa

SEQ ID NO: 3334900 - RNA, 16 nt, Human
gcaugggaaugaaugu

SEQ ID NO: 3334901 - RNA, 19 nt, Human
gcaugggaaugaaugucag

SEQ ID NO: 3334902 - RNA, 17 nt, Human
gcaugugaugagaggaa

SEQ ID NO: 3334903 - RNA, 23 nt, Human
gcauccuggcacccggccccugc

SEQ ID NO: 3334904 - RNA, 22 nt, Human
gcauccuggcacccggccccug

SEQ ID NO: 3334905 - RNA, 14 nt, Human
gcauccuggcaccc

SEQ ID NO: 3334906 - RNA, 21 nt, Human
gcauccuggcacccggccccu

SEQ ID NO: 3334907 - RNA, 17 nt, Human
gcauccuggcacccggc

SEQ ID NO: 3334908 - RNA, 11 nt, Human
gacagcuccuu

SEQ ID NO: 3334909 - RNA, 15 nt, Human
gacagcuccuucugu

SEQ ID NO: 3334910 - RNA, 14 nt, Human
gacagcuccuucug

SEQ ID NO: 3334911 - RNA, 13 nt, Human
gacagcuccuucu

SEQ ID NO: 3334912 - RNA, 16 nt, Human
gacccuauugcugcuu

SEQ ID NO: 3334913 - RNA, 13 nt, Human
gacccggcugcgu

SEQ ID NO: 3334914 - RNA, 12 nt, Human
gacccggcugcg

SEQ ID NO: 3334915 - RNA, 16 nt, Human
gaccaucccugaaggc

SEQ ID NO: 3334916 - RNA, 17 nt, Human
gaccaucccugaaggcc

SEQ ID NO: 3334917 - RNA, 16 nt, Human
gaccauucuccaccug

SEQ ID NO: 3334918 - RNA, 14 nt, Human
gaccaucccugaag

SEQ ID NO: 3334919 - RNA, 15 nt, Human
gaccaucccugaagg

SEQ ID NO: 3334920 - RNA, 13 nt, Human
gacgcugugcugc

SEQ ID NO: 3334921 - RNA, 12 nt, Human
gacgcugugcug

SEQ ID NO: 3334922 - RNA, 17 nt, Human
gagaagcggcuggcagc

SEQ ID NO: 3334923 - RNA, 16 nt, Human
gagaagcggcuggcag

SEQ ID NO: 3334924 - RNA, 14 nt, Human
gacucaaugcacug

SEQ ID NO: 3334925 - RNA, 17 nt, Human
gacucaaugcacugaca

SEQ ID NO: 3334926 - RNA, 22 nt, Human
gacuguacaaaguagaagucuu

SEQ ID NO: 3334927 - RNA, 16 nt, Human
gacuguuuucucuuga

SEQ ID NO: 3334928 - RNA, 18 nt, Human
gacuguuuucucuugaga

SEQ ID NO: 3334929 - RNA, 14 nt, Human
gacuuuggaaagac

SEQ ID NO: 3334930 - RNA, 14 nt, Human
gacuuuggaaagag

SEQ ID NO: 3334931 - RNA, 20 nt, Human
gacuuuuccaacccucauca

SEQ ID NO: 3334932 - RNA, 21 nt, Human
gacuuuucuguccgagcuuug

SEQ ID NO: 3334933 - RNA, 18 nt, Human
gagugagacucugucuca

SEQ ID NO: 3334934 - RNA, 14 nt, Human
gagugagacucugu

SEQ ID NO: 3334935 - RNA, 18 nt, Human
gagugcagugagccgaga

SEQ ID NO: 3334936 - RNA, 13 nt, Human
gagugcagugagc

SEQ ID NO: 3334937 - RNA, 22 nt, Human
gaguugauacuacaguuuguua

SEQ ID NO: 3334938 - RNA, 21 nt, Human
gaguugauagcacagacccug

SEQ ID NO: 3334939 - RNA, 19 nt, Human
gaguugauacuacaguuug

SEQ ID NO: 3334940 - RNA, 14 nt, Human
gagucacuggaaca

SEQ ID NO: 3334941 - RNA, 21 nt, Human
gagucacuggaacacuaauga

SEQ ID NO: 3334942 - RNA, 17 nt, Human
gaggugggauccuccag

SEQ ID NO: 3334943 - RNA, 15 nt, Human
gaggugggauccucc

SEQ ID NO: 3334944 - RNA, 16 nt, Human
gaggugggauccucca

SEQ ID NO: 3334945 - RNA, 13 nt, Human
gaggugggauccu

SEQ ID NO: 3334946 - RNA, 12 nt, Human
gagggcuccaga

SEQ ID NO: 3334947 - RNA, 13 nt, Human
gagggcuccagac

SEQ ID NO: 3334948 - RNA, 14 nt, Human
gagggcuccagaca

SEQ ID NO: 3334949 - RNA, 15 nt, Human
gagggcuccagacac

SEQ ID NO: 3334950 - RNA, 12 nt, Human
gaggggaacaga

SEQ ID NO: 3334951 - RNA, 15 nt, Human
gaggcucugcccuug

SEQ ID NO: 3334952 - RNA, 17 nt, Human
gaggcucugcccuuggu

SEQ ID NO: 3334953 - RNA, 12 nt, Human
gaggcucugccc

SEQ ID NO: 3334954 - RNA, 13 nt, Human
gaggcucugcccu

SEQ ID NO: 3334955 - RNA, 14 nt, Human
gaggcucugcccuu

SEQ ID NO: 3334956 - RNA, 20 nt, Human
gaggccagagacacaagccu

SEQ ID NO: 3334957 - RNA, 19 nt, Human
gaggccagagacacaagcc

SEQ ID NO: 3334958 - RNA, 19 nt, Human
gagcugccuguucagcucc

SEQ ID NO: 3334959 - RNA, 16 nt, Human
gagcugccuguucagc

SEQ ID NO: 3334960 - RNA, 15 nt, Human
gagcugccuguucag

SEQ ID NO: 3334961 - RNA, 17 nt, Human
gagcaucaggccaggcc

SEQ ID NO: 3334962 - RNA, 12 nt, Human
gagccuuccagg

SEQ ID NO: 3334963 - RNA, 13 nt, Human
gagccuuccaggg

SEQ ID NO: 3334964 - RNA, 20 nt, Human
gagcaucaggccaggcccuc

SEQ ID NO: 3334965 - RNA, 22 nt, Human
gagcaucaggccaggcccucug

SEQ ID NO: 3334966 - RNA, 16 nt, Human
ggccagugugacaagg

SEQ ID NO: 3334967 - RNA, 20 nt, Human
ggccagugugacaaggauug

SEQ ID NO: 3334968 - RNA, 14 nt, Human
ggccaguugguccc

SEQ ID NO: 3334969 - RNA, 17 nt, Human
ggccaguuggucccccu

SEQ ID NO: 3334970 - RNA, 19 nt, Human
ggcccuucucuccagcccc

SEQ ID NO: 3334971 - RNA, 20 nt, Human
ggcccuucucuccagccccu

SEQ ID NO: 3334972 - RNA, 21 nt, Human
ggcccuucucuccagccccug

SEQ ID NO: 3334973 - RNA, 15 nt, Human
ggcccggcuccaggc

SEQ ID NO: 3334974 - RNA, 13 nt, Human
ggcccggcuccag

SEQ ID NO: 3334975 - RNA, 23 nt, Human
ggccccugcugguucaggguugg

SEQ ID NO: 3334976 - RNA, 14 nt, Human
ggccccugcugguu

SEQ ID NO: 3334977 - RNA, 13 nt, Human
ggccccugcuggu

SEQ ID NO: 3334978 - RNA, 22 nt, Human
ggcccuucucuccagccccugg

SEQ ID NO: 3334979 - RNA, 23 nt, Human
ggcccuucucuccagccccugga

SEQ ID NO: 3334980 - RNA, 23 nt, Human
ggccucaagugauucuccugccu

SEQ ID NO: 3334981 - RNA, 22 nt, Human
ggcagccccuguucuggcagag

SEQ ID NO: 3334982 - RNA, 20 nt, Human
ggcaguggugguuuucuguu

SEQ ID NO: 3334983 - RNA, 21 nt, Human
ggcaguggugguuuucuguuc

SEQ ID NO: 3334984 - RNA, 16 nt, Human
ggagagaagagaaugc

SEQ ID NO: 3334985 - RNA, 20 nt, Human
ggcacagaaaauggaagaca

SEQ ID NO: 3334986 - RNA, 21 nt, Human
ggcacagaaaauggaagacag

SEQ ID NO: 3334987 - RNA, 19 nt, Human
ggcacagaaaauggaagac

SEQ ID NO: 3334988 - RNA, 13 nt, Human
ggcacaucagcac

SEQ ID NO: 3334989 - RNA, 20 nt, Human
ggcacucagaagacacugau

SEQ ID NO: 3334990 - RNA, 23 nt, Human
ggcacucagaagacacugauggg

SEQ ID NO: 3334991 - RNA, 11 nt, Human
ggcagccccug

SEQ ID NO: 3334992 - RNA, 23 nt, Human
ggcagccccauucugccugccca

SEQ ID NO: 3334993 - RNA, 18 nt, Human
ggcucagcggggacagcu

SEQ ID NO: 3334994 - RNA, 19 nt, Human
ggcucagcggggacagcuc

SEQ ID NO: 3334995 - RNA, 19 nt, Human
ggcucagguggggucacuc

SEQ ID NO: 3334996 - RNA, 20 nt, Human
ggcucagguggggucacucu

SEQ ID NO: 3334997 - RNA, 13 nt, Human
ggcugggagagcc

SEQ ID NO: 3334998 - RNA, 14 nt, Human
ggcugggagagccu

SEQ ID NO: 3334999 - RNA, 15 nt, Human
ggcugggagagccuu

SEQ ID NO: 3335000 - RNA, 16 nt, Human
ggcugggagagccuuc

SEQ ID NO: 3335001 - RNA, 22 nt, Human
ggcugcggaaugaaccacaucu

SEQ ID NO: 3335002 - RNA, 19 nt, Human
ggcugccaaugggagcuca

SEQ ID NO: 3335003 - RNA, 20 nt, Human
ggcugccaaugggagcucau

SEQ ID NO: 3335004 - RNA, 22 nt, Human
ggcugcaugcgggcuuccuccu

SEQ ID NO: 3335005 - RNA, 12 nt, Human
ggcucuuccagg

SEQ ID NO: 3335006 - RNA, 13 nt, Human
ggcucucaggcca

SEQ ID NO: 3335007 - RNA, 11 nt, Human
ggcucucaggc

SEQ ID NO: 3335008 - RNA, 23 nt, Human
gggacuuggaagcuccgcuuucu

SEQ ID NO: 3335009 - RNA, 18 nt, Human
gggacuuggaagcuccgc

SEQ ID NO: 3335010 - RNA, 17 nt, Human
gggacuuggaagcuccg

SEQ ID NO: 3335011 - RNA, 15 nt, Human
gggacuuggaagcuc

SEQ ID NO: 3335012 - RNA, 21 nt, Human
gggagaaccaaaaagaggcua

SEQ ID NO: 3335013 - RNA, 18 nt, Human
gggaggucaaggcugcag

SEQ ID NO: 3335014 - RNA, 15 nt, Human
gggagggagggcucc

SEQ ID NO: 3335015 - RNA, 16 nt, Human
gggagggagggcucca

SEQ ID NO: 3335016 - RNA, 15 nt, Human
gggagagccuuccag

SEQ ID NO: 3335017 - RNA, 19 nt, Human
gggagagccuuccaggggu

SEQ ID NO: 3335018 - RNA, 23 nt, Human
gggagcaggcucgggcuccccag

SEQ ID NO: 3335019 - RNA, 18 nt, Human
aaaacucuccucugcugc

SEQ ID NO: 3335020 - RNA, 13 nt, Human
aaaacaugcuaca

SEQ ID NO: 3335021 - RNA, 14 nt, Human
aaaacaugcuacac

SEQ ID NO: 3335022 - RNA, 12 nt, Human
aaaacccaagug

SEQ ID NO: 3335023 - RNA, 14 nt, Human
gggaccagagcugc

SEQ ID NO: 3335024 - RNA, 20 nt, Human
gggaccagagcugccaccug

SEQ ID NO: 3335025 - RNA, 21 nt, Human
ggcuuccuccugguguggaag

SEQ ID NO: 3335026 - RNA, 18 nt, Human
gggaagaagcucucuccu

SEQ ID NO: 3335027 - RNA, 15 nt, Human
gggacagcuccuucu

SEQ ID NO: 3335028 - RNA, 13 nt, Human
gggacagcuccuu

SEQ ID NO: 3335029 - RNA, 12 nt, Human
gggacagcuccu

SEQ ID NO: 3335030 - RNA, 18 nt, Human
ggcuucauccuccucaga

SEQ ID NO: 3335031 - RNA, 22 nt, Human
ggcuucauccuccucagaucuu

SEQ ID NO: 3335032 - RNA, 16 nt, Human
ggcuuccucauaguau

SEQ ID NO: 3335033 - RNA, 18 nt, Human
ggcuguaucccaugagcc

SEQ ID NO: 3335034 - RNA, 20 nt, Human
ggcuucaguggcagcugcuu

SEQ ID NO: 3335035 - RNA, 19 nt, Human
ggcuucaguggcagcugcu

SEQ ID NO: 3335036 - RNA, 17 nt, Human
ggcuucaguggcagcug

SEQ ID NO: 3335037 - RNA, 18 nt, Human
ggcuucaguggcagcugc

SEQ ID NO: 3335038 - RNA, 14 nt, Human
ggcugggggccuca

SEQ ID NO: 3335039 - RNA, 19 nt, Human
ggcuggguucuacccaggu

SEQ ID NO: 3335040 - RNA, 21 nt, Human
ggcuggguucuacccaggugc

SEQ ID NO: 3335041 - RNA, 19 nt, Human
ggcuggguggcaccagcag

SEQ ID NO: 3335042 - RNA, 19 nt, Human
ggcugggggccucagugcc

SEQ ID NO: 3335043 - RNA, 17 nt, Human
ggcugggggccucagug

SEQ ID NO: 3335044 - RNA, 16 nt, Human
ggcugggggccucagu

SEQ ID NO: 3335045 - RNA, 15 nt, Human
ggcugggggccucag

SEQ ID NO: 3335046 - RNA, 13 nt, Human
aaagcugcugaca

SEQ ID NO: 3335047 - RNA, 15 nt, Human
aaagcuuguuaagau

SEQ ID NO: 3335048 - RNA, 15 nt, Human
aaagcucacuuuacu

SEQ ID NO: 3335049 - RNA, 22 nt, Human
aaagcugccagccgagauagcc

SEQ ID NO: 3335050 - RNA, 21 nt, Human
aaaggagagcuagcagcaggg

SEQ ID NO: 3335051 - RNA, 17 nt, Human
aaaggagagcuagcagc

SEQ ID NO: 3335052 - RNA, 17 nt, Human
aaaggagauuggaagga

SEQ ID NO: 3335053 - RNA, 22 nt, Human
aaaggaaagagggagguaagga

SEQ ID NO: 3335054 - RNA, 22 nt, Human
aaagggacuuggaagcuccgcu

SEQ ID NO: 3335055 - RNA, 13 nt, Human
ggugcaaugaccu

SEQ ID NO: 3335056 - RNA, 12 nt, Human
ggugcaaugacc

SEQ ID NO: 3335057 - RNA, 24 nt, Human
ggugauccacccaccucagccucc

SEQ ID NO: 3335058 - RNA, 23 nt, Human
ggugauccacccaccucagccuc

SEQ ID NO: 3335059 - RNA, 18 nt, Human
ggugauccacccaccuca

SEQ ID NO: 3335060 - RNA, 13 nt, Human
ggucgaggcagga

SEQ ID NO: 3335061 - RNA, 13 nt, Human
ggugaacagaaca

SEQ ID NO: 3335062 - RNA, 13 nt, Human
gguggaugccugg

SEQ ID NO: 3335063 - RNA, 12 nt, Human
gguccugcugca

SEQ ID NO: 3335064 - RNA, 11 nt, Human
gguccugcugc

SEQ ID NO: 3335065 - RNA, 13 nt, Human
aaagacuguacaa

SEQ ID NO: 3335066 - RNA, 23 nt, Human
aaagacugaguacguugugcauu

SEQ ID NO: 3335067 - RNA, 17 nt, Human
aaagaugcuucucacug

SEQ ID NO: 3335068 - RNA, 14 nt, Human
aaagaugcuucuca

SEQ ID NO: 3335069 - RNA, 19 nt, Human
aaagaugcuucucacugcc

SEQ ID NO: 3335070 - RNA, 18 nt, Human
aaacuuuucaaggcuuau

SEQ ID NO: 3335071 - RNA, 22 nt, Human
aaacuugauguguuaucucuua

SEQ ID NO: 3335072 - RNA, 22 nt, Human
aaacuuuucaaggcuuauauuc

SEQ ID NO: 3335073 - RNA, 17 nt, Human
aaacuuaaucuaaaugg

SEQ ID NO: 3335074 - RNA, 18 nt, Human
aaacuuaaucuaaaugga

SEQ ID NO: 3335075 - RNA, 16 nt, Human
aaacuuaaucuaaaug

SEQ ID NO: 3335076 - RNA, 14 nt, Human
aaacuuaaucuaaa

SEQ ID NO: 3335077 - RNA, 19 nt, Human
ggguggcaccagcagccug

SEQ ID NO: 3335078 - RNA, 15 nt, Human
aaacgggcucagcaa

SEQ ID NO: 3335079 - RNA, 23 nt, Human
aaaccaagucaagugaaaaagga

SEQ ID NO: 3335080 - RNA, 13 nt, Human
gggaugagaaagg

SEQ ID NO: 3335081 - RNA, 19 nt, Human
aaaauuuagaaauauaauu

SEQ ID NO: 3335082 - RNA, 20 nt, Human
aaaauuuugauguuuuaagg

SEQ ID NO: 3335083 - RNA, 11 nt, Human
aaacacauuuu

SEQ ID NO: 3335084 - RNA, 18 nt, Human
gggggccucagugccacu

SEQ ID NO: 3335085 - RNA, 17 nt, Human
gggggccucagugccac

SEQ ID NO: 3335086 - RNA, 15 nt, Human
gggggccucagugcc

SEQ ID NO: 3335087 - RNA, 12 nt, Human
gggggccucagu

SEQ ID NO: 3335088 - RNA, 22 nt, Human
ggggaauguuugccucugccuc

SEQ ID NO: 3335089 - RNA, 18 nt, Human
ggggaauguuugccucug

SEQ ID NO: 3335090 - RNA, 16 nt, Human
ggggaccagagcugcc

SEQ ID NO: 3335091 - RNA, 15 nt, Human
ggggaccagagcugc

SEQ ID NO: 3335092 - RNA, 17 nt, Human
aaacauggccuuugcuu

SEQ ID NO: 3335093 - RNA, 16 nt, Human
aaacauggccuuugcu

SEQ ID NO: 3335094 - RNA, 17 nt, Human
guacaugaaaacacauu

SEQ ID NO: 3335095 - RNA, 18 nt, Human
guacaugaaaacacauuu

SEQ ID NO: 3335096 - RNA, 19 nt, Human
guacaugaaaacacauuuu

SEQ ID NO: 3335097 - RNA, 20 nt, Human
guacaugaaaacacauuuuu

SEQ ID NO: 3335098 - RNA, 19 nt, Human
guacauggaauaacaugua

SEQ ID NO: 3335099 - RNA, 14 nt, Human
guacaugaaaacac

SEQ ID NO: 3335100 - RNA, 15 nt, Human
guacaugaaaacaca

SEQ ID NO: 3335101 - RNA, 16 nt, Human
guacaugaaaacacau

SEQ ID NO: 3335102 - RNA, 12 nt, Human
guacccacugcu

SEQ ID NO: 3335103 - RNA, 23 nt, Human
guaccaggaaaggauuuuauaau

SEQ ID NO: 3335104 - RNA, 19 nt, Human
aaaucagccguguaaccau

SEQ ID NO: 3335105 - RNA, 12 nt, Human
aaaucagccugc

SEQ ID NO: 3335106 - RNA, 16 nt, Human
aaaucagcugcuacua

SEQ ID NO: 3335107 - RNA, 19 nt, Human
aaauauuaagaaagacuau

SEQ ID NO: 3335108 - RNA, 18 nt, Human
guacuacaguccucccau

SEQ ID NO: 3335109 - RNA, 19 nt, Human
guacuacaguccucccauc

SEQ ID NO: 3335110 - RNA, 14 nt, Human
guacccacugcucu

SEQ ID NO: 3335111 - RNA, 13 nt, Human
guacccacugcuc

SEQ ID NO: 3335112 - RNA, 13 nt, Human
guacuauguauca

SEQ ID NO: 3335113 - RNA, 17 nt, Human
guacuacaguccuccca

SEQ ID NO: 3335114 - RNA, 17 nt, Human
guacuauguaucaauga

SEQ ID NO: 3335115 - RNA, 15 nt, Human
guacuauguaucaau

SEQ ID NO: 3335116 - RNA, 16 nt, Human
guacuggagaaaaugg

SEQ ID NO: 3335117 - RNA, 23 nt, Human
guagaaauaucugaaaauguaug

SEQ ID NO: 3335118 - RNA, 21 nt, Human
guagaaauaucugaaaaugua

SEQ ID NO: 3335119 - RNA, 20 nt, Human
guagaaauaucugaaaaugu

SEQ ID NO: 3335120 - RNA, 21 nt, Human
guagaagucuuagauguauau

SEQ ID NO: 3335121 - RNA, 18 nt, Human
guagaagcccuucuaccu

SEQ ID NO: 3335122 - RNA, 12 nt, Human
guagagacaggg

SEQ ID NO: 3335123 - RNA, 11 nt, Human
guagagacagg

SEQ ID NO: 3335124 - RNA, 15 nt, Human
guagagccagggucu

SEQ ID NO: 3335125 - RNA, 10 nt, Human
guagagccag

SEQ ID NO: 3335126 - RNA, 13 nt, Human
guagagacagggu

SEQ ID NO: 3335127 - RNA, 11 nt, Human
guagagccagg

SEQ ID NO: 3335128 - RNA, 14 nt, Human
aaauauaauugaca

SEQ ID NO: 3335129 - RNA, 17 nt, Human
aaauacagauagauaua

SEQ ID NO: 3335130 - RNA, 14 nt, Human
guaauaugcacaca

SEQ ID NO: 3335131 - RNA, 16 nt, Human
guaauaugcacacauu

SEQ ID NO: 3335132 - RNA, 17 nt, Human
guaauaugcacacauuu

SEQ ID NO: 3335133 - RNA, 18 nt, Human
guaauaugcacacauuuu

SEQ ID NO: 3335134 - RNA, 22 nt, Human
guaauuugugauacaaugcugu

SEQ ID NO: 3335135 - RNA, 21 nt, Human
aaaguacuucuccacccugcu

SEQ ID NO: 3335136 - RNA, 20 nt, Human
aaaguacuucuccacccugc

SEQ ID NO: 3335137 - RNA, 19 nt, Human
aaaguacuucuccacccug

SEQ ID NO: 3335138 - RNA, 20 nt, Human
aaaguacacuguuucaaacu

SEQ ID NO: 3335139 - RNA, 23 nt, Human
gcucugcaagaauugaagcagga

SEQ ID NO: 3335140 - RNA, 17 nt, Human
gcucugaucauccacug

SEQ ID NO: 3335141 - RNA, 23 nt, Human
gcucugaucauccacugugccau

SEQ ID NO: 3335142 - RNA, 11 nt, Human
gcucugcccuu

SEQ ID NO: 3335143 - RNA, 18 nt, Human
gcuccuggcccacugcau

SEQ ID NO: 3335144 - RNA, 19 nt, Human
gcuccuggcccacugcauc

SEQ ID NO: 3335145 - RNA, 20 nt, Human
gcuccuggcccacugcaucg

SEQ ID NO: 3335146 - RNA, 14 nt, Human
gcuccuggcccacu

SEQ ID NO: 3335147 - RNA, 15 nt, Human
gcuccuggcccacug

SEQ ID NO: 3335148 - RNA, 20 nt, Human
gcuccagcucaccagcccca

SEQ ID NO: 3335149 - RNA, 18 nt, Human
gcuccagcucaccagccc

SEQ ID NO: 3335150 - RNA, 17 nt, Human
gcuccagcucaccagcc

SEQ ID NO: 3335151 - RNA, 12 nt, Human
gcuaugcauuug

SEQ ID NO: 3335152 - RNA, 21 nt, Human
gcuagugugguguuuccuggc

SEQ ID NO: 3335153 - RNA, 13 nt, Human
gcuaugcauuuga

SEQ ID NO: 3335154 - RNA, 19 nt, Human
gcuauucaguaauaacucu

SEQ ID NO: 3335155 - RNA, 16 nt, Human
gcuaggccuggccaga

SEQ ID NO: 3335156 - RNA, 23 nt, Human
gcuaggccuggccagaugcacca

SEQ ID NO: 3335157 - RNA, 17 nt, Human
gcuaggccuggccagau

SEQ ID NO: 3335158 - RNA, 20 nt, Human
gcuauucaguaauaacucua

SEQ ID NO: 3335159 - RNA, 18 nt, Human
gcuauucaguaauaacuc

SEQ ID NO: 3335160 - RNA, 14 nt, Human
gcucacugcagccu

SEQ ID NO: 3335161 - RNA, 13 nt, Human
gcucacugcagcc

SEQ ID NO: 3335162 - RNA, 12 nt, Human
gcucacugcagc

SEQ ID NO: 3335163 - RNA, 11 nt, Human
gcucacugcag

SEQ ID NO: 3335164 - RNA, 16 nt, Human
gcucacugcagccuca

SEQ ID NO: 3335165 - RNA, 15 nt, Human
gcucacugcagccuc

SEQ ID NO: 3335166 - RNA, 17 nt, Human
gcucacugcagccucaa

SEQ ID NO: 3335167 - RNA, 13 nt, Human
gcucagagagggu

SEQ ID NO: 3335168 - RNA, 14 nt, Human
gcucagagagggug

SEQ ID NO: 3335169 - RNA, 23 nt, Human
gcucagguggggucacucuggca

SEQ ID NO: 3335170 - RNA, 14 nt, Human
gcucaggugucccu

SEQ ID NO: 3335171 - RNA, 16 nt, Human
gcucaggugucccugc

SEQ ID NO: 3335172 - RNA, 13 nt, Human
gcucaggaguuug

SEQ ID NO: 3335173 - RNA, 23 nt, Human
gcuaagugauccucccaccucag

SEQ ID NO: 3335174 - RNA, 15 nt, Human
gcuaaugggacacua

SEQ ID NO: 3335175 - RNA, 13 nt, Human
gcuaaugggacac

SEQ ID NO: 3335176 - RNA, 23 nt, Human
gcgugcacacaccagagcccacc

SEQ ID NO: 3335177 - RNA, 19 nt, Human
gcgugcacacaccagagcc

SEQ ID NO: 3335178 - RNA, 18 nt, Human
gcguuucuaugacacaug

SEQ ID NO: 3335179 - RNA, 20 nt, Human
gcgggaggauguucugggac

SEQ ID NO: 3335180 - RNA, 22 nt, Human
gcgggaggauguucugggacac

SEQ ID NO: 3335181 - RNA, 21 nt, Human
gcgggaggauguucugggaca

SEQ ID NO: 3335182 - RNA, 20 nt, Human
gcgugcacacaccagagccc

SEQ ID NO: 3335183 - RNA, 20 nt, Human
gccuggccugagcugggaug

SEQ ID NO: 3335184 - RNA, 14 nt, Human
gccuggccugagcu

SEQ ID NO: 3335185 - RNA, 18 nt, Human
gccuggccugagcuggga

SEQ ID NO: 3335186 - RNA, 13 nt, Human
gccuggccugagc

SEQ ID NO: 3335187 - RNA, 15 nt, Human
gccuguugggccagg

SEQ ID NO: 3335188 - RNA, 16 nt, Human
gccuguugggccagga

SEQ ID NO: 3335189 - RNA, 18 nt, Human
gccuguugggccaggagc

SEQ ID NO: 3335190 - RNA, 20 nt, Human
gccuguugggccaggagccu

SEQ ID NO: 3335191 - RNA, 14 nt, Human
gccuguugggccag

SEQ ID NO: 3335192 - RNA, 17 nt, Human
gccugugccucugggac

SEQ ID NO: 3335193 - RNA, 16 nt, Human
gccugugccucuggga

SEQ ID NO: 3335194 - RNA, 13 nt, Human
gccuggcucaggu

SEQ ID NO: 3335195 - RNA, 18 nt, Human
gccugugccucugggacu

SEQ ID NO: 3335196 - RNA, 15 nt, Human
gcgagcccugguggc

SEQ ID NO: 3335197 - RNA, 17 nt, Human
gcgagcccugguggcag

SEQ ID NO: 3335198 - RNA, 17 nt, Human
gccuugaccauucucca

SEQ ID NO: 3335199 - RNA, 19 nt, Human
gccuugaccauucuccacc

SEQ ID NO: 3335200 - RNA, 20 nt, Human
gccuugaccauucuccaccu

SEQ ID NO: 3335201 - RNA, 16 nt, Human
gccuugaccauucucc

SEQ ID NO: 3335202 - RNA, 22 nt, Human
gcgaucuggguucacugcaacc

SEQ ID NO: 3335203 - RNA, 11 nt, Human
gcgcacacaca

SEQ ID NO: 3335204 - RNA, 16 nt, Human
gcgcacacacacacau

SEQ ID NO: 3335205 - RNA, 18 nt, Human
gcgcacacacacacauac

SEQ ID NO: 3335206 - RNA, 19 nt, Human
gcgcacacacacacauaca

SEQ ID NO: 3335207 - RNA, 20 nt, Human
gccugcccaggccccugcca

SEQ ID NO: 3335208 - RNA, 15 nt, Human
gccugcccaggcccc

SEQ ID NO: 3335209 - RNA, 12 nt, Human
gccugcccaggc

SEQ ID NO: 3335210 - RNA, 22 nt, Human
gccugcccaggccccugccacc

SEQ ID NO: 3335211 - RNA, 21 nt, Human
gccucuuaugggcuggguucu

SEQ ID NO: 3335212 - RNA, 14 nt, Human
gccucuuggguuca

SEQ ID NO: 3335213 - RNA, 14 nt, Human
gccugcccaggccc

SEQ ID NO: 3335214 - RNA, 13 nt, Human
gccugcccaggcc

SEQ ID NO: 3335215 - RNA, 22 nt, Human
gccucgaacuggcugcaaaggg

SEQ ID NO: 3335216 - RNA, 20 nt, Human
gccucgaacuggcugcaaag

SEQ ID NO: 3335217 - RNA, 17 nt, Human
gccucuuaugggcuggg

SEQ ID NO: 3335218 - RNA, 18 nt, Human
gccucuuaugggcugggu

SEQ ID NO: 3335219 - RNA, 16 nt, Human
gccucuuaugggcugg

SEQ ID NO: 3335220 - RNA, 17 nt, Human
gccucccaaagugcugg

SEQ ID NO: 3335221 - RNA, 13 nt, Human
gccuccugugugu

SEQ ID NO: 3335222 - RNA, 16 nt, Human
gccucccaaagugcug

SEQ ID NO: 3335223 - RNA, 23 nt, Human
gccuccugugugugcgccuacag

SEQ ID NO: 3335224 - RNA, 19 nt, Human
gccuccugugugugcgccu

SEQ ID NO: 3335225 - RNA, 17 nt, Human
gccucgaacuggcugca

SEQ ID NO: 3335226 - RNA, 16 nt, Human
gccccugccacccugg

SEQ ID NO: 3335227 - RNA, 17 nt, Human
gccccugccacccuggg

SEQ ID NO: 3335228 - RNA, 23 nt, Human
gcccgggcucugccucccaucac

SEQ ID NO: 3335229 - RNA, 21 nt, Human
gcccgggcucugccucccauc

SEQ ID NO: 3335230 - RNA, 20 nt, Human
gcccuuagcagggaaacagc

SEQ ID NO: 3335231 - RNA, 19 nt, Human
gcccuuagcagggaaacag

SEQ ID NO: 3335232 - RNA, 12 nt, Human
gcccugccuccu

SEQ ID NO: 3335233 - RNA, 13 nt, Human
gcccugccuccuu

SEQ ID NO: 3335234 - RNA, 22 nt, Human
gcccuuagcagggaaacagcua

SEQ ID NO: 3335235 - RNA, 20 nt, Human
gccgcagcccugcagagggc

SEQ ID NO: 3335236 - RNA, 19 nt, Human
gccgcagcccugcagaggg

SEQ ID NO: 3335237 - RNA, 15 nt, Human
gcccugcccaccugg

SEQ ID NO: 3335238 - RNA, 11 nt, Human
gcccugccucc

SEQ ID NO: 3335239 - RNA, 17 nt, Human
gcccugcccaccuggcc

SEQ ID NO: 3335240 - RNA, 20 nt, Human
gcccugcccaccuggccucu

SEQ ID NO: 3335241 - RNA, 21 nt, Human
gcccugcccaccuggccucug

SEQ ID NO: 3335242 - RNA, 22 nt, Human
gcccugcccaccuggccucugc

SEQ ID NO: 3335243 - RNA, 18 nt, Human
gcccugcagagggcacag

SEQ ID NO: 3335244 - RNA, 16 nt, Human
gcccugcagagggcac

SEQ ID NO: 3335245 - RNA, 23 nt, Human
gccuagcauacguacacauuuua

SEQ ID NO: 3335246 - RNA, 19 nt, Human
gccuagcauacguacacau

SEQ ID NO: 3335247 - RNA, 21 nt, Human
gccuagcauacguacacauuu

SEQ ID NO: 3335248 - RNA, 22 nt, Human
gccuagcauacguacacauuuu

SEQ ID NO: 3335249 - RNA, 20 nt, Human
gccuagcauacguacacauu

SEQ ID NO: 3335250 - RNA, 15 nt, Human
gccuaggugacagag

SEQ ID NO: 3335251 - RNA, 14 nt, Human
gccuaggugacaga

SEQ ID NO: 3335252 - RNA, 13 nt, Human
gccuaggugacag

SEQ ID NO: 3335253 - RNA, 20 nt, Human
gccuaggugacagagugaga

SEQ ID NO: 3335254 - RNA, 20 nt, Human
gcuggccuggccccucaggg

SEQ ID NO: 3335255 - RNA, 22 nt, Human
gcuggagugcagugagccgaga

SEQ ID NO: 3335256 - RNA, 17 nt, Human
gcuggagugcagugagc

SEQ ID NO: 3335257 - RNA, 18 nt, Human
gcuggagugcagugagcc

SEQ ID NO: 3335258 - RNA, 20 nt, Human
gcuggcgugcaguggugcga

SEQ ID NO: 3335259 - RNA, 19 nt, Human
gcuggccuggccccucagg

SEQ ID NO: 3335260 - RNA, 15 nt, Human
gcucugguccauaga

SEQ ID NO: 3335261 - RNA, 16 nt, Human
gcucugguccauagag

SEQ ID NO: 3335262 - RNA, 12 nt, Human
gcugcugaaggc

SEQ ID NO: 3335263 - RNA, 13 nt, Human
gcugcugaaggcu

SEQ ID NO: 3335264 - RNA, 14 nt, Human
gcugcugaaggcuc

SEQ ID NO: 3335265 - RNA, 15 nt, Human
gcugcugaaggcucg

SEQ ID NO: 3335266 - RNA, 13 nt, Human
gcugcuggcuggu

SEQ ID NO: 3335267 - RNA, 16 nt, Human
gcuggcuguuggcugg

SEQ ID NO: 3335268 - RNA, 15 nt, Human
gcuggcuguuggcug

SEQ ID NO: 3335269 - RNA, 23 nt, Human
gcugggguggggaccucaggccu

SEQ ID NO: 3335270 - RNA, 21 nt, Human
gcuggguggcaccagcagccu

SEQ ID NO: 3335271 - RNA, 22 nt, Human
gcuggguggcaccagcagccug

SEQ ID NO: 3335272 - RNA, 23 nt, Human
gcuggguggcaccagcagccugg

SEQ ID NO: 3335273 - RNA, 18 nt, Human
gcuucacggaagagccuu

SEQ ID NO: 3335274 - RNA, 12 nt, Human
gcuucagccucc

SEQ ID NO: 3335275 - RNA, 17 nt, Human
gcuucacggaagagccu

SEQ ID NO: 3335276 - RNA, 15 nt, Human
gcuucacggaagagc

SEQ ID NO: 3335277 - RNA, 20 nt, Human
gcuucaaggauccugagcca

SEQ ID NO: 3335278 - RNA, 21 nt, Human
gcuucaaggauccugagccag

SEQ ID NO: 3335279 - RNA, 19 nt, Human
gcuucaaggauccugagcc

SEQ ID NO: 3335280 - RNA, 18 nt, Human
gcuucaaggauccugagc

SEQ ID NO: 3335281 - RNA, 22 nt, Human
gcuugaccuuuaagagaaauga

SEQ ID NO: 3335282 - RNA, 14 nt, Human
gcuugagcucagga

SEQ ID NO: 3335283 - RNA, 20 nt, Human
gcuuguaaauagcucaggug

SEQ ID NO: 3335284 - RNA, 23 nt, Human
gcuucuucagagacuccugcagg

SEQ ID NO: 3335285 - RNA, 22 nt, Human
gcuuccucauaguaugguggcu

SEQ ID NO: 3335286 - RNA, 13 nt, Human
ggaagacuuugga

SEQ ID NO: 3335287 - RNA, 17 nt, Human
ggaagacuuuggaaaga

SEQ ID NO: 3335288 - RNA, 12 nt, Human
ggaagacuuugg

SEQ ID NO: 3335289 - RNA, 13 nt, Human
ggaagacagcucu

SEQ ID NO: 3335290 - RNA, 14 nt, Human
ggaagacagcucuu

SEQ ID NO: 3335291 - RNA, 22 nt, Human
ggaagacaaugugaaaagaaaa

SEQ ID NO: 3335292 - RNA, 13 nt, Human
ggaagagaaaaaa

SEQ ID NO: 3335293 - RNA, 18 nt, Human
ggaagacuuuggaaagag

SEQ ID NO: 3335294 - RNA, 15 nt, Human
ggaagagaaaaaaua

SEQ ID NO: 3335295 - RNA, 15 nt, Human
ggaacacucugagac

SEQ ID NO: 3335296 - RNA, 16 nt, Human
ggaacacucugagacu

SEQ ID NO: 3335297 - RNA, 12 nt, Human
ggaacacucuga

SEQ ID NO: 3335298 - RNA, 14 nt, Human
ggaacacucugaga

SEQ ID NO: 3335299 - RNA, 19 nt, Human
ggaacacuccuucacagau

SEQ ID NO: 3335300 - RNA, 22 nt, Human
ggacaaggaugaucuaggaaga

SEQ ID NO: 3335301 - RNA, 23 nt, Human
ggacaaggaugaucuaggaagac

SEQ ID NO: 3335302 - RNA, 13 nt, Human
ggacaagagcagg

SEQ ID NO: 3335303 - RNA, 18 nt, Human
ggaauaacauguaauuaa

SEQ ID NO: 3335304 - RNA, 16 nt, Human
ggaauccagacccggc

SEQ ID NO: 3335305 - RNA, 18 nt, Human
ggacacagcucuucucca

SEQ ID NO: 3335306 - RNA, 15 nt, Human
ggacacagcucuucu

SEQ ID NO: 3335307 - RNA, 14 nt, Human
ggacacagcucuuc

SEQ ID NO: 3335308 - RNA, 17 nt, Human
ggacagcuccuucuguc

SEQ ID NO: 3335309 - RNA, 20 nt, Human
ggacagcuccuucuguccua

SEQ ID NO: 3335310 - RNA, 19 nt, Human
ggacagcuccuucuguccu

SEQ ID NO: 3335311 - RNA, 17 nt, Human
ggacacuaaccacgcug

SEQ ID NO: 3335312 - RNA, 16 nt, Human
ggaaggaaacccagcu

SEQ ID NO: 3335313 - RNA, 23 nt, Human
ggaagcucagggccuggcucagg

SEQ ID NO: 3335314 - RNA, 11 nt, Human
ggaagcuccgc

SEQ ID NO: 3335315 - RNA, 22 nt, Human
ggaagcucagggccuggcucag

SEQ ID NO: 3335316 - RNA, 19 nt, Human
ggaaggaaacccagcucug

SEQ ID NO: 3335317 - RNA, 20 nt, Human
ggaaggaaacccagcucugg

SEQ ID NO: 3335318 - RNA, 24 nt, Human
ggacuaacuugucuuuggacccug

SEQ ID NO: 3335319 - RNA, 14 nt, Human
ggacuacaggugug

SEQ ID NO: 3335320 - RNA, 15 nt, Human
ggacucaaugcacug

SEQ ID NO: 3335321 - RNA, 20 nt, Human
ggacuaacuugucuuuggac

SEQ ID NO: 3335322 - RNA, 16 nt, Human
ggacucaaugcacuga

SEQ ID NO: 3335323 - RNA, 14 nt, Human
ggacuuggaagcuc

SEQ ID NO: 3335324 - RNA, 16 nt, Human
ggagaaaggaagggcu

SEQ ID NO: 3335325 - RNA, 14 nt, Human
ggaccucaggccug

SEQ ID NO: 3335326 - RNA, 15 nt, Human
ggaccucaggccugg

SEQ ID NO: 3335327 - RNA, 20 nt, Human
ggacguguuaugacuccaga

SEQ ID NO: 3335328 - RNA, 13 nt, Human
ggaccucaggccu

SEQ ID NO: 3335329 - RNA, 12 nt, Human
ggaccucaggcc

SEQ ID NO: 3335330 - RNA, 12 nt, Human
ggacccugaggc

SEQ ID NO: 3335331 - RNA, 19 nt, Human
ggacccugaggcccagagg

SEQ ID NO: 3335332 - RNA, 11 nt, Human
ggacccugagg

SEQ ID NO: 3335333 - RNA, 12 nt, Human
ggacccccugaa

SEQ ID NO: 3335334 - RNA, 18 nt, Human
ccaccaucaugucuggcu

SEQ ID NO: 3335335 - RNA, 18 nt, Human
ccaccaucaccagacagg

SEQ ID NO: 3335336 - RNA, 19 nt, Human
ccaccaucaugucuggcua

SEQ ID NO: 3335337 - RNA, 16 nt, Human
ccaccuuggcugcagg

SEQ ID NO: 3335338 - RNA, 15 nt, Human
ccaccuuggcugcag

SEQ ID NO: 3335339 - RNA, 14 nt, Human
ccaccuuggcugca

SEQ ID NO: 3335340 - RNA, 12 nt, Human
ccaccuuggcug

SEQ ID NO: 3335341 - RNA, 19 nt, Human
ccaccuuggcugcagggag

SEQ ID NO: 3335342 - RNA, 18 nt, Human
ccaccuuggcugcaggga

SEQ ID NO: 3335343 - RNA, 16 nt, Human
ccaccuuggcucaagu

SEQ ID NO: 3335344 - RNA, 18 nt, Human
ccacgcuggaccuugaac

SEQ ID NO: 3335345 - RNA, 22 nt, Human
ccacagagaaaguacuucucca

SEQ ID NO: 3335346 - RNA, 13 nt, Human
ccaagaagcccag

SEQ ID NO: 3335347 - RNA, 13 nt, Human
ccaacgucugugc

SEQ ID NO: 3335348 - RNA, 15 nt, Human
ccaacgucugugcca

SEQ ID NO: 3335349 - RNA, 22 nt, Human
ccaaauggaaaugggcagagca

SEQ ID NO: 3335350 - RNA, 15 nt, Human
ccaaggccaaaggaa

SEQ ID NO: 3335351 - RNA, 14 nt, Human
ccaagaagcccagg

SEQ ID NO: 3335352 - RNA, 19 nt, Human
ccaagcuggucccacucag

SEQ ID NO: 3335353 - RNA, 12 nt, Human
ccaagcuggucc

SEQ ID NO: 3335354 - RNA, 19 nt, Human
cauuuuuuaaaugcaccug

SEQ ID NO: 3335355 - RNA, 15 nt, Human
cauuuuuuaaaugca

SEQ ID NO: 3335356 - RNA, 16 nt, Human
cauuuuuuaaaugcac

SEQ ID NO: 3335357 - RNA, 14 nt, Human
cauuuauucugcuc

SEQ ID NO: 3335358 - RNA, 17 nt, Human
cauuugucacacacuuu

SEQ ID NO: 3335359 - RNA, 15 nt, Human
cauuuggauuggaug

SEQ ID NO: 3335360 - RNA, 22 nt, Human
caugauuaaccacuucagcuga

SEQ ID NO: 3335361 - RNA, 23 nt, Human
caugauuaaccacuucagcugac

SEQ ID NO: 3335362 - RNA, 12 nt, Human
caugcugcccug

SEQ ID NO: 3335363 - RNA, 13 nt, Human
caugcugcccugu

SEQ ID NO: 3335364 - RNA, 13 nt, Human
caugcuccuggcc

SEQ ID NO: 3335365 - RNA, 16 nt, Human
caugcacgugugugca

SEQ ID NO: 3335366 - RNA, 15 nt, Human
caugaaguaauaugc

SEQ ID NO: 3335367 - RNA, 19 nt, Human
caugaaguaauaugcacac

SEQ ID NO: 3335368 - RNA, 22 nt, Human
caugaaguaauaugcacacauu

SEQ ID NO: 3335369 - RNA, 23 nt, Human
caugaaguaauaugcacacauuu

SEQ ID NO: 3335370 - RNA, 21 nt, Human
caugacacgaauauugcugau

SEQ ID NO: 3335371 - RNA, 23 nt, Human
caugacacgaauauugcugaugg

SEQ ID NO: 3335372 - RNA, 14 nt, Human
caugcugcccugug

SEQ ID NO: 3335373 - RNA, 12 nt, Human
cauuccuguucc

SEQ ID NO: 3335374 - RNA, 19 nt, Human
cauguccaagaagcccagg

SEQ ID NO: 3335375 - RNA, 20 nt, Human
cauguccaagaagcccagga

SEQ ID NO: 3335376 - RNA, 18 nt, Human
cauguccaagaagcccag

SEQ ID NO: 3335377 - RNA, 16 nt, Human
cauguccaagaagccc

SEQ ID NO: 3335378 - RNA, 12 nt, Human
cauguuggccag

SEQ ID NO: 3335379 - RNA, 22 nt, Human
cauuaggugugacugaauuucu

SEQ ID NO: 3335380 - RNA, 23 nt, Human
cauuaucuagauacuguaucaug

SEQ ID NO: 3335381 - RNA, 18 nt, Human
cauuaucuagauacugua

SEQ ID NO: 3335382 - RNA, 20 nt, Human
cauauucaggaagcucaggg

SEQ ID NO: 3335383 - RNA, 14 nt, Human
cauauucaggaagc

SEQ ID NO: 3335384 - RNA, 15 nt, Human
cauauucaggaagcu

SEQ ID NO: 3335385 - RNA, 22 nt, Human
cauaugccugggcagaaggaag

SEQ ID NO: 3335386 - RNA, 13 nt, Human
cauaugccugggc

SEQ ID NO: 3335387 - RNA, 15 nt, Human
cauaugccugggcag

SEQ ID NO: 3335388 - RNA, 20 nt, Human
cauaugccugggcagaagga

SEQ ID NO: 3335389 - RNA, 22 nt, Human
cauagcagagaaugaaagggcc

SEQ ID NO: 3335390 - RNA, 19 nt, Human
cauagcagagaaugaaagg

SEQ ID NO: 3335391 - RNA, 13 nt, Human
cauacacgaaaga

SEQ ID NO: 3335392 - RNA, 17 nt, Human
cauacacgaaagagaga

SEQ ID NO: 3335393 - RNA, 19 nt, Human
caucccauaugccugggca

SEQ ID NO: 3335394 - RNA, 14 nt, Human
cauccccuguagag

SEQ ID NO: 3335395 - RNA, 15 nt, Human
caucaggccaggccc

SEQ ID NO: 3335396 - RNA, 14 nt, Human
caucaggccaggcc

SEQ ID NO: 3335397 - RNA, 16 nt, Human
caucaggccaggcccu

SEQ ID NO: 3335398 - RNA, 19 nt, Human
caucaggccaggcccucug

SEQ ID NO: 3335399 - RNA, 17 nt, Human
caucccagccccaauga

SEQ ID NO: 3335400 - RNA, 18 nt, Human
cagguuuaagcuguuacu

SEQ ID NO: 3335401 - RNA, 14 nt, Human
cagguuuaagcugu

SEQ ID NO: 3335402 - RNA, 16 nt, Human
cagguuuaagcuguua

SEQ ID NO: 3335403 - RNA, 22 nt, Human
cagucaccccggccaccugcgg

SEQ ID NO: 3335404 - RNA, 20 nt, Human
cagucaccccggccaccugc

SEQ ID NO: 3335405 - RNA, 19 nt, Human
cagucaccccggccaccug

SEQ ID NO: 3335406 - RNA, 22 nt, Human
caggugcacaagcuccaagcuc

SEQ ID NO: 3335407 - RNA, 17 nt, Human
caggugauccacccacc

SEQ ID NO: 3335408 - RNA, 16 nt, Human
caggugauccacccac

SEQ ID NO: 3335409 - RNA, 12 nt, Human
caggguuggccc

SEQ ID NO: 3335410 - RNA, 14 nt, Human
cagguugguggggg

SEQ ID NO: 3335411 - RNA, 18 nt, Human
caggugcuaggaacacuc

SEQ ID NO: 3335412 - RNA, 20 nt, Human
caggugcuaggaacacuccu

SEQ ID NO: 3335413 - RNA, 14 nt, Human
caggugcgaaagga

SEQ ID NO: 3335414 - RNA, 18 nt, Human
cagggucucacucugucg

SEQ ID NO: 3335415 - RNA, 17 nt, Human
cagggucucacucuguc

SEQ ID NO: 3335416 - RNA, 21 nt, Human
cagggucucacucugucgccc

SEQ ID NO: 3335417 - RNA, 22 nt, Human
cagugcaugcugucccuuacgu

SEQ ID NO: 3335418 - RNA, 23 nt, Human
cagugcaugcugucccuuacgug

SEQ ID NO: 3335419 - RNA, 19 nt, Human
cagugcaugcugucccuua

SEQ ID NO: 3335420 - RNA, 19 nt, Human
cagucugauucccaagcuc

SEQ ID NO: 3335421 - RNA, 11 nt, Human
cagugggagcu

SEQ ID NO: 3335422 - RNA, 15 nt, Human
cagugccaaaaacaa

SEQ ID NO: 3335423 - RNA, 14 nt, Human
caggaggccagccu

SEQ ID NO: 3335424 - RNA, 15 nt, Human
caggaggccagccuu

SEQ ID NO: 3335425 - RNA, 16 nt, Human
caggaggccagccuug

SEQ ID NO: 3335426 - RNA, 18 nt, Human
caggcacccaccaucaug

SEQ ID NO: 3335427 - RNA, 23 nt, Human
caggcacccaccaucaugucugg

SEQ ID NO: 3335428 - RNA, 22 nt, Human
caggcacccaccaucaugucug

SEQ ID NO: 3335429 - RNA, 17 nt, Human
caggaggccagccuuga

SEQ ID NO: 3335430 - RNA, 21 nt, Human
caggccagagggagugacaga

SEQ ID NO: 3335431 - RNA, 19 nt, Human
caggccagagggagugaca

SEQ ID NO: 3335432 - RNA, 16 nt, Human
caggccagagggagug

SEQ ID NO: 3335433 - RNA, 18 nt, Human
cagggaggugaccccagg

SEQ ID NO: 3335434 - RNA, 22 nt, Human
cagggaguccgaaagggacuug

SEQ ID NO: 3335435 - RNA, 15 nt, Human
caggcugggcuucag

SEQ ID NO: 3335436 - RNA, 16 nt, Human
caggcugggcuucagu

SEQ ID NO: 3335437 - RNA, 17 nt, Human
caggcugggcuucagug

SEQ ID NO: 3335438 - RNA, 16 nt, Human
cagagcugccaccugc

SEQ ID NO: 3335439 - RNA, 18 nt, Human
cagagcugccaccugccu

SEQ ID NO: 3335440 - RNA, 20 nt, Human
cagaaguuugagaucagccu

SEQ ID NO: 3335441 - RNA, 23 nt, Human
cagaaguuucugccgcagcccug

SEQ ID NO: 3335442 - RNA, 22 nt, Human
cagaaguuugagaucagccugg

SEQ ID NO: 3335443 - RNA, 19 nt, Human
cagagggccugcaagggag

SEQ ID NO: 3335444 - RNA, 22 nt, Human
cagagggccugcaagggaguga

SEQ ID NO: 3335445 - RNA, 18 nt, Human
cagaggggguggccuccc

SEQ ID NO: 3335446 - RNA, 17 nt, Human
cagaggggguggccucc

SEQ ID NO: 3335447 - RNA, 19 nt, Human
cagaggggguggccuccca

SEQ ID NO: 3335448 - RNA, 20 nt, Human
cagaggggguggccucccaa

SEQ ID NO: 3335449 - RNA, 20 nt, Human
cagagucagaaguuucugcc

SEQ ID NO: 3335450 - RNA, 12 nt, Human
cagccaggccac

SEQ ID NO: 3335451 - RNA, 13 nt, Human
cagccaggccaca

SEQ ID NO: 3335452 - RNA, 19 nt, Human
cagcauauucaggaagcuc

SEQ ID NO: 3335453 - RNA, 22 nt, Human
cagcauauucaggaagcucagg

SEQ ID NO: 3335454 - RNA, 23 nt, Human
cagcauauucaggaagcucaggg

SEQ ID NO: 3335455 - RNA, 15 nt, Human
cagcuccagcucacc

SEQ ID NO: 3335456 - RNA, 14 nt, Human
cagcuccagcucac

SEQ ID NO: 3335457 - RNA, 13 nt, Human
cagcuccagcuca

SEQ ID NO: 3335458 - RNA, 20 nt, Human
cagcuccagcucaccagccc

SEQ ID NO: 3335459 - RNA, 18 nt, Human
cagcuccagcucaccagc

SEQ ID NO: 3335460 - RNA, 17 nt, Human
cagcuccagcucaccag

SEQ ID NO: 3335461 - RNA, 16 nt, Human
cagcuccagcucacca

SEQ ID NO: 3335462 - RNA, 22 nt, Human
cagcuccagcucaccagcccca

SEQ ID NO: 3335463 - RNA, 14 nt, Human
caggaaaggcucca

SEQ ID NO: 3335464 - RNA, 15 nt, Human
caggaaaggcuccag

SEQ ID NO: 3335465 - RNA, 18 nt, Human
cagcugugcucuggacag

SEQ ID NO: 3335466 - RNA, 15 nt, Human
cagcuucauuuccug

SEQ ID NO: 3335467 - RNA, 18 nt, Human
cagcuucauuuccugugu

SEQ ID NO: 3335468 - RNA, 12 nt, Human
cagccccuggau

SEQ ID NO: 3335469 - RNA, 13 nt, Human
cagccccuggaug

SEQ ID NO: 3335470 - RNA, 14 nt, Human
cagccccuggaugc

SEQ ID NO: 3335471 - RNA, 17 nt, Human
cagccccuggaugcagc

SEQ ID NO: 3335472 - RNA, 18 nt, Human
cagccccuggaugcagcc

SEQ ID NO: 3335473 - RNA, 19 nt, Human
cagccccuggaugcagccu

SEQ ID NO: 3335474 - RNA, 21 nt, Human
cagccccuggaugcagccuca

SEQ ID NO: 3335475 - RNA, 21 nt, Human
cagcccuuagcagggaaacag

SEQ ID NO: 3335476 - RNA, 16 nt, Human
cagcccuuagcaggga

SEQ ID NO: 3335477 - RNA, 15 nt, Human
cagcccuuagcaggg

SEQ ID NO: 3335478 - RNA, 20 nt, Human
cagccgagauagccaaggcc

SEQ ID NO: 3335479 - RNA, 21 nt, Human
cagccgagauagccaaggcca

SEQ ID NO: 3335480 - RNA, 16 nt, Human
cagcggggacagcucc

SEQ ID NO: 3335481 - RNA, 14 nt, Human
cagcggggacagcu

SEQ ID NO: 3335482 - RNA, 15 nt, Human
cagcggggacagcuc

SEQ ID NO: 3335483 - RNA, 17 nt, Human
auucuccuuguguuacu

SEQ ID NO: 3335484 - RNA, 18 nt, Human
auucuccuuguguuacua

SEQ ID NO: 3335485 - RNA, 19 nt, Human
auucuccuuguguuacuaa

SEQ ID NO: 3335486 - RNA, 21 nt, Human
auucuccuuguguuacuaagu

SEQ ID NO: 3335487 - RNA, 22 nt, Human
auucuccuuguguuacuaaguu

SEQ ID NO: 3335488 - RNA, 17 nt, Human
auucucuaguuugauua

SEQ ID NO: 3335489 - RNA, 18 nt, Human
auucucuaguuugauuaa

SEQ ID NO: 3335490 - RNA, 22 nt, Human
auucuucuguacgucugacagg

SEQ ID NO: 3335491 - RNA, 20 nt, Human
auucuucugcuucagccucc

SEQ ID NO: 3335492 - RNA, 19 nt, Human
auucuucugcuucagccuc

SEQ ID NO: 3335493 - RNA, 15 nt, Human
auucuugcaaaguau

SEQ ID NO: 3335494 - RNA, 16 nt, Human
auucuugcaaaguauc

SEQ ID NO: 3335495 - RNA, 14 nt, Human
auucuugcaaagua

SEQ ID NO: 3335496 - RNA, 14 nt, Human
auucuucugcuuca

SEQ ID NO: 3335497 - RNA, 18 nt, Human
auucaacagguuuuccug

SEQ ID NO: 3335498 - RNA, 14 nt, Human
auucaaccauggac

SEQ ID NO: 3335499 - RNA, 17 nt, Human
auucaaccauggacuuu

SEQ ID NO: 3335500 - RNA, 17 nt, Human
auuaaaugcccagcccc

SEQ ID NO: 3335501 - RNA, 19 nt, Human
auuaaaugcccagccccuu

SEQ ID NO: 3335502 - RNA, 23 nt, Human
auuaugcaugaaguaauaugcac

SEQ ID NO: 3335503 - RNA, 18 nt, Human
auugcuugagcucaggag

SEQ ID NO: 3335504 - RNA, 14 nt, Human
auuucacucuccuu

SEQ ID NO: 3335505 - RNA, 20 nt, Human
auuuaaugaaagacuguaca

SEQ ID NO: 3335506 - RNA, 15 nt, Human
auuuaaugaaagacu

SEQ ID NO: 3335507 - RNA, 16 nt, Human
auuuaaugaaagacug

SEQ ID NO: 3335508 - RNA, 20 nt, Human
auuuuuuuuuccuucagugc

SEQ ID NO: 3335509 - RNA, 22 nt, Human
auuuuuuuuuccuucagugccu

SEQ ID NO: 3335510 - RNA, 17 nt, Human
auuuuuuuuuccuucag

SEQ ID NO: 3335511 - RNA, 19 nt, Human
caaaagcugggcagguugg

SEQ ID NO: 3335512 - RNA, 18 nt, Human
auuuuuuuuuccuucagu

SEQ ID NO: 3335513 - RNA, 16 nt, Human
auuuuuuugagacaga

SEQ ID NO: 3335514 - RNA, 16 nt, Human
auuuuuaagugcugca

SEQ ID NO: 3335515 - RNA, 18 nt, Human
auuuuuaagugcugcauu

SEQ ID NO: 3335516 - RNA, 19 nt, Human
auuuuuaagugcugcauuu

SEQ ID NO: 3335517 - RNA, 13 nt, Human
auuuuuaagugcu

SEQ ID NO: 3335518 - RNA, 14 nt, Human
auuuuuagacagag

SEQ ID NO: 3335519 - RNA, 23 nt, Human
caaaugcuguaacuuucugaaau

SEQ ID NO: 3335520 - RNA, 21 nt, Human
caaaucugcuuuuuaaagaau

SEQ ID NO: 3335521 - RNA, 19 nt, Human
caaaguaucccuacuguaa

SEQ ID NO: 3335522 - RNA, 21 nt, Human
caaaguaucccuacuguaauu

SEQ ID NO: 3335523 - RNA, 22 nt, Human
caaaguagaagucuuagaugua

SEQ ID NO: 3335524 - RNA, 14 nt, Human
caaagauauuuugc

SEQ ID NO: 3335525 - RNA, 16 nt, Human
caaagauauuuugcuu

SEQ ID NO: 3335526 - RNA, 18 nt, Human
caaagcagugcaugcugu

SEQ ID NO: 3335527 - RNA, 21 nt, Human
caaagcagugcaugcuguccc

SEQ ID NO: 3335528 - RNA, 22 nt, Human
caaagcagugcaugcugucccu

SEQ ID NO: 3335529 - RNA, 17 nt, Human
caacucaccccagcccc

SEQ ID NO: 3335530 - RNA, 18 nt, Human
caacucaccccagcccca

SEQ ID NO: 3335531 - RNA, 15 nt, Human
caaccauggacuuua

SEQ ID NO: 3335532 - RNA, 14 nt, Human
caaccauggacuuu

SEQ ID NO: 3335533 - RNA, 13 nt, Human
caaccauggacuu

SEQ ID NO: 3335534 - RNA, 14 nt, Human
caacucuccuccag

SEQ ID NO: 3335535 - RNA, 22 nt, Human
caagaauugaagcaggacuaaa

SEQ ID NO: 3335536 - RNA, 17 nt, Human
caagaccacguuucuaa

SEQ ID NO: 3335537 - RNA, 18 nt, Human
caagaccacguuucuaaa

SEQ ID NO: 3335538 - RNA, 16 nt, Human
caagaccacguuucua

SEQ ID NO: 3335539 - RNA, 12 nt, Human
cacacauuuuuu

SEQ ID NO: 3335540 - RNA, 16 nt, Human
cacacauuuuuuaaau

SEQ ID NO: 3335541 - RNA, 19 nt, Human
cacacauuuuuuaaaugca

SEQ ID NO: 3335542 - RNA, 20 nt, Human
cacacauuuuuuaaaugcac

SEQ ID NO: 3335543 - RNA, 10 nt, Human
cacacauuuu

SEQ ID NO: 3335544 - RNA, 11 nt, Human
cacacauuuuu

SEQ ID NO: 3335545 - RNA, 10 nt, Human
cacagcucuu

SEQ ID NO: 3335546 - RNA, 18 nt, Human
cacagcucuguccuggga

SEQ ID NO: 3335547 - RNA, 16 nt, Human
cacagcucuguccugg

SEQ ID NO: 3335548 - RNA, 15 nt, Human
cacagcucuguccug

SEQ ID NO: 3335549 - RNA, 15 nt, Human
cacagcucuucucca

SEQ ID NO: 3335550 - RNA, 14 nt, Human
cacagcucuucucc

SEQ ID NO: 3335551 - RNA, 17 nt, Human
cacagcucuucuccagg

SEQ ID NO: 3335552 - RNA, 14 nt, Human
cacagcucuguccu

SEQ ID NO: 3335553 - RNA, 11 nt, Human
cacagcucugu

SEQ ID NO: 3335554 - RNA, 16 nt, Human
cacagacccugcccug

SEQ ID NO: 3335555 - RNA, 17 nt, Human
cacagacccugcccugu

SEQ ID NO: 3335556 - RNA, 13 nt, Human
cacagacccugcc

SEQ ID NO: 3335557 - RNA, 14 nt, Human
cacagacccugccc

SEQ ID NO: 3335558 - RNA, 14 nt, Human
caccaacgucugug

SEQ ID NO: 3335559 - RNA, 17 nt, Human
cacauuuuauuuuauua

SEQ ID NO: 3335560 - RNA, 19 nt, Human
cacauuuuauuuuauuaug

SEQ ID NO: 3335561 - RNA, 20 nt, Human
cacauuuuauuuuauuaugc

SEQ ID NO: 3335562 - RNA, 17 nt, Human
cacccaccucagccucc

SEQ ID NO: 3335563 - RNA, 13 nt, Human
caccagccccagu

SEQ ID NO: 3335564 - RNA, 18 nt, Human
cacccaccucagccuccc

SEQ ID NO: 3335565 - RNA, 20 nt, Human
cacaagcuccaagcucccag

SEQ ID NO: 3335566 - RNA, 13 nt, Human
caaugcuggcugu

SEQ ID NO: 3335567 - RNA, 20 nt, Human
caaugcuggcuguuggcugg

SEQ ID NO: 3335568 - RNA, 12 nt, Human
caaugcuggcug

SEQ ID NO: 3335569 - RNA, 16 nt, Human
caauggcagccuuggc

SEQ ID NO: 3335570 - RNA, 17 nt, Human
cacaagagcccaggccu

SEQ ID NO: 3335571 - RNA, 20 nt, Human
cacaagagcccaggccuccu

SEQ ID NO: 3335572 - RNA, 18 nt, Human
cacaagcuccaagcuccc

SEQ ID NO: 3335573 - RNA, 19 nt, Human
cacaagcuccaagcuccca

SEQ ID NO: 3335574 - RNA, 18 nt, Human
cacaagagcccaggccuc

SEQ ID NO: 3335575 - RNA, 19 nt, Human
cacaagagcccaggccucc

SEQ ID NO: 3335576 - RNA, 19 nt, Human
caaggccaaaggaagcaca

SEQ ID NO: 3335577 - RNA, 20 nt, Human
caaggccaaaggaagcacau

SEQ ID NO: 3335578 - RNA, 21 nt, Human
caaggccaaaggaagcacaug

SEQ ID NO: 3335579 - RNA, 18 nt, Human
caaggcaaggcugucaau

SEQ ID NO: 3335580 - RNA, 17 nt, Human
caaggcaaggcugucaa

SEQ ID NO: 3335581 - RNA, 16 nt, Human
caaggcaaggcuguca

SEQ ID NO: 3335582 - RNA, 18 nt, Human
cacuuguguuaugaagca

SEQ ID NO: 3335583 - RNA, 16 nt, Human
cacuuucuagccagag

SEQ ID NO: 3335584 - RNA, 17 nt, Human
cacuuucuagccagagg

SEQ ID NO: 3335585 - RNA, 13 nt, Human
cacuuucuagcca

SEQ ID NO: 3335586 - RNA, 14 nt, Human
cacugcagccucaa

SEQ ID NO: 3335587 - RNA, 19 nt, Human
cacugcagccucaaccucc

SEQ ID NO: 3335588 - RNA, 23 nt, Human
cacugcagccucaaccuccuggg

SEQ ID NO: 3335589 - RNA, 22 nt, Human
cacugcagccucaaccuccugg

SEQ ID NO: 3335590 - RNA, 21 nt, Human
cacugcagccucaaccuccug

SEQ ID NO: 3335591 - RNA, 20 nt, Human
cacugcagccucaaccuccu

SEQ ID NO: 3335592 - RNA, 19 nt, Human
cacuguugcccaggcuggc

SEQ ID NO: 3335593 - RNA, 18 nt, Human
cacuguugcccaggcugg

SEQ ID NO: 3335594 - RNA, 23 nt, Human
cacuguugcccaggcuggcgugc

SEQ ID NO: 3335595 - RNA, 17 nt, Human
cacuguugcccaggcug

SEQ ID NO: 3335596 - RNA, 16 nt, Human
cagaaauguacagcaa

SEQ ID NO: 3335597 - RNA, 14 nt, Human
cagaaguuucugcc

SEQ ID NO: 3335598 - RNA, 16 nt, Human
cagaaguuucugccgc

SEQ ID NO: 3335599 - RNA, 16 nt, Human
caccuuggcugcaggg

SEQ ID NO: 3335600 - RNA, 15 nt, Human
caccuuggcugcagg

SEQ ID NO: 3335601 - RNA, 18 nt, Human
caccuuggcugcagggag

SEQ ID NO: 3335602 - RNA, 14 nt, Human
caccuuggcugcag

SEQ ID NO: 3335603 - RNA, 17 nt, Human
caccuuuguccccaccg

SEQ ID NO: 3335604 - RNA, 14 nt, Human
caccuuucccaucu

SEQ ID NO: 3335605 - RNA, 13 nt, Human
cacgaaagagaga

SEQ ID NO: 3335606 - RNA, 22 nt, Human
cacgaaagagagagaaacaaac

SEQ ID NO: 3335607 - RNA, 22 nt, Human
cacucuuauugcccacgcugga

SEQ ID NO: 3335608 - RNA, 21 nt, Human
cacucuuauugcccacgcugg

SEQ ID NO: 3335609 - RNA, 20 nt, Human
cacucuuauugcccacgcug

SEQ ID NO: 3335610 - RNA, 19 nt, Human
cacucuuauugcccacgcu

SEQ ID NO: 3335611 - RNA, 12 nt, Human
cacggccaggcc

SEQ ID NO: 3335612 - RNA, 17 nt, Human
cacggccaggccagagg

SEQ ID NO: 3335613 - RNA, 14 nt, Human
cacggcucacugca

SEQ ID NO: 3335614 - RNA, 20 nt, Human
cacucugucgcccagucugg

SEQ ID NO: 3335615 - RNA, 14 nt, Human
cacuccagccuggg

SEQ ID NO: 3335616 - RNA, 13 nt, Human
cacuccagccugg

SEQ ID NO: 3335617 - RNA, 16 nt, Human
cacuacauucuguuaa

SEQ ID NO: 3335618 - RNA, 17 nt, Human
cacuacauucuguuaau

SEQ ID NO: 3335619 - RNA, 21 nt, Human
cacuacauucuguuaaucauu

SEQ ID NO: 3335620 - RNA, 15 nt, Human
ccuggauggggcugc

SEQ ID NO: 3335621 - RNA, 17 nt, Human
ccuggauggggcugcac

SEQ ID NO: 3335622 - RNA, 18 nt, Human
ccuggauggggcugcacc

SEQ ID NO: 3335623 - RNA, 16 nt, Human
ccuggccccucagggu

SEQ ID NO: 3335624 - RNA, 18 nt, Human
ccuggccccucagggucc

SEQ ID NO: 3335625 - RNA, 20 nt, Human
ccuggccccucagggucccu

SEQ ID NO: 3335626 - RNA, 21 nt, Human
ccuggccccucagggucccug

SEQ ID NO: 3335627 - RNA, 22 nt, Human
ccuggccucaagugauucuccu

SEQ ID NO: 3335628 - RNA, 20 nt, Human
ccuggccugagcugggauga

SEQ ID NO: 3335629 - RNA, 15 nt, Human
ccuggggagaaagua

SEQ ID NO: 3335630 - RNA, 13 nt, Human
ccugguguggaag

SEQ ID NO: 3335631 - RNA, 19 nt, Human
ccugguggcagugggagcu

SEQ ID NO: 3335632 - RNA, 18 nt, Human
ccugguggcagugggagc

SEQ ID NO: 3335633 - RNA, 15 nt, Human
ccugguggcaguggg

SEQ ID NO: 3335634 - RNA, 15 nt, Human
ccucuuugagugaag

SEQ ID NO: 3335635 - RNA, 19 nt, Human
ccucuuucccucccuuccu

SEQ ID NO: 3335636 - RNA, 16 nt, Human
ccucuuucccucccuu

SEQ ID NO: 3335637 - RNA, 12 nt, Human
ccugcaggcagc

SEQ ID NO: 3335638 - RNA, 13 nt, Human
ccugcaggcagcc

SEQ ID NO: 3335639 - RNA, 14 nt, Human
ccugcaggcagcca

SEQ ID NO: 3335640 - RNA, 16 nt, Human
ccugaggggccucuua

SEQ ID NO: 3335641 - RNA, 14 nt, Human
ccugagguguacca

SEQ ID NO: 3335642 - RNA, 18 nt, Human
ccugcccaccuggccucu

SEQ ID NO: 3335643 - RNA, 19 nt, Human
ccugcccaggccccugcca

SEQ ID NO: 3335644 - RNA, 18 nt, Human
ccugcccaggccccugcc

SEQ ID NO: 3335645 - RNA, 14 nt, Human
ccugccucagccuc

SEQ ID NO: 3335646 - RNA, 21 nt, Human
ccugcccaggccccugccacc

SEQ ID NO: 3335647 - RNA, 15 nt, Human
ccugccucagccucc

SEQ ID NO: 3335648 - RNA, 16 nt, Human
ccugccucagccuccc

SEQ ID NO: 3335649 - RNA, 15 nt, Human
ccugcccaccuggcc

SEQ ID NO: 3335650 - RNA, 17 nt, Human
ccugcccaccuggccuc

SEQ ID NO: 3335651 - RNA, 20 nt, Human
ccuagccugugccucuggga

SEQ ID NO: 3335652 - RNA, 21 nt, Human
ccuagcauacguacacauuuu

SEQ ID NO: 3335653 - RNA, 23 nt, Human
ccuagccugugccucugggacug

SEQ ID NO: 3335654 - RNA, 19 nt, Human
ccuagccuuagaagucaca

SEQ ID NO: 3335655 - RNA, 22 nt, Human
ccuagccuuagaagucacacag

SEQ ID NO: 3335656 - RNA, 18 nt, Human
ccggccaccugcggugcu

SEQ ID NO: 3335657 - RNA, 17 nt, Human
ccggccaccugcggugc

SEQ ID NO: 3335658 - RNA, 14 nt, Human
cccuucucuccagc

SEQ ID NO: 3335659 - RNA, 19 nt, Human
cccuuuuuuggcugcugaa

SEQ ID NO: 3335660 - RNA, 21 nt, Human
cccuuuuuuggcugcugaagg

SEQ ID NO: 3335661 - RNA, 22 nt, Human
cccuuuuuuggcugcugaaggc

SEQ ID NO: 3335662 - RNA, 23 nt, Human
cccuuuuuuggcugcugaaggcu

SEQ ID NO: 3335663 - RNA, 23 nt, Human
cccugugaguacuacaguccucc

SEQ ID NO: 3335664 - RNA, 15 nt, Human
cccugugauggggcc

SEQ ID NO: 3335665 - RNA, 21 nt, Human
cccugugaguacuacaguccu

SEQ ID NO: 3335666 - RNA, 14 nt, Human
cccuccuuucacca

SEQ ID NO: 3335667 - RNA, 14 nt, Human
ccgcagcccugcag

SEQ ID NO: 3335668 - RNA, 18 nt, Human
ccgcagcccugcagaggg

SEQ ID NO: 3335669 - RNA, 16 nt, Human
ccucaacaccucugca

SEQ ID NO: 3335670 - RNA, 21 nt, Human
ccucaacucuccuccagaguc

SEQ ID NO: 3335671 - RNA, 23 nt, Human
ccucaacucuccuccagagucag

SEQ ID NO: 3335672 - RNA, 19 nt, Human
ccucaacucuccuccagag

SEQ ID NO: 3335673 - RNA, 15 nt, Human
ccucaaccuccuggg

SEQ ID NO: 3335674 - RNA, 18 nt, Human
ccucauuagcauuuugcu

SEQ ID NO: 3335675 - RNA, 12 nt, Human
ccucaggcaggu

SEQ ID NO: 3335676 - RNA, 18 nt, Human
ccucaggcaggugggaug

SEQ ID NO: 3335677 - RNA, 20 nt, Human
ccucaagugauucuccugcc

SEQ ID NO: 3335678 - RNA, 17 nt, Human
ccucccaucacccgcua

SEQ ID NO: 3335679 - RNA, 17 nt, Human
ccuccaagaccuucucc

SEQ ID NO: 3335680 - RNA, 19 nt, Human
ccuccaagaccuucuccuu

SEQ ID NO: 3335681 - RNA, 16 nt, Human
ccuccaagaccuucuc

SEQ ID NO: 3335682 - RNA, 12 nt, Human
ccucccaucacc

SEQ ID NO: 3335683 - RNA, 18 nt, Human
ccuccuuuucacaguucu

SEQ ID NO: 3335684 - RNA, 23 nt, Human
ccuccuuugugaggaagccgcug

SEQ ID NO: 3335685 - RNA, 20 nt, Human
ccuccuuugugaggaagccg

SEQ ID NO: 3335686 - RNA, 14 nt, Human
ccuccgccucuugg

SEQ ID NO: 3335687 - RNA, 13 nt, Human
ccuccgccucuug

SEQ ID NO: 3335688 - RNA, 14 nt, Human
ccaggcaggucuug

SEQ ID NO: 3335689 - RNA, 12 nt, Human
ccaggcaggucu

SEQ ID NO: 3335690 - RNA, 23 nt, Human
ccaggcaggucuugaacuccugg

SEQ ID NO: 3335691 - RNA, 12 nt, Human
ccaggcuggcgu

SEQ ID NO: 3335692 - RNA, 21 nt, Human
ccaggggaaaaucagccugcu

SEQ ID NO: 3335693 - RNA, 23 nt, Human
ccagccccuucugacccaugcug

SEQ ID NO: 3335694 - RNA, 24 nt, Human
ccagccccuucugacccaugcugc

SEQ ID NO: 3335695 - RNA, 18 nt, Human
ccagccccuucugaccca

SEQ ID NO: 3335696 - RNA, 12 nt, Human
ccagcagagcac

SEQ ID NO: 3335697 - RNA, 13 nt, Human
ccagcagagcacc

SEQ ID NO: 3335698 - RNA, 17 nt, Human
ccagccccagugcccac

SEQ ID NO: 3335699 - RNA, 15 nt, Human
ccagccccauccucu

SEQ ID NO: 3335700 - RNA, 17 nt, Human
ccagccccauccucugu

SEQ ID NO: 3335701 - RNA, 20 nt, Human
ccaugaggaacaaggcaagg

SEQ ID NO: 3335702 - RNA, 18 nt, Human
ccaugaggaacaaggcaa

SEQ ID NO: 3335703 - RNA, 23 nt, Human
ccaugaggaacaaggcaaggcug

SEQ ID NO: 3335704 - RNA, 18 nt, Human
ccaugaguccccuguuug

SEQ ID NO: 3335705 - RNA, 22 nt, Human
ccauccccuguagagugggagc

SEQ ID NO: 3335706 - RNA, 21 nt, Human
ccaucccauaugccugggcag

SEQ ID NO: 3335707 - RNA, 19 nt, Human
ccaucccauaugccugggc

SEQ ID NO: 3335708 - RNA, 20 nt, Human
ccaucccauaugccugggca

SEQ ID NO: 3335709 - RNA, 19 nt, Human
ccauccagguucagcuugu

SEQ ID NO: 3335710 - RNA, 18 nt, Human
ccauccagguucagcuug

SEQ ID NO: 3335711 - RNA, 18 nt, Human
ccaguuggucccccuucc

SEQ ID NO: 3335712 - RNA, 13 nt, Human
ccaguuggucccc

SEQ ID NO: 3335713 - RNA, 23 nt, Human
ccaguuggguggaugccuggugg

SEQ ID NO: 3335714 - RNA, 22 nt, Human
cccacugcuuuuggucugugug

SEQ ID NO: 3335715 - RNA, 23 nt, Human
cccacugcuuuuggucuguguga

SEQ ID NO: 3335716 - RNA, 13 nt, Human
cccacucccugca

SEQ ID NO: 3335717 - RNA, 12 nt, Human
cccacucccugc

SEQ ID NO: 3335718 - RNA, 12 nt, Human
cccaagcucugc

SEQ ID NO: 3335719 - RNA, 14 nt, Human
cccaagcucugcuc

SEQ ID NO: 3335720 - RNA, 13 nt, Human
cccaagcucugcu

SEQ ID NO: 3335721 - RNA, 17 nt, Human
cccaacucaccccagcc

SEQ ID NO: 3335722 - RNA, 20 nt, Human
cccaacucaccccagcccca

SEQ ID NO: 3335723 - RNA, 15 nt, Human
cccaacucaccccag

SEQ ID NO: 3335724 - RNA, 16 nt, Human
cccaacucaccccagc

SEQ ID NO: 3335725 - RNA, 23 nt, Human
ccauucuuacuuacuaaaauaua

SEQ ID NO: 3335726 - RNA, 22 nt, Human
ccauucuuacuuacuaaaauau

SEQ ID NO: 3335727 - RNA, 16 nt, Human
ccccugccacccuggg

SEQ ID NO: 3335728 - RNA, 14 nt, Human
ccccugccacccug

SEQ ID NO: 3335729 - RNA, 15 nt, Human
ccccugacaacacuc

SEQ ID NO: 3335730 - RNA, 18 nt, Human
cccgggaagggggcuggg

SEQ ID NO: 3335731 - RNA, 21 nt, Human
cccgggaagggggcugggaca

SEQ ID NO: 3335732 - RNA, 16 nt, Human
cccucaacaccucugc

SEQ ID NO: 3335733 - RNA, 16 nt, Human
cccucaacucuccucc

SEQ ID NO: 3335734 - RNA, 17 nt, Human
cccggccaccugcggug

SEQ ID NO: 3335735 - RNA, 18 nt, Human
cccgaauagcugggacua

SEQ ID NO: 3335736 - RNA, 17 nt, Human
cccgaauagcugggacu

SEQ ID NO: 3335737 - RNA, 16 nt, Human
cccgaauagcugggac

SEQ ID NO: 3335738 - RNA, 14 nt, Human
ccccuucugaccca

SEQ ID NO: 3335739 - RNA, 13 nt, Human
ccccuucugaccc

SEQ ID NO: 3335740 - RNA, 15 nt, Human
cccgggaagggggcu

SEQ ID NO: 3335741 - RNA, 12 nt, Human
cccgggaagggg

SEQ ID NO: 3335742 - RNA, 15 nt, Human
cccggccccugcugg

SEQ ID NO: 3335743 - RNA, 16 nt, Human
cccggccccugcuggu

SEQ ID NO: 3335744 - RNA, 23 nt, Human
ccccgaggccuucucugaaggac

SEQ ID NO: 3335745 - RNA, 14 nt, Human
ccccgcacugggcu

SEQ ID NO: 3335746 - RNA, 20 nt, Human
ccccagauugcaacaggcug

SEQ ID NO: 3335747 - RNA, 15 nt, Human
ccccagauugcaaca

SEQ ID NO: 3335748 - RNA, 15 nt, Human
cccauucugccugcc

SEQ ID NO: 3335749 - RNA, 14 nt, Human
cccauucugccugc

SEQ ID NO: 3335750 - RNA, 19 nt, Human
cccauucugccugcccagg

SEQ ID NO: 3335751 - RNA, 13 nt, Human
cccauucugccug

SEQ ID NO: 3335752 - RNA, 15 nt, Human
cccauuugcuccuuu

SEQ ID NO: 3335753 - RNA, 21 nt, Human
cccauccucuguacagagccc

SEQ ID NO: 3335754 - RNA, 22 nt, Human
cccauccucuguacagagccca

SEQ ID NO: 3335755 - RNA, 20 nt, Human
cccauccucuguacagagcc

SEQ ID NO: 3335756 - RNA, 23 nt, Human
cccagcaagugagagcugggugu

SEQ ID NO: 3335757 - RNA, 15 nt, Human
cccaggaaaggcucc

SEQ ID NO: 3335758 - RNA, 16 nt, Human
cccaggaaaggcucca

SEQ ID NO: 3335759 - RNA, 17 nt, Human
cccaggaaaggcuccag

SEQ ID NO: 3335760 - RNA, 18 nt, Human
cccaggaaaggcuccagg

SEQ ID NO: 3335761 - RNA, 20 nt, Human
cccaggcuuagucacugaga

SEQ ID NO: 3335762 - RNA, 22 nt, Human
cccaggcuuagucacugagaca

SEQ ID NO: 3335763 - RNA, 18 nt, Human
cgcugccccuggcagccc

SEQ ID NO: 3335764 - RNA, 23 nt, Human
cgcuggaccuugaacuggguacu

SEQ ID NO: 3335765 - RNA, 19 nt, Human
cgcuggaccuugaacuggg

SEQ ID NO: 3335766 - RNA, 16 nt, Human
cgcugccccuggcagc

SEQ ID NO: 3335767 - RNA, 17 nt, Human
cgcugccccuggcagcc

SEQ ID NO: 3335768 - RNA, 13 nt, Human
cgcugccccuggc

SEQ ID NO: 3335769 - RNA, 16 nt, Human
cgccuuaaggauguuc

SEQ ID NO: 3335770 - RNA, 17 nt, Human
cgcuggggccaguuggu

SEQ ID NO: 3335771 - RNA, 17 nt, Human
cggagaaaggaagggcu

SEQ ID NO: 3335772 - RNA, 14 nt, Human
cuaaagcugccagc

SEQ ID NO: 3335773 - RNA, 15 nt, Human
cuaaaggcuaccuuu

SEQ ID NO: 3335774 - RNA, 16 nt, Human
cuaaaggcuaccuuug

SEQ ID NO: 3335775 - RNA, 11 nt, Human
cuaaagcugcc

SEQ ID NO: 3335776 - RNA, 15 nt, Human
cuaaagcugccagcc

SEQ ID NO: 3335777 - RNA, 22 nt, Human
cuaaaguguauuuuuuuacuaa

SEQ ID NO: 3335778 - RNA, 17 nt, Human
cuaaaggcuaccuuugu

SEQ ID NO: 3335779 - RNA, 19 nt, Human
cuaaaggcuaccuuuguau

SEQ ID NO: 3335780 - RNA, 19 nt, Human
cuaaaguguauuuuuuuac

SEQ ID NO: 3335781 - RNA, 13 nt, Human
cguuaaaauacca

SEQ ID NO: 3335782 - RNA, 13 nt, Human
cguacacauuuua

SEQ ID NO: 3335783 - RNA, 15 nt, Human
cuaccugaggggccu

SEQ ID NO: 3335784 - RNA, 16 nt, Human
cuaccugaggggccuc

SEQ ID NO: 3335785 - RNA, 19 nt, Human
cuaccugaggggccucuua

SEQ ID NO: 3335786 - RNA, 23 nt, Human
cuaccugaggggccucuuauggg

SEQ ID NO: 3335787 - RNA, 19 nt, Human
cuagccagaggagagagga

SEQ ID NO: 3335788 - RNA, 17 nt, Human
cuagccagaggagagag

SEQ ID NO: 3335789 - RNA, 13 nt, Human
cuaggccuggcca

SEQ ID NO: 3335790 - RNA, 19 nt, Human
cuaggccuggccagaugca

SEQ ID NO: 3335791 - RNA, 18 nt, Human
cuaggccuggccagaugc

SEQ ID NO: 3335792 - RNA, 15 nt, Human
cuaggccuggccaga

SEQ ID NO: 3335793 - RNA, 14 nt, Human
cuaggccuggccag

SEQ ID NO: 3335794 - RNA, 12 nt, Human
cuaggccugggg

SEQ ID NO: 3335795 - RNA, 13 nt, Human
cuaggccugggga

SEQ ID NO: 3335796 - RNA, 16 nt, Human
cuagcauacguacaca

SEQ ID NO: 3335797 - RNA, 18 nt, Human
cuagcauacguacacauu

SEQ ID NO: 3335798 - RNA, 19 nt, Human
cuagcauacguacacauuu

SEQ ID NO: 3335799 - RNA, 15 nt, Human
cuaguuugauuaaau

SEQ ID NO: 3335800 - RNA, 20 nt, Human
cuaguuugauuaaauucuug

SEQ ID NO: 3335801 - RNA, 14 nt, Human
cuagggaagauaau

SEQ ID NO: 3335802 - RNA, 21 nt, Human
cuagggaaaaaccagcgugug

SEQ ID NO: 3335803 - RNA, 17 nt, Human
cuaguuugauuaaauuc

SEQ ID NO: 3335804 - RNA, 19 nt, Human
cuaguuugauuaaauucuu

SEQ ID NO: 3335805 - RNA, 14 nt, Human
cucacacaugagca

SEQ ID NO: 3335806 - RNA, 14 nt, Human
cucacaaaggaugc

SEQ ID NO: 3335807 - RNA, 12 nt, Human
cucaaauaacua

SEQ ID NO: 3335808 - RNA, 20 nt, Human
cuaucucccccagccccauc

SEQ ID NO: 3335809 - RNA, 19 nt, Human
cuauguaucaaugaguaac

SEQ ID NO: 3335810 - RNA, 18 nt, Human
cuaucucccccagcccca

SEQ ID NO: 3335811 - RNA, 17 nt, Human
cuaugugagcacaaagg

SEQ ID NO: 3335812 - RNA, 16 nt, Human
cuauguaucaaugagu

SEQ ID NO: 3335813 - RNA, 22 nt, Human
cuauguguagggcgggaggaug

SEQ ID NO: 3335814 - RNA, 15 nt, Human
cuauguugcccaggc

SEQ ID NO: 3335815 - RNA, 14 nt, Human
cuauguugcccagg

SEQ ID NO: 3335816 - RNA, 18 nt, Human
cucaaaaaaagaaaaaga

SEQ ID NO: 3335817 - RNA, 17 nt, Human
cucaaaaaaagaaaaag

SEQ ID NO: 3335818 - RNA, 16 nt, Human
cuauguugcccaggca

SEQ ID NO: 3335819 - RNA, 18 nt, Human
cucaccugccccucaacu

SEQ ID NO: 3335820 - RNA, 14 nt, Human
cucaccugccccuc

SEQ ID NO: 3335821 - RNA, 16 nt, Human
cucaccugccccucaa

SEQ ID NO: 3335822 - RNA, 13 nt, Human
cucaccugccccu

SEQ ID NO: 3335823 - RNA, 14 nt, Human
cucaccucucccuu

SEQ ID NO: 3335824 - RNA, 15 nt, Human
cucaccucucccuug

SEQ ID NO: 3335825 - RNA, 16 nt, Human
cucaccucucccuugg

SEQ ID NO: 3335826 - RNA, 17 nt, Human
cucaccucucccuugga

SEQ ID NO: 3335827 - RNA, 13 nt, Human
cucaccucucccu

SEQ ID NO: 3335828 - RNA, 15 nt, Human
cucccucuuucccuc

SEQ ID NO: 3335829 - RNA, 16 nt, Human
cucccucccucuuucc

SEQ ID NO: 3335830 - RNA, 19 nt, Human
cucccucuuucccucccuu

SEQ ID NO: 3335831 - RNA, 20 nt, Human
cuccgcuuucuacccagcga

SEQ ID NO: 3335832 - RNA, 21 nt, Human
cuccgcuuucuacccagcgag

SEQ ID NO: 3335833 - RNA, 22 nt, Human
cuccgcuuucuacccagcgagc

SEQ ID NO: 3335834 - RNA, 22 nt, Human
cuccagaauuucccaaagcagu

SEQ ID NO: 3335835 - RNA, 11 nt, Human
cuccagacaca

SEQ ID NO: 3335836 - RNA, 17 nt, Human
cucagaaucucaaauaa

SEQ ID NO: 3335837 - RNA, 16 nt, Human
cucagaaucucaaaua

SEQ ID NO: 3335838 - RNA, 21 nt, Human
cuccagaauuucccaaagcag

SEQ ID NO: 3335839 - RNA, 22 nt, Human
cuccaggcuguaucccaugagc

SEQ ID NO: 3335840 - RNA, 23 nt, Human
cuccaggcuguaucccaugagcc

SEQ ID NO: 3335841 - RNA, 13 nt, Human
cucccaccucagc

SEQ ID NO: 3335842 - RNA, 16 nt, Human
cucccaccucagccuc

SEQ ID NO: 3335843 - RNA, 14 nt, Human
cucccaccucagcc

SEQ ID NO: 3335844 - RNA, 19 nt, Human
cuccaggugcacaagcucc

SEQ ID NO: 3335845 - RNA, 20 nt, Human
cuccaggugcacaagcucca

SEQ ID NO: 3335846 - RNA, 18 nt, Human
cuccaggugcacaagcuc

SEQ ID NO: 3335847 - RNA, 16 nt, Human
cucugcacaagcugca

SEQ ID NO: 3335848 - RNA, 13 nt, Human
cucucccuuggau

SEQ ID NO: 3335849 - RNA, 13 nt, Human
cucuccuccuuuu

SEQ ID NO: 3335850 - RNA, 20 nt, Human
cucuccuccuuuucacaguu

SEQ ID NO: 3335851 - RNA, 16 nt, Human
cucuccgaccagacac

SEQ ID NO: 3335852 - RNA, 10 nt, Human
cucuccucug

SEQ ID NO: 3335853 - RNA, 11 nt, Human
cucggugccuu

SEQ ID NO: 3335854 - RNA, 23 nt, Human
cucgguguggagaagcggcuggc

SEQ ID NO: 3335855 - RNA, 22 nt, Human
cuccuagccugugccucuggga

SEQ ID NO: 3335856 - RNA, 17 nt, Human
cuccuuuagcgcccagu

SEQ ID NO: 3335857 - RNA, 16 nt, Human
cuccuuuagcgcccag

SEQ ID NO: 3335858 - RNA, 22 nt, Human
cuccuuuagcgcccaguugggu

SEQ ID NO: 3335859 - RNA, 23 nt, Human
cuccuuugugaggaagccgcugg

SEQ ID NO: 3335860 - RNA, 24 nt, Human
cuccuuuucacaguucucuccuuc

SEQ ID NO: 3335861 - RNA, 23 nt, Human
cugacacacagcucuguccuggg

SEQ ID NO: 3335862 - RNA, 22 nt, Human
cugacacacagcucuguccugg

SEQ ID NO: 3335863 - RNA, 21 nt, Human
cugacacacagcucuguccug

SEQ ID NO: 3335864 - RNA, 20 nt, Human
cugacacacagcucuguccu

SEQ ID NO: 3335865 - RNA, 19 nt, Human
cugacacacagcucugucc

SEQ ID NO: 3335866 - RNA, 18 nt, Human
cugacacacagcucuguc

SEQ ID NO: 3335867 - RNA, 17 nt, Human
cugacacacagcucugu

SEQ ID NO: 3335868 - RNA, 16 nt, Human
cugacacacagcucug

SEQ ID NO: 3335869 - RNA, 15 nt, Human
cugacacacagcucu

SEQ ID NO: 3335870 - RNA, 13 nt, Human
cugacacacagcu

SEQ ID NO: 3335871 - RNA, 22 nt, Human
cucuugauucauaaugacuuaa

SEQ ID NO: 3335872 - RNA, 23 nt, Human
cucuugagccuugaacuuugacc

SEQ ID NO: 3335873 - RNA, 15 nt, Human
cucuugagccuggga

SEQ ID NO: 3335874 - RNA, 13 nt, Human
cucuugagccugg

SEQ ID NO: 3335875 - RNA, 14 nt, Human
cucuugagccuggg

SEQ ID NO: 3335876 - RNA, 24 nt, Human
cucuugauucauaaugacuuaagc

SEQ ID NO: 3335877 - RNA, 17 nt, Human
cucugcacaagcugcac

SEQ ID NO: 3335878 - RNA, 18 nt, Human
cucugcacaagcugcacc

SEQ ID NO: 3335879 - RNA, 22 nt, Human
cugaggugggaggaucucuuga

SEQ ID NO: 3335880 - RNA, 13 nt, Human
cugaggugggagg

SEQ ID NO: 3335881 - RNA, 12 nt, Human
cugaggugggag

SEQ ID NO: 3335882 - RNA, 23 nt, Human
cugaggaauccagacccggcugc

SEQ ID NO: 3335883 - RNA, 14 nt, Human
cugaggggccucuu

SEQ ID NO: 3335884 - RNA, 12 nt, Human
cugagcugggau

SEQ ID NO: 3335885 - RNA, 22 nt, Human
cugagcugggaugauuggaggg

SEQ ID NO: 3335886 - RNA, 19 nt, Human
cugacccugcuucaaauau

SEQ ID NO: 3335887 - RNA, 21 nt, Human
cugaggaauccagacccggcu

SEQ ID NO: 3335888 - RNA, 17 nt, Human
cugaucucucgugauug

SEQ ID NO: 3335889 - RNA, 18 nt, Human
cugaucucucgugauuga

SEQ ID NO: 3335890 - RNA, 14 nt, Human
cugaucucucguga

SEQ ID NO: 3335891 - RNA, 23 nt, Human
augugcacaugcacgugugugca

SEQ ID NO: 3335892 - RNA, 17 nt, Human
augugaugagaggaaau

SEQ ID NO: 3335893 - RNA, 19 nt, Human
augugaugagaggaaauca

SEQ ID NO: 3335894 - RNA, 16 nt, Human
augugaugagaggaaa

SEQ ID NO: 3335895 - RNA, 15 nt, Human
augugaugagaggaa

SEQ ID NO: 3335896 - RNA, 15 nt, Human
auguauguguaagua

SEQ ID NO: 3335897 - RNA, 16 nt, Human
auguauguguaaguau

SEQ ID NO: 3335898 - RNA, 12 nt, Human
augucaguguga

SEQ ID NO: 3335899 - RNA, 13 nt, Human
augucagugugac

SEQ ID NO: 3335900 - RNA, 13 nt, Human
uuugacgccaucc

SEQ ID NO: 3335901 - RNA, 14 nt, Human
uuugacgccauccc

SEQ ID NO: 3335902 - RNA, 16 nt, Human
uuugacgccaucccag

SEQ ID NO: 3335903 - RNA, 19 nt, Human
uuugacgccaucccagccc

SEQ ID NO: 3335904 - RNA, 20 nt, Human
uuugacgccaucccagcccc

SEQ ID NO: 3335905 - RNA, 18 nt, Human
uuugauuaaauucuugca

SEQ ID NO: 3335906 - RNA, 21 nt, Human
uuugauuaaauucuugcaaag

SEQ ID NO: 3335907 - RNA, 18 nt, Human
uuugauucagacagcugc

SEQ ID NO: 3335908 - RNA, 21 nt, Human
uuugauucagacagcugccug

SEQ ID NO: 3335909 - RNA, 13 nt, Human
uuugauuaaauuc

SEQ ID NO: 3335910 - RNA, 22 nt, Human
uuugauguucuuucacccuuuu

SEQ ID NO: 3335911 - RNA, 22 nt, Human
uuugauucagacagcugccugg

SEQ ID NO: 3335912 - RNA, 15 nt, Human
uuugccguuauuaaa

SEQ ID NO: 3335913 - RNA, 13 nt, Human
uuugccucugccu

SEQ ID NO: 3335914 - RNA, 12 nt, Human
uuugaccucugc

SEQ ID NO: 3335915 - RNA, 17 nt, Human
augguggcuggguugga

SEQ ID NO: 3335916 - RNA, 15 nt, Human
augguggcuggguug

SEQ ID NO: 3335917 - RNA, 13 nt, Human
augguggcugggu

SEQ ID NO: 3335918 - RNA, 12 nt, Human
augguggcuggg

SEQ ID NO: 3335919 - RNA, 19 nt, Human
auggugcaaugaccuuuca

SEQ ID NO: 3335920 - RNA, 16 nt, Human
auggugcaaugaccuu

SEQ ID NO: 3335921 - RNA, 17 nt, Human
auggugcaaugaccuuu

SEQ ID NO: 3335922 - RNA, 12 nt, Human
auggugcaauga

SEQ ID NO: 3335923 - RNA, 13 nt, Human
auggugcaaugac

SEQ ID NO: 3335924 - RNA, 15 nt, Human
auggugcaaugaccu

SEQ ID NO: 3335925 - RNA, 15 nt, Human
augggugcuuggagg

SEQ ID NO: 3335926 - RNA, 20 nt, Human
auggugagggauacccaucc

SEQ ID NO: 3335927 - RNA, 15 nt, Human
augguuuucaaaaua

SEQ ID NO: 3335928 - RNA, 14 nt, Human
augguuuucaaaau

SEQ ID NO: 3335929 - RNA, 16 nt, Human
augguuuucaaaauaa

SEQ ID NO: 3335930 - RNA, 14 nt, Human
augguuuucuugug

SEQ ID NO: 3335931 - RNA, 15 nt, Human
uuucuggcuaugcau

SEQ ID NO: 3335932 - RNA, 16 nt, Human
uuucuggcuaugcauu

SEQ ID NO: 3335933 - RNA, 18 nt, Human
uuucuggcuaugcauuug

SEQ ID NO: 3335934 - RNA, 19 nt, Human
uuucuggcuaugcauuuga

SEQ ID NO: 3335935 - RNA, 19 nt, Human
uuucugcagccacuauugu

SEQ ID NO: 3335936 - RNA, 15 nt, Human
augggauccuggagu

SEQ ID NO: 3335937 - RNA, 12 nt, Human
auggggcugcac

SEQ ID NO: 3335938 - RNA, 24 nt, Human
auggggcugcaccggcuggccugg

SEQ ID NO: 3335939 - RNA, 14 nt, Human
augggggugcauuu

SEQ ID NO: 3335940 - RNA, 15 nt, Human
augggggugcauuug

SEQ ID NO: 3335941 - RNA, 18 nt, Human
augggccuccugugugug

SEQ ID NO: 3335942 - RNA, 17 nt, Human
augggccuccugugugu

SEQ ID NO: 3335943 - RNA, 20 nt, Human
augggcuggguucuacccag

SEQ ID NO: 3335944 - RNA, 19 nt, Human
augcacuuuguucuggcuc

SEQ ID NO: 3335945 - RNA, 20 nt, Human
augcacuuuguucuggcucu

SEQ ID NO: 3335946 - RNA, 17 nt, Human
augcacuuuguucuggc

SEQ ID NO: 3335947 - RNA, 16 nt, Human
augcacuuuguucugg

SEQ ID NO: 3335948 - RNA, 13 nt, Human
augcaccuggaau

SEQ ID NO: 3335949 - RNA, 14 nt, Human
augcaccagcccuu

SEQ ID NO: 3335950 - RNA, 22 nt, Human
augcaccagcccuuagcaggga

SEQ ID NO: 3335951 - RNA, 13 nt, Human
uuuaaagaaugcu

SEQ ID NO: 3335952 - RNA, 23 nt, Human
uuuaaaaauacagauagauauau

SEQ ID NO: 3335953 - RNA, 20 nt, Human
uuguucuugguuuguaaauu

SEQ ID NO: 3335954 - RNA, 13 nt, Human
uuguguuacuaag

SEQ ID NO: 3335955 - RNA, 15 nt, Human
uuguguuacuaaguu

SEQ ID NO: 3335956 - RNA, 20 nt, Human
uuguguuacuaaguuuuuau

SEQ ID NO: 3335957 - RNA, 21 nt, Human
uuguuccacaaguuaaauaaa

SEQ ID NO: 3335958 - RNA, 15 nt, Human
augaucuaggaagac

SEQ ID NO: 3335959 - RNA, 17 nt, Human
augaucuaggaagacuu

SEQ ID NO: 3335960 - RNA, 20 nt, Human
augaucuaggaagacuuugg

SEQ ID NO: 3335961 - RNA, 17 nt, Human
augcagccucacagucc

SEQ ID NO: 3335962 - RNA, 18 nt, Human
augcagccucacaguccu

SEQ ID NO: 3335963 - RNA, 19 nt, Human
uuuaauuuuuuugagacag

SEQ ID NO: 3335964 - RNA, 12 nt, Human
augcccagcccc

SEQ ID NO: 3335965 - RNA, 13 nt, Human
augcccagccccu

SEQ ID NO: 3335966 - RNA, 14 nt, Human
augcccagccccuu

SEQ ID NO: 3335967 - RNA, 11 nt, Human
augcccagccc

SEQ ID NO: 3335968 - RNA, 13 nt, Human
augcagugcuucc

SEQ ID NO: 3335969 - RNA, 23 nt, Human
augcagugguaugaucacggcuc

SEQ ID NO: 3335970 - RNA, 19 nt, Human
auggacuaacuugucuuug

SEQ ID NO: 3335971 - RNA, 11 nt, Human
auggacuuugu

SEQ ID NO: 3335972 - RNA, 12 nt, Human
auggacuuuguu

SEQ ID NO: 3335973 - RNA, 17 nt, Human
auggacuuuauaagcca

SEQ ID NO: 3335974 - RNA, 17 nt, Human
uuuccaugaguccccug

SEQ ID NO: 3335975 - RNA, 18 nt, Human
uuuccaugaguccccugu

SEQ ID NO: 3335976 - RNA, 19 nt, Human
augggagagaagagaaugc

SEQ ID NO: 3335977 - RNA, 15 nt, Human
augggagagaagaga

SEQ ID NO: 3335978 - RNA, 22 nt, Human
augcugugcccuaaaguguauu

SEQ ID NO: 3335979 - RNA, 13 nt, Human
augcuucucacug

SEQ ID NO: 3335980 - RNA, 15 nt, Human
uuucaaacuuuacua

SEQ ID NO: 3335981 - RNA, 22 nt, Human
uuucaaacuuuacuauggcccu

SEQ ID NO: 3335982 - RNA, 16 nt, Human
uuucaaacuuuacuau

SEQ ID NO: 3335983 - RNA, 11 nt, Human
aucagaauucu

SEQ ID NO: 3335984 - RNA, 13 nt, Human
aucagcacgauuu

SEQ ID NO: 3335985 - RNA, 15 nt, Human
aucaggccaggcccu

SEQ ID NO: 3335986 - RNA, 16 nt, Human
aucaggccaggcccuc

SEQ ID NO: 3335987 - RNA, 18 nt, Human
aucaggccaggcccucug

SEQ ID NO: 3335988 - RNA, 12 nt, Human
aucagaauucuc

SEQ ID NO: 3335989 - RNA, 14 nt, Human
aucaggccaggccc

SEQ ID NO: 3335990 - RNA, 16 nt, Human
uucuagcauggcugcc

SEQ ID NO: 3335991 - RNA, 21 nt, Human
uucuaaaucuccaaaauaaaa

SEQ ID NO: 3335992 - RNA, 19 nt, Human
uucuaaaucuccaaaauaa

SEQ ID NO: 3335993 - RNA, 20 nt, Human
uucuaaaggcuaccuuugua

SEQ ID NO: 3335994 - RNA, 21 nt, Human
uucuaaaggcuaccuuuguau

SEQ ID NO: 3335995 - RNA, 19 nt, Human
uucuaaaggcuaccuuugu

SEQ ID NO: 3335996 - RNA, 19 nt, Human
uucgcuccugugucuugca

SEQ ID NO: 3335997 - RNA, 15 nt, Human
uucgcuccugugucu

SEQ ID NO: 3335998 - RNA, 13 nt, Human
uucgcuccugugu

SEQ ID NO: 3335999 - RNA, 13 nt, Human
uuccucuuuccau

SEQ ID NO: 3336000 - RNA, 11 nt, Human
uuccucuuucc

SEQ ID NO: 3336001 - RNA, 22 nt, Human
uuccucuuuccaucuacccucc

SEQ ID NO: 3336002 - RNA, 17 nt, Human
uuccucuuuccaucuac

SEQ ID NO: 3336003 - RNA, 14 nt, Human
uuccugaaccgaug

SEQ ID NO: 3336004 - RNA, 17 nt, Human
uuccuaauccucuagga

SEQ ID NO: 3336005 - RNA, 15 nt, Human
uucccuauuagagaa

SEQ ID NO: 3336006 - RNA, 20 nt, Human
uucccucaccuuucccaucu

SEQ ID NO: 3336007 - RNA, 14 nt, Human
uuccguuaaaauac

SEQ ID NO: 3336008 - RNA, 16 nt, Human
uuccguuaaaauacca

SEQ ID NO: 3336009 - RNA, 14 nt, Human
aucaaugaguaaca

SEQ ID NO: 3336010 - RNA, 15 nt, Human
aucacggcucacugc

SEQ ID NO: 3336011 - RNA, 13 nt, Human
aucacgccacugc

SEQ ID NO: 3336012 - RNA, 18 nt, Human
aucacggcucacugcagc

SEQ ID NO: 3336013 - RNA, 21 nt, Human
aucaagaugugacauguuuua

SEQ ID NO: 3336014 - RNA, 20 nt, Human
uucuucugcuucagccuccc

SEQ ID NO: 3336015 - RNA, 13 nt, Human
aucccucauccuc

SEQ ID NO: 3336016 - RNA, 21 nt, Human
aucccucauccucauacccac

SEQ ID NO: 3336017 - RNA, 23 nt, Human
aucccucauccucauacccaccc

SEQ ID NO: 3336018 - RNA, 14 nt, Human
aucccucauccuca

SEQ ID NO: 3336019 - RNA, 24 nt, Human
aucccauaugccugggcagaagga

SEQ ID NO: 3336020 - RNA, 17 nt, Human
aucccauaugccugggc

SEQ ID NO: 3336021 - RNA, 13 nt, Human
uucuucucccuca

SEQ ID NO: 3336022 - RNA, 11 nt, Human
uucuucucccu

SEQ ID NO: 3336023 - RNA, 14 nt, Human
uucuucucccucag

SEQ ID NO: 3336024 - RNA, 15 nt, Human
uucuucugcuucagc

SEQ ID NO: 3336025 - RNA, 13 nt, Human
uucuucugcuuca

SEQ ID NO: 3336026 - RNA, 12 nt, Human
auccuaagcuau

SEQ ID NO: 3336027 - RNA, 16 nt, Human
auccuaggcauuugcu

SEQ ID NO: 3336028 - RNA, 16 nt, Human
auccuccucagaucuu

SEQ ID NO: 3336029 - RNA, 14 nt, Human
auccuccucagauc

SEQ ID NO: 3336030 - RNA, 21 nt, Human
uucuccuuguguuacuaaguu

SEQ ID NO: 3336031 - RNA, 19 nt, Human
aucaggugcugccauccag

SEQ ID NO: 3336032 - RNA, 15 nt, Human
uucucuaguuugauu

SEQ ID NO: 3336033 - RNA, 17 nt, Human
uucucuaguuugauuaa

SEQ ID NO: 3336034 - RNA, 18 nt, Human
uucugccugcccaggccc

SEQ ID NO: 3336035 - RNA, 17 nt, Human
uucugccugcccaggcc

SEQ ID NO: 3336036 - RNA, 15 nt, Human
uucuggcucuuccag

SEQ ID NO: 3336037 - RNA, 21 nt, Human
uucugccugcccaggccccug

SEQ ID NO: 3336038 - RNA, 16 nt, Human
uucuggcucuuccagg

SEQ ID NO: 3336039 - RNA, 17 nt, Human
uucuggcucuuccaggc

SEQ ID NO: 3336040 - RNA, 19 nt, Human
uucugaacuuggcgcugcc

SEQ ID NO: 3336041 - RNA, 22 nt, Human
uucugaacuuggcgcugccccu

SEQ ID NO: 3336042 - RNA, 15 nt, Human
uucugccauauucug

SEQ ID NO: 3336043 - RNA, 15 nt, Human
auccaguaucuugaa

SEQ ID NO: 3336044 - RNA, 16 nt, Human
auccaguaucuugaag

SEQ ID NO: 3336045 - RNA, 15 nt, Human
auccacccaccucag

SEQ ID NO: 3336046 - RNA, 13 nt, Human
auccacccaccuc

SEQ ID NO: 3336047 - RNA, 18 nt, Human
auccaagcuggucccacu

SEQ ID NO: 3336048 - RNA, 19 nt, Human
aucccaaacccuucagugc

SEQ ID NO: 3336049 - RNA, 20 nt, Human
aucccaaacccuucagugcc

SEQ ID NO: 3336050 - RNA, 12 nt, Human
aucccagcccca

SEQ ID NO: 3336051 - RNA, 18 nt, Human
aucccauaugccugggca

SEQ ID NO: 3336052 - RNA, 21 nt, Human
auccaguaucuugaagacuuu

SEQ ID NO: 3336053 - RNA, 16 nt, Human
aucuggugacuuuccu

SEQ ID NO: 3336054 - RNA, 17 nt, Human
aucuggugacuuuccuc

SEQ ID NO: 3336055 - RNA, 10 nt, Human
aucuggugac

SEQ ID NO: 3336056 - RNA, 17 nt, Human
aucugugaaaggaaaga

SEQ ID NO: 3336057 - RNA, 22 nt, Human
aucugucauuugagcagggcuc

SEQ ID NO: 3336058 - RNA, 18 nt, Human
aucugugaaaggaaagag

SEQ ID NO: 3336059 - RNA, 20 nt, Human
aucuuggucagauuugaacu

SEQ ID NO: 3336060 - RNA, 22 nt, Human
aucuuuucauuuaggugaggaa

SEQ ID NO: 3336061 - RNA, 17 nt, Human
aucuuugcagacaggca

SEQ ID NO: 3336062 - RNA, 18 nt, Human
augaaagggcccagagag

SEQ ID NO: 3336063 - RNA, 15 nt, Human
augaaagggcccaga

SEQ ID NO: 3336064 - RNA, 23 nt, Human
uuggcuauuagagaucaaccccu

SEQ ID NO: 3336065 - RNA, 16 nt, Human
uuggagggugucccaa

SEQ ID NO: 3336066 - RNA, 18 nt, Human
uuggccccugcccggcug

SEQ ID NO: 3336067 - RNA, 14 nt, Human
uugcuugaaagaaa

SEQ ID NO: 3336068 - RNA, 19 nt, Human
augaaagggcccagagagg

SEQ ID NO: 3336069 - RNA, 14 nt, Human
augaaaugagguca

SEQ ID NO: 3336070 - RNA, 18 nt, Human
uuggggaccagagcugcc

SEQ ID NO: 3336071 - RNA, 14 nt, Human
aucucagggccugg

SEQ ID NO: 3336072 - RNA, 16 nt, Human
aucucagggccugguc

SEQ ID NO: 3336073 - RNA, 14 nt, Human
aucuccaaaauaaa

SEQ ID NO: 3336074 - RNA, 17 nt, Human
aucuccaaaauaaaacu

SEQ ID NO: 3336075 - RNA, 20 nt, Human
aucuccaaaauaaaacuuuu

SEQ ID NO: 3336076 - RNA, 21 nt, Human
aucuccaaaauaaaacuuuuu

SEQ ID NO: 3336077 - RNA, 13 nt, Human
aucuccaaaauaa

SEQ ID NO: 3336078 - RNA, 16 nt, Human
aucucccccagcccca

SEQ ID NO: 3336079 - RNA, 17 nt, Human
aucucccccagccccau

SEQ ID NO: 3336080 - RNA, 14 nt, Human
aucucccccagccc

SEQ ID NO: 3336081 - RNA, 15 nt, Human
aucucccccagcccc

SEQ ID NO: 3336082 - RNA, 22 nt, Human
aucugaaaauguauguguaagu

SEQ ID NO: 3336083 - RNA, 20 nt, Human
aucugaaaauguauguguaa

SEQ ID NO: 3336084 - RNA, 19 nt, Human
aucugaaaauguaugugua

SEQ ID NO: 3336085 - RNA, 16 nt, Human
aucugaaaauguaugu

SEQ ID NO: 3336086 - RNA, 14 nt, Human
aucugaaaauguau

SEQ ID NO: 3336087 - RNA, 15 nt, Human
aucucuugagccugg

SEQ ID NO: 3336088 - RNA, 14 nt, Human
uugcaccacugcac

SEQ ID NO: 3336089 - RNA, 15 nt, Human
uugcaccacugcacu

SEQ ID NO: 3336090 - RNA, 16 nt, Human
uugcaccacugcacuc

SEQ ID NO: 3336091 - RNA, 19 nt, Human
uugcaauggcagccuuggc

SEQ ID NO: 3336092 - RNA, 17 nt, Human
uugcaauggcagccuug

SEQ ID NO: 3336093 - RNA, 16 nt, Human
uugcaauggcagccuu

SEQ ID NO: 3336094 - RNA, 14 nt, Human
uugcaauggcagcc

SEQ ID NO: 3336095 - RNA, 23 nt, Human
uugauguuuuaaggaugcuugua

SEQ ID NO: 3336096 - RNA, 13 nt, Human
uugauuaaauucu

SEQ ID NO: 3336097 - RNA, 23 nt, Human
aucugaaaauguauguguaagua

SEQ ID NO: 3336098 - RNA, 12 nt, Human
aucugaaaaugu

SEQ ID NO: 3336099 - RNA, 14 nt, Human
uugauuaaauucuu

SEQ ID NO: 3336100 - RNA, 21 nt, Human
uugauuaaauucuugcaaagu

SEQ ID NO: 3336101 - RNA, 17 nt, Human
aucuaaauggaaccacu

SEQ ID NO: 3336102 - RNA, 18 nt, Human
aucuaaauggaaccacuc

SEQ ID NO: 3336103 - RNA, 13 nt, Human
aucuaaauggaac

SEQ ID NO: 3336104 - RNA, 16 nt, Human
auccucuguacagagc

SEQ ID NO: 3336105 - RNA, 17 nt, Human
auccucuguacagagcc

SEQ ID NO: 3336106 - RNA, 16 nt, Human
uugagaucagccuggg

SEQ ID NO: 3336107 - RNA, 15 nt, Human
uugagaucagccugg

SEQ ID NO: 3336108 - RNA, 12 nt, Human
uugagacagagu

SEQ ID NO: 3336109 - RNA, 20 nt, Human
uugagugaagcugggagaac

SEQ ID NO: 3336110 - RNA, 20 nt, Human
uugaguugauucagcucugc

SEQ ID NO: 3336111 - RNA, 18 nt, Human
aucuaauauguaacaagc

SEQ ID NO: 3336112 - RNA, 17 nt, Human
auuuaaaagauacaguu

SEQ ID NO: 3336113 - RNA, 14 nt, Human
auuuaaaagauaca

SEQ ID NO: 3336114 - RNA, 16 nt, Human
auuuaaaagauacagu

SEQ ID NO: 3336115 - RNA, 13 nt, Human
auuuaaaagauac

SEQ ID NO: 3336116 - RNA, 21 nt, Human
auuguuuggggaugagaaagg

SEQ ID NO: 3336117 - RNA, 13 nt, Human
auugugggaaggg

SEQ ID NO: 3336118 - RNA, 14 nt, Human
auugugggaagggg

SEQ ID NO: 3336119 - RNA, 20 nt, Human
auuguccccgacccuugccg

SEQ ID NO: 3336120 - RNA, 23 nt, Human
auugucaaaguggugagaggcau

SEQ ID NO: 3336121 - RNA, 16 nt, Human
auugucaaagugguga

SEQ ID NO: 3336122 - RNA, 21 nt, Human
auugauuuccguuaaaauacc

SEQ ID NO: 3336123 - RNA, 16 nt, Human
auuggauuauccugag

SEQ ID NO: 3336124 - RNA, 19 nt, Human
auuucccaaagcagugcau

SEQ ID NO: 3336125 - RNA, 16 nt, Human
auuucccaaagcagug

SEQ ID NO: 3336126 - RNA, 14 nt, Human
auuuauuuaaauuu

SEQ ID NO: 3336127 - RNA, 12 nt, Human
auuuauuuaaau

SEQ ID NO: 3336128 - RNA, 16 nt, Human
auuugaaaauuuugau

SEQ ID NO: 3336129 - RNA, 15 nt, Human
auuugaaaauuuuga

SEQ ID NO: 3336130 - RNA, 16 nt, Human
auuucuuccacaagag

SEQ ID NO: 3336131 - RNA, 20 nt, Human
auuucuuccacaagagccca

SEQ ID NO: 3336132 - RNA, 23 nt, Human
auuucuuccacaagagcccaggc

SEQ ID NO: 3336133 - RNA, 22 nt, Human
auuuuaaaaauacagauagaua

SEQ ID NO: 3336134 - RNA, 21 nt, Human
auuuugcugucccuuuuccuu

SEQ ID NO: 3336135 - RNA, 20 nt, Human
auuuugcuaaaugugaauga

SEQ ID NO: 3336136 - RNA, 17 nt, Human
auuuugauguuuuaagg

SEQ ID NO: 3336137 - RNA, 15 nt, Human
auuuugauguuuuaa

SEQ ID NO: 3336138 - RNA, 19 nt, Human
auuuugauccaagcugguc

SEQ ID NO: 3336139 - RNA, 18 nt, Human
auuuugauccaagcuggu

SEQ ID NO: 3336140 - RNA, 16 nt, Human
auuuuccugccaggca

SEQ ID NO: 3336141 - RNA, 19 nt, Human
auuuucccuauuagagaag

SEQ ID NO: 3336142 - RNA, 20 nt, Human
auuuuggaaaauaaauuauu

SEQ ID NO: 3336143 - RNA, 19 nt, Human
auuuuggaaaauaaauuau

SEQ ID NO: 3336144 - RNA, 14 nt, Human
auuuuggaaaauaa

SEQ ID NO: 3336145 - RNA, 18 nt, Human
auuuugcuuugugauuuu

SEQ ID NO: 3336146 - RNA, 20 nt, Human
auuuugcuuugugauuuuug

SEQ ID NO: 3336147 - RNA, 12 nt, Human
auuuugcuuugu

SEQ ID NO: 3336148 - RNA, 23 nt, Human
auuuugucauauaagauucauau

SEQ ID NO: 3336149 - RNA, 19 nt, Human
auuuugugcccccauguaa

SEQ ID NO: 3336150 - RNA, 22 nt, Human
auuuuucuuagggaaggauaca

SEQ ID NO: 3336151 - RNA, 21 nt, Human
auuuuucuuagggaaggauac

SEQ ID NO: 3336152 - RNA, 13 nt, Human
auuuuuuaaaugc

SEQ ID NO: 3336153 - RNA, 14 nt, Human
auuuuuuaaaugca

SEQ ID NO: 3336154 - RNA, 12 nt, Human
auuuuuguaauu

SEQ ID NO: 3336155 - RNA, 19 nt, Human
auuuuuguagagccagggu

SEQ ID NO: 3336156 - RNA, 14 nt, Human
auuaucuagauacu

SEQ ID NO: 3336157 - RNA, 18 nt, Human
auuaucuagauacuguau

SEQ ID NO: 3336158 - RNA, 14 nt, Human
auucagacagcugc

SEQ ID NO: 3336159 - RNA, 15 nt, Human
auucagacagcugcc

SEQ ID NO: 3336160 - RNA, 16 nt, Human
auucagacagcugccu

SEQ ID NO: 3336161 - RNA, 17 nt, Human
auucagacagcugccug

SEQ ID NO: 3336162 - RNA, 18 nt, Human
auucagacagcugccugg

SEQ ID NO: 3336163 - RNA, 12 nt, Human
auucaggaagcu

SEQ ID NO: 3336164 - RNA, 12 nt, Human
auucagacagcu

SEQ ID NO: 3336165 - RNA, 13 nt, Human
auucagacagcug

SEQ ID NO: 3336166 - RNA, 11 nt, Human
auucagacagc

SEQ ID NO: 3336167 - RNA, 19 nt, Human
auucuguuggccaguguga

SEQ ID NO: 3336168 - RNA, 14 nt, Human
auucuguuggccag

SEQ ID NO: 3336169 - RNA, 22 nt, Human
auucugcucacauaucugucau

SEQ ID NO: 3336170 - RNA, 21 nt, Human
auucugcucacauaucuguca

SEQ ID NO: 3336171 - RNA, 20 nt, Human
auucugcucacauaucuguc

SEQ ID NO: 3336172 - RNA, 19 nt, Human
auucugcucacauaucugu

SEQ ID NO: 3336173 - RNA, 21 nt, Human
auucugccugcccaggccccu

SEQ ID NO: 3336174 - RNA, 20 nt, Human
auucugccugcccaggcccc

SEQ ID NO: 3336175 - RNA, 18 nt, Human
auucugcucacauaucug

SEQ ID NO: 3336176 - RNA, 19 nt, Human
auucugccugcccaggccc

SEQ ID NO: 3336177 - RNA, 18 nt, Human
auucugccugcccaggcc

SEQ ID NO: 3336178 - RNA, 17 nt, Human
auucugccugcccaggc

SEQ ID NO: 3336179 - RNA, 16 nt, Human
auucugccugcccagg

SEQ ID NO: 3336180 - RNA, 15 nt, Human
auucugccugcccag

SEQ ID NO: 3336181 - RNA, 14 nt, Human
auucugccugccca

SEQ ID NO: 3336182 - RNA, 13 nt, Human
auucugccugccc

SEQ ID NO: 3336183 - RNA, 11 nt, Human
auucugccugc

SEQ ID NO: 3336184 - RNA, 17 nt, Human
auucucauuugucacac

SEQ ID NO: 3336185 - RNA, 14 nt, Human
auucuuaaauaugu

SEQ ID NO: 3336186 - RNA, 17 nt, Human
auugaaaucuuuuugcu

SEQ ID NO: 3336187 - RNA, 18 nt, Human
auugaaaucuuuuugcuu

SEQ ID NO: 3336188 - RNA, 20 nt, Human
auugaaaucuuuuugcuuug

SEQ ID NO: 3336189 - RNA, 12 nt, Human
auugaaaucuuu

SEQ ID NO: 3336190 - RNA, 17 nt, Human
auugaccugaggcccuu

SEQ ID NO: 3336191 - RNA, 15 nt, Human
ugcccaggcaggucu

SEQ ID NO: 3336192 - RNA, 14 nt, Human
ugcccacaggauca

SEQ ID NO: 3336193 - RNA, 11 nt, Human
ugcccaggccc

SEQ ID NO: 3336194 - RNA, 20 nt, Human
ugcccaggcaggucuugaac

SEQ ID NO: 3336195 - RNA, 17 nt, Human
ugcccaggcaggucuug

SEQ ID NO: 3336196 - RNA, 16 nt, Human
ugcccaggcaggucuu

SEQ ID NO: 3336197 - RNA, 22 nt, Human
ugcccaggccccugccacccug

SEQ ID NO: 3336198 - RNA, 20 nt, Human
ugcccaggccccugccaccc

SEQ ID NO: 3336199 - RNA, 12 nt, Human
ugcccaggcccc

SEQ ID NO: 3336200 - RNA, 14 nt, Human
agcucagggccugg

SEQ ID NO: 3336201 - RNA, 15 nt, Human
agcucagggccuggc

SEQ ID NO: 3336202 - RNA, 16 nt, Human
agcucagggccuggcu

SEQ ID NO: 3336203 - RNA, 19 nt, Human
ugccauguuggccaggcug

SEQ ID NO: 3336204 - RNA, 18 nt, Human
ugccauguuggccaggcu

SEQ ID NO: 3336205 - RNA, 17 nt, Human
agcucagggccuggcuc

SEQ ID NO: 3336206 - RNA, 17 nt, Human
ugccauguuggccaggc

SEQ ID NO: 3336207 - RNA, 20 nt, Human
ugccauguuggccaggcugg

SEQ ID NO: 3336208 - RNA, 21 nt, Human
ugccauguuggccaggcuggu

SEQ ID NO: 3336209 - RNA, 16 nt, Human
ugccauguuggccagg

SEQ ID NO: 3336210 - RNA, 19 nt, Human
ugcauuugaaaauuuugau

SEQ ID NO: 3336211 - RNA, 23 nt, Human
ugcauuugaaaauuuugauguuu

SEQ ID NO: 3336212 - RNA, 14 nt, Human
agcgcccaguuggg

SEQ ID NO: 3336213 - RNA, 15 nt, Human
ugccagucaccccgg

SEQ ID NO: 3336214 - RNA, 16 nt, Human
ugccagucaccccggc

SEQ ID NO: 3336215 - RNA, 18 nt, Human
ugccagucaccccggcca

SEQ ID NO: 3336216 - RNA, 20 nt, Human
ugccagucaccccggccacc

SEQ ID NO: 3336217 - RNA, 15 nt, Human
ugccauauucuguug

SEQ ID NO: 3336218 - RNA, 17 nt, Human
ugccauauucuguuggc

SEQ ID NO: 3336219 - RNA, 16 nt, Human
ugccauauucuguugg

SEQ ID NO: 3336220 - RNA, 22 nt, Human
ugccagucaccccggccaccug

SEQ ID NO: 3336221 - RNA, 23 nt, Human
ugccagucaccccggccaccugc

SEQ ID NO: 3336222 - RNA, 21 nt, Human
ugccauauucuguuggccagu

SEQ ID NO: 3336223 - RNA, 20 nt, Human
ugccauauucuguuggccag

SEQ ID NO: 3336224 - RNA, 15 nt, Human
agcggggacagcucc

SEQ ID NO: 3336225 - RNA, 17 nt, Human
agcggggacagcuccuu

SEQ ID NO: 3336226 - RNA, 16 nt, Human
agcggggacagcuccu

SEQ ID NO: 3336227 - RNA, 15 nt, Human
agcgugagccacugc

SEQ ID NO: 3336228 - RNA, 13 nt, Human
agcgugagccacu

SEQ ID NO: 3336229 - RNA, 20 nt, Human
agcgugguggacaugcacag

SEQ ID NO: 3336230 - RNA, 15 nt, Human
agcgugcauaaguua

SEQ ID NO: 3336231 - RNA, 16 nt, Human
agcgugagccacugca

SEQ ID NO: 3336232 - RNA, 23 nt, Human
agcgugguggacaugcacagcua

SEQ ID NO: 3336233 - RNA, 12 nt, Human
ugcacuccccug

SEQ ID NO: 3336234 - RNA, 13 nt, Human
ugcacuccccugc

SEQ ID NO: 3336235 - RNA, 19 nt, Human
ugcacguacacacacauac

SEQ ID NO: 3336236 - RNA, 14 nt, Human
ugcaccacugcacu

SEQ ID NO: 3336237 - RNA, 18 nt, Human
ugcacaagcuccaagcuc

SEQ ID NO: 3336238 - RNA, 20 nt, Human
ugcacaagcuccaagcuccc

SEQ ID NO: 3336239 - RNA, 22 nt, Human
ugcacaagcuccaagcucccag

SEQ ID NO: 3336240 - RNA, 23 nt, Human
ugcacaagcuccaagcucccagg

SEQ ID NO: 3336241 - RNA, 15 nt, Human
ugcacaagcuccaag

SEQ ID NO: 3336242 - RNA, 16 nt, Human
ugcacaagcuccaagc

SEQ ID NO: 3336243 - RNA, 15 nt, Human
ugcacacaccagagc

SEQ ID NO: 3336244 - RNA, 20 nt, Human
ugcacuuuguucuggcucuu

SEQ ID NO: 3336245 - RNA, 18 nt, Human
ugcagacucuacagaggc

SEQ ID NO: 3336246 - RNA, 20 nt, Human
ugcagacucuacagaggcca

SEQ ID NO: 3336247 - RNA, 19 nt, Human
ugcagacucuacagaggcc

SEQ ID NO: 3336248 - RNA, 22 nt, Human
ugcagacucuacagaggccaug

SEQ ID NO: 3336249 - RNA, 17 nt, Human
agccuaggugacagagu

SEQ ID NO: 3336250 - RNA, 15 nt, Human
agccuaggugacaga

SEQ ID NO: 3336251 - RNA, 15 nt, Human
agccucaaccuccug

SEQ ID NO: 3336252 - RNA, 22 nt, Human
ugcauaccacuuuuguucuugg

SEQ ID NO: 3336253 - RNA, 21 nt, Human
ugcauaccacuuuuguucuug

SEQ ID NO: 3336254 - RNA, 20 nt, Human
ugcaugaaguaauaugcaca

SEQ ID NO: 3336255 - RNA, 22 nt, Human
ugcaugaaguaauaugcacaca

SEQ ID NO: 3336256 - RNA, 21 nt, Human
ugcaugaggcuaguguggugu

SEQ ID NO: 3336257 - RNA, 14 nt, Human
ugcaugcugucccu

SEQ ID NO: 3336258 - RNA, 15 nt, Human
ugcaugcugucccuu

SEQ ID NO: 3336259 - RNA, 13 nt, Human
ugcaugcuguccc

SEQ ID NO: 3336260 - RNA, 16 nt, Human
agccugccucuucucu

SEQ ID NO: 3336261 - RNA, 19 nt, Human
agccugccucuucucuacu

SEQ ID NO: 3336262 - RNA, 23 nt, Human
agccugcaguuauuaacacuaac

SEQ ID NO: 3336263 - RNA, 19 nt, Human
ugcagccucaaccuccugg

SEQ ID NO: 3336264 - RNA, 18 nt, Human
ugcagccucaaccuccug

SEQ ID NO: 3336265 - RNA, 14 nt, Human
agccucagcauccu

SEQ ID NO: 3336266 - RNA, 13 nt, Human
agccucagcaucc

SEQ ID NO: 3336267 - RNA, 18 nt, Human
agccucaaccuccugggc

SEQ ID NO: 3336268 - RNA, 17 nt, Human
agccucaaccuccuggg

SEQ ID NO: 3336269 - RNA, 15 nt, Human
agccucagcauccug

SEQ ID NO: 3336270 - RNA, 17 nt, Human
ugcauaaguuaacuucc

SEQ ID NO: 3336271 - RNA, 14 nt, Human
ugcagugagccgag

SEQ ID NO: 3336272 - RNA, 15 nt, Human
ugccucucucaggcc

SEQ ID NO: 3336273 - RNA, 21 nt, Human
ugccucugacacacagcucug

SEQ ID NO: 3336274 - RNA, 20 nt, Human
ugccucugacacacagcucu

SEQ ID NO: 3336275 - RNA, 13 nt, Human
ugccucccaucac

SEQ ID NO: 3336276 - RNA, 14 nt, Human
ugccucccaucacc

SEQ ID NO: 3336277 - RNA, 13 nt, Human
ugccucucucagg

SEQ ID NO: 3336278 - RNA, 14 nt, Human
ugccucucucaggc

SEQ ID NO: 3336279 - RNA, 18 nt, Human
agcugcauacaguuugca

SEQ ID NO: 3336280 - RNA, 13 nt, Human
agcugccaccugc

SEQ ID NO: 3336281 - RNA, 19 nt, Human
ugcccuccaagaccuucuc

SEQ ID NO: 3336282 - RNA, 20 nt, Human
ugcccuccaagaccuucucc

SEQ ID NO: 3336283 - RNA, 22 nt, Human
ugcccuccaagaccuucuccuu

SEQ ID NO: 3336284 - RNA, 20 nt, Human
agcucugguccauagagagc

SEQ ID NO: 3336285 - RNA, 22 nt, Human
agcucugcuccucuccccagca

SEQ ID NO: 3336286 - RNA, 12 nt, Human
agcucugcuccu

SEQ ID NO: 3336287 - RNA, 12 nt, Human
agcucuguccug

SEQ ID NO: 3336288 - RNA, 17 nt, Human
agcucuucuccaggcug

SEQ ID NO: 3336289 - RNA, 18 nt, Human
agcucuucuccaggcugu

SEQ ID NO: 3336290 - RNA, 18 nt, Human
agcugcacccucaggcag

SEQ ID NO: 3336291 - RNA, 19 nt, Human
agcugcacccucaggcagg

SEQ ID NO: 3336292 - RNA, 20 nt, Human
agcugcacccucaggcaggu

SEQ ID NO: 3336293 - RNA, 22 nt, Human
agcugcacccucaggcaggugg

SEQ ID NO: 3336294 - RNA, 13 nt, Human
agcugcacccuca

SEQ ID NO: 3336295 - RNA, 17 nt, Human
agcugcacccucaggca

SEQ ID NO: 3336296 - RNA, 14 nt, Human
agcugggcagguug

SEQ ID NO: 3336297 - RNA, 19 nt, Human
agcugggacuacaggugug

SEQ ID NO: 3336298 - RNA, 17 nt, Human
agcugggacuacaggug

SEQ ID NO: 3336299 - RNA, 23 nt, Human
agcugggaugauuggagggggga

SEQ ID NO: 3336300 - RNA, 22 nt, Human
ugccucugacacacagcucugu

SEQ ID NO: 3336301 - RNA, 21 nt, Human
agcugccugggaucccucauc

SEQ ID NO: 3336302 - RNA, 13 nt, Human
agcugccugggau

SEQ ID NO: 3336303 - RNA, 19 nt, Human
agcugccugggaucccuca

SEQ ID NO: 3336304 - RNA, 13 nt, Human
ugcgaaaggauga

SEQ ID NO: 3336305 - RNA, 17 nt, Human
ugcggacagccacggcc

SEQ ID NO: 3336306 - RNA, 18 nt, Human
ugcggacagccacggcca

SEQ ID NO: 3336307 - RNA, 19 nt, Human
ugcgaaaggaugaaaguga

SEQ ID NO: 3336308 - RNA, 16 nt, Human
ugccuguucagcucca

SEQ ID NO: 3336309 - RNA, 15 nt, Human
ugccuguucagcucc

SEQ ID NO: 3336310 - RNA, 20 nt, Human
ugcggacagccacggccagg

SEQ ID NO: 3336311 - RNA, 12 nt, Human
agcuuaucucag

SEQ ID NO: 3336312 - RNA, 14 nt, Human
agcuuaucucaggg

SEQ ID NO: 3336313 - RNA, 15 nt, Human
agcuuaucucagggg

SEQ ID NO: 3336314 - RNA, 20 nt, Human
agcuuguaaauagcucaggu

SEQ ID NO: 3336315 - RNA, 19 nt, Human
agcuuguaaauagcucagg

SEQ ID NO: 3336316 - RNA, 18 nt, Human
agcuuguaaauagcucag

SEQ ID NO: 3336317 - RNA, 21 nt, Human
aggaaacccagcucuggucca

SEQ ID NO: 3336318 - RNA, 18 nt, Human
aggaaacccagcucuggu

SEQ ID NO: 3336319 - RNA, 20 nt, Human
aggaaacccagcucuggucc

SEQ ID NO: 3336320 - RNA, 16 nt, Human
aggaaacccagcucug

SEQ ID NO: 3336321 - RNA, 17 nt, Human
aggaaacccagcucugg

SEQ ID NO: 3336322 - RNA, 15 nt, Human
aggaaacccagcucu

SEQ ID NO: 3336323 - RNA, 16 nt, Human
aggaaaagcugcugac

SEQ ID NO: 3336324 - RNA, 12 nt, Human
agcuuugaaaau

SEQ ID NO: 3336325 - RNA, 16 nt, Human
agcuuugaaaauucag

SEQ ID NO: 3336326 - RNA, 18 nt, Human
agcuuugaaaauucagug

SEQ ID NO: 3336327 - RNA, 19 nt, Human
agcuuugaaaauucagugg

SEQ ID NO: 3336328 - RNA, 16 nt, Human
aggaaagaggcucugg

SEQ ID NO: 3336329 - RNA, 17 nt, Human
aggaaagcaaaggagau

SEQ ID NO: 3336330 - RNA, 12 nt, Human
aggaaagaggcu

SEQ ID NO: 3336331 - RNA, 13 nt, Human
aggaaagaggcuc

SEQ ID NO: 3336332 - RNA, 17 nt, Human
ugcugacuguuuucucu

SEQ ID NO: 3336333 - RNA, 18 nt, Human
ugcucugcauguuacaua

SEQ ID NO: 3336334 - RNA, 15 nt, Human
ugcucugcauguuac

SEQ ID NO: 3336335 - RNA, 17 nt, Human
ugcucuggacaggcaug

SEQ ID NO: 3336336 - RNA, 22 nt, Human
ugcucugaucauccacugugcc

SEQ ID NO: 3336337 - RNA, 19 nt, Human
ugcucugaucauccacugu

SEQ ID NO: 3336338 - RNA, 21 nt, Human
ugcugacuguuuucucuugag

SEQ ID NO: 3336339 - RNA, 24 nt, Human
ugcugacuguuuucucuugagagg

SEQ ID NO: 3336340 - RNA, 16 nt, Human
ugcugacuguuuucuc

SEQ ID NO: 3336341 - RNA, 19 nt, Human
aggaaagcaaaggagauug

SEQ ID NO: 3336342 - RNA, 16 nt, Human
aggaaaggcuccagga

SEQ ID NO: 3336343 - RNA, 18 nt, Human
aggaaaggcuccaggagc

SEQ ID NO: 3336344 - RNA, 20 nt, Human
aggaaaggcuccaggagcag

SEQ ID NO: 3336345 - RNA, 22 nt, Human
aggaaaggcuccaggagcagcc

SEQ ID NO: 3336346 - RNA, 11 nt, Human
ugcugccaucc

SEQ ID NO: 3336347 - RNA, 15 nt, Human
ugcugccauccaggu

SEQ ID NO: 3336348 - RNA, 14 nt, Human
ugcugccauccagg

SEQ ID NO: 3336349 - RNA, 13 nt, Human
ugcugccauccag

SEQ ID NO: 3336350 - RNA, 12 nt, Human
ugcugccaucca

SEQ ID NO: 3336351 - RNA, 22 nt, Human
ugcugccauccagguucagcuu

SEQ ID NO: 3336352 - RNA, 21 nt, Human
ugcugccauccagguucagcu

SEQ ID NO: 3336353 - RNA, 15 nt, Human
aggaagacuuuggaa

SEQ ID NO: 3336354 - RNA, 14 nt, Human
aggaagacuuugga

SEQ ID NO: 3336355 - RNA, 14 nt, Human
aggaagagaaaaaa

SEQ ID NO: 3336356 - RNA, 18 nt, Human
aggaagcucagggccugg

SEQ ID NO: 3336357 - RNA, 22 nt, Human
aggaagcucagggccuggcuca

SEQ ID NO: 3336358 - RNA, 17 nt, Human
aggaagcucagggccug

SEQ ID NO: 3336359 - RNA, 16 nt, Human
aggaagcucagggccu

SEQ ID NO: 3336360 - RNA, 20 nt, Human
aggaauccagacccggcugc

SEQ ID NO: 3336361 - RNA, 23 nt, Human
aggaauccagacccggcugcgug

SEQ ID NO: 3336362 - RNA, 13 nt, Human
uggcccacugcau

SEQ ID NO: 3336363 - RNA, 14 nt, Human
uggcccacugcauc

SEQ ID NO: 3336364 - RNA, 13 nt, Human
uggcccacgcacu

SEQ ID NO: 3336365 - RNA, 19 nt, Human
uggcccacgcacuucggga

SEQ ID NO: 3336366 - RNA, 22 nt, Human
uggcaugggaaugaaugucagu

SEQ ID NO: 3336367 - RNA, 19 nt, Human
uggccucugcacuccccug

SEQ ID NO: 3336368 - RNA, 18 nt, Human
uggccucugcacuccccu

SEQ ID NO: 3336369 - RNA, 20 nt, Human
uggccucugcacuccccugc

SEQ ID NO: 3336370 - RNA, 18 nt, Human
uggccugagcugggauga

SEQ ID NO: 3336371 - RNA, 18 nt, Human
aggccuucucugaaggac

SEQ ID NO: 3336372 - RNA, 17 nt, Human
aggccuucucugaagga

SEQ ID NO: 3336373 - RNA, 14 nt, Human
aggcuccaggagca

SEQ ID NO: 3336374 - RNA, 16 nt, Human
aggcuccaggagcagc

SEQ ID NO: 3336375 - RNA, 13 nt, Human
aggcuccaggagc

SEQ ID NO: 3336376 - RNA, 16 nt, Human
uggcaccagcagccug

SEQ ID NO: 3336377 - RNA, 17 nt, Human
uggcaccagcagccugg

SEQ ID NO: 3336378 - RNA, 12 nt, Human
aggccagagaca

SEQ ID NO: 3336379 - RNA, 16 nt, Human
uggcagcucagagagg

SEQ ID NO: 3336380 - RNA, 13 nt, Human
aggccagagacac

SEQ ID NO: 3336381 - RNA, 18 nt, Human
aggccagagacacaagcc

SEQ ID NO: 3336382 - RNA, 14 nt, Human
uggcagcucagaga

SEQ ID NO: 3336383 - RNA, 15 nt, Human
uggcagcucagagag

SEQ ID NO: 3336384 - RNA, 13 nt, Human
uggcagcucagag

SEQ ID NO: 3336385 - RNA, 23 nt, Human
aggccagagacacaagccuucgg

SEQ ID NO: 3336386 - RNA, 18 nt, Human
aggccaugggccuccugu

SEQ ID NO: 3336387 - RNA, 17 nt, Human
aggccaugggccuccug

SEQ ID NO: 3336388 - RNA, 15 nt, Human
aggcccagagggccu

SEQ ID NO: 3336389 - RNA, 16 nt, Human
aggcccagagggccug

SEQ ID NO: 3336390 - RNA, 16 nt, Human
aggcccggcuccaggc

SEQ ID NO: 3336391 - RNA, 15 nt, Human
aggcccggcuccagg

SEQ ID NO: 3336392 - RNA, 14 nt, Human
aggcccggcuccag

SEQ ID NO: 3336393 - RNA, 21 nt, Human
aggccccugccacccugggga

SEQ ID NO: 3336394 - RNA, 12 nt, Human
aggccccugcca

SEQ ID NO: 3336395 - RNA, 18 nt, Human
aggccccugccacccugg

SEQ ID NO: 3336396 - RNA, 17 nt, Human
aggccccugccacccug

SEQ ID NO: 3336397 - RNA, 19 nt, Human
aggcccagagggccugcaa

SEQ ID NO: 3336398 - RNA, 15 nt, Human
aggccccugccaccc

SEQ ID NO: 3336399 - RNA, 13 nt, Human
aggccccugccac

SEQ ID NO: 3336400 - RNA, 13 nt, Human
aggccuggccaga

SEQ ID NO: 3336401 - RNA, 12 nt, Human
aggccuggccag

SEQ ID NO: 3336402 - RNA, 21 nt, Human
aggcagccccauucugccugc

SEQ ID NO: 3336403 - RNA, 20 nt, Human
aggcagccccauucugccug

SEQ ID NO: 3336404 - RNA, 19 nt, Human
aggcagccccauucugccu

SEQ ID NO: 3336405 - RNA, 22 nt, Human
aggcagccccauucugccugcc

SEQ ID NO: 3336406 - RNA, 14 nt, Human
aggcagguccaggg

SEQ ID NO: 3336407 - RNA, 22 nt, Human
aggcagggucucacucugucgc

SEQ ID NO: 3336408 - RNA, 21 nt, Human
aggcagggucucacucugucg

SEQ ID NO: 3336409 - RNA, 20 nt, Human
aggcagggucucacucuguc

SEQ ID NO: 3336410 - RNA, 18 nt, Human
aggcagggucucacucug

SEQ ID NO: 3336411 - RNA, 19 nt, Human
aggcagggucucacucugu

SEQ ID NO: 3336412 - RNA, 21 nt, Human
aggcaggucuugaacuccugg

SEQ ID NO: 3336413 - RNA, 11 nt, Human
uggacuuuguu

SEQ ID NO: 3336414 - RNA, 22 nt, Human
uggacuuuguuaguuucuccaa

SEQ ID NO: 3336415 - RNA, 24 nt, Human
uggacuuuguuaguuucuccaagc

SEQ ID NO: 3336416 - RNA, 16 nt, Human
aggcaaugcuggcugu

SEQ ID NO: 3336417 - RNA, 15 nt, Human
aggcaaugcuggcug

SEQ ID NO: 3336418 - RNA, 15 nt, Human
aggaugcuuguacau

SEQ ID NO: 3336419 - RNA, 16 nt, Human
aggaugcuuguacaua

SEQ ID NO: 3336420 - RNA, 21 nt, Human
aggauccugagccagauuuca

SEQ ID NO: 3336421 - RNA, 18 nt, Human
aggauccugagccagauu

SEQ ID NO: 3336422 - RNA, 22 nt, Human
aggauugcuacuguccuaccca

SEQ ID NO: 3336423 - RNA, 15 nt, Human
uggacaccggaaaca

SEQ ID NO: 3336424 - RNA, 19 nt, Human
aggcaacugcauuggcuuu

SEQ ID NO: 3336425 - RNA, 14 nt, Human
aggcaagcaccucc

SEQ ID NO: 3336426 - RNA, 12 nt, Human
uggaacacucug

SEQ ID NO: 3336427 - RNA, 13 nt, Human
uggaagcuccgcu

SEQ ID NO: 3336428 - RNA, 20 nt, Human
uggaaguacuauaauuuacc

SEQ ID NO: 3336429 - RNA, 18 nt, Human
uggaaguacuauaauuua

SEQ ID NO: 3336430 - RNA, 10 nt, Human
ugcugcccug

SEQ ID NO: 3336431 - RNA, 21 nt, Human
aggaguuugagaccaaccugg

SEQ ID NO: 3336432 - RNA, 15 nt, Human
aggaggccagccuug

SEQ ID NO: 3336433 - RNA, 22 nt, Human
aggcugggggaagaagcucucu

SEQ ID NO: 3336434 - RNA, 14 nt, Human
aggcuggguucuga

SEQ ID NO: 3336435 - RNA, 21 nt, Human
aggcugggcuucaguggcagc

SEQ ID NO: 3336436 - RNA, 20 nt, Human
aggcugggcuucaguggcag

SEQ ID NO: 3336437 - RNA, 19 nt, Human
aggcugggcuucaguggca

SEQ ID NO: 3336438 - RNA, 18 nt, Human
aggcugggcuucaguggc

SEQ ID NO: 3336439 - RNA, 23 nt, Human
aggcugggcuucaguggcagcug

SEQ ID NO: 3336440 - RNA, 22 nt, Human
aggcugggcuucaguggcagcu

SEQ ID NO: 3336441 - RNA, 17 nt, Human
aggcugggggaagaagc

SEQ ID NO: 3336442 - RNA, 21 nt, Human
aggcugggcucccuucccacc

SEQ ID NO: 3336443 - RNA, 23 nt, Human
aggcugggcucccuucccaccuc

SEQ ID NO: 3336444 - RNA, 14 nt, Human
aggcugggcuucag

SEQ ID NO: 3336445 - RNA, 14 nt, Human
aggcugggcucccu

SEQ ID NO: 3336446 - RNA, 18 nt, Human
aggcugggcucccuuccc

SEQ ID NO: 3336447 - RNA, 13 nt, Human
aggcugggcuccc

SEQ ID NO: 3336448 - RNA, 20 nt, Human
aggcugggagagccuuccag

SEQ ID NO: 3336449 - RNA, 21 nt, Human
aggcugggagagccuuccagg

SEQ ID NO: 3336450 - RNA, 22 nt, Human
aggcugggagagccuuccaggg

SEQ ID NO: 3336451 - RNA, 19 nt, Human
aggcugggagagccuucca

SEQ ID NO: 3336452 - RNA, 16 nt, Human
aggcugggagagccuu

SEQ ID NO: 3336453 - RNA, 21 nt, Human
aggcuuagucacugagacagc

SEQ ID NO: 3336454 - RNA, 22 nt, Human
aggcuuagucacugagacagcc

SEQ ID NO: 3336455 - RNA, 23 nt, Human
aggcuuagucacugagacagccc

SEQ ID NO: 3336456 - RNA, 15 nt, Human
aggcuuauauucaac

SEQ ID NO: 3336457 - RNA, 17 nt, Human
aggcuuauauucaacca

SEQ ID NO: 3336458 - RNA, 16 nt, Human
aggcuuauauucaacc

SEQ ID NO: 3336459 - RNA, 21 nt, Human
aggcuuauauucaaccaugga

SEQ ID NO: 3336460 - RNA, 18 nt, Human
aggcuuauauucaaccau

SEQ ID NO: 3336461 - RNA, 15 nt, Human
uggcuuuugugcauu

SEQ ID NO: 3336462 - RNA, 16 nt, Human
uggcuuuugugcauua

SEQ ID NO: 3336463 - RNA, 17 nt, Human
uggcuucacggaagagc

SEQ ID NO: 3336464 - RNA, 20 nt, Human
uggcuucacggaagagccuu

SEQ ID NO: 3336465 - RNA, 21 nt, Human
uggcuuuugugcauuaucuag

SEQ ID NO: 3336466 - RNA, 23 nt, Human
uggcugcaaaggguaucaggugc

SEQ ID NO: 3336467 - RNA, 18 nt, Human
uggcuguuggcugggggc

SEQ ID NO: 3336468 - RNA, 16 nt, Human
uggcuguuggcugggg

SEQ ID NO: 3336469 - RNA, 14 nt, Human
uggcuucacggaag

SEQ ID NO: 3336470 - RNA, 23 nt, Human
uggcuguuggcugggggccucag

SEQ ID NO: 3336471 - RNA, 15 nt, Human
uggcuguuggcuggg

SEQ ID NO: 3336472 - RNA, 13 nt, Human
uggcucacgccug

SEQ ID NO: 3336473 - RNA, 18 nt, Human
uggcucaaguccucuuuu

SEQ ID NO: 3336474 - RNA, 19 nt, Human
uggcuaauguacugcauau

SEQ ID NO: 3336475 - RNA, 17 nt, Human
uggcuaauguacugcau

SEQ ID NO: 3336476 - RNA, 17 nt, Human
aggcuccaggagcagcc

SEQ ID NO: 3336477 - RNA, 18 nt, Human
aggcuccaggagcagcca

SEQ ID NO: 3336478 - RNA, 19 nt, Human
aggcuccaggagcagccac

SEQ ID NO: 3336479 - RNA, 23 nt, Human
aggcuccaggagcagccacauuc

SEQ ID NO: 3336480 - RNA, 14 nt, Human
uggcuaaauucaug

SEQ ID NO: 3336481 - RNA, 17 nt, Human
agggagggcuccagaca

SEQ ID NO: 3336482 - RNA, 19 nt, Human
agggagggcuccagacaca

SEQ ID NO: 3336483 - RNA, 12 nt, Human
agggagggcucc

SEQ ID NO: 3336484 - RNA, 17 nt, Human
agggagggagggcucca

SEQ ID NO: 3336485 - RNA, 22 nt, Human
agggagggcuccagacacaugu

SEQ ID NO: 3336486 - RNA, 20 nt, Human
agggaguccgaaagggacuu

SEQ ID NO: 3336487 - RNA, 20 nt, Human
agggagugaguugauagcac

SEQ ID NO: 3336488 - RNA, 20 nt, Human
agggagugacagaggcagcc

SEQ ID NO: 3336489 - RNA, 23 nt, Human
agggaguccgaaagggacuugga

SEQ ID NO: 3336490 - RNA, 13 nt, Human
agggcccagagag

SEQ ID NO: 3336491 - RNA, 12 nt, Human
agggcccagaga

SEQ ID NO: 3336492 - RNA, 20 nt, Human
agggcuccagacacaugucc

SEQ ID NO: 3336493 - RNA, 15 nt, Human
agggcuccagacaca

SEQ ID NO: 3336494 - RNA, 14 nt, Human
agggcccagagagg

SEQ ID NO: 3336495 - RNA, 14 nt, Human
ugggcucccuuccc

SEQ ID NO: 3336496 - RNA, 21 nt, Human
ugggcucccuucccaccucuc

SEQ ID NO: 3336497 - RNA, 16 nt, Human
ugggacuacaggugug

SEQ ID NO: 3336498 - RNA, 16 nt, Human
ugggacuacaggcacc

SEQ ID NO: 3336499 - RNA, 18 nt, Human
ugggacuacaggcaccca

SEQ ID NO: 3336500 - RNA, 20 nt, Human
agggacuuggaagcuccgcu

SEQ ID NO: 3336501 - RNA, 19 nt, Human
agggacuuggaagcuccgc

SEQ ID NO: 3336502 - RNA, 18 nt, Human
agggacuuggaagcuccg

SEQ ID NO: 3336503 - RNA, 15 nt, Human
agggacuuggaagcu

SEQ ID NO: 3336504 - RNA, 21 nt, Human
ugggcaacccccagccugcua

SEQ ID NO: 3336505 - RNA, 16 nt, Human
ugggcagaaggaagac

SEQ ID NO: 3336506 - RNA, 20 nt, Human
ugggcagaaggaagacuuca

SEQ ID NO: 3336507 - RNA, 13 nt, Human
ugggcagaaggaa

SEQ ID NO: 3336508 - RNA, 12 nt, Human
ugggcagaagga

SEQ ID NO: 3336509 - RNA, 21 nt, Human
ugggagaaccaaaaagaggcu

SEQ ID NO: 3336510 - RNA, 22 nt, Human
ugggaggaucucuugagccugg

SEQ ID NO: 3336511 - RNA, 18 nt, Human
ugggaggauugcuugagc

SEQ ID NO: 3336512 - RNA, 21 nt, Human
ugggaggauugcuugagcuca

SEQ ID NO: 3336513 - RNA, 22 nt, Human
uguguuaucacccagaagaaaa

SEQ ID NO: 3336514 - RNA, 22 nt, Human
agugggcccaaugcacuuuguu

SEQ ID NO: 3336515 - RNA, 18 nt, Human
agugggggaucacagccu

SEQ ID NO: 3336516 - RNA, 20 nt, Human
ugugucagguggggcagcuu

SEQ ID NO: 3336517 - RNA, 12 nt, Human
ugugguuucauu

SEQ ID NO: 3336518 - RNA, 22 nt, Human
ugugucucuugguccugcugca

SEQ ID NO: 3336519 - RNA, 20 nt, Human
agugugguguuuccuggcac

SEQ ID NO: 3336520 - RNA, 21 nt, Human
agugugccugaagucccagau

SEQ ID NO: 3336521 - RNA, 20 nt, Human
agugugccugaagucccaga

SEQ ID NO: 3336522 - RNA, 20 nt, Human
agugugacugaucucucgug

SEQ ID NO: 3336523 - RNA, 17 nt, Human
uguuaugacuccagaau

SEQ ID NO: 3336524 - RNA, 13 nt, Human
uguuaugacucca

SEQ ID NO: 3336525 - RNA, 22 nt, Human
agugugguguuuccuggcacug

SEQ ID NO: 3336526 - RNA, 19 nt, Human
aguguuguggauuuaacag

SEQ ID NO: 3336527 - RNA, 20 nt, Human
aguguuguggauuuaacaga

SEQ ID NO: 3336528 - RNA, 13 nt, Human
aguuacucagaau

SEQ ID NO: 3336529 - RNA, 16 nt, Human
aguguuguggauuuaa

SEQ ID NO: 3336530 - RNA, 20 nt, Human
uguugcccaggcuggcgugc

SEQ ID NO: 3336531 - RNA, 23 nt, Human
uguugcccaggcuggcgugcagu

SEQ ID NO: 3336532 - RNA, 22 nt, Human
uguugccuaaguauuaaaacau

SEQ ID NO: 3336533 - RNA, 12 nt, Human
uguugccuaagu

SEQ ID NO: 3336534 - RNA, 14 nt, Human
uguggaugauaaaa

SEQ ID NO: 3336535 - RNA, 19 nt, Human
uguggauuuaacagaaaug

SEQ ID NO: 3336536 - RNA, 20 nt, Human
uguggauuuaacagaaaugu

SEQ ID NO: 3336537 - RNA, 23 nt, Human
agugagcugguuuuuagcggaga

SEQ ID NO: 3336538 - RNA, 18 nt, Human
ugugcugcccugcccacc

SEQ ID NO: 3336539 - RNA, 19 nt, Human
ugugcugcccugcccaccu

SEQ ID NO: 3336540 - RNA, 20 nt, Human
ugugcugcccugcccaccug

SEQ ID NO: 3336541 - RNA, 19 nt, Human
ugugcucuggacaggcaug

SEQ ID NO: 3336542 - RNA, 19 nt, Human
ugugcugagucugaaggcu

SEQ ID NO: 3336543 - RNA, 18 nt, Human
ugugcugagucugaaggc

SEQ ID NO: 3336544 - RNA, 16 nt, Human
agugaggaugaaaaaa

SEQ ID NO: 3336545 - RNA, 13 nt, Human
agugaggcucugc

SEQ ID NO: 3336546 - RNA, 12 nt, Human
agugaggcucug

SEQ ID NO: 3336547 - RNA, 17 nt, Human
agugcagugagccgaga

SEQ ID NO: 3336548 - RNA, 14 nt, Human
agugcaugcugucc

SEQ ID NO: 3336549 - RNA, 16 nt, Human
agugcaugcugucccu

SEQ ID NO: 3336550 - RNA, 16 nt, Human
ugugacugaucucucg

SEQ ID NO: 3336551 - RNA, 11 nt, Human
ugugaggaagc

SEQ ID NO: 3336552 - RNA, 16 nt, Human
agucuuagauguauau

SEQ ID NO: 3336553 - RNA, 14 nt, Human
agucuuagauguau

SEQ ID NO: 3336554 - RNA, 13 nt, Human
agucuuagaugua

SEQ ID NO: 3336555 - RNA, 16 nt, Human
agucucuugauucaua

SEQ ID NO: 3336556 - RNA, 17 nt, Human
agucucuugauucauaa

SEQ ID NO: 3336557 - RNA, 21 nt, Human
agugacugauggcuaauguac

SEQ ID NO: 3336558 - RNA, 16 nt, Human
agugaacuugggccac

SEQ ID NO: 3336559 - RNA, 12 nt, Human
agugagcugguu

SEQ ID NO: 3336560 - RNA, 22 nt, Human
ugugaugaugaaaugaggucag

SEQ ID NO: 3336561 - RNA, 19 nt, Human
ugugaugagaggaaaucac

SEQ ID NO: 3336562 - RNA, 18 nt, Human
ugugaugagaggaaauca

SEQ ID NO: 3336563 - RNA, 14 nt, Human
agugagagcugggu

SEQ ID NO: 3336564 - RNA, 14 nt, Human
agugagcacuaagg

SEQ ID NO: 3336565 - RNA, 21 nt, Human
uguacauggaauaacauguaa

SEQ ID NO: 3336566 - RNA, 21 nt, Human
aguacacuguuucaaacuuua

SEQ ID NO: 3336567 - RNA, 23 nt, Human
aguacacuguuucaaacuuuacu

SEQ ID NO: 3336568 - RNA, 20 nt, Human
aguacacuguuucaaacuuu

SEQ ID NO: 3336569 - RNA, 18 nt, Human
uguauauauuuccuauau

SEQ ID NO: 3336570 - RNA, 22 nt, Human
uguauauauuuccuauauuguu

SEQ ID NO: 3336571 - RNA, 17 nt, Human
uguaggguuauaauaau

SEQ ID NO: 3336572 - RNA, 16 nt, Human
uguaggguuauaauaa

SEQ ID NO: 3336573 - RNA, 20 nt, Human
uguacaugaaaacacauuuu

SEQ ID NO: 3336574 - RNA, 14 nt, Human
uguacaugaaaaca

SEQ ID NO: 3336575 - RNA, 19 nt, Human
uguacauaaugcgugcaua

SEQ ID NO: 3336576 - RNA, 20 nt, Human
uguacauaaugcgugcauac

SEQ ID NO: 3336577 - RNA, 20 nt, Human
uguaauuuuuuuaucgucac

SEQ ID NO: 3336578 - RNA, 17 nt, Human
uguaauuaaguacuaug

SEQ ID NO: 3336579 - RNA, 21 nt, Human
uguaauuaaguacuauguauc

SEQ ID NO: 3336580 - RNA, 19 nt, Human
uguaauuaaguacuaugua

SEQ ID NO: 3336581 - RNA, 18 nt, Human
uguaauuaaguacuaugu

SEQ ID NO: 3336582 - RNA, 20 nt, Human
agguuggcaaaaaggcagga

SEQ ID NO: 3336583 - RNA, 12 nt, Human
aggugggaggau

SEQ ID NO: 3336584 - RNA, 22 nt, Human
aggugugagucaccaagcccag

SEQ ID NO: 3336585 - RNA, 21 nt, Human
aggugugagucaccaagccca

SEQ ID NO: 3336586 - RNA, 16 nt, Human
aggugucccugcacuu

SEQ ID NO: 3336587 - RNA, 20 nt, Human
aggugugagucaccaagccc

SEQ ID NO: 3336588 - RNA, 14 nt, Human
agguugaagcacca

SEQ ID NO: 3336589 - RNA, 19 nt, Human
ugucccuuacgugaguccu

SEQ ID NO: 3336590 - RNA, 23 nt, Human
ugucccuuacgugaguccuggca

SEQ ID NO: 3336591 - RNA, 14 nt, Human
ugucccugcacuug

SEQ ID NO: 3336592 - RNA, 19 nt, Human
agucccaccuuggcugcag

SEQ ID NO: 3336593 - RNA, 18 nt, Human
agucccaccuuggcugca

SEQ ID NO: 3336594 - RNA, 16 nt, Human
agucccaccuuggcug

SEQ ID NO: 3336595 - RNA, 15 nt, Human
agucccaccuuggcu

SEQ ID NO: 3336596 - RNA, 14 nt, Human
aguccucccaucuc

SEQ ID NO: 3336597 - RNA, 16 nt, Human
aguccucccaucucac

SEQ ID NO: 3336598 - RNA, 23 nt, Human
agucucacuguugcccaggcugg

SEQ ID NO: 3336599 - RNA, 21 nt, Human
agucucacuguugcccaggcu

SEQ ID NO: 3336600 - RNA, 16 nt, Human
uguccaagaagcccag

SEQ ID NO: 3336601 - RNA, 17 nt, Human
uguccaagaagcccagg

SEQ ID NO: 3336602 - RNA, 18 nt, Human
uguccaagaagcccagga

SEQ ID NO: 3336603 - RNA, 22 nt, Human
uguccaagaagcccaggaaagg

SEQ ID NO: 3336604 - RNA, 23 nt, Human
ugucccugcacuugcagacucua

SEQ ID NO: 3336605 - RNA, 22 nt, Human
ugucccugcacuugcagacucu

SEQ ID NO: 3336606 - RNA, 20 nt, Human
ugucccugcacuugcagacu

SEQ ID NO: 3336607 - RNA, 22 nt, Human
ugucauuugagcagggcucagc

SEQ ID NO: 3336608 - RNA, 21 nt, Human
ugucauuugagcagggcucag

SEQ ID NO: 3336609 - RNA, 20 nt, Human
ugucauuugagcagggcuca

SEQ ID NO: 3336610 - RNA, 20 nt, Human
ugucagguggggcagcuuga

SEQ ID NO: 3336611 - RNA, 18 nt, Human
ugucagguggggcagcuu

SEQ ID NO: 3336612 - RNA, 17 nt, Human
ugucagguggggcagcu

SEQ ID NO: 3336613 - RNA, 14 nt, Human
uguccaagaagccc

SEQ ID NO: 3336614 - RNA, 15 nt, Human
uguccaagaagccca

SEQ ID NO: 3336615 - RNA, 16 nt, Human
ugucagguggggcagc

SEQ ID NO: 3336616 - RNA, 19 nt, Human
ugucauuugagcagggcuc

SEQ ID NO: 3336617 - RNA, 15 nt, Human
agucaccaagcccag

SEQ ID NO: 3336618 - RNA, 14 nt, Human
agucaccaagccca

SEQ ID NO: 3336619 - RNA, 19 nt, Human
aguauucuuauuuaaugaa

SEQ ID NO: 3336620 - RNA, 23 nt, Human
aguauuaaaacauuggauuaucc

SEQ ID NO: 3336621 - RNA, 22 nt, Human
aguauuaaaacauuggauuauc

SEQ ID NO: 3336622 - RNA, 19 nt, Human
aguauuaaaacauuggauu

SEQ ID NO: 3336623 - RNA, 16 nt, Human
aguauuaaaacauugg

SEQ ID NO: 3336624 - RNA, 15 nt, Human
aguauuaaaacauug

SEQ ID NO: 3336625 - RNA, 14 nt, Human
aguauuaaaacauu

SEQ ID NO: 3336626 - RNA, 13 nt, Human
aguauuaaaacau

SEQ ID NO: 3336627 - RNA, 14 nt, Human
auagagagagacca

SEQ ID NO: 3336628 - RNA, 16 nt, Human
auagacaauuuauuau

SEQ ID NO: 3336629 - RNA, 22 nt, Human
auagacaauuuauuauggcaca

SEQ ID NO: 3336630 - RNA, 23 nt, Human
auagacaauuuauuauggcacau

SEQ ID NO: 3336631 - RNA, 13 nt, Human
uuauuaugcauga

SEQ ID NO: 3336632 - RNA, 12 nt, Human
uuauuaugcaug

SEQ ID NO: 3336633 - RNA, 17 nt, Human
auacuccuccaagguua

SEQ ID NO: 3336634 - RNA, 14 nt, Human
auacucccaucugu

SEQ ID NO: 3336635 - RNA, 16 nt, Human
auacucugcuuagaau

SEQ ID NO: 3336636 - RNA, 11 nt, Human
auacucccauc

SEQ ID NO: 3336637 - RNA, 17 nt, Human
uuauaaacuuuaccuuu

SEQ ID NO: 3336638 - RNA, 18 nt, Human
uuauaaacuuuaccuuuu

SEQ ID NO: 3336639 - RNA, 16 nt, Human
auacagaggcaacugc

SEQ ID NO: 3336640 - RNA, 17 nt, Human
auacagaggcaacugca

SEQ ID NO: 3336641 - RNA, 18 nt, Human
auacaguuacucagaauu

SEQ ID NO: 3336642 - RNA, 23 nt, Human
auacaggaaaagcugcugacagu

SEQ ID NO: 3336643 - RNA, 22 nt, Human
auacaggaaaagcugcugacag

SEQ ID NO: 3336644 - RNA, 23 nt, Human
auacagauagauauaugcucugc

SEQ ID NO: 3336645 - RNA, 20 nt, Human
auacaguuacucagaauucu

SEQ ID NO: 3336646 - RNA, 20 nt, Human
auacauaaacaagaccacgu

SEQ ID NO: 3336647 - RNA, 19 nt, Human
auacuaaccagcagaaaug

SEQ ID NO: 3336648 - RNA, 20 nt, Human
auacuaaccagcagaaaugc

SEQ ID NO: 3336649 - RNA, 13 nt, Human
auacuaaccagca

SEQ ID NO: 3336650 - RNA, 14 nt, Human
auaccuuuuuuaga

SEQ ID NO: 3336651 - RNA, 11 nt, Human
auacgaacaaa

SEQ ID NO: 3336652 - RNA, 17 nt, Human
auaccacuuuuguucuu

SEQ ID NO: 3336653 - RNA, 18 nt, Human
auaccacuuuuguucuug

SEQ ID NO: 3336654 - RNA, 14 nt, Human
auacguacacauuu

SEQ ID NO: 3336655 - RNA, 15 nt, Human
auacguacacauuuu

SEQ ID NO: 3336656 - RNA, 16 nt, Human
auacguacacauuuua

SEQ ID NO: 3336657 - RNA, 13 nt, Human
auacguacacauu

SEQ ID NO: 3336658 - RNA, 13 nt, Human
auacgaacaaaac

SEQ ID NO: 3336659 - RNA, 17 nt, Human
uuaucacccagaagaaa

SEQ ID NO: 3336660 - RNA, 18 nt, Human
uuaucacccagaagaaaa

SEQ ID NO: 3336661 - RNA, 19 nt, Human
uuaucacccagaagaaaau

SEQ ID NO: 3336662 - RNA, 21 nt, Human
uuaucacccagaagaaaauag

SEQ ID NO: 3336663 - RNA, 11 nt, Human
uuaugacucca

SEQ ID NO: 3336664 - RNA, 22 nt, Human
uuaugggcuggguucuacccag

SEQ ID NO: 3336665 - RNA, 19 nt, Human
uuauggcuuuugugcauua

SEQ ID NO: 3336666 - RNA, 18 nt, Human
uuauggcuuuugugcauu

SEQ ID NO: 3336667 - RNA, 13 nt, Human
uuaugggcugggu

SEQ ID NO: 3336668 - RNA, 17 nt, Human
uuaaaaaucucaaauuu

SEQ ID NO: 3336669 - RNA, 20 nt, Human
uuaaaaaucucaaauuucua

SEQ ID NO: 3336670 - RNA, 19 nt, Human
uuaaaaaucucaaauuucu

SEQ ID NO: 3336671 - RNA, 22 nt, Human
aguuuguuaguaugaggcauuu

SEQ ID NO: 3336672 - RNA, 19 nt, Human
aguuucugccgcagcccug

SEQ ID NO: 3336673 - RNA, 15 nt, Human
aguuucugccgcagc

SEQ ID NO: 3336674 - RNA, 21 nt, Human
aguuucuccaagcaggacaug

SEQ ID NO: 3336675 - RNA, 14 nt, Human
aguuucucuuuuca

SEQ ID NO: 3336676 - RNA, 13 nt, Human
uuaacagaaaugu

SEQ ID NO: 3336677 - RNA, 14 nt, Human
uuaacagaaaugua

SEQ ID NO: 3336678 - RNA, 12 nt, Human
uuaacagaaaug

SEQ ID NO: 3336679 - RNA, 15 nt, Human
uuaaucuaaauggaa

SEQ ID NO: 3336680 - RNA, 23 nt, Human
uuaacuuuuauaaacuuuaccuu

SEQ ID NO: 3336681 - RNA, 22 nt, Human
uuaacuuuuauaaacuuuaccu

SEQ ID NO: 3336682 - RNA, 18 nt, Human
uuaacuuuuauaaacuuu

SEQ ID NO: 3336683 - RNA, 14 nt, Human
uuaccagcagagca

SEQ ID NO: 3336684 - RNA, 19 nt, Human
uuaccagcagagcaccuua

SEQ ID NO: 3336685 - RNA, 14 nt, Human
uuacaggugugaac

SEQ ID NO: 3336686 - RNA, 13 nt, Human
uuacuguacauga

SEQ ID NO: 3336687 - RNA, 14 nt, Human
uuacuguacaugaa

SEQ ID NO: 3336688 - RNA, 22 nt, Human
uuacuguacaugaaaacacauu

SEQ ID NO: 3336689 - RNA, 23 nt, Human
uuacuguacaugaaaacacauuu

SEQ ID NO: 3336690 - RNA, 12 nt, Human
uuacuguacaug

SEQ ID NO: 3336691 - RNA, 15 nt, Human
uuacugcagcuuugu

SEQ ID NO: 3336692 - RNA, 14 nt, Human
auaagauucauauu

SEQ ID NO: 3336693 - RNA, 16 nt, Human
uuagaagucacacagu

SEQ ID NO: 3336694 - RNA, 13 nt, Human
uuaguagagacag

SEQ ID NO: 3336695 - RNA, 14 nt, Human
uuaguagagacagg

SEQ ID NO: 3336696 - RNA, 13 nt, Human
uuauaaacuuuac

SEQ ID NO: 3336697 - RNA, 21 nt, Human
uuaggugugacugaauuucuu

SEQ ID NO: 3336698 - RNA, 19 nt, Human
uuaggugugggggaagcac

SEQ ID NO: 3336699 - RNA, 18 nt, Human
auaauuuaccugaagucu

SEQ ID NO: 3336700 - RNA, 21 nt, Human
auaagauucauauuuacuucu

SEQ ID NO: 3336701 - RNA, 22 nt, Human
auaagccaaaaaaugcuugcuu

SEQ ID NO: 3336702 - RNA, 13 nt, Human
ugaggggccucuu

SEQ ID NO: 3336703 - RNA, 12 nt, Human
ugaggggccucu

SEQ ID NO: 3336704 - RNA, 20 nt, Human
ugaggcccuucucuccagcc

SEQ ID NO: 3336705 - RNA, 22 nt, Human
ugaggcccuucucuccagcccc

SEQ ID NO: 3336706 - RNA, 23 nt, Human
ugaggcccuucucuccagccccu

SEQ ID NO: 3336707 - RNA, 24 nt, Human
ugaggcccuucucuccagccccug

SEQ ID NO: 3336708 - RNA, 18 nt, Human
ugaggcccuucucuccag

SEQ ID NO: 3336709 - RNA, 19 nt, Human
ugaggcccuucucuccagc

SEQ ID NO: 3336710 - RNA, 16 nt, Human
ugaggcccuucucucc

SEQ ID NO: 3336711 - RNA, 19 nt, Human
ugagggauacccaucccau

SEQ ID NO: 3336712 - RNA, 17 nt, Human
agcagaggaaggagagg

SEQ ID NO: 3336713 - RNA, 19 nt, Human
agcagauggagaccccuug

SEQ ID NO: 3336714 - RNA, 18 nt, Human
agcagagaccaucccuga

SEQ ID NO: 3336715 - RNA, 19 nt, Human
agcagagaccaucccugaa

SEQ ID NO: 3336716 - RNA, 17 nt, Human
agcagagaccaucccug

SEQ ID NO: 3336717 - RNA, 20 nt, Human
agcagagcaccuuagacagu

SEQ ID NO: 3336718 - RNA, 20 nt, Human
agcagagaccaucccugaag

SEQ ID NO: 3336719 - RNA, 20 nt, Human
ugaggguugggcugguguca

SEQ ID NO: 3336720 - RNA, 16 nt, Human
ugaggucagagccugc

SEQ ID NO: 3336721 - RNA, 14 nt, Human
ugaggucagagccu

SEQ ID NO: 3336722 - RNA, 13 nt, Human
ugaggucagagcc

SEQ ID NO: 3336723 - RNA, 23 nt, Human
ugaggcccagagggccugcaagg

SEQ ID NO: 3336724 - RNA, 21 nt, Human
ugaggcccagagggccugcaa

SEQ ID NO: 3336725 - RNA, 22 nt, Human
ugaggcccagagggccugcaag

SEQ ID NO: 3336726 - RNA, 15 nt, Human
ugaggcccagagggc

SEQ ID NO: 3336727 - RNA, 17 nt, Human
ugaggcccagagggccu

SEQ ID NO: 3336728 - RNA, 18 nt, Human
ugaggcccagagggccug

SEQ ID NO: 3336729 - RNA, 20 nt, Human
ugaggcccagagggccugca

SEQ ID NO: 3336730 - RNA, 20 nt, Human
ugaggccagagacacaagcc

SEQ ID NO: 3336731 - RNA, 14 nt, Human
ugaggccagagaca

SEQ ID NO: 3336732 - RNA, 16 nt, Human
ugaggccagagacaca

SEQ ID NO: 3336733 - RNA, 12 nt, Human
ugaggcccagag

SEQ ID NO: 3336734 - RNA, 13 nt, Human
ugaggcccagagg

SEQ ID NO: 3336735 - RNA, 22 nt, Human
ugaggaauccagacccggcugc

SEQ ID NO: 3336736 - RNA, 21 nt, Human
ugaggaauccagacccggcug

SEQ ID NO: 3336737 - RNA, 23 nt, Human
ugaggcauuuguuugaacugaua

SEQ ID NO: 3336738 - RNA, 12 nt, Human
ugaggccagaga

SEQ ID NO: 3336739 - RNA, 21 nt, Human
ugaggacacuaaccacgcugg

SEQ ID NO: 3336740 - RNA, 15 nt, Human
ugaggaagcaaaagc

SEQ ID NO: 3336741 - RNA, 22 nt, Human
ugaggaagcaaaagcaucuaug

SEQ ID NO: 3336742 - RNA, 14 nt, Human
ugaggaagccgcug

SEQ ID NO: 3336743 - RNA, 17 nt, Human
ugaggaagccgcugggg

SEQ ID NO: 3336744 - RNA, 18 nt, Human
ugaggaagccgcuggggc

SEQ ID NO: 3336745 - RNA, 19 nt, Human
ugaggaagccgcuggggcc

SEQ ID NO: 3336746 - RNA, 21 nt, Human
ugaggaagccgcuggggccag

SEQ ID NO: 3336747 - RNA, 15 nt, Human
ugagcaauccugcaa

SEQ ID NO: 3336748 - RNA, 23 nt, Human
ugagcacuaaggugugcucugau

SEQ ID NO: 3336749 - RNA, 22 nt, Human
ugagcacuaaggugugcucuga

SEQ ID NO: 3336750 - RNA, 21 nt, Human
ugagcacuaaggugugcucug

SEQ ID NO: 3336751 - RNA, 20 nt, Human
ugagcacuaaggugugcucu

SEQ ID NO: 3336752 - RNA, 14 nt, Human
ugagccagauuuca

SEQ ID NO: 3336753 - RNA, 16 nt, Human
ugagccagauuucacu

SEQ ID NO: 3336754 - RNA, 13 nt, Human
ugagccagauuuc

SEQ ID NO: 3336755 - RNA, 23 nt, Human
ugagccacugcaccgggccacag

SEQ ID NO: 3336756 - RNA, 18 nt, Human
ugagccacugcaccgggc

SEQ ID NO: 3336757 - RNA, 21 nt, Human
ugagccacugcaccgggccac

SEQ ID NO: 3336758 - RNA, 21 nt, Human
ugagcaucaggccaggcccuc

SEQ ID NO: 3336759 - RNA, 22 nt, Human
ugagcaucaggccaggcccucu

SEQ ID NO: 3336760 - RNA, 24 nt, Human
ugagcaucaggccaggcccucugc

SEQ ID NO: 3336761 - RNA, 17 nt, Human
ugagccagauuucacuc

SEQ ID NO: 3336762 - RNA, 22 nt, Human
ugagccagauuucacucuccuu

SEQ ID NO: 3336763 - RNA, 21 nt, Human
ugagccagauuucacucuccu

SEQ ID NO: 3336764 - RNA, 13 nt, Human
agcaagugagagc

SEQ ID NO: 3336765 - RNA, 16 nt, Human
agcaagugagacccug

SEQ ID NO: 3336766 - RNA, 20 nt, Human
agcaagugagacccugucuc

SEQ ID NO: 3336767 - RNA, 18 nt, Human
agcaagugagagcugggu

SEQ ID NO: 3336768 - RNA, 22 nt, Human
agcaagugagagcuggguguca

SEQ ID NO: 3336769 - RNA, 13 nt, Human
agcacaugccucu

SEQ ID NO: 3336770 - RNA, 14 nt, Human
agcacaugccucuc

SEQ ID NO: 3336771 - RNA, 22 nt, Human
agcaccaaaagcuuaccaaggg

SEQ ID NO: 3336772 - RNA, 14 nt, Human
agcacgauuucugu

SEQ ID NO: 3336773 - RNA, 15 nt, Human
agcacgauuucuguu

SEQ ID NO: 3336774 - RNA, 16 nt, Human
agcacgauuucuguuu

SEQ ID NO: 3336775 - RNA, 13 nt, Human
agcacgauuucug

SEQ ID NO: 3336776 - RNA, 23 nt, Human
agcaccuuagacagucccugcca

SEQ ID NO: 3336777 - RNA, 19 nt, Human
agcaccuuagacagucccu

SEQ ID NO: 3336778 - RNA, 20 nt, Human
agcaccuuagacagucccug

SEQ ID NO: 3336779 - RNA, 21 nt, Human
agcaccuuagacagucccugc

SEQ ID NO: 3336780 - RNA, 22 nt, Human
agcaccuuagacagucccugcc

SEQ ID NO: 3336781 - RNA, 23 nt, Human
agcacuuugggaggccaaggugg

SEQ ID NO: 3336782 - RNA, 22 nt, Human
agcacuuugggaggccaaggug

SEQ ID NO: 3336783 - RNA, 12 nt, Human
agcagaaaugcc

SEQ ID NO: 3336784 - RNA, 13 nt, Human
agcagaaaugccu

SEQ ID NO: 3336785 - RNA, 19 nt, Human
agcagaaaugccuuacccu

SEQ ID NO: 3336786 - RNA, 21 nt, Human
agcagagaaugaaagggccca

SEQ ID NO: 3336787 - RNA, 21 nt, Human
agcagagaauucucuuaucca

SEQ ID NO: 3336788 - RNA, 14 nt, Human
agcagagaauucuc

SEQ ID NO: 3336789 - RNA, 23 nt, Human
agcagagaaugaaagggcccaga

SEQ ID NO: 3336790 - RNA, 22 nt, Human
agcagagaaugaaagggcccag

SEQ ID NO: 3336791 - RNA, 15 nt, Human
agcagagaccauccc

SEQ ID NO: 3336792 - RNA, 16 nt, Human
agcagagaccaucccu

SEQ ID NO: 3336793 - RNA, 10 nt, Human
ugagccuggc

SEQ ID NO: 3336794 - RNA, 14 nt, Human
ugagccuugaacuu

SEQ ID NO: 3336795 - RNA, 19 nt, Human
ugagccugggaggucaagg

SEQ ID NO: 3336796 - RNA, 22 nt, Human
ugagccugggaggucaaggcug

SEQ ID NO: 3336797 - RNA, 11 nt, Human
ugagccuggca

SEQ ID NO: 3336798 - RNA, 16 nt, Human
ugagccuggcaagaau

SEQ ID NO: 3336799 - RNA, 14 nt, Human
ugagccugggaggu

SEQ ID NO: 3336800 - RNA, 15 nt, Human
ugagccuugaacuuu

SEQ ID NO: 3336801 - RNA, 17 nt, Human
ugagccuugaacuuuga

SEQ ID NO: 3336802 - RNA, 18 nt, Human
ugagccuugaacuuugac

SEQ ID NO: 3336803 - RNA, 19 nt, Human
ugagccuugaacuuugacc

SEQ ID NO: 3336804 - RNA, 13 nt, Human
ugaccucugccug

SEQ ID NO: 3336805 - RNA, 14 nt, Human
ugaccucugccuga

SEQ ID NO: 3336806 - RNA, 12 nt, Human
ugaccugaggcc

SEQ ID NO: 3336807 - RNA, 18 nt, Human
agaugcuucucacugcca

SEQ ID NO: 3336808 - RNA, 16 nt, Human
agaugcuucucacugc

SEQ ID NO: 3336809 - RNA, 14 nt, Human
ugaccugaggcccu

SEQ ID NO: 3336810 - RNA, 15 nt, Human
ugaccugaggcccuu

SEQ ID NO: 3336811 - RNA, 17 nt, Human
ugacuccagaauuuccc

SEQ ID NO: 3336812 - RNA, 19 nt, Human
ugacuccagaauuucccaa

SEQ ID NO: 3336813 - RNA, 20 nt, Human
ugacuccagaauuucccaaa

SEQ ID NO: 3336814 - RNA, 23 nt, Human
ugacuccagaauuucccaaagca

SEQ ID NO: 3336815 - RNA, 17 nt, Human
agauuugaacucuucaa

SEQ ID NO: 3336816 - RNA, 13 nt, Human
agauuucacucuc

SEQ ID NO: 3336817 - RNA, 14 nt, Human
agauuucacucucc

SEQ ID NO: 3336818 - RNA, 18 nt, Human
agaggcaacugcauuggc

SEQ ID NO: 3336819 - RNA, 11 nt, Human
agaggaaauca

SEQ ID NO: 3336820 - RNA, 12 nt, Human
agaggaaaucac

SEQ ID NO: 3336821 - RNA, 12 nt, Human
agaggaaagcaa

SEQ ID NO: 3336822 - RNA, 16 nt, Human
agaggaaagcaaagga

SEQ ID NO: 3336823 - RNA, 18 nt, Human
agaggaaagcaaaggaga

SEQ ID NO: 3336824 - RNA, 19 nt, Human
agaggaaagcaaaggagau

SEQ ID NO: 3336825 - RNA, 19 nt, Human
agagcugggugucaagagg

SEQ ID NO: 3336826 - RNA, 13 nt, Human
ugaagacaaugac

SEQ ID NO: 3336827 - RNA, 17 nt, Human
ugaagacaaugacuuac

SEQ ID NO: 3336828 - RNA, 11 nt, Human
ugaagacaaug

SEQ ID NO: 3336829 - RNA, 16 nt, Human
ugaacuuugaccucug

SEQ ID NO: 3336830 - RNA, 14 nt, Human
ucuuuggucuacac

SEQ ID NO: 3336831 - RNA, 21 nt, Human
ucuuuggucuacacugugcug

SEQ ID NO: 3336832 - RNA, 11 nt, Human
ugaacuuugac

SEQ ID NO: 3336833 - RNA, 22 nt, Human
agagggagggagggcuccagac

SEQ ID NO: 3336834 - RNA, 21 nt, Human
agagggagggagggcuccaga

SEQ ID NO: 3336835 - RNA, 20 nt, Human
agagggagggagggcuccag

SEQ ID NO: 3336836 - RNA, 21 nt, Human
agaucaaccccuucgcuccug

SEQ ID NO: 3336837 - RNA, 19 nt, Human
agaucaaccccuucgcucc

SEQ ID NO: 3336838 - RNA, 14 nt, Human
agaucaaccccuuc

SEQ ID NO: 3336839 - RNA, 22 nt, Human
agauauuuugcuuugugauuuu

SEQ ID NO: 3336840 - RNA, 19 nt, Human
agagugagacucugucuca

SEQ ID NO: 3336841 - RNA, 19 nt, Human
agauaaggguaucugguga

SEQ ID NO: 3336842 - RNA, 17 nt, Human
agauaaggguaucuggu

SEQ ID NO: 3336843 - RNA, 15 nt, Human
ugaaugucaguguga

SEQ ID NO: 3336844 - RNA, 14 nt, Human
ugaaugucagugug

SEQ ID NO: 3336845 - RNA, 20 nt, Human
agagucucacuguugcccag

SEQ ID NO: 3336846 - RNA, 16 nt, Human
agagugagacucuguc

SEQ ID NO: 3336847 - RNA, 15 nt, Human
agagugagacucugu

SEQ ID NO: 3336848 - RNA, 14 nt, Human
agacagucccugcc

SEQ ID NO: 3336849 - RNA, 16 nt, Human
agacagucccugccaa

SEQ ID NO: 3336850 - RNA, 17 nt, Human
agacagucccugccaau

SEQ ID NO: 3336851 - RNA, 15 nt, Human
agacagucccugcca

SEQ ID NO: 3336852 - RNA, 21 nt, Human
agacaggguuuugccauguug

SEQ ID NO: 3336853 - RNA, 15 nt, Human
agacaggaccaggga

SEQ ID NO: 3336854 - RNA, 22 nt, Human
agacaggcaagcaccuccugcc

SEQ ID NO: 3336855 - RNA, 23 nt, Human
agacaggcaagcaccuccugccu

SEQ ID NO: 3336856 - RNA, 16 nt, Human
agacagcugccuggga

SEQ ID NO: 3336857 - RNA, 22 nt, Human
ucuuccaggcugggagagccuu

SEQ ID NO: 3336858 - RNA, 21 nt, Human
ucuuccaggcugggagagccu

SEQ ID NO: 3336859 - RNA, 22 nt, Human
ucuucccuacaguugaaaaaca

SEQ ID NO: 3336860 - RNA, 15 nt, Human
ucuuaugggcugggu

SEQ ID NO: 3336861 - RNA, 16 nt, Human
ucuuaugggcuggguu

SEQ ID NO: 3336862 - RNA, 13 nt, Human
ucuuaugggcugg

SEQ ID NO: 3336863 - RNA, 14 nt, Human
ucuuaugggcuggg

SEQ ID NO: 3336864 - RNA, 22 nt, Human
ucuuauugcccacgcuggagug

SEQ ID NO: 3336865 - RNA, 18 nt, Human
ucuuauugcccacgcugg

SEQ ID NO: 3336866 - RNA, 14 nt, Human
ucuuauugcccacg

SEQ ID NO: 3336867 - RNA, 15 nt, Human
ucugucauuugagca

SEQ ID NO: 3336868 - RNA, 23 nt, Human
ucugucauuugagcagggcucag

SEQ ID NO: 3336869 - RNA, 20 nt, Human
ucugucauuugagcagggcu

SEQ ID NO: 3336870 - RNA, 18 nt, Human
ucugguccauagagagca

SEQ ID NO: 3336871 - RNA, 16 nt, Human
ucuggguucacugcaa

SEQ ID NO: 3336872 - RNA, 14 nt, Human
ucuggguucacugc

SEQ ID NO: 3336873 - RNA, 11 nt, Human
ucuggggcugu

SEQ ID NO: 3336874 - RNA, 20 nt, Human
ucuguuggccagugugacaa

SEQ ID NO: 3336875 - RNA, 19 nt, Human
ucuguuggccagugugaca

SEQ ID NO: 3336876 - RNA, 18 nt, Human
ucuguuggccagugugac

SEQ ID NO: 3336877 - RNA, 15 nt, Human
ucugugaaaggaaag

SEQ ID NO: 3336878 - RNA, 21 nt, Human
ucugugaaaggaaagagggag

SEQ ID NO: 3336879 - RNA, 23 nt, Human
agaauuucccaaagcagugcaug

SEQ ID NO: 3336880 - RNA, 17 nt, Human
agaauuucccaaagcag

SEQ ID NO: 3336881 - RNA, 18 nt, Human
agaauuucccaaagcagu

SEQ ID NO: 3336882 - RNA, 13 nt, Human
agacccugcccug

SEQ ID NO: 3336883 - RNA, 14 nt, Human
agacccugcccugu

SEQ ID NO: 3336884 - RNA, 12 nt, Human
agacccugcccu

SEQ ID NO: 3336885 - RNA, 19 nt, Human
agacccuuguggucccacc

SEQ ID NO: 3336886 - RNA, 20 nt, Human
agacccuuguggucccaccc

SEQ ID NO: 3336887 - RNA, 22 nt, Human
agacccuuguggucccacccca

SEQ ID NO: 3336888 - RNA, 23 nt, Human
agacccuuguggucccaccccac

SEQ ID NO: 3336889 - RNA, 16 nt, Human
agacccugcccugugg

SEQ ID NO: 3336890 - RNA, 19 nt, Human
agacccugcccugugggcc

SEQ ID NO: 3336891 - RNA, 21 nt, Human
agacccugcccugugggcccc

SEQ ID NO: 3336892 - RNA, 23 nt, Human
agacccugcccugugggccccca

SEQ ID NO: 3336893 - RNA, 13 nt, Human
agacccuuguggu

SEQ ID NO: 3336894 - RNA, 15 nt, Human
agacccuuguggucc

SEQ ID NO: 3336895 - RNA, 17 nt, Human
agacucauucuucugua

SEQ ID NO: 3336896 - RNA, 18 nt, Human
agacucauucuucuguac

SEQ ID NO: 3336897 - RNA, 15 nt, Human
agacuaucuaaaugu

SEQ ID NO: 3336898 - RNA, 18 nt, Human
agacuaucuaaauguuga

SEQ ID NO: 3336899 - RNA, 17 nt, Human
agacuaucuaaauguug

SEQ ID NO: 3336900 - RNA, 19 nt, Human
agacuaucuaaauguugaa

SEQ ID NO: 3336901 - RNA, 16 nt, Human
ucuugcaauggcagcc

SEQ ID NO: 3336902 - RNA, 13 nt, Human
ucuugcaauggca

SEQ ID NO: 3336903 - RNA, 17 nt, Human
ucuugcaauggcagccu

SEQ ID NO: 3336904 - RNA, 15 nt, Human
agacucauucuucug

SEQ ID NO: 3336905 - RNA, 21 nt, Human
agacucgcgacaaugcaaacc

SEQ ID NO: 3336906 - RNA, 17 nt, Human
agacucuacagaggcca

SEQ ID NO: 3336907 - RNA, 18 nt, Human
agacuccugcaggcagcc

SEQ ID NO: 3336908 - RNA, 19 nt, Human
agacuccugcaggcagcca

SEQ ID NO: 3336909 - RNA, 20 nt, Human
agacuccugcaggcagccag

SEQ ID NO: 3336910 - RNA, 13 nt, Human
ucuuuccugaggc

SEQ ID NO: 3336911 - RNA, 14 nt, Human
ucuuuccugaggcu

SEQ ID NO: 3336912 - RNA, 15 nt, Human
ucuuuccugaggcug

SEQ ID NO: 3336913 - RNA, 12 nt, Human
ucuuuccugagg

SEQ ID NO: 3336914 - RNA, 14 nt, Human
agacuccugcaggc

SEQ ID NO: 3336915 - RNA, 15 nt, Human
agacuccugcaggca

SEQ ID NO: 3336916 - RNA, 16 nt, Human
agacuccugcaggcag

SEQ ID NO: 3336917 - RNA, 17 nt, Human
agacuccugcaggcagc

SEQ ID NO: 3336918 - RNA, 15 nt, Human
ucuuuacuucaugga

SEQ ID NO: 3336919 - RNA, 15 nt, Human
agagaccaucccuga

SEQ ID NO: 3336920 - RNA, 13 nt, Human
agagaccaucccu

SEQ ID NO: 3336921 - RNA, 14 nt, Human
agagaccaucccug

SEQ ID NO: 3336922 - RNA, 12 nt, Human
agacuuuggaaa

SEQ ID NO: 3336923 - RNA, 14 nt, Human
agacuuuggaaaga

SEQ ID NO: 3336924 - RNA, 18 nt, Human
agagaaugaaagggccca

SEQ ID NO: 3336925 - RNA, 14 nt, Human
agacuucaucccuc

SEQ ID NO: 3336926 - RNA, 17 nt, Human
agacuucaucccucugg

SEQ ID NO: 3336927 - RNA, 16 nt, Human
ucugcucacauaucug

SEQ ID NO: 3336928 - RNA, 14 nt, Human
ucugcccuccaaga

SEQ ID NO: 3336929 - RNA, 23 nt, Human
ucugccgcagcccugcagagggc

SEQ ID NO: 3336930 - RNA, 14 nt, Human
ucuggcagcucaga

SEQ ID NO: 3336931 - RNA, 15 nt, Human
ucuggcagcucagag

SEQ ID NO: 3336932 - RNA, 23 nt, Human
ucuggcagaguugaagacagagc

SEQ ID NO: 3336933 - RNA, 23 nt, Human
ucugcuuuuuaaagaaugcucuu

SEQ ID NO: 3336934 - RNA, 18 nt, Human
ucuggagguacgaaaaga

SEQ ID NO: 3336935 - RNA, 15 nt, Human
agaagcggcuggcag

SEQ ID NO: 3336936 - RNA, 16 nt, Human
agaagcggcuggcagc

SEQ ID NO: 3336937 - RNA, 22 nt, Human
ucugcacuccccugcugggugu

SEQ ID NO: 3336938 - RNA, 20 nt, Human
ucugauucccaagcucugcu

SEQ ID NO: 3336939 - RNA, 19 nt, Human
ucugauucccaagcucugc

SEQ ID NO: 3336940 - RNA, 18 nt, Human
ucugauucccaagcucug

SEQ ID NO: 3336941 - RNA, 19 nt, Human
ucugacccugcuucaaaua

SEQ ID NO: 3336942 - RNA, 23 nt, Human
ucugacccaugcugcccugugag

SEQ ID NO: 3336943 - RNA, 17 nt, Human
agaaauguacagcaagg

SEQ ID NO: 3336944 - RNA, 16 nt, Human
agaaauguacagcaag

SEQ ID NO: 3336945 - RNA, 11 nt, Human
agaaauguguu

SEQ ID NO: 3336946 - RNA, 12 nt, Human
ucuccucugcug

SEQ ID NO: 3336947 - RNA, 19 nt, Human
ucucccuuggauugucccc

SEQ ID NO: 3336948 - RNA, 23 nt, Human
ucuccgaccagacaccuugacag

SEQ ID NO: 3336949 - RNA, 13 nt, Human
ucuccucugcugc

SEQ ID NO: 3336950 - RNA, 14 nt, Human
ucuccucugcugcu

SEQ ID NO: 3336951 - RNA, 11 nt, Human
ucucccuugga

SEQ ID NO: 3336952 - RNA, 18 nt, Human
ucucccuuggauuguccc

SEQ ID NO: 3336953 - RNA, 17 nt, Human
acuuuggaaagacuuuu

SEQ ID NO: 3336954 - RNA, 13 nt, Human
acuuuggaaagac

SEQ ID NO: 3336955 - RNA, 14 nt, Human
acuuuggaaagacu

SEQ ID NO: 3336956 - RNA, 12 nt, Human
acuuuggaaaga

SEQ ID NO: 3336957 - RNA, 19 nt, Human
acuuuaccuuuuuuauaca

SEQ ID NO: 3336958 - RNA, 22 nt, Human
acuuuaccuuuuuuauacauaa

SEQ ID NO: 3336959 - RNA, 18 nt, Human
acuuuaccuuuuuuauac

SEQ ID NO: 3336960 - RNA, 12 nt, Human
acuuuaccuuuu

SEQ ID NO: 3336961 - RNA, 23 nt, Human
acuuugaccucugcagcaauaaa

SEQ ID NO: 3336962 - RNA, 19 nt, Human
acuuugaccucugcagcaa

SEQ ID NO: 3336963 - RNA, 22 nt, Human
ucucuuuaaugucacaggcagg

SEQ ID NO: 3336964 - RNA, 13 nt, Human
ucucuugagccug

SEQ ID NO: 3336965 - RNA, 14 nt, Human
ucucuugagccugg

SEQ ID NO: 3336966 - RNA, 15 nt, Human
ucucuugagccuggg

SEQ ID NO: 3336967 - RNA, 21 nt, Human
ucucuuuaaugucacaggcag

SEQ ID NO: 3336968 - RNA, 18 nt, Human
agaaaaaggaugcacaga

SEQ ID NO: 3336969 - RNA, 13 nt, Human
ucucuccagcccc

SEQ ID NO: 3336970 - RNA, 14 nt, Human
ucucuccagccccu

SEQ ID NO: 3336971 - RNA, 20 nt, Human
ucuccuucaccuuugucccc

SEQ ID NO: 3336972 - RNA, 18 nt, Human
ucuccuucaccuuugucc

SEQ ID NO: 3336973 - RNA, 20 nt, Human
ucucuccuguaccucuugag

SEQ ID NO: 3336974 - RNA, 22 nt, Human
ucucuccuguaccucuugagcc

SEQ ID NO: 3336975 - RNA, 17 nt, Human
ucucuccuguaccucuu

SEQ ID NO: 3336976 - RNA, 15 nt, Human
ucucuccagccccug

SEQ ID NO: 3336977 - RNA, 14 nt, Human
ucucuugagagggu

SEQ ID NO: 3336978 - RNA, 11 nt, Human
uccaagcuggu

SEQ ID NO: 3336979 - RNA, 12 nt, Human
uccaagcuccca

SEQ ID NO: 3336980 - RNA, 13 nt, Human
uccaagcucccag

SEQ ID NO: 3336981 - RNA, 14 nt, Human
uccaagcucccagg

SEQ ID NO: 3336982 - RNA, 15 nt, Human
uccaagcucccaggc

SEQ ID NO: 3336983 - RNA, 16 nt, Human
uccaagcucccaggca

SEQ ID NO: 3336984 - RNA, 13 nt, Human
ucauuuuuuuuaa

SEQ ID NO: 3336985 - RNA, 21 nt, Human
ucauuugagcagggcucagcg

SEQ ID NO: 3336986 - RNA, 14 nt, Human
accuggaauauaua

SEQ ID NO: 3336987 - RNA, 19 nt, Human
ucauuugagcagggcucag

SEQ ID NO: 3336988 - RNA, 19 nt, Human
accugcggugcuaucuccc

SEQ ID NO: 3336989 - RNA, 22 nt, Human
accugcggugcuaucuccccca

SEQ ID NO: 3336990 - RNA, 15 nt, Human
accugaagucuuugu

SEQ ID NO: 3336991 - RNA, 22 nt, Human
accugaagucuuuguacagaca

SEQ ID NO: 3336992 - RNA, 18 nt, Human
accugcggugcuaucucc

SEQ ID NO: 3336993 - RNA, 15 nt, Human
uccaccaucaagcca

SEQ ID NO: 3336994 - RNA, 12 nt, Human
accuucuccuuc

SEQ ID NO: 3336995 - RNA, 13 nt, Human
accuucuccuuca

SEQ ID NO: 3336996 - RNA, 15 nt, Human
accuugaaugaugcc

SEQ ID NO: 3336997 - RNA, 14 nt, Human
accuugacagggca

SEQ ID NO: 3336998 - RNA, 15 nt, Human
accuugacagggcac

SEQ ID NO: 3336999 - RNA, 15 nt, Human
accuuuguauucucu

SEQ ID NO: 3337000 - RNA, 19 nt, Human
accuuuguauucucuccug

SEQ ID NO: 3337001 - RNA, 23 nt, Human
accuuuguauucucuccuguacc

SEQ ID NO: 3337002 - RNA, 22 nt, Human
uccagaaguuugagaucagccu

SEQ ID NO: 3337003 - RNA, 16 nt, Human
uccagccccuggaugc

SEQ ID NO: 3337004 - RNA, 17 nt, Human
uccagccccuggaugca

SEQ ID NO: 3337005 - RNA, 19 nt, Human
uccagccccuggaugcagc

SEQ ID NO: 3337006 - RNA, 21 nt, Human
uccagccccuggaugcagccu

SEQ ID NO: 3337007 - RNA, 15 nt, Human
uccagccccuggaug

SEQ ID NO: 3337008 - RNA, 14 nt, Human
uccagccccuggau

SEQ ID NO: 3337009 - RNA, 11 nt, Human
uccagccuggg

SEQ ID NO: 3337010 - RNA, 22 nt, Human
uccagccccuggaugcagccuc

SEQ ID NO: 3337011 - RNA, 13 nt, Human
accuagccuuaga

SEQ ID NO: 3337012 - RNA, 20 nt, Human
accuccgccucuuggguuca

SEQ ID NO: 3337013 - RNA, 18 nt, Human
ucauccacugugccaugu

SEQ ID NO: 3337014 - RNA, 20 nt, Human
accgcagacaggaccaggga

SEQ ID NO: 3337015 - RNA, 17 nt, Human
accgccaaggcuggggg

SEQ ID NO: 3337016 - RNA, 17 nt, Human
accgcagacaggaccag

SEQ ID NO: 3337017 - RNA, 16 nt, Human
ucauauuuacuucuua

SEQ ID NO: 3337018 - RNA, 21 nt, Human
ucauauuuacuucuuauacau

SEQ ID NO: 3337019 - RNA, 20 nt, Human
ucauauuuacuucuuauaca

SEQ ID NO: 3337020 - RNA, 10 nt, Human
acccuuuucu

SEQ ID NO: 3337021 - RNA, 23 nt, Human
accucucccuuggauuguccccg

SEQ ID NO: 3337022 - RNA, 14 nt, Human
accucucucacucc

SEQ ID NO: 3337023 - RNA, 19 nt, Human
accucucucacuccuugaa

SEQ ID NO: 3337024 - RNA, 13 nt, Human
accucucccuugg

SEQ ID NO: 3337025 - RNA, 14 nt, Human
accucucccuugga

SEQ ID NO: 3337026 - RNA, 15 nt, Human
accucucccuuggau

SEQ ID NO: 3337027 - RNA, 22 nt, Human
ucauugaccugaggcccuucuc

SEQ ID NO: 3337028 - RNA, 21 nt, Human
ucauucuccuuguguuacuaa

SEQ ID NO: 3337029 - RNA, 19 nt, Human
ucauugaccugaggcccuu

SEQ ID NO: 3337030 - RNA, 13 nt, Human
ucaugucuggcua

SEQ ID NO: 3337031 - RNA, 11 nt, Human
ucauguucuua

SEQ ID NO: 3337032 - RNA, 17 nt, Human
ucauguucuuaauucuu

SEQ ID NO: 3337033 - RNA, 21 nt, Human
ucauccacugugccaugugcc

SEQ ID NO: 3337034 - RNA, 19 nt, Human
ucauccacugugccaugug

SEQ ID NO: 3337035 - RNA, 19 nt, Human
ucaugacaaagacugagua

SEQ ID NO: 3337036 - RNA, 19 nt, Human
ucaccugaagacucauucu

SEQ ID NO: 3337037 - RNA, 16 nt, Human
ucaccugaagacucau

SEQ ID NO: 3337038 - RNA, 23 nt, Human
ucaccugaagacucauucuucug

SEQ ID NO: 3337039 - RNA, 17 nt, Human
accagagcccaccuugg

SEQ ID NO: 3337040 - RNA, 22 nt, Human
accagagcccaccuuggcucaa

SEQ ID NO: 3337041 - RNA, 19 nt, Human
accagagcccaccuuggcu

SEQ ID NO: 3337042 - RNA, 12 nt, Human
accacuuuuguu

SEQ ID NO: 3337043 - RNA, 17 nt, Human
accagacaccuugacag

SEQ ID NO: 3337044 - RNA, 23 nt, Human
accagacaccuugacagggcaca

SEQ ID NO: 3337045 - RNA, 22 nt, Human
accagacaccuugacagggcac

SEQ ID NO: 3337046 - RNA, 21 nt, Human
accacagacauacuaaccagc

SEQ ID NO: 3337047 - RNA, 22 nt, Human
accacagacauacuaaccagca

SEQ ID NO: 3337048 - RNA, 14 nt, Human
accacaucuugcuc

SEQ ID NO: 3337049 - RNA, 24 nt, Human
accacaucuugcucugcugacaga

SEQ ID NO: 3337050 - RNA, 21 nt, Human
accacaucuugcucugcugac

SEQ ID NO: 3337051 - RNA, 20 nt, Human
accacaucuugcucugcuga

SEQ ID NO: 3337052 - RNA, 19 nt, Human
accacaucuugcucugcug

SEQ ID NO: 3337053 - RNA, 20 nt, Human
accacucuaucaaguauuau

SEQ ID NO: 3337054 - RNA, 13 nt, Human
accacuucagcug

SEQ ID NO: 3337055 - RNA, 14 nt, Human
accacuucagcuga

SEQ ID NO: 3337056 - RNA, 18 nt, Human
acccagcccacuucugcc

SEQ ID NO: 3337057 - RNA, 15 nt, Human
acccagcccacuucu

SEQ ID NO: 3337058 - RNA, 17 nt, Human
acccagcccacuucugc

SEQ ID NO: 3337059 - RNA, 16 nt, Human
acccagcccacuucug

SEQ ID NO: 3337060 - RNA, 16 nt, Human
acccagaagaaaauag

SEQ ID NO: 3337061 - RNA, 13 nt, Human
accauucuccacc

SEQ ID NO: 3337062 - RNA, 16 nt, Human
accauucuccaccugc

SEQ ID NO: 3337063 - RNA, 22 nt, Human
accaugauuaaccacuucagcu

SEQ ID NO: 3337064 - RNA, 23 nt, Human
accaugauuaaccacuucagcug

SEQ ID NO: 3337065 - RNA, 22 nt, Human
accauuuugggguacccacugc

SEQ ID NO: 3337066 - RNA, 23 nt, Human
accauuuugggguacccacugcu

SEQ ID NO: 3337067 - RNA, 16 nt, Human
ucaccugccccucaac

SEQ ID NO: 3337068 - RNA, 14 nt, Human
ucacugagacagcc

SEQ ID NO: 3337069 - RNA, 15 nt, Human
ucacugagacagccc

SEQ ID NO: 3337070 - RNA, 13 nt, Human
ucacugagacagc

SEQ ID NO: 3337071 - RNA, 16 nt, Human
ucacuguugcccaggc

SEQ ID NO: 3337072 - RNA, 12 nt, Human
ucacugcagccu

SEQ ID NO: 3337073 - RNA, 18 nt, Human
accaguguuguggauuua

SEQ ID NO: 3337074 - RNA, 21 nt, Human
accaguguuguggauuuaaca

SEQ ID NO: 3337075 - RNA, 18 nt, Human
ucacuguugcccaggcug

SEQ ID NO: 3337076 - RNA, 17 nt, Human
ucacuguugcccaggcu

SEQ ID NO: 3337077 - RNA, 10 nt, Human
ucagccuggg

SEQ ID NO: 3337078 - RNA, 12 nt, Human
ucagccugggca

SEQ ID NO: 3337079 - RNA, 14 nt, Human
acccccagccugcu

SEQ ID NO: 3337080 - RNA, 15 nt, Human
acccccagccugcua

SEQ ID NO: 3337081 - RNA, 13 nt, Human
ucagaagacacug

SEQ ID NO: 3337082 - RNA, 13 nt, Human
ucagaucuucugu

SEQ ID NO: 3337083 - RNA, 23 nt, Human
acccaggugcuaggaacacuccu

SEQ ID NO: 3337084 - RNA, 13 nt, Human
acccagcucuggu

SEQ ID NO: 3337085 - RNA, 15 nt, Human
acccagcucuggucc

SEQ ID NO: 3337086 - RNA, 20 nt, Human
accccuucgcuccugugucu

SEQ ID NO: 3337087 - RNA, 23 nt, Human
ucaggguuggccccugcccggcu

SEQ ID NO: 3337088 - RNA, 16 nt, Human
acccuuguggucccac

SEQ ID NO: 3337089 - RNA, 17 nt, Human
acccuuguggucccacc

SEQ ID NO: 3337090 - RNA, 19 nt, Human
acccuuguggucccacccc

SEQ ID NO: 3337091 - RNA, 15 nt, Human
acccuugugguccca

SEQ ID NO: 3337092 - RNA, 11 nt, Human
acccugcccug

SEQ ID NO: 3337093 - RNA, 12 nt, Human
acccugcccugu

SEQ ID NO: 3337094 - RNA, 13 nt, Human
acccugcccugug

SEQ ID NO: 3337095 - RNA, 14 nt, Human
acccucuuagaaaa

SEQ ID NO: 3337096 - RNA, 20 nt, Human
ucaggccaaacucaccugcc

SEQ ID NO: 3337097 - RNA, 16 nt, Human
ucaggaagcucagggc

SEQ ID NO: 3337098 - RNA, 17 nt, Human
ucaggaagcucagggcc

SEQ ID NO: 3337099 - RNA, 19 nt, Human
ucaggaagcucagggccug

SEQ ID NO: 3337100 - RNA, 20 nt, Human
ucaggaagcucagggccugg

SEQ ID NO: 3337101 - RNA, 17 nt, Human
ucagcggggacagcucc

SEQ ID NO: 3337102 - RNA, 16 nt, Human
ucagcggggacagcuc

SEQ ID NO: 3337103 - RNA, 15 nt, Human
ucagcggggacagcu

SEQ ID NO: 3337104 - RNA, 19 nt, Human
accccuucgcuccuguguc

SEQ ID NO: 3337105 - RNA, 16 nt, Human
accccuucgcuccugu

SEQ ID NO: 3337106 - RNA, 15 nt, Human
ucagguaacaggcag

SEQ ID NO: 3337107 - RNA, 13 nt, Human
ucagguaacaggc

SEQ ID NO: 3337108 - RNA, 14 nt, Human
ucagggucccuggu

SEQ ID NO: 3337109 - RNA, 23 nt, Human
ucaggggugugcggccuuuggcu

SEQ ID NO: 3337110 - RNA, 13 nt, Human
ucagggucccugg

SEQ ID NO: 3337111 - RNA, 15 nt, Human
ucaggccagcugcuu

SEQ ID NO: 3337112 - RNA, 20 nt, Human
ucaggccagcugcuugggcu

SEQ ID NO: 3337113 - RNA, 11 nt, Human
ucaggccaggc

SEQ ID NO: 3337114 - RNA, 14 nt, Human
ucaggccagcugcu

SEQ ID NO: 3337115 - RNA, 23 nt, Human
ucaggccaggcccucugcccacu

SEQ ID NO: 3337116 - RNA, 22 nt, Human
ucccuuugacgccaucccagcc

SEQ ID NO: 3337117 - RNA, 23 nt, Human
ucccuuugacgccaucccagccc

SEQ ID NO: 3337118 - RNA, 21 nt, Human
ucccuuugacgccaucccagc

SEQ ID NO: 3337119 - RNA, 14 nt, Human
uccuaggcauuugc

SEQ ID NO: 3337120 - RNA, 22 nt, Human
ucccuuuccaaaugcccagcuu

SEQ ID NO: 3337121 - RNA, 18 nt, Human
ucccuuacgugaguccug

SEQ ID NO: 3337122 - RNA, 22 nt, Human
ucccuuacgugaguccuggcau

SEQ ID NO: 3337123 - RNA, 17 nt, Human
ucccuuacgugaguccu

SEQ ID NO: 3337124 - RNA, 23 nt, Human
ucccugguggcagcucaccucuc

SEQ ID NO: 3337125 - RNA, 22 nt, Human
ucccucauccucauacccaccc

SEQ ID NO: 3337126 - RNA, 21 nt, Human
ucccucagucuggcccuuccu

SEQ ID NO: 3337127 - RNA, 20 nt, Human
ucccucagucuggcccuucc

SEQ ID NO: 3337128 - RNA, 22 nt, Human
acucauugaccugaggcccuuc

SEQ ID NO: 3337129 - RNA, 18 nt, Human
acucuccucugcugcugg

SEQ ID NO: 3337130 - RNA, 19 nt, Human
acucuccucugcugcuggc

SEQ ID NO: 3337131 - RNA, 16 nt, Human
acucuccucugcugcu

SEQ ID NO: 3337132 - RNA, 17 nt, Human
acucuccucugcugcug

SEQ ID NO: 3337133 - RNA, 18 nt, Human
acucgcgacaaugcaaac

SEQ ID NO: 3337134 - RNA, 19 nt, Human
uccuaggcauuugcugaau

SEQ ID NO: 3337135 - RNA, 20 nt, Human
acucgcgacaaugcaaacca

SEQ ID NO: 3337136 - RNA, 23 nt, Human
acucgcgacaaugcaaaccauca

SEQ ID NO: 3337137 - RNA, 17 nt, Human
acucgcgacaaugcaaa

SEQ ID NO: 3337138 - RNA, 14 nt, Human
uccucauacccacc

SEQ ID NO: 3337139 - RNA, 18 nt, Human
uccucauacccaccccca

SEQ ID NO: 3337140 - RNA, 15 nt, Human
uccucccucccucuu

SEQ ID NO: 3337141 - RNA, 17 nt, Human
uccucccucccucuuuc

SEQ ID NO: 3337142 - RNA, 19 nt, Human
uccucccucccucuuuccc

SEQ ID NO: 3337143 - RNA, 12 nt, Human
uccucuccccag

SEQ ID NO: 3337144 - RNA, 20 nt, Human
uccucagaucuucugugggu

SEQ ID NO: 3337145 - RNA, 16 nt, Human
acucuuauugcccacg

SEQ ID NO: 3337146 - RNA, 18 nt, Human
acuauguugcccaggcag

SEQ ID NO: 3337147 - RNA, 17 nt, Human
acuauguugcccaggca

SEQ ID NO: 3337148 - RNA, 20 nt, Human
acuauguugcccaggcaggu

SEQ ID NO: 3337149 - RNA, 19 nt, Human
acuauguugcccaggcagg

SEQ ID NO: 3337150 - RNA, 23 nt, Human
acuauguugcccaggcaggucuu

SEQ ID NO: 3337151 - RNA, 23 nt, Human
uccccaggaggccagccuugacc

SEQ ID NO: 3337152 - RNA, 24 nt, Human
uccccaccgcagacaggaccaggg

SEQ ID NO: 3337153 - RNA, 23 nt, Human
acuauaauuuaccugaagucuuu

SEQ ID NO: 3337154 - RNA, 21 nt, Human
acuauaauguaagcucuacug

SEQ ID NO: 3337155 - RNA, 17 nt, Human
acuauagccuaggugac

SEQ ID NO: 3337156 - RNA, 16 nt, Human
ucccgaauagcuggga

SEQ ID NO: 3337157 - RNA, 15 nt, Human
ucccgaauagcuggg

SEQ ID NO: 3337158 - RNA, 20 nt, Human
ucccgaguagcugggacuac

SEQ ID NO: 3337159 - RNA, 18 nt, Human
ucccuauuagagaagaga

SEQ ID NO: 3337160 - RNA, 16 nt, Human
ucccuauuagagaaga

SEQ ID NO: 3337161 - RNA, 14 nt, Human
ucccaucucacaca

SEQ ID NO: 3337162 - RNA, 19 nt, Human
ucccaucucacacaugagc

SEQ ID NO: 3337163 - RNA, 13 nt, Human
ucccaucucacac

SEQ ID NO: 3337164 - RNA, 15 nt, Human
ucccauaugccuggg

SEQ ID NO: 3337165 - RNA, 22 nt, Human
uccccaccgcagacaggaccag

SEQ ID NO: 3337166 - RNA, 15 nt, Human
acuacaguuuguuag

SEQ ID NO: 3337167 - RNA, 16 nt, Human
acuacaguccucccau

SEQ ID NO: 3337168 - RNA, 19 nt, Human
ucccagugccgagaaggaa

SEQ ID NO: 3337169 - RNA, 22 nt, Human
ucccagugccgagaaggaagcc

SEQ ID NO: 3337170 - RNA, 12 nt, Human
acuaaccacgcu

SEQ ID NO: 3337171 - RNA, 16 nt, Human
acuaaccagcagaaau

SEQ ID NO: 3337172 - RNA, 13 nt, Human
acuaaccacgcug

SEQ ID NO: 3337173 - RNA, 17 nt, Human
acuaaccagcagaaaug

SEQ ID NO: 3337174 - RNA, 23 nt, Human
acuacaggugugagucaccaagc

SEQ ID NO: 3337175 - RNA, 15 nt, Human
acuacaguccuccca

SEQ ID NO: 3337176 - RNA, 14 nt, Human
acuaaaauauauau

SEQ ID NO: 3337177 - RNA, 12 nt, Human
acuaaaauauau

SEQ ID NO: 3337178 - RNA, 12 nt, Human
acguuucuaaag

SEQ ID NO: 3337179 - RNA, 14 nt, Human
uccagcucaccagc

SEQ ID NO: 3337180 - RNA, 24 nt, Human
uccagccugggugacagagcaagu

SEQ ID NO: 3337181 - RNA, 13 nt, Human
uccagccugggug

SEQ ID NO: 3337182 - RNA, 14 nt, Human
acguuucuaaaggc

SEQ ID NO: 3337183 - RNA, 13 nt, Human
ucgaacuggcugc

SEQ ID NO: 3337184 - RNA, 14 nt, Human
ucgaacuggcugca

SEQ ID NO: 3337185 - RNA, 15 nt, Human
ucgaacuggcugcaa

SEQ ID NO: 3337186 - RNA, 23 nt, Human
uccuuuagcgcccaguugggugg

SEQ ID NO: 3337187 - RNA, 15 nt, Human
uccuuucaccacaug

SEQ ID NO: 3337188 - RNA, 13 nt, Human
ucgcgacaaugca

SEQ ID NO: 3337189 - RNA, 17 nt, Human
ucgaggacagggaggug

SEQ ID NO: 3337190 - RNA, 14 nt, Human
ucgaggacagggag

SEQ ID NO: 3337191 - RNA, 14 nt, Human
ucgagcaugccugg

SEQ ID NO: 3337192 - RNA, 13 nt, Human
ucgaggacaggga

SEQ ID NO: 3337193 - RNA, 14 nt, Human
acuguacaaaguag

SEQ ID NO: 3337194 - RNA, 19 nt, Human
acuguaauuugugauacaa

SEQ ID NO: 3337195 - RNA, 13 nt, Human
acuguacaaagua

SEQ ID NO: 3337196 - RNA, 23 nt, Human
acuguacaugaaaacacauuuuu

SEQ ID NO: 3337197 - RNA, 21 nt, Human
acuguacaugaaaacacauuu

SEQ ID NO: 3337198 - RNA, 13 nt, Human
acuguacaugaaa

SEQ ID NO: 3337199 - RNA, 14 nt, Human
acuguacaugaaaa

SEQ ID NO: 3337200 - RNA, 22 nt, Human
acugggcuuggggaccagagcu

SEQ ID NO: 3337201 - RNA, 13 nt, Human
ucgcuccuguguc

SEQ ID NO: 3337202 - RNA, 12 nt, Human
ucgcuccugugu

SEQ ID NO: 3337203 - RNA, 18 nt, Human
acuggguacuuguggaca

SEQ ID NO: 3337204 - RNA, 20 nt, Human
acuggguacuuguggacaca

SEQ ID NO: 3337205 - RNA, 19 nt, Human
acuggguacuuguggacac

SEQ ID NO: 3337206 - RNA, 22 nt, Human
acuggauuaaacuuaaucuaaa

SEQ ID NO: 3337207 - RNA, 17 nt, Human
acugcuuccagugaggc

SEQ ID NO: 3337208 - RNA, 18 nt, Human
acugcuuccagugaggcu

SEQ ID NO: 3337209 - RNA, 21 nt, Human
acugcuuccagugaggcucug

SEQ ID NO: 3337210 - RNA, 22 nt, Human
acugcuuccagugaggcucugc

SEQ ID NO: 3337211 - RNA, 23 nt, Human
acugcuuccagugaggcucugcc

SEQ ID NO: 3337212 - RNA, 22 nt, Human
acuggcugcaaaggguaucagg

SEQ ID NO: 3337213 - RNA, 13 nt, Human
uccuucagugccu

SEQ ID NO: 3337214 - RNA, 20 nt, Human
uccuucagugccuuauggaa

SEQ ID NO: 3337215 - RNA, 22 nt, Human
uccuucagugccuuauggaaca

SEQ ID NO: 3337216 - RNA, 12 nt, Human
uccuucagugcc

SEQ ID NO: 3337217 - RNA, 11 nt, Human
uccuucagugc

SEQ ID NO: 3337218 - RNA, 13 nt, Human
uccugcugcaguu

SEQ ID NO: 3337219 - RNA, 23 nt, Human
acugcagccucaaccuccugggc

SEQ ID NO: 3337220 - RNA, 13 nt, Human
acugcacuguuuu

SEQ ID NO: 3337221 - RNA, 22 nt, Human
acugcagccucaaccuccuggg

SEQ ID NO: 3337222 - RNA, 21 nt, Human
acugcagccucaaccuccugg

SEQ ID NO: 3337223 - RNA, 19 nt, Human
acugcagccucaaccuccu

SEQ ID NO: 3337224 - RNA, 24 nt, Human
uccugugucuugcaauggcagccu

SEQ ID NO: 3337225 - RNA, 23 nt, Human
uccugugucuugcaauggcagcc

SEQ ID NO: 3337226 - RNA, 14 nt, Human
uccugugugugcgc

SEQ ID NO: 3337227 - RNA, 13 nt, Human
uccugugugugcg

SEQ ID NO: 3337228 - RNA, 18 nt, Human
uccugugugugcgccuac

SEQ ID NO: 3337229 - RNA, 19 nt, Human
uccuguucccaugagauga

SEQ ID NO: 3337230 - RNA, 16 nt, Human
uccugcaggcagccag

SEQ ID NO: 3337231 - RNA, 17 nt, Human
uccugcaggcagccagg

SEQ ID NO: 3337232 - RNA, 19 nt, Human
uccugcaggcagccaggcc

SEQ ID NO: 3337233 - RNA, 20 nt, Human
uccugcaggcagccaggcca

SEQ ID NO: 3337234 - RNA, 19 nt, Human
uccugccucagccucccaa

SEQ ID NO: 3337235 - RNA, 22 nt, Human
uccugcaggcagccaggccaca

SEQ ID NO: 3337236 - RNA, 20 nt, Human
uccugccucgaacuggcugc

SEQ ID NO: 3337237 - RNA, 17 nt, Human
uccugccucagccuccc

SEQ ID NO: 3337238 - RNA, 21 nt, Human
uccugaugcuucuucagagac

SEQ ID NO: 3337239 - RNA, 15 nt, Human
uccugcaggcagcca

SEQ ID NO: 3337240 - RNA, 22 nt, Human
acugcaaccuccgccucuuggg

SEQ ID NO: 3337241 - RNA, 16 nt, Human
acugcaaccuccgccu

SEQ ID NO: 3337242 - RNA, 14 nt, Human
acugcaaccuccgc

SEQ ID NO: 3337243 - RNA, 13 nt, Human
acugcaaccuccg

SEQ ID NO: 3337244 - RNA, 18 nt, Human
acugaguacguugugcau

SEQ ID NO: 3337245 - RNA, 19 nt, Human
acugaguacguugugcauu

SEQ ID NO: 3337246 - RNA, 21 nt, Human
acugaguacguugugcauuug

SEQ ID NO: 3337247 - RNA, 22 nt, Human
acugaguacguugugcauuugg

SEQ ID NO: 3337248 - RNA, 23 nt, Human
acugaguacguugugcauuuggu

SEQ ID NO: 3337249 - RNA, 15 nt, Human
uccucuccccagcaa

SEQ ID NO: 3337250 - RNA, 17 nt, Human
aagucuuagauguauau

SEQ ID NO: 3337251 - RNA, 19 nt, Human
aagucuuagauguauauau

SEQ ID NO: 3337252 - RNA, 18 nt, Human
aagucuuagauguauaua

SEQ ID NO: 3337253 - RNA, 18 nt, Human
guuuuucuaggccugggg

SEQ ID NO: 3337254 - RNA, 16 nt, Human
guuuuugucuuaaaaa

SEQ ID NO: 3337255 - RNA, 21 nt, Human
aagucaagugaaaaaggagga

SEQ ID NO: 3337256 - RNA, 24 nt, Human
aagucacacaguauuacuucugcu

SEQ ID NO: 3337257 - RNA, 18 nt, Human
aaguauucuuauuuaaug

SEQ ID NO: 3337258 - RNA, 13 nt, Human
aagucacacagug

SEQ ID NO: 3337259 - RNA, 16 nt, Human
aaguacuauguaucaa

SEQ ID NO: 3337260 - RNA, 15 nt, Human
aaguacuggagaaaa

SEQ ID NO: 3337261 - RNA, 21 nt, Human
aaguacuucuccacccugcuc

SEQ ID NO: 3337262 - RNA, 15 nt, Human
aaguacuauguauca

SEQ ID NO: 3337263 - RNA, 22 nt, Human
aaguacuucuccacccugcucu

SEQ ID NO: 3337264 - RNA, 20 nt, Human
aaguacuucuccacccugcu

SEQ ID NO: 3337265 - RNA, 13 nt, Human
aaguauuaaaaca

SEQ ID NO: 3337266 - RNA, 14 nt, Human
aaguauuaaaacau

SEQ ID NO: 3337267 - RNA, 17 nt, Human
aaguauuaaaacauugg

SEQ ID NO: 3337268 - RNA, 15 nt, Human
aaguauuaaaacauu

SEQ ID NO: 3337269 - RNA, 21 nt, Human
aaguauuaaaacauuggauua

SEQ ID NO: 3337270 - RNA, 18 nt, Human
guuucugccgcagcccug

SEQ ID NO: 3337271 - RNA, 22 nt, Human
guuucugccgcagcccugcaga

SEQ ID NO: 3337272 - RNA, 13 nt, Human
guuugcuaaguga

SEQ ID NO: 3337273 - RNA, 17 nt, Human
guuugccucugccucug

SEQ ID NO: 3337274 - RNA, 16 nt, Human
guuugccucugccucu

SEQ ID NO: 3337275 - RNA, 16 nt, Human
guuuuaagaggcaggg

SEQ ID NO: 3337276 - RNA, 14 nt, Human
guuuuaagaggcag

SEQ ID NO: 3337277 - RNA, 16 nt, Human
guuuuacugcagcuuu

SEQ ID NO: 3337278 - RNA, 18 nt, Human
guuuuacugcagcuuugu

SEQ ID NO: 3337279 - RNA, 15 nt, Human
guuuuacugcagcuu

SEQ ID NO: 3337280 - RNA, 13 nt, Human
aagggcccagaga

SEQ ID NO: 3337281 - RNA, 15 nt, Human
aagggcccagagagg

SEQ ID NO: 3337282 - RNA, 16 nt, Human
aaggguaucuggugac

SEQ ID NO: 3337283 - RNA, 19 nt, Human
aaggguaucaggugcugcc

SEQ ID NO: 3337284 - RNA, 14 nt, Human
aaggggcaguggug

SEQ ID NO: 3337285 - RNA, 17 nt, Human
aaggguaucaggugcug

SEQ ID NO: 3337286 - RNA, 20 nt, Human
aaggaggaagagaaaaaaua

SEQ ID NO: 3337287 - RNA, 18 nt, Human
aaggaggaagagaaaaaa

SEQ ID NO: 3337288 - RNA, 11 nt, Human
aaggauccuga

SEQ ID NO: 3337289 - RNA, 12 nt, Human
aaggauccugag

SEQ ID NO: 3337290 - RNA, 20 nt, Human
aaggauccugagccagauuu

SEQ ID NO: 3337291 - RNA, 22 nt, Human
aaggauccugagccagauuuca

SEQ ID NO: 3337292 - RNA, 18 nt, Human
aaggagauuuacaacugg

SEQ ID NO: 3337293 - RNA, 17 nt, Human
aaggagauuuacaacug

SEQ ID NO: 3337294 - RNA, 15 nt, Human
aaggaaacccagcuc

SEQ ID NO: 3337295 - RNA, 14 nt, Human
aaggaugcccaaag

SEQ ID NO: 3337296 - RNA, 24 nt, Human
aaggaugcacagaguuguuacauu

SEQ ID NO: 3337297 - RNA, 22 nt, Human
aaggaugcacagaguuguuaca

SEQ ID NO: 3337298 - RNA, 14 nt, Human
aaggccccgcccag

SEQ ID NO: 3337299 - RNA, 16 nt, Human
aaggccccgcccaggc

SEQ ID NO: 3337300 - RNA, 19 nt, Human
aaggccccgcccaggcuua

SEQ ID NO: 3337301 - RNA, 14 nt, Human
guugcccaggcugg

SEQ ID NO: 3337302 - RNA, 13 nt, Human
aaggcuaccuuug

SEQ ID NO: 3337303 - RNA, 23 nt, Human
guuggcugggggccucagugcca

SEQ ID NO: 3337304 - RNA, 15 nt, Human
guugcccaggcuggc

SEQ ID NO: 3337305 - RNA, 16 nt, Human
guugcccaggcuggcg

SEQ ID NO: 3337306 - RNA, 15 nt, Human
guugggcugguguca

SEQ ID NO: 3337307 - RNA, 17 nt, Human
guugggcuggugucacc

SEQ ID NO: 3337308 - RNA, 12 nt, Human
guucucugcccu

SEQ ID NO: 3337309 - RNA, 11 nt, Human
guucucugccc

SEQ ID NO: 3337310 - RNA, 16 nt, Human
guucucugaggacacu

SEQ ID NO: 3337311 - RNA, 14 nt, Human
guucucugaggaca

SEQ ID NO: 3337312 - RNA, 23 nt, Human
guugauagcacagacccugcccu

SEQ ID NO: 3337313 - RNA, 22 nt, Human
guugauagcacagacccugccc

SEQ ID NO: 3337314 - RNA, 18 nt, Human
aagcuguuacugucuuca

SEQ ID NO: 3337315 - RNA, 13 nt, Human
aagcucugcuccu

SEQ ID NO: 3337316 - RNA, 12 nt, Human
aagcucccaggc

SEQ ID NO: 3337317 - RNA, 22 nt, Human
aagcucccaggcauuccccagg

SEQ ID NO: 3337318 - RNA, 23 nt, Human
aagcucccaggcauuccccagga

SEQ ID NO: 3337319 - RNA, 21 nt, Human
aagcucuacugaggugcuaug

SEQ ID NO: 3337320 - RNA, 13 nt, Human
guguuuauuguca

SEQ ID NO: 3337321 - RNA, 11 nt, Human
aagcucccagg

SEQ ID NO: 3337322 - RNA, 13 nt, Human
uaaagucaggggu

SEQ ID NO: 3337323 - RNA, 14 nt, Human
uaaaguguauuuuu

SEQ ID NO: 3337324 - RNA, 15 nt, Human
uaaaguguauuuuuu

SEQ ID NO: 3337325 - RNA, 19 nt, Human
uaaaguguauuuuuuuacu

SEQ ID NO: 3337326 - RNA, 14 nt, Human
aauaaaguaauuau

SEQ ID NO: 3337327 - RNA, 15 nt, Human
aauaacuaaaaggua

SEQ ID NO: 3337328 - RNA, 12 nt, Human
aauaaauuauuu

SEQ ID NO: 3337329 - RNA, 12 nt, Human
aauaacauguaa

SEQ ID NO: 3337330 - RNA, 19 nt, Human
aauaacauguaauuaagua

SEQ ID NO: 3337331 - RNA, 16 nt, Human
aauacaccacuacauu

SEQ ID NO: 3337332 - RNA, 18 nt, Human
aauacaccacuacauucu

SEQ ID NO: 3337333 - RNA, 20 nt, Human
aauacaccacuacauucugu

SEQ ID NO: 3337334 - RNA, 15 nt, Human
aauacaccacuacau

SEQ ID NO: 3337335 - RNA, 19 nt, Human
uaaaucuccaaaauaaaac

SEQ ID NO: 3337336 - RNA, 13 nt, Human
uaacaagccaccc

SEQ ID NO: 3337337 - RNA, 22 nt, Human
uaaauuaacuuuuauaaacuuu

SEQ ID NO: 3337338 - RNA, 18 nt, Human
uaaaucuccaaaauaaaa

SEQ ID NO: 3337339 - RNA, 20 nt, Human
uaaaucuccaaaauaaaacu

SEQ ID NO: 3337340 - RNA, 21 nt, Human
uaaaucuccaaaauaaaacuu

SEQ ID NO: 3337341 - RNA, 21 nt, Human
uaaaggcuaccuuuguauucu

SEQ ID NO: 3337342 - RNA, 19 nt, Human
uaaaggcuaccuuuguauu

SEQ ID NO: 3337343 - RNA, 16 nt, Human
uaaaccgccaaggcug

SEQ ID NO: 3337344 - RNA, 18 nt, Human
uaaaccgccaaggcuggg

SEQ ID NO: 3337345 - RNA, 14 nt, Human
aaguuaaauaaauc

SEQ ID NO: 3337346 - RNA, 12 nt, Human
aaguuaaauaaa

SEQ ID NO: 3337347 - RNA, 23 nt, Human
aacguggcugcuucaaggauccu

SEQ ID NO: 3337348 - RNA, 22 nt, Human
aacguggcugcuucaaggaucc

SEQ ID NO: 3337349 - RNA, 16 nt, Human
gucuucaguaagccgu

SEQ ID NO: 3337350 - RNA, 15 nt, Human
gucuuuguacagaca

SEQ ID NO: 3337351 - RNA, 16 nt, Human
gucuuuguacagacaa

SEQ ID NO: 3337352 - RNA, 12 nt, Human
aaccugugucuc

SEQ ID NO: 3337353 - RNA, 19 nt, Human
aaccugauugugucucuug

SEQ ID NO: 3337354 - RNA, 18 nt, Human
aaccugauugugucucuu

SEQ ID NO: 3337355 - RNA, 13 nt, Human
gucucuugguccu

SEQ ID NO: 3337356 - RNA, 20 nt, Human
gucucuugguccugcugcag

SEQ ID NO: 3337357 - RNA, 18 nt, Human
gucucuugguccugcugc

SEQ ID NO: 3337358 - RNA, 19 nt, Human
gucucuugguccugcugca

SEQ ID NO: 3337359 - RNA, 17 nt, Human
gucucuugguccugcug

SEQ ID NO: 3337360 - RNA, 13 nt, Human
aaccauggacuuu

SEQ ID NO: 3337361 - RNA, 22 nt, Human
gucucuuuaaugucacaggcag

SEQ ID NO: 3337362 - RNA, 19 nt, Human
gucugaaggcuggguucug

SEQ ID NO: 3337363 - RNA, 14 nt, Human
gucugaaggcuggg

SEQ ID NO: 3337364 - RNA, 20 nt, Human
gucucuuuaaugucacaggc

SEQ ID NO: 3337365 - RNA, 19 nt, Human
gucucuuuaaugucacagg

SEQ ID NO: 3337366 - RNA, 18 nt, Human
gucucuuuaaugucacag

SEQ ID NO: 3337367 - RNA, 15 nt, Human
aaccauggacuuuau

SEQ ID NO: 3337368 - RNA, 23 nt, Human
gucugacaggcaaugcuggcugu

SEQ ID NO: 3337369 - RNA, 22 nt, Human
gucugacaggcaaugcuggcug

SEQ ID NO: 3337370 - RNA, 21 nt, Human
gucugacaggcaaugcuggcu

SEQ ID NO: 3337371 - RNA, 18 nt, Human
gucuggaaugcaguggua

SEQ ID NO: 3337372 - RNA, 20 nt, Human
gucugacaggcaaugcuggc

SEQ ID NO: 3337373 - RNA, 17 nt, Human
gugaguacuacaguccu

SEQ ID NO: 3337374 - RNA, 21 nt, Human
gugagcacuaaggugugcucu

SEQ ID NO: 3337375 - RNA, 16 nt, Human
gugagaggggaacaga

SEQ ID NO: 3337376 - RNA, 13 nt, Human
gugagagcugggu

SEQ ID NO: 3337377 - RNA, 15 nt, Human
gugagcaauccugca

SEQ ID NO: 3337378 - RNA, 12 nt, Human
gugaccccaggu

SEQ ID NO: 3337379 - RNA, 12 nt, Human
gugagagcuggg

SEQ ID NO: 3337380 - RNA, 17 nt, Human
gugaguccuggcauggg

SEQ ID NO: 3337381 - RNA, 19 nt, Human
gugaguacuacaguccucc

SEQ ID NO: 3337382 - RNA, 19 nt, Human
gugagucaccaagcccagu

SEQ ID NO: 3337383 - RNA, 20 nt, Human
gugaguccuggcaugggaau

SEQ ID NO: 3337384 - RNA, 19 nt, Human
gugacagaggcagccccau

SEQ ID NO: 3337385 - RNA, 18 nt, Human
gugacagaggcagcccca

SEQ ID NO: 3337386 - RNA, 16 nt, Human
gugacagaggcagccc

SEQ ID NO: 3337387 - RNA, 15 nt, Human
gugacagaggcagcc

SEQ ID NO: 3337388 - RNA, 17 nt, Human
gugaccaaugaugguca

SEQ ID NO: 3337389 - RNA, 18 nt, Human
gugaccagcaccaucucu

SEQ ID NO: 3337390 - RNA, 21 nt, Human
gugaccagcaccaucucuccu

SEQ ID NO: 3337391 - RNA, 18 nt, Human
gugaccauguuuuguuua

SEQ ID NO: 3337392 - RNA, 23 nt, Human
gugaagacaaugacuuacuguac

SEQ ID NO: 3337393 - RNA, 14 nt, Human
gugaagugaagaca

SEQ ID NO: 3337394 - RNA, 14 nt, Human
gucuaugggacuca

SEQ ID NO: 3337395 - RNA, 22 nt, Human
gucucaaacucuugaccucagg

SEQ ID NO: 3337396 - RNA, 19 nt, Human
gucucaaaaaaagaaaaag

SEQ ID NO: 3337397 - RNA, 13 nt, Human
aaccacaucuugc

SEQ ID NO: 3337398 - RNA, 23 nt, Human
aaccaucauugaaaucuuuuugc

SEQ ID NO: 3337399 - RNA, 23 nt, Human
gucgcccagucuggaaugcagug

SEQ ID NO: 3337400 - RNA, 20 nt, Human
gucuaccugaggggccucuu

SEQ ID NO: 3337401 - RNA, 14 nt, Human
gucgaggacaggga

SEQ ID NO: 3337402 - RNA, 14 nt, Human
gucgcccagucugg

SEQ ID NO: 3337403 - RNA, 13 nt, Human
gucgcccagucug

SEQ ID NO: 3337404 - RNA, 13 nt, Human
guccugcugcagu

SEQ ID NO: 3337405 - RNA, 16 nt, Human
guccugcugcaguugc

SEQ ID NO: 3337406 - RNA, 20 nt, Human
aacagacuggaagcacagcu

SEQ ID NO: 3337407 - RNA, 13 nt, Human
guccuacccaccc

SEQ ID NO: 3337408 - RNA, 22 nt, Human
aacauguuuuucuucucccuca

SEQ ID NO: 3337409 - RNA, 18 nt, Human
aacauacucccaucugug

SEQ ID NO: 3337410 - RNA, 16 nt, Human
aacauacucccaucug

SEQ ID NO: 3337411 - RNA, 20 nt, Human
aacauacucccaucugugaa

SEQ ID NO: 3337412 - RNA, 13 nt, Human
gucccuuuuccuu

SEQ ID NO: 3337413 - RNA, 21 nt, Human
guccgaaagggacuuggaagc

SEQ ID NO: 3337414 - RNA, 22 nt, Human
guccgaaagggacuuggaagcu

SEQ ID NO: 3337415 - RNA, 13 nt, Human
gucccccugacaa

SEQ ID NO: 3337416 - RNA, 15 nt, Human
guccccgcacugggc

SEQ ID NO: 3337417 - RNA, 16 nt, Human
guccccgcacugggcu

SEQ ID NO: 3337418 - RNA, 23 nt, Human
guccccuguuuguuucugaaagg

SEQ ID NO: 3337419 - RNA, 22 nt, Human
guccccuguuuguuucugaaag

SEQ ID NO: 3337420 - RNA, 18 nt, Human
gucccaccuuggcugcag

SEQ ID NO: 3337421 - RNA, 17 nt, Human
gucccaccuuggcugca

SEQ ID NO: 3337422 - RNA, 19 nt, Human
gucccaccuuggcugcagg

SEQ ID NO: 3337423 - RNA, 23 nt, Human
gugcacaagcuccaagcucccag

SEQ ID NO: 3337424 - RNA, 17 nt, Human
gugcacacaccagagcc

SEQ ID NO: 3337425 - RNA, 18 nt, Human
gugcacguacacacacau

SEQ ID NO: 3337426 - RNA, 14 nt, Human
gugcacacaccaga

SEQ ID NO: 3337427 - RNA, 12 nt, Human
gugcacacacca

SEQ ID NO: 3337428 - RNA, 20 nt, Human
gugcauuugaggucuguucu

SEQ ID NO: 3337429 - RNA, 21 nt, Human
gugcauuugaggucuguucuu

SEQ ID NO: 3337430 - RNA, 22 nt, Human
gugcauuugaggucuguucuuu

SEQ ID NO: 3337431 - RNA, 14 nt, Human
gugccaagcagagg

SEQ ID NO: 3337432 - RNA, 15 nt, Human
gugccucugggacug

SEQ ID NO: 3337433 - RNA, 14 nt, Human
gugccucugggacu

SEQ ID NO: 3337434 - RNA, 23 nt, Human
aacuugguucccauuugcuccuu

SEQ ID NO: 3337435 - RNA, 22 nt, Human
aacuugucuuuggacccugagg

SEQ ID NO: 3337436 - RNA, 14 nt, Human
aacuuggcgcugcc

SEQ ID NO: 3337437 - RNA, 19 nt, Human
aagaaaaaggaugcacaga

SEQ ID NO: 3337438 - RNA, 20 nt, Human
aagaaaaaggaugcacagag

SEQ ID NO: 3337439 - RNA, 22 nt, Human
aagaaaaaggaugcacagaguu

SEQ ID NO: 3337440 - RNA, 14 nt, Human
aagaagcucucucc

SEQ ID NO: 3337441 - RNA, 15 nt, Human
aagaagcucucuccu

SEQ ID NO: 3337442 - RNA, 16 nt, Human
aagaagcccaggaaag

SEQ ID NO: 3337443 - RNA, 17 nt, Human
aagaagcccaggaaagg

SEQ ID NO: 3337444 - RNA, 22 nt, Human
aagaaaauaguggugugauuug

SEQ ID NO: 3337445 - RNA, 19 nt, Human
gugcugcccugcccaccug

SEQ ID NO: 3337446 - RNA, 20 nt, Human
gugcugcccugcccaccugg

SEQ ID NO: 3337447 - RNA, 18 nt, Human
gugcugcccugcccaccu

SEQ ID NO: 3337448 - RNA, 24 nt, Human
guggacacagcucuucuccaggcu

SEQ ID NO: 3337449 - RNA, 23 nt, Human
guggacacagcucuucuccaggc

SEQ ID NO: 3337450 - RNA, 15 nt, Human
guggacacagcucuu

SEQ ID NO: 3337451 - RNA, 14 nt, Human
guggacacagcucu

SEQ ID NO: 3337452 - RNA, 21 nt, Human
guggauuuaacagaaauguac

SEQ ID NO: 3337453 - RNA, 20 nt, Human
guggauuuaacagaaaugua

SEQ ID NO: 3337454 - RNA, 23 nt, Human
guggauuuaacagaaauguacag

SEQ ID NO: 3337455 - RNA, 22 nt, Human
guggcagcucaccucucccuug

SEQ ID NO: 3337456 - RNA, 14 nt, Human
guggcagcugcggu

SEQ ID NO: 3337457 - RNA, 13 nt, Human
guggcaccagcag

SEQ ID NO: 3337458 - RNA, 14 nt, Human
guggcaccagcagc

SEQ ID NO: 3337459 - RNA, 20 nt, Human
guggcagcucaccucucccu

SEQ ID NO: 3337460 - RNA, 17 nt, Human
guggcagcugcggucca

SEQ ID NO: 3337461 - RNA, 21 nt, Human
aagacgcugugcugcccugcc

SEQ ID NO: 3337462 - RNA, 22 nt, Human
aagacgcugugcugcccugccc

SEQ ID NO: 3337463 - RNA, 23 nt, Human
aagacgcugugcugcccugccca

SEQ ID NO: 3337464 - RNA, 20 nt, Human
aagacgcugugcugcccugc

SEQ ID NO: 3337465 - RNA, 17 nt, Human
aagacucauucuucugu

SEQ ID NO: 3337466 - RNA, 16 nt, Human
aagagauugugguuuc

SEQ ID NO: 3337467 - RNA, 12 nt, Human
aagagcccaggc

SEQ ID NO: 3337468 - RNA, 14 nt, Human
aagagcccaggccu

SEQ ID NO: 3337469 - RNA, 16 nt, Human
aagagcccaggccucc

SEQ ID NO: 3337470 - RNA, 13 nt, Human
guggccucccaac

SEQ ID NO: 3337471 - RNA, 14 nt, Human
guggccucccaacu

SEQ ID NO: 3337472 - RNA, 13 nt, Human
gugggauccucca

SEQ ID NO: 3337473 - RNA, 15 nt, Human
gugggauccuccagg

SEQ ID NO: 3337474 - RNA, 18 nt, Human
gugggauccuccaggugc

SEQ ID NO: 3337475 - RNA, 12 nt, Human
gugggagcugag

SEQ ID NO: 3337476 - RNA, 20 nt, Human
guggugguuuucuguucuuu

SEQ ID NO: 3337477 - RNA, 15 nt, Human
gugguguuuccuggc

SEQ ID NO: 3337478 - RNA, 16 nt, Human
gugguguuuccuggca

SEQ ID NO: 3337479 - RNA, 16 nt, Human
gugugguagagugugc

SEQ ID NO: 3337480 - RNA, 15 nt, Human
gugugguguuuccug

SEQ ID NO: 3337481 - RNA, 18 nt, Human
gugugagucaccaagccc

SEQ ID NO: 3337482 - RNA, 13 nt, Human
gugugagucacca

SEQ ID NO: 3337483 - RNA, 21 nt, Human
gugucuugcaauggcagccuu

SEQ ID NO: 3337484 - RNA, 19 nt, Human
gugucuugcaauggcagcc

SEQ ID NO: 3337485 - RNA, 19 nt, Human
gugugguguuuccuggcac

SEQ ID NO: 3337486 - RNA, 14 nt, Human
aagaguaggaagac

SEQ ID NO: 3337487 - RNA, 18 nt, Human
gugguuauggagagggug

SEQ ID NO: 3337488 - RNA, 19 nt, Human
gugguguuuccuggcacug

SEQ ID NO: 3337489 - RNA, 16 nt, Human
aagaguaggaagacuu

SEQ ID NO: 3337490 - RNA, 18 nt, Human
aagaguaggaagacuuug

SEQ ID NO: 3337491 - RNA, 15 nt, Human
aagauauuuugcuuu

SEQ ID NO: 3337492 - RNA, 19 nt, Human
aagaguaggaagacuuugg

SEQ ID NO: 3337493 - RNA, 17 nt, Human
aagauauuuugcuuugu

SEQ ID NO: 3337494 - RNA, 20 nt, Human
aagauauuuugcuuugugau

SEQ ID NO: 3337495 - RNA, 21 nt, Human
acacaugcaaggucauuuuuu

SEQ ID NO: 3337496 - RNA, 21 nt, Human
acacccagcccacuucugcca

SEQ ID NO: 3337497 - RNA, 20 nt, Human
acacccagcccacuucugcc

SEQ ID NO: 3337498 - RNA, 19 nt, Human
acacccagcccacuucugc

SEQ ID NO: 3337499 - RNA, 12 nt, Human
acacccugugau

SEQ ID NO: 3337500 - RNA, 18 nt, Human
acacccugugauggggcc

SEQ ID NO: 3337501 - RNA, 11 nt, Human
acacccuguga

SEQ ID NO: 3337502 - RNA, 18 nt, Human
acacaugcaaggucauuu

SEQ ID NO: 3337503 - RNA, 19 nt, Human
acacaugcaaggucauuuu

SEQ ID NO: 3337504 - RNA, 20 nt, Human
acacaugcaaggucauuuuu

SEQ ID NO: 3337505 - RNA, 19 nt, Human
acaagcugcacccucaggc

SEQ ID NO: 3337506 - RNA, 21 nt, Human
acaagcugcacccucaggcag

SEQ ID NO: 3337507 - RNA, 22 nt, Human
acaagcugcacccucaggcagg

SEQ ID NO: 3337508 - RNA, 23 nt, Human
acaagcugcacccucaggcaggu

SEQ ID NO: 3337509 - RNA, 21 nt, Human
uagucaggugccucaagagaa

SEQ ID NO: 3337510 - RNA, 20 nt, Human
uagucacugagacagcccgg

SEQ ID NO: 3337511 - RNA, 20 nt, Human
uaguuccucauuagcauuuu

SEQ ID NO: 3337512 - RNA, 14 nt, Human
uauacauuugauaa

SEQ ID NO: 3337513 - RNA, 13 nt, Human
uauacauaaacaa

SEQ ID NO: 3337514 - RNA, 14 nt, Human
uauacauaaacaag

SEQ ID NO: 3337515 - RNA, 21 nt, Human
uauaauuuaccugaagucuuu

SEQ ID NO: 3337516 - RNA, 21 nt, Human
uauaagccaguguugccuaag

SEQ ID NO: 3337517 - RNA, 20 nt, Human
uauaagccaguguugccuaa

SEQ ID NO: 3337518 - RNA, 21 nt, Human
acacucauugaccugaggccc

SEQ ID NO: 3337519 - RNA, 23 nt, Human
acacucauugaccugaggcccuu

SEQ ID NO: 3337520 - RNA, 19 nt, Human
acacucauugaccugaggc

SEQ ID NO: 3337521 - RNA, 20 nt, Human
uauagccuaggugacagagu

SEQ ID NO: 3337522 - RNA, 18 nt, Human
uauagccuaggugacaga

SEQ ID NO: 3337523 - RNA, 15 nt, Human
uauauauagaaauau

SEQ ID NO: 3337524 - RNA, 14 nt, Human
uaucuugaagacuu

SEQ ID NO: 3337525 - RNA, 22 nt, Human
acagaguuguuacauuuuuaag

SEQ ID NO: 3337526 - RNA, 18 nt, Human
acagaguuuucacucuua

SEQ ID NO: 3337527 - RNA, 20 nt, Human
acagaguuuucacucuuauu

SEQ ID NO: 3337528 - RNA, 23 nt, Human
uaugaucacggcucacugcagcc

SEQ ID NO: 3337529 - RNA, 21 nt, Human
uaugaucacggcucacugcag

SEQ ID NO: 3337530 - RNA, 14 nt, Human
uaugaucacggcuc

SEQ ID NO: 3337531 - RNA, 15 nt, Human
uaucuugaagacuuu

SEQ ID NO: 3337532 - RNA, 23 nt, Human
uaugaggcauuuguuugaacuga

SEQ ID NO: 3337533 - RNA, 14 nt, Human
uaugcucugcaugu

SEQ ID NO: 3337534 - RNA, 18 nt, Human
uaugcucugcauguuaca

SEQ ID NO: 3337535 - RNA, 22 nt, Human
uauggcccuggccuagcauacg

SEQ ID NO: 3337536 - RNA, 19 nt, Human
uaugcucugcauguuacau

SEQ ID NO: 3337537 - RNA, 14 nt, Human
acagcuaacaugga

SEQ ID NO: 3337538 - RNA, 15 nt, Human
acagcuaacauggaa

SEQ ID NO: 3337539 - RNA, 17 nt, Human
acagcuaacauggaagu

SEQ ID NO: 3337540 - RNA, 10 nt, Human
uaugggagag

SEQ ID NO: 3337541 - RNA, 21 nt, Human
acagagugagacucugucuca

SEQ ID NO: 3337542 - RNA, 16 nt, Human
acagagcuacacaggg

SEQ ID NO: 3337543 - RNA, 20 nt, Human
acagagcccacgcccccacu

SEQ ID NO: 3337544 - RNA, 22 nt, Human
acagacuggaagcacagcuuca

SEQ ID NO: 3337545 - RNA, 15 nt, Human
uaucuagauacugua

SEQ ID NO: 3337546 - RNA, 16 nt, Human
uaucuagauacuguau

SEQ ID NO: 3337547 - RNA, 16 nt, Human
uaucucccccagcccc

SEQ ID NO: 3337548 - RNA, 18 nt, Human
uaucucccccagccccau

SEQ ID NO: 3337549 - RNA, 17 nt, Human
uaucucccccagcccca

SEQ ID NO: 3337550 - RNA, 19 nt, Human
uaucuagauacuguaucau

SEQ ID NO: 3337551 - RNA, 18 nt, Human
uaucacccagaagaaaau

SEQ ID NO: 3337552 - RNA, 21 nt, Human
uaucaaguauuauaccuuuuu

SEQ ID NO: 3337553 - RNA, 18 nt, Human
uaucaaguauuauaccuu

SEQ ID NO: 3337554 - RNA, 14 nt, Human
acagacuggaagca

SEQ ID NO: 3337555 - RNA, 18 nt, Human
acagacccugcccugugg

SEQ ID NO: 3337556 - RNA, 11 nt, Human
acacuccuuca

SEQ ID NO: 3337557 - RNA, 23 nt, Human
acagacacaggcccggcuccagg

SEQ ID NO: 3337558 - RNA, 22 nt, Human
acagacacaggcccggcuccag

SEQ ID NO: 3337559 - RNA, 17 nt, Human
acagacccugcccugug

SEQ ID NO: 3337560 - RNA, 16 nt, Human
acagacccugcccugu

SEQ ID NO: 3337561 - RNA, 13 nt, Human
uauugucaaagug

SEQ ID NO: 3337562 - RNA, 17 nt, Human
uauugucaaagugguga

SEQ ID NO: 3337563 - RNA, 21 nt, Human
uauuuaaugaaagacuguaca

SEQ ID NO: 3337564 - RNA, 15 nt, Human
uauuuaaugaaagac

SEQ ID NO: 3337565 - RNA, 13 nt, Human
uauuuauuuaaau

SEQ ID NO: 3337566 - RNA, 14 nt, Human
uauuuauuuaaauu

SEQ ID NO: 3337567 - RNA, 18 nt, Human
uauuuacuucuuauacau

SEQ ID NO: 3337568 - RNA, 23 nt, Human
uauuuaauuuuuuugagacagag

SEQ ID NO: 3337569 - RNA, 17 nt, Human
acaguucucuccuucuu

SEQ ID NO: 3337570 - RNA, 20 nt, Human
uauucucuccuguaccucuu

SEQ ID NO: 3337571 - RNA, 24 nt, Human
uauucucuccuguaccucuugagc

SEQ ID NO: 3337572 - RNA, 18 nt, Human
uauucucuccuguaccuc

SEQ ID NO: 3337573 - RNA, 16 nt, Human
uauucuguuggccagu

SEQ ID NO: 3337574 - RNA, 15 nt, Human
uauucuuauuuaaug

SEQ ID NO: 3337575 - RNA, 20 nt, Human
acaguucaauucucauuugu

SEQ ID NO: 3337576 - RNA, 13 nt, Human
acaguuacucaga

SEQ ID NO: 3337577 - RNA, 20 nt, Human
acaguuacucagaauucucu

SEQ ID NO: 3337578 - RNA, 16 nt, Human
acaguucucuccuucu

SEQ ID NO: 3337579 - RNA, 23 nt, Human
uauuaaaaaucucaaauuucuaa

SEQ ID NO: 3337580 - RNA, 12 nt, Human
uauuaaaacauu

SEQ ID NO: 3337581 - RNA, 18 nt, Human
uauuaaaacauuggauua

SEQ ID NO: 3337582 - RNA, 17 nt, Human
uauuaaaacauuggauu

SEQ ID NO: 3337583 - RNA, 19 nt, Human
uauuaaaacauuggauuau

SEQ ID NO: 3337584 - RNA, 16 nt, Human
uauuaaaaaucucaaa

SEQ ID NO: 3337585 - RNA, 18 nt, Human
uauuaaaaaucucaaauu

SEQ ID NO: 3337586 - RNA, 20 nt, Human
uauuaaaaaucucaaauuuc

SEQ ID NO: 3337587 - RNA, 22 nt, Human
uauuaaaaaucucaaauuucua

SEQ ID NO: 3337588 - RNA, 19 nt, Human
uauguuuuaagaggcaggg

SEQ ID NO: 3337589 - RNA, 17 nt, Human
uauguuuuaagaggcag

SEQ ID NO: 3337590 - RNA, 12 nt, Human
uauuagagaaga

SEQ ID NO: 3337591 - RNA, 16 nt, Human
uauuaccacagacaua

SEQ ID NO: 3337592 - RNA, 16 nt, Human
uauucaggaagcucag

SEQ ID NO: 3337593 - RNA, 17 nt, Human
uauucaaccauggacuu

SEQ ID NO: 3337594 - RNA, 16 nt, Human
uauucaaccauggacu

SEQ ID NO: 3337595 - RNA, 14 nt, Human
uauucaaccaugga

SEQ ID NO: 3337596 - RNA, 18 nt, Human
uauucaggaagcucaggg

SEQ ID NO: 3337597 - RNA, 22 nt, Human
uauucaggaagcucagggccug

SEQ ID NO: 3337598 - RNA, 21 nt, Human
acaguccuuaccagcagagca

SEQ ID NO: 3337599 - RNA, 22 nt, Human
acaguccuuaccagcagagcac

SEQ ID NO: 3337600 - RNA, 15 nt, Human
acaguuaagagaaau

SEQ ID NO: 3337601 - RNA, 12 nt, Human
acagucccugcc

SEQ ID NO: 3337602 - RNA, 13 nt, Human
acagucccugcca

SEQ ID NO: 3337603 - RNA, 19 nt, Human
acaguauuacuucugcuac

SEQ ID NO: 3337604 - RNA, 17 nt, Human
acaguauuacuucugcu

SEQ ID NO: 3337605 - RNA, 16 nt, Human
acaguauuacuucugc

SEQ ID NO: 3337606 - RNA, 15 nt, Human
acaguauuacuucug

SEQ ID NO: 3337607 - RNA, 15 nt, Human
acagucccugccaau

SEQ ID NO: 3337608 - RNA, 13 nt, Human
acaguccucccau

SEQ ID NO: 3337609 - RNA, 14 nt, Human
acaguccucccauc

SEQ ID NO: 3337610 - RNA, 15 nt, Human
acaguccucccaucu

SEQ ID NO: 3337611 - RNA, 18 nt, Human
acaguccuuaccagcaga

SEQ ID NO: 3337612 - RNA, 20 nt, Human
acaguccuuaccagcagagc

SEQ ID NO: 3337613 - RNA, 17 nt, Human
acaguccucccaucuca

SEQ ID NO: 3337614 - RNA, 17 nt, Human
acaggcugggcuucagu

SEQ ID NO: 3337615 - RNA, 14 nt, Human
acaggcugggcuuc

SEQ ID NO: 3337616 - RNA, 20 nt, Human
acagggcacaccgggcacuc

SEQ ID NO: 3337617 - RNA, 12 nt, Human
acaggcugggcu

SEQ ID NO: 3337618 - RNA, 22 nt, Human
acagguuuuccugaagaauuga

SEQ ID NO: 3337619 - RNA, 22 nt, Human
acagggcacaccgggcacucag

SEQ ID NO: 3337620 - RNA, 13 nt, Human
aauuuaaaagucu

SEQ ID NO: 3337621 - RNA, 19 nt, Human
aauuuacauacucugcuua

SEQ ID NO: 3337622 - RNA, 15 nt, Human
aauuuacauacucug

SEQ ID NO: 3337623 - RNA, 22 nt, Human
aauuguuuggggaugagaaagg

SEQ ID NO: 3337624 - RNA, 17 nt, Human
aauuuagaaauauaauu

SEQ ID NO: 3337625 - RNA, 13 nt, Human
aauuucuaaaucu

SEQ ID NO: 3337626 - RNA, 21 nt, Human
aauuucuaaaucuccaaaaua

SEQ ID NO: 3337627 - RNA, 21 nt, Human
uacucugugucagguggggca

SEQ ID NO: 3337628 - RNA, 13 nt, Human
uacgugaguccug

SEQ ID NO: 3337629 - RNA, 13 nt, Human
uacguugugcauu

SEQ ID NO: 3337630 - RNA, 16 nt, Human
uacuauaauuuaccug

SEQ ID NO: 3337631 - RNA, 16 nt, Human
uacuauguaucaauga

SEQ ID NO: 3337632 - RNA, 14 nt, Human
uacuauguaucaau

SEQ ID NO: 3337633 - RNA, 13 nt, Human
aauucuuaaauau

SEQ ID NO: 3337634 - RNA, 22 nt, Human
aauucuucuccacuuucuagcc

SEQ ID NO: 3337635 - RNA, 14 nt, Human
aauucuugcaaagu

SEQ ID NO: 3337636 - RNA, 20 nt, Human
aauucuugcaaaguaucccu

SEQ ID NO: 3337637 - RNA, 15 nt, Human
uacguacacauuuua

SEQ ID NO: 3337638 - RNA, 14 nt, Human
uacguacacauuuu

SEQ ID NO: 3337639 - RNA, 16 nt, Human
uagcacagacccugcc

SEQ ID NO: 3337640 - RNA, 17 nt, Human
uagcacagacccugccc

SEQ ID NO: 3337641 - RNA, 18 nt, Human
uagcacagacccugcccu

SEQ ID NO: 3337642 - RNA, 22 nt, Human
uagauuuuagacccuauugcug

SEQ ID NO: 3337643 - RNA, 24 nt, Human
uagcacagacccugcccugugggc

SEQ ID NO: 3337644 - RNA, 12 nt, Human
acaagccacccc

SEQ ID NO: 3337645 - RNA, 21 nt, Human
acaagcgugagccacugcacc

SEQ ID NO: 3337646 - RNA, 20 nt, Human
acaagcgugagccacugcac

SEQ ID NO: 3337647 - RNA, 13 nt, Human
acaagcugcaccc

SEQ ID NO: 3337648 - RNA, 18 nt, Human
acaagcgugagccacugc

SEQ ID NO: 3337649 - RNA, 17 nt, Human
acaagagcccaggccuc

SEQ ID NO: 3337650 - RNA, 15 nt, Human
acaacaacaaaauga

SEQ ID NO: 3337651 - RNA, 12 nt, Human
acaacacucaca

SEQ ID NO: 3337652 - RNA, 12 nt, Human
uagacagucccu

SEQ ID NO: 3337653 - RNA, 14 nt, Human
uagacagucccugc

SEQ ID NO: 3337654 - RNA, 18 nt, Human
aauuuuuauuaaauuaug

SEQ ID NO: 3337655 - RNA, 17 nt, Human
aauuuuuauuaaauuau

SEQ ID NO: 3337656 - RNA, 22 nt, Human
aauuuuuuuaucgucacugcuu

SEQ ID NO: 3337657 - RNA, 13 nt, Human
acaaaaacauggc

SEQ ID NO: 3337658 - RNA, 17 nt, Human
aauuuuuuugagacaga

SEQ ID NO: 3337659 - RNA, 19 nt, Human
uagaagucuuagauguaua

SEQ ID NO: 3337660 - RNA, 18 nt, Human
uagaagucuuagauguau

SEQ ID NO: 3337661 - RNA, 17 nt, Human
uagaagucuuagaugua

SEQ ID NO: 3337662 - RNA, 16 nt, Human
uagaagucuuagaugu

SEQ ID NO: 3337663 - RNA, 16 nt, Human
uagaagucacacagua

SEQ ID NO: 3337664 - RNA, 16 nt, Human
uagacaauuuauuaug

SEQ ID NO: 3337665 - RNA, 21 nt, Human
uagacagagucucacuguugc

SEQ ID NO: 3337666 - RNA, 15 nt, Human
uagaagucacacagu

SEQ ID NO: 3337667 - RNA, 17 nt, Human
uaccauccccuguagag

SEQ ID NO: 3337668 - RNA, 17 nt, Human
uaccacuuuuguucuug

SEQ ID NO: 3337669 - RNA, 22 nt, Human
uacccuggcacuauaauguaag

SEQ ID NO: 3337670 - RNA, 20 nt, Human
uacccuggcacuauaaugua

SEQ ID NO: 3337671 - RNA, 15 nt, Human
uacccucauguucuu

SEQ ID NO: 3337672 - RNA, 16 nt, Human
uacccucauguucuua

SEQ ID NO: 3337673 - RNA, 20 nt, Human
uacccgggaagggggcuggg

SEQ ID NO: 3337674 - RNA, 18 nt, Human
aauuaacuuuuauaaacu

SEQ ID NO: 3337675 - RNA, 20 nt, Human
aauuaacuuuuauaaacuuu

SEQ ID NO: 3337676 - RNA, 22 nt, Human
aauuaacuuuuauaaacuuuac

SEQ ID NO: 3337677 - RNA, 16 nt, Human
aauuaacuuuuauaaa

SEQ ID NO: 3337678 - RNA, 22 nt, Human
aaugugaaacuggauuaaacuu

SEQ ID NO: 3337679 - RNA, 14 nt, Human
aaugucacaggcag

SEQ ID NO: 3337680 - RNA, 13 nt, Human
aaugucacaggca

SEQ ID NO: 3337681 - RNA, 18 nt, Human
aauguacugcauaugaaa

SEQ ID NO: 3337682 - RNA, 15 nt, Human
uacaguaucucaggg

SEQ ID NO: 3337683 - RNA, 18 nt, Human
uacaguaucucagggccu

SEQ ID NO: 3337684 - RNA, 12 nt, Human
uacaguccuccc

SEQ ID NO: 3337685 - RNA, 15 nt, Human
uacaguccucccauc

SEQ ID NO: 3337686 - RNA, 17 nt, Human
uacaguccucccaucuc

SEQ ID NO: 3337687 - RNA, 18 nt, Human
uacaguccucccaucuca

SEQ ID NO: 3337688 - RNA, 22 nt, Human
uacagcaaggagauuuacaacu

SEQ ID NO: 3337689 - RNA, 21 nt, Human
aauguacagcaaggagauuua

SEQ ID NO: 3337690 - RNA, 23 nt, Human
aauguacagcaaggagauuuaca

SEQ ID NO: 3337691 - RNA, 16 nt, Human
uacacgaaagagagag

SEQ ID NO: 3337692 - RNA, 15 nt, Human
uacacgaaagagaga

SEQ ID NO: 3337693 - RNA, 14 nt, Human
uacacgaaagagag

SEQ ID NO: 3337694 - RNA, 15 nt, Human
aauguaagcucuacu

SEQ ID NO: 3337695 - RNA, 13 nt, Human
aauguaagcucua

SEQ ID NO: 3337696 - RNA, 17 nt, Human
aaugguuuucuugugug

SEQ ID NO: 3337697 - RNA, 18 nt, Human
aaugguuuucuugugugu

SEQ ID NO: 3337698 - RNA, 22 nt, Human
aaugguuuucuuguguguuuau

SEQ ID NO: 3337699 - RNA, 16 nt, Human
aaugguuuucuugugu

SEQ ID NO: 3337700 - RNA, 19 nt, Human
aaugcacaaacagaggccg

SEQ ID NO: 3337701 - RNA, 13 nt, Human
aaugcacuuuguu

SEQ ID NO: 3337702 - RNA, 16 nt, Human
aaugcacuuuguucug

SEQ ID NO: 3337703 - RNA, 19 nt, Human
aaugcacuuuguucuggcu

SEQ ID NO: 3337704 - RNA, 23 nt, Human
uaauuaguuccucauuagcauuu

SEQ ID NO: 3337705 - RNA, 13 nt, Human
aaugaccuuucaa

SEQ ID NO: 3337706 - RNA, 14 nt, Human
aaugaccuuucaau

SEQ ID NO: 3337707 - RNA, 14 nt, Human
aaugcaaaccauca

SEQ ID NO: 3337708 - RNA, 16 nt, Human
aaugcaaaccaucauu

SEQ ID NO: 3337709 - RNA, 20 nt, Human
aaugaaugucagugugacug

SEQ ID NO: 3337710 - RNA, 21 nt, Human
aaugaaugucagugugacuga

SEQ ID NO: 3337711 - RNA, 18 nt, Human
aaugcacaaacagaggcc

SEQ ID NO: 3337712 - RNA, 22 nt, Human
aaugcaaaccaucauugaaauc

SEQ ID NO: 3337713 - RNA, 23 nt, Human
aaugcaaaccaucauugaaaucu

SEQ ID NO: 3337714 - RNA, 17 nt, Human
uaauuuaccugaagucu

SEQ ID NO: 3337715 - RNA, 18 nt, Human
uaauuuaccugaagucuu

SEQ ID NO: 3337716 - RNA, 20 nt, Human
uacaagcgugagccacugca

SEQ ID NO: 3337717 - RNA, 19 nt, Human
uacaagcgugagccacugc

SEQ ID NO: 3337718 - RNA, 18 nt, Human
uacaagcgugagccacug

SEQ ID NO: 3337719 - RNA, 16 nt, Human
uacaagcgugagccac

SEQ ID NO: 3337720 - RNA, 16 nt, Human
uacaaaaacauggccu

SEQ ID NO: 3337721 - RNA, 22 nt, Human
uaauacaccacuacauucuguu

SEQ ID NO: 3337722 - RNA, 21 nt, Human
uaauacaccacuacauucugu

SEQ ID NO: 3337723 - RNA, 23 nt, Human
uaauacaccacuacauucuguua

SEQ ID NO: 3337724 - RNA, 20 nt, Human
aauacaguaucucagggccu

SEQ ID NO: 3337725 - RNA, 21 nt, Human
uaauauugauaugcuuauaca

SEQ ID NO: 3337726 - RNA, 17 nt, Human
uaauguaagcucuacug

SEQ ID NO: 3337727 - RNA, 16 nt, Human
uaauguaagcucuacu

SEQ ID NO: 3337728 - RNA, 12 nt, Human
uaaugugaaacu

SEQ ID NO: 3337729 - RNA, 20 nt, Human
uaaugugaaacuggauuaaa

SEQ ID NO: 3337730 - RNA, 22 nt, Human
uaaugugaaacuggauuaaacu

SEQ ID NO: 3337731 - RNA, 23 nt, Human
uaaugugaaacuggauuaaacuu

SEQ ID NO: 3337732 - RNA, 16 nt, Human
uaaugucacaggcagg

SEQ ID NO: 3337733 - RNA, 15 nt, Human
uaaugucacaggcag

SEQ ID NO: 3337734 - RNA, 23 nt, Human
aaucuucugaacuuggcgcugcc

SEQ ID NO: 3337735 - RNA, 15 nt, Human
aaugaaugucagugu

SEQ ID NO: 3337736 - RNA, 14 nt, Human
aaugaaugucagug

SEQ ID NO: 3337737 - RNA, 14 nt, Human
aaugaaugaaacau

SEQ ID NO: 3337738 - RNA, 15 nt, Human
aaaaaauauuuuccu

SEQ ID NO: 3337739 - RNA, 23 nt, Human
aagauacaguuacucagaauucu

SEQ ID NO: 3337740 - RNA, 13 nt, Human
aagauaaaugugc

SEQ ID NO: 3337741 - RNA, 12 nt, Human
aagauaaaugug

SEQ ID NO: 3337742 - RNA, 20 nt, Human
aagccagcaggcucucaggc

SEQ ID NO: 3337743 - RNA, 23 nt, Human
aagccagcaggcucucaggccag

SEQ ID NO: 3337744 - RNA, 21 nt, Human
aagcagcguuucuaugacaca

SEQ ID NO: 3337745 - RNA, 22 nt, Human
aagcagcguuucuaugacacau

SEQ ID NO: 3337746 - RNA, 19 nt, Human
aagccagcaggcucucagg

SEQ ID NO: 3337747 - RNA, 17 nt, Human
aagcagcguuucuauga

SEQ ID NO: 3337748 - RNA, 20 nt, Human
aagcagcguuucuaugacac

SEQ ID NO: 3337749 - RNA, 14 nt, Human
aagcagcguuucua

SEQ ID NO: 3337750 - RNA, 17 nt, Human
aagcgauucuucugcuu

SEQ ID NO: 3337751 - RNA, 21 nt, Human
aagcgauucuucugcuucagc

SEQ ID NO: 3337752 - RNA, 21 nt, Human
aagcuggucccacucagucca

SEQ ID NO: 3337753 - RNA, 18 nt, Human
aagcuggucccacucagu

SEQ ID NO: 3337754 - RNA, 15 nt, Human
aagcugggcagguug

SEQ ID NO: 3337755 - RNA, 13 nt, Human
aaggacacuagaa

SEQ ID NO: 3337756 - RNA, 15 nt, Human
aaggauugcuacugu

SEQ ID NO: 3337757 - RNA, 15 nt, Human
aaggauguucuagca

SEQ ID NO: 3337758 - RNA, 19 nt, Human
aaguggaaaaauagccugc

SEQ ID NO: 3337759 - RNA, 21 nt, Human
aaguggaaaaauagccugccu

SEQ ID NO: 3337760 - RNA, 18 nt, Human
aaggucauuuuuuuuaag

SEQ ID NO: 3337761 - RNA, 19 nt, Human
aaggucauuuuuuuuaaga

SEQ ID NO: 3337762 - RNA, 22 nt, Human
aaguccucuuuucugagaggac

SEQ ID NO: 3337763 - RNA, 18 nt, Human
aaguccucuuuucugaga

SEQ ID NO: 3337764 - RNA, 20 nt, Human
aaguagaagucuuagaugua

SEQ ID NO: 3337765 - RNA, 19 nt, Human
aaguagaagucuuagaugu

SEQ ID NO: 3337766 - RNA, 17 nt, Human
aaguaucccuacuguaa

SEQ ID NO: 3337767 - RNA, 18 nt, Human
aaguaucccuacuguaau

SEQ ID NO: 3337768 - RNA, 23 nt, Human
aaguaucccuacuguaauuugug

SEQ ID NO: 3337769 - RNA, 21 nt, Human
aaguagaagucuuagauguau

SEQ ID NO: 3337770 - RNA, 16 nt, Human
aaucucaaauuucuaa

SEQ ID NO: 3337771 - RNA, 15 nt, Human
aaucucaaauuucua

SEQ ID NO: 3337772 - RNA, 17 nt, Human
aauccagacccggcugc

SEQ ID NO: 3337773 - RNA, 19 nt, Human
aauccagacccggcugcgu

SEQ ID NO: 3337774 - RNA, 17 nt, Human
aaucucaaauuucuaaa

SEQ ID NO: 3337775 - RNA, 18 nt, Human
aaucucaaauuucuaaau

SEQ ID NO: 3337776 - RNA, 16 nt, Human
aaugauuaauuaaaac

SEQ ID NO: 3337777 - RNA, 20 nt, Human
aauacucuacccucuuagaa

SEQ ID NO: 3337778 - RNA, 22 nt, Human
aauacucuacccucuuagaaaa

SEQ ID NO: 3337779 - RNA, 14 nt, Human
aaucaccgaaaacg

SEQ ID NO: 3337780 - RNA, 13 nt, Human
aauagacaauuua

SEQ ID NO: 3337781 - RNA, 23 nt, Human
aaugccuuacccucauguucuua

SEQ ID NO: 3337782 - RNA, 18 nt, Human
aaugcgugcauaccacuu

SEQ ID NO: 3337783 - RNA, 19 nt, Human
aaugcgugcauaccacuuu

SEQ ID NO: 3337784 - RNA, 15 nt, Human
aaugugaaaagaaaa

SEQ ID NO: 3337785 - RNA, 15 nt, Human
aauguuugccucugc

SEQ ID NO: 3337786 - RNA, 23 nt, Human
aaugcucuuuacuucauggacuu

SEQ ID NO: 3337787 - RNA, 13 nt, Human
aaccacgcuggac

SEQ ID NO: 3337788 - RNA, 15 nt, Human
aaccacuucagcuga

SEQ ID NO: 3337789 - RNA, 23 nt, Human
aaaugccuuacccucauguucuu

SEQ ID NO: 3337790 - RNA, 18 nt, Human
aaauucuugcaaaguauc

SEQ ID NO: 3337791 - RNA, 21 nt, Human
aaauucuugcaaaguaucccu

SEQ ID NO: 3337792 - RNA, 15 nt, Human
aacuuaaucuaaaug

SEQ ID NO: 3337793 - RNA, 16 nt, Human
aacuuaaucuaaaugg

SEQ ID NO: 3337794 - RNA, 18 nt, Human
aacuuaaucuaaauggaa

SEQ ID NO: 3337795 - RNA, 14 nt, Human
aacugauaaagaug

SEQ ID NO: 3337796 - RNA, 19 nt, Human
aacuuaaauaaugugaaac

SEQ ID NO: 3337797 - RNA, 24 nt, Human
aaauagcucaggugucccugcacu

SEQ ID NO: 3337798 - RNA, 19 nt, Human
aaauaguggugugauuugg

SEQ ID NO: 3337799 - RNA, 18 nt, Human
aaaucugcuuuuuaaaga

SEQ ID NO: 3337800 - RNA, 19 nt, Human
aaauaaaacuuuuuaaaau

SEQ ID NO: 3337801 - RNA, 13 nt, Human
aaauaaaacuuuu

SEQ ID NO: 3337802 - RNA, 16 nt, Human
aaauaaaacuuuuuaa

SEQ ID NO: 3337803 - RNA, 13 nt, Human
aaaguggaaaaau

SEQ ID NO: 3337804 - RNA, 14 nt, Human
aaagugcugggauu

SEQ ID NO: 3337805 - RNA, 19 nt, Human
aaaggcuccaggagcagcc

SEQ ID NO: 3337806 - RNA, 15 nt, Human
aaaggcuccaggagc

SEQ ID NO: 3337807 - RNA, 16 nt, Human
aaaggcuccaggagca

SEQ ID NO: 3337808 - RNA, 18 nt, Human
aaacucuccucugcugcu

SEQ ID NO: 3337809 - RNA, 13 nt, Human
aaacucuccucug

SEQ ID NO: 3337810 - RNA, 18 nt, Human
aaaccaucauugaaaucu

SEQ ID NO: 3337811 - RNA, 17 nt, Human
aaagauauuuugcuuug

SEQ ID NO: 3337812 - RNA, 12 nt, Human
aaagauauuuug

SEQ ID NO: 3337813 - RNA, 16 nt, Human
aaagauauuuugcuuu

SEQ ID NO: 3337814 - RNA, 14 nt, Human
aaagaguaggaaga

SEQ ID NO: 3337815 - RNA, 19 nt, Human
aaaaucucaaauuucuaaa

SEQ ID NO: 3337816 - RNA, 22 nt, Human
aaaaucucaaauuucuaaaucu

SEQ ID NO: 3337817 - RNA, 15 nt, Human
aaaaagaaaggaggg

SEQ ID NO: 3337818 - RNA, 22 nt, Human
aaaaucccuuaccucggugccu

SEQ ID NO: 3337819 - RNA, 16 nt, Human
aaaauaaaacuuuuua

SEQ ID NO: 3337820 - RNA, 17 nt, Human
aaaauaaaacuuuuuaa

SEQ ID NO: 3337821 - RNA, 14 nt, Human
acgucugacaggca

SEQ ID NO: 3337822 - RNA, 13 nt, Human
acgucugacaggc

SEQ ID NO: 3337823 - RNA, 12 nt, Human
acgcugugcugc

SEQ ID NO: 3337824 - RNA, 14 nt, Human
acgcugugcugccc

SEQ ID NO: 3337825 - RNA, 11 nt, Human
acgcugugcug

SEQ ID NO: 3337826 - RNA, 11 nt, Human
acgugaguccu

SEQ ID NO: 3337827 - RNA, 15 nt, Human
accucugcagcaaua

SEQ ID NO: 3337828 - RNA, 18 nt, Human
accucugcagcaauaaag

SEQ ID NO: 3337829 - RNA, 20 nt, Human
accucugcagcaauaaagca

SEQ ID NO: 3337830 - RNA, 21 nt, Human
accucugcagcaauaaagcag

SEQ ID NO: 3337831 - RNA, 23 nt, Human
accucugccugaagucacacagu

SEQ ID NO: 3337832 - RNA, 15 nt, Human
accuuuaagagaaau

SEQ ID NO: 3337833 - RNA, 18 nt, Human
accuuucccaucuuccaa

SEQ ID NO: 3337834 - RNA, 13 nt, Human
accuuucccaucu

SEQ ID NO: 3337835 - RNA, 17 nt, Human
accuuggcugcagggag

SEQ ID NO: 3337836 - RNA, 14 nt, Human
accuuggcugcagg

SEQ ID NO: 3337837 - RNA, 18 nt, Human
accuuggcugcagggagu

SEQ ID NO: 3337838 - RNA, 12 nt, Human
accugucccccu

SEQ ID NO: 3337839 - RNA, 15 nt, Human
accugucccccugac

SEQ ID NO: 3337840 - RNA, 16 nt, Human
accugucccccugaca

SEQ ID NO: 3337841 - RNA, 19 nt, Human
acucaguccauagcagaga

SEQ ID NO: 3337842 - RNA, 13 nt, Human
acucaaaagcugg

SEQ ID NO: 3337843 - RNA, 15 nt, Human
acucuagggaaaaac

SEQ ID NO: 3337844 - RNA, 17 nt, Human
acucuagggaaaaacca

SEQ ID NO: 3337845 - RNA, 19 nt, Human
acucugucgcccagucugg

SEQ ID NO: 3337846 - RNA, 23 nt, Human
acucuaucaaguauuauaccuuu

SEQ ID NO: 3337847 - RNA, 21 nt, Human
acucuaucaaguauuauaccu

SEQ ID NO: 3337848 - RNA, 14 nt, Human
acuggagaaaaugg

SEQ ID NO: 3337849 - RNA, 15 nt, Human
acuggagaaaaugga

SEQ ID NO: 3337850 - RNA, 17 nt, Human
acuggaagcacagcuuc

SEQ ID NO: 3337851 - RNA, 19 nt, Human
acuggaagcacagcuucau

SEQ ID NO: 3337852 - RNA, 16 nt, Human
acuggaagcacagcuu

SEQ ID NO: 3337853 - RNA, 18 nt, Human
acugguuccauggccucu

SEQ ID NO: 3337854 - RNA, 16 nt, Human
acugugaagagaacca

SEQ ID NO: 3337855 - RNA, 20 nt, Human
acugugcugagucugaaggc

SEQ ID NO: 3337856 - RNA, 23 nt, Human
acuucacauauugauuuccguua

SEQ ID NO: 3337857 - RNA, 18 nt, Human
acuucuuauacauuugau

SEQ ID NO: 3337858 - RNA, 14 nt, Human
acuugggccacugu

SEQ ID NO: 3337859 - RNA, 15 nt, Human
acuugggccacugug

SEQ ID NO: 3337860 - RNA, 16 nt, Human
acuugguuuuuaaaaa

SEQ ID NO: 3337861 - RNA, 23 nt, Human
agaaaguacuucuccacccugcu

SEQ ID NO: 3337862 - RNA, 22 nt, Human
agaaaguacuucuccacccugc

SEQ ID NO: 3337863 - RNA, 13 nt, Human
acuuuuauaaacu

SEQ ID NO: 3337864 - RNA, 14 nt, Human
acuuuguucuggcu

SEQ ID NO: 3337865 - RNA, 19 nt, Human
acuuuguucuggcucuucc

SEQ ID NO: 3337866 - RNA, 16 nt, Human
acuuuguucuggcucu

SEQ ID NO: 3337867 - RNA, 17 nt, Human
acuuuguucuggcucuu

SEQ ID NO: 3337868 - RNA, 20 nt, Human
acuuuucauaaccuagccuu

SEQ ID NO: 3337869 - RNA, 22 nt, Human
acuuuucaaggcuuauauucaa

SEQ ID NO: 3337870 - RNA, 16 nt, Human
acuuuucuuucagcca

SEQ ID NO: 3337871 - RNA, 23 nt, Human
acuuuucaaggcuuauauucaac

SEQ ID NO: 3337872 - RNA, 14 nt, Human
acuuuucuuugugg

SEQ ID NO: 3337873 - RNA, 19 nt, Human
agaaaauaguggugugauu

SEQ ID NO: 3337874 - RNA, 15 nt, Human
agaaaauaccaagga

SEQ ID NO: 3337875 - RNA, 12 nt, Human
acaaggcaaggc

SEQ ID NO: 3337876 - RNA, 14 nt, Human
acaaggcaaggcug

SEQ ID NO: 3337877 - RNA, 17 nt, Human
acaaggauugcuacugu

SEQ ID NO: 3337878 - RNA, 16 nt, Human
acaaggauugcuacug

SEQ ID NO: 3337879 - RNA, 20 nt, Human
acaaaauguaggguuauaau

SEQ ID NO: 3337880 - RNA, 22 nt, Human
acaaaauguaggguuauaauaa

SEQ ID NO: 3337881 - RNA, 20 nt, Human
acaaggcaaggcugucaauu

SEQ ID NO: 3337882 - RNA, 16 nt, Human
aauuuugugcccccau

SEQ ID NO: 3337883 - RNA, 20 nt, Human
acacauuuuuuaaaugcacc

SEQ ID NO: 3337884 - RNA, 22 nt, Human
acacauuuuuuaaaugcaccug

SEQ ID NO: 3337885 - RNA, 21 nt, Human
acacauuuuauuuuauuaugc

SEQ ID NO: 3337886 - RNA, 22 nt, Human
acacauuuuauuuuauuaugca

SEQ ID NO: 3337887 - RNA, 11 nt, Human
acacagcucuu

SEQ ID NO: 3337888 - RNA, 19 nt, Human
acacagaggcugccucucc

SEQ ID NO: 3337889 - RNA, 14 nt, Human
acacagcucugucc

SEQ ID NO: 3337890 - RNA, 20 nt, Human
acacagcucuguccugggag

SEQ ID NO: 3337891 - RNA, 17 nt, Human
acacgcgugcacacacc

SEQ ID NO: 3337892 - RNA, 15 nt, Human
acacgcgugcacaca

SEQ ID NO: 3337893 - RNA, 17 nt, Human
acacgcgcgcacacaca

SEQ ID NO: 3337894 - RNA, 19 nt, Human
acacauuuuuuaaaugcac

SEQ ID NO: 3337895 - RNA, 22 nt, Human
acacgcgcgcacacacacacau

SEQ ID NO: 3337896 - RNA, 14 nt, Human
acaggauuauugga

SEQ ID NO: 3337897 - RNA, 12 nt, Human
acaggcaagcac

SEQ ID NO: 3337898 - RNA, 18 nt, Human
acaggcaaugcuggcugu

SEQ ID NO: 3337899 - RNA, 15 nt, Human
acaggaucagucuga

SEQ ID NO: 3337900 - RNA, 17 nt, Human
acagcucuucuccaggc

SEQ ID NO: 3337901 - RNA, 16 nt, Human
acagcucuucuccagg

SEQ ID NO: 3337902 - RNA, 17 nt, Human
acagcucuguccuggga

SEQ ID NO: 3337903 - RNA, 15 nt, Human
acagccacggccagg

SEQ ID NO: 3337904 - RNA, 17 nt, Human
acagccacggccaggcc

SEQ ID NO: 3337905 - RNA, 16 nt, Human
acagccacggccaggc

SEQ ID NO: 3337906 - RNA, 18 nt, Human
acagccacggccaggcca

SEQ ID NO: 3337907 - RNA, 14 nt, Human
acacugcauguuug

SEQ ID NO: 3337908 - RNA, 15 nt, Human
acacugcauguuugu

SEQ ID NO: 3337909 - RNA, 11 nt, Human
acagacacagg

SEQ ID NO: 3337910 - RNA, 15 nt, Human
acacuguacugcaau

SEQ ID NO: 3337911 - RNA, 15 nt, Human
acagaggcagcccca

SEQ ID NO: 3337912 - RNA, 14 nt, Human
acagaggcagcccc

SEQ ID NO: 3337913 - RNA, 14 nt, Human
acagacacaggccc

SEQ ID NO: 3337914 - RNA, 13 nt, Human
acagacacaggcc

SEQ ID NO: 3337915 - RNA, 23 nt, Human
acagaggccaugggccuccugug

SEQ ID NO: 3337916 - RNA, 19 nt, Human
acagaggcagccccauucu

SEQ ID NO: 3337917 - RNA, 15 nt, Human
acagagugagacucu

SEQ ID NO: 3337918 - RNA, 23 nt, Human
acagagucucacuguugcccagg

SEQ ID NO: 3337919 - RNA, 19 nt, Human
acagagugagacucugucu

SEQ ID NO: 3337920 - RNA, 19 nt, Human
accccuccaugugggcuag

SEQ ID NO: 3337921 - RNA, 16 nt, Human
accccuccaugugggc

SEQ ID NO: 3337922 - RNA, 20 nt, Human
accccucaacaccucugcac

SEQ ID NO: 3337923 - RNA, 14 nt, Human
accauauuaccaca

SEQ ID NO: 3337924 - RNA, 16 nt, Human
accauauuaccacaga

SEQ ID NO: 3337925 - RNA, 16 nt, Human
acccaccucagccucc

SEQ ID NO: 3337926 - RNA, 11 nt, Human
acccccugaau

SEQ ID NO: 3337927 - RNA, 20 nt, Human
accauauuaccacagacaua

SEQ ID NO: 3337928 - RNA, 19 nt, Human
acccaagggccuggccuga

SEQ ID NO: 3337929 - RNA, 22 nt, Human
acccaagggccuggccugagcu

SEQ ID NO: 3337930 - RNA, 18 nt, Human
acccaagggccuggccug

SEQ ID NO: 3337931 - RNA, 15 nt, Human
acccaccucagccuc

SEQ ID NO: 3337932 - RNA, 14 nt, Human
acccaccucagccu

SEQ ID NO: 3337933 - RNA, 13 nt, Human
acccaccucagcc

SEQ ID NO: 3337934 - RNA, 16 nt, Human
acaugugcacaugcac

SEQ ID NO: 3337935 - RNA, 18 nt, Human
acaucagcacgauuucug

SEQ ID NO: 3337936 - RNA, 15 nt, Human
acaucagcacgauuu

SEQ ID NO: 3337937 - RNA, 17 nt, Human
acaucagcacgauuucu

SEQ ID NO: 3337938 - RNA, 19 nt, Human
acaugaucuucuuuauaau

SEQ ID NO: 3337939 - RNA, 23 nt, Human
acauaaugcgugcauaccacuuu

SEQ ID NO: 3337940 - RNA, 22 nt, Human
acauaaugcgugcauaccacuu

SEQ ID NO: 3337941 - RNA, 21 nt, Human
acauaaugcgugcauaccacu

SEQ ID NO: 3337942 - RNA, 23 nt, Human
acaggcaaugcuggcuguuggcu

SEQ ID NO: 3337943 - RNA, 19 nt, Human
acaggcaaugcuggcuguu

SEQ ID NO: 3337944 - RNA, 19 nt, Human
acaggguuuugccauguug

SEQ ID NO: 3337945 - RNA, 14 nt, Human
acauuuauucugcu

SEQ ID NO: 3337946 - RNA, 19 nt, Human
accagagcugccaccugcc

SEQ ID NO: 3337947 - RNA, 13 nt, Human
accagcagaaaug

SEQ ID NO: 3337948 - RNA, 17 nt, Human
accagccaguaaauggg

SEQ ID NO: 3337949 - RNA, 15 nt, Human
acauuuauucugcuc

SEQ ID NO: 3337950 - RNA, 23 nt, Human
agcauccuggcacccggccccug

SEQ ID NO: 3337951 - RNA, 22 nt, Human
agcauccuggcacccggccccu

SEQ ID NO: 3337952 - RNA, 18 nt, Human
agcauccuggcacccggc

SEQ ID NO: 3337953 - RNA, 23 nt, Human
agccaagugugguagagugugcc

SEQ ID NO: 3337954 - RNA, 20 nt, Human
agcaugccuggauggggcug

SEQ ID NO: 3337955 - RNA, 23 nt, Human
agcaugccuggauggggcugcac

SEQ ID NO: 3337956 - RNA, 23 nt, Human
agccaaagcuaggccuggccaga

SEQ ID NO: 3337957 - RNA, 13 nt, Human
agcagcguuucua

SEQ ID NO: 3337958 - RNA, 18 nt, Human
agcagugcaugcuguccc

SEQ ID NO: 3337959 - RNA, 19 nt, Human
agcagugcaugcugucccu

SEQ ID NO: 3337960 - RNA, 20 nt, Human
agcagugcaugcugucccuu

SEQ ID NO: 3337961 - RNA, 17 nt, Human
agcacagacccugcccu

SEQ ID NO: 3337962 - RNA, 23 nt, Human
agcacacuugacaucaacugcau

SEQ ID NO: 3337963 - RNA, 18 nt, Human
agcacagacccugcccug

SEQ ID NO: 3337964 - RNA, 19 nt, Human
agcacagacccugcccugu

SEQ ID NO: 3337965 - RNA, 18 nt, Human
agccagcaggcucucagg

SEQ ID NO: 3337966 - RNA, 19 nt, Human
agccagcaggcucucaggc

SEQ ID NO: 3337967 - RNA, 17 nt, Human
agccagcaggcucucag

SEQ ID NO: 3337968 - RNA, 20 nt, Human
agccagcaggcucucaggcc

SEQ ID NO: 3337969 - RNA, 15 nt, Human
agccccagugcccac

SEQ ID NO: 3337970 - RNA, 14 nt, Human
agccccagugccca

SEQ ID NO: 3337971 - RNA, 13 nt, Human
agccccagugccc

SEQ ID NO: 3337972 - RNA, 21 nt, Human
agcccgggcucugccucccau

SEQ ID NO: 3337973 - RNA, 16 nt, Human
agccccauucugccug

SEQ ID NO: 3337974 - RNA, 13 nt, Human
agccccauucugc

SEQ ID NO: 3337975 - RNA, 19 nt, Human
agccucccgaguagcuggg

SEQ ID NO: 3337976 - RNA, 18 nt, Human
agccucccgaguagcugg

SEQ ID NO: 3337977 - RNA, 20 nt, Human
agccucccgaguagcuggga

SEQ ID NO: 3337978 - RNA, 14 nt, Human
agccuccuccagcc

SEQ ID NO: 3337979 - RNA, 17 nt, Human
agccucccgaguagcug

SEQ ID NO: 3337980 - RNA, 20 nt, Human
agccucccaaagugcuggga

SEQ ID NO: 3337981 - RNA, 21 nt, Human
agccucccaaagugcugggau

SEQ ID NO: 3337982 - RNA, 22 nt, Human
agccucccacgacugcccggca

SEQ ID NO: 3337983 - RNA, 21 nt, Human
agccgccaugcuccuggccca

SEQ ID NO: 3337984 - RNA, 18 nt, Human
agacgggggcagagaggg

SEQ ID NO: 3337985 - RNA, 20 nt, Human
agacgcugugcugcccugcc

SEQ ID NO: 3337986 - RNA, 22 nt, Human
agacgcugugcugcccugccca

SEQ ID NO: 3337987 - RNA, 21 nt, Human
agacgcugugcugcccugccc

SEQ ID NO: 3337988 - RNA, 11 nt, Human
agacagcucuu

SEQ ID NO: 3337989 - RNA, 12 nt, Human
agacagcucuua

SEQ ID NO: 3337990 - RNA, 21 nt, Human
agacagauacuccuccaaggu

SEQ ID NO: 3337991 - RNA, 15 nt, Human
agacagauacuccuc

SEQ ID NO: 3337992 - RNA, 14 nt, Human
agacagcccgggcu

SEQ ID NO: 3337993 - RNA, 15 nt, Human
agacagcccgggcuc

SEQ ID NO: 3337994 - RNA, 23 nt, Human
agacagagucucacuguugccca

SEQ ID NO: 3337995 - RNA, 21 nt, Human
agagaggguggugaccucugc

SEQ ID NO: 3337996 - RNA, 20 nt, Human
agagaggguggugaccucug

SEQ ID NO: 3337997 - RNA, 22 nt, Human
agagaggguggugaccucugcc

SEQ ID NO: 3337998 - RNA, 13 nt, Human
agagcccaccuug

SEQ ID NO: 3337999 - RNA, 16 nt, Human
agagcccacgccccca

SEQ ID NO: 3338000 - RNA, 13 nt, Human
agagcccacgccc

SEQ ID NO: 3338001 - RNA, 19 nt, Human
agagcccaccuuggcucaa

SEQ ID NO: 3338002 - RNA, 23 nt, Human
agagagcaagacgcugugcugcc

SEQ ID NO: 3338003 - RNA, 16 nt, Human
agacuggaagcacagc

SEQ ID NO: 3338004 - RNA, 17 nt, Human
agacuggaagcacagcu

SEQ ID NO: 3338005 - RNA, 19 nt, Human
agacuggaagcacagcuuc

SEQ ID NO: 3338006 - RNA, 14 nt, Human
agaucuucuguggg

SEQ ID NO: 3338007 - RNA, 19 nt, Human
agauauaugcucugcaugu

SEQ ID NO: 3338008 - RNA, 15 nt, Human
agagcccaggccucc

SEQ ID NO: 3338009 - RNA, 13 nt, Human
agagcccaggccu

SEQ ID NO: 3338010 - RNA, 14 nt, Human
agagcccaggccuc

SEQ ID NO: 3338011 - RNA, 12 nt, Human
agagggcacaga

SEQ ID NO: 3338012 - RNA, 22 nt, Human
agaggguggugaccucugccug

SEQ ID NO: 3338013 - RNA, 20 nt, Human
agaggguggugaccucugcc

SEQ ID NO: 3338014 - RNA, 19 nt, Human
agaggguggugaccucugc

SEQ ID NO: 3338015 - RNA, 14 nt, Human
agagugugccugaa

SEQ ID NO: 3338016 - RNA, 11 nt, Human
agagugggagc

SEQ ID NO: 3338017 - RNA, 21 nt, Human
agaggaaaucaccgaaaacgu

SEQ ID NO: 3338018 - RNA, 16 nt, Human
agaggaaggagaggag

SEQ ID NO: 3338019 - RNA, 15 nt, Human
agaggagagaggacc

SEQ ID NO: 3338020 - RNA, 16 nt, Human
agaggagagaggaccc

SEQ ID NO: 3338021 - RNA, 23 nt, Human
agaggacuuuucuuuguggcuuc

SEQ ID NO: 3338022 - RNA, 23 nt, Human
agcugcgguccacccaggagccc

SEQ ID NO: 3338023 - RNA, 21 nt, Human
agcuccgcuuucuacccagcg

SEQ ID NO: 3338024 - RNA, 20 nt, Human
agcuccgcuuucuacccagc

SEQ ID NO: 3338025 - RNA, 23 nt, Human
agcuccgcuuucuacccagcgag

SEQ ID NO: 3338026 - RNA, 12 nt, Human
agcuccuucugu

SEQ ID NO: 3338027 - RNA, 21 nt, Human
agcugacuuuucuguccgagc

SEQ ID NO: 3338028 - RNA, 21 nt, Human
agcugcgguccacccaggagc

SEQ ID NO: 3338029 - RNA, 21 nt, Human
aggaaucaugugccaagcaga

SEQ ID NO: 3338030 - RNA, 17 nt, Human
aggaauccagacccggc

SEQ ID NO: 3338031 - RNA, 13 nt, Human
aggaccucaggug

SEQ ID NO: 3338032 - RNA, 21 nt, Human
aggaugcuuguacauaaugcg

SEQ ID NO: 3338033 - RNA, 23 nt, Human
aggaugcuuguacauaaugcgug

SEQ ID NO: 3338034 - RNA, 22 nt, Human
aggauguucuagcauggcugcc

SEQ ID NO: 3338035 - RNA, 16 nt, Human
aggauguucugggaca

SEQ ID NO: 3338036 - RNA, 15 nt, Human
aggauguucugggac

SEQ ID NO: 3338037 - RNA, 18 nt, Human
aggaugcuuguacauaau

SEQ ID NO: 3338038 - RNA, 14 nt, Human
aggauuauuggaaa

SEQ ID NO: 3338039 - RNA, 14 nt, Human
agguucaaagauau

SEQ ID NO: 3338040 - RNA, 22 nt, Human
agguucccuuugacgccauccc

SEQ ID NO: 3338041 - RNA, 13 nt, Human
agguucccuuuga

SEQ ID NO: 3338042 - RNA, 23 nt, Human
agguucccuuugacgccauccca

SEQ ID NO: 3338043 - RNA, 19 nt, Human
aggugcuaggaacacuccu

SEQ ID NO: 3338044 - RNA, 22 nt, Human
aggugcuaggaacacuccuuca

SEQ ID NO: 3338045 - RNA, 23 nt, Human
aggugcuaggaacacuccuucac

SEQ ID NO: 3338046 - RNA, 18 nt, Human
aggucuguucuuuccaaa

SEQ ID NO: 3338047 - RNA, 22 nt, Human
aggucuguucuuuccaaaguac

SEQ ID NO: 3338048 - RNA, 23 nt, Human
aggucuguucuuuccaaaguaca

SEQ ID NO: 3338049 - RNA, 23 nt, Human
aggguuuugccauguuggccagg

SEQ ID NO: 3338050 - RNA, 11 nt, Human
agggucccugg

SEQ ID NO: 3338051 - RNA, 21 nt, Human
aggguaucaggugcugccauc

SEQ ID NO: 3338052 - RNA, 18 nt, Human
aggguaucaggugcugcc

SEQ ID NO: 3338053 - RNA, 19 nt, Human
aggguaucaggugcugcca

SEQ ID NO: 3338054 - RNA, 20 nt, Human
aggggccucuuaugggcugg

SEQ ID NO: 3338055 - RNA, 19 nt, Human
aggggccucuuaugggcug

SEQ ID NO: 3338056 - RNA, 21 nt, Human
aggcugucaauuacaggaagu

SEQ ID NO: 3338057 - RNA, 22 nt, Human
agggacagaggggguggccucc

SEQ ID NO: 3338058 - RNA, 20 nt, Human
agggacagaggggguggccu

SEQ ID NO: 3338059 - RNA, 23 nt, Human
agggacagaggggguggccuccc

SEQ ID NO: 3338060 - RNA, 19 nt, Human
aggcugucaauuacaggaa

SEQ ID NO: 3338061 - RNA, 20 nt, Human
aggcugucaauuacaggaag

SEQ ID NO: 3338062 - RNA, 13 nt, Human
aggcuguauccca

SEQ ID NO: 3338063 - RNA, 20 nt, Human
aggcccuucucuccagcccc

SEQ ID NO: 3338064 - RNA, 21 nt, Human
aggcccuucucuccagccccu

SEQ ID NO: 3338065 - RNA, 22 nt, Human
aggcccuucucuccagccccug

SEQ ID NO: 3338066 - RNA, 23 nt, Human
aggcccuucucuccagccccugg

SEQ ID NO: 3338067 - RNA, 19 nt, Human
aggcccuucucuccagccc

SEQ ID NO: 3338068 - RNA, 22 nt, Human
aucuucugaacuuggcgcugcc

SEQ ID NO: 3338069 - RNA, 18 nt, Human
aucuugaagacuuuucuu

SEQ ID NO: 3338070 - RNA, 22 nt, Human
aucugcuuuuuaaagaaugcuc

SEQ ID NO: 3338071 - RNA, 21 nt, Human
aucucccccagccccauccuc

SEQ ID NO: 3338072 - RNA, 17 nt, Human
augaaagacuguacaaa

SEQ ID NO: 3338073 - RNA, 16 nt, Human
augaaagacuguacaa

SEQ ID NO: 3338074 - RNA, 13 nt, Human
augaaagacugua

SEQ ID NO: 3338075 - RNA, 21 nt, Human
augaccuuucaauaggaaaaa

SEQ ID NO: 3338076 - RNA, 18 nt, Human
augaccuuucaauaggaa

SEQ ID NO: 3338077 - RNA, 22 nt, Human
augaccuuucaauaggaaaaac

SEQ ID NO: 3338078 - RNA, 23 nt, Human
augaccuuucaauaggaaaaacu

SEQ ID NO: 3338079 - RNA, 14 nt, Human
aucccauuuaaaaa

SEQ ID NO: 3338080 - RNA, 15 nt, Human
aucccauuuaaaaaa

SEQ ID NO: 3338081 - RNA, 15 nt, Human
auccccuguagagug

SEQ ID NO: 3338082 - RNA, 23 nt, Human
auccucauacccacccccaccca

SEQ ID NO: 3338083 - RNA, 11 nt, Human
auccuccaggu

SEQ ID NO: 3338084 - RNA, 23 nt, Human
auccuccaggugcacaagcucca

SEQ ID NO: 3338085 - RNA, 15 nt, Human
auccucccaccucag

SEQ ID NO: 3338086 - RNA, 19 nt, Human
auccucccaccucagccuc

SEQ ID NO: 3338087 - RNA, 18 nt, Human
auccucccaccucagccu

SEQ ID NO: 3338088 - RNA, 20 nt, Human
auccucccaccucagccucc

SEQ ID NO: 3338089 - RNA, 19 nt, Human
aucaccaacgucugugcca

SEQ ID NO: 3338090 - RNA, 23 nt, Human
aucacccgcuaagagggagggag

SEQ ID NO: 3338091 - RNA, 18 nt, Human
aucaccaacgucugugcc

SEQ ID NO: 3338092 - RNA, 21 nt, Human
aucacagccucugaaaaccaa

SEQ ID NO: 3338093 - RNA, 13 nt, Human
aucacagccucug

SEQ ID NO: 3338094 - RNA, 23 nt, Human
aucagcacgauuucuguuuagau

SEQ ID NO: 3338095 - RNA, 19 nt, Human
aucagcacgauuucuguuu

SEQ ID NO: 3338096 - RNA, 20 nt, Human
aucagcacgauuucuguuua

SEQ ID NO: 3338097 - RNA, 19 nt, Human
aucaccgaaaacguggcug

SEQ ID NO: 3338098 - RNA, 18 nt, Human
aucagcacgauuucuguu

SEQ ID NO: 3338099 - RNA, 14 nt, Human
aucaccgaaaacgu

SEQ ID NO: 3338100 - RNA, 19 nt, Human
aucagccugcuccagcugu

SEQ ID NO: 3338101 - RNA, 17 nt, Human
aucagccugcuccagcu

SEQ ID NO: 3338102 - RNA, 18 nt, Human
aucagccugcuccagcug

SEQ ID NO: 3338103 - RNA, 11 nt, Human
augcugcccug

SEQ ID NO: 3338104 - RNA, 16 nt, Human
augcucuuuacuucau

SEQ ID NO: 3338105 - RNA, 15 nt, Human
auggauuuccagcca

SEQ ID NO: 3338106 - RNA, 13 nt, Human
augcuuguacaua

SEQ ID NO: 3338107 - RNA, 14 nt, Human
augcuuguacauaa

SEQ ID NO: 3338108 - RNA, 12 nt, Human
augcuuguacau

SEQ ID NO: 3338109 - RNA, 16 nt, Human
augaugccaugaggaa

SEQ ID NO: 3338110 - RNA, 17 nt, Human
augaugccaugaggaac

SEQ ID NO: 3338111 - RNA, 24 nt, Human
augauguuuuccaugaguccccug

SEQ ID NO: 3338112 - RNA, 15 nt, Human
augcacaaacagagg

SEQ ID NO: 3338113 - RNA, 16 nt, Human
augcaugaaguaauau

SEQ ID NO: 3338114 - RNA, 17 nt, Human
augccucucucaggcca

SEQ ID NO: 3338115 - RNA, 19 nt, Human
augccucucucaggccaaa

SEQ ID NO: 3338116 - RNA, 23 nt, Human
augcacacauuuuuuaaaugcac

SEQ ID NO: 3338117 - RNA, 16 nt, Human
augcacagaguuguua

SEQ ID NO: 3338118 - RNA, 16 nt, Human
augcacaaacagaggc

SEQ ID NO: 3338119 - RNA, 17 nt, Human
augcacaaacagaggcc

SEQ ID NO: 3338120 - RNA, 17 nt, Human
augcacagaguuguuac

SEQ ID NO: 3338121 - RNA, 22 nt, Human
augugaaacuggauuaaacuua

SEQ ID NO: 3338122 - RNA, 14 nt, Human
augucuuuucuugc

SEQ ID NO: 3338123 - RNA, 19 nt, Human
auggucaccaaaucagcug

SEQ ID NO: 3338124 - RNA, 17 nt, Human
auguaauuaaguacuau

SEQ ID NO: 3338125 - RNA, 15 nt, Human
auguaauuaaguacu

SEQ ID NO: 3338126 - RNA, 18 nt, Human
auguuugccucugccucu

SEQ ID NO: 3338127 - RNA, 22 nt, Human
auguuugccucugccucugaca

SEQ ID NO: 3338128 - RNA, 19 nt, Human
auguuugccucugccucug

SEQ ID NO: 3338129 - RNA, 12 nt, Human
auguucugggac

SEQ ID NO: 3338130 - RNA, 11 nt, Human
auguucuggga

SEQ ID NO: 3338131 - RNA, 20 nt, Human
agugaacuugggccacugug

SEQ ID NO: 3338132 - RNA, 17 nt, Human
agucuggaaugcagugg

SEQ ID NO: 3338133 - RNA, 18 nt, Human
agucugauucccaagcuc

SEQ ID NO: 3338134 - RNA, 16 nt, Human
agucugauucccaagc

SEQ ID NO: 3338135 - RNA, 14 nt, Human
agugaagacaauga

SEQ ID NO: 3338136 - RNA, 16 nt, Human
agugaagacaaugacu

SEQ ID NO: 3338137 - RNA, 20 nt, Human
aguccuggcaugggaaugaa

SEQ ID NO: 3338138 - RNA, 21 nt, Human
aguccuggcaugggaaugaau

SEQ ID NO: 3338139 - RNA, 22 nt, Human
aguccuggcaugggaaugaaug

SEQ ID NO: 3338140 - RNA, 12 nt, Human
agucugaaggcu

SEQ ID NO: 3338141 - RNA, 16 nt, Human
agucugaaggcugggu

SEQ ID NO: 3338142 - RNA, 13 nt, Human
agucugaaggcug

SEQ ID NO: 3338143 - RNA, 15 nt, Human
agucugaaggcuggg

SEQ ID NO: 3338144 - RNA, 11 nt, Human
aguaucuugaa

SEQ ID NO: 3338145 - RNA, 12 nt, Human
aguaucuugaag

SEQ ID NO: 3338146 - RNA, 15 nt, Human
aguaucuugaagacu

SEQ ID NO: 3338147 - RNA, 15 nt, Human
aguaucucagggccu

SEQ ID NO: 3338148 - RNA, 15 nt, Human
aguaugaggcauuug

SEQ ID NO: 3338149 - RNA, 16 nt, Human
aguaugaggcauuugu

SEQ ID NO: 3338150 - RNA, 14 nt, Human
agugggagcugccu

SEQ ID NO: 3338151 - RNA, 15 nt, Human
agugggagcugccug

SEQ ID NO: 3338152 - RNA, 17 nt, Human
aguguauuuuuuuacua

SEQ ID NO: 3338153 - RNA, 18 nt, Human
aguguauuuuuuuacuaa

SEQ ID NO: 3338154 - RNA, 23 nt, Human
aguggcuuaaaacaacacucaca

SEQ ID NO: 3338155 - RNA, 20 nt, Human
aguuguuugauucagacagc

SEQ ID NO: 3338156 - RNA, 14 nt, Human
aguugaagacagag

SEQ ID NO: 3338157 - RNA, 14 nt, Human
aguuacagacaaag

SEQ ID NO: 3338158 - RNA, 16 nt, Human
aguuacagacaaagcg

SEQ ID NO: 3338159 - RNA, 18 nt, Human
aguuacacuaaaagguga

SEQ ID NO: 3338160 - RNA, 12 nt, Human
aguuaaauaaau

SEQ ID NO: 3338161 - RNA, 22 nt, Human
aguucaucuugaauuguaagga

SEQ ID NO: 3338162 - RNA, 19 nt, Human
aguucagguaacaggcaga

SEQ ID NO: 3338163 - RNA, 18 nt, Human
aguucagguaacaggcag

SEQ ID NO: 3338164 - RNA, 20 nt, Human
aguucagguaacaggcagau

SEQ ID NO: 3338165 - RNA, 14 nt, Human
auaaagcagcguuu

SEQ ID NO: 3338166 - RNA, 18 nt, Human
auaaagcagcguuucuau

SEQ ID NO: 3338167 - RNA, 19 nt, Human
auaaagcagcguuucuaug

SEQ ID NO: 3338168 - RNA, 20 nt, Human
auaaagcagcguuucuauga

SEQ ID NO: 3338169 - RNA, 13 nt, Human
auaaagcagcguu

SEQ ID NO: 3338170 - RNA, 17 nt, Human
auaaaacuuuuuaaaau

SEQ ID NO: 3338171 - RNA, 21 nt, Human
auaaacuuuaccuuuuuuaua

SEQ ID NO: 3338172 - RNA, 16 nt, Human
auaaacuuuaccuuuu

SEQ ID NO: 3338173 - RNA, 24 nt, Human
auaaacuuuaccuuuuuuauacau

SEQ ID NO: 3338174 - RNA, 15 nt, Human
auaaaacuuuuuaaa

SEQ ID NO: 3338175 - RNA, 11 nt, Human
auaaaacuuuu

SEQ ID NO: 3338176 - RNA, 12 nt, Human
auacccaccccc

SEQ ID NO: 3338177 - RNA, 11 nt, Human
auacccacccc

SEQ ID NO: 3338178 - RNA, 18 nt, Human
auaccugucccccugaca

SEQ ID NO: 3338179 - RNA, 17 nt, Human
auaccugucccccugac

SEQ ID NO: 3338180 - RNA, 21 nt, Human
auaaugcgugcauaccacuuu

SEQ ID NO: 3338181 - RNA, 20 nt, Human
auaaugcgugcauaccacuu

SEQ ID NO: 3338182 - RNA, 14 nt, Human
auaauguaagcucu

SEQ ID NO: 3338183 - RNA, 19 nt, Human
auacaccacuacauucugu

SEQ ID NO: 3338184 - RNA, 20 nt, Human
auacaccacuacauucuguu

SEQ ID NO: 3338185 - RNA, 18 nt, Human
auacaccacuacauucug

SEQ ID NO: 3338186 - RNA, 15 nt, Human
auaauguaagcucua

SEQ ID NO: 3338187 - RNA, 19 nt, Human
auauuaccacagacauacu

SEQ ID NO: 3338188 - RNA, 22 nt, Human
auauuaccacagacauacuaac

SEQ ID NO: 3338189 - RNA, 21 nt, Human
auaugcuuauacacuuacacu

SEQ ID NO: 3338190 - RNA, 19 nt, Human
auauuuacuucuuauacau

SEQ ID NO: 3338191 - RNA, 16 nt, Human
auaguaugguggcugg

SEQ ID NO: 3338192 - RNA, 18 nt, Human
auaguaugguggcugggu

SEQ ID NO: 3338193 - RNA, 17 nt, Human
auaguaugguggcuggg

SEQ ID NO: 3338194 - RNA, 15 nt, Human
auagccaaggccaaa

SEQ ID NO: 3338195 - RNA, 21 nt, Human
auagccaaggccaaaggaagc

SEQ ID NO: 3338196 - RNA, 14 nt, Human
auauagaaauauau

SEQ ID NO: 3338197 - RNA, 16 nt, Human
cacccaagggccuggc

SEQ ID NO: 3338198 - RNA, 17 nt, Human
cacccaagggccuggcc

SEQ ID NO: 3338199 - RNA, 18 nt, Human
cacccaagggccuggccu

SEQ ID NO: 3338200 - RNA, 19 nt, Human
cacccaagggccuggccug

SEQ ID NO: 3338201 - RNA, 20 nt, Human
cacccaagggccuggccuga

SEQ ID NO: 3338202 - RNA, 21 nt, Human
cacccaagggccuggccugag

SEQ ID NO: 3338203 - RNA, 23 nt, Human
cacccaagggccuggccugagcu

SEQ ID NO: 3338204 - RNA, 22 nt, Human
cacccaccaucaugucuggcua

SEQ ID NO: 3338205 - RNA, 20 nt, Human
cacccaccaucaugucuggc

SEQ ID NO: 3338206 - RNA, 16 nt, Human
cacccaccucagccuc

SEQ ID NO: 3338207 - RNA, 14 nt, Human
cacccaccucagcc

SEQ ID NO: 3338208 - RNA, 13 nt, Human
cacccaccucagc

SEQ ID NO: 3338209 - RNA, 12 nt, Human
cacccaccucag

SEQ ID NO: 3338210 - RNA, 12 nt, Human
caccccagcccc

SEQ ID NO: 3338211 - RNA, 13 nt, Human
caccccagcccca

SEQ ID NO: 3338212 - RNA, 14 nt, Human
caccccggccaccu

SEQ ID NO: 3338213 - RNA, 15 nt, Human
caccccggccaccug

SEQ ID NO: 3338214 - RNA, 16 nt, Human
caccccggccaccugc

SEQ ID NO: 3338215 - RNA, 17 nt, Human
caccccggccaccugcg

SEQ ID NO: 3338216 - RNA, 22 nt, Human
cacccccacccaagggccuggc

SEQ ID NO: 3338217 - RNA, 15 nt, Human
caaagcuaggccugg

SEQ ID NO: 3338218 - RNA, 21 nt, Human
caaagccaaagcuaggccugg

SEQ ID NO: 3338219 - RNA, 20 nt, Human
caaagccaaagcuaggccug

SEQ ID NO: 3338220 - RNA, 17 nt, Human
caaagcuaggccuggcc

SEQ ID NO: 3338221 - RNA, 16 nt, Human
caaagcuaggccuggc

SEQ ID NO: 3338222 - RNA, 16 nt, Human
caaagcuuguuaagau

SEQ ID NO: 3338223 - RNA, 18 nt, Human
auuuuuuuacuaauagac

SEQ ID NO: 3338224 - RNA, 19 nt, Human
caaacuuuucaaggcuuau

SEQ ID NO: 3338225 - RNA, 17 nt, Human
caaacuuuucaaggcuu

SEQ ID NO: 3338226 - RNA, 21 nt, Human
caaacuuuucaaggcuuauau

SEQ ID NO: 3338227 - RNA, 20 nt, Human
caaacuuuucaaggcuuaua

SEQ ID NO: 3338228 - RNA, 21 nt, Human
caaaggaugcccaaagaugca

SEQ ID NO: 3338229 - RNA, 13 nt, Human
caaaucagcugcu

SEQ ID NO: 3338230 - RNA, 16 nt, Human
caaaucagcugcuacu

SEQ ID NO: 3338231 - RNA, 22 nt, Human
caaauucugcuugcuugcuuuu

SEQ ID NO: 3338232 - RNA, 17 nt, Human
caagugauucuccugcc

SEQ ID NO: 3338233 - RNA, 16 nt, Human
caagugauucuccugc

SEQ ID NO: 3338234 - RNA, 21 nt, Human
caagugauucuccugccucag

SEQ ID NO: 3338235 - RNA, 22 nt, Human
caagugauucuccugccucagc

SEQ ID NO: 3338236 - RNA, 22 nt, Human
caagugugguagagugugccug

SEQ ID NO: 3338237 - RNA, 23 nt, Human
caaggugggaggauugcuugagc

SEQ ID NO: 3338238 - RNA, 12 nt, Human
caaggugggagg

SEQ ID NO: 3338239 - RNA, 19 nt, Human
caagggccuggccugagcu

SEQ ID NO: 3338240 - RNA, 16 nt, Human
caagggccuggccuga

SEQ ID NO: 3338241 - RNA, 15 nt, Human
caaggauugcuacug

SEQ ID NO: 3338242 - RNA, 21 nt, Human
caaggaugaucuaggaagacu

SEQ ID NO: 3338243 - RNA, 22 nt, Human
caaggauccugagccagauuuc

SEQ ID NO: 3338244 - RNA, 17 nt, Human
caagcgugagccacugc

SEQ ID NO: 3338245 - RNA, 21 nt, Human
caagccaccaacauacuccca

SEQ ID NO: 3338246 - RNA, 16 nt, Human
caagcgugagccacug

SEQ ID NO: 3338247 - RNA, 18 nt, Human
caagcaccuccugccucg

SEQ ID NO: 3338248 - RNA, 17 nt, Human
caaccccuucgcuccug

SEQ ID NO: 3338249 - RNA, 12 nt, Human
caacccucauca

SEQ ID NO: 3338250 - RNA, 15 nt, Human
caacccucaucacca

SEQ ID NO: 3338251 - RNA, 19 nt, Human
caacucuccuccagaguca

SEQ ID NO: 3338252 - RNA, 20 nt, Human
caacucuccuccagagucag

SEQ ID NO: 3338253 - RNA, 16 nt, Human
caacugcauuggcuuu

SEQ ID NO: 3338254 - RNA, 19 nt, Human
caaccccuucgcuccugug

SEQ ID NO: 3338255 - RNA, 18 nt, Human
caaccccuucgcuccugu

SEQ ID NO: 3338256 - RNA, 21 nt, Human
caaccccuucgcuccuguguc

SEQ ID NO: 3338257 - RNA, 19 nt, Human
caacagguuuuccugaaga

SEQ ID NO: 3338258 - RNA, 18 nt, Human
caacaggguuuuuuucca

SEQ ID NO: 3338259 - RNA, 15 nt, Human
caacagguuuuccug

SEQ ID NO: 3338260 - RNA, 22 nt, Human
caacaucuuggucagauuugaa

SEQ ID NO: 3338261 - RNA, 24 nt, Human
caacaggcugggcuucaguggcag

SEQ ID NO: 3338262 - RNA, 23 nt, Human
caacaggcugggcuucaguggca

SEQ ID NO: 3338263 - RNA, 23 nt, Human
cacauguccaagaagcccaggaa

SEQ ID NO: 3338264 - RNA, 13 nt, Human
cacaugccucucu

SEQ ID NO: 3338265 - RNA, 17 nt, Human
cacaugccucucucagg

SEQ ID NO: 3338266 - RNA, 18 nt, Human
cacaugccucucucaggc

SEQ ID NO: 3338267 - RNA, 18 nt, Human
cacaucagcacgauuucu

SEQ ID NO: 3338268 - RNA, 20 nt, Human
cacauauugauuuccguuaa

SEQ ID NO: 3338269 - RNA, 12 nt, Human
cacauaucuguc

SEQ ID NO: 3338270 - RNA, 15 nt, Human
cacaugugcacaugc

SEQ ID NO: 3338271 - RNA, 14 nt, Human
cacaugugcacaug

SEQ ID NO: 3338272 - RNA, 17 nt, Human
cacaugugcacaugcac

SEQ ID NO: 3338273 - RNA, 16 nt, Human
cacauuccugaugcuu

SEQ ID NO: 3338274 - RNA, 15 nt, Human
caccacacccagccc

SEQ ID NO: 3338275 - RNA, 13 nt, Human
caccacacccagc

SEQ ID NO: 3338276 - RNA, 15 nt, Human
caccaagcccaguua

SEQ ID NO: 3338277 - RNA, 19 nt, Human
caccacuacauucuguuaa

SEQ ID NO: 3338278 - RNA, 20 nt, Human
caccacuacauucuguuaau

SEQ ID NO: 3338279 - RNA, 17 nt, Human
caccacuacauucuguu

SEQ ID NO: 3338280 - RNA, 18 nt, Human
caccacuacauucuguua

SEQ ID NO: 3338281 - RNA, 16 nt, Human
caccacuacauucugu

SEQ ID NO: 3338282 - RNA, 18 nt, Human
caccacaugugcacaugc

SEQ ID NO: 3338283 - RNA, 15 nt, Human
caccacaugugcaca

SEQ ID NO: 3338284 - RNA, 19 nt, Human
caccacaugugcacaugca

SEQ ID NO: 3338285 - RNA, 20 nt, Human
cacagaugggugcuuggagg

SEQ ID NO: 3338286 - RNA, 14 nt, Human
cacagaugggugcu

SEQ ID NO: 3338287 - RNA, 18 nt, Human
cacagaugggugcuugga

SEQ ID NO: 3338288 - RNA, 20 nt, Human
cacagaguuguuacauuuuu

SEQ ID NO: 3338289 - RNA, 10 nt, Human
cacaggcagg

SEQ ID NO: 3338290 - RNA, 19 nt, Human
cacaggcccggcuccaggc

SEQ ID NO: 3338291 - RNA, 18 nt, Human
cacaggcccggcuccagg

SEQ ID NO: 3338292 - RNA, 17 nt, Human
cacaggcccggcuccag

SEQ ID NO: 3338293 - RNA, 16 nt, Human
cacaggcccggcucca

SEQ ID NO: 3338294 - RNA, 16 nt, Human
cacaggaucagucuga

SEQ ID NO: 3338295 - RNA, 15 nt, Human
cacaggaucagucug

SEQ ID NO: 3338296 - RNA, 12 nt, Human
cacaggaucagu

SEQ ID NO: 3338297 - RNA, 23 nt, Human
cacaggcccggcuccaggcuccu

SEQ ID NO: 3338298 - RNA, 20 nt, Human
cacaggcccggcuccaggcu

SEQ ID NO: 3338299 - RNA, 18 nt, Human
cacagugagucgaggaca

SEQ ID NO: 3338300 - RNA, 20 nt, Human
cacagugagucgaggacagg

SEQ ID NO: 3338301 - RNA, 19 nt, Human
cacagugagucgaggacag

SEQ ID NO: 3338302 - RNA, 14 nt, Human
cacaggcccggcuc

SEQ ID NO: 3338303 - RNA, 17 nt, Human
cacauacacacacacgc

SEQ ID NO: 3338304 - RNA, 15 nt, Human
cacauacacgaaaga

SEQ ID NO: 3338305 - RNA, 20 nt, Human
cacauacacgaaagagagag

SEQ ID NO: 3338306 - RNA, 21 nt, Human
cacacuugacaucaacugcau

SEQ ID NO: 3338307 - RNA, 22 nt, Human
cacagacccugcccugugggcc

SEQ ID NO: 3338308 - RNA, 16 nt, Human
cacagaguuguuacau

SEQ ID NO: 3338309 - RNA, 17 nt, Human
cacagaguuguuacauu

SEQ ID NO: 3338310 - RNA, 21 nt, Human
cacagagaaaguacuucucca

SEQ ID NO: 3338311 - RNA, 13 nt, Human
cacaccagagccc

SEQ ID NO: 3338312 - RNA, 12 nt, Human
cacaccagagcc

SEQ ID NO: 3338313 - RNA, 15 nt, Human
cacaccagagcccac

SEQ ID NO: 3338314 - RNA, 19 nt, Human
cacacagaggcugccucuc

SEQ ID NO: 3338315 - RNA, 14 nt, Human
cacacaccagagcc

SEQ ID NO: 3338316 - RNA, 13 nt, Human
cacacacauacac

SEQ ID NO: 3338317 - RNA, 12 nt, Human
cacacacauaca

SEQ ID NO: 3338318 - RNA, 16 nt, Human
cacaaaaguuucucuu

SEQ ID NO: 3338319 - RNA, 20 nt, Human
caauaggaaaaacugauuuu

SEQ ID NO: 3338320 - RNA, 18 nt, Human
caauaggaaaaacugauu

SEQ ID NO: 3338321 - RNA, 21 nt, Human
caauaggaaaaacugauuuuu

SEQ ID NO: 3338322 - RNA, 19 nt, Human
caaugcaaaccaucauuga

SEQ ID NO: 3338323 - RNA, 22 nt, Human
caaugcacuuuguucuggcucu

SEQ ID NO: 3338324 - RNA, 23 nt, Human
caaugcacuuuguucuggcucuu

SEQ ID NO: 3338325 - RNA, 14 nt, Human
caaugcaaaccauc

SEQ ID NO: 3338326 - RNA, 17 nt, Human
caaugcaaaccaucauu

SEQ ID NO: 3338327 - RNA, 18 nt, Human
caaugcaaaccaucauug

SEQ ID NO: 3338328 - RNA, 19 nt, Human
uugccauguuggccaggcu

SEQ ID NO: 3338329 - RNA, 18 nt, Human
uugccauguuggccaggc

SEQ ID NO: 3338330 - RNA, 17 nt, Human
uugccauguuggccagg

SEQ ID NO: 3338331 - RNA, 16 nt, Human
uugccauguuggccag

SEQ ID NO: 3338332 - RNA, 23 nt, Human
uugcagacaggcaagcaccuccu

SEQ ID NO: 3338333 - RNA, 13 nt, Human
uugauucauaaug

SEQ ID NO: 3338334 - RNA, 17 nt, Human
uugauucauaaugacuu

SEQ ID NO: 3338335 - RNA, 22 nt, Human
uugcagacaggcaagcaccucc

SEQ ID NO: 3338336 - RNA, 15 nt, Human
uugagccuugaacuu

SEQ ID NO: 3338337 - RNA, 16 nt, Human
uugagccuugaacuuu

SEQ ID NO: 3338338 - RNA, 14 nt, Human
uugagccuugaacu

SEQ ID NO: 3338339 - RNA, 14 nt, Human
uugagccugggagg

SEQ ID NO: 3338340 - RNA, 19 nt, Human
uugagccuugaacuuugac

SEQ ID NO: 3338341 - RNA, 16 nt, Human
uugauucagcucugca

SEQ ID NO: 3338342 - RNA, 23 nt, Human
uugauucagacagcugccuggga

SEQ ID NO: 3338343 - RNA, 17 nt, Human
uugauucagacagcugc

SEQ ID NO: 3338344 - RNA, 21 nt, Human
uugauucagacagcugccugg

SEQ ID NO: 3338345 - RNA, 16 nt, Human
uugauaugcuuauaca

SEQ ID NO: 3338346 - RNA, 23 nt, Human
uugauauccucuuugagugaagc

SEQ ID NO: 3338347 - RNA, 20 nt, Human
uucuggcagaguugaagaca

SEQ ID NO: 3338348 - RNA, 13 nt, Human
uucuucagagacu

SEQ ID NO: 3338349 - RNA, 17 nt, Human
uucuuagggaaggauac

SEQ ID NO: 3338350 - RNA, 15 nt, Human
uugaacuuugaccuc

SEQ ID NO: 3338351 - RNA, 21 nt, Human
uucuuuccugaggcugggcuc

SEQ ID NO: 3338352 - RNA, 17 nt, Human
uugaacuuugaccucug

SEQ ID NO: 3338353 - RNA, 18 nt, Human
uugaacuuugaccucugc

SEQ ID NO: 3338354 - RNA, 13 nt, Human
uugaacuuugacc

SEQ ID NO: 3338355 - RNA, 12 nt, Human
uugaaugaugcc

SEQ ID NO: 3338356 - RNA, 16 nt, Human
uugaaugaugccauga

SEQ ID NO: 3338357 - RNA, 21 nt, Human
uugccauguuggccaggcugg

SEQ ID NO: 3338358 - RNA, 20 nt, Human
uugccauguuggccaggcug

SEQ ID NO: 3338359 - RNA, 18 nt, Human
uugcugucccuuuuccuu

SEQ ID NO: 3338360 - RNA, 16 nt, Human
uugcugucccuuuucc

SEQ ID NO: 3338361 - RNA, 14 nt, Human
uugcugcuugaggc

SEQ ID NO: 3338362 - RNA, 16 nt, Human
uugcugcuugaggcaa

SEQ ID NO: 3338363 - RNA, 19 nt, Human
uuggaagcuccgcuuucua

SEQ ID NO: 3338364 - RNA, 14 nt, Human
uuggauuguccccg

SEQ ID NO: 3338365 - RNA, 15 nt, Human
uuggauuguccccga

SEQ ID NO: 3338366 - RNA, 15 nt, Human
uuggacccugaggcc

SEQ ID NO: 3338367 - RNA, 18 nt, Human
uuggacccugaggcccag

SEQ ID NO: 3338368 - RNA, 19 nt, Human
uuggacccugaggcccaga

SEQ ID NO: 3338369 - RNA, 23 nt, Human
uuggcuucacggaagagccuugc

SEQ ID NO: 3338370 - RNA, 20 nt, Human
uuggucugacccacugcuuu

SEQ ID NO: 3338371 - RNA, 13 nt, Human
uugguccugcugc

SEQ ID NO: 3338372 - RNA, 22 nt, Human
uugucaaaguggugagaggcau

SEQ ID NO: 3338373 - RNA, 14 nt, Human
uugucuaugggacu

SEQ ID NO: 3338374 - RNA, 20 nt, Human
uuguauuuuacuaauaaaau

SEQ ID NO: 3338375 - RNA, 22 nt, Human
uugucuuaaaaaguggaaaaau

SEQ ID NO: 3338376 - RNA, 20 nt, Human
uugucuaugggacucaaugc

SEQ ID NO: 3338377 - RNA, 16 nt, Human
uuugcuugaaagaaaa

SEQ ID NO: 3338378 - RNA, 14 nt, Human
uuugcuugaaagaa

SEQ ID NO: 3338379 - RNA, 15 nt, Human
uuuggacccugaggc

SEQ ID NO: 3338380 - RNA, 19 nt, Human
uuuggacccugaggcccag

SEQ ID NO: 3338381 - RNA, 13 nt, Human
uuuggacccugag

SEQ ID NO: 3338382 - RNA, 19 nt, Human
uuucuuguguguuuauugu

SEQ ID NO: 3338383 - RNA, 16 nt, Human
uuugagaucagccugg

SEQ ID NO: 3338384 - RNA, 17 nt, Human
uuugagaucagccuggg

SEQ ID NO: 3338385 - RNA, 19 nt, Human
uuucuaaaucuccaaaaua

SEQ ID NO: 3338386 - RNA, 19 nt, Human
uuuccuggcacugcuucca

SEQ ID NO: 3338387 - RNA, 23 nt, Human
uuuccuggcacugcuuccaguga

SEQ ID NO: 3338388 - RNA, 14 nt, Human
uuucugaaauaaca

SEQ ID NO: 3338389 - RNA, 18 nt, Human
uuucuacccagcgagccc

SEQ ID NO: 3338390 - RNA, 15 nt, Human
uuucuacccagcgag

SEQ ID NO: 3338391 - RNA, 22 nt, Human
uuucuacccagcgagcccuggu

SEQ ID NO: 3338392 - RNA, 17 nt, Human
uuucagccaagaauucu

SEQ ID NO: 3338393 - RNA, 16 nt, Human
uuucagccaagaauuc

SEQ ID NO: 3338394 - RNA, 22 nt, Human
uuuagacccuauugcugcuuga

SEQ ID NO: 3338395 - RNA, 19 nt, Human
uuuagacccuauugcugcu

SEQ ID NO: 3338396 - RNA, 18 nt, Human
uuuauaaacuuuaccuuu

SEQ ID NO: 3338397 - RNA, 12 nt, Human
uuuauacauaaa

SEQ ID NO: 3338398 - RNA, 20 nt, Human
uuuauacauaaacaagacca

SEQ ID NO: 3338399 - RNA, 14 nt, Human
uuuaacagaaaugu

SEQ ID NO: 3338400 - RNA, 15 nt, Human
uuuaacagaaaugua

SEQ ID NO: 3338401 - RNA, 20 nt, Human
uuguuuggggaugagaaagg

SEQ ID NO: 3338402 - RNA, 15 nt, Human
uugucuuuggacccu

SEQ ID NO: 3338403 - RNA, 20 nt, Human
uugucuuuggacccugaggc

SEQ ID NO: 3338404 - RNA, 24 nt, Human
uugucuuuggacccugaggcccag

SEQ ID NO: 3338405 - RNA, 13 nt, Human
uuuaaaagauaca

SEQ ID NO: 3338406 - RNA, 13 nt, Human
uuuaacagaaaug

SEQ ID NO: 3338407 - RNA, 23 nt, Human
uuauuaaaaaucucaaauuucua

SEQ ID NO: 3338408 - RNA, 11 nt, Human
uuauucugcuc

SEQ ID NO: 3338409 - RNA, 15 nt, Human
uuauugcccacgcug

SEQ ID NO: 3338410 - RNA, 16 nt, Human
uuaucuagauacugua

SEQ ID NO: 3338411 - RNA, 14 nt, Human
uuaucuagauacug

SEQ ID NO: 3338412 - RNA, 16 nt, Human
uuaguuccucauuagc

SEQ ID NO: 3338413 - RNA, 14 nt, Human
uuaguuccuugagu

SEQ ID NO: 3338414 - RNA, 17 nt, Human
uuaucuagauacuguau

SEQ ID NO: 3338415 - RNA, 16 nt, Human
uuaugcaugaaguaau

SEQ ID NO: 3338416 - RNA, 22 nt, Human
uuaugcaugaaguaauaugcac

SEQ ID NO: 3338417 - RNA, 14 nt, Human
uuauggcacaucag

SEQ ID NO: 3338418 - RNA, 17 nt, Human
uuauuuuaauucaguug

SEQ ID NO: 3338419 - RNA, 17 nt, Human
uuauugucaaaguggug

SEQ ID NO: 3338420 - RNA, 18 nt, Human
uuauugucaaagugguga

SEQ ID NO: 3338421 - RNA, 15 nt, Human
uucacgugguccuaa

SEQ ID NO: 3338422 - RNA, 18 nt, Human
uucacggaagagccuugc

SEQ ID NO: 3338423 - RNA, 13 nt, Human
uucaauaggaaaa

SEQ ID NO: 3338424 - RNA, 15 nt, Human
uucaauaggaaaaac

SEQ ID NO: 3338425 - RNA, 18 nt, Human
uucaauaggaaaaacuga

SEQ ID NO: 3338426 - RNA, 22 nt, Human
uucagcuuguaaauagcucagg

SEQ ID NO: 3338427 - RNA, 13 nt, Human
uucacucuccuug

SEQ ID NO: 3338428 - RNA, 19 nt, Human
uucagagacuccugcaggc

SEQ ID NO: 3338429 - RNA, 21 nt, Human
uucagacagcugccugggauc

SEQ ID NO: 3338430 - RNA, 17 nt, Human
uuccccaggaggccagc

SEQ ID NO: 3338431 - RNA, 18 nt, Human
uuccccaggaggccagcc

SEQ ID NO: 3338432 - RNA, 19 nt, Human
uuccccaggaggccagccu

SEQ ID NO: 3338433 - RNA, 20 nt, Human
uuccccaggaggccagccuu

SEQ ID NO: 3338434 - RNA, 21 nt, Human
uuccccaggaggccagccuug

SEQ ID NO: 3338435 - RNA, 20 nt, Human
uucccucccuuccucuuucc

SEQ ID NO: 3338436 - RNA, 17 nt, Human
uucccucccuuccucuu

SEQ ID NO: 3338437 - RNA, 11 nt, Human
uucccucccuu

SEQ ID NO: 3338438 - RNA, 16 nt, Human
uucccauuugcuccuu

SEQ ID NO: 3338439 - RNA, 15 nt, Human
uuccccaggaggcca

SEQ ID NO: 3338440 - RNA, 16 nt, Human
uuccccaggaggccag

SEQ ID NO: 3338441 - RNA, 15 nt, Human
uuccaaauucugcuu

SEQ ID NO: 3338442 - RNA, 11 nt, Human
uucaggaagcu

SEQ ID NO: 3338443 - RNA, 13 nt, Human
uucaggaagcuca

SEQ ID NO: 3338444 - RNA, 17 nt, Human
uucaucuugaauuguaa

SEQ ID NO: 3338445 - RNA, 21 nt, Human
uucaucuugaauuguaaggaa

SEQ ID NO: 3338446 - RNA, 16 nt, Human
uucauuuccugugucu

SEQ ID NO: 3338447 - RNA, 15 nt, Human
uucauuuccuguguc

SEQ ID NO: 3338448 - RNA, 20 nt, Human
uucccuuugacgccauccca

SEQ ID NO: 3338449 - RNA, 21 nt, Human
uucccuuugacgccaucccag

SEQ ID NO: 3338450 - RNA, 22 nt, Human
uucccuuugacgccaucccagc

SEQ ID NO: 3338451 - RNA, 13 nt, Human
uuccucauuagca

SEQ ID NO: 3338452 - RNA, 18 nt, Human
uuccugaugcuucuucag

SEQ ID NO: 3338453 - RNA, 19 nt, Human
uuccugaugcuucuucaga

SEQ ID NO: 3338454 - RNA, 15 nt, Human
uuccugaugcuucuu

SEQ ID NO: 3338455 - RNA, 17 nt, Human
uuccugccaggcauggu

SEQ ID NO: 3338456 - RNA, 14 nt, Human
uuccuggcacugcu

SEQ ID NO: 3338457 - RNA, 13 nt, Human
uucuaaagcugcc

SEQ ID NO: 3338458 - RNA, 20 nt, Human
uucgggaggucgaggcagga

SEQ ID NO: 3338459 - RNA, 18 nt, Human
uguuuuaaggaugcuugu

SEQ ID NO: 3338460 - RNA, 22 nt, Human
uguuuuaagaggcagggucuca

SEQ ID NO: 3338461 - RNA, 14 nt, Human
uuaaaagauacagu

SEQ ID NO: 3338462 - RNA, 17 nt, Human
uuaaaagauacaguuac

SEQ ID NO: 3338463 - RNA, 21 nt, Human
uuaaaauaccagccaguaaau

SEQ ID NO: 3338464 - RNA, 20 nt, Human
uguuuuaagaggcagggucu

SEQ ID NO: 3338465 - RNA, 13 nt, Human
uguuugugauuga

SEQ ID NO: 3338466 - RNA, 23 nt, Human
uguuuccuggcacugcuuccagu

SEQ ID NO: 3338467 - RNA, 19 nt, Human
uguuuggggaugagaaagg

SEQ ID NO: 3338468 - RNA, 15 nt, Human
uguuucaaacuuuac

SEQ ID NO: 3338469 - RNA, 16 nt, Human
uguuuagauaauacac

SEQ ID NO: 3338470 - RNA, 20 nt, Human
uuacaagcgugagccacugc

SEQ ID NO: 3338471 - RNA, 21 nt, Human
uuacaagcgugagccacugca

SEQ ID NO: 3338472 - RNA, 17 nt, Human
uuaagcuguuacugucu

SEQ ID NO: 3338473 - RNA, 18 nt, Human
uuaauauugauaugcuua

SEQ ID NO: 3338474 - RNA, 17 nt, Human
uuaaccacuucagcuga

SEQ ID NO: 3338475 - RNA, 15 nt, Human
uuaacuuuuauaaac

SEQ ID NO: 3338476 - RNA, 16 nt, Human
uuaacuucacauauug

SEQ ID NO: 3338477 - RNA, 16 nt, Human
uuaacuuuuauaaacu

SEQ ID NO: 3338478 - RNA, 17 nt, Human
uuaacuuuuauaaacuu

SEQ ID NO: 3338479 - RNA, 14 nt, Human
uuaacuuuuauaaa

SEQ ID NO: 3338480 - RNA, 16 nt, Human
uuagacagucccugcc

SEQ ID NO: 3338481 - RNA, 17 nt, Human
uuagacagucccugcca

SEQ ID NO: 3338482 - RNA, 18 nt, Human
uuagacagucccugccaa

SEQ ID NO: 3338483 - RNA, 14 nt, Human
uuagacagucccug

SEQ ID NO: 3338484 - RNA, 15 nt, Human
uuagacagucccugc

SEQ ID NO: 3338485 - RNA, 14 nt, Human
uuacuuuguguuca

SEQ ID NO: 3338486 - RNA, 18 nt, Human
uuacuuuaaaaggagcca

SEQ ID NO: 3338487 - RNA, 17 nt, Human
uuacuuuaaaaggagcc

SEQ ID NO: 3338488 - RNA, 21 nt, Human
uuacuuaaaccgccaaggcug

SEQ ID NO: 3338489 - RNA, 23 nt, Human
uuacuucuuauacauuugauaaa

SEQ ID NO: 3338490 - RNA, 12 nt, Human
uuacuucugcua

SEQ ID NO: 3338491 - RNA, 11 nt, Human
uuacuucugcu

SEQ ID NO: 3338492 - RNA, 18 nt, Human
uuacuuagguguggggga

SEQ ID NO: 3338493 - RNA, 13 nt, Human
uuacuaaguuuuu

SEQ ID NO: 3338494 - RNA, 14 nt, Human
uuacuaaguuuuua

SEQ ID NO: 3338495 - RNA, 16 nt, Human
uuacuaauagacaauu

SEQ ID NO: 3338496 - RNA, 14 nt, Human
uuagaguugauacu

SEQ ID NO: 3338497 - RNA, 22 nt, Human
uuagauaauacaccacuacauu

SEQ ID NO: 3338498 - RNA, 14 nt, Human
uuagcggagacgga

SEQ ID NO: 3338499 - RNA, 18 nt, Human
uuaguaugaggcauuugu

SEQ ID NO: 3338500 - RNA, 16 nt, Human
uuaguaugaggcauuu

SEQ ID NO: 3338501 - RNA, 17 nt, Human
uuaguagagacaggguu

SEQ ID NO: 3338502 - RNA, 15 nt, Human
uauugcccacgcugg

SEQ ID NO: 3338503 - RNA, 14 nt, Human
uauugcccacgcug

SEQ ID NO: 3338504 - RNA, 13 nt, Human
uauugcccacgcu

SEQ ID NO: 3338505 - RNA, 23 nt, Human
uauugcugauggugcaaugaccu

SEQ ID NO: 3338506 - RNA, 22 nt, Human
uauugcugauggugcaaugacc

SEQ ID NO: 3338507 - RNA, 20 nt, Human
uauugauaugcuuauacacu

SEQ ID NO: 3338508 - RNA, 17 nt, Human
uauuuaugggauccugg

SEQ ID NO: 3338509 - RNA, 14 nt, Human
uauuaaggaagaca

SEQ ID NO: 3338510 - RNA, 12 nt, Human
uauuauaccuuu

SEQ ID NO: 3338511 - RNA, 13 nt, Human
uauuauaccuuuu

SEQ ID NO: 3338512 - RNA, 14 nt, Human
uauuauaccuuuuu

SEQ ID NO: 3338513 - RNA, 16 nt, Human
uauuaagaaagacuau

SEQ ID NO: 3338514 - RNA, 17 nt, Human
uauuaaaugcccagccc

SEQ ID NO: 3338515 - RNA, 19 nt, Human
uauuaaaugcccagccccu

SEQ ID NO: 3338516 - RNA, 15 nt, Human
uauuaaaugcccagc

SEQ ID NO: 3338517 - RNA, 21 nt, Human
uauguugcccaggcaggucuu

SEQ ID NO: 3338518 - RNA, 20 nt, Human
uauguugcccaggcaggucu

SEQ ID NO: 3338519 - RNA, 22 nt, Human
uauguucuuaguggauguucug

SEQ ID NO: 3338520 - RNA, 13 nt, Human
ucaaggauccuga

SEQ ID NO: 3338521 - RNA, 14 nt, Human
ucaaggauccugag

SEQ ID NO: 3338522 - RNA, 15 nt, Human
ucaaggauccugagc

SEQ ID NO: 3338523 - RNA, 16 nt, Human
ucaaggauccugagcc

SEQ ID NO: 3338524 - RNA, 19 nt, Human
ucaagcgauucuucugcuu

SEQ ID NO: 3338525 - RNA, 18 nt, Human
ucaagcgauucuucugcu

SEQ ID NO: 3338526 - RNA, 12 nt, Human
ucaagccaccaa

SEQ ID NO: 3338527 - RNA, 20 nt, Human
ucaagccaccaacauacucc

SEQ ID NO: 3338528 - RNA, 17 nt, Human
ucaagcgauucuucugc

SEQ ID NO: 3338529 - RNA, 19 nt, Human
ucaaccccuucgcuccugu

SEQ ID NO: 3338530 - RNA, 18 nt, Human
ucaaccccuucgcuccug

SEQ ID NO: 3338531 - RNA, 15 nt, Human
ucaaccuccugggcu

SEQ ID NO: 3338532 - RNA, 14 nt, Human
ucaaccuccugggc

SEQ ID NO: 3338533 - RNA, 16 nt, Human
ucaaccuccugggcua

SEQ ID NO: 3338534 - RNA, 20 nt, Human
ucaacucuccuccagaguca

SEQ ID NO: 3338535 - RNA, 12 nt, Human
ucaaagagguuu

SEQ ID NO: 3338536 - RNA, 12 nt, Human
ucacccuuuucu

SEQ ID NO: 3338537 - RNA, 14 nt, Human
ucaccgaaaacgug

SEQ ID NO: 3338538 - RNA, 19 nt, Human
ucacccgcuaagagggagg

SEQ ID NO: 3338539 - RNA, 15 nt, Human
ucaccgaaaacgugg

SEQ ID NO: 3338540 - RNA, 19 nt, Human
ucaccgaaaacguggcugc

SEQ ID NO: 3338541 - RNA, 20 nt, Human
ucaccgaaaacguggcugcu

SEQ ID NO: 3338542 - RNA, 21 nt, Human
ucaccgaaaacguggcugcuu

SEQ ID NO: 3338543 - RNA, 22 nt, Human
ucaccgaaaacguggcugcuuc

SEQ ID NO: 3338544 - RNA, 23 nt, Human
ucaccgaaaacguggcugcuuca

SEQ ID NO: 3338545 - RNA, 16 nt, Human
ucaccacaugugcaca

SEQ ID NO: 3338546 - RNA, 18 nt, Human
ucacccgcuaagagggag

SEQ ID NO: 3338547 - RNA, 17 nt, Human
ucaccaacgucugugcc

SEQ ID NO: 3338548 - RNA, 18 nt, Human
ucaccaacgucugugcca

SEQ ID NO: 3338549 - RNA, 21 nt, Human
ucaccaaaucagcugcuacua

SEQ ID NO: 3338550 - RNA, 14 nt, Human
ucacauuuauucug

SEQ ID NO: 3338551 - RNA, 22 nt, Human
ucacacaugagcaucaggccag

SEQ ID NO: 3338552 - RNA, 23 nt, Human
ucacacaugagcaucaggccagg

SEQ ID NO: 3338553 - RNA, 15 nt, Human
ucacacacuuuggcu

SEQ ID NO: 3338554 - RNA, 13 nt, Human
uauggaacacucu

SEQ ID NO: 3338555 - RNA, 16 nt, Human
uauggaacacucugag

SEQ ID NO: 3338556 - RNA, 17 nt, Human
uauggaacacucugaga

SEQ ID NO: 3338557 - RNA, 18 nt, Human
uauggaacacucugagac

SEQ ID NO: 3338558 - RNA, 19 nt, Human
uauggaacacucugagacu

SEQ ID NO: 3338559 - RNA, 17 nt, Human
uauggacaaugacccag

SEQ ID NO: 3338560 - RNA, 13 nt, Human
uaugcaugaagua

SEQ ID NO: 3338561 - RNA, 22 nt, Human
uaugcuuauacacuuacacuuu

SEQ ID NO: 3338562 - RNA, 13 nt, Human
uaugcacacauuu

SEQ ID NO: 3338563 - RNA, 14 nt, Human
uaugcacacauuuu

SEQ ID NO: 3338564 - RNA, 18 nt, Human
uaugcaaucaaaucugcu

SEQ ID NO: 3338565 - RNA, 16 nt, Human
uaugacuccagaauuu

SEQ ID NO: 3338566 - RNA, 17 nt, Human
uaugacuccagaauuuc

SEQ ID NO: 3338567 - RNA, 23 nt, Human
uaugacuccagaauuucccaaag

SEQ ID NO: 3338568 - RNA, 23 nt, Human
uaucugucauuugagcagggcuc

SEQ ID NO: 3338569 - RNA, 21 nt, Human
uaucugucauuugagcagggc

SEQ ID NO: 3338570 - RNA, 20 nt, Human
uaucugucauuugagcaggg

SEQ ID NO: 3338571 - RNA, 22 nt, Human
uaugacacaugcaaggucauuu

SEQ ID NO: 3338572 - RNA, 12 nt, Human
uaugacacaugc

SEQ ID NO: 3338573 - RNA, 21 nt, Human
uaucuaauauguaacaagcca

SEQ ID NO: 3338574 - RNA, 19 nt, Human
uauauguuuuaagaggcag

SEQ ID NO: 3338575 - RNA, 16 nt, Human
uaucuaaauguugaaa

SEQ ID NO: 3338576 - RNA, 18 nt, Human
uauaaacuuuaccuuuuu

SEQ ID NO: 3338577 - RNA, 21 nt, Human
uauaugcucugcauguuacau

SEQ ID NO: 3338578 - RNA, 20 nt, Human
uauaugcucugcauguuaca

SEQ ID NO: 3338579 - RNA, 17 nt, Human
uauacgaacaaaacaca

SEQ ID NO: 3338580 - RNA, 15 nt, Human
uauacgaacaaaaca

SEQ ID NO: 3338581 - RNA, 20 nt, Human
uagggaaaaaccagcgugug

SEQ ID NO: 3338582 - RNA, 21 nt, Human
uagggaaaaaccagcguguga

SEQ ID NO: 3338583 - RNA, 19 nt, Human
uagggaaaaaccagcgugu

SEQ ID NO: 3338584 - RNA, 11 nt, Human
uagggaaaaac

SEQ ID NO: 3338585 - RNA, 16 nt, Human
uaggugacagagugag

SEQ ID NO: 3338586 - RNA, 15 nt, Human
uaggccuggccagau

SEQ ID NO: 3338587 - RNA, 18 nt, Human
uaggccuggccagaugca

SEQ ID NO: 3338588 - RNA, 14 nt, Human
uaggccuggccaga

SEQ ID NO: 3338589 - RNA, 23 nt, Human
uaggugacagagugagacucugu

SEQ ID NO: 3338590 - RNA, 14 nt, Human
uccgccucuugggu

SEQ ID NO: 3338591 - RNA, 21 nt, Human
uccuaagcuauucaguaauaa

SEQ ID NO: 3338592 - RNA, 20 nt, Human
uccuaagcuauucaguaaua

SEQ ID NO: 3338593 - RNA, 18 nt, Human
uccuaagcuauucaguaa

SEQ ID NO: 3338594 - RNA, 18 nt, Human
uccgcuuucuacccagcg

SEQ ID NO: 3338595 - RNA, 16 nt, Human
uccgcuuucuacccag

SEQ ID NO: 3338596 - RNA, 15 nt, Human
ucccccuuccaugga

SEQ ID NO: 3338597 - RNA, 16 nt, Human
ucccuuccucuuucca

SEQ ID NO: 3338598 - RNA, 15 nt, Human
ucccuuccucuuucc

SEQ ID NO: 3338599 - RNA, 18 nt, Human
uccucauuagcauuuugc

SEQ ID NO: 3338600 - RNA, 17 nt, Human
uccucauuagcauuuug

SEQ ID NO: 3338601 - RNA, 12 nt, Human
uccucccaccuc

SEQ ID NO: 3338602 - RNA, 21 nt, Human
uccuauauuguuuucagugua

SEQ ID NO: 3338603 - RNA, 23 nt, Human
uccuauauuguuuucaguguaca

SEQ ID NO: 3338604 - RNA, 14 nt, Human
uccuggaguucugg

SEQ ID NO: 3338605 - RNA, 17 nt, Human
uccugcccuuaccugcc

SEQ ID NO: 3338606 - RNA, 20 nt, Human
uccugcccuuaccugccagg

SEQ ID NO: 3338607 - RNA, 12 nt, Human
uccuggccucaa

SEQ ID NO: 3338608 - RNA, 13 nt, Human
uccuggcacugcu

SEQ ID NO: 3338609 - RNA, 16 nt, Human
uccuggcacugcuucc

SEQ ID NO: 3338610 - RNA, 22 nt, Human
uccuggcacccggccccugcug

SEQ ID NO: 3338611 - RNA, 23 nt, Human
uccuggcacccggccccugcugg

SEQ ID NO: 3338612 - RNA, 22 nt, Human
uccuguaccucuugagccuuga

SEQ ID NO: 3338613 - RNA, 13 nt, Human
uccuguagcccua

SEQ ID NO: 3338614 - RNA, 11 nt, Human
uccuguagccc

SEQ ID NO: 3338615 - RNA, 21 nt, Human
uccugagccagauuucacucu

SEQ ID NO: 3338616 - RNA, 13 nt, Human
uccugccaggcau

SEQ ID NO: 3338617 - RNA, 14 nt, Human
uccugccaggcaug

SEQ ID NO: 3338618 - RNA, 18 nt, Human
ucuaaaggcuaccuuugu

SEQ ID NO: 3338619 - RNA, 17 nt, Human
ucuaaaggcuaccuuug

SEQ ID NO: 3338620 - RNA, 19 nt, Human
ucuaaaggcuaccuuugua

SEQ ID NO: 3338621 - RNA, 20 nt, Human
ucuaaaggcuaccuuuguau

SEQ ID NO: 3338622 - RNA, 13 nt, Human
ucgugacaacacu

SEQ ID NO: 3338623 - RNA, 14 nt, Human
ucuaccuuccugca

SEQ ID NO: 3338624 - RNA, 15 nt, Human
ucuacagaggccaug

SEQ ID NO: 3338625 - RNA, 21 nt, Human
ucuacacugugcugagucuga

SEQ ID NO: 3338626 - RNA, 22 nt, Human
ucuaucaaguauuauaccuuuu

SEQ ID NO: 3338627 - RNA, 12 nt, Human
ucuaggaagacu

SEQ ID NO: 3338628 - RNA, 19 nt, Human
ucuaggaagacuuuggaaa

SEQ ID NO: 3338629 - RNA, 15 nt, Human
ucuaggaagacuuug

SEQ ID NO: 3338630 - RNA, 16 nt, Human
ucuaggaagacuuugg

SEQ ID NO: 3338631 - RNA, 17 nt, Human
ucuaugacacaugcaag

SEQ ID NO: 3338632 - RNA, 14 nt, Human
ucuaugacacaugc

SEQ ID NO: 3338633 - RNA, 22 nt, Human
ucuccagccccuggaugcagcc

SEQ ID NO: 3338634 - RNA, 16 nt, Human
ucuccagccccuggau

SEQ ID NO: 3338635 - RNA, 18 nt, Human
ucuccagccccuggaugc

SEQ ID NO: 3338636 - RNA, 12 nt, Human
ucuccagccccu

SEQ ID NO: 3338637 - RNA, 13 nt, Human
ucuccagccccug

SEQ ID NO: 3338638 - RNA, 14 nt, Human
ucuccagccccugg

SEQ ID NO: 3338639 - RNA, 15 nt, Human
ucuccagccccugga

SEQ ID NO: 3338640 - RNA, 23 nt, Human
ucucccucagucuggcccuuccu

SEQ ID NO: 3338641 - RNA, 18 nt, Human
ucucccucagucuggccc

SEQ ID NO: 3338642 - RNA, 12 nt, Human
ucucccccagcc

SEQ ID NO: 3338643 - RNA, 14 nt, Human
ucuccaccugccag

SEQ ID NO: 3338644 - RNA, 15 nt, Human
ucuccaccugccagg

SEQ ID NO: 3338645 - RNA, 16 nt, Human
ucuccaccugccaggg

SEQ ID NO: 3338646 - RNA, 17 nt, Human
ucuccaccugccaggga

SEQ ID NO: 3338647 - RNA, 19 nt, Human
ucuccaccugccagggaca

SEQ ID NO: 3338648 - RNA, 22 nt, Human
ucuccaccugccagggacagag

SEQ ID NO: 3338649 - RNA, 16 nt, Human
ucuccacccugcucuc

SEQ ID NO: 3338650 - RNA, 14 nt, Human
ucuccacccugcuc

SEQ ID NO: 3338651 - RNA, 17 nt, Human
ucuccacccugcucucc

SEQ ID NO: 3338652 - RNA, 12 nt, Human
ucuccacccugc

SEQ ID NO: 3338653 - RNA, 13 nt, Human
ucuccacccugcu

SEQ ID NO: 3338654 - RNA, 18 nt, Human
ucucauacucaccucacc

SEQ ID NO: 3338655 - RNA, 16 nt, Human
ucucauacucaccuca

SEQ ID NO: 3338656 - RNA, 13 nt, Human
ucuaugggacuca

SEQ ID NO: 3338657 - RNA, 12 nt, Human
ucuaugggacuc

SEQ ID NO: 3338658 - RNA, 19 nt, Human
ucuaugggacucaaugcac

SEQ ID NO: 3338659 - RNA, 13 nt, Human
uccaaaguacacu

SEQ ID NO: 3338660 - RNA, 19 nt, Human
ucaucuugaauuguaagga

SEQ ID NO: 3338661 - RNA, 17 nt, Human
ucauccacugugccaug

SEQ ID NO: 3338662 - RNA, 14 nt, Human
ucauccacugugcc

SEQ ID NO: 3338663 - RNA, 14 nt, Human
ucaucauccuaagc

SEQ ID NO: 3338664 - RNA, 11 nt, Human
ucaguguacau

SEQ ID NO: 3338665 - RNA, 20 nt, Human
ucaguguacauggaauaaca

SEQ ID NO: 3338666 - RNA, 21 nt, Human
ucaggccugggggcugggcag

SEQ ID NO: 3338667 - RNA, 23 nt, Human
ucaggaagcucagggccuggcuc

SEQ ID NO: 3338668 - RNA, 23 nt, Human
ucagcucugcaagaauugaagca

SEQ ID NO: 3338669 - RNA, 22 nt, Human
ucagcuccagcucaccagcccc

SEQ ID NO: 3338670 - RNA, 24 nt, Human
ucagcuccagcucaccagccccag

SEQ ID NO: 3338671 - RNA, 23 nt, Human
ucagcuccagcucaccagcccca

SEQ ID NO: 3338672 - RNA, 19 nt, Human
ucagguggggcagcuugag

SEQ ID NO: 3338673 - RNA, 18 nt, Human
ucagguggggcagcuuga

SEQ ID NO: 3338674 - RNA, 17 nt, Human
ucagguggggcagcuug

SEQ ID NO: 3338675 - RNA, 23 nt, Human
ucaggugauccacccaccucagc

SEQ ID NO: 3338676 - RNA, 23 nt, Human
ucaggugagaagcagaggaagga

SEQ ID NO: 3338677 - RNA, 16 nt, Human
ucaggugauccaccca

SEQ ID NO: 3338678 - RNA, 20 nt, Human
ucagguggggcagcuugagg

SEQ ID NO: 3338679 - RNA, 22 nt, Human
ucagucugauucccaagcucug

SEQ ID NO: 3338680 - RNA, 21 nt, Human
ucagucugauucccaagcucu

SEQ ID NO: 3338681 - RNA, 19 nt, Human
ucagucugauucccaagcu

SEQ ID NO: 3338682 - RNA, 13 nt, Human
ucccaccuuggcu

SEQ ID NO: 3338683 - RNA, 20 nt, Human
ucccaccucucucacuccuu

SEQ ID NO: 3338684 - RNA, 20 nt, Human
ucccagcugugcucuggaca

SEQ ID NO: 3338685 - RNA, 17 nt, Human
ucccaccuuggcugcag

SEQ ID NO: 3338686 - RNA, 16 nt, Human
ucccaccuuggcugca

SEQ ID NO: 3338687 - RNA, 20 nt, Human
uccaugugggcuaguugggc

SEQ ID NO: 3338688 - RNA, 22 nt, Human
ucccaccucucucacuccuuga

SEQ ID NO: 3338689 - RNA, 19 nt, Human
ucccaugagccucagcauc

SEQ ID NO: 3338690 - RNA, 18 nt, Human
ucccaugagccucagcau

SEQ ID NO: 3338691 - RNA, 21 nt, Human
ucccaucugugaaaggaaaga

SEQ ID NO: 3338692 - RNA, 15 nt, Human
ucccaucuuccaagg

SEQ ID NO: 3338693 - RNA, 22 nt, Human
ucccagcugugcucuggacagg

SEQ ID NO: 3338694 - RNA, 21 nt, Human
ucccagcugugcucuggacag

SEQ ID NO: 3338695 - RNA, 23 nt, Human
ucccagcugugcucuggacaggc

SEQ ID NO: 3338696 - RNA, 23 nt, Human
ucccaggcauuccccaggaggcc

SEQ ID NO: 3338697 - RNA, 24 nt, Human
ucccaggcauuccccaggaggcca

SEQ ID NO: 3338698 - RNA, 17 nt, Human
ucccaugagccucagca

SEQ ID NO: 3338699 - RNA, 20 nt, Human
ucccaugagccucagcaucc

SEQ ID NO: 3338700 - RNA, 18 nt, Human
uccccagauugcaacagg

SEQ ID NO: 3338701 - RNA, 13 nt, Human
uccccagauugca

SEQ ID NO: 3338702 - RNA, 22 nt, Human
uccccagcaagugagagcuggg

SEQ ID NO: 3338703 - RNA, 21 nt, Human
uccccagcaagugagagcugg

SEQ ID NO: 3338704 - RNA, 20 nt, Human
uccccagcaagugagagcug

SEQ ID NO: 3338705 - RNA, 23 nt, Human
uccccagauugcaacaggcuggg

SEQ ID NO: 3338706 - RNA, 22 nt, Human
uccccagauugcaacaggcugg

SEQ ID NO: 3338707 - RNA, 20 nt, Human
uccccagauugcaacaggcu

SEQ ID NO: 3338708 - RNA, 19 nt, Human
uccccagauugcaacaggc

SEQ ID NO: 3338709 - RNA, 13 nt, Human
uccccaggaggcc

SEQ ID NO: 3338710 - RNA, 17 nt, Human
ucccccagccccauccu

SEQ ID NO: 3338711 - RNA, 15 nt, Human
uccccaggaggccag

SEQ ID NO: 3338712 - RNA, 16 nt, Human
uccccaggaggccagc

SEQ ID NO: 3338713 - RNA, 20 nt, Human
ucccccagccccauccucug

SEQ ID NO: 3338714 - RNA, 21 nt, Human
ucccccagccccauccucugu

SEQ ID NO: 3338715 - RNA, 14 nt, Human
uccccaggaggcca

SEQ ID NO: 3338716 - RNA, 20 nt, Human
uccagguuuaagcuguuacu

SEQ ID NO: 3338717 - RNA, 18 nt, Human
uccagguuuaagcuguua

SEQ ID NO: 3338718 - RNA, 14 nt, Human
uccauagagagcaa

SEQ ID NO: 3338719 - RNA, 12 nt, Human
uccaggagcagc

SEQ ID NO: 3338720 - RNA, 13 nt, Human
uccaggagcagcc

SEQ ID NO: 3338721 - RNA, 14 nt, Human
uccaggagcagcca

SEQ ID NO: 3338722 - RNA, 15 nt, Human
uccaggagcagccac

SEQ ID NO: 3338723 - RNA, 19 nt, Human
uccaggggugggacacccu

SEQ ID NO: 3338724 - RNA, 20 nt, Human
uccaggggugggacacccug

SEQ ID NO: 3338725 - RNA, 20 nt, Human
uccacuuucuagccagagga

SEQ ID NO: 3338726 - RNA, 21 nt, Human
uccacuuucuagccagaggag

SEQ ID NO: 3338727 - RNA, 19 nt, Human
uccacuuucuagccagagg

SEQ ID NO: 3338728 - RNA, 14 nt, Human
uccaaaguacacug

SEQ ID NO: 3338729 - RNA, 16 nt, Human
uccaaaguacacuguu

SEQ ID NO: 3338730 - RNA, 17 nt, Human
ugagccucagcauccug

SEQ ID NO: 3338731 - RNA, 21 nt, Human
ugagccgagaucacgccacug

SEQ ID NO: 3338732 - RNA, 19 nt, Human
ugagccgagaucacgccac

SEQ ID NO: 3338733 - RNA, 21 nt, Human
ugagccucagcauccuggcac

SEQ ID NO: 3338734 - RNA, 18 nt, Human
ugagccucagcauccugg

SEQ ID NO: 3338735 - RNA, 22 nt, Human
ugagccucagcauccuggcacc

SEQ ID NO: 3338736 - RNA, 15 nt, Human
ugagccucagcaucc

SEQ ID NO: 3338737 - RNA, 16 nt, Human
ugagcaucaggccagg

SEQ ID NO: 3338738 - RNA, 17 nt, Human
ugagcagggcucagcgg

SEQ ID NO: 3338739 - RNA, 16 nt, Human
ugagcagggcucagcg

SEQ ID NO: 3338740 - RNA, 19 nt, Human
ugagcagggcucagcgggg

SEQ ID NO: 3338741 - RNA, 18 nt, Human
ugagcaucaggccaggcc

SEQ ID NO: 3338742 - RNA, 19 nt, Human
ugagcaucaggccaggccc

SEQ ID NO: 3338743 - RNA, 20 nt, Human
ugagcaucaggccaggcccu

SEQ ID NO: 3338744 - RNA, 20 nt, Human
ugaccucaggugauccaccc

SEQ ID NO: 3338745 - RNA, 19 nt, Human
ugagacucgcgacaaugca

SEQ ID NO: 3338746 - RNA, 15 nt, Human
ugagaucaaaacggu

SEQ ID NO: 3338747 - RNA, 14 nt, Human
ugagaucagccugg

SEQ ID NO: 3338748 - RNA, 15 nt, Human
ugagcagggcucagc

SEQ ID NO: 3338749 - RNA, 14 nt, Human
ugagcagggcucag

SEQ ID NO: 3338750 - RNA, 13 nt, Human
ugagcagggcuca

SEQ ID NO: 3338751 - RNA, 12 nt, Human
ugagcagggcuc

SEQ ID NO: 3338752 - RNA, 20 nt, Human
ugagacucgcgacaaugcaa

SEQ ID NO: 3338753 - RNA, 21 nt, Human
ugagacucgcgacaaugcaaa

SEQ ID NO: 3338754 - RNA, 22 nt, Human
ugagacucgcgacaaugcaaac

SEQ ID NO: 3338755 - RNA, 13 nt, Human
ugagucugaaggc

SEQ ID NO: 3338756 - RNA, 15 nt, Human
ugagucugaaggcug

SEQ ID NO: 3338757 - RNA, 17 nt, Human
ugagucugaaggcuggg

SEQ ID NO: 3338758 - RNA, 18 nt, Human
ugagucugaaggcugggu

SEQ ID NO: 3338759 - RNA, 19 nt, Human
ugagucgaggacagggagg

SEQ ID NO: 3338760 - RNA, 18 nt, Human
ugagucgaggacagggag

SEQ ID NO: 3338761 - RNA, 13 nt, Human
ugaguccagaagu

SEQ ID NO: 3338762 - RNA, 19 nt, Human
ugaguccagaaguuugaga

SEQ ID NO: 3338763 - RNA, 16 nt, Human
ugaguugauagcacag

SEQ ID NO: 3338764 - RNA, 20 nt, Human
ugaguugauagcacagaccc

SEQ ID NO: 3338765 - RNA, 23 nt, Human
ugaggcuagugugguguuuccug

SEQ ID NO: 3338766 - RNA, 21 nt, Human
ugaggcauuuguuugaacuga

SEQ ID NO: 3338767 - RNA, 17 nt, Human
ugaggcuaguguggugu

SEQ ID NO: 3338768 - RNA, 19 nt, Human
ugaggcauuuguuugaacu

SEQ ID NO: 3338769 - RNA, 20 nt, Human
ugaggcauuuguuugaacug

SEQ ID NO: 3338770 - RNA, 12 nt, Human
ugaggcauuugu

SEQ ID NO: 3338771 - RNA, 13 nt, Human
ugagcugggauga

SEQ ID NO: 3338772 - RNA, 12 nt, Human
ugaggugggagg

SEQ ID NO: 3338773 - RNA, 13 nt, Human
ugaggugggagga

SEQ ID NO: 3338774 - RNA, 17 nt, Human
ugagggaacagagaggu

SEQ ID NO: 3338775 - RNA, 13 nt, Human
ugaggcucugccc

SEQ ID NO: 3338776 - RNA, 14 nt, Human
ugaggcucugcccu

SEQ ID NO: 3338777 - RNA, 16 nt, Human
ugauccacccaccuca

SEQ ID NO: 3338778 - RNA, 15 nt, Human
ugauccaagcugguc

SEQ ID NO: 3338779 - RNA, 14 nt, Human
ugauccaagcuggu

SEQ ID NO: 3338780 - RNA, 13 nt, Human
ugauccaagcugg

SEQ ID NO: 3338781 - RNA, 13 nt, Human
ugauagcacagac

SEQ ID NO: 3338782 - RNA, 18 nt, Human
ugauccacccaccucagc

SEQ ID NO: 3338783 - RNA, 17 nt, Human
ugauccacccaccucag

SEQ ID NO: 3338784 - RNA, 20 nt, Human
ugaucuucuuuauaauucua

SEQ ID NO: 3338785 - RNA, 16 nt, Human
ugaucuuugcagacag

SEQ ID NO: 3338786 - RNA, 16 nt, Human
ugaugcuucuucagag

SEQ ID NO: 3338787 - RNA, 17 nt, Human
ugaugcuucuucagaga

SEQ ID NO: 3338788 - RNA, 16 nt, Human
ugauguguuaucucuu

SEQ ID NO: 3338789 - RNA, 18 nt, Human
ugauucagacagcugccu

SEQ ID NO: 3338790 - RNA, 19 nt, Human
ugauucagacagcugccug

SEQ ID NO: 3338791 - RNA, 20 nt, Human
ugauucagacagcugccugg

SEQ ID NO: 3338792 - RNA, 21 nt, Human
ugauucagacagcugccuggg

SEQ ID NO: 3338793 - RNA, 23 nt, Human
ugauucagacagcugccugggau

SEQ ID NO: 3338794 - RNA, 21 nt, Human
ugauucuccugccucagccuc

SEQ ID NO: 3338795 - RNA, 20 nt, Human
ugauucuccugccucagccu

SEQ ID NO: 3338796 - RNA, 16 nt, Human
ugauugugucucuugg

SEQ ID NO: 3338797 - RNA, 13 nt, Human
ugauuggaggggg

SEQ ID NO: 3338798 - RNA, 21 nt, Human
ugauuggaggggggagguggg

SEQ ID NO: 3338799 - RNA, 13 nt, Human
ugauucagacagc

SEQ ID NO: 3338800 - RNA, 14 nt, Human
ugauucagacagcu

SEQ ID NO: 3338801 - RNA, 15 nt, Human
ugauucagacagcug

SEQ ID NO: 3338802 - RNA, 16 nt, Human
ugauucagacagcugc

SEQ ID NO: 3338803 - RNA, 20 nt, Human
ugauucaacagguuuuccug

SEQ ID NO: 3338804 - RNA, 20 nt, Human
ugauguucuuucacccuuuu

SEQ ID NO: 3338805 - RNA, 17 nt, Human
ugacagaggcagcccca

SEQ ID NO: 3338806 - RNA, 16 nt, Human
ugacagaggcagcccc

SEQ ID NO: 3338807 - RNA, 15 nt, Human
ugacagaggcagccc

SEQ ID NO: 3338808 - RNA, 14 nt, Human
ugacagaggcagcc

SEQ ID NO: 3338809 - RNA, 23 nt, Human
ugacagacacaggcccggcucca

SEQ ID NO: 3338810 - RNA, 20 nt, Human
ugacagacacaggcccggcu

SEQ ID NO: 3338811 - RNA, 13 nt, Human
ugacagaggcagc

SEQ ID NO: 3338812 - RNA, 17 nt, Human
ugacagagugagacucu

SEQ ID NO: 3338813 - RNA, 14 nt, Human
ugacagagugagac

SEQ ID NO: 3338814 - RNA, 23 nt, Human
ugacagaggcagccccauucugc

SEQ ID NO: 3338815 - RNA, 18 nt, Human
ugacagaggcagccccau

SEQ ID NO: 3338816 - RNA, 19 nt, Human
ugacagagugagacucugu

SEQ ID NO: 3338817 - RNA, 14 nt, Human
ugaccauucuccac

SEQ ID NO: 3338818 - RNA, 13 nt, Human
ugaccgugaggcc

SEQ ID NO: 3338819 - RNA, 14 nt, Human
ugaccgugaggcca

SEQ ID NO: 3338820 - RNA, 16 nt, Human
ugaccgugaggccaga

SEQ ID NO: 3338821 - RNA, 20 nt, Human
ugaccgugaggccagagaca

SEQ ID NO: 3338822 - RNA, 17 nt, Human
ugaccauucuccaccug

SEQ ID NO: 3338823 - RNA, 18 nt, Human
ugaccauucuccaccugc

SEQ ID NO: 3338824 - RNA, 16 nt, Human
ugaccauucuccaccu

SEQ ID NO: 3338825 - RNA, 13 nt, Human
ugacaugucuuuu

SEQ ID NO: 3338826 - RNA, 15 nt, Human
ugacaugucuuuucu

SEQ ID NO: 3338827 - RNA, 19 nt, Human
ugaccagcaccaucucucc

SEQ ID NO: 3338828 - RNA, 20 nt, Human
ugaaggacauugcggacagc

SEQ ID NO: 3338829 - RNA, 19 nt, Human
ugaaggacauugcggacag

SEQ ID NO: 3338830 - RNA, 22 nt, Human
ugaaggacauugcggacagcca

SEQ ID NO: 3338831 - RNA, 15 nt, Human
ugaaggccccgccca

SEQ ID NO: 3338832 - RNA, 16 nt, Human
ugaaggccccgcccag

SEQ ID NO: 3338833 - RNA, 17 nt, Human
ugaacuccuggccucaa

SEQ ID NO: 3338834 - RNA, 13 nt, Human
ucuuuccaaagua

SEQ ID NO: 3338835 - RNA, 14 nt, Human
ucuuuccaaaguac

SEQ ID NO: 3338836 - RNA, 16 nt, Human
ucuuucagccaagaau

SEQ ID NO: 3338837 - RNA, 19 nt, Human
ucuuucagccaagaauucu

SEQ ID NO: 3338838 - RNA, 20 nt, Human
ucuuucagccaagaauucuu

SEQ ID NO: 3338839 - RNA, 21 nt, Human
ucuuucagccaagaauucuua

SEQ ID NO: 3338840 - RNA, 17 nt, Human
ucuuuggacacucacac

SEQ ID NO: 3338841 - RNA, 23 nt, Human
ucuuugagugaagcugggagaac

SEQ ID NO: 3338842 - RNA, 16 nt, Human
ucucccuucauccuuc

SEQ ID NO: 3338843 - RNA, 20 nt, Human
ucuccucugcugcuggcugg

SEQ ID NO: 3338844 - RNA, 23 nt, Human
ucuugcaauggcagccuuggcaa

SEQ ID NO: 3338845 - RNA, 16 nt, Human
ucuuguguguuuauug

SEQ ID NO: 3338846 - RNA, 21 nt, Human
ucuuguguguuuauugucaaa

SEQ ID NO: 3338847 - RNA, 23 nt, Human
ucuuucacccuuuucuguuugcu

SEQ ID NO: 3338848 - RNA, 16 nt, Human
ugaacuccuggccuca

SEQ ID NO: 3338849 - RNA, 20 nt, Human
ugaaccaccacacccagccc

SEQ ID NO: 3338850 - RNA, 17 nt, Human
ugaaccaccacacccag

SEQ ID NO: 3338851 - RNA, 23 nt, Human
ugaaccacaucuugcucugcuga

SEQ ID NO: 3338852 - RNA, 22 nt, Human
ugaaccaagaacuuuccaggaa

SEQ ID NO: 3338853 - RNA, 22 nt, Human
ugaaccacaucuugcucugcug

SEQ ID NO: 3338854 - RNA, 19 nt, Human
ugaaaauuuugauguuuua

SEQ ID NO: 3338855 - RNA, 21 nt, Human
ugaaaauuuugauguuuuaag

SEQ ID NO: 3338856 - RNA, 12 nt, Human
ugaaaauuuuga

SEQ ID NO: 3338857 - RNA, 13 nt, Human
ugaaaauuuugau

SEQ ID NO: 3338858 - RNA, 14 nt, Human
ugaaacauuuuguc

SEQ ID NO: 3338859 - RNA, 23 nt, Human
ugaaagggaguauuacaaaaaca

SEQ ID NO: 3338860 - RNA, 13 nt, Human
ugaaagggcccag

SEQ ID NO: 3338861 - RNA, 18 nt, Human
ugaaagggcccagagagg

SEQ ID NO: 3338862 - RNA, 18 nt, Human
ugaaagcccugagcuuuc

SEQ ID NO: 3338863 - RNA, 14 nt, Human
ugggccuggcuccc

SEQ ID NO: 3338864 - RNA, 23 nt, Human
ugggcagagcagagaccaucccu

SEQ ID NO: 3338865 - RNA, 22 nt, Human
ugggcagagcagagaccauccc

SEQ ID NO: 3338866 - RNA, 18 nt, Human
ugggcagagcagagacca

SEQ ID NO: 3338867 - RNA, 22 nt, Human
ugggauuacaagcgugagccac

SEQ ID NO: 3338868 - RNA, 12 nt, Human
ugggauccucca

SEQ ID NO: 3338869 - RNA, 13 nt, Human
ugggauccuccag

SEQ ID NO: 3338870 - RNA, 17 nt, Human
uggcugggggccucagu

SEQ ID NO: 3338871 - RNA, 16 nt, Human
uggcugggggccucag

SEQ ID NO: 3338872 - RNA, 14 nt, Human
ugggagugggccca

SEQ ID NO: 3338873 - RNA, 16 nt, Human
ugggagugggcccaau

SEQ ID NO: 3338874 - RNA, 20 nt, Human
uggggccaguuggucccccu

SEQ ID NO: 3338875 - RNA, 23 nt, Human
uggggaugagaaagguugaagca

SEQ ID NO: 3338876 - RNA, 15 nt, Human
uggggaugagaaagg

SEQ ID NO: 3338877 - RNA, 22 nt, Human
ugggcuucauccuccucagauc

SEQ ID NO: 3338878 - RNA, 18 nt, Human
uggguacuuguggacaca

SEQ ID NO: 3338879 - RNA, 17 nt, Human
uggguacuuguggacac

SEQ ID NO: 3338880 - RNA, 16 nt, Human
uggguaacuagggaag

SEQ ID NO: 3338881 - RNA, 16 nt, Human
ugggggaguggccaca

SEQ ID NO: 3338882 - RNA, 19 nt, Human
uggugacuuuccucuuugg

SEQ ID NO: 3338883 - RNA, 22 nt, Human
uggugaccucugccugaaguca

SEQ ID NO: 3338884 - RNA, 17 nt, Human
uggugaccucugccuga

SEQ ID NO: 3338885 - RNA, 16 nt, Human
uggugaccucugccug

SEQ ID NO: 3338886 - RNA, 15 nt, Human
uggugaccucugccu

SEQ ID NO: 3338887 - RNA, 14 nt, Human
uggugagaggcauc

SEQ ID NO: 3338888 - RNA, 21 nt, Human
uggugcaaugaccuuucaaua

SEQ ID NO: 3338889 - RNA, 20 nt, Human
uggugcaaugaccuuucaau

SEQ ID NO: 3338890 - RNA, 14 nt, Human
uggugaccucugcc

SEQ ID NO: 3338891 - RNA, 13 nt, Human
uggugaccucugc

SEQ ID NO: 3338892 - RNA, 15 nt, Human
uggucuacacugugc

SEQ ID NO: 3338893 - RNA, 16 nt, Human
uggucuacacugugcu

SEQ ID NO: 3338894 - RNA, 17 nt, Human
uggucuacacugugcug

SEQ ID NO: 3338895 - RNA, 18 nt, Human
uggucuacacugugcuga

SEQ ID NO: 3338896 - RNA, 17 nt, Human
uggucggaaaacaugcu

SEQ ID NO: 3338897 - RNA, 14 nt, Human
uggucggaaaacau

SEQ ID NO: 3338898 - RNA, 17 nt, Human
ugguccuaaucuucuga

SEQ ID NO: 3338899 - RNA, 19 nt, Human
ugguccuaaucuucugaac

SEQ ID NO: 3338900 - RNA, 13 nt, Human
ugguccugcugca

SEQ ID NO: 3338901 - RNA, 15 nt, Human
ugguccugcugcagu

SEQ ID NO: 3338902 - RNA, 23 nt, Human
ugguccugcugcaguugccaguc

SEQ ID NO: 3338903 - RNA, 15 nt, Human
uggucccccuuccau

SEQ ID NO: 3338904 - RNA, 16 nt, Human
uggucccccuuccaug

SEQ ID NO: 3338905 - RNA, 18 nt, Human
uggucccccuuccaugga

SEQ ID NO: 3338906 - RNA, 23 nt, Human
uggucccccuuccauggacuuug

SEQ ID NO: 3338907 - RNA, 18 nt, Human
ugguaugaucacggcuca

SEQ ID NO: 3338908 - RNA, 13 nt, Human
uggucccacucag

SEQ ID NO: 3338909 - RNA, 14 nt, Human
uggucccccuucca

SEQ ID NO: 3338910 - RNA, 23 nt, Human
uggacaggcauguucucugagga

SEQ ID NO: 3338911 - RNA, 16 nt, Human
uggcacuauaauguaa

SEQ ID NO: 3338912 - RNA, 15 nt, Human
uggcacuauaaugua

SEQ ID NO: 3338913 - RNA, 16 nt, Human
uggcaaaaaggcagga

SEQ ID NO: 3338914 - RNA, 12 nt, Human
uggcaaaaaggc

SEQ ID NO: 3338915 - RNA, 21 nt, Human
uggaggaaggaaacccagcuc

SEQ ID NO: 3338916 - RNA, 23 nt, Human
uggaggaaggaaacccagcucug

SEQ ID NO: 3338917 - RNA, 20 nt, Human
uggaggaaggaaacccagcu

SEQ ID NO: 3338918 - RNA, 15 nt, Human
uggcagaguugaaga

SEQ ID NO: 3338919 - RNA, 21 nt, Human
uggcagaguggauucuugaac

SEQ ID NO: 3338920 - RNA, 17 nt, Human
uggcagaguugaagaca

SEQ ID NO: 3338921 - RNA, 18 nt, Human
uggccagaugcaccagcc

SEQ ID NO: 3338922 - RNA, 17 nt, Human
uggccagaugcaccagc

SEQ ID NO: 3338923 - RNA, 15 nt, Human
uggccagaugcacca

SEQ ID NO: 3338924 - RNA, 19 nt, Human
uggccagaugcaccagccc

SEQ ID NO: 3338925 - RNA, 13 nt, Human
uggccaggcuggu

SEQ ID NO: 3338926 - RNA, 16 nt, Human
uggccccugcccggcu

SEQ ID NO: 3338927 - RNA, 15 nt, Human
uggccccugcccggc

SEQ ID NO: 3338928 - RNA, 14 nt, Human
uggccccugcccgg

SEQ ID NO: 3338929 - RNA, 15 nt, Human
uggcgcugccccugg

SEQ ID NO: 3338930 - RNA, 23 nt, Human
uggcgcugccccuggcagccccu

SEQ ID NO: 3338931 - RNA, 16 nt, Human
uggcgcugccccuggc

SEQ ID NO: 3338932 - RNA, 22 nt, Human
uggcgcagcauauucaggaagc

SEQ ID NO: 3338933 - RNA, 23 nt, Human
uggcgcagcauauucaggaagcu

SEQ ID NO: 3338934 - RNA, 23 nt, Human
uggccucccaacucaccccagcc

SEQ ID NO: 3338935 - RNA, 15 nt, Human
uggcugcuucaagga

SEQ ID NO: 3338936 - RNA, 15 nt, Human
uggcugggggccuca

SEQ ID NO: 3338937 - RNA, 11 nt, Human
uggcugcuuca

SEQ ID NO: 3338938 - RNA, 16 nt, Human
uggcugcugaaggcuc

SEQ ID NO: 3338939 - RNA, 19 nt, Human
ugcccaggcuggcgugcag

SEQ ID NO: 3338940 - RNA, 18 nt, Human
ugcccaggcuggcgugca

SEQ ID NO: 3338941 - RNA, 20 nt, Human
ugcccaggcuggcgugcagu

SEQ ID NO: 3338942 - RNA, 13 nt, Human
ugcccaggcuggc

SEQ ID NO: 3338943 - RNA, 14 nt, Human
ugcccggcugcgga

SEQ ID NO: 3338944 - RNA, 12 nt, Human
ugcccggcugcg

SEQ ID NO: 3338945 - RNA, 16 nt, Human
ugccccuggcagcccc

SEQ ID NO: 3338946 - RNA, 14 nt, Human
ugccucaagagaag

SEQ ID NO: 3338947 - RNA, 15 nt, Human
ugccucaagagaagg

SEQ ID NO: 3338948 - RNA, 16 nt, Human
ugcccugcccaccugg

SEQ ID NO: 3338949 - RNA, 20 nt, Human
ugcccugcccaccuggccuc

SEQ ID NO: 3338950 - RNA, 15 nt, Human
ugcccugcccaccug

SEQ ID NO: 3338951 - RNA, 14 nt, Human
ugcccugcccaccu

SEQ ID NO: 3338952 - RNA, 21 nt, Human
ugcaguuacacuaaaagguga

SEQ ID NO: 3338953 - RNA, 21 nt, Human
ugcaguggugcgaucuggguu

SEQ ID NO: 3338954 - RNA, 20 nt, Human
ugcaguggugcgaucugggu

SEQ ID NO: 3338955 - RNA, 13 nt, Human
ugcagggaguccg

SEQ ID NO: 3338956 - RNA, 19 nt, Human
ugcaucaagaugugacaug

SEQ ID NO: 3338957 - RNA, 16 nt, Human
ugcaguugccagucac

SEQ ID NO: 3338958 - RNA, 15 nt, Human
ugcaguugccaguca

SEQ ID NO: 3338959 - RNA, 23 nt, Human
ugcauuuggugguuucagaaaug

SEQ ID NO: 3338960 - RNA, 21 nt, Human
ugcauuuggugguuucagaaa

SEQ ID NO: 3338961 - RNA, 20 nt, Human
ugccacccuggggagaaagu

SEQ ID NO: 3338962 - RNA, 19 nt, Human
ugccaggaagccagcaggc

SEQ ID NO: 3338963 - RNA, 10 nt, Human
ugccaggcau

SEQ ID NO: 3338964 - RNA, 14 nt, Human
ugccaggcauggug

SEQ ID NO: 3338965 - RNA, 20 nt, Human
ugccaggaagccagcaggcu

SEQ ID NO: 3338966 - RNA, 22 nt, Human
ugccaggaagccagcaggcucu

SEQ ID NO: 3338967 - RNA, 22 nt, Human
ugcuacuguccuacccacccuc

SEQ ID NO: 3338968 - RNA, 21 nt, Human
ugcuacuguccuacccacccu

SEQ ID NO: 3338969 - RNA, 23 nt, Human
ugcucuccgaccagacaccuuga

SEQ ID NO: 3338970 - RNA, 17 nt, Human
ugcucacauaucuguca

SEQ ID NO: 3338971 - RNA, 21 nt, Human
ugcuaggaacacuccuucaca

SEQ ID NO: 3338972 - RNA, 20 nt, Human
ugcuaggaacacuccuucac

SEQ ID NO: 3338973 - RNA, 22 nt, Human
ugcuaggaacacuccuucacag

SEQ ID NO: 3338974 - RNA, 19 nt, Human
ugcugcuugaggcaacuca

SEQ ID NO: 3338975 - RNA, 20 nt, Human
ugcugggauuacagguguga

SEQ ID NO: 3338976 - RNA, 12 nt, Human
ugcugcuugagg

SEQ ID NO: 3338977 - RNA, 17 nt, Human
ugcugcauuuaaaagau

SEQ ID NO: 3338978 - RNA, 18 nt, Human
ugcugcauuuaaaagaua

SEQ ID NO: 3338979 - RNA, 19 nt, Human
ugcugcauuuaaaagauac

SEQ ID NO: 3338980 - RNA, 23 nt, Human
ugcugcauuuaaaagauacaguu

SEQ ID NO: 3338981 - RNA, 14 nt, Human
ugcugcauuuaaaa

SEQ ID NO: 3338982 - RNA, 13 nt, Human
ugcuggguguggc

SEQ ID NO: 3338983 - RNA, 17 nt, Human
ugcugggcuugucugua

SEQ ID NO: 3338984 - RNA, 17 nt, Human
guggaguucaucuugaa

SEQ ID NO: 3338985 - RNA, 18 nt, Human
guggaugccugguggcag

SEQ ID NO: 3338986 - RNA, 16 nt, Human
guggaugccugguggc

SEQ ID NO: 3338987 - RNA, 20 nt, Human
guggagaagcggcuggcagc

SEQ ID NO: 3338988 - RNA, 15 nt, Human
guggcagugggagcu

SEQ ID NO: 3338989 - RNA, 17 nt, Human
guggcagugggagcugc

SEQ ID NO: 3338990 - RNA, 16 nt, Human
guggcagugggagcug

SEQ ID NO: 3338991 - RNA, 19 nt, Human
guggcagcugcuuuugucu

SEQ ID NO: 3338992 - RNA, 13 nt, Human
guggcagcugcuu

SEQ ID NO: 3338993 - RNA, 12 nt, Human
guggcagcugcu

SEQ ID NO: 3338994 - RNA, 23 nt, Human
guggcagcugcgguccacccagg

SEQ ID NO: 3338995 - RNA, 22 nt, Human
guggcagcugcgguccacccag

SEQ ID NO: 3338996 - RNA, 21 nt, Human
guggcagcugcgguccaccca

SEQ ID NO: 3338997 - RNA, 19 nt, Human
guggcagcugcgguccacc

SEQ ID NO: 3338998 - RNA, 21 nt, Human
guggcagugggagcugccugu

SEQ ID NO: 3338999 - RNA, 19 nt, Human
guggcagugggagcugccu

SEQ ID NO: 3339000 - RNA, 18 nt, Human
guggaaaaauagccugcc

SEQ ID NO: 3339001 - RNA, 22 nt, Human
gugcugccauccagguucagcu

SEQ ID NO: 3339002 - RNA, 11 nt, Human
gugcugcccug

SEQ ID NO: 3339003 - RNA, 13 nt, Human
gugcuuggaggaa

SEQ ID NO: 3339004 - RNA, 15 nt, Human
gugcuuggaggaagg

SEQ ID NO: 3339005 - RNA, 12 nt, Human
gugcuuggagga

SEQ ID NO: 3339006 - RNA, 16 nt, Human
gugcugagucugaagg

SEQ ID NO: 3339007 - RNA, 17 nt, Human
gugcugagucugaaggc

SEQ ID NO: 3339008 - RNA, 18 nt, Human
gugcugagucugaaggcu

SEQ ID NO: 3339009 - RNA, 19 nt, Human
gugcugagucugaaggcug

SEQ ID NO: 3339010 - RNA, 12 nt, Human
gugcugagucug

SEQ ID NO: 3339011 - RNA, 12 nt, Human
gugcugcauuua

SEQ ID NO: 3339012 - RNA, 19 nt, Human
gugcugcauuuaaaagaua

SEQ ID NO: 3339013 - RNA, 20 nt, Human
gugcugcauuuaaaagauac

SEQ ID NO: 3339014 - RNA, 19 nt, Human
gugcugccauccagguuca

SEQ ID NO: 3339015 - RNA, 18 nt, Human
gugcugccauccagguuc

SEQ ID NO: 3339016 - RNA, 15 nt, Human
gugcugccauccagg

SEQ ID NO: 3339017 - RNA, 14 nt, Human
gugcucuggacagg

SEQ ID NO: 3339018 - RNA, 18 nt, Human
gugcucuggacaggcaug

SEQ ID NO: 3339019 - RNA, 17 nt, Human
gugcucuggacaggcau

SEQ ID NO: 3339020 - RNA, 23 nt, Human
gugcugaaugguuuucaaaauaa

SEQ ID NO: 3339021 - RNA, 20 nt, Human
gugcugaaugguuuucaaaa

SEQ ID NO: 3339022 - RNA, 19 nt, Human
gugcugaaugguuuucaaa

SEQ ID NO: 3339023 - RNA, 21 nt, Human
gugccuuggggacaagagcag

SEQ ID NO: 3339024 - RNA, 16 nt, Human
gugcucuggacaggca

SEQ ID NO: 3339025 - RNA, 15 nt, Human
gugcucuggacaggc

SEQ ID NO: 3339026 - RNA, 14 nt, Human
gugaaaagaaaaau

SEQ ID NO: 3339027 - RNA, 23 nt, Human
gugaaaagaaaaaugagccuggc

SEQ ID NO: 3339028 - RNA, 12 nt, Human
gugaaacuggau

SEQ ID NO: 3339029 - RNA, 19 nt, Human
gugaaaggaaagagggagg

SEQ ID NO: 3339030 - RNA, 13 nt, Human
gugagccacugca

SEQ ID NO: 3339031 - RNA, 17 nt, Human
gugacugaucucucgug

SEQ ID NO: 3339032 - RNA, 16 nt, Human
gugaggaagccgcugg

SEQ ID NO: 3339033 - RNA, 19 nt, Human
gugaggaagccgcuggggc

SEQ ID NO: 3339034 - RNA, 11 nt, Human
gugaggaagcc

SEQ ID NO: 3339035 - RNA, 16 nt, Human
gugacaacacuugugu

SEQ ID NO: 3339036 - RNA, 15 nt, Human
gugaccucugccuga

SEQ ID NO: 3339037 - RNA, 16 nt, Human
gugacugaauuucuuu

SEQ ID NO: 3339038 - RNA, 18 nt, Human
gugacugaauuucuuuug

SEQ ID NO: 3339039 - RNA, 15 nt, Human
gugacugaauuucuu

SEQ ID NO: 3339040 - RNA, 20 nt, Human
gugcccacaggaucagucug

SEQ ID NO: 3339041 - RNA, 13 nt, Human
gugcauaccacuu

SEQ ID NO: 3339042 - RNA, 14 nt, Human
gugcauaccacuuu

SEQ ID NO: 3339043 - RNA, 22 nt, Human
gugccagguuuuuggucugacc

SEQ ID NO: 3339044 - RNA, 20 nt, Human
gugccagguuuuuggucuga

SEQ ID NO: 3339045 - RNA, 19 nt, Human
gugcauaaguuaacuucca

SEQ ID NO: 3339046 - RNA, 22 nt, Human
gugauucuccugccucagccuc

SEQ ID NO: 3339047 - RNA, 20 nt, Human
gugauucuccugccucagcc

SEQ ID NO: 3339048 - RNA, 19 nt, Human
gugauucuccugccucagc

SEQ ID NO: 3339049 - RNA, 18 nt, Human
gugauucuccugccucag

SEQ ID NO: 3339050 - RNA, 17 nt, Human
gugauucuccugccuca

SEQ ID NO: 3339051 - RNA, 16 nt, Human
gugauucuccugccuc

SEQ ID NO: 3339052 - RNA, 14 nt, Human
gugauucuccugcc

SEQ ID NO: 3339053 - RNA, 23 nt, Human
gugauucuccugccucagccucc

SEQ ID NO: 3339054 - RNA, 12 nt, Human
gugauuuucauu

SEQ ID NO: 3339055 - RNA, 18 nt, Human
gugauccucccaccucag

SEQ ID NO: 3339056 - RNA, 15 nt, Human
gugauccucccaccu

SEQ ID NO: 3339057 - RNA, 14 nt, Human
gugauccucccacc

SEQ ID NO: 3339058 - RNA, 22 nt, Human
gugauccucccaccucagccuc

SEQ ID NO: 3339059 - RNA, 20 nt, Human
gugauccucccaccucagcc

SEQ ID NO: 3339060 - RNA, 20 nt, Human
gugauccacccaccucagcc

SEQ ID NO: 3339061 - RNA, 18 nt, Human
gugauccacccaccucag

SEQ ID NO: 3339062 - RNA, 15 nt, Human
gugauccacccaccu

SEQ ID NO: 3339063 - RNA, 11 nt, Human
gugaggccaga

SEQ ID NO: 3339064 - RNA, 19 nt, Human
gucugaggaauccagaccc

SEQ ID NO: 3339065 - RNA, 18 nt, Human
gucugaggaauccagacc

SEQ ID NO: 3339066 - RNA, 15 nt, Human
gucugacccacugcu

SEQ ID NO: 3339067 - RNA, 14 nt, Human
gucugacccacugc

SEQ ID NO: 3339068 - RNA, 13 nt, Human
gucugacccacug

SEQ ID NO: 3339069 - RNA, 21 nt, Human
gucugauucccaagcucugcu

SEQ ID NO: 3339070 - RNA, 20 nt, Human
gucugauucccaagcucugc

SEQ ID NO: 3339071 - RNA, 21 nt, Human
gucugaggaauccagacccgg

SEQ ID NO: 3339072 - RNA, 19 nt, Human
gucugauucccaagcucug

SEQ ID NO: 3339073 - RNA, 18 nt, Human
gucugauucccaagcucu

SEQ ID NO: 3339074 - RNA, 17 nt, Human
gucugauucccaagcuc

SEQ ID NO: 3339075 - RNA, 23 nt, Human
gucucacuguugcccaggcuggc

SEQ ID NO: 3339076 - RNA, 22 nt, Human
gucucacuguugcccaggcugg

SEQ ID NO: 3339077 - RNA, 21 nt, Human
gucucacuguugcccaggcug

SEQ ID NO: 3339078 - RNA, 20 nt, Human
gucucacuguugcccaggcu

SEQ ID NO: 3339079 - RNA, 19 nt, Human
gucucacuauguugcccag

SEQ ID NO: 3339080 - RNA, 19 nt, Human
gucucacuguugcccaggc

SEQ ID NO: 3339081 - RNA, 18 nt, Human
gucucacuguugcccagg

SEQ ID NO: 3339082 - RNA, 17 nt, Human
gucucacuguugcccag

SEQ ID NO: 3339083 - RNA, 16 nt, Human
gucucacuguugccca

SEQ ID NO: 3339084 - RNA, 23 nt, Human
gucucacuauguugcccaggcag

SEQ ID NO: 3339085 - RNA, 13 nt, Human
gucucacuguugc

SEQ ID NO: 3339086 - RNA, 21 nt, Human
gucucacuauguugcccaggc

SEQ ID NO: 3339087 - RNA, 20 nt, Human
gucucacuauguugcccagg

SEQ ID NO: 3339088 - RNA, 16 nt, Human
guccuuaccagcagag

SEQ ID NO: 3339089 - RNA, 17 nt, Human
guccuuaccagcagagc

SEQ ID NO: 3339090 - RNA, 15 nt, Human
guccuuaccagcaga

SEQ ID NO: 3339091 - RNA, 15 nt, Human
gucuacacugugcug

SEQ ID NO: 3339092 - RNA, 18 nt, Human
guccugggagugagcugg

SEQ ID NO: 3339093 - RNA, 17 nt, Human
guccugggagugagcug

SEQ ID NO: 3339094 - RNA, 19 nt, Human
guccugggagugagcuggu

SEQ ID NO: 3339095 - RNA, 23 nt, Human
guccucccaucucacacaugagc

SEQ ID NO: 3339096 - RNA, 13 nt, Human
guccucccaucuc

SEQ ID NO: 3339097 - RNA, 14 nt, Human
guccucccaucuca

SEQ ID NO: 3339098 - RNA, 12 nt, Human
guccucccaucu

SEQ ID NO: 3339099 - RNA, 17 nt, Human
guccuggcaugggaaug

SEQ ID NO: 3339100 - RNA, 16 nt, Human
guccugggagugagcu

SEQ ID NO: 3339101 - RNA, 15 nt, Human
guccugggagugagc

SEQ ID NO: 3339102 - RNA, 23 nt, Human
guccuagaaauuccccacccuga

SEQ ID NO: 3339103 - RNA, 23 nt, Human
guccuacucugugucaggugggg

SEQ ID NO: 3339104 - RNA, 15 nt, Human
guccuacucuguguc

SEQ ID NO: 3339105 - RNA, 16 nt, Human
gucccugguggcagcu

SEQ ID NO: 3339106 - RNA, 17 nt, Human
gucccugguggcagcuc

SEQ ID NO: 3339107 - RNA, 13 nt, Human
guccuacucugug

SEQ ID NO: 3339108 - RNA, 12 nt, Human
gucccagugccg

SEQ ID NO: 3339109 - RNA, 19 nt, Human
gucaagugaaaaaggagga

SEQ ID NO: 3339110 - RNA, 16 nt, Human
gucaagugaaaaagga

SEQ ID NO: 3339111 - RNA, 18 nt, Human
gucaagugaaaaaggagg

SEQ ID NO: 3339112 - RNA, 19 nt, Human
gucaagagggucugaggaa

SEQ ID NO: 3339113 - RNA, 18 nt, Human
gucaagagggucugagga

SEQ ID NO: 3339114 - RNA, 13 nt, Human
gucaccccggcca

SEQ ID NO: 3339115 - RNA, 20 nt, Human
gucaccugaagacucauucu

SEQ ID NO: 3339116 - RNA, 13 nt, Human
gucaauuacagga

SEQ ID NO: 3339117 - RNA, 15 nt, Human
gucaauuacaggaag

SEQ ID NO: 3339118 - RNA, 14 nt, Human
guauuauaccuuuu

SEQ ID NO: 3339119 - RNA, 15 nt, Human
guauuacuucugcua

SEQ ID NO: 3339120 - RNA, 14 nt, Human
guauuacuucugcu

SEQ ID NO: 3339121 - RNA, 13 nt, Human
guauuacuucugc

SEQ ID NO: 3339122 - RNA, 15 nt, Human
guagagugggagcug

SEQ ID NO: 3339123 - RNA, 13 nt, Human
guagagugggagc

SEQ ID NO: 3339124 - RNA, 21 nt, Human
gucauauaagauucauauuua

SEQ ID NO: 3339125 - RNA, 16 nt, Human
guccacccaggagccc

SEQ ID NO: 3339126 - RNA, 15 nt, Human
guccacccaggagcc

SEQ ID NO: 3339127 - RNA, 13 nt, Human
guccacccaggag

SEQ ID NO: 3339128 - RNA, 14 nt, Human
guccacccaggagc

SEQ ID NO: 3339129 - RNA, 14 nt, Human
gucccacucagucc

SEQ ID NO: 3339130 - RNA, 15 nt, Human
gucccacucagucca

SEQ ID NO: 3339131 - RNA, 17 nt, Human
gucccagauacuugggg

SEQ ID NO: 3339132 - RNA, 22 nt, Human
ggucccaccccacacacgccag

SEQ ID NO: 3339133 - RNA, 11 nt, Human
ggucagagccu

SEQ ID NO: 3339134 - RNA, 14 nt, Human
ggucccacucaguc

SEQ ID NO: 3339135 - RNA, 12 nt, Human
ggucccacucag

SEQ ID NO: 3339136 - RNA, 22 nt, Human
ggucccacucaguccauagcag

SEQ ID NO: 3339137 - RNA, 18 nt, Human
ggucccccuuccauggac

SEQ ID NO: 3339138 - RNA, 23 nt, Human
ggucccccuuccauggacuuugu

SEQ ID NO: 3339139 - RNA, 13 nt, Human
ggucccccuucca

SEQ ID NO: 3339140 - RNA, 16 nt, Human
ggucagagccugcagu

SEQ ID NO: 3339141 - RNA, 15 nt, Human
ggucagagccugcag

SEQ ID NO: 3339142 - RNA, 14 nt, Human
ggucagagccugca

SEQ ID NO: 3339143 - RNA, 13 nt, Human
ggucagagccugc

SEQ ID NO: 3339144 - RNA, 16 nt, Human
ggucacucuggcagcu

SEQ ID NO: 3339145 - RNA, 20 nt, Human
ggucacucuggcagcucaga

SEQ ID NO: 3339146 - RNA, 22 nt, Human
ggucacucuggcagcucagaga

SEQ ID NO: 3339147 - RNA, 12 nt, Human
ggucagagccug

SEQ ID NO: 3339148 - RNA, 12 nt, Human
ggucacucuggc

SEQ ID NO: 3339149 - RNA, 19 nt, Human
ggguuggccccugcccggc

SEQ ID NO: 3339150 - RNA, 16 nt, Human
ggguuggccccugccc

SEQ ID NO: 3339151 - RNA, 17 nt, Human
ggguucuacccaggugc

SEQ ID NO: 3339152 - RNA, 22 nt, Human
ggguucuacccaggugcuagga

SEQ ID NO: 3339153 - RNA, 23 nt, Human
ggguucccuuuuuuggcugcuga

SEQ ID NO: 3339154 - RNA, 15 nt, Human
ggguugggcuggugu

SEQ ID NO: 3339155 - RNA, 16 nt, Human
gguacccacugcucug

SEQ ID NO: 3339156 - RNA, 17 nt, Human
gguacccacugcucugg

SEQ ID NO: 3339157 - RNA, 22 nt, Human
gguacuuguggacacagcucuu

SEQ ID NO: 3339158 - RNA, 20 nt, Human
gguacuuguggacacagcuc

SEQ ID NO: 3339159 - RNA, 21 nt, Human
gguacuuguggacacagcucu

SEQ ID NO: 3339160 - RNA, 14 nt, Human
ggucccugguggca

SEQ ID NO: 3339161 - RNA, 22 nt, Human
ggucucacuauguugcccaggc

SEQ ID NO: 3339162 - RNA, 22 nt, Human
ggucccugguggcagcucaccu

SEQ ID NO: 3339163 - RNA, 18 nt, Human
ggugaagugaagacaaug

SEQ ID NO: 3339164 - RNA, 16 nt, Human
ggugaacuugguuccc

SEQ ID NO: 3339165 - RNA, 19 nt, Human
ggucugaggaauccagacc

SEQ ID NO: 3339166 - RNA, 14 nt, Human
ggucugacccacug

SEQ ID NO: 3339167 - RNA, 12 nt, Human
ggucucacucug

SEQ ID NO: 3339168 - RNA, 21 nt, Human
ggucucacuauguugcccagg

SEQ ID NO: 3339169 - RNA, 16 nt, Human
ggucugacccacugcu

SEQ ID NO: 3339170 - RNA, 15 nt, Human
ggucugacccacugc

SEQ ID NO: 3339171 - RNA, 14 nt, Human
ggugaccucugccu

SEQ ID NO: 3339172 - RNA, 16 nt, Human
ggugaccucugccuga

SEQ ID NO: 3339173 - RNA, 13 nt, Human
gguggcagcugcg

SEQ ID NO: 3339174 - RNA, 12 nt, Human
gguggcagcugc

SEQ ID NO: 3339175 - RNA, 13 nt, Human
gguggcagcucac

SEQ ID NO: 3339176 - RNA, 11 nt, Human
gguggcagcug

SEQ ID NO: 3339177 - RNA, 23 nt, Human
gguggcagcugcgguccacccag

SEQ ID NO: 3339178 - RNA, 15 nt, Human
gguggcagcugcggu

SEQ ID NO: 3339179 - RNA, 23 nt, Human
ggugcuaucucccccagccccau

SEQ ID NO: 3339180 - RNA, 21 nt, Human
ggugcuaucucccccagcccc

SEQ ID NO: 3339181 - RNA, 22 nt, Human
ggugcuaucucccccagcccca

SEQ ID NO: 3339182 - RNA, 15 nt, Human
ggugcgaucuggguu

SEQ ID NO: 3339183 - RNA, 14 nt, Human
gggcuucaguggca

SEQ ID NO: 3339184 - RNA, 16 nt, Human
gggcugaggugggagg

SEQ ID NO: 3339185 - RNA, 14 nt, Human
gggcugcaccggcu

SEQ ID NO: 3339186 - RNA, 15 nt, Human
gggcucugccuccca

SEQ ID NO: 3339187 - RNA, 16 nt, Human
gggcucugccucccau

SEQ ID NO: 3339188 - RNA, 17 nt, Human
gggcucugccucccauc

SEQ ID NO: 3339189 - RNA, 20 nt, Human
gggcucugccucccaucacc

SEQ ID NO: 3339190 - RNA, 13 nt, Human
gggcucugccucc

SEQ ID NO: 3339191 - RNA, 18 nt, Human
gggccuggucguuuucaa

SEQ ID NO: 3339192 - RNA, 14 nt, Human
gggccuggcucagg

SEQ ID NO: 3339193 - RNA, 16 nt, Human
gggccuggcucaggug

SEQ ID NO: 3339194 - RNA, 12 nt, Human
gggccuggcuca

SEQ ID NO: 3339195 - RNA, 19 nt, Human
gggccuggccugagcuggg

SEQ ID NO: 3339196 - RNA, 14 nt, Human
gggcucccuuccca

SEQ ID NO: 3339197 - RNA, 17 nt, Human
gggcucccuucccaccu

SEQ ID NO: 3339198 - RNA, 18 nt, Human
gggcucccuucccaccuc

SEQ ID NO: 3339199 - RNA, 23 nt, Human
gggcucccuucccaccucucuca

SEQ ID NO: 3339200 - RNA, 13 nt, Human
gggcucccuuccc

SEQ ID NO: 3339201 - RNA, 16 nt, Human
gggcgcgguggcucac

SEQ ID NO: 3339202 - RNA, 13 nt, Human
ggggcugggacau

SEQ ID NO: 3339203 - RNA, 16 nt, Human
ggggcugggcagagga

SEQ ID NO: 3339204 - RNA, 17 nt, Human
ggggcugggcagaggaa

SEQ ID NO: 3339205 - RNA, 23 nt, Human
ggggcugcaccggcuggccuggc

SEQ ID NO: 3339206 - RNA, 18 nt, Human
ggguacccacugcucugg

SEQ ID NO: 3339207 - RNA, 15 nt, Human
ggguacccacugcuc

SEQ ID NO: 3339208 - RNA, 13 nt, Human
ggguacccacugc

SEQ ID NO: 3339209 - RNA, 23 nt, Human
ggguagagcggagaaaggaaggg

SEQ ID NO: 3339210 - RNA, 23 nt, Human
ggguacuuguggacacagcucuu

SEQ ID NO: 3339211 - RNA, 22 nt, Human
ggguacuuguggacacagcucu

SEQ ID NO: 3339212 - RNA, 19 nt, Human
ggguacuuguggacacagc

SEQ ID NO: 3339213 - RNA, 23 nt, Human
gggguucccuuuuuuggcugcug

SEQ ID NO: 3339214 - RNA, 19 nt, Human
gggcuucauccuccucaga

SEQ ID NO: 3339215 - RNA, 20 nt, Human
gggcuucaguggcagcugcu

SEQ ID NO: 3339216 - RNA, 19 nt, Human
gggcuucaguggcagcugc

SEQ ID NO: 3339217 - RNA, 18 nt, Human
gggcuucaguggcagcug

SEQ ID NO: 3339218 - RNA, 17 nt, Human
gggcuucaguggcagcu

SEQ ID NO: 3339219 - RNA, 16 nt, Human
gggcuucaguggcagc

SEQ ID NO: 3339220 - RNA, 15 nt, Human
gggcuucaguggcag

SEQ ID NO: 3339221 - RNA, 20 nt, Human
gggcuucauccuccucagau

SEQ ID NO: 3339222 - RNA, 20 nt, Human
gggcuuggggaccagagcug

SEQ ID NO: 3339223 - RNA, 13 nt, Human
ggggaguggccac

SEQ ID NO: 3339224 - RNA, 21 nt, Human
gggcuuggggaccagagcugc

SEQ ID NO: 3339225 - RNA, 11 nt, Human
ggggagaaagu

SEQ ID NO: 3339226 - RNA, 17 nt, Human
ggggaucacagccucug

SEQ ID NO: 3339227 - RNA, 23 nt, Human
guaaauuaacuuuuauaaacuuu

SEQ ID NO: 3339228 - RNA, 20 nt, Human
guaaggaauaccuguccccc

SEQ ID NO: 3339229 - RNA, 21 nt, Human
guaaggaauaccugucccccu

SEQ ID NO: 3339230 - RNA, 23 nt, Human
guaaggaauaccugucccccuga

SEQ ID NO: 3339231 - RNA, 13 nt, Human
guaaggaaugauu

SEQ ID NO: 3339232 - RNA, 18 nt, Human
guaaggaauaccuguccc

SEQ ID NO: 3339233 - RNA, 22 nt, Human
guaaguauucuuauuuaaugaa

SEQ ID NO: 3339234 - RNA, 19 nt, Human
guaaaugggggugcauuug

SEQ ID NO: 3339235 - RNA, 20 nt, Human
guaaaugggggugcauuuga

SEQ ID NO: 3339236 - RNA, 18 nt, Human
guaaaugggggugcauuu

SEQ ID NO: 3339237 - RNA, 16 nt, Human
guaaauuaacuuuuau

SEQ ID NO: 3339238 - RNA, 17 nt, Human
guaaauuaacuuuuaua

SEQ ID NO: 3339239 - RNA, 21 nt, Human
guaaauuaacuuuuauaaacu

SEQ ID NO: 3339240 - RNA, 22 nt, Human
guaaauuaacuuuuauaaacuu

SEQ ID NO: 3339241 - RNA, 15 nt, Human
guaaauuaacuuuua

SEQ ID NO: 3339242 - RNA, 23 nt, Human
gguuuugccauguuggccaggcu

SEQ ID NO: 3339243 - RNA, 12 nt, Human
gguuuucuguuc

SEQ ID NO: 3339244 - RNA, 13 nt, Human
gguuuucuguucu

SEQ ID NO: 3339245 - RNA, 15 nt, Human
gguuuucuguucuuu

SEQ ID NO: 3339246 - RNA, 14 nt, Human
gguugaagcaccaa

SEQ ID NO: 3339247 - RNA, 22 nt, Human
gguucaagcgauucuucugcuu

SEQ ID NO: 3339248 - RNA, 20 nt, Human
gguucacugcaaccuccgcc

SEQ ID NO: 3339249 - RNA, 21 nt, Human
gguucaagcgauucuucugcu

SEQ ID NO: 3339250 - RNA, 13 nt, Human
gguggccucccaa

SEQ ID NO: 3339251 - RNA, 13 nt, Human
gguuuaagcuguu

SEQ ID NO: 3339252 - RNA, 13 nt, Human
gguuggugggggc

SEQ ID NO: 3339253 - RNA, 14 nt, Human
gguugggcuggugu

SEQ ID NO: 3339254 - RNA, 20 nt, Human
guacauaaugcgugcauacc

SEQ ID NO: 3339255 - RNA, 15 nt, Human
guacccacugcucug

SEQ ID NO: 3339256 - RNA, 12 nt, Human
guacagagccca

SEQ ID NO: 3339257 - RNA, 18 nt, Human
guacagagcccacgcccc

SEQ ID NO: 3339258 - RNA, 22 nt, Human
guacagagcccacgcccccacu

SEQ ID NO: 3339259 - RNA, 20 nt, Human
guacagcaaggagauuuaca

SEQ ID NO: 3339260 - RNA, 16 nt, Human
guacagacaacaaacc

SEQ ID NO: 3339261 - RNA, 19 nt, Human
guacacuguuucaaacuuu

SEQ ID NO: 3339262 - RNA, 20 nt, Human
guacacuguuucaaacuuua

SEQ ID NO: 3339263 - RNA, 21 nt, Human
guacacuguuucaaacuuuac

SEQ ID NO: 3339264 - RNA, 21 nt, Human
guaauuaaguacuauguauca

SEQ ID NO: 3339265 - RNA, 20 nt, Human
guaauuaaguacuauguauc

SEQ ID NO: 3339266 - RNA, 17 nt, Human
guaauuaaguacuaugu

SEQ ID NO: 3339267 - RNA, 14 nt, Human
guaauuaaguacua

SEQ ID NO: 3339268 - RNA, 18 nt, Human
guacacuguuucaaacuu

SEQ ID NO: 3339269 - RNA, 21 nt, Human
guacuucuccacccugcucuc

SEQ ID NO: 3339270 - RNA, 20 nt, Human
guacuucuccacccugcucu

SEQ ID NO: 3339271 - RNA, 19 nt, Human
guacuucuccacccugcuc

SEQ ID NO: 3339272 - RNA, 18 nt, Human
guacuucuccacccugcu

SEQ ID NO: 3339273 - RNA, 17 nt, Human
guacuucuccacccugc

SEQ ID NO: 3339274 - RNA, 16 nt, Human
guacuucuccacccug

SEQ ID NO: 3339275 - RNA, 20 nt, Human
guacuuguggacacagcucu

SEQ ID NO: 3339276 - RNA, 16 nt, Human
guacuuguggacacag

SEQ ID NO: 3339277 - RNA, 21 nt, Human
guacuuguggacacagcucuu

SEQ ID NO: 3339278 - RNA, 18 nt, Human
guagagccagggucucac

SEQ ID NO: 3339279 - RNA, 16 nt, Human
guagagcggagaaagg

SEQ ID NO: 3339280 - RNA, 17 nt, Human
guacguugugcauuugg

SEQ ID NO: 3339281 - RNA, 23 nt, Human
guacuaaggaaucuuucugcuuu

SEQ ID NO: 3339282 - RNA, 15 nt, Human
guacuaaggaaucuu

SEQ ID NO: 3339283 - RNA, 15 nt, Human
guacuucuccacccu

SEQ ID NO: 3339284 - RNA, 14 nt, Human
guacuucuccaccc

SEQ ID NO: 3339285 - RNA, 15 nt, Human
guacguugugcauuu

SEQ ID NO: 3339286 - RNA, 16 nt, Human
guacguugugcauuug

SEQ ID NO: 3339287 - RNA, 14 nt, Human
guacguugugcauu

SEQ ID NO: 3339288 - RNA, 17 nt, Human
guacgucugacaggcaa

SEQ ID NO: 3339289 - RNA, 15 nt, Human
guacgucugacaggc

SEQ ID NO: 3339290 - RNA, 14 nt, Human
guacgucugacagg

SEQ ID NO: 3339291 - RNA, 13 nt, Human
guaccucuugagc

SEQ ID NO: 3339292 - RNA, 21 nt, Human
guaccucuugagccuugaacu

SEQ ID NO: 3339293 - RNA, 22 nt, Human
guaccucuugagccuugaacuu

SEQ ID NO: 3339294 - RNA, 16 nt, Human
guacccacugcucugg

SEQ ID NO: 3339295 - RNA, 18 nt, Human
gcuucaguggcagcugcu

SEQ ID NO: 3339296 - RNA, 17 nt, Human
gcuucaguggcagcugc

SEQ ID NO: 3339297 - RNA, 12 nt, Human
gcuucauccucc

SEQ ID NO: 3339298 - RNA, 15 nt, Human
gcuucauccuccuca

SEQ ID NO: 3339299 - RNA, 16 nt, Human
gcuucauuuccugugu

SEQ ID NO: 3339300 - RNA, 13 nt, Human
gcuucauuuccug

SEQ ID NO: 3339301 - RNA, 12 nt, Human
gcuuauacacuu

SEQ ID NO: 3339302 - RNA, 13 nt, Human
gcuuaucucaggg

SEQ ID NO: 3339303 - RNA, 19 nt, Human
gcuuaucucaggggugugc

SEQ ID NO: 3339304 - RNA, 15 nt, Human
gcuucaguggcagcu

SEQ ID NO: 3339305 - RNA, 16 nt, Human
gcuucaguggcagcug

SEQ ID NO: 3339306 - RNA, 16 nt, Human
gcuuccagugaggcuc

SEQ ID NO: 3339307 - RNA, 17 nt, Human
gcuucauuuccuguguc

SEQ ID NO: 3339308 - RNA, 15 nt, Human
gcuuccagugaggcu

SEQ ID NO: 3339309 - RNA, 16 nt, Human
gcuugaggguugggcu

SEQ ID NO: 3339310 - RNA, 15 nt, Human
gcuuagucacugaga

SEQ ID NO: 3339311 - RNA, 17 nt, Human
gcuuagucacugagaca

SEQ ID NO: 3339312 - RNA, 21 nt, Human
gcuuagucacugagacagccc

SEQ ID NO: 3339313 - RNA, 19 nt, Human
gcuuagucacugagacagc

SEQ ID NO: 3339314 - RNA, 20 nt, Human
gcuuagucacugagacagcc

SEQ ID NO: 3339315 - RNA, 14 nt, Human
gcuguucagcuggu

SEQ ID NO: 3339316 - RNA, 13 nt, Human
gcuguucagcugg

SEQ ID NO: 3339317 - RNA, 15 nt, Human
gcugccaaugggagc

SEQ ID NO: 3339318 - RNA, 16 nt, Human
gcugccaaugggagcu

SEQ ID NO: 3339319 - RNA, 19 nt, Human
gcugccaaugggagcucau

SEQ ID NO: 3339320 - RNA, 22 nt, Human
ggaaaggcuccaggagcagcca

SEQ ID NO: 3339321 - RNA, 17 nt, Human
ggaaaggcuccaggagc

SEQ ID NO: 3339322 - RNA, 19 nt, Human
ggaaaggcuccaggagcag

SEQ ID NO: 3339323 - RNA, 20 nt, Human
ggaaaggcuccaggagcagc

SEQ ID NO: 3339324 - RNA, 21 nt, Human
ggaaaggcuccaggagcagcc

SEQ ID NO: 3339325 - RNA, 12 nt, Human
ggaaaggcucca

SEQ ID NO: 3339326 - RNA, 13 nt, Human
ggaaaggcuccag

SEQ ID NO: 3339327 - RNA, 14 nt, Human
ggaaaggcuccagg

SEQ ID NO: 3339328 - RNA, 19 nt, Human
ggaaaaucagccugcucca

SEQ ID NO: 3339329 - RNA, 15 nt, Human
ggaaaaucagccugc

SEQ ID NO: 3339330 - RNA, 23 nt, Human
ggaaaaucagccugcuccagcug

SEQ ID NO: 3339331 - RNA, 16 nt, Human
ggaacaggaaacugau

SEQ ID NO: 3339332 - RNA, 21 nt, Human
ggaaaucaccgaaaacguggc

SEQ ID NO: 3339333 - RNA, 14 nt, Human
ggaaaucaccgaaa

SEQ ID NO: 3339334 - RNA, 14 nt, Human
ggaaaagcugcuga

SEQ ID NO: 3339335 - RNA, 20 nt, Human
ggaaaagcugcugacagugu

SEQ ID NO: 3339336 - RNA, 18 nt, Human
ggaaaagcugcugacagu

SEQ ID NO: 3339337 - RNA, 18 nt, Human
ggaaaacaugcuacacac

SEQ ID NO: 3339338 - RNA, 21 nt, Human
gcuuuguuuguugucagcuga

SEQ ID NO: 3339339 - RNA, 20 nt, Human
gcuugaggguugggcuggug

SEQ ID NO: 3339340 - RNA, 18 nt, Human
gcuugaggguugggcugg

SEQ ID NO: 3339341 - RNA, 15 nt, Human
gcuuugugauuuuug

SEQ ID NO: 3339342 - RNA, 22 nt, Human
ggacacuaaccacgcuggaccu

SEQ ID NO: 3339343 - RNA, 19 nt, Human
ggaauguuugccucugccu

SEQ ID NO: 3339344 - RNA, 24 nt, Human
ggaaugauuaauuaaaacacaaca

SEQ ID NO: 3339345 - RNA, 12 nt, Human
ggaaugcagugg

SEQ ID NO: 3339346 - RNA, 23 nt, Human
ggaaggggagauaaggguaucug

SEQ ID NO: 3339347 - RNA, 12 nt, Human
ggaaguacugga

SEQ ID NO: 3339348 - RNA, 16 nt, Human
ggaaguacuggagaaa

SEQ ID NO: 3339349 - RNA, 18 nt, Human
ggaaguacuggagaaaau

SEQ ID NO: 3339350 - RNA, 14 nt, Human
ggaaugauuaauua

SEQ ID NO: 3339351 - RNA, 20 nt, Human
ggacauugcggacagccacg

SEQ ID NO: 3339352 - RNA, 14 nt, Human
ggacauggacaagg

SEQ ID NO: 3339353 - RNA, 21 nt, Human
ggacagccacggccaggccag

SEQ ID NO: 3339354 - RNA, 20 nt, Human
ggacagccacggccaggcca

SEQ ID NO: 3339355 - RNA, 19 nt, Human
ggacagccacggccaggcc

SEQ ID NO: 3339356 - RNA, 15 nt, Human
ggacagccacggcca

SEQ ID NO: 3339357 - RNA, 20 nt, Human
ggacagaggggguggccucc

SEQ ID NO: 3339358 - RNA, 17 nt, Human
ggacacucaaaagcugg

SEQ ID NO: 3339359 - RNA, 19 nt, Human
ggacgcuacccgggaaggg

SEQ ID NO: 3339360 - RNA, 20 nt, Human
ggacgcuacccgggaagggg

SEQ ID NO: 3339361 - RNA, 17 nt, Human
ggacgcuacccgggaag

SEQ ID NO: 3339362 - RNA, 17 nt, Human
ggaccuugaacugggua

SEQ ID NO: 3339363 - RNA, 15 nt, Human
ggaccuugaacuggg

SEQ ID NO: 3339364 - RNA, 19 nt, Human
ggaccucaggugagaagca

SEQ ID NO: 3339365 - RNA, 20 nt, Human
ggaccucaggccugggggcu

SEQ ID NO: 3339366 - RNA, 23 nt, Human
ggaccucaggugagaagcagagg

SEQ ID NO: 3339367 - RNA, 13 nt, Human
ggaccagagcugc

SEQ ID NO: 3339368 - RNA, 17 nt, Human
ggagaagcggcuggcag

SEQ ID NO: 3339369 - RNA, 13 nt, Human
ggcagcucagaga

SEQ ID NO: 3339370 - RNA, 21 nt, Human
ggcagcucagagaggguggga

SEQ ID NO: 3339371 - RNA, 18 nt, Human
ggcagggucucacucugu

SEQ ID NO: 3339372 - RNA, 22 nt, Human
ggcagcugcuuuugucuauggg

SEQ ID NO: 3339373 - RNA, 12 nt, Human
ggcagcucaccu

SEQ ID NO: 3339374 - RNA, 14 nt, Human
ggcagcucaccucu

SEQ ID NO: 3339375 - RNA, 15 nt, Human
ggcaugaagacagau

SEQ ID NO: 3339376 - RNA, 18 nt, Human
ggcaugacacgaauauug

SEQ ID NO: 3339377 - RNA, 16 nt, Human
ggcagugggagcugcc

SEQ ID NO: 3339378 - RNA, 14 nt, Human
ggcagugggagcug

SEQ ID NO: 3339379 - RNA, 13 nt, Human
ggcagugggagcu

SEQ ID NO: 3339380 - RNA, 20 nt, Human
ggcagggucucacucugucg

SEQ ID NO: 3339381 - RNA, 19 nt, Human
ggcagggucucacucuguc

SEQ ID NO: 3339382 - RNA, 18 nt, Human
ggcauuccccaggaggcc

SEQ ID NO: 3339383 - RNA, 19 nt, Human
ggcauuccccaggaggcca

SEQ ID NO: 3339384 - RNA, 16 nt, Human
ggcauuccccaggagg

SEQ ID NO: 3339385 - RNA, 22 nt, Human
ggcaugggaaugaaugucagug

SEQ ID NO: 3339386 - RNA, 17 nt, Human
ggcauuccccaggaggc

SEQ ID NO: 3339387 - RNA, 18 nt, Human
ggcaugggaaugaauguc

SEQ ID NO: 3339388 - RNA, 23 nt, Human
ggccagcugcuugggcuucaucc

SEQ ID NO: 3339389 - RNA, 18 nt, Human
ggccaggcccucugccca

SEQ ID NO: 3339390 - RNA, 22 nt, Human
ggccagccuugaccauucucca

SEQ ID NO: 3339391 - RNA, 17 nt, Human
ggccagcugcuugggcu

SEQ ID NO: 3339392 - RNA, 20 nt, Human
ggccagccuugaccauucuc

SEQ ID NO: 3339393 - RNA, 16 nt, Human
ggccaugggccuccug

SEQ ID NO: 3339394 - RNA, 18 nt, Human
ggcaacccccagccugcu

SEQ ID NO: 3339395 - RNA, 23 nt, Human
ggcaaugcuggcuguuggcuggg

SEQ ID NO: 3339396 - RNA, 15 nt, Human
ggcaaugcuggcugu

SEQ ID NO: 3339397 - RNA, 14 nt, Human
ggcaaugcuggcug

SEQ ID NO: 3339398 - RNA, 22 nt, Human
ggcacccggccccugcugguuc

SEQ ID NO: 3339399 - RNA, 20 nt, Human
ggcacccggccccugcuggu

SEQ ID NO: 3339400 - RNA, 23 nt, Human
ggcacccaccaucaugucuggcu

SEQ ID NO: 3339401 - RNA, 20 nt, Human
ggcacccaccaucaugucug

SEQ ID NO: 3339402 - RNA, 17 nt, Human
ggauugcuacuguccua

SEQ ID NO: 3339403 - RNA, 17 nt, Human
ggcaacccccagccugc

SEQ ID NO: 3339404 - RNA, 16 nt, Human
ggcaacccccagccug

SEQ ID NO: 3339405 - RNA, 16 nt, Human
ggauucuuauggacaa

SEQ ID NO: 3339406 - RNA, 23 nt, Human
ggauuacaagcgugagccacugc

SEQ ID NO: 3339407 - RNA, 22 nt, Human
ggaucccucauccucauaccca

SEQ ID NO: 3339408 - RNA, 13 nt, Human
ggaucccucaucc

SEQ ID NO: 3339409 - RNA, 17 nt, Human
ggaucccucauccucau

SEQ ID NO: 3339410 - RNA, 23 nt, Human
ggagugaguugauagcacagacc

SEQ ID NO: 3339411 - RNA, 12 nt, Human
ggagugcaguga

SEQ ID NO: 3339412 - RNA, 14 nt, Human
ggagugcagugagc

SEQ ID NO: 3339413 - RNA, 18 nt, Human
ggauacaaaagcauguga

SEQ ID NO: 3339414 - RNA, 12 nt, Human
ggauccuccagg

SEQ ID NO: 3339415 - RNA, 13 nt, Human
ggauccuccaggu

SEQ ID NO: 3339416 - RNA, 23 nt, Human
ggaugcacagaguuguuacauuu

SEQ ID NO: 3339417 - RNA, 21 nt, Human
ggaugauuggaggggggaggu

SEQ ID NO: 3339418 - RNA, 16 nt, Human
ggaugcagccucacag

SEQ ID NO: 3339419 - RNA, 17 nt, Human
ggaugcagccucacagu

SEQ ID NO: 3339420 - RNA, 21 nt, Human
ggaugccugguggcagcugcg

SEQ ID NO: 3339421 - RNA, 19 nt, Human
ggaugcagccucacagucc

SEQ ID NO: 3339422 - RNA, 15 nt, Human
ggaugcuuguacaua

SEQ ID NO: 3339423 - RNA, 19 nt, Human
ggauuacaagcgugagcca

SEQ ID NO: 3339424 - RNA, 13 nt, Human
ggcccugccuccu

SEQ ID NO: 3339425 - RNA, 14 nt, Human
ggcccugccuccuu

SEQ ID NO: 3339426 - RNA, 15 nt, Human
ggcccugccuccuuu

SEQ ID NO: 3339427 - RNA, 21 nt, Human
ggcccucugcccacucccugc

SEQ ID NO: 3339428 - RNA, 19 nt, Human
ggcccucugcccacucccu

SEQ ID NO: 3339429 - RNA, 20 nt, Human
ggcccucugcccacucccug

SEQ ID NO: 3339430 - RNA, 13 nt, Human
ggcccucugccca

SEQ ID NO: 3339431 - RNA, 15 nt, Human
ggcccucugcccacu

SEQ ID NO: 3339432 - RNA, 16 nt, Human
ggcccucugcccacuc

SEQ ID NO: 3339433 - RNA, 17 nt, Human
ggcccucugcccacucc

SEQ ID NO: 3339434 - RNA, 11 nt, Human
ggcccagagag

SEQ ID NO: 3339435 - RNA, 13 nt, Human
ggccucugcacuc

SEQ ID NO: 3339436 - RNA, 14 nt, Human
ggccucugcacucc

SEQ ID NO: 3339437 - RNA, 15 nt, Human
ggccucugcacuccc

SEQ ID NO: 3339438 - RNA, 18 nt, Human
ggccucuuaugggcuggg

SEQ ID NO: 3339439 - RNA, 17 nt, Human
ggccucuuaugggcugg

SEQ ID NO: 3339440 - RNA, 23 nt, Human
ggccuagcauacguacacauuuu

SEQ ID NO: 3339441 - RNA, 18 nt, Human
ggcgcugccccuggcagc

SEQ ID NO: 3339442 - RNA, 19 nt, Human
ggcgcugccccuggcagcc

SEQ ID NO: 3339443 - RNA, 21 nt, Human
ggcgcugccccuggcagcccc

SEQ ID NO: 3339444 - RNA, 23 nt, Human
ggcgcugccccuggcagccccug

SEQ ID NO: 3339445 - RNA, 20 nt, Human
ggccugggggcugggcagag

SEQ ID NO: 3339446 - RNA, 14 nt, Human
ggccugggggcugg

SEQ ID NO: 3339447 - RNA, 19 nt, Human
ggccuggccugagcuggga

SEQ ID NO: 3339448 - RNA, 18 nt, Human
ggcuccaggagcagccac

SEQ ID NO: 3339449 - RNA, 15 nt, Human
ggcuccaggcuccuu

SEQ ID NO: 3339450 - RNA, 16 nt, Human
ggcuccaggcuccuuu

SEQ ID NO: 3339451 - RNA, 19 nt, Human
ggcuccaggagcagccaca

SEQ ID NO: 3339452 - RNA, 12 nt, Human
ggcuccaggagc

SEQ ID NO: 3339453 - RNA, 21 nt, Human
ggcucaaguccucuuuucuga

SEQ ID NO: 3339454 - RNA, 15 nt, Human
ggcucaaguccucuu

SEQ ID NO: 3339455 - RNA, 22 nt, Human
ggcuagagguucaaagauauuu

SEQ ID NO: 3339456 - RNA, 17 nt, Human
ggcuagagguucaaaga

SEQ ID NO: 3339457 - RNA, 16 nt, Human
ggcuagagguucaaag

SEQ ID NO: 3339458 - RNA, 16 nt, Human
ggcuaggaccccucca

SEQ ID NO: 3339459 - RNA, 22 nt, Human
ggcuaggaccccuccauguggg

SEQ ID NO: 3339460 - RNA, 23 nt, Human
ggcuagugugguguuuccuggca

SEQ ID NO: 3339461 - RNA, 15 nt, Human
ggcuaguugggcuuc

SEQ ID NO: 3339462 - RNA, 14 nt, Human
ggcuaugcauuuga

SEQ ID NO: 3339463 - RNA, 16 nt, Human
ggcuaguugggcuucc

SEQ ID NO: 3339464 - RNA, 15 nt, Human
ggcuaugcauuugaa

SEQ ID NO: 3339465 - RNA, 23 nt, Human
gcuccaggcuccuuuagcgccca

SEQ ID NO: 3339466 - RNA, 16 nt, Human
gcuccaggcuccuuua

SEQ ID NO: 3339467 - RNA, 11 nt, Human
gcuccagcugu

SEQ ID NO: 3339468 - RNA, 13 nt, Human
gcuccaggcuccu

SEQ ID NO: 3339469 - RNA, 16 nt, Human
gcuccaagcucccagg

SEQ ID NO: 3339470 - RNA, 17 nt, Human
gcuccaagcucccaggc

SEQ ID NO: 3339471 - RNA, 18 nt, Human
gcuccaagcucccaggca

SEQ ID NO: 3339472 - RNA, 19 nt, Human
gcuccaagcucccaggcau

SEQ ID NO: 3339473 - RNA, 21 nt, Human
gcuccaagcucccaggcauuc

SEQ ID NO: 3339474 - RNA, 21 nt, Human
gcuccagcucaccagccccag

SEQ ID NO: 3339475 - RNA, 14 nt, Human
gcuccaagcuccca

SEQ ID NO: 3339476 - RNA, 15 nt, Human
gcuccaagcucccag

SEQ ID NO: 3339477 - RNA, 13 nt, Human
gcuccaagcuccc

SEQ ID NO: 3339478 - RNA, 19 nt, Human
gcucaggugucccugcacu

SEQ ID NO: 3339479 - RNA, 17 nt, Human
gcucaggugucccugca

SEQ ID NO: 3339480 - RNA, 18 nt, Human
gcucaggugucccugcac

SEQ ID NO: 3339481 - RNA, 21 nt, Human
gcucagcggggacagcuccuu

SEQ ID NO: 3339482 - RNA, 15 nt, Human
gcucagcggggacag

SEQ ID NO: 3339483 - RNA, 19 nt, Human
gcucagcggggacagcucc

SEQ ID NO: 3339484 - RNA, 20 nt, Human
gcucagcggggacagcuccu

SEQ ID NO: 3339485 - RNA, 17 nt, Human
gcucagcaaaagaugcu

SEQ ID NO: 3339486 - RNA, 20 nt, Human
gcucagcaaaagaugcuucu

SEQ ID NO: 3339487 - RNA, 22 nt, Human
gcucagcaaaagaugcuucuca

SEQ ID NO: 3339488 - RNA, 23 nt, Human
gcucagcaaaagaugcuucucac

SEQ ID NO: 3339489 - RNA, 23 nt, Human
gcucaccagccccagugcccaca

SEQ ID NO: 3339490 - RNA, 20 nt, Human
gcucaccagccccagugccc

SEQ ID NO: 3339491 - RNA, 19 nt, Human
gcucaccagccccagugcc

SEQ ID NO: 3339492 - RNA, 18 nt, Human
gcucaccagccccagugc

SEQ ID NO: 3339493 - RNA, 16 nt, Human
gcgguccacccaggag

SEQ ID NO: 3339494 - RNA, 15 nt, Human
gcgggcuuccuccug

SEQ ID NO: 3339495 - RNA, 12 nt, Human
gcggggacagcu

SEQ ID NO: 3339496 - RNA, 19 nt, Human
gcgguccacccaggagccc

SEQ ID NO: 3339497 - RNA, 18 nt, Human
gcgguccacccaggagcc

SEQ ID NO: 3339498 - RNA, 23 nt, Human
gcgugagccacugcaccgggcca

SEQ ID NO: 3339499 - RNA, 18 nt, Human
gcgugagccacugcaccg

SEQ ID NO: 3339500 - RNA, 16 nt, Human
gcgugagccacugcac

SEQ ID NO: 3339501 - RNA, 21 nt, Human
gcuaagagggagggagggcuc

SEQ ID NO: 3339502 - RNA, 22 nt, Human
gcuaagagggagggagggcucc

SEQ ID NO: 3339503 - RNA, 13 nt, Human
gcuaaaugugaau

SEQ ID NO: 3339504 - RNA, 16 nt, Human
gcuaaaugugaaugau

SEQ ID NO: 3339505 - RNA, 16 nt, Human
gcuaucucccccagcc

SEQ ID NO: 3339506 - RNA, 17 nt, Human
gcuaucucccccagccc

SEQ ID NO: 3339507 - RNA, 18 nt, Human
gcuaucucccccagcccc

SEQ ID NO: 3339508 - RNA, 22 nt, Human
gcuagcagcagggagggcuucu

SEQ ID NO: 3339509 - RNA, 19 nt, Human
gcuaucucccccagcccca

SEQ ID NO: 3339510 - RNA, 20 nt, Human
gcuaucucccccagccccau

SEQ ID NO: 3339511 - RNA, 21 nt, Human
gcuaucucccccagccccauc

SEQ ID NO: 3339512 - RNA, 22 nt, Human
gcuaucucccccagccccaucc

SEQ ID NO: 3339513 - RNA, 23 nt, Human
gcuaucucccccagccccauccu

SEQ ID NO: 3339514 - RNA, 15 nt, Human
gcuaucucccccagc

SEQ ID NO: 3339515 - RNA, 19 nt, Human
gcuagagguucaaagauau

SEQ ID NO: 3339516 - RNA, 21 nt, Human
gcuagagguucaaagauauuu

SEQ ID NO: 3339517 - RNA, 18 nt, Human
gcuagagguucaaagaua

SEQ ID NO: 3339518 - RNA, 21 nt, Human
gcuacccgggaagggggcugg

SEQ ID NO: 3339519 - RNA, 20 nt, Human
gcuaccuuuguauucucucc

SEQ ID NO: 3339520 - RNA, 14 nt, Human
gcuacccgggaagg

SEQ ID NO: 3339521 - RNA, 15 nt, Human
gcuacccgggaaggg

SEQ ID NO: 3339522 - RNA, 23 nt, Human
gcuaagagggagggagggcucca

SEQ ID NO: 3339523 - RNA, 16 nt, Human
gcucuucuccaggcug

SEQ ID NO: 3339524 - RNA, 14 nt, Human
gcucuucuccaggc

SEQ ID NO: 3339525 - RNA, 19 nt, Human
gcucuuccaggcugggaga

SEQ ID NO: 3339526 - RNA, 18 nt, Human
gcucuuccaggcugggag

SEQ ID NO: 3339527 - RNA, 12 nt, Human
gcucuucuccag

SEQ ID NO: 3339528 - RNA, 22 nt, Human
gcucuuccaggcugggagagcc

SEQ ID NO: 3339529 - RNA, 20 nt, Human
gcugacagacacaggcccgg

SEQ ID NO: 3339530 - RNA, 21 nt, Human
gcugacagacacaggcccggc

SEQ ID NO: 3339531 - RNA, 18 nt, Human
gcugauggugcaaugacc

SEQ ID NO: 3339532 - RNA, 21 nt, Human
gcugauggugcaaugaccuuu

SEQ ID NO: 3339533 - RNA, 18 nt, Human
gcugcaguugccagucac

SEQ ID NO: 3339534 - RNA, 20 nt, Human
gcugcaguugccagucaccc

SEQ ID NO: 3339535 - RNA, 21 nt, Human
gcugcaguugccagucacccc

SEQ ID NO: 3339536 - RNA, 17 nt, Human
gcugcaguugccaguca

SEQ ID NO: 3339537 - RNA, 19 nt, Human
gcugagucugaaggcuggg

SEQ ID NO: 3339538 - RNA, 16 nt, Human
gcugagucugaaggcu

SEQ ID NO: 3339539 - RNA, 18 nt, Human
gcugagucugaaggcugg

SEQ ID NO: 3339540 - RNA, 15 nt, Human
gcugagucugaaggc

SEQ ID NO: 3339541 - RNA, 15 nt, Human
gcugauggugcaaug

SEQ ID NO: 3339542 - RNA, 16 nt, Human
gcugauggugcaauga

SEQ ID NO: 3339543 - RNA, 22 nt, Human
gcugagugggggaucacagccu

SEQ ID NO: 3339544 - RNA, 23 nt, Human
gcugagugggggaucacagccuc

SEQ ID NO: 3339545 - RNA, 23 nt, Human
gcucugcugacagacacaggccc

SEQ ID NO: 3339546 - RNA, 20 nt, Human
gcucugcugacagacacagg

SEQ ID NO: 3339547 - RNA, 19 nt, Human
gcucugcugacagacacag

SEQ ID NO: 3339548 - RNA, 18 nt, Human
gcucugcugacagacaca

SEQ ID NO: 3339549 - RNA, 14 nt, Human
gcucugcugacaga

SEQ ID NO: 3339550 - RNA, 13 nt, Human
gcucugcugacag

SEQ ID NO: 3339551 - RNA, 21 nt, Human
gcucugcuccucuccccagca

SEQ ID NO: 3339552 - RNA, 19 nt, Human
gcucugcuccucuccccag

SEQ ID NO: 3339553 - RNA, 22 nt, Human
gcucuggacaggcauguucucu

SEQ ID NO: 3339554 - RNA, 21 nt, Human
gcucuggacaggcauguucuc

SEQ ID NO: 3339555 - RNA, 16 nt, Human
gcucuggacaggcaug

SEQ ID NO: 3339556 - RNA, 15 nt, Human
gcucuggacaggcau

SEQ ID NO: 3339557 - RNA, 14 nt, Human
gcucuggacaggca

SEQ ID NO: 3339558 - RNA, 13 nt, Human
gcucugccuccca

SEQ ID NO: 3339559 - RNA, 14 nt, Human
gcucugccucccau

SEQ ID NO: 3339560 - RNA, 15 nt, Human
gcucugccucccauc

SEQ ID NO: 3339561 - RNA, 22 nt, Human
gcucugccucccaucacccgcu

SEQ ID NO: 3339562 - RNA, 14 nt, Human
gcucugcuccucuc

SEQ ID NO: 3339563 - RNA, 13 nt, Human
gcucugcuccucu

SEQ ID NO: 3339564 - RNA, 23 nt, Human
gcucugcccuugguuaggcauug

SEQ ID NO: 3339565 - RNA, 11 nt, Human
gcucugccucc

SEQ ID NO: 3339566 - RNA, 13 nt, Human
gcucugcccuugg

SEQ ID NO: 3339567 - RNA, 14 nt, Human
gcucugcccuuggu

SEQ ID NO: 3339568 - RNA, 21 nt, Human
gcuccuucuguccuacucugu

SEQ ID NO: 3339569 - RNA, 15 nt, Human
gcuccuucuguccua

SEQ ID NO: 3339570 - RNA, 16 nt, Human
gcucccuucccaccuc

SEQ ID NO: 3339571 - RNA, 18 nt, Human
gcucccuucccaccucuc

SEQ ID NO: 3339572 - RNA, 15 nt, Human
gcucccuucccaccu

SEQ ID NO: 3339573 - RNA, 16 nt, Human
gcucgagcaugccugg

SEQ ID NO: 3339574 - RNA, 17 nt, Human
gcucuccgaccagacac

SEQ ID NO: 3339575 - RNA, 13 nt, Human
gcucuccgaccag

SEQ ID NO: 3339576 - RNA, 19 nt, Human
gcucuccgaccagacaccu

SEQ ID NO: 3339577 - RNA, 16 nt, Human
gcccugagcuuucugc

SEQ ID NO: 3339578 - RNA, 14 nt, Human
gcccugagcuuucu

SEQ ID NO: 3339579 - RNA, 18 nt, Human
gcccggcuccaggcuccu

SEQ ID NO: 3339580 - RNA, 17 nt, Human
gcccggcuccaggcucc

SEQ ID NO: 3339581 - RNA, 15 nt, Human
gcagacucuacagag

SEQ ID NO: 3339582 - RNA, 21 nt, Human
gccccuguucuggcagaguug

SEQ ID NO: 3339583 - RNA, 17 nt, Human
gccccuguucuggcaga

SEQ ID NO: 3339584 - RNA, 15 nt, Human
gccccugccacccug

SEQ ID NO: 3339585 - RNA, 14 nt, Human
gccccugccacccu

SEQ ID NO: 3339586 - RNA, 13 nt, Human
gccccugccaccc

SEQ ID NO: 3339587 - RNA, 16 nt, Human
gcccggcuccaggcuc

SEQ ID NO: 3339588 - RNA, 15 nt, Human
gcccggcuccaggcu

SEQ ID NO: 3339589 - RNA, 18 nt, Human
gcccuucucuccagcccc

SEQ ID NO: 3339590 - RNA, 19 nt, Human
gcccuucucuccagccccu

SEQ ID NO: 3339591 - RNA, 21 nt, Human
gcccuucucuccagccccugg

SEQ ID NO: 3339592 - RNA, 22 nt, Human
gcccuucucuccagccccugga

SEQ ID NO: 3339593 - RNA, 18 nt, Human
gccgagauugcaccacug

SEQ ID NO: 3339594 - RNA, 17 nt, Human
gccgagauugcaccacu

SEQ ID NO: 3339595 - RNA, 18 nt, Human
gccgagaucacgccacug

SEQ ID NO: 3339596 - RNA, 16 nt, Human
gccgagaucacgccac

SEQ ID NO: 3339597 - RNA, 23 nt, Human
gcccugguggcagugggagcugc

SEQ ID NO: 3339598 - RNA, 22 nt, Human
gcccugguggcagugggagcug

SEQ ID NO: 3339599 - RNA, 21 nt, Human
gcccugguggcagugggagcu

SEQ ID NO: 3339600 - RNA, 20 nt, Human
gcccugguggcagugggagc

SEQ ID NO: 3339601 - RNA, 19 nt, Human
gcccugguggcagugggag

SEQ ID NO: 3339602 - RNA, 18 nt, Human
gcccugguggcaguggga

SEQ ID NO: 3339603 - RNA, 17 nt, Human
gcccugguggcaguggg

SEQ ID NO: 3339604 - RNA, 14 nt, Human
gcccugguggcagu

SEQ ID NO: 3339605 - RNA, 22 nt, Human
gccuggccagaugcaccagccc

SEQ ID NO: 3339606 - RNA, 15 nt, Human
gccuggccagaugca

SEQ ID NO: 3339607 - RNA, 14 nt, Human
gccuggccagaugc

SEQ ID NO: 3339608 - RNA, 15 nt, Human
gccugggcagaagga

SEQ ID NO: 3339609 - RNA, 15 nt, Human
gccuggauggggcug

SEQ ID NO: 3339610 - RNA, 14 nt, Human
gccuggauggggcu

SEQ ID NO: 3339611 - RNA, 11 nt, Human
gccugggcaga

SEQ ID NO: 3339612 - RNA, 16 nt, Human
gccugggcagaaggaa

SEQ ID NO: 3339613 - RNA, 17 nt, Human
gccugggcagaaggaag

SEQ ID NO: 3339614 - RNA, 20 nt, Human
gccugggggcugggcagagg

SEQ ID NO: 3339615 - RNA, 18 nt, Human
gccucugccucugacaca

SEQ ID NO: 3339616 - RNA, 22 nt, Human
gccugaagucacacagugaguc

SEQ ID NO: 3339617 - RNA, 18 nt, Human
gccugaagucacacagug

SEQ ID NO: 3339618 - RNA, 16 nt, Human
gccugcuccagcuguu

SEQ ID NO: 3339619 - RNA, 18 nt, Human
gccugcuccagcuguuca

SEQ ID NO: 3339620 - RNA, 13 nt, Human
gccugcuccagcu

SEQ ID NO: 3339621 - RNA, 15 nt, Human
gccugcuccagcugu

SEQ ID NO: 3339622 - RNA, 15 nt, Human
gccucccgaguagcu

SEQ ID NO: 3339623 - RNA, 23 nt, Human
gccucccgaauagcugggacuac

SEQ ID NO: 3339624 - RNA, 21 nt, Human
gccucccaacucaccccagcc

SEQ ID NO: 3339625 - RNA, 15 nt, Human
gccucagugccacua

SEQ ID NO: 3339626 - RNA, 22 nt, Human
gccucccaacucaccccagccc

SEQ ID NO: 3339627 - RNA, 23 nt, Human
gccucccaacucaccccagcccc

SEQ ID NO: 3339628 - RNA, 21 nt, Human
gccucccacgacugcccggca

SEQ ID NO: 3339629 - RNA, 14 nt, Human
gccucccacgacug

SEQ ID NO: 3339630 - RNA, 21 nt, Human
gccucccgaauagcugggacu

SEQ ID NO: 3339631 - RNA, 21 nt, Human
gccucacaguccuuaccagca

SEQ ID NO: 3339632 - RNA, 22 nt, Human
gccucagccucccaaagugcug

SEQ ID NO: 3339633 - RNA, 23 nt, Human
gccucagccucccaaagugcugg

SEQ ID NO: 3339634 - RNA, 14 nt, Human
gccucagugccacu

SEQ ID NO: 3339635 - RNA, 12 nt, Human
gccucagugcca

SEQ ID NO: 3339636 - RNA, 21 nt, Human
gccucaagugauucuccugcc

SEQ ID NO: 3339637 - RNA, 20 nt, Human
gccucaagugauucuccugc

SEQ ID NO: 3339638 - RNA, 19 nt, Human
gccucaagugauucuccug

SEQ ID NO: 3339639 - RNA, 16 nt, Human
gccucaaccuccuggg

SEQ ID NO: 3339640 - RNA, 14 nt, Human
gccucaaccuccug

SEQ ID NO: 3339641 - RNA, 19 nt, Human
gccgagauagccaaggcca

SEQ ID NO: 3339642 - RNA, 12 nt, Human
gccuaaguauua

SEQ ID NO: 3339643 - RNA, 14 nt, Human
gccuaaguauuaaa

SEQ ID NO: 3339644 - RNA, 18 nt, Human
gccuaaguauuaaaacau

SEQ ID NO: 3339645 - RNA, 15 nt, Human
gacucauucuucugu

SEQ ID NO: 3339646 - RNA, 14 nt, Human
gacucauucuucug

SEQ ID NO: 3339647 - RNA, 21 nt, Human
gacuacaggugugagucacca

SEQ ID NO: 3339648 - RNA, 18 nt, Human
gacuacaggugugaguca

SEQ ID NO: 3339649 - RNA, 13 nt, Human
gacuacaggugug

SEQ ID NO: 3339650 - RNA, 12 nt, Human
gacuccugcagg

SEQ ID NO: 3339651 - RNA, 13 nt, Human
gacuccugcaggc

SEQ ID NO: 3339652 - RNA, 21 nt, Human
gacuccugcaggcagccaggc

SEQ ID NO: 3339653 - RNA, 13 nt, Human
gacucgcgacaau

SEQ ID NO: 3339654 - RNA, 18 nt, Human
gacuggaagcacagcuuc

SEQ ID NO: 3339655 - RNA, 16 nt, Human
gacuggaagcacagcu

SEQ ID NO: 3339656 - RNA, 15 nt, Human
gacuggaagcacagc

SEQ ID NO: 3339657 - RNA, 14 nt, Human
gacuggaagcacag

SEQ ID NO: 3339658 - RNA, 17 nt, Human
gacucgcgacaaugcaa

SEQ ID NO: 3339659 - RNA, 21 nt, Human
gacugaguacguugugcauuu

SEQ ID NO: 3339660 - RNA, 22 nt, Human
gacugaguacguugugcauuug

SEQ ID NO: 3339661 - RNA, 18 nt, Human
gacugaguacguugugca

SEQ ID NO: 3339662 - RNA, 15 nt, Human
gacugcccggcaggg

SEQ ID NO: 3339663 - RNA, 13 nt, Human
gacugcccggcag

SEQ ID NO: 3339664 - RNA, 23 nt, Human
gacugaguacguugugcauuugg

SEQ ID NO: 3339665 - RNA, 19 nt, Human
gacuuaagcacacuugaca

SEQ ID NO: 3339666 - RNA, 16 nt, Human
gagaagagaaugcaca

SEQ ID NO: 3339667 - RNA, 16 nt, Human
gagaagcagaggaagg

SEQ ID NO: 3339668 - RNA, 14 nt, Human
gagaagagaaugca

SEQ ID NO: 3339669 - RNA, 16 nt, Human
gagaaagguugaagca

SEQ ID NO: 3339670 - RNA, 14 nt, Human
gagaaaugagcuug

SEQ ID NO: 3339671 - RNA, 19 nt, Human
gagccagggucucacuaug

SEQ ID NO: 3339672 - RNA, 23 nt, Human
gagccagauuucacucuccuugg

SEQ ID NO: 3339673 - RNA, 14 nt, Human
gagccagggucuca

SEQ ID NO: 3339674 - RNA, 18 nt, Human
gagcccugguggcagugg

SEQ ID NO: 3339675 - RNA, 19 nt, Human
gagccaauuuaaagaaaac

SEQ ID NO: 3339676 - RNA, 20 nt, Human
gagccagauuucacucuccu

SEQ ID NO: 3339677 - RNA, 12 nt, Human
gagcagagacca

SEQ ID NO: 3339678 - RNA, 16 nt, Human
gagcagagaauucucu

SEQ ID NO: 3339679 - RNA, 21 nt, Human
gagcaccuuagacagucccug

SEQ ID NO: 3339680 - RNA, 22 nt, Human
gagcaccuuagacagucccugc

SEQ ID NO: 3339681 - RNA, 15 nt, Human
gagcacuaaggugug

SEQ ID NO: 3339682 - RNA, 19 nt, Human
gagcaccuuagacaguccc

SEQ ID NO: 3339683 - RNA, 21 nt, Human
gagcacuaaggugugcucuga

SEQ ID NO: 3339684 - RNA, 20 nt, Human
gagcaccuuagacagucccu

SEQ ID NO: 3339685 - RNA, 23 nt, Human
gagcaagacgcugugcugcccug

SEQ ID NO: 3339686 - RNA, 16 nt, Human
gagauagccaaggcca

SEQ ID NO: 3339687 - RNA, 23 nt, Human
gagaucaaccccuucgcuccugu

SEQ ID NO: 3339688 - RNA, 14 nt, Human
gagauagccaaggc

SEQ ID NO: 3339689 - RNA, 18 nt, Human
gagaucacgccacugcac

SEQ ID NO: 3339690 - RNA, 19 nt, Human
gagaucacgccacugcacu

SEQ ID NO: 3339691 - RNA, 14 nt, Human
gagagggugggagu

SEQ ID NO: 3339692 - RNA, 16 nt, Human
gagagggugggagugg

SEQ ID NO: 3339693 - RNA, 13 nt, Human
gagaggggcacag

SEQ ID NO: 3339694 - RNA, 18 nt, Human
gagaggggaacagacugg

SEQ ID NO: 3339695 - RNA, 19 nt, Human
gagaggggaacagacugga

SEQ ID NO: 3339696 - RNA, 19 nt, Human
gagagagaaacaaacuuuu

SEQ ID NO: 3339697 - RNA, 20 nt, Human
gagacucgcgacaaugcaaa

SEQ ID NO: 3339698 - RNA, 21 nt, Human
gagacucgcgacaaugcaaac

SEQ ID NO: 3339699 - RNA, 18 nt, Human
gagacucgcgacaaugca

SEQ ID NO: 3339700 - RNA, 20 nt, Human
gagacuccugcaggcagcca

SEQ ID NO: 3339701 - RNA, 21 nt, Human
gagacuccugcaggcagccag

SEQ ID NO: 3339702 - RNA, 19 nt, Human
gagacuccugcaggcagcc

SEQ ID NO: 3339703 - RNA, 18 nt, Human
gagacuccugcaggcagc

SEQ ID NO: 3339704 - RNA, 13 nt, Human
gagagaaacaaac

SEQ ID NO: 3339705 - RNA, 18 nt, Human
gagaccaucccugaaggc

SEQ ID NO: 3339706 - RNA, 21 nt, Human
gagaccaucccugaaggcccc

SEQ ID NO: 3339707 - RNA, 14 nt, Human
gagaccaucccuga

SEQ ID NO: 3339708 - RNA, 12 nt, Human
gagaccaucccu

SEQ ID NO: 3339709 - RNA, 22 nt, Human
gagacaggguuuugccauguug

SEQ ID NO: 3339710 - RNA, 23 nt, Human
gagaaugcacaaacagaggccgc

SEQ ID NO: 3339711 - RNA, 22 nt, Human
gagaaugcacaaacagaggccg

SEQ ID NO: 3339712 - RNA, 22 nt, Human
gaauuucuuuugccguuauuaa

SEQ ID NO: 3339713 - RNA, 22 nt, Human
gacaacacucauugaccugagg

SEQ ID NO: 3339714 - RNA, 23 nt, Human
gacaacacucauugaccugaggc

SEQ ID NO: 3339715 - RNA, 12 nt, Human
gacaaugugaaa

SEQ ID NO: 3339716 - RNA, 18 nt, Human
gacaaugugaaaagaaaa

SEQ ID NO: 3339717 - RNA, 22 nt, Human
gacaaugcaaaccaucauugaa

SEQ ID NO: 3339718 - RNA, 19 nt, Human
gacaaugugaaaagaaaaa

SEQ ID NO: 3339719 - RNA, 20 nt, Human
gacaaugugaaaagaaaaau

SEQ ID NO: 3339720 - RNA, 19 nt, Human
gacaaggauugcuacuguc

SEQ ID NO: 3339721 - RNA, 18 nt, Human
gacaaugcaaaccaucau

SEQ ID NO: 3339722 - RNA, 21 nt, Human
gacaaggaugaucuaggaaga

SEQ ID NO: 3339723 - RNA, 18 nt, Human
gacaaggauugcuacugu

SEQ ID NO: 3339724 - RNA, 19 nt, Human
gacacaugcaaggucauuu

SEQ ID NO: 3339725 - RNA, 15 nt, Human
gacacauguccaaga

SEQ ID NO: 3339726 - RNA, 20 nt, Human
gacacauguccaagaagccc

SEQ ID NO: 3339727 - RNA, 23 nt, Human
gacacauguccaagaagcccagg

SEQ ID NO: 3339728 - RNA, 21 nt, Human
gacacaggcccggcuccaggc

SEQ ID NO: 3339729 - RNA, 20 nt, Human
gacacaggcccggcuccagg

SEQ ID NO: 3339730 - RNA, 14 nt, Human
gacacaugcaaggu

SEQ ID NO: 3339731 - RNA, 16 nt, Human
gacacaagccuucggc

SEQ ID NO: 3339732 - RNA, 19 nt, Human
gacacaggcccggcuccag

SEQ ID NO: 3339733 - RNA, 21 nt, Human
gaaugcacaaacagaggccgc

SEQ ID NO: 3339734 - RNA, 20 nt, Human
gaaugcacaaacagaggccg

SEQ ID NO: 3339735 - RNA, 21 nt, Human
gaaugaaagggcccagagagg

SEQ ID NO: 3339736 - RNA, 20 nt, Human
gaauccagacccggcugcgu

SEQ ID NO: 3339737 - RNA, 18 nt, Human
gaauccagacccggcugc

SEQ ID NO: 3339738 - RNA, 14 nt, Human
gaauugaagcagga

SEQ ID NO: 3339739 - RNA, 13 nt, Human
gaccagagcugcc

SEQ ID NO: 3339740 - RNA, 14 nt, Human
gaccagagcugcca

SEQ ID NO: 3339741 - RNA, 15 nt, Human
gaccagagcugccac

SEQ ID NO: 3339742 - RNA, 17 nt, Human
gaccagagcugccaccu

SEQ ID NO: 3339743 - RNA, 18 nt, Human
gaccagagcugccaccug

SEQ ID NO: 3339744 - RNA, 21 nt, Human
gaccauucuccaccugccagg

SEQ ID NO: 3339745 - RNA, 22 nt, Human
gaccauucuccaccugccaggg

SEQ ID NO: 3339746 - RNA, 17 nt, Human
gaccauucuccaccugc

SEQ ID NO: 3339747 - RNA, 19 nt, Human
gaccauucuccaccugcca

SEQ ID NO: 3339748 - RNA, 20 nt, Human
gaccauucuccaccugccag

SEQ ID NO: 3339749 - RNA, 18 nt, Human
gacaugggaaaggggaag

SEQ ID NO: 3339750 - RNA, 11 nt, Human
gaccagagcug

SEQ ID NO: 3339751 - RNA, 24 nt, Human
gaccagacaccuugacagggcaca

SEQ ID NO: 3339752 - RNA, 14 nt, Human
gaccacguuucuaa

SEQ ID NO: 3339753 - RNA, 15 nt, Human
gaccgugaggccaga

SEQ ID NO: 3339754 - RNA, 18 nt, Human
gaccgugaggccagagac

SEQ ID NO: 3339755 - RNA, 16 nt, Human
gaccgugaggccagag

SEQ ID NO: 3339756 - RNA, 17 nt, Human
gaccgugaggccagaga

SEQ ID NO: 3339757 - RNA, 15 nt, Human
gacccuugugguccc

SEQ ID NO: 3339758 - RNA, 21 nt, Human
gacccuuguggucccacccca

SEQ ID NO: 3339759 - RNA, 19 nt, Human
gacccuuguggucccaccc

SEQ ID NO: 3339760 - RNA, 20 nt, Human
gacccuuguggucccacccc

SEQ ID NO: 3339761 - RNA, 12 nt, Human
gacccugucuca

SEQ ID NO: 3339762 - RNA, 22 nt, Human
gacccugaggcccagagggccu

SEQ ID NO: 3339763 - RNA, 21 nt, Human
gaccccuccaugugggcuagu

SEQ ID NO: 3339764 - RNA, 18 nt, Human
gaccccuccaugugggcu

SEQ ID NO: 3339765 - RNA, 14 nt, Human
gaccccuccaugug

SEQ ID NO: 3339766 - RNA, 23 nt, Human
gacccugaggcccagagggccug

SEQ ID NO: 3339767 - RNA, 13 nt, Human
gaccccuccaugu

SEQ ID NO: 3339768 - RNA, 21 nt, Human
gacagagcaagugagacccug

SEQ ID NO: 3339769 - RNA, 16 nt, Human
gacagaggcagcccca

SEQ ID NO: 3339770 - RNA, 14 nt, Human
gacagaggcagccc

SEQ ID NO: 3339771 - RNA, 12 nt, Human
gacagaggcagc

SEQ ID NO: 3339772 - RNA, 21 nt, Human
gacagaggggguggccuccca

SEQ ID NO: 3339773 - RNA, 22 nt, Human
gacagaggggguggccucccaa

SEQ ID NO: 3339774 - RNA, 19 nt, Human
gacagagugagacucuguc

SEQ ID NO: 3339775 - RNA, 23 nt, Human
gacagaggggguggccucccaac

SEQ ID NO: 3339776 - RNA, 18 nt, Human
gacagaggggguggccuc

SEQ ID NO: 3339777 - RNA, 19 nt, Human
gacagaggggguggccucc

SEQ ID NO: 3339778 - RNA, 15 nt, Human
gacagaggggguggc

SEQ ID NO: 3339779 - RNA, 17 nt, Human
gacagaggcagccccau

SEQ ID NO: 3339780 - RNA, 16 nt, Human
gacagcugccugggau

SEQ ID NO: 3339781 - RNA, 17 nt, Human
gacagcugccugggauc

SEQ ID NO: 3339782 - RNA, 21 nt, Human
gacagccacggccaggccaga

SEQ ID NO: 3339783 - RNA, 20 nt, Human
gacagccacggccaggccag

SEQ ID NO: 3339784 - RNA, 18 nt, Human
gacagcugccugggaucc

SEQ ID NO: 3339785 - RNA, 19 nt, Human
gacagccacggccaggcca

SEQ ID NO: 3339786 - RNA, 18 nt, Human
gacagccacggccaggcc

SEQ ID NO: 3339787 - RNA, 17 nt, Human
gacagccacggccaggc

SEQ ID NO: 3339788 - RNA, 14 nt, Human
gacagccacggcca

SEQ ID NO: 3339789 - RNA, 22 nt, Human
gacagagugagacucugucuca

SEQ ID NO: 3339790 - RNA, 20 nt, Human
gacagagugagacucugucu

SEQ ID NO: 3339791 - RNA, 13 nt, Human
gacagagggggug

SEQ ID NO: 3339792 - RNA, 13 nt, Human
gacagccacggcc

SEQ ID NO: 3339793 - RNA, 14 nt, Human
gacaguuaagagaa

SEQ ID NO: 3339794 - RNA, 23 nt, Human
gacagggcacaccgggcacucag

SEQ ID NO: 3339795 - RNA, 16 nt, Human
gacagggaggugaccc

SEQ ID NO: 3339796 - RNA, 15 nt, Human
gacaggaccagggau

SEQ ID NO: 3339797 - RNA, 23 nt, Human
gacaggaccagggauuuccauga

SEQ ID NO: 3339798 - RNA, 14 nt, Human
gacaggaccaggga

SEQ ID NO: 3339799 - RNA, 14 nt, Human
gacaugggaaaggg

SEQ ID NO: 3339800 - RNA, 14 nt, Human
gacaugaucuucuu

SEQ ID NO: 3339801 - RNA, 23 nt, Human
gacauacuaaccagcagaaaugc

SEQ ID NO: 3339802 - RNA, 13 nt, Human
gaguuacagacaa

SEQ ID NO: 3339803 - RNA, 15 nt, Human
gaguuacagacaaag

SEQ ID NO: 3339804 - RNA, 19 nt, Human
gaguucaucuugaauugua

SEQ ID NO: 3339805 - RNA, 14 nt, Human
gaguucaucuugaa

SEQ ID NO: 3339806 - RNA, 20 nt, Human
gaguucauacccuguuacca

SEQ ID NO: 3339807 - RNA, 15 nt, Human
gaguugaagacagag

SEQ ID NO: 3339808 - RNA, 17 nt, Human
gaguugaagacagagcu

SEQ ID NO: 3339809 - RNA, 21 nt, Human
gaguugaagacagagcuacac

SEQ ID NO: 3339810 - RNA, 14 nt, Human
gaguugaagacaga

SEQ ID NO: 3339811 - RNA, 23 nt, Human
gagugggggaucacagccucuga

SEQ ID NO: 3339812 - RNA, 13 nt, Human
gagugggugaaua

SEQ ID NO: 3339813 - RNA, 12 nt, Human
gaguuacagaca

SEQ ID NO: 3339814 - RNA, 17 nt, Human
gagugugccugaagucc

SEQ ID NO: 3339815 - RNA, 20 nt, Human
gagugugccugaagucccag

SEQ ID NO: 3339816 - RNA, 16 nt, Human
gaucacggcucacugc

SEQ ID NO: 3339817 - RNA, 15 nt, Human
gaucacggcucacug

SEQ ID NO: 3339818 - RNA, 18 nt, Human
gaucacggcucacugcag

SEQ ID NO: 3339819 - RNA, 12 nt, Human
gaucacggcuca

SEQ ID NO: 3339820 - RNA, 22 nt, Human
gauagccaaggccaaaggaagc

SEQ ID NO: 3339821 - RNA, 14 nt, Human
gauagccaaggcca

SEQ ID NO: 3339822 - RNA, 15 nt, Human
gauagcacagacccu

SEQ ID NO: 3339823 - RNA, 22 nt, Human
gauaagaaccuuuugagugccu

SEQ ID NO: 3339824 - RNA, 20 nt, Human
gauacaggaaaagcugcuga

SEQ ID NO: 3339825 - RNA, 21 nt, Human
gauacaggaaaagcugcugac

SEQ ID NO: 3339826 - RNA, 19 nt, Human
gauacaggaaaagcugcug

SEQ ID NO: 3339827 - RNA, 15 nt, Human
gagguugggaggcca

SEQ ID NO: 3339828 - RNA, 17 nt, Human
gagguugggaggccauu

SEQ ID NO: 3339829 - RNA, 16 nt, Human
gagguuucaaaccucc

SEQ ID NO: 3339830 - RNA, 20 nt, Human
gaggucagagccugcaguua

SEQ ID NO: 3339831 - RNA, 17 nt, Human
gaggucagagccugcag

SEQ ID NO: 3339832 - RNA, 20 nt, Human
gaguacuacaguccucccau

SEQ ID NO: 3339833 - RNA, 21 nt, Human
gaguacuacaguccucccauc

SEQ ID NO: 3339834 - RNA, 23 nt, Human
gaguacuacaguccucccaucuc

SEQ ID NO: 3339835 - RNA, 13 nt, Human
gaguaggaagacu

SEQ ID NO: 3339836 - RNA, 17 nt, Human
gaguaggaagacuuugg

SEQ ID NO: 3339837 - RNA, 12 nt, Human
gaguaggaagac

SEQ ID NO: 3339838 - RNA, 22 nt, Human
gaguagcugggacuacaggcac

SEQ ID NO: 3339839 - RNA, 19 nt, Human
gaguagcugggacuacagg

SEQ ID NO: 3339840 - RNA, 14 nt, Human
gagucgaggacagg

SEQ ID NO: 3339841 - RNA, 19 nt, Human
gaguccgaaagggacuugg

SEQ ID NO: 3339842 - RNA, 15 nt, Human
gagucgaggacaggg

SEQ ID NO: 3339843 - RNA, 18 nt, Human
gaguaggaagacuuugga

SEQ ID NO: 3339844 - RNA, 19 nt, Human
gaguaggaagacuuuggaa

SEQ ID NO: 3339845 - RNA, 11 nt, Human
gaguauauguc

SEQ ID NO: 3339846 - RNA, 12 nt, Human
gagucugaaggc

SEQ ID NO: 3339847 - RNA, 13 nt, Human
gagucugaaggcu

SEQ ID NO: 3339848 - RNA, 14 nt, Human
gagucugaaggcug

SEQ ID NO: 3339849 - RNA, 16 nt, Human
gagugacagaggcagc

SEQ ID NO: 3339850 - RNA, 15 nt, Human
gagugacagaggcag

SEQ ID NO: 3339851 - RNA, 14 nt, Human
gagugacagaggca

SEQ ID NO: 3339852 - RNA, 17 nt, Human
gagugaagcugggagaa

SEQ ID NO: 3339853 - RNA, 20 nt, Human
gaggcugggcucccuuccca

SEQ ID NO: 3339854 - RNA, 19 nt, Human
gagggagggcuccagacac

SEQ ID NO: 3339855 - RNA, 20 nt, Human
gagggagggcuccagacaca

SEQ ID NO: 3339856 - RNA, 16 nt, Human
gagggagggcuccaga

SEQ ID NO: 3339857 - RNA, 16 nt, Human
gagggagugacagagg

SEQ ID NO: 3339858 - RNA, 18 nt, Human
gagggagugacagaggca

SEQ ID NO: 3339859 - RNA, 22 nt, Human
gagggagugacagaggcagccc

SEQ ID NO: 3339860 - RNA, 21 nt, Human
gagggagugacagaggcagcc

SEQ ID NO: 3339861 - RNA, 13 nt, Human
gaggguaaggcug

SEQ ID NO: 3339862 - RNA, 15 nt, Human
gaggggguggccucc

SEQ ID NO: 3339863 - RNA, 17 nt, Human
gaggggguggccuccca

SEQ ID NO: 3339864 - RNA, 14 nt, Human
gagggucugaggaa

SEQ ID NO: 3339865 - RNA, 13 nt, Human
gagggucugagga

SEQ ID NO: 3339866 - RNA, 22 nt, Human
gagggugucccaaaaagaaagg

SEQ ID NO: 3339867 - RNA, 21 nt, Human
gaggguggugaccucugccug

SEQ ID NO: 3339868 - RNA, 15 nt, Human
gagggugggaguggg

SEQ ID NO: 3339869 - RNA, 14 nt, Human
gaggguggugaccu

SEQ ID NO: 3339870 - RNA, 21 nt, Human
gagggugaagugaagacaaug

SEQ ID NO: 3339871 - RNA, 12 nt, Human
gaggguggaaua

SEQ ID NO: 3339872 - RNA, 17 nt, Human
gaggucaaggcugcagu

SEQ ID NO: 3339873 - RNA, 13 nt, Human
gaggucagagccu

SEQ ID NO: 3339874 - RNA, 12 nt, Human
gaggucagagcc

SEQ ID NO: 3339875 - RNA, 21 nt, Human
gagguaaggaauaccuguccc

SEQ ID NO: 3339876 - RNA, 24 nt, Human
gagguaaggaauaccugucccccu

SEQ ID NO: 3339877 - RNA, 15 nt, Human
gaggguugggcuggu

SEQ ID NO: 3339878 - RNA, 14 nt, Human
gaggguugggcugg

SEQ ID NO: 3339879 - RNA, 13 nt, Human
gaggaucucuuga

SEQ ID NO: 3339880 - RNA, 16 nt, Human
gaggaucucuugagcc

SEQ ID NO: 3339881 - RNA, 19 nt, Human
gaggaucucuugagccugg

SEQ ID NO: 3339882 - RNA, 22 nt, Human
gaggaucucuugagccugggag

SEQ ID NO: 3339883 - RNA, 16 nt, Human
gaggauugcuugagcu

SEQ ID NO: 3339884 - RNA, 20 nt, Human
gaggauugcuugagcucagg

SEQ ID NO: 3339885 - RNA, 23 nt, Human
gaggccaugggccuccugugugu

SEQ ID NO: 3339886 - RNA, 21 nt, Human
gaggccaugggccuccugugu

SEQ ID NO: 3339887 - RNA, 20 nt, Human
gaggccaugggccuccugug

SEQ ID NO: 3339888 - RNA, 18 nt, Human
gaggccaugggccuccug

SEQ ID NO: 3339889 - RNA, 17 nt, Human
gaggccaugggccuccu

SEQ ID NO: 3339890 - RNA, 14 nt, Human
gaggccaugggccu

SEQ ID NO: 3339891 - RNA, 18 nt, Human
gaggcagccccauucugc

SEQ ID NO: 3339892 - RNA, 19 nt, Human
gaggcagccccauucugcc

SEQ ID NO: 3339893 - RNA, 9 nt, Human
gaggcaggg

SEQ ID NO: 3339894 - RNA, 20 nt, Human
gaggcagccccauucugccu

SEQ ID NO: 3339895 - RNA, 11 nt, Human
gaggcccagag

SEQ ID NO: 3339896 - RNA, 13 nt, Human
gaggcccagaggg

SEQ ID NO: 3339897 - RNA, 14 nt, Human
gaggcccagagggc

SEQ ID NO: 3339898 - RNA, 19 nt, Human
gaggcccagagggccugca

SEQ ID NO: 3339899 - RNA, 15 nt, Human
gaggcccagagggcc

SEQ ID NO: 3339900 - RNA, 16 nt, Human
gaggcccagagggccu

SEQ ID NO: 3339901 - RNA, 21 nt, Human
gaggcccuucucuccagcccc

SEQ ID NO: 3339902 - RNA, 15 nt, Human
gaggcccuucucucc

SEQ ID NO: 3339903 - RNA, 20 nt, Human
gaggcccuucucuccagccc

SEQ ID NO: 3339904 - RNA, 14 nt, Human
gaggcccuucucuc

SEQ ID NO: 3339905 - RNA, 16 nt, Human
gaggcugggcucccuu

SEQ ID NO: 3339906 - RNA, 14 nt, Human
gaggcugccucucc

SEQ ID NO: 3339907 - RNA, 19 nt, Human
gaggccuucucugaaggac

SEQ ID NO: 3339908 - RNA, 18 nt, Human
gaggccuucucugaagga

SEQ ID NO: 3339909 - RNA, 14 nt, Human
gaggccuucucuga

SEQ ID NO: 3339910 - RNA, 16 nt, Human
gaggccuucucugaag

SEQ ID NO: 3339911 - RNA, 18 nt, Human
gcacaagcuccaagcucc

SEQ ID NO: 3339912 - RNA, 15 nt, Human
gcacaagcuccaagc

SEQ ID NO: 3339913 - RNA, 17 nt, Human
gcacaagcuccaagcuc

SEQ ID NO: 3339914 - RNA, 20 nt, Human
gcacagaaaauggaagacag

SEQ ID NO: 3339915 - RNA, 20 nt, Human
gcacaccgggcacucagaag

SEQ ID NO: 3339916 - RNA, 15 nt, Human
gcacagaguuguuac

SEQ ID NO: 3339917 - RNA, 22 nt, Human
gcacagacccugcccugugggc

SEQ ID NO: 3339918 - RNA, 18 nt, Human
gcacagacccugcccugu

SEQ ID NO: 3339919 - RNA, 19 nt, Human
gcacagacccugcccugug

SEQ ID NO: 3339920 - RNA, 20 nt, Human
gcacagacccugcccugugg

SEQ ID NO: 3339921 - RNA, 21 nt, Human
gcacagacccugcccuguggg

SEQ ID NO: 3339922 - RNA, 14 nt, Human
gcacagacccugcc

SEQ ID NO: 3339923 - RNA, 15 nt, Human
gcacagacccugccc

SEQ ID NO: 3339924 - RNA, 16 nt, Human
gcacagacccugcccu

SEQ ID NO: 3339925 - RNA, 17 nt, Human
gcacagacccugcccug

SEQ ID NO: 3339926 - RNA, 21 nt, Human
gcacagaaaauggaagacagc

SEQ ID NO: 3339927 - RNA, 22 nt, Human
gcacagaaaauggaagacagcu

SEQ ID NO: 3339928 - RNA, 23 nt, Human
gcacagaaaauggaagacagcuc

SEQ ID NO: 3339929 - RNA, 14 nt, Human
gcaaugugauaaaa

SEQ ID NO: 3339930 - RNA, 14 nt, Human
gcaacucaucuuag

SEQ ID NO: 3339931 - RNA, 15 nt, Human
gcaauggcagccuug

SEQ ID NO: 3339932 - RNA, 14 nt, Human
gcaauggcagccuu

SEQ ID NO: 3339933 - RNA, 14 nt, Human
gcacaaacagaggc

SEQ ID NO: 3339934 - RNA, 15 nt, Human
gcacaaacagaggcc

SEQ ID NO: 3339935 - RNA, 16 nt, Human
gcacaaacagaggccg

SEQ ID NO: 3339936 - RNA, 12 nt, Human
gcaccauaacuu

SEQ ID NO: 3339937 - RNA, 20 nt, Human
gcaccuuagacagucccugc

SEQ ID NO: 3339938 - RNA, 21 nt, Human
gcaccuuagacagucccugcc

SEQ ID NO: 3339939 - RNA, 13 nt, Human
gcacgauuucugu

SEQ ID NO: 3339940 - RNA, 15 nt, Human
gcacgauuucuguuu

SEQ ID NO: 3339941 - RNA, 19 nt, Human
gcaccuuagacagucccug

SEQ ID NO: 3339942 - RNA, 16 nt, Human
gcacagaguuguuaca

SEQ ID NO: 3339943 - RNA, 18 nt, Human
gcacagaguuguuacauu

SEQ ID NO: 3339944 - RNA, 19 nt, Human
gcacagaguuguuacauuu

SEQ ID NO: 3339945 - RNA, 21 nt, Human
gcacagaguuguuacauuuuu

SEQ ID NO: 3339946 - RNA, 22 nt, Human
gcacagaguuguuacauuuuua

SEQ ID NO: 3339947 - RNA, 18 nt, Human
gcagacaggaccagggau

SEQ ID NO: 3339948 - RNA, 12 nt, Human
gcagacaggcaa

SEQ ID NO: 3339949 - RNA, 13 nt, Human
gcagacaggcaag

SEQ ID NO: 3339950 - RNA, 18 nt, Human
gcagaaggaagacuucau

SEQ ID NO: 3339951 - RNA, 16 nt, Human
gcacgauuucuguuua

SEQ ID NO: 3339952 - RNA, 23 nt, Human
gcacugcuuccagugaggcucug

SEQ ID NO: 3339953 - RNA, 22 nt, Human
gcacugcuuccagugaggcucu

SEQ ID NO: 3339954 - RNA, 12 nt, Human
gcaaaccaucau

SEQ ID NO: 3339955 - RNA, 21 nt, Human
gauuuugaaauuuuuauuaaa

SEQ ID NO: 3339956 - RNA, 19 nt, Human
gauuuugauccaagcuggu

SEQ ID NO: 3339957 - RNA, 13 nt, Human
gauuuaacagaaa

SEQ ID NO: 3339958 - RNA, 14 nt, Human
gauuuaacagaaau

SEQ ID NO: 3339959 - RNA, 12 nt, Human
gauuuaaaucag

SEQ ID NO: 3339960 - RNA, 15 nt, Human
gauuuaacagaaaug

SEQ ID NO: 3339961 - RNA, 22 nt, Human
gauuuccguuaaaauaccagcc

SEQ ID NO: 3339962 - RNA, 18 nt, Human
gauuuccguuaaaauacc

SEQ ID NO: 3339963 - RNA, 24 nt, Human
gauggggcccugccuccuuuguga

SEQ ID NO: 3339964 - RNA, 21 nt, Human
gaugggcaacccccagccugc

SEQ ID NO: 3339965 - RNA, 20 nt, Human
gaugggcaacccccagccug

SEQ ID NO: 3339966 - RNA, 15 nt, Human
gauggggcugcaccg

SEQ ID NO: 3339967 - RNA, 13 nt, Human
gauggggcugcac

SEQ ID NO: 3339968 - RNA, 19 nt, Human
gaugggugcuuggaggaag

SEQ ID NO: 3339969 - RNA, 19 nt, Human
gaugcccaaagaugcagcc

SEQ ID NO: 3339970 - RNA, 20 nt, Human
gaugcccaaagaugcagccg

SEQ ID NO: 3339971 - RNA, 15 nt, Human
gauggugcaaugacc

SEQ ID NO: 3339972 - RNA, 16 nt, Human
gauggugcaaugaccu

SEQ ID NO: 3339973 - RNA, 12 nt, Human
gauggugcaaug

SEQ ID NO: 3339974 - RNA, 14 nt, Human
gauggugcaaugac

SEQ ID NO: 3339975 - RNA, 21 nt, Human
gauuacaagcgugagccacug

SEQ ID NO: 3339976 - RNA, 23 nt, Human
gauuacaagcgugagccacugca

SEQ ID NO: 3339977 - RNA, 15 nt, Human
gauuaaacuuaaucu

SEQ ID NO: 3339978 - RNA, 22 nt, Human
gauuacaagcgugagccacugc

SEQ ID NO: 3339979 - RNA, 23 nt, Human
gauguuuuccaugaguccccugu

SEQ ID NO: 3339980 - RNA, 22 nt, Human
cuuuaccuuuuuuauacauaaa

SEQ ID NO: 3339981 - RNA, 13 nt, Human
cuuuacuauggcc

SEQ ID NO: 3339982 - RNA, 15 nt, Human
cuuuaugcacaaaau

SEQ ID NO: 3339983 - RNA, 19 nt, Human
cuuuauaauucuacuuuga

SEQ ID NO: 3339984 - RNA, 13 nt, Human
cuuuauaauucua

SEQ ID NO: 3339985 - RNA, 14 nt, Human
cuuuagcgcccagu

SEQ ID NO: 3339986 - RNA, 22 nt, Human
cuuguacauaaugcgugcauac

SEQ ID NO: 3339987 - RNA, 19 nt, Human
cuuguacauaaugcgugca

SEQ ID NO: 3339988 - RNA, 21 nt, Human
cuuguacauaaugcgugcaua

SEQ ID NO: 3339989 - RNA, 15 nt, Human
cuuguacauaaugcg

SEQ ID NO: 3339990 - RNA, 12 nt, Human
cuuguacauaau

SEQ ID NO: 3339991 - RNA, 18 nt, Human
cuuguaaauagcucaggu

SEQ ID NO: 3339992 - RNA, 17 nt, Human
cuuguaaauagcucagg

SEQ ID NO: 3339993 - RNA, 22 nt, Human
cuuggggggcugaggugggagg

SEQ ID NO: 3339994 - RNA, 16 nt, Human
cuuguaaauagcucag

SEQ ID NO: 3339995 - RNA, 23 nt, Human
cuuggggggcugaggugggagga

SEQ ID NO: 3339996 - RNA, 19 nt, Human
cuuuggcuauuagagauca

SEQ ID NO: 3339997 - RNA, 14 nt, Human
cuuuguccccaccg

SEQ ID NO: 3339998 - RNA, 19 nt, Human
cuuugugauuuuuguaauu

SEQ ID NO: 3339999 - RNA, 15 nt, Human
cuuugugaggaagcc

SEQ ID NO: 3340000 - RNA, 17 nt, Human
cuuugaccucugcagca

SEQ ID NO: 3340001 - RNA, 18 nt, Human
cuuugaccucugcagcaa

SEQ ID NO: 3340002 - RNA, 20 nt, Human
cuuugaccucugcagcaaua

SEQ ID NO: 3340003 - RNA, 24 nt, Human
cuuugaccucugcagcaauaaagc

SEQ ID NO: 3340004 - RNA, 14 nt, Human
cuuugaccucugca

SEQ ID NO: 3340005 - RNA, 15 nt, Human
cuuugaccucugcag

SEQ ID NO: 3340006 - RNA, 13 nt, Human
cuuugaccucugc

SEQ ID NO: 3340007 - RNA, 16 nt, Human
cuuugcagacaggcaa

SEQ ID NO: 3340008 - RNA, 20 nt, Human
cuuugcagacaggcaagcac

SEQ ID NO: 3340009 - RNA, 15 nt, Human
cuuuccaucuacccu

SEQ ID NO: 3340010 - RNA, 15 nt, Human
cuuuccaggaaggcu

SEQ ID NO: 3340011 - RNA, 16 nt, Human
cuuucccucccuuccu

SEQ ID NO: 3340012 - RNA, 14 nt, Human
cuuucccucccuuc

SEQ ID NO: 3340013 - RNA, 13 nt, Human
cuuucccucccuu

SEQ ID NO: 3340014 - RNA, 11 nt, Human
cuuucccuccc

SEQ ID NO: 3340015 - RNA, 12 nt, Human
cuuuccugaggc

SEQ ID NO: 3340016 - RNA, 16 nt, Human
cuuuccucuuuggucu

SEQ ID NO: 3340017 - RNA, 13 nt, Human
cuuuccugaggcu

SEQ ID NO: 3340018 - RNA, 15 nt, Human
cuuuccugaggcugg

SEQ ID NO: 3340019 - RNA, 17 nt, Human
cuuucuggcuaugcauu

SEQ ID NO: 3340020 - RNA, 18 nt, Human
cuuucuggcuaugcauuu

SEQ ID NO: 3340021 - RNA, 19 nt, Human
cuuucuggcuaugcauuug

SEQ ID NO: 3340022 - RNA, 20 nt, Human
cuuucuggcuaugcauuuga

SEQ ID NO: 3340023 - RNA, 20 nt, Human
cuuuuuuggcugcugaaggc

SEQ ID NO: 3340024 - RNA, 22 nt, Human
cuuuuuuggcugcugaaggcuc

SEQ ID NO: 3340025 - RNA, 17 nt, Human
cuuuuuuggcugcugaa

SEQ ID NO: 3340026 - RNA, 14 nt, Human
gaaaacacauuuuu

SEQ ID NO: 3340027 - RNA, 18 nt, Human
gaaaacacauuuuucuua

SEQ ID NO: 3340028 - RNA, 19 nt, Human
gaaaacacauuuuucuuag

SEQ ID NO: 3340029 - RNA, 12 nt, Human
gaaaaaggagga

SEQ ID NO: 3340030 - RNA, 15 nt, Human
gaaaaaggaggaaga

SEQ ID NO: 3340031 - RNA, 16 nt, Human
cuuuuuuggcugcuga

SEQ ID NO: 3340032 - RNA, 11 nt, Human
cuuuuguucuu

SEQ ID NO: 3340033 - RNA, 12 nt, Human
cuuuuguucuug

SEQ ID NO: 3340034 - RNA, 18 nt, Human
cuuuguuaguuucuccaa

SEQ ID NO: 3340035 - RNA, 20 nt, Human
gaaaacguggcugcuucaag

SEQ ID NO: 3340036 - RNA, 22 nt, Human
gaaaacguggcugcuucaagga

SEQ ID NO: 3340037 - RNA, 19 nt, Human
gaaaacguggcugcuucaa

SEQ ID NO: 3340038 - RNA, 19 nt, Human
gaaaagcugcugacagugu

SEQ ID NO: 3340039 - RNA, 22 nt, Human
gaaaacacuguucucugcccuc

SEQ ID NO: 3340040 - RNA, 24 nt, Human
gaaaacacuguucucugcccucca

SEQ ID NO: 3340041 - RNA, 20 nt, Human
gaaaaucagccugcuccagc

SEQ ID NO: 3340042 - RNA, 22 nt, Human
gaaaaucagccugcuccagcug

SEQ ID NO: 3340043 - RNA, 18 nt, Human
gaaaaucagccugcucca

SEQ ID NO: 3340044 - RNA, 15 nt, Human
gaaacccagcucugg

SEQ ID NO: 3340045 - RNA, 16 nt, Human
gaaacccagcucuggu

SEQ ID NO: 3340046 - RNA, 18 nt, Human
gaaacccagcucuggucc

SEQ ID NO: 3340047 - RNA, 19 nt, Human
gaaacccagcucuggucca

SEQ ID NO: 3340048 - RNA, 13 nt, Human
gaaacccagcucu

SEQ ID NO: 3340049 - RNA, 14 nt, Human
gaaacccagcucug

SEQ ID NO: 3340050 - RNA, 23 nt, Human
gaaacccagcucugguccauaga

SEQ ID NO: 3340051 - RNA, 15 nt, Human
gaaagaguaggaaga

SEQ ID NO: 3340052 - RNA, 17 nt, Human
gaaagacuguacaaagu

SEQ ID NO: 3340053 - RNA, 19 nt, Human
gaaagacuuuuccaacccu

SEQ ID NO: 3340054 - RNA, 21 nt, Human
gaaagcccugagcuuucugcu

SEQ ID NO: 3340055 - RNA, 22 nt, Human
gaaagcccugagcuuucugcua

SEQ ID NO: 3340056 - RNA, 17 nt, Human
gaaagcccugagcuuuc

SEQ ID NO: 3340057 - RNA, 15 nt, Human
cuuccaggcugggag

SEQ ID NO: 3340058 - RNA, 16 nt, Human
cuuccaggcugggaga

SEQ ID NO: 3340059 - RNA, 19 nt, Human
cuuccaggcugggagagcc

SEQ ID NO: 3340060 - RNA, 14 nt, Human
cuuccagggguggg

SEQ ID NO: 3340061 - RNA, 15 nt, Human
cuuccagggguggga

SEQ ID NO: 3340062 - RNA, 17 nt, Human
cuuccaggggugggaca

SEQ ID NO: 3340063 - RNA, 16 nt, Human
cuucaguaagccguga

SEQ ID NO: 3340064 - RNA, 23 nt, Human
cuucaguaagccgugauuuucau

SEQ ID NO: 3340065 - RNA, 16 nt, Human
cuucaguggcagcugc

SEQ ID NO: 3340066 - RNA, 15 nt, Human
cuucaguggcagcug

SEQ ID NO: 3340067 - RNA, 14 nt, Human
cuucaguggcagcu

SEQ ID NO: 3340068 - RNA, 13 nt, Human
cuucaguggcagc

SEQ ID NO: 3340069 - RNA, 18 nt, Human
cuucagugccuuauggaa

SEQ ID NO: 3340070 - RNA, 22 nt, Human
cuucagugccuuauggaacacu

SEQ ID NO: 3340071 - RNA, 14 nt, Human
cuucagugccuuau

SEQ ID NO: 3340072 - RNA, 15 nt, Human
cuucaguaagccgug

SEQ ID NO: 3340073 - RNA, 20 nt, Human
cuucauucaacccaccugcg

SEQ ID NO: 3340074 - RNA, 19 nt, Human
cuuccacaagagcccaggc

SEQ ID NO: 3340075 - RNA, 21 nt, Human
cuuccacaagagcccaggccu

SEQ ID NO: 3340076 - RNA, 17 nt, Human
cuuccacaagagcccag

SEQ ID NO: 3340077 - RNA, 16 nt, Human
cuuccacaagagccca

SEQ ID NO: 3340078 - RNA, 12 nt, Human
cuuccaggcugg

SEQ ID NO: 3340079 - RNA, 14 nt, Human
cuuccaggcuggga

SEQ ID NO: 3340080 - RNA, 23 nt, Human
cuucacagaugggugcuuggagg

SEQ ID NO: 3340081 - RNA, 13 nt, Human
cuucaaggauccu

SEQ ID NO: 3340082 - RNA, 15 nt, Human
cuucaaggauccuga

SEQ ID NO: 3340083 - RNA, 10 nt, Human
cuucaaggau

SEQ ID NO: 3340084 - RNA, 17 nt, Human
cuuauuuaaugaaagac

SEQ ID NO: 3340085 - RNA, 15 nt, Human
cuuauuuaaugaaag

SEQ ID NO: 3340086 - RNA, 18 nt, Human
cuuauuuaaugaaagacu

SEQ ID NO: 3340087 - RNA, 15 nt, Human
cuuauacauuugaua

SEQ ID NO: 3340088 - RNA, 18 nt, Human
cuuagucacugagacagc

SEQ ID NO: 3340089 - RNA, 19 nt, Human
cuuagucacugagacagcc

SEQ ID NO: 3340090 - RNA, 14 nt, Human
cuuagucacugaga

SEQ ID NO: 3340091 - RNA, 16 nt, Human
cuguucuggcagaguu

SEQ ID NO: 3340092 - RNA, 16 nt, Human
cuuagucacugagaca

SEQ ID NO: 3340093 - RNA, 13 nt, Human
cuuagauguauau

SEQ ID NO: 3340094 - RNA, 20 nt, Human
cuucugccauuucugagauc

SEQ ID NO: 3340095 - RNA, 13 nt, Human
cuucucugaagga

SEQ ID NO: 3340096 - RNA, 13 nt, Human
cuucucuccagcc

SEQ ID NO: 3340097 - RNA, 15 nt, Human
cuucucuccagcccc

SEQ ID NO: 3340098 - RNA, 17 nt, Human
cuucucuccagccccug

SEQ ID NO: 3340099 - RNA, 19 nt, Human
cuucucuccagccccugga

SEQ ID NO: 3340100 - RNA, 12 nt, Human
cuucucuccagc

SEQ ID NO: 3340101 - RNA, 13 nt, Human
cuucuccaggcug

SEQ ID NO: 3340102 - RNA, 12 nt, Human
cuucuccaggcu

SEQ ID NO: 3340103 - RNA, 11 nt, Human
cuucuccacuu

SEQ ID NO: 3340104 - RNA, 20 nt, Human
cuucuccacuuucuagccag

SEQ ID NO: 3340105 - RNA, 21 nt, Human
cuucuccacccugcucuccga

SEQ ID NO: 3340106 - RNA, 20 nt, Human
cuucuguacgucugacaggc

SEQ ID NO: 3340107 - RNA, 18 nt, Human
cuucuguacgucugacag

SEQ ID NO: 3340108 - RNA, 15 nt, Human
cuucuguacgucuga

SEQ ID NO: 3340109 - RNA, 14 nt, Human
cuucuguacgucug

SEQ ID NO: 3340110 - RNA, 21 nt, Human
cuucuguacgucugacaggca

SEQ ID NO: 3340111 - RNA, 19 nt, Human
cuucuguccuacucugugu

SEQ ID NO: 3340112 - RNA, 18 nt, Human
cuucuguccuacucugug

SEQ ID NO: 3340113 - RNA, 17 nt, Human
cuucuguccuacucugu

SEQ ID NO: 3340114 - RNA, 16 nt, Human
cuucuguccuacucug

SEQ ID NO: 3340115 - RNA, 21 nt, Human
cuucuguccuacucuguguca

SEQ ID NO: 3340116 - RNA, 14 nt, Human
cuugaaaacacugu

SEQ ID NO: 3340117 - RNA, 23 nt, Human
cuugaaaacacuguucucugccc

SEQ ID NO: 3340118 - RNA, 14 nt, Human
cuucuguggguuuc

SEQ ID NO: 3340119 - RNA, 21 nt, Human
cuucuguggguuucuaaagcu

SEQ ID NO: 3340120 - RNA, 13 nt, Human
cuucuguggguuu

SEQ ID NO: 3340121 - RNA, 20 nt, Human
cuugaggguugggcuggugu

SEQ ID NO: 3340122 - RNA, 19 nt, Human
cuugaggguugggcuggug

SEQ ID NO: 3340123 - RNA, 17 nt, Human
cuugaggguugggcugg

SEQ ID NO: 3340124 - RNA, 21 nt, Human
cuugaguugauucagcucugc

SEQ ID NO: 3340125 - RNA, 21 nt, Human
cuugaggguugggcugguguc

SEQ ID NO: 3340126 - RNA, 13 nt, Human
cuugagcucagga

SEQ ID NO: 3340127 - RNA, 15 nt, Human
cuugagccuugaacu

SEQ ID NO: 3340128 - RNA, 17 nt, Human
cuugagccuugaacuuu

SEQ ID NO: 3340129 - RNA, 16 nt, Human
cuugagccugggaggu

SEQ ID NO: 3340130 - RNA, 21 nt, Human
cuugaccauucuccaccugcc

SEQ ID NO: 3340131 - RNA, 17 nt, Human
cuugaccgugaggccag

SEQ ID NO: 3340132 - RNA, 22 nt, Human
cuugaccauucuccaccugcca

SEQ ID NO: 3340133 - RNA, 23 nt, Human
cuugaccauucuccaccugccag

SEQ ID NO: 3340134 - RNA, 18 nt, Human
cuugaccgugaggccaga

SEQ ID NO: 3340135 - RNA, 20 nt, Human
cuugaccgugaggccagaga

SEQ ID NO: 3340136 - RNA, 21 nt, Human
cuugaccgugaggccagagac

SEQ ID NO: 3340137 - RNA, 13 nt, Human
cuugaccucaggu

SEQ ID NO: 3340138 - RNA, 17 nt, Human
cuugaacuuugaccucu

SEQ ID NO: 3340139 - RNA, 21 nt, Human
cuugaacuuugaccucugcag

SEQ ID NO: 3340140 - RNA, 13 nt, Human
cuugaacuccugg

SEQ ID NO: 3340141 - RNA, 15 nt, Human
cuugaacuuugaccu

SEQ ID NO: 3340142 - RNA, 13 nt, Human
cuguucucugccc

SEQ ID NO: 3340143 - RNA, 14 nt, Human
cuguucucugcccu

SEQ ID NO: 3340144 - RNA, 15 nt, Human
cuguucucugcccuc

SEQ ID NO: 3340145 - RNA, 16 nt, Human
cuguucucugcccucc

SEQ ID NO: 3340146 - RNA, 17 nt, Human
cuguucucugcccucca

SEQ ID NO: 3340147 - RNA, 18 nt, Human
cuguucucugcccuccaa

SEQ ID NO: 3340148 - RNA, 19 nt, Human
cuguucucugcccuccaag

SEQ ID NO: 3340149 - RNA, 20 nt, Human
cuguucucugcccuccaaga

SEQ ID NO: 3340150 - RNA, 18 nt, Human
cuguucagcugguugagg

SEQ ID NO: 3340151 - RNA, 19 nt, Human
cuguucagcugguugaggu

SEQ ID NO: 3340152 - RNA, 21 nt, Human
cuguucagcugguugagguuu

SEQ ID NO: 3340153 - RNA, 22 nt, Human
cugugucuugcaauggcagccu

SEQ ID NO: 3340154 - RNA, 20 nt, Human
cugugucuugcaauggcagc

SEQ ID NO: 3340155 - RNA, 21 nt, Human
cugugucuugcaauggcagcc

SEQ ID NO: 3340156 - RNA, 20 nt, Human
cugugugugcgccuacagga

SEQ ID NO: 3340157 - RNA, 18 nt, Human
cugugugugcgccuacag

SEQ ID NO: 3340158 - RNA, 17 nt, Human
cuguggaugauaaaaca

SEQ ID NO: 3340159 - RNA, 14 nt, Human
cugugggcccccaa

SEQ ID NO: 3340160 - RNA, 16 nt, Human
cugugccucugggacu

SEQ ID NO: 3340161 - RNA, 14 nt, Human
cugugccucuggga

SEQ ID NO: 3340162 - RNA, 21 nt, Human
cugugcugcccugcccaccug

SEQ ID NO: 3340163 - RNA, 17 nt, Human
cugugccucugggacug

SEQ ID NO: 3340164 - RNA, 22 nt, Human
cugugcugcccugcccaccugg

SEQ ID NO: 3340165 - RNA, 18 nt, Human
cugugccaugugccaggu

SEQ ID NO: 3340166 - RNA, 16 nt, Human
cugugccaugugccag

SEQ ID NO: 3340167 - RNA, 14 nt, Human
cugugccauuuugu

SEQ ID NO: 3340168 - RNA, 15 nt, Human
cugugccaugugcca

SEQ ID NO: 3340169 - RNA, 19 nt, Human
cugugauggggcccugccu

SEQ ID NO: 3340170 - RNA, 18 nt, Human
cugugauggggcccugcc

SEQ ID NO: 3340171 - RNA, 17 nt, Human
cugugauggggcccugc

SEQ ID NO: 3340172 - RNA, 20 nt, Human
cugugaguacuacaguccuc

SEQ ID NO: 3340173 - RNA, 21 nt, Human
cugugaguacuacaguccucc

SEQ ID NO: 3340174 - RNA, 23 nt, Human
cugugaguacuacaguccuccca

SEQ ID NO: 3340175 - RNA, 18 nt, Human
cugucuccauguuugaug

SEQ ID NO: 3340176 - RNA, 13 nt, Human
cuguacagagccc

SEQ ID NO: 3340177 - RNA, 22 nt, Human
cuguaucccaugagccucagca

SEQ ID NO: 3340178 - RNA, 23 nt, Human
cuguaucccaugagccucagcau

SEQ ID NO: 3340179 - RNA, 17 nt, Human
cuguccccgcacugggc

SEQ ID NO: 3340180 - RNA, 18 nt, Human
cuguccccgcacugggcu

SEQ ID NO: 3340181 - RNA, 19 nt, Human
cuguccccgcacugggcuu

SEQ ID NO: 3340182 - RNA, 22 nt, Human
cuguccccgcacugggcuuggg

SEQ ID NO: 3340183 - RNA, 14 nt, Human
cuguccgagcuuug

SEQ ID NO: 3340184 - RNA, 20 nt, Human
cugucccuuacgugaguccu

SEQ ID NO: 3340185 - RNA, 18 nt, Human
cugucucaaaaaaagaaa

SEQ ID NO: 3340186 - RNA, 16 nt, Human
cugucucaaaaaaaga

SEQ ID NO: 3340187 - RNA, 23 nt, Human
cugucucaaaaaaacacaaaagu

SEQ ID NO: 3340188 - RNA, 15 nt, Human
cuguccgagcuuuga

SEQ ID NO: 3340189 - RNA, 14 nt, Human
cuguccuacccacc

SEQ ID NO: 3340190 - RNA, 22 nt, Human
cuggguaacuagggaagauaau

SEQ ID NO: 3340191 - RNA, 20 nt, Human
cuggguaacuagggaagaua

SEQ ID NO: 3340192 - RNA, 14 nt, Human
cuggguucuaccca

SEQ ID NO: 3340193 - RNA, 15 nt, Human
cuggguucuacccag

SEQ ID NO: 3340194 - RNA, 16 nt, Human
cuggguucuacccagg

SEQ ID NO: 3340195 - RNA, 17 nt, Human
cuggguucuacccaggu

SEQ ID NO: 3340196 - RNA, 24 nt, Human
cugggcuucaguggcagcugcuuu

SEQ ID NO: 3340197 - RNA, 23 nt, Human
cugggcuucaguggcagcugcuu

SEQ ID NO: 3340198 - RNA, 13 nt, Human
cugggggaagaag

SEQ ID NO: 3340199 - RNA, 15 nt, Human
cugggggaagaagcu

SEQ ID NO: 3340200 - RNA, 18 nt, Human
cugggggcugggcagagg

SEQ ID NO: 3340201 - RNA, 19 nt, Human
cugggggcugggcagagga

SEQ ID NO: 3340202 - RNA, 13 nt, Human
cugguggcagcug

SEQ ID NO: 3340203 - RNA, 21 nt, Human
cugguggcagcucaccucucc

SEQ ID NO: 3340204 - RNA, 23 nt, Human
cugguggcagcucaccucucccu

SEQ ID NO: 3340205 - RNA, 13 nt, Human
cuguacaaaguag

SEQ ID NO: 3340206 - RNA, 22 nt, Human
cuguaauuugugauacaaugcu

SEQ ID NO: 3340207 - RNA, 15 nt, Human
cuguacaaaguagaa

SEQ ID NO: 3340208 - RNA, 20 nt, Human
cuguaauccuagcacuuugg

SEQ ID NO: 3340209 - RNA, 19 nt, Human
cuguaauccuagcacuuug

SEQ ID NO: 3340210 - RNA, 16 nt, Human
cugguuccauggccuc

SEQ ID NO: 3340211 - RNA, 15 nt, Human
cugccucuucucuac

SEQ ID NO: 3340212 - RNA, 14 nt, Human
cugccucuucucua

SEQ ID NO: 3340213 - RNA, 17 nt, Human
cugccugcccaggcccc

SEQ ID NO: 3340214 - RNA, 16 nt, Human
cugccugcccaggccc

SEQ ID NO: 3340215 - RNA, 15 nt, Human
cugccugcccaggcc

SEQ ID NO: 3340216 - RNA, 15 nt, Human
cugccugaagucaca

SEQ ID NO: 3340217 - RNA, 21 nt, Human
cugccugggaucccucauccu

SEQ ID NO: 3340218 - RNA, 20 nt, Human
cugccugcccaggccccugc

SEQ ID NO: 3340219 - RNA, 23 nt, Human
cugccucugacacacagcucugu

SEQ ID NO: 3340220 - RNA, 22 nt, Human
cugccucugacacacagcucug

SEQ ID NO: 3340221 - RNA, 11 nt, Human
cugccucccau

SEQ ID NO: 3340222 - RNA, 12 nt, Human
cugccucccauc

SEQ ID NO: 3340223 - RNA, 14 nt, Human
cugccucccaucac

SEQ ID NO: 3340224 - RNA, 16 nt, Human
cugccucccaucaccc

SEQ ID NO: 3340225 - RNA, 19 nt, Human
cugccucccaucacccgcu

SEQ ID NO: 3340226 - RNA, 12 nt, Human
cugcccuccaag

SEQ ID NO: 3340227 - RNA, 14 nt, Human
cucccuucccaccu

SEQ ID NO: 3340228 - RNA, 15 nt, Human
cucccuucccaccuc

SEQ ID NO: 3340229 - RNA, 16 nt, Human
cucccuucccaccucu

SEQ ID NO: 3340230 - RNA, 17 nt, Human
cucccuucccaccucuc

SEQ ID NO: 3340231 - RNA, 17 nt, Human
cugccgcagcccugcag

SEQ ID NO: 3340232 - RNA, 18 nt, Human
cugccgcagcccugcaga

SEQ ID NO: 3340233 - RNA, 14 nt, Human
cugccgcagcccug

SEQ ID NO: 3340234 - RNA, 15 nt, Human
cugccgcagcccugc

SEQ ID NO: 3340235 - RNA, 19 nt, Human
cugcucuccgaccagacac

SEQ ID NO: 3340236 - RNA, 19 nt, Human
cugcuccagcuguucagcu

SEQ ID NO: 3340237 - RNA, 20 nt, Human
cugcuccagcuguucagcug

SEQ ID NO: 3340238 - RNA, 15 nt, Human
cugcuccagcuguuc

SEQ ID NO: 3340239 - RNA, 19 nt, Human
cugcgaccacaagaaggau

SEQ ID NO: 3340240 - RNA, 15 nt, Human
cugcugcaguugcca

SEQ ID NO: 3340241 - RNA, 11 nt, Human
cugcugaaggc

SEQ ID NO: 3340242 - RNA, 14 nt, Human
cugcugcuggcugg

SEQ ID NO: 3340243 - RNA, 15 nt, Human
cugcugcuggcuggu

SEQ ID NO: 3340244 - RNA, 19 nt, Human
cugcuuccagugaggcucu

SEQ ID NO: 3340245 - RNA, 20 nt, Human
cugcuuccagugaggcucug

SEQ ID NO: 3340246 - RNA, 21 nt, Human
cugcuuccagugaggcucugc

SEQ ID NO: 3340247 - RNA, 23 nt, Human
cugcuuccagugaggcucugccc

SEQ ID NO: 3340248 - RNA, 16 nt, Human
cugcuuccagugaggc

SEQ ID NO: 3340249 - RNA, 18 nt, Human
cugcuuccagugaggcuc

SEQ ID NO: 3340250 - RNA, 15 nt, Human
cugcuuccagugagg

SEQ ID NO: 3340251 - RNA, 23 nt, Human
cugcugguucaggguuggccccu

SEQ ID NO: 3340252 - RNA, 15 nt, Human
cugcugguucagggu

SEQ ID NO: 3340253 - RNA, 13 nt, Human
cugcugguucagg

SEQ ID NO: 3340254 - RNA, 20 nt, Human
cuggaccuugaacuggguac

SEQ ID NO: 3340255 - RNA, 17 nt, Human
cuggaccuugaacuggg

SEQ ID NO: 3340256 - RNA, 21 nt, Human
cuggaccuugaacuggguacu

SEQ ID NO: 3340257 - RNA, 15 nt, Human
cuggacccuguggau

SEQ ID NO: 3340258 - RNA, 16 nt, Human
cuggaccuugaacugg

SEQ ID NO: 3340259 - RNA, 17 nt, Human
cuggacaggcauguucu

SEQ ID NO: 3340260 - RNA, 14 nt, Human
cuggacaggcaugu

SEQ ID NO: 3340261 - RNA, 23 nt, Human
cuggacaggcauguucucugagg

SEQ ID NO: 3340262 - RNA, 17 nt, Human
cuggagguacgaaaaga

SEQ ID NO: 3340263 - RNA, 22 nt, Human
cuggagguacgaaaagagggga

SEQ ID NO: 3340264 - RNA, 17 nt, Human
cuggagugcagugagcc

SEQ ID NO: 3340265 - RNA, 16 nt, Human
cuggagugcagugagc

SEQ ID NO: 3340266 - RNA, 15 nt, Human
cuggagugcagugag

SEQ ID NO: 3340267 - RNA, 14 nt, Human
cuggagugcaguga

SEQ ID NO: 3340268 - RNA, 19 nt, Human
cuggcacugcuuccaguga

SEQ ID NO: 3340269 - RNA, 20 nt, Human
cuggcacugcuuccagugag

SEQ ID NO: 3340270 - RNA, 23 nt, Human
cuggcacugcuuccagugaggcu

SEQ ID NO: 3340271 - RNA, 18 nt, Human
cuggcacugcuuccagug

SEQ ID NO: 3340272 - RNA, 19 nt, Human
cuggcacccggccccugcu

SEQ ID NO: 3340273 - RNA, 21 nt, Human
cuggcacccggccccugcugg

SEQ ID NO: 3340274 - RNA, 20 nt, Human
cuggcacccggccccugcug

SEQ ID NO: 3340275 - RNA, 20 nt, Human
cuggagugcagugagccgag

SEQ ID NO: 3340276 - RNA, 15 nt, Human
cuggcccacugcauc

SEQ ID NO: 3340277 - RNA, 20 nt, Human
cuggcucuuccaggcuggga

SEQ ID NO: 3340278 - RNA, 24 nt, Human
cuggcucuuccaggcugggagagc

SEQ ID NO: 3340279 - RNA, 21 nt, Human
cuggcucuuccaggcugggag

SEQ ID NO: 3340280 - RNA, 22 nt, Human
cuggcucuuccaggcugggaga

SEQ ID NO: 3340281 - RNA, 15 nt, Human
cuggcgugcaguggu

SEQ ID NO: 3340282 - RNA, 14 nt, Human
cuggcgugcagugg

SEQ ID NO: 3340283 - RNA, 18 nt, Human
cuggccucugcacucccc

SEQ ID NO: 3340284 - RNA, 20 nt, Human
cuggccucugcacuccccug

SEQ ID NO: 3340285 - RNA, 21 nt, Human
cuggccucugcacuccccugc

SEQ ID NO: 3340286 - RNA, 16 nt, Human
cuggccucugcacucc

SEQ ID NO: 3340287 - RNA, 19 nt, Human
cuggccuggccccucaggg

SEQ ID NO: 3340288 - RNA, 24 nt, Human
cuggccuggccccucagggucccu

SEQ ID NO: 3340289 - RNA, 21 nt, Human
cccugcucuccgaccagacac

SEQ ID NO: 3340290 - RNA, 22 nt, Human
cccugcucuccgaccagacacc

SEQ ID NO: 3340291 - RNA, 11 nt, Human
cccugccuccu

SEQ ID NO: 3340292 - RNA, 21 nt, Human
cccugcccugugggcccccaa

SEQ ID NO: 3340293 - RNA, 12 nt, Human
cccugaggccca

SEQ ID NO: 3340294 - RNA, 20 nt, Human
cccugcagagggcacagaaa

SEQ ID NO: 3340295 - RNA, 12 nt, Human
cccuuccaugga

SEQ ID NO: 3340296 - RNA, 15 nt, Human
cccuuacgugagucc

SEQ ID NO: 3340297 - RNA, 17 nt, Human
cccuuacgugaguccug

SEQ ID NO: 3340298 - RNA, 14 nt, Human
cccuuagcagggaa

SEQ ID NO: 3340299 - RNA, 23 nt, Human
cccuuagcagggaaacagcuaau

SEQ ID NO: 3340300 - RNA, 22 nt, Human
cccuugccgucuaccugagggg

SEQ ID NO: 3340301 - RNA, 20 nt, Human
cccuuaccugccaggaagcc

SEQ ID NO: 3340302 - RNA, 23 nt, Human
cccuuaccugccaggaagccagc

SEQ ID NO: 3340303 - RNA, 17 nt, Human
cccuuaccugccaggaa

SEQ ID NO: 3340304 - RNA, 19 nt, Human
cccuuaccucggugccuuc

SEQ ID NO: 3340305 - RNA, 19 nt, Human
cccuguuuguuucugaaag

SEQ ID NO: 3340306 - RNA, 16 nt, Human
cccuguuuguuucuga

SEQ ID NO: 3340307 - RNA, 13 nt, Human
cccuguucuggca

SEQ ID NO: 3340308 - RNA, 14 nt, Human
cccuguucuggcag

SEQ ID NO: 3340309 - RNA, 20 nt, Human
cccugguggcagcucaccuc

SEQ ID NO: 3340310 - RNA, 21 nt, Human
cccuggugaccagcaccaucu

SEQ ID NO: 3340311 - RNA, 21 nt, Human
cccugguggcagcucaccucu

SEQ ID NO: 3340312 - RNA, 13 nt, Human
cccugguggcagu

SEQ ID NO: 3340313 - RNA, 21 nt, Human
cccuguagagugggagcugag

SEQ ID NO: 3340314 - RNA, 14 nt, Human
cccugguggcagug

SEQ ID NO: 3340315 - RNA, 23 nt, Human
cccucccucuuucccucccuucc

SEQ ID NO: 3340316 - RNA, 11 nt, Human
cccucugccca

SEQ ID NO: 3340317 - RNA, 15 nt, Human
cccucugcccacucc

SEQ ID NO: 3340318 - RNA, 18 nt, Human
cccucugcccacucccug

SEQ ID NO: 3340319 - RNA, 19 nt, Human
cccucugcccacucccugc

SEQ ID NO: 3340320 - RNA, 12 nt, Human
cccucuuucccu

SEQ ID NO: 3340321 - RNA, 20 nt, Human
cccucuuucccucccuuccu

SEQ ID NO: 3340322 - RNA, 17 nt, Human
cccucuuucccucccuu

SEQ ID NO: 3340323 - RNA, 18 nt, Human
ccuaggugacagagugag

SEQ ID NO: 3340324 - RNA, 23 nt, Human
ccuaggcauuugcugaauacaga

SEQ ID NO: 3340325 - RNA, 16 nt, Human
ccgugaggccagagac

SEQ ID NO: 3340326 - RNA, 12 nt, Human
ccguuauuaaaa

SEQ ID NO: 3340327 - RNA, 18 nt, Human
ccuacaggagugagcacu

SEQ ID NO: 3340328 - RNA, 23 nt, Human
ccgcacugggcuuggggaccaga

SEQ ID NO: 3340329 - RNA, 19 nt, Human
ccgcacugggcuuggggac

SEQ ID NO: 3340330 - RNA, 14 nt, Human
ccgaguagcuggga

SEQ ID NO: 3340331 - RNA, 19 nt, Human
ccgagcuuugaaaauucag

SEQ ID NO: 3340332 - RNA, 15 nt, Human
ccgagauugcaccac

SEQ ID NO: 3340333 - RNA, 19 nt, Human
ccgagauugcaccacugca

SEQ ID NO: 3340334 - RNA, 21 nt, Human
ccgagauugcaccacugcacu

SEQ ID NO: 3340335 - RNA, 11 nt, Human
ccgcuggggcc

SEQ ID NO: 3340336 - RNA, 13 nt, Human
ccgggccacagag

SEQ ID NO: 3340337 - RNA, 22 nt, Human
ccgggcacucagaagacacuga

SEQ ID NO: 3340338 - RNA, 20 nt, Human
ccgggcacucagaagacacu

SEQ ID NO: 3340339 - RNA, 21 nt, Human
ccggcuccaggcuccuuuagc

SEQ ID NO: 3340340 - RNA, 16 nt, Human
ccggcuccaggcuccu

SEQ ID NO: 3340341 - RNA, 15 nt, Human
ccggcuccaggcucc

SEQ ID NO: 3340342 - RNA, 18 nt, Human
ccgugaggccagagacac

SEQ ID NO: 3340343 - RNA, 14 nt, Human
ccgggcucugccuc

SEQ ID NO: 3340344 - RNA, 15 nt, Human
ccgggcucugccucc

SEQ ID NO: 3340345 - RNA, 18 nt, Human
ccgggcucugccucccau

SEQ ID NO: 3340346 - RNA, 13 nt, Human
ccgggcucugccu

SEQ ID NO: 3340347 - RNA, 21 nt, Human
ccccacccaagggccuggccu

SEQ ID NO: 3340348 - RNA, 15 nt, Human
ccccaccgcagacag

SEQ ID NO: 3340349 - RNA, 19 nt, Human
ccccaccgcagacaggacc

SEQ ID NO: 3340350 - RNA, 14 nt, Human
ccccacuggugaca

SEQ ID NO: 3340351 - RNA, 19 nt, Human
cccaucucuacaaaaagca

SEQ ID NO: 3340352 - RNA, 14 nt, Human
cccaguugggugga

SEQ ID NO: 3340353 - RNA, 18 nt, Human
cccaugcugcccugugag

SEQ ID NO: 3340354 - RNA, 14 nt, Human
cccaugagccucag

SEQ ID NO: 3340355 - RNA, 22 nt, Human
cccaugagccucagcauccugg

SEQ ID NO: 3340356 - RNA, 14 nt, Human
ccccauccucugua

SEQ ID NO: 3340357 - RNA, 13 nt, Human
cccccacccaagg

SEQ ID NO: 3340358 - RNA, 24 nt, Human
cccccacccaagggccuggccuga

SEQ ID NO: 3340359 - RNA, 15 nt, Human
cccccacuggugaca

SEQ ID NO: 3340360 - RNA, 11 nt, Human
cccccacuggu

SEQ ID NO: 3340361 - RNA, 13 nt, Human
cccccacugguga

SEQ ID NO: 3340362 - RNA, 22 nt, Human
ccccaggugguuauggagaggg

SEQ ID NO: 3340363 - RNA, 20 nt, Human
ccccagugcccacaggauca

SEQ ID NO: 3340364 - RNA, 16 nt, Human
ccccagugcccacagg

SEQ ID NO: 3340365 - RNA, 15 nt, Human
ccccagugcccacag

SEQ ID NO: 3340366 - RNA, 14 nt, Human
ccccagugcccaca

SEQ ID NO: 3340367 - RNA, 15 nt, Human
ccccucaacaccucu

SEQ ID NO: 3340368 - RNA, 16 nt, Human
ccccucaacaccucug

SEQ ID NO: 3340369 - RNA, 23 nt, Human
ccccucaacucuccuccagaguc

SEQ ID NO: 3340370 - RNA, 12 nt, Human
cccccagccugc

SEQ ID NO: 3340371 - RNA, 19 nt, Human
cccccugacaacacucauu

SEQ ID NO: 3340372 - RNA, 17 nt, Human
cccccugacaacacuca

SEQ ID NO: 3340373 - RNA, 22 nt, Human
ccccucagggucccugguggca

SEQ ID NO: 3340374 - RNA, 12 nt, Human
ccccuccaugug

SEQ ID NO: 3340375 - RNA, 19 nt, Human
ccccugcccggcugcggaa

SEQ ID NO: 3340376 - RNA, 17 nt, Human
ccccugcccggcugcgg

SEQ ID NO: 3340377 - RNA, 20 nt, Human
ccccugcugguucaggguug

SEQ ID NO: 3340378 - RNA, 15 nt, Human
ccccugcugguucag

SEQ ID NO: 3340379 - RNA, 13 nt, Human
ccccugcugguuc

SEQ ID NO: 3340380 - RNA, 11 nt, Human
ccccugcuggu

SEQ ID NO: 3340381 - RNA, 14 nt, Human
ccccugcugggugu

SEQ ID NO: 3340382 - RNA, 17 nt, Human
ccccugcuggguguggc

SEQ ID NO: 3340383 - RNA, 18 nt, Human
ccccuggaugcagccuca

SEQ ID NO: 3340384 - RNA, 19 nt, Human
ccccuggaugcagccucac

SEQ ID NO: 3340385 - RNA, 15 nt, Human
ccccuggaugcagcc

SEQ ID NO: 3340386 - RNA, 22 nt, Human
cccgcuaagagggagggagggc

SEQ ID NO: 3340387 - RNA, 23 nt, Human
cccgcuaagagggagggagggcu

SEQ ID NO: 3340388 - RNA, 20 nt, Human
cccgcccaggcuuagucacu

SEQ ID NO: 3340389 - RNA, 13 nt, Human
ccccuuccaugga

SEQ ID NO: 3340390 - RNA, 20 nt, Human
ccccuuccauggacuuuguu

SEQ ID NO: 3340391 - RNA, 22 nt, Human
cccgaauagcugggacuacagg

SEQ ID NO: 3340392 - RNA, 13 nt, Human
ccauuugcuccuu

SEQ ID NO: 3340393 - RNA, 15 nt, Human
ccauucugccugccc

SEQ ID NO: 3340394 - RNA, 18 nt, Human
ccauguuuuguuuacggu

SEQ ID NO: 3340395 - RNA, 16 nt, Human
cccaagggccuggccu

SEQ ID NO: 3340396 - RNA, 13 nt, Human
cccacaggaucag

SEQ ID NO: 3340397 - RNA, 17 nt, Human
cccacaggaucagucug

SEQ ID NO: 3340398 - RNA, 12 nt, Human
cccaagggccug

SEQ ID NO: 3340399 - RNA, 14 nt, Human
cccaagggccuggc

SEQ ID NO: 3340400 - RNA, 20 nt, Human
ccauuuugcugucccuuuuc

SEQ ID NO: 3340401 - RNA, 21 nt, Human
ccauuuuguauuuuacuaaua

SEQ ID NO: 3340402 - RNA, 14 nt, Human
cccaccucucucac

SEQ ID NO: 3340403 - RNA, 17 nt, Human
cccaccucucucacucc

SEQ ID NO: 3340404 - RNA, 13 nt, Human
cccaccucucuca

SEQ ID NO: 3340405 - RNA, 21 nt, Human
cccaccucagccucccaaagu

SEQ ID NO: 3340406 - RNA, 12 nt, Human
cccaccuuggcu

SEQ ID NO: 3340407 - RNA, 15 nt, Human
cccaccucagccucc

SEQ ID NO: 3340408 - RNA, 14 nt, Human
cccaccucagccuc

SEQ ID NO: 3340409 - RNA, 12 nt, Human
cccaccucagcc

SEQ ID NO: 3340410 - RNA, 15 nt, Human
cccaccuuggcugca

SEQ ID NO: 3340411 - RNA, 14 nt, Human
cccaccuuggcugc

SEQ ID NO: 3340412 - RNA, 22 nt, Human
cccaccuuggcucaaguccucu

SEQ ID NO: 3340413 - RNA, 15 nt, Human
cccaccuuggcucaa

SEQ ID NO: 3340414 - RNA, 15 nt, Human
cccacgcccccacug

SEQ ID NO: 3340415 - RNA, 17 nt, Human
cccacgcccccacuggu

SEQ ID NO: 3340416 - RNA, 19 nt, Human
cccacgcccccacugguga

SEQ ID NO: 3340417 - RNA, 21 nt, Human
cccacgcuggagugcagugag

SEQ ID NO: 3340418 - RNA, 15 nt, Human
ccaggcccucugccc

SEQ ID NO: 3340419 - RNA, 23 nt, Human
ccaggcugggagagccuuccagg

SEQ ID NO: 3340420 - RNA, 22 nt, Human
ccaggcuuagucacugagacag

SEQ ID NO: 3340421 - RNA, 23 nt, Human
ccaggcuuagucacugagacagc

SEQ ID NO: 3340422 - RNA, 21 nt, Human
ccaggcuuagucacugagaca

SEQ ID NO: 3340423 - RNA, 21 nt, Human
ccaggccacaagacccuugug

SEQ ID NO: 3340424 - RNA, 20 nt, Human
ccaggaggccagccuugacc

SEQ ID NO: 3340425 - RNA, 15 nt, Human
ccaggaggccagccu

SEQ ID NO: 3340426 - RNA, 18 nt, Human
ccaggaggccagccuuga

SEQ ID NO: 3340427 - RNA, 14 nt, Human
ccaggaggccagcc

SEQ ID NO: 3340428 - RNA, 13 nt, Human
ccaggcccucugc

SEQ ID NO: 3340429 - RNA, 14 nt, Human
ccaggcccucugcc

SEQ ID NO: 3340430 - RNA, 16 nt, Human
ccaggccccugccacc

SEQ ID NO: 3340431 - RNA, 15 nt, Human
ccaggccccugccac

SEQ ID NO: 3340432 - RNA, 13 nt, Human
ccaggccccugcc

SEQ ID NO: 3340433 - RNA, 14 nt, Human
ccaggccccugcca

SEQ ID NO: 3340434 - RNA, 21 nt, Human
ccaguaaaugggggugcauuu

SEQ ID NO: 3340435 - RNA, 22 nt, Human
ccaguaaaugggggugcauuug

SEQ ID NO: 3340436 - RNA, 20 nt, Human
ccaguaaaugggggugcauu

SEQ ID NO: 3340437 - RNA, 13 nt, Human
ccagguuuaagcu

SEQ ID NO: 3340438 - RNA, 16 nt, Human
ccagguuucuaugugu

SEQ ID NO: 3340439 - RNA, 24 nt, Human
ccaggugcacaagcuccaagcucc

SEQ ID NO: 3340440 - RNA, 21 nt, Human
ccaggugcuaggaacacuccu

SEQ ID NO: 3340441 - RNA, 23 nt, Human
ccagugugacaaggauugcuacu

SEQ ID NO: 3340442 - RNA, 14 nt, Human
ccagugugacaagg

SEQ ID NO: 3340443 - RNA, 13 nt, Human
ccauaugccuggg

SEQ ID NO: 3340444 - RNA, 12 nt, Human
ccaucaagccac

SEQ ID NO: 3340445 - RNA, 15 nt, Human
ccauaugccugggca

SEQ ID NO: 3340446 - RNA, 16 nt, Human
ccaucaagccaccaac

SEQ ID NO: 3340447 - RNA, 13 nt, Human
ccaucaagccacc

SEQ ID NO: 3340448 - RNA, 14 nt, Human
ccaucaagccacca

SEQ ID NO: 3340449 - RNA, 12 nt, Human
ccaucauugaaa

SEQ ID NO: 3340450 - RNA, 13 nt, Human
ccaucaugucugg

SEQ ID NO: 3340451 - RNA, 12 nt, Human
ccaucaugucug

SEQ ID NO: 3340452 - RNA, 14 nt, Human
ccaucucacacaug

SEQ ID NO: 3340453 - RNA, 15 nt, Human
ccaucucacacauga

SEQ ID NO: 3340454 - RNA, 17 nt, Human
ccaucucacacaugagc

SEQ ID NO: 3340455 - RNA, 18 nt, Human
ccaucucacacaugagca

SEQ ID NO: 3340456 - RNA, 20 nt, Human
ccaucucacacaugagcauc

SEQ ID NO: 3340457 - RNA, 21 nt, Human
ccaucucacacaugagcauca

SEQ ID NO: 3340458 - RNA, 15 nt, Human
ccaucucuccuccuu

SEQ ID NO: 3340459 - RNA, 13 nt, Human
ccaucuacccucc

SEQ ID NO: 3340460 - RNA, 14 nt, Human
ccaucauugaaauc

SEQ ID NO: 3340461 - RNA, 16 nt, Human
ccaucauugaaaucuu

SEQ ID NO: 3340462 - RNA, 18 nt, Human
ccagauuucacucuccuu

SEQ ID NO: 3340463 - RNA, 19 nt, Human
ccagauuucacucuccuug

SEQ ID NO: 3340464 - RNA, 15 nt, Human
ccagauuucacucuc

SEQ ID NO: 3340465 - RNA, 22 nt, Human
ccagauugcaacaggcugggcu

SEQ ID NO: 3340466 - RNA, 21 nt, Human
ccagauugcaacaggcugggc

SEQ ID NO: 3340467 - RNA, 23 nt, Human
ccagauugcaacaggcugggcuu

SEQ ID NO: 3340468 - RNA, 16 nt, Human
ccagauugcaacaggc

SEQ ID NO: 3340469 - RNA, 14 nt, Human
ccagauugcaacag

SEQ ID NO: 3340470 - RNA, 23 nt, Human
ccagauucuuuccugaggcuggg

SEQ ID NO: 3340471 - RNA, 17 nt, Human
ccagcaggcucucaggc

SEQ ID NO: 3340472 - RNA, 18 nt, Human
ccagcaggcucucaggcc

SEQ ID NO: 3340473 - RNA, 16 nt, Human
ccagcaggcucucagg

SEQ ID NO: 3340474 - RNA, 15 nt, Human
ccagcaggcucucag

SEQ ID NO: 3340475 - RNA, 17 nt, Human
ccagcaccaucucuccu

SEQ ID NO: 3340476 - RNA, 18 nt, Human
ccagcaccaucucuccuc

SEQ ID NO: 3340477 - RNA, 16 nt, Human
ccagcaagugagagcu

SEQ ID NO: 3340478 - RNA, 19 nt, Human
ccagcaagugagagcuggg

SEQ ID NO: 3340479 - RNA, 18 nt, Human
ccagcaagugagagcugg

SEQ ID NO: 3340480 - RNA, 17 nt, Human
ccagcaagugagagcug

SEQ ID NO: 3340481 - RNA, 20 nt, Human
ccagccgagauagccaaggc

SEQ ID NO: 3340482 - RNA, 22 nt, Human
ccagccgagauagccaaggcca

SEQ ID NO: 3340483 - RNA, 17 nt, Human
ccagccgagauagccaa

SEQ ID NO: 3340484 - RNA, 19 nt, Human
ccagccgccaugcuccugg

SEQ ID NO: 3340485 - RNA, 19 nt, Human
ccagcaggcucucaggcca

SEQ ID NO: 3340486 - RNA, 20 nt, Human
ccagcaggcucucaggccag

SEQ ID NO: 3340487 - RNA, 21 nt, Human
ccagcaggcucucaggccagc

SEQ ID NO: 3340488 - RNA, 23 nt, Human
ccagcaggcucucaggccagcug

SEQ ID NO: 3340489 - RNA, 17 nt, Human
ccagcccacuucugcca

SEQ ID NO: 3340490 - RNA, 16 nt, Human
ccagcccacuucugcc

SEQ ID NO: 3340491 - RNA, 13 nt, Human
ccagccuggguga

SEQ ID NO: 3340492 - RNA, 23 nt, Human
ccagccuugaccauucuccaccu

SEQ ID NO: 3340493 - RNA, 22 nt, Human
ccagccuugaccauucuccacc

SEQ ID NO: 3340494 - RNA, 19 nt, Human
ccacccccacccaagggcc

SEQ ID NO: 3340495 - RNA, 19 nt, Human
ccaccccucaacaccucug

SEQ ID NO: 3340496 - RNA, 18 nt, Human
ccacccugaaagcccuga

SEQ ID NO: 3340497 - RNA, 14 nt, Human
ccacccuccuuuca

SEQ ID NO: 3340498 - RNA, 12 nt, Human
ccacccugcucu

SEQ ID NO: 3340499 - RNA, 11 nt, Human
ccacccugcuc

SEQ ID NO: 3340500 - RNA, 14 nt, Human
ccaccucucucacu

SEQ ID NO: 3340501 - RNA, 16 nt, Human
ccaccucucucacucc

SEQ ID NO: 3340502 - RNA, 19 nt, Human
ccaccucucucacuccuug

SEQ ID NO: 3340503 - RNA, 20 nt, Human
ccaccucucucacuccuuga

SEQ ID NO: 3340504 - RNA, 13 nt, Human
ccaccuggccucu

SEQ ID NO: 3340505 - RNA, 18 nt, Human
ccaccuggccucugcacu

SEQ ID NO: 3340506 - RNA, 20 nt, Human
ccaccuggccucugcacucc

SEQ ID NO: 3340507 - RNA, 13 nt, Human
ccaccugccaggg

SEQ ID NO: 3340508 - RNA, 14 nt, Human
ccaccugccaggga

SEQ ID NO: 3340509 - RNA, 12 nt, Human
ccaccugccagg

SEQ ID NO: 3340510 - RNA, 15 nt, Human
ccaccugccagggac

SEQ ID NO: 3340511 - RNA, 22 nt, Human
ccagaagaaaauagugguguga

SEQ ID NO: 3340512 - RNA, 16 nt, Human
ccacugugccaugugc

SEQ ID NO: 3340513 - RNA, 15 nt, Human
ccacugugccaugug

SEQ ID NO: 3340514 - RNA, 19 nt, Human
ccacugugccaugugccag

SEQ ID NO: 3340515 - RNA, 22 nt, Human
ccacuuuuguucuugguuugua

SEQ ID NO: 3340516 - RNA, 21 nt, Human
ccacugcaucguuucaucuuc

SEQ ID NO: 3340517 - RNA, 23 nt, Human
ccacugcaucguuucaucuucca

SEQ ID NO: 3340518 - RNA, 15 nt, Human
ccacugcucugguua

SEQ ID NO: 3340519 - RNA, 13 nt, Human
ccacugcucuggu

SEQ ID NO: 3340520 - RNA, 12 nt, Human
ccacugcucugg

SEQ ID NO: 3340521 - RNA, 11 nt, Human
ccacugcucug

SEQ ID NO: 3340522 - RNA, 20 nt, Human
ccacugcuuuuggucugugu

SEQ ID NO: 3340523 - RNA, 22 nt, Human
ccacugcuuuuggucuguguga

SEQ ID NO: 3340524 - RNA, 14 nt, Human
ccacugugaagaga

SEQ ID NO: 3340525 - RNA, 15 nt, Human
ccacugugaagagaa

SEQ ID NO: 3340526 - RNA, 23 nt, Human
ccacuggugacaugucuuuucuu

SEQ ID NO: 3340527 - RNA, 15 nt, Human
ccagacccggcugcg

SEQ ID NO: 3340528 - RNA, 14 nt, Human
ccagacccggcugc

SEQ ID NO: 3340529 - RNA, 17 nt, Human
ccagacacauguccaag

SEQ ID NO: 3340530 - RNA, 20 nt, Human
ccagacacauguccaagaag

SEQ ID NO: 3340531 - RNA, 22 nt, Human
ccagacacauguccaagaagcc

SEQ ID NO: 3340532 - RNA, 16 nt, Human
cgaggacagggaggug

SEQ ID NO: 3340533 - RNA, 19 nt, Human
cgagcccugguggcagugg

SEQ ID NO: 3340534 - RNA, 14 nt, Human
cgaggacagggagg

SEQ ID NO: 3340535 - RNA, 18 nt, Human
cgagcccugguggcagug

SEQ ID NO: 3340536 - RNA, 13 nt, Human
cgcacugggcuug

SEQ ID NO: 3340537 - RNA, 19 nt, Human
cgcagcauauucaggaagc

SEQ ID NO: 3340538 - RNA, 20 nt, Human
cgcagcauauucaggaagcu

SEQ ID NO: 3340539 - RNA, 15 nt, Human
cgcagcccugcagag

SEQ ID NO: 3340540 - RNA, 17 nt, Human
cgcagcccugcagaggg

SEQ ID NO: 3340541 - RNA, 17 nt, Human
cgcacugggcuugggga

SEQ ID NO: 3340542 - RNA, 20 nt, Human
cggacagccacggccaggcc

SEQ ID NO: 3340543 - RNA, 14 nt, Human
cggaauaguuggcu

SEQ ID NO: 3340544 - RNA, 17 nt, Human
cggaauaguuggcuagg

SEQ ID NO: 3340545 - RNA, 16 nt, Human
cggaauaguuggcuag

SEQ ID NO: 3340546 - RNA, 16 nt, Human
cgcuuucuacccagcg

SEQ ID NO: 3340547 - RNA, 14 nt, Human
cgcuuucuacccag

SEQ ID NO: 3340548 - RNA, 22 nt, Human
cggacagccacggccaggccag

SEQ ID NO: 3340549 - RNA, 21 nt, Human
cggacagccacggccaggcca

SEQ ID NO: 3340550 - RNA, 15 nt, Human
cggagaaaggaaggg

SEQ ID NO: 3340551 - RNA, 13 nt, Human
cgcugugcugccc

SEQ ID NO: 3340552 - RNA, 11 nt, Human
cgcugugcugc

SEQ ID NO: 3340553 - RNA, 21 nt, Human
cgcugugcugcccugcccacc

SEQ ID NO: 3340554 - RNA, 23 nt, Human
cgcugugcugcccugcccaccug

SEQ ID NO: 3340555 - RNA, 19 nt, Human
cgcugugcugcccugccca

SEQ ID NO: 3340556 - RNA, 18 nt, Human
cgcugugcugcccugccc

SEQ ID NO: 3340557 - RNA, 12 nt, Human
cgcccagucugg

SEQ ID NO: 3340558 - RNA, 19 nt, Human
cgcccagucuggaaugcag

SEQ ID NO: 3340559 - RNA, 13 nt, Human
cgcccagucugga

SEQ ID NO: 3340560 - RNA, 18 nt, Human
cgcagcccugcagagggc

SEQ ID NO: 3340561 - RNA, 19 nt, Human
cgcagcccugcagagggca

SEQ ID NO: 3340562 - RNA, 17 nt, Human
cgcuacccgggaagggg

SEQ ID NO: 3340563 - RNA, 18 nt, Human
cgcuacccgggaaggggg

SEQ ID NO: 3340564 - RNA, 21 nt, Human
cgcuacccgggaagggggcug

SEQ ID NO: 3340565 - RNA, 24 nt, Human
cgcuacccgggaagggggcuggga

SEQ ID NO: 3340566 - RNA, 14 nt, Human
cgcgacaaugcaaa

SEQ ID NO: 3340567 - RNA, 19 nt, Human
cgcgguggcucacgccugu

SEQ ID NO: 3340568 - RNA, 14 nt, Human
cggcuggcagccca

SEQ ID NO: 3340569 - RNA, 11 nt, Human
cggccaggcca

SEQ ID NO: 3340570 - RNA, 20 nt, Human
cggccaggccagagggagug

SEQ ID NO: 3340571 - RNA, 12 nt, Human
cggccaggccag

SEQ ID NO: 3340572 - RNA, 23 nt, Human
cggcuggcagcccaccccucaac

SEQ ID NO: 3340573 - RNA, 13 nt, Human
cggcuggccuggc

SEQ ID NO: 3340574 - RNA, 19 nt, Human
cgggaagggggcugggaca

SEQ ID NO: 3340575 - RNA, 20 nt, Human
cgggaagggggcugggacau

SEQ ID NO: 3340576 - RNA, 16 nt, Human
cgggaagggggcuggg

SEQ ID NO: 3340577 - RNA, 15 nt, Human
cgaauauugcugaug

SEQ ID NO: 3340578 - RNA, 17 nt, Human
cgaauauugcugauggu

SEQ ID NO: 3340579 - RNA, 12 nt, Human
cgaauauugcug

SEQ ID NO: 3340580 - RNA, 14 nt, Human
cgaauauugcugau

SEQ ID NO: 3340581 - RNA, 11 nt, Human
cgaauauugcu

SEQ ID NO: 3340582 - RNA, 16 nt, Human
cgaauagcugggacua

SEQ ID NO: 3340583 - RNA, 15 nt, Human
cgaauagcugggacu

SEQ ID NO: 3340584 - RNA, 17 nt, Human
ccuuuuuuggcugcuga

SEQ ID NO: 3340585 - RNA, 18 nt, Human
ccuuuuuuggcugcugaa

SEQ ID NO: 3340586 - RNA, 20 nt, Human
ccuuuuuuggcugcugaagg

SEQ ID NO: 3340587 - RNA, 22 nt, Human
ccuuuuuuggcugcugaaggcu

SEQ ID NO: 3340588 - RNA, 23 nt, Human
cgaaagggacuuggaagcuccgc

SEQ ID NO: 3340589 - RNA, 21 nt, Human
cgaacauguuuuucuucuccc

SEQ ID NO: 3340590 - RNA, 11 nt, Human
cgaacaaaaca

SEQ ID NO: 3340591 - RNA, 15 nt, Human
ccuuuuuuggcugcu

SEQ ID NO: 3340592 - RNA, 19 nt, Human
ccuuuuuuauacauaaaca

SEQ ID NO: 3340593 - RNA, 15 nt, Human
ccuuugugaggaagc

SEQ ID NO: 3340594 - RNA, 16 nt, Human
ccuuugugaggaagcc

SEQ ID NO: 3340595 - RNA, 17 nt, Human
ccuuugugaggaagccg

SEQ ID NO: 3340596 - RNA, 23 nt, Human
ccuuugugaggaagccgcugggg

SEQ ID NO: 3340597 - RNA, 22 nt, Human
ccuuuguccccaccgcagacag

SEQ ID NO: 3340598 - RNA, 23 nt, Human
ccuuuguccccaccgcagacagg

SEQ ID NO: 3340599 - RNA, 14 nt, Human
ccuuugugaggaag

SEQ ID NO: 3340600 - RNA, 22 nt, Human
ccuuuguauucucuccuguacc

SEQ ID NO: 3340601 - RNA, 23 nt, Human
ccuuuguauucucuccuguaccu

SEQ ID NO: 3340602 - RNA, 24 nt, Human
ccuuuguauucucuccuguaccuc

SEQ ID NO: 3340603 - RNA, 20 nt, Human
ccuuuguauucucuccugua

SEQ ID NO: 3340604 - RNA, 16 nt, Human
ccuuuguccccaccgc

SEQ ID NO: 3340605 - RNA, 18 nt, Human
ccuuuguccccaccgcag

SEQ ID NO: 3340606 - RNA, 14 nt, Human
ccuuuguccccacc

SEQ ID NO: 3340607 - RNA, 19 nt, Human
ccuuggugucgggcaugac

SEQ ID NO: 3340608 - RNA, 20 nt, Human
ccuuggugucgggcaugaca

SEQ ID NO: 3340609 - RNA, 14 nt, Human
ccuuggggagcagg

SEQ ID NO: 3340610 - RNA, 16 nt, Human
ccuuggcugcagggag

SEQ ID NO: 3340611 - RNA, 14 nt, Human
ccuuggcugcaggg

SEQ ID NO: 3340612 - RNA, 17 nt, Human
ccuucucuccagccccu

SEQ ID NO: 3340613 - RNA, 18 nt, Human
ccuucucuccagccccug

SEQ ID NO: 3340614 - RNA, 21 nt, Human
ccuugacagggcacaccgggc

SEQ ID NO: 3340615 - RNA, 18 nt, Human
ccuugacagggcacaccg

SEQ ID NO: 3340616 - RNA, 22 nt, Human
ccuuggcucaaguccucuuuuc

SEQ ID NO: 3340617 - RNA, 15 nt, Human
ccuuggauugucccc

SEQ ID NO: 3340618 - RNA, 20 nt, Human
ccuguggaugauaaaacaca

SEQ ID NO: 3340619 - RNA, 20 nt, Human
ccugugggcccccaaaugga

SEQ ID NO: 3340620 - RNA, 20 nt, Human
ccugugccucugggacugga

SEQ ID NO: 3340621 - RNA, 19 nt, Human
ccugugccucugggacugg

SEQ ID NO: 3340622 - RNA, 12 nt, Human
ccuucucuccag

SEQ ID NO: 3340623 - RNA, 13 nt, Human
ccuucucuccagc

SEQ ID NO: 3340624 - RNA, 15 nt, Human
ccuucucuccagccc

SEQ ID NO: 3340625 - RNA, 16 nt, Human
ccuucucuccagcccc

SEQ ID NO: 3340626 - RNA, 17 nt, Human
ccuuccauggacuuugu

SEQ ID NO: 3340627 - RNA, 22 nt, Human
ccuuccaggggugggacacccu

SEQ ID NO: 3340628 - RNA, 13 nt, Human
ccuuccaggggug

SEQ ID NO: 3340629 - RNA, 18 nt, Human
ccugguggcagcugcggu

SEQ ID NO: 3340630 - RNA, 17 nt, Human
ccugguggcagcugcgg

SEQ ID NO: 3340631 - RNA, 16 nt, Human
ccugguggcagcugcg

SEQ ID NO: 3340632 - RNA, 15 nt, Human
ccugguggcagcugc

SEQ ID NO: 3340633 - RNA, 19 nt, Human
ccugguggcagcucaccuc

SEQ ID NO: 3340634 - RNA, 21 nt, Human
ccugguggcagcucaccucuc

SEQ ID NO: 3340635 - RNA, 22 nt, Human
ccugguggcagcucaccucucc

SEQ ID NO: 3340636 - RNA, 14 nt, Human
ccugguggcagcug

SEQ ID NO: 3340637 - RNA, 12 nt, Human
ccugucccccug

SEQ ID NO: 3340638 - RNA, 13 nt, Human
ccugucccccuga

SEQ ID NO: 3340639 - RNA, 14 nt, Human
ccugucccccugac

SEQ ID NO: 3340640 - RNA, 15 nt, Human
ccugucccccugaca

SEQ ID NO: 3340641 - RNA, 13 nt, Human
ccuguagcccuaa

SEQ ID NO: 3340642 - RNA, 15 nt, Human
ccuguagagugggag

SEQ ID NO: 3340643 - RNA, 16 nt, Human
ccuguagagugggagc

SEQ ID NO: 3340644 - RNA, 10 nt, Human
ccuguaccuc

SEQ ID NO: 3340645 - RNA, 14 nt, Human
ccugguggcagugg

SEQ ID NO: 3340646 - RNA, 13 nt, Human
ccugguggcagug

SEQ ID NO: 3340647 - RNA, 19 nt, Human
ccugggggcugggcagagg

SEQ ID NO: 3340648 - RNA, 20 nt, Human
ccugggggcugggcagagga

SEQ ID NO: 3340649 - RNA, 21 nt, Human
ccugggggcugggcagaggaa

SEQ ID NO: 3340650 - RNA, 18 nt, Human
ccugggggcugggcagag

SEQ ID NO: 3340651 - RNA, 15 nt, Human
ccugggcagaaggaa

SEQ ID NO: 3340652 - RNA, 20 nt, Human
ccugggaggucaaggcugca

SEQ ID NO: 3340653 - RNA, 18 nt, Human
ccugggagugagcugguu

SEQ ID NO: 3340654 - RNA, 16 nt, Human
ccugggcagaaggaag

SEQ ID NO: 3340655 - RNA, 22 nt, Human
ccugggaggucaaggcugcagu

SEQ ID NO: 3340656 - RNA, 16 nt, Human
ccugggagugagcugg

SEQ ID NO: 3340657 - RNA, 16 nt, Human
ccuggcccacugcauc

SEQ ID NO: 3340658 - RNA, 13 nt, Human
ccuggcacugcuu

SEQ ID NO: 3340659 - RNA, 16 nt, Human
ccuggcacugcuucca

SEQ ID NO: 3340660 - RNA, 13 nt, Human
ccuggcaugggaa

SEQ ID NO: 3340661 - RNA, 23 nt, Human
ccuggcaugggaaugaaugucag

SEQ ID NO: 3340662 - RNA, 20 nt, Human
ccuggccagaugcaccagcc

SEQ ID NO: 3340663 - RNA, 23 nt, Human
ccuggccagaugcaccagcccuu

SEQ ID NO: 3340664 - RNA, 21 nt, Human
ccuggccagaugcaccagccc

SEQ ID NO: 3340665 - RNA, 13 nt, Human
ccuggcccacugc

SEQ ID NO: 3340666 - RNA, 14 nt, Human
ccuggcccacugca

SEQ ID NO: 3340667 - RNA, 12 nt, Human
ccuggcacugcu

SEQ ID NO: 3340668 - RNA, 22 nt, Human
ccuggcacuauaauguaagcuc

SEQ ID NO: 3340669 - RNA, 18 nt, Human
ccuggcacccggccccug

SEQ ID NO: 3340670 - RNA, 20 nt, Human
ccuggcacccggccccugcu

SEQ ID NO: 3340671 - RNA, 19 nt, Human
ccuggcacccggccccugc

SEQ ID NO: 3340672 - RNA, 18 nt, Human
ccugccuguugggccagg

SEQ ID NO: 3340673 - RNA, 19 nt, Human
ccugccuguugggccagga

SEQ ID NO: 3340674 - RNA, 20 nt, Human
ccugccuguugggccaggag

SEQ ID NO: 3340675 - RNA, 21 nt, Human
ccugcuaauuccccagauugc

SEQ ID NO: 3340676 - RNA, 17 nt, Human
ccugcuaauuccccaga

SEQ ID NO: 3340677 - RNA, 13 nt, Human
ccugccacccugg

SEQ ID NO: 3340678 - RNA, 12 nt, Human
ccugccacccug

SEQ ID NO: 3340679 - RNA, 14 nt, Human
ccugccacccuggg

SEQ ID NO: 3340680 - RNA, 22 nt, Human
ccugccacccuggggagaaagu

SEQ ID NO: 3340681 - RNA, 16 nt, Human
ccugccacccugggga

SEQ ID NO: 3340682 - RNA, 19 nt, Human
ccugccaauggacuaacuu

SEQ ID NO: 3340683 - RNA, 15 nt, Human
ccugagccagauuuc

SEQ ID NO: 3340684 - RNA, 12 nt, Human
ccugagccagau

SEQ ID NO: 3340685 - RNA, 16 nt, Human
ccugagccagauuuca

SEQ ID NO: 3340686 - RNA, 18 nt, Human
ccugagccagauuucacu

SEQ ID NO: 3340687 - RNA, 19 nt, Human
ccugaagucacacagugag

SEQ ID NO: 3340688 - RNA, 20 nt, Human
ccugaagucacacagugagu

SEQ ID NO: 3340689 - RNA, 22 nt, Human
ccugaagucuuuguacagacaa

SEQ ID NO: 3340690 - RNA, 12 nt, Human
ccugagcuggga

SEQ ID NO: 3340691 - RNA, 15 nt, Human
ccugaggcccagagg

SEQ ID NO: 3340692 - RNA, 16 nt, Human
ccugaggcccagaggg

SEQ ID NO: 3340693 - RNA, 17 nt, Human
ccugaggcccagagggc

SEQ ID NO: 3340694 - RNA, 13 nt, Human
ccugaggcugggc

SEQ ID NO: 3340695 - RNA, 14 nt, Human
ccugaggcugggcu

SEQ ID NO: 3340696 - RNA, 15 nt, Human
ccugaggcugggcuc

SEQ ID NO: 3340697 - RNA, 14 nt, Human
ccugaggcccagag

SEQ ID NO: 3340698 - RNA, 15 nt, Human
ccugagcugggauga

SEQ ID NO: 3340699 - RNA, 22 nt, Human
ccugaaggccccgcccaggcuu

SEQ ID NO: 3340700 - RNA, 20 nt, Human
ccugaaggccccgcccaggc

SEQ ID NO: 3340701 - RNA, 21 nt, Human
ccugaaggccccgcccaggcu

SEQ ID NO: 3340702 - RNA, 18 nt, Human
ccugaaggccccgcccag

SEQ ID NO: 3340703 - RNA, 19 nt, Human
ccugaaggccccgcccagg

SEQ ID NO: 3340704 - RNA, 14 nt, Human
ccugaaggccccgc

SEQ ID NO: 3340705 - RNA, 13 nt, Human
ccugaaagcccug

SEQ ID NO: 3340706 - RNA, 14 nt, Human
ccugaaagcccuga

SEQ ID NO: 3340707 - RNA, 21 nt, Human
ccugaagacucauucuucugu

SEQ ID NO: 3340708 - RNA, 18 nt, Human
ccugaaagcccugagcuu

SEQ ID NO: 3340709 - RNA, 22 nt, Human
ccugccuguugggccaggagcc

SEQ ID NO: 3340710 - RNA, 12 nt, Human
ccugcccugugg

SEQ ID NO: 3340711 - RNA, 14 nt, Human
ccugcccugugggc

SEQ ID NO: 3340712 - RNA, 11 nt, Human
ccugcccugug

SEQ ID NO: 3340713 - RNA, 14 nt, Human
ccugccuguugggc

SEQ ID NO: 3340714 - RNA, 11 nt, Human
ccugccucagc

SEQ ID NO: 3340715 - RNA, 12 nt, Human
ccugccucagcc

SEQ ID NO: 3340716 - RNA, 13 nt, Human
ccugccucagccu

SEQ ID NO: 3340717 - RNA, 15 nt, Human
ccugcccugugggcc

SEQ ID NO: 3340718 - RNA, 19 nt, Human
ccugcccuuaccugccagg

SEQ ID NO: 3340719 - RNA, 21 nt, Human
ccugcccuuaccugccaggaa

SEQ ID NO: 3340720 - RNA, 22 nt, Human
ccugcccuuaccugccaggaag

SEQ ID NO: 3340721 - RNA, 12 nt, Human
ccugccaggcau

SEQ ID NO: 3340722 - RNA, 22 nt, Human
ccugccagggacagagggggug

SEQ ID NO: 3340723 - RNA, 16 nt, Human
ccugcccggcugcgga

SEQ ID NO: 3340724 - RNA, 14 nt, Human
ccugcccggcugcg

SEQ ID NO: 3340725 - RNA, 21 nt, Human
cucagcggggacagcuccuuc

SEQ ID NO: 3340726 - RNA, 20 nt, Human
cucagcggggacagcuccuu

SEQ ID NO: 3340727 - RNA, 19 nt, Human
cucagcggggacagcuccu

SEQ ID NO: 3340728 - RNA, 18 nt, Human
cucagcggggacagcucc

SEQ ID NO: 3340729 - RNA, 16 nt, Human
cucagcggggacagcu

SEQ ID NO: 3340730 - RNA, 15 nt, Human
cucagcggggacagc

SEQ ID NO: 3340731 - RNA, 14 nt, Human
cucagcggggacag

SEQ ID NO: 3340732 - RNA, 23 nt, Human
cucagcggggacagcuccuucug

SEQ ID NO: 3340733 - RNA, 13 nt, Human
cucagcggggaca

SEQ ID NO: 3340734 - RNA, 16 nt, Human
cucagcaggggagggu

SEQ ID NO: 3340735 - RNA, 19 nt, Human
cucagcaaaagaugcuucu

SEQ ID NO: 3340736 - RNA, 20 nt, Human
cucagcaaaagaugcuucuc

SEQ ID NO: 3340737 - RNA, 22 nt, Human
cucagcauccuggcacccggcc

SEQ ID NO: 3340738 - RNA, 21 nt, Human
cucagcauccuggcacccggc

SEQ ID NO: 3340739 - RNA, 13 nt, Human
cucagcauccugg

SEQ ID NO: 3340740 - RNA, 14 nt, Human
cucacugcagccuc

SEQ ID NO: 3340741 - RNA, 16 nt, Human
cucacugcagccucaa

SEQ ID NO: 3340742 - RNA, 15 nt, Human
cucacugcagccuca

SEQ ID NO: 3340743 - RNA, 15 nt, Human
cucacuguugcccag

SEQ ID NO: 3340744 - RNA, 14 nt, Human
cucacuguugccca

SEQ ID NO: 3340745 - RNA, 18 nt, Human
cucacuguugcccaggcu

SEQ ID NO: 3340746 - RNA, 17 nt, Human
cucacuguugcccaggc

SEQ ID NO: 3340747 - RNA, 16 nt, Human
cucacuguugcccagg

SEQ ID NO: 3340748 - RNA, 23 nt, Human
cucagagagggugggagugggcc

SEQ ID NO: 3340749 - RNA, 19 nt, Human
cucagagagggugggagug

SEQ ID NO: 3340750 - RNA, 18 nt, Human
cucagagagggugggagu

SEQ ID NO: 3340751 - RNA, 16 nt, Human
cucagaucuucugugg

SEQ ID NO: 3340752 - RNA, 18 nt, Human
cucaggcaggugggaugg

SEQ ID NO: 3340753 - RNA, 15 nt, Human
cucaggcagguggga

SEQ ID NO: 3340754 - RNA, 18 nt, Human
cucagggccuggcucagg

SEQ ID NO: 3340755 - RNA, 19 nt, Human
cucagggccuggcucaggu

SEQ ID NO: 3340756 - RNA, 20 nt, Human
cucagggccuggcucaggug

SEQ ID NO: 3340757 - RNA, 23 nt, Human
cucaggugauccacccaccucag

SEQ ID NO: 3340758 - RNA, 22 nt, Human
cucaggugauccacccaccuca

SEQ ID NO: 3340759 - RNA, 19 nt, Human
cucagguggggucacucug

SEQ ID NO: 3340760 - RNA, 20 nt, Human
cucagguggggucacucugg

SEQ ID NO: 3340761 - RNA, 21 nt, Human
cucagguggggucacucuggc

SEQ ID NO: 3340762 - RNA, 20 nt, Human
cucagggucccugguggcag

SEQ ID NO: 3340763 - RNA, 21 nt, Human
cucagggucccugguggcagc

SEQ ID NO: 3340764 - RNA, 22 nt, Human
cucagggucccugguggcagcu

SEQ ID NO: 3340765 - RNA, 24 nt, Human
cucagggucccugguggcagcuca

SEQ ID NO: 3340766 - RNA, 18 nt, Human
cucagggucccugguggc

SEQ ID NO: 3340767 - RNA, 23 nt, Human
cucccaaagugcugggauuacag

SEQ ID NO: 3340768 - RNA, 16 nt, Human
cucccaaagugcuggg

SEQ ID NO: 3340769 - RNA, 14 nt, Human
cucccaacucaccc

SEQ ID NO: 3340770 - RNA, 15 nt, Human
cucccaacucacccc

SEQ ID NO: 3340771 - RNA, 15 nt, Human
cucccacaaaggaga

SEQ ID NO: 3340772 - RNA, 16 nt, Human
cucccaucacuucccu

SEQ ID NO: 3340773 - RNA, 14 nt, Human
cucccaucacccgc

SEQ ID NO: 3340774 - RNA, 15 nt, Human
cucccuucauccuuc

SEQ ID NO: 3340775 - RNA, 19 nt, Human
cucccgaauagcugggacu

SEQ ID NO: 3340776 - RNA, 23 nt, Human
cucccgaauagcugggacuacag

SEQ ID NO: 3340777 - RNA, 20 nt, Human
cucccgaauagcugggacua

SEQ ID NO: 3340778 - RNA, 14 nt, Human
cuccccugcugggu

SEQ ID NO: 3340779 - RNA, 21 nt, Human
cuccccugcuggguguggcgc

SEQ ID NO: 3340780 - RNA, 23 nt, Human
cuccccugcuggguguggcgcag

SEQ ID NO: 3340781 - RNA, 18 nt, Human
cucauucuccuuguguua

SEQ ID NO: 3340782 - RNA, 22 nt, Human
cucauucuccuuguguuacuaa

SEQ ID NO: 3340783 - RNA, 17 nt, Human
cucauugaccugaggcc

SEQ ID NO: 3340784 - RNA, 19 nt, Human
cucauugaccugaggcccu

SEQ ID NO: 3340785 - RNA, 21 nt, Human
cucauugaccugaggcccuuc

SEQ ID NO: 3340786 - RNA, 18 nt, Human
cuccaaaauaaaacuuuu

SEQ ID NO: 3340787 - RNA, 17 nt, Human
cuccaagcucccaggca

SEQ ID NO: 3340788 - RNA, 21 nt, Human
cucauuugucacacacuuugg

SEQ ID NO: 3340789 - RNA, 18 nt, Human
cucauuugucacacacuu

SEQ ID NO: 3340790 - RNA, 16 nt, Human
cuccagagucagaagu

SEQ ID NO: 3340791 - RNA, 13 nt, Human
cuccagccccugg

SEQ ID NO: 3340792 - RNA, 14 nt, Human
cuccagccccugga

SEQ ID NO: 3340793 - RNA, 11 nt, Human
cuccagccccu

SEQ ID NO: 3340794 - RNA, 18 nt, Human
cuccagcucaccagcccc

SEQ ID NO: 3340795 - RNA, 16 nt, Human
cuccagcucaccagcc

SEQ ID NO: 3340796 - RNA, 15 nt, Human
cuccagcucaccagc

SEQ ID NO: 3340797 - RNA, 14 nt, Human
cuccagcucaccag

SEQ ID NO: 3340798 - RNA, 24 nt, Human
cuagauacuguaucaugacaaaga

SEQ ID NO: 3340799 - RNA, 13 nt, Human
cuagauacuguau

SEQ ID NO: 3340800 - RNA, 16 nt, Human
cuagauacuguaucau

SEQ ID NO: 3340801 - RNA, 19 nt, Human
cuagccugugccucuggga

SEQ ID NO: 3340802 - RNA, 21 nt, Human
cuagccugugccucugggacu

SEQ ID NO: 3340803 - RNA, 22 nt, Human
cuagccugugccucugggacug

SEQ ID NO: 3340804 - RNA, 21 nt, Human
cuagccuuagaagucacacag

SEQ ID NO: 3340805 - RNA, 23 nt, Human
cuagccuuagaagucacacagua

SEQ ID NO: 3340806 - RNA, 22 nt, Human
cuagccuuagaagucacacagu

SEQ ID NO: 3340807 - RNA, 20 nt, Human
cuacuguccuacccacccuc

SEQ ID NO: 3340808 - RNA, 18 nt, Human
cuagagguucaaagauau

SEQ ID NO: 3340809 - RNA, 21 nt, Human
cuagagguucaaagauauuuu

SEQ ID NO: 3340810 - RNA, 17 nt, Human
cuagagguucaaagaua

SEQ ID NO: 3340811 - RNA, 15 nt, Human
cuagagguucaaaga

SEQ ID NO: 3340812 - RNA, 21 nt, Human
cuagagugaacuugggccacu

SEQ ID NO: 3340813 - RNA, 16 nt, Human
cuacucgaguuacaga

SEQ ID NO: 3340814 - RNA, 19 nt, Human
cuacucgaguuacagacaa

SEQ ID NO: 3340815 - RNA, 15 nt, Human
cuacucgaguuacag

SEQ ID NO: 3340816 - RNA, 21 nt, Human
cuacuguaauuugugauacaa

SEQ ID NO: 3340817 - RNA, 19 nt, Human
cuacuguccuacccacccu

SEQ ID NO: 3340818 - RNA, 12 nt, Human
cuacucuguguc

SEQ ID NO: 3340819 - RNA, 14 nt, Human
cuacugaggugcua

SEQ ID NO: 3340820 - RNA, 23 nt, Human
cucacacggacacucaaaagcug

SEQ ID NO: 3340821 - RNA, 16 nt, Human
cucaacucuccuccag

SEQ ID NO: 3340822 - RNA, 18 nt, Human
cucaacucuccuccagag

SEQ ID NO: 3340823 - RNA, 14 nt, Human
cucaaauuucuaaa

SEQ ID NO: 3340824 - RNA, 15 nt, Human
cucaaauuucuaaau

SEQ ID NO: 3340825 - RNA, 17 nt, Human
cucaaauuucuaaaucu

SEQ ID NO: 3340826 - RNA, 13 nt, Human
cucaaauuucuaa

SEQ ID NO: 3340827 - RNA, 14 nt, Human
cucaacucuccucc

SEQ ID NO: 3340828 - RNA, 18 nt, Human
cuauuguuagucucuuga

SEQ ID NO: 3340829 - RNA, 16 nt, Human
cuauugcugcuugagg

SEQ ID NO: 3340830 - RNA, 21 nt, Human
cuauagccuaggugacagagu

SEQ ID NO: 3340831 - RNA, 20 nt, Human
cuauagccuaggugacagag

SEQ ID NO: 3340832 - RNA, 18 nt, Human
cuauagccuaggugacag

SEQ ID NO: 3340833 - RNA, 19 nt, Human
cuauagccuaggugacaga

SEQ ID NO: 3340834 - RNA, 20 nt, Human
cuaggaacacuccuucacag

SEQ ID NO: 3340835 - RNA, 15 nt, Human
cuaggaagacuuugg

SEQ ID NO: 3340836 - RNA, 21 nt, Human
cuaugcauuugaaaauuuuga

SEQ ID NO: 3340837 - RNA, 23 nt, Human
cuauucaguaauaacucuacccu

SEQ ID NO: 3340838 - RNA, 13 nt, Human
cuauguaucaaug

SEQ ID NO: 3340839 - RNA, 17 nt, Human
cuauucaguaauaacuc

SEQ ID NO: 3340840 - RNA, 22 nt, Human
cuacauuauaaaugucucuuua

SEQ ID NO: 3340841 - RNA, 13 nt, Human
cuacauucuguua

SEQ ID NO: 3340842 - RNA, 14 nt, Human
cuacauucuguuaa

SEQ ID NO: 3340843 - RNA, 18 nt, Human
cuaccauccccuguagag

SEQ ID NO: 3340844 - RNA, 17 nt, Human
cuacccagcgagcccug

SEQ ID NO: 3340845 - RNA, 15 nt, Human
cuacccagcgagccc

SEQ ID NO: 3340846 - RNA, 12 nt, Human
cuacccaggugc

SEQ ID NO: 3340847 - RNA, 13 nt, Human
cuacccaggugcu

SEQ ID NO: 3340848 - RNA, 18 nt, Human
cuacccagcgagcccugg

SEQ ID NO: 3340849 - RNA, 17 nt, Human
cuacccucuuagaaaaa

SEQ ID NO: 3340850 - RNA, 13 nt, Human
cuacacugugcug

SEQ ID NO: 3340851 - RNA, 14 nt, Human
cuacacugugcuga

SEQ ID NO: 3340852 - RNA, 17 nt, Human
cuacacugugcugaguc

SEQ ID NO: 3340853 - RNA, 17 nt, Human
cuacagaggccaugggc

SEQ ID NO: 3340854 - RNA, 20 nt, Human
cuacagaggccaugggccuc

SEQ ID NO: 3340855 - RNA, 18 nt, Human
cuacagaggccaugggcc

SEQ ID NO: 3340856 - RNA, 22 nt, Human
cuacagaggccaugggccuccu

SEQ ID NO: 3340857 - RNA, 19 nt, Human
cuacagcuugaccgugagg

SEQ ID NO: 3340858 - RNA, 22 nt, Human
cuacagcuugaccgugaggcca

SEQ ID NO: 3340859 - RNA, 23 nt, Human
cuacagcuugaccgugaggccag

SEQ ID NO: 3340860 - RNA, 16 nt, Human
cuacaggagugagcac

SEQ ID NO: 3340861 - RNA, 15 nt, Human
cuacaggagugagca

SEQ ID NO: 3340862 - RNA, 14 nt, Human
cuacaggagugagc

SEQ ID NO: 3340863 - RNA, 17 nt, Human
cuacaggcacccaccau

SEQ ID NO: 3340864 - RNA, 15 nt, Human
cuacaggcacccacc

SEQ ID NO: 3340865 - RNA, 20 nt, Human
cuacauggaguauaugucaa

SEQ ID NO: 3340866 - RNA, 18 nt, Human
cuacauggaguauauguc

SEQ ID NO: 3340867 - RNA, 14 nt, Human
cuacaggugugagu

SEQ ID NO: 3340868 - RNA, 16 nt, Human
cuacaggugugaguca

SEQ ID NO: 3340869 - RNA, 13 nt, Human
cuaaugggacacu

SEQ ID NO: 3340870 - RNA, 12 nt, Human
cuaaugggacac

SEQ ID NO: 3340871 - RNA, 21 nt, Human
cuacacaggggaaaagaggag

SEQ ID NO: 3340872 - RNA, 21 nt, Human
cuacacacugcauguuuguga

SEQ ID NO: 3340873 - RNA, 19 nt, Human
cuaauagacaauuuauuau

SEQ ID NO: 3340874 - RNA, 23 nt, Human
cuaauagacaauuuauuauggca

SEQ ID NO: 3340875 - RNA, 17 nt, Human
cuaauagacaauuuauu

SEQ ID NO: 3340876 - RNA, 22 nt, Human
cuaagcuauucaguaauaacuc

SEQ ID NO: 3340877 - RNA, 21 nt, Human
cuaaaucuccaaaauaaaacu

SEQ ID NO: 3340878 - RNA, 20 nt, Human
cuaaaucuccaaaauaaaac

SEQ ID NO: 3340879 - RNA, 22 nt, Human
cuaaaugaaaaucgugacaaca

SEQ ID NO: 3340880 - RNA, 11 nt, Human
cuaaaauauau

SEQ ID NO: 3340881 - RNA, 21 nt, Human
cgggaggauguucugggacac

SEQ ID NO: 3340882 - RNA, 23 nt, Human
cgggaggauguucugggacacag

SEQ ID NO: 3340883 - RNA, 15 nt, Human
cuaagagggagggag

SEQ ID NO: 3340884 - RNA, 22 nt, Human
cuaagagggagggagggcucca

SEQ ID NO: 3340885 - RNA, 13 nt, Human
cuaagagggaggg

SEQ ID NO: 3340886 - RNA, 23 nt, Human
cuaagagggagggagggcuccag

SEQ ID NO: 3340887 - RNA, 12 nt, Human
cuaaccacgcug

SEQ ID NO: 3340888 - RNA, 16 nt, Human
cuaaauucaugcugcu

SEQ ID NO: 3340889 - RNA, 15 nt, Human
acccacccccaccca

SEQ ID NO: 3340890 - RNA, 17 nt, Human
acccacccccacccaag

SEQ ID NO: 3340891 - RNA, 15 nt, Human
acccacccuccuuuc

SEQ ID NO: 3340892 - RNA, 13 nt, Human
acccaugcugccc

SEQ ID NO: 3340893 - RNA, 14 nt, Human
accaucaagccacc

SEQ ID NO: 3340894 - RNA, 15 nt, Human
accaucauugaaauc

SEQ ID NO: 3340895 - RNA, 12 nt, Human
accaucauugaa

SEQ ID NO: 3340896 - RNA, 15 nt, Human
accaucaagccacca

SEQ ID NO: 3340897 - RNA, 23 nt, Human
accaucauugaaaucuuuuugcu

SEQ ID NO: 3340898 - RNA, 23 nt, Human
acaugucuuuucuugcaugaggc

SEQ ID NO: 3340899 - RNA, 21 nt, Human
acaugucuuuucuugcaugag

SEQ ID NO: 3340900 - RNA, 19 nt, Human
acaugccucucucaggcca

SEQ ID NO: 3340901 - RNA, 14 nt, Human
accagcagaaaugc

SEQ ID NO: 3340902 - RNA, 12 nt, Human
accagcagagca

SEQ ID NO: 3340903 - RNA, 13 nt, Human
accagcagagcac

SEQ ID NO: 3340904 - RNA, 17 nt, Human
accagccccagugccca

SEQ ID NO: 3340905 - RNA, 16 nt, Human
accagccccagugccc

SEQ ID NO: 3340906 - RNA, 19 nt, Human
accagccccagugcccaca

SEQ ID NO: 3340907 - RNA, 18 nt, Human
accagccccagugcccac

SEQ ID NO: 3340908 - RNA, 20 nt, Human
accagccccagugcccacag

SEQ ID NO: 3340909 - RNA, 17 nt, Human
acaugcaaggucauuuu

SEQ ID NO: 3340910 - RNA, 15 nt, Human
acaugccucucucag

SEQ ID NO: 3340911 - RNA, 16 nt, Human
acaugccucucucagg

SEQ ID NO: 3340912 - RNA, 17 nt, Human
acaugccucucucaggc

SEQ ID NO: 3340913 - RNA, 18 nt, Human
acaugccucucucaggcc

SEQ ID NO: 3340914 - RNA, 16 nt, Human
acaugcaaggucauuu

SEQ ID NO: 3340915 - RNA, 16 nt, Human
acauaagauaaaugug

SEQ ID NO: 3340916 - RNA, 15 nt, Human
acauaagauaaaugu

SEQ ID NO: 3340917 - RNA, 13 nt, Human
acagcucuguccu

SEQ ID NO: 3340918 - RNA, 16 nt, Human
acagcucuguccuggg

SEQ ID NO: 3340919 - RNA, 23 nt, Human
acaggcaagcaccuccugccucg

SEQ ID NO: 3340920 - RNA, 20 nt, Human
acaggcaagcaccuccugcc

SEQ ID NO: 3340921 - RNA, 14 nt, Human
acagcucuguccug

SEQ ID NO: 3340922 - RNA, 18 nt, Human
acagcuccuucuguccua

SEQ ID NO: 3340923 - RNA, 16 nt, Human
acagcuccuucugucc

SEQ ID NO: 3340924 - RNA, 17 nt, Human
acagaggggguggccuc

SEQ ID NO: 3340925 - RNA, 18 nt, Human
acagaggggguggccucc

SEQ ID NO: 3340926 - RNA, 19 nt, Human
acagaggggguggccuccc

SEQ ID NO: 3340927 - RNA, 15 nt, Human
acagcuccuucuguc

SEQ ID NO: 3340928 - RNA, 19 nt, Human
acaggcaagcaccuccugc

SEQ ID NO: 3340929 - RNA, 23 nt, Human
acaggugugagucaccaagccca

SEQ ID NO: 3340930 - RNA, 22 nt, Human
acaggugugagucaccaagccc

SEQ ID NO: 3340931 - RNA, 22 nt, Human
acagugagucgaggacagggag

SEQ ID NO: 3340932 - RNA, 15 nt, Human
acacgaauauugcug

SEQ ID NO: 3340933 - RNA, 21 nt, Human
acacgaauauugcugauggug

SEQ ID NO: 3340934 - RNA, 16 nt, Human
acacauuuuuuaaaug

SEQ ID NO: 3340935 - RNA, 18 nt, Human
acacauuuuuuaaaugca

SEQ ID NO: 3340936 - RNA, 14 nt, Human
acaccacuacauuc

SEQ ID NO: 3340937 - RNA, 15 nt, Human
acaccacuacauucu

SEQ ID NO: 3340938 - RNA, 17 nt, Human
acaccacuacauucugu

SEQ ID NO: 3340939 - RNA, 20 nt, Human
acaccacuacauucuguuaa

SEQ ID NO: 3340940 - RNA, 12 nt, Human
acacgaauauug

SEQ ID NO: 3340941 - RNA, 14 nt, Human
acacgaauauugcu

SEQ ID NO: 3340942 - RNA, 14 nt, Human
acacauuuuuuaaa

SEQ ID NO: 3340943 - RNA, 12 nt, Human
acacauuuuucu

SEQ ID NO: 3340944 - RNA, 21 nt, Human
acacagcucuucuccaggcug

SEQ ID NO: 3340945 - RNA, 20 nt, Human
acacagcucuucuccaggcu

SEQ ID NO: 3340946 - RNA, 19 nt, Human
acacaaaaguuucucuuuu

SEQ ID NO: 3340947 - RNA, 19 nt, Human
acacagcucuucuccaggc

SEQ ID NO: 3340948 - RNA, 13 nt, Human
acaauuuauuaug

SEQ ID NO: 3340949 - RNA, 20 nt, Human
acaaggaugaucuaggaaga

SEQ ID NO: 3340950 - RNA, 17 nt, Human
acacugugcugagucug

SEQ ID NO: 3340951 - RNA, 22 nt, Human
acacugugcugagucugaaggc

SEQ ID NO: 3340952 - RNA, 14 nt, Human
acagacaaagcgug

SEQ ID NO: 3340953 - RNA, 13 nt, Human
acagacaaagcgu

SEQ ID NO: 3340954 - RNA, 21 nt, Human
acagaggccaugggccuccug

SEQ ID NO: 3340955 - RNA, 14 nt, Human
acagaggggguggc

SEQ ID NO: 3340956 - RNA, 17 nt, Human
acagaggccaugggccu

SEQ ID NO: 3340957 - RNA, 23 nt, Human
acagaggcagccccauucugccu

SEQ ID NO: 3340958 - RNA, 13 nt, Human
acagaggcagccc

SEQ ID NO: 3340959 - RNA, 19 nt, Human
aaugucacaggcaggucca

SEQ ID NO: 3340960 - RNA, 16 nt, Human
aaugucacaggcaggu

SEQ ID NO: 3340961 - RNA, 12 nt, Human
aauuguaaggaa

SEQ ID NO: 3340962 - RNA, 20 nt, Human
aauuuauuuaugggauccug

SEQ ID NO: 3340963 - RNA, 17 nt, Human
aauuuauuauggcacau

SEQ ID NO: 3340964 - RNA, 14 nt, Human
aauuuugauguuuu

SEQ ID NO: 3340965 - RNA, 13 nt, Human
acaaaaugaaacg

SEQ ID NO: 3340966 - RNA, 22 nt, Human
acaaaaugaaacgcaaccacca

SEQ ID NO: 3340967 - RNA, 18 nt, Human
acaaacuuuucaaggcuu

SEQ ID NO: 3340968 - RNA, 11 nt, Human
accugccaggg

SEQ ID NO: 3340969 - RNA, 12 nt, Human
accugccaggga

SEQ ID NO: 3340970 - RNA, 13 nt, Human
accugccagggac

SEQ ID NO: 3340971 - RNA, 15 nt, Human
accugccagggacag

SEQ ID NO: 3340972 - RNA, 16 nt, Human
accugccagggacaga

SEQ ID NO: 3340973 - RNA, 18 nt, Human
accugccagggacagagg

SEQ ID NO: 3340974 - RNA, 17 nt, Human
accucuugagccuugaa

SEQ ID NO: 3340975 - RNA, 19 nt, Human
accucuugagccuugaacu

SEQ ID NO: 3340976 - RNA, 20 nt, Human
accucuugagccuugaacuu

SEQ ID NO: 3340977 - RNA, 16 nt, Human
accgugaggccagaga

SEQ ID NO: 3340978 - RNA, 11 nt, Human
accucaggccu

SEQ ID NO: 3340979 - RNA, 12 nt, Human
accucaggccug

SEQ ID NO: 3340980 - RNA, 13 nt, Human
accucaggccugg

SEQ ID NO: 3340981 - RNA, 14 nt, Human
accucaggccuggg

SEQ ID NO: 3340982 - RNA, 22 nt, Human
accucaggccugggggcugggc

SEQ ID NO: 3340983 - RNA, 18 nt, Human
accucaggugagaagcag

SEQ ID NO: 3340984 - RNA, 17 nt, Human
acccuguuaccauuuug

SEQ ID NO: 3340985 - RNA, 22 nt, Human
acccugugauggggcccugccu

SEQ ID NO: 3340986 - RNA, 21 nt, Human
acccugugauggggcccugcc

SEQ ID NO: 3340987 - RNA, 16 nt, Human
accccacacacgccag

SEQ ID NO: 3340988 - RNA, 14 nt, Human
acccaugcugcccu

SEQ ID NO: 3340989 - RNA, 15 nt, Human
acccaugcugcccug

SEQ ID NO: 3340990 - RNA, 14 nt, Human
accggcuggccugg

SEQ ID NO: 3340991 - RNA, 15 nt, Human
accggcuggccuggc

SEQ ID NO: 3340992 - RNA, 17 nt, Human
accggcuggccuggccc

SEQ ID NO: 3340993 - RNA, 18 nt, Human
accggcuggccuggcccc

SEQ ID NO: 3340994 - RNA, 20 nt, Human
accgggcacucagaagacac

SEQ ID NO: 3340995 - RNA, 14 nt, Human
accgugaggccaga

SEQ ID NO: 3340996 - RNA, 19 nt, Human
accgggccacagagaaagu

SEQ ID NO: 3340997 - RNA, 15 nt, Human
accgggccacagaga

SEQ ID NO: 3340998 - RNA, 17 nt, Human
acuagggaagauaauau

SEQ ID NO: 3340999 - RNA, 16 nt, Human
acuauuguuagucucu

SEQ ID NO: 3341000 - RNA, 11 nt, Human
accugugucuc

SEQ ID NO: 3341001 - RNA, 15 nt, Human
acuaauagacaauuu

SEQ ID NO: 3341002 - RNA, 23 nt, Human
acgucugacaggcaaugcuggcu

SEQ ID NO: 3341003 - RNA, 15 nt, Human
acgucugacaggcaa

SEQ ID NO: 3341004 - RNA, 18 nt, Human
acgcuggagugcagugag

SEQ ID NO: 3341005 - RNA, 19 nt, Human
acgcuggagugcagugagc

SEQ ID NO: 3341006 - RNA, 15 nt, Human
acggaagagccuugc

SEQ ID NO: 3341007 - RNA, 16 nt, Human
acggaagagccuugcg

SEQ ID NO: 3341008 - RNA, 19 nt, Human
acggacacucaaaagcugg

SEQ ID NO: 3341009 - RNA, 15 nt, Human
acugcccggcagggu

SEQ ID NO: 3341010 - RNA, 16 nt, Human
acugcuuuuggucugu

SEQ ID NO: 3341011 - RNA, 15 nt, Human
acugcuuuuggucug

SEQ ID NO: 3341012 - RNA, 14 nt, Human
acugcuuuuggucu

SEQ ID NO: 3341013 - RNA, 22 nt, Human
acugcccggcaggguccuagaa

SEQ ID NO: 3341014 - RNA, 23 nt, Human
acugauuuuuuuuuccuucagug

SEQ ID NO: 3341015 - RNA, 20 nt, Human
acugauuuuuuuuuccuuca

SEQ ID NO: 3341016 - RNA, 21 nt, Human
acugauuuuuuuuuccuucag

SEQ ID NO: 3341017 - RNA, 22 nt, Human
acugauuuuuuuuuccuucagu

SEQ ID NO: 3341018 - RNA, 23 nt, Human
acugacauuguuggccaaagcca

SEQ ID NO: 3341019 - RNA, 22 nt, Human
acugacauuguuggccaaagcc

SEQ ID NO: 3341020 - RNA, 13 nt, Human
acugaucucucgu

SEQ ID NO: 3341021 - RNA, 22 nt, Human
acugauggcuaauguacugcau

SEQ ID NO: 3341022 - RNA, 22 nt, Human
acugaugggcaacccccagccu

SEQ ID NO: 3341023 - RNA, 12 nt, Human
acugaugggcaa

SEQ ID NO: 3341024 - RNA, 19 nt, Human
acucugucucaaaaaaaca

SEQ ID NO: 3341025 - RNA, 19 nt, Human
acucugugucagguggggc

SEQ ID NO: 3341026 - RNA, 21 nt, Human
acucugugucagguggggcag

SEQ ID NO: 3341027 - RNA, 17 nt, Human
acuucuuauacauuuga

SEQ ID NO: 3341028 - RNA, 20 nt, Human
acuucugccauauucuguug

SEQ ID NO: 3341029 - RNA, 19 nt, Human
acuucugccauauucuguu

SEQ ID NO: 3341030 - RNA, 14 nt, Human
acuuaaauaaugug

SEQ ID NO: 3341031 - RNA, 16 nt, Human
aagacuuuggaaagag

SEQ ID NO: 3341032 - RNA, 16 nt, Human
aagacuuuggaaagac

SEQ ID NO: 3341033 - RNA, 21 nt, Human
aagagagagaaacaaacuuuu

SEQ ID NO: 3341034 - RNA, 20 nt, Human
aagagagagaaacaaacuuu

SEQ ID NO: 3341035 - RNA, 19 nt, Human
aagagagagaaacaaacuu

SEQ ID NO: 3341036 - RNA, 20 nt, Human
aagauucauauuuacuucuu

SEQ ID NO: 3341037 - RNA, 19 nt, Human
aagauuuugaaauuuuuau

SEQ ID NO: 3341038 - RNA, 19 nt, Human
aagccaccaacauacuccc

SEQ ID NO: 3341039 - RNA, 21 nt, Human
aagcagaggaaggagaggaga

SEQ ID NO: 3341040 - RNA, 23 nt, Human
aaggaaugauuaauuaaaacaca

SEQ ID NO: 3341041 - RNA, 16 nt, Human
aagcugcugacagugu

SEQ ID NO: 3341042 - RNA, 11 nt, Human
aagcugccagc

SEQ ID NO: 3341043 - RNA, 12 nt, Human
aagcugccagcc

SEQ ID NO: 3341044 - RNA, 22 nt, Human
aagcugccagccgagauagcca

SEQ ID NO: 3341045 - RNA, 14 nt, Human
aagcugcugacagu

SEQ ID NO: 3341046 - RNA, 20 nt, Human
aagcgugagccacugcaccg

SEQ ID NO: 3341047 - RNA, 17 nt, Human
aagcgugagccacugca

SEQ ID NO: 3341048 - RNA, 16 nt, Human
aagcgauucuucugcu

SEQ ID NO: 3341049 - RNA, 16 nt, Human
aagcgugagccacugc

SEQ ID NO: 3341050 - RNA, 14 nt, Human
aagcgauucuucug

SEQ ID NO: 3341051 - RNA, 15 nt, Human
aagcgauucuucugc

SEQ ID NO: 3341052 - RNA, 15 nt, Human
aagccagcaggcucu

SEQ ID NO: 3341053 - RNA, 18 nt, Human
aagccagcaggcucucag

SEQ ID NO: 3341054 - RNA, 21 nt, Human
aagccaccaacauacucccau

SEQ ID NO: 3341055 - RNA, 18 nt, Human
aagggacgcuacccggga

SEQ ID NO: 3341056 - RNA, 20 nt, Human
aagggacuuggaagcuccgc

SEQ ID NO: 3341057 - RNA, 20 nt, Human
aagguuaauguucaucaucc

SEQ ID NO: 3341058 - RNA, 15 nt, Human
aaugucacaggcagg

SEQ ID NO: 3341059 - RNA, 15 nt, Human
aaugggggugcauuu

SEQ ID NO: 3341060 - RNA, 17 nt, Human
aaugggggugcauuuga

SEQ ID NO: 3341061 - RNA, 14 nt, Human
aaugggagcucaug

SEQ ID NO: 3341062 - RNA, 13 nt, Human
aaugggacacuaa

SEQ ID NO: 3341063 - RNA, 21 nt, Human
aaugcgugcauaccacuuuug

SEQ ID NO: 3341064 - RNA, 23 nt, Human
aaugcgugcauaccacuuuuguu

SEQ ID NO: 3341065 - RNA, 12 nt, Human
aaugauuaauua

SEQ ID NO: 3341066 - RNA, 13 nt, Human
aaugauuaauuaa

SEQ ID NO: 3341067 - RNA, 15 nt, Human
aaugauagcuacugu

SEQ ID NO: 3341068 - RNA, 18 nt, Human
aaucuccaaaauaaaacu

SEQ ID NO: 3341069 - RNA, 21 nt, Human
aauaccugucccccugacaac

SEQ ID NO: 3341070 - RNA, 19 nt, Human
aauaauguuaacauggaca

SEQ ID NO: 3341071 - RNA, 13 nt, Human
aagugcugcauuu

SEQ ID NO: 3341072 - RNA, 16 nt, Human
aacagcuaaugggaca

SEQ ID NO: 3341073 - RNA, 19 nt, Human
aaccaguguuguggauuua

SEQ ID NO: 3341074 - RNA, 17 nt, Human
aaccaguguuguggauu

SEQ ID NO: 3341075 - RNA, 13 nt, Human
aacccuucagugc

SEQ ID NO: 3341076 - RNA, 15 nt, Human
aacauggaaguacua

SEQ ID NO: 3341077 - RNA, 22 nt, Human
aacaugcuacacacugcauguu

SEQ ID NO: 3341078 - RNA, 15 nt, Human
aacucaccccagccc

SEQ ID NO: 3341079 - RNA, 18 nt, Human
aacucaccccagccccaa

SEQ ID NO: 3341080 - RNA, 16 nt, Human
aacucaccccagcccc

SEQ ID NO: 3341081 - RNA, 17 nt, Human
aacucaccccagcccca

SEQ ID NO: 3341082 - RNA, 17 nt, Human
aacucaaacucuuaaaa

SEQ ID NO: 3341083 - RNA, 15 nt, Human
aaauggacguguuau

SEQ ID NO: 3341084 - RNA, 17 nt, Human
aaauggacguguuauga

SEQ ID NO: 3341085 - RNA, 14 nt, Human
aaauggacguguua

SEQ ID NO: 3341086 - RNA, 22 nt, Human
aaaucuccaaaauaaaacuuuu

SEQ ID NO: 3341087 - RNA, 19 nt, Human
aaaucuccaaaauaaaacu

SEQ ID NO: 3341088 - RNA, 21 nt, Human
aacacauacaggaagguagaa

SEQ ID NO: 3341089 - RNA, 22 nt, Human
aacaaaccuguuucugcagcca

SEQ ID NO: 3341090 - RNA, 12 nt, Human
aaauuaacuuuu

SEQ ID NO: 3341091 - RNA, 13 nt, Human
aaauuaacuuuua

SEQ ID NO: 3341092 - RNA, 14 nt, Human
aaauuaacuuuuau

SEQ ID NO: 3341093 - RNA, 17 nt, Human
aaacagcuaaugggaca

SEQ ID NO: 3341094 - RNA, 15 nt, Human
aaaauuagccaagug

SEQ ID NO: 3341095 - RNA, 15 nt, Human
aaagauacaguuacu

SEQ ID NO: 3341096 - RNA, 20 nt, Human
aaacugauuuuuuuuuccuu

SEQ ID NO: 3341097 - RNA, 13 nt, Human
aaacugauuuuuu

SEQ ID NO: 3341098 - RNA, 19 nt, Human
aaacugauuuuuuuuuccu

SEQ ID NO: 3341099 - RNA, 14 nt, Human
aaacccuucagugc

SEQ ID NO: 3341100 - RNA, 17 nt, Human
aaacucuugaccucagg

SEQ ID NO: 3341101 - RNA, 18 nt, Human
aaacccagcucuggucca

SEQ ID NO: 3341102 - RNA, 17 nt, Human
aaaccccaucucuacaa

SEQ ID NO: 3341103 - RNA, 11 nt, Human
aaauaaauuau

SEQ ID NO: 3341104 - RNA, 15 nt, Human
aaagccaaagcuagg

SEQ ID NO: 3341105 - RNA, 22 nt, Human
aaaggcuccaggagcagccaca

SEQ ID NO: 3341106 - RNA, 20 nt, Human
aaaggcuccaggagcagcca

SEQ ID NO: 3341107 - RNA, 21 nt, Human
aaaggcuccaggagcagccac

SEQ ID NO: 3341108 - RNA, 17 nt, Human
aaaggcuaccuuuguau

SEQ ID NO: 3341109 - RNA, 14 nt, Human
aaaggcuaccuuug

SEQ ID NO: 3341110 - RNA, 14 nt, Human
aaaggcuccaggag

SEQ ID NO: 3341111 - RNA, 22 nt, Human
agaggacuuuucuuuguggcuu

SEQ ID NO: 3341112 - RNA, 21 nt, Human
agaggacuuuucuuuguggcu

SEQ ID NO: 3341113 - RNA, 14 nt, Human
agaggacuuuucuu

SEQ ID NO: 3341114 - RNA, 17 nt, Human
agaggggguggccuccc

SEQ ID NO: 3341115 - RNA, 19 nt, Human
agaggggguggccucccaa

SEQ ID NO: 3341116 - RNA, 13 nt, Human
agagggccugcaa

SEQ ID NO: 3341117 - RNA, 16 nt, Human
agagggccugcaaggg

SEQ ID NO: 3341118 - RNA, 16 nt, Human
agagagaccacuuuuc

SEQ ID NO: 3341119 - RNA, 13 nt, Human
agagccagggucu

SEQ ID NO: 3341120 - RNA, 13 nt, Human
agacucugucuca

SEQ ID NO: 3341121 - RNA, 18 nt, Human
agacucugucucaaaaaa

SEQ ID NO: 3341122 - RNA, 22 nt, Human
agacugaguacguugugcauuu

SEQ ID NO: 3341123 - RNA, 20 nt, Human
agacugaguacguugugcau

SEQ ID NO: 3341124 - RNA, 21 nt, Human
agacaaugacuuacuguacau

SEQ ID NO: 3341125 - RNA, 22 nt, Human
agacaaugacuuacuguacaug

SEQ ID NO: 3341126 - RNA, 19 nt, Human
agacaaugacuuacuguac

SEQ ID NO: 3341127 - RNA, 15 nt, Human
agacagagcuacaca

SEQ ID NO: 3341128 - RNA, 20 nt, Human
agacagagucucacuguugc

SEQ ID NO: 3341129 - RNA, 19 nt, Human
agacagagucucacuguug

SEQ ID NO: 3341130 - RNA, 13 nt, Human
agacagagcuaca

SEQ ID NO: 3341131 - RNA, 11 nt, Human
agacagagucu

SEQ ID NO: 3341132 - RNA, 20 nt, Human
agacaaugacuuacuguaca

SEQ ID NO: 3341133 - RNA, 15 nt, Human
agaccacguuucuaa

SEQ ID NO: 3341134 - RNA, 22 nt, Human
agacagauacuccuccaagguu

SEQ ID NO: 3341135 - RNA, 21 nt, Human
agacagagucucacuguugcc

SEQ ID NO: 3341136 - RNA, 14 nt, Human
agaaguaacuuacu

SEQ ID NO: 3341137 - RNA, 21 nt, Human
agaagacacugaugggcaacc

SEQ ID NO: 3341138 - RNA, 13 nt, Human
agaagacacugau

SEQ ID NO: 3341139 - RNA, 23 nt, Human
agaagagaaugcacaaacagagg

SEQ ID NO: 3341140 - RNA, 19 nt, Human
agaaugcacaaacagaggc

SEQ ID NO: 3341141 - RNA, 16 nt, Human
agaaugaaagggccca

SEQ ID NO: 3341142 - RNA, 18 nt, Human
agaaugaaagggcccaga

SEQ ID NO: 3341143 - RNA, 16 nt, Human
agccaaagcuaggccu

SEQ ID NO: 3341144 - RNA, 17 nt, Human
agcauccuggcacccgg

SEQ ID NO: 3341145 - RNA, 14 nt, Human
agcauccuggcacc

SEQ ID NO: 3341146 - RNA, 14 nt, Human
agccagcaggcucu

SEQ ID NO: 3341147 - RNA, 17 nt, Human
agccagaggagagagga

SEQ ID NO: 3341148 - RNA, 13 nt, Human
agccagaggagag

SEQ ID NO: 3341149 - RNA, 15 nt, Human
agccagaggagagag

SEQ ID NO: 3341150 - RNA, 11 nt, Human
agccagaggag

SEQ ID NO: 3341151 - RNA, 16 nt, Human
agccagcaggcucuca

SEQ ID NO: 3341152 - RNA, 14 nt, Human
agcccaccuuggcu

SEQ ID NO: 3341153 - RNA, 16 nt, Human
agcccaccuuggcuca

SEQ ID NO: 3341154 - RNA, 14 nt, Human
agcccacgccccca

SEQ ID NO: 3341155 - RNA, 20 nt, Human
agcccacgcccccacuggug

SEQ ID NO: 3341156 - RNA, 23 nt, Human
agcccacgcccccacuggugaca

SEQ ID NO: 3341157 - RNA, 13 nt, Human
agcauccuggcac

SEQ ID NO: 3341158 - RNA, 19 nt, Human
agccccauucugccugccc

SEQ ID NO: 3341159 - RNA, 18 nt, Human
agccccauucugccugcc

SEQ ID NO: 3341160 - RNA, 17 nt, Human
agccccauucugccugc

SEQ ID NO: 3341161 - RNA, 11 nt, Human
agccccauccu

SEQ ID NO: 3341162 - RNA, 17 nt, Human
agccccauccucuguac

SEQ ID NO: 3341163 - RNA, 23 nt, Human
agccccauccucuguacagagcc

SEQ ID NO: 3341164 - RNA, 15 nt, Human
agccccauccucugu

SEQ ID NO: 3341165 - RNA, 17 nt, Human
agcccgggcucugccuc

SEQ ID NO: 3341166 - RNA, 18 nt, Human
agcccgggcucugccucc

SEQ ID NO: 3341167 - RNA, 20 nt, Human
agcccgggcucugccuccca

SEQ ID NO: 3341168 - RNA, 24 nt, Human
agccccaaaacucuccucugcugc

SEQ ID NO: 3341169 - RNA, 19 nt, Human
agcacgauuucuguuuaga

SEQ ID NO: 3341170 - RNA, 21 nt, Human
agcacgauuucuguuuagaua

SEQ ID NO: 3341171 - RNA, 17 nt, Human
agcacgauuucuguuua

SEQ ID NO: 3341172 - RNA, 16 nt, Human
agcacagacccugccc

SEQ ID NO: 3341173 - RNA, 14 nt, Human
agcacagacccugc

SEQ ID NO: 3341174 - RNA, 15 nt, Human
agcacagacccugcc

SEQ ID NO: 3341175 - RNA, 12 nt, Human
agcacagacccu

SEQ ID NO: 3341176 - RNA, 21 nt, Human
agauugcaacaggcugggcuu

SEQ ID NO: 3341177 - RNA, 20 nt, Human
agauugcaacaggcugggcu

SEQ ID NO: 3341178 - RNA, 19 nt, Human
agauugcaacaggcugggc

SEQ ID NO: 3341179 - RNA, 19 nt, Human
agauucuuuccugaggcug

SEQ ID NO: 3341180 - RNA, 21 nt, Human
agauucuuuccugaggcuggg

SEQ ID NO: 3341181 - RNA, 18 nt, Human
agauucuuuccugaggcu

SEQ ID NO: 3341182 - RNA, 18 nt, Human
agcaaaagaugcuucuca

SEQ ID NO: 3341183 - RNA, 20 nt, Human
agcaaaggagauuggaagga

SEQ ID NO: 3341184 - RNA, 14 nt, Human
agaugagugagcau

SEQ ID NO: 3341185 - RNA, 17 nt, Human
agcuggucccacucagu

SEQ ID NO: 3341186 - RNA, 16 nt, Human
agcuggucccacucag

SEQ ID NO: 3341187 - RNA, 14 nt, Human
agcugcugacagug

SEQ ID NO: 3341188 - RNA, 13 nt, Human
agcugcugacagu

SEQ ID NO: 3341189 - RNA, 18 nt, Human
agcuggucccacucaguc

SEQ ID NO: 3341190 - RNA, 16 nt, Human
agcugguugagguuuc

SEQ ID NO: 3341191 - RNA, 22 nt, Human
agcugguuuuuagcggagacgg

SEQ ID NO: 3341192 - RNA, 18 nt, Human
agcugcgguccacccagg

SEQ ID NO: 3341193 - RNA, 17 nt, Human
agcugcgguccacccag

SEQ ID NO: 3341194 - RNA, 16 nt, Human
agcugcgguccaccca

SEQ ID NO: 3341195 - RNA, 13 nt, Human
agcugcgguccac

SEQ ID NO: 3341196 - RNA, 20 nt, Human
agcugcgguccacccaggag

SEQ ID NO: 3341197 - RNA, 19 nt, Human
agcugcgguccacccagga

SEQ ID NO: 3341198 - RNA, 12 nt, Human
agcugcugacag

SEQ ID NO: 3341199 - RNA, 15 nt, Human
agcugaaccugggua

SEQ ID NO: 3341200 - RNA, 15 nt, Human
agcucaccucucccu

SEQ ID NO: 3341201 - RNA, 18 nt, Human
agcucaccucucccuugg

SEQ ID NO: 3341202 - RNA, 19 nt, Human
agcucaccucucccuugga

SEQ ID NO: 3341203 - RNA, 12 nt, Human
agcucaccucuc

SEQ ID NO: 3341204 - RNA, 15 nt, Human
agcucaccagcccca

SEQ ID NO: 3341205 - RNA, 19 nt, Human
agcucaccagccccagugc

SEQ ID NO: 3341206 - RNA, 18 nt, Human
agcucagagaggguggga

SEQ ID NO: 3341207 - RNA, 14 nt, Human
agcucagagagggu

SEQ ID NO: 3341208 - RNA, 12 nt, Human
agcucagagagg

SEQ ID NO: 3341209 - RNA, 15 nt, Human
agcuaaugggacacu

SEQ ID NO: 3341210 - RNA, 16 nt, Human
agcucaccagccccag

SEQ ID NO: 3341211 - RNA, 12 nt, Human
agccugggaggu

SEQ ID NO: 3341212 - RNA, 13 nt, Human
agcgagcccuggu

SEQ ID NO: 3341213 - RNA, 19 nt, Human
agcgagcccugguggcagu

SEQ ID NO: 3341214 - RNA, 15 nt, Human
aggagaggagagggg

SEQ ID NO: 3341215 - RNA, 18 nt, Human
agcuucauuuccuguguc

SEQ ID NO: 3341216 - RNA, 19 nt, Human
agcuucauuuccugugucu

SEQ ID NO: 3341217 - RNA, 22 nt, Human
agcuuuguuuguugucagcuga

SEQ ID NO: 3341218 - RNA, 23 nt, Human
agcuuuguuuguugucagcugaa

SEQ ID NO: 3341219 - RNA, 12 nt, Human
aggaacaaggca

SEQ ID NO: 3341220 - RNA, 13 nt, Human
aggaacaaggcaa

SEQ ID NO: 3341221 - RNA, 16 nt, Human
aggaacaaggcaaggc

SEQ ID NO: 3341222 - RNA, 17 nt, Human
aggaacaaggcaaggcu

SEQ ID NO: 3341223 - RNA, 19 nt, Human
aggaacaaggcaaggcugu

SEQ ID NO: 3341224 - RNA, 20 nt, Human
aggaacaaggcaaggcuguc

SEQ ID NO: 3341225 - RNA, 21 nt, Human
aggaacuuaaauaaugugaaa

SEQ ID NO: 3341226 - RNA, 15 nt, Human
aggaauaccuguccc

SEQ ID NO: 3341227 - RNA, 18 nt, Human
aggaauaccugucccccu

SEQ ID NO: 3341228 - RNA, 22 nt, Human
aggaauaccugucccccugaca

SEQ ID NO: 3341229 - RNA, 14 nt, Human
agguacucuccugg

SEQ ID NO: 3341230 - RNA, 13 nt, Human
agguacucuccug

SEQ ID NO: 3341231 - RNA, 14 nt, Human
agguaacaggcaga

SEQ ID NO: 3341232 - RNA, 13 nt, Human
agguaacaggcag

SEQ ID NO: 3341233 - RNA, 16 nt, Human
agguaacaggcagaua

SEQ ID NO: 3341234 - RNA, 22 nt, Human
agguacgaaaagaggggaagag

SEQ ID NO: 3341235 - RNA, 22 nt, Human
aggguuuugccauguuggccag

SEQ ID NO: 3341236 - RNA, 21 nt, Human
aggggccucuuaugggcuggg

SEQ ID NO: 3341237 - RNA, 22 nt, Human
aggggcccaaauucuuucagug

SEQ ID NO: 3341238 - RNA, 16 nt, Human
agggucccugguggca

SEQ ID NO: 3341239 - RNA, 17 nt, Human
agggucccugguggcag

SEQ ID NO: 3341240 - RNA, 20 nt, Human
agggucccugguggcagcuc

SEQ ID NO: 3341241 - RNA, 22 nt, Human
agggucccugguggcagcucac

SEQ ID NO: 3341242 - RNA, 12 nt, Human
agggucccuggu

SEQ ID NO: 3341243 - RNA, 14 nt, Human
agggucccuggugg

SEQ ID NO: 3341244 - RNA, 13 nt, Human
aggguauuccaga

SEQ ID NO: 3341245 - RNA, 21 nt, Human
aggguaucuggugacuuuccu

SEQ ID NO: 3341246 - RNA, 15 nt, Human
aggguaucuggugac

SEQ ID NO: 3341247 - RNA, 16 nt, Human
agggauacccauccca

SEQ ID NO: 3341248 - RNA, 12 nt, Human
agggccuggccu

SEQ ID NO: 3341249 - RNA, 13 nt, Human
agggccuggccug

SEQ ID NO: 3341250 - RNA, 15 nt, Human
agggccugcaaggga

SEQ ID NO: 3341251 - RNA, 14 nt, Human
agggccugcaaggg

SEQ ID NO: 3341252 - RNA, 18 nt, Human
aggcauuccccaggaggc

SEQ ID NO: 3341253 - RNA, 17 nt, Human
aggcauuccccaggagg

SEQ ID NO: 3341254 - RNA, 12 nt, Human
aggcauguucuc

SEQ ID NO: 3341255 - RNA, 19 nt, Human
aggcauguucucugaggac

SEQ ID NO: 3341256 - RNA, 18 nt, Human
aggcauguucucugagga

SEQ ID NO: 3341257 - RNA, 19 nt, Human
aggcaugugaugagaggaa

SEQ ID NO: 3341258 - RNA, 20 nt, Human
aggcaugugaugagaggaaa

SEQ ID NO: 3341259 - RNA, 17 nt, Human
aggcauguucucugagg

SEQ ID NO: 3341260 - RNA, 17 nt, Human
aggcaugugaugagagg

SEQ ID NO: 3341261 - RNA, 15 nt, Human
aggcaugguggccca

SEQ ID NO: 3341262 - RNA, 19 nt, Human
aggcauuccccaggaggcc

SEQ ID NO: 3341263 - RNA, 20 nt, Human
aggcauuccccaggaggcca

SEQ ID NO: 3341264 - RNA, 23 nt, Human
aggccagcugcuugggcuucauc

SEQ ID NO: 3341265 - RNA, 13 nt, Human
aggccaggcccuc

SEQ ID NO: 3341266 - RNA, 14 nt, Human
aggccaggcccucu

SEQ ID NO: 3341267 - RNA, 15 nt, Human
aggccaggcccucug

SEQ ID NO: 3341268 - RNA, 15 nt, Human
aggcccuucucucca

SEQ ID NO: 3341269 - RNA, 12 nt, Human
aggcccuucucu

SEQ ID NO: 3341270 - RNA, 22 nt, Human
aggcccucugcccacucccugc

SEQ ID NO: 3341271 - RNA, 23 nt, Human
aggcccucugcccacucccugca

SEQ ID NO: 3341272 - RNA, 21 nt, Human
aggcccucugcccacucccug

SEQ ID NO: 3341273 - RNA, 18 nt, Human
aggcuggguucugauccu

SEQ ID NO: 3341274 - RNA, 13 nt, Human
aggcuaccuuugu

SEQ ID NO: 3341275 - RNA, 14 nt, Human
aggcuaccuuugua

SEQ ID NO: 3341276 - RNA, 15 nt, Human
aggcuaccuuuguau

SEQ ID NO: 3341277 - RNA, 17 nt, Human
aggcuuagucacugaga

SEQ ID NO: 3341278 - RNA, 18 nt, Human
aggcuguaucccaugagc

SEQ ID NO: 3341279 - RNA, 22 nt, Human
aggcuguaucccaugagccuca

SEQ ID NO: 3341280 - RNA, 21 nt, Human
aggcuguaucccaugagccuc

SEQ ID NO: 3341281 - RNA, 20 nt, Human
aggcuguaucccaugagccu

SEQ ID NO: 3341282 - RNA, 17 nt, Human
aggcuggguucugaucc

SEQ ID NO: 3341283 - RNA, 18 nt, Human
aggcuuagucacugagac

SEQ ID NO: 3341284 - RNA, 15 nt, Human
agggacccuccacca

SEQ ID NO: 3341285 - RNA, 14 nt, Human
aguacuauguauca

SEQ ID NO: 3341286 - RNA, 12 nt, Human
aguacuauguau

SEQ ID NO: 3341287 - RNA, 22 nt, Human
aguacuucuccacccugcucuc

SEQ ID NO: 3341288 - RNA, 12 nt, Human
aguacuucuuuu

SEQ ID NO: 3341289 - RNA, 17 nt, Human
aguacuucuccacccug

SEQ ID NO: 3341290 - RNA, 19 nt, Human
aguacuacaguccucccau

SEQ ID NO: 3341291 - RNA, 22 nt, Human
aguacuacaguccucccaucuc

SEQ ID NO: 3341292 - RNA, 14 nt, Human
aguacuauaauuua

SEQ ID NO: 3341293 - RNA, 16 nt, Human
aguacguugugcauuu

SEQ ID NO: 3341294 - RNA, 17 nt, Human
aguacguugugcauuug

SEQ ID NO: 3341295 - RNA, 18 nt, Human
aguacguugugcauuugg

SEQ ID NO: 3341296 - RNA, 15 nt, Human
aguacguugugcauu

SEQ ID NO: 3341297 - RNA, 14 nt, Human
aguacguugugcau

SEQ ID NO: 3341298 - RNA, 13 nt, Human
aggucuguucuuu

SEQ ID NO: 3341299 - RNA, 15 nt, Human
aggucuguucuuucc

SEQ ID NO: 3341300 - RNA, 16 nt, Human
aggucuguucuuucca

SEQ ID NO: 3341301 - RNA, 22 nt, Human
agucacacaguauuacuucugc

SEQ ID NO: 3341302 - RNA, 20 nt, Human
aguaugaggcauuuguuuga

SEQ ID NO: 3341303 - RNA, 21 nt, Human
aguaugaggcauuuguuugaa

SEQ ID NO: 3341304 - RNA, 23 nt, Human
aguaugaggcauuuguuugaacu

SEQ ID NO: 3341305 - RNA, 17 nt, Human
aguaugaggcauuuguu

SEQ ID NO: 3341306 - RNA, 14 nt, Human
aguccucuuuucug

SEQ ID NO: 3341307 - RNA, 19 nt, Human
aguccucuuuucugagagg

SEQ ID NO: 3341308 - RNA, 20 nt, Human
aguccuuaccagcagagcac

SEQ ID NO: 3341309 - RNA, 22 nt, Human
aguccucuuuucugagaggacu

SEQ ID NO: 3341310 - RNA, 19 nt, Human
aguccuuaccagcagagca

SEQ ID NO: 3341311 - RNA, 17 nt, Human
agucugaaggcuggguu

SEQ ID NO: 3341312 - RNA, 15 nt, Human
aguucaucuugaauu

SEQ ID NO: 3341313 - RNA, 19 nt, Human
aguucaucuugaauuguaa

SEQ ID NO: 3341314 - RNA, 13 nt, Human
aguucaucuugaa

SEQ ID NO: 3341315 - RNA, 16 nt, Human
aguugauacuacaguu

SEQ ID NO: 3341316 - RNA, 16 nt, Human
agugccuuauggaaca

SEQ ID NO: 3341317 - RNA, 10 nt, Human
agugccuuau

SEQ ID NO: 3341318 - RNA, 13 nt, Human
agugccuuaugga

SEQ ID NO: 3341319 - RNA, 14 nt, Human
agugccuuauggaa

SEQ ID NO: 3341320 - RNA, 15 nt, Human
agugccuuauggaac

SEQ ID NO: 3341321 - RNA, 24 nt, Human
agugauccucccaccucagccucc

SEQ ID NO: 3341322 - RNA, 23 nt, Human
agugauccucccaccucagccuc

SEQ ID NO: 3341323 - RNA, 18 nt, Human
agugauccucccaccuca

SEQ ID NO: 3341324 - RNA, 15 nt, Human
agugauccucccacc

SEQ ID NO: 3341325 - RNA, 14 nt, Human
agugauccucccac

SEQ ID NO: 3341326 - RNA, 17 nt, Human
agugccuuacacaaugg

SEQ ID NO: 3341327 - RNA, 15 nt, Human
agugauucuccugcc

SEQ ID NO: 3341328 - RNA, 18 nt, Human
agugccuuacacaauggu

SEQ ID NO: 3341329 - RNA, 14 nt, Human
agugauucuccugc

SEQ ID NO: 3341330 - RNA, 13 nt, Human
agugauccuccca

SEQ ID NO: 3341331 - RNA, 16 nt, Human
agugggagcugccugu

SEQ ID NO: 3341332 - RNA, 19 nt, Human
auauucaggaagcucaggg

SEQ ID NO: 3341333 - RNA, 17 nt, Human
auauucaggaagcucag

SEQ ID NO: 3341334 - RNA, 23 nt, Human
auauucaaccauggacuuuauaa

SEQ ID NO: 3341335 - RNA, 21 nt, Human
auauucaaccauggacuuuau

SEQ ID NO: 3341336 - RNA, 17 nt, Human
auauucaaccauggacu

SEQ ID NO: 3341337 - RNA, 12 nt, Human
auauucaaccau

SEQ ID NO: 3341338 - RNA, 11 nt, Human
auauucaacca

SEQ ID NO: 3341339 - RNA, 22 nt, Human
auaugcacacauuuuuuaaaug

SEQ ID NO: 3341340 - RNA, 17 nt, Human
auaugcucugcauguua

SEQ ID NO: 3341341 - RNA, 16 nt, Human
auaugcucugcauguu

SEQ ID NO: 3341342 - RNA, 20 nt, Human
auaugcucugcauguuacau

SEQ ID NO: 3341343 - RNA, 17 nt, Human
auagccuaggugacaga

SEQ ID NO: 3341344 - RNA, 15 nt, Human
auagccuaggugaca

SEQ ID NO: 3341345 - RNA, 17 nt, Human
auagcacagacccugcc

SEQ ID NO: 3341346 - RNA, 18 nt, Human
auagcacagacccugccc

SEQ ID NO: 3341347 - RNA, 18 nt, Human
auagaaauauauacgaac

SEQ ID NO: 3341348 - RNA, 15 nt, Human
auagcacagacccug

SEQ ID NO: 3341349 - RNA, 14 nt, Human
auagaaauauauac

SEQ ID NO: 3341350 - RNA, 18 nt, Human
auaacauguaauuaagua

SEQ ID NO: 3341351 - RNA, 13 nt, Human
auaacauguaauu

SEQ ID NO: 3341352 - RNA, 12 nt, Human
auaacauguaau

SEQ ID NO: 3341353 - RNA, 17 nt, Human
aguuugauuaaauucuu

SEQ ID NO: 3341354 - RNA, 18 nt, Human
aguuugauuaaauucuug

SEQ ID NO: 3341355 - RNA, 20 nt, Human
aguuugauuaaauucuugca

SEQ ID NO: 3341356 - RNA, 22 nt, Human
aguuugauuaaauucuugcaaa

SEQ ID NO: 3341357 - RNA, 16 nt, Human
aguuugauuaaauucu

SEQ ID NO: 3341358 - RNA, 20 nt, Human
aguuugagaucagccugggc

SEQ ID NO: 3341359 - RNA, 18 nt, Human
aguuugagaucagccugg

SEQ ID NO: 3341360 - RNA, 19 nt, Human
aguuugagaucagccuggg

SEQ ID NO: 3341361 - RNA, 19 nt, Human
aguuguuacauuuuuaagu

SEQ ID NO: 3341362 - RNA, 20 nt, Human
aguuguuacauuuuuaagug

SEQ ID NO: 3341363 - RNA, 22 nt, Human
aguuguuacauuuuuaagugcu

SEQ ID NO: 3341364 - RNA, 23 nt, Human
aguuugauuaaauucuugcaaag

SEQ ID NO: 3341365 - RNA, 13 nt, Human
auaccuguccccc

SEQ ID NO: 3341366 - RNA, 14 nt, Human
auaccugucccccu

SEQ ID NO: 3341367 - RNA, 15 nt, Human
auaccugucccccug

SEQ ID NO: 3341368 - RNA, 16 nt, Human
auaccugucccccuga

SEQ ID NO: 3341369 - RNA, 14 nt, Human
auacaaugcugugc

SEQ ID NO: 3341370 - RNA, 22 nt, Human
auacacuuacacuuuaugcaca

SEQ ID NO: 3341371 - RNA, 13 nt, Human
auacacuuacacu

SEQ ID NO: 3341372 - RNA, 14 nt, Human
auacccacccccac

SEQ ID NO: 3341373 - RNA, 16 nt, Human
auacccacccccaccc

SEQ ID NO: 3341374 - RNA, 13 nt, Human
auacccaccccca

SEQ ID NO: 3341375 - RNA, 17 nt, Human
auacccacccccaccca

SEQ ID NO: 3341376 - RNA, 18 nt, Human
auaaggguaucuggugac

SEQ ID NO: 3341377 - RNA, 20 nt, Human
auaagccaguguugccuaag

SEQ ID NO: 3341378 - RNA, 18 nt, Human
auaagccaguguugccua

SEQ ID NO: 3341379 - RNA, 20 nt, Human
aucaaagagguuuuaaaaaa

SEQ ID NO: 3341380 - RNA, 23 nt, Human
aucaaagagguuuuaaaaaaauc

SEQ ID NO: 3341381 - RNA, 24 nt, Human
aucaaaagguuaauaaaguaauua

SEQ ID NO: 3341382 - RNA, 13 nt, Human
aucaccagacagg

SEQ ID NO: 3341383 - RNA, 20 nt, Human
aucaccaacgucugugccau

SEQ ID NO: 3341384 - RNA, 21 nt, Human
aucaccgaaaacguggcugcu

SEQ ID NO: 3341385 - RNA, 14 nt, Human
aucaugucuggcua

SEQ ID NO: 3341386 - RNA, 19 nt, Human
auccagacccggcugcgug

SEQ ID NO: 3341387 - RNA, 15 nt, Human
auccagacccggcug

SEQ ID NO: 3341388 - RNA, 18 nt, Human
aucccaugagccucagca

SEQ ID NO: 3341389 - RNA, 19 nt, Human
aucccaugagccucagcau

SEQ ID NO: 3341390 - RNA, 14 nt, Human
augaaaacacauuu

SEQ ID NO: 3341391 - RNA, 15 nt, Human
augaaaacacauuuu

SEQ ID NO: 3341392 - RNA, 16 nt, Human
augaaaacacauuuuu

SEQ ID NO: 3341393 - RNA, 13 nt, Human
augaggcauuugu

SEQ ID NO: 3341394 - RNA, 14 nt, Human
augaggcauuuguu

SEQ ID NO: 3341395 - RNA, 21 nt, Human
augaggcauuuguuugaacug

SEQ ID NO: 3341396 - RNA, 17 nt, Human
auguuugccucugccuc

SEQ ID NO: 3341397 - RNA, 15 nt, Human
auguuugccucugcc

SEQ ID NO: 3341398 - RNA, 14 nt, Human
auguuugccucugc

SEQ ID NO: 3341399 - RNA, 14 nt, Human
auguucugggacac

SEQ ID NO: 3341400 - RNA, 13 nt, Human
auguucugggaca

SEQ ID NO: 3341401 - RNA, 15 nt, Human
auguucugggacaca

SEQ ID NO: 3341402 - RNA, 17 nt, Human
auguucucucuucucca

SEQ ID NO: 3341403 - RNA, 13 nt, Human
auguucucugagg

SEQ ID NO: 3341404 - RNA, 16 nt, Human
auguucucucuucucc

SEQ ID NO: 3341405 - RNA, 13 nt, Human
auguguaaguauu

SEQ ID NO: 3341406 - RNA, 20 nt, Human
augggugcuuggaggaagga

SEQ ID NO: 3341407 - RNA, 21 nt, Human
augggugcuuggaggaaggaa

SEQ ID NO: 3341408 - RNA, 23 nt, Human
augggugcuuggaggaaggaaac

SEQ ID NO: 3341409 - RNA, 23 nt, Human
auguaauuaaguacuauguauca

SEQ ID NO: 3341410 - RNA, 13 nt, Human
augucacaggcag

SEQ ID NO: 3341411 - RNA, 19 nt, Human
augucacaggcagguccag

SEQ ID NO: 3341412 - RNA, 17 nt, Human
augucacaggcaggucc

SEQ ID NO: 3341413 - RNA, 16 nt, Human
auggcuuuugugcauu

SEQ ID NO: 3341414 - RNA, 17 nt, Human
auggcuuuugugcauua

SEQ ID NO: 3341415 - RNA, 16 nt, Human
augcuuguacauaaug

SEQ ID NO: 3341416 - RNA, 15 nt, Human
augcuuguacauaau

SEQ ID NO: 3341417 - RNA, 13 nt, Human
augcugcccugug

SEQ ID NO: 3341418 - RNA, 12 nt, Human
augcugcccugu

SEQ ID NO: 3341419 - RNA, 14 nt, Human
augcugcccuguga

SEQ ID NO: 3341420 - RNA, 15 nt, Human
augcugcccugugag

SEQ ID NO: 3341421 - RNA, 16 nt, Human
augcugcccugugagu

SEQ ID NO: 3341422 - RNA, 18 nt, Human
augcacagaguuguuaca

SEQ ID NO: 3341423 - RNA, 13 nt, Human
augcacacauuuu

SEQ ID NO: 3341424 - RNA, 14 nt, Human
augcacacauuuuu

SEQ ID NO: 3341425 - RNA, 19 nt, Human
augcacagaguuguuacau

SEQ ID NO: 3341426 - RNA, 21 nt, Human
augcacagaguuguuacauuu

SEQ ID NO: 3341427 - RNA, 22 nt, Human
augcacagaguuguuacauuuu

SEQ ID NO: 3341428 - RNA, 19 nt, Human
augccuggauggggcugca

SEQ ID NO: 3341429 - RNA, 20 nt, Human
augccuggauggggcugcac

SEQ ID NO: 3341430 - RNA, 21 nt, Human
augaucuuugcagacaggcaa

SEQ ID NO: 3341431 - RNA, 19 nt, Human
augaucuuugcagacaggc

SEQ ID NO: 3341432 - RNA, 18 nt, Human
augaucuuugcagacagg

SEQ ID NO: 3341433 - RNA, 18 nt, Human
augaucuucuuuauaauu

SEQ ID NO: 3341434 - RNA, 17 nt, Human
augaucuuugcagacag

SEQ ID NO: 3341435 - RNA, 18 nt, Human
augaugaaaugaggucag

SEQ ID NO: 3341436 - RNA, 23 nt, Human
augaugaaaugaggucagagccu

SEQ ID NO: 3341437 - RNA, 15 nt, Human
augaugauccuaggc

SEQ ID NO: 3341438 - RNA, 18 nt, Human
augcacaaacagaggccg

SEQ ID NO: 3341439 - RNA, 23 nt, Human
cuucuucagagacuccugcaggc

SEQ ID NO: 3341440 - RNA, 21 nt, Human
cuucugacccaugcugcccug

SEQ ID NO: 3341441 - RNA, 22 nt, Human
cuucugacccaugcugcccugu

SEQ ID NO: 3341442 - RNA, 20 nt, Human
cuucugacccaugcugcccu

SEQ ID NO: 3341443 - RNA, 17 nt, Human
cuuccugcaacaccuug

SEQ ID NO: 3341444 - RNA, 18 nt, Human
cuuccucccucccucuuu

SEQ ID NO: 3341445 - RNA, 14 nt, Human
cuuggcgcugcccc

SEQ ID NO: 3341446 - RNA, 17 nt, Human
cuuggcgcugccccugg

SEQ ID NO: 3341447 - RNA, 12 nt, Human
cuuggcgcugcc

SEQ ID NO: 3341448 - RNA, 13 nt, Human
cuugacagggcac

SEQ ID NO: 3341449 - RNA, 15 nt, Human
cuugacagggcacac

SEQ ID NO: 3341450 - RNA, 14 nt, Human
cuugacagggcaca

SEQ ID NO: 3341451 - RNA, 19 nt, Human
cuugaauuguaaggaauga

SEQ ID NO: 3341452 - RNA, 18 nt, Human
cuugaauuguaaggaaug

SEQ ID NO: 3341453 - RNA, 16 nt, Human
cuugaagacuuuucuu

SEQ ID NO: 3341454 - RNA, 11 nt, Human
cuucccaccuc

SEQ ID NO: 3341455 - RNA, 21 nt, Human
cuucccaccucucucacuccu

SEQ ID NO: 3341456 - RNA, 23 nt, Human
cuucccaccucucucacuccuug

SEQ ID NO: 3341457 - RNA, 18 nt, Human
cuucagagacuccugcag

SEQ ID NO: 3341458 - RNA, 19 nt, Human
cuucagagacuccugcagg

SEQ ID NO: 3341459 - RNA, 17 nt, Human
cuucagagacuccugca

SEQ ID NO: 3341460 - RNA, 22 nt, Human
cuuccagugaggcucugcccuu

SEQ ID NO: 3341461 - RNA, 23 nt, Human
cuuccagugaggcucugcccuug

SEQ ID NO: 3341462 - RNA, 20 nt, Human
cuuccagugaggcucugccc

SEQ ID NO: 3341463 - RNA, 21 nt, Human
cuuccagugaggcucugcccu

SEQ ID NO: 3341464 - RNA, 14 nt, Human
cugugcugagucug

SEQ ID NO: 3341465 - RNA, 12 nt, Human
cugugcugaguc

SEQ ID NO: 3341466 - RNA, 17 nt, Human
cuuauggaacacucuga

SEQ ID NO: 3341467 - RNA, 19 nt, Human
cuuauggaacacucugaga

SEQ ID NO: 3341468 - RNA, 20 nt, Human
cuuauggaacacucugagac

SEQ ID NO: 3341469 - RNA, 15 nt, Human
cuucacggaagagcc

SEQ ID NO: 3341470 - RNA, 19 nt, Human
cuucacggaagagccuugc

SEQ ID NO: 3341471 - RNA, 22 nt, Human
cuucaccuuuguccccaccgca

SEQ ID NO: 3341472 - RNA, 21 nt, Human
cuucaccuuuguccccaccgc

SEQ ID NO: 3341473 - RNA, 20 nt, Human
cuucaccuuuguccccaccg

SEQ ID NO: 3341474 - RNA, 13 nt, Human
cuuauggaacacu

SEQ ID NO: 3341475 - RNA, 16 nt, Human
cuuauggaacacucug

SEQ ID NO: 3341476 - RNA, 16 nt, Human
cuuucuagccagagga

SEQ ID NO: 3341477 - RNA, 15 nt, Human
cuuucuagccagagg

SEQ ID NO: 3341478 - RNA, 17 nt, Human
cuuucuacccagcgagc

SEQ ID NO: 3341479 - RNA, 17 nt, Human
cuuugggccuggcuccc

SEQ ID NO: 3341480 - RNA, 13 nt, Human
cuuuuauaaacuu

SEQ ID NO: 3341481 - RNA, 21 nt, Human
cuuuccugaggcugggcuccc

SEQ ID NO: 3341482 - RNA, 22 nt, Human
cuuuccugaggcugggcucccu

SEQ ID NO: 3341483 - RNA, 23 nt, Human
cuuucaauaggaaaaacugauuu

SEQ ID NO: 3341484 - RNA, 23 nt, Human
cuuucagccaagaauucuuaaau

SEQ ID NO: 3341485 - RNA, 20 nt, Human
cuuucagccaagaauucuua

SEQ ID NO: 3341486 - RNA, 22 nt, Human
gaaagggacuuggaagcuccgc

SEQ ID NO: 3341487 - RNA, 20 nt, Human
gaaagggacgcuacccggga

SEQ ID NO: 3341488 - RNA, 19 nt, Human
gaaagggacuuggaagcuc

SEQ ID NO: 3341489 - RNA, 19 nt, Human
gaaaucaccgaaaacgugg

SEQ ID NO: 3341490 - RNA, 21 nt, Human
gaaaggcuccaggagcagcca

SEQ ID NO: 3341491 - RNA, 20 nt, Human
gaaaggcuccaggagcagcc

SEQ ID NO: 3341492 - RNA, 22 nt, Human
gaaaggcuccaggagcagccac

SEQ ID NO: 3341493 - RNA, 20 nt, Human
gaaagacuaucuaaauguug

SEQ ID NO: 3341494 - RNA, 12 nt, Human
cuuuugugcauu

SEQ ID NO: 3341495 - RNA, 13 nt, Human
cuuuugugcauua

SEQ ID NO: 3341496 - RNA, 23 nt, Human
cuuuuuuggcugcugaaggcucg

SEQ ID NO: 3341497 - RNA, 17 nt, Human
cuuuugucuaugggacu

SEQ ID NO: 3341498 - RNA, 18 nt, Human
cuuuugucuaugggacuc

SEQ ID NO: 3341499 - RNA, 23 nt, Human
cuuuugcccacacuugggagcaa

SEQ ID NO: 3341500 - RNA, 15 nt, Human
gaaaauguaugugua

SEQ ID NO: 3341501 - RNA, 19 nt, Human
gaaaauggacguguuauga

SEQ ID NO: 3341502 - RNA, 23 nt, Human
gaaaauggacguguuaugacucc

SEQ ID NO: 3341503 - RNA, 21 nt, Human
gaaaauggaagacagcucuua

SEQ ID NO: 3341504 - RNA, 18 nt, Human
gaaaagaaaaaugagccu

SEQ ID NO: 3341505 - RNA, 14 nt, Human
gaaaaacugauuuu

SEQ ID NO: 3341506 - RNA, 14 nt, Human
cugccccucaacuc

SEQ ID NO: 3341507 - RNA, 22 nt, Human
cugccccucaacucuccuccag

SEQ ID NO: 3341508 - RNA, 15 nt, Human
cugcccugugggccc

SEQ ID NO: 3341509 - RNA, 16 nt, Human
cugcccugugggcccc

SEQ ID NO: 3341510 - RNA, 18 nt, Human
cugcccugugggccccca

SEQ ID NO: 3341511 - RNA, 12 nt, Human
cugcccugugag

SEQ ID NO: 3341512 - RNA, 23 nt, Human
cugccauauucuguuggccagug

SEQ ID NO: 3341513 - RNA, 22 nt, Human
cugccauauucuguuggccagu

SEQ ID NO: 3341514 - RNA, 21 nt, Human
cugccauauucuguuggccag

SEQ ID NO: 3341515 - RNA, 20 nt, Human
cugccauauucuguuggcca

SEQ ID NO: 3341516 - RNA, 12 nt, Human
cugccagggaca

SEQ ID NO: 3341517 - RNA, 15 nt, Human
cugccagggacagag

SEQ ID NO: 3341518 - RNA, 11 nt, Human
cugccagggac

SEQ ID NO: 3341519 - RNA, 15 nt, Human
cugccaaugggagcu

SEQ ID NO: 3341520 - RNA, 18 nt, Human
cugcauuuaaaagauaca

SEQ ID NO: 3341521 - RNA, 20 nt, Human
cugcauuuaaaagauacagu

SEQ ID NO: 3341522 - RNA, 22 nt, Human
cugcauuuaaaagauacaguua

SEQ ID NO: 3341523 - RNA, 15 nt, Human
cugcauguuugugau

SEQ ID NO: 3341524 - RNA, 13 nt, Human
cugcauguuacau

SEQ ID NO: 3341525 - RNA, 17 nt, Human
cugagacucgcgacaau

SEQ ID NO: 3341526 - RNA, 19 nt, Human
cugagacucgcgacaaugc

SEQ ID NO: 3341527 - RNA, 15 nt, Human
cugcuacagagcaga

SEQ ID NO: 3341528 - RNA, 16 nt, Human
cugccuguugggccag

SEQ ID NO: 3341529 - RNA, 14 nt, Human
cugccuguugggcc

SEQ ID NO: 3341530 - RNA, 18 nt, Human
cugccuguugggccagga

SEQ ID NO: 3341531 - RNA, 19 nt, Human
cugccuguugggccaggag

SEQ ID NO: 3341532 - RNA, 16 nt, Human
cugcuaauuccccaga

SEQ ID NO: 3341533 - RNA, 14 nt, Human
cugccuguucagcu

SEQ ID NO: 3341534 - RNA, 23 nt, Human
cugccugggaucccucauccuca

SEQ ID NO: 3341535 - RNA, 22 nt, Human
cugccugggaucccucauccuc

SEQ ID NO: 3341536 - RNA, 18 nt, Human
cugccucgaacuggcugc

SEQ ID NO: 3341537 - RNA, 17 nt, Human
cugccucgaacuggcug

SEQ ID NO: 3341538 - RNA, 15 nt, Human
cugccucgaacuggc

SEQ ID NO: 3341539 - RNA, 14 nt, Human
cugcccugugggcc

SEQ ID NO: 3341540 - RNA, 17 nt, Human
cuggaacacuaaugagg

SEQ ID NO: 3341541 - RNA, 19 nt, Human
cugcuuuuuaaagaaugcu

SEQ ID NO: 3341542 - RNA, 16 nt, Human
cuggaaauauuaagaa

SEQ ID NO: 3341543 - RNA, 22 nt, Human
cugcuuuuuaaagaaugcucuu

SEQ ID NO: 3341544 - RNA, 16 nt, Human
cugcuucagccucccg

SEQ ID NO: 3341545 - RNA, 14 nt, Human
cugcuucagccucc

SEQ ID NO: 3341546 - RNA, 15 nt, Human
cugcuuaacuucaca

SEQ ID NO: 3341547 - RNA, 17 nt, Human
cugcuuaacuucacaua

SEQ ID NO: 3341548 - RNA, 13 nt, Human
cugcuucagccuc

SEQ ID NO: 3341549 - RNA, 13 nt, Human
cugcuuaacuuca

SEQ ID NO: 3341550 - RNA, 20 nt, Human
cugcugacagacacaggccc

SEQ ID NO: 3341551 - RNA, 19 nt, Human
cugcugacagacacaggcc

SEQ ID NO: 3341552 - RNA, 18 nt, Human
cugcugacagacacaggc

SEQ ID NO: 3341553 - RNA, 15 nt, Human
cugcugacagacaca

SEQ ID NO: 3341554 - RNA, 23 nt, Human
cugcugacagacacaggcccggc

SEQ ID NO: 3341555 - RNA, 21 nt, Human
cugcugacagacacaggcccg

SEQ ID NO: 3341556 - RNA, 13 nt, Human
cugucgcccaguc

SEQ ID NO: 3341557 - RNA, 19 nt, Human
cugugcucuggacaggcau

SEQ ID NO: 3341558 - RNA, 14 nt, Human
cugugcucuggaca

SEQ ID NO: 3341559 - RNA, 15 nt, Human
cugugaagagaacca

SEQ ID NO: 3341560 - RNA, 21 nt, Human
cuguaggaagguuaauguuca

SEQ ID NO: 3341561 - RNA, 18 nt, Human
cuguaggaagguuaaugu

SEQ ID NO: 3341562 - RNA, 18 nt, Human
cugucauuugagcagggc

SEQ ID NO: 3341563 - RNA, 17 nt, Human
cugucauuugagcaggg

SEQ ID NO: 3341564 - RNA, 16 nt, Human
cugucauuugagcagg

SEQ ID NO: 3341565 - RNA, 18 nt, Human
cugucagccauuccuguu

SEQ ID NO: 3341566 - RNA, 12 nt, Human
cuggcagcucag

SEQ ID NO: 3341567 - RNA, 13 nt, Human
cuggcagcucaga

SEQ ID NO: 3341568 - RNA, 14 nt, Human
cuggcagcucagag

SEQ ID NO: 3341569 - RNA, 13 nt, Human
cuggccccucagg

SEQ ID NO: 3341570 - RNA, 11 nt, Human
cugggacacag

SEQ ID NO: 3341571 - RNA, 13 nt, Human
cugggacacaguu

SEQ ID NO: 3341572 - RNA, 12 nt, Human
cugggacacagu

SEQ ID NO: 3341573 - RNA, 17 nt, Human
cuggccccucagggucc

SEQ ID NO: 3341574 - RNA, 18 nt, Human
cuggccccucaggguccc

SEQ ID NO: 3341575 - RNA, 20 nt, Human
cuggccccucagggucccug

SEQ ID NO: 3341576 - RNA, 21 nt, Human
cuggccccucagggucccugg

SEQ ID NO: 3341577 - RNA, 23 nt, Human
cuggguggcaccagcagccugga

SEQ ID NO: 3341578 - RNA, 22 nt, Human
cuggguggcaccagcagccugg

SEQ ID NO: 3341579 - RNA, 17 nt, Human
cuggguguggcgcagca

SEQ ID NO: 3341580 - RNA, 16 nt, Human
cuggguguggcgcagc

SEQ ID NO: 3341581 - RNA, 15 nt, Human
cuggugacuuuccuc

SEQ ID NO: 3341582 - RNA, 20 nt, Human
cuggugacuuuccucuuugg

SEQ ID NO: 3341583 - RNA, 21 nt, Human
cuggugacuuuccucuuuggu

SEQ ID NO: 3341584 - RNA, 14 nt, Human
cuggguucacugca

SEQ ID NO: 3341585 - RNA, 23 nt, Human
cuggugacuuuccucuuuggucu

SEQ ID NO: 3341586 - RNA, 16 nt, Human
cuggggccgaaagaac

SEQ ID NO: 3341587 - RNA, 16 nt, Human
cugggcagaaggaaga

SEQ ID NO: 3341588 - RNA, 18 nt, Human
cugggcagaaggaagacu

SEQ ID NO: 3341589 - RNA, 17 nt, Human
cugggcagaaggaagac

SEQ ID NO: 3341590 - RNA, 13 nt, Human
gaggucuguucuu

SEQ ID NO: 3341591 - RNA, 14 nt, Human
gaggucuguucuuu

SEQ ID NO: 3341592 - RNA, 12 nt, Human
gaggugggaucc

SEQ ID NO: 3341593 - RNA, 11 nt, Human
gaggugggagg

SEQ ID NO: 3341594 - RNA, 14 nt, Human
gagucaccaagccc

SEQ ID NO: 3341595 - RNA, 13 nt, Human
gagucaccaagcc

SEQ ID NO: 3341596 - RNA, 20 nt, Human
gagucccaccuuggcugcag

SEQ ID NO: 3341597 - RNA, 16 nt, Human
gagucccaccuuggcu

SEQ ID NO: 3341598 - RNA, 12 nt, Human
gagugagcuggu

SEQ ID NO: 3341599 - RNA, 13 nt, Human
gagucccaccuug

SEQ ID NO: 3341600 - RNA, 24 nt, Human
gagugagcacuaaggugugcucug

SEQ ID NO: 3341601 - RNA, 12 nt, Human
gagugcagugag

SEQ ID NO: 3341602 - RNA, 11 nt, Human
gagugcaguga

SEQ ID NO: 3341603 - RNA, 18 nt, Human
gagugccuuacacaaugg

SEQ ID NO: 3341604 - RNA, 16 nt, Human
gaguuguuacauuuuu

SEQ ID NO: 3341605 - RNA, 20 nt, Human
gaguuguuacauuuuuaagu

SEQ ID NO: 3341606 - RNA, 20 nt, Human
gaguuugggguaugggagag

SEQ ID NO: 3341607 - RNA, 11 nt, Human
gauacuacagu

SEQ ID NO: 3341608 - RNA, 16 nt, Human
gauacuacaguuuguu

SEQ ID NO: 3341609 - RNA, 13 nt, Human
gauacccauccca

SEQ ID NO: 3341610 - RNA, 14 nt, Human
gauacccaucccau

SEQ ID NO: 3341611 - RNA, 20 nt, Human
gauuacaggugugaaccacc

SEQ ID NO: 3341612 - RNA, 15 nt, Human
gauauuuuuuucuuu

SEQ ID NO: 3341613 - RNA, 16 nt, Human
gauauuuugcuuugug

SEQ ID NO: 3341614 - RNA, 15 nt, Human
gauauuuugcuuugu

SEQ ID NO: 3341615 - RNA, 12 nt, Human
gaucucuugagc

SEQ ID NO: 3341616 - RNA, 16 nt, Human
gaucucuugagccugg

SEQ ID NO: 3341617 - RNA, 17 nt, Human
gaucucuugagccuggg

SEQ ID NO: 3341618 - RNA, 21 nt, Human
gaugaucuuugcagacaggca

SEQ ID NO: 3341619 - RNA, 20 nt, Human
gaugaucuuugcagacaggc

SEQ ID NO: 3341620 - RNA, 14 nt, Human
gaugaucuuugcag

SEQ ID NO: 3341621 - RNA, 16 nt, Human
gaugagaggaaaucac

SEQ ID NO: 3341622 - RNA, 12 nt, Human
gcagccaggcca

SEQ ID NO: 3341623 - RNA, 14 nt, Human
gcagccacuauugu

SEQ ID NO: 3341624 - RNA, 15 nt, Human
gcagccacauuccug

SEQ ID NO: 3341625 - RNA, 16 nt, Human
gcagccacauuccuga

SEQ ID NO: 3341626 - RNA, 13 nt, Human
gcagccaggccac

SEQ ID NO: 3341627 - RNA, 14 nt, Human
gcagccaggccaca

SEQ ID NO: 3341628 - RNA, 18 nt, Human
gcagcccaccccucaaca

SEQ ID NO: 3341629 - RNA, 20 nt, Human
gcaggcucucaggccagcug

SEQ ID NO: 3341630 - RNA, 22 nt, Human
gcaggcucucaggccagcugcu

SEQ ID NO: 3341631 - RNA, 17 nt, Human
gcagcugcgguccaccc

SEQ ID NO: 3341632 - RNA, 23 nt, Human
gcaggcucucaggccagcugcuu

SEQ ID NO: 3341633 - RNA, 18 nt, Human
gcaggcucucaggccagc

SEQ ID NO: 3341634 - RNA, 17 nt, Human
gcauaccacuuuuguuc

SEQ ID NO: 3341635 - RNA, 20 nt, Human
gcauaccacuuuuguucuug

SEQ ID NO: 3341636 - RNA, 16 nt, Human
gcauaccacuuuuguu

SEQ ID NO: 3341637 - RNA, 19 nt, Human
gcacaucagcacgauuucu

SEQ ID NO: 3341638 - RNA, 20 nt, Human
gcacaucagcacgauuucug

SEQ ID NO: 3341639 - RNA, 13 nt, Human
gcacaugccucuc

SEQ ID NO: 3341640 - RNA, 14 nt, Human
gcacacacacacau

SEQ ID NO: 3341641 - RNA, 15 nt, Human
gcacacacacacaua

SEQ ID NO: 3341642 - RNA, 14 nt, Human
gcacaugccucucu

SEQ ID NO: 3341643 - RNA, 17 nt, Human
gcacaugccucucucag

SEQ ID NO: 3341644 - RNA, 18 nt, Human
gcacaugccucucucagg

SEQ ID NO: 3341645 - RNA, 19 nt, Human
gcacaugccucucucaggc

SEQ ID NO: 3341646 - RNA, 20 nt, Human
gcacaugccucucucaggcc

SEQ ID NO: 3341647 - RNA, 21 nt, Human
gcacaugccucucucaggcca

SEQ ID NO: 3341648 - RNA, 19 nt, Human
gcaccggcuggccuggccc

SEQ ID NO: 3341649 - RNA, 21 nt, Human
gcaccggcuggccuggccccu

SEQ ID NO: 3341650 - RNA, 23 nt, Human
gcaccggcuggccuggccccuca

SEQ ID NO: 3341651 - RNA, 18 nt, Human
gcaccggcuggccuggcc

SEQ ID NO: 3341652 - RNA, 21 nt, Human
gcaauaaagcagcguuucuau

SEQ ID NO: 3341653 - RNA, 14 nt, Human
gcacaagcugcacc

SEQ ID NO: 3341654 - RNA, 23 nt, Human
gcacaagcuccaagcucccaggc

SEQ ID NO: 3341655 - RNA, 21 nt, Human
gcacaagcuccaagcucccag

SEQ ID NO: 3341656 - RNA, 22 nt, Human
gcacaagcuccaagcucccagg

SEQ ID NO: 3341657 - RNA, 13 nt, Human
gcaagugagagcu

SEQ ID NO: 3341658 - RNA, 19 nt, Human
gcagagcagagaccauccc

SEQ ID NO: 3341659 - RNA, 20 nt, Human
gcagagcagagaccaucccu

SEQ ID NO: 3341660 - RNA, 24 nt, Human
gcagagcaccuuagacagucccug

SEQ ID NO: 3341661 - RNA, 12 nt, Human
gcagagcagaga

SEQ ID NO: 3341662 - RNA, 14 nt, Human
gcagagcagagacc

SEQ ID NO: 3341663 - RNA, 15 nt, Human
gcagagcagagacca

SEQ ID NO: 3341664 - RNA, 22 nt, Human
gcagagcaccuuagacaguccc

SEQ ID NO: 3341665 - RNA, 23 nt, Human
gcagagcaccuuagacagucccu

SEQ ID NO: 3341666 - RNA, 19 nt, Human
gcagagcaccuuagacagu

SEQ ID NO: 3341667 - RNA, 12 nt, Human
gcacugacauug

SEQ ID NO: 3341668 - RNA, 11 nt, Human
gaaugaauguc

SEQ ID NO: 3341669 - RNA, 14 nt, Human
gaaugaaugucagu

SEQ ID NO: 3341670 - RNA, 18 nt, Human
gaaugaaugucaguguga

SEQ ID NO: 3341671 - RNA, 22 nt, Human
gaaugaaugucagugugacuga

SEQ ID NO: 3341672 - RNA, 19 nt, Human
gaagucuuuguacagacaa

SEQ ID NO: 3341673 - RNA, 20 nt, Human
gaagucuuuguacagacaac

SEQ ID NO: 3341674 - RNA, 18 nt, Human
gaagucuuuguacagaca

SEQ ID NO: 3341675 - RNA, 16 nt, Human
gaagucuuuguacaga

SEQ ID NO: 3341676 - RNA, 16 nt, Human
gaaggcucgagcaugc

SEQ ID NO: 3341677 - RNA, 17 nt, Human
gaaggcucgagcaugcc

SEQ ID NO: 3341678 - RNA, 16 nt, Human
gaagcucagggccugg

SEQ ID NO: 3341679 - RNA, 17 nt, Human
gaagcucagggccuggc

SEQ ID NO: 3341680 - RNA, 18 nt, Human
gaagcucagggccuggcu

SEQ ID NO: 3341681 - RNA, 19 nt, Human
gaagcucagggccuggcuc

SEQ ID NO: 3341682 - RNA, 20 nt, Human
gaagcucagggccuggcuca

SEQ ID NO: 3341683 - RNA, 21 nt, Human
gaagcucagggccuggcucag

SEQ ID NO: 3341684 - RNA, 23 nt, Human
gaagcucagggccuggcucaggu

SEQ ID NO: 3341685 - RNA, 14 nt, Human
gaagcucagggccu

SEQ ID NO: 3341686 - RNA, 15 nt, Human
gaagcucagggccug

SEQ ID NO: 3341687 - RNA, 21 nt, Human
gaauuuugugcccccauguaa

SEQ ID NO: 3341688 - RNA, 20 nt, Human
gaauuuugugcccccaugua

SEQ ID NO: 3341689 - RNA, 23 nt, Human
gaauuuuggcugugucucccuuc

SEQ ID NO: 3341690 - RNA, 19 nt, Human
gacacacagcucuguccug

SEQ ID NO: 3341691 - RNA, 18 nt, Human
gacacacagcucuguccu

SEQ ID NO: 3341692 - RNA, 17 nt, Human
gacacacagcucugucc

SEQ ID NO: 3341693 - RNA, 15 nt, Human
gacacacagcucugu

SEQ ID NO: 3341694 - RNA, 13 nt, Human
gacacacagcucu

SEQ ID NO: 3341695 - RNA, 14 nt, Human
gacacacagcucug

SEQ ID NO: 3341696 - RNA, 19 nt, Human
gaauuuuggcugugucucc

SEQ ID NO: 3341697 - RNA, 21 nt, Human
gacacacagcucuguccuggg

SEQ ID NO: 3341698 - RNA, 22 nt, Human
gacaggguuuugccauguuggc

SEQ ID NO: 3341699 - RNA, 20 nt, Human
gacaggguuuugccauguug

SEQ ID NO: 3341700 - RNA, 20 nt, Human
gacagcccgggcucugccuc

SEQ ID NO: 3341701 - RNA, 21 nt, Human
gacagcccgggcucugccucc

SEQ ID NO: 3341702 - RNA, 22 nt, Human
gacagcccgggcucugccuccc

SEQ ID NO: 3341703 - RNA, 23 nt, Human
gacagcccgggcucugccuccca

SEQ ID NO: 3341704 - RNA, 15 nt, Human
gacacugaugggcaa

SEQ ID NO: 3341705 - RNA, 13 nt, Human
gacacugaugggc

SEQ ID NO: 3341706 - RNA, 12 nt, Human
gagaaggaagcc

SEQ ID NO: 3341707 - RNA, 13 nt, Human
gagaagcggcugg

SEQ ID NO: 3341708 - RNA, 15 nt, Human
gagaagcggcuggca

SEQ ID NO: 3341709 - RNA, 23 nt, Human
gacuuuucuguccgagcuuugaa

SEQ ID NO: 3341710 - RNA, 23 nt, Human
gacuuuucuuucagccaagaauu

SEQ ID NO: 3341711 - RNA, 21 nt, Human
gacuuuucuuuguggcuuccu

SEQ ID NO: 3341712 - RNA, 12 nt, Human
gacucugucuca

SEQ ID NO: 3341713 - RNA, 22 nt, Human
gacuaucuaaauguugaaagau

SEQ ID NO: 3341714 - RNA, 14 nt, Human
gagcagggcucagc

SEQ ID NO: 3341715 - RNA, 22 nt, Human
gagcaugccuggauggggcugc

SEQ ID NO: 3341716 - RNA, 21 nt, Human
gagcaugccuggauggggcug

SEQ ID NO: 3341717 - RNA, 12 nt, Human
gagcaucaggcc

SEQ ID NO: 3341718 - RNA, 14 nt, Human
gagccuuccagggg

SEQ ID NO: 3341719 - RNA, 15 nt, Human
gagccuuccaggggu

SEQ ID NO: 3341720 - RNA, 16 nt, Human
gagccuuccaggggug

SEQ ID NO: 3341721 - RNA, 22 nt, Human
gagccuugaacuuugaccucug

SEQ ID NO: 3341722 - RNA, 19 nt, Human
gagccuugaacuuugaccu

SEQ ID NO: 3341723 - RNA, 22 nt, Human
gagcugccuguucagcuccagc

SEQ ID NO: 3341724 - RNA, 21 nt, Human
gagcugccuguucagcuccag

SEQ ID NO: 3341725 - RNA, 20 nt, Human
gagcugccuguucagcucca

SEQ ID NO: 3341726 - RNA, 18 nt, Human
gagcggagaaaggaaggg

SEQ ID NO: 3341727 - RNA, 21 nt, Human
gagcggagaaaggaagggcug

SEQ ID NO: 3341728 - RNA, 17 nt, Human
gagcggagaaaggaagg

SEQ ID NO: 3341729 - RNA, 18 nt, Human
gagcugggugucaagagg

SEQ ID NO: 3341730 - RNA, 21 nt, Human
gagaugaugccaugggcccuc

SEQ ID NO: 3341731 - RNA, 14 nt, Human
gagacuccugcagg

SEQ ID NO: 3341732 - RNA, 15 nt, Human
gagacuccugcaggc

SEQ ID NO: 3341733 - RNA, 16 nt, Human
gagacuccugcaggca

SEQ ID NO: 3341734 - RNA, 17 nt, Human
gagacuccugcaggcag

SEQ ID NO: 3341735 - RNA, 14 nt, Human
gagaggcauccagu

SEQ ID NO: 3341736 - RNA, 18 nt, Human
gagauugcaccacugcac

SEQ ID NO: 3341737 - RNA, 13 nt, Human
gagauuuacaacu

SEQ ID NO: 3341738 - RNA, 23 nt, Human
ggcucagcggggacagcuccuuc

SEQ ID NO: 3341739 - RNA, 22 nt, Human
ggcucagcggggacagcuccuu

SEQ ID NO: 3341740 - RNA, 21 nt, Human
ggcucagcggggacagcuccu

SEQ ID NO: 3341741 - RNA, 20 nt, Human
ggcucagcggggacagcucc

SEQ ID NO: 3341742 - RNA, 23 nt, Human
ggcucagcaaaagaugcuucuca

SEQ ID NO: 3341743 - RNA, 19 nt, Human
ggcucagcaaaagaugcuu

SEQ ID NO: 3341744 - RNA, 17 nt, Human
ggcucacugcagccuca

SEQ ID NO: 3341745 - RNA, 16 nt, Human
ggcucacugcagccuc

SEQ ID NO: 3341746 - RNA, 14 nt, Human
ggcgugcaguggug

SEQ ID NO: 3341747 - RNA, 19 nt, Human
ggcgugcaguggugcgauc

SEQ ID NO: 3341748 - RNA, 16 nt, Human
ggccuucucugaagga

SEQ ID NO: 3341749 - RNA, 15 nt, Human
ggccuucucugaagg

SEQ ID NO: 3341750 - RNA, 13 nt, Human
ggccuuuggcuuc

SEQ ID NO: 3341751 - RNA, 14 nt, Human
ggccuuuggcuuca

SEQ ID NO: 3341752 - RNA, 21 nt, Human
ggccuggccagaugcaccagc

SEQ ID NO: 3341753 - RNA, 16 nt, Human
ggccuggccagaugca

SEQ ID NO: 3341754 - RNA, 21 nt, Human
ggccugugucuaguuguuuga

SEQ ID NO: 3341755 - RNA, 12 nt, Human
ggccuucucuga

SEQ ID NO: 3341756 - RNA, 15 nt, Human
ggccugagcugggau

SEQ ID NO: 3341757 - RNA, 12 nt, Human
ggccugagcugg

SEQ ID NO: 3341758 - RNA, 17 nt, Human
ggcagugggagcugccu

SEQ ID NO: 3341759 - RNA, 15 nt, Human
ggcaccagcagccug

SEQ ID NO: 3341760 - RNA, 22 nt, Human
ggcacugcuuccagugaggcuc

SEQ ID NO: 3341761 - RNA, 24 nt, Human
ggcacugcuuccagugaggcucug

SEQ ID NO: 3341762 - RNA, 18 nt, Human
ggcauccaguaucuugaa

SEQ ID NO: 3341763 - RNA, 19 nt, Human
ggcagugggagcugccugu

SEQ ID NO: 3341764 - RNA, 18 nt, Human
ggcagugggagcugccug

SEQ ID NO: 3341765 - RNA, 14 nt, Human
ggccaggcuggucu

SEQ ID NO: 3341766 - RNA, 12 nt, Human
ggccaggcuggu

SEQ ID NO: 3341767 - RNA, 18 nt, Human
ggccaggcuggucucaaa

SEQ ID NO: 3341768 - RNA, 16 nt, Human
ggccaggcuggucuca

SEQ ID NO: 3341769 - RNA, 17 nt, Human
ggccaaacucaccugcc

SEQ ID NO: 3341770 - RNA, 18 nt, Human
ggcccuucucuccagccc

SEQ ID NO: 3341771 - RNA, 16 nt, Human
ggcccuucucuccagc

SEQ ID NO: 3341772 - RNA, 17 nt, Human
ggcccuucucuccagcc

SEQ ID NO: 3341773 - RNA, 14 nt, Human
ggcccuuccuuuuc

SEQ ID NO: 3341774 - RNA, 19 nt, Human
ggaggaaggaaacccagcu

SEQ ID NO: 3341775 - RNA, 20 nt, Human
ggaggaaggaaacccagcuc

SEQ ID NO: 3341776 - RNA, 23 nt, Human
ggaggaaggaaacccagcucugg

SEQ ID NO: 3341777 - RNA, 11 nt, Human
ggaggccagcc

SEQ ID NO: 3341778 - RNA, 20 nt, Human
ggaggccaaggugggaggau

SEQ ID NO: 3341779 - RNA, 22 nt, Human
ggagccccgaggccuucucuga

SEQ ID NO: 3341780 - RNA, 16 nt, Human
ggagccccgaggccuu

SEQ ID NO: 3341781 - RNA, 12 nt, Human
ggagcugccugu

SEQ ID NO: 3341782 - RNA, 16 nt, Human
ggagcugaguggggga

SEQ ID NO: 3341783 - RNA, 21 nt, Human
ggagcugccuguucagcucca

SEQ ID NO: 3341784 - RNA, 14 nt, Human
ggaggggggaggug

SEQ ID NO: 3341785 - RNA, 22 nt, Human
ggagguaaggaauaccuguccc

SEQ ID NO: 3341786 - RNA, 16 nt, Human
ggaggggggagguggg

SEQ ID NO: 3341787 - RNA, 20 nt, Human
ggaggucaaggcugcaguga

SEQ ID NO: 3341788 - RNA, 14 nt, Human
ggaggugaccccag

SEQ ID NO: 3341789 - RNA, 15 nt, Human
ggagugcagugagcc

SEQ ID NO: 3341790 - RNA, 18 nt, Human
ggaucucuugagccuggg

SEQ ID NO: 3341791 - RNA, 15 nt, Human
ggauccuccaggugc

SEQ ID NO: 3341792 - RNA, 14 nt, Human
ggauccuccaggug

SEQ ID NO: 3341793 - RNA, 13 nt, Human
ggauccugagcca

SEQ ID NO: 3341794 - RNA, 14 nt, Human
ggauccugagccag

SEQ ID NO: 3341795 - RNA, 16 nt, Human
ggauggggcugcaccg

SEQ ID NO: 3341796 - RNA, 18 nt, Human
ggauggauuuccagccaa

SEQ ID NO: 3341797 - RNA, 15 nt, Human
ggaguucugguuccu

SEQ ID NO: 3341798 - RNA, 15 nt, Human
ggauguucugggaca

SEQ ID NO: 3341799 - RNA, 16 nt, Human
ggauguucugggacac

SEQ ID NO: 3341800 - RNA, 13 nt, Human
ggauguucuggga

SEQ ID NO: 3341801 - RNA, 24 nt, Human
ggcacagaaaauggaagacagcuc

SEQ ID NO: 3341802 - RNA, 23 nt, Human
ggcacagaaaauggaagacagcu

SEQ ID NO: 3341803 - RNA, 14 nt, Human
gguaugcaaucaaa

SEQ ID NO: 3341804 - RNA, 22 nt, Human
gguaugaucacggcucacugca

SEQ ID NO: 3341805 - RNA, 16 nt, Human
gguccacccaggagcc

SEQ ID NO: 3341806 - RNA, 15 nt, Human
gguccacccaggagc

SEQ ID NO: 3341807 - RNA, 13 nt, Human
gguccacccagga

SEQ ID NO: 3341808 - RNA, 12 nt, Human
gguccacccagg

SEQ ID NO: 3341809 - RNA, 17 nt, Human
gguccacccaggagccc

SEQ ID NO: 3341810 - RNA, 17 nt, Human
aaacuuuaccuuuuuua

SEQ ID NO: 3341811 - RNA, 22 nt, Human
aaacuuuaccuuuuuuauacau

SEQ ID NO: 3341812 - RNA, 15 nt, Human
gguccauagagagca

SEQ ID NO: 3341813 - RNA, 12 nt, Human
aaacuuuacuau

SEQ ID NO: 3341814 - RNA, 17 nt, Human
aaagacuaucuaaaugu

SEQ ID NO: 3341815 - RNA, 13 nt, Human
gguaacaggcaga

SEQ ID NO: 3341816 - RNA, 20 nt, Human
gguaacaggcagauacagga

SEQ ID NO: 3341817 - RNA, 14 nt, Human
gguaacaggcagau

SEQ ID NO: 3341818 - RNA, 17 nt, Human
ggguuucuaaagcugcc

SEQ ID NO: 3341819 - RNA, 20 nt, Human
ggguggggaccucaggccug

SEQ ID NO: 3341820 - RNA, 19 nt, Human
gggugggacacccugugau

SEQ ID NO: 3341821 - RNA, 13 nt, Human
ggguggaugccug

SEQ ID NO: 3341822 - RNA, 15 nt, Human
ggguggcaccagcag

SEQ ID NO: 3341823 - RNA, 17 nt, Human
ggguggaugccuggugg

SEQ ID NO: 3341824 - RNA, 17 nt, Human
ggguguggcgcagcaua

SEQ ID NO: 3341825 - RNA, 21 nt, Human
gguccugcugcaguugccagu

SEQ ID NO: 3341826 - RNA, 23 nt, Human
gguccugcugcaguugccaguca

SEQ ID NO: 3341827 - RNA, 23 nt, Human
gguccuagaaauuccccacccug

SEQ ID NO: 3341828 - RNA, 13 nt, Human
aaagcaaaggaga

SEQ ID NO: 3341829 - RNA, 13 nt, Human
ggucggaaaacau

SEQ ID NO: 3341830 - RNA, 14 nt, Human
gguccugcugcagu

SEQ ID NO: 3341831 - RNA, 14 nt, Human
ggucggaaaacaug

SEQ ID NO: 3341832 - RNA, 17 nt, Human
ggucuacacugugcuga

SEQ ID NO: 3341833 - RNA, 15 nt, Human
aaagcagcguuucua

SEQ ID NO: 3341834 - RNA, 16 nt, Human
aaagcagcguuucuau

SEQ ID NO: 3341835 - RNA, 18 nt, Human
aaagcagcguuucuauga

SEQ ID NO: 3341836 - RNA, 22 nt, Human
aaagcagcguuucuaugacaca

SEQ ID NO: 3341837 - RNA, 21 nt, Human
gguggaugccugguggcagcu

SEQ ID NO: 3341838 - RNA, 14 nt, Human
gguggaugccuggu

SEQ ID NO: 3341839 - RNA, 21 nt, Human
ggugcauuugaggucuguucu

SEQ ID NO: 3341840 - RNA, 16 nt, Human
ggugcaaugaccuuuc

SEQ ID NO: 3341841 - RNA, 19 nt, Human
ggugcaaugaccuuucaau

SEQ ID NO: 3341842 - RNA, 20 nt, Human
ggugcaaugaccuuucaaua

SEQ ID NO: 3341843 - RNA, 18 nt, Human
ggugcaaugaccuuucaa

SEQ ID NO: 3341844 - RNA, 14 nt, Human
ggugggauccucca

SEQ ID NO: 3341845 - RNA, 15 nt, Human
ggugggauccuccag

SEQ ID NO: 3341846 - RNA, 20 nt, Human
ggugggaggauugcuugagc

SEQ ID NO: 3341847 - RNA, 20 nt, Human
ggugggaggaucucuugagc

SEQ ID NO: 3341848 - RNA, 19 nt, Human
ggugggauccuccaggugc

SEQ ID NO: 3341849 - RNA, 17 nt, Human
gguggggcagcuugagg

SEQ ID NO: 3341850 - RNA, 13 nt, Human
gguggggcagcuu

SEQ ID NO: 3341851 - RNA, 15 nt, Human
gguggggucacucug

SEQ ID NO: 3341852 - RNA, 23 nt, Human
gguggggucacucuggcagcuca

SEQ ID NO: 3341853 - RNA, 13 nt, Human
ggugucgggcaug

SEQ ID NO: 3341854 - RNA, 16 nt, Human
ggugucgggcaugaca

SEQ ID NO: 3341855 - RNA, 18 nt, Human
ggugugagucaccaagcc

SEQ ID NO: 3341856 - RNA, 16 nt, Human
ggugugacugaauuuc

SEQ ID NO: 3341857 - RNA, 21 nt, Human
ggugugcggccuuuggcuuca

SEQ ID NO: 3341858 - RNA, 13 nt, Human
ggugugcucugau

SEQ ID NO: 3341859 - RNA, 12 nt, Human
gguguggaagag

SEQ ID NO: 3341860 - RNA, 12 nt, Human
gguucagcuugu

SEQ ID NO: 3341861 - RNA, 21 nt, Human
gguucaggguuggccccugcc

SEQ ID NO: 3341862 - RNA, 18 nt, Human
gguucaggguuggccccu

SEQ ID NO: 3341863 - RNA, 22 nt, Human
gguucaggguuggccccugccc

SEQ ID NO: 3341864 - RNA, 21 nt, Human
gguucccuuugacgccauccc

SEQ ID NO: 3341865 - RNA, 14 nt, Human
gguuucagaaaugu

SEQ ID NO: 3341866 - RNA, 12 nt, Human
gguuucagaaau

SEQ ID NO: 3341867 - RNA, 13 nt, Human
gguuucagaaaug

SEQ ID NO: 3341868 - RNA, 23 nt, Human
aaaguuucucuuuucaaaacauu

SEQ ID NO: 3341869 - RNA, 21 nt, Human
aaaguuucucuuuucaaaaca

SEQ ID NO: 3341870 - RNA, 12 nt, Human
aaaguggugaga

SEQ ID NO: 3341871 - RNA, 12 nt, Human
aaauaaugugaa

SEQ ID NO: 3341872 - RNA, 13 nt, Human
aaauaaugugaaa

SEQ ID NO: 3341873 - RNA, 15 nt, Human
ggggccucagugcca

SEQ ID NO: 3341874 - RNA, 20 nt, Human
ggggacagcuccuucugucc

SEQ ID NO: 3341875 - RNA, 14 nt, Human
ggggacagcuccuu

SEQ ID NO: 3341876 - RNA, 12 nt, Human
ggggacagcucc

SEQ ID NO: 3341877 - RNA, 12 nt, Human
aaacacauuuuu

SEQ ID NO: 3341878 - RNA, 16 nt, Human
aaacacauuuuucuua

SEQ ID NO: 3341879 - RNA, 18 nt, Human
aaacaagaccacguuucu

SEQ ID NO: 3341880 - RNA, 20 nt, Human
aaacaagaccacguuucuaa

SEQ ID NO: 3341881 - RNA, 20 nt, Human
gggcuggguucuacccaggu

SEQ ID NO: 3341882 - RNA, 17 nt, Human
gggcuggguucuaccca

SEQ ID NO: 3341883 - RNA, 22 nt, Human
gggcugcaccggcuggccuggc

SEQ ID NO: 3341884 - RNA, 10 nt, Human
gggcucagca

SEQ ID NO: 3341885 - RNA, 21 nt, Human
gggcugcaugcgggcuuccuc

SEQ ID NO: 3341886 - RNA, 18 nt, Human
gggcugcaugcgggcuuc

SEQ ID NO: 3341887 - RNA, 22 nt, Human
gggcuggguucuacccaggugc

SEQ ID NO: 3341888 - RNA, 11 nt, Human
gggccaggagc

SEQ ID NO: 3341889 - RNA, 14 nt, Human
aaaaugagccuggc

SEQ ID NO: 3341890 - RNA, 21 nt, Human
aaaaugagccuggcaagaaug

SEQ ID NO: 3341891 - RNA, 14 nt, Human
gggccaguuggucc

SEQ ID NO: 3341892 - RNA, 18 nt, Human
gggccaguuggucccccu

SEQ ID NO: 3341893 - RNA, 22 nt, Human
gggccaguuggucccccuucca

SEQ ID NO: 3341894 - RNA, 23 nt, Human
gggccaguuggucccccuuccau

SEQ ID NO: 3341895 - RNA, 15 nt, Human
gggccucagugccac

SEQ ID NO: 3341896 - RNA, 13 nt, Human
gggccuccugugu

SEQ ID NO: 3341897 - RNA, 15 nt, Human
gggccuccugugugu

SEQ ID NO: 3341898 - RNA, 20 nt, Human
gggccucuuaugggcugggu

SEQ ID NO: 3341899 - RNA, 19 nt, Human
gggccucuuaugggcuggg

SEQ ID NO: 3341900 - RNA, 15 nt, Human
gggcgggaggauguu

SEQ ID NO: 3341901 - RNA, 18 nt, Human
gggcuaguugggcuuccu

SEQ ID NO: 3341902 - RNA, 14 nt, Human
gggcagaggaaagc

SEQ ID NO: 3341903 - RNA, 17 nt, Human
gggcagagcagagacca

SEQ ID NO: 3341904 - RNA, 22 nt, Human
gggcagagcagagaccaucccu

SEQ ID NO: 3341905 - RNA, 16 nt, Human
gggcagagcagagacc

SEQ ID NO: 3341906 - RNA, 12 nt, Human
gggcagagcaga

SEQ ID NO: 3341907 - RNA, 18 nt, Human
gggcaacccccagccugc

SEQ ID NO: 3341908 - RNA, 16 nt, Human
gggcaacccccagccu

SEQ ID NO: 3341909 - RNA, 15 nt, Human
gggauuacaggugug

SEQ ID NO: 3341910 - RNA, 19 nt, Human
gggaggccaaggugggagg

SEQ ID NO: 3341911 - RNA, 14 nt, Human
gggagggcuccaga

SEQ ID NO: 3341912 - RNA, 15 nt, Human
gggagggcuccagac

SEQ ID NO: 3341913 - RNA, 17 nt, Human
gggagggcuccagacac

SEQ ID NO: 3341914 - RNA, 17 nt, Human
gggaggucgaggcagga

SEQ ID NO: 3341915 - RNA, 18 nt, Human
gggaggucgaggcaggag

SEQ ID NO: 3341916 - RNA, 19 nt, Human
gggaggucgaggcaggagg

SEQ ID NO: 3341917 - RNA, 15 nt, Human
gggaggucgaggcag

SEQ ID NO: 3341918 - RNA, 13 nt, Human
gggagggcuccag

SEQ ID NO: 3341919 - RNA, 15 nt, Human
aaaacaugcuacaca

SEQ ID NO: 3341920 - RNA, 21 nt, Human
aaaaccaauguucucucuucu

SEQ ID NO: 3341921 - RNA, 14 nt, Human
aaaacauuggauua

SEQ ID NO: 3341922 - RNA, 21 nt, Human
aaaacauuggauuauccugag

SEQ ID NO: 3341923 - RNA, 14 nt, Human
aaaaaucucaaauu

SEQ ID NO: 3341924 - RNA, 23 nt, Human
aaaacugcugacuguuuucucuu

SEQ ID NO: 3341925 - RNA, 13 nt, Human
aaaagaugcuucu

SEQ ID NO: 3341926 - RNA, 20 nt, Human
aaaacugcugacuguuuucu

SEQ ID NO: 3341927 - RNA, 22 nt, Human
aaaacugcugacuguuuucucu

SEQ ID NO: 3341928 - RNA, 21 nt, Human
gggacagcuccuucuguccua

SEQ ID NO: 3341929 - RNA, 13 nt, Human
gggaaggauacaa

SEQ ID NO: 3341930 - RNA, 13 nt, Human
gggacagaggggg

SEQ ID NO: 3341931 - RNA, 22 nt, Human
gggacagaggggguggccuccc

SEQ ID NO: 3341932 - RNA, 23 nt, Human
gggacagaggggguggccuccca

SEQ ID NO: 3341933 - RNA, 16 nt, Human
gggacagcuccuucug

SEQ ID NO: 3341934 - RNA, 13 nt, Human
gggaagagacuug

SEQ ID NO: 3341935 - RNA, 14 nt, Human
gcuuugaucccuuc

SEQ ID NO: 3341936 - RNA, 17 nt, Human
gcuuugaucccuucuua

SEQ ID NO: 3341937 - RNA, 18 nt, Human
ggaaaauuuuaaaaauac

SEQ ID NO: 3341938 - RNA, 16 nt, Human
ggaaacccagcucugg

SEQ ID NO: 3341939 - RNA, 15 nt, Human
ggaaacccagcucug

SEQ ID NO: 3341940 - RNA, 15 nt, Human
gcuuuuuaauauuga

SEQ ID NO: 3341941 - RNA, 18 nt, Human
gcuuuugucuaugggacu

SEQ ID NO: 3341942 - RNA, 15 nt, Human
gcuuuuggucugugu

SEQ ID NO: 3341943 - RNA, 14 nt, Human
ggaaaugggcagag

SEQ ID NO: 3341944 - RNA, 16 nt, Human
ggaaaugggcagagca

SEQ ID NO: 3341945 - RNA, 17 nt, Human
ggaaaugggcagagcag

SEQ ID NO: 3341946 - RNA, 18 nt, Human
ggaaaugggcagagcaga

SEQ ID NO: 3341947 - RNA, 22 nt, Human
ggaaaugggcagagcagagacc

SEQ ID NO: 3341948 - RNA, 17 nt, Human
ggaacaaggcaaggcug

SEQ ID NO: 3341949 - RNA, 21 nt, Human
ggaacaaggcaaggcugucaa

SEQ ID NO: 3341950 - RNA, 15 nt, Human
ggaacaaggcaaggc

SEQ ID NO: 3341951 - RNA, 13 nt, Human
ggaacaccuccuc

SEQ ID NO: 3341952 - RNA, 23 nt, Human
ggaacaaggcaaggcugucaauu

SEQ ID NO: 3341953 - RNA, 15 nt, Human
ggaacacuccuucac

SEQ ID NO: 3341954 - RNA, 14 nt, Human
ggaagacaauguga

SEQ ID NO: 3341955 - RNA, 16 nt, Human
ggaagacaaugugaaa

SEQ ID NO: 3341956 - RNA, 17 nt, Human
ggaagacuucaucccuc

SEQ ID NO: 3341957 - RNA, 20 nt, Human
ggaagacuucaucccucugg

SEQ ID NO: 3341958 - RNA, 22 nt, Human
gcuuccagugaggcucugcccu

SEQ ID NO: 3341959 - RNA, 23 nt, Human
gcuugaccgugaggccagagaca

SEQ ID NO: 3341960 - RNA, 18 nt, Human
gcuugaccuuuaagagaa

SEQ ID NO: 3341961 - RNA, 17 nt, Human
gcuuguaaauagcucag

SEQ ID NO: 3341962 - RNA, 19 nt, Human
gcuuguaaauagcucaggu

SEQ ID NO: 3341963 - RNA, 18 nt, Human
gcuuguaaauagcucagg

SEQ ID NO: 3341964 - RNA, 23 nt, Human
gcuuucuacccagcgagcccugg

SEQ ID NO: 3341965 - RNA, 12 nt, Human
gcuucuucagag

SEQ ID NO: 3341966 - RNA, 20 nt, Human
gcuugaccgugaggccagag

SEQ ID NO: 3341967 - RNA, 23 nt, Human
gcuuccagugaggcucugcccuu

SEQ ID NO: 3341968 - RNA, 13 nt, Human
gcuguuggcuggg

SEQ ID NO: 3341969 - RNA, 14 nt, Human
gcuucaaggauccu

SEQ ID NO: 3341970 - RNA, 14 nt, Human
gcuucaguggcagc

SEQ ID NO: 3341971 - RNA, 23 nt, Human
gcugguucaggguuggccccugc

SEQ ID NO: 3341972 - RNA, 13 nt, Human
gcugccauccagg

SEQ ID NO: 3341973 - RNA, 12 nt, Human
gcugccauccag

SEQ ID NO: 3341974 - RNA, 13 nt, Human
gcugcacccucag

SEQ ID NO: 3341975 - RNA, 15 nt, Human
gcugcacccucaggc

SEQ ID NO: 3341976 - RNA, 15 nt, Human
gcugaggugggagga

SEQ ID NO: 3341977 - RNA, 12 nt, Human
gcugcugacagu

SEQ ID NO: 3341978 - RNA, 18 nt, Human
gcugcugaaggcucgagc

SEQ ID NO: 3341979 - RNA, 15 nt, Human
gcugccccuggcagc

SEQ ID NO: 3341980 - RNA, 16 nt, Human
gcugccccuggcagcc

SEQ ID NO: 3341981 - RNA, 13 nt, Human
gcugccccuggca

SEQ ID NO: 3341982 - RNA, 16 nt, Human
gcucucaggccagcug

SEQ ID NO: 3341983 - RNA, 18 nt, Human
gcucucaaguuaucaggg

SEQ ID NO: 3341984 - RNA, 19 nt, Human
gcuccucuccccagcaagu

SEQ ID NO: 3341985 - RNA, 16 nt, Human
gcuccucuccccagca

SEQ ID NO: 3341986 - RNA, 19 nt, Human
gcucuacugaggugcuaug

SEQ ID NO: 3341987 - RNA, 17 nt, Human
gcucucaggccagcugc

SEQ ID NO: 3341988 - RNA, 18 nt, Human
gcucucaggccagcugcu

SEQ ID NO: 3341989 - RNA, 19 nt, Human
gcucucaggccagcugcuu

SEQ ID NO: 3341990 - RNA, 23 nt, Human
gcucccaggcauuccccaggagg

SEQ ID NO: 3341991 - RNA, 14 nt, Human
gcuccagcucacca

SEQ ID NO: 3341992 - RNA, 13 nt, Human
gcuccagcucacc

SEQ ID NO: 3341993 - RNA, 15 nt, Human
gcuccucuccccagc

SEQ ID NO: 3341994 - RNA, 18 nt, Human
gcuccagacacaugucca

SEQ ID NO: 3341995 - RNA, 21 nt, Human
gcuccagacacauguccaaga

SEQ ID NO: 3341996 - RNA, 23 nt, Human
gcuccagacacauguccaagaag

SEQ ID NO: 3341997 - RNA, 9 nt, Human
gcuccagac

SEQ ID NO: 3341998 - RNA, 23 nt, Human
gcucugguccauagagagcaaga

SEQ ID NO: 3341999 - RNA, 23 nt, Human
gcugaaggcucgagcaugccugg

SEQ ID NO: 3342000 - RNA, 17 nt, Human
gcugaauacagaggcaa

SEQ ID NO: 3342001 - RNA, 22 nt, Human
gcucugaucauccacugugcca

SEQ ID NO: 3342002 - RNA, 21 nt, Human
gcucugaucauccacugugcc

SEQ ID NO: 3342003 - RNA, 20 nt, Human
gcucugaucauccacugugc

SEQ ID NO: 3342004 - RNA, 20 nt, Human
gccuccuuugugaggaagcc

SEQ ID NO: 3342005 - RNA, 19 nt, Human
gccuccuuugugaggaagc

SEQ ID NO: 3342006 - RNA, 23 nt, Human
gccugcuaauuccccagauugca

SEQ ID NO: 3342007 - RNA, 17 nt, Human
gccugcuaauuccccag

SEQ ID NO: 3342008 - RNA, 19 nt, Human
gcggagacggagucccacc

SEQ ID NO: 3342009 - RNA, 20 nt, Human
gcgugguggacaugcacagc

SEQ ID NO: 3342010 - RNA, 18 nt, Human
gcgugcacacaccagagc

SEQ ID NO: 3342011 - RNA, 14 nt, Human
gcgugcacacacca

SEQ ID NO: 3342012 - RNA, 16 nt, Human
gcuaauuuuucauuuu

SEQ ID NO: 3342013 - RNA, 17 nt, Human
gcguuucuaugacacau

SEQ ID NO: 3342014 - RNA, 20 nt, Human
gcuacuguccuacccacccu

SEQ ID NO: 3342015 - RNA, 19 nt, Human
gcuacuguccuacccaccc

SEQ ID NO: 3342016 - RNA, 14 nt, Human
gcgauucuucugcu

SEQ ID NO: 3342017 - RNA, 13 nt, Human
gcgauucuucugc

SEQ ID NO: 3342018 - RNA, 22 nt, Human
gccccugcugguucaggguugg

SEQ ID NO: 3342019 - RNA, 21 nt, Human
gccccugcugguucaggguug

SEQ ID NO: 3342020 - RNA, 15 nt, Human
gccccugcccggcug

SEQ ID NO: 3342021 - RNA, 12 nt, Human
gcccaggcaggu

SEQ ID NO: 3342022 - RNA, 13 nt, Human
gcccaggcagguc

SEQ ID NO: 3342023 - RNA, 13 nt, Human
gcccaggccccug

SEQ ID NO: 3342024 - RNA, 15 nt, Human
gcccaggccccugcc

SEQ ID NO: 3342025 - RNA, 14 nt, Human
gcccaggcaggucu

SEQ ID NO: 3342026 - RNA, 14 nt, Human
gccaugugccaggu

SEQ ID NO: 3342027 - RNA, 17 nt, Human
gcccaggccccugccac

SEQ ID NO: 3342028 - RNA, 21 nt, Human
gccaggccacaagacccuugu

SEQ ID NO: 3342029 - RNA, 15 nt, Human
gccaggccagaggga

SEQ ID NO: 3342030 - RNA, 22 nt, Human
gccaggccagagggagugacag

SEQ ID NO: 3342031 - RNA, 13 nt, Human
gccaggccagagg

SEQ ID NO: 3342032 - RNA, 13 nt, Human
gccaggccacaag

SEQ ID NO: 3342033 - RNA, 18 nt, Human
gccaggccacaagacccu

SEQ ID NO: 3342034 - RNA, 13 nt, Human
gccaggcccucug

SEQ ID NO: 3342035 - RNA, 14 nt, Human
gccaggcccucugc

SEQ ID NO: 3342036 - RNA, 23 nt, Human
gccagcaggcucucaggccagcu

SEQ ID NO: 3342037 - RNA, 16 nt, Human
gccaguuggucccccu

SEQ ID NO: 3342038 - RNA, 18 nt, Human
gccaguuggucccccuuc

SEQ ID NO: 3342039 - RNA, 20 nt, Human
gccaguuggucccccuucca

SEQ ID NO: 3342040 - RNA, 21 nt, Human
gccaguuggucccccuuccau

SEQ ID NO: 3342041 - RNA, 22 nt, Human
gccaguuggucccccuuccaug

SEQ ID NO: 3342042 - RNA, 23 nt, Human
gccaguuggucccccuuccaugg

SEQ ID NO: 3342043 - RNA, 13 nt, Human
gccaguugguccc

SEQ ID NO: 3342044 - RNA, 18 nt, Human
gccaguguugccuaagua

SEQ ID NO: 3342045 - RNA, 16 nt, Human
gccaguguugccuaag

SEQ ID NO: 3342046 - RNA, 15 nt, Human
gccaguguugccuaa

SEQ ID NO: 3342047 - RNA, 13 nt, Human
gccagugugacaa

SEQ ID NO: 3342048 - RNA, 18 nt, Human
caagcgugagccacugca

SEQ ID NO: 3342049 - RNA, 19 nt, Human
caauaaagcagcguuucua

SEQ ID NO: 3342050 - RNA, 14 nt, Human
caagcugcacccuc

SEQ ID NO: 3342051 - RNA, 18 nt, Human
caagcugcacccucaggc

SEQ ID NO: 3342052 - RNA, 13 nt, Human
caagcugcacccu

SEQ ID NO: 3342053 - RNA, 14 nt, Human
caagcucugcuccu

SEQ ID NO: 3342054 - RNA, 12 nt, Human
caagcuccaagc

SEQ ID NO: 3342055 - RNA, 13 nt, Human
caagcucugcucc

SEQ ID NO: 3342056 - RNA, 15 nt, Human
caaggccaaaggaag

SEQ ID NO: 3342057 - RNA, 16 nt, Human
caaggccaaaggaagc

SEQ ID NO: 3342058 - RNA, 17 nt, Human
caaggccaaaggaagca

SEQ ID NO: 3342059 - RNA, 18 nt, Human
caaggccaaaggaagcac

SEQ ID NO: 3342060 - RNA, 13 nt, Human
caagucaagugaa

SEQ ID NO: 3342061 - RNA, 17 nt, Human
caagucaagugaaaaag

SEQ ID NO: 3342062 - RNA, 18 nt, Human
cacagacauacuaaccag

SEQ ID NO: 3342063 - RNA, 23 nt, Human
cacagaaaauggaagacagcucu

SEQ ID NO: 3342064 - RNA, 19 nt, Human
cacagaaaauucuucucca

SEQ ID NO: 3342065 - RNA, 19 nt, Human
cacagacauacuaaccagc

SEQ ID NO: 3342066 - RNA, 21 nt, Human
cacagacauacuaaccagcag

SEQ ID NO: 3342067 - RNA, 11 nt, Human
cacagccucug

SEQ ID NO: 3342068 - RNA, 21 nt, Human
cacacaugagcaucaggccag

SEQ ID NO: 3342069 - RNA, 22 nt, Human
cacacaugagcaucaggccagg

SEQ ID NO: 3342070 - RNA, 18 nt, Human
cacagaaaauggaagaca

SEQ ID NO: 3342071 - RNA, 19 nt, Human
cacagaaaauggaagacag

SEQ ID NO: 3342072 - RNA, 20 nt, Human
cacagaaaauggaagacagc

SEQ ID NO: 3342073 - RNA, 22 nt, Human
cacagaaaauggaagacagcuc

SEQ ID NO: 3342074 - RNA, 16 nt, Human
cacacagcucuguccu

SEQ ID NO: 3342075 - RNA, 23 nt, Human
cacacaguauuacuucugcuaca

SEQ ID NO: 3342076 - RNA, 20 nt, Human
cacacaguauuacuucugcu

SEQ ID NO: 3342077 - RNA, 18 nt, Human
cacacagugagucgagga

SEQ ID NO: 3342078 - RNA, 23 nt, Human
cacacagugagucgaggacaggg

SEQ ID NO: 3342079 - RNA, 21 nt, Human
cacacagugagucgaggacag

SEQ ID NO: 3342080 - RNA, 15 nt, Human
cacacauacacacac

SEQ ID NO: 3342081 - RNA, 20 nt, Human
cacacaugagcaucaggcca

SEQ ID NO: 3342082 - RNA, 19 nt, Human
cacaguauuacuucugcua

SEQ ID NO: 3342083 - RNA, 21 nt, Human
cacaguauuacuucugcuaca

SEQ ID NO: 3342084 - RNA, 20 nt, Human
cacaguauuacuucugcuac

SEQ ID NO: 3342085 - RNA, 17 nt, Human
cacaggggaaaagagga

SEQ ID NO: 3342086 - RNA, 18 nt, Human
cacaggggaaaagaggag

SEQ ID NO: 3342087 - RNA, 19 nt, Human
cacaggggaaaagaggagu

SEQ ID NO: 3342088 - RNA, 20 nt, Human
cacacagcucuguccuggga

SEQ ID NO: 3342089 - RNA, 17 nt, Human
cacacagcucuguccug

SEQ ID NO: 3342090 - RNA, 17 nt, Human
cacaagcugcacccuca

SEQ ID NO: 3342091 - RNA, 23 nt, Human
cacaagcugcacccucaggcagg

SEQ ID NO: 3342092 - RNA, 17 nt, Human
cacaagcuccaagcucc

SEQ ID NO: 3342093 - RNA, 23 nt, Human
cacaagcuccaagcucccaggca

SEQ ID NO: 3342094 - RNA, 21 nt, Human
cacaagcuccaagcucccagg

SEQ ID NO: 3342095 - RNA, 16 nt, Human
cacaagagcccaggcc

SEQ ID NO: 3342096 - RNA, 13 nt, Human
cacaagcuccaag

SEQ ID NO: 3342097 - RNA, 14 nt, Human
cacaagcuccaagc

SEQ ID NO: 3342098 - RNA, 15 nt, Human
cacaagcuccaagcu

SEQ ID NO: 3342099 - RNA, 14 nt, Human
cacaagagcccagg

SEQ ID NO: 3342100 - RNA, 11 nt, Human
caauggcagcc

SEQ ID NO: 3342101 - RNA, 11 nt, Human
caccccagccc

SEQ ID NO: 3342102 - RNA, 14 nt, Human
cacccucaggcagg

SEQ ID NO: 3342103 - RNA, 16 nt, Human
cacccuggggagaaag

SEQ ID NO: 3342104 - RNA, 15 nt, Human
cacccuggggagaaa

SEQ ID NO: 3342105 - RNA, 17 nt, Human
cacccugaaagcccuga

SEQ ID NO: 3342106 - RNA, 15 nt, Human
caccugccccucaac

SEQ ID NO: 3342107 - RNA, 14 nt, Human
caccugccccucaa

SEQ ID NO: 3342108 - RNA, 13 nt, Human
caccucagccucc

SEQ ID NO: 3342109 - RNA, 12 nt, Human
caccucagccuc

SEQ ID NO: 3342110 - RNA, 14 nt, Human
caccucagccuccc

SEQ ID NO: 3342111 - RNA, 13 nt, Human
caccuuggcugca

SEQ ID NO: 3342112 - RNA, 15 nt, Human
caccuuggcucaagu

SEQ ID NO: 3342113 - RNA, 14 nt, Human
caccuuggcucaag

SEQ ID NO: 3342114 - RNA, 19 nt, Human
caccugccuguugggccag

SEQ ID NO: 3342115 - RNA, 17 nt, Human
caccugccuguugggcc

SEQ ID NO: 3342116 - RNA, 14 nt, Human
cacuccccugcugg

SEQ ID NO: 3342117 - RNA, 12 nt, Human
cacuccccugcu

SEQ ID NO: 3342118 - RNA, 13 nt, Human
cacuccccugcug

SEQ ID NO: 3342119 - RNA, 16 nt, Human
cacuccagccugggug

SEQ ID NO: 3342120 - RNA, 22 nt, Human
cacucauugaccugaggcccuu

SEQ ID NO: 3342121 - RNA, 16 nt, Human
cacugcauguuuguga

SEQ ID NO: 3342122 - RNA, 13 nt, Human
cacugcagccuca

SEQ ID NO: 3342123 - RNA, 19 nt, Human
cacugcacuauagccuagg

SEQ ID NO: 3342124 - RNA, 19 nt, Human
cacugcacuccagccuggg

SEQ ID NO: 3342125 - RNA, 18 nt, Human
cacugcacuccagccugg

SEQ ID NO: 3342126 - RNA, 15 nt, Human
cacugcacuccagcc

SEQ ID NO: 3342127 - RNA, 16 nt, Human
cacugcacuccagccu

SEQ ID NO: 3342128 - RNA, 20 nt, Human
cacugcacuccagccugggu

SEQ ID NO: 3342129 - RNA, 12 nt, Human
cacugcagccuc

SEQ ID NO: 3342130 - RNA, 18 nt, Human
cacuuacacuuuaugcac

SEQ ID NO: 3342131 - RNA, 16 nt, Human
cacuuacacuuuaugc

SEQ ID NO: 3342132 - RNA, 22 nt, Human
auugcuacuguccuacccaccc

SEQ ID NO: 3342133 - RNA, 20 nt, Human
auugcuacuguccuacccac

SEQ ID NO: 3342134 - RNA, 15 nt, Human
auugcuacuguccua

SEQ ID NO: 3342135 - RNA, 14 nt, Human
auugcuacuguccu

SEQ ID NO: 3342136 - RNA, 21 nt, Human
auugauaagaaccuuuugagu

SEQ ID NO: 3342137 - RNA, 12 nt, Human
auucuucugcuu

SEQ ID NO: 3342138 - RNA, 11 nt, Human
auucuucugcu

SEQ ID NO: 3342139 - RNA, 11 nt, Human
auucuuuccug

SEQ ID NO: 3342140 - RNA, 15 nt, Human
auugcugauggugca

SEQ ID NO: 3342141 - RNA, 16 nt, Human
auugcugauggugcaa

SEQ ID NO: 3342142 - RNA, 18 nt, Human
auugcugauggugcaaug

SEQ ID NO: 3342143 - RNA, 19 nt, Human
auugcugauggugcaauga

SEQ ID NO: 3342144 - RNA, 14 nt, Human
auugcuugagcuca

SEQ ID NO: 3342145 - RNA, 23 nt, Human
auugcugauggugcaaugaccuu

SEQ ID NO: 3342146 - RNA, 12 nt, Human
auugcugcuuga

SEQ ID NO: 3342147 - RNA, 18 nt, Human
auugugucucuugguccu

SEQ ID NO: 3342148 - RNA, 21 nt, Human
auugugucucuugguccugcu

SEQ ID NO: 3342149 - RNA, 23 nt, Human
auugugucucuugguccugcugc

SEQ ID NO: 3342150 - RNA, 16 nt, Human
auuguuagucucuuga

SEQ ID NO: 3342151 - RNA, 16 nt, Human
auuacaggugugaacc

SEQ ID NO: 3342152 - RNA, 17 nt, Human
auuacaggaaguacugg

SEQ ID NO: 3342153 - RNA, 14 nt, Human
auucauaaugacuu

SEQ ID NO: 3342154 - RNA, 15 nt, Human
auucauaaugacuua

SEQ ID NO: 3342155 - RNA, 19 nt, Human
auucauaaugacuuaagca

SEQ ID NO: 3342156 - RNA, 21 nt, Human
auuaggugugacugaauuucu

SEQ ID NO: 3342157 - RNA, 16 nt, Human
auuaggugugacugaa

SEQ ID NO: 3342158 - RNA, 18 nt, Human
auuaggugugacugaauu

SEQ ID NO: 3342159 - RNA, 15 nt, Human
auuugugauacaaug

SEQ ID NO: 3342160 - RNA, 17 nt, Human
auuugugauacaaugcu

SEQ ID NO: 3342161 - RNA, 20 nt, Human
auuugugauacaaugcugug

SEQ ID NO: 3342162 - RNA, 13 nt, Human
auuugcuccuuuc

SEQ ID NO: 3342163 - RNA, 20 nt, Human
auuuguuugaacugauaaag

SEQ ID NO: 3342164 - RNA, 22 nt, Human
auuuguuugaacugauaaagau

SEQ ID NO: 3342165 - RNA, 23 nt, Human
auuuguuugaacugauaaagaug

SEQ ID NO: 3342166 - RNA, 15 nt, Human
caaagcagugcaugc

SEQ ID NO: 3342167 - RNA, 17 nt, Human
caaagcagugcaugcug

SEQ ID NO: 3342168 - RNA, 22 nt, Human
caaaguacacuguuucaaacuu

SEQ ID NO: 3342169 - RNA, 21 nt, Human
caaaguagaagucuuagaugu

SEQ ID NO: 3342170 - RNA, 14 nt, Human
caaaguagaagucu

SEQ ID NO: 3342171 - RNA, 22 nt, Human
caaagauauuuugcuuugugau

SEQ ID NO: 3342172 - RNA, 23 nt, Human
caaagauauuuugcuuugugauu

SEQ ID NO: 3342173 - RNA, 14 nt, Human
caaagaugcagccg

SEQ ID NO: 3342174 - RNA, 21 nt, Human
caaauggaaaugggcagagca

SEQ ID NO: 3342175 - RNA, 20 nt, Human
caaauggaaaugggcagagc

SEQ ID NO: 3342176 - RNA, 18 nt, Human
caaagauauuuugcuuug

SEQ ID NO: 3342177 - RNA, 20 nt, Human
caaagauauuuugcuuugug

SEQ ID NO: 3342178 - RNA, 21 nt, Human
caaaccaucauugaaaucuuu

SEQ ID NO: 3342179 - RNA, 19 nt, Human
caaaccaucauugaaaucu

SEQ ID NO: 3342180 - RNA, 15 nt, Human
caaacagaggccgcc

SEQ ID NO: 3342181 - RNA, 23 nt, Human
auuuuuuuuuccuucagugccuu

SEQ ID NO: 3342182 - RNA, 18 nt, Human
caaaagaugcuucucacu

SEQ ID NO: 3342183 - RNA, 16 nt, Human
caaaagaugcuucuca

SEQ ID NO: 3342184 - RNA, 15 nt, Human
cagauuucacucucc

SEQ ID NO: 3342185 - RNA, 16 nt, Human
cagauuucacucuccu

SEQ ID NO: 3342186 - RNA, 19 nt, Human
cagauuugaacucuucaau

SEQ ID NO: 3342187 - RNA, 18 nt, Human
cagauuucacucuccuug

SEQ ID NO: 3342188 - RNA, 13 nt, Human
cagauuucacucu

SEQ ID NO: 3342189 - RNA, 21 nt, Human
cagauugcaacaggcugggcu

SEQ ID NO: 3342190 - RNA, 17 nt, Human
cagcauagaaguaacuu

SEQ ID NO: 3342191 - RNA, 16 nt, Human
cagcauauucaggaag

SEQ ID NO: 3342192 - RNA, 17 nt, Human
cagcauauucaggaagc

SEQ ID NO: 3342193 - RNA, 18 nt, Human
cagcauauucaggaagcu

SEQ ID NO: 3342194 - RNA, 22 nt, Human
cagccccauucugccugcccag

SEQ ID NO: 3342195 - RNA, 20 nt, Human
cagccccauucugccugccc

SEQ ID NO: 3342196 - RNA, 19 nt, Human
cagccccauucugccugcc

SEQ ID NO: 3342197 - RNA, 24 nt, Human
cagccccauucugccugcccaggc

SEQ ID NO: 3342198 - RNA, 23 nt, Human
cagccccauucugccugcccagg

SEQ ID NO: 3342199 - RNA, 18 nt, Human
cagccccauucugccugc

SEQ ID NO: 3342200 - RNA, 16 nt, Human
cagcguuucuaugaca

SEQ ID NO: 3342201 - RNA, 14 nt, Human
cagcguuucuauga

SEQ ID NO: 3342202 - RNA, 13 nt, Human
cagcccuuagcag

SEQ ID NO: 3342203 - RNA, 23 nt, Human
cagccgccaugcuccuggcccac

SEQ ID NO: 3342204 - RNA, 17 nt, Human
cagagcuacacagggga

SEQ ID NO: 3342205 - RNA, 22 nt, Human
cagagcuacacaggggaaaaga

SEQ ID NO: 3342206 - RNA, 16 nt, Human
cagagagggugggagu

SEQ ID NO: 3342207 - RNA, 13 nt, Human
cagagaggguggg

SEQ ID NO: 3342208 - RNA, 20 nt, Human
cagagagggugggagugggc

SEQ ID NO: 3342209 - RNA, 22 nt, Human
cagagagggugggagugggccc

SEQ ID NO: 3342210 - RNA, 14 nt, Human
cagagccugcaguu

SEQ ID NO: 3342211 - RNA, 13 nt, Human
cagagccugcagu

SEQ ID NO: 3342212 - RNA, 19 nt, Human
cagagacuccugcaggcag

SEQ ID NO: 3342213 - RNA, 21 nt, Human
cagagacuccugcaggcagcc

SEQ ID NO: 3342214 - RNA, 22 nt, Human
cagagacuccugcaggcagcca

SEQ ID NO: 3342215 - RNA, 20 nt, Human
cagagacuccugcaggcagc

SEQ ID NO: 3342216 - RNA, 23 nt, Human
cagauacaggaaaagcugcugac

SEQ ID NO: 3342217 - RNA, 23 nt, Human
cagggucucacucugucgcccag

SEQ ID NO: 3342218 - RNA, 22 nt, Human
cagggucucacucugucgccca

SEQ ID NO: 3342219 - RNA, 21 nt, Human
cagggucucuaccauccccug

SEQ ID NO: 3342220 - RNA, 16 nt, Human
caggguuggccccugc

SEQ ID NO: 3342221 - RNA, 15 nt, Human
caggguuggccccug

SEQ ID NO: 3342222 - RNA, 23 nt, Human
cagguuuuuggucugacccacug

SEQ ID NO: 3342223 - RNA, 21 nt, Human
caggguuggccccugcccggc

SEQ ID NO: 3342224 - RNA, 17 nt, Human
caggguuggccccugcc

SEQ ID NO: 3342225 - RNA, 14 nt, Human
caggguuggccccu

SEQ ID NO: 3342226 - RNA, 14 nt, Human
caggugcugccauc

SEQ ID NO: 3342227 - RNA, 13 nt, Human
caggugcugccau

SEQ ID NO: 3342228 - RNA, 19 nt, Human
caguaaaugggggugcauu

SEQ ID NO: 3342229 - RNA, 19 nt, Human
caguauuacuucugcuaca

SEQ ID NO: 3342230 - RNA, 18 nt, Human
caguaaaugggggugcau

SEQ ID NO: 3342231 - RNA, 16 nt, Human
cagucaccccggccac

SEQ ID NO: 3342232 - RNA, 17 nt, Human
cagucaccccggccacc

SEQ ID NO: 3342233 - RNA, 14 nt, Human
cagucaccccggcc

SEQ ID NO: 3342234 - RNA, 20 nt, Human
caggccugggggcugggcag

SEQ ID NO: 3342235 - RNA, 22 nt, Human
caggccugggggcugggcagag

SEQ ID NO: 3342236 - RNA, 19 nt, Human
caggcuggcgugcaguggu

SEQ ID NO: 3342237 - RNA, 18 nt, Human
caggcuggcgugcagugg

SEQ ID NO: 3342238 - RNA, 23 nt, Human
caggccugggggcugggcagagg

SEQ ID NO: 3342239 - RNA, 17 nt, Human
caggcuggcgugcagug

SEQ ID NO: 3342240 - RNA, 16 nt, Human
caggcugggagagccu

SEQ ID NO: 3342241 - RNA, 18 nt, Human
caggcugggagagccuuc

SEQ ID NO: 3342242 - RNA, 19 nt, Human
caggcugggagagccuucc

SEQ ID NO: 3342243 - RNA, 15 nt, Human
caggcuggcgugcag

SEQ ID NO: 3342244 - RNA, 15 nt, Human
cagggcucagcgggg

SEQ ID NO: 3342245 - RNA, 12 nt, Human
cagggcucagcg

SEQ ID NO: 3342246 - RNA, 16 nt, Human
cagggagggcuucugc

SEQ ID NO: 3342247 - RNA, 14 nt, Human
caggcugggcuuca

SEQ ID NO: 3342248 - RNA, 15 nt, Human
caggcugggagagcc

SEQ ID NO: 3342249 - RNA, 23 nt, Human
caggccagagggagugacagagg

SEQ ID NO: 3342250 - RNA, 13 nt, Human
caggccagcugcu

SEQ ID NO: 3342251 - RNA, 15 nt, Human
caggccagcugcuug

SEQ ID NO: 3342252 - RNA, 12 nt, Human
caggaggccagc

SEQ ID NO: 3342253 - RNA, 13 nt, Human
caggaggccagcc

SEQ ID NO: 3342254 - RNA, 20 nt, Human
caggcaaugcuggcuguugg

SEQ ID NO: 3342255 - RNA, 19 nt, Human
caggcaaugcuggcuguug

SEQ ID NO: 3342256 - RNA, 21 nt, Human
caggcaaugcuggcuguuggc

SEQ ID NO: 3342257 - RNA, 17 nt, Human
caggcaaugcuggcugu

SEQ ID NO: 3342258 - RNA, 13 nt, Human
caggccaggcccu

SEQ ID NO: 3342259 - RNA, 14 nt, Human
caggccaggcccuc

SEQ ID NO: 3342260 - RNA, 15 nt, Human
caggccaggcccucu

SEQ ID NO: 3342261 - RNA, 13 nt, Human
caggaccagggau

SEQ ID NO: 3342262 - RNA, 20 nt, Human
caggaaaggcuccaggagca

SEQ ID NO: 3342263 - RNA, 20 nt, Human
caggaaaagcugcugacagu

SEQ ID NO: 3342264 - RNA, 19 nt, Human
caggaaaagcugcugacag

SEQ ID NO: 3342265 - RNA, 21 nt, Human
caggaaaggcuccaggagcag

SEQ ID NO: 3342266 - RNA, 22 nt, Human
caggaaaggcuccaggagcagc

SEQ ID NO: 3342267 - RNA, 23 nt, Human
caggaaaggcuccaggagcagcc

SEQ ID NO: 3342268 - RNA, 15 nt, Human
cagcuguucagcugg

SEQ ID NO: 3342269 - RNA, 16 nt, Human
cagcuguucagcuggu

SEQ ID NO: 3342270 - RNA, 18 nt, Human
caggaaaagcugcugaca

SEQ ID NO: 3342271 - RNA, 18 nt, Human
caucugugaaaggaaaga

SEQ ID NO: 3342272 - RNA, 19 nt, Human
caucugugaaaggaaagag

SEQ ID NO: 3342273 - RNA, 21 nt, Human
caucuuagguuggcaaaaagg

SEQ ID NO: 3342274 - RNA, 22 nt, Human
caucuuagguuggcaaaaaggc

SEQ ID NO: 3342275 - RNA, 20 nt, Human
caucaggccaggcccucugc

SEQ ID NO: 3342276 - RNA, 21 nt, Human
caucaggccaggcccucugcc

SEQ ID NO: 3342277 - RNA, 22 nt, Human
caucaggccaggcccucugccc

SEQ ID NO: 3342278 - RNA, 23 nt, Human
caucaggccaggcccucugccca

SEQ ID NO: 3342279 - RNA, 12 nt, Human
caucccagcccc

SEQ ID NO: 3342280 - RNA, 16 nt, Human
caucccagccccaaug

SEQ ID NO: 3342281 - RNA, 14 nt, Human
caucccagccccaa

SEQ ID NO: 3342282 - RNA, 13 nt, Human
caucccagcccca

SEQ ID NO: 3342283 - RNA, 23 nt, Human
cauccuggcacccggccccugcu

SEQ ID NO: 3342284 - RNA, 17 nt, Human
caucagcacgauuucug

SEQ ID NO: 3342285 - RNA, 18 nt, Human
caucagcacgauuucugu

SEQ ID NO: 3342286 - RNA, 13 nt, Human
caucaggccaggc

SEQ ID NO: 3342287 - RNA, 16 nt, Human
caugcugcccugugag

SEQ ID NO: 3342288 - RNA, 18 nt, Human
caugcugcccugugagua

SEQ ID NO: 3342289 - RNA, 22 nt, Human
cauggccuuugcuugaaagaaa

SEQ ID NO: 3342290 - RNA, 19 nt, Human
cauggccuuugcuugaaag

SEQ ID NO: 3342291 - RNA, 15 nt, Human
caugcugcccuguga

SEQ ID NO: 3342292 - RNA, 17 nt, Human
caugcaaggucauuuuu

SEQ ID NO: 3342293 - RNA, 18 nt, Human
caugcaaggucauuuuuu

SEQ ID NO: 3342294 - RNA, 22 nt, Human
caugcaaggucauuuuuuuuaa

SEQ ID NO: 3342295 - RNA, 15 nt, Human
caugcaaggucauuu

SEQ ID NO: 3342296 - RNA, 17 nt, Human
caugacacgaauauugc

SEQ ID NO: 3342297 - RNA, 18 nt, Human
caugacacgaauauugcu

SEQ ID NO: 3342298 - RNA, 24 nt, Human
caugauuaaccacuucagcugacu

SEQ ID NO: 3342299 - RNA, 14 nt, Human
caugacacgaauau

SEQ ID NO: 3342300 - RNA, 18 nt, Human
cagucaccccggccaccu

SEQ ID NO: 3342301 - RNA, 14 nt, Human
cauaaugcgugcau

SEQ ID NO: 3342302 - RNA, 17 nt, Human
cauaaugcgugcauacc

SEQ ID NO: 3342303 - RNA, 20 nt, Human
cauauuaccacagacauacu

SEQ ID NO: 3342304 - RNA, 21 nt, Human
cauauuaccacagacauacua

SEQ ID NO: 3342305 - RNA, 17 nt, Human
cauauuaccacagacau

SEQ ID NO: 3342306 - RNA, 16 nt, Human
cauauuaccacagaca

SEQ ID NO: 3342307 - RNA, 15 nt, Human
cauacaauuccaaac

SEQ ID NO: 3342308 - RNA, 21 nt, Human
cauaaugcgugcauaccacuu

SEQ ID NO: 3342309 - RNA, 16 nt, Human
ccaccaucaagccacc

SEQ ID NO: 3342310 - RNA, 17 nt, Human
ccaccaucaagccacca

SEQ ID NO: 3342311 - RNA, 14 nt, Human
ccaccgcagacagg

SEQ ID NO: 3342312 - RNA, 17 nt, Human
ccaccgcagacaggacc

SEQ ID NO: 3342313 - RNA, 20 nt, Human
ccaccaucaagccaccaaca

SEQ ID NO: 3342314 - RNA, 15 nt, Human
ccaccaucaagccac

SEQ ID NO: 3342315 - RNA, 13 nt, Human
ccacccugcucuc

SEQ ID NO: 3342316 - RNA, 18 nt, Human
ccaccgcagacaggacca

SEQ ID NO: 3342317 - RNA, 13 nt, Human
ccaccgcagacag

SEQ ID NO: 3342318 - RNA, 15 nt, Human
ccaccuuggcucaag

SEQ ID NO: 3342319 - RNA, 14 nt, Human
ccaccuuggcucaa

SEQ ID NO: 3342320 - RNA, 13 nt, Human
ccaccuuggcuca

SEQ ID NO: 3342321 - RNA, 20 nt, Human
ccaauguucucucuucucca

SEQ ID NO: 3342322 - RNA, 20 nt, Human
ccaagcuggucccacucagu

SEQ ID NO: 3342323 - RNA, 20 nt, Human
ccaaugcacuuuguucuggc

SEQ ID NO: 3342324 - RNA, 22 nt, Human
ccaaugcacuuuguucuggcuc

SEQ ID NO: 3342325 - RNA, 23 nt, Human
ccaaugcacuuuguucuggcucu

SEQ ID NO: 3342326 - RNA, 14 nt, Human
ccaaugcacuuugu

SEQ ID NO: 3342327 - RNA, 14 nt, Human
ccaaagugcuggga

SEQ ID NO: 3342328 - RNA, 16 nt, Human
ccaacgucugugccau

SEQ ID NO: 3342329 - RNA, 16 nt, Human
ccaaaucauaguggcu

SEQ ID NO: 3342330 - RNA, 21 nt, Human
cauugcggacagccacggcca

SEQ ID NO: 3342331 - RNA, 17 nt, Human
cauugcggacagccacg

SEQ ID NO: 3342332 - RNA, 15 nt, Human
cauugcggacagcca

SEQ ID NO: 3342333 - RNA, 14 nt, Human
cauugcggacagcc

SEQ ID NO: 3342334 - RNA, 18 nt, Human
cauugcugggcuugucug

SEQ ID NO: 3342335 - RNA, 15 nt, Human
cauuuauucugcuca

SEQ ID NO: 3342336 - RNA, 16 nt, Human
cauuuauucugcucac

SEQ ID NO: 3342337 - RNA, 21 nt, Human
cauuuggugguuucagaaaug

SEQ ID NO: 3342338 - RNA, 22 nt, Human
cauuuggugguuucagaaaugu

SEQ ID NO: 3342339 - RNA, 23 nt, Human
cauuuggugguuucagaaaugug

SEQ ID NO: 3342340 - RNA, 23 nt, Human
cauuuuucuuagggaaggauaca

SEQ ID NO: 3342341 - RNA, 17 nt, Human
ccaaaaaaugcuugcuu

SEQ ID NO: 3342342 - RNA, 17 nt, Human
ccaaaacucuccucugc

SEQ ID NO: 3342343 - RNA, 16 nt, Human
cauucuccuuguguua

SEQ ID NO: 3342344 - RNA, 21 nt, Human
cauucuccaccugccagggac

SEQ ID NO: 3342345 - RNA, 17 nt, Human
cauggcugccaauggga

SEQ ID NO: 3342346 - RNA, 22 nt, Human
cauggcugccaaugggagcuca

SEQ ID NO: 3342347 - RNA, 22 nt, Human
cauggccucuucagaucucuaa

SEQ ID NO: 3342348 - RNA, 15 nt, Human
cauguucucugagga

SEQ ID NO: 3342349 - RNA, 16 nt, Human
cauuaucuagauacug

SEQ ID NO: 3342350 - RNA, 17 nt, Human
cauuaucuagauacugu

SEQ ID NO: 3342351 - RNA, 12 nt, Human
cauuaucuagau

SEQ ID NO: 3342352 - RNA, 18 nt, Human
ccaggcuggcgugcagug

SEQ ID NO: 3342353 - RNA, 17 nt, Human
ccaggcuggcgugcagu

SEQ ID NO: 3342354 - RNA, 21 nt, Human
ccaggcuccuuuagcgcccag

SEQ ID NO: 3342355 - RNA, 20 nt, Human
ccaggcuccuuuagcgccca

SEQ ID NO: 3342356 - RNA, 16 nt, Human
ccaggcuggcgugcag

SEQ ID NO: 3342357 - RNA, 23 nt, Human
ccaggggugggacacccugugau

SEQ ID NO: 3342358 - RNA, 14 nt, Human
ccaggggugggaca

SEQ ID NO: 3342359 - RNA, 17 nt, Human
ccaggggugggacaccc

SEQ ID NO: 3342360 - RNA, 20 nt, Human
ccaggggaaaaucagccugc

SEQ ID NO: 3342361 - RNA, 13 nt, Human
ccaggggugggac

SEQ ID NO: 3342362 - RNA, 19 nt, Human
ccaggggaaaaucagccug

SEQ ID NO: 3342363 - RNA, 20 nt, Human
ccauggucggaaaacaugcu

SEQ ID NO: 3342364 - RNA, 23 nt, Human
ccaugagccucagcauccuggca

SEQ ID NO: 3342365 - RNA, 21 nt, Human
ccaugagccucagcauccugg

SEQ ID NO: 3342366 - RNA, 14 nt, Human
ccaucccagcccca

SEQ ID NO: 3342367 - RNA, 13 nt, Human
ccaucccagcccc

SEQ ID NO: 3342368 - RNA, 15 nt, Human
ccaucccagccccaa

SEQ ID NO: 3342369 - RNA, 23 nt, Human
ccaguuggucccccuuccaugga

SEQ ID NO: 3342370 - RNA, 20 nt, Human
ccaguuggucccccuuccau

SEQ ID NO: 3342371 - RNA, 14 nt, Human
ccaucccugaaggc

SEQ ID NO: 3342372 - RNA, 15 nt, Human
ccaucccugaaggcc

SEQ ID NO: 3342373 - RNA, 17 nt, Human
ccaucccugaaggcccc

SEQ ID NO: 3342374 - RNA, 20 nt, Human
ccaguuggguggaugccugg

SEQ ID NO: 3342375 - RNA, 19 nt, Human
ccaguuggguggaugccug

SEQ ID NO: 3342376 - RNA, 17 nt, Human
ccaguuggguggaugcc

SEQ ID NO: 3342377 - RNA, 13 nt, Human
ccagcaggcucuc

SEQ ID NO: 3342378 - RNA, 20 nt, Human
ccagcagccuggacccugug

SEQ ID NO: 3342379 - RNA, 11 nt, Human
ccagccccugg

SEQ ID NO: 3342380 - RNA, 16 nt, Human
ccagcucaccagcccc

SEQ ID NO: 3342381 - RNA, 15 nt, Human
ccagcucaccagccc

SEQ ID NO: 3342382 - RNA, 16 nt, Human
ccagcuguucagcugg

SEQ ID NO: 3342383 - RNA, 22 nt, Human
ccagcucaccagccccagugcc

SEQ ID NO: 3342384 - RNA, 17 nt, Human
ccagcuguucagcuggu

SEQ ID NO: 3342385 - RNA, 19 nt, Human
ccagcuuaaaggggcuaga

SEQ ID NO: 3342386 - RNA, 13 nt, Human
ccaggaagccagc

SEQ ID NO: 3342387 - RNA, 12 nt, Human
ccaggaagccag

SEQ ID NO: 3342388 - RNA, 14 nt, Human
ccaggaaaggcucc

SEQ ID NO: 3342389 - RNA, 15 nt, Human
ccaggaaaggcucca

SEQ ID NO: 3342390 - RNA, 16 nt, Human
ccaggaaaggcuccag

SEQ ID NO: 3342391 - RNA, 19 nt, Human
ccaggaaaggauuuuauaa

SEQ ID NO: 3342392 - RNA, 15 nt, Human
ccagaugcaccagcc

SEQ ID NO: 3342393 - RNA, 17 nt, Human
ccagaugcaccagcccu

SEQ ID NO: 3342394 - RNA, 18 nt, Human
ccagaugcaccagcccuu

SEQ ID NO: 3342395 - RNA, 18 nt, Human
ccagagggccugcaaggg

SEQ ID NO: 3342396 - RNA, 19 nt, Human
ccagagggccugcaaggga

SEQ ID NO: 3342397 - RNA, 17 nt, Human
ccagagggccugcaagg

SEQ ID NO: 3342398 - RNA, 23 nt, Human
cccagcucugguccauagagagc

SEQ ID NO: 3342399 - RNA, 22 nt, Human
cccagcuuaaaggggcuagagu

SEQ ID NO: 3342400 - RNA, 17 nt, Human
cccaggcuggcgugcag

SEQ ID NO: 3342401 - RNA, 13 nt, Human
cccaggcuggcgu

SEQ ID NO: 3342402 - RNA, 13 nt, Human
cccacugcucugg

SEQ ID NO: 3342403 - RNA, 12 nt, Human
cccacugcucug

SEQ ID NO: 3342404 - RNA, 19 nt, Human
cccacugcuuuuggucugu

SEQ ID NO: 3342405 - RNA, 20 nt, Human
cccacccaagggccuggccu

SEQ ID NO: 3342406 - RNA, 21 nt, Human
cccacccaagggccuggccug

SEQ ID NO: 3342407 - RNA, 22 nt, Human
cccacccaagggccuggccuga

SEQ ID NO: 3342408 - RNA, 18 nt, Human
cccacccugaaagcccug

SEQ ID NO: 3342409 - RNA, 18 nt, Human
cccacccaagggccuggc

SEQ ID NO: 3342410 - RNA, 12 nt, Human
cccacccccacc

SEQ ID NO: 3342411 - RNA, 15 nt, Human
cccacccccacccaa

SEQ ID NO: 3342412 - RNA, 17 nt, Human
cccacccccacccaagg

SEQ ID NO: 3342413 - RNA, 22 nt, Human
ccccagcaagugagagcugggu

SEQ ID NO: 3342414 - RNA, 22 nt, Human
ccccauccucuguacagagccc

SEQ ID NO: 3342415 - RNA, 21 nt, Human
ccccagcaagugagagcuggg

SEQ ID NO: 3342416 - RNA, 22 nt, Human
cccccaaauggaaaugggcaga

SEQ ID NO: 3342417 - RNA, 23 nt, Human
ccccgacccuugccgucuaccug

SEQ ID NO: 3342418 - RNA, 21 nt, Human
ccccaaaacucuccucugcug

SEQ ID NO: 3342419 - RNA, 23 nt, Human
ccccaaaacucuccucugcugcu

SEQ ID NO: 3342420 - RNA, 22 nt, Human
ccccaaaacucuccucugcugc

SEQ ID NO: 3342421 - RNA, 14 nt, Human
cccgaauagcuggg

SEQ ID NO: 3342422 - RNA, 16 nt, Human
cccggcaggguccuag

SEQ ID NO: 3342423 - RNA, 16 nt, Human
cccggcuccaggcucc

SEQ ID NO: 3342424 - RNA, 15 nt, Human
cccggcuccaggcuc

SEQ ID NO: 3342425 - RNA, 14 nt, Human
cccggcuccaggcu

SEQ ID NO: 3342426 - RNA, 13 nt, Human
cccggcuccaggc

SEQ ID NO: 3342427 - RNA, 13 nt, Human
cccggccaccugc

SEQ ID NO: 3342428 - RNA, 14 nt, Human
cccggccaccugcg

SEQ ID NO: 3342429 - RNA, 12 nt, Human
cccggcuccagg

SEQ ID NO: 3342430 - RNA, 11 nt, Human
cccggcuccag

SEQ ID NO: 3342431 - RNA, 22 nt, Human
cccgggaagggggcugggacau

SEQ ID NO: 3342432 - RNA, 18 nt, Human
cccuauuagagaagagau

SEQ ID NO: 3342433 - RNA, 14 nt, Human
cccuggcagccccu

SEQ ID NO: 3342434 - RNA, 16 nt, Human
cccuggcagccccugu

SEQ ID NO: 3342435 - RNA, 12 nt, Human
cccuggcagccc

SEQ ID NO: 3342436 - RNA, 13 nt, Human
cccuggcagcccc

SEQ ID NO: 3342437 - RNA, 16 nt, Human
cccugcccugugggcc

SEQ ID NO: 3342438 - RNA, 20 nt, Human
cccugcccugugggccccca

SEQ ID NO: 3342439 - RNA, 15 nt, Human
cccugcccugugggc

SEQ ID NO: 3342440 - RNA, 14 nt, Human
cccugcccuguggg

SEQ ID NO: 3342441 - RNA, 11 nt, Human
cccugcccugu

SEQ ID NO: 3342442 - RNA, 12 nt, Human
cccugcccugug

SEQ ID NO: 3342443 - RNA, 13 nt, Human
cccugcccugugg

SEQ ID NO: 3342444 - RNA, 16 nt, Human
ccgacccuugccgucu

SEQ ID NO: 3342445 - RNA, 17 nt, Human
ccgccaaggcuggggga

SEQ ID NO: 3342446 - RNA, 18 nt, Human
ccgaccagacaccuugac

SEQ ID NO: 3342447 - RNA, 17 nt, Human
ccgaauagcugggacua

SEQ ID NO: 3342448 - RNA, 20 nt, Human
ccgaauagcugggacuacag

SEQ ID NO: 3342449 - RNA, 20 nt, Human
ccgcccaggcuuagucacug

SEQ ID NO: 3342450 - RNA, 12 nt, Human
ccgcccaggcuu

SEQ ID NO: 3342451 - RNA, 16 nt, Human
ccgccaugcuccuggc

SEQ ID NO: 3342452 - RNA, 21 nt, Human
cccuucugacccaugcugccc

SEQ ID NO: 3342453 - RNA, 22 nt, Human
cccuucugacccaugcugcccu

SEQ ID NO: 3342454 - RNA, 23 nt, Human
cccuucugacccaugcugcccug

SEQ ID NO: 3342455 - RNA, 16 nt, Human
cccuucuaccuuccug

SEQ ID NO: 3342456 - RNA, 18 nt, Human
cccuucgcuccugugucu

SEQ ID NO: 3342457 - RNA, 16 nt, Human
cccuucgcuccugugu

SEQ ID NO: 3342458 - RNA, 16 nt, Human
ccucaaccuccugggc

SEQ ID NO: 3342459 - RNA, 15 nt, Human
ccucaacucuccucc

SEQ ID NO: 3342460 - RNA, 15 nt, Human
ccucaagagaaggca

SEQ ID NO: 3342461 - RNA, 22 nt, Human
ccucagccucccaaagugcugg

SEQ ID NO: 3342462 - RNA, 11 nt, Human
ccucagccucc

SEQ ID NO: 3342463 - RNA, 22 nt, Human
ccucccaaggggcccaaauucu

SEQ ID NO: 3342464 - RNA, 23 nt, Human
ccucccaacucaccccagcccca

SEQ ID NO: 3342465 - RNA, 19 nt, Human
ccucauguucuuaauucuu

SEQ ID NO: 3342466 - RNA, 20 nt, Human
ccuccaagaccuucuccuuc

SEQ ID NO: 3342467 - RNA, 13 nt, Human
ccucauguucuua

SEQ ID NO: 3342468 - RNA, 22 nt, Human
ccucagccucccgaauagcugg

SEQ ID NO: 3342469 - RNA, 23 nt, Human
ccucagccucccaaagugcuggg

SEQ ID NO: 3342470 - RNA, 17 nt, Human
ccuaaguauuaaaacau

SEQ ID NO: 3342471 - RNA, 16 nt, Human
ccuaaguauuaaaaca

SEQ ID NO: 3342472 - RNA, 13 nt, Human
ccuaaguauuaaa

SEQ ID NO: 3342473 - RNA, 21 nt, Human
ccuaaguauuaaaacauugga

SEQ ID NO: 3342474 - RNA, 18 nt, Human
ccuaaguauuaaaacauu

SEQ ID NO: 3342475 - RNA, 16 nt, Human
ccuggaguucugguuc

SEQ ID NO: 3342476 - RNA, 17 nt, Human
ccuggaguucugguucc

SEQ ID NO: 3342477 - RNA, 15 nt, Human
ccuggaguucugguu

SEQ ID NO: 3342478 - RNA, 13 nt, Human
ccuggaugcagcc

SEQ ID NO: 3342479 - RNA, 14 nt, Human
ccuggaugcagccu

SEQ ID NO: 3342480 - RNA, 17 nt, Human
ccuggaugcagccucac

SEQ ID NO: 3342481 - RNA, 19 nt, Human
ccuggaugcagccucacag

SEQ ID NO: 3342482 - RNA, 14 nt, Human
ccugcugggugugg

SEQ ID NO: 3342483 - RNA, 20 nt, Human
ccugcuggguguggcgcagc

SEQ ID NO: 3342484 - RNA, 12 nt, Human
ccugcugggugu

SEQ ID NO: 3342485 - RNA, 13 nt, Human
ccugcccaggccc

SEQ ID NO: 3342486 - RNA, 16 nt, Human
ccugcccaggccccug

SEQ ID NO: 3342487 - RNA, 22 nt, Human
ccugcccaggccccugccaccc

SEQ ID NO: 3342488 - RNA, 15 nt, Human
ccugcccaggccccu

SEQ ID NO: 3342489 - RNA, 14 nt, Human
ccugcccaggcccc

SEQ ID NO: 3342490 - RNA, 14 nt, Human
ccuggccucugcac

SEQ ID NO: 3342491 - RNA, 15 nt, Human
ccuggccucugcacu

SEQ ID NO: 3342492 - RNA, 13 nt, Human
ccuggccugagcu

SEQ ID NO: 3342493 - RNA, 12 nt, Human
ccuggccucugc

SEQ ID NO: 3342494 - RNA, 14 nt, Human
ccucucucaggcca

SEQ ID NO: 3342495 - RNA, 12 nt, Human
ccucucucacuc

SEQ ID NO: 3342496 - RNA, 13 nt, Human
ccucucucacucc

SEQ ID NO: 3342497 - RNA, 14 nt, Human
ccucucucacuccu

SEQ ID NO: 3342498 - RNA, 15 nt, Human
ccucucucacuccuu

SEQ ID NO: 3342499 - RNA, 17 nt, Human
ccucucucacuccuuga

SEQ ID NO: 3342500 - RNA, 12 nt, Human
ccucucucaggc

SEQ ID NO: 3342501 - RNA, 21 nt, Human
ccucugccugaagucacacag

SEQ ID NO: 3342502 - RNA, 22 nt, Human
ccucugccugaagucacacagu

SEQ ID NO: 3342503 - RNA, 15 nt, Human
ccucugcugcuggcu

SEQ ID NO: 3342504 - RNA, 16 nt, Human
ccucugcugcuggcug

SEQ ID NO: 3342505 - RNA, 17 nt, Human
ccucugcugcuggcugg

SEQ ID NO: 3342506 - RNA, 18 nt, Human
ccucugcugcuggcuggu

SEQ ID NO: 3342507 - RNA, 13 nt, Human
ccucugcugcugg

SEQ ID NO: 3342508 - RNA, 14 nt, Human
ccucugcugcuggc

SEQ ID NO: 3342509 - RNA, 22 nt, Human
ccugcacuugcagacucuacag

SEQ ID NO: 3342510 - RNA, 19 nt, Human
ccugcacuugcagacucua

SEQ ID NO: 3342511 - RNA, 13 nt, Human
ccucuugagccuu

SEQ ID NO: 3342512 - RNA, 19 nt, Human
ccucuugagccuugaacuu

SEQ ID NO: 3342513 - RNA, 13 nt, Human
ccucuuggguuca

SEQ ID NO: 3342514 - RNA, 16 nt, Human
cuaacuuuccuucauu

SEQ ID NO: 3342515 - RNA, 16 nt, Human
cuaacuucaccauauu

SEQ ID NO: 3342516 - RNA, 15 nt, Human
cuaacuucaccauau

SEQ ID NO: 3342517 - RNA, 22 nt, Human
cuaagugauccucccaccucag

SEQ ID NO: 3342518 - RNA, 20 nt, Human
cuaagugauccucccaccuc

SEQ ID NO: 3342519 - RNA, 18 nt, Human
cuaagugaggaugaaaaa

SEQ ID NO: 3342520 - RNA, 13 nt, Human
cuacaguccuccc

SEQ ID NO: 3342521 - RNA, 15 nt, Human
cuacaguccucccau

SEQ ID NO: 3342522 - RNA, 16 nt, Human
cuacaguccucccauc

SEQ ID NO: 3342523 - RNA, 17 nt, Human
cuacaguccucccaucu

SEQ ID NO: 3342524 - RNA, 13 nt, Human
cuacaguugaaaa

SEQ ID NO: 3342525 - RNA, 19 nt, Human
cuagggaaaaaccagcgug

SEQ ID NO: 3342526 - RNA, 18 nt, Human
cuaguuccaccaucaagc

SEQ ID NO: 3342527 - RNA, 20 nt, Human
cuaguuccaccaucaagcca

SEQ ID NO: 3342528 - RNA, 14 nt, Human
cuaguuccaccauc

SEQ ID NO: 3342529 - RNA, 22 nt, Human
cuaguuccaccaucaagccacc

SEQ ID NO: 3342530 - RNA, 11 nt, Human
cuaccugaggg

SEQ ID NO: 3342531 - RNA, 14 nt, Human
cuaccugaggggcc

SEQ ID NO: 3342532 - RNA, 19 nt, Human
cuagaaauuccccacccug

SEQ ID NO: 3342533 - RNA, 17 nt, Human
cuagcauggcugccaau

SEQ ID NO: 3342534 - RNA, 23 nt, Human
cuagcagcagggagggcuucugc

SEQ ID NO: 3342535 - RNA, 22 nt, Human
cuagcagcagggagggcuucug

SEQ ID NO: 3342536 - RNA, 12 nt, Human
cuagcagcaggg

SEQ ID NO: 3342537 - RNA, 17 nt, Human
cgaguuacagacaaagc

SEQ ID NO: 3342538 - RNA, 18 nt, Human
cgaguuacagacaaagcg

SEQ ID NO: 3342539 - RNA, 15 nt, Human
cgaguagcugggacu

SEQ ID NO: 3342540 - RNA, 14 nt, Human
cgaguagcugggac

SEQ ID NO: 3342541 - RNA, 13 nt, Human
cgaguagcuggga

SEQ ID NO: 3342542 - RNA, 13 nt, Human
cgccaaggcuggg

SEQ ID NO: 3342543 - RNA, 16 nt, Human
cgccaaggcuggggga

SEQ ID NO: 3342544 - RNA, 12 nt, Human
cgccaaggcugg

SEQ ID NO: 3342545 - RNA, 15 nt, Human
cggccuuuggcuuca

SEQ ID NO: 3342546 - RNA, 18 nt, Human
cggcucacugcagccuca

SEQ ID NO: 3342547 - RNA, 19 nt, Human
cggcucacugcagccucaa

SEQ ID NO: 3342548 - RNA, 17 nt, Human
cggcucacugcagccuc

SEQ ID NO: 3342549 - RNA, 21 nt, Human
ccuucugacccaugcugcccu

SEQ ID NO: 3342550 - RNA, 22 nt, Human
ccuucugacccaugcugcccug

SEQ ID NO: 3342551 - RNA, 23 nt, Human
ccuucugacccaugcugcccugu

SEQ ID NO: 3342552 - RNA, 22 nt, Human
ccuucuggaauaaggagaauga

SEQ ID NO: 3342553 - RNA, 12 nt, Human
ccuucugaccca

SEQ ID NO: 3342554 - RNA, 16 nt, Human
ccuucugacccaugcu

SEQ ID NO: 3342555 - RNA, 17 nt, Human
ccuucugacccaugcug

SEQ ID NO: 3342556 - RNA, 20 nt, Human
ccuucugacccaugcugccc

SEQ ID NO: 3342557 - RNA, 14 nt, Human
ccuggccugagcug

SEQ ID NO: 3342558 - RNA, 15 nt, Human
ccuggccugagcugg

SEQ ID NO: 3342559 - RNA, 17 nt, Human
ccuugccgucuaccuga

SEQ ID NO: 3342560 - RNA, 20 nt, Human
ccuugccgucuaccugaggg

SEQ ID NO: 3342561 - RNA, 20 nt, Human
ccuuuucgcaggauucuucc

SEQ ID NO: 3342562 - RNA, 20 nt, Human
ccuuuagcgcccaguugggu

SEQ ID NO: 3342563 - RNA, 14 nt, Human
ccuuuagcgcccag

SEQ ID NO: 3342564 - RNA, 12 nt, Human
ccuuuuuuauac

SEQ ID NO: 3342565 - RNA, 21 nt, Human
ccuuuuuuagaguugauacua

SEQ ID NO: 3342566 - RNA, 23 nt, Human
cgaccagacaccuugacagggca

SEQ ID NO: 3342567 - RNA, 17 nt, Human
ccuuuuuuauacauaaa

SEQ ID NO: 3342568 - RNA, 18 nt, Human
ccuuuuuuauacauaaac

SEQ ID NO: 3342569 - RNA, 24 nt, Human
cucuccccagcaagugagagcugg

SEQ ID NO: 3342570 - RNA, 21 nt, Human
cucuccgaccagacaccuuga

SEQ ID NO: 3342571 - RNA, 15 nt, Human
cucugaaggacauug

SEQ ID NO: 3342572 - RNA, 12 nt, Human
cucucacuccuu

SEQ ID NO: 3342573 - RNA, 14 nt, Human
cucucacuccuuga

SEQ ID NO: 3342574 - RNA, 19 nt, Human
cucucagauuguaccauug

SEQ ID NO: 3342575 - RNA, 15 nt, Human
cucucacuccuugaa

SEQ ID NO: 3342576 - RNA, 13 nt, Human
cucugcagcaaua

SEQ ID NO: 3342577 - RNA, 18 nt, Human
cucugcagcaauaaagca

SEQ ID NO: 3342578 - RNA, 19 nt, Human
cucugcagcaauaaagcag

SEQ ID NO: 3342579 - RNA, 23 nt, Human
cucugcagcaauaaagcagcguu

SEQ ID NO: 3342580 - RNA, 16 nt, Human
cucugcugacagacac

SEQ ID NO: 3342581 - RNA, 15 nt, Human
cucugguccauagag

SEQ ID NO: 3342582 - RNA, 19 nt, Human
cucugcugacagacacagg

SEQ ID NO: 3342583 - RNA, 18 nt, Human
cucugcugacagacacag

SEQ ID NO: 3342584 - RNA, 17 nt, Human
cucugcugacagacaca

SEQ ID NO: 3342585 - RNA, 16 nt, Human
cucugguccauagaga

SEQ ID NO: 3342586 - RNA, 18 nt, Human
cucugguccauagagagc

SEQ ID NO: 3342587 - RNA, 19 nt, Human
cucugguccauagagagca

SEQ ID NO: 3342588 - RNA, 15 nt, Human
cucugguuaucuaau

SEQ ID NO: 3342589 - RNA, 17 nt, Human
cucuguacagagcccac

SEQ ID NO: 3342590 - RNA, 21 nt, Human
cucuguacagagcccacgccc

SEQ ID NO: 3342591 - RNA, 15 nt, Human
cucuuagaaaaacca

SEQ ID NO: 3342592 - RNA, 13 nt, Human
cugaaggccccgc

SEQ ID NO: 3342593 - RNA, 14 nt, Human
cugaaggccccgcc

SEQ ID NO: 3342594 - RNA, 17 nt, Human
cugaaggcuggguucug

SEQ ID NO: 3342595 - RNA, 17 nt, Human
cugaaggccccgcccag

SEQ ID NO: 3342596 - RNA, 20 nt, Human
cugaaggacauugcggacag

SEQ ID NO: 3342597 - RNA, 19 nt, Human
cugaaggacauugcggaca

SEQ ID NO: 3342598 - RNA, 16 nt, Human
cugaaaauguaugugu

SEQ ID NO: 3342599 - RNA, 14 nt, Human
cugaaaauguaugu

SEQ ID NO: 3342600 - RNA, 14 nt, Human
cugacagacacagg

SEQ ID NO: 3342601 - RNA, 12 nt, Human
cugacagacaca

SEQ ID NO: 3342602 - RNA, 18 nt, Human
cugacccaugcugcccug

SEQ ID NO: 3342603 - RNA, 17 nt, Human
cugacccaugcugcccu

SEQ ID NO: 3342604 - RNA, 19 nt, Human
cugacccaugcugcccugu

SEQ ID NO: 3342605 - RNA, 23 nt, Human
cugacccugcuucaaauauuucc

SEQ ID NO: 3342606 - RNA, 13 nt, Human
cucaggccugggg

SEQ ID NO: 3342607 - RNA, 14 nt, Human
cucaggccuggggg

SEQ ID NO: 3342608 - RNA, 20 nt, Human
cucaggccugggggcugggc

SEQ ID NO: 3342609 - RNA, 21 nt, Human
cucaggccugggggcugggca

SEQ ID NO: 3342610 - RNA, 14 nt, Human
cucaggccagcugc

SEQ ID NO: 3342611 - RNA, 20 nt, Human
cucaggccagcugcuugggc

SEQ ID NO: 3342612 - RNA, 21 nt, Human
cucaggccagcugcuugggcu

SEQ ID NO: 3342613 - RNA, 22 nt, Human
cucaggccagcugcuugggcuu

SEQ ID NO: 3342614 - RNA, 13 nt, Human
cucaggccagcug

SEQ ID NO: 3342615 - RNA, 13 nt, Human
cucagccucccaa

SEQ ID NO: 3342616 - RNA, 16 nt, Human
cucagccucccaaagu

SEQ ID NO: 3342617 - RNA, 14 nt, Human
cucagccucccaaa

SEQ ID NO: 3342618 - RNA, 21 nt, Human
cucagccucccaaagugcugg

SEQ ID NO: 3342619 - RNA, 22 nt, Human
cucagccucccaaagugcuggg

SEQ ID NO: 3342620 - RNA, 23 nt, Human
cucagccucccgaauagcuggga

SEQ ID NO: 3342621 - RNA, 12 nt, Human
cucauguucuua

SEQ ID NO: 3342622 - RNA, 14 nt, Human
cucauguucuuaau

SEQ ID NO: 3342623 - RNA, 18 nt, Human
cucauguucuuaauucuu

SEQ ID NO: 3342624 - RNA, 19 nt, Human
cucauguucuuaauucuua

SEQ ID NO: 3342625 - RNA, 18 nt, Human
cucagucuggcccuuccu

SEQ ID NO: 3342626 - RNA, 17 nt, Human
cucagucuggcccuucc

SEQ ID NO: 3342627 - RNA, 13 nt, Human
cucagugccacua

SEQ ID NO: 3342628 - RNA, 16 nt, Human
cuccagacacaugucc

SEQ ID NO: 3342629 - RNA, 17 nt, Human
cuccagacacaugucca

SEQ ID NO: 3342630 - RNA, 19 nt, Human
cuccagacacauguccaag

SEQ ID NO: 3342631 - RNA, 15 nt, Human
cuccagaauuuccca

SEQ ID NO: 3342632 - RNA, 18 nt, Human
cuccagaauuucccaaag

SEQ ID NO: 3342633 - RNA, 17 nt, Human
cuccaagaccuucuccu

SEQ ID NO: 3342634 - RNA, 18 nt, Human
cuccaagaccuucuccuu

SEQ ID NO: 3342635 - RNA, 16 nt, Human
cuccaagaccuucucc

SEQ ID NO: 3342636 - RNA, 15 nt, Human
cuccaagaccuucuc

SEQ ID NO: 3342637 - RNA, 22 nt, Human
cuccacuuucuagccagaggag

SEQ ID NO: 3342638 - RNA, 20 nt, Human
cuccacuuucuagccagagg

SEQ ID NO: 3342639 - RNA, 11 nt, Human
cuccaggugca

SEQ ID NO: 3342640 - RNA, 12 nt, Human
cucccaccucag

SEQ ID NO: 3342641 - RNA, 19 nt, Human
cuccgcuuucuacccagcg

SEQ ID NO: 3342642 - RNA, 23 nt, Human
auuucuuuugccguuauuaaaaa

SEQ ID NO: 3342643 - RNA, 16 nt, Human
auuuauuauggcacau

SEQ ID NO: 3342644 - RNA, 14 nt, Human
auuuccugugucuu

SEQ ID NO: 3342645 - RNA, 12 nt, Human
auuucuaaaucu

SEQ ID NO: 3342646 - RNA, 13 nt, Human
auuucuaaaucuc

SEQ ID NO: 3342647 - RNA, 21 nt, Human
auuucuaaaucuccaaaauaa

SEQ ID NO: 3342648 - RNA, 13 nt, Human
auuuauuauggca

SEQ ID NO: 3342649 - RNA, 20 nt, Human
auuuauuaaaugcccagccc

SEQ ID NO: 3342650 - RNA, 16 nt, Human
auuugagcagggcuca

SEQ ID NO: 3342651 - RNA, 20 nt, Human
auuucuuuugccguuauuaa

SEQ ID NO: 3342652 - RNA, 22 nt, Human
auuugaggucuguucuuuccaa

SEQ ID NO: 3342653 - RNA, 23 nt, Human
auuugaggucuguucuuuccaaa

SEQ ID NO: 3342654 - RNA, 17 nt, Human
auuugagcagggcucag

SEQ ID NO: 3342655 - RNA, 18 nt, Human
auuuggugguuucagaaa

SEQ ID NO: 3342656 - RNA, 20 nt, Human
auuuggugguuucagaaaug

SEQ ID NO: 3342657 - RNA, 17 nt, Human
auuuggugguuucagaa

SEQ ID NO: 3342658 - RNA, 13 nt, Human
auuuuauuaugca

SEQ ID NO: 3342659 - RNA, 14 nt, Human
auuuuauuaugcau

SEQ ID NO: 3342660 - RNA, 15 nt, Human
auuuuauuaugcaug

SEQ ID NO: 3342661 - RNA, 17 nt, Human
auuuuauuaugcaugaa

SEQ ID NO: 3342662 - RNA, 19 nt, Human
auugcggacagccacggcc

SEQ ID NO: 3342663 - RNA, 18 nt, Human
auugcggacagccacggc

SEQ ID NO: 3342664 - RNA, 16 nt, Human
auugcggacagccacg

SEQ ID NO: 3342665 - RNA, 21 nt, Human
auugcccacgcuggagugcag

SEQ ID NO: 3342666 - RNA, 17 nt, Human
auugcccacgcuggagu

SEQ ID NO: 3342667 - RNA, 23 nt, Human
auugccauuucuuccacaagagc

SEQ ID NO: 3342668 - RNA, 21 nt, Human
auugcaacaggcugggcuuca

SEQ ID NO: 3342669 - RNA, 19 nt, Human
auugcaacaggcugggcuu

SEQ ID NO: 3342670 - RNA, 15 nt, Human
auugcaacaggcugg

SEQ ID NO: 3342671 - RNA, 13 nt, Human
auugaccugaggc

SEQ ID NO: 3342672 - RNA, 16 nt, Human
auucuacuuugagugc

SEQ ID NO: 3342673 - RNA, 13 nt, Human
auucuacuuugag

SEQ ID NO: 3342674 - RNA, 14 nt, Human
auucucagaaucuc

SEQ ID NO: 3342675 - RNA, 20 nt, Human
auucucagaaucucaaauaa

SEQ ID NO: 3342676 - RNA, 18 nt, Human
auucucagaaucucaaau

SEQ ID NO: 3342677 - RNA, 13 nt, Human
auucuccaccugc

SEQ ID NO: 3342678 - RNA, 16 nt, Human
auucuccaccugccag

SEQ ID NO: 3342679 - RNA, 17 nt, Human
auucuccaccugccagg

SEQ ID NO: 3342680 - RNA, 23 nt, Human
auuuaauuuuuuugagacagagu

SEQ ID NO: 3342681 - RNA, 19 nt, Human
auuuaauuuuuuugagaca

SEQ ID NO: 3342682 - RNA, 17 nt, Human
auuuaacagaaauguac

SEQ ID NO: 3342683 - RNA, 19 nt, Human
auuuaacagaaauguacag

SEQ ID NO: 3342684 - RNA, 20 nt, Human
auuuaacagaaauguacagc

SEQ ID NO: 3342685 - RNA, 15 nt, Human
auuuaacagaaaugu

SEQ ID NO: 3342686 - RNA, 16 nt, Human
auuuaacagaaaugua

SEQ ID NO: 3342687 - RNA, 23 nt, Human
auuggcuuuggguugcaggaccu

SEQ ID NO: 3342688 - RNA, 17 nt, Human
auuaaacuuaaucuaaa

SEQ ID NO: 3342689 - RNA, 16 nt, Human
auuaaacuuaaucuaa

SEQ ID NO: 3342690 - RNA, 19 nt, Human
auuaaacuuaaucuaaaug

SEQ ID NO: 3342691 - RNA, 17 nt, Human
auuaaccacuucagcug

SEQ ID NO: 3342692 - RNA, 18 nt, Human
auuaaccacuucagcuga

SEQ ID NO: 3342693 - RNA, 20 nt, Human
auuaaccacuucagcugacu

SEQ ID NO: 3342694 - RNA, 16 nt, Human
auuaacuuuuauaaac

SEQ ID NO: 3342695 - RNA, 17 nt, Human
auuaacuuuuauaaacu

SEQ ID NO: 3342696 - RNA, 19 nt, Human
auuaacuuuuauaaacuuu

SEQ ID NO: 3342697 - RNA, 20 nt, Human
auuaacuuuuauaaacuuua

SEQ ID NO: 3342698 - RNA, 12 nt, Human
auuaacuuuuau

SEQ ID NO: 3342699 - RNA, 23 nt, Human
auuaacuuuuauaaacuuuaccu

SEQ ID NO: 3342700 - RNA, 14 nt, Human
auuaagaaagacua

SEQ ID NO: 3342701 - RNA, 13 nt, Human
auuaagaaagacu

SEQ ID NO: 3342702 - RNA, 17 nt, Human
auguuuuucuucucccu

SEQ ID NO: 3342703 - RNA, 18 nt, Human
auguuuuucuucucccuc

SEQ ID NO: 3342704 - RNA, 14 nt, Human
auguuuuccaugag

SEQ ID NO: 3342705 - RNA, 19 nt, Human
uuuuccagguuuaagcugu

SEQ ID NO: 3342706 - RNA, 14 nt, Human
uuuuauaaacuuua

SEQ ID NO: 3342707 - RNA, 17 nt, Human
uuuuauaaacuuuaccu

SEQ ID NO: 3342708 - RNA, 19 nt, Human
uuuuauaaacuuuaccuuu

SEQ ID NO: 3342709 - RNA, 21 nt, Human
uuuuauggcuuuugugcauua

SEQ ID NO: 3342710 - RNA, 12 nt, Human
uuuuauaaacuu

SEQ ID NO: 3342711 - RNA, 13 nt, Human
uuuuauaaacuuu

SEQ ID NO: 3342712 - RNA, 23 nt, Human
uuuuagaguugauacuacaguuu

SEQ ID NO: 3342713 - RNA, 14 nt, Human
auguuggccaggcu

SEQ ID NO: 3342714 - RNA, 13 nt, Human
auguuggccaggc

SEQ ID NO: 3342715 - RNA, 16 nt, Human
uuuuaagugcugcauu

SEQ ID NO: 3342716 - RNA, 17 nt, Human
uuuuaagugcugcauuu

SEQ ID NO: 3342717 - RNA, 21 nt, Human
uuuuaagugcugcauuuaaaa

SEQ ID NO: 3342718 - RNA, 21 nt, Human
auguucaucauccuaagcuau

SEQ ID NO: 3342719 - RNA, 14 nt, Human
uuuggggauauuuu

SEQ ID NO: 3342720 - RNA, 22 nt, Human
uuugggaggccaaggugggagg

SEQ ID NO: 3342721 - RNA, 13 nt, Human
uuuggggaagaac

SEQ ID NO: 3342722 - RNA, 22 nt, Human
uuugccauguuggccaggcugg

SEQ ID NO: 3342723 - RNA, 23 nt, Human
augucucuuuaaugucacaggca

SEQ ID NO: 3342724 - RNA, 19 nt, Human
auguccaagaagcccagga

SEQ ID NO: 3342725 - RNA, 18 nt, Human
auguccaagaagcccagg

SEQ ID NO: 3342726 - RNA, 23 nt, Human
auguccaagaagcccaggaaagg

SEQ ID NO: 3342727 - RNA, 15 nt, Human
augucagugugacug

SEQ ID NO: 3342728 - RNA, 16 nt, Human
augucagugugacuga

SEQ ID NO: 3342729 - RNA, 21 nt, Human
augucagugugacugaucucu

SEQ ID NO: 3342730 - RNA, 22 nt, Human
uuugggggaaaauuuagaaaua

SEQ ID NO: 3342731 - RNA, 15 nt, Human
auguaucaaugagua

SEQ ID NO: 3342732 - RNA, 15 nt, Human
auguaucugagcagg

SEQ ID NO: 3342733 - RNA, 12 nt, Human
auguauguguaa

SEQ ID NO: 3342734 - RNA, 21 nt, Human
uuuuaaaaaacugcugacugu

SEQ ID NO: 3342735 - RNA, 18 nt, Human
uuuguuugaacugauaaa

SEQ ID NO: 3342736 - RNA, 15 nt, Human
uuuuaagugcugcau

SEQ ID NO: 3342737 - RNA, 16 nt, Human
uuuuaagaggcagggu

SEQ ID NO: 3342738 - RNA, 15 nt, Human
uuuuaagaggcaggg

SEQ ID NO: 3342739 - RNA, 18 nt, Human
uuugugaggaagccgcug

SEQ ID NO: 3342740 - RNA, 19 nt, Human
uuugugaggaagccgcugg

SEQ ID NO: 3342741 - RNA, 13 nt, Human
uuuguuugaacug

SEQ ID NO: 3342742 - RNA, 14 nt, Human
uuuguuugaacuga

SEQ ID NO: 3342743 - RNA, 12 nt, Human
uuuguuugaacu

SEQ ID NO: 3342744 - RNA, 22 nt, Human
uuuguaaauuaacuuuuauaaa

SEQ ID NO: 3342745 - RNA, 13 nt, Human
uuuguagagccag

SEQ ID NO: 3342746 - RNA, 22 nt, Human
auuaccugaauuuuggcugugu

SEQ ID NO: 3342747 - RNA, 19 nt, Human
auuaccacagacauacuaa

SEQ ID NO: 3342748 - RNA, 22 nt, Human
uuuuuguuccacaaguuaaaua

SEQ ID NO: 3342749 - RNA, 23 nt, Human
auuauuuauuaaaugcccagccc

SEQ ID NO: 3342750 - RNA, 13 nt, Human
auuagagaagaga

SEQ ID NO: 3342751 - RNA, 14 nt, Human
auucagcucugcaa

SEQ ID NO: 3342752 - RNA, 18 nt, Human
auucagcucugcaagaau

SEQ ID NO: 3342753 - RNA, 21 nt, Human
auucaggaagcucagggccug

SEQ ID NO: 3342754 - RNA, 22 nt, Human
auucaggaagcucagggccugg

SEQ ID NO: 3342755 - RNA, 23 nt, Human
auucaggaagcucagggccuggc

SEQ ID NO: 3342756 - RNA, 16 nt, Human
auucaguuguuagugu

SEQ ID NO: 3342757 - RNA, 21 nt, Human
auucaguuguuagugugucuu

SEQ ID NO: 3342758 - RNA, 20 nt, Human
auucaggaagcucagggccu

SEQ ID NO: 3342759 - RNA, 16 nt, Human
auuccccaggaggcca

SEQ ID NO: 3342760 - RNA, 22 nt, Human
auuccccacccugaaagcccug

SEQ ID NO: 3342761 - RNA, 20 nt, Human
auuccccagauugcaacagg

SEQ ID NO: 3342762 - RNA, 15 nt, Human
auccuaguuccacca

SEQ ID NO: 3342763 - RNA, 19 nt, Human
auccuaguuccaccaucaa

SEQ ID NO: 3342764 - RNA, 15 nt, Human
aucucacacaugagc

SEQ ID NO: 3342765 - RNA, 12 nt, Human
aucucccccagc

SEQ ID NO: 3342766 - RNA, 13 nt, Human
aucucccccagcc

SEQ ID NO: 3342767 - RNA, 15 nt, Human
uugauucagacagcu

SEQ ID NO: 3342768 - RNA, 16 nt, Human
uugauucagacagcug

SEQ ID NO: 3342769 - RNA, 14 nt, Human
uugauucagacagc

SEQ ID NO: 3342770 - RNA, 14 nt, Human
uugccguuauuaaa

SEQ ID NO: 3342771 - RNA, 19 nt, Human
uugccgucuaccugagggg

SEQ ID NO: 3342772 - RNA, 15 nt, Human
uugccgucuaccuga

SEQ ID NO: 3342773 - RNA, 18 nt, Human
uugccgucuaccugaggg

SEQ ID NO: 3342774 - RNA, 14 nt, Human
uugccuaaguauua

SEQ ID NO: 3342775 - RNA, 20 nt, Human
uugccuaaguauuaaaacau

SEQ ID NO: 3342776 - RNA, 16 nt, Human
uugccuaaguauuaaa

SEQ ID NO: 3342777 - RNA, 13 nt, Human
uugccgucuaccu

SEQ ID NO: 3342778 - RNA, 23 nt, Human
uugccuaaguauuaaaacauugg

SEQ ID NO: 3342779 - RNA, 19 nt, Human
aucuugcucugcugacaga

SEQ ID NO: 3342780 - RNA, 17 nt, Human
aucuugcucugcugaca

SEQ ID NO: 3342781 - RNA, 17 nt, Human
aucuugaauuguaagga

SEQ ID NO: 3342782 - RNA, 18 nt, Human
aucuugaauuguaaggaa

SEQ ID NO: 3342783 - RNA, 17 nt, Human
aucuggguucacugcaa

SEQ ID NO: 3342784 - RNA, 19 nt, Human
aucuggguucacugcaacc

SEQ ID NO: 3342785 - RNA, 23 nt, Human
aucugugaaaggaaagagggagg

SEQ ID NO: 3342786 - RNA, 14 nt, Human
augacacaugcaag

SEQ ID NO: 3342787 - RNA, 22 nt, Human
augacacaugcaaggucauuuu

SEQ ID NO: 3342788 - RNA, 14 nt, Human
augacuuacuguac

SEQ ID NO: 3342789 - RNA, 22 nt, Human
augacuuaagcacacuugacau

SEQ ID NO: 3342790 - RNA, 18 nt, Human
augacacgaauauugcug

SEQ ID NO: 3342791 - RNA, 16 nt, Human
augacuuacuguacau

SEQ ID NO: 3342792 - RNA, 17 nt, Human
augacuuacuguacaug

SEQ ID NO: 3342793 - RNA, 22 nt, Human
augagaaagguugaagcaccaa

SEQ ID NO: 3342794 - RNA, 21 nt, Human
augagaaagguugaagcacca

SEQ ID NO: 3342795 - RNA, 22 nt, Human
uuggcgcugccccuggcagccc

SEQ ID NO: 3342796 - RNA, 23 nt, Human
uuggcgcugccccuggcagcccc

SEQ ID NO: 3342797 - RNA, 18 nt, Human
uuggcuagagguucaaag

SEQ ID NO: 3342798 - RNA, 15 nt, Human
uuggauuauccugag

SEQ ID NO: 3342799 - RNA, 18 nt, Human
aucuuugcagacaggcaa

SEQ ID NO: 3342800 - RNA, 22 nt, Human
uuggggggcugaggugggagga

SEQ ID NO: 3342801 - RNA, 14 nt, Human
uuggggauauuuuu

SEQ ID NO: 3342802 - RNA, 20 nt, Human
augaaugucagugugacuga

SEQ ID NO: 3342803 - RNA, 14 nt, Human
auggacaugaucuu

SEQ ID NO: 3342804 - RNA, 13 nt, Human
uuucagaaaugug

SEQ ID NO: 3342805 - RNA, 24 nt, Human
uuucacucuuauugcccacgcugg

SEQ ID NO: 3342806 - RNA, 16 nt, Human
auggaagacagcucuu

SEQ ID NO: 3342807 - RNA, 18 nt, Human
auggauuuccagccaaag

SEQ ID NO: 3342808 - RNA, 23 nt, Human
auggacguguuaugacuccagaa

SEQ ID NO: 3342809 - RNA, 19 nt, Human
auggacguguuaugacucc

SEQ ID NO: 3342810 - RNA, 20 nt, Human
auggacguguuaugacucca

SEQ ID NO: 3342811 - RNA, 17 nt, Human
auggcacaucagcacga

SEQ ID NO: 3342812 - RNA, 23 nt, Human
auggcacaucagcacgauuucug

SEQ ID NO: 3342813 - RNA, 21 nt, Human
auggccgggcgcgguggcuca

SEQ ID NO: 3342814 - RNA, 20 nt, Human
auggccuuugcuugaaagaa

SEQ ID NO: 3342815 - RNA, 18 nt, Human
auggcuaauguacugcau

SEQ ID NO: 3342816 - RNA, 15 nt, Human
uuuaguagagacagg

SEQ ID NO: 3342817 - RNA, 24 nt, Human
uuuauggcuuuugugcauuaucua

SEQ ID NO: 3342818 - RNA, 20 nt, Human
uuuauggcuuuugugcauua

SEQ ID NO: 3342819 - RNA, 11 nt, Human
auggaacacuc

SEQ ID NO: 3342820 - RNA, 14 nt, Human
auggaacacucuga

SEQ ID NO: 3342821 - RNA, 15 nt, Human
auggaacacucugag

SEQ ID NO: 3342822 - RNA, 16 nt, Human
auggaacacucugaga

SEQ ID NO: 3342823 - RNA, 15 nt, Human
auggaagacagcucu

SEQ ID NO: 3342824 - RNA, 19 nt, Human
augcugucccuuacgugag

SEQ ID NO: 3342825 - RNA, 23 nt, Human
augcugucccuuacgugaguccu

SEQ ID NO: 3342826 - RNA, 22 nt, Human
augcuguaacuuucugaaauaa

SEQ ID NO: 3342827 - RNA, 19 nt, Human
augcuccuggcccacugca

SEQ ID NO: 3342828 - RNA, 20 nt, Human
uuguucuggcucuuccaggc

SEQ ID NO: 3342829 - RNA, 22 nt, Human
uuguucuggcucuuccaggcug

SEQ ID NO: 3342830 - RNA, 17 nt, Human
uuguguguuuauuguca

SEQ ID NO: 3342831 - RNA, 19 nt, Human
uuguucuggcucuuccagg

SEQ ID NO: 3342832 - RNA, 13 nt, Human
uugugguuaaucu

SEQ ID NO: 3342833 - RNA, 18 nt, Human
uugugauacaaugcugug

SEQ ID NO: 3342834 - RNA, 21 nt, Human
uugugaggaagccgcuggggc

SEQ ID NO: 3342835 - RNA, 13 nt, Human
augcaccagcccu

SEQ ID NO: 3342836 - RNA, 12 nt, Human
augcacuuuguu

SEQ ID NO: 3342837 - RNA, 19 nt, Human
augauuaaccacuucagcu

SEQ ID NO: 3342838 - RNA, 20 nt, Human
augauuaaccacuucagcug

SEQ ID NO: 3342839 - RNA, 21 nt, Human
augauuaaccacuucagcuga

SEQ ID NO: 3342840 - RNA, 21 nt, Human
augauucaacagguuuuccug

SEQ ID NO: 3342841 - RNA, 12 nt, Human
uuuaauucaguu

SEQ ID NO: 3342842 - RNA, 15 nt, Human
uuuaagugcugcauu

SEQ ID NO: 3342843 - RNA, 16 nt, Human
uuuaagugcugcauuu

SEQ ID NO: 3342844 - RNA, 17 nt, Human
uuuaagugcugcauuua

SEQ ID NO: 3342845 - RNA, 23 nt, Human
uuuaaugaaagacuguacaaagu

SEQ ID NO: 3342846 - RNA, 14 nt, Human
uuuaagaggcaggg

SEQ ID NO: 3342847 - RNA, 16 nt, Human
uuguuuucaguguaca

SEQ ID NO: 3342848 - RNA, 13 nt, Human
uuguuuucagugu

SEQ ID NO: 3342849 - RNA, 15 nt, Human
augcacuuuguucug

SEQ ID NO: 3342850 - RNA, 13 nt, Human
augcagccucaca

SEQ ID NO: 3342851 - RNA, 14 nt, Human
augcagccucacag

SEQ ID NO: 3342852 - RNA, 15 nt, Human
augcagccucacagu

SEQ ID NO: 3342853 - RNA, 21 nt, Human
aucauugaaaucuuuuugcuu

SEQ ID NO: 3342854 - RNA, 21 nt, Human
aucaggccaggcccucugccc

SEQ ID NO: 3342855 - RNA, 22 nt, Human
aucaggccaggcccucugccca

SEQ ID NO: 3342856 - RNA, 23 nt, Human
aucaggccaggcccucugcccac

SEQ ID NO: 3342857 - RNA, 20 nt, Human
aucauugaaaucuuuuugcu

SEQ ID NO: 3342858 - RNA, 20 nt, Human
aucaggccaggcccucugcc

SEQ ID NO: 3342859 - RNA, 17 nt, Human
uucucuacucuagggaa

SEQ ID NO: 3342860 - RNA, 16 nt, Human
uucucuuuucaaaaca

SEQ ID NO: 3342861 - RNA, 14 nt, Human
uucugacccaugcu

SEQ ID NO: 3342862 - RNA, 13 nt, Human
uucugccgcagcc

SEQ ID NO: 3342863 - RNA, 16 nt, Human
uucuggcuaugcauuu

SEQ ID NO: 3342864 - RNA, 18 nt, Human
uucuggcuaugcauuuga

SEQ ID NO: 3342865 - RNA, 20 nt, Human
uucuggcuaugcauuugaaa

SEQ ID NO: 3342866 - RNA, 14 nt, Human
uucugccgcagccc

SEQ ID NO: 3342867 - RNA, 15 nt, Human
uucugccgcagcccu

SEQ ID NO: 3342868 - RNA, 21 nt, Human
auccaagcuggucccacucag

SEQ ID NO: 3342869 - RNA, 22 nt, Human
uucuuucuggcuaugcauuuga

SEQ ID NO: 3342870 - RNA, 12 nt, Human
uucuugcaaagu

SEQ ID NO: 3342871 - RNA, 23 nt, Human
uucuuccucccucccucuuuccc

SEQ ID NO: 3342872 - RNA, 13 nt, Human
uucuuaauucuua

SEQ ID NO: 3342873 - RNA, 18 nt, Human
uucuguucuuucuggcua

SEQ ID NO: 3342874 - RNA, 11 nt, Human
uucuguucuuu

SEQ ID NO: 3342875 - RNA, 20 nt, Human
uucuguuuuucuaggccugg

SEQ ID NO: 3342876 - RNA, 21 nt, Human
uugaaauuuuuauuaaauuau

SEQ ID NO: 3342877 - RNA, 11 nt, Human
uugaaaucuuu

SEQ ID NO: 3342878 - RNA, 20 nt, Human
uugaaauauaggaacuuaaa

SEQ ID NO: 3342879 - RNA, 21 nt, Human
auccuaagcuauucaguaaua

SEQ ID NO: 3342880 - RNA, 21 nt, Human
auccuaggcauuugcugaaua

SEQ ID NO: 3342881 - RNA, 13 nt, Human
auccuaguuccac

SEQ ID NO: 3342882 - RNA, 19 nt, Human
uucccuuuuuuggcugcug

SEQ ID NO: 3342883 - RNA, 18 nt, Human
uucccuuuuuuggcugcu

SEQ ID NO: 3342884 - RNA, 20 nt, Human
aucaaccccuucgcuccugu

SEQ ID NO: 3342885 - RNA, 19 nt, Human
aucaaccccuucgcuccug

SEQ ID NO: 3342886 - RNA, 21 nt, Human
uucgcaggauucuuccucccu

SEQ ID NO: 3342887 - RNA, 13 nt, Human
aucaggccaggcc

SEQ ID NO: 3342888 - RNA, 21 nt, Human
uucucacugccaugccagcuu

SEQ ID NO: 3342889 - RNA, 17 nt, Human
uuccaaggguacuaagg

SEQ ID NO: 3342890 - RNA, 15 nt, Human
uuccaaggguacuaa

SEQ ID NO: 3342891 - RNA, 15 nt, Human
auauguggaguucau

SEQ ID NO: 3342892 - RNA, 16 nt, Human
auauguggaguucauc

SEQ ID NO: 3342893 - RNA, 19 nt, Human
uuccaccaucaagccacca

SEQ ID NO: 3342894 - RNA, 22 nt, Human
uuccacaagagcccaggccucc

SEQ ID NO: 3342895 - RNA, 18 nt, Human
uuccaccaucaagccacc

SEQ ID NO: 3342896 - RNA, 17 nt, Human
uuccaggggugggacac

SEQ ID NO: 3342897 - RNA, 21 nt, Human
uuccaggggugggacacccug

SEQ ID NO: 3342898 - RNA, 17 nt, Human
uuccagugaggcucugc

SEQ ID NO: 3342899 - RNA, 19 nt, Human
uuccagugaggcucugccc

SEQ ID NO: 3342900 - RNA, 20 nt, Human
uuccagugaggcucugcccu

SEQ ID NO: 3342901 - RNA, 21 nt, Human
uuccagugaggcucugcccuu

SEQ ID NO: 3342902 - RNA, 22 nt, Human
uuccagugaggcucugcccuug

SEQ ID NO: 3342903 - RNA, 23 nt, Human
uucccaaagcagugcaugcuguc

SEQ ID NO: 3342904 - RNA, 12 nt, Human
uucccaccucuc

SEQ ID NO: 3342905 - RNA, 22 nt, Human
uucccaccucucucacuccuug

SEQ ID NO: 3342906 - RNA, 18 nt, Human
uucccaagcucugcuccu

SEQ ID NO: 3342907 - RNA, 16 nt, Human
uucccaagcucugcuc

SEQ ID NO: 3342908 - RNA, 15 nt, Human
uucccaagcucugcu

SEQ ID NO: 3342909 - RNA, 14 nt, Human
uucccaagcucugc

SEQ ID NO: 3342910 - RNA, 13 nt, Human
uucccaagcucug

SEQ ID NO: 3342911 - RNA, 11 nt, Human
uucagaaaugu

SEQ ID NO: 3342912 - RNA, 16 nt, Human
uucagugccaaaaaca

SEQ ID NO: 3342913 - RNA, 12 nt, Human
uucagugccuua

SEQ ID NO: 3342914 - RNA, 13 nt, Human
uucagugccuuau

SEQ ID NO: 3342915 - RNA, 21 nt, Human
uucaucccucuggggcuguuc

SEQ ID NO: 3342916 - RNA, 17 nt, Human
uucaucccucuggggcu

SEQ ID NO: 3342917 - RNA, 16 nt, Human
auauguaacaagccac

SEQ ID NO: 3342918 - RNA, 17 nt, Human
auauguaacaagccacc

SEQ ID NO: 3342919 - RNA, 14 nt, Human
auaugcacacauuu

SEQ ID NO: 3342920 - RNA, 15 nt, Human
auaugcacacauuuu

SEQ ID NO: 3342921 - RNA, 16 nt, Human
auaugcacacauuuuu

SEQ ID NO: 3342922 - RNA, 13 nt, Human
auaugcacacauu

SEQ ID NO: 3342923 - RNA, 20 nt, Human
auaucugaaaauguaugugu

SEQ ID NO: 3342924 - RNA, 17 nt, Human
auaucugaaaauguaug

SEQ ID NO: 3342925 - RNA, 16 nt, Human
auaucugaaaauguau

SEQ ID NO: 3342926 - RNA, 12 nt, Human
auauauaaccag

SEQ ID NO: 3342927 - RNA, 13 nt, Human
auauauaaccagu

SEQ ID NO: 3342928 - RNA, 17 nt, Human
auaguggcuuaaaacaa

SEQ ID NO: 3342929 - RNA, 15 nt, Human
auaguggugugauuu

SEQ ID NO: 3342930 - RNA, 22 nt, Human
auaguuaagcgugcauaaguua

SEQ ID NO: 3342931 - RNA, 22 nt, Human
auaguuggcuaggaccccucca

SEQ ID NO: 3342932 - RNA, 21 nt, Human
uucaagcgauucuucugcuuc

SEQ ID NO: 3342933 - RNA, 18 nt, Human
uuauuuuuagacagaguc

SEQ ID NO: 3342934 - RNA, 17 nt, Human
uuauuuuuagacagagu

SEQ ID NO: 3342935 - RNA, 12 nt, Human
auaggaaaaacu

SEQ ID NO: 3342936 - RNA, 14 nt, Human
auaggaaaaacuga

SEQ ID NO: 3342937 - RNA, 16 nt, Human
auaggaaaaacugauu

SEQ ID NO: 3342938 - RNA, 17 nt, Human
auaggaaaaacugauuu

SEQ ID NO: 3342939 - RNA, 20 nt, Human
uucacagaugggugcuugga

SEQ ID NO: 3342940 - RNA, 15 nt, Human
uucacaguucucucc

SEQ ID NO: 3342941 - RNA, 20 nt, Human
uucacaguucucuccuucuu

SEQ ID NO: 3342942 - RNA, 13 nt, Human
uucacaguucucu

SEQ ID NO: 3342943 - RNA, 17 nt, Human
ugaguacuacaguccuc

SEQ ID NO: 3342944 - RNA, 21 nt, Human
ugaguacuacaguccucccau

SEQ ID NO: 3342945 - RNA, 22 nt, Human
ugaguacuacaguccucccauc

SEQ ID NO: 3342946 - RNA, 23 nt, Human
ugaguacuacaguccucccaucu

SEQ ID NO: 3342947 - RNA, 14 nt, Human
ugaguacuacaguc

SEQ ID NO: 3342948 - RNA, 14 nt, Human
agcauauucaggaa

SEQ ID NO: 3342949 - RNA, 15 nt, Human
ugaguacuacagucc

SEQ ID NO: 3342950 - RNA, 12 nt, Human
ugagaauuaccc

SEQ ID NO: 3342951 - RNA, 15 nt, Human
agcauacguacacau

SEQ ID NO: 3342952 - RNA, 16 nt, Human
agcauacguacacauu

SEQ ID NO: 3342953 - RNA, 17 nt, Human
agcauacguacacauuu

SEQ ID NO: 3342954 - RNA, 18 nt, Human
agcauacguacacauuuu

SEQ ID NO: 3342955 - RNA, 19 nt, Human
agcauacguacacauuuua

SEQ ID NO: 3342956 - RNA, 20 nt, Human
agcauacguacacauuuuau

SEQ ID NO: 3342957 - RNA, 21 nt, Human
agcauacguacacauuuuauu

SEQ ID NO: 3342958 - RNA, 18 nt, Human
ugauacaaugcugugccc

SEQ ID NO: 3342959 - RNA, 20 nt, Human
ugauacaaugcugugcccua

SEQ ID NO: 3342960 - RNA, 21 nt, Human
ugauacaaugcugugcccuaa

SEQ ID NO: 3342961 - RNA, 14 nt, Human
ugauacuacaguuu

SEQ ID NO: 3342962 - RNA, 17 nt, Human
ugauacuacaguuuguu

SEQ ID NO: 3342963 - RNA, 20 nt, Human
ugauaagaaccuuuugagug

SEQ ID NO: 3342964 - RNA, 17 nt, Human
ugaguucauacccuguu

SEQ ID NO: 3342965 - RNA, 17 nt, Human
ugagugccuuacacaau

SEQ ID NO: 3342966 - RNA, 20 nt, Human
ugagugccuuacacaauggu

SEQ ID NO: 3342967 - RNA, 17 nt, Human
ugagucaccaagcccag

SEQ ID NO: 3342968 - RNA, 16 nt, Human
ugagucaccaagccca

SEQ ID NO: 3342969 - RNA, 14 nt, Human
ugagucaccaagcc

SEQ ID NO: 3342970 - RNA, 23 nt, Human
ugagugggggaucacagccucug

SEQ ID NO: 3342971 - RNA, 21 nt, Human
ugagugggugaauaauacagu

SEQ ID NO: 3342972 - RNA, 16 nt, Human
ugagugccuuacacaa

SEQ ID NO: 3342973 - RNA, 12 nt, Human
agcauggcugcc

SEQ ID NO: 3342974 - RNA, 14 nt, Human
agcaucaggccagg

SEQ ID NO: 3342975 - RNA, 16 nt, Human
agcaucaggccaggcc

SEQ ID NO: 3342976 - RNA, 17 nt, Human
agcaucaggccaggccc

SEQ ID NO: 3342977 - RNA, 18 nt, Human
agcaucaggccaggcccu

SEQ ID NO: 3342978 - RNA, 19 nt, Human
agcaucaggccaggcccuc

SEQ ID NO: 3342979 - RNA, 20 nt, Human
agcaucaggccaggcccucu

SEQ ID NO: 3342980 - RNA, 19 nt, Human
ugaucacggcucacugcag

SEQ ID NO: 3342981 - RNA, 18 nt, Human
ugaucacggcucacugca

SEQ ID NO: 3342982 - RNA, 13 nt, Human
agcaucaggccag

SEQ ID NO: 3342983 - RNA, 12 nt, Human
agcaucaggcca

SEQ ID NO: 3342984 - RNA, 20 nt, Human
ugaucacggcucacugcagc

SEQ ID NO: 3342985 - RNA, 22 nt, Human
agcauauucaggaagcucaggg

SEQ ID NO: 3342986 - RNA, 22 nt, Human
agcccacuucugccauauucug

SEQ ID NO: 3342987 - RNA, 19 nt, Human
agcccaggaaaggcuccag

SEQ ID NO: 3342988 - RNA, 20 nt, Human
agcccaggaaaggcuccagg

SEQ ID NO: 3342989 - RNA, 21 nt, Human
agcccaggaaaggcuccagga

SEQ ID NO: 3342990 - RNA, 19 nt, Human
ugauucccaagcucugcuc

SEQ ID NO: 3342991 - RNA, 18 nt, Human
ugauucccaagcucugcu

SEQ ID NO: 3342992 - RNA, 16 nt, Human
ugauucccaagcucug

SEQ ID NO: 3342993 - RNA, 15 nt, Human
ugauucccaagcucu

SEQ ID NO: 3342994 - RNA, 22 nt, Human
agcccaggaaaggcuccaggag

SEQ ID NO: 3342995 - RNA, 23 nt, Human
agcccaggaaaggcuccaggagc

SEQ ID NO: 3342996 - RNA, 24 nt, Human
agcccaggaaaggcuccaggagca

SEQ ID NO: 3342997 - RNA, 18 nt, Human
agcccaggaaaggcucca

SEQ ID NO: 3342998 - RNA, 13 nt, Human
ugauucagcucug

SEQ ID NO: 3342999 - RNA, 14 nt, Human
ugauucagcucugc

SEQ ID NO: 3343000 - RNA, 21 nt, Human
agccaggccacaagacccuug

SEQ ID NO: 3343001 - RNA, 22 nt, Human
agccaggccacaagacccuugu

SEQ ID NO: 3343002 - RNA, 12 nt, Human
agccagggucuc

SEQ ID NO: 3343003 - RNA, 23 nt, Human
agccaguaaaugggggugcauuu

SEQ ID NO: 3343004 - RNA, 22 nt, Human
agccaguaaaugggggugcauu

SEQ ID NO: 3343005 - RNA, 16 nt, Human
agccaguguugccuaa

SEQ ID NO: 3343006 - RNA, 12 nt, Human
agccaggccaca

SEQ ID NO: 3343007 - RNA, 14 nt, Human
agccaggccacaag

SEQ ID NO: 3343008 - RNA, 14 nt, Human
agccacauuccuga

SEQ ID NO: 3343009 - RNA, 18 nt, Human
agccacauuccugaugcu

SEQ ID NO: 3343010 - RNA, 20 nt, Human
agccaccaacauacucccau

SEQ ID NO: 3343011 - RNA, 23 nt, Human
agccaccaacauacucccaucug

SEQ ID NO: 3343012 - RNA, 19 nt, Human
agccaccaacauacuccca

SEQ ID NO: 3343013 - RNA, 14 nt, Human
agccacggccaggc

SEQ ID NO: 3343014 - RNA, 15 nt, Human
agccacggccaggcc

SEQ ID NO: 3343015 - RNA, 17 nt, Human
ugauggugcaaugaccu

SEQ ID NO: 3343016 - RNA, 23 nt, Human
ugauggugcaaugaccuuucaau

SEQ ID NO: 3343017 - RNA, 15 nt, Human
ugauggugcaaugac

SEQ ID NO: 3343018 - RNA, 16 nt, Human
ugauggugcaaugacc

SEQ ID NO: 3343019 - RNA, 14 nt, Human
ugaugauccuaggc

SEQ ID NO: 3343020 - RNA, 20 nt, Human
ugaugauccuaggcauuugc

SEQ ID NO: 3343021 - RNA, 17 nt, Human
ugauguuuuaaggaugc

SEQ ID NO: 3343022 - RNA, 23 nt, Human
ugauguuuuccaugaguccccug

SEQ ID NO: 3343023 - RNA, 22 nt, Human
agccacugcaccgggccacaga

SEQ ID NO: 3343024 - RNA, 21 nt, Human
agccacugcaccgggccacag

SEQ ID NO: 3343025 - RNA, 13 nt, Human
agccacugcaccg

SEQ ID NO: 3343026 - RNA, 20 nt, Human
agccacugcaccgggccaca

SEQ ID NO: 3343027 - RNA, 15 nt, Human
ugauuaauuaaaaca

SEQ ID NO: 3343028 - RNA, 22 nt, Human
agccugggugacagagcaagug

SEQ ID NO: 3343029 - RNA, 19 nt, Human
agccugcuccagcuguuca

SEQ ID NO: 3343030 - RNA, 22 nt, Human
agccugcuccagcuguucagcu

SEQ ID NO: 3343031 - RNA, 12 nt, Human
ugcauaccacuu

SEQ ID NO: 3343032 - RNA, 14 nt, Human
agccugcuccagcu

SEQ ID NO: 3343033 - RNA, 15 nt, Human
agccugcuccagcug

SEQ ID NO: 3343034 - RNA, 16 nt, Human
agccugcuccagcugu

SEQ ID NO: 3343035 - RNA, 17 nt, Human
agccugcuccagcuguu

SEQ ID NO: 3343036 - RNA, 22 nt, Human
agccuuagaagucacacaguau

SEQ ID NO: 3343037 - RNA, 21 nt, Human
agccugugccucugggacugg

SEQ ID NO: 3343038 - RNA, 19 nt, Human
agccugugccucugggacu

SEQ ID NO: 3343039 - RNA, 21 nt, Human
ugcauuaucuagauacuguau

SEQ ID NO: 3343040 - RNA, 22 nt, Human
ugcauuaucuagauacuguauc

SEQ ID NO: 3343041 - RNA, 18 nt, Human
ugcauuaucuagauacug

SEQ ID NO: 3343042 - RNA, 18 nt, Human
ugccaaugggagcucaug

SEQ ID NO: 3343043 - RNA, 16 nt, Human
agcggagaaaggaagg

SEQ ID NO: 3343044 - RNA, 20 nt, Human
ugcauuaucuagauacugua

SEQ ID NO: 3343045 - RNA, 20 nt, Human
agcggagaaaggaagggcug

SEQ ID NO: 3343046 - RNA, 18 nt, Human
agcggagacggaguccca

SEQ ID NO: 3343047 - RNA, 11 nt, Human
agccuuccagg

SEQ ID NO: 3343048 - RNA, 14 nt, Human
agccuuccaggggu

SEQ ID NO: 3343049 - RNA, 16 nt, Human
agccuuccaggggugg

SEQ ID NO: 3343050 - RNA, 17 nt, Human
agccuuccagggguggg

SEQ ID NO: 3343051 - RNA, 21 nt, Human
ugcccagccccuucugaccca

SEQ ID NO: 3343052 - RNA, 20 nt, Human
ugcccagccccuucugaccc

SEQ ID NO: 3343053 - RNA, 16 nt, Human
ugcccacaggaucagu

SEQ ID NO: 3343054 - RNA, 19 nt, Human
ugcccacaggaucagucug

SEQ ID NO: 3343055 - RNA, 20 nt, Human
ugcccacaggaucagucuga

SEQ ID NO: 3343056 - RNA, 20 nt, Human
agcucauucuccuuguguua

SEQ ID NO: 3343057 - RNA, 21 nt, Human
agcucauucuccuuguguuac

SEQ ID NO: 3343058 - RNA, 12 nt, Human
agcuaggccugg

SEQ ID NO: 3343059 - RNA, 15 nt, Human
agcuaggccuggcca

SEQ ID NO: 3343060 - RNA, 14 nt, Human
agcuaggccuggcc

SEQ ID NO: 3343061 - RNA, 21 nt, Human
agcucaggugucccugcacuu

SEQ ID NO: 3343062 - RNA, 20 nt, Human
agcucaggugucccugcacu

SEQ ID NO: 3343063 - RNA, 22 nt, Human
agcucaggugucccugcacuug

SEQ ID NO: 3343064 - RNA, 17 nt, Human
agcucaggugucccugc

SEQ ID NO: 3343065 - RNA, 18 nt, Human
agcucaggugucccugca

SEQ ID NO: 3343066 - RNA, 22 nt, Human
agcgugagccacugcaccgggc

SEQ ID NO: 3343067 - RNA, 19 nt, Human
agcgugagccacugcaccg

SEQ ID NO: 3343068 - RNA, 17 nt, Human
agcgugagccacugcac

SEQ ID NO: 3343069 - RNA, 18 nt, Human
agcuagacgagcaggcuu

SEQ ID NO: 3343070 - RNA, 14 nt, Human
ugcauaaguuaacu

SEQ ID NO: 3343071 - RNA, 16 nt, Human
ugcagccucacagucc

SEQ ID NO: 3343072 - RNA, 13 nt, Human
ugcagccucacag

SEQ ID NO: 3343073 - RNA, 15 nt, Human
ugcagccucacaguc

SEQ ID NO: 3343074 - RNA, 23 nt, Human
ugcagccucaaccuccugggcua

SEQ ID NO: 3343075 - RNA, 23 nt, Human
agcccuucuaccuuccugcaaca

SEQ ID NO: 3343076 - RNA, 23 nt, Human
ugcacuauagccuaggugacaga

SEQ ID NO: 3343077 - RNA, 22 nt, Human
ugcacuauagccuaggugacag

SEQ ID NO: 3343078 - RNA, 16 nt, Human
agccucagcauccugg

SEQ ID NO: 3343079 - RNA, 21 nt, Human
agccucagcauccuggcaccc

SEQ ID NO: 3343080 - RNA, 20 nt, Human
agccucagcauccuggcacc

SEQ ID NO: 3343081 - RNA, 19 nt, Human
agccucagcauccuggcac

SEQ ID NO: 3343082 - RNA, 17 nt, Human
agccucagcauccuggc

SEQ ID NO: 3343083 - RNA, 16 nt, Human
agccucccaaagugcu

SEQ ID NO: 3343084 - RNA, 23 nt, Human
agccucagcauccuggcacccgg

SEQ ID NO: 3343085 - RNA, 22 nt, Human
agccucagcauccuggcacccg

SEQ ID NO: 3343086 - RNA, 21 nt, Human
agcccugguggcagugggagc

SEQ ID NO: 3343087 - RNA, 20 nt, Human
agccccuucugacccaugcu

SEQ ID NO: 3343088 - RNA, 24 nt, Human
agccccuucugacccaugcugccc

SEQ ID NO: 3343089 - RNA, 18 nt, Human
ugcacaagcugcacccuc

SEQ ID NO: 3343090 - RNA, 21 nt, Human
ugcacaagcugcacccucagg

SEQ ID NO: 3343091 - RNA, 22 nt, Human
ugcacacaccagagcccaccuu

SEQ ID NO: 3343092 - RNA, 14 nt, Human
ugcacaagcugcac

SEQ ID NO: 3343093 - RNA, 15 nt, Human
ugcacaagcugcacc

SEQ ID NO: 3343094 - RNA, 23 nt, Human
agcccugguggcagugggagcug

SEQ ID NO: 3343095 - RNA, 22 nt, Human
agcccugguggcagugggagcu

SEQ ID NO: 3343096 - RNA, 15 nt, Human
ugcacgugugugcac

SEQ ID NO: 3343097 - RNA, 14 nt, Human
ugcacgugugugca

SEQ ID NO: 3343098 - RNA, 16 nt, Human
ugcacccucaggcagg

SEQ ID NO: 3343099 - RNA, 17 nt, Human
ugcacccucaggcaggu

SEQ ID NO: 3343100 - RNA, 10 nt, Human
ugcacacauu

SEQ ID NO: 3343101 - RNA, 20 nt, Human
ugcacacauuuuuuaaaugc

SEQ ID NO: 3343102 - RNA, 13 nt, Human
ugauucuccugcc

SEQ ID NO: 3343103 - RNA, 15 nt, Human
ugauucuccugccuc

SEQ ID NO: 3343104 - RNA, 19 nt, Human
ugauucuccugccucagcc

SEQ ID NO: 3343105 - RNA, 20 nt, Human
agccccaaaacucuccucug

SEQ ID NO: 3343106 - RNA, 21 nt, Human
agccccaaaacucuccucugc

SEQ ID NO: 3343107 - RNA, 22 nt, Human
agccccaaaacucuccucugcu

SEQ ID NO: 3343108 - RNA, 23 nt, Human
agccccauucugccugcccaggc

SEQ ID NO: 3343109 - RNA, 16 nt, Human
agccccgaggccuucu

SEQ ID NO: 3343110 - RNA, 22 nt, Human
agccccgaggccuucucugaag

SEQ ID NO: 3343111 - RNA, 17 nt, Human
agccccgaggccuucuc

SEQ ID NO: 3343112 - RNA, 19 nt, Human
agccccuggaugcagccuc

SEQ ID NO: 3343113 - RNA, 19 nt, Human
agccccuucugacccaugc

SEQ ID NO: 3343114 - RNA, 17 nt, Human
agccccuggaugcagcc

SEQ ID NO: 3343115 - RNA, 18 nt, Human
agccccuggaugcagccu

SEQ ID NO: 3343116 - RNA, 13 nt, Human
uggauuguccccg

SEQ ID NO: 3343117 - RNA, 14 nt, Human
uggauuauccugag

SEQ ID NO: 3343118 - RNA, 22 nt, Human
uggauuaaacuuaaucuaaaug

SEQ ID NO: 3343119 - RNA, 16 nt, Human
aggccaaaggaagcac

SEQ ID NO: 3343120 - RNA, 18 nt, Human
aggccaaaggaagcacau

SEQ ID NO: 3343121 - RNA, 19 nt, Human
aggccaaaggaagcacaug

SEQ ID NO: 3343122 - RNA, 15 nt, Human
aggccaaaggaagca

SEQ ID NO: 3343123 - RNA, 17 nt, Human
aggcagccccauucugc

SEQ ID NO: 3343124 - RNA, 16 nt, Human
aggcagccccauucug

SEQ ID NO: 3343125 - RNA, 18 nt, Human
aggcagccaggccacaag

SEQ ID NO: 3343126 - RNA, 16 nt, Human
aggccaaggugggagg

SEQ ID NO: 3343127 - RNA, 23 nt, Human
uggaggggggaggugggauccuc

SEQ ID NO: 3343128 - RNA, 20 nt, Human
aggccagagggagugacaga

SEQ ID NO: 3343129 - RNA, 21 nt, Human
aggcccagagggccugcaagg

SEQ ID NO: 3343130 - RNA, 16 nt, Human
aggccccgcccaggcu

SEQ ID NO: 3343131 - RNA, 20 nt, Human
aggcccagagggccugcaag

SEQ ID NO: 3343132 - RNA, 17 nt, Human
aggccacaagacccuug

SEQ ID NO: 3343133 - RNA, 18 nt, Human
aggccacaagacccuugu

SEQ ID NO: 3343134 - RNA, 19 nt, Human
aggccacaagacccuugug

SEQ ID NO: 3343135 - RNA, 14 nt, Human
aggccagagggagu

SEQ ID NO: 3343136 - RNA, 16 nt, Human
aggccacaagacccuu

SEQ ID NO: 3343137 - RNA, 19 nt, Human
uggcagcucaccucucccu

SEQ ID NO: 3343138 - RNA, 15 nt, Human
uggcagcucaccucu

SEQ ID NO: 3343139 - RNA, 17 nt, Human
uggcagccuuggcaaac

SEQ ID NO: 3343140 - RNA, 13 nt, Human
uggcagccuuggc

SEQ ID NO: 3343141 - RNA, 17 nt, Human
aggccccgcccaggcuu

SEQ ID NO: 3343142 - RNA, 23 nt, Human
uggccaaagccaaagcuaggccu

SEQ ID NO: 3343143 - RNA, 21 nt, Human
uggccaaagccaaagcuaggc

SEQ ID NO: 3343144 - RNA, 23 nt, Human
uggccagugugacaaggauugcu

SEQ ID NO: 3343145 - RNA, 13 nt, Human
uggccucuucaga

SEQ ID NO: 3343146 - RNA, 23 nt, Human
uggccgggcgcgguggcucacgc

SEQ ID NO: 3343147 - RNA, 12 nt, Human
aggccuggggac

SEQ ID NO: 3343148 - RNA, 18 nt, Human
aggccugggggcugggca

SEQ ID NO: 3343149 - RNA, 12 nt, Human
uggccuggcccc

SEQ ID NO: 3343150 - RNA, 18 nt, Human
uggccuggccccucaggg

SEQ ID NO: 3343151 - RNA, 21 nt, Human
uggccuggccccucagggucc

SEQ ID NO: 3343152 - RNA, 17 nt, Human
aggaucucuugagccug

SEQ ID NO: 3343153 - RNA, 18 nt, Human
aggaucucuugagccugg

SEQ ID NO: 3343154 - RNA, 19 nt, Human
aggaucucuugagccuggg

SEQ ID NO: 3343155 - RNA, 12 nt, Human
aggaucucuuga

SEQ ID NO: 3343156 - RNA, 14 nt, Human
uggacacagcucuu

SEQ ID NO: 3343157 - RNA, 13 nt, Human
uggacacagcucu

SEQ ID NO: 3343158 - RNA, 22 nt, Human
uggacacagcucuucuccaggc

SEQ ID NO: 3343159 - RNA, 21 nt, Human
uggacacagcucuucuccagg

SEQ ID NO: 3343160 - RNA, 23 nt, Human
uggacacagcucuucuccaggcu

SEQ ID NO: 3343161 - RNA, 16 nt, Human
uggacccugaggccca

SEQ ID NO: 3343162 - RNA, 18 nt, Human
uggacccugaggcccaga

SEQ ID NO: 3343163 - RNA, 23 nt, Human
uggacccuguggaugauaaaaca

SEQ ID NO: 3343164 - RNA, 21 nt, Human
uggacccugaggcccagaggg

SEQ ID NO: 3343165 - RNA, 19 nt, Human
uggacccugaggcccagag

SEQ ID NO: 3343166 - RNA, 20 nt, Human
uggacccugaggcccagagg

SEQ ID NO: 3343167 - RNA, 15 nt, Human
uggacccugaggccc

SEQ ID NO: 3343168 - RNA, 17 nt, Human
aggcaaggcugucaauu

SEQ ID NO: 3343169 - RNA, 22 nt, Human
aggcacccaccaucaugucugg

SEQ ID NO: 3343170 - RNA, 21 nt, Human
aggcacccaccaucaugucug

SEQ ID NO: 3343171 - RNA, 20 nt, Human
aggcacccaccaucaugucu

SEQ ID NO: 3343172 - RNA, 14 nt, Human
aggcaaugcuggcu

SEQ ID NO: 3343173 - RNA, 15 nt, Human
aggcacccaccauca

SEQ ID NO: 3343174 - RNA, 13 nt, Human
uggagaagcggcu

SEQ ID NO: 3343175 - RNA, 22 nt, Human
uggagaagcggcuggcagccca

SEQ ID NO: 3343176 - RNA, 17 nt, Human
uggaaaugggcagagca

SEQ ID NO: 3343177 - RNA, 21 nt, Human
aggauacaaaagcaugugaga

SEQ ID NO: 3343178 - RNA, 13 nt, Human
aggauccugagcc

SEQ ID NO: 3343179 - RNA, 14 nt, Human
aggauccugagcca

SEQ ID NO: 3343180 - RNA, 22 nt, Human
ugcuuguacauaaugcgugcau

SEQ ID NO: 3343181 - RNA, 14 nt, Human
ugcuuguacauaau

SEQ ID NO: 3343182 - RNA, 16 nt, Human
ugcuuguacauaaugc

SEQ ID NO: 3343183 - RNA, 14 nt, Human
ugcuuugugauuuu

SEQ ID NO: 3343184 - RNA, 16 nt, Human
ugcuuugugauuuuug

SEQ ID NO: 3343185 - RNA, 12 nt, Human
ugcuuugugauu

SEQ ID NO: 3343186 - RNA, 14 nt, Human
ugcuuuuggucugu

SEQ ID NO: 3343187 - RNA, 12 nt, Human
ugcuuguacaua

SEQ ID NO: 3343188 - RNA, 13 nt, Human
ugcuuguacauaa

SEQ ID NO: 3343189 - RNA, 15 nt, Human
ugcuuggaggaagga

SEQ ID NO: 3343190 - RNA, 14 nt, Human
ugcuuggaggaagg

SEQ ID NO: 3343191 - RNA, 21 nt, Human
ugcuugaggcaacucaucuua

SEQ ID NO: 3343192 - RNA, 22 nt, Human
aggacagggaggugaccccagg

SEQ ID NO: 3343193 - RNA, 22 nt, Human
ugcggacagccacggccaggcc

SEQ ID NO: 3343194 - RNA, 21 nt, Human
ugcggacagccacggccaggc

SEQ ID NO: 3343195 - RNA, 23 nt, Human
ugcggacagccacggccaggcca

SEQ ID NO: 3343196 - RNA, 17 nt, Human
ugcggugcuaucucccc

SEQ ID NO: 3343197 - RNA, 18 nt, Human
ugcgguccacccaggagc

SEQ ID NO: 3343198 - RNA, 17 nt, Human
ugcgguccacccaggag

SEQ ID NO: 3343199 - RNA, 20 nt, Human
ugcgggcuuccuccuggugu

SEQ ID NO: 3343200 - RNA, 17 nt, Human
ugcggccuuuggcuuca

SEQ ID NO: 3343201 - RNA, 19 nt, Human
ugcggccuuuggcuucacg

SEQ ID NO: 3343202 - RNA, 14 nt, Human
agcuguucagcugg

SEQ ID NO: 3343203 - RNA, 14 nt, Human
agcuugaggguugg

SEQ ID NO: 3343204 - RNA, 18 nt, Human
agcuugaggguugggcug

SEQ ID NO: 3343205 - RNA, 24 nt, Human
ugccugcccaggccccugccaccc

SEQ ID NO: 3343206 - RNA, 12 nt, Human
ugccucugccuc

SEQ ID NO: 3343207 - RNA, 15 nt, Human
ugccugcccaggccc

SEQ ID NO: 3343208 - RNA, 14 nt, Human
ugccugcccaggcc

SEQ ID NO: 3343209 - RNA, 15 nt, Human
ugccucugccucuga

SEQ ID NO: 3343210 - RNA, 13 nt, Human
ugccugcccaggc

SEQ ID NO: 3343211 - RNA, 14 nt, Human
ugccucugccucug

SEQ ID NO: 3343212 - RNA, 13 nt, Human
ugccucugccucu

SEQ ID NO: 3343213 - RNA, 14 nt, Human
ugcccaggcagguc

SEQ ID NO: 3343214 - RNA, 13 nt, Human
ugcccaggcaggu

SEQ ID NO: 3343215 - RNA, 12 nt, Human
ugcccaggcagg

SEQ ID NO: 3343216 - RNA, 15 nt, Human
ugccuggauggggcu

SEQ ID NO: 3343217 - RNA, 14 nt, Human
ugccuggauggggc

SEQ ID NO: 3343218 - RNA, 20 nt, Human
agcugccuguucagcuccag

SEQ ID NO: 3343219 - RNA, 20 nt, Human
agcugcuugggcuucauccu

SEQ ID NO: 3343220 - RNA, 21 nt, Human
agcugccuguucagcuccagc

SEQ ID NO: 3343221 - RNA, 21 nt, Human
agcugcuugggcuucauccuc

SEQ ID NO: 3343222 - RNA, 19 nt, Human
agcugccuguucagcucca

SEQ ID NO: 3343223 - RNA, 21 nt, Human
agcugcuuuugucuaugggac

SEQ ID NO: 3343224 - RNA, 15 nt, Human
ugccuuauggaacac

SEQ ID NO: 3343225 - RNA, 16 nt, Human
ugccuuauggaacacu

SEQ ID NO: 3343226 - RNA, 20 nt, Human
ugccuguugggccaggagcc

SEQ ID NO: 3343227 - RNA, 19 nt, Human
ugccuguugggccaggagc

SEQ ID NO: 3343228 - RNA, 20 nt, Human
ugccuguucagcuccagcuc

SEQ ID NO: 3343229 - RNA, 18 nt, Human
ugccuguucagcuccagc

SEQ ID NO: 3343230 - RNA, 13 nt, Human
agcuguucagcug

SEQ ID NO: 3343231 - RNA, 17 nt, Human
ugccuguucagcuccag

SEQ ID NO: 3343232 - RNA, 21 nt, Human
agcugugcucuggacaggcau

SEQ ID NO: 3343233 - RNA, 20 nt, Human
agcugugcucuggacaggca

SEQ ID NO: 3343234 - RNA, 19 nt, Human
agcugugcucuggacaggc

SEQ ID NO: 3343235 - RNA, 20 nt, Human
aggaaggaaacccagcucug

SEQ ID NO: 3343236 - RNA, 22 nt, Human
aggaaggaaacccagcucuggu

SEQ ID NO: 3343237 - RNA, 23 nt, Human
aggaaggaaacccagcucugguc

SEQ ID NO: 3343238 - RNA, 18 nt, Human
aggaagccagcaggcucu

SEQ ID NO: 3343239 - RNA, 18 nt, Human
aggaagccgcuggggcca

SEQ ID NO: 3343240 - RNA, 19 nt, Human
aggaagccgcuggggccag

SEQ ID NO: 3343241 - RNA, 20 nt, Human
aggaagccgcuggggccagu

SEQ ID NO: 3343242 - RNA, 22 nt, Human
aggaagccagcaggcucucagg

SEQ ID NO: 3343243 - RNA, 23 nt, Human
aggaagccagcaggcucucaggc

SEQ ID NO: 3343244 - RNA, 21 nt, Human
aggaagccagcaggcucucag

SEQ ID NO: 3343245 - RNA, 16 nt, Human
aggaagcacaugccuc

SEQ ID NO: 3343246 - RNA, 17 nt, Human
aggaagcacaugccucu

SEQ ID NO: 3343247 - RNA, 11 nt, Human
aggaagcacau

SEQ ID NO: 3343248 - RNA, 15 nt, Human
aggaaaucaccgaaa

SEQ ID NO: 3343249 - RNA, 19 nt, Human
aggaaaucaccgaaaacgu

SEQ ID NO: 3343250 - RNA, 13 nt, Human
aggaaaggcucca

SEQ ID NO: 3343251 - RNA, 14 nt, Human
aggaaaggcuccag

SEQ ID NO: 3343252 - RNA, 15 nt, Human
aggaaaggcuccagg

SEQ ID NO: 3343253 - RNA, 14 nt, Human
ugcucuggacaggc

SEQ ID NO: 3343254 - RNA, 16 nt, Human
ugcucuggacaggcau

SEQ ID NO: 3343255 - RNA, 15 nt, Human
ugcucuggacaggca

SEQ ID NO: 3343256 - RNA, 20 nt, Human
ugcuaucucccccagcccca

SEQ ID NO: 3343257 - RNA, 18 nt, Human
ugcuaucucccccagccc

SEQ ID NO: 3343258 - RNA, 19 nt, Human
ugcuaucucccccagcccc

SEQ ID NO: 3343259 - RNA, 19 nt, Human
ugcugucccuuacgugagu

SEQ ID NO: 3343260 - RNA, 15 nt, Human
ugcugucccuuuucc

SEQ ID NO: 3343261 - RNA, 17 nt, Human
ugcugucccuuacguga

SEQ ID NO: 3343262 - RNA, 20 nt, Human
ugcuucaaggauccugagcc

SEQ ID NO: 3343263 - RNA, 21 nt, Human
ugcuucaaggauccugagcca

SEQ ID NO: 3343264 - RNA, 23 nt, Human
ugcuucaaggauccugagccaga

SEQ ID NO: 3343265 - RNA, 18 nt, Human
aggacacuaaccacgcug

SEQ ID NO: 3343266 - RNA, 13 nt, Human
ugcugcccugccc

SEQ ID NO: 3343267 - RNA, 16 nt, Human
ugcugcccugcccacc

SEQ ID NO: 3343268 - RNA, 17 nt, Human
ugcugcccugcccaccu

SEQ ID NO: 3343269 - RNA, 18 nt, Human
ugcugcccugcccaccug

SEQ ID NO: 3343270 - RNA, 12 nt, Human
ugcugcccugcc

SEQ ID NO: 3343271 - RNA, 11 nt, Human
ugcugcccugu

SEQ ID NO: 3343272 - RNA, 19 nt, Human
ugcugcccugcccaccugg

SEQ ID NO: 3343273 - RNA, 21 nt, Human
ugcugcccugcccaccuggcc

SEQ ID NO: 3343274 - RNA, 21 nt, Human
ugcuggcuguuggcugggggc

SEQ ID NO: 3343275 - RNA, 19 nt, Human
ugcuggcuguuggcugggg

SEQ ID NO: 3343276 - RNA, 19 nt, Human
ugcugggauuacaagcgug

SEQ ID NO: 3343277 - RNA, 18 nt, Human
ugcuggcuguuggcuggg

SEQ ID NO: 3343278 - RNA, 17 nt, Human
ugcugggauuacaggug

SEQ ID NO: 3343279 - RNA, 21 nt, Human
ugcugggauuacaagcgugag

SEQ ID NO: 3343280 - RNA, 23 nt, Human
uggucucaaacucuugaccucag

SEQ ID NO: 3343281 - RNA, 17 nt, Human
uggucucaaacucuuga

SEQ ID NO: 3343282 - RNA, 16 nt, Human
uggucccaccccacac

SEQ ID NO: 3343283 - RNA, 19 nt, Human
uggucuacacugugcugag

SEQ ID NO: 3343284 - RNA, 16 nt, Human
uggucucaaacucuug

SEQ ID NO: 3343285 - RNA, 13 nt, Human
uggucccacccca

SEQ ID NO: 3343286 - RNA, 22 nt, Human
uggucagauuugaacucuucaa

SEQ ID NO: 3343287 - RNA, 18 nt, Human
uggucaccaaaucagcug

SEQ ID NO: 3343288 - RNA, 14 nt, Human
uggucccaccccac

SEQ ID NO: 3343289 - RNA, 15 nt, Human
uggucccaccccaca

SEQ ID NO: 3343290 - RNA, 13 nt, Human
aggguuauaauaa

SEQ ID NO: 3343291 - RNA, 22 nt, Human
aggguguccggucccuguccca

SEQ ID NO: 3343292 - RNA, 21 nt, Human
aggguggugaccucugccuga

SEQ ID NO: 3343293 - RNA, 17 nt, Human
uggucugacccacugcu

SEQ ID NO: 3343294 - RNA, 16 nt, Human
uggucugacccacugc

SEQ ID NO: 3343295 - RNA, 17 nt, Human
agguaugcaaucaaauc

SEQ ID NO: 3343296 - RNA, 21 nt, Human
agguaugcaaucaaaucugcu

SEQ ID NO: 3343297 - RNA, 23 nt, Human
agguagaaauaucugaaaaugua

SEQ ID NO: 3343298 - RNA, 17 nt, Human
aggguuggccccugccc

SEQ ID NO: 3343299 - RNA, 23 nt, Human
aggguuggccccugcccggcugc

SEQ ID NO: 3343300 - RNA, 18 nt, Human
aggguuggccccugcccg

SEQ ID NO: 3343301 - RNA, 19 nt, Human
agguagaaauaucugaaaa

SEQ ID NO: 3343302 - RNA, 17 nt, Human
agguagaaauaucugaa

SEQ ID NO: 3343303 - RNA, 17 nt, Human
aggucauuuuuuuuaag

SEQ ID NO: 3343304 - RNA, 12 nt, Human
aggucagagccu

SEQ ID NO: 3343305 - RNA, 18 nt, Human
aggggugggacacccugu

SEQ ID NO: 3343306 - RNA, 20 nt, Human
aggggugggacacccuguga

SEQ ID NO: 3343307 - RNA, 22 nt, Human
aggggugggacacccugugaug

SEQ ID NO: 3343308 - RNA, 17 nt, Human
aggggguggccucccaa

SEQ ID NO: 3343309 - RNA, 15 nt, Human
aggggguggccuccc

SEQ ID NO: 3343310 - RNA, 22 nt, Human
agggucucacuauguugcccag

SEQ ID NO: 3343311 - RNA, 21 nt, Human
agggucucacuauguugccca

SEQ ID NO: 3343312 - RNA, 20 nt, Human
agggucucacuauguugccc

SEQ ID NO: 3343313 - RNA, 24 nt, Human
agggguucccuuuuuuggcugcug

SEQ ID NO: 3343314 - RNA, 19 nt, Human
uggggucacucuggcagcu

SEQ ID NO: 3343315 - RNA, 16 nt, Human
ugguacuaacuuuccu

SEQ ID NO: 3343316 - RNA, 21 nt, Human
agggucucacucugucgccca

SEQ ID NO: 3343317 - RNA, 22 nt, Human
agggucucacucugucgcccag

SEQ ID NO: 3343318 - RNA, 15 nt, Human
ugggugcuuggagga

SEQ ID NO: 3343319 - RNA, 19 nt, Human
ugggugcuuggaggaagga

SEQ ID NO: 3343320 - RNA, 22 nt, Human
uggguggcaccagcagccugga

SEQ ID NO: 3343321 - RNA, 16 nt, Human
ugggcaacccccagcc

SEQ ID NO: 3343322 - RNA, 18 nt, Human
ugggaggucaaggcugca

SEQ ID NO: 3343323 - RNA, 19 nt, Human
ugggaggucaaggcugcag

SEQ ID NO: 3343324 - RNA, 20 nt, Human
ugggaggucaaggcugcagu

SEQ ID NO: 3343325 - RNA, 23 nt, Human
ugggaggucaaggcugcagugag

SEQ ID NO: 3343326 - RNA, 17 nt, Human
ugggaggucaaggcugc

SEQ ID NO: 3343327 - RNA, 13 nt, Human
ugggccaggagcc

SEQ ID NO: 3343328 - RNA, 14 nt, Human
ugggccaggagccu

SEQ ID NO: 3343329 - RNA, 16 nt, Human
ugggccaggagccucc

SEQ ID NO: 3343330 - RNA, 20 nt, Human
ugggcccaaugcacuuuguu

SEQ ID NO: 3343331 - RNA, 20 nt, Human
ugggcaacccccagccugcu

SEQ ID NO: 3343332 - RNA, 17 nt, Human
ugggcaacccccagccu

SEQ ID NO: 3343333 - RNA, 15 nt, Human
agggagggcuucugc

SEQ ID NO: 3343334 - RNA, 19 nt, Human
agggagugacagaggcagc

SEQ ID NO: 3343335 - RNA, 18 nt, Human
agggagugacagaggcag

SEQ ID NO: 3343336 - RNA, 17 nt, Human
agggagugacagaggca

SEQ ID NO: 3343337 - RNA, 17 nt, Human
agggaggugaccccagg

SEQ ID NO: 3343338 - RNA, 18 nt, Human
agggcccagagagggugg

SEQ ID NO: 3343339 - RNA, 23 nt, Human
agggcccagagaggguggugacc

SEQ ID NO: 3343340 - RNA, 14 nt, Human
uggggaccagagcu

SEQ ID NO: 3343341 - RNA, 15 nt, Human
uggggaccagagcug

SEQ ID NO: 3343342 - RNA, 17 nt, Human
uggggaccagagcugcc

SEQ ID NO: 3343343 - RNA, 18 nt, Human
uggggaccagagcugcca

SEQ ID NO: 3343344 - RNA, 13 nt, Human
uggggaccucagg

SEQ ID NO: 3343345 - RNA, 18 nt, Human
ugggcuggguucuaccca

SEQ ID NO: 3343346 - RNA, 19 nt, Human
ugggcuggguucuacccag

SEQ ID NO: 3343347 - RNA, 20 nt, Human
ugggcucccuucccaccucu

SEQ ID NO: 3343348 - RNA, 18 nt, Human
ugggcucccuucccaccu

SEQ ID NO: 3343349 - RNA, 19 nt, Human
ugggcucccuucccaccuc

SEQ ID NO: 3343350 - RNA, 15 nt, Human
ugggcucccuuccca

SEQ ID NO: 3343351 - RNA, 23 nt, Human
agggcuucugccauuucugagau

SEQ ID NO: 3343352 - RNA, 18 nt, Human
uggggcggugagagggga

SEQ ID NO: 3343353 - RNA, 15 nt, Human
uggggcccugccucc

SEQ ID NO: 3343354 - RNA, 16 nt, Human
uggggcccugccuccu

SEQ ID NO: 3343355 - RNA, 12 nt, Human
uggggagaaagu

SEQ ID NO: 3343356 - RNA, 17 nt, Human
uggggaccucaggccug

SEQ ID NO: 3343357 - RNA, 23 nt, Human
uggggaccucaggccugggggcu

SEQ ID NO: 3343358 - RNA, 14 nt, Human
uggggcccugccuc

SEQ ID NO: 3343359 - RNA, 20 nt, Human
ugggguacccacugcucugg

SEQ ID NO: 3343360 - RNA, 16 nt, Human
ugggguacccacugcu

SEQ ID NO: 3343361 - RNA, 15 nt, Human
ugggguacccacugc

SEQ ID NO: 3343362 - RNA, 17 nt, Human
uggggucacucuggcag

SEQ ID NO: 3343363 - RNA, 18 nt, Human
uggggucacucuggcagc

SEQ ID NO: 3343364 - RNA, 16 nt, Human
uggggucacucuggca

SEQ ID NO: 3343365 - RNA, 14 nt, Human
ugggguacccacug

SEQ ID NO: 3343366 - RNA, 20 nt, Human
uggggcugcaccggcuggcc

SEQ ID NO: 3343367 - RNA, 17 nt, Human
ugucccuuuuccuuuuu

SEQ ID NO: 3343368 - RNA, 13 nt, Human
uguccgagcuuug

SEQ ID NO: 3343369 - RNA, 14 nt, Human
uguccgagcuuuga

SEQ ID NO: 3343370 - RNA, 14 nt, Human
ugucgggcaugaca

SEQ ID NO: 3343371 - RNA, 15 nt, Human
ugucgggcaugacac

SEQ ID NO: 3343372 - RNA, 12 nt, Human
ugucgggcauga

SEQ ID NO: 3343373 - RNA, 15 nt, Human
ugucgcccagucugg

SEQ ID NO: 3343374 - RNA, 14 nt, Human
ugucgcccagucug

SEQ ID NO: 3343375 - RNA, 22 nt, Human
agucagaaguuucugccgcagc

SEQ ID NO: 3343376 - RNA, 23 nt, Human
aguccgaaagggacuuggaagcu

SEQ ID NO: 3343377 - RNA, 17 nt, Human
agucucacuguugccca

SEQ ID NO: 3343378 - RNA, 16 nt, Human
agucucacuguugccc

SEQ ID NO: 3343379 - RNA, 17 nt, Human
aguaggaagacuuugga

SEQ ID NO: 3343380 - RNA, 18 nt, Human
aguaggaagacuuuggaa

SEQ ID NO: 3343381 - RNA, 19 nt, Human
aguaggaagacuuuggaaa

SEQ ID NO: 3343382 - RNA, 22 nt, Human
aguaggaagacuuuggaaagac

SEQ ID NO: 3343383 - RNA, 16 nt, Human
aguaggaagacuuugg

SEQ ID NO: 3343384 - RNA, 14 nt, Human
uguauuuuuuuacu

SEQ ID NO: 3343385 - RNA, 15 nt, Human
ugucaagccauaauu

SEQ ID NO: 3343386 - RNA, 19 nt, Human
ugucaagagggucugagga

SEQ ID NO: 3343387 - RNA, 19 nt, Human
ugucagcugaaccugggua

SEQ ID NO: 3343388 - RNA, 19 nt, Human
agucacugagacagcccgg

SEQ ID NO: 3343389 - RNA, 18 nt, Human
agucacugagacagcccg

SEQ ID NO: 3343390 - RNA, 16 nt, Human
ugucagcugaaccugg

SEQ ID NO: 3343391 - RNA, 13 nt, Human
agucaccaagccc

SEQ ID NO: 3343392 - RNA, 17 nt, Human
aguaugguggcuggguu

SEQ ID NO: 3343393 - RNA, 16 nt, Human
aguacacuguuucaaa

SEQ ID NO: 3343394 - RNA, 14 nt, Human
aguacacuguuuca

SEQ ID NO: 3343395 - RNA, 20 nt, Human
uguaggaagguuaauguuca

SEQ ID NO: 3343396 - RNA, 18 nt, Human
uguaggaagguuaauguu

SEQ ID NO: 3343397 - RNA, 12 nt, Human
aguagagacagg

SEQ ID NO: 3343398 - RNA, 17 nt, Human
aguaauaugcacacauu

SEQ ID NO: 3343399 - RNA, 20 nt, Human
aguaauaugcacacauuuuu

SEQ ID NO: 3343400 - RNA, 18 nt, Human
aguaauaugcacacauuu

SEQ ID NO: 3343401 - RNA, 19 nt, Human
aguaauaugcacacauuuu

SEQ ID NO: 3343402 - RNA, 20 nt, Human
aguaagccgugauuuucauu

SEQ ID NO: 3343403 - RNA, 11 nt, Human
agguuuuccug

SEQ ID NO: 3343404 - RNA, 14 nt, Human
uguaauuugugaua

SEQ ID NO: 3343405 - RNA, 21 nt, Human
uguaccaggaaaggauuuuau

SEQ ID NO: 3343406 - RNA, 13 nt, Human
uguagagugggag

SEQ ID NO: 3343407 - RNA, 22 nt, Human
aggucuugaacuccuggccuca

SEQ ID NO: 3343408 - RNA, 23 nt, Human
aggucuugaacuccuggccucaa

SEQ ID NO: 3343409 - RNA, 15 nt, Human
aggugcacaagcucc

SEQ ID NO: 3343410 - RNA, 16 nt, Human
aggugcacaagcucca

SEQ ID NO: 3343411 - RNA, 17 nt, Human
aggugcacaagcuccaa

SEQ ID NO: 3343412 - RNA, 18 nt, Human
aggugcacaagcuccaag

SEQ ID NO: 3343413 - RNA, 20 nt, Human
aggugcacaagcuccaagcu

SEQ ID NO: 3343414 - RNA, 18 nt, Human
aggugggauccuccaggu

SEQ ID NO: 3343415 - RNA, 20 nt, Human
aggugggauccuccaggugc

SEQ ID NO: 3343416 - RNA, 21 nt, Human
aggugcacaagcuccaagcuc

SEQ ID NO: 3343417 - RNA, 23 nt, Human
uguaauuaaguacuauguaucaa

SEQ ID NO: 3343418 - RNA, 17 nt, Human
uguaacuuucugaaaua

SEQ ID NO: 3343419 - RNA, 14 nt, Human
agguuggugggggc

SEQ ID NO: 3343420 - RNA, 17 nt, Human
aggugguuauggagagg

SEQ ID NO: 3343421 - RNA, 16 nt, Human
agugccaaaaacaaca

SEQ ID NO: 3343422 - RNA, 14 nt, Human
agugccaaaaacaa

SEQ ID NO: 3343423 - RNA, 14 nt, Human
agugcccacaggau

SEQ ID NO: 3343424 - RNA, 24 nt, Human
agugauucuccugccucagccucc

SEQ ID NO: 3343425 - RNA, 22 nt, Human
agugauucuccugccucagccu

SEQ ID NO: 3343426 - RNA, 16 nt, Human
agugagucgaggacag

SEQ ID NO: 3343427 - RNA, 20 nt, Human
ugugcccuaaaguguauuuu

SEQ ID NO: 3343428 - RNA, 21 nt, Human
ugugcccuaaaguguauuuuu

SEQ ID NO: 3343429 - RNA, 19 nt, Human
agucucacuguugcccagg

SEQ ID NO: 3343430 - RNA, 18 nt, Human
agucucacuguugcccag

SEQ ID NO: 3343431 - RNA, 20 nt, Human
agucucacuguugcccaggc

SEQ ID NO: 3343432 - RNA, 15 nt, Human
ugugcucuggacagg

SEQ ID NO: 3343433 - RNA, 23 nt, Human
ugugcucugaucauccacugugc

SEQ ID NO: 3343434 - RNA, 12 nt, Human
ugugcucugauc

SEQ ID NO: 3343435 - RNA, 22 nt, Human
ugugcucugaucauccacugug

SEQ ID NO: 3343436 - RNA, 18 nt, Human
ugugcucuggacaggcau

SEQ ID NO: 3343437 - RNA, 16 nt, Human
ugugcucuggacaggc

SEQ ID NO: 3343438 - RNA, 12 nt, Human
ugugcugcccug

SEQ ID NO: 3343439 - RNA, 13 nt, Human
ugugcugcccugc

SEQ ID NO: 3343440 - RNA, 14 nt, Human
ugugcugcccugcc

SEQ ID NO: 3343441 - RNA, 21 nt, Human
uguggagaagcggcuggcagc

SEQ ID NO: 3343442 - RNA, 15 nt, Human
ugugcugcccugccc

SEQ ID NO: 3343443 - RNA, 22 nt, Human
uguggauuuaacagaaauguac

SEQ ID NO: 3343444 - RNA, 21 nt, Human
uguuaacauggacaugaucuu

SEQ ID NO: 3343445 - RNA, 19 nt, Human
uguuaaugauagcuacugu

SEQ ID NO: 3343446 - RNA, 18 nt, Human
aguggaaaaauagccugc

SEQ ID NO: 3343447 - RNA, 19 nt, Human
aguggaaaaauagccugcc

SEQ ID NO: 3343448 - RNA, 11 nt, Human
aguggaaaaau

SEQ ID NO: 3343449 - RNA, 19 nt, Human
ugugucagguggggcagcu

SEQ ID NO: 3343450 - RNA, 17 nt, Human
ugugucagguggggcag

SEQ ID NO: 3343451 - RNA, 13 nt, Human
ugugucucuuggu

SEQ ID NO: 3343452 - RNA, 14 nt, Human
uguguuaugaagca

SEQ ID NO: 3343453 - RNA, 23 nt, Human
uguguuaucacccagaagaaaau

SEQ ID NO: 3343454 - RNA, 20 nt, Human
ugugguguuuccuggcacug

SEQ ID NO: 3343455 - RNA, 19 nt, Human
ugugucagcauagaaguaa

SEQ ID NO: 3343456 - RNA, 16 nt, Human
uguggucccaccccac

SEQ ID NO: 3343457 - RNA, 16 nt, Human
agugcuuccaaggaug

SEQ ID NO: 3343458 - RNA, 22 nt, Human
agugcugcauuuaaaagauaca

SEQ ID NO: 3343459 - RNA, 20 nt, Human
agugcugggauuacaagcgu

SEQ ID NO: 3343460 - RNA, 19 nt, Human
agugcugggauuacaggug

SEQ ID NO: 3343461 - RNA, 20 nt, Human
agugcugcauuuaaaagaua

SEQ ID NO: 3343462 - RNA, 15 nt, Human
agugccuuacacaau

SEQ ID NO: 3343463 - RNA, 23 nt, Human
aguuccucauuagcauuuugcua

SEQ ID NO: 3343464 - RNA, 16 nt, Human
aguucaauucucauuu

SEQ ID NO: 3343465 - RNA, 14 nt, Human
uguuuauugucaaa

SEQ ID NO: 3343466 - RNA, 20 nt, Human
uguuuagauaauacaccacu

SEQ ID NO: 3343467 - RNA, 19 nt, Human
uguucuugguuuguaaauu

SEQ ID NO: 3343468 - RNA, 20 nt, Human
uguucuugguuuguaaauua

SEQ ID NO: 3343469 - RNA, 22 nt, Human
uguucuugguuuguaaauuaac

SEQ ID NO: 3343470 - RNA, 13 nt, Human
uguugcccaggcu

SEQ ID NO: 3343471 - RNA, 19 nt, Human
uguugcccaggcaggucuu

SEQ ID NO: 3343472 - RNA, 15 nt, Human
uguugcccaggcugg

SEQ ID NO: 3343473 - RNA, 23 nt, Human
aguguugccuaaguauuaaaaca

SEQ ID NO: 3343474 - RNA, 17 nt, Human
aguguugccuaaguauu

SEQ ID NO: 3343475 - RNA, 16 nt, Human
aguguugccuaaguau

SEQ ID NO: 3343476 - RNA, 14 nt, Human
aguguugccuaagu

SEQ ID NO: 3343477 - RNA, 13 nt, Human
aguguugccuaag

SEQ ID NO: 3343478 - RNA, 18 nt, Human
uguucuagcauggcugcc

SEQ ID NO: 3343479 - RNA, 18 nt, Human
uguucuuaguuugcaguu

SEQ ID NO: 3343480 - RNA, 23 nt, Human
aguuuuuauggcuuuugugcauu

SEQ ID NO: 3343481 - RNA, 21 nt, Human
uuaagaaaaaggaugcacaga

SEQ ID NO: 3343482 - RNA, 19 nt, Human
uuaagaaaaaggaugcaca

SEQ ID NO: 3343483 - RNA, 20 nt, Human
uuaagaaaaaggaugcacag

SEQ ID NO: 3343484 - RNA, 22 nt, Human
uuaaucugguuuauuuuuguuc

SEQ ID NO: 3343485 - RNA, 18 nt, Human
uuaaugaaagacuguaca

SEQ ID NO: 3343486 - RNA, 19 nt, Human
uuaaugaaagacuguacaa

SEQ ID NO: 3343487 - RNA, 13 nt, Human
uuaaucauuaggu

SEQ ID NO: 3343488 - RNA, 22 nt, Human
uuaaucauuaggugugacugaa

SEQ ID NO: 3343489 - RNA, 23 nt, Human
uuaaucauuaggugugacugaau

SEQ ID NO: 3343490 - RNA, 9 nt, Human
uuaaggugg

SEQ ID NO: 3343491 - RNA, 22 nt, Human
uuaagaaagacuaucuaaaugu

SEQ ID NO: 3343492 - RNA, 19 nt, Human
uuaagugcugcauuuaaaa

SEQ ID NO: 3343493 - RNA, 22 nt, Human
uuaauauugauaugcuuauaca

SEQ ID NO: 3343494 - RNA, 15 nt, Human
uuaagugcugcauuu

SEQ ID NO: 3343495 - RNA, 16 nt, Human
uuaagugcugcauuua

SEQ ID NO: 3343496 - RNA, 14 nt, Human
uuaagugcugcauu

SEQ ID NO: 3343497 - RNA, 19 nt, Human
uuaacagaaauguacagca

SEQ ID NO: 3343498 - RNA, 16 nt, Human
uuaacagaaauguaca

SEQ ID NO: 3343499 - RNA, 20 nt, Human
uuaacagaaauguacagcaa

SEQ ID NO: 3343500 - RNA, 13 nt, Human
uuaaauaauguga

SEQ ID NO: 3343501 - RNA, 16 nt, Human
uuaaauaaugugaaac

SEQ ID NO: 3343502 - RNA, 18 nt, Human
uuaaauaaugugaaacug

SEQ ID NO: 3343503 - RNA, 15 nt, Human
uuaaauaaugugaaa

SEQ ID NO: 3343504 - RNA, 16 nt, Human
uuaaaaaucucaaauu

SEQ ID NO: 3343505 - RNA, 14 nt, Human
uuaaaaaucucaaa

SEQ ID NO: 3343506 - RNA, 15 nt, Human
uuaaaaaucucaaau

SEQ ID NO: 3343507 - RNA, 19 nt, Human
aguugggcuuccucauagu

SEQ ID NO: 3343508 - RNA, 13 nt, Human
aguugggcuuccu

SEQ ID NO: 3343509 - RNA, 23 nt, Human
aguugccagucaccccggccacc

SEQ ID NO: 3343510 - RNA, 20 nt, Human
aguugccagucaccccggcc

SEQ ID NO: 3343511 - RNA, 13 nt, Human
uuaaaaaaaaucc

SEQ ID NO: 3343512 - RNA, 17 nt, Human
aguuggucccccuucca

SEQ ID NO: 3343513 - RNA, 11 nt, Human
aguuggucccc

SEQ ID NO: 3343514 - RNA, 13 nt, Human
aguuggucccccu

SEQ ID NO: 3343515 - RNA, 18 nt, Human
auaauacaccacuacauu

SEQ ID NO: 3343516 - RNA, 20 nt, Human
auaauacaccacuacauucu

SEQ ID NO: 3343517 - RNA, 12 nt, Human
auaauacaccac

SEQ ID NO: 3343518 - RNA, 22 nt, Human
auaauugacaggauuauuggaa

SEQ ID NO: 3343519 - RNA, 15 nt, Human
auaaugcgugcauac

SEQ ID NO: 3343520 - RNA, 15 nt, Human
auaaugaaugaaaca

SEQ ID NO: 3343521 - RNA, 15 nt, Human
uuaggugaggaagca

SEQ ID NO: 3343522 - RNA, 20 nt, Human
uuagggaaggauacaaaagc

SEQ ID NO: 3343523 - RNA, 16 nt, Human
uuaggugugacugaau

SEQ ID NO: 3343524 - RNA, 16 nt, Human
uuaggugaggaagcaa

SEQ ID NO: 3343525 - RNA, 18 nt, Human
uuagguuggcaaaaaggc

SEQ ID NO: 3343526 - RNA, 22 nt, Human
uuaguuugcaguuacacuaaaa

SEQ ID NO: 3343527 - RNA, 15 nt, Human
uuaguuucuccaagc

SEQ ID NO: 3343528 - RNA, 18 nt, Human
uuagcaaauucuguuuuu

SEQ ID NO: 3343529 - RNA, 18 nt, Human
uuagccaagugugguaga

SEQ ID NO: 3343530 - RNA, 19 nt, Human
uuacccucauguucuuaau

SEQ ID NO: 3343531 - RNA, 22 nt, Human
uuacaggaaguacuggagaaaa

SEQ ID NO: 3343532 - RNA, 13 nt, Human
uuagacagucccu

SEQ ID NO: 3343533 - RNA, 20 nt, Human
uuagacagagucucacuguu

SEQ ID NO: 3343534 - RNA, 13 nt, Human
uuagacagagucu

SEQ ID NO: 3343535 - RNA, 11 nt, Human
auaaauuauuu

SEQ ID NO: 3343536 - RNA, 20 nt, Human
auaaccaguguuguggauuu

SEQ ID NO: 3343537 - RNA, 14 nt, Human
acauggccuuugcu

SEQ ID NO: 3343538 - RNA, 19 nt, Human
acauggaguauaugucaag

SEQ ID NO: 3343539 - RNA, 15 nt, Human
acauggaguauaugu

SEQ ID NO: 3343540 - RNA, 18 nt, Human
acauggaauaacauguaa

SEQ ID NO: 3343541 - RNA, 14 nt, Human
acauggaaguacua

SEQ ID NO: 3343542 - RNA, 20 nt, Human
acauggaauaacauguaauu

SEQ ID NO: 3343543 - RNA, 20 nt, Human
acaugagcaucaggccaggc

SEQ ID NO: 3343544 - RNA, 23 nt, Human
acaugagcaucaggccaggcccu

SEQ ID NO: 3343545 - RNA, 23 nt, Human
acaugaaaacacauuuuucuuag

SEQ ID NO: 3343546 - RNA, 22 nt, Human
acaugaaaacacauuuuucuua

SEQ ID NO: 3343547 - RNA, 13 nt, Human
ucaaagauauuuu

SEQ ID NO: 3343548 - RNA, 20 nt, Human
ucaaagauauuuugcuuugu

SEQ ID NO: 3343549 - RNA, 22 nt, Human
ucaaagauauuuugcuuuguga

SEQ ID NO: 3343550 - RNA, 23 nt, Human
ucaaagagguuuuaaaaaaaucc

SEQ ID NO: 3343551 - RNA, 16 nt, Human
ucaaaagcugggcagg

SEQ ID NO: 3343552 - RNA, 20 nt, Human
uauuuugcuuugugauuuuu

SEQ ID NO: 3343553 - RNA, 13 nt, Human
uauuuugcuuugu

SEQ ID NO: 3343554 - RNA, 15 nt, Human
uauuuugcuuuguga

SEQ ID NO: 3343555 - RNA, 17 nt, Human
uauuuuuguagagccag

SEQ ID NO: 3343556 - RNA, 15 nt, Human
acaugaaaacacauu

SEQ ID NO: 3343557 - RNA, 22 nt, Human
acaucuugcucugcugacagac

SEQ ID NO: 3343558 - RNA, 19 nt, Human
acaucuuggucagauuuga

SEQ ID NO: 3343559 - RNA, 14 nt, Human
acaucuugcucugc

SEQ ID NO: 3343560 - RNA, 16 nt, Human
acaucuugcucugcug

SEQ ID NO: 3343561 - RNA, 15 nt, Human
acaucuugcucugcu

SEQ ID NO: 3343562 - RNA, 17 nt, Human
ucaagagggucugagga

SEQ ID NO: 3343563 - RNA, 23 nt, Human
ucaaggauccugagccagauuuc

SEQ ID NO: 3343564 - RNA, 18 nt, Human
ucaauaggaaaaacugau

SEQ ID NO: 3343565 - RNA, 19 nt, Human
ucaauaggaaaaacugauu

SEQ ID NO: 3343566 - RNA, 17 nt, Human
ucaauaggaaaaacuga

SEQ ID NO: 3343567 - RNA, 17 nt, Human
ucaagugauucuccugc

SEQ ID NO: 3343568 - RNA, 16 nt, Human
ucaagugauucuccug

SEQ ID NO: 3343569 - RNA, 22 nt, Human
ucaauaggaaaaacugauuuuu

SEQ ID NO: 3343570 - RNA, 15 nt, Human
acauuuuuaagugcu

SEQ ID NO: 3343571 - RNA, 18 nt, Human
acauuuuuaagugcugca

SEQ ID NO: 3343572 - RNA, 13 nt, Human
acauuuuucuuag

SEQ ID NO: 3343573 - RNA, 21 nt, Human
acauuuuuuaaaugcaccugg

SEQ ID NO: 3343574 - RNA, 22 nt, Human
acauugcggacagccacggcca

SEQ ID NO: 3343575 - RNA, 21 nt, Human
acauugcggacagccacggcc

SEQ ID NO: 3343576 - RNA, 18 nt, Human
acauuggauuauccugag

SEQ ID NO: 3343577 - RNA, 16 nt, Human
acauuggauuauccug

SEQ ID NO: 3343578 - RNA, 23 nt, Human
accacacccagcccacuucugcc

SEQ ID NO: 3343579 - RNA, 21 nt, Human
accacacccagcccacuucug

SEQ ID NO: 3343580 - RNA, 20 nt, Human
accacacccagcccacuucu

SEQ ID NO: 3343581 - RNA, 16 nt, Human
accacacccagcccac

SEQ ID NO: 3343582 - RNA, 15 nt, Human
accacacccagccca

SEQ ID NO: 3343583 - RNA, 17 nt, Human
accacacagaggcugcc

SEQ ID NO: 3343584 - RNA, 20 nt, Human
accaaccacugcgaccacaa

SEQ ID NO: 3343585 - RNA, 16 nt, Human
accaacauacucccau

SEQ ID NO: 3343586 - RNA, 19 nt, Human
accaaaucagcugcuacua

SEQ ID NO: 3343587 - RNA, 16 nt, Human
accaaaucagcugcua

SEQ ID NO: 3343588 - RNA, 16 nt, Human
ucacauauugauuucc

SEQ ID NO: 3343589 - RNA, 18 nt, Human
ucacauauugauuuccgu

SEQ ID NO: 3343590 - RNA, 20 nt, Human
ucacauauugauuuccguua

SEQ ID NO: 3343591 - RNA, 16 nt, Human
ucaccagccccagugc

SEQ ID NO: 3343592 - RNA, 17 nt, Human
ucaccagccccagugcc

SEQ ID NO: 3343593 - RNA, 14 nt, Human
ucacagaugggugc

SEQ ID NO: 3343594 - RNA, 15 nt, Human
ucacagaugggugcu

SEQ ID NO: 3343595 - RNA, 19 nt, Human
acccgcuaagagggaggga

SEQ ID NO: 3343596 - RNA, 19 nt, Human
ucaggguuggccccugccc

SEQ ID NO: 3343597 - RNA, 18 nt, Human
ucaggguuggccccugcc

SEQ ID NO: 3343598 - RNA, 19 nt, Human
ucaggccaggcccucugcc

SEQ ID NO: 3343599 - RNA, 17 nt, Human
ucaggccaggcccucug

SEQ ID NO: 3343600 - RNA, 18 nt, Human
ucaggccaggcccucugc

SEQ ID NO: 3343601 - RNA, 12 nt, Human
ucaggggugugc

SEQ ID NO: 3343602 - RNA, 19 nt, Human
ucaggggugugcggccuuu

SEQ ID NO: 3343603 - RNA, 17 nt, Human
ucaggguuggccccugc

SEQ ID NO: 3343604 - RNA, 13 nt, Human
ucaggccagcugc

SEQ ID NO: 3343605 - RNA, 12 nt, Human
ucaggccaggcc

SEQ ID NO: 3343606 - RNA, 13 nt, Human
ucaggccaggccc

SEQ ID NO: 3343607 - RNA, 14 nt, Human
ucaggccaggcccu

SEQ ID NO: 3343608 - RNA, 15 nt, Human
ucaggccaggcccuc

SEQ ID NO: 3343609 - RNA, 16 nt, Human
ucaggccaggcccucu

SEQ ID NO: 3343610 - RNA, 12 nt, Human
acccccagccug

SEQ ID NO: 3343611 - RNA, 13 nt, Human
acccccagccugc

SEQ ID NO: 3343612 - RNA, 23 nt, Human
ucaggccaaacucaccugccccu

SEQ ID NO: 3343613 - RNA, 18 nt, Human
ucaggcaggugggaugga

SEQ ID NO: 3343614 - RNA, 17 nt, Human
ucaggcaggugggaugg

SEQ ID NO: 3343615 - RNA, 23 nt, Human
acccugaggcccagagggccugc

SEQ ID NO: 3343616 - RNA, 11 nt, Human
acccugaggcc

SEQ ID NO: 3343617 - RNA, 17 nt, Human
acccugaggcccagagg

SEQ ID NO: 3343618 - RNA, 19 nt, Human
acccugaggcccagagggc

SEQ ID NO: 3343619 - RNA, 21 nt, Human
acccugaggcccagagggccu

SEQ ID NO: 3343620 - RNA, 19 nt, Human
acccgggaagggggcuggg

SEQ ID NO: 3343621 - RNA, 20 nt, Human
acccgggaagggggcuggga

SEQ ID NO: 3343622 - RNA, 13 nt, Human
acccgggaagggg

SEQ ID NO: 3343623 - RNA, 15 nt, Human
acccucauguucuua

SEQ ID NO: 3343624 - RNA, 17 nt, Human
acccucauguucuuaau

SEQ ID NO: 3343625 - RNA, 14 nt, Human
acccucauguucuu

SEQ ID NO: 3343626 - RNA, 22 nt, Human
acccgggaagggggcugggaca

SEQ ID NO: 3343627 - RNA, 21 nt, Human
acccuccuuucaccacaugug

SEQ ID NO: 3343628 - RNA, 21 nt, Human
ucagguggggucacucuggca

SEQ ID NO: 3343629 - RNA, 22 nt, Human
ucagguggggucacucuggcag

SEQ ID NO: 3343630 - RNA, 21 nt, Human
accgaaaacguggcugcuuca

SEQ ID NO: 3343631 - RNA, 22 nt, Human
accgaaaacguggcugcuucaa

SEQ ID NO: 3343632 - RNA, 18 nt, Human
ucaggugucccugcacuu

SEQ ID NO: 3343633 - RNA, 17 nt, Human
ucaggugucccugcacu

SEQ ID NO: 3343634 - RNA, 23 nt, Human
ucagguggggucacucuggcagc

SEQ ID NO: 3343635 - RNA, 15 nt, Human
ucaggugucccugca

SEQ ID NO: 3343636 - RNA, 20 nt, Human
accgaaaacguggcugcuuc

SEQ ID NO: 3343637 - RNA, 20 nt, Human
acccuugccgucuaccugag

SEQ ID NO: 3343638 - RNA, 13 nt, Human
ucaguaauaacuc

SEQ ID NO: 3343639 - RNA, 13 nt, Human
ucaguaagccgug

SEQ ID NO: 3343640 - RNA, 22 nt, Human
ucaggugucccugcacuugcag

SEQ ID NO: 3343641 - RNA, 19 nt, Human
ucaguuguuagugugucuu

SEQ ID NO: 3343642 - RNA, 18 nt, Human
ucagugccuuauggaaca

SEQ ID NO: 3343643 - RNA, 13 nt, Human
ucaguggcagcug

SEQ ID NO: 3343644 - RNA, 17 nt, Human
ucaguuguuaguguguc

SEQ ID NO: 3343645 - RNA, 15 nt, Human
ucaguggcagcugcu

SEQ ID NO: 3343646 - RNA, 14 nt, Human
ucaguggcagcugc

SEQ ID NO: 3343647 - RNA, 19 nt, Human
ucagugccuuauggaacac

SEQ ID NO: 3343648 - RNA, 20 nt, Human
ucagugccuuauggaacacu

SEQ ID NO: 3343649 - RNA, 22 nt, Human
ucagugccuuauggaacacucu

SEQ ID NO: 3343650 - RNA, 23 nt, Human
ucagugccuuauggaacacucug

SEQ ID NO: 3343651 - RNA, 23 nt, Human
ucagaaguuucugccgcagcccu

SEQ ID NO: 3343652 - RNA, 22 nt, Human
ucagagacuccugcaggcagcc

SEQ ID NO: 3343653 - RNA, 12 nt, Human
ucagaauucuca

SEQ ID NO: 3343654 - RNA, 10 nt, Human
ucagaauucu

SEQ ID NO: 3343655 - RNA, 20 nt, Human
ucagaauucucagaaucuca

SEQ ID NO: 3343656 - RNA, 23 nt, Human
ucagagagggugggagugggccc

SEQ ID NO: 3343657 - RNA, 23 nt, Human
ucagagacuccugcaggcagcca

SEQ ID NO: 3343658 - RNA, 16 nt, Human
ucagaucucuaacuuc

SEQ ID NO: 3343659 - RNA, 15 nt, Human
ucagaucucuaacuu

SEQ ID NO: 3343660 - RNA, 11 nt, Human
acccaggugcu

SEQ ID NO: 3343661 - RNA, 13 nt, Human
accccagguuucu

SEQ ID NO: 3343662 - RNA, 15 nt, Human
acccaggagccccga

SEQ ID NO: 3343663 - RNA, 13 nt, Human
acccaggagcccc

SEQ ID NO: 3343664 - RNA, 16 nt, Human
acccagcgagcccugg

SEQ ID NO: 3343665 - RNA, 13 nt, Human
acccagcgagccc

SEQ ID NO: 3343666 - RNA, 15 nt, Human
ucacuguugcccagg

SEQ ID NO: 3343667 - RNA, 14 nt, Human
ucacuguugcccag

SEQ ID NO: 3343668 - RNA, 18 nt, Human
ucacugcaaccuccgccu

SEQ ID NO: 3343669 - RNA, 23 nt, Human
ucacugagacagcccgggcucug

SEQ ID NO: 3343670 - RNA, 22 nt, Human
ucacugagacagcccgggcucu

SEQ ID NO: 3343671 - RNA, 21 nt, Human
ucacuauguugcccaggcagg

SEQ ID NO: 3343672 - RNA, 20 nt, Human
ucacuauguugcccaggcag

SEQ ID NO: 3343673 - RNA, 22 nt, Human
ucaccagccccagugcccacag

SEQ ID NO: 3343674 - RNA, 20 nt, Human
accauucuccaccugccagg

SEQ ID NO: 3343675 - RNA, 21 nt, Human
accauucuccaccugccaggg

SEQ ID NO: 3343676 - RNA, 19 nt, Human
accauucuccaccugccag

SEQ ID NO: 3343677 - RNA, 18 nt, Human
accauucuccaccugcca

SEQ ID NO: 3343678 - RNA, 22 nt, Human
accauuuugcugucccuuuucc

SEQ ID NO: 3343679 - RNA, 23 nt, Human
accauuuugcugucccuuuuccu

SEQ ID NO: 3343680 - RNA, 21 nt, Human
accauuuugggguacccacug

SEQ ID NO: 3343681 - RNA, 20 nt, Human
acccacugcuuuuggucugu

SEQ ID NO: 3343682 - RNA, 11 nt, Human
acccacugcuu

SEQ ID NO: 3343683 - RNA, 15 nt, Human
accauggacuuuaua

SEQ ID NO: 3343684 - RNA, 14 nt, Human
accauggacuuuau

SEQ ID NO: 3343685 - RNA, 16 nt, Human
accauggacuuuauaa

SEQ ID NO: 3343686 - RNA, 13 nt, Human
acguacacauuuu

SEQ ID NO: 3343687 - RNA, 12 nt, Human
acguacacauuu

SEQ ID NO: 3343688 - RNA, 13 nt, Human
acguacacacaca

SEQ ID NO: 3343689 - RNA, 18 nt, Human
acuacggaauaguuggcu

SEQ ID NO: 3343690 - RNA, 14 nt, Human
acucaaugcacuga

SEQ ID NO: 3343691 - RNA, 20 nt, Human
acucacauuuauucugcuca

SEQ ID NO: 3343692 - RNA, 19 nt, Human
acucacauuuauucugcuc

SEQ ID NO: 3343693 - RNA, 12 nt, Human
acuauguaucaa

SEQ ID NO: 3343694 - RNA, 14 nt, Human
acuauaauguaagc

SEQ ID NO: 3343695 - RNA, 13 nt, Human
acuauaauguaag

SEQ ID NO: 3343696 - RNA, 11 nt, Human
acuauaaugua

SEQ ID NO: 3343697 - RNA, 12 nt, Human
acuauaauguaa

SEQ ID NO: 3343698 - RNA, 13 nt, Human
ucccucuuucccu

SEQ ID NO: 3343699 - RNA, 11 nt, Human
ucccucuuucc

SEQ ID NO: 3343700 - RNA, 18 nt, Human
ucccucagucuggcccuu

SEQ ID NO: 3343701 - RNA, 21 nt, Human
ucccucuuucccucccuuccu

SEQ ID NO: 3343702 - RNA, 21 nt, Human
ucccugaaggccccgcccagg

SEQ ID NO: 3343703 - RNA, 22 nt, Human
ucccugaaggccccgcccaggc

SEQ ID NO: 3343704 - RNA, 18 nt, Human
ucccugaaggccccgccc

SEQ ID NO: 3343705 - RNA, 17 nt, Human
ucccugaaggccccgcc

SEQ ID NO: 3343706 - RNA, 17 nt, Human
acucaccccagccccaa

SEQ ID NO: 3343707 - RNA, 16 nt, Human
acucaccccagcccca

SEQ ID NO: 3343708 - RNA, 23 nt, Human
ucccugaaggccccgcccaggcu

SEQ ID NO: 3343709 - RNA, 12 nt, Human
acucaucuuagg

SEQ ID NO: 3343710 - RNA, 16 nt, Human
acucauugaccugagg

SEQ ID NO: 3343711 - RNA, 17 nt, Human
acucauugaccugaggc

SEQ ID NO: 3343712 - RNA, 18 nt, Human
acucauugaccugaggcc

SEQ ID NO: 3343713 - RNA, 15 nt, Human
acucauugaccugag

SEQ ID NO: 3343714 - RNA, 17 nt, Human
acucagaagacacugau

SEQ ID NO: 3343715 - RNA, 16 nt, Human
acucagaagacacuga

SEQ ID NO: 3343716 - RNA, 15 nt, Human
acucagaagacacug

SEQ ID NO: 3343717 - RNA, 14 nt, Human
acucagaagacacu

SEQ ID NO: 3343718 - RNA, 14 nt, Human
acucaccugccccu

SEQ ID NO: 3343719 - RNA, 19 nt, Human
acucaccugccccucaacu

SEQ ID NO: 3343720 - RNA, 21 nt, Human
acucaccugccccucaacucu

SEQ ID NO: 3343721 - RNA, 18 nt, Human
acucagaagacacugaug

SEQ ID NO: 3343722 - RNA, 21 nt, Human
acucagaauucucuaguuuga

SEQ ID NO: 3343723 - RNA, 22 nt, Human
acucagaauucucuaguuugau

SEQ ID NO: 3343724 - RNA, 14 nt, Human
acucagaauucucu

SEQ ID NO: 3343725 - RNA, 21 nt, Human
uccuagccugugccucuggga

SEQ ID NO: 3343726 - RNA, 20 nt, Human
uccuagcacuuugggaggcc

SEQ ID NO: 3343727 - RNA, 16 nt, Human
acucgaguuacagaca

SEQ ID NO: 3343728 - RNA, 15 nt, Human
uccguuaaaauacca

SEQ ID NO: 3343729 - RNA, 13 nt, Human
uccguuaaaauac

SEQ ID NO: 3343730 - RNA, 19 nt, Human
acucuggcagcucagagag

SEQ ID NO: 3343731 - RNA, 19 nt, Human
acucuuauugcccacgcug

SEQ ID NO: 3343732 - RNA, 21 nt, Human
acucuuauugcccacgcugga

SEQ ID NO: 3343733 - RNA, 16 nt, Human
acucuggcagcucaga

SEQ ID NO: 3343734 - RNA, 17 nt, Human
acucuggcagcucagag

SEQ ID NO: 3343735 - RNA, 15 nt, Human
acucgcgacaaugca

SEQ ID NO: 3343736 - RNA, 16 nt, Human
acucgcgacaaugcaa

SEQ ID NO: 3343737 - RNA, 14 nt, Human
uccucccaccucag

SEQ ID NO: 3343738 - RNA, 13 nt, Human
uccucccaccuca

SEQ ID NO: 3343739 - RNA, 20 nt, Human
uccucccaccucagccuccc

SEQ ID NO: 3343740 - RNA, 18 nt, Human
uccucccaccucagccuc

SEQ ID NO: 3343741 - RNA, 16 nt, Human
uccucccaccucagcc

SEQ ID NO: 3343742 - RNA, 15 nt, Human
uccucccaccucagc

SEQ ID NO: 3343743 - RNA, 21 nt, Human
uccucccaccucagccucccg

SEQ ID NO: 3343744 - RNA, 19 nt, Human
acucuuucuauuguuucuu

SEQ ID NO: 3343745 - RNA, 15 nt, Human
uccugaagaauugaa

SEQ ID NO: 3343746 - RNA, 23 nt, Human
uccucuuuggucuacacugugcu

SEQ ID NO: 3343747 - RNA, 11 nt, Human
ucccaccccac

SEQ ID NO: 3343748 - RNA, 16 nt, Human
ucccaaagugcuggga

SEQ ID NO: 3343749 - RNA, 15 nt, Human
ucccaaagugcuggg

SEQ ID NO: 3343750 - RNA, 14 nt, Human
ucccaaagugcugg

SEQ ID NO: 3343751 - RNA, 14 nt, Human
ucccacaaaggaga

SEQ ID NO: 3343752 - RNA, 14 nt, Human
acggcucacugcag

SEQ ID NO: 3343753 - RNA, 17 nt, Human
uccagugaggcucugcc

SEQ ID NO: 3343754 - RNA, 18 nt, Human
uccagugaggcucugccc

SEQ ID NO: 3343755 - RNA, 19 nt, Human
uccagugaggcucugcccu

SEQ ID NO: 3343756 - RNA, 20 nt, Human
uccagugaggcucugcccuu

SEQ ID NO: 3343757 - RNA, 15 nt, Human
uccaugaguccccug

SEQ ID NO: 3343758 - RNA, 16 nt, Human
uccaugaguccccugu

SEQ ID NO: 3343759 - RNA, 17 nt, Human
uccaugaguccccuguu

SEQ ID NO: 3343760 - RNA, 18 nt, Human
acgccaggggaaaaucag

SEQ ID NO: 3343761 - RNA, 15 nt, Human
acgacugcccggcag

SEQ ID NO: 3343762 - RNA, 23 nt, Human
acgccaggggaaaaucagccugc

SEQ ID NO: 3343763 - RNA, 11 nt, Human
acgccauccca

SEQ ID NO: 3343764 - RNA, 14 nt, Human
acgccaucccagcc

SEQ ID NO: 3343765 - RNA, 15 nt, Human
acgccaucccagccc

SEQ ID NO: 3343766 - RNA, 16 nt, Human
acgccaucccagcccc

SEQ ID NO: 3343767 - RNA, 17 nt, Human
acgccaucccagcccca

SEQ ID NO: 3343768 - RNA, 18 nt, Human
acgccaucccagccccaa

SEQ ID NO: 3343769 - RNA, 14 nt, Human
uccaggcugggaga

SEQ ID NO: 3343770 - RNA, 17 nt, Human
uccaggcugggagagcc

SEQ ID NO: 3343771 - RNA, 18 nt, Human
uccaggcugggagagccu

SEQ ID NO: 3343772 - RNA, 22 nt, Human
uccaggcuccuuuagcgcccag

SEQ ID NO: 3343773 - RNA, 16 nt, Human
acggccaggccagagg

SEQ ID NO: 3343774 - RNA, 13 nt, Human
acggccaggccag

SEQ ID NO: 3343775 - RNA, 19 nt, Human
acggagucccaccuuggcu

SEQ ID NO: 3343776 - RNA, 14 nt, Human
acgcccccacuggu

SEQ ID NO: 3343777 - RNA, 23 nt, Human
acgcgugcacacaccagagccca

SEQ ID NO: 3343778 - RNA, 20 nt, Human
acgcgugcacacaccagagc

SEQ ID NO: 3343779 - RNA, 13 nt, Human
acgcuacccggga

SEQ ID NO: 3343780 - RNA, 17 nt, Human
acgcuacccgggaaggg

SEQ ID NO: 3343781 - RNA, 16 nt, Human
accuuuuuuauacaua

SEQ ID NO: 3343782 - RNA, 17 nt, Human
accuuuuuuauacauaa

SEQ ID NO: 3343783 - RNA, 18 nt, Human
accuuuuuuauacauaaa

SEQ ID NO: 3343784 - RNA, 14 nt, Human
accuuuguccccac

SEQ ID NO: 3343785 - RNA, 15 nt, Human
accuuuguccccacc

SEQ ID NO: 3343786 - RNA, 14 nt, Human
accuuuuuuauaca

SEQ ID NO: 3343787 - RNA, 16 nt, Human
accuuuguccccaccg

SEQ ID NO: 3343788 - RNA, 13 nt, Human
accuuugucccca

SEQ ID NO: 3343789 - RNA, 16 nt, Human
accuugacagggcaca

SEQ ID NO: 3343790 - RNA, 22 nt, Human
accuucuccuucaccuuugucc

SEQ ID NO: 3343791 - RNA, 14 nt, Human
accuucuccuucac

SEQ ID NO: 3343792 - RNA, 12 nt, Human
accuggccucug

SEQ ID NO: 3343793 - RNA, 13 nt, Human
accuggccucugc

SEQ ID NO: 3343794 - RNA, 17 nt, Human
uccacccaggagccccg

SEQ ID NO: 3343795 - RNA, 13 nt, Human
uccacccaccuca

SEQ ID NO: 3343796 - RNA, 18 nt, Human
uccaccaucaagccacca

SEQ ID NO: 3343797 - RNA, 12 nt, Human
uccacccaccuc

SEQ ID NO: 3343798 - RNA, 20 nt, Human
uccacccaggagccccgagg

SEQ ID NO: 3343799 - RNA, 17 nt, Human
accuggaauauauaacc

SEQ ID NO: 3343800 - RNA, 20 nt, Human
accuggaauauauaaccagu

SEQ ID NO: 3343801 - RNA, 23 nt, Human
accugccuguugggccaggagcc

SEQ ID NO: 3343802 - RNA, 21 nt, Human
accugcgucucauacucaccu

SEQ ID NO: 3343803 - RNA, 16 nt, Human
accugcggugcuaucu

SEQ ID NO: 3343804 - RNA, 23 nt, Human
accugcggugcuaucucccccag

SEQ ID NO: 3343805 - RNA, 14 nt, Human
ucauuugucacaca

SEQ ID NO: 3343806 - RNA, 16 nt, Human
ucauuugucacacacu

SEQ ID NO: 3343807 - RNA, 19 nt, Human
ucauuuuuaguagagacag

SEQ ID NO: 3343808 - RNA, 18 nt, Human
ucauuuuuuuuaagaaaa

SEQ ID NO: 3343809 - RNA, 17 nt, Human
ucauuuuuuuuaagaaa

SEQ ID NO: 3343810 - RNA, 22 nt, Human
accugaggcccuucucuccagc

SEQ ID NO: 3343811 - RNA, 14 nt, Human
accugaggggccuc

SEQ ID NO: 3343812 - RNA, 15 nt, Human
accugccaggaagcc

SEQ ID NO: 3343813 - RNA, 18 nt, Human
accugccaggaagccagc

SEQ ID NO: 3343814 - RNA, 16 nt, Human
accugccaggaagcca

SEQ ID NO: 3343815 - RNA, 17 nt, Human
accugccaggaagccag

SEQ ID NO: 3343816 - RNA, 19 nt, Human
accugaauuuuggcugugu

SEQ ID NO: 3343817 - RNA, 18 nt, Human
accugaagacucauucuu

SEQ ID NO: 3343818 - RNA, 12 nt, Human
ucauaaugacuu

SEQ ID NO: 3343819 - RNA, 23 nt, Human
accugaggcccuucucuccagcc

SEQ ID NO: 3343820 - RNA, 21 nt, Human
ucuacccucuuagaaaaacca

SEQ ID NO: 3343821 - RNA, 14 nt, Human
ucuacccaggugcu

SEQ ID NO: 3343822 - RNA, 13 nt, Human
ucuaaaggcuacc

SEQ ID NO: 3343823 - RNA, 16 nt, Human
ucuaaaggcuaccuuu

SEQ ID NO: 3343824 - RNA, 16 nt, Human
ucuaaagcugccagcc

SEQ ID NO: 3343825 - RNA, 17 nt, Human
ucuaaagcugccagccg

SEQ ID NO: 3343826 - RNA, 22 nt, Human
ucuaacuucaccauauuaccac

SEQ ID NO: 3343827 - RNA, 17 nt, Human
acuguuaauaguucagg

SEQ ID NO: 3343828 - RNA, 21 nt, Human
acuguuaauaguucagguaac

SEQ ID NO: 3343829 - RNA, 20 nt, Human
acuguacaugaaaacacauu

SEQ ID NO: 3343830 - RNA, 14 nt, Human
acuguaucaugaca

SEQ ID NO: 3343831 - RNA, 19 nt, Human
acuguacaugaaaacacau

SEQ ID NO: 3343832 - RNA, 16 nt, Human
acuguacaugaaaaca

SEQ ID NO: 3343833 - RNA, 22 nt, Human
acuguacaaaguagaagucuua

SEQ ID NO: 3343834 - RNA, 16 nt, Human
acuguacaaaguagaa

SEQ ID NO: 3343835 - RNA, 17 nt, Human
acuggguacuuguggac

SEQ ID NO: 3343836 - RNA, 15 nt, Human
acuguacaaaguaga

SEQ ID NO: 3343837 - RNA, 16 nt, Human
acuguaucaugacaaa

SEQ ID NO: 3343838 - RNA, 20 nt, Human
acuguaucaugacaaagacu

SEQ ID NO: 3343839 - RNA, 23 nt, Human
acuguccuacccacccuccuuuc

SEQ ID NO: 3343840 - RNA, 14 nt, Human
ucgcuccugugucu

SEQ ID NO: 3343841 - RNA, 15 nt, Human
acuggguacuugugg

SEQ ID NO: 3343842 - RNA, 21 nt, Human
acugggcuuggggaccagagc

SEQ ID NO: 3343843 - RNA, 13 nt, Human
ucuagccagagga

SEQ ID NO: 3343844 - RNA, 24 nt, Human
ucuagauacuguaucaugacaaag

SEQ ID NO: 3343845 - RNA, 13 nt, Human
ucuagauacugua

SEQ ID NO: 3343846 - RNA, 22 nt, Human
ucuaguuugauuaaauucuugc

SEQ ID NO: 3343847 - RNA, 23 nt, Human
ucuaguuugauuaaauucuugca

SEQ ID NO: 3343848 - RNA, 16 nt, Human
acuucaucccucuggg

SEQ ID NO: 3343849 - RNA, 17 nt, Human
acuuccacugccauccu

SEQ ID NO: 3343850 - RNA, 18 nt, Human
acuuccaauuuacauacu

SEQ ID NO: 3343851 - RNA, 13 nt, Human
acuuacuguacau

SEQ ID NO: 3343852 - RNA, 14 nt, Human
acuuacuguacaug

SEQ ID NO: 3343853 - RNA, 15 nt, Human
acuuacuguacauga

SEQ ID NO: 3343854 - RNA, 20 nt, Human
acuuagagguggggagcaga

SEQ ID NO: 3343855 - RNA, 12 nt, Human
ucuaccugaggg

SEQ ID NO: 3343856 - RNA, 19 nt, Human
ucuaccugaggggccucuu

SEQ ID NO: 3343857 - RNA, 16 nt, Human
ucucaaaaaaagaaaa

SEQ ID NO: 3343858 - RNA, 16 nt, Human
ucuauuguuucuuuca

SEQ ID NO: 3343859 - RNA, 18 nt, Human
acuucuccacccugcucu

SEQ ID NO: 3343860 - RNA, 17 nt, Human
acuucgggaggucgagg

SEQ ID NO: 3343861 - RNA, 20 nt, Human
acuucgggaggucgaggcag

SEQ ID NO: 3343862 - RNA, 14 nt, Human
acuuggaagcuccg

SEQ ID NO: 3343863 - RNA, 14 nt, Human
acuugucuuuggac

SEQ ID NO: 3343864 - RNA, 22 nt, Human
agaaguuugagaucagccuggg

SEQ ID NO: 3343865 - RNA, 23 nt, Human
agaaguuucugccgcagcccugc

SEQ ID NO: 3343866 - RNA, 22 nt, Human
ucugcuuugggguuuaucagaa

SEQ ID NO: 3343867 - RNA, 18 nt, Human
ucuggcagcucagagagg

SEQ ID NO: 3343868 - RNA, 21 nt, Human
ucuggcagcucagagagggug

SEQ ID NO: 3343869 - RNA, 20 nt, Human
ucuggcagaguugaagacag

SEQ ID NO: 3343870 - RNA, 17 nt, Human
ucuggcagcucagagag

SEQ ID NO: 3343871 - RNA, 16 nt, Human
ucuggcagcucagaga

SEQ ID NO: 3343872 - RNA, 19 nt, Human
agaaccuuuugagugccuu

SEQ ID NO: 3343873 - RNA, 23 nt, Human
agaaccuuuugagugccuuacac

SEQ ID NO: 3343874 - RNA, 16 nt, Human
agaagcagaggaagga

SEQ ID NO: 3343875 - RNA, 12 nt, Human
ucugcccuuggu

SEQ ID NO: 3343876 - RNA, 23 nt, Human
agaagcccaggaaaggcuccagg

SEQ ID NO: 3343877 - RNA, 23 nt, Human
ucugcccacucccugcaaccuga

SEQ ID NO: 3343878 - RNA, 23 nt, Human
acuuuggaaagaguaggaagacu

SEQ ID NO: 3343879 - RNA, 13 nt, Human
acuuuggaaagag

SEQ ID NO: 3343880 - RNA, 14 nt, Human
acuuuggaaagagu

SEQ ID NO: 3343881 - RNA, 23 nt, Human
acuuuggaaagacuuuuccaacc

SEQ ID NO: 3343882 - RNA, 23 nt, Human
acuuuaccuuuuuuauacauaaa

SEQ ID NO: 3343883 - RNA, 14 nt, Human
acuuguggacacag

SEQ ID NO: 3343884 - RNA, 12 nt, Human
ucucucaggcca

SEQ ID NO: 3343885 - RNA, 16 nt, Human
acuuuguguucaccuu

SEQ ID NO: 3343886 - RNA, 21 nt, Human
ucuccuuggugucgggcauga

SEQ ID NO: 3343887 - RNA, 23 nt, Human
ucuccuuggugucgggcaugaca

SEQ ID NO: 3343888 - RNA, 19 nt, Human
ucuccuguaccucuugagc

SEQ ID NO: 3343889 - RNA, 16 nt, Human
ucucuugguccugcug

SEQ ID NO: 3343890 - RNA, 17 nt, Human
ucucuugguccugcugc

SEQ ID NO: 3343891 - RNA, 18 nt, Human
ucucuugguccugcugca

SEQ ID NO: 3343892 - RNA, 17 nt, Human
agaaaaaugagccuggc

SEQ ID NO: 3343893 - RNA, 18 nt, Human
agaaaaaugagccuggca

SEQ ID NO: 3343894 - RNA, 19 nt, Human
agaaaaaauauuuucccua

SEQ ID NO: 3343895 - RNA, 17 nt, Human
agaaaaaauauuuuccu

SEQ ID NO: 3343896 - RNA, 23 nt, Human
agaaaaaauauuuuccugccagg

SEQ ID NO: 3343897 - RNA, 15 nt, Human
agaaaugccuuaccc

SEQ ID NO: 3343898 - RNA, 18 nt, Human
ucugaaggcuggguucug

SEQ ID NO: 3343899 - RNA, 22 nt, Human
ucugaaggacauugcggacagc

SEQ ID NO: 3343900 - RNA, 22 nt, Human
agaaagacuaucuaaauguuga

SEQ ID NO: 3343901 - RNA, 20 nt, Human
agaaagacuaucuaaauguu

SEQ ID NO: 3343902 - RNA, 13 nt, Human
ucuugauucauaa

SEQ ID NO: 3343903 - RNA, 20 nt, Human
ucuugagccuugaacuuuga

SEQ ID NO: 3343904 - RNA, 13 nt, Human
ucuugagccuggg

SEQ ID NO: 3343905 - RNA, 16 nt, Human
ucuugagccugggagg

SEQ ID NO: 3343906 - RNA, 15 nt, Human
agaccuucuccuuca

SEQ ID NO: 3343907 - RNA, 18 nt, Human
agaccuucuccuucaccu

SEQ ID NO: 3343908 - RNA, 11 nt, Human
agaccuucucc

SEQ ID NO: 3343909 - RNA, 21 nt, Human
agaccuucuccuucaccuuug

SEQ ID NO: 3343910 - RNA, 23 nt, Human
agaccuucuccuucaccuuuguc

SEQ ID NO: 3343911 - RNA, 17 nt, Human
ucuuuccugaggcuggg

SEQ ID NO: 3343912 - RNA, 16 nt, Human
ucuuuccugaggcugg

SEQ ID NO: 3343913 - RNA, 15 nt, Human
ucuugguccugcugc

SEQ ID NO: 3343914 - RNA, 17 nt, Human
ucuugguccugcugcag

SEQ ID NO: 3343915 - RNA, 22 nt, Human
ucuugcaauggcagccuuggca

SEQ ID NO: 3343916 - RNA, 18 nt, Human
ucuugcaauggcagccuu

SEQ ID NO: 3343917 - RNA, 19 nt, Human
ucuugcaauggcagccuug

SEQ ID NO: 3343918 - RNA, 17 nt, Human
ucuuggucagauuugaa

SEQ ID NO: 3343919 - RNA, 14 nt, Human
ucuugguccugcug

SEQ ID NO: 3343920 - RNA, 21 nt, Human
ucuucugaacuuggcgcugcc

SEQ ID NO: 3343921 - RNA, 12 nt, Human
ucuucugcuuca

SEQ ID NO: 3343922 - RNA, 23 nt, Human
ucuucuguacgucugacaggcaa

SEQ ID NO: 3343923 - RNA, 15 nt, Human
ucuucuguacgucug

SEQ ID NO: 3343924 - RNA, 20 nt, Human
ucuucuguggguuucuaaag

SEQ ID NO: 3343925 - RNA, 19 nt, Human
agacauacuaaccagcaga

SEQ ID NO: 3343926 - RNA, 15 nt, Human
ucuuccucccucccu

SEQ ID NO: 3343927 - RNA, 19 nt, Human
ucuucccuacaguugaaaa

SEQ ID NO: 3343928 - RNA, 14 nt, Human
ucuuccucccuccc

SEQ ID NO: 3343929 - RNA, 14 nt, Human
ucuuccaggcuggg

SEQ ID NO: 3343930 - RNA, 15 nt, Human
ucuuccaggcuggga

SEQ ID NO: 3343931 - RNA, 17 nt, Human
ucuuccaggcugggaga

SEQ ID NO: 3343932 - RNA, 20 nt, Human
ucuuccaggcugggagagcc

SEQ ID NO: 3343933 - RNA, 17 nt, Human
ucuucagagacuccugc

SEQ ID NO: 3343934 - RNA, 18 nt, Human
ucuucagagacuccugca

SEQ ID NO: 3343935 - RNA, 12 nt, Human
ucuucagagacu

SEQ ID NO: 3343936 - RNA, 22 nt, Human
agagcaccuuagacagucccug

SEQ ID NO: 3343937 - RNA, 21 nt, Human
agagcaccuuagacagucccu

SEQ ID NO: 3343938 - RNA, 23 nt, Human
agagcaccuuagacagucccugc

SEQ ID NO: 3343939 - RNA, 13 nt, Human
agagccuuccagg

SEQ ID NO: 3343940 - RNA, 15 nt, Human
agagccuuccagggg

SEQ ID NO: 3343941 - RNA, 17 nt, Human
agagccuuccaggggug

SEQ ID NO: 3343942 - RNA, 20 nt, Human
agagcuagcagcagggaggg

SEQ ID NO: 3343943 - RNA, 22 nt, Human
agagaucaaccccuucgcuccu

SEQ ID NO: 3343944 - RNA, 19 nt, Human
agagcaagacgcugugcug

SEQ ID NO: 3343945 - RNA, 23 nt, Human
agagcaagacgcugugcugcccu

SEQ ID NO: 3343946 - RNA, 15 nt, Human
agagacuccugcagg

SEQ ID NO: 3343947 - RNA, 17 nt, Human
agagacuccugcaggca

SEQ ID NO: 3343948 - RNA, 18 nt, Human
agagacuccugcaggcag

SEQ ID NO: 3343949 - RNA, 19 nt, Human
agagacuccugcaggcagc

SEQ ID NO: 3343950 - RNA, 20 nt, Human
agagacuccugcaggcagcc

SEQ ID NO: 3343951 - RNA, 21 nt, Human
agagacuccugcaggcagcca

SEQ ID NO: 3343952 - RNA, 22 nt, Human
agagacuccugcaggcagccag

SEQ ID NO: 3343953 - RNA, 15 nt, Human
ugaaagacuguacaa

SEQ ID NO: 3343954 - RNA, 13 nt, Human
ugaaagacuguac

SEQ ID NO: 3343955 - RNA, 21 nt, Human
ucuuucuggcuaugcauuuga

SEQ ID NO: 3343956 - RNA, 19 nt, Human
ucuuucuggcuaugcauuu

SEQ ID NO: 3343957 - RNA, 20 nt, Human
ucuuucuggcuaugcauuug

SEQ ID NO: 3343958 - RNA, 22 nt, Human
ucuuuggucuacacugugcuga

SEQ ID NO: 3343959 - RNA, 14 nt, Human
ucuuuguggcuucc

SEQ ID NO: 3343960 - RNA, 16 nt, Human
ugaaaaaggaggaaga

SEQ ID NO: 3343961 - RNA, 16 nt, Human
ugaaacgcaaccacca

SEQ ID NO: 3343962 - RNA, 19 nt, Human
ugaaaaucgugacaacacu

SEQ ID NO: 3343963 - RNA, 17 nt, Human
ugaaaauguauguguaa

SEQ ID NO: 3343964 - RNA, 16 nt, Human
ugaaaaucgugacaac

SEQ ID NO: 3343965 - RNA, 20 nt, Human
ugaaaaaggaggaagagaaa

SEQ ID NO: 3343966 - RNA, 22 nt, Human
ugaaaaaggaggaagagaaaaa

SEQ ID NO: 3343967 - RNA, 15 nt, Human
ugaauuucuuuugcc

SEQ ID NO: 3343968 - RNA, 23 nt, Human
ugaauuucuuuugccguuauuaa

SEQ ID NO: 3343969 - RNA, 12 nt, Human
ugacacaugcaa

SEQ ID NO: 3343970 - RNA, 20 nt, Human
ugacacaugcaaggucauuu

SEQ ID NO: 3343971 - RNA, 18 nt, Human
ugacacacagcucugucc

SEQ ID NO: 3343972 - RNA, 16 nt, Human
ugacacacagcucugu

SEQ ID NO: 3343973 - RNA, 19 nt, Human
ugacaaagacugaguacgu

SEQ ID NO: 3343974 - RNA, 19 nt, Human
ugacacacagcucuguccu

SEQ ID NO: 3343975 - RNA, 22 nt, Human
agauacaguuacucagaauucu

SEQ ID NO: 3343976 - RNA, 19 nt, Human
agauacaggaaaagcugcu

SEQ ID NO: 3343977 - RNA, 11 nt, Human
agauacuguau

SEQ ID NO: 3343978 - RNA, 18 nt, Human
agauaauauuaaggaaga

SEQ ID NO: 3343979 - RNA, 22 nt, Human
agauaauauuaaggaagacaau

SEQ ID NO: 3343980 - RNA, 13 nt, Human
agauacaguuacu

SEQ ID NO: 3343981 - RNA, 20 nt, Human
agauacaggaaaagcugcug

SEQ ID NO: 3343982 - RNA, 15 nt, Human
agauacuguaucaug

SEQ ID NO: 3343983 - RNA, 20 nt, Human
agauauuuugcuuugugauu

SEQ ID NO: 3343984 - RNA, 21 nt, Human
agauauuuugcuuugugauuu

SEQ ID NO: 3343985 - RNA, 18 nt, Human
agaucaaaagguuaauaa

SEQ ID NO: 3343986 - RNA, 18 nt, Human
agauaauacaccacuaca

SEQ ID NO: 3343987 - RNA, 19 nt, Human
agaguuguuacauuuuuaa

SEQ ID NO: 3343988 - RNA, 20 nt, Human
agaguuguuacauuuuuaag

SEQ ID NO: 3343989 - RNA, 16 nt, Human
agaguuguuacauuuu

SEQ ID NO: 3343990 - RNA, 17 nt, Human
agaguuguuacauuuuu

SEQ ID NO: 3343991 - RNA, 15 nt, Human
agagucacuggaaca

SEQ ID NO: 3343992 - RNA, 14 nt, Human
ugaagucacacagu

SEQ ID NO: 3343993 - RNA, 16 nt, Human
agagguggggagcaga

SEQ ID NO: 3343994 - RNA, 15 nt, Human
agagguuaagguggg

SEQ ID NO: 3343995 - RNA, 16 nt, Human
agagggagggagggcu

SEQ ID NO: 3343996 - RNA, 17 nt, Human
agcaagacgcugugcug

SEQ ID NO: 3343997 - RNA, 20 nt, Human
agcaagacgcugugcugccc

SEQ ID NO: 3343998 - RNA, 21 nt, Human
agcaagacgcugugcugcccu

SEQ ID NO: 3343999 - RNA, 22 nt, Human
agcaagacgcugugcugcccug

SEQ ID NO: 3344000 - RNA, 23 nt, Human
agcaagacgcugugcugcccugc

SEQ ID NO: 3344001 - RNA, 13 nt, Human
agcaagacgcugu

SEQ ID NO: 3344002 - RNA, 16 nt, Human
agcaagacgcugugcu

SEQ ID NO: 3344003 - RNA, 21 nt, Human
agauuuugaaauuuuuauuaa

SEQ ID NO: 3344004 - RNA, 13 nt, Human
agauuggaaggaa

SEQ ID NO: 3344005 - RNA, 12 nt, Human
ugacuuacugua

SEQ ID NO: 3344006 - RNA, 22 nt, Human
agauucauauuuacuucuuaua

SEQ ID NO: 3344007 - RNA, 19 nt, Human
agauucauauuuacuucuu

SEQ ID NO: 3344008 - RNA, 18 nt, Human
ugaccugaggcccuucuc

SEQ ID NO: 3344009 - RNA, 19 nt, Human
ugaccugaggcccuucucu

SEQ ID NO: 3344010 - RNA, 17 nt, Human
ugaccugaggcccuucu

SEQ ID NO: 3344011 - RNA, 15 nt, Human
ugacuuacuguacau

SEQ ID NO: 3344012 - RNA, 16 nt, Human
ugacuuacuguacaug

SEQ ID NO: 3344013 - RNA, 13 nt, Human
ugacuuacuguac

SEQ ID NO: 3344014 - RNA, 14 nt, Human
ugacccaugcugcc

SEQ ID NO: 3344015 - RNA, 15 nt, Human
ugacccaugcugccc

SEQ ID NO: 3344016 - RNA, 12 nt, Human
ugacccaugcug

SEQ ID NO: 3344017 - RNA, 16 nt, Human
ugacccaugcugcccu

SEQ ID NO: 3344018 - RNA, 21 nt, Human
ugacccaugcugcccugugag

SEQ ID NO: 3344019 - RNA, 16 nt, Human
agaugccgcauuugga

SEQ ID NO: 3344020 - RNA, 19 nt, Human
aaccaccacacccagccca

SEQ ID NO: 3344021 - RNA, 15 nt, Human
aaccaagucaaguga

SEQ ID NO: 3344022 - RNA, 21 nt, Human
aaccaccacacccagcccacu

SEQ ID NO: 3344023 - RNA, 12 nt, Human
aaccaucauuga

SEQ ID NO: 3344024 - RNA, 17 nt, Human
aaccaucauugaaaucu

SEQ ID NO: 3344025 - RNA, 10 nt, Human
aacccagcuc

SEQ ID NO: 3344026 - RNA, 18 nt, Human
gucuuuggacccugaggc

SEQ ID NO: 3344027 - RNA, 14 nt, Human
gucuggcccuuccu

SEQ ID NO: 3344028 - RNA, 12 nt, Human
aacuccuggccu

SEQ ID NO: 3344029 - RNA, 15 nt, Human
aacucuccuccagag

SEQ ID NO: 3344030 - RNA, 18 nt, Human
aacucuccuccagaguca

SEQ ID NO: 3344031 - RNA, 16 nt, Human
aacucuccucugcugc

SEQ ID NO: 3344032 - RNA, 21 nt, Human
gugaaccaccacacccagccc

SEQ ID NO: 3344033 - RNA, 23 nt, Human
gugaaccaccacacccagcccac

SEQ ID NO: 3344034 - RNA, 22 nt, Human
gugaaccaccacacccagccca

SEQ ID NO: 3344035 - RNA, 22 nt, Human
gugcaaugaccuuucaauagga

SEQ ID NO: 3344036 - RNA, 19 nt, Human
gugauggggcccugccucc

SEQ ID NO: 3344037 - RNA, 21 nt, Human
gugcacacaccagagcccacc

SEQ ID NO: 3344038 - RNA, 22 nt, Human
gugcaugcugucccuuacguga

SEQ ID NO: 3344039 - RNA, 15 nt, Human
gugcauuaucuagau

SEQ ID NO: 3344040 - RNA, 19 nt, Human
gugcauuaucuagauacug

SEQ ID NO: 3344041 - RNA, 19 nt, Human
gugcauguguguucaugca

SEQ ID NO: 3344042 - RNA, 23 nt, Human
gugcauuaucuagauacuguauc

SEQ ID NO: 3344043 - RNA, 14 nt, Human
gugaugagaggaaa

SEQ ID NO: 3344044 - RNA, 16 nt, Human
gugaugagaggaaauc

SEQ ID NO: 3344045 - RNA, 14 nt, Human
gugauggggcccug

SEQ ID NO: 3344046 - RNA, 16 nt, Human
gugauggggcccugcc

SEQ ID NO: 3344047 - RNA, 17 nt, Human
gugauggggcccugccu

SEQ ID NO: 3344048 - RNA, 18 nt, Human
gugauggggcccugccuc

SEQ ID NO: 3344049 - RNA, 22 nt, Human
gugaugcgcaugucacggaggg

SEQ ID NO: 3344050 - RNA, 13 nt, Human
aacuuccaauuua

SEQ ID NO: 3344051 - RNA, 20 nt, Human
aacugcugacuguuuucucu

SEQ ID NO: 3344052 - RNA, 21 nt, Human
aacugcugacuguuuucucuu

SEQ ID NO: 3344053 - RNA, 23 nt, Human
aacugcugacuguuuucucuuga

SEQ ID NO: 3344054 - RNA, 15 nt, Human
aacugcugacuguuu

SEQ ID NO: 3344055 - RNA, 16 nt, Human
aacuggauuaaacuua

SEQ ID NO: 3344056 - RNA, 11 nt, Human
aacuggcugca

SEQ ID NO: 3344057 - RNA, 15 nt, Human
aacuggauuaaacuu

SEQ ID NO: 3344058 - RNA, 21 nt, Human
aacugggggagggugaaguga

SEQ ID NO: 3344059 - RNA, 22 nt, Human
aacugggggagggugaagugaa

SEQ ID NO: 3344060 - RNA, 21 nt, Human
aacuggguacuuguggacaca

SEQ ID NO: 3344061 - RNA, 16 nt, Human
aacuggguacuugugg

SEQ ID NO: 3344062 - RNA, 22 nt, Human
gugagucgaggacagggaggug

SEQ ID NO: 3344063 - RNA, 15 nt, Human
gugagucgaggacag

SEQ ID NO: 3344064 - RNA, 21 nt, Human
aacucuucaaucucuugcacu

SEQ ID NO: 3344065 - RNA, 23 nt, Human
aacugauuuuuuuuuccuucagu

SEQ ID NO: 3344066 - RNA, 17 nt, Human
gugaggccagagacaca

SEQ ID NO: 3344067 - RNA, 22 nt, Human
gugaggccagagacacaagccu

SEQ ID NO: 3344068 - RNA, 13 nt, Human
gugaggccagaga

SEQ ID NO: 3344069 - RNA, 17 nt, Human
gugaacuugggccacug

SEQ ID NO: 3344070 - RNA, 19 nt, Human
gugaacuugggccacugug

SEQ ID NO: 3344071 - RNA, 18 nt, Human
aacaaggcaaggcuguca

SEQ ID NO: 3344072 - RNA, 21 nt, Human
aacaaggcaaggcugucaauu

SEQ ID NO: 3344073 - RNA, 18 nt, Human
aaauuuugauguuuuaag

SEQ ID NO: 3344074 - RNA, 23 nt, Human
aaauuuugauguuuuaaggaugc

SEQ ID NO: 3344075 - RNA, 20 nt, Human
aacaagaccacguuucuaaa

SEQ ID NO: 3344076 - RNA, 15 nt, Human
aacaaggcaaggcug

SEQ ID NO: 3344077 - RNA, 16 nt, Human
aacaaggcaaggcugu

SEQ ID NO: 3344078 - RNA, 23 nt, Human
gucagaaguuucugccgcagccc

SEQ ID NO: 3344079 - RNA, 21 nt, Human
gucacacaguauuacuucugc

SEQ ID NO: 3344080 - RNA, 22 nt, Human
gucacacaguauuacuucugcu

SEQ ID NO: 3344081 - RNA, 18 nt, Human
aaauuuguuauaaugaau

SEQ ID NO: 3344082 - RNA, 15 nt, Human
gucagugugacugau

SEQ ID NO: 3344083 - RNA, 16 nt, Human
gucccaccuuggcugc

SEQ ID NO: 3344084 - RNA, 15 nt, Human
gucccaccuuggcug

SEQ ID NO: 3344085 - RNA, 14 nt, Human
gucccaccuuggcu

SEQ ID NO: 3344086 - RNA, 20 nt, Human
gucccaccccacacacgcca

SEQ ID NO: 3344087 - RNA, 21 nt, Human
gucccaccccacacacgccag

SEQ ID NO: 3344088 - RNA, 13 nt, Human
guccauagagagc

SEQ ID NO: 3344089 - RNA, 14 nt, Human
guccauagagagca

SEQ ID NO: 3344090 - RNA, 13 nt, Human
guccaagaagccc

SEQ ID NO: 3344091 - RNA, 15 nt, Human
guccaagaagcccag

SEQ ID NO: 3344092 - RNA, 16 nt, Human
guccaagaagcccagg

SEQ ID NO: 3344093 - RNA, 20 nt, Human
guccaagaagcccaggaaag

SEQ ID NO: 3344094 - RNA, 17 nt, Human
guccaagaagcccagga

SEQ ID NO: 3344095 - RNA, 18 nt, Human
guccaagaagcccaggaa

SEQ ID NO: 3344096 - RNA, 19 nt, Human
gucauuuuuuuuaagaaaa

SEQ ID NO: 3344097 - RNA, 21 nt, Human
gucauuuuuuuuaagaaaaag

SEQ ID NO: 3344098 - RNA, 20 nt, Human
aacacacgcgcgcacacaca

SEQ ID NO: 3344099 - RNA, 19 nt, Human
aacacacgcgcgcacacac

SEQ ID NO: 3344100 - RNA, 14 nt, Human
aacagaaauguaca

SEQ ID NO: 3344101 - RNA, 12 nt, Human
aacagaaaugua

SEQ ID NO: 3344102 - RNA, 13 nt, Human
aacagaaauguac

SEQ ID NO: 3344103 - RNA, 12 nt, Human
guccuacucugu

SEQ ID NO: 3344104 - RNA, 15 nt, Human
guccuacccacccuc

SEQ ID NO: 3344105 - RNA, 16 nt, Human
guccuacccacccucc

SEQ ID NO: 3344106 - RNA, 16 nt, Human
gucccccuuccaugga

SEQ ID NO: 3344107 - RNA, 18 nt, Human
gucccccuuccauggacu

SEQ ID NO: 3344108 - RNA, 14 nt, Human
gucccccuuccaug

SEQ ID NO: 3344109 - RNA, 18 nt, Human
gucccccugacaacacuc

SEQ ID NO: 3344110 - RNA, 11 nt, Human
aacagaaaugu

SEQ ID NO: 3344111 - RNA, 19 nt, Human
aaaugucuaguuguaacac

SEQ ID NO: 3344112 - RNA, 22 nt, Human
guauuuuguuuuugucuuaaaa

SEQ ID NO: 3344113 - RNA, 22 nt, Human
guaacaggaaaauuuuaaaaau

SEQ ID NO: 3344114 - RNA, 12 nt, Human
guaacaggcaga

SEQ ID NO: 3344115 - RNA, 19 nt, Human
aaaugggggugcauuugag

SEQ ID NO: 3344116 - RNA, 20 nt, Human
guaacaggaaaauuuuaaaa

SEQ ID NO: 3344117 - RNA, 13 nt, Human
guaugguggcugg

SEQ ID NO: 3344118 - RNA, 14 nt, Human
guaugguggcuggg

SEQ ID NO: 3344119 - RNA, 16 nt, Human
guaugguggcuggguu

SEQ ID NO: 3344120 - RNA, 15 nt, Human
guaugguggcugggu

SEQ ID NO: 3344121 - RNA, 19 nt, Human
guaucccaugagccucagc

SEQ ID NO: 3344122 - RNA, 22 nt, Human
guaucaggugcugccauccagg

SEQ ID NO: 3344123 - RNA, 18 nt, Human
guaucaggugcugccauc

SEQ ID NO: 3344124 - RNA, 16 nt, Human
guaucaggugcugcca

SEQ ID NO: 3344125 - RNA, 19 nt, Human
aaguacacuguuucaaacu

SEQ ID NO: 3344126 - RNA, 20 nt, Human
aaguacacuguuucaaacuu

SEQ ID NO: 3344127 - RNA, 23 nt, Human
aaguacacuguuucaaacuuuac

SEQ ID NO: 3344128 - RNA, 22 nt, Human
guuuugccauguuggccaggcu

SEQ ID NO: 3344129 - RNA, 21 nt, Human
guuuugccauguuggccaggc

SEQ ID NO: 3344130 - RNA, 20 nt, Human
guuuugccauguuggccagg

SEQ ID NO: 3344131 - RNA, 16 nt, Human
guuuugccauguuggc

SEQ ID NO: 3344132 - RNA, 15 nt, Human
guuucugccgcagcc

SEQ ID NO: 3344133 - RNA, 14 nt, Human
guuucugccgcagc

SEQ ID NO: 3344134 - RNA, 21 nt, Human
aaguaauaugcacacauuuuu

SEQ ID NO: 3344135 - RNA, 13 nt, Human
aaguacacuguuu

SEQ ID NO: 3344136 - RNA, 18 nt, Human
aaguacacuguuucaaac

SEQ ID NO: 3344137 - RNA, 12 nt, Human
aagugagagagg

SEQ ID NO: 3344138 - RNA, 14 nt, Human
aagugagagcuggg

SEQ ID NO: 3344139 - RNA, 17 nt, Human
aagugaagacaaugacu

SEQ ID NO: 3344140 - RNA, 19 nt, Human
aagugaagacaaugacuua

SEQ ID NO: 3344141 - RNA, 21 nt, Human
aagugaaaaaggaggaagaga

SEQ ID NO: 3344142 - RNA, 19 nt, Human
uaaaaaucucaaauuucua

SEQ ID NO: 3344143 - RNA, 20 nt, Human
uaaaaaucucaaauuucuaa

SEQ ID NO: 3344144 - RNA, 21 nt, Human
uaaaaaucucaaauuucuaaa

SEQ ID NO: 3344145 - RNA, 22 nt, Human
uaaaacuugauguguuaucucu

SEQ ID NO: 3344146 - RNA, 20 nt, Human
uaaaacuugauguguuaucu

SEQ ID NO: 3344147 - RNA, 15 nt, Human
uaaaaaguggaaaaa

SEQ ID NO: 3344148 - RNA, 15 nt, Human
guuuuucuucucccu

SEQ ID NO: 3344149 - RNA, 16 nt, Human
uaaaaaucucaaauuu

SEQ ID NO: 3344150 - RNA, 17 nt, Human
uaaaaaucucaaauuuc

SEQ ID NO: 3344151 - RNA, 15 nt, Human
uaaaaaucucaaauu

SEQ ID NO: 3344152 - RNA, 18 nt, Human
aagugauucuccugccuc

SEQ ID NO: 3344153 - RNA, 17 nt, Human
aagugauucuccugccu

SEQ ID NO: 3344154 - RNA, 16 nt, Human
aagugauucuccugcc

SEQ ID NO: 3344155 - RNA, 15 nt, Human
aagugauucuccugc

SEQ ID NO: 3344156 - RNA, 19 nt, Human
aagugauucuccugccuca

SEQ ID NO: 3344157 - RNA, 16 nt, Human
aagugaggaugaaaaa

SEQ ID NO: 3344158 - RNA, 15 nt, Human
aagugagagcugggu

SEQ ID NO: 3344159 - RNA, 22 nt, Human
uaaaauaccagccaguaaaugg

SEQ ID NO: 3344160 - RNA, 21 nt, Human
uaaaauaccagccaguaaaug

SEQ ID NO: 3344161 - RNA, 15 nt, Human
aaggaaagagggagg

SEQ ID NO: 3344162 - RNA, 15 nt, Human
aaggaagacuucauc

SEQ ID NO: 3344163 - RNA, 13 nt, Human
aaggaagcacaug

SEQ ID NO: 3344164 - RNA, 14 nt, Human
aaggaagacuucau

SEQ ID NO: 3344165 - RNA, 17 nt, Human
aaggaauaccugucccc

SEQ ID NO: 3344166 - RNA, 16 nt, Human
aaggaagcacaugccu

SEQ ID NO: 3344167 - RNA, 20 nt, Human
aaggaggggauagagagaga

SEQ ID NO: 3344168 - RNA, 14 nt, Human
aaggagauuuacaa

SEQ ID NO: 3344169 - RNA, 11 nt, Human
aaggagagcua

SEQ ID NO: 3344170 - RNA, 18 nt, Human
aaggaauaccuguccccc

SEQ ID NO: 3344171 - RNA, 19 nt, Human
guugcccaggcaggucuug

SEQ ID NO: 3344172 - RNA, 17 nt, Human
guugccuaaguauuaaa

SEQ ID NO: 3344173 - RNA, 22 nt, Human
guugccuaaguauuaaaacauu

SEQ ID NO: 3344174 - RNA, 21 nt, Human
guugccuaaguauuaaaacau

SEQ ID NO: 3344175 - RNA, 18 nt, Human
guugccuaaguauuaaaa

SEQ ID NO: 3344176 - RNA, 13 nt, Human
guugcccaggcug

SEQ ID NO: 3344177 - RNA, 12 nt, Human
guugcccaggcu

SEQ ID NO: 3344178 - RNA, 23 nt, Human
guugcccaggcaggucuugaacu

SEQ ID NO: 3344179 - RNA, 13 nt, Human
aaggauacaaaag

SEQ ID NO: 3344180 - RNA, 21 nt, Human
aaggauacaaaagcaugugag

SEQ ID NO: 3344181 - RNA, 13 nt, Human
guuuauugucaaa

SEQ ID NO: 3344182 - RNA, 15 nt, Human
guugggccaggagcc

SEQ ID NO: 3344183 - RNA, 17 nt, Human
guugggccaggagccuc

SEQ ID NO: 3344184 - RNA, 13 nt, Human
guugggcuggugu

SEQ ID NO: 3344185 - RNA, 19 nt, Human
aaggcuccaggagcagcca

SEQ ID NO: 3344186 - RNA, 22 nt, Human
aaggcuccaggagcagccacau

SEQ ID NO: 3344187 - RNA, 16 nt, Human
aaggcucgagcaugcc

SEQ ID NO: 3344188 - RNA, 18 nt, Human
aaggcucgagcaugccug

SEQ ID NO: 3344189 - RNA, 19 nt, Human
aaggcucgagcaugccugg

SEQ ID NO: 3344190 - RNA, 20 nt, Human
aaggcucgagcaugccugga

SEQ ID NO: 3344191 - RNA, 22 nt, Human
aaggcucgagcaugccuggaug

SEQ ID NO: 3344192 - RNA, 14 nt, Human
guuucaaacuuuac

SEQ ID NO: 3344193 - RNA, 16 nt, Human
guuucaaacuuuacua

SEQ ID NO: 3344194 - RNA, 13 nt, Human
guuucaaacuuua

SEQ ID NO: 3344195 - RNA, 16 nt, Human
aaggcuccaggagcag

SEQ ID NO: 3344196 - RNA, 18 nt, Human
aaggcuccaggagcagcc

SEQ ID NO: 3344197 - RNA, 15 nt, Human
aaggcuccaggagca

SEQ ID NO: 3344198 - RNA, 22 nt, Human
guuucuaugacacaugcaaggu

SEQ ID NO: 3344199 - RNA, 12 nt, Human
aaggucauuuuu

SEQ ID NO: 3344200 - RNA, 18 nt, Human
guuucugaaagggacgcu

SEQ ID NO: 3344201 - RNA, 19 nt, Human
guuucuauguguagggcgg

SEQ ID NO: 3344202 - RNA, 20 nt, Human
aagguagaaauaucugaaaa

SEQ ID NO: 3344203 - RNA, 22 nt, Human
aaggggcccaaauucuuucagu

SEQ ID NO: 3344204 - RNA, 17 nt, Human
aaggggcaguggugguu

SEQ ID NO: 3344205 - RNA, 18 nt, Human
guuaagagaaaugagcuu

SEQ ID NO: 3344206 - RNA, 11 nt, Human
guuaagagaaa

SEQ ID NO: 3344207 - RNA, 12 nt, Human
guuaagagaaau

SEQ ID NO: 3344208 - RNA, 19 nt, Human
guuaggcauugugggaagg

SEQ ID NO: 3344209 - RNA, 20 nt, Human
guuaggcauugugggaaggg

SEQ ID NO: 3344210 - RNA, 20 nt, Human
guucaaagauauuuugcuuu

SEQ ID NO: 3344211 - RNA, 21 nt, Human
guucaaagauauuuugcuuug

SEQ ID NO: 3344212 - RNA, 22 nt, Human
guucaaagauauuuugcuuugu

SEQ ID NO: 3344213 - RNA, 23 nt, Human
guuauuuuuauuuauuuaaauuu

SEQ ID NO: 3344214 - RNA, 18 nt, Human
aagcucagggccuggcuc

SEQ ID NO: 3344215 - RNA, 19 nt, Human
aagcucagggccuggcuca

SEQ ID NO: 3344216 - RNA, 20 nt, Human
aagcucagggccuggcucag

SEQ ID NO: 3344217 - RNA, 17 nt, Human
aagcuccaagcucccag

SEQ ID NO: 3344218 - RNA, 18 nt, Human
aagcuccaagcucccagg

SEQ ID NO: 3344219 - RNA, 12 nt, Human
aagcucagggcc

SEQ ID NO: 3344220 - RNA, 13 nt, Human
aagcucagggccu

SEQ ID NO: 3344221 - RNA, 16 nt, Human
aagcucagggccuggc

SEQ ID NO: 3344222 - RNA, 17 nt, Human
aagcucagggccuggcu

SEQ ID NO: 3344223 - RNA, 13 nt, Human
guucagcuccagc

SEQ ID NO: 3344224 - RNA, 12 nt, Human
aagcuaggccug

SEQ ID NO: 3344225 - RNA, 22 nt, Human
aagcuauucaguaauaacucua

SEQ ID NO: 3344226 - RNA, 20 nt, Human
aagccugaguuugcuuucaa

SEQ ID NO: 3344227 - RNA, 22 nt, Human
aagcuagacgagcaggcuucuu

SEQ ID NO: 3344228 - RNA, 19 nt, Human
aagcccaggaaaggcucca

SEQ ID NO: 3344229 - RNA, 22 nt, Human
aagcccaggaaaggcuccagga

SEQ ID NO: 3344230 - RNA, 14 nt, Human
aagcccaggaaagg

SEQ ID NO: 3344231 - RNA, 17 nt, Human
aagcccaggaaaggcuc

SEQ ID NO: 3344232 - RNA, 22 nt, Human
aagccaaagcuaggccuggcca

SEQ ID NO: 3344233 - RNA, 20 nt, Human
aagccaaagcuaggccuggc

SEQ ID NO: 3344234 - RNA, 20 nt, Human
aagccgcuggggccaguugg

SEQ ID NO: 3344235 - RNA, 19 nt, Human
aagcccugagcuuucugcu

SEQ ID NO: 3344236 - RNA, 20 nt, Human
aagcagugcaugcugucccu

SEQ ID NO: 3344237 - RNA, 14 nt, Human
aagcagugcaugcu

SEQ ID NO: 3344238 - RNA, 15 nt, Human
aagcagugcaugcug

SEQ ID NO: 3344239 - RNA, 21 nt, Human
gugugugcgccuacaggagug

SEQ ID NO: 3344240 - RNA, 12 nt, Human
aagcagugcaug

SEQ ID NO: 3344241 - RNA, 16 nt, Human
aagcauuuacuuugug

SEQ ID NO: 3344242 - RNA, 23 nt, Human
aagacugaguacguugugcauuu

SEQ ID NO: 3344243 - RNA, 22 nt, Human
aagacugaguacguugugcauu

SEQ ID NO: 3344244 - RNA, 15 nt, Human
aagaccuucuccuuc

SEQ ID NO: 3344245 - RNA, 18 nt, Human
aagaccuucuccuucacc

SEQ ID NO: 3344246 - RNA, 19 nt, Human
aagaccuucuccuucaccu

SEQ ID NO: 3344247 - RNA, 15 nt, Human
aagacgcugugcugc

SEQ ID NO: 3344248 - RNA, 17 nt, Human
aagacgcugugcugccc

SEQ ID NO: 3344249 - RNA, 18 nt, Human
aagacgcugugcugcccu

SEQ ID NO: 3344250 - RNA, 19 nt, Human
aagacgcugugcugcccug

SEQ ID NO: 3344251 - RNA, 13 nt, Human
aagacgcugugcu

SEQ ID NO: 3344252 - RNA, 13 nt, Human
gugggacacccug

SEQ ID NO: 3344253 - RNA, 15 nt, Human
gugggacacccugug

SEQ ID NO: 3344254 - RNA, 14 nt, Human
gugggagcugccug

SEQ ID NO: 3344255 - RNA, 15 nt, Human
guggggucacucugg

SEQ ID NO: 3344256 - RNA, 18 nt, Human
gugggagcugccuguuca

SEQ ID NO: 3344257 - RNA, 15 nt, Human
gugggagcugccugu

SEQ ID NO: 3344258 - RNA, 21 nt, Human
guggccucccaacucacccca

SEQ ID NO: 3344259 - RNA, 22 nt, Human
guggccucccaacucaccccag

SEQ ID NO: 3344260 - RNA, 15 nt, Human
guggccucccaacuc

SEQ ID NO: 3344261 - RNA, 22 nt, Human
gugugacaaggauugcuacugu

SEQ ID NO: 3344262 - RNA, 20 nt, Human
gugucagguggggcagcuug

SEQ ID NO: 3344263 - RNA, 17 nt, Human
guguauuuuuuuacuaa

SEQ ID NO: 3344264 - RNA, 23 nt, Human
guguauuuuuuuacuaauagaca

SEQ ID NO: 3344265 - RNA, 20 nt, Human
gugucaagagggucugagga

SEQ ID NO: 3344266 - RNA, 16 nt, Human
gugucagcauagaagu

SEQ ID NO: 3344267 - RNA, 19 nt, Human
aagaugcuucucacugcca

SEQ ID NO: 3344268 - RNA, 17 nt, Human
aagaugcuucucacugc

SEQ ID NO: 3344269 - RNA, 16 nt, Human
aagaugcuucucacug

SEQ ID NO: 3344270 - RNA, 13 nt, Human
aagaguaggaaga

SEQ ID NO: 3344271 - RNA, 22 nt, Human
aagagggagggagggcuccaga

SEQ ID NO: 3344272 - RNA, 23 nt, Human
aagagggagggagggcuccagac

SEQ ID NO: 3344273 - RNA, 12 nt, Human
aagaguaggaag

SEQ ID NO: 3344274 - RNA, 17 nt, Human
guggggucacucuggca

SEQ ID NO: 3344275 - RNA, 20 nt, Human
guggggucacucuggcagcu

SEQ ID NO: 3344276 - RNA, 21 nt, Human
guggggucacucuggcagcuc

SEQ ID NO: 3344277 - RNA, 22 nt, Human
guggggucacucuggcagcuca

SEQ ID NO: 3344278 - RNA, 21 nt, Human
aauuauuuauuaaaugcccag

SEQ ID NO: 3344279 - RNA, 22 nt, Human
aauuauuuauuaaaugcccagc

SEQ ID NO: 3344280 - RNA, 17 nt, Human
aauucaguuguuagugu

SEQ ID NO: 3344281 - RNA, 22 nt, Human
aauucaguuguuagugugucuu

SEQ ID NO: 3344282 - RNA, 11 nt, Human
aauucaguugu

SEQ ID NO: 3344283 - RNA, 16 nt, Human
uaccugaggggccucu

SEQ ID NO: 3344284 - RNA, 17 nt, Human
aauuacaggaaguacug

SEQ ID NO: 3344285 - RNA, 19 nt, Human
aauuacaggaaguacugga

SEQ ID NO: 3344286 - RNA, 20 nt, Human
aauuacaggaaguacuggag

SEQ ID NO: 3344287 - RNA, 11 nt, Human
aauuacaggaa

SEQ ID NO: 3344288 - RNA, 13 nt, Human
uaccugaagucuu

SEQ ID NO: 3344289 - RNA, 14 nt, Human
uaccugaagucuuu

SEQ ID NO: 3344290 - RNA, 13 nt, Human
uaccugaggggcc

SEQ ID NO: 3344291 - RNA, 15 nt, Human
uaccugaggggccuc

SEQ ID NO: 3344292 - RNA, 16 nt, Human
uaccugaagucuuugu

SEQ ID NO: 3344293 - RNA, 23 nt, Human
uacccgggaagggggcugggaca

SEQ ID NO: 3344294 - RNA, 22 nt, Human
uaccucuugagccuugaacuuu

SEQ ID NO: 3344295 - RNA, 21 nt, Human
uaccucuugagccuugaacuu

SEQ ID NO: 3344296 - RNA, 23 nt, Human
uaccucuugagccuugaacuuug

SEQ ID NO: 3344297 - RNA, 11 nt, Human
aauuaacuuuu

SEQ ID NO: 3344298 - RNA, 18 nt, Human
uaccagccaguaaauggg

SEQ ID NO: 3344299 - RNA, 22 nt, Human
uaccagcagagcaccuuagaca

SEQ ID NO: 3344300 - RNA, 13 nt, Human
uaccagcagagca

SEQ ID NO: 3344301 - RNA, 14 nt, Human
uaccagcagagcac

SEQ ID NO: 3344302 - RNA, 12 nt, Human
uaccagcagagc

SEQ ID NO: 3344303 - RNA, 21 nt, Human
aaugugcugaaugguuuucaa

SEQ ID NO: 3344304 - RNA, 17 nt, Human
aauuaaguacuauguau

SEQ ID NO: 3344305 - RNA, 16 nt, Human
aauuaaguacuaugua

SEQ ID NO: 3344306 - RNA, 15 nt, Human
aauuaacuuuuauaa

SEQ ID NO: 3344307 - RNA, 13 nt, Human
aauuaaguacuau

SEQ ID NO: 3344308 - RNA, 12 nt, Human
aauuaacuuuua

SEQ ID NO: 3344309 - RNA, 13 nt, Human
aauuaacuuuuau

SEQ ID NO: 3344310 - RNA, 18 nt, Human
aaugaggucagagccugc

SEQ ID NO: 3344311 - RNA, 16 nt, Human
aaugaggucagagccu

SEQ ID NO: 3344312 - RNA, 12 nt, Human
aaugagccuggc

SEQ ID NO: 3344313 - RNA, 13 nt, Human
aaugagccuggca

SEQ ID NO: 3344314 - RNA, 21 nt, Human
aaugaccuuucaauaggaaaa

SEQ ID NO: 3344315 - RNA, 20 nt, Human
aaugaccuuucaauaggaaa

SEQ ID NO: 3344316 - RNA, 11 nt, Human
aaugagccugg

SEQ ID NO: 3344317 - RNA, 13 nt, Human
aaugcaccuggaa

SEQ ID NO: 3344318 - RNA, 12 nt, Human
aaugcaaaccau

SEQ ID NO: 3344319 - RNA, 20 nt, Human
aaugcacaaacagaggccgc

SEQ ID NO: 3344320 - RNA, 11 nt, Human
aaugcaaacca

SEQ ID NO: 3344321 - RNA, 13 nt, Human
uacaaugcugugc

SEQ ID NO: 3344322 - RNA, 14 nt, Human
uacaaugcugugcc

SEQ ID NO: 3344323 - RNA, 18 nt, Human
uaauuuuuuugagacaga

SEQ ID NO: 3344324 - RNA, 21 nt, Human
aaugcuggcuguuggcugggg

SEQ ID NO: 3344325 - RNA, 22 nt, Human
aaugcuggcuguuggcuggggg

SEQ ID NO: 3344326 - RNA, 14 nt, Human
aauggaaccacucu

SEQ ID NO: 3344327 - RNA, 13 nt, Human
aauggaagacagc

SEQ ID NO: 3344328 - RNA, 16 nt, Human
aauggaagacagcucu

SEQ ID NO: 3344329 - RNA, 14 nt, Human
aaugguuuucaaaa

SEQ ID NO: 3344330 - RNA, 16 nt, Human
aaugguuuucaaaaua

SEQ ID NO: 3344331 - RNA, 14 nt, Human
uacagacaaagcgu

SEQ ID NO: 3344332 - RNA, 15 nt, Human
uacagacaaagcgug

SEQ ID NO: 3344333 - RNA, 13 nt, Human
uacagacaaagcg

SEQ ID NO: 3344334 - RNA, 23 nt, Human
uacagagcagacaguuaagagaa

SEQ ID NO: 3344335 - RNA, 19 nt, Human
uacagagcccacgccccca

SEQ ID NO: 3344336 - RNA, 22 nt, Human
uacagagcccacgcccccacug

SEQ ID NO: 3344337 - RNA, 17 nt, Human
aaucccauuuaaaaaaa

SEQ ID NO: 3344338 - RNA, 21 nt, Human
uaaguauucuuauuuaaugaa

SEQ ID NO: 3344339 - RNA, 13 nt, Human
aaucagccugcuc

SEQ ID NO: 3344340 - RNA, 18 nt, Human
aaucagccugcuccagcu

SEQ ID NO: 3344341 - RNA, 19 nt, Human
aaucagccugcuccagcug

SEQ ID NO: 3344342 - RNA, 11 nt, Human
aaucagccugc

SEQ ID NO: 3344343 - RNA, 17 nt, Human
uaaggaauaccuguccc

SEQ ID NO: 3344344 - RNA, 18 nt, Human
uaaggaauaccugucccc

SEQ ID NO: 3344345 - RNA, 13 nt, Human
uaaggaagacaau

SEQ ID NO: 3344346 - RNA, 9 nt, Human
uaaggaaua

SEQ ID NO: 3344347 - RNA, 14 nt, Human
uaagcuauucagua

SEQ ID NO: 3344348 - RNA, 21 nt, Human
uaagcuauucaguaauaacuc

SEQ ID NO: 3344349 - RNA, 18 nt, Human
aaguguauuuuuuuacua

SEQ ID NO: 3344350 - RNA, 21 nt, Human
aaguguauuuuuuuacuaaua

SEQ ID NO: 3344351 - RNA, 18 nt, Human
uaaaugaaaaucgugaca

SEQ ID NO: 3344352 - RNA, 19 nt, Human
uaaauuaacuuuuauaaac

SEQ ID NO: 3344353 - RNA, 20 nt, Human
uaaauuaacuuuuauaaacu

SEQ ID NO: 3344354 - RNA, 18 nt, Human
uaaauuaacuuuuauaaa

SEQ ID NO: 3344355 - RNA, 21 nt, Human
uaaauuaacuuuuauaaacuu

SEQ ID NO: 3344356 - RNA, 21 nt, Human
aauacaccacuacauucuguu

SEQ ID NO: 3344357 - RNA, 13 nt, Human
aauacagaggcaa

SEQ ID NO: 3344358 - RNA, 12 nt, Human
aauaccaaggaa

SEQ ID NO: 3344359 - RNA, 17 nt, Human
aauaccagccaguaaau

SEQ ID NO: 3344360 - RNA, 19 nt, Human
aauaccagccaguaaaugg

SEQ ID NO: 3344361 - RNA, 15 nt, Human
aauaccugucccccu

SEQ ID NO: 3344362 - RNA, 18 nt, Human
aauaccugucccccugac

SEQ ID NO: 3344363 - RNA, 19 nt, Human
aauaccugucccccugaca

SEQ ID NO: 3344364 - RNA, 20 nt, Human
aauagccugccucuucucua

SEQ ID NO: 3344365 - RNA, 19 nt, Human
uaacauguaauuaaguacu

SEQ ID NO: 3344366 - RNA, 17 nt, Human
uaacauguaauuaagua

SEQ ID NO: 3344367 - RNA, 16 nt, Human
uaacuugucuuuggac

SEQ ID NO: 3344368 - RNA, 20 nt, Human
uaacuugucuuuggacccug

SEQ ID NO: 3344369 - RNA, 17 nt, Human
uaacuuccaauuuacau

SEQ ID NO: 3344370 - RNA, 19 nt, Human
uaucacccagaagaaaaua

SEQ ID NO: 3344371 - RNA, 22 nt, Human
uaucacccagaagaaaauagug

SEQ ID NO: 3344372 - RNA, 20 nt, Human
acagacccugcccugugggc

SEQ ID NO: 3344373 - RNA, 19 nt, Human
uauccaacaucaacaucuu

SEQ ID NO: 3344374 - RNA, 17 nt, Human
uaucagaauucucagaa

SEQ ID NO: 3344375 - RNA, 10 nt, Human
uaucagaauu

SEQ ID NO: 3344376 - RNA, 21 nt, Human
acacuuacacuuuaugcacaa

SEQ ID NO: 3344377 - RNA, 18 nt, Human
acacuuacacuuuaugca

SEQ ID NO: 3344378 - RNA, 17 nt, Human
acacuguuucaaacuuu

SEQ ID NO: 3344379 - RNA, 18 nt, Human
acacuguuucaaacuuua

SEQ ID NO: 3344380 - RNA, 16 nt, Human
acacuguuucaaacuu

SEQ ID NO: 3344381 - RNA, 17 nt, Human
acacucauugaccugag

SEQ ID NO: 3344382 - RNA, 20 nt, Human
acacuguuucaaacuuuacu

SEQ ID NO: 3344383 - RNA, 16 nt, Human
acacuuacacuuuaug

SEQ ID NO: 3344384 - RNA, 18 nt, Human
acagacauacuaaccagc

SEQ ID NO: 3344385 - RNA, 19 nt, Human
acagacauacuaaccagca

SEQ ID NO: 3344386 - RNA, 15 nt, Human
acacuaaugaggaaa

SEQ ID NO: 3344387 - RNA, 22 nt, Human
acacuaaugaggaaacugcacu

SEQ ID NO: 3344388 - RNA, 21 nt, Human
acacucaaaagcugggcaggu

SEQ ID NO: 3344389 - RNA, 17 nt, Human
uagucacugagacagcc

SEQ ID NO: 3344390 - RNA, 15 nt, Human
acacucaaaagcugg

SEQ ID NO: 3344391 - RNA, 18 nt, Human
uauaauuuaccugaaguc

SEQ ID NO: 3344392 - RNA, 22 nt, Human
uauacacuuacacuuuaugcac

SEQ ID NO: 3344393 - RNA, 21 nt, Human
uauacacuuacacuuuaugca

SEQ ID NO: 3344394 - RNA, 16 nt, Human
acacucauugaccuga

SEQ ID NO: 3344395 - RNA, 23 nt, Human
uauaggaacuuaaauaaugugaa

SEQ ID NO: 3344396 - RNA, 17 nt, Human
acaggcccggcuccagg

SEQ ID NO: 3344397 - RNA, 16 nt, Human
acaggcccggcuccag

SEQ ID NO: 3344398 - RNA, 15 nt, Human
acaggcagauacagg

SEQ ID NO: 3344399 - RNA, 20 nt, Human
acaggaaaauuuuaaaaaua

SEQ ID NO: 3344400 - RNA, 22 nt, Human
acaggcccggcuccaggcuccu

SEQ ID NO: 3344401 - RNA, 21 nt, Human
acaggcccggcuccaggcucc

SEQ ID NO: 3344402 - RNA, 20 nt, Human
acaggcccggcuccaggcuc

SEQ ID NO: 3344403 - RNA, 18 nt, Human
acaggcccggcuccaggc

SEQ ID NO: 3344404 - RNA, 21 nt, Human
acagcuucauuuccugugucu

SEQ ID NO: 3344405 - RNA, 19 nt, Human
acagcuucauuuccugugu

SEQ ID NO: 3344406 - RNA, 17 nt, Human
acagcuucauuuccugu

SEQ ID NO: 3344407 - RNA, 20 nt, Human
acagcuugaccgugaggcca

SEQ ID NO: 3344408 - RNA, 21 nt, Human
acagcuugaccgugaggccag

SEQ ID NO: 3344409 - RNA, 17 nt, Human
acagcuugaccgugagg

SEQ ID NO: 3344410 - RNA, 21 nt, Human
acaggaaaagcugcugacagu

SEQ ID NO: 3344411 - RNA, 20 nt, Human
acaggaaaagcugcugacag

SEQ ID NO: 3344412 - RNA, 19 nt, Human
acaggaaaagcugcugaca

SEQ ID NO: 3344413 - RNA, 18 nt, Human
acaggaaaagcugcugac

SEQ ID NO: 3344414 - RNA, 22 nt, Human
acagcuugaccgugaggccaga

SEQ ID NO: 3344415 - RNA, 23 nt, Human
acagcuugaccgugaggccagag

SEQ ID NO: 3344416 - RNA, 19 nt, Human
acagcuaaugggacacuaa

SEQ ID NO: 3344417 - RNA, 17 nt, Human
acagcuaaugggacacu

SEQ ID NO: 3344418 - RNA, 16 nt, Human
acagcuaaugggacac

SEQ ID NO: 3344419 - RNA, 15 nt, Human
acagcuaaugggaca

SEQ ID NO: 3344420 - RNA, 21 nt, Human
uaugaggcauuuguuugaacu

SEQ ID NO: 3344421 - RNA, 14 nt, Human
uaugaggcauuugu

SEQ ID NO: 3344422 - RNA, 15 nt, Human
uaugaggcauuuguu

SEQ ID NO: 3344423 - RNA, 13 nt, Human
uaugaggcauuug

SEQ ID NO: 3344424 - RNA, 15 nt, Human
acagcccgggcucug

SEQ ID NO: 3344425 - RNA, 22 nt, Human
uaugcaugaaguaauaugcaca

SEQ ID NO: 3344426 - RNA, 18 nt, Human
uaugcaugaaguaauaug

SEQ ID NO: 3344427 - RNA, 23 nt, Human
uauggcuuuugugcauuaucuag

SEQ ID NO: 3344428 - RNA, 21 nt, Human
uauggcccuggccuagcauac

SEQ ID NO: 3344429 - RNA, 20 nt, Human
uauggcccuggccuagcaua

SEQ ID NO: 3344430 - RNA, 23 nt, Human
uaugggacucaaugcacugacau

SEQ ID NO: 3344431 - RNA, 16 nt, Human
uaugggacucaaugca

SEQ ID NO: 3344432 - RNA, 13 nt, Human
uagccaaggccaa

SEQ ID NO: 3344433 - RNA, 12 nt, Human
uagccaaggcca

SEQ ID NO: 3344434 - RNA, 22 nt, Human
uagcacagacccugcccugugg

SEQ ID NO: 3344435 - RNA, 15 nt, Human
uagcacagacccugc

SEQ ID NO: 3344436 - RNA, 19 nt, Human
uagcacagacccugcccug

SEQ ID NO: 3344437 - RNA, 20 nt, Human
uagcacagacccugcccugu

SEQ ID NO: 3344438 - RNA, 21 nt, Human
uagcacagacccugcccugug

SEQ ID NO: 3344439 - RNA, 14 nt, Human
uagcacagacccug

SEQ ID NO: 3344440 - RNA, 22 nt, Human
uagagcggagaaaggaagggcu

SEQ ID NO: 3344441 - RNA, 14 nt, Human
uagagccagggucu

SEQ ID NO: 3344442 - RNA, 16 nt, Human
acaaaaagcauaaaaa

SEQ ID NO: 3344443 - RNA, 16 nt, Human
uagacagucccugcca

SEQ ID NO: 3344444 - RNA, 10 nt, Human
uagacagagu

SEQ ID NO: 3344445 - RNA, 18 nt, Human
uagacaauuuauuauggc

SEQ ID NO: 3344446 - RNA, 17 nt, Human
aauuugugauacaaugc

SEQ ID NO: 3344447 - RNA, 18 nt, Human
aauuugugauacaaugcu

SEQ ID NO: 3344448 - RNA, 14 nt, Human
aauuugugauacaa

SEQ ID NO: 3344449 - RNA, 17 nt, Human
uagacagucccugccaa

SEQ ID NO: 3344450 - RNA, 21 nt, Human
uagacagucccugccaaugga

SEQ ID NO: 3344451 - RNA, 14 nt, Human
uaguagagacaggg

SEQ ID NO: 3344452 - RNA, 14 nt, Human
uagucacugagaca

SEQ ID NO: 3344453 - RNA, 22 nt, Human
uaguagagacaggguuuugcca

SEQ ID NO: 3344454 - RNA, 15 nt, Human
uaguagagacagggu

SEQ ID NO: 3344455 - RNA, 16 nt, Human
acacaggcccggcucc

SEQ ID NO: 3344456 - RNA, 18 nt, Human
acacaggcccggcuccag

SEQ ID NO: 3344457 - RNA, 17 nt, Human
acacaggcccggcucca

SEQ ID NO: 3344458 - RNA, 22 nt, Human
acacacacgcgugcacacacca

SEQ ID NO: 3344459 - RNA, 22 nt, Human
acacaggcccggcuccaggcuc

SEQ ID NO: 3344460 - RNA, 21 nt, Human
acacaggcccggcuccaggcu

SEQ ID NO: 3344461 - RNA, 20 nt, Human
acacaggcccggcuccaggc

SEQ ID NO: 3344462 - RNA, 19 nt, Human
acacaggcccggcuccagg

SEQ ID NO: 3344463 - RNA, 24 nt, Human
acacaggcccggcuccaggcuccu

SEQ ID NO: 3344464 - RNA, 23 nt, Human
acacaggcccggcuccaggcucc

SEQ ID NO: 3344465 - RNA, 15 nt, Human
uaggguuauaauaau

SEQ ID NO: 3344466 - RNA, 17 nt, Human
uaggguuauaauaaugu

SEQ ID NO: 3344467 - RNA, 19 nt, Human
uaggguaagugagagaggg

SEQ ID NO: 3344468 - RNA, 11 nt, Human
acaaugcaaac

SEQ ID NO: 3344469 - RNA, 16 nt, Human
acaaugcaaaccauca

SEQ ID NO: 3344470 - RNA, 17 nt, Human
acaaugcaaaccaucau

SEQ ID NO: 3344471 - RNA, 18 nt, Human
acaaugcaaaccaucauu

SEQ ID NO: 3344472 - RNA, 22 nt, Human
acaaugacuuacuguacaugaa

SEQ ID NO: 3344473 - RNA, 20 nt, Human
acaaugacuuacuguacaug

SEQ ID NO: 3344474 - RNA, 19 nt, Human
acaaugacuuacuguacau

SEQ ID NO: 3344475 - RNA, 19 nt, Human
acaaugcaaaccaucauug

SEQ ID NO: 3344476 - RNA, 21 nt, Human
acaaugcaaaccaucauugaa

SEQ ID NO: 3344477 - RNA, 23 nt, Human
acaaugcaaaccaucauugaaau

SEQ ID NO: 3344478 - RNA, 12 nt, Human
acacacacacau

SEQ ID NO: 3344479 - RNA, 15 nt, Human
acacacacacauaca

SEQ ID NO: 3344480 - RNA, 14 nt, Human
acacacacacauac

SEQ ID NO: 3344481 - RNA, 13 nt, Human
acacacacacaua

SEQ ID NO: 3344482 - RNA, 20 nt, Human
uagccuuagaagucacacag

SEQ ID NO: 3344483 - RNA, 21 nt, Human
uagccuuagaagucacacagu

SEQ ID NO: 3344484 - RNA, 20 nt, Human
uagccugugccucugggacu

SEQ ID NO: 3344485 - RNA, 14 nt, Human
uagcgcccaguugg

SEQ ID NO: 3344486 - RNA, 17 nt, Human
uagcgcccaguugggug

SEQ ID NO: 3344487 - RNA, 13 nt, Human
uaggaaaaacuga

SEQ ID NO: 3344488 - RNA, 14 nt, Human
uaggaaaaacugau

SEQ ID NO: 3344489 - RNA, 13 nt, Human
uagggaagauaau

SEQ ID NO: 3344490 - RNA, 16 nt, Human
uaggaaaaacugauuu

SEQ ID NO: 3344491 - RNA, 17 nt, Human
uaggaaaaacugauuuu

SEQ ID NO: 3344492 - RNA, 17 nt, Human
cacaguucaauucucau

SEQ ID NO: 3344493 - RNA, 16 nt, Human
caauaggaaaaacuga

SEQ ID NO: 3344494 - RNA, 17 nt, Human
caauaggaaaaacugau

SEQ ID NO: 3344495 - RNA, 15 nt, Human
caauaggaaaaacug

SEQ ID NO: 3344496 - RNA, 14 nt, Human
caauaggaaaaacu

SEQ ID NO: 3344497 - RNA, 18 nt, Human
caaggcuuauauucaacc

SEQ ID NO: 3344498 - RNA, 17 nt, Human
caaggcuuauauucaac

SEQ ID NO: 3344499 - RNA, 17 nt, Human
caaggcugcagugagcc

SEQ ID NO: 3344500 - RNA, 22 nt, Human
caaggcugcagugagccgagau

SEQ ID NO: 3344501 - RNA, 17 nt, Human
caaggauccugagccag

SEQ ID NO: 3344502 - RNA, 15 nt, Human
caaggcugcagugag

SEQ ID NO: 3344503 - RNA, 20 nt, Human
caaggauccugagccagauu

SEQ ID NO: 3344504 - RNA, 16 nt, Human
caaggagauuuacaac

SEQ ID NO: 3344505 - RNA, 18 nt, Human
caaggauccugagccaga

SEQ ID NO: 3344506 - RNA, 19 nt, Human
caaggauccugagccagau

SEQ ID NO: 3344507 - RNA, 23 nt, Human
caagcuggucccacucaguccau

SEQ ID NO: 3344508 - RNA, 22 nt, Human
caagcuggucccacucagucca

SEQ ID NO: 3344509 - RNA, 20 nt, Human
caagcugcacccucaggcag

SEQ ID NO: 3344510 - RNA, 22 nt, Human
caagcugcacccucaggcaggu

SEQ ID NO: 3344511 - RNA, 21 nt, Human
caagcuggucccacucagucc

SEQ ID NO: 3344512 - RNA, 17 nt, Human
caagcgauucuucugcu

SEQ ID NO: 3344513 - RNA, 15 nt, Human
caagcgauucuucug

SEQ ID NO: 3344514 - RNA, 21 nt, Human
caagcugcacccucaggcagg

SEQ ID NO: 3344515 - RNA, 18 nt, Human
caagcgauucuucugcuu

SEQ ID NO: 3344516 - RNA, 21 nt, Human
cacagcucuucuccaggcugu

SEQ ID NO: 3344517 - RNA, 21 nt, Human
cacagaguuguuacauuuuua

SEQ ID NO: 3344518 - RNA, 22 nt, Human
cacagaguuguuacauuuuuaa

SEQ ID NO: 3344519 - RNA, 13 nt, Human
cacagaggcugcc

SEQ ID NO: 3344520 - RNA, 23 nt, Human
cacagaugggugcuuggaggaag

SEQ ID NO: 3344521 - RNA, 20 nt, Human
cacagagaaaguacuucucc

SEQ ID NO: 3344522 - RNA, 19 nt, Human
cacagagaaaguacuucuc

SEQ ID NO: 3344523 - RNA, 12 nt, Human
cacagagaaagu

SEQ ID NO: 3344524 - RNA, 19 nt, Human
caaugugaaaagaaaaaug

SEQ ID NO: 3344525 - RNA, 22 nt, Human
caaugugaaaagaaaaaugagc

SEQ ID NO: 3344526 - RNA, 14 nt, Human
caauguucucucuu

SEQ ID NO: 3344527 - RNA, 17 nt, Human
caauuacaggaaguacu

SEQ ID NO: 3344528 - RNA, 18 nt, Human
caauuacaggaaguacug

SEQ ID NO: 3344529 - RNA, 14 nt, Human
cacaaacagaggcc

SEQ ID NO: 3344530 - RNA, 13 nt, Human
cacaaacagaggc

SEQ ID NO: 3344531 - RNA, 18 nt, Human
cacaaaaguuucucuuuu

SEQ ID NO: 3344532 - RNA, 17 nt, Human
cacacacgcgugcacac

SEQ ID NO: 3344533 - RNA, 14 nt, Human
cacacacacauaca

SEQ ID NO: 3344534 - RNA, 13 nt, Human
cacacacacauac

SEQ ID NO: 3344535 - RNA, 12 nt, Human
cacacacacaua

SEQ ID NO: 3344536 - RNA, 15 nt, Human
cacacacacauacac

SEQ ID NO: 3344537 - RNA, 14 nt, Human
cacacacacacaua

SEQ ID NO: 3344538 - RNA, 13 nt, Human
cacaaaggagagc

SEQ ID NO: 3344539 - RNA, 13 nt, Human
caaacagaggccg

SEQ ID NO: 3344540 - RNA, 11 nt, Human
caaaaugaaac

SEQ ID NO: 3344541 - RNA, 22 nt, Human
caaaaugaaacgcaaccaccac

SEQ ID NO: 3344542 - RNA, 20 nt, Human
caaacucuugaccucaggug

SEQ ID NO: 3344543 - RNA, 19 nt, Human
caaacucuugaccucaggu

SEQ ID NO: 3344544 - RNA, 17 nt, Human
caaacucuugaccucag

SEQ ID NO: 3344545 - RNA, 21 nt, Human
caaacucuugaccucagguga

SEQ ID NO: 3344546 - RNA, 15 nt, Human
caaaacgguuuuacu

SEQ ID NO: 3344547 - RNA, 21 nt, Human
caaaacgguuuuacugcagcu

SEQ ID NO: 3344548 - RNA, 18 nt, Human
auuuuauuuuauuaugca

SEQ ID NO: 3344549 - RNA, 15 nt, Human
caaaacucuccucug

SEQ ID NO: 3344550 - RNA, 16 nt, Human
caaaacucuccucugc

SEQ ID NO: 3344551 - RNA, 23 nt, Human
caaaacucuccucugcugcuggc

SEQ ID NO: 3344552 - RNA, 14 nt, Human
caaaaguuucucuu

SEQ ID NO: 3344553 - RNA, 21 nt, Human
caaaaucgaugcagugcuucc

SEQ ID NO: 3344554 - RNA, 14 nt, Human
caaaauaaaacuuu

SEQ ID NO: 3344555 - RNA, 16 nt, Human
caaaauaaaacuuuuu

SEQ ID NO: 3344556 - RNA, 20 nt, Human
caaaauaaaacuuuuuaaaa

SEQ ID NO: 3344557 - RNA, 17 nt, Human
caacauacucccaucug

SEQ ID NO: 3344558 - RNA, 19 nt, Human
caacauacucccaucugug

SEQ ID NO: 3344559 - RNA, 12 nt, Human
caacaggcuggg

SEQ ID NO: 3344560 - RNA, 20 nt, Human
caacauacucccaucuguga

SEQ ID NO: 3344561 - RNA, 16 nt, Human
caacauacucccaucu

SEQ ID NO: 3344562 - RNA, 15 nt, Human
caaauuucuaaaucu

SEQ ID NO: 3344563 - RNA, 22 nt, Human
caaauuucuaaaucuccaaaau

SEQ ID NO: 3344564 - RNA, 14 nt, Human
caaauuucuaaauc

SEQ ID NO: 3344565 - RNA, 23 nt, Human
caaagugcugggauuacaagcgu

SEQ ID NO: 3344566 - RNA, 19 nt, Human
caaaguggugagaggcauc

SEQ ID NO: 3344567 - RNA, 19 nt, Human
caaagugcugggauuacaa

SEQ ID NO: 3344568 - RNA, 13 nt, Human
caaagugcuggga

SEQ ID NO: 3344569 - RNA, 23 nt, Human
caaauggaaaugggcagagcaga

SEQ ID NO: 3344570 - RNA, 22 nt, Human
caaauggaaaugggcagagcag

SEQ ID NO: 3344571 - RNA, 21 nt, Human
caagaccuucuccuucaccuu

SEQ ID NO: 3344572 - RNA, 23 nt, Human
caagaccuucuccuucaccuuug

SEQ ID NO: 3344573 - RNA, 13 nt, Human
caagacgcugugc

SEQ ID NO: 3344574 - RNA, 13 nt, Human
caagaagcccagg

SEQ ID NO: 3344575 - RNA, 22 nt, Human
ugaggaugaaaaaauaacacug

SEQ ID NO: 3344576 - RNA, 22 nt, Human
ugagccgagaucacgccacugc

SEQ ID NO: 3344577 - RNA, 23 nt, Human
ugagcagggcucagcggggacag

SEQ ID NO: 3344578 - RNA, 22 nt, Human
ugagcagggcucagcggggaca

SEQ ID NO: 3344579 - RNA, 20 nt, Human
ugagcagggcucagcgggga

SEQ ID NO: 3344580 - RNA, 23 nt, Human
ugagccgagaucacgccacugca

SEQ ID NO: 3344581 - RNA, 11 nt, Human
ugagcucagga

SEQ ID NO: 3344582 - RNA, 19 nt, Human
ugagcucaggaguuugaga

SEQ ID NO: 3344583 - RNA, 18 nt, Human
ugaggcucugcccuuggu

SEQ ID NO: 3344584 - RNA, 15 nt, Human
ugaggcugggcuccc

SEQ ID NO: 3344585 - RNA, 16 nt, Human
ugaggcugggcucccu

SEQ ID NO: 3344586 - RNA, 16 nt, Human
ugaggcucugcccuug

SEQ ID NO: 3344587 - RNA, 15 nt, Human
ugaggcucugcccuu

SEQ ID NO: 3344588 - RNA, 19 nt, Human
ugaggucagagccugcagu

SEQ ID NO: 3344589 - RNA, 18 nt, Human
ugaggucagagccugcag

SEQ ID NO: 3344590 - RNA, 21 nt, Human
ugaggcugggcucccuuccca

SEQ ID NO: 3344591 - RNA, 17 nt, Human
ugaggucagagccugca

SEQ ID NO: 3344592 - RNA, 21 nt, Human
ugaggugggaggaucucuuga

SEQ ID NO: 3344593 - RNA, 12 nt, Human
ugagguguacca

SEQ ID NO: 3344594 - RNA, 22 nt, Human
ugacuuuucuguccgagcuuug

SEQ ID NO: 3344595 - RNA, 15 nt, Human
ugagaaauaaaguuu

SEQ ID NO: 3344596 - RNA, 14 nt, Human
ugagaggggaacag

SEQ ID NO: 3344597 - RNA, 18 nt, Human
ugagaggggaacagacug

SEQ ID NO: 3344598 - RNA, 14 nt, Human
ugagaccaaccugg

SEQ ID NO: 3344599 - RNA, 13 nt, Human
ugaccauucucca

SEQ ID NO: 3344600 - RNA, 16 nt, Human
ugacuuuccucuuugg

SEQ ID NO: 3344601 - RNA, 21 nt, Human
ugacucuuucuauuguuucuu

SEQ ID NO: 3344602 - RNA, 23 nt, Human
ugaacuggguacuuguggacaca

SEQ ID NO: 3344603 - RNA, 20 nt, Human
ugaagacucauucuucugua

SEQ ID NO: 3344604 - RNA, 19 nt, Human
ugaagacucauucuucugu

SEQ ID NO: 3344605 - RNA, 16 nt, Human
ugaaggcuggguucug

SEQ ID NO: 3344606 - RNA, 17 nt, Human
ugaaggccccgcccagg

SEQ ID NO: 3344607 - RNA, 19 nt, Human
ugaaggccccgcccaggcu

SEQ ID NO: 3344608 - RNA, 20 nt, Human
ugaaggccccgcccaggcuu

SEQ ID NO: 3344609 - RNA, 18 nt, Human
ugaaggccccgcccaggc

SEQ ID NO: 3344610 - RNA, 20 nt, Human
ugaaggcuggguucugaucc

SEQ ID NO: 3344611 - RNA, 21 nt, Human
ugaaggcuggguucugauccu

SEQ ID NO: 3344612 - RNA, 23 nt, Human
ugaaugaugauccuaggcauuug

SEQ ID NO: 3344613 - RNA, 13 nt, Human
ugacaacacucau

SEQ ID NO: 3344614 - RNA, 23 nt, Human
ugacaacacucauugaccugagg

SEQ ID NO: 3344615 - RNA, 13 nt, Human
ugaauuguaagga

SEQ ID NO: 3344616 - RNA, 21 nt, Human
ugaauuguaaggaaugauuaa

SEQ ID NO: 3344617 - RNA, 23 nt, Human
ugacaaggauugcuacuguccua

SEQ ID NO: 3344618 - RNA, 18 nt, Human
ugacaaggauugcuacug

SEQ ID NO: 3344619 - RNA, 16 nt, Human
ugacagacacaggccc

SEQ ID NO: 3344620 - RNA, 14 nt, Human
ugacagacacaggc

SEQ ID NO: 3344621 - RNA, 13 nt, Human
ugacagacacagg

SEQ ID NO: 3344622 - RNA, 14 nt, Human
ugacacacagcucu

SEQ ID NO: 3344623 - RNA, 15 nt, Human
ugacacacagcucug

SEQ ID NO: 3344624 - RNA, 22 nt, Human
ugacagagcaagugagacccug

SEQ ID NO: 3344625 - RNA, 23 nt, Human
ugacaucaacugcaucaagaugu

SEQ ID NO: 3344626 - RNA, 18 nt, Human
ugacagacacaggcccgg

SEQ ID NO: 3344627 - RNA, 17 nt, Human
ugacagacacaggcccg

SEQ ID NO: 3344628 - RNA, 20 nt, Human
ugaccagcaccaucucuccu

SEQ ID NO: 3344629 - RNA, 22 nt, Human
ugaaaacacuguucucugcccu

SEQ ID NO: 3344630 - RNA, 23 nt, Human
ugaaaacacuguucucugcccuc

SEQ ID NO: 3344631 - RNA, 20 nt, Human
ugaaaacacauuuuucuuag

SEQ ID NO: 3344632 - RNA, 17 nt, Human
ugaaaacacuguucucu

SEQ ID NO: 3344633 - RNA, 20 nt, Human
ugaaaacacuguucucugcc

SEQ ID NO: 3344634 - RNA, 21 nt, Human
ugaaaacacuguucucugccc

SEQ ID NO: 3344635 - RNA, 21 nt, Human
ugaaaacacauuuuucuuagg

SEQ ID NO: 3344636 - RNA, 19 nt, Human
ugaaaagaaaaaugagccu

SEQ ID NO: 3344637 - RNA, 15 nt, Human
ugaaaagaaaaauga

SEQ ID NO: 3344638 - RNA, 20 nt, Human
ugaaaagaaaaaugagccug

SEQ ID NO: 3344639 - RNA, 14 nt, Human
ugaaaauucagugg

SEQ ID NO: 3344640 - RNA, 14 nt, Human
ucuuuggacccuga

SEQ ID NO: 3344641 - RNA, 15 nt, Human
ucuuuggacccugag

SEQ ID NO: 3344642 - RNA, 13 nt, Human
ucuuuggacccug

SEQ ID NO: 3344643 - RNA, 17 nt, Human
ucuuugcagacaggcaa

SEQ ID NO: 3344644 - RNA, 14 nt, Human
ucuuugcagacagg

SEQ ID NO: 3344645 - RNA, 13 nt, Human
ucuuugcagacag

SEQ ID NO: 3344646 - RNA, 23 nt, Human
ucuuuccaaaguacacuguuuca

SEQ ID NO: 3344647 - RNA, 13 nt, Human
ucuuguguguuua

SEQ ID NO: 3344648 - RNA, 13 nt, Human
ucuuucccucccu

SEQ ID NO: 3344649 - RNA, 17 nt, Human
ucuuuccaaaguacacu

SEQ ID NO: 3344650 - RNA, 12 nt, Human
ucuuucccuccc

SEQ ID NO: 3344651 - RNA, 20 nt, Human
ucuuagguuggcaaaaaggc

SEQ ID NO: 3344652 - RNA, 23 nt, Human
ucuuagguuggcaaaaaggcagg

SEQ ID NO: 3344653 - RNA, 20 nt, Human
ucugugucagguggggcagc

SEQ ID NO: 3344654 - RNA, 17 nt, Human
ucugugucagguggggc

SEQ ID NO: 3344655 - RNA, 15 nt, Human
ucuuagauguauaua

SEQ ID NO: 3344656 - RNA, 14 nt, Human
ucuuagauguauau

SEQ ID NO: 3344657 - RNA, 22 nt, Human
ucuuauccaacaucaacaucuu

SEQ ID NO: 3344658 - RNA, 14 nt, Human
ucuucagaucucua

SEQ ID NO: 3344659 - RNA, 20 nt, Human
ucuucagagacuccugcagg

SEQ ID NO: 3344660 - RNA, 21 nt, Human
ucuucagagacuccugcaggc

SEQ ID NO: 3344661 - RNA, 14 nt, Human
ucuugcucugcuga

SEQ ID NO: 3344662 - RNA, 23 nt, Human
ucuugcucugcugacagacacag

SEQ ID NO: 3344663 - RNA, 15 nt, Human
ucuugcucugcugac

SEQ ID NO: 3344664 - RNA, 13 nt, Human
ucuugcucugcug

SEQ ID NO: 3344665 - RNA, 15 nt, Human
ucuugcaugaggcua

SEQ ID NO: 3344666 - RNA, 13 nt, Human
ucuugaagacuuu

SEQ ID NO: 3344667 - RNA, 22 nt, Human
ucuugaagacuuuucuuucagc

SEQ ID NO: 3344668 - RNA, 20 nt, Human
ucuugaaauauaggaacuua

SEQ ID NO: 3344669 - RNA, 21 nt, Human
ucuugaaauauaggaacuuaa

SEQ ID NO: 3344670 - RNA, 18 nt, Human
ucugagaggacuuuucuu

SEQ ID NO: 3344671 - RNA, 19 nt, Human
ucugacccaugcugcccug

SEQ ID NO: 3344672 - RNA, 20 nt, Human
ucugacccaugcugcccugu

SEQ ID NO: 3344673 - RNA, 22 nt, Human
ucugacccaugcugcccuguga

SEQ ID NO: 3344674 - RNA, 21 nt, Human
ucugcaagaauugaagcagga

SEQ ID NO: 3344675 - RNA, 21 nt, Human
ucugaggaauccagacccggc

SEQ ID NO: 3344676 - RNA, 18 nt, Human
ucugaggaauccagaccc

SEQ ID NO: 3344677 - RNA, 22 nt, Human
ucugaggaauccagacccggcu

SEQ ID NO: 3344678 - RNA, 17 nt, Human
ucugaggaauccagacc

SEQ ID NO: 3344679 - RNA, 13 nt, Human
ucugcccacuccc

SEQ ID NO: 3344680 - RNA, 14 nt, Human
ucugcccacucccu

SEQ ID NO: 3344681 - RNA, 12 nt, Human
ucugccucccau

SEQ ID NO: 3344682 - RNA, 13 nt, Human
ucugccucccauc

SEQ ID NO: 3344683 - RNA, 15 nt, Human
ucugccucccaucac

SEQ ID NO: 3344684 - RNA, 23 nt, Human
ucugccauauucuguuggccagu

SEQ ID NO: 3344685 - RNA, 22 nt, Human
ucugccauauucuguuggccag

SEQ ID NO: 3344686 - RNA, 12 nt, Human
ucugcccacucc

SEQ ID NO: 3344687 - RNA, 18 nt, Human
ucugccauauucuguugg

SEQ ID NO: 3344688 - RNA, 20 nt, Human
ucugccugaagucacacagu

SEQ ID NO: 3344689 - RNA, 19 nt, Human
ucugccugaagucacacag

SEQ ID NO: 3344690 - RNA, 22 nt, Human
ucugccucugacacacagcucu

SEQ ID NO: 3344691 - RNA, 21 nt, Human
ucugccucugacacacagcuc

SEQ ID NO: 3344692 - RNA, 23 nt, Human
ucugccucugacacacagcucug

SEQ ID NO: 3344693 - RNA, 16 nt, Human
ucugccucccaucacc

SEQ ID NO: 3344694 - RNA, 17 nt, Human
ucugccucccaucaccc

SEQ ID NO: 3344695 - RNA, 20 nt, Human
ucugccucccaucacccgcu

SEQ ID NO: 3344696 - RNA, 21 nt, Human
ucugccucccaucacccgcua

SEQ ID NO: 3344697 - RNA, 18 nt, Human
ucugccucugacacacag

SEQ ID NO: 3344698 - RNA, 15 nt, Human
ucugccucugacaca

SEQ ID NO: 3344699 - RNA, 16 nt, Human
ucuggaaugcaguggu

SEQ ID NO: 3344700 - RNA, 14 nt, Human
ucugcugcuggcug

SEQ ID NO: 3344701 - RNA, 15 nt, Human
ucugcugcuggcugg

SEQ ID NO: 3344702 - RNA, 17 nt, Human
ucugcugcuggcugguu

SEQ ID NO: 3344703 - RNA, 20 nt, Human
ucugccugcccaggccccug

SEQ ID NO: 3344704 - RNA, 18 nt, Human
ucugccugcccaggcccc

SEQ ID NO: 3344705 - RNA, 17 nt, Human
ucugccugcccaggccc

SEQ ID NO: 3344706 - RNA, 16 nt, Human
ucugccugcccaggcc

SEQ ID NO: 3344707 - RNA, 21 nt, Human
ucugcuccucuccccagcaag

SEQ ID NO: 3344708 - RNA, 11 nt, Human
ucugcugcugg

SEQ ID NO: 3344709 - RNA, 13 nt, Human
ucugcugcuggcu

SEQ ID NO: 3344710 - RNA, 17 nt, Human
ucugucgcccagucugg

SEQ ID NO: 3344711 - RNA, 12 nt, Human
ucuguccuggga

SEQ ID NO: 3344712 - RNA, 14 nt, Human
ucuguacagagccc

SEQ ID NO: 3344713 - RNA, 15 nt, Human
ucuguacagagccca

SEQ ID NO: 3344714 - RNA, 20 nt, Human
ucuguccuacucugugucag

SEQ ID NO: 3344715 - RNA, 13 nt, Human
ucugucuaggaau

SEQ ID NO: 3344716 - RNA, 16 nt, Human
ucugucgcccagucug

SEQ ID NO: 3344717 - RNA, 22 nt, Human
uccacugugccaugugccaggu

SEQ ID NO: 3344718 - RNA, 21 nt, Human
uccacugugccaugugccagg

SEQ ID NO: 3344719 - RNA, 14 nt, Human
uccacccugcucuc

SEQ ID NO: 3344720 - RNA, 13 nt, Human
uccacccugcucu

SEQ ID NO: 3344721 - RNA, 21 nt, Human
uccacccugcucuccgaccag

SEQ ID NO: 3344722 - RNA, 14 nt, Human
uccacuuucuagcc

SEQ ID NO: 3344723 - RNA, 20 nt, Human
uccacaagagcccaggccuc

SEQ ID NO: 3344724 - RNA, 19 nt, Human
uccacaagagcccaggccu

SEQ ID NO: 3344725 - RNA, 21 nt, Human
uccacaagagcccaggccucc

SEQ ID NO: 3344726 - RNA, 15 nt, Human
uccaagaagcccagg

SEQ ID NO: 3344727 - RNA, 16 nt, Human
uccaagaagcccagga

SEQ ID NO: 3344728 - RNA, 14 nt, Human
uccaagaagcccag

SEQ ID NO: 3344729 - RNA, 12 nt, Human
uccaagaagccc

SEQ ID NO: 3344730 - RNA, 19 nt, Human
uccaagaccuucuccuuca

SEQ ID NO: 3344731 - RNA, 20 nt, Human
uccaagaccuucuccuucac

SEQ ID NO: 3344732 - RNA, 14 nt, Human
uccaagcaggacau

SEQ ID NO: 3344733 - RNA, 17 nt, Human
ucccaggcauuccccag

SEQ ID NO: 3344734 - RNA, 18 nt, Human
ucccaggcauuccccagg

SEQ ID NO: 3344735 - RNA, 16 nt, Human
ucccaugagccucagc

SEQ ID NO: 3344736 - RNA, 15 nt, Human
ucccaugagccucag

SEQ ID NO: 3344737 - RNA, 14 nt, Human
ucccacucagucca

SEQ ID NO: 3344738 - RNA, 18 nt, Human
ucccaccuuggcugcagg

SEQ ID NO: 3344739 - RNA, 21 nt, Human
ucccaccuuggcugcagggag

SEQ ID NO: 3344740 - RNA, 19 nt, Human
ucccaccuuggcugcaggg

SEQ ID NO: 3344741 - RNA, 17 nt, Human
ucccaccucucucacuc

SEQ ID NO: 3344742 - RNA, 18 nt, Human
ucccaccucucucacucc

SEQ ID NO: 3344743 - RNA, 14 nt, Human
ucccaccucucuca

SEQ ID NO: 3344744 - RNA, 16 nt, Human
ucccaccucagccucc

SEQ ID NO: 3344745 - RNA, 18 nt, Human
ucccaccucagccucccg

SEQ ID NO: 3344746 - RNA, 15 nt, Human
uccauagagagcaag

SEQ ID NO: 3344747 - RNA, 17 nt, Human
uccauagagagcaagac

SEQ ID NO: 3344748 - RNA, 20 nt, Human
uccauagagagcaagacgcu

SEQ ID NO: 3344749 - RNA, 19 nt, Human
ucccaacucaccccagccc

SEQ ID NO: 3344750 - RNA, 21 nt, Human
ucccaacucaccccagcccca

SEQ ID NO: 3344751 - RNA, 17 nt, Human
ucccaacucaccccagc

SEQ ID NO: 3344752 - RNA, 18 nt, Human
ucccaacucaccccagcc

SEQ ID NO: 3344753 - RNA, 15 nt, Human
ucauacucaccucac

SEQ ID NO: 3344754 - RNA, 17 nt, Human
ucagucugauucccaag

SEQ ID NO: 3344755 - RNA, 18 nt, Human
ucagugugacugaucucu

SEQ ID NO: 3344756 - RNA, 21 nt, Human
ucagguggggcagcuugaggg

SEQ ID NO: 3344757 - RNA, 16 nt, Human
ucagguggggcagcuu

SEQ ID NO: 3344758 - RNA, 15 nt, Human
ucagguggggcagcu

SEQ ID NO: 3344759 - RNA, 20 nt, Human
ucaggugcugccauccaggu

SEQ ID NO: 3344760 - RNA, 18 nt, Human
ucaggugcugccauccag

SEQ ID NO: 3344761 - RNA, 14 nt, Human
ucagguggggcagc

SEQ ID NO: 3344762 - RNA, 17 nt, Human
ucagguggggucacucu

SEQ ID NO: 3344763 - RNA, 20 nt, Human
ucagguggggucacucuggc

SEQ ID NO: 3344764 - RNA, 15 nt, Human
ucaggugcugccauc

SEQ ID NO: 3344765 - RNA, 15 nt, Human
ucaguccauagcaga

SEQ ID NO: 3344766 - RNA, 15 nt, Human
ucagcugcuacuacu

SEQ ID NO: 3344767 - RNA, 21 nt, Human
ucagcuccagcucaccagccc

SEQ ID NO: 3344768 - RNA, 18 nt, Human
ucagcuccagcucaccag

SEQ ID NO: 3344769 - RNA, 15 nt, Human
ucagcuccagcucac

SEQ ID NO: 3344770 - RNA, 16 nt, Human
ucagccugcuccagcu

SEQ ID NO: 3344771 - RNA, 12 nt, Human
ucagccucccga

SEQ ID NO: 3344772 - RNA, 22 nt, Human
ucagccucccaaagugcuggga

SEQ ID NO: 3344773 - RNA, 12 nt, Human
ucagccucccaa

SEQ ID NO: 3344774 - RNA, 21 nt, Human
ucagccucccaaagugcuggg

SEQ ID NO: 3344775 - RNA, 18 nt, Human
ucagcauccuggcacccg

SEQ ID NO: 3344776 - RNA, 17 nt, Human
ucagcauccuggcaccc

SEQ ID NO: 3344777 - RNA, 16 nt, Human
ucagcauccuggcacc

SEQ ID NO: 3344778 - RNA, 15 nt, Human
ucagcauccuggcac

SEQ ID NO: 3344779 - RNA, 15 nt, Human
ucagcacgauuucug

SEQ ID NO: 3344780 - RNA, 16 nt, Human
ucagcacgauuucugu

SEQ ID NO: 3344781 - RNA, 17 nt, Human
ucagcacgauuucuguu

SEQ ID NO: 3344782 - RNA, 18 nt, Human
uccuuugugaggaagccg

SEQ ID NO: 3344783 - RNA, 22 nt, Human
uccuuugugaggaagccgcugg

SEQ ID NO: 3344784 - RNA, 17 nt, Human
uccuuugugaggaagcc

SEQ ID NO: 3344785 - RNA, 18 nt, Human
uccuuggugucgggcaug

SEQ ID NO: 3344786 - RNA, 21 nt, Human
uccuuggugucgggcaugaca

SEQ ID NO: 3344787 - RNA, 22 nt, Human
uccuugaaaacacuguucucug

SEQ ID NO: 3344788 - RNA, 23 nt, Human
uccuugaaaacacuguucucugc

SEQ ID NO: 3344789 - RNA, 20 nt, Human
uccuuaccagcagagcaccu

SEQ ID NO: 3344790 - RNA, 21 nt, Human
uccuuaccagcagagcaccuu

SEQ ID NO: 3344791 - RNA, 18 nt, Human
uccuuuucgcaggauucu

SEQ ID NO: 3344792 - RNA, 22 nt, Human
uccuuuucgcaggauucuuccu

SEQ ID NO: 3344793 - RNA, 23 nt, Human
ucgcaggauucuuccucccuccc

SEQ ID NO: 3344794 - RNA, 21 nt, Human
ucgcaggauucuuccucccuc

SEQ ID NO: 3344795 - RNA, 17 nt, Human
ucgcaggauucuuccuc

SEQ ID NO: 3344796 - RNA, 15 nt, Human
ucggaaaacaugcua

SEQ ID NO: 3344797 - RNA, 18 nt, Human
ucggaaaacaugcuacac

SEQ ID NO: 3344798 - RNA, 23 nt, Human
ucgcccagucuggaaugcagugg

SEQ ID NO: 3344799 - RNA, 19 nt, Human
ucgcccagucuggaaugca

SEQ ID NO: 3344800 - RNA, 14 nt, Human
ucgcccagucugga

SEQ ID NO: 3344801 - RNA, 23 nt, Human
ucgucacugcuuaacuucacaua

SEQ ID NO: 3344802 - RNA, 14 nt, Human
ucucaaauuucuaa

SEQ ID NO: 3344803 - RNA, 16 nt, Human
ucucaaauuucuaaau

SEQ ID NO: 3344804 - RNA, 13 nt, Human
ucucaaauuucua

SEQ ID NO: 3344805 - RNA, 16 nt, Human
ucucacacaugagcau

SEQ ID NO: 3344806 - RNA, 20 nt, Human
ucucacugccaugccagcuu

SEQ ID NO: 3344807 - RNA, 22 nt, Human
ucucacucugucgcccagucug

SEQ ID NO: 3344808 - RNA, 21 nt, Human
ucucacacaugagcaucaggc

SEQ ID NO: 3344809 - RNA, 23 nt, Human
ucucacucugucgcccagucugg

SEQ ID NO: 3344810 - RNA, 15 nt, Human
ucucacuguugccca

SEQ ID NO: 3344811 - RNA, 14 nt, Human
ucucacuguugccc

SEQ ID NO: 3344812 - RNA, 18 nt, Human
ucuacucuagggaaaaac

SEQ ID NO: 3344813 - RNA, 18 nt, Human
ucuaggaggucucuaaga

SEQ ID NO: 3344814 - RNA, 20 nt, Human
ucuacucgaguuacagacaa

SEQ ID NO: 3344815 - RNA, 21 nt, Human
ucuacucgaguuacagacaaa

SEQ ID NO: 3344816 - RNA, 12 nt, Human
ucuagggaaaaa

SEQ ID NO: 3344817 - RNA, 14 nt, Human
ucuaauauguaaca

SEQ ID NO: 3344818 - RNA, 21 nt, Human
uccgcuuucuacccagcgagc

SEQ ID NO: 3344819 - RNA, 20 nt, Human
uccgcuuucuacccagcgag

SEQ ID NO: 3344820 - RNA, 22 nt, Human
uccgaaagggacuuggaagcuc

SEQ ID NO: 3344821 - RNA, 17 nt, Human
uccgaccagacaccuug

SEQ ID NO: 3344822 - RNA, 21 nt, Human
uccgaaagggacuuggaagcu

SEQ ID NO: 3344823 - RNA, 17 nt, Human
ucccuucccaccucucu

SEQ ID NO: 3344824 - RNA, 21 nt, Human
ucccuucccacuggaggcaug

SEQ ID NO: 3344825 - RNA, 14 nt, Human
ucccuucccaccuc

SEQ ID NO: 3344826 - RNA, 16 nt, Human
ucccuucccaccucuc

SEQ ID NO: 3344827 - RNA, 14 nt, Human
ucccugccaaugga

SEQ ID NO: 3344828 - RNA, 16 nt, Human
ucccugccaauggacu

SEQ ID NO: 3344829 - RNA, 13 nt, Human
ucccucuggggcu

SEQ ID NO: 3344830 - RNA, 17 nt, Human
ucccucuggggcuguuc

SEQ ID NO: 3344831 - RNA, 20 nt, Human
ucccugcacuugcagacucu

SEQ ID NO: 3344832 - RNA, 18 nt, Human
ucccucccuuccucuuuc

SEQ ID NO: 3344833 - RNA, 22 nt, Human
ucccaugagccucagcauccug

SEQ ID NO: 3344834 - RNA, 16 nt, Human
uccuaagcuauucagu

SEQ ID NO: 3344835 - RNA, 14 nt, Human
uccuaguuccacca

SEQ ID NO: 3344836 - RNA, 17 nt, Human
uccuaguuccaccauca

SEQ ID NO: 3344837 - RNA, 12 nt, Human
uccuaguuccac

SEQ ID NO: 3344838 - RNA, 21 nt, Human
uccuaguuccaccaucaagcc

SEQ ID NO: 3344839 - RNA, 14 nt, Human
uccuccaggugcac

SEQ ID NO: 3344840 - RNA, 18 nt, Human
uccuccaggugcacaagc

SEQ ID NO: 3344841 - RNA, 20 nt, Human
uccuccaggugcacaagcuc

SEQ ID NO: 3344842 - RNA, 22 nt, Human
uccuccaggugcacaagcucca

SEQ ID NO: 3344843 - RNA, 12 nt, Human
uccuccaggugc

SEQ ID NO: 3344844 - RNA, 13 nt, Human
uccuccaggugca

SEQ ID NO: 3344845 - RNA, 10 nt, Human
uccuccaggu

SEQ ID NO: 3344846 - RNA, 12 nt, Human
uccuccucagau

SEQ ID NO: 3344847 - RNA, 17 nt, Human
uccucugcugcuggcug

SEQ ID NO: 3344848 - RNA, 13 nt, Human
uccucuguacaga

SEQ ID NO: 3344849 - RNA, 15 nt, Human
uccucuggccugugu

SEQ ID NO: 3344850 - RNA, 21 nt, Human
uccuccuuuucacaguucucu

SEQ ID NO: 3344851 - RNA, 19 nt, Human
uccuccuuuucacaguucu

SEQ ID NO: 3344852 - RNA, 21 nt, Human
uccucuaggaggucucuaaga

SEQ ID NO: 3344853 - RNA, 17 nt, Human
uccucuaggaggucucu

SEQ ID NO: 3344854 - RNA, 17 nt, Human
uccugagccagauuuca

SEQ ID NO: 3344855 - RNA, 23 nt, Human
uccucuguacagagcccacgccc

SEQ ID NO: 3344856 - RNA, 19 nt, Human
uccucuguacagagcccac

SEQ ID NO: 3344857 - RNA, 18 nt, Human
uccugagccagauuucac

SEQ ID NO: 3344858 - RNA, 19 nt, Human
uccugagccagauuucacu

SEQ ID NO: 3344859 - RNA, 14 nt, Human
uccugagccagauu

SEQ ID NO: 3344860 - RNA, 15 nt, Human
uccugaggcugggcu

SEQ ID NO: 3344861 - RNA, 16 nt, Human
uccugaggcugggcuc

SEQ ID NO: 3344862 - RNA, 17 nt, Human
uccugaggcugggcucc

SEQ ID NO: 3344863 - RNA, 19 nt, Human
uccugaggcugggcucccu

SEQ ID NO: 3344864 - RNA, 12 nt, Human
uccugaggcugg

SEQ ID NO: 3344865 - RNA, 21 nt, Human
uggccagaugcaccagcccuu

SEQ ID NO: 3344866 - RNA, 20 nt, Human
uggccagaugcaccagcccu

SEQ ID NO: 3344867 - RNA, 23 nt, Human
uggcagcugcgguccacccagga

SEQ ID NO: 3344868 - RNA, 13 nt, Human
uggcagcugcuuu

SEQ ID NO: 3344869 - RNA, 21 nt, Human
uggcacccggccccugcuggu

SEQ ID NO: 3344870 - RNA, 20 nt, Human
uggauuuaacagaaauguac

SEQ ID NO: 3344871 - RNA, 24 nt, Human
uggauuuaacagaaauguacagca

SEQ ID NO: 3344872 - RNA, 17 nt, Human
uggauuuaacagaaaug

SEQ ID NO: 3344873 - RNA, 12 nt, Human
uggaggaaggaa

SEQ ID NO: 3344874 - RNA, 18 nt, Human
uggaggaaggaaacccag

SEQ ID NO: 3344875 - RNA, 17 nt, Human
uggaaaaauagccugcc

SEQ ID NO: 3344876 - RNA, 20 nt, Human
uggaaaaauagccugccucu

SEQ ID NO: 3344877 - RNA, 21 nt, Human
uggaaagacuuuuccaacccu

SEQ ID NO: 3344878 - RNA, 20 nt, Human
uggaaagaguaggaagacuu

SEQ ID NO: 3344879 - RNA, 15 nt, Human
uggaauauauaacca

SEQ ID NO: 3344880 - RNA, 16 nt, Human
uggaauauauaaccag

SEQ ID NO: 3344881 - RNA, 17 nt, Human
uggaauaaggagaauga

SEQ ID NO: 3344882 - RNA, 19 nt, Human
uggaauaacauguaauuaa

SEQ ID NO: 3344883 - RNA, 15 nt, Human
uggaauaacauguaa

SEQ ID NO: 3344884 - RNA, 14 nt, Human
uggaauaacaugua

SEQ ID NO: 3344885 - RNA, 13 nt, Human
uggacaugcacag

SEQ ID NO: 3344886 - RNA, 19 nt, Human
uggacaugcacagcuaaca

SEQ ID NO: 3344887 - RNA, 20 nt, Human
uggacuaacuugucuuugga

SEQ ID NO: 3344888 - RNA, 19 nt, Human
ugggguuuaucagaauucu

SEQ ID NO: 3344889 - RNA, 15 nt, Human
uggguucuacccagg

SEQ ID NO: 3344890 - RNA, 16 nt, Human
uggguucuacccaggu

SEQ ID NO: 3344891 - RNA, 22 nt, Human
uggguucuacccaggugcuagg

SEQ ID NO: 3344892 - RNA, 14 nt, Human
uggguguggcgcag

SEQ ID NO: 3344893 - RNA, 21 nt, Human
uggguuucuaaagcugccagc

SEQ ID NO: 3344894 - RNA, 17 nt, Human
uggguuucuaaagcugc

SEQ ID NO: 3344895 - RNA, 18 nt, Human
uggguuucuaaagcugcc

SEQ ID NO: 3344896 - RNA, 23 nt, Human
ugguauuggcuagagguucaaag

SEQ ID NO: 3344897 - RNA, 15 nt, Human
ugggcuucaguggca

SEQ ID NO: 3344898 - RNA, 21 nt, Human
ugggcuugucuguagauuuua

SEQ ID NO: 3344899 - RNA, 16 nt, Human
ugggcagaggaaagca

SEQ ID NO: 3344900 - RNA, 22 nt, Human
ugggcuaagugauccucccacc

SEQ ID NO: 3344901 - RNA, 23 nt, Human
ugggcuggguucuacccaggugc

SEQ ID NO: 3344902 - RNA, 17 nt, Human
ugggcuggugucaccug

SEQ ID NO: 3344903 - RNA, 16 nt, Human
ugggcuaguugggcuu

SEQ ID NO: 3344904 - RNA, 21 nt, Human
ugggggaucacagccucugaa

SEQ ID NO: 3344905 - RNA, 20 nt, Human
ugggggaucacagccucuga

SEQ ID NO: 3344906 - RNA, 17 nt, Human
ugggggcugggcagagg

SEQ ID NO: 3344907 - RNA, 18 nt, Human
ugggggcugggcagagga

SEQ ID NO: 3344908 - RNA, 12 nt, Human
ugggggugcauu

SEQ ID NO: 3344909 - RNA, 15 nt, Human
ugggggugcauuuga

SEQ ID NO: 3344910 - RNA, 20 nt, Human
uggcugggggccucagugcc

SEQ ID NO: 3344911 - RNA, 21 nt, Human
uggcugggggccucagugcca

SEQ ID NO: 3344912 - RNA, 16 nt, Human
uggcugcuucaaggau

SEQ ID NO: 3344913 - RNA, 21 nt, Human
uggcugcuucaaggauccuga

SEQ ID NO: 3344914 - RNA, 14 nt, Human
uggcuuuugugcau

SEQ ID NO: 3344915 - RNA, 22 nt, Human
uggcuuccuaaaauucagugga

SEQ ID NO: 3344916 - RNA, 13 nt, Human
ugggagcaaaaga

SEQ ID NO: 3344917 - RNA, 16 nt, Human
ugggagagccuuccag

SEQ ID NO: 3344918 - RNA, 14 nt, Human
ugggagcugccugu

SEQ ID NO: 3344919 - RNA, 13 nt, Human
ugggagcugccug

SEQ ID NO: 3344920 - RNA, 12 nt, Human
ugggagcugccu

SEQ ID NO: 3344921 - RNA, 12 nt, Human
ugggacacccug

SEQ ID NO: 3344922 - RNA, 16 nt, Human
ugggauuacaggugug

SEQ ID NO: 3344923 - RNA, 18 nt, Human
ugggauccuccaggugca

SEQ ID NO: 3344924 - RNA, 13 nt, Human
ugggauccuggag

SEQ ID NO: 3344925 - RNA, 15 nt, Human
ugggcagaggaaagc

SEQ ID NO: 3344926 - RNA, 21 nt, Human
ugggagcugccuguucagcuc

SEQ ID NO: 3344927 - RNA, 17 nt, Human
ugggagcugccuguuca

SEQ ID NO: 3344928 - RNA, 22 nt, Human
ugggagcugccuguucagcucc

SEQ ID NO: 3344929 - RNA, 15 nt, Human
ugggagugagcuggu

SEQ ID NO: 3344930 - RNA, 15 nt, Human
ugggauccuccaggu

SEQ ID NO: 3344931 - RNA, 14 nt, Human
ugggauccuccagg

SEQ ID NO: 3344932 - RNA, 20 nt, Human
ugccauccagguucagcuug

SEQ ID NO: 3344933 - RNA, 21 nt, Human
ugccauccagguucagcuugu

SEQ ID NO: 3344934 - RNA, 13 nt, Human
ugcccacucccug

SEQ ID NO: 3344935 - RNA, 13 nt, Human
ugcccaccuggcc

SEQ ID NO: 3344936 - RNA, 14 nt, Human
ugcccacucccugc

SEQ ID NO: 3344937 - RNA, 15 nt, Human
ugcccacucccugca

SEQ ID NO: 3344938 - RNA, 16 nt, Human
ugcccacucccugcaa

SEQ ID NO: 3344939 - RNA, 11 nt, Human
ugcccaggcug

SEQ ID NO: 3344940 - RNA, 23 nt, Human
ugccccucaacucuccuccagag

SEQ ID NO: 3344941 - RNA, 17 nt, Human
ugccccuggcagccccu

SEQ ID NO: 3344942 - RNA, 19 nt, Human
ugccccucaacucuccucc

SEQ ID NO: 3344943 - RNA, 14 nt, Human
ugcaucaagaugug

SEQ ID NO: 3344944 - RNA, 22 nt, Human
ugccagguuuuuggucugaccc

SEQ ID NO: 3344945 - RNA, 19 nt, Human
ugccagguuuuuggucuga

SEQ ID NO: 3344946 - RNA, 18 nt, Human
ugccagguuuuuggucug

SEQ ID NO: 3344947 - RNA, 22 nt, Human
ugccacuacggaauaguuggcu

SEQ ID NO: 3344948 - RNA, 19 nt, Human
ugccacccuggggagaaag

SEQ ID NO: 3344949 - RNA, 20 nt, Human
ugcagcaauaaagcagcguu

SEQ ID NO: 3344950 - RNA, 23 nt, Human
ugcagcaauaaagcagcguuucu

SEQ ID NO: 3344951 - RNA, 12 nt, Human
ugcacuuuguuc

SEQ ID NO: 3344952 - RNA, 19 nt, Human
ugaguccccuguuuguuuc

SEQ ID NO: 3344953 - RNA, 23 nt, Human
ugcaccggcuggccuggccccuc

SEQ ID NO: 3344954 - RNA, 15 nt, Human
ugcaccgggccacag

SEQ ID NO: 3344955 - RNA, 14 nt, Human
ugcaccgggccaca

SEQ ID NO: 3344956 - RNA, 22 nt, Human
ugcaccgggccacagagaaagu

SEQ ID NO: 3344957 - RNA, 17 nt, Human
ugcaccgggccacagag

SEQ ID NO: 3344958 - RNA, 21 nt, Human
ugcaccggcuggccuggcccc

SEQ ID NO: 3344959 - RNA, 22 nt, Human
ugcagugguaugaucacggcuc

SEQ ID NO: 3344960 - RNA, 13 nt, Human
ugcaguugccagu

SEQ ID NO: 3344961 - RNA, 14 nt, Human
ugcaguugccaguc

SEQ ID NO: 3344962 - RNA, 13 nt, Human
ugcaggcagccag

SEQ ID NO: 3344963 - RNA, 14 nt, Human
ugcaggcagccagg

SEQ ID NO: 3344964 - RNA, 19 nt, Human
ugcaggcagccaggccaca

SEQ ID NO: 3344965 - RNA, 16 nt, Human
ugcagugcuuccaagg

SEQ ID NO: 3344966 - RNA, 15 nt, Human
ugcugauggugcaau

SEQ ID NO: 3344967 - RNA, 17 nt, Human
ugcugauggugcaauga

SEQ ID NO: 3344968 - RNA, 13 nt, Human
ugcugauggugca

SEQ ID NO: 3344969 - RNA, 12 nt, Human
ugcugaaggcuc

SEQ ID NO: 3344970 - RNA, 13 nt, Human
ugcugaaggcucg

SEQ ID NO: 3344971 - RNA, 19 nt, Human
ugcugacagacacaggccc

SEQ ID NO: 3344972 - RNA, 23 nt, Human
ugcugacagacacaggcccggcu

SEQ ID NO: 3344973 - RNA, 22 nt, Human
ugcugacagacacaggcccggc

SEQ ID NO: 3344974 - RNA, 16 nt, Human
ugcugcaguugccagu

SEQ ID NO: 3344975 - RNA, 18 nt, Human
ugcugcaguugccaguca

SEQ ID NO: 3344976 - RNA, 23 nt, Human
ugcugcaguugccagucaccccg

SEQ ID NO: 3344977 - RNA, 13 nt, Human
ugcugcuggcugg

SEQ ID NO: 3344978 - RNA, 17 nt, Human
ugcuccucuccccagca

SEQ ID NO: 3344979 - RNA, 18 nt, Human
ugcuccuuucuuguuuua

SEQ ID NO: 3344980 - RNA, 14 nt, Human
ugcuccucucccca

SEQ ID NO: 3344981 - RNA, 16 nt, Human
ugcucacauaucuguc

SEQ ID NO: 3344982 - RNA, 15 nt, Human
ugcucacauaucugu

SEQ ID NO: 3344983 - RNA, 16 nt, Human
ugcgccuacaggagug

SEQ ID NO: 3344984 - RNA, 14 nt, Human
ugcgccuacaggag

SEQ ID NO: 3344985 - RNA, 22 nt, Human
ugcgccuacaggagugagcacu

SEQ ID NO: 3344986 - RNA, 13 nt, Human
ugcgccuacagga

SEQ ID NO: 3344987 - RNA, 15 nt, Human
ugcuaaaugugaaug

SEQ ID NO: 3344988 - RNA, 21 nt, Human
ugcgaucuggguucacugcaa

SEQ ID NO: 3344989 - RNA, 20 nt, Human
ugcgaucuggguucacugca

SEQ ID NO: 3344990 - RNA, 19 nt, Human
ugcgaucuggguucacugc

SEQ ID NO: 3344991 - RNA, 15 nt, Human
ugcgaucuggguuca

SEQ ID NO: 3344992 - RNA, 14 nt, Human
ugcgaucuggguuc

SEQ ID NO: 3344993 - RNA, 19 nt, Human
ugccucgaacuggcugcaa

SEQ ID NO: 3344994 - RNA, 18 nt, Human
ugccucgaacuggcugca

SEQ ID NO: 3344995 - RNA, 20 nt, Human
ugccucgaacuggcugcaaa

SEQ ID NO: 3344996 - RNA, 18 nt, Human
ugccccuggcagccccug

SEQ ID NO: 3344997 - RNA, 21 nt, Human
ugccugggaucccucauccuc

SEQ ID NO: 3344998 - RNA, 18 nt, Human
ugccugggcagaaggaag

SEQ ID NO: 3344999 - RNA, 15 nt, Human
ugccugguggcagcu

SEQ ID NO: 3345000 - RNA, 14 nt, Human
ugccugguggcagc

SEQ ID NO: 3345001 - RNA, 19 nt, Human
uguacugcauaugaaagga

SEQ ID NO: 3345002 - RNA, 15 nt, Human
uguacgucugacagg

SEQ ID NO: 3345003 - RNA, 16 nt, Human
uguacagagcccacgc

SEQ ID NO: 3345004 - RNA, 17 nt, Human
uguacagagcccacgcc

SEQ ID NO: 3345005 - RNA, 13 nt, Human
uguacagagccca

SEQ ID NO: 3345006 - RNA, 18 nt, Human
uguacagagcccacgccc

SEQ ID NO: 3345007 - RNA, 16 nt, Human
ugucauuugagcaggg

SEQ ID NO: 3345008 - RNA, 23 nt, Human
ugucccaaaaagaaaggagggga

SEQ ID NO: 3345009 - RNA, 13 nt, Human
ugucaccugaaga

SEQ ID NO: 3345010 - RNA, 18 nt, Human
uguccccaccgcagacag

SEQ ID NO: 3345011 - RNA, 19 nt, Human
uguccccaccgcagacagg

SEQ ID NO: 3345012 - RNA, 22 nt, Human
uguccccaccgcagacaggacc

SEQ ID NO: 3345013 - RNA, 13 nt, Human
uguccccaccgca

SEQ ID NO: 3345014 - RNA, 16 nt, Human
uguccccgacccuugc

SEQ ID NO: 3345015 - RNA, 20 nt, Human
uguccuacccacccuccuuu

SEQ ID NO: 3345016 - RNA, 17 nt, Human
uguccuacucuguguca

SEQ ID NO: 3345017 - RNA, 12 nt, Human
uguccuacucug

SEQ ID NO: 3345018 - RNA, 16 nt, Human
uguccuacccacccuc

SEQ ID NO: 3345019 - RNA, 22 nt, Human
uguauucucuccuguaccucuu

SEQ ID NO: 3345020 - RNA, 20 nt, Human
uguauucucuccuguaccuc

SEQ ID NO: 3345021 - RNA, 19 nt, Human
uguauuuuacuaauaaaau

SEQ ID NO: 3345022 - RNA, 12 nt, Human
ugucacaggcag

SEQ ID NO: 3345023 - RNA, 17 nt, Human
ugucacacacuuuggcu

SEQ ID NO: 3345024 - RNA, 13 nt, Human
ugucacacacuuu

SEQ ID NO: 3345025 - RNA, 17 nt, Human
ugugagucaccaagccc

SEQ ID NO: 3345026 - RNA, 15 nt, Human
ugugagucaccaagc

SEQ ID NO: 3345027 - RNA, 21 nt, Human
ugugagucaccaagcccaguu

SEQ ID NO: 3345028 - RNA, 19 nt, Human
ugugagucaccaagcccag

SEQ ID NO: 3345029 - RNA, 13 nt, Human
ugugaggaagccg

SEQ ID NO: 3345030 - RNA, 18 nt, Human
ugugaggaagccgcuggg

SEQ ID NO: 3345031 - RNA, 20 nt, Human
ugugaggaagccgcuggggc

SEQ ID NO: 3345032 - RNA, 12 nt, Human
ugugaggaagcc

SEQ ID NO: 3345033 - RNA, 15 nt, Human
ugugacauguuuuau

SEQ ID NO: 3345034 - RNA, 16 nt, Human
ugucuuuggacccuga

SEQ ID NO: 3345035 - RNA, 21 nt, Human
ugucuuuucuugcaugaggcu

SEQ ID NO: 3345036 - RNA, 14 nt, Human
ugucuuuggacccu

SEQ ID NO: 3345037 - RNA, 23 nt, Human
ugucuuuucuugcaugaggcuag

SEQ ID NO: 3345038 - RNA, 23 nt, Human
ugugaaaagaaaaaugagccugg

SEQ ID NO: 3345039 - RNA, 21 nt, Human
ugugaaaagaaaaaugagccu

SEQ ID NO: 3345040 - RNA, 19 nt, Human
ugugcgccuacaggaguga

SEQ ID NO: 3345041 - RNA, 14 nt, Human
ugugcgccuacagg

SEQ ID NO: 3345042 - RNA, 16 nt, Human
ugugcauuaucuagau

SEQ ID NO: 3345043 - RNA, 19 nt, Human
ugugcauuaucuagauacu

SEQ ID NO: 3345044 - RNA, 14 nt, Human
ugugcauuaucuag

SEQ ID NO: 3345045 - RNA, 14 nt, Human
ugugcacguacaca

SEQ ID NO: 3345046 - RNA, 23 nt, Human
ugugcauuaucuagauacuguau

SEQ ID NO: 3345047 - RNA, 20 nt, Human
ugugcauuaucuagauacug

SEQ ID NO: 3345048 - RNA, 21 nt, Human
ugugcauuaucuagauacugu

SEQ ID NO: 3345049 - RNA, 12 nt, Human
uguguagggcgg

SEQ ID NO: 3345050 - RNA, 19 nt, Human
uguggacacagcucuucuc

SEQ ID NO: 3345051 - RNA, 16 nt, Human
uguggacacagcucuu

SEQ ID NO: 3345052 - RNA, 18 nt, Human
uguggacacagcucuucu

SEQ ID NO: 3345053 - RNA, 23 nt, Human
uguggcgcagcauauucaggaag

SEQ ID NO: 3345054 - RNA, 16 nt, Human
uguuggccaggcuggu

SEQ ID NO: 3345055 - RNA, 15 nt, Human
uguuggccaggcugg

SEQ ID NO: 3345056 - RNA, 17 nt, Human
uguuggcugggggccuc

SEQ ID NO: 3345057 - RNA, 19 nt, Human
uguuggcugggggccucag

SEQ ID NO: 3345058 - RNA, 13 nt, Human
uguucucugcccu

SEQ ID NO: 3345059 - RNA, 14 nt, Human
uguucucugcccuc

SEQ ID NO: 3345060 - RNA, 15 nt, Human
uguucucugcccucc

SEQ ID NO: 3345061 - RNA, 13 nt, Human
uguucuggcucuu

SEQ ID NO: 3345062 - RNA, 16 nt, Human
uguucuggcucuucca

SEQ ID NO: 3345063 - RNA, 12 nt, Human
uguucuggcucu

SEQ ID NO: 3345064 - RNA, 12 nt, Human
uguucucugccc

SEQ ID NO: 3345065 - RNA, 19 nt, Human
uguucaucauccuaagcua

SEQ ID NO: 3345066 - RNA, 15 nt, Human
uguucucucuucucc

SEQ ID NO: 3345067 - RNA, 16 nt, Human
uguucucucuucucca

SEQ ID NO: 3345068 - RNA, 17 nt, Human
uguucuggcucuuccag

SEQ ID NO: 3345069 - RNA, 20 nt, Human
uguucuggcucuuccaggcu

SEQ ID NO: 3345070 - RNA, 21 nt, Human
uguucuggcucuuccaggcug

SEQ ID NO: 3345071 - RNA, 23 nt, Human
uguucuuucuggcuaugcauuug

SEQ ID NO: 3345072 - RNA, 14 nt, Human
uguuacuaaguuuu

SEQ ID NO: 3345073 - RNA, 19 nt, Human
uguuaguaugaggcauuug

SEQ ID NO: 3345074 - RNA, 20 nt, Human
uguuaguaugaggcauuugu

SEQ ID NO: 3345075 - RNA, 17 nt, Human
uguuaguaugaggcauu

SEQ ID NO: 3345076 - RNA, 21 nt, Human
uguucagcuccagcucaccag

SEQ ID NO: 3345077 - RNA, 20 nt, Human
uguucagcuccagcucacca

SEQ ID NO: 3345078 - RNA, 18 nt, Human
uguucagcuccagcucac

SEQ ID NO: 3345079 - RNA, 16 nt, Human
uguguuuauugucaaa

SEQ ID NO: 3345080 - RNA, 13 nt, Human
uguguuuauuguc

SEQ ID NO: 3345081 - RNA, 19 nt, Human
ugugugcacguacacacac

SEQ ID NO: 3345082 - RNA, 13 nt, Human
uuaaaugcccagc

SEQ ID NO: 3345083 - RNA, 12 nt, Human
uuaacuuuuaua

SEQ ID NO: 3345084 - RNA, 13 nt, Human
uuaacuuuuauaa

SEQ ID NO: 3345085 - RNA, 20 nt, Human
uuacacuuuaugcacaaaau

SEQ ID NO: 3345086 - RNA, 13 nt, Human
uuacacuuuaugc

SEQ ID NO: 3345087 - RNA, 12 nt, Human
uuacauuuuuaa

SEQ ID NO: 3345088 - RNA, 17 nt, Human
uuacauuuuuaagugcu

SEQ ID NO: 3345089 - RNA, 22 nt, Human
uuaauuaaaacacaacaucuuu

SEQ ID NO: 3345090 - RNA, 15 nt, Human
uuaaaugcccagccc

SEQ ID NO: 3345091 - RNA, 16 nt, Human
uuaaaugcccagcccc

SEQ ID NO: 3345092 - RNA, 14 nt, Human
uuaaaugcccagcc

SEQ ID NO: 3345093 - RNA, 14 nt, Human
uuaaaacccaagug

SEQ ID NO: 3345094 - RNA, 22 nt, Human
uuaaacuuaaucuaaauggaac

SEQ ID NO: 3345095 - RNA, 16 nt, Human
uguuuuaagaggcagg

SEQ ID NO: 3345096 - RNA, 22 nt, Human
uguuuuaaggaugcuuguacau

SEQ ID NO: 3345097 - RNA, 23 nt, Human
uguuuuaaggaugcuuguacaua

SEQ ID NO: 3345098 - RNA, 19 nt, Human
uguuuuaaggaugcuugua

SEQ ID NO: 3345099 - RNA, 17 nt, Human
uguuuuaagaggcaggg

SEQ ID NO: 3345100 - RNA, 15 nt, Human
uaauaugcacacauu

SEQ ID NO: 3345101 - RNA, 16 nt, Human
uaauaugcacacauuu

SEQ ID NO: 3345102 - RNA, 17 nt, Human
uaauaugcacacauuuu

SEQ ID NO: 3345103 - RNA, 18 nt, Human
uaauaugcacacauuuuu

SEQ ID NO: 3345104 - RNA, 19 nt, Human
uaauaugcacacauuuuuu

SEQ ID NO: 3345105 - RNA, 12 nt, Human
uaaucuaaaugg

SEQ ID NO: 3345106 - RNA, 13 nt, Human
uaaucuaaaugga

SEQ ID NO: 3345107 - RNA, 20 nt, Human
uaauauuaaggaagacaaug

SEQ ID NO: 3345108 - RNA, 17 nt, Human
uaauuaaguacuaugua

SEQ ID NO: 3345109 - RNA, 14 nt, Human
uaauuaaguacuau

SEQ ID NO: 3345110 - RNA, 15 nt, Human
uaauggggcggugag

SEQ ID NO: 3345111 - RNA, 19 nt, Human
uaaugcgugcauaccacuu

SEQ ID NO: 3345112 - RNA, 22 nt, Human
uaaugcgugcauaccacuuuug

SEQ ID NO: 3345113 - RNA, 23 nt, Human
uaaugcgugcauaccacuuuugu

SEQ ID NO: 3345114 - RNA, 15 nt, Human
uaaugcgugcauacc

SEQ ID NO: 3345115 - RNA, 14 nt, Human
uaaugcgugcauac

SEQ ID NO: 3345116 - RNA, 17 nt, Human
uaaggguaucuggugac

SEQ ID NO: 3345117 - RNA, 15 nt, Human
uaaggugugcucuga

SEQ ID NO: 3345118 - RNA, 20 nt, Human
uaagguggguacgggagggu

SEQ ID NO: 3345119 - RNA, 16 nt, Human
uaaggauguucuagca

SEQ ID NO: 3345120 - RNA, 15 nt, Human
uaagaggcagggucu

SEQ ID NO: 3345121 - RNA, 12 nt, Human
uaagaggcaggg

SEQ ID NO: 3345122 - RNA, 15 nt, Human
uaagugcugcauuua

SEQ ID NO: 3345123 - RNA, 16 nt, Human
uaagugcugcauuuaa

SEQ ID NO: 3345124 - RNA, 18 nt, Human
uaagugcugcauuuaaaa

SEQ ID NO: 3345125 - RNA, 22 nt, Human
uaagugcugcauuuaaaagaua

SEQ ID NO: 3345126 - RNA, 20 nt, Human
uaagugguacuaacuuuccu

SEQ ID NO: 3345127 - RNA, 12 nt, Human
uaagugagagag

SEQ ID NO: 3345128 - RNA, 23 nt, Human
uaagugaggaugaaaaaauaaca

SEQ ID NO: 3345129 - RNA, 14 nt, Human
uaagugcugcauuu

SEQ ID NO: 3345130 - RNA, 11 nt, Human
uaacagaaaug

SEQ ID NO: 3345131 - RNA, 16 nt, Human
uaaccacuucagcuga

SEQ ID NO: 3345132 - RNA, 23 nt, Human
uaaccaguguuguggauuuaaca

SEQ ID NO: 3345133 - RNA, 16 nt, Human
uaagaaaaaggaugca

SEQ ID NO: 3345134 - RNA, 18 nt, Human
uaagaaaaaggaugcaca

SEQ ID NO: 3345135 - RNA, 19 nt, Human
uaagaaaaaggaugcacag

SEQ ID NO: 3345136 - RNA, 23 nt, Human
uaagaaaaaggaugcacagaguu

SEQ ID NO: 3345137 - RNA, 19 nt, Human
uaagaaccuuuugagugcc

SEQ ID NO: 3345138 - RNA, 13 nt, Human
uaaaugcccagcc

SEQ ID NO: 3345139 - RNA, 16 nt, Human
uaaauggaaccacucu

SEQ ID NO: 3345140 - RNA, 14 nt, Human
uaaaugcccagccc

SEQ ID NO: 3345141 - RNA, 15 nt, Human
uaaaugcccagcccc

SEQ ID NO: 3345142 - RNA, 16 nt, Human
uaaaugcccagccccu

SEQ ID NO: 3345143 - RNA, 17 nt, Human
uaaaugcccagccccuu

SEQ ID NO: 3345144 - RNA, 20 nt, Human
uaaaugucuaguuguaacac

SEQ ID NO: 3345145 - RNA, 22 nt, Human
uaaaugucucuuuaaugucaca

SEQ ID NO: 3345146 - RNA, 18 nt, Human
uaaaugggggugcauuug

SEQ ID NO: 3345147 - RNA, 19 nt, Human
uaaaugggggugcauuuga

SEQ ID NO: 3345148 - RNA, 14 nt, Human
uaaaugggggugca

SEQ ID NO: 3345149 - RNA, 17 nt, Human
uaaaugggggugcauuu

SEQ ID NO: 3345150 - RNA, 16 nt, Human
uaaauucuugcaaagu

SEQ ID NO: 3345151 - RNA, 17 nt, Human
uaaauucuugcaaagua

SEQ ID NO: 3345152 - RNA, 18 nt, Human
uaaauucuugcaaaguau

SEQ ID NO: 3345153 - RNA, 22 nt, Human
uaaauucuugcaaaguaucccu

SEQ ID NO: 3345154 - RNA, 11 nt, Human
uaaauuauuuu

SEQ ID NO: 3345155 - RNA, 18 nt, Human
uaacaccaugauuaacca

SEQ ID NO: 3345156 - RNA, 20 nt, Human
guuuguuucugaaagggacg

SEQ ID NO: 3345157 - RNA, 17 nt, Human
guuuucaaaauaaaaau

SEQ ID NO: 3345158 - RNA, 12 nt, Human
guuuucacucuu

SEQ ID NO: 3345159 - RNA, 11 nt, Human
guuuucacucu

SEQ ID NO: 3345160 - RNA, 20 nt, Human
guuuuccagguuuaagcugu

SEQ ID NO: 3345161 - RNA, 19 nt, Human
guuuuccaugaguccccug

SEQ ID NO: 3345162 - RNA, 20 nt, Human
guuuuccaugaguccccugu

SEQ ID NO: 3345163 - RNA, 23 nt, Human
guuugauuaaauucuugcaaagu

SEQ ID NO: 3345164 - RNA, 17 nt, Human
guuugagaucagccugg

SEQ ID NO: 3345165 - RNA, 18 nt, Human
guuuguuucugaaaggga

SEQ ID NO: 3345166 - RNA, 16 nt, Human
guuugauucagacagc

SEQ ID NO: 3345167 - RNA, 20 nt, Human
guuugauucagacagcugcc

SEQ ID NO: 3345168 - RNA, 18 nt, Human
guuuggggaugagaaagg

SEQ ID NO: 3345169 - RNA, 20 nt, Human
guuuguaaauuaacuuuuau

SEQ ID NO: 3345170 - RNA, 12 nt, Human
guuggcuggggg

SEQ ID NO: 3345171 - RNA, 14 nt, Human
guuggccccugccc

SEQ ID NO: 3345172 - RNA, 13 nt, Human
guuggccccugcc

SEQ ID NO: 3345173 - RNA, 20 nt, Human
guuggccccugcccggcugc

SEQ ID NO: 3345174 - RNA, 19 nt, Human
guuggcugggggccucagu

SEQ ID NO: 3345175 - RNA, 12 nt, Human
guugucagcuga

SEQ ID NO: 3345176 - RNA, 22 nt, Human
guuguggauuuaacagaaaugu

SEQ ID NO: 3345177 - RNA, 14 nt, Human
guugugguuaaucu

SEQ ID NO: 3345178 - RNA, 14 nt, Human
guuguuacauuuuu

SEQ ID NO: 3345179 - RNA, 15 nt, Human
guuguuacauuuuua

SEQ ID NO: 3345180 - RNA, 14 nt, Human
guuuagauaauaca

SEQ ID NO: 3345181 - RNA, 21 nt, Human
uaaacaagaccacguuucuaa

SEQ ID NO: 3345182 - RNA, 22 nt, Human
uaaacaagaccacguuucuaaa

SEQ ID NO: 3345183 - RNA, 20 nt, Human
uaaacaagaccacguuucua

SEQ ID NO: 3345184 - RNA, 19 nt, Human
uaaacaagaccacguuucu

SEQ ID NO: 3345185 - RNA, 22 nt, Human
uaaacuugguuuuuaaaaaacu

SEQ ID NO: 3345186 - RNA, 16 nt, Human
uaaagcagcguuucua

SEQ ID NO: 3345187 - RNA, 17 nt, Human
uaaagcagcguuucuau

SEQ ID NO: 3345188 - RNA, 19 nt, Human
uaaagcagcguuucuauga

SEQ ID NO: 3345189 - RNA, 12 nt, Human
uaaagaaaacug

SEQ ID NO: 3345190 - RNA, 15 nt, Human
uaaaggcuaccuuug

SEQ ID NO: 3345191 - RNA, 20 nt, Human
uaaagccugaguuugcuuuc

SEQ ID NO: 3345192 - RNA, 17 nt, Human
uaaaggcuaccuuugua

SEQ ID NO: 3345193 - RNA, 21 nt, Human
uaaaagauacaguuacucaga

SEQ ID NO: 3345194 - RNA, 17 nt, Human
uaaaagauacaguuacu

SEQ ID NO: 3345195 - RNA, 20 nt, Human
uaaaagauacaguuacucag

SEQ ID NO: 3345196 - RNA, 14 nt, Human
uaaaagauacaguu

SEQ ID NO: 3345197 - RNA, 21 nt, Human
uaaaacauuggauuauccuga

SEQ ID NO: 3345198 - RNA, 20 nt, Human
uaaaacauuggauuauccug

SEQ ID NO: 3345199 - RNA, 19 nt, Human
uaaaacauuggauuauccu

SEQ ID NO: 3345200 - RNA, 17 nt, Human
uaaaacauuggauuauc

SEQ ID NO: 3345201 - RNA, 22 nt, Human
uaaaacauuggauuauccugag

SEQ ID NO: 3345202 - RNA, 16 nt, Human
uaaaacauuggauuau

SEQ ID NO: 3345203 - RNA, 15 nt, Human
uaaaacauuggauua

SEQ ID NO: 3345204 - RNA, 21 nt, Human
uaaaagguaugcaaucaaauc

SEQ ID NO: 3345205 - RNA, 12 nt, Human
uaaaaggagcca

SEQ ID NO: 3345206 - RNA, 12 nt, Human
uaaaaggugacc

SEQ ID NO: 3345207 - RNA, 22 nt, Human
uaaaacacaacaucuuuuucua

SEQ ID NO: 3345208 - RNA, 23 nt, Human
uaaaacacaacaucuuuuucuac

SEQ ID NO: 3345209 - RNA, 17 nt, Human
uaaaacacaacaucuuu

SEQ ID NO: 3345210 - RNA, 15 nt, Human
uaaaacaacacucac

SEQ ID NO: 3345211 - RNA, 17 nt, Human
uaucaugacaaagacug

SEQ ID NO: 3345212 - RNA, 20 nt, Human
uaucaggugcugccauccag

SEQ ID NO: 3345213 - RNA, 17 nt, Human
uaucaggugcugccauc

SEQ ID NO: 3345214 - RNA, 19 nt, Human
uaucaggugcugccaucca

SEQ ID NO: 3345215 - RNA, 21 nt, Human
uauagaaauauauacgaacaa

SEQ ID NO: 3345216 - RNA, 19 nt, Human
uauagaaauauauacgaac

SEQ ID NO: 3345217 - RNA, 22 nt, Human
uagcuggucuuauuuguaaagc

SEQ ID NO: 3345218 - RNA, 11 nt, Human
uaggugacaga

SEQ ID NO: 3345219 - RNA, 17 nt, Human
uaguaugaggcauuugu

SEQ ID NO: 3345220 - RNA, 18 nt, Human
uaguaugaggcauuuguu

SEQ ID NO: 3345221 - RNA, 19 nt, Human
uaggugugacugaauuucu

SEQ ID NO: 3345222 - RNA, 21 nt, Human
uaggugugacugaauuucuuu

SEQ ID NO: 3345223 - RNA, 23 nt, Human
uaggugugacugaauuucuuuug

SEQ ID NO: 3345224 - RNA, 13 nt, Human
uagguguggggga

SEQ ID NO: 3345225 - RNA, 17 nt, Human
uaggugugggggaagca

SEQ ID NO: 3345226 - RNA, 20 nt, Human
uaguuguuugauucagacag

SEQ ID NO: 3345227 - RNA, 21 nt, Human
uaguuguuugauucagacagc

SEQ ID NO: 3345228 - RNA, 22 nt, Human
uaguuguuugauucagacagcu

SEQ ID NO: 3345229 - RNA, 20 nt, Human
uaguggcuuaaaacaacacu

SEQ ID NO: 3345230 - RNA, 15 nt, Human
uaguaugaggcauuu

SEQ ID NO: 3345231 - RNA, 16 nt, Human
uaguaugguggcuggg

SEQ ID NO: 3345232 - RNA, 17 nt, Human
uauaaacuuuaccuuuu

SEQ ID NO: 3345233 - RNA, 15 nt, Human
uauaaacuuuaccuu

SEQ ID NO: 3345234 - RNA, 16 nt, Human
uauaaacuuuaccuuu

SEQ ID NO: 3345235 - RNA, 13 nt, Human
uauaaacuuuacc

SEQ ID NO: 3345236 - RNA, 14 nt, Human
uauaaacuuuaccu

SEQ ID NO: 3345237 - RNA, 11 nt, Human
uauaaacuuua

SEQ ID NO: 3345238 - RNA, 15 nt, Human
uaguuugauuaaauu

SEQ ID NO: 3345239 - RNA, 16 nt, Human
uaguuugauuaaauuc

SEQ ID NO: 3345240 - RNA, 16 nt, Human
uagcauacguacacau

SEQ ID NO: 3345241 - RNA, 17 nt, Human
uagcauacguacacauu

SEQ ID NO: 3345242 - RNA, 18 nt, Human
uagcauacguacacauuu

SEQ ID NO: 3345243 - RNA, 19 nt, Human
uagcauacguacacauuuu

SEQ ID NO: 3345244 - RNA, 11 nt, Human
uagcagggaaa

SEQ ID NO: 3345245 - RNA, 16 nt, Human
uagauacuguaucaug

SEQ ID NO: 3345246 - RNA, 12 nt, Human
uagcucauucuc

SEQ ID NO: 3345247 - RNA, 21 nt, Human
uagcucaggugucccugcacu

SEQ ID NO: 3345248 - RNA, 20 nt, Human
uagcucaggugucccugcac

SEQ ID NO: 3345249 - RNA, 18 nt, Human
uagccugugccucuggga

SEQ ID NO: 3345250 - RNA, 16 nt, Human
uagcucaggugucccu

SEQ ID NO: 3345251 - RNA, 17 nt, Human
uagcugggacuacaggc

SEQ ID NO: 3345252 - RNA, 15 nt, Human
uagcugggacuacag

SEQ ID NO: 3345253 - RNA, 12 nt, Human
uagcugggacua

SEQ ID NO: 3345254 - RNA, 17 nt, Human
uagccugccucuucucu

SEQ ID NO: 3345255 - RNA, 14 nt, Human
uagaguugauacua

SEQ ID NO: 3345256 - RNA, 17 nt, Human
uagaguugauacuacag

SEQ ID NO: 3345257 - RNA, 12 nt, Human
uagagugggagc

SEQ ID NO: 3345258 - RNA, 14 nt, Human
uagagguucaaaga

SEQ ID NO: 3345259 - RNA, 15 nt, Human
uagagguucaaagau

SEQ ID NO: 3345260 - RNA, 20 nt, Human
uagaagucuuagauguauau

SEQ ID NO: 3345261 - RNA, 19 nt, Human
uacuuguggacacagcucu

SEQ ID NO: 3345262 - RNA, 23 nt, Human
uagaauuaguggcacuugcuuuu

SEQ ID NO: 3345263 - RNA, 19 nt, Human
uacaguuuguuaguaugag

SEQ ID NO: 3345264 - RNA, 21 nt, Human
uacaguuuguuaguaugaggc

SEQ ID NO: 3345265 - RNA, 16 nt, Human
uacauaaacaaguccu

SEQ ID NO: 3345266 - RNA, 17 nt, Human
uacaugaaaacacauuu

SEQ ID NO: 3345267 - RNA, 18 nt, Human
uacaugaaaacacauuuu

SEQ ID NO: 3345268 - RNA, 19 nt, Human
uacaugaaaacacauuuuu

SEQ ID NO: 3345269 - RNA, 23 nt, Human
uacaugaaaacacauuuuucuua

SEQ ID NO: 3345270 - RNA, 16 nt, Human
uacaugaaaacacauu

SEQ ID NO: 3345271 - RNA, 16 nt, Human
uacauaagauaaaugu

SEQ ID NO: 3345272 - RNA, 14 nt, Human
uacauuuuuaagug

SEQ ID NO: 3345273 - RNA, 19 nt, Human
uacauuuuuaagugcugca

SEQ ID NO: 3345274 - RNA, 22 nt, Human
uacauuuuuaagugcugcauuu

SEQ ID NO: 3345275 - RNA, 22 nt, Human
uacauggaauaacauguaauua

SEQ ID NO: 3345276 - RNA, 19 nt, Human
uacauggaauaacauguaa

SEQ ID NO: 3345277 - RNA, 18 nt, Human
uacauggaauaacaugua

SEQ ID NO: 3345278 - RNA, 14 nt, Human
uacauggaauaaca

SEQ ID NO: 3345279 - RNA, 18 nt, Human
uacaggaagguagaaaua

SEQ ID NO: 3345280 - RNA, 13 nt, Human
uacaggaaguacu

SEQ ID NO: 3345281 - RNA, 20 nt, Human
uacagcuugaccgugaggcc

SEQ ID NO: 3345282 - RNA, 19 nt, Human
uacacuguuucaaacuuua

SEQ ID NO: 3345283 - RNA, 22 nt, Human
uacacuguuucaaacuuuacua

SEQ ID NO: 3345284 - RNA, 16 nt, Human
uacacuuacacuuuau

SEQ ID NO: 3345285 - RNA, 22 nt, Human
uacacugugcugagucugaagg

SEQ ID NO: 3345286 - RNA, 23 nt, Human
uacacugugcugagucugaaggc

SEQ ID NO: 3345287 - RNA, 20 nt, Human
uacacuguuucaaacuuuac

SEQ ID NO: 3345288 - RNA, 16 nt, Human
uacacugugcugaguc

SEQ ID NO: 3345289 - RNA, 17 nt, Human
uacaguugaaaaacagc

SEQ ID NO: 3345290 - RNA, 19 nt, Human
uacaguugaaaaacagcug

SEQ ID NO: 3345291 - RNA, 18 nt, Human
uacaguuuguuaguauga

SEQ ID NO: 3345292 - RNA, 20 nt, Human
uacaguugaaaaacagcuga

SEQ ID NO: 3345293 - RNA, 14 nt, Human
uacaggaaguacug

SEQ ID NO: 3345294 - RNA, 15 nt, Human
uacaggaaguacugg

SEQ ID NO: 3345295 - RNA, 22 nt, Human
uacaggaaguacuggagaaaau

SEQ ID NO: 3345296 - RNA, 15 nt, Human
uacaggagugagcac

SEQ ID NO: 3345297 - RNA, 18 nt, Human
uacaaaguagaagucuua

SEQ ID NO: 3345298 - RNA, 14 nt, Human
uacaaaguagaagu

SEQ ID NO: 3345299 - RNA, 23 nt, Human
uacacaaugguuuucuugugugu

SEQ ID NO: 3345300 - RNA, 11 nt, Human
uacacacacac

SEQ ID NO: 3345301 - RNA, 15 nt, Human
uacacacugcauguu

SEQ ID NO: 3345302 - RNA, 21 nt, Human
uacacugugcugagucugaag

SEQ ID NO: 3345303 - RNA, 17 nt, Human
uacugcauaugaaagga

SEQ ID NO: 3345304 - RNA, 22 nt, Human
uacucgaguuacagacaaagcg

SEQ ID NO: 3345305 - RNA, 18 nt, Human
uacucgaguuacagacaa

SEQ ID NO: 3345306 - RNA, 22 nt, Human
uacuacaguccucccaucucac

SEQ ID NO: 3345307 - RNA, 20 nt, Human
uacuacaguccucccaucuc

SEQ ID NO: 3345308 - RNA, 13 nt, Human
uacuacaguuugu

SEQ ID NO: 3345309 - RNA, 14 nt, Human
uacuacaguuuguu

SEQ ID NO: 3345310 - RNA, 21 nt, Human
uacugucuucaguaagccgug

SEQ ID NO: 3345311 - RNA, 16 nt, Human
uacuguccuacccacc

SEQ ID NO: 3345312 - RNA, 13 nt, Human
uacuuguggacac

SEQ ID NO: 3345313 - RNA, 13 nt, Human
uacuaacuuuccu

SEQ ID NO: 3345314 - RNA, 20 nt, Human
uacuaauagacaauuuauua

SEQ ID NO: 3345315 - RNA, 21 nt, Human
uacuaauagacaauuuauuau

SEQ ID NO: 3345316 - RNA, 14 nt, Human
uacuaaggaaucuu

SEQ ID NO: 3345317 - RNA, 18 nt, Human
uacgaaaagaggggaaga

SEQ ID NO: 3345318 - RNA, 21 nt, Human
uacgaaaagaggggaagagac

SEQ ID NO: 3345319 - RNA, 16 nt, Human
uacgaacaaaacacac

SEQ ID NO: 3345320 - RNA, 12 nt, Human
uacgaacaaaac

SEQ ID NO: 3345321 - RNA, 13 nt, Human
uaccuuuuuuaua

SEQ ID NO: 3345322 - RNA, 16 nt, Human
uaccuuuuuuauacau

SEQ ID NO: 3345323 - RNA, 17 nt, Human
uaccuuuuuuauacaua

SEQ ID NO: 3345324 - RNA, 22 nt, Human
uaccuuuuuuauacauaaacaa

SEQ ID NO: 3345325 - RNA, 18 nt, Human
uaccucggugccuuccuc

SEQ ID NO: 3345326 - RNA, 13 nt, Human
uaccuuuuuuaga

SEQ ID NO: 3345327 - RNA, 19 nt, Human
uaccuuuuuuagaguugau

SEQ ID NO: 3345328 - RNA, 22 nt, Human
uaccuuuuuuagaguugauacu

SEQ ID NO: 3345329 - RNA, 15 nt, Human
uaccuacauacaauu

SEQ ID NO: 3345330 - RNA, 23 nt, Human
uacauuuuuaagugcugcauuua

SEQ ID NO: 3345331 - RNA, 15 nt, Human
uacccacugcucugg

SEQ ID NO: 3345332 - RNA, 17 nt, Human
guggucccaccccacac

SEQ ID NO: 3345333 - RNA, 18 nt, Human
gugguccuaaucuucuga

SEQ ID NO: 3345334 - RNA, 14 nt, Human
guggucccacccca

SEQ ID NO: 3345335 - RNA, 15 nt, Human
guggucccaccccac

SEQ ID NO: 3345336 - RNA, 16 nt, Human
guggucccaccccaca

SEQ ID NO: 3345337 - RNA, 19 nt, Human
gugguaugaucacggcuca

SEQ ID NO: 3345338 - RNA, 17 nt, Human
gugguagagugugccug

SEQ ID NO: 3345339 - RNA, 21 nt, Human
guggugagaggcauccaguau

SEQ ID NO: 3345340 - RNA, 17 nt, Human
guggugaccucugccug

SEQ ID NO: 3345341 - RNA, 14 nt, Human
guggugaccucugc

SEQ ID NO: 3345342 - RNA, 19 nt, Human
guggugcgaucuggguuca

SEQ ID NO: 3345343 - RNA, 21 nt, Human
guguaaguauucuuauuuaau

SEQ ID NO: 3345344 - RNA, 20 nt, Human
gugucccaaaaagaaaggag

SEQ ID NO: 3345345 - RNA, 18 nt, Human
gugucccugcacuugcag

SEQ ID NO: 3345346 - RNA, 16 nt, Human
gugucccugcacuugc

SEQ ID NO: 3345347 - RNA, 13 nt, Human
gugucccugcacu

SEQ ID NO: 3345348 - RNA, 22 nt, Human
guguacauggaauaacauguaa

SEQ ID NO: 3345349 - RNA, 17 nt, Human
guguacauggaauaaca

SEQ ID NO: 3345350 - RNA, 17 nt, Human
gugggcccaaugcacuu

SEQ ID NO: 3345351 - RNA, 15 nt, Human
gugggcuaguugggc

SEQ ID NO: 3345352 - RNA, 23 nt, Human
guggguuucuaaagcugccagcc

SEQ ID NO: 3345353 - RNA, 17 nt, Human
guggggcagcuugaggg

SEQ ID NO: 3345354 - RNA, 13 nt, Human
guggggcagcuug

SEQ ID NO: 3345355 - RNA, 15 nt, Human
guggggaccucaggc

SEQ ID NO: 3345356 - RNA, 18 nt, Human
guggggaccucaggccug

SEQ ID NO: 3345357 - RNA, 12 nt, Human
guggcugcuuca

SEQ ID NO: 3345358 - RNA, 14 nt, Human
guggcugcuucaag

SEQ ID NO: 3345359 - RNA, 14 nt, Human
guggcucacgccug

SEQ ID NO: 3345360 - RNA, 22 nt, Human
guggcuuaaaacaacacucaca

SEQ ID NO: 3345361 - RNA, 15 nt, Human
guggcugcuucaagg

SEQ ID NO: 3345362 - RNA, 16 nt, Human
guggcugcuucaagga

SEQ ID NO: 3345363 - RNA, 19 nt, Human
guggcugcuucaaggaucc

SEQ ID NO: 3345364 - RNA, 22 nt, Human
guggcugcuucaaggauccuga

SEQ ID NO: 3345365 - RNA, 19 nt, Human
guggcuggguuggagggug

SEQ ID NO: 3345366 - RNA, 23 nt, Human
guggcugcuucaaggauccugag

SEQ ID NO: 3345367 - RNA, 14 nt, Human
guguuacuaaguuu

SEQ ID NO: 3345368 - RNA, 12 nt, Human
guguuacuaagu

SEQ ID NO: 3345369 - RNA, 18 nt, Human
guguuaugacuccagaau

SEQ ID NO: 3345370 - RNA, 13 nt, Human
guuacagacaaag

SEQ ID NO: 3345371 - RNA, 16 nt, Human
guuacacuaaaaggug

SEQ ID NO: 3345372 - RNA, 15 nt, Human
guuacacuaaaaggu

SEQ ID NO: 3345373 - RNA, 22 nt, Human
guuaaaauaccagccaguaaau

SEQ ID NO: 3345374 - RNA, 14 nt, Human
gugucucuuggucc

SEQ ID NO: 3345375 - RNA, 17 nt, Human
gugucucccuucauccu

SEQ ID NO: 3345376 - RNA, 14 nt, Human
guguccggucccug

SEQ ID NO: 3345377 - RNA, 23 nt, Human
gugucccugcacuugcagacucu

SEQ ID NO: 3345378 - RNA, 15 nt, Human
gugucgggcaugaca

SEQ ID NO: 3345379 - RNA, 20 nt, Human
gugugagucaccaagcccag

SEQ ID NO: 3345380 - RNA, 18 nt, Human
gugucucuugguccugcu

SEQ ID NO: 3345381 - RNA, 19 nt, Human
gugucucuugguccugcug

SEQ ID NO: 3345382 - RNA, 20 nt, Human
gugucucuugguccugcugc

SEQ ID NO: 3345383 - RNA, 21 nt, Human
gugucucuugguccugcugca

SEQ ID NO: 3345384 - RNA, 22 nt, Human
gugucucuugguccugcugcag

SEQ ID NO: 3345385 - RNA, 12 nt, Human
gugugcucugau

SEQ ID NO: 3345386 - RNA, 22 nt, Human
gugugcucugaucauccacugu

SEQ ID NO: 3345387 - RNA, 15 nt, Human
gugugcucugaucau

SEQ ID NO: 3345388 - RNA, 13 nt, Human
guguggagaagcg

SEQ ID NO: 3345389 - RNA, 21 nt, Human
guguggagaagcggcuggcag

SEQ ID NO: 3345390 - RNA, 13 nt, Human
guuggccaggcug

SEQ ID NO: 3345391 - RNA, 14 nt, Human
guuggccaggcugg

SEQ ID NO: 3345392 - RNA, 15 nt, Human
guuggccaggcuggu

SEQ ID NO: 3345393 - RNA, 14 nt, Human
guuggccaguguga

SEQ ID NO: 3345394 - RNA, 19 nt, Human
guuggccaggcuggucuca

SEQ ID NO: 3345395 - RNA, 17 nt, Human
guuggccaggcuggucu

SEQ ID NO: 3345396 - RNA, 23 nt, Human
guuggccaaagccaaagcuaggc

SEQ ID NO: 3345397 - RNA, 14 nt, Human
guuggcaaaaaggc

SEQ ID NO: 3345398 - RNA, 18 nt, Human
guuggcaaaaaggcagga

SEQ ID NO: 3345399 - RNA, 14 nt, Human
guugcccaggcagg

SEQ ID NO: 3345400 - RNA, 12 nt, Human
guugcccaggca

SEQ ID NO: 3345401 - RNA, 16 nt, Human
guugccagucaccccg

SEQ ID NO: 3345402 - RNA, 17 nt, Human
guugccagucaccccgg

SEQ ID NO: 3345403 - RNA, 18 nt, Human
guugccagucaccccggc

SEQ ID NO: 3345404 - RNA, 23 nt, Human
guugccagucaccccggccaccu

SEQ ID NO: 3345405 - RNA, 13 nt, Human
guugccagucacc

SEQ ID NO: 3345406 - RNA, 14 nt, Human
guugccagucaccc

SEQ ID NO: 3345407 - RNA, 15 nt, Human
guugcaggaccucag

SEQ ID NO: 3345408 - RNA, 16 nt, Human
guugaagacagagcua

SEQ ID NO: 3345409 - RNA, 18 nt, Human
guucuuucacccuuuucu

SEQ ID NO: 3345410 - RNA, 16 nt, Human
guucugggacacaguu

SEQ ID NO: 3345411 - RNA, 15 nt, Human
guucugggacacagu

SEQ ID NO: 3345412 - RNA, 14 nt, Human
guucugggacacag

SEQ ID NO: 3345413 - RNA, 12 nt, Human
guucugggacac

SEQ ID NO: 3345414 - RNA, 11 nt, Human
guucugggaca

SEQ ID NO: 3345415 - RNA, 23 nt, Human
guucuggcagaguugaagacaga

SEQ ID NO: 3345416 - RNA, 16 nt, Human
guucuggcucuuccag

SEQ ID NO: 3345417 - RNA, 20 nt, Human
guucuggcucuuccaggcug

SEQ ID NO: 3345418 - RNA, 12 nt, Human
guucuggcucuu

SEQ ID NO: 3345419 - RNA, 13 nt, Human
guucuuuccaaag

SEQ ID NO: 3345420 - RNA, 14 nt, Human
guucuuuccaaagu

SEQ ID NO: 3345421 - RNA, 18 nt, Human
guucuuuccaaaguacac

SEQ ID NO: 3345422 - RNA, 20 nt, Human
guucuuuccaaaguacacug

SEQ ID NO: 3345423 - RNA, 17 nt, Human
guugaaaaacagcugag

SEQ ID NO: 3345424 - RNA, 19 nt, Human
guucugauccuaguuccac

SEQ ID NO: 3345425 - RNA, 22 nt, Human
guuacuaaguuuuuauggcuuu

SEQ ID NO: 3345426 - RNA, 15 nt, Human
guuacucagaauucu

SEQ ID NO: 3345427 - RNA, 16 nt, Human
guuaguuucuccaagc

SEQ ID NO: 3345428 - RNA, 19 nt, Human
guuaguuucuccaagcagg

SEQ ID NO: 3345429 - RNA, 22 nt, Human
guuaguuucuccaagcaggaca

SEQ ID NO: 3345430 - RNA, 15 nt, Human
guuacagacaaagcg

SEQ ID NO: 3345431 - RNA, 17 nt, Human
guuacagacaaagcgug

SEQ ID NO: 3345432 - RNA, 19 nt, Human
guuacauaagauaaaugug

SEQ ID NO: 3345433 - RNA, 18 nt, Human
guuacauaagauaaaugu

SEQ ID NO: 3345434 - RNA, 21 nt, Human
guuacauuuuuaagugcugca

SEQ ID NO: 3345435 - RNA, 23 nt, Human
guuaccauuuugggguacccacu

SEQ ID NO: 3345436 - RNA, 21 nt, Human
guuaugacuccagaauuuccc

SEQ ID NO: 3345437 - RNA, 19 nt, Human
guuauuaaaaaucucaaau

SEQ ID NO: 3345438 - RNA, 19 nt, Human
guucaagcgauucuucugc

SEQ ID NO: 3345439 - RNA, 18 nt, Human
guucaagcgauucuucug

SEQ ID NO: 3345440 - RNA, 23 nt, Human
guucaauucucauuugucacaca

SEQ ID NO: 3345441 - RNA, 16 nt, Human
guucaauucucauuug

SEQ ID NO: 3345442 - RNA, 20 nt, Human
guucaagcgauucuucugcu

SEQ ID NO: 3345443 - RNA, 17 nt, Human
guuccaccaucaagcca

SEQ ID NO: 3345444 - RNA, 20 nt, Human
guuccaccaucaagccacca

SEQ ID NO: 3345445 - RNA, 14 nt, Human
guuccuaauccucu

SEQ ID NO: 3345446 - RNA, 22 nt, Human
guuccucauuagcauuuugcua

SEQ ID NO: 3345447 - RNA, 19 nt, Human
guucacugcaaccuccgcc

SEQ ID NO: 3345448 - RNA, 12 nt, Human
guucaucuugaa

SEQ ID NO: 3345449 - RNA, 13 nt, Human
guucaucuugaau

SEQ ID NO: 3345450 - RNA, 18 nt, Human
guucaucuugaauuguaa

SEQ ID NO: 3345451 - RNA, 17 nt, Human
guucaucauccuaagcu

SEQ ID NO: 3345452 - RNA, 22 nt, Human
gucucacucugucgcccagucu

SEQ ID NO: 3345453 - RNA, 19 nt, Human
gucucacucugucgcccag

SEQ ID NO: 3345454 - RNA, 18 nt, Human
gucucacucugucgccca

SEQ ID NO: 3345455 - RNA, 16 nt, Human
gucucacucugucgcc

SEQ ID NO: 3345456 - RNA, 15 nt, Human
gucucacucugucgc

SEQ ID NO: 3345457 - RNA, 11 nt, Human
gucucacucug

SEQ ID NO: 3345458 - RNA, 18 nt, Human
gucucacuauguugccca

SEQ ID NO: 3345459 - RNA, 21 nt, Human
gucggaaaacaugcuacacac

SEQ ID NO: 3345460 - RNA, 16 nt, Human
gucgggcaugacacga

SEQ ID NO: 3345461 - RNA, 21 nt, Human
guccuuaccagcagagcaccu

SEQ ID NO: 3345462 - RNA, 18 nt, Human
guccuuaccagcagagca

SEQ ID NO: 3345463 - RNA, 19 nt, Human
guccuuaccagcagagcac

SEQ ID NO: 3345464 - RNA, 11 nt, Human
gucccugccaa

SEQ ID NO: 3345465 - RNA, 14 nt, Human
gucccugccaaugg

SEQ ID NO: 3345466 - RNA, 15 nt, Human
gucccugccaaugga

SEQ ID NO: 3345467 - RNA, 16 nt, Human
gucuuuuuucacuaca

SEQ ID NO: 3345468 - RNA, 23 nt, Human
gucuugcaauggcagccuuggca

SEQ ID NO: 3345469 - RNA, 21 nt, Human
gucuugcaauggcagccuugg

SEQ ID NO: 3345470 - RNA, 20 nt, Human
gucuugcaauggcagccuug

SEQ ID NO: 3345471 - RNA, 19 nt, Human
gucuugcaauggcagccuu

SEQ ID NO: 3345472 - RNA, 18 nt, Human
gucuugcaauggcagccu

SEQ ID NO: 3345473 - RNA, 17 nt, Human
gucuugcaauggcagcc

SEQ ID NO: 3345474 - RNA, 16 nt, Human
gucuugcaauggcagc

SEQ ID NO: 3345475 - RNA, 20 nt, Human
gucuugaacuccuggccuca

SEQ ID NO: 3345476 - RNA, 18 nt, Human
gucuugaacuccuggccu

SEQ ID NO: 3345477 - RNA, 21 nt, Human
gucuugaacuccuggccucaa

SEQ ID NO: 3345478 - RNA, 17 nt, Human
gucuugaacuccuggcc

SEQ ID NO: 3345479 - RNA, 16 nt, Human
gucuugaacuccuggc

SEQ ID NO: 3345480 - RNA, 18 nt, Human
gucugugccauuuuguau

SEQ ID NO: 3345481 - RNA, 14 nt, Human
gucuguucuuucca

SEQ ID NO: 3345482 - RNA, 17 nt, Human
gucuguucuuuccaaag

SEQ ID NO: 3345483 - RNA, 22 nt, Human
gugauccacccaccucagccuc

SEQ ID NO: 3345484 - RNA, 17 nt, Human
gugaguugauagcacag

SEQ ID NO: 3345485 - RNA, 15 nt, Human
gugauacaaugcugu

SEQ ID NO: 3345486 - RNA, 17 nt, Human
gugauacaaugcugugc

SEQ ID NO: 3345487 - RNA, 17 nt, Human
gugaggaugaaaaaaua

SEQ ID NO: 3345488 - RNA, 19 nt, Human
gugagccgagaucacgcca

SEQ ID NO: 3345489 - RNA, 20 nt, Human
gugagccacugcaccgggcc

SEQ ID NO: 3345490 - RNA, 15 nt, Human
gugagccacugcacc

SEQ ID NO: 3345491 - RNA, 14 nt, Human
gugagccacugcac

SEQ ID NO: 3345492 - RNA, 14 nt, Human
gugaccucugccug

SEQ ID NO: 3345493 - RNA, 13 nt, Human
gugaccucugccu

SEQ ID NO: 3345494 - RNA, 12 nt, Human
gugaccucugcc

SEQ ID NO: 3345495 - RNA, 14 nt, Human
gugacagaggcagc

SEQ ID NO: 3345496 - RNA, 13 nt, Human
gugacagaggcag

SEQ ID NO: 3345497 - RNA, 12 nt, Human
gugacagaggca

SEQ ID NO: 3345498 - RNA, 20 nt, Human
gugacaaggauugcuacugu

SEQ ID NO: 3345499 - RNA, 21 nt, Human
gugaaugaugauccuaggcau

SEQ ID NO: 3345500 - RNA, 23 nt, Human
gugcaguggugcgaucuggguuc

SEQ ID NO: 3345501 - RNA, 20 nt, Human
gugcaguggugcgaucuggg

SEQ ID NO: 3345502 - RNA, 22 nt, Human
gugcauaccacuuuuguucuug

SEQ ID NO: 3345503 - RNA, 21 nt, Human
gugcauaccacuuuuguucuu

SEQ ID NO: 3345504 - RNA, 13 nt, Human
gugauuuuuguaa

SEQ ID NO: 3345505 - RNA, 18 nt, Human
gugauuuuuguaauuuuu

SEQ ID NO: 3345506 - RNA, 24 nt, Human
gugauccacccaccucagccuccc

SEQ ID NO: 3345507 - RNA, 23 nt, Human
gugauccacccaccucagccucc

SEQ ID NO: 3345508 - RNA, 14 nt, Human
gugcggccuuuggc

SEQ ID NO: 3345509 - RNA, 14 nt, Human
gugcgccuacagga

SEQ ID NO: 3345510 - RNA, 16 nt, Human
gugccaugugccaggu

SEQ ID NO: 3345511 - RNA, 14 nt, Human
gugccaugugccag

SEQ ID NO: 3345512 - RNA, 21 nt, Human
gugcgaucuggguucacugca

SEQ ID NO: 3345513 - RNA, 22 nt, Human
guauaugucaagccauaauugu

SEQ ID NO: 3345514 - RNA, 17 nt, Human
guaugaggcauuuguuu

SEQ ID NO: 3345515 - RNA, 20 nt, Human
guaugaggcauuuguuugaa

SEQ ID NO: 3345516 - RNA, 20 nt, Human
guaugaucacggcucacugc

SEQ ID NO: 3345517 - RNA, 21 nt, Human
guaugaucacggcucacugca

SEQ ID NO: 3345518 - RNA, 23 nt, Human
guauuaaaacauuggauuauccu

SEQ ID NO: 3345519 - RNA, 20 nt, Human
guauuaaaacauuggauuau

SEQ ID NO: 3345520 - RNA, 17 nt, Human
guauuaaaacauuggau

SEQ ID NO: 3345521 - RNA, 15 nt, Human
guauuaaaacauugg

SEQ ID NO: 3345522 - RNA, 14 nt, Human
guauuaaaacauug

SEQ ID NO: 3345523 - RNA, 13 nt, Human
guauuaaaacauu

SEQ ID NO: 3345524 - RNA, 12 nt, Human
guauuaaaacau

SEQ ID NO: 3345525 - RNA, 12 nt, Human
guaucugagcag

SEQ ID NO: 3345526 - RNA, 12 nt, Human
guaucuggugac

SEQ ID NO: 3345527 - RNA, 19 nt, Human
guaucuggugacuuuccuc

SEQ ID NO: 3345528 - RNA, 13 nt, Human
guaugaggcauuu

SEQ ID NO: 3345529 - RNA, 15 nt, Human
guaugaggcauuugu

SEQ ID NO: 3345530 - RNA, 22 nt, Human
guagggcgggaggauguucugg

SEQ ID NO: 3345531 - RNA, 21 nt, Human
guagggcgggaggauguucug

SEQ ID NO: 3345532 - RNA, 23 nt, Human
guagggcgggaggauguucuggg

SEQ ID NO: 3345533 - RNA, 16 nt, Human
guagggcgggaggaug

SEQ ID NO: 3345534 - RNA, 15 nt, Human
guagagugugccuga

SEQ ID NO: 3345535 - RNA, 16 nt, Human
guaggguuauaauaau

SEQ ID NO: 3345536 - RNA, 14 nt, Human
guagucaggugccu

SEQ ID NO: 3345537 - RNA, 21 nt, Human
gucccaccuuggcugcaggga

SEQ ID NO: 3345538 - RNA, 12 nt, Human
guccacccagga

SEQ ID NO: 3345539 - RNA, 23 nt, Human
guccacccaggagccccgaggcc

SEQ ID NO: 3345540 - RNA, 23 nt, Human
gucccaccuuggcugcagggagu

SEQ ID NO: 3345541 - RNA, 20 nt, Human
gucccaccuuggcugcaggg

SEQ ID NO: 3345542 - RNA, 16 nt, Human
gucccugcacuugcag

SEQ ID NO: 3345543 - RNA, 21 nt, Human
gucccugcacuugcagacucu

SEQ ID NO: 3345544 - RNA, 19 nt, Human
gucccugcacuugcagacu

SEQ ID NO: 3345545 - RNA, 12 nt, Human
gucacucuggca

SEQ ID NO: 3345546 - RNA, 13 nt, Human
gucacucuggcag

SEQ ID NO: 3345547 - RNA, 14 nt, Human
gucacucuggcagc

SEQ ID NO: 3345548 - RNA, 16 nt, Human
gucacucuggcagcuc

SEQ ID NO: 3345549 - RNA, 17 nt, Human
gucacucuggcagcuca

SEQ ID NO: 3345550 - RNA, 19 nt, Human
gucacucuggcagcucaga

SEQ ID NO: 3345551 - RNA, 17 nt, Human
gucaccccggccaccug

SEQ ID NO: 3345552 - RNA, 18 nt, Human
gucaccccggccaccugc

SEQ ID NO: 3345553 - RNA, 22 nt, Human
gucaccccggccaccugcggug

SEQ ID NO: 3345554 - RNA, 16 nt, Human
gucagagccugcaguu

SEQ ID NO: 3345555 - RNA, 15 nt, Human
gucagagccugcagu

SEQ ID NO: 3345556 - RNA, 14 nt, Human
gucagagccugcag

SEQ ID NO: 3345557 - RNA, 19 nt, Human
guauuuuguuuuugucuua

SEQ ID NO: 3345558 - RNA, 15 nt, Human
gucaagugaaaaagg

SEQ ID NO: 3345559 - RNA, 15 nt, Human
gucaccccggccacc

SEQ ID NO: 3345560 - RNA, 14 nt, Human
guauuuuacuaaua

SEQ ID NO: 3345561 - RNA, 11 nt, Human
uuuuuccuuca

SEQ ID NO: 3345562 - RNA, 23 nt, Human
uuuuuaagaaaaaggaugcacag

SEQ ID NO: 3345563 - RNA, 19 nt, Human
uuuuuccuucagugccuua

SEQ ID NO: 3345564 - RNA, 16 nt, Human
uuuugucauauaagau

SEQ ID NO: 3345565 - RNA, 19 nt, Human
uuuuguagagccagggucu

SEQ ID NO: 3345566 - RNA, 16 nt, Human
uuuucuuucagccaag

SEQ ID NO: 3345567 - RNA, 14 nt, Human
uuuuggcugcugaa

SEQ ID NO: 3345568 - RNA, 15 nt, Human
uuuuggucuguguga

SEQ ID NO: 3345569 - RNA, 20 nt, Human
uuuugacaaggggcaguggu

SEQ ID NO: 3345570 - RNA, 21 nt, Human
uuuuaaaugcaccuggaauau

SEQ ID NO: 3345571 - RNA, 11 nt, Human
uuuuaaaugca

SEQ ID NO: 3345572 - RNA, 12 nt, Human
uuuuaaaugcac

SEQ ID NO: 3345573 - RNA, 21 nt, Human
uuuguucuggcucuuccaggc

SEQ ID NO: 3345574 - RNA, 17 nt, Human
uuuuaaagaaugcucuu

SEQ ID NO: 3345575 - RNA, 15 nt, Human
uuugcuuugugauuu

SEQ ID NO: 3345576 - RNA, 16 nt, Human
uuugcuuugugauuuu

SEQ ID NO: 3345577 - RNA, 14 nt, Human
uuuggaauuuugug

SEQ ID NO: 3345578 - RNA, 21 nt, Human
uuuggaauuuugugcccccau

SEQ ID NO: 3345579 - RNA, 17 nt, Human
uuuggucuacacugugc

SEQ ID NO: 3345580 - RNA, 12 nt, Human
uuucuucucccu

SEQ ID NO: 3345581 - RNA, 13 nt, Human
uuucuucucccuc

SEQ ID NO: 3345582 - RNA, 18 nt, Human
uuucuuagggaaggauac

SEQ ID NO: 3345583 - RNA, 23 nt, Human
uuucuuagggaaggauacaaaag

SEQ ID NO: 3345584 - RNA, 15 nt, Human
uuugaacugauaaag

SEQ ID NO: 3345585 - RNA, 14 nt, Human
uuugaacucuucaa

SEQ ID NO: 3345586 - RNA, 17 nt, Human
uuugaacugauaaagau

SEQ ID NO: 3345587 - RNA, 19 nt, Human
uuugaacugauaaagauga

SEQ ID NO: 3345588 - RNA, 22 nt, Human
uuugaagaugccgcauuuggau

SEQ ID NO: 3345589 - RNA, 20 nt, Human
uuucuaaaggcuaccuuugu

SEQ ID NO: 3345590 - RNA, 21 nt, Human
uuucuaaaggcuaccuuugua

SEQ ID NO: 3345591 - RNA, 18 nt, Human
uuucuaaaggcuaccuuu

SEQ ID NO: 3345592 - RNA, 23 nt, Human
uuucuacucgaguuacagacaaa

SEQ ID NO: 3345593 - RNA, 20 nt, Human
uuucuguucuuucuggcuau

SEQ ID NO: 3345594 - RNA, 23 nt, Human
uuacauuuuuaagugcugcauuu

SEQ ID NO: 3345595 - RNA, 14 nt, Human
uuaccacagacaua

SEQ ID NO: 3345596 - RNA, 17 nt, Human
uuaccacagacauacua

SEQ ID NO: 3345597 - RNA, 16 nt, Human
uuuccugaggcugggc

SEQ ID NO: 3345598 - RNA, 21 nt, Human
cuaauaaaauuuaaaagucuu

SEQ ID NO: 3345599 - RNA, 16 nt, Human
cuaaggugugcucuga

SEQ ID NO: 3345600 - RNA, 20 nt, Human
cuaauaaaauuuaaaagucu

SEQ ID NO: 3345601 - RNA, 18 nt, Human
cuaauauguaacaagcca

SEQ ID NO: 3345602 - RNA, 16 nt, Human
cuaauguacugcauau

SEQ ID NO: 3345603 - RNA, 14 nt, Human
cuaauguacugcau

SEQ ID NO: 3345604 - RNA, 22 nt, Human
cuacccacccuccuuucaccac

SEQ ID NO: 3345605 - RNA, 13 nt, Human
cuacccacccucc

SEQ ID NO: 3345606 - RNA, 17 nt, Human
cuacccacccuccuuuc

SEQ ID NO: 3345607 - RNA, 19 nt, Human
cuacccagcgagcccuggu

SEQ ID NO: 3345608 - RNA, 20 nt, Human
cuacccagcgagcccuggug

SEQ ID NO: 3345609 - RNA, 15 nt, Human
cuacagaggccaugg

SEQ ID NO: 3345610 - RNA, 13 nt, Human
cuacacacugcau

SEQ ID NO: 3345611 - RNA, 15 nt, Human
cuacacacugcaugu

SEQ ID NO: 3345612 - RNA, 18 nt, Human
cuacacugugcugagucu

SEQ ID NO: 3345613 - RNA, 15 nt, Human
cuaaggugugcucug

SEQ ID NO: 3345614 - RNA, 21 nt, Human
cuaagcuauucaguaauaacu

SEQ ID NO: 3345615 - RNA, 19 nt, Human
cuaagcuauucaguaauaa

SEQ ID NO: 3345616 - RNA, 17 nt, Human
cuaaccacgcuggaccu

SEQ ID NO: 3345617 - RNA, 16 nt, Human
cuaaccagcagaaaug

SEQ ID NO: 3345618 - RNA, 14 nt, Human
cuaaccacgcugga

SEQ ID NO: 3345619 - RNA, 17 nt, Human
cuaaccagcagaaaugc

SEQ ID NO: 3345620 - RNA, 17 nt, Human
cuagcacuuugggaggc

SEQ ID NO: 3345621 - RNA, 17 nt, Human
cuagagugaacuugggc

SEQ ID NO: 3345622 - RNA, 20 nt, Human
cuagacgagcaggcuucuuc

SEQ ID NO: 3345623 - RNA, 21 nt, Human
cuagacgagcaggcuucuucc

SEQ ID NO: 3345624 - RNA, 16 nt, Human
cuacuguaauuuguga

SEQ ID NO: 3345625 - RNA, 17 nt, Human
cuacuguaauuugugau

SEQ ID NO: 3345626 - RNA, 14 nt, Human
cuacccgggaaggg

SEQ ID NO: 3345627 - RNA, 15 nt, Human
cuacccgggaagggg

SEQ ID NO: 3345628 - RNA, 20 nt, Human
cuacccgggaagggggcugg

SEQ ID NO: 3345629 - RNA, 21 nt, Human
cuacccgggaagggggcuggg

SEQ ID NO: 3345630 - RNA, 21 nt, Human
cuacucugugucagguggggc

SEQ ID NO: 3345631 - RNA, 16 nt, Human
cuacucugugucaggu

SEQ ID NO: 3345632 - RNA, 13 nt, Human
cuacucuguguca

SEQ ID NO: 3345633 - RNA, 14 nt, Human
cuaugcauuugaaa

SEQ ID NO: 3345634 - RNA, 19 nt, Human
cucaacucuccuccagagu

SEQ ID NO: 3345635 - RNA, 20 nt, Human
cucaacucuccuccagaguc

SEQ ID NO: 3345636 - RNA, 21 nt, Human
cucaacucuccuccagaguca

SEQ ID NO: 3345637 - RNA, 17 nt, Human
cucaaccuccugggcua

SEQ ID NO: 3345638 - RNA, 17 nt, Human
cucacuauguugcccag

SEQ ID NO: 3345639 - RNA, 16 nt, Human
cucacuauguugccca

SEQ ID NO: 3345640 - RNA, 12 nt, Human
cucaccccagcc

SEQ ID NO: 3345641 - RNA, 13 nt, Human
cucaccccagccc

SEQ ID NO: 3345642 - RNA, 19 nt, Human
cucaccagccccagugccc

SEQ ID NO: 3345643 - RNA, 21 nt, Human
cucaccagccccagugcccac

SEQ ID NO: 3345644 - RNA, 20 nt, Human
cucaccagccccagugccca

SEQ ID NO: 3345645 - RNA, 20 nt, Human
cucaagugauucuccugccu

SEQ ID NO: 3345646 - RNA, 19 nt, Human
cucaagugauucuccugcc

SEQ ID NO: 3345647 - RNA, 18 nt, Human
cucaagugauucuccugc

SEQ ID NO: 3345648 - RNA, 23 nt, Human
cucacaguccuuaccagcagagc

SEQ ID NO: 3345649 - RNA, 17 nt, Human
cucaagugauucuccug

SEQ ID NO: 3345650 - RNA, 11 nt, Human
cuaugcauuug

SEQ ID NO: 3345651 - RNA, 12 nt, Human
cuaugcauuuga

SEQ ID NO: 3345652 - RNA, 14 nt, Human
cuaugacacaugca

SEQ ID NO: 3345653 - RNA, 20 nt, Human
cuaucaaguauuauaccuuu

SEQ ID NO: 3345654 - RNA, 22 nt, Human
cuauauuguuuucaguguacau

SEQ ID NO: 3345655 - RNA, 23 nt, Human
cuauauuguuuucaguguacaug

SEQ ID NO: 3345656 - RNA, 22 nt, Human
cuaggaccccuccaugugggcu

SEQ ID NO: 3345657 - RNA, 17 nt, Human
cuaggaggucucuaaga

SEQ ID NO: 3345658 - RNA, 21 nt, Human
cuaggaagacuuuggaaagag

SEQ ID NO: 3345659 - RNA, 13 nt, Human
cuaggaacacucc

SEQ ID NO: 3345660 - RNA, 15 nt, Human
cuaggaacacuccuu

SEQ ID NO: 3345661 - RNA, 17 nt, Human
cuaggaagacuuuggaa

SEQ ID NO: 3345662 - RNA, 21 nt, Human
cuagugugguguuuccuggca

SEQ ID NO: 3345663 - RNA, 22 nt, Human
cuagugugguguuuccuggcac

SEQ ID NO: 3345664 - RNA, 23 nt, Human
cuagugugguguuuccuggcacu

SEQ ID NO: 3345665 - RNA, 19 nt, Human
cuagugugguguuuccugg

SEQ ID NO: 3345666 - RNA, 21 nt, Human
cuaggcauuugcugaauacag

SEQ ID NO: 3345667 - RNA, 14 nt, Human
cgugcacacaccag

SEQ ID NO: 3345668 - RNA, 19 nt, Human
cgugcacacaccagagccc

SEQ ID NO: 3345669 - RNA, 18 nt, Human
cgugcacacaccagagcc

SEQ ID NO: 3345670 - RNA, 23 nt, Human
cgugcauaccacuuuuguucuug

SEQ ID NO: 3345671 - RNA, 21 nt, Human
cgugcaguggugcgaucuggg

SEQ ID NO: 3345672 - RNA, 22 nt, Human
cgucugacaggcaaugcuggcu

SEQ ID NO: 3345673 - RNA, 21 nt, Human
cgucugacaggcaaugcuggc

SEQ ID NO: 3345674 - RNA, 20 nt, Human
cgucugacaggcaaugcugg

SEQ ID NO: 3345675 - RNA, 16 nt, Human
cgugcacacaccagag

SEQ ID NO: 3345676 - RNA, 18 nt, Human
cggugcuaucucccccag

SEQ ID NO: 3345677 - RNA, 20 nt, Human
cggugcuaucucccccagcc

SEQ ID NO: 3345678 - RNA, 21 nt, Human
cggugcuaucucccccagccc

SEQ ID NO: 3345679 - RNA, 16 nt, Human
cgucucauacucaccu

SEQ ID NO: 3345680 - RNA, 16 nt, Human
cgucuaccugaggggc

SEQ ID NO: 3345681 - RNA, 14 nt, Human
cgucugacaggcaa

SEQ ID NO: 3345682 - RNA, 17 nt, Human
cguggcugcuucaagga

SEQ ID NO: 3345683 - RNA, 15 nt, Human
cuaaauggaaccacu

SEQ ID NO: 3345684 - RNA, 16 nt, Human
cuaaauggaaccacuc

SEQ ID NO: 3345685 - RNA, 17 nt, Human
cuaaauggaaccacucu

SEQ ID NO: 3345686 - RNA, 18 nt, Human
cuaaauggaaccacucua

SEQ ID NO: 3345687 - RNA, 15 nt, Human
cuaacauggaaguac

SEQ ID NO: 3345688 - RNA, 17 nt, Human
cuaacauggaaguacua

SEQ ID NO: 3345689 - RNA, 16 nt, Human
cuaaauguugaaagau

SEQ ID NO: 3345690 - RNA, 18 nt, Human
cgggaggucgaggcagga

SEQ ID NO: 3345691 - RNA, 20 nt, Human
cgggaggucgaggcaggagg

SEQ ID NO: 3345692 - RNA, 22 nt, Human
cgggcacucagaagacacugau

SEQ ID NO: 3345693 - RNA, 14 nt, Human
cgggcacucagaag

SEQ ID NO: 3345694 - RNA, 22 nt, Human
cggggacagcuccuucuguccu

SEQ ID NO: 3345695 - RNA, 22 nt, Human
cggcuggccuggccccucaggg

SEQ ID NO: 3345696 - RNA, 19 nt, Human
cggcuggccuggccccuca

SEQ ID NO: 3345697 - RNA, 23 nt, Human
cggcuggccuggccccucagggu

SEQ ID NO: 3345698 - RNA, 15 nt, Human
cgggggcagagaggg

SEQ ID NO: 3345699 - RNA, 23 nt, Human
cggggacagcuccuucuguccua

SEQ ID NO: 3345700 - RNA, 21 nt, Human
cggugagaggggaacagacug

SEQ ID NO: 3345701 - RNA, 20 nt, Human
cggugagaggggaacagacu

SEQ ID NO: 3345702 - RNA, 20 nt, Human
cgguccacccaggagccccg

SEQ ID NO: 3345703 - RNA, 16 nt, Human
cgguccacccaggagc

SEQ ID NO: 3345704 - RNA, 15 nt, Human
cgguccacccaggag

SEQ ID NO: 3345705 - RNA, 14 nt, Human
cgguccacccagga

SEQ ID NO: 3345706 - RNA, 13 nt, Human
cggaagagccuug

SEQ ID NO: 3345707 - RNA, 11 nt, Human
cggccaccugc

SEQ ID NO: 3345708 - RNA, 15 nt, Human
cggccaccugcggug

SEQ ID NO: 3345709 - RNA, 16 nt, Human
cggccaccugcggugc

SEQ ID NO: 3345710 - RNA, 17 nt, Human
cggccaccugcggugcu

SEQ ID NO: 3345711 - RNA, 24 nt, Human
cggccaggccagagggagugacag

SEQ ID NO: 3345712 - RNA, 19 nt, Human
cggccccugcugguucagg

SEQ ID NO: 3345713 - RNA, 18 nt, Human
cggccccugcugguucag

SEQ ID NO: 3345714 - RNA, 13 nt, Human
cggccccugcugg

SEQ ID NO: 3345715 - RNA, 22 nt, Human
cgcccaggcuuagucacugaga

SEQ ID NO: 3345716 - RNA, 12 nt, Human
cgcgcacacaca

SEQ ID NO: 3345717 - RNA, 18 nt, Human
cgcgcacacacacacaua

SEQ ID NO: 3345718 - RNA, 23 nt, Human
cgccaggggaaaaucagccugcu

SEQ ID NO: 3345719 - RNA, 14 nt, Human
cgccaucccagccc

SEQ ID NO: 3345720 - RNA, 16 nt, Human
cgccaucccagcccca

SEQ ID NO: 3345721 - RNA, 22 nt, Human
cgccaggggaaaaucagccugc

SEQ ID NO: 3345722 - RNA, 17 nt, Human
ccucugcccacucccug

SEQ ID NO: 3345723 - RNA, 19 nt, Human
ccucugcccacucccugca

SEQ ID NO: 3345724 - RNA, 20 nt, Human
ccucugcccacucccugcaa

SEQ ID NO: 3345725 - RNA, 22 nt, Human
cgccagauucuuuccugaggcu

SEQ ID NO: 3345726 - RNA, 14 nt, Human
cgcugugcugcccu

SEQ ID NO: 3345727 - RNA, 15 nt, Human
cggaaaacaugcuac

SEQ ID NO: 3345728 - RNA, 20 nt, Human
cggaaaacaugcuacacacu

SEQ ID NO: 3345729 - RNA, 22 nt, Human
cgcugucagccauuccuguucc

SEQ ID NO: 3345730 - RNA, 20 nt, Human
cgcuggggccaguugguccc

SEQ ID NO: 3345731 - RNA, 16 nt, Human
cgcugugcugcccugc

SEQ ID NO: 3345732 - RNA, 17 nt, Human
cgcugugcugcccugcc

SEQ ID NO: 3345733 - RNA, 15 nt, Human
cgcugugcugcccug

SEQ ID NO: 3345734 - RNA, 22 nt, Human
cgcuaagagggagggagggcuc

SEQ ID NO: 3345735 - RNA, 21 nt, Human
cgcuaagagggagggagggcu

SEQ ID NO: 3345736 - RNA, 14 nt, Human
cgcgcgcacacaca

SEQ ID NO: 3345737 - RNA, 13 nt, Human
cgcgcgcacacac

SEQ ID NO: 3345738 - RNA, 11 nt, Human
cgcgcgcacac

SEQ ID NO: 3345739 - RNA, 19 nt, Human
cgcgcgcacacacacacau

SEQ ID NO: 3345740 - RNA, 16 nt, Human
cgcuacccgggaaggg

SEQ ID NO: 3345741 - RNA, 15 nt, Human
cugaaagcccugagc

SEQ ID NO: 3345742 - RNA, 16 nt, Human
cugaaagcccugagcu

SEQ ID NO: 3345743 - RNA, 17 nt, Human
cugaaagcccugagcuu

SEQ ID NO: 3345744 - RNA, 18 nt, Human
cugaaagcccugagcuuu

SEQ ID NO: 3345745 - RNA, 19 nt, Human
cugaaagcccugagcuuuc

SEQ ID NO: 3345746 - RNA, 23 nt, Human
cugaaagcccugagcuuucugcu

SEQ ID NO: 3345747 - RNA, 19 nt, Human
cugaagaauugaaaaacca

SEQ ID NO: 3345748 - RNA, 17 nt, Human
cucuuucccucccuucc

SEQ ID NO: 3345749 - RNA, 13 nt, Human
cucuuucccuccc

SEQ ID NO: 3345750 - RNA, 23 nt, Human
cucuuuaaugucacaggcagguc

SEQ ID NO: 3345751 - RNA, 22 nt, Human
cucuuuaaugucacaggcaggu

SEQ ID NO: 3345752 - RNA, 21 nt, Human
cucuuuaaugucacaggcagg

SEQ ID NO: 3345753 - RNA, 20 nt, Human
cucuuuaaugucacaggcag

SEQ ID NO: 3345754 - RNA, 13 nt, Human
cucuugguccugc

SEQ ID NO: 3345755 - RNA, 15 nt, Human
cucuugguccugcug

SEQ ID NO: 3345756 - RNA, 16 nt, Human
cucuugguccugcugc

SEQ ID NO: 3345757 - RNA, 18 nt, Human
cucuuuaaugucacaggc

SEQ ID NO: 3345758 - RNA, 22 nt, Human
cucuugaaauauaggaacuuaa

SEQ ID NO: 3345759 - RNA, 19 nt, Human
cucuuggguucaagcgauu

SEQ ID NO: 3345760 - RNA, 21 nt, Human
cucuuggguucaagcgauucu

SEQ ID NO: 3345761 - RNA, 15 nt, Human
cucugugucaggugg

SEQ ID NO: 3345762 - RNA, 13 nt, Human
cucuuagaaaaac

SEQ ID NO: 3345763 - RNA, 14 nt, Human
cucuuccaggcugg

SEQ ID NO: 3345764 - RNA, 15 nt, Human
cucuuccaggcuggg

SEQ ID NO: 3345765 - RNA, 13 nt, Human
cucuuccaggcug

SEQ ID NO: 3345766 - RNA, 15 nt, Human
cucuggacaggcaug

SEQ ID NO: 3345767 - RNA, 21 nt, Human
cucugccugaagucacacagu

SEQ ID NO: 3345768 - RNA, 10 nt, Human
cucugccuga

SEQ ID NO: 3345769 - RNA, 22 nt, Human
cucugccugaagucacacagug

SEQ ID NO: 3345770 - RNA, 13 nt, Human
cucucuccucccu

SEQ ID NO: 3345771 - RNA, 14 nt, Human
cucuggacaggcau

SEQ ID NO: 3345772 - RNA, 16 nt, Human
cucuggacaggcaugu

SEQ ID NO: 3345773 - RNA, 12 nt, Human
cucuggcagcuc

SEQ ID NO: 3345774 - RNA, 14 nt, Human
cucuggcagcucag

SEQ ID NO: 3345775 - RNA, 15 nt, Human
cucuggcagcucaga

SEQ ID NO: 3345776 - RNA, 14 nt, Human
cugagacagcccgg

SEQ ID NO: 3345777 - RNA, 15 nt, Human
cugagacagcccggg

SEQ ID NO: 3345778 - RNA, 18 nt, Human
cugacuguuuucucuuga

SEQ ID NO: 3345779 - RNA, 16 nt, Human
cugacuguuuucucuu

SEQ ID NO: 3345780 - RNA, 13 nt, Human
cugacccaugcug

SEQ ID NO: 3345781 - RNA, 14 nt, Human
cugacccacugcuu

SEQ ID NO: 3345782 - RNA, 13 nt, Human
cugacccacugcu

SEQ ID NO: 3345783 - RNA, 14 nt, Human
cugacccaugcugc

SEQ ID NO: 3345784 - RNA, 15 nt, Human
cugacccaugcugcc

SEQ ID NO: 3345785 - RNA, 16 nt, Human
cugacccaugcugccc

SEQ ID NO: 3345786 - RNA, 12 nt, Human
cugacccacugc

SEQ ID NO: 3345787 - RNA, 22 nt, Human
cugacauuguuggccaaagcca

SEQ ID NO: 3345788 - RNA, 21 nt, Human
cugacauuguuggccaaagcc

SEQ ID NO: 3345789 - RNA, 21 nt, Human
cugacaggcaaugcuggcugu

SEQ ID NO: 3345790 - RNA, 12 nt, Human
cugaggcccaga

SEQ ID NO: 3345791 - RNA, 13 nt, Human
cugaggcccagag

SEQ ID NO: 3345792 - RNA, 14 nt, Human
cugaggcccagagg

SEQ ID NO: 3345793 - RNA, 15 nt, Human
cugaggcccagaggg

SEQ ID NO: 3345794 - RNA, 16 nt, Human
cugaggcccagagggc

SEQ ID NO: 3345795 - RNA, 17 nt, Human
cugaggcccagagggcc

SEQ ID NO: 3345796 - RNA, 18 nt, Human
cugaggcccagagggccu

SEQ ID NO: 3345797 - RNA, 19 nt, Human
cugaggcccagagggccug

SEQ ID NO: 3345798 - RNA, 21 nt, Human
cugaggcccagagggccugca

SEQ ID NO: 3345799 - RNA, 23 nt, Human
cugaggcccagagggccugcaag

SEQ ID NO: 3345800 - RNA, 14 nt, Human
cugaggcccuucuc

SEQ ID NO: 3345801 - RNA, 15 nt, Human
cugaggcccuucucu

SEQ ID NO: 3345802 - RNA, 18 nt, Human
cugaggcccuucucucca

SEQ ID NO: 3345803 - RNA, 19 nt, Human
cugaggcccuucucuccag

SEQ ID NO: 3345804 - RNA, 20 nt, Human
cugaggcccuucucuccagc

SEQ ID NO: 3345805 - RNA, 16 nt, Human
cugagacagcccgggc

SEQ ID NO: 3345806 - RNA, 17 nt, Human
cugagacagcccgggcu

SEQ ID NO: 3345807 - RNA, 18 nt, Human
cugagacagcccgggcuc

SEQ ID NO: 3345808 - RNA, 17 nt, Human
cugagccagauuucacu

SEQ ID NO: 3345809 - RNA, 18 nt, Human
cugagccagauuucacuc

SEQ ID NO: 3345810 - RNA, 19 nt, Human
cugagccagauuucacucu

SEQ ID NO: 3345811 - RNA, 20 nt, Human
cugagccagauuucacucuc

SEQ ID NO: 3345812 - RNA, 21 nt, Human
cugagccagauuucacucucc

SEQ ID NO: 3345813 - RNA, 15 nt, Human
cugagccagauuuca

SEQ ID NO: 3345814 - RNA, 13 nt, Human
cucuacaaaaagc

SEQ ID NO: 3345815 - RNA, 16 nt, Human
cucuacagaggccaug

SEQ ID NO: 3345816 - RNA, 14 nt, Human
cucuacagaggcca

SEQ ID NO: 3345817 - RNA, 19 nt, Human
cucuacagaggccaugggc

SEQ ID NO: 3345818 - RNA, 13 nt, Human
cucuacagaggcc

SEQ ID NO: 3345819 - RNA, 16 nt, Human
cuccuucacagauggg

SEQ ID NO: 3345820 - RNA, 17 nt, Human
cuccuucacagaugggu

SEQ ID NO: 3345821 - RNA, 14 nt, Human
cuccugugugugcg

SEQ ID NO: 3345822 - RNA, 19 nt, Human
cuccuucacagaugggugc

SEQ ID NO: 3345823 - RNA, 13 nt, Human
cucuacccuggca

SEQ ID NO: 3345824 - RNA, 20 nt, Human
cucuaccauccccuguagag

SEQ ID NO: 3345825 - RNA, 23 nt, Human
cucuagggaaaaaccagcgugug

SEQ ID NO: 3345826 - RNA, 22 nt, Human
cucucaggccaaacucaccugc

SEQ ID NO: 3345827 - RNA, 23 nt, Human
cucucaggccaaacucaccugcc

SEQ ID NO: 3345828 - RNA, 13 nt, Human
cucucaggccagc

SEQ ID NO: 3345829 - RNA, 15 nt, Human
cucucaggccagcug

SEQ ID NO: 3345830 - RNA, 20 nt, Human
cucucaggccaaacucaccu

SEQ ID NO: 3345831 - RNA, 21 nt, Human
cucucaggccaaacucaccug

SEQ ID NO: 3345832 - RNA, 12 nt, Human
cucucaggccaa

SEQ ID NO: 3345833 - RNA, 19 nt, Human
cucuaguuugauuaaauuc

SEQ ID NO: 3345834 - RNA, 20 nt, Human
cucuaguuugauuaaauucu

SEQ ID NO: 3345835 - RNA, 21 nt, Human
cucuaguuugauuaaauucuu

SEQ ID NO: 3345836 - RNA, 15 nt, Human
cucuaguuugauuaa

SEQ ID NO: 3345837 - RNA, 17 nt, Human
cucucaggccagcugcu

SEQ ID NO: 3345838 - RNA, 18 nt, Human
cucucaggccagcugcuu

SEQ ID NO: 3345839 - RNA, 19 nt, Human
cucucaggccagcugcuug

SEQ ID NO: 3345840 - RNA, 21 nt, Human
cucucaggccagcugcuuggg

SEQ ID NO: 3345841 - RNA, 15 nt, Human
cucuccagccccugg

SEQ ID NO: 3345842 - RNA, 16 nt, Human
cucuccagccccugga

SEQ ID NO: 3345843 - RNA, 17 nt, Human
cucuccagccccuggau

SEQ ID NO: 3345844 - RNA, 18 nt, Human
cucuccagccccuggaug

SEQ ID NO: 3345845 - RNA, 14 nt, Human
cucuccagccccug

SEQ ID NO: 3345846 - RNA, 13 nt, Human
cucuccccagcaa

SEQ ID NO: 3345847 - RNA, 19 nt, Human
cucuccagccccuggaugc

SEQ ID NO: 3345848 - RNA, 12 nt, Human
cucuccucugcu

SEQ ID NO: 3345849 - RNA, 22 nt, Human
cucuccccagcaagugagagcu

SEQ ID NO: 3345850 - RNA, 14 nt, Human
cucuccccagcaag

SEQ ID NO: 3345851 - RNA, 13 nt, Human
cucuccucugcug

SEQ ID NO: 3345852 - RNA, 14 nt, Human
cucuccucugcugc

SEQ ID NO: 3345853 - RNA, 15 nt, Human
cucuccucugcugcu

SEQ ID NO: 3345854 - RNA, 18 nt, Human
cucuccucugcugcuggc

SEQ ID NO: 3345855 - RNA, 12 nt, Human
cucucucacucc

SEQ ID NO: 3345856 - RNA, 13 nt, Human
cucucucaggcca

SEQ ID NO: 3345857 - RNA, 15 nt, Human
cuccugccucagccu

SEQ ID NO: 3345858 - RNA, 22 nt, Human
cuccugccucgaacuggcugca

SEQ ID NO: 3345859 - RNA, 19 nt, Human
cuccugugugugcgccuac

SEQ ID NO: 3345860 - RNA, 16 nt, Human
cuccugugugugcgcc

SEQ ID NO: 3345861 - RNA, 11 nt, Human
cuccugcaggc

SEQ ID NO: 3345862 - RNA, 16 nt, Human
cuccugcaggcagcca

SEQ ID NO: 3345863 - RNA, 17 nt, Human
cuccugcaggcagccag

SEQ ID NO: 3345864 - RNA, 14 nt, Human
cuccugccucagcc

SEQ ID NO: 3345865 - RNA, 13 nt, Human
cuccugccucagc

SEQ ID NO: 3345866 - RNA, 11 nt, Human
cuccugcccuu

SEQ ID NO: 3345867 - RNA, 18 nt, Human
cuccugcaggcagccagg

SEQ ID NO: 3345868 - RNA, 20 nt, Human
cuccugcaggcagccaggcc

SEQ ID NO: 3345869 - RNA, 17 nt, Human
cucccuuucuucccuac

SEQ ID NO: 3345870 - RNA, 18 nt, Human
cucccucagucuggcccu

SEQ ID NO: 3345871 - RNA, 22 nt, Human
cuccuccagccgccaugcuccu

SEQ ID NO: 3345872 - RNA, 22 nt, Human
cuccucuccccagcaagugaga

SEQ ID NO: 3345873 - RNA, 12 nt, Human
cuccccugcugg

SEQ ID NO: 3345874 - RNA, 20 nt, Human
cuccccagccccaucccaaa

SEQ ID NO: 3345875 - RNA, 20 nt, Human
cuccccagcaagugagagcu

SEQ ID NO: 3345876 - RNA, 12 nt, Human
cuccccagcaag

SEQ ID NO: 3345877 - RNA, 17 nt, Human
cucccgaguagcuggga

SEQ ID NO: 3345878 - RNA, 16 nt, Human
cucccgaguagcuggg

SEQ ID NO: 3345879 - RNA, 18 nt, Human
cucccgaauagcugggac

SEQ ID NO: 3345880 - RNA, 15 nt, Human
cucccgaguagcugg

SEQ ID NO: 3345881 - RNA, 13 nt, Human
cuccccugcuggg

SEQ ID NO: 3345882 - RNA, 16 nt, Human
cucccgaauagcuggg

SEQ ID NO: 3345883 - RNA, 17 nt, Human
cucccgaauagcuggga

SEQ ID NO: 3345884 - RNA, 21 nt, Human
cucccaucucacacaugagca

SEQ ID NO: 3345885 - RNA, 11 nt, Human
cucccaucugu

SEQ ID NO: 3345886 - RNA, 14 nt, Human
cucccaucugugaa

SEQ ID NO: 3345887 - RNA, 15 nt, Human
cucccaucugugaaa

SEQ ID NO: 3345888 - RNA, 18 nt, Human
cucccaucugugaaagga

SEQ ID NO: 3345889 - RNA, 23 nt, Human
cucccaucugugaaaggaaagag

SEQ ID NO: 3345890 - RNA, 16 nt, Human
cucccaacucacccca

SEQ ID NO: 3345891 - RNA, 17 nt, Human
cucccaacucaccccag

SEQ ID NO: 3345892 - RNA, 18 nt, Human
cucccaaagugcugggau

SEQ ID NO: 3345893 - RNA, 22 nt, Human
cucccaacucaccccagcccca

SEQ ID NO: 3345894 - RNA, 13 nt, Human
cuccaugugggcu

SEQ ID NO: 3345895 - RNA, 17 nt, Human
cucccaaagugcuggga

SEQ ID NO: 3345896 - RNA, 18 nt, Human
cucacuauguugcccagg

SEQ ID NO: 3345897 - RNA, 18 nt, Human
cugcggugcuaucucccc

SEQ ID NO: 3345898 - RNA, 19 nt, Human
cugcggugcuaucuccccc

SEQ ID NO: 3345899 - RNA, 23 nt, Human
cugcgguccacccaggagccccg

SEQ ID NO: 3345900 - RNA, 20 nt, Human
cugcccugcccaccuggccu

SEQ ID NO: 3345901 - RNA, 17 nt, Human
cugcccugcccaccugg

SEQ ID NO: 3345902 - RNA, 21 nt, Human
cugcccugcccaccuggccuc

SEQ ID NO: 3345903 - RNA, 19 nt, Human
cugccauccagguucagcu

SEQ ID NO: 3345904 - RNA, 16 nt, Human
cugccugaagucacac

SEQ ID NO: 3345905 - RNA, 18 nt, Human
cugccugaagucacacag

SEQ ID NO: 3345906 - RNA, 19 nt, Human
cugccugaagucacacagu

SEQ ID NO: 3345907 - RNA, 14 nt, Human
cugcugcaguugcc

SEQ ID NO: 3345908 - RNA, 10 nt, Human
cugcugcagu

SEQ ID NO: 3345909 - RNA, 13 nt, Human
cugcugcaguugc

SEQ ID NO: 3345910 - RNA, 12 nt, Human
cugcucugguua

SEQ ID NO: 3345911 - RNA, 15 nt, Human
cugcucuccgaccag

SEQ ID NO: 3345912 - RNA, 20 nt, Human
cugcuccucuccccagcaag

SEQ ID NO: 3345913 - RNA, 19 nt, Human
cugcuccucuccccagcaa

SEQ ID NO: 3345914 - RNA, 23 nt, Human
cugcuccucuccccagcaaguga

SEQ ID NO: 3345915 - RNA, 20 nt, Human
cugcgguccacccaggagcc

SEQ ID NO: 3345916 - RNA, 20 nt, Human
cugcggugcuaucuccccca

SEQ ID NO: 3345917 - RNA, 21 nt, Human
cugcggugcuaucucccccag

SEQ ID NO: 3345918 - RNA, 22 nt, Human
cugcggugcuaucucccccagc

SEQ ID NO: 3345919 - RNA, 23 nt, Human
cugcggugcuaucucccccagcc

SEQ ID NO: 3345920 - RNA, 22 nt, Human
cugcuugaggcaacucaucuua

SEQ ID NO: 3345921 - RNA, 20 nt, Human
cugcuugcuugcuuuuuaau

SEQ ID NO: 3345922 - RNA, 13 nt, Human
cugcuugggcuuc

SEQ ID NO: 3345923 - RNA, 15 nt, Human
cugcuugggcuucau

SEQ ID NO: 3345924 - RNA, 17 nt, Human
cugcuugggcuucaucc

SEQ ID NO: 3345925 - RNA, 18 nt, Human
cugcuugggcuucauccu

SEQ ID NO: 3345926 - RNA, 19 nt, Human
cugcuugggcuucauccuc

SEQ ID NO: 3345927 - RNA, 19 nt, Human
cugcuugugaaaggaaaga

SEQ ID NO: 3345928 - RNA, 15 nt, Human
cugcuuuuggucugu

SEQ ID NO: 3345929 - RNA, 17 nt, Human
cugcuuuuggucugugu

SEQ ID NO: 3345930 - RNA, 13 nt, Human
cugcuugaggcaa

SEQ ID NO: 3345931 - RNA, 20 nt, Human
cugcuugaggcaacucaucu

SEQ ID NO: 3345932 - RNA, 21 nt, Human
cugcuugaggcaacucaucuu

SEQ ID NO: 3345933 - RNA, 17 nt, Human
cugcuggguguggcgca

SEQ ID NO: 3345934 - RNA, 14 nt, Human
cugcuggguguggc

SEQ ID NO: 3345935 - RNA, 15 nt, Human
cugcuggguguggcg

SEQ ID NO: 3345936 - RNA, 12 nt, Human
cugcugcuggcu

SEQ ID NO: 3345937 - RNA, 13 nt, Human
cugcugcuggcug

SEQ ID NO: 3345938 - RNA, 17 nt, Human
cugcagcaauaaagcag

SEQ ID NO: 3345939 - RNA, 13 nt, Human
cugcaguugccag

SEQ ID NO: 3345940 - RNA, 16 nt, Human
cugcaguugccaguca

SEQ ID NO: 3345941 - RNA, 20 nt, Human
cugcacuccagccuggguga

SEQ ID NO: 3345942 - RNA, 19 nt, Human
cugcacuccagccugggug

SEQ ID NO: 3345943 - RNA, 18 nt, Human
cugcaccgggccacagag

SEQ ID NO: 3345944 - RNA, 13 nt, Human
cugcacuccccug

SEQ ID NO: 3345945 - RNA, 19 nt, Human
cugcacuccccugcugggu

SEQ ID NO: 3345946 - RNA, 20 nt, Human
cugcacuccccugcugggug

SEQ ID NO: 3345947 - RNA, 22 nt, Human
cugaggcccuucucuccagccc

SEQ ID NO: 3345948 - RNA, 23 nt, Human
cugaggcccuucucuccagcccc

SEQ ID NO: 3345949 - RNA, 14 nt, Human
cugcaccggcuggc

SEQ ID NO: 3345950 - RNA, 15 nt, Human
cugcaccggcuggcc

SEQ ID NO: 3345951 - RNA, 15 nt, Human
cugcaccgggccaca

SEQ ID NO: 3345952 - RNA, 14 nt, Human
cugcaccgggccac

SEQ ID NO: 3345953 - RNA, 10 nt, Human
cugcagaggg

SEQ ID NO: 3345954 - RNA, 15 nt, Human
cugcagcaauaaagc

SEQ ID NO: 3345955 - RNA, 16 nt, Human
cugcagcaauaaagca

SEQ ID NO: 3345956 - RNA, 13 nt, Human
cugcagagggcac

SEQ ID NO: 3345957 - RNA, 18 nt, Human
cugcacuccccugcuggg

SEQ ID NO: 3345958 - RNA, 21 nt, Human
cugcacuccccugcugggugu

SEQ ID NO: 3345959 - RNA, 12 nt, Human
cugccacccugg

SEQ ID NO: 3345960 - RNA, 20 nt, Human
cugccacccuggggagaaag

SEQ ID NO: 3345961 - RNA, 21 nt, Human
cugccacccuggggagaaagu

SEQ ID NO: 3345962 - RNA, 20 nt, Human
cugcaucaagaugugacaug

SEQ ID NO: 3345963 - RNA, 15 nt, Human
cugcauaugaaagga

SEQ ID NO: 3345964 - RNA, 13 nt, Human
cugccaggaagcc

SEQ ID NO: 3345965 - RNA, 14 nt, Human
cugccaggaagcca

SEQ ID NO: 3345966 - RNA, 20 nt, Human
cugccaggaagccagcaggc

SEQ ID NO: 3345967 - RNA, 21 nt, Human
cugccaggaagccagcaggcu

SEQ ID NO: 3345968 - RNA, 19 nt, Human
cugccaggaagccagcagg

SEQ ID NO: 3345969 - RNA, 15 nt, Human
cugccauccucccaa

SEQ ID NO: 3345970 - RNA, 21 nt, Human
cugccauccagguucagcuug

SEQ ID NO: 3345971 - RNA, 22 nt, Human
cugccaggaagccagcaggcuc

SEQ ID NO: 3345972 - RNA, 20 nt, Human
cugcccaggccccugccacc

SEQ ID NO: 3345973 - RNA, 19 nt, Human
cugcccaggccccugccac

SEQ ID NO: 3345974 - RNA, 18 nt, Human
cugcccaggccccugcca

SEQ ID NO: 3345975 - RNA, 16 nt, Human
cugcccaggccccugc

SEQ ID NO: 3345976 - RNA, 15 nt, Human
cugccauuucugaga

SEQ ID NO: 3345977 - RNA, 15 nt, Human
cugcccaggccccug

SEQ ID NO: 3345978 - RNA, 14 nt, Human
cugcccaggccccu

SEQ ID NO: 3345979 - RNA, 12 nt, Human
cugcccaccugg

SEQ ID NO: 3345980 - RNA, 13 nt, Human
cugcccaggcccc

SEQ ID NO: 3345981 - RNA, 18 nt, Human
cugccccuggcagccccu

SEQ ID NO: 3345982 - RNA, 17 nt, Human
cugccccuggcagcccc

SEQ ID NO: 3345983 - RNA, 19 nt, Human
cugccccuggcagccccug

SEQ ID NO: 3345984 - RNA, 13 nt, Human
cugcccggcaggg

SEQ ID NO: 3345985 - RNA, 21 nt, Human
cugguccauagagagcaagac

SEQ ID NO: 3345986 - RNA, 23 nt, Human
cuggucucaaacucuugaccuca

SEQ ID NO: 3345987 - RNA, 13 nt, Human
cuggucccacuca

SEQ ID NO: 3345988 - RNA, 18 nt, Human
cuggguacuuguggacac

SEQ ID NO: 3345989 - RNA, 14 nt, Human
cuggguacuugugg

SEQ ID NO: 3345990 - RNA, 16 nt, Human
cuggguacuuguggac

SEQ ID NO: 3345991 - RNA, 19 nt, Human
cugggcucccuucccaccu

SEQ ID NO: 3345992 - RNA, 20 nt, Human
cugggcucccuucccaccuc

SEQ ID NO: 3345993 - RNA, 21 nt, Human
cugggcucccuucccaccucu

SEQ ID NO: 3345994 - RNA, 22 nt, Human
cugggcucccuucccaccucuc

SEQ ID NO: 3345995 - RNA, 15 nt, Human
cuggguuggagggug

SEQ ID NO: 3345996 - RNA, 20 nt, Human
cugguucaggguuggccccu

SEQ ID NO: 3345997 - RNA, 13 nt, Human
cugguggcagcuc

SEQ ID NO: 3345998 - RNA, 14 nt, Human
cugguggcagcuca

SEQ ID NO: 3345999 - RNA, 12 nt, Human
cugguggcagcu

SEQ ID NO: 3346000 - RNA, 22 nt, Human
cuguacaugaaaacacauuuuu

SEQ ID NO: 3346001 - RNA, 23 nt, Human
cuguacaugaaaacacauuuuuc

SEQ ID NO: 3346002 - RNA, 21 nt, Human
cuguaccucuugagccuugaa

SEQ ID NO: 3346003 - RNA, 22 nt, Human
cuguacagagcccacgccccca

SEQ ID NO: 3346004 - RNA, 21 nt, Human
cuguaauuugugauacaaugc

SEQ ID NO: 3346005 - RNA, 23 nt, Human
cuguacagagcccacgcccccac

SEQ ID NO: 3346006 - RNA, 18 nt, Human
cuguaauuugugauacaa

SEQ ID NO: 3346007 - RNA, 17 nt, Human
cuguaauuugugauaca

SEQ ID NO: 3346008 - RNA, 22 nt, Human
cugucccagugccgagaaggaa

SEQ ID NO: 3346009 - RNA, 23 nt, Human
cugucauuugagcagggcucagc

SEQ ID NO: 3346010 - RNA, 18 nt, Human
cuguaucccaugagccuc

SEQ ID NO: 3346011 - RNA, 15 nt, Human
cuguaucccaugagc

SEQ ID NO: 3346012 - RNA, 14 nt, Human
cuguaucccaugag

SEQ ID NO: 3346013 - RNA, 22 nt, Human
cuguaccucuugagccuugaac

SEQ ID NO: 3346014 - RNA, 13 nt, Human
cugucccccugac

SEQ ID NO: 3346015 - RNA, 14 nt, Human
cugucccccugaca

SEQ ID NO: 3346016 - RNA, 20 nt, Human
cuguccuacucugugucagg

SEQ ID NO: 3346017 - RNA, 18 nt, Human
cuguccuacucuguguca

SEQ ID NO: 3346018 - RNA, 17 nt, Human
cuguccuacucuguguc

SEQ ID NO: 3346019 - RNA, 16 nt, Human
cuguccuacucugugu

SEQ ID NO: 3346020 - RNA, 22 nt, Human
cugucccuuacgugaguccugg

SEQ ID NO: 3346021 - RNA, 21 nt, Human
cuguccuacucugugucaggu

SEQ ID NO: 3346022 - RNA, 22 nt, Human
cugucucaaaaaaagaaaaaga

SEQ ID NO: 3346023 - RNA, 18 nt, Human
cugggaugauuggagggg

SEQ ID NO: 3346024 - RNA, 20 nt, Human
cugggaucccucauccucau

SEQ ID NO: 3346025 - RNA, 20 nt, Human
cugggauuacaggugugaac

SEQ ID NO: 3346026 - RNA, 17 nt, Human
cugggauuacaggugug

SEQ ID NO: 3346027 - RNA, 19 nt, Human
cugggaggucaaggcugca

SEQ ID NO: 3346028 - RNA, 21 nt, Human
cugggaggucaaggcugcagu

SEQ ID NO: 3346029 - RNA, 22 nt, Human
cugggagaaccaaaaagaggcu

SEQ ID NO: 3346030 - RNA, 17 nt, Human
cugggagagccuuccag

SEQ ID NO: 3346031 - RNA, 18 nt, Human
cugggagagccuuccagg

SEQ ID NO: 3346032 - RNA, 19 nt, Human
cugggagagccuuccaggg

SEQ ID NO: 3346033 - RNA, 20 nt, Human
cugggagagccuuccagggg

SEQ ID NO: 3346034 - RNA, 21 nt, Human
cugggagagccuuccaggggu

SEQ ID NO: 3346035 - RNA, 22 nt, Human
cuggcuggguggcaccagcagc

SEQ ID NO: 3346036 - RNA, 20 nt, Human
cuggcugguuagagguuccc

SEQ ID NO: 3346037 - RNA, 17 nt, Human
cuggcuguuggcugggg

SEQ ID NO: 3346038 - RNA, 16 nt, Human
cuggcuguuggcuggg

SEQ ID NO: 3346039 - RNA, 22 nt, Human
cuggccagaugcaccagcccuu

SEQ ID NO: 3346040 - RNA, 24 nt, Human
cuggcaugggaaugaaugucagug

SEQ ID NO: 3346041 - RNA, 16 nt, Human
cuggcaugggaaugaa

SEQ ID NO: 3346042 - RNA, 18 nt, Human
cuggcaugggaaugaaug

SEQ ID NO: 3346043 - RNA, 19 nt, Human
cuggcaugggaaugaaugu

SEQ ID NO: 3346044 - RNA, 22 nt, Human
cuggcaugggaaugaaugucag

SEQ ID NO: 3346045 - RNA, 16 nt, Human
cuggcacuauaaugua

SEQ ID NO: 3346046 - RNA, 15 nt, Human
cuggcacuauaaugu

SEQ ID NO: 3346047 - RNA, 18 nt, Human
cuggaauauauaaccagu

SEQ ID NO: 3346048 - RNA, 14 nt, Human
cuggcaagaaugug

SEQ ID NO: 3346049 - RNA, 22 nt, Human
cuggcacccggccccugcuggu

SEQ ID NO: 3346050 - RNA, 18 nt, Human
cuggcacccggccccugc

SEQ ID NO: 3346051 - RNA, 17 nt, Human
cuggcacccggccccug

SEQ ID NO: 3346052 - RNA, 16 nt, Human
cuggcacccggccccu

SEQ ID NO: 3346053 - RNA, 22 nt, Human
cuggccucaagugauucuccug

SEQ ID NO: 3346054 - RNA, 12 nt, Human
cuggccucugca

SEQ ID NO: 3346055 - RNA, 23 nt, Human
cuggccucaagugauucuccugc

SEQ ID NO: 3346056 - RNA, 15 nt, Human
cuggccugagcuggg

SEQ ID NO: 3346057 - RNA, 18 nt, Human
cuggccugagcugggaug

SEQ ID NO: 3346058 - RNA, 14 nt, Human
cuggccuggccccu

SEQ ID NO: 3346059 - RNA, 13 nt, Human
cuggccuggcccc

SEQ ID NO: 3346060 - RNA, 13 nt, Human
cuggccucugcac

SEQ ID NO: 3346061 - RNA, 14 nt, Human
cuggccucugcacu

SEQ ID NO: 3346062 - RNA, 16 nt, Human
cuggccugagcuggga

SEQ ID NO: 3346063 - RNA, 16 nt, Human
cuggccuggccccuca

SEQ ID NO: 3346064 - RNA, 17 nt, Human
cuggccuggccccucag

SEQ ID NO: 3346065 - RNA, 14 nt, Human
cuggccugugucua

SEQ ID NO: 3346066 - RNA, 19 nt, Human
gaaggaagacuucaucccu

SEQ ID NO: 3346067 - RNA, 15 nt, Human
gaaggaacguccccu

SEQ ID NO: 3346068 - RNA, 21 nt, Human
gaaggaaacccagcucugguc

SEQ ID NO: 3346069 - RNA, 22 nt, Human
gaaggaaacccagcucuggucc

SEQ ID NO: 3346070 - RNA, 21 nt, Human
gaaggacauugcggacagcca

SEQ ID NO: 3346071 - RNA, 20 nt, Human
gaaggacauugcggacagcc

SEQ ID NO: 3346072 - RNA, 19 nt, Human
gaaggacauugcggacagc

SEQ ID NO: 3346073 - RNA, 18 nt, Human
gaagccgcuggggccagu

SEQ ID NO: 3346074 - RNA, 20 nt, Human
gaagccgcuggggccaguug

SEQ ID NO: 3346075 - RNA, 14 nt, Human
gaagccgcuggggc

SEQ ID NO: 3346076 - RNA, 19 nt, Human
gaaggaaacccagcucugg

SEQ ID NO: 3346077 - RNA, 20 nt, Human
gaaggaaacccagcucuggu

SEQ ID NO: 3346078 - RNA, 19 nt, Human
gaaguaauaugcacacauu

SEQ ID NO: 3346079 - RNA, 20 nt, Human
gaaguaauaugcacacauuu

SEQ ID NO: 3346080 - RNA, 13 nt, Human
gaagucacacagu

SEQ ID NO: 3346081 - RNA, 18 nt, Human
gaagucuuagauguauau

SEQ ID NO: 3346082 - RNA, 13 nt, Human
gaagggggcuggg

SEQ ID NO: 3346083 - RNA, 18 nt, Human
gaagcauuuacuuugugu

SEQ ID NO: 3346084 - RNA, 12 nt, Human
gaagagccuugc

SEQ ID NO: 3346085 - RNA, 17 nt, Human
gaagacuucaucccucu

SEQ ID NO: 3346086 - RNA, 15 nt, Human
gaagacuucaucccu

SEQ ID NO: 3346087 - RNA, 16 nt, Human
gaagacuucaucccuc

SEQ ID NO: 3346088 - RNA, 16 nt, Human
gaacuuugaccucugc

SEQ ID NO: 3346089 - RNA, 22 nt, Human
gaacuuugaccucugcagcaau

SEQ ID NO: 3346090 - RNA, 14 nt, Human
gaagaagcucucuc

SEQ ID NO: 3346091 - RNA, 17 nt, Human
gaacuuuccaggaaggc

SEQ ID NO: 3346092 - RNA, 17 nt, Human
gaacuugggccacugug

SEQ ID NO: 3346093 - RNA, 18 nt, Human
gaacuuggcgcugccccu

SEQ ID NO: 3346094 - RNA, 17 nt, Human
gaacuuggcgcugcccc

SEQ ID NO: 3346095 - RNA, 14 nt, Human
gaacuuaaauaaug

SEQ ID NO: 3346096 - RNA, 18 nt, Human
gaaccacaucuugcucug

SEQ ID NO: 3346097 - RNA, 16 nt, Human
gaaaugggcagagcag

SEQ ID NO: 3346098 - RNA, 15 nt, Human
gaaaugggcagagca

SEQ ID NO: 3346099 - RNA, 11 nt, Human
gaaaugagcug

SEQ ID NO: 3346100 - RNA, 18 nt, Human
gaaaugaggucagagccu

SEQ ID NO: 3346101 - RNA, 17 nt, Human
gaaaugggcagagcaga

SEQ ID NO: 3346102 - RNA, 17 nt, Human
gaaauguacagcaagga

SEQ ID NO: 3346103 - RNA, 17 nt, Human
gaaauauaggaacuuaa

SEQ ID NO: 3346104 - RNA, 22 nt, Human
gaaauauauacgaacaaaacac

SEQ ID NO: 3346105 - RNA, 20 nt, Human
gaaauauauacgaacaaaac

SEQ ID NO: 3346106 - RNA, 19 nt, Human
gaaauauauacgaacaaaa

SEQ ID NO: 3346107 - RNA, 18 nt, Human
gaaauauauacgaacaaa

SEQ ID NO: 3346108 - RNA, 16 nt, Human
gaaauauauacgaaca

SEQ ID NO: 3346109 - RNA, 19 nt, Human
gaaauaucugaaaauguau

SEQ ID NO: 3346110 - RNA, 18 nt, Human
gaaauaucugaaaaugua

SEQ ID NO: 3346111 - RNA, 22 nt, Human
gaacagacuggaagcacagcuu

SEQ ID NO: 3346112 - RNA, 15 nt, Human
gaacacuccuucaca

SEQ ID NO: 3346113 - RNA, 16 nt, Human
gaacacuccuucacag

SEQ ID NO: 3346114 - RNA, 19 nt, Human
gaacagacuggaagcacag

SEQ ID NO: 3346115 - RNA, 20 nt, Human
gaacagacuggaagcacagc

SEQ ID NO: 3346116 - RNA, 17 nt, Human
gaacacuccuucacaga

SEQ ID NO: 3346117 - RNA, 16 nt, Human
gaaaaaugagccuggc

SEQ ID NO: 3346118 - RNA, 16 nt, Human
gaaagaucaaaagguu

SEQ ID NO: 3346119 - RNA, 16 nt, Human
gaaagaguaggaagac

SEQ ID NO: 3346120 - RNA, 21 nt, Human
gaaagagagagaaacaaacuu

SEQ ID NO: 3346121 - RNA, 17 nt, Human
gaaagagagagaaacaa

SEQ ID NO: 3346122 - RNA, 11 nt, Human
gaaagagagag

SEQ ID NO: 3346123 - RNA, 22 nt, Human
gaaaguacuucuccacccugcu

SEQ ID NO: 3346124 - RNA, 11 nt, Human
gaaaggaaaga

SEQ ID NO: 3346125 - RNA, 16 nt, Human
gaaaggaaagaggcuc

SEQ ID NO: 3346126 - RNA, 17 nt, Human
cuuuucuuucagccaag

SEQ ID NO: 3346127 - RNA, 16 nt, Human
cuuuucuuucagccaa

SEQ ID NO: 3346128 - RNA, 13 nt, Human
cuuuucuuuucuu

SEQ ID NO: 3346129 - RNA, 22 nt, Human
cuuuuuaauauugauaugcuua

SEQ ID NO: 3346130 - RNA, 18 nt, Human
cuuuuuuauacauaaaca

SEQ ID NO: 3346131 - RNA, 11 nt, Human
gaaaaagaaaa

SEQ ID NO: 3346132 - RNA, 16 nt, Human
gaaaaagaaaaaauau

SEQ ID NO: 3346133 - RNA, 15 nt, Human
cuuuuuuauacauaa

SEQ ID NO: 3346134 - RNA, 16 nt, Human
cuuuuuuauacauaaa

SEQ ID NO: 3346135 - RNA, 17 nt, Human
cuuuuuuauacauaaac

SEQ ID NO: 3346136 - RNA, 21 nt, Human
cuuuucgcaggauucuuccuc

SEQ ID NO: 3346137 - RNA, 20 nt, Human
cuuuucgcaggauucuuccu

SEQ ID NO: 3346138 - RNA, 13 nt, Human
cuuuuccaacccu

SEQ ID NO: 3346139 - RNA, 23 nt, Human
cuuuuccaacccucaucaccaac

SEQ ID NO: 3346140 - RNA, 22 nt, Human
cuuuucauuuaggugaggaagc

SEQ ID NO: 3346141 - RNA, 22 nt, Human
cuuuccaaaguacacuguuuca

SEQ ID NO: 3346142 - RNA, 16 nt, Human
cuuuccaaaguacacu

SEQ ID NO: 3346143 - RNA, 14 nt, Human
cuuuccaggaaggc

SEQ ID NO: 3346144 - RNA, 19 nt, Human
cuuuggaaagaguaggaag

SEQ ID NO: 3346145 - RNA, 23 nt, Human
cuuuggaaagaguaggaagacuu

SEQ ID NO: 3346146 - RNA, 15 nt, Human
cuuugcagacaggca

SEQ ID NO: 3346147 - RNA, 14 nt, Human
cuuugcagacaggc

SEQ ID NO: 3346148 - RNA, 17 nt, Human
cuuuccugaggcugggc

SEQ ID NO: 3346149 - RNA, 16 nt, Human
cuuuccugaggcuggg

SEQ ID NO: 3346150 - RNA, 20 nt, Human
cuuuccugaggcugggcucc

SEQ ID NO: 3346151 - RNA, 13 nt, Human
cuuggauuguccc

SEQ ID NO: 3346152 - RNA, 23 nt, Human
cuuggcucaaguccucuuuucug

SEQ ID NO: 3346153 - RNA, 13 nt, Human
cuuggcugcaggg

SEQ ID NO: 3346154 - RNA, 12 nt, Human
cuuggcugcagg

SEQ ID NO: 3346155 - RNA, 13 nt, Human
cuugcuugcuuuu

SEQ ID NO: 3346156 - RNA, 18 nt, Human
cuuggggaccagagcugc

SEQ ID NO: 3346157 - RNA, 19 nt, Human
cuuggggaccagagcugcc

SEQ ID NO: 3346158 - RNA, 17 nt, Human
cuuggggaccagagcug

SEQ ID NO: 3346159 - RNA, 16 nt, Human
cuuggggaccagagcu

SEQ ID NO: 3346160 - RNA, 21 nt, Human
cuuguaaauagcucagguguc

SEQ ID NO: 3346161 - RNA, 20 nt, Human
cuugguuuguaaauuaacuu

SEQ ID NO: 3346162 - RNA, 18 nt, Human
cuuguggacacagcucuu

SEQ ID NO: 3346163 - RNA, 17 nt, Human
cuuguggacacagcucu

SEQ ID NO: 3346164 - RNA, 16 nt, Human
cuuguggacacagcuc

SEQ ID NO: 3346165 - RNA, 19 nt, Human
cuugaaauauaggaacuua

SEQ ID NO: 3346166 - RNA, 22 nt, Human
cuucuuuauaauucuacuuuga

SEQ ID NO: 3346167 - RNA, 16 nt, Human
cuugaacuggguacuu

SEQ ID NO: 3346168 - RNA, 19 nt, Human
cuugaacuccuggccucaa

SEQ ID NO: 3346169 - RNA, 20 nt, Human
cuugaacuggguacuugugg

SEQ ID NO: 3346170 - RNA, 18 nt, Human
cuugaacuggguacuugu

SEQ ID NO: 3346171 - RNA, 18 nt, Human
cuugaacuccuggccuca

SEQ ID NO: 3346172 - RNA, 17 nt, Human
cuugaacuccuggccuc

SEQ ID NO: 3346173 - RNA, 15 nt, Human
cuugaacuccuggcc

SEQ ID NO: 3346174 - RNA, 14 nt, Human
cuugaacuccuggc

SEQ ID NO: 3346175 - RNA, 20 nt, Human
cuugagccuugaacuuugac

SEQ ID NO: 3346176 - RNA, 22 nt, Human
cuugagccuugaacuuugaccu

SEQ ID NO: 3346177 - RNA, 18 nt, Human
cuugagccuugaacuuug

SEQ ID NO: 3346178 - RNA, 19 nt, Human
cuugagccuugaacuuuga

SEQ ID NO: 3346179 - RNA, 14 nt, Human
cuugagagggugga

SEQ ID NO: 3346180 - RNA, 17 nt, Human
cuugaccauucuccacc

SEQ ID NO: 3346181 - RNA, 20 nt, Human
cuugaccauucuccaccugc

SEQ ID NO: 3346182 - RNA, 22 nt, Human
cuugcaaaguaucccuacugua

SEQ ID NO: 3346183 - RNA, 12 nt, Human
cuugcaaaguau

SEQ ID NO: 3346184 - RNA, 14 nt, Human
cuugcaauggcagc

SEQ ID NO: 3346185 - RNA, 18 nt, Human
cuugcagacucuacagag

SEQ ID NO: 3346186 - RNA, 21 nt, Human
cuugcaugaggcuaguguggu

SEQ ID NO: 3346187 - RNA, 17 nt, Human
cuugcaugaggcuagug

SEQ ID NO: 3346188 - RNA, 12 nt, Human
gacagcugccug

SEQ ID NO: 3346189 - RNA, 13 nt, Human
gacagcugccugg

SEQ ID NO: 3346190 - RNA, 16 nt, Human
gacagacacaggcccg

SEQ ID NO: 3346191 - RNA, 15 nt, Human
gacagacacaggccc

SEQ ID NO: 3346192 - RNA, 20 nt, Human
gacacuaaccacgcuggacc

SEQ ID NO: 3346193 - RNA, 14 nt, Human
gacagacacaggcc

SEQ ID NO: 3346194 - RNA, 12 nt, Human
gacagacacagg

SEQ ID NO: 3346195 - RNA, 21 nt, Human
gacagcugccugggaucccuc

SEQ ID NO: 3346196 - RNA, 14 nt, Human
gacagcugccuggg

SEQ ID NO: 3346197 - RNA, 15 nt, Human
gacagcugccuggga

SEQ ID NO: 3346198 - RNA, 19 nt, Human
gacaggcauguucucugag

SEQ ID NO: 3346199 - RNA, 18 nt, Human
gacaggcauguucucuga

SEQ ID NO: 3346200 - RNA, 17 nt, Human
gacaggcaaugcuggcu

SEQ ID NO: 3346201 - RNA, 24 nt, Human
gacaggcaaugcuggcuguuggcu

SEQ ID NO: 3346202 - RNA, 16 nt, Human
gacaggcaaugcuggc

SEQ ID NO: 3346203 - RNA, 14 nt, Human
gacaggcaaugcug

SEQ ID NO: 3346204 - RNA, 21 nt, Human
gacaggcaagcaccuccugcc

SEQ ID NO: 3346205 - RNA, 15 nt, Human
gacauacuaaccagc

SEQ ID NO: 3346206 - RNA, 16 nt, Human
gacauacuaaccagca

SEQ ID NO: 3346207 - RNA, 17 nt, Human
gacaugucuuuucuugc

SEQ ID NO: 3346208 - RNA, 21 nt, Human
gacaugucuuuucuugcauga

SEQ ID NO: 3346209 - RNA, 17 nt, Human
gacaaugacuuacugua

SEQ ID NO: 3346210 - RNA, 20 nt, Human
gacaaugacuuacuguacau

SEQ ID NO: 3346211 - RNA, 21 nt, Human
gacaaugacuuacuguacaug

SEQ ID NO: 3346212 - RNA, 12 nt, Human
gacaaugcaaac

SEQ ID NO: 3346213 - RNA, 16 nt, Human
gacaaugcaaaccauc

SEQ ID NO: 3346214 - RNA, 12 nt, Human
gacaauuuauua

SEQ ID NO: 3346215 - RNA, 13 nt, Human
gacaauuuauuau

SEQ ID NO: 3346216 - RNA, 19 nt, Human
gacaauuuauuauggcaca

SEQ ID NO: 3346217 - RNA, 22 nt, Human
gacacaagccuucggcgccuua

SEQ ID NO: 3346218 - RNA, 17 nt, Human
gacacaggcccggcucc

SEQ ID NO: 3346219 - RNA, 15 nt, Human
gacacaggcccggcu

SEQ ID NO: 3346220 - RNA, 12 nt, Human
gacacaggcccg

SEQ ID NO: 3346221 - RNA, 16 nt, Human
gacaaugacccagugg

SEQ ID NO: 3346222 - RNA, 22 nt, Human
gacaaggauugcuacuguccua

SEQ ID NO: 3346223 - RNA, 21 nt, Human
gacaaggauugcuacuguccu

SEQ ID NO: 3346224 - RNA, 14 nt, Human
gaagucuuuguaca

SEQ ID NO: 3346225 - RNA, 18 nt, Human
gacacuaaccacgcugga

SEQ ID NO: 3346226 - RNA, 17 nt, Human
gacacuaaccacgcugg

SEQ ID NO: 3346227 - RNA, 16 nt, Human
gacacuaaccacgcug

SEQ ID NO: 3346228 - RNA, 15 nt, Human
gacacuaaccacgcu

SEQ ID NO: 3346229 - RNA, 17 nt, Human
gacacgaauauugcuga

SEQ ID NO: 3346230 - RNA, 18 nt, Human
gacacgaauauugcugau

SEQ ID NO: 3346231 - RNA, 19 nt, Human
gacacgaauauugcugaug

SEQ ID NO: 3346232 - RNA, 17 nt, Human
gacaccuugacagggca

SEQ ID NO: 3346233 - RNA, 15 nt, Human
gacaccuugacaggg

SEQ ID NO: 3346234 - RNA, 20 nt, Human
gacaccuugacagggcacac

SEQ ID NO: 3346235 - RNA, 18 nt, Human
gacaccuugacagggcac

SEQ ID NO: 3346236 - RNA, 15 nt, Human
gacacgaauauugcu

SEQ ID NO: 3346237 - RNA, 18 nt, Human
gacacaggcccggcucca

SEQ ID NO: 3346238 - RNA, 12 nt, Human
gacacccuguga

SEQ ID NO: 3346239 - RNA, 13 nt, Human
gacacccugugau

SEQ ID NO: 3346240 - RNA, 22 nt, Human
gacacccugugauggggcccug

SEQ ID NO: 3346241 - RNA, 23 nt, Human
gacacccugugauggggcccugc

SEQ ID NO: 3346242 - RNA, 17 nt, Human
gacuacucccccaggug

SEQ ID NO: 3346243 - RNA, 22 nt, Human
gacguguuaugacuccagaauu

SEQ ID NO: 3346244 - RNA, 15 nt, Human
gacuccugcaggcag

SEQ ID NO: 3346245 - RNA, 16 nt, Human
gacuccugcaggcagc

SEQ ID NO: 3346246 - RNA, 14 nt, Human
gacuccugcaggca

SEQ ID NO: 3346247 - RNA, 15 nt, Human
gacguguuaugacuc

SEQ ID NO: 3346248 - RNA, 17 nt, Human
gacguguuaugacucca

SEQ ID NO: 3346249 - RNA, 20 nt, Human
gacguguuaugacuccagaa

SEQ ID NO: 3346250 - RNA, 21 nt, Human
gacggagucccaccuuggcug

SEQ ID NO: 3346251 - RNA, 18 nt, Human
gacggagucccaccuugg

SEQ ID NO: 3346252 - RNA, 14 nt, Human
gacggagucccacc

SEQ ID NO: 3346253 - RNA, 23 nt, Human
gaccuugaacuggguacuugugg

SEQ ID NO: 3346254 - RNA, 20 nt, Human
gaccuuucaauaggaaaaac

SEQ ID NO: 3346255 - RNA, 21 nt, Human
gaccuuucaauaggaaaaacu

SEQ ID NO: 3346256 - RNA, 14 nt, Human
gaccgugaggccag

SEQ ID NO: 3346257 - RNA, 19 nt, Human
gaccgugaggccagagaca

SEQ ID NO: 3346258 - RNA, 11 nt, Human
gaccucaggcc

SEQ ID NO: 3346259 - RNA, 12 nt, Human
gaccucaggccu

SEQ ID NO: 3346260 - RNA, 14 nt, Human
gaccugaggcccuu

SEQ ID NO: 3346261 - RNA, 15 nt, Human
gaccugaggcccuuc

SEQ ID NO: 3346262 - RNA, 18 nt, Human
gaccugaggcccuucucu

SEQ ID NO: 3346263 - RNA, 21 nt, Human
gaccugaggcccuucucucca

SEQ ID NO: 3346264 - RNA, 23 nt, Human
gacccugucucaaaaaaagaaaa

SEQ ID NO: 3346265 - RNA, 16 nt, Human
gacccugcccuguggg

SEQ ID NO: 3346266 - RNA, 13 nt, Human
gacccugcccugu

SEQ ID NO: 3346267 - RNA, 15 nt, Human
gacccugcccugugg

SEQ ID NO: 3346268 - RNA, 19 nt, Human
gacccugaggcccagaggg

SEQ ID NO: 3346269 - RNA, 20 nt, Human
gacccugaggcccagagggc

SEQ ID NO: 3346270 - RNA, 12 nt, Human
gacccugcccug

SEQ ID NO: 3346271 - RNA, 21 nt, Human
gacccugaggcccagagggcc

SEQ ID NO: 3346272 - RNA, 18 nt, Human
gacccugaggcccagagg

SEQ ID NO: 3346273 - RNA, 16 nt, Human
gacccaugcugcccug

SEQ ID NO: 3346274 - RNA, 14 nt, Human
gacccaugcugccc

SEQ ID NO: 3346275 - RNA, 15 nt, Human
gacccaugcugcccu

SEQ ID NO: 3346276 - RNA, 13 nt, Human
gacccaugcugcc

SEQ ID NO: 3346277 - RNA, 11 nt, Human
gacccacugcu

SEQ ID NO: 3346278 - RNA, 18 nt, Human
gagccagauuucacucuc

SEQ ID NO: 3346279 - RNA, 19 nt, Human
gagccagauuucacucucc

SEQ ID NO: 3346280 - RNA, 15 nt, Human
gagccagauuucacu

SEQ ID NO: 3346281 - RNA, 13 nt, Human
gagccacugcacc

SEQ ID NO: 3346282 - RNA, 19 nt, Human
gagccacugcaccgggcca

SEQ ID NO: 3346283 - RNA, 18 nt, Human
gagccacugcaccgggcc

SEQ ID NO: 3346284 - RNA, 17 nt, Human
gagcccaccuuggcuca

SEQ ID NO: 3346285 - RNA, 15 nt, Human
gagcccaccuuggcu

SEQ ID NO: 3346286 - RNA, 13 nt, Human
gagcccaccuugg

SEQ ID NO: 3346287 - RNA, 13 nt, Human
gagccagauuuca

SEQ ID NO: 3346288 - RNA, 22 nt, Human
gagcagccacauuccugaugcu

SEQ ID NO: 3346289 - RNA, 21 nt, Human
gagcagccacauuccugaugc

SEQ ID NO: 3346290 - RNA, 19 nt, Human
gagcagagaccaucccuga

SEQ ID NO: 3346291 - RNA, 21 nt, Human
gagcagagaccaucccugaag

SEQ ID NO: 3346292 - RNA, 23 nt, Human
gagcagagaccaucccugaaggc

SEQ ID NO: 3346293 - RNA, 17 nt, Human
gagcagagaccaucccu

SEQ ID NO: 3346294 - RNA, 18 nt, Human
gagcagagaccaucccug

SEQ ID NO: 3346295 - RNA, 16 nt, Human
gagcagagaccauccc

SEQ ID NO: 3346296 - RNA, 19 nt, Human
gagauagccaaggccaaag

SEQ ID NO: 3346297 - RNA, 20 nt, Human
gagauagccaaggccaaagg

SEQ ID NO: 3346298 - RNA, 21 nt, Human
gagauagccaaggccaaagga

SEQ ID NO: 3346299 - RNA, 18 nt, Human
gagcccacgcccccacug

SEQ ID NO: 3346300 - RNA, 20 nt, Human
gagccgagaucacgccacug

SEQ ID NO: 3346301 - RNA, 19 nt, Human
gagccgagaucacgccacu

SEQ ID NO: 3346302 - RNA, 22 nt, Human
gagccgagaucacgccacugca

SEQ ID NO: 3346303 - RNA, 21 nt, Human
gagccgagaucacgccacugc

SEQ ID NO: 3346304 - RNA, 13 nt, Human
gagccucagcauc

SEQ ID NO: 3346305 - RNA, 15 nt, Human
gagccucagcauccu

SEQ ID NO: 3346306 - RNA, 14 nt, Human
gagccucagcaucc

SEQ ID NO: 3346307 - RNA, 17 nt, Human
gagccucagcauccugg

SEQ ID NO: 3346308 - RNA, 12 nt, Human
gagccugcaguu

SEQ ID NO: 3346309 - RNA, 20 nt, Human
gagcuuugaaaauucagugg

SEQ ID NO: 3346310 - RNA, 22 nt, Human
gagcuuucugcuaucaaagagg

SEQ ID NO: 3346311 - RNA, 16 nt, Human
gaggaaagcaaaggag

SEQ ID NO: 3346312 - RNA, 17 nt, Human
gaggaaagcaaaggaga

SEQ ID NO: 3346313 - RNA, 18 nt, Human
gaggaagccgcuggggcc

SEQ ID NO: 3346314 - RNA, 14 nt, Human
gaggaagccgcugg

SEQ ID NO: 3346315 - RNA, 17 nt, Human
gaggaagccgcuggggc

SEQ ID NO: 3346316 - RNA, 13 nt, Human
gaggaagccgcug

SEQ ID NO: 3346317 - RNA, 17 nt, Human
gaggaagagaaaaaaua

SEQ ID NO: 3346318 - RNA, 16 nt, Human
gaggaacaaggcaagg

SEQ ID NO: 3346319 - RNA, 14 nt, Human
gaggaacaaggcaa

SEQ ID NO: 3346320 - RNA, 15 nt, Human
gagcuagcagcaggg

SEQ ID NO: 3346321 - RNA, 17 nt, Human
gagcuagcagcagggag

SEQ ID NO: 3346322 - RNA, 15 nt, Human
gagccugcaguuauu

SEQ ID NO: 3346323 - RNA, 15 nt, Human
gagcugaguggggga

SEQ ID NO: 3346324 - RNA, 17 nt, Human
gagagaagagaaugcac

SEQ ID NO: 3346325 - RNA, 20 nt, Human
gagagggugggagugggccc

SEQ ID NO: 3346326 - RNA, 21 nt, Human
gagagggugggagugggccca

SEQ ID NO: 3346327 - RNA, 13 nt, Human
gagaggggaacag

SEQ ID NO: 3346328 - RNA, 13 nt, Human
gagagccuuccag

SEQ ID NO: 3346329 - RNA, 22 nt, Human
gagacuccugcaggcagccagg

SEQ ID NO: 3346330 - RNA, 16 nt, Human
gagacucgcgacaaug

SEQ ID NO: 3346331 - RNA, 13 nt, Human
gagacucugucuc

SEQ ID NO: 3346332 - RNA, 14 nt, Human
gagacucugucuca

SEQ ID NO: 3346333 - RNA, 14 nt, Human
gagacagcccgggc

SEQ ID NO: 3346334 - RNA, 17 nt, Human
gagacagcccgggcucu

SEQ ID NO: 3346335 - RNA, 18 nt, Human
gagacagcccgggcucug

SEQ ID NO: 3346336 - RNA, 19 nt, Human
gagacagcccgggcucugc

SEQ ID NO: 3346337 - RNA, 20 nt, Human
gagacagcccgggcucugcc

SEQ ID NO: 3346338 - RNA, 21 nt, Human
gagacagcccgggcucugccu

SEQ ID NO: 3346339 - RNA, 22 nt, Human
gagacagcccgggcucugccuc

SEQ ID NO: 3346340 - RNA, 23 nt, Human
gagacagcccgggcucugccucc

SEQ ID NO: 3346341 - RNA, 24 nt, Human
gagacagcccgggcucugccuccc

SEQ ID NO: 3346342 - RNA, 22 nt, Human
gagaaaguacuucuccacccug

SEQ ID NO: 3346343 - RNA, 23 nt, Human
gagaaaguacuucuccacccugc

SEQ ID NO: 3346344 - RNA, 17 nt, Human
gacuccugcaggcagcc

SEQ ID NO: 3346345 - RNA, 18 nt, Human
gacucgcgacaaugcaaa

SEQ ID NO: 3346346 - RNA, 19 nt, Human
gacucgcgacaaugcaaac

SEQ ID NO: 3346347 - RNA, 16 nt, Human
gacuuggaagcuccgc

SEQ ID NO: 3346348 - RNA, 15 nt, Human
gacuuggaagcuccg

SEQ ID NO: 3346349 - RNA, 14 nt, Human
gacuuggaagcucc

SEQ ID NO: 3346350 - RNA, 21 nt, Human
gagaaaauggacguguuauga

SEQ ID NO: 3346351 - RNA, 13 nt, Human
gagaaacaaacuu

SEQ ID NO: 3346352 - RNA, 15 nt, Human
gagaaacaaacuuuu

SEQ ID NO: 3346353 - RNA, 13 nt, Human
gacuuggaagcuc

SEQ ID NO: 3346354 - RNA, 12 nt, Human
gagacagcccgg

SEQ ID NO: 3346355 - RNA, 19 nt, Human
gagacagaguuuucacucu

SEQ ID NO: 3346356 - RNA, 15 nt, Human
gagacacaagccuuc

SEQ ID NO: 3346357 - RNA, 17 nt, Human
gagacacaagccuucgg

SEQ ID NO: 3346358 - RNA, 20 nt, Human
gagaaugcacaaacagaggc

SEQ ID NO: 3346359 - RNA, 21 nt, Human
gagaaugcacaaacagaggcc

SEQ ID NO: 3346360 - RNA, 12 nt, Human
gaucagccuggg

SEQ ID NO: 3346361 - RNA, 15 nt, Human
gaucagccugggcaa

SEQ ID NO: 3346362 - RNA, 22 nt, Human
gaucagucugauucccaagcuc

SEQ ID NO: 3346363 - RNA, 18 nt, Human
gaucacgccacugcacua

SEQ ID NO: 3346364 - RNA, 16 nt, Human
gaucacgccacugcac

SEQ ID NO: 3346365 - RNA, 21 nt, Human
gaucauccacugugccaugug

SEQ ID NO: 3346366 - RNA, 16 nt, Human
gaucauccacugugcc

SEQ ID NO: 3346367 - RNA, 19 nt, Human
gaucauccacugugccaug

SEQ ID NO: 3346368 - RNA, 17 nt, Human
gaucauccacugugcca

SEQ ID NO: 3346369 - RNA, 14 nt, Human
gauaauacaccacu

SEQ ID NO: 3346370 - RNA, 18 nt, Human
gauaauacaccacuacau

SEQ ID NO: 3346371 - RNA, 21 nt, Human
gauaauacaccacuacauucu

SEQ ID NO: 3346372 - RNA, 22 nt, Human
gauaauacaccacuacauucug

SEQ ID NO: 3346373 - RNA, 21 nt, Human
gauagcacagacccugcccug

SEQ ID NO: 3346374 - RNA, 22 nt, Human
gauagcacagacccugcccugu

SEQ ID NO: 3346375 - RNA, 20 nt, Human
gauagcacagacccugcccu

SEQ ID NO: 3346376 - RNA, 18 nt, Human
gauacaggaaaagcugcu

SEQ ID NO: 3346377 - RNA, 13 nt, Human
gaggaaggaaacc

SEQ ID NO: 3346378 - RNA, 19 nt, Human
gaggaaggaaacccagcuc

SEQ ID NO: 3346379 - RNA, 20 nt, Human
gaggaaggaaacccagcucu

SEQ ID NO: 3346380 - RNA, 21 nt, Human
gauccugagccagauuucacu

SEQ ID NO: 3346381 - RNA, 22 nt, Human
gauccugagccagauuucacuc

SEQ ID NO: 3346382 - RNA, 15 nt, Human
gaucccucauccuca

SEQ ID NO: 3346383 - RNA, 16 nt, Human
gaucccucauccucau

SEQ ID NO: 3346384 - RNA, 17 nt, Human
gaucuuugcagacaggc

SEQ ID NO: 3346385 - RNA, 18 nt, Human
gaucuuugcagacaggca

SEQ ID NO: 3346386 - RNA, 14 nt, Human
gaugcagccucaca

SEQ ID NO: 3346387 - RNA, 12 nt, Human
gaugcagccuca

SEQ ID NO: 3346388 - RNA, 17 nt, Human
gaugccugguggcagcu

SEQ ID NO: 3346389 - RNA, 21 nt, Human
gaugcacagaguuguuacauu

SEQ ID NO: 3346390 - RNA, 22 nt, Human
gaugcacagaguuguuacauuu

SEQ ID NO: 3346391 - RNA, 13 nt, Human
gaugcaccagccc

SEQ ID NO: 3346392 - RNA, 22 nt, Human
gauggccgggcgcgguggcuca

SEQ ID NO: 3346393 - RNA, 22 nt, Human
gauggauuuccagccaaagccu

SEQ ID NO: 3346394 - RNA, 19 nt, Human
gaugccugguggcagcugc

SEQ ID NO: 3346395 - RNA, 18 nt, Human
gaugccugguggcagcug

SEQ ID NO: 3346396 - RNA, 14 nt, Human
gauggggcccugcc

SEQ ID NO: 3346397 - RNA, 22 nt, Human
gauggggcccugccuccuuugu

SEQ ID NO: 3346398 - RNA, 13 nt, Human
gauggggcccugc

SEQ ID NO: 3346399 - RNA, 15 nt, Human
gcaaucaaaucugcu

SEQ ID NO: 3346400 - RNA, 17 nt, Human
gcaaucaaaucugcuuu

SEQ ID NO: 3346401 - RNA, 15 nt, Human
gcaaugaccuuucaa

SEQ ID NO: 3346402 - RNA, 17 nt, Human
gcaaugaccuuucaaua

SEQ ID NO: 3346403 - RNA, 20 nt, Human
gcaaugaccuuucaauagga

SEQ ID NO: 3346404 - RNA, 22 nt, Human
gcaaugaccuuucaauaggaaa

SEQ ID NO: 3346405 - RNA, 23 nt, Human
gcaaugcuggcuguuggcugggg

SEQ ID NO: 3346406 - RNA, 22 nt, Human
gcaaugcuggcuguuggcuggg

SEQ ID NO: 3346407 - RNA, 14 nt, Human
gcaaugcuggcugu

SEQ ID NO: 3346408 - RNA, 13 nt, Human
gcaaugcuggcug

SEQ ID NO: 3346409 - RNA, 23 nt, Human
gcaaugaccuuucaauaggaaaa

SEQ ID NO: 3346410 - RNA, 11 nt, Human
gcaaggcuguc

SEQ ID NO: 3346411 - RNA, 18 nt, Human
gcaaggagauuuacaacu

SEQ ID NO: 3346412 - RNA, 17 nt, Human
gcaagaauugaagcagg

SEQ ID NO: 3346413 - RNA, 14 nt, Human
gcaagacgcugugc

SEQ ID NO: 3346414 - RNA, 20 nt, Human
gcaagacgcugugcugcccu

SEQ ID NO: 3346415 - RNA, 21 nt, Human
gcaagacgcugugcugcccug

SEQ ID NO: 3346416 - RNA, 22 nt, Human
gcaagacgcugugcugcccugc

SEQ ID NO: 3346417 - RNA, 23 nt, Human
gcaagacgcugugcugcccugcc

SEQ ID NO: 3346418 - RNA, 16 nt, Human
gcaaaguaucccuacu

SEQ ID NO: 3346419 - RNA, 18 nt, Human
gauucccaagcucugcuc

SEQ ID NO: 3346420 - RNA, 19 nt, Human
gauucauauuuacuucuua

SEQ ID NO: 3346421 - RNA, 18 nt, Human
gauucauauuuacuucuu

SEQ ID NO: 3346422 - RNA, 17 nt, Human
gauucauauuuacuucu

SEQ ID NO: 3346423 - RNA, 23 nt, Human
gauggggcugcaccggcuggccu

SEQ ID NO: 3346424 - RNA, 19 nt, Human
gauggggcugcaccggcug

SEQ ID NO: 3346425 - RNA, 13 nt, Human
gauucagcucugc

SEQ ID NO: 3346426 - RNA, 19 nt, Human
gauucagacagcugccugg

SEQ ID NO: 3346427 - RNA, 18 nt, Human
gauucagacagcugccug

SEQ ID NO: 3346428 - RNA, 20 nt, Human
gauucccaagcucugcuccu

SEQ ID NO: 3346429 - RNA, 19 nt, Human
gauucccaagcucugcucc

SEQ ID NO: 3346430 - RNA, 12 nt, Human
gauucuuuccug

SEQ ID NO: 3346431 - RNA, 16 nt, Human
gauucuuuccugaggc

SEQ ID NO: 3346432 - RNA, 17 nt, Human
gauucuuuccugaggcu

SEQ ID NO: 3346433 - RNA, 18 nt, Human
gauucuuuccugaggcug

SEQ ID NO: 3346434 - RNA, 20 nt, Human
gauugcaacaggcugggcuu

SEQ ID NO: 3346435 - RNA, 16 nt, Human
gauugcaccacugcac

SEQ ID NO: 3346436 - RNA, 23 nt, Human
gauugcaccacugcacuccagcc

SEQ ID NO: 3346437 - RNA, 21 nt, Human
gauugcaacaggcugggcuuc

SEQ ID NO: 3346438 - RNA, 18 nt, Human
gauugcaacaggcugggc

SEQ ID NO: 3346439 - RNA, 15 nt, Human
gauuuccguuaaaau

SEQ ID NO: 3346440 - RNA, 11 nt, Human
gauuucuguuu

SEQ ID NO: 3346441 - RNA, 19 nt, Human
gauuucuguuuagauaaua

SEQ ID NO: 3346442 - RNA, 14 nt, Human
gcagugggagcugc

SEQ ID NO: 3346443 - RNA, 12 nt, Human
gcagugggagcu

SEQ ID NO: 3346444 - RNA, 13 nt, Human
gcagugggagcug

SEQ ID NO: 3346445 - RNA, 22 nt, Human
gcaguggugguuuucuguucuu

SEQ ID NO: 3346446 - RNA, 23 nt, Human
gcaguggugguuuucuguucuuu

SEQ ID NO: 3346447 - RNA, 17 nt, Human
gcaguuauuaacacuaa

SEQ ID NO: 3346448 - RNA, 20 nt, Human
gcaggucuugaacuccuggc

SEQ ID NO: 3346449 - RNA, 19 nt, Human
gcaggucuugaacuccugg

SEQ ID NO: 3346450 - RNA, 22 nt, Human
gcagguccaggguuugaguuca

SEQ ID NO: 3346451 - RNA, 16 nt, Human
gcagugcaugcugucc

SEQ ID NO: 3346452 - RNA, 15 nt, Human
gcagugcaugcuguc

SEQ ID NO: 3346453 - RNA, 15 nt, Human
gcaggcagccaggcc

SEQ ID NO: 3346454 - RNA, 16 nt, Human
gcaggcagccaggcca

SEQ ID NO: 3346455 - RNA, 21 nt, Human
gcagggcucagcggggacagc

SEQ ID NO: 3346456 - RNA, 19 nt, Human
gcagggcucagcggggaca

SEQ ID NO: 3346457 - RNA, 18 nt, Human
gcagggucucacucuguc

SEQ ID NO: 3346458 - RNA, 17 nt, Human
gcagggucucacucugu

SEQ ID NO: 3346459 - RNA, 14 nt, Human
gcagggcucagcgg

SEQ ID NO: 3346460 - RNA, 22 nt, Human
gcaggggaggguagagcggaga

SEQ ID NO: 3346461 - RNA, 18 nt, Human
gcaugcgggcuuccuccu

SEQ ID NO: 3346462 - RNA, 14 nt, Human
gcauguucucugag

SEQ ID NO: 3346463 - RNA, 21 nt, Human
gcauguucucugaggacacua

SEQ ID NO: 3346464 - RNA, 15 nt, Human
gcauguucucugagg

SEQ ID NO: 3346465 - RNA, 14 nt, Human
gccaaacucaccug

SEQ ID NO: 3346466 - RNA, 16 nt, Human
gccaaacucaccugcc

SEQ ID NO: 3346467 - RNA, 22 nt, Human
gccaaagcuaggccuggccaga

SEQ ID NO: 3346468 - RNA, 16 nt, Human
gccaaagcuaggccug

SEQ ID NO: 3346469 - RNA, 16 nt, Human
gccaaagccuccucca

SEQ ID NO: 3346470 - RNA, 19 nt, Human
gccaaagccuccuccagcc

SEQ ID NO: 3346471 - RNA, 20 nt, Human
gccaaagccaaagcuaggcc

SEQ ID NO: 3346472 - RNA, 13 nt, Human
gccaaagccaaag

SEQ ID NO: 3346473 - RNA, 16 nt, Human
gcauuuguuugaacug

SEQ ID NO: 3346474 - RNA, 14 nt, Human
gcauuugcugaaua

SEQ ID NO: 3346475 - RNA, 21 nt, Human
gcauuugaggucuguucuuuc

SEQ ID NO: 3346476 - RNA, 13 nt, Human
gcauuugcugaau

SEQ ID NO: 3346477 - RNA, 17 nt, Human
gcauuaucuagauacug

SEQ ID NO: 3346478 - RNA, 12 nt, Human
gcacgauuucug

SEQ ID NO: 3346479 - RNA, 18 nt, Human
gcaccuuagacagucccu

SEQ ID NO: 3346480 - RNA, 18 nt, Human
gcaccuggaauauauaac

SEQ ID NO: 3346481 - RNA, 21 nt, Human
gcaccuggaauauauaaccag

SEQ ID NO: 3346482 - RNA, 15 nt, Human
gcacccucaggcagg

SEQ ID NO: 3346483 - RNA, 22 nt, Human
gcaccuggaauauauaaccagu

SEQ ID NO: 3346484 - RNA, 14 nt, Human
gcaccuuagacagu

SEQ ID NO: 3346485 - RNA, 17 nt, Human
gcaccuuagacaguccc

SEQ ID NO: 3346486 - RNA, 19 nt, Human
gcacccggccccugcuggu

SEQ ID NO: 3346487 - RNA, 18 nt, Human
gcacccggccccugcugg

SEQ ID NO: 3346488 - RNA, 22 nt, Human
gcacccaccaucaugucuggcu

SEQ ID NO: 3346489 - RNA, 16 nt, Human
gcaccagcagccugga

SEQ ID NO: 3346490 - RNA, 21 nt, Human
gcaccacugcacuccagccug

SEQ ID NO: 3346491 - RNA, 22 nt, Human
gcaccacugcacuccagccugg

SEQ ID NO: 3346492 - RNA, 15 nt, Human
gcaccagcagccugg

SEQ ID NO: 3346493 - RNA, 14 nt, Human
gcaccagcagccug

SEQ ID NO: 3346494 - RNA, 13 nt, Human
gcaauggcagccu

SEQ ID NO: 3346495 - RNA, 12 nt, Human
gcaauggcagcc

SEQ ID NO: 3346496 - RNA, 20 nt, Human
gcaccacugcacuccagccu

SEQ ID NO: 3346497 - RNA, 16 nt, Human
gcacugcuuccaguga

SEQ ID NO: 3346498 - RNA, 18 nt, Human
gcacugcuuccagugagg

SEQ ID NO: 3346499 - RNA, 20 nt, Human
gcacugcuuccagugaggcu

SEQ ID NO: 3346500 - RNA, 15 nt, Human
gcacugcuuccagug

SEQ ID NO: 3346501 - RNA, 12 nt, Human
gcagacaggacc

SEQ ID NO: 3346502 - RNA, 13 nt, Human
gcagacaggacca

SEQ ID NO: 3346503 - RNA, 15 nt, Human
gcagacaggaccagg

SEQ ID NO: 3346504 - RNA, 14 nt, Human
gcagacaggcaagc

SEQ ID NO: 3346505 - RNA, 19 nt, Human
gcagacaggcaagcaccuc

SEQ ID NO: 3346506 - RNA, 23 nt, Human
gcagacaggcaagcaccuccugc

SEQ ID NO: 3346507 - RNA, 14 nt, Human
gcagcccugcagag

SEQ ID NO: 3346508 - RNA, 15 nt, Human
gcagcccugcagagg

SEQ ID NO: 3346509 - RNA, 16 nt, Human
gcagcccugcagaggg

SEQ ID NO: 3346510 - RNA, 17 nt, Human
gcagcccugcagagggc

SEQ ID NO: 3346511 - RNA, 15 nt, Human
gcagcucaccucucc

SEQ ID NO: 3346512 - RNA, 15 nt, Human
gcagccuuggcaaac

SEQ ID NO: 3346513 - RNA, 14 nt, Human
gcagcucaccucuc

SEQ ID NO: 3346514 - RNA, 23 nt, Human
gcaggaggaucacuugaguccag

SEQ ID NO: 3346515 - RNA, 20 nt, Human
gcaggaggaucacuugaguc

SEQ ID NO: 3346516 - RNA, 13 nt, Human
gcaggcagccagg

SEQ ID NO: 3346517 - RNA, 14 nt, Human
gcaggcagccaggc

SEQ ID NO: 3346518 - RNA, 12 nt, Human
gcaggcagccag

SEQ ID NO: 3346519 - RNA, 12 nt, Human
gcagcaauaaag

SEQ ID NO: 3346520 - RNA, 22 nt, Human
gcagauacaggaaaagcugcug

SEQ ID NO: 3346521 - RNA, 17 nt, Human
gcagacaguuaagagaa

SEQ ID NO: 3346522 - RNA, 21 nt, Human
gcagaguugaagacagagcua

SEQ ID NO: 3346523 - RNA, 20 nt, Human
gcagaguugaagacagagcu

SEQ ID NO: 3346524 - RNA, 24 nt, Human
gcagccccauucugccugcccagg

SEQ ID NO: 3346525 - RNA, 21 nt, Human
gcagccccauucugccugccc

SEQ ID NO: 3346526 - RNA, 19 nt, Human
gcagccccauucugccugc

SEQ ID NO: 3346527 - RNA, 18 nt, Human
gcagccccauucugccug

SEQ ID NO: 3346528 - RNA, 16 nt, Human
gcagcaauaaagcagc

SEQ ID NO: 3346529 - RNA, 23 nt, Human
gcagcaauaaagcagcguuucua

SEQ ID NO: 3346530 - RNA, 17 nt, Human
gcagccccauucugccu

SEQ ID NO: 3346531 - RNA, 13 nt, Human
gcagcccugcaga

SEQ ID NO: 3346532 - RNA, 20 nt, Human
gcagccccuguucuggcaga

SEQ ID NO: 3346533 - RNA, 21 nt, Human
gcagccccuguucuggcagag

SEQ ID NO: 3346534 - RNA, 13 nt, Human
gccugguggcagc

SEQ ID NO: 3346535 - RNA, 21 nt, Human
gccugguggcagcugcggucc

SEQ ID NO: 3346536 - RNA, 19 nt, Human
gccugguggcagcugcggu

SEQ ID NO: 3346537 - RNA, 18 nt, Human
gccugguggcagcugcgg

SEQ ID NO: 3346538 - RNA, 21 nt, Human
gccugggggcugggcagagga

SEQ ID NO: 3346539 - RNA, 22 nt, Human
gccugggggcugggcagaggaa

SEQ ID NO: 3346540 - RNA, 21 nt, Human
gccuguugggccaggagccuc

SEQ ID NO: 3346541 - RNA, 16 nt, Human
gccuuacacaaugguu

SEQ ID NO: 3346542 - RNA, 20 nt, Human
gccuuacacaaugguuuucu

SEQ ID NO: 3346543 - RNA, 18 nt, Human
gccuuacccucauguucu

SEQ ID NO: 3346544 - RNA, 21 nt, Human
gccuuacacaaugguuuucuu

SEQ ID NO: 3346545 - RNA, 18 nt, Human
gccuuagaagucacacag

SEQ ID NO: 3346546 - RNA, 17 nt, Human
gccuuagaagucacaca

SEQ ID NO: 3346547 - RNA, 19 nt, Human
gccuuagaagucacacagu

SEQ ID NO: 3346548 - RNA, 10 nt, Human
gccuuaugga

SEQ ID NO: 3346549 - RNA, 14 nt, Human
gccuuauggaacac

SEQ ID NO: 3346550 - RNA, 16 nt, Human
gccuuauggaacacuc

SEQ ID NO: 3346551 - RNA, 18 nt, Human
gccuuauggaacacucug

SEQ ID NO: 3346552 - RNA, 19 nt, Human
gccuuauggaacacucuga

SEQ ID NO: 3346553 - RNA, 12 nt, Human
gccuuccagggg

SEQ ID NO: 3346554 - RNA, 15 nt, Human
gccuuccaggggugg

SEQ ID NO: 3346555 - RNA, 16 nt, Human
gccuuccagggguggg

SEQ ID NO: 3346556 - RNA, 23 nt, Human
gcgacaaugcaaaccaucauuga

SEQ ID NO: 3346557 - RNA, 19 nt, Human
gcgucucauacucaccuca

SEQ ID NO: 3346558 - RNA, 15 nt, Human
gcggacagccacggc

SEQ ID NO: 3346559 - RNA, 19 nt, Human
gcggaaugaaccacaucuu

SEQ ID NO: 3346560 - RNA, 13 nt, Human
gcggacagccacg

SEQ ID NO: 3346561 - RNA, 11 nt, Human
gcggacagcca

SEQ ID NO: 3346562 - RNA, 19 nt, Human
gcgcgcacacacacacaua

SEQ ID NO: 3346563 - RNA, 15 nt, Human
gcgccuacaggagug

SEQ ID NO: 3346564 - RNA, 13 nt, Human
gcgcgcacacaca

SEQ ID NO: 3346565 - RNA, 18 nt, Human
gcgcgcacacacacacau

SEQ ID NO: 3346566 - RNA, 13 nt, Human
gcuaagagggagg

SEQ ID NO: 3346567 - RNA, 14 nt, Human
gcuacacaggggaa

SEQ ID NO: 3346568 - RNA, 13 nt, Human
gcuacacacugca

SEQ ID NO: 3346569 - RNA, 20 nt, Human
gcuacacacugcauguuugu

SEQ ID NO: 3346570 - RNA, 20 nt, Human
gcuaagagggagggagggcu

SEQ ID NO: 3346571 - RNA, 15 nt, Human
gcuaggaacacuccu

SEQ ID NO: 3346572 - RNA, 16 nt, Human
gcuaccuuuguauucu

SEQ ID NO: 3346573 - RNA, 16 nt, Human
gccucccaacucaccc

SEQ ID NO: 3346574 - RNA, 17 nt, Human
gccucccaacucacccc

SEQ ID NO: 3346575 - RNA, 18 nt, Human
gccucccaacucacccca

SEQ ID NO: 3346576 - RNA, 19 nt, Human
gccucccaacucaccccag

SEQ ID NO: 3346577 - RNA, 14 nt, Human
gccucccaucaccc

SEQ ID NO: 3346578 - RNA, 16 nt, Human
gccucccaucacccgc

SEQ ID NO: 3346579 - RNA, 13 nt, Human
gccucccaacuca

SEQ ID NO: 3346580 - RNA, 19 nt, Human
gccucccaaagugcuggga

SEQ ID NO: 3346581 - RNA, 18 nt, Human
gccucccaaagugcuggg

SEQ ID NO: 3346582 - RNA, 16 nt, Human
gccucagcauccuggc

SEQ ID NO: 3346583 - RNA, 15 nt, Human
gccucagcauccugg

SEQ ID NO: 3346584 - RNA, 18 nt, Human
gccucacaguccuuacca

SEQ ID NO: 3346585 - RNA, 17 nt, Human
gccucccgaguagcugg

SEQ ID NO: 3346586 - RNA, 19 nt, Human
gccucccgaguagcuggga

SEQ ID NO: 3346587 - RNA, 18 nt, Human
gccucccgaguagcuggg

SEQ ID NO: 3346588 - RNA, 13 nt, Human
gccugcaagggag

SEQ ID NO: 3346589 - RNA, 15 nt, Human
gccugcaagggagug

SEQ ID NO: 3346590 - RNA, 13 nt, Human
gccucugccucug

SEQ ID NO: 3346591 - RNA, 12 nt, Human
gccucugccucu

SEQ ID NO: 3346592 - RNA, 14 nt, Human
gccucugcacuccc

SEQ ID NO: 3346593 - RNA, 21 nt, Human
gccucugacacacagcucugu

SEQ ID NO: 3346594 - RNA, 20 nt, Human
gccucugacacacagcucug

SEQ ID NO: 3346595 - RNA, 19 nt, Human
gccucugacacacagcucu

SEQ ID NO: 3346596 - RNA, 16 nt, Human
gccucucucaggccaa

SEQ ID NO: 3346597 - RNA, 16 nt, Human
gccucugacacacagc

SEQ ID NO: 3346598 - RNA, 18 nt, Human
gccucugacacacagcuc

SEQ ID NO: 3346599 - RNA, 17 nt, Human
gccucugacacacagcu

SEQ ID NO: 3346600 - RNA, 13 nt, Human
gccucucucaggc

SEQ ID NO: 3346601 - RNA, 14 nt, Human
gccucucucaggcc

SEQ ID NO: 3346602 - RNA, 17 nt, Human
gccucaaccuccugggc

SEQ ID NO: 3346603 - RNA, 13 nt, Human
gccucacaguccu

SEQ ID NO: 3346604 - RNA, 17 nt, Human
gccucacaguccuuacc

SEQ ID NO: 3346605 - RNA, 19 nt, Human
gccucaaccuccugggcua

SEQ ID NO: 3346606 - RNA, 18 nt, Human
gccucaaccuccugggcu

SEQ ID NO: 3346607 - RNA, 20 nt, Human
gccguguaaccauggaccca

SEQ ID NO: 3346608 - RNA, 15 nt, Human
gccgucuaccugagg

SEQ ID NO: 3346609 - RNA, 16 nt, Human
gccgucuaccugaggg

SEQ ID NO: 3346610 - RNA, 17 nt, Human
gccgucuaccugagggg

SEQ ID NO: 3346611 - RNA, 14 nt, Human
gcccuucucuccag

SEQ ID NO: 3346612 - RNA, 16 nt, Human
gcccuucucuccagcc

SEQ ID NO: 3346613 - RNA, 17 nt, Human
gcccuucucuccagccc

SEQ ID NO: 3346614 - RNA, 13 nt, Human
gcccuucucucca

SEQ ID NO: 3346615 - RNA, 19 nt, Human
gccgagaucacgccacugc

SEQ ID NO: 3346616 - RNA, 22 nt, Human
gccgagaucacgccacugcacu

SEQ ID NO: 3346617 - RNA, 21 nt, Human
gccgagaucacgccacugcac

SEQ ID NO: 3346618 - RNA, 20 nt, Human
gccgagaucacgccacugca

SEQ ID NO: 3346619 - RNA, 11 nt, Human
gccgcagcccu

SEQ ID NO: 3346620 - RNA, 12 nt, Human
gccgcagcccug

SEQ ID NO: 3346621 - RNA, 21 nt, Human
gccgggcgcgguggcucacgc

SEQ ID NO: 3346622 - RNA, 12 nt, Human
gcccaggcuggc

SEQ ID NO: 3346623 - RNA, 22 nt, Human
gcccaggccccugccacccugg

SEQ ID NO: 3346624 - RNA, 23 nt, Human
gcccaggccccugccacccuggg

SEQ ID NO: 3346625 - RNA, 21 nt, Human
gcccagagaggguggugaccu

SEQ ID NO: 3346626 - RNA, 15 nt, Human
gcccagagagggugg

SEQ ID NO: 3346627 - RNA, 22 nt, Human
gcccaguuggguggaugccugg

SEQ ID NO: 3346628 - RNA, 12 nt, Human
gccccagugccc

SEQ ID NO: 3346629 - RNA, 18 nt, Human
gccccaucccaaacccuu

SEQ ID NO: 3346630 - RNA, 14 nt, Human
gccccagugcccac

SEQ ID NO: 3346631 - RNA, 13 nt, Human
gccccagugccca

SEQ ID NO: 3346632 - RNA, 21 nt, Human
gccccagugcccacaggauca

SEQ ID NO: 3346633 - RNA, 13 nt, Human
gccccauccucug

SEQ ID NO: 3346634 - RNA, 14 nt, Human
gccccauccucugu

SEQ ID NO: 3346635 - RNA, 22 nt, Human
gccccauccucuguacagagcc

SEQ ID NO: 3346636 - RNA, 14 nt, Human
gccccauucugccu

SEQ ID NO: 3346637 - RNA, 20 nt, Human
gccccuucugacccaugcug

SEQ ID NO: 3346638 - RNA, 15 nt, Human
gccccgaggccuucu

SEQ ID NO: 3346639 - RNA, 14 nt, Human
gccccucagggucc

SEQ ID NO: 3346640 - RNA, 18 nt, Human
gccccgaggccuucucug

SEQ ID NO: 3346641 - RNA, 23 nt, Human
gccccucaacucuccuccagagu

SEQ ID NO: 3346642 - RNA, 16 nt, Human
gccccucagggucccu

SEQ ID NO: 3346643 - RNA, 15 nt, Human
gcccugcagagggca

SEQ ID NO: 3346644 - RNA, 14 nt, Human
gcccugcagagggc

SEQ ID NO: 3346645 - RNA, 13 nt, Human
gcccugcagaggg

SEQ ID NO: 3346646 - RNA, 12 nt, Human
gcccucugccca

SEQ ID NO: 3346647 - RNA, 13 nt, Human
gcccucugcccac

SEQ ID NO: 3346648 - RNA, 16 nt, Human
gcccucugcccacucc

SEQ ID NO: 3346649 - RNA, 18 nt, Human
gcccucugcccacucccu

SEQ ID NO: 3346650 - RNA, 22 nt, Human
gcccuccaagaccuucuccuuc

SEQ ID NO: 3346651 - RNA, 23 nt, Human
gcccuccaagaccuucuccuuca

SEQ ID NO: 3346652 - RNA, 19 nt, Human
gcccuccaagaccuucucc

SEQ ID NO: 3346653 - RNA, 21 nt, Human
gcccuccaagaccuucuccuu

SEQ ID NO: 3346654 - RNA, 14 nt, Human
gccaggagccuccu

SEQ ID NO: 3346655 - RNA, 16 nt, Human
gccaggagccuccugc

SEQ ID NO: 3346656 - RNA, 19 nt, Human
gccaggagccuccugcccu

SEQ ID NO: 3346657 - RNA, 20 nt, Human
gccaggagccuccugcccuu

SEQ ID NO: 3346658 - RNA, 20 nt, Human
gccaggaagccagcaggcuc

SEQ ID NO: 3346659 - RNA, 11 nt, Human
gccaggaagcc

SEQ ID NO: 3346660 - RNA, 20 nt, Human
gccagcugcuugggcuucau

SEQ ID NO: 3346661 - RNA, 12 nt, Human
gccaggaagcca

SEQ ID NO: 3346662 - RNA, 13 nt, Human
gccaggaagccag

SEQ ID NO: 3346663 - RNA, 14 nt, Human
gccaggaagccagc

SEQ ID NO: 3346664 - RNA, 17 nt, Human
gccagcugcuugggcuu

SEQ ID NO: 3346665 - RNA, 18 nt, Human
gccagcugcuugggcuuc

SEQ ID NO: 3346666 - RNA, 16 nt, Human
gccagcugcuugggcu

SEQ ID NO: 3346667 - RNA, 24 nt, Human
gccaaggccaaaggaagcacaugc

SEQ ID NO: 3346668 - RNA, 19 nt, Human
gccaaggccaaaggaagca

SEQ ID NO: 3346669 - RNA, 20 nt, Human
gccaaggccaaaggaagcac

SEQ ID NO: 3346670 - RNA, 21 nt, Human
gccagagacacaagccuucgg

SEQ ID NO: 3346671 - RNA, 20 nt, Human
gccagagacacaagccuucg

SEQ ID NO: 3346672 - RNA, 22 nt, Human
gccagagacacaagccuucggc

SEQ ID NO: 3346673 - RNA, 19 nt, Human
gccacugcaccgggccaca

SEQ ID NO: 3346674 - RNA, 21 nt, Human
gccacugcaccgggccacaga

SEQ ID NO: 3346675 - RNA, 20 nt, Human
gccacugcaccgggccacag

SEQ ID NO: 3346676 - RNA, 22 nt, Human
gccagaggagagaggacccccu

SEQ ID NO: 3346677 - RNA, 14 nt, Human
gccagaugcaccag

SEQ ID NO: 3346678 - RNA, 24 nt, Human
gccagauucuuuccugaggcuggg

SEQ ID NO: 3346679 - RNA, 13 nt, Human
gccagauuucacu

SEQ ID NO: 3346680 - RNA, 20 nt, Human
gccagauucuuuccugaggc

SEQ ID NO: 3346681 - RNA, 22 nt, Human
gccagccgagauagccaaggcc

SEQ ID NO: 3346682 - RNA, 21 nt, Human
gccagccgagauagccaaggc

SEQ ID NO: 3346683 - RNA, 19 nt, Human
gccagauucuuuccugagg

SEQ ID NO: 3346684 - RNA, 14 nt, Human
gcccacuucugcca

SEQ ID NO: 3346685 - RNA, 16 nt, Human
gcccaccuuggcucaa

SEQ ID NO: 3346686 - RNA, 15 nt, Human
gcccaccuuggcuca

SEQ ID NO: 3346687 - RNA, 13 nt, Human
gcccaccuuggcu

SEQ ID NO: 3346688 - RNA, 17 nt, Human
gcccaccuggccucugc

SEQ ID NO: 3346689 - RNA, 20 nt, Human
gcccaccuggccucugcacu

SEQ ID NO: 3346690 - RNA, 21 nt, Human
gcccaccuggccucugcacuc

SEQ ID NO: 3346691 - RNA, 24 nt, Human
gcccaccuggccucugcacucccc

SEQ ID NO: 3346692 - RNA, 15 nt, Human
gcccaccuggccucu

SEQ ID NO: 3346693 - RNA, 16 nt, Human
gcccaccuggccucug

SEQ ID NO: 3346694 - RNA, 16 nt, Human
gccaugggccuccugu

SEQ ID NO: 3346695 - RNA, 15 nt, Human
gccaugggccuccug

SEQ ID NO: 3346696 - RNA, 13 nt, Human
gccaggcuggucu

SEQ ID NO: 3346697 - RNA, 23 nt, Human
gccaguaaaugggggugcauuug

SEQ ID NO: 3346698 - RNA, 12 nt, Human
gccaguaaaugg

SEQ ID NO: 3346699 - RNA, 21 nt, Human
gccagucaccccggccaccug

SEQ ID NO: 3346700 - RNA, 14 nt, Human
gccaugcuccuggc

SEQ ID NO: 3346701 - RNA, 20 nt, Human
gccaugaggaacaaggcaag

SEQ ID NO: 3346702 - RNA, 17 nt, Human
caucccugaaggccccg

SEQ ID NO: 3346703 - RNA, 18 nt, Human
caucccugaaggccccgc

SEQ ID NO: 3346704 - RNA, 19 nt, Human
caucccugaaggccccgcc

SEQ ID NO: 3346705 - RNA, 21 nt, Human
caucccugaaggccccgccca

SEQ ID NO: 3346706 - RNA, 14 nt, Human
caucauugaaaucu

SEQ ID NO: 3346707 - RNA, 15 nt, Human
caucauugaaaucuu

SEQ ID NO: 3346708 - RNA, 20 nt, Human
caucauugaaaucuuuuugc

SEQ ID NO: 3346709 - RNA, 21 nt, Human
caucauugaaaucuuuuugcu

SEQ ID NO: 3346710 - RNA, 13 nt, Human
caucauugaaauc

SEQ ID NO: 3346711 - RNA, 15 nt, Human
caucaccaacgucug

SEQ ID NO: 3346712 - RNA, 15 nt, Human
cauccagguucagcu

SEQ ID NO: 3346713 - RNA, 15 nt, Human
caucccucuggggcu

SEQ ID NO: 3346714 - RNA, 19 nt, Human
caucccucuggggcuguuc

SEQ ID NO: 3346715 - RNA, 11 nt, Human
caucccugaag

SEQ ID NO: 3346716 - RNA, 13 nt, Human
caucccugaaggc

SEQ ID NO: 3346717 - RNA, 20 nt, Human
caucuugcucugcugacaga

SEQ ID NO: 3346718 - RNA, 19 nt, Human
caucuugcucugcugacag

SEQ ID NO: 3346719 - RNA, 14 nt, Human
caucuugcucugcu

SEQ ID NO: 3346720 - RNA, 13 nt, Human
caucuugcucugc

SEQ ID NO: 3346721 - RNA, 22 nt, Human
caucuuccaaggguacuaagga

SEQ ID NO: 3346722 - RNA, 20 nt, Human
caucucacacaugagcauca

SEQ ID NO: 3346723 - RNA, 16 nt, Human
caucucacacaugagc

SEQ ID NO: 3346724 - RNA, 17 nt, Human
caucucacacaugagca

SEQ ID NO: 3346725 - RNA, 15 nt, Human
cauccucuguacaga

SEQ ID NO: 3346726 - RNA, 18 nt, Human
cauccucuguacagagcc

SEQ ID NO: 3346727 - RNA, 19 nt, Human
cauccucuguacagagccc

SEQ ID NO: 3346728 - RNA, 15 nt, Human
caucuacccuccgau

SEQ ID NO: 3346729 - RNA, 13 nt, Human
cauccucccaagg

SEQ ID NO: 3346730 - RNA, 17 nt, Human
cauccucauacccaccc

SEQ ID NO: 3346731 - RNA, 18 nt, Human
cauccucauacccacccc

SEQ ID NO: 3346732 - RNA, 21 nt, Human
cauccucauacccacccccac

SEQ ID NO: 3346733 - RNA, 22 nt, Human
cauccucauacccacccccacc

SEQ ID NO: 3346734 - RNA, 15 nt, Human
cauccuccucagauc

SEQ ID NO: 3346735 - RNA, 16 nt, Human
cauccuccucagaucu

SEQ ID NO: 3346736 - RNA, 18 nt, Human
cauccuccucagaucuuc

SEQ ID NO: 3346737 - RNA, 19 nt, Human
cauccuccucagaucuucu

SEQ ID NO: 3346738 - RNA, 11 nt, Human
cauccuccuca

SEQ ID NO: 3346739 - RNA, 12 nt, Human
cauccuccucag

SEQ ID NO: 3346740 - RNA, 15 nt, Human
cauccucauacccac

SEQ ID NO: 3346741 - RNA, 16 nt, Human
cauccucauacccacc

SEQ ID NO: 3346742 - RNA, 23 nt, Human
cauagagagcaagacgcugugcu

SEQ ID NO: 3346743 - RNA, 19 nt, Human
cauagagagcaagacgcug

SEQ ID NO: 3346744 - RNA, 21 nt, Human
cauagagagcaagacgcugug

SEQ ID NO: 3346745 - RNA, 16 nt, Human
cauacucccaucugug

SEQ ID NO: 3346746 - RNA, 15 nt, Human
cauacucccaucugu

SEQ ID NO: 3346747 - RNA, 18 nt, Human
cauacucccaucugugaa

SEQ ID NO: 3346748 - RNA, 20 nt, Human
cauacucccaucugugaaag

SEQ ID NO: 3346749 - RNA, 11 nt, Human
cauacucugcu

SEQ ID NO: 3346750 - RNA, 17 nt, Human
cauaguaugguggcugg

SEQ ID NO: 3346751 - RNA, 19 nt, Human
cauaguaugguggcugggu

SEQ ID NO: 3346752 - RNA, 18 nt, Human
cauaguaugguggcuggg

SEQ ID NO: 3346753 - RNA, 22 nt, Human
cauaguggcuuaaaacaacacu

SEQ ID NO: 3346754 - RNA, 22 nt, Human
cauauauauguuuuaagaggca

SEQ ID NO: 3346755 - RNA, 20 nt, Human
cauauuuacuucuuauacau

SEQ ID NO: 3346756 - RNA, 17 nt, Human
cauauuuacuucuuaua

SEQ ID NO: 3346757 - RNA, 16 nt, Human
cauauuuacuucuuau

SEQ ID NO: 3346758 - RNA, 14 nt, Human
cauauuuacuucuu

SEQ ID NO: 3346759 - RNA, 14 nt, Human
caucaagaugugac

SEQ ID NO: 3346760 - RNA, 12 nt, Human
caguugaaaaac

SEQ ID NO: 3346761 - RNA, 18 nt, Human
caguugaaaaacagcuga

SEQ ID NO: 3346762 - RNA, 19 nt, Human
caguugaaaaacagcugag

SEQ ID NO: 3346763 - RNA, 22 nt, Human
caguucucuccuucuucccccc

SEQ ID NO: 3346764 - RNA, 14 nt, Human
caguucucuccuuc

SEQ ID NO: 3346765 - RNA, 15 nt, Human
caguucucuccuucu

SEQ ID NO: 3346766 - RNA, 13 nt, Human
caguucucuccuu

SEQ ID NO: 3346767 - RNA, 19 nt, Human
caguguuguggauuuaaca

SEQ ID NO: 3346768 - RNA, 13 nt, Human
caguguugccuaa

SEQ ID NO: 3346769 - RNA, 20 nt, Human
caguguuguggauuuaacag

SEQ ID NO: 3346770 - RNA, 22 nt, Human
caguguuguggauuuaacagaa

SEQ ID NO: 3346771 - RNA, 14 nt, Human
caguguugccuaag

SEQ ID NO: 3346772 - RNA, 13 nt, Human
caguuaagagaaa

SEQ ID NO: 3346773 - RNA, 14 nt, Human
caguuaagagaaau

SEQ ID NO: 3346774 - RNA, 16 nt, Human
caguggcagcugcuuu

SEQ ID NO: 3346775 - RNA, 15 nt, Human
caguggcagcugcuu

SEQ ID NO: 3346776 - RNA, 14 nt, Human
caguggcagcugcu

SEQ ID NO: 3346777 - RNA, 13 nt, Human
caguggcagcugc

SEQ ID NO: 3346778 - RNA, 12 nt, Human
caguggcagcug

SEQ ID NO: 3346779 - RNA, 22 nt, Human
caguggugguuuucuguucuuu

SEQ ID NO: 3346780 - RNA, 22 nt, Human
cagugguuccuaauccucuagg

SEQ ID NO: 3346781 - RNA, 12 nt, Human
cagugugacuga

SEQ ID NO: 3346782 - RNA, 14 nt, Human
cagugugacaagga

SEQ ID NO: 3346783 - RNA, 23 nt, Human
caguguacauggaauaacaugua

SEQ ID NO: 3346784 - RNA, 20 nt, Human
caguguacauggaauaacau

SEQ ID NO: 3346785 - RNA, 16 nt, Human
caguguacauggaaua

SEQ ID NO: 3346786 - RNA, 23 nt, Human
caguugccagucaccccggccac

SEQ ID NO: 3346787 - RNA, 16 nt, Human
caguuggguggaugcc

SEQ ID NO: 3346788 - RNA, 19 nt, Human
caguuggucccccuuccau

SEQ ID NO: 3346789 - RNA, 20 nt, Human
caguuggucccccuuccaug

SEQ ID NO: 3346790 - RNA, 21 nt, Human
caguuggucccccuuccaugg

SEQ ID NO: 3346791 - RNA, 22 nt, Human
caguuggucccccuuccaugga

SEQ ID NO: 3346792 - RNA, 19 nt, Human
caguuggguggaugccugg

SEQ ID NO: 3346793 - RNA, 18 nt, Human
caguuggguggaugccug

SEQ ID NO: 3346794 - RNA, 18 nt, Human
caguuggucccccuucca

SEQ ID NO: 3346795 - RNA, 17 nt, Human
caguuguuagugugucu

SEQ ID NO: 3346796 - RNA, 16 nt, Human
cauaaccuagccuuag

SEQ ID NO: 3346797 - RNA, 20 nt, Human
cauaaacaagaccacguuuc

SEQ ID NO: 3346798 - RNA, 21 nt, Human
cauaaacaagaccacguuucu

SEQ ID NO: 3346799 - RNA, 22 nt, Human
cauaaacaagaccacguuucua

SEQ ID NO: 3346800 - RNA, 21 nt, Human
cauaaaaauuagccaagugug

SEQ ID NO: 3346801 - RNA, 14 nt, Human
cauaagauaaaugu

SEQ ID NO: 3346802 - RNA, 13 nt, Human
cauaccacuuuug

SEQ ID NO: 3346803 - RNA, 14 nt, Human
cauaccacuuuugu

SEQ ID NO: 3346804 - RNA, 15 nt, Human
cauaccacuuuuguu

SEQ ID NO: 3346805 - RNA, 18 nt, Human
cauaccacuuuuguucuu

SEQ ID NO: 3346806 - RNA, 11 nt, Human
cauacccaccc

SEQ ID NO: 3346807 - RNA, 12 nt, Human
cauacccacccc

SEQ ID NO: 3346808 - RNA, 19 nt, Human
cauaccacuuuuguucuug

SEQ ID NO: 3346809 - RNA, 17 nt, Human
cauacguacacauuuua

SEQ ID NO: 3346810 - RNA, 18 nt, Human
cauacguacacauuuuau

SEQ ID NO: 3346811 - RNA, 14 nt, Human
cauacuaaccagca

SEQ ID NO: 3346812 - RNA, 21 nt, Human
cauacuaaccagcagaaaugc

SEQ ID NO: 3346813 - RNA, 15 nt, Human
cauacguacacauuu

SEQ ID NO: 3346814 - RNA, 16 nt, Human
cauacguacacauuuu

SEQ ID NO: 3346815 - RNA, 13 nt, Human
cauacguacacau

SEQ ID NO: 3346816 - RNA, 14 nt, Human
cauacccaccccca

SEQ ID NO: 3346817 - RNA, 17 nt, Human
cauacccacccccaccc

SEQ ID NO: 3346818 - RNA, 18 nt, Human
cauacccacccccaccca

SEQ ID NO: 3346819 - RNA, 21 nt, Human
cauacccacccccacccaagg

SEQ ID NO: 3346820 - RNA, 19 nt, Human
caugccagcuuaucucagg

SEQ ID NO: 3346821 - RNA, 20 nt, Human
caugccagcuuaucucaggg

SEQ ID NO: 3346822 - RNA, 13 nt, Human
caugccccugaac

SEQ ID NO: 3346823 - RNA, 14 nt, Human
caugccucucucag

SEQ ID NO: 3346824 - RNA, 15 nt, Human
caugccucucucagg

SEQ ID NO: 3346825 - RNA, 16 nt, Human
caugccucucucaggc

SEQ ID NO: 3346826 - RNA, 17 nt, Human
caugccucucucaggcc

SEQ ID NO: 3346827 - RNA, 18 nt, Human
caugccucucucaggcca

SEQ ID NO: 3346828 - RNA, 19 nt, Human
caugccucucucaggccaa

SEQ ID NO: 3346829 - RNA, 13 nt, Human
caugccuggaugg

SEQ ID NO: 3346830 - RNA, 16 nt, Human
cauggaauaacaugua

SEQ ID NO: 3346831 - RNA, 13 nt, Human
cauggacuuuaua

SEQ ID NO: 3346832 - RNA, 20 nt, Human
cauggaaguacuauaauuua

SEQ ID NO: 3346833 - RNA, 22 nt, Human
cauggaaguacuauaauuuacc

SEQ ID NO: 3346834 - RNA, 18 nt, Human
caugccuggauggggcug

SEQ ID NO: 3346835 - RNA, 21 nt, Human
caugccuggauggggcugcac

SEQ ID NO: 3346836 - RNA, 23 nt, Human
caugccuggauggggcugcaccg

SEQ ID NO: 3346837 - RNA, 17 nt, Human
caugcgggcuuccuccu

SEQ ID NO: 3346838 - RNA, 17 nt, Human
caugcugucccuuacgu

SEQ ID NO: 3346839 - RNA, 22 nt, Human
caugcugucccuuacgugaguc

SEQ ID NO: 3346840 - RNA, 17 nt, Human
cauggagguuugaagau

SEQ ID NO: 3346841 - RNA, 11 nt, Human
cauggacuuug

SEQ ID NO: 3346842 - RNA, 13 nt, Human
cauggacuuuguu

SEQ ID NO: 3346843 - RNA, 17 nt, Human
cauggacuuuauaagcc

SEQ ID NO: 3346844 - RNA, 16 nt, Human
cauggaguauauguca

SEQ ID NO: 3346845 - RNA, 18 nt, Human
caugggaaugaaugucag

SEQ ID NO: 3346846 - RNA, 17 nt, Human
caugggccuccugugug

SEQ ID NO: 3346847 - RNA, 16 nt, Human
caugggccuccugugu

SEQ ID NO: 3346848 - RNA, 17 nt, Human
caugggaaugaauguca

SEQ ID NO: 3346849 - RNA, 15 nt, Human
caugggccuccugug

SEQ ID NO: 3346850 - RNA, 22 nt, Human
caugggaaugaaugucagugug

SEQ ID NO: 3346851 - RNA, 14 nt, Human
caugucuuuucuug

SEQ ID NO: 3346852 - RNA, 19 nt, Human
caugucuuuucuugcauga

SEQ ID NO: 3346853 - RNA, 21 nt, Human
caugucuuuucuugcaugagg

SEQ ID NO: 3346854 - RNA, 23 nt, Human
caugucuuuucuugcaugaggcu

SEQ ID NO: 3346855 - RNA, 21 nt, Human
cauguaauuaaguacuaugua

SEQ ID NO: 3346856 - RNA, 18 nt, Human
cauguaauuaaguacuau

SEQ ID NO: 3346857 - RNA, 16 nt, Human
cauggucggaaaacau

SEQ ID NO: 3346858 - RNA, 15 nt, Human
cauguuugugauuga

SEQ ID NO: 3346859 - RNA, 15 nt, Human
caugugcacaugcac

SEQ ID NO: 3346860 - RNA, 21 nt, Human
caugugccagguuuuuggucu

SEQ ID NO: 3346861 - RNA, 21 nt, Human
cauuaaagccugaguuugcuu

SEQ ID NO: 3346862 - RNA, 15 nt, Human
cauguuuuguuuacg

SEQ ID NO: 3346863 - RNA, 13 nt, Human
cauugaccugagg

SEQ ID NO: 3346864 - RNA, 22 nt, Human
cauugaccugaggcccuucucu

SEQ ID NO: 3346865 - RNA, 19 nt, Human
cauugaaaucuuuuugcuu

SEQ ID NO: 3346866 - RNA, 21 nt, Human
cauuuaaaagauacaguuacu

SEQ ID NO: 3346867 - RNA, 21 nt, Human
cauuuacuuuguguucaccuu

SEQ ID NO: 3346868 - RNA, 17 nt, Human
cauuuacuuuguguuca

SEQ ID NO: 3346869 - RNA, 21 nt, Human
cauuucuuccacaagagccca

SEQ ID NO: 3346870 - RNA, 23 nt, Human
cauuucuuccacaagagcccagg

SEQ ID NO: 3346871 - RNA, 17 nt, Human
cauuugaggucuguucu

SEQ ID NO: 3346872 - RNA, 18 nt, Human
cauuugaggucuguucuu

SEQ ID NO: 3346873 - RNA, 19 nt, Human
cauuugaggucuguucuuu

SEQ ID NO: 3346874 - RNA, 14 nt, Human
cauuugagcagggc

SEQ ID NO: 3346875 - RNA, 23 nt, Human
cauuuugggguacccacugcucu

SEQ ID NO: 3346876 - RNA, 15 nt, Human
cauuuuuaagugcug

SEQ ID NO: 3346877 - RNA, 20 nt, Human
cauuuuuaagugcugcauuu

SEQ ID NO: 3346878 - RNA, 18 nt, Human
cauuuuuaguagagacag

SEQ ID NO: 3346879 - RNA, 19 nt, Human
cauuuuuaguagagacagg

SEQ ID NO: 3346880 - RNA, 18 nt, Human
cauuuugcuaaaugugaa

SEQ ID NO: 3346881 - RNA, 21 nt, Human
cauuuugcuaaaugugaauga

SEQ ID NO: 3346882 - RNA, 24 nt, Human
cauuuugcuaaaugugaaugauga

SEQ ID NO: 3346883 - RNA, 22 nt, Human
cauuuugggguacccacugcuc

SEQ ID NO: 3346884 - RNA, 21 nt, Human
cauuuugggguacccacugcu

SEQ ID NO: 3346885 - RNA, 20 nt, Human
cauuuugggguacccacugc

SEQ ID NO: 3346886 - RNA, 21 nt, Human
cauuuuauuuuauuaugcaug

SEQ ID NO: 3346887 - RNA, 19 nt, Human
cauuuuauuuuauuaugca

SEQ ID NO: 3346888 - RNA, 16 nt, Human
ccaaacccuucagugc

SEQ ID NO: 3346889 - RNA, 18 nt, Human
ccaaaauaaaacuuuuua

SEQ ID NO: 3346890 - RNA, 21 nt, Human
ccaaaauaaaacuuuuuaaaa

SEQ ID NO: 3346891 - RNA, 20 nt, Human
cauuuuuaguagagacaggg

SEQ ID NO: 3346892 - RNA, 14 nt, Human
ccaaagaugcagcc

SEQ ID NO: 3346893 - RNA, 13 nt, Human
ccaaagaugcagc

SEQ ID NO: 3346894 - RNA, 13 nt, Human
ccaacccucauca

SEQ ID NO: 3346895 - RNA, 15 nt, Human
ccaacccucaucacc

SEQ ID NO: 3346896 - RNA, 15 nt, Human
ccaagaccuucuccu

SEQ ID NO: 3346897 - RNA, 22 nt, Human
ccaaauucuuucaguggcuacc

SEQ ID NO: 3346898 - RNA, 15 nt, Human
ccaaauucuuucagu

SEQ ID NO: 3346899 - RNA, 16 nt, Human
ccaacaucaacaucuu

SEQ ID NO: 3346900 - RNA, 14 nt, Human
ccaacauacuccca

SEQ ID NO: 3346901 - RNA, 13 nt, Human
ccaacaucaacau

SEQ ID NO: 3346902 - RNA, 20 nt, Human
ccacaaguuaaauaaaucau

SEQ ID NO: 3346903 - RNA, 15 nt, Human
ccacaaguuaaauaa

SEQ ID NO: 3346904 - RNA, 16 nt, Human
ccacaagagcccaggc

SEQ ID NO: 3346905 - RNA, 17 nt, Human
ccacaagagcccaggcc

SEQ ID NO: 3346906 - RNA, 18 nt, Human
ccacaagagcccaggccu

SEQ ID NO: 3346907 - RNA, 19 nt, Human
ccacaagagcccaggccuc

SEQ ID NO: 3346908 - RNA, 20 nt, Human
ccacaagagcccaggccucc

SEQ ID NO: 3346909 - RNA, 21 nt, Human
ccacaagagcccaggccuccu

SEQ ID NO: 3346910 - RNA, 14 nt, Human
ccaaggcuggggga

SEQ ID NO: 3346911 - RNA, 18 nt, Human
ccaaggugggaggauugc

SEQ ID NO: 3346912 - RNA, 18 nt, Human
ccacaaaggagagcuagc

SEQ ID NO: 3346913 - RNA, 16 nt, Human
ccacaagacccuugug

SEQ ID NO: 3346914 - RNA, 13 nt, Human
ccacaagagccca

SEQ ID NO: 3346915 - RNA, 23 nt, Human
ccaagcagagguugggaggccau

SEQ ID NO: 3346916 - RNA, 14 nt, Human
ccaagcaggacaug

SEQ ID NO: 3346917 - RNA, 12 nt, Human
ccaagcucccag

SEQ ID NO: 3346918 - RNA, 13 nt, Human
ccaagcucccagg

SEQ ID NO: 3346919 - RNA, 16 nt, Human
ccagcugcuugggcuu

SEQ ID NO: 3346920 - RNA, 18 nt, Human
ccagcugcuugggcuuca

SEQ ID NO: 3346921 - RNA, 13 nt, Human
ccagcugcuuggg

SEQ ID NO: 3346922 - RNA, 15 nt, Human
ccagcugcuugggcu

SEQ ID NO: 3346923 - RNA, 21 nt, Human
ccagcugugcucuggacaggc

SEQ ID NO: 3346924 - RNA, 20 nt, Human
ccagcugugcucuggacagg

SEQ ID NO: 3346925 - RNA, 18 nt, Human
ccagcugugcucuggaca

SEQ ID NO: 3346926 - RNA, 12 nt, Human
ccaggagcagcc

SEQ ID NO: 3346927 - RNA, 13 nt, Human
ccaggagcagcca

SEQ ID NO: 3346928 - RNA, 14 nt, Human
ccaggaagccagca

SEQ ID NO: 3346929 - RNA, 15 nt, Human
ccaggaagccagcag

SEQ ID NO: 3346930 - RNA, 17 nt, Human
ccaggaagccagcaggc

SEQ ID NO: 3346931 - RNA, 19 nt, Human
ccaggaagccagcaggcuc

SEQ ID NO: 3346932 - RNA, 23 nt, Human
ccagcugugcucuggacaggcau

SEQ ID NO: 3346933 - RNA, 22 nt, Human
ccagcugugcucuggacaggca

SEQ ID NO: 3346934 - RNA, 16 nt, Human
ccaggcccucugccca

SEQ ID NO: 3346935 - RNA, 17 nt, Human
ccaggcccucugcccac

SEQ ID NO: 3346936 - RNA, 18 nt, Human
ccaggcccucugcccacu

SEQ ID NO: 3346937 - RNA, 19 nt, Human
ccaggcccucugcccacuc

SEQ ID NO: 3346938 - RNA, 13 nt, Human
ccaggccuccuac

SEQ ID NO: 3346939 - RNA, 18 nt, Human
ccaggccuccuacagcuu

SEQ ID NO: 3346940 - RNA, 19 nt, Human
ccaggccuccuacagcuug

SEQ ID NO: 3346941 - RNA, 12 nt, Human
ccaggccagagg

SEQ ID NO: 3346942 - RNA, 14 nt, Human
ccaggagcagccac

SEQ ID NO: 3346943 - RNA, 21 nt, Human
ccaggccagagggagugacag

SEQ ID NO: 3346944 - RNA, 14 nt, Human
ccaggccagaggga

SEQ ID NO: 3346945 - RNA, 23 nt, Human
ccaggccccugccacccugggga

SEQ ID NO: 3346946 - RNA, 21 nt, Human
ccaggccccugccacccuggg

SEQ ID NO: 3346947 - RNA, 19 nt, Human
ccaggccccugccacccug

SEQ ID NO: 3346948 - RNA, 22 nt, Human
ccagggacagaggggguggccu

SEQ ID NO: 3346949 - RNA, 23 nt, Human
ccagggacagaggggguggccuc

SEQ ID NO: 3346950 - RNA, 13 nt, Human
ccaucaccagaca

SEQ ID NO: 3346951 - RNA, 12 nt, Human
ccaucacccgcu

SEQ ID NO: 3346952 - RNA, 18 nt, Human
ccauauucuguuggccag

SEQ ID NO: 3346953 - RNA, 19 nt, Human
ccauauuaccacagacaua

SEQ ID NO: 3346954 - RNA, 15 nt, Human
ccauauucuguuggc

SEQ ID NO: 3346955 - RNA, 23 nt, Human
ccauagagagcaagacgcugugc

SEQ ID NO: 3346956 - RNA, 16 nt, Human
ccaucaugucuggcua

SEQ ID NO: 3346957 - RNA, 14 nt, Human
ccaucaugucuggc

SEQ ID NO: 3346958 - RNA, 21 nt, Human
ccauccucuguacagagccca

SEQ ID NO: 3346959 - RNA, 20 nt, Human
ccauccucuguacagagccc

SEQ ID NO: 3346960 - RNA, 14 nt, Human
cccaguuagcucuc

SEQ ID NO: 3346961 - RNA, 20 nt, Human
cccagugguuccuaauccuc

SEQ ID NO: 3346962 - RNA, 19 nt, Human
cccagucuggaaugcagug

SEQ ID NO: 3346963 - RNA, 18 nt, Human
cccagucuggaaugcagu

SEQ ID NO: 3346964 - RNA, 10 nt, Human
cccagucugg

SEQ ID NO: 3346965 - RNA, 21 nt, Human
cccagugcccacaggaucagu

SEQ ID NO: 3346966 - RNA, 15 nt, Human
cccagugccgagaag

SEQ ID NO: 3346967 - RNA, 13 nt, Human
cccagguuucuau

SEQ ID NO: 3346968 - RNA, 15 nt, Human
cccaggaggccagcc

SEQ ID NO: 3346969 - RNA, 16 nt, Human
cccaggaggccagccu

SEQ ID NO: 3346970 - RNA, 15 nt, Human
cccaggcauucccca

SEQ ID NO: 3346971 - RNA, 23 nt, Human
cccaggcaggucuugaacuccug

SEQ ID NO: 3346972 - RNA, 17 nt, Human
cccaggcauuccccagg

SEQ ID NO: 3346973 - RNA, 17 nt, Human
cccaggcaggucuugaa

SEQ ID NO: 3346974 - RNA, 16 nt, Human
cccaugagccucagca

SEQ ID NO: 3346975 - RNA, 15 nt, Human
cccaugagccucagc

SEQ ID NO: 3346976 - RNA, 20 nt, Human
cccaugagccucagcauccu

SEQ ID NO: 3346977 - RNA, 12 nt, Human
cccaugcugccc

SEQ ID NO: 3346978 - RNA, 13 nt, Human
cccaugcugcccu

SEQ ID NO: 3346979 - RNA, 12 nt, Human
cccaucugugaa

SEQ ID NO: 3346980 - RNA, 18 nt, Human
cccaucucacacaugagc

SEQ ID NO: 3346981 - RNA, 13 nt, Human
cccaucucacaca

SEQ ID NO: 3346982 - RNA, 20 nt, Human
cccaucugugaaaggaaaga

SEQ ID NO: 3346983 - RNA, 15 nt, Human
ccauguuggccaggc

SEQ ID NO: 3346984 - RNA, 18 nt, Human
ccauguuggccaggcugg

SEQ ID NO: 3346985 - RNA, 21 nt, Human
ccauguuggccaggcuggucu

SEQ ID NO: 3346986 - RNA, 19 nt, Human
ccauguuggccaggcuggu

SEQ ID NO: 3346987 - RNA, 19 nt, Human
cccaccuuggcugcaggga

SEQ ID NO: 3346988 - RNA, 17 nt, Human
cccaccuuggcugcagg

SEQ ID NO: 3346989 - RNA, 16 nt, Human
cccaccuuggcugcag

SEQ ID NO: 3346990 - RNA, 12 nt, Human
cccaccuggccu

SEQ ID NO: 3346991 - RNA, 15 nt, Human
cccaccuggccucug

SEQ ID NO: 3346992 - RNA, 13 nt, Human
cccacgcccccac

SEQ ID NO: 3346993 - RNA, 14 nt, Human
cccacgcccccacu

SEQ ID NO: 3346994 - RNA, 13 nt, Human
ccaugcuccuggc

SEQ ID NO: 3346995 - RNA, 16 nt, Human
ccaugcugcccuguga

SEQ ID NO: 3346996 - RNA, 17 nt, Human
ccaugcugcccugugag

SEQ ID NO: 3346997 - RNA, 15 nt, Human
ccaugcuccuggccc

SEQ ID NO: 3346998 - RNA, 18 nt, Human
ccaugcuccuggcccacu

SEQ ID NO: 3346999 - RNA, 15 nt, Human
ccaugcugcccugug

SEQ ID NO: 3347000 - RNA, 14 nt, Human
ccauguuggccagg

SEQ ID NO: 3347001 - RNA, 13 nt, Human
ccauguuggccag

SEQ ID NO: 3347002 - RNA, 13 nt, Human
ccaugugccaggu

SEQ ID NO: 3347003 - RNA, 23 nt, Human
cccagauugcaacaggcugggcu

SEQ ID NO: 3347004 - RNA, 17 nt, Human
cccagccccaaugaaca

SEQ ID NO: 3347005 - RNA, 11 nt, Human
cccagccccau

SEQ ID NO: 3347006 - RNA, 12 nt, Human
cccagccccauc

SEQ ID NO: 3347007 - RNA, 13 nt, Human
cccagccccaaug

SEQ ID NO: 3347008 - RNA, 18 nt, Human
cccagccccauccucugu

SEQ ID NO: 3347009 - RNA, 19 nt, Human
cccagccccauccucugua

SEQ ID NO: 3347010 - RNA, 18 nt, Human
cccagccccuucugaccc

SEQ ID NO: 3347011 - RNA, 13 nt, Human
cccagccccaucc

SEQ ID NO: 3347012 - RNA, 14 nt, Human
cccagccccauccc

SEQ ID NO: 3347013 - RNA, 14 nt, Human
cccagccccauccu

SEQ ID NO: 3347014 - RNA, 15 nt, Human
cccagccccauccuc

SEQ ID NO: 3347015 - RNA, 14 nt, Human
cccaggaggccagc

SEQ ID NO: 3347016 - RNA, 13 nt, Human
cccaggaggccag

SEQ ID NO: 3347017 - RNA, 14 nt, Human
cccaggagccccga

SEQ ID NO: 3347018 - RNA, 13 nt, Human
cccaggagccccg

SEQ ID NO: 3347019 - RNA, 13 nt, Human
cccagcucugguc

SEQ ID NO: 3347020 - RNA, 14 nt, Human
cccagcucuggucc

SEQ ID NO: 3347021 - RNA, 12 nt, Human
cccagcucuggu

SEQ ID NO: 3347022 - RNA, 15 nt, Human
cccagcucuggucca

SEQ ID NO: 3347023 - RNA, 16 nt, Human
cccagcucugguccau

SEQ ID NO: 3347024 - RNA, 18 nt, Human
cccagcucugguccauag

SEQ ID NO: 3347025 - RNA, 14 nt, Human
cccagcgagcccug

SEQ ID NO: 3347026 - RNA, 22 nt, Human
ccccuguccccgcacugggcuu

SEQ ID NO: 3347027 - RNA, 20 nt, Human
ccccuguucuggcagaguug

SEQ ID NO: 3347028 - RNA, 15 nt, Human
cccgaggccuucucu

SEQ ID NO: 3347029 - RNA, 20 nt, Human
cccgaggccuucucugaagg

SEQ ID NO: 3347030 - RNA, 16 nt, Human
ccccagccccauccca

SEQ ID NO: 3347031 - RNA, 15 nt, Human
ccccagccccauccu

SEQ ID NO: 3347032 - RNA, 13 nt, Human
ccccagccugcua

SEQ ID NO: 3347033 - RNA, 12 nt, Human
ccccaggaggcc

SEQ ID NO: 3347034 - RNA, 12 nt, Human
ccccuggcagcc

SEQ ID NO: 3347035 - RNA, 14 nt, Human
ccccuggcagcccc

SEQ ID NO: 3347036 - RNA, 15 nt, Human
ccccuggcagccccu

SEQ ID NO: 3347037 - RNA, 16 nt, Human
cccucagggucccugg

SEQ ID NO: 3347038 - RNA, 17 nt, Human
cccucagggucccuggu

SEQ ID NO: 3347039 - RNA, 18 nt, Human
cccucagggucccuggug

SEQ ID NO: 3347040 - RNA, 19 nt, Human
cccucagggucccuggugg

SEQ ID NO: 3347041 - RNA, 15 nt, Human
cccucagggucccug

SEQ ID NO: 3347042 - RNA, 17 nt, Human
cccuaaaguguauuuuu

SEQ ID NO: 3347043 - RNA, 22 nt, Human
cccuaaaguguauuuuuuuacu

SEQ ID NO: 3347044 - RNA, 13 nt, Human
cccucccucuuuc

SEQ ID NO: 3347045 - RNA, 17 nt, Human
cccuccaugugggcuag

SEQ ID NO: 3347046 - RNA, 17 nt, Human
cccucauccucauaccc

SEQ ID NO: 3347047 - RNA, 20 nt, Human
cccucauccucauacccacc

SEQ ID NO: 3347048 - RNA, 22 nt, Human
cccucaucaccaacgucugugc

SEQ ID NO: 3347049 - RNA, 20 nt, Human
cccucagucuggcccuuccu

SEQ ID NO: 3347050 - RNA, 21 nt, Human
cccucagggucccugguggca

SEQ ID NO: 3347051 - RNA, 21 nt, Human
cccuccaagaccuucuccuuc

SEQ ID NO: 3347052 - RNA, 22 nt, Human
cccucauccucauacccacccc

SEQ ID NO: 3347053 - RNA, 14 nt, Human
cccugguggcagcu

SEQ ID NO: 3347054 - RNA, 21 nt, Human
cccugguggcagugggagcug

SEQ ID NO: 3347055 - RNA, 22 nt, Human
cccugguggcagugggagcugc

SEQ ID NO: 3347056 - RNA, 20 nt, Human
cccugcugguucaggguugg

SEQ ID NO: 3347057 - RNA, 19 nt, Human
cccugcugguucaggguug

SEQ ID NO: 3347058 - RNA, 22 nt, Human
cccugcuggguguggcgcagca

SEQ ID NO: 3347059 - RNA, 13 nt, Human
cccugcugguuca

SEQ ID NO: 3347060 - RNA, 22 nt, Human
cccugcaaccugauugugucuc

SEQ ID NO: 3347061 - RNA, 16 nt, Human
cccugcaaccugauug

SEQ ID NO: 3347062 - RNA, 18 nt, Human
cccugcagagggcacaga

SEQ ID NO: 3347063 - RNA, 12 nt, Human
cccugcagaggg

SEQ ID NO: 3347064 - RNA, 22 nt, Human
cccugcacuugcagacucuaca

SEQ ID NO: 3347065 - RNA, 18 nt, Human
cccugccacccuggggag

SEQ ID NO: 3347066 - RNA, 17 nt, Human
cccugccacccugggga

SEQ ID NO: 3347067 - RNA, 15 nt, Human
cccugccacccuggg

SEQ ID NO: 3347068 - RNA, 14 nt, Human
cccugccacccugg

SEQ ID NO: 3347069 - RNA, 12 nt, Human
cccugccacccu

SEQ ID NO: 3347070 - RNA, 16 nt, Human
cccugccuccuuugug

SEQ ID NO: 3347071 - RNA, 23 nt, Human
cccugccuccuuugugaggaagc

SEQ ID NO: 3347072 - RNA, 14 nt, Human
cccugccuccuuug

SEQ ID NO: 3347073 - RNA, 24 nt, Human
ccucacaguccuuaccagcagagc

SEQ ID NO: 3347074 - RNA, 23 nt, Human
ccucacaguccuuaccagcagag

SEQ ID NO: 3347075 - RNA, 16 nt, Human
ccuauuagagaagaga

SEQ ID NO: 3347076 - RNA, 17 nt, Human
ccuauuagagaagagau

SEQ ID NO: 3347077 - RNA, 15 nt, Human
ccuaggugacagagu

SEQ ID NO: 3347078 - RNA, 16 nt, Human
ccucagggucccuggu

SEQ ID NO: 3347079 - RNA, 17 nt, Human
ccucagggucccuggug

SEQ ID NO: 3347080 - RNA, 20 nt, Human
ccucagggucccugguggca

SEQ ID NO: 3347081 - RNA, 23 nt, Human
ccucaggccugggggcugggcag

SEQ ID NO: 3347082 - RNA, 16 nt, Human
ccucagaucuucugug

SEQ ID NO: 3347083 - RNA, 13 nt, Human
ccuaggugacaga

SEQ ID NO: 3347084 - RNA, 21 nt, Human
ccuagaaauuccccacccuga

SEQ ID NO: 3347085 - RNA, 19 nt, Human
ccuacuguaauuugugaua

SEQ ID NO: 3347086 - RNA, 18 nt, Human
ccuacccacccuccuuuc

SEQ ID NO: 3347087 - RNA, 13 nt, Human
ccuacccacccuc

SEQ ID NO: 3347088 - RNA, 21 nt, Human
ccuacaguugaaaaacagcug

SEQ ID NO: 3347089 - RNA, 19 nt, Human
ccuacagcuugaccgugag

SEQ ID NO: 3347090 - RNA, 22 nt, Human
ccuacaguugaaaaacagcuga

SEQ ID NO: 3347091 - RNA, 16 nt, Human
ccuaaaauucagugga

SEQ ID NO: 3347092 - RNA, 15 nt, Human
ccuaaaauucagugg

SEQ ID NO: 3347093 - RNA, 13 nt, Human
cccuucccaccuc

SEQ ID NO: 3347094 - RNA, 12 nt, Human
cccuucccaccu

SEQ ID NO: 3347095 - RNA, 22 nt, Human
cccuugguuaggcauuguggga

SEQ ID NO: 3347096 - RNA, 23 nt, Human
cccuugguuaggcauugugggaa

SEQ ID NO: 3347097 - RNA, 22 nt, Human
cccuuguggucccaccccacac

SEQ ID NO: 3347098 - RNA, 20 nt, Human
cccuuguggucccaccccac

SEQ ID NO: 3347099 - RNA, 17 nt, Human
cccuuggauuguccccg

SEQ ID NO: 3347100 - RNA, 17 nt, Human
ccgggaagggggcuggg

SEQ ID NO: 3347101 - RNA, 15 nt, Human
ccucuccccagcaag

SEQ ID NO: 3347102 - RNA, 20 nt, Human
ccucuccccagcaagugaga

SEQ ID NO: 3347103 - RNA, 13 nt, Human
ccucucccuugga

SEQ ID NO: 3347104 - RNA, 22 nt, Human
ccucucccuuggauuguccccg

SEQ ID NO: 3347105 - RNA, 21 nt, Human
ccuccuccagccgccaugcuc

SEQ ID NO: 3347106 - RNA, 18 nt, Human
ccucgguguggagaagcg

SEQ ID NO: 3347107 - RNA, 13 nt, Human
ccucugacacaca

SEQ ID NO: 3347108 - RNA, 20 nt, Human
ccucugacacacagcucugu

SEQ ID NO: 3347109 - RNA, 19 nt, Human
ccucugacacacagcucug

SEQ ID NO: 3347110 - RNA, 14 nt, Human
ccucugacacacag

SEQ ID NO: 3347111 - RNA, 18 nt, Human
ccucugacacacagcucu

SEQ ID NO: 3347112 - RNA, 21 nt, Human
ccucugacacacagcucuguc

SEQ ID NO: 3347113 - RNA, 13 nt, Human
ccucugcccacuc

SEQ ID NO: 3347114 - RNA, 16 nt, Human
ccucugcccacucccu

SEQ ID NO: 3347115 - RNA, 14 nt, Human
ccucugcagcaaua

SEQ ID NO: 3347116 - RNA, 18 nt, Human
ccucugcagcaauaaagc

SEQ ID NO: 3347117 - RNA, 23 nt, Human
ccucugcacuccccugcugggug

SEQ ID NO: 3347118 - RNA, 18 nt, Human
ccucugcacuccccugcu

SEQ ID NO: 3347119 - RNA, 16 nt, Human
ccucugcacuccccug

SEQ ID NO: 3347120 - RNA, 17 nt, Human
ccucugcacuccccugc

SEQ ID NO: 3347121 - RNA, 15 nt, Human
ccucugcacuccccu

SEQ ID NO: 3347122 - RNA, 18 nt, Human
ccucccgaauagcuggga

SEQ ID NO: 3347123 - RNA, 16 nt, Human
ccucccaaagugcugg

SEQ ID NO: 3347124 - RNA, 20 nt, Human
ccucccgaauagcugggacu

SEQ ID NO: 3347125 - RNA, 19 nt, Human
ccucccgaauagcugggac

SEQ ID NO: 3347126 - RNA, 21 nt, Human
ccucccgaauagcugggacua

SEQ ID NO: 3347127 - RNA, 18 nt, Human
ccucccgaguagcuggga

SEQ ID NO: 3347128 - RNA, 17 nt, Human
ccucccgaguagcuggg

SEQ ID NO: 3347129 - RNA, 12 nt, Human
ccuccuccagcc

SEQ ID NO: 3347130 - RNA, 11 nt, Human
ccuccucagau

SEQ ID NO: 3347131 - RNA, 17 nt, Human
ccucaggugagaagcag

SEQ ID NO: 3347132 - RNA, 18 nt, Human
ccucaggugagaagcaga

SEQ ID NO: 3347133 - RNA, 20 nt, Human
ccucaggugagaagcagagg

SEQ ID NO: 3347134 - RNA, 15 nt, Human
ccucagggucccugg

SEQ ID NO: 3347135 - RNA, 11 nt, Human
ccuccaggugc

SEQ ID NO: 3347136 - RNA, 12 nt, Human
ccuccaggugca

SEQ ID NO: 3347137 - RNA, 14 nt, Human
ccucccaacucacc

SEQ ID NO: 3347138 - RNA, 17 nt, Human
ccucccaaagugcuggg

SEQ ID NO: 3347139 - RNA, 15 nt, Human
ccuccaugugggcua

SEQ ID NO: 3347140 - RNA, 12 nt, Human
ccuccauguggg

SEQ ID NO: 3347141 - RNA, 19 nt, Human
gccuguucagcuccagcuc

SEQ ID NO: 3347142 - RNA, 17 nt, Human
gccuguucagcuccagc

SEQ ID NO: 3347143 - RNA, 20 nt, Human
gccuguucagcuccagcuca

SEQ ID NO: 3347144 - RNA, 15 nt, Human
gcuaggccuggccag

SEQ ID NO: 3347145 - RNA, 14 nt, Human
gcuaggccuggcca

SEQ ID NO: 3347146 - RNA, 22 nt, Human
gcuaggaccccuccaugugggc

SEQ ID NO: 3347147 - RNA, 19 nt, Human
gcuaggaacacuccuucac

SEQ ID NO: 3347148 - RNA, 21 nt, Human
gcuaggaacacuccuucacag

SEQ ID NO: 3347149 - RNA, 18 nt, Human
gcuaggaacacuccuuca

SEQ ID NO: 3347150 - RNA, 16 nt, Human
gcuaggaacacuccuu

SEQ ID NO: 3347151 - RNA, 18 nt, Human
gcucagagagggugggag

SEQ ID NO: 3347152 - RNA, 20 nt, Human
gcucagagagggugggagug

SEQ ID NO: 3347153 - RNA, 15 nt, Human
gcucagagagggugg

SEQ ID NO: 3347154 - RNA, 12 nt, Human
gcucagggccug

SEQ ID NO: 3347155 - RNA, 13 nt, Human
gcucagggccugg

SEQ ID NO: 3347156 - RNA, 16 nt, Human
gcucagggccuggcuc

SEQ ID NO: 3347157 - RNA, 21 nt, Human
gcucagguggggucacucugg

SEQ ID NO: 3347158 - RNA, 22 nt, Human
gcucagguggggucacucuggc

SEQ ID NO: 3347159 - RNA, 20 nt, Human
gcucccaggcauuccccagg

SEQ ID NO: 3347160 - RNA, 21 nt, Human
gcucccaggcauuccccagga

SEQ ID NO: 3347161 - RNA, 14 nt, Human
gcuccccagcccca

SEQ ID NO: 3347162 - RNA, 17 nt, Human
gcucccaggcauucccc

SEQ ID NO: 3347163 - RNA, 22 nt, Human
gcucccaggcauuccccaggag

SEQ ID NO: 3347164 - RNA, 13 nt, Human
gcucucaggccag

SEQ ID NO: 3347165 - RNA, 14 nt, Human
gcucucaggccagc

SEQ ID NO: 3347166 - RNA, 15 nt, Human
gcucucaggccagcu

SEQ ID NO: 3347167 - RNA, 16 nt, Human
gcucuguccugggagu

SEQ ID NO: 3347168 - RNA, 14 nt, Human
gcucuguccuggga

SEQ ID NO: 3347169 - RNA, 15 nt, Human
gcucuguccugggag

SEQ ID NO: 3347170 - RNA, 15 nt, Human
gcucuuccaggcugg

SEQ ID NO: 3347171 - RNA, 16 nt, Human
gcucuuccaggcuggg

SEQ ID NO: 3347172 - RNA, 12 nt, Human
gcucuuccaggc

SEQ ID NO: 3347173 - RNA, 22 nt, Human
gcugaauacagaggcaacugca

SEQ ID NO: 3347174 - RNA, 17 nt, Human
gcugaaugguuuucaaa

SEQ ID NO: 3347175 - RNA, 12 nt, Human
gcugaaggcucg

SEQ ID NO: 3347176 - RNA, 20 nt, Human
gcugaaggcucgagcaugcc

SEQ ID NO: 3347177 - RNA, 16 nt, Human
gcugacagacacaggc

SEQ ID NO: 3347178 - RNA, 13 nt, Human
gcugacagacaca

SEQ ID NO: 3347179 - RNA, 15 nt, Human
gcugacagacacagg

SEQ ID NO: 3347180 - RNA, 14 nt, Human
gcugacagacacag

SEQ ID NO: 3347181 - RNA, 13 nt, Human
gcugccugggauc

SEQ ID NO: 3347182 - RNA, 17 nt, Human
gcugccauccagguuca

SEQ ID NO: 3347183 - RNA, 19 nt, Human
gcugccugggaucccucau

SEQ ID NO: 3347184 - RNA, 16 nt, Human
gcugccugggaucccu

SEQ ID NO: 3347185 - RNA, 18 nt, Human
gcugccugggaucccuca

SEQ ID NO: 3347186 - RNA, 13 nt, Human
gcugccaccugcc

SEQ ID NO: 3347187 - RNA, 19 nt, Human
gcugccagccgagauagcc

SEQ ID NO: 3347188 - RNA, 21 nt, Human
gcugccagccgagauagccaa

SEQ ID NO: 3347189 - RNA, 23 nt, Human
gcugccauccagguucagcuugu

SEQ ID NO: 3347190 - RNA, 21 nt, Human
gcugccauccagguucagcuu

SEQ ID NO: 3347191 - RNA, 18 nt, Human
gcugcaccggcuggccug

SEQ ID NO: 3347192 - RNA, 19 nt, Human
gcugcaccggcuggccugg

SEQ ID NO: 3347193 - RNA, 22 nt, Human
gcugcaccggcuggccuggccc

SEQ ID NO: 3347194 - RNA, 16 nt, Human
gcugcaccggcuggcc

SEQ ID NO: 3347195 - RNA, 17 nt, Human
gcugcaccggcuggccu

SEQ ID NO: 3347196 - RNA, 14 nt, Human
gcugcaccggcugg

SEQ ID NO: 3347197 - RNA, 15 nt, Human
gcuggguguggcgca

SEQ ID NO: 3347198 - RNA, 19 nt, Human
gcugggcagaggaaagcaa

SEQ ID NO: 3347199 - RNA, 16 nt, Human
gcugggcagaggaaag

SEQ ID NO: 3347200 - RNA, 17 nt, Human
gcugggcagaggaaagc

SEQ ID NO: 3347201 - RNA, 12 nt, Human
gcugggcucccu

SEQ ID NO: 3347202 - RNA, 16 nt, Human
gcugggcucccuuccc

SEQ ID NO: 3347203 - RNA, 17 nt, Human
gcugggcucccuuccca

SEQ ID NO: 3347204 - RNA, 20 nt, Human
gcugggcucccuucccaccu

SEQ ID NO: 3347205 - RNA, 18 nt, Human
gcuggccuggccccucag

SEQ ID NO: 3347206 - RNA, 16 nt, Human
gcugggauuacaggug

SEQ ID NO: 3347207 - RNA, 16 nt, Human
gcuggccuggccccuc

SEQ ID NO: 3347208 - RNA, 17 nt, Human
gcuggccuggccccuca

SEQ ID NO: 3347209 - RNA, 15 nt, Human
gcuggagugcaguga

SEQ ID NO: 3347210 - RNA, 14 nt, Human
gcuggagugcagug

SEQ ID NO: 3347211 - RNA, 14 nt, Human
gcugggcagaggaa

SEQ ID NO: 3347212 - RNA, 15 nt, Human
gcugggcagaggaaa

SEQ ID NO: 3347213 - RNA, 13 nt, Human
gcugggcagagga

SEQ ID NO: 3347214 - RNA, 18 nt, Human
gcugggauuacaggugug

SEQ ID NO: 3347215 - RNA, 19 nt, Human
gcugggauuacagguguga

SEQ ID NO: 3347216 - RNA, 12 nt, Human
gcuggagugcag

SEQ ID NO: 3347217 - RNA, 22 nt, Human
gcuggaccuugaacuggguacu

SEQ ID NO: 3347218 - RNA, 14 nt, Human
gcuuguacauaaug

SEQ ID NO: 3347219 - RNA, 16 nt, Human
gcuuguacauaaugcg

SEQ ID NO: 3347220 - RNA, 22 nt, Human
gcuuggggaccagagcugccac

SEQ ID NO: 3347221 - RNA, 19 nt, Human
gcugugcugcccugcccac

SEQ ID NO: 3347222 - RNA, 22 nt, Human
gcugugcugcccugcccaccug

SEQ ID NO: 3347223 - RNA, 22 nt, Human
gcuguuggcugggggccucagu

SEQ ID NO: 3347224 - RNA, 21 nt, Human
gcuguuggcugggggccucag

SEQ ID NO: 3347225 - RNA, 12 nt, Human
gcugugcugccc

SEQ ID NO: 3347226 - RNA, 21 nt, Human
gcugugcucuggacaggcaug

SEQ ID NO: 3347227 - RNA, 13 nt, Human
gcugugcugcccu

SEQ ID NO: 3347228 - RNA, 18 nt, Human
gcugugcucuggacaggc

SEQ ID NO: 3347229 - RNA, 17 nt, Human
gcugugcugcccugccc

SEQ ID NO: 3347230 - RNA, 22 nt, Human
gcuucaaggauccugagccaga

SEQ ID NO: 3347231 - RNA, 19 nt, Human
gcuucacggaagagccuug

SEQ ID NO: 3347232 - RNA, 20 nt, Human
gcuucacggaagagccuugc

SEQ ID NO: 3347233 - RNA, 19 nt, Human
gcuguaucccaugagccuc

SEQ ID NO: 3347234 - RNA, 23 nt, Human
gcuguaucccaugagccucagca

SEQ ID NO: 3347235 - RNA, 20 nt, Human
gcuguaucccaugagccuca

SEQ ID NO: 3347236 - RNA, 15 nt, Human
gcuggguucuaccca

SEQ ID NO: 3347237 - RNA, 15 nt, Human
gcuggguucugaucc

SEQ ID NO: 3347238 - RNA, 21 nt, Human
gcuggguuggaggguguccca

SEQ ID NO: 3347239 - RNA, 14 nt, Human
gcuggguuggaggg

SEQ ID NO: 3347240 - RNA, 21 nt, Human
gcuggguucuacccaggugcu

SEQ ID NO: 3347241 - RNA, 24 nt, Human
gccauguuggccaggcuggucuca

SEQ ID NO: 3347242 - RNA, 22 nt, Human
gccauguuggccaggcuggucu

SEQ ID NO: 3347243 - RNA, 20 nt, Human
gccauguuggccaggcuggu

SEQ ID NO: 3347244 - RNA, 19 nt, Human
gccauguuggccaggcugg

SEQ ID NO: 3347245 - RNA, 13 nt, Human
gcccacgccccca

SEQ ID NO: 3347246 - RNA, 14 nt, Human
gcccacgcccccac

SEQ ID NO: 3347247 - RNA, 18 nt, Human
gcccaccuuggcucaagu

SEQ ID NO: 3347248 - RNA, 17 nt, Human
gcccaccuuggcucaag

SEQ ID NO: 3347249 - RNA, 17 nt, Human
gcccacgcuggagugca

SEQ ID NO: 3347250 - RNA, 16 nt, Human
gcccacgcuggagugc

SEQ ID NO: 3347251 - RNA, 15 nt, Human
gcccacgcuggagug

SEQ ID NO: 3347252 - RNA, 14 nt, Human
gccauguuggccag

SEQ ID NO: 3347253 - RNA, 18 nt, Human
gccauguuggccaggcug

SEQ ID NO: 3347254 - RNA, 17 nt, Human
gccauguuggccaggcu

SEQ ID NO: 3347255 - RNA, 16 nt, Human
gccauguuggccaggc

SEQ ID NO: 3347256 - RNA, 15 nt, Human
gccauguuggccagg

SEQ ID NO: 3347257 - RNA, 20 nt, Human
gccauauucuguuggccagu

SEQ ID NO: 3347258 - RNA, 19 nt, Human
gccauauucuguuggccag

SEQ ID NO: 3347259 - RNA, 13 nt, Human
gccagcaggcucu

SEQ ID NO: 3347260 - RNA, 16 nt, Human
gccagcaggcucucag

SEQ ID NO: 3347261 - RNA, 21 nt, Human
gccagcaggcucucaggccag

SEQ ID NO: 3347262 - RNA, 17 nt, Human
gccagcaggcucucagg

SEQ ID NO: 3347263 - RNA, 18 nt, Human
gccagcaggcucucaggc

SEQ ID NO: 3347264 - RNA, 19 nt, Human
gccagcaggcucucaggcc

SEQ ID NO: 3347265 - RNA, 20 nt, Human
gccagcaggcucucaggcca

SEQ ID NO: 3347266 - RNA, 15 nt, Human
gccaggcccucugcc

SEQ ID NO: 3347267 - RNA, 16 nt, Human
gccaggcccucugccc

SEQ ID NO: 3347268 - RNA, 17 nt, Human
gccaggcccucugccca

SEQ ID NO: 3347269 - RNA, 19 nt, Human
gccaggcccucugcccacu

SEQ ID NO: 3347270 - RNA, 20 nt, Human
gccaggcccucugcccacuc

SEQ ID NO: 3347271 - RNA, 21 nt, Human
gccaggcccucugcccacucc

SEQ ID NO: 3347272 - RNA, 12 nt, Human
gccaggccagag

SEQ ID NO: 3347273 - RNA, 23 nt, Human
gccaggccacaagacccuugugg

SEQ ID NO: 3347274 - RNA, 23 nt, Human
gccacugcaccgggccacagaga

SEQ ID NO: 3347275 - RNA, 19 nt, Human
gccacccuggggagaaagu

SEQ ID NO: 3347276 - RNA, 13 nt, Human
gccacccugggga

SEQ ID NO: 3347277 - RNA, 21 nt, Human
gccacugcacuauagccuagg

SEQ ID NO: 3347278 - RNA, 22 nt, Human
gccacugcaccgggccacagag

SEQ ID NO: 3347279 - RNA, 18 nt, Human
gccacugugaagagaacc

SEQ ID NO: 3347280 - RNA, 19 nt, Human
gccacugugaagagaacca

SEQ ID NO: 3347281 - RNA, 20 nt, Human
gccaccaacauacucccauc

SEQ ID NO: 3347282 - RNA, 21 nt, Human
gccaccaacauacucccaucu

SEQ ID NO: 3347283 - RNA, 19 nt, Human
gccaccaacauacucccau

SEQ ID NO: 3347284 - RNA, 22 nt, Human
gccaccaacauacucccaucug

SEQ ID NO: 3347285 - RNA, 16 nt, Human
gccacauuccugaugc

SEQ ID NO: 3347286 - RNA, 20 nt, Human
gccacauuccugaugcuucu

SEQ ID NO: 3347287 - RNA, 12 nt, Human
gccucuucucua

SEQ ID NO: 3347288 - RNA, 23 nt, Human
gccucuucucuacucuagggaaa

SEQ ID NO: 3347289 - RNA, 19 nt, Human
gccugcccaggccccugcc

SEQ ID NO: 3347290 - RNA, 18 nt, Human
gccugcccaggccccugc

SEQ ID NO: 3347291 - RNA, 17 nt, Human
gccugcccaggccccug

SEQ ID NO: 3347292 - RNA, 12 nt, Human
gccucugggacu

SEQ ID NO: 3347293 - RNA, 18 nt, Human
gccuccugcccuuaccug

SEQ ID NO: 3347294 - RNA, 13 nt, Human
gccuccuccagcc

SEQ ID NO: 3347295 - RNA, 18 nt, Human
gccugggaucccucaucc

SEQ ID NO: 3347296 - RNA, 22 nt, Human
gccugggaggucaaggcugcag

SEQ ID NO: 3347297 - RNA, 14 nt, Human
gccugggaucccuc

SEQ ID NO: 3347298 - RNA, 21 nt, Human
gccugggaggucaaggcugca

SEQ ID NO: 3347299 - RNA, 10 nt, Human
gccuggccug

SEQ ID NO: 3347300 - RNA, 14 nt, Human
gccuggccccucag

SEQ ID NO: 3347301 - RNA, 20 nt, Human
gccuggccccucaggguccc

SEQ ID NO: 3347302 - RNA, 22 nt, Human
gccuggccccucagggucccug

SEQ ID NO: 3347303 - RNA, 16 nt, Human
gccuggccccucaggg

SEQ ID NO: 3347304 - RNA, 17 nt, Human
gccuggccccucagggu

SEQ ID NO: 3347305 - RNA, 15 nt, Human
gccuggccccucagg

SEQ ID NO: 3347306 - RNA, 16 nt, Human
gccugccucuucucua

SEQ ID NO: 3347307 - RNA, 14 nt, Human
gcccacucccugca

SEQ ID NO: 3347308 - RNA, 15 nt, Human
gcccacucccugcaa

SEQ ID NO: 3347309 - RNA, 19 nt, Human
gcccacucccugcaaccug

SEQ ID NO: 3347310 - RNA, 13 nt, Human
gcccacucccugc

SEQ ID NO: 3347311 - RNA, 14 nt, Human
gccccugcccggcu

SEQ ID NO: 3347312 - RNA, 13 nt, Human
gccccugcccggc

SEQ ID NO: 3347313 - RNA, 18 nt, Human
gccccaaaacucuccucu

SEQ ID NO: 3347314 - RNA, 15 nt, Human
gccccuggaugcagc

SEQ ID NO: 3347315 - RNA, 16 nt, Human
gccccuggaugcagcc

SEQ ID NO: 3347316 - RNA, 18 nt, Human
gccccuggaugcagccuc

SEQ ID NO: 3347317 - RNA, 22 nt, Human
gccccuggaugcagccucacag

SEQ ID NO: 3347318 - RNA, 22 nt, Human
gcccuaaaguguauuuuuuuac

SEQ ID NO: 3347319 - RNA, 15 nt, Human
gccgccaugcuccug

SEQ ID NO: 3347320 - RNA, 16 nt, Human
gcccuuaccugccagg

SEQ ID NO: 3347321 - RNA, 20 nt, Human
gcccuuaccugccaggaagc

SEQ ID NO: 3347322 - RNA, 16 nt, Human
gccgccaugcuccugg

SEQ ID NO: 3347323 - RNA, 21 nt, Human
gcccugugggcccccaaaugg

SEQ ID NO: 3347324 - RNA, 16 nt, Human
gcccugccuccuuugu

SEQ ID NO: 3347325 - RNA, 22 nt, Human
gcccugccuccuuugugaggaa

SEQ ID NO: 3347326 - RNA, 14 nt, Human
gcccugccuccuuu

SEQ ID NO: 3347327 - RNA, 13 nt, Human
ggccucccaacuc

SEQ ID NO: 3347328 - RNA, 14 nt, Human
ggccucccaacuca

SEQ ID NO: 3347329 - RNA, 23 nt, Human
ggccagagggagugacagaggca

SEQ ID NO: 3347330 - RNA, 22 nt, Human
ggccagagggagugacagaggc

SEQ ID NO: 3347331 - RNA, 13 nt, Human
ggccaagguggga

SEQ ID NO: 3347332 - RNA, 20 nt, Human
ggccagaugcaccagcccuu

SEQ ID NO: 3347333 - RNA, 19 nt, Human
ggccagaugcaccagcccu

SEQ ID NO: 3347334 - RNA, 17 nt, Human
ggccagaugcaccagcc

SEQ ID NO: 3347335 - RNA, 12 nt, Human
ggcauuguggga

SEQ ID NO: 3347336 - RNA, 21 nt, Human
ggccaaacucaccugccccuc

SEQ ID NO: 3347337 - RNA, 12 nt, Human
ggccaaaggaag

SEQ ID NO: 3347338 - RNA, 15 nt, Human
ggccaaagccaaagc

SEQ ID NO: 3347339 - RNA, 21 nt, Human
ggccaaaggaagcacaugccu

SEQ ID NO: 3347340 - RNA, 23 nt, Human
ggauuaaacuuaaucuaaaugga

SEQ ID NO: 3347341 - RNA, 21 nt, Human
ggauuuugauccaagcugguc

SEQ ID NO: 3347342 - RNA, 22 nt, Human
ggaugagaaagguugaagcacc

SEQ ID NO: 3347343 - RNA, 12 nt, Human
ggaugagaaagg

SEQ ID NO: 3347344 - RNA, 21 nt, Human
ggaugaauuccaaauucugcu

SEQ ID NO: 3347345 - RNA, 14 nt, Human
ggcagccaggccac

SEQ ID NO: 3347346 - RNA, 10 nt, Human
ggcagagcag

SEQ ID NO: 3347347 - RNA, 15 nt, Human
ggcagccaggccaca

SEQ ID NO: 3347348 - RNA, 17 nt, Human
ggcagccaggccacaag

SEQ ID NO: 3347349 - RNA, 12 nt, Human
ggcagaaggaag

SEQ ID NO: 3347350 - RNA, 13 nt, Human
ggagcagccacau

SEQ ID NO: 3347351 - RNA, 21 nt, Human
ggagcagccacauuccugaug

SEQ ID NO: 3347352 - RNA, 18 nt, Human
ggaggucgaggcaggagg

SEQ ID NO: 3347353 - RNA, 15 nt, Human
ggaggucgaggcagg

SEQ ID NO: 3347354 - RNA, 16 nt, Human
ggaggucgaggcagga

SEQ ID NO: 3347355 - RNA, 14 nt, Human
ggaggucgaggcag

SEQ ID NO: 3347356 - RNA, 22 nt, Human
ggagcugccuguucagcuccag

SEQ ID NO: 3347357 - RNA, 12 nt, Human
ggaggccagccu

SEQ ID NO: 3347358 - RNA, 18 nt, Human
ggaggccaaggugggagg

SEQ ID NO: 3347359 - RNA, 13 nt, Human
ggaggccagccuu

SEQ ID NO: 3347360 - RNA, 21 nt, Human
ggaggcaugugaugagaggaa

SEQ ID NO: 3347361 - RNA, 12 nt, Human
ggaggaagagaa

SEQ ID NO: 3347362 - RNA, 15 nt, Human
ggagagcuagcagca

SEQ ID NO: 3347363 - RNA, 22 nt, Human
ggagagccuuccagggguggga

SEQ ID NO: 3347364 - RNA, 17 nt, Human
ggagagccuuccagggg

SEQ ID NO: 3347365 - RNA, 18 nt, Human
ggagagccuuccaggggu

SEQ ID NO: 3347366 - RNA, 13 nt, Human
ggagagccuucca

SEQ ID NO: 3347367 - RNA, 16 nt, Human
ggagagccuuccaggg

SEQ ID NO: 3347368 - RNA, 17 nt, Human
ggacuuggaagcuccgc

SEQ ID NO: 3347369 - RNA, 15 nt, Human
ggacuuggaagcucc

SEQ ID NO: 3347370 - RNA, 19 nt, Human
ggagaaaauggacguguua

SEQ ID NO: 3347371 - RNA, 9 nt, Human
ggacuuugu

SEQ ID NO: 3347372 - RNA, 22 nt, Human
ggagaaccaaaaagaggcuaug

SEQ ID NO: 3347373 - RNA, 20 nt, Human
ggacuacaggugugagucac

SEQ ID NO: 3347374 - RNA, 22 nt, Human
ggacucaaugcacugacauugu

SEQ ID NO: 3347375 - RNA, 18 nt, Human
ggacucaaugcacugaca

SEQ ID NO: 3347376 - RNA, 15 nt, Human
ggacccugaggccca

SEQ ID NO: 3347377 - RNA, 18 nt, Human
ggacccugaggcccagag

SEQ ID NO: 3347378 - RNA, 14 nt, Human
ggacccugaggccc

SEQ ID NO: 3347379 - RNA, 13 nt, Human
ggacccugaggcc

SEQ ID NO: 3347380 - RNA, 12 nt, Human
gcuuguacauaa

SEQ ID NO: 3347381 - RNA, 19 nt, Human
gcuuguacauaaugcgugc

SEQ ID NO: 3347382 - RNA, 16 nt, Human
aaacuggauuaaacuu

SEQ ID NO: 3347383 - RNA, 16 nt, Human
aaacguggcugcuuca

SEQ ID NO: 3347384 - RNA, 17 nt, Human
aaacguggcugcuucaa

SEQ ID NO: 3347385 - RNA, 23 nt, Human
gggucucacuauguugcccaggc

SEQ ID NO: 3347386 - RNA, 22 nt, Human
gggucucacuauguugcccagg

SEQ ID NO: 3347387 - RNA, 15 nt, Human
aaacauuggauuauc

SEQ ID NO: 3347388 - RNA, 22 nt, Human
gggucacucuggcagcucagag

SEQ ID NO: 3347389 - RNA, 20 nt, Human
ggguaucaggugcugccauc

SEQ ID NO: 3347390 - RNA, 17 nt, Human
ggggccaguuggucccc

SEQ ID NO: 3347391 - RNA, 16 nt, Human
ggggcccugccuccuu

SEQ ID NO: 3347392 - RNA, 15 nt, Human
ggggcccugccuccu

SEQ ID NO: 3347393 - RNA, 19 nt, Human
ggggcccugccuccuuugu

SEQ ID NO: 3347394 - RNA, 23 nt, Human
ggggcccugccuccuuugugagg

SEQ ID NO: 3347395 - RNA, 13 nt, Human
ggggaccucaggc

SEQ ID NO: 3347396 - RNA, 15 nt, Human
ggggaccucaggccu

SEQ ID NO: 3347397 - RNA, 16 nt, Human
ggggaccucaggccug

SEQ ID NO: 3347398 - RNA, 17 nt, Human
ggggaccucaggccugg

SEQ ID NO: 3347399 - RNA, 24 nt, Human
ggggaaaaucagccugcuccagcu

SEQ ID NO: 3347400 - RNA, 22 nt, Human
aaacaugcuacacacugcaugu

SEQ ID NO: 3347401 - RNA, 16 nt, Human
aaacaugcuacacacu

SEQ ID NO: 3347402 - RNA, 19 nt, Human
aaacacaaacgggcucagc

SEQ ID NO: 3347403 - RNA, 21 nt, Human
aaacacacgcgcgcacacaca

SEQ ID NO: 3347404 - RNA, 21 nt, Human
aaaauguaggguuauaauaau

SEQ ID NO: 3347405 - RNA, 21 nt, Human
aaaauggacguguuaugacuc

SEQ ID NO: 3347406 - RNA, 20 nt, Human
aaaauggaagacagcucuua

SEQ ID NO: 3347407 - RNA, 23 nt, Human
aaacaaacuuuucaaggcuuaua

SEQ ID NO: 3347408 - RNA, 19 nt, Human
aaagacuuuuccaacccuc

SEQ ID NO: 3347409 - RNA, 15 nt, Human
aaagacuguacaaag

SEQ ID NO: 3347410 - RNA, 14 nt, Human
aaagacuguacaaa

SEQ ID NO: 3347411 - RNA, 13 nt, Human
aaagaggcuaugu

SEQ ID NO: 3347412 - RNA, 18 nt, Human
aaagaggcuaugugagca

SEQ ID NO: 3347413 - RNA, 15 nt, Human
aaagaugagugagca

SEQ ID NO: 3347414 - RNA, 12 nt, Human
ggucccacccca

SEQ ID NO: 3347415 - RNA, 22 nt, Human
gguccacccaggagccccgagg

SEQ ID NO: 3347416 - RNA, 20 nt, Human
gguccacccaggagccccga

SEQ ID NO: 3347417 - RNA, 14 nt, Human
aaacuuuaccuuuu

SEQ ID NO: 3347418 - RNA, 19 nt, Human
gguccacccaggagccccg

SEQ ID NO: 3347419 - RNA, 23 nt, Human
gguauuggcuagagguucaaaga

SEQ ID NO: 3347420 - RNA, 16 nt, Human
aaagcagugcaugcug

SEQ ID NO: 3347421 - RNA, 21 nt, Human
aaagcagugcaugcugucccu

SEQ ID NO: 3347422 - RNA, 22 nt, Human
aaagcagugcaugcugucccuu

SEQ ID NO: 3347423 - RNA, 18 nt, Human
aaagcuaggccuggccag

SEQ ID NO: 3347424 - RNA, 17 nt, Human
aaagcuaggccuggcca

SEQ ID NO: 3347425 - RNA, 17 nt, Human
aaagcagugcaugcugu

SEQ ID NO: 3347426 - RNA, 11 nt, Human
aaaggaaagag

SEQ ID NO: 3347427 - RNA, 16 nt, Human
ggugcacaagcuccaa

SEQ ID NO: 3347428 - RNA, 22 nt, Human
ggugcacaagcuccaagcuccc

SEQ ID NO: 3347429 - RNA, 17 nt, Human
ggucuguucuuuccaaa

SEQ ID NO: 3347430 - RNA, 19 nt, Human
ggucuguucuuuccaaagu

SEQ ID NO: 3347431 - RNA, 22 nt, Human
ggucuugaacuccuggccucaa

SEQ ID NO: 3347432 - RNA, 21 nt, Human
ggucuugaacuccuggccuca

SEQ ID NO: 3347433 - RNA, 12 nt, Human
ggucuguucuuu

SEQ ID NO: 3347434 - RNA, 15 nt, Human
aaaauaccagccagu

SEQ ID NO: 3347435 - RNA, 14 nt, Human
aaaauaccaaggaa

SEQ ID NO: 3347436 - RNA, 14 nt, Human
aaaauaccagccag

SEQ ID NO: 3347437 - RNA, 12 nt, Human
aaaauaaauuau

SEQ ID NO: 3347438 - RNA, 12 nt, Human
aaaauagccugc

SEQ ID NO: 3347439 - RNA, 18 nt, Human
aaaauaguggugugauuu

SEQ ID NO: 3347440 - RNA, 23 nt, Human
aaaauauauauagaaauauauac

SEQ ID NO: 3347441 - RNA, 10 nt, Human
aaaauauaua

SEQ ID NO: 3347442 - RNA, 23 nt, Human
gggcagagcagagaccaucccug

SEQ ID NO: 3347443 - RNA, 15 nt, Human
gggauuuccaugaug

SEQ ID NO: 3347444 - RNA, 18 nt, Human
gggagggcuccagacaca

SEQ ID NO: 3347445 - RNA, 18 nt, Human
aaaacugauuuuuuuuuc

SEQ ID NO: 3347446 - RNA, 22 nt, Human
aaaacugauuuuuuuuuccuuc

SEQ ID NO: 3347447 - RNA, 21 nt, Human
aaaacguggcugcuucaagga

SEQ ID NO: 3347448 - RNA, 14 nt, Human
aaaacguggcugcu

SEQ ID NO: 3347449 - RNA, 16 nt, Human
aaaacguggcugcuuc

SEQ ID NO: 3347450 - RNA, 17 nt, Human
aaaacguggcugcuuca

SEQ ID NO: 3347451 - RNA, 18 nt, Human
aaaacguggcugcuucaa

SEQ ID NO: 3347452 - RNA, 15 nt, Human
aaaaccaauguucuc

SEQ ID NO: 3347453 - RNA, 19 nt, Human
aaaaaucucaaauuucuaa

SEQ ID NO: 3347454 - RNA, 20 nt, Human
aaaaaucucaaauuucuaaa

SEQ ID NO: 3347455 - RNA, 17 nt, Human
aaaaaucucaaauuucu

SEQ ID NO: 3347456 - RNA, 22 nt, Human
gggaacagacuggaagcacagc

SEQ ID NO: 3347457 - RNA, 14 nt, Human
gggaacagacugga

SEQ ID NO: 3347458 - RNA, 14 nt, Human
aaaagcugggcagg

SEQ ID NO: 3347459 - RNA, 22 nt, Human
aaaacuugauguguuaucucuu

SEQ ID NO: 3347460 - RNA, 11 nt, Human
gggagggcucc

SEQ ID NO: 3347461 - RNA, 20 nt, Human
ggcucuuccaggcugggaga

SEQ ID NO: 3347462 - RNA, 23 nt, Human
ggcucuuccaggcugggagagcc

SEQ ID NO: 3347463 - RNA, 24 nt, Human
ggcucuuccaggcugggagagccu

SEQ ID NO: 3347464 - RNA, 18 nt, Human
ggcucgagcaugccugga

SEQ ID NO: 3347465 - RNA, 17 nt, Human
ggcugcagggaguccga

SEQ ID NO: 3347466 - RNA, 20 nt, Human
ggcugcaugcgggcuuccuc

SEQ ID NO: 3347467 - RNA, 21 nt, Human
ggcugccaaugggagcucaug

SEQ ID NO: 3347468 - RNA, 20 nt, Human
ggcucccuucccaccucucu

SEQ ID NO: 3347469 - RNA, 22 nt, Human
ggcucccuucccaccucucuca

SEQ ID NO: 3347470 - RNA, 17 nt, Human
ggcucccuucccaccuc

SEQ ID NO: 3347471 - RNA, 18 nt, Human
ggcucccuucccaccucu

SEQ ID NO: 3347472 - RNA, 16 nt, Human
ggcucccuucccaccu

SEQ ID NO: 3347473 - RNA, 13 nt, Human
ggcucccuuccca

SEQ ID NO: 3347474 - RNA, 17 nt, Human
ggcuggccuggccccuc

SEQ ID NO: 3347475 - RNA, 22 nt, Human
ggcuggccuggccccucagggu

SEQ ID NO: 3347476 - RNA, 20 nt, Human
ggcuggcgugcaguggugcg

SEQ ID NO: 3347477 - RNA, 16 nt, Human
ggcuggcgugcagugg

SEQ ID NO: 3347478 - RNA, 14 nt, Human
ggcuggcgugcagu

SEQ ID NO: 3347479 - RNA, 15 nt, Human
ggcuggccuggcccc

SEQ ID NO: 3347480 - RNA, 23 nt, Human
gggaaaaucagccugcuccagcu

SEQ ID NO: 3347481 - RNA, 13 nt, Human
gggaaaaucagcc

SEQ ID NO: 3347482 - RNA, 14 nt, Human
ggcuuuugugcauu

SEQ ID NO: 3347483 - RNA, 16 nt, Human
ggcuucaguggcagcu

SEQ ID NO: 3347484 - RNA, 16 nt, Human
ggcuggugucaccuga

SEQ ID NO: 3347485 - RNA, 19 nt, Human
ggcuguaucccaugagccu

SEQ ID NO: 3347486 - RNA, 15 nt, Human
ggcugucaauuacag

SEQ ID NO: 3347487 - RNA, 23 nt, Human
ggcuguaucccaugagccucagc

SEQ ID NO: 3347488 - RNA, 22 nt, Human
ggcuguaucccaugagccucag

SEQ ID NO: 3347489 - RNA, 20 nt, Human
ggcuguaucccaugagccuc

SEQ ID NO: 3347490 - RNA, 15 nt, Human
ggcuucaguggcagc

SEQ ID NO: 3347491 - RNA, 12 nt, Human
gaacuggcugca

SEQ ID NO: 3347492 - RNA, 11 nt, Human
gaacuggcugc

SEQ ID NO: 3347493 - RNA, 15 nt, Human
gaacuccuggccuca

SEQ ID NO: 3347494 - RNA, 16 nt, Human
gaagacaaugacuuac

SEQ ID NO: 3347495 - RNA, 22 nt, Human
gaagacaaugacuuacuguaca

SEQ ID NO: 3347496 - RNA, 23 nt, Human
gaagacaaugugaaaagaaaaau

SEQ ID NO: 3347497 - RNA, 23 nt, Human
gaagauuuugaaauuuuuauuaa

SEQ ID NO: 3347498 - RNA, 17 nt, Human
gaagcacaugccucucu

SEQ ID NO: 3347499 - RNA, 20 nt, Human
gaagcacaugccucucucag

SEQ ID NO: 3347500 - RNA, 15 nt, Human
gaagcacaugccucu

SEQ ID NO: 3347501 - RNA, 14 nt, Human
gaagcacaugccuc

SEQ ID NO: 3347502 - RNA, 15 nt, Human
gaagcagaggaagga

SEQ ID NO: 3347503 - RNA, 19 nt, Human
gaagcuccgcuuucuaccc

SEQ ID NO: 3347504 - RNA, 17 nt, Human
gaaggccccgcccaggc

SEQ ID NO: 3347505 - RNA, 22 nt, Human
gaagcuccgcuuucuacccagc

SEQ ID NO: 3347506 - RNA, 15 nt, Human
gaaggcuggguucug

SEQ ID NO: 3347507 - RNA, 19 nt, Human
gaaggcuggguucugaucc

SEQ ID NO: 3347508 - RNA, 19 nt, Human
gaaggcucgagcaugccug

SEQ ID NO: 3347509 - RNA, 18 nt, Human
gaaggccccgcccaggcu

SEQ ID NO: 3347510 - RNA, 19 nt, Human
gaaggccccgcccaggcuu

SEQ ID NO: 3347511 - RNA, 21 nt, Human
gaaggcucgagcaugccugga

SEQ ID NO: 3347512 - RNA, 20 nt, Human
gaaggcuggguucugauccu

SEQ ID NO: 3347513 - RNA, 22 nt, Human
gaaggcuggguucugauccuag

SEQ ID NO: 3347514 - RNA, 22 nt, Human
gaaggggagauaaggguaucug

SEQ ID NO: 3347515 - RNA, 14 nt, Human
gaauauugcugaug

SEQ ID NO: 3347516 - RNA, 15 nt, Human
gaauauugcugaugg

SEQ ID NO: 3347517 - RNA, 19 nt, Human
gaauauugcugauggugca

SEQ ID NO: 3347518 - RNA, 13 nt, Human
gaauauugcugau

SEQ ID NO: 3347519 - RNA, 17 nt, Human
gacagcccgggcucugc

SEQ ID NO: 3347520 - RNA, 22 nt, Human
gacacagcucuucuccaggcug

SEQ ID NO: 3347521 - RNA, 21 nt, Human
gacacagcucuucuccaggcu

SEQ ID NO: 3347522 - RNA, 23 nt, Human
gacacagcucuucuccaggcugu

SEQ ID NO: 3347523 - RNA, 16 nt, Human
gacacagcucuucucc

SEQ ID NO: 3347524 - RNA, 14 nt, Human
gacacagcucuucu

SEQ ID NO: 3347525 - RNA, 13 nt, Human
gacacagcucuuc

SEQ ID NO: 3347526 - RNA, 15 nt, Human
gacauugcggacagc

SEQ ID NO: 3347527 - RNA, 14 nt, Human
gacauugcggacag

SEQ ID NO: 3347528 - RNA, 18 nt, Human
gacagcccgggcucugcc

SEQ ID NO: 3347529 - RNA, 19 nt, Human
gacagcccgggcucugccu

SEQ ID NO: 3347530 - RNA, 16 nt, Human
gacagcccgggcucug

SEQ ID NO: 3347531 - RNA, 19 nt, Human
gacauuguuggccaaagcc

SEQ ID NO: 3347532 - RNA, 12 nt, Human
gaccaucccuga

SEQ ID NO: 3347533 - RNA, 13 nt, Human
gaccaucccugaa

SEQ ID NO: 3347534 - RNA, 18 nt, Human
gaccaucccugaaggccc

SEQ ID NO: 3347535 - RNA, 19 nt, Human
gaccaucccugaaggcccc

SEQ ID NO: 3347536 - RNA, 20 nt, Human
gaccagggauuuccaugaug

SEQ ID NO: 3347537 - RNA, 18 nt, Human
gaccagggauuuccauga

SEQ ID NO: 3347538 - RNA, 11 nt, Human
gaccugaggcc

SEQ ID NO: 3347539 - RNA, 13 nt, Human
gaccugaggcccu

SEQ ID NO: 3347540 - RNA, 16 nt, Human
gacgccaucccagccc

SEQ ID NO: 3347541 - RNA, 13 nt, Human
gaccucugccuga

SEQ ID NO: 3347542 - RNA, 20 nt, Human
gaccaucccugaaggccccg

SEQ ID NO: 3347543 - RNA, 17 nt, Human
gacgccaucccagcccc

SEQ ID NO: 3347544 - RNA, 18 nt, Human
gacgccaucccagcccca

SEQ ID NO: 3347545 - RNA, 15 nt, Human
gacgccaucccagcc

SEQ ID NO: 3347546 - RNA, 16 nt, Human
gacgcuacccgggaag

SEQ ID NO: 3347547 - RNA, 18 nt, Human
gacgcuacccgggaaggg

SEQ ID NO: 3347548 - RNA, 14 nt, Human
gacugaauuucuuu

SEQ ID NO: 3347549 - RNA, 19 nt, Human
gacucugucucaaaaaaac

SEQ ID NO: 3347550 - RNA, 13 nt, Human
gacuuuauaagcc

SEQ ID NO: 3347551 - RNA, 17 nt, Human
gagccuuccaggggugg

SEQ ID NO: 3347552 - RNA, 13 nt, Human
gagccuugaacuu

SEQ ID NO: 3347553 - RNA, 23 nt, Human
gagccuuccaggggugggacacc

SEQ ID NO: 3347554 - RNA, 20 nt, Human
gagccuuccaggggugggac

SEQ ID NO: 3347555 - RNA, 13 nt, Human
gaggccagagaca

SEQ ID NO: 3347556 - RNA, 14 nt, Human
gaggccagagacac

SEQ ID NO: 3347557 - RNA, 22 nt, Human
gaggcuagugugguguuuccug

SEQ ID NO: 3347558 - RNA, 22 nt, Human
gaggcagggucucacucugucg

SEQ ID NO: 3347559 - RNA, 15 nt, Human
gaggcagggucucac

SEQ ID NO: 3347560 - RNA, 17 nt, Human
gaggccaaggugggagg

SEQ ID NO: 3347561 - RNA, 22 nt, Human
gaggccaaggugggaggauugc

SEQ ID NO: 3347562 - RNA, 14 nt, Human
gaggcagggucuca

SEQ ID NO: 3347563 - RNA, 23 nt, Human
gaggugaccccagguuucuaugu

SEQ ID NO: 3347564 - RNA, 15 nt, Human
gaggucgaggcagga

SEQ ID NO: 3347565 - RNA, 20 nt, Human
gagugacagaggcagcccca

SEQ ID NO: 3347566 - RNA, 15 nt, Human
gaguugauucagcuc

SEQ ID NO: 3347567 - RNA, 16 nt, Human
gaguugauucagcucu

SEQ ID NO: 3347568 - RNA, 17 nt, Human
gaguugauucagcucug

SEQ ID NO: 3347569 - RNA, 22 nt, Human
gaguugauagcacagacccugc

SEQ ID NO: 3347570 - RNA, 17 nt, Human
gagucaccaagcccagu

SEQ ID NO: 3347571 - RNA, 18 nt, Human
gagucagaaguuucugcc

SEQ ID NO: 3347572 - RNA, 16 nt, Human
gagucaccaagcccag

SEQ ID NO: 3347573 - RNA, 15 nt, Human
gagucaccaagccca

SEQ ID NO: 3347574 - RNA, 18 nt, Human
gagugacagaggcagccc

SEQ ID NO: 3347575 - RNA, 17 nt, Human
gagugacagaggcagcc

SEQ ID NO: 3347576 - RNA, 12 nt, Human
gagucccaccuu

SEQ ID NO: 3347577 - RNA, 22 nt, Human
gagucagaaguuucugccgcag

SEQ ID NO: 3347578 - RNA, 22 nt, Human
gaguuguuacauuuuuaagugc

SEQ ID NO: 3347579 - RNA, 18 nt, Human
gaguugauucagcucugc

SEQ ID NO: 3347580 - RNA, 19 nt, Human
gcaagugagagcugggugu

SEQ ID NO: 3347581 - RNA, 22 nt, Human
gcacaagcugcacccucaggca

SEQ ID NO: 3347582 - RNA, 14 nt, Human
gcacaccgggcacu

SEQ ID NO: 3347583 - RNA, 14 nt, Human
gcacacauuuuuua

SEQ ID NO: 3347584 - RNA, 21 nt, Human
gcacaucagcacgauuucugu

SEQ ID NO: 3347585 - RNA, 22 nt, Human
gcacaucagcacgauuucuguu

SEQ ID NO: 3347586 - RNA, 23 nt, Human
gcacaucagcacgauuucuguuu

SEQ ID NO: 3347587 - RNA, 14 nt, Human
gcaccgggccacag

SEQ ID NO: 3347588 - RNA, 23 nt, Human
gcaccgggccacagagaaaguac

SEQ ID NO: 3347589 - RNA, 17 nt, Human
gcacuccccugcugggu

SEQ ID NO: 3347590 - RNA, 16 nt, Human
gcacucagaagacacu

SEQ ID NO: 3347591 - RNA, 13 nt, Human
gcacucagaagac

SEQ ID NO: 3347592 - RNA, 22 nt, Human
gcacuccccugcuggguguggc

SEQ ID NO: 3347593 - RNA, 16 nt, Human
gcacuccccugcuggg

SEQ ID NO: 3347594 - RNA, 16 nt, Human
gcacuugcagacucua

SEQ ID NO: 3347595 - RNA, 12 nt, Human
gauuauuggaaa

SEQ ID NO: 3347596 - RNA, 12 nt, Human
gauuauccugag

SEQ ID NO: 3347597 - RNA, 14 nt, Human
gauucuccugccuc

SEQ ID NO: 3347598 - RNA, 18 nt, Human
gauucuccugccucagcc

SEQ ID NO: 3347599 - RNA, 17 nt, Human
gauucuccugccucagc

SEQ ID NO: 3347600 - RNA, 15 nt, Human
gauucuccugccuca

SEQ ID NO: 3347601 - RNA, 18 nt, Human
gauucuuccucccucccu

SEQ ID NO: 3347602 - RNA, 17 nt, Human
gauucuuccucccuccc

SEQ ID NO: 3347603 - RNA, 14 nt, Human
gaugauccuaggca

SEQ ID NO: 3347604 - RNA, 15 nt, Human
gaugaucuaggaaga

SEQ ID NO: 3347605 - RNA, 21 nt, Human
gaugaucuaggaagacuuugg

SEQ ID NO: 3347606 - RNA, 16 nt, Human
gaugagugagcaugcc

SEQ ID NO: 3347607 - RNA, 22 nt, Human
cuggaugcagccucacaguccu

SEQ ID NO: 3347608 - RNA, 15 nt, Human
cuggaguucugguuc

SEQ ID NO: 3347609 - RNA, 16 nt, Human
cuggaguucugguucc

SEQ ID NO: 3347610 - RNA, 17 nt, Human
cuggaguucugguuccu

SEQ ID NO: 3347611 - RNA, 20 nt, Human
cugcuuaacuucacauauug

SEQ ID NO: 3347612 - RNA, 13 nt, Human
cugcugaaggcuc

SEQ ID NO: 3347613 - RNA, 14 nt, Human
cugcugaaggcucg

SEQ ID NO: 3347614 - RNA, 15 nt, Human
cugcugaaggcucga

SEQ ID NO: 3347615 - RNA, 12 nt, Human
cugcugacagug

SEQ ID NO: 3347616 - RNA, 11 nt, Human
cugcugacagu

SEQ ID NO: 3347617 - RNA, 15 nt, Human
cugcugacaguguug

SEQ ID NO: 3347618 - RNA, 13 nt, Human
cugcugacagugu

SEQ ID NO: 3347619 - RNA, 14 nt, Human
cugcucacauaucu

SEQ ID NO: 3347620 - RNA, 19 nt, Human
cugcucacauaucugucau

SEQ ID NO: 3347621 - RNA, 16 nt, Human
cugcucacauaucugu

SEQ ID NO: 3347622 - RNA, 12 nt, Human
cugcugaaggcu

SEQ ID NO: 3347623 - RNA, 15 nt, Human
cugggacuacaggca

SEQ ID NO: 3347624 - RNA, 13 nt, Human
cugggacuacagg

SEQ ID NO: 3347625 - RNA, 18 nt, Human
cugggacaugggaaaggg

SEQ ID NO: 3347626 - RNA, 22 nt, Human
cugggacaugggaaaggggaag

SEQ ID NO: 3347627 - RNA, 14 nt, Human
cugggacaugggaa

SEQ ID NO: 3347628 - RNA, 13 nt, Human
cuggcuaugcauu

SEQ ID NO: 3347629 - RNA, 14 nt, Human
cuggcuaugcauuu

SEQ ID NO: 3347630 - RNA, 15 nt, Human
cuggcuaugcauuug

SEQ ID NO: 3347631 - RNA, 16 nt, Human
cuggcuaugcauuuga

SEQ ID NO: 3347632 - RNA, 22 nt, Human
cuggcuaugcauuugaaaauuu

SEQ ID NO: 3347633 - RNA, 12 nt, Human
cuggcccuuccu

SEQ ID NO: 3347634 - RNA, 13 nt, Human
cuggggagaaagu

SEQ ID NO: 3347635 - RNA, 18 nt, Human
cuggguggcaccagcagc

SEQ ID NO: 3347636 - RNA, 20 nt, Human
cuggguggcaccagcagccu

SEQ ID NO: 3347637 - RNA, 20 nt, Human
cugggcagguuggugggggc

SEQ ID NO: 3347638 - RNA, 13 nt, Human
cugggcagaggaa

SEQ ID NO: 3347639 - RNA, 16 nt, Human
cugggcagaggaaagc

SEQ ID NO: 3347640 - RNA, 12 nt, Human
cugggcagagga

SEQ ID NO: 3347641 - RNA, 20 nt, Human
cugggcagaggaaagcaaag

SEQ ID NO: 3347642 - RNA, 15 nt, Human
cuggguguggcgcag

SEQ ID NO: 3347643 - RNA, 14 nt, Human
cuggguguggcgca

SEQ ID NO: 3347644 - RNA, 21 nt, Human
cuggguggcaccagcagccug

SEQ ID NO: 3347645 - RNA, 16 nt, Human
cugcccuuaccugcca

SEQ ID NO: 3347646 - RNA, 12 nt, Human
cugcccuuaccu

SEQ ID NO: 3347647 - RNA, 19 nt, Human
cugcccugugggcccccaa

SEQ ID NO: 3347648 - RNA, 17 nt, Human
cugcauuuaaaagauac

SEQ ID NO: 3347649 - RNA, 20 nt, Human
cugccagggacagagggggu

SEQ ID NO: 3347650 - RNA, 22 nt, Human
cugccagggacagagggggugg

SEQ ID NO: 3347651 - RNA, 23 nt, Human
cugccagggacagaggggguggc

SEQ ID NO: 3347652 - RNA, 18 nt, Human
cugccauccagguucagc

SEQ ID NO: 3347653 - RNA, 16 nt, Human
cugccauccagguuca

SEQ ID NO: 3347654 - RNA, 16 nt, Human
cugccauauucuguug

SEQ ID NO: 3347655 - RNA, 12 nt, Human
cugccauccagg

SEQ ID NO: 3347656 - RNA, 14 nt, Human
cugcauuuaaaaga

SEQ ID NO: 3347657 - RNA, 13 nt, Human
cugcauuggcuuu

SEQ ID NO: 3347658 - RNA, 16 nt, Human
cugaugcuucuucaga

SEQ ID NO: 3347659 - RNA, 17 nt, Human
cugaugcuucuucagag

SEQ ID NO: 3347660 - RNA, 14 nt, Human
cucuuaugggcugg

SEQ ID NO: 3347661 - RNA, 15 nt, Human
cucuuaugggcuggg

SEQ ID NO: 3347662 - RNA, 21 nt, Human
cugaugggcaacccccagccu

SEQ ID NO: 3347663 - RNA, 18 nt, Human
cugaugggcaacccccag

SEQ ID NO: 3347664 - RNA, 18 nt, Human
cugaugcuucuucagaga

SEQ ID NO: 3347665 - RNA, 19 nt, Human
cugaugcuucuucagagac

SEQ ID NO: 3347666 - RNA, 20 nt, Human
cugaugcuucuucagagacu

SEQ ID NO: 3347667 - RNA, 22 nt, Human
cugcaaaggguaucaggugcug

SEQ ID NO: 3347668 - RNA, 21 nt, Human
cugcaaaggguaucaggugcu

SEQ ID NO: 3347669 - RNA, 23 nt, Human
cugaugggcaacccccagccugc

SEQ ID NO: 3347670 - RNA, 22 nt, Human
cugaugggcaacccccagccug

SEQ ID NO: 3347671 - RNA, 24 nt, Human
cugaugggcaacccccagccugcu

SEQ ID NO: 3347672 - RNA, 20 nt, Human
cugcaaccuccgccucuugg

SEQ ID NO: 3347673 - RNA, 19 nt, Human
cugcaaccugauugugucu

SEQ ID NO: 3347674 - RNA, 21 nt, Human
cugcaaccugauugugucucu

SEQ ID NO: 3347675 - RNA, 14 nt, Human
cugcaaccugauug

SEQ ID NO: 3347676 - RNA, 22 nt, Human
cugcaaccuccgccucuugggu

SEQ ID NO: 3347677 - RNA, 18 nt, Human
cugcaagaauugaagcag

SEQ ID NO: 3347678 - RNA, 22 nt, Human
cugcaaccugauugugucucuu

SEQ ID NO: 3347679 - RNA, 12 nt, Human
cugcaagggagu

SEQ ID NO: 3347680 - RNA, 20 nt, Human
cugcaagaauugaagcagga

SEQ ID NO: 3347681 - RNA, 20 nt, Human
cugcaccgggccacagagaa

SEQ ID NO: 3347682 - RNA, 23 nt, Human
cugcaccgggccacagagaaagu

SEQ ID NO: 3347683 - RNA, 12 nt, Human
cugcagcuuugu

SEQ ID NO: 3347684 - RNA, 13 nt, Human
cugcaggcagcca

SEQ ID NO: 3347685 - RNA, 14 nt, Human
cugcaggcagccag

SEQ ID NO: 3347686 - RNA, 15 nt, Human
cugcaggcagccagg

SEQ ID NO: 3347687 - RNA, 16 nt, Human
cugcaggcagccaggc

SEQ ID NO: 3347688 - RNA, 17 nt, Human
cugcaggcagccaggcc

SEQ ID NO: 3347689 - RNA, 18 nt, Human
cugcaggcagccaggcca

SEQ ID NO: 3347690 - RNA, 19 nt, Human
cugcaggcagccaggccac

SEQ ID NO: 3347691 - RNA, 20 nt, Human
cugcaggcagccaggccaca

SEQ ID NO: 3347692 - RNA, 17 nt, Human
cugcacuccagccuggg

SEQ ID NO: 3347693 - RNA, 16 nt, Human
cugcacuccagccugg

SEQ ID NO: 3347694 - RNA, 18 nt, Human
cugcacuccagccugggu

SEQ ID NO: 3347695 - RNA, 24 nt, Human
cugcagccucaaccuccugggcua

SEQ ID NO: 3347696 - RNA, 23 nt, Human
cugcagccucaaccuccugggcu

SEQ ID NO: 3347697 - RNA, 20 nt, Human
cugcacuauagccuagguga

SEQ ID NO: 3347698 - RNA, 18 nt, Human
cugcacuauagccuaggu

SEQ ID NO: 3347699 - RNA, 17 nt, Human
cugcacuauagccuagg

SEQ ID NO: 3347700 - RNA, 16 nt, Human
cugcacuauagccuag

SEQ ID NO: 3347701 - RNA, 13 nt, Human
cugcacuccagcc

SEQ ID NO: 3347702 - RNA, 23 nt, Human
cugcacuauagccuaggugacag

SEQ ID NO: 3347703 - RNA, 22 nt, Human
cugcacuauagccuaggugaca

SEQ ID NO: 3347704 - RNA, 15 nt, Human
cugcacuccagccug

SEQ ID NO: 3347705 - RNA, 18 nt, Human
cuuccagugaggcucugc

SEQ ID NO: 3347706 - RNA, 17 nt, Human
cuuccagugaggcucug

SEQ ID NO: 3347707 - RNA, 19 nt, Human
cuuccagugaggcucugcc

SEQ ID NO: 3347708 - RNA, 16 nt, Human
cuuccauggacuuugu

SEQ ID NO: 3347709 - RNA, 17 nt, Human
cuuccauggacuuuguu

SEQ ID NO: 3347710 - RNA, 23 nt, Human
cuucagagacuccugcaggcagc

SEQ ID NO: 3347711 - RNA, 17 nt, Human
cuucaguggcagcugcu

SEQ ID NO: 3347712 - RNA, 18 nt, Human
cuucaguggcagcugcuu

SEQ ID NO: 3347713 - RNA, 13 nt, Human
cuucaucccucug

SEQ ID NO: 3347714 - RNA, 15 nt, Human
cuucauccuccucag

SEQ ID NO: 3347715 - RNA, 16 nt, Human
cuucauccuccucaga

SEQ ID NO: 3347716 - RNA, 17 nt, Human
cuucaccuuugucccca

SEQ ID NO: 3347717 - RNA, 18 nt, Human
cuuauugcccacgcugga

SEQ ID NO: 3347718 - RNA, 14 nt, Human
cuucaccuuugucc

SEQ ID NO: 3347719 - RNA, 20 nt, Human
cuucagagacuccugcaggc

SEQ ID NO: 3347720 - RNA, 16 nt, Human
cuucagagacuccugc

SEQ ID NO: 3347721 - RNA, 21 nt, Human
cuucagagacuccugcaggca

SEQ ID NO: 3347722 - RNA, 22 nt, Human
cuucagagacuccugcaggcag

SEQ ID NO: 3347723 - RNA, 18 nt, Human
cuuagcagggaaacagcu

SEQ ID NO: 3347724 - RNA, 13 nt, Human
cuuauugcccacg

SEQ ID NO: 3347725 - RNA, 12 nt, Human
cuuauugcccac

SEQ ID NO: 3347726 - RNA, 22 nt, Human
cuuaugggcuggguucuaccca

SEQ ID NO: 3347727 - RNA, 23 nt, Human
cuuaugggcuggguucuacccag

SEQ ID NO: 3347728 - RNA, 14 nt, Human
cuuaugggcugggu

SEQ ID NO: 3347729 - RNA, 21 nt, Human
cuuaugggcuggguucuaccc

SEQ ID NO: 3347730 - RNA, 21 nt, Human
cuuauggaacacucugagacu

SEQ ID NO: 3347731 - RNA, 19 nt, Human
cugugcugagucugaaggc

SEQ ID NO: 3347732 - RNA, 11 nt, Human
cugugcugccc

SEQ ID NO: 3347733 - RNA, 20 nt, Human
cugugcugagucugaaggcu

SEQ ID NO: 3347734 - RNA, 22 nt, Human
cugugcugagucugaaggcugg

SEQ ID NO: 3347735 - RNA, 14 nt, Human
cugugucucccuuc

SEQ ID NO: 3347736 - RNA, 19 nt, Human
cugugucucccuucauccu

SEQ ID NO: 3347737 - RNA, 14 nt, Human
cugugucuugcaau

SEQ ID NO: 3347738 - RNA, 21 nt, Human
cugugucagguggggcagcuu

SEQ ID NO: 3347739 - RNA, 19 nt, Human
cugugucagcauagaagua

SEQ ID NO: 3347740 - RNA, 20 nt, Human
cugugucagcauagaaguaa

SEQ ID NO: 3347741 - RNA, 19 nt, Human
cugugucagguggggcagc

SEQ ID NO: 3347742 - RNA, 19 nt, Human
cugugucuugcaauggcag

SEQ ID NO: 3347743 - RNA, 16 nt, Human
cugugucuugcaaugg

SEQ ID NO: 3347744 - RNA, 13 nt, Human
cuguucagcucca

SEQ ID NO: 3347745 - RNA, 13 nt, Human
cuuacacaauggu

SEQ ID NO: 3347746 - RNA, 17 nt, Human
cuguugggccaggagcc

SEQ ID NO: 3347747 - RNA, 20 nt, Human
cuguugggccaggagccucc

SEQ ID NO: 3347748 - RNA, 16 nt, Human
cuguugggccaggagc

SEQ ID NO: 3347749 - RNA, 17 nt, Human
cuuacccucauguucuu

SEQ ID NO: 3347750 - RNA, 18 nt, Human
cuuacccucauguucuua

SEQ ID NO: 3347751 - RNA, 19 nt, Human
cuuacccucauguucuuaa

SEQ ID NO: 3347752 - RNA, 13 nt, Human
cuuaccucggugc

SEQ ID NO: 3347753 - RNA, 19 nt, Human
cuuaccucggugccuuccu

SEQ ID NO: 3347754 - RNA, 21 nt, Human
cuuaccucggugccuuccucu

SEQ ID NO: 3347755 - RNA, 19 nt, Human
cuuagauguauauauuucc

SEQ ID NO: 3347756 - RNA, 20 nt, Human
cuugccgucuaccugagggg

SEQ ID NO: 3347757 - RNA, 12 nt, Human
cuugacagggca

SEQ ID NO: 3347758 - RNA, 19 nt, Human
cuugccgucuaccugaggg

SEQ ID NO: 3347759 - RNA, 23 nt, Human
cuugccgucuaccugaggggccu

SEQ ID NO: 3347760 - RNA, 12 nt, Human
cuugcucugcug

SEQ ID NO: 3347761 - RNA, 20 nt, Human
cuugaaugaugccaugagga

SEQ ID NO: 3347762 - RNA, 20 nt, Human
cuucuucagagacuccugca

SEQ ID NO: 3347763 - RNA, 21 nt, Human
cuucuucagagacuccugcag

SEQ ID NO: 3347764 - RNA, 23 nt, Human
cuucugacccaugcugcccugug

SEQ ID NO: 3347765 - RNA, 22 nt, Human
cuucuucagagacuccugcagg

SEQ ID NO: 3347766 - RNA, 18 nt, Human
cuucuucagagacuccug

SEQ ID NO: 3347767 - RNA, 20 nt, Human
cuuuggucuacacugugcug

SEQ ID NO: 3347768 - RNA, 16 nt, Human
cuuuggucuacacugu

SEQ ID NO: 3347769 - RNA, 15 nt, Human
cuuuuauaaacuuua

SEQ ID NO: 3347770 - RNA, 16 nt, Human
cuuuuauaaacuuuac

SEQ ID NO: 3347771 - RNA, 18 nt, Human
cuuuuauaaacuuuaccu

SEQ ID NO: 3347772 - RNA, 14 nt, Human
cuuuuauaaacuuu

SEQ ID NO: 3347773 - RNA, 15 nt, Human
cuuuucaaaacauuu

SEQ ID NO: 3347774 - RNA, 16 nt, Human
cuuuucaaggcuuaua

SEQ ID NO: 3347775 - RNA, 13 nt, Human
cuuuucaaggcuu

SEQ ID NO: 3347776 - RNA, 18 nt, Human
cuuugacgccaucccagc

SEQ ID NO: 3347777 - RNA, 19 nt, Human
cuuugacgccaucccagcc

SEQ ID NO: 3347778 - RNA, 21 nt, Human
cuuugacgccaucccagcccc

SEQ ID NO: 3347779 - RNA, 22 nt, Human
cuuugacgccaucccagcccca

SEQ ID NO: 3347780 - RNA, 18 nt, Human
cuuucaauaggaaaaacu

SEQ ID NO: 3347781 - RNA, 20 nt, Human
cuuucaauaggaaaaacuga

SEQ ID NO: 3347782 - RNA, 21 nt, Human
cuuucaauaggaaaaacugau

SEQ ID NO: 3347783 - RNA, 22 nt, Human
cuuucaauaggaaaaacugauu

SEQ ID NO: 3347784 - RNA, 15 nt, Human
cuuguggacacagcu

SEQ ID NO: 3347785 - RNA, 14 nt, Human
cuuguggacacagc

SEQ ID NO: 3347786 - RNA, 13 nt, Human
cuuguggacacag

SEQ ID NO: 3347787 - RNA, 13 nt, Human
caaguauuauacc

SEQ ID NO: 3347788 - RNA, 17 nt, Human
caaguauuauaccuuuu

SEQ ID NO: 3347789 - RNA, 22 nt, Human
caaguauuauaccuuuuuuaga

SEQ ID NO: 3347790 - RNA, 20 nt, Human
caaggauugcuacuguccua

SEQ ID NO: 3347791 - RNA, 19 nt, Human
caaggauugcuacuguccu

SEQ ID NO: 3347792 - RNA, 14 nt, Human
caaggcaaggcugu

SEQ ID NO: 3347793 - RNA, 17 nt, Human
caagcuccaagcuccca

SEQ ID NO: 3347794 - RNA, 18 nt, Human
caagcuccaagcucccag

SEQ ID NO: 3347795 - RNA, 19 nt, Human
caagcuccaagcucccagg

SEQ ID NO: 3347796 - RNA, 21 nt, Human
caagcuccaagcucccaggca

SEQ ID NO: 3347797 - RNA, 12 nt, Human
caagcucccagg

SEQ ID NO: 3347798 - RNA, 14 nt, Human
caagcucccaggca

SEQ ID NO: 3347799 - RNA, 15 nt, Human
caagcucccaggcau

SEQ ID NO: 3347800 - RNA, 17 nt, Human
caagcucccaggcauuc

SEQ ID NO: 3347801 - RNA, 16 nt, Human
caagcucugcuccucu

SEQ ID NO: 3347802 - RNA, 15 nt, Human
caagcucugcuccuc

SEQ ID NO: 3347803 - RNA, 20 nt, Human
caauuuauuauggcacauca

SEQ ID NO: 3347804 - RNA, 13 nt, Human
caauuuauuaugg

SEQ ID NO: 3347805 - RNA, 15 nt, Human
caauggcagccuugg

SEQ ID NO: 3347806 - RNA, 14 nt, Human
caauggcagccuug

SEQ ID NO: 3347807 - RNA, 13 nt, Human
caauggcagccuu

SEQ ID NO: 3347808 - RNA, 12 nt, Human
caauggcagccu

SEQ ID NO: 3347809 - RNA, 14 nt, Human
caaucaaaucugcu

SEQ ID NO: 3347810 - RNA, 13 nt, Human
caagcaccuccug

SEQ ID NO: 3347811 - RNA, 14 nt, Human
caagaccacguuuc

SEQ ID NO: 3347812 - RNA, 16 nt, Human
caaccccuucgcuccu

SEQ ID NO: 3347813 - RNA, 14 nt, Human
caaccccuucgcuc

SEQ ID NO: 3347814 - RNA, 18 nt, Human
caagaagcccaggaaagg

SEQ ID NO: 3347815 - RNA, 17 nt, Human
caagaaggaugauucaa

SEQ ID NO: 3347816 - RNA, 14 nt, Human
caagaagcccagga

SEQ ID NO: 3347817 - RNA, 15 nt, Human
caagaagcccaggaa

SEQ ID NO: 3347818 - RNA, 19 nt, Human
caccagcccuuagcaggga

SEQ ID NO: 3347819 - RNA, 16 nt, Human
caccagccccagugcc

SEQ ID NO: 3347820 - RNA, 22 nt, Human
caccagccccagugcccacagg

SEQ ID NO: 3347821 - RNA, 21 nt, Human
caccagccccagugcccacag

SEQ ID NO: 3347822 - RNA, 18 nt, Human
caccagccccagugccca

SEQ ID NO: 3347823 - RNA, 17 nt, Human
caccagccccagugccc

SEQ ID NO: 3347824 - RNA, 18 nt, Human
cacauuuauucugcucac

SEQ ID NO: 3347825 - RNA, 17 nt, Human
cacauuuauucugcuca

SEQ ID NO: 3347826 - RNA, 19 nt, Human
cacaucuugcucugcugac

SEQ ID NO: 3347827 - RNA, 23 nt, Human
cacaucuugcucugcugacagac

SEQ ID NO: 3347828 - RNA, 12 nt, Human
cacccagcccac

SEQ ID NO: 3347829 - RNA, 22 nt, Human
cacaucuugcucugcugacaga

SEQ ID NO: 3347830 - RNA, 21 nt, Human
cacaucuugcucugcugacag

SEQ ID NO: 3347831 - RNA, 20 nt, Human
cacaucuugcucugcugaca

SEQ ID NO: 3347832 - RNA, 15 nt, Human
cacaucuugcucugc

SEQ ID NO: 3347833 - RNA, 14 nt, Human
cacaucuugcucug

SEQ ID NO: 3347834 - RNA, 13 nt, Human
cacaucuugcucu

SEQ ID NO: 3347835 - RNA, 17 nt, Human
caccugcggugcuaucu

SEQ ID NO: 3347836 - RNA, 19 nt, Human
caccugcggugcuaucucc

SEQ ID NO: 3347837 - RNA, 16 nt, Human
caccugcggugcuauc

SEQ ID NO: 3347838 - RNA, 24 nt, Human
caccugccuguugggccaggagcc

SEQ ID NO: 3347839 - RNA, 12 nt, Human
cacccuccuuuc

SEQ ID NO: 3347840 - RNA, 12 nt, Human
cacccugcucuc

SEQ ID NO: 3347841 - RNA, 16 nt, Human
caccugccccucaacu

SEQ ID NO: 3347842 - RNA, 18 nt, Human
caccugccccucaacucu

SEQ ID NO: 3347843 - RNA, 21 nt, Human
caccugccccucaacucuccu

SEQ ID NO: 3347844 - RNA, 11 nt, Human
caccugccagg

SEQ ID NO: 3347845 - RNA, 12 nt, Human
caccugccaggg

SEQ ID NO: 3347846 - RNA, 17 nt, Human
cacccuggggagaaagu

SEQ ID NO: 3347847 - RNA, 15 nt, Human
cacgcuggagugcag

SEQ ID NO: 3347848 - RNA, 20 nt, Human
cacgcuggagugcagugagc

SEQ ID NO: 3347849 - RNA, 18 nt, Human
cacgcuggagugcaguga

SEQ ID NO: 3347850 - RNA, 17 nt, Human
cacgcuggagugcagug

SEQ ID NO: 3347851 - RNA, 16 nt, Human
cacgcuggagugcagu

SEQ ID NO: 3347852 - RNA, 21 nt, Human
cacgcuggagugcagugagcc

SEQ ID NO: 3347853 - RNA, 13 nt, Human
cacuacauucugu

SEQ ID NO: 3347854 - RNA, 14 nt, Human
cacuacauucuguu

SEQ ID NO: 3347855 - RNA, 21 nt, Human
cacuacauuauaaaugucucu

SEQ ID NO: 3347856 - RNA, 16 nt, Human
cacggaagagccuugc

SEQ ID NO: 3347857 - RNA, 22 nt, Human
cacggaagagccuugcggaagg

SEQ ID NO: 3347858 - RNA, 15 nt, Human
cacuacauucuguua

SEQ ID NO: 3347859 - RNA, 21 nt, Human
auuucuguuuagauaauacac

SEQ ID NO: 3347860 - RNA, 20 nt, Human
auuucuguuuagauaauaca

SEQ ID NO: 3347861 - RNA, 19 nt, Human
auuucuguuuagauaauac

SEQ ID NO: 3347862 - RNA, 12 nt, Human
auuucacucucc

SEQ ID NO: 3347863 - RNA, 14 nt, Human
auuuguuauaauga

SEQ ID NO: 3347864 - RNA, 17 nt, Human
caaaccaucauugaaau

SEQ ID NO: 3347865 - RNA, 14 nt, Human
caaaccaucauuga

SEQ ID NO: 3347866 - RNA, 16 nt, Human
caaaccaucauugaaa

SEQ ID NO: 3347867 - RNA, 16 nt, Human
auuuuuauuaaauuau

SEQ ID NO: 3347868 - RNA, 22 nt, Human
auuuuguuuuugucuuaaaaag

SEQ ID NO: 3347869 - RNA, 21 nt, Human
auuuuguuuuugucuuaaaaa

SEQ ID NO: 3347870 - RNA, 20 nt, Human
caaaagguuaauaaaguaau

SEQ ID NO: 3347871 - RNA, 13 nt, Human
caaaagcauguga

SEQ ID NO: 3347872 - RNA, 19 nt, Human
caaaagcaucuaugugaga

SEQ ID NO: 3347873 - RNA, 22 nt, Human
auuacaagcgugagccacugca

SEQ ID NO: 3347874 - RNA, 15 nt, Human
auucucuuauccaac

SEQ ID NO: 3347875 - RNA, 14 nt, Human
auucucuuauccaa

SEQ ID NO: 3347876 - RNA, 12 nt, Human
auucucuuaucc

SEQ ID NO: 3347877 - RNA, 23 nt, Human
auucucuaguuugauuaaauucu

SEQ ID NO: 3347878 - RNA, 20 nt, Human
auucucuaguuugauuaaau

SEQ ID NO: 3347879 - RNA, 19 nt, Human
auucucuaguuugauuaaa

SEQ ID NO: 3347880 - RNA, 11 nt, Human
caucccagccc

SEQ ID NO: 3347881 - RNA, 20 nt, Human
caucccaaacccuucagugc

SEQ ID NO: 3347882 - RNA, 21 nt, Human
cauccucuguacagagcccac

SEQ ID NO: 3347883 - RNA, 22 nt, Human
cauccucuguacagagcccacg

SEQ ID NO: 3347884 - RNA, 19 nt, Human
caucccaaacccuucagug

SEQ ID NO: 3347885 - RNA, 19 nt, Human
caucagcacgauuucuguu

SEQ ID NO: 3347886 - RNA, 21 nt, Human
caucagcacgauuucuguuua

SEQ ID NO: 3347887 - RNA, 23 nt, Human
caguuuguuaguaugaggcauuu

SEQ ID NO: 3347888 - RNA, 21 nt, Human
caguuuguuaguaugaggcau

SEQ ID NO: 3347889 - RNA, 18 nt, Human
caguuguuagugugucuu

SEQ ID NO: 3347890 - RNA, 22 nt, Human
caguuguuagugugucuuagug

SEQ ID NO: 3347891 - RNA, 23 nt, Human
cauacaggaagguagaaauaucu

SEQ ID NO: 3347892 - RNA, 16 nt, Human
cauacaguuugcacuu

SEQ ID NO: 3347893 - RNA, 23 nt, Human
cauaaugcgugcauaccacuuuu

SEQ ID NO: 3347894 - RNA, 22 nt, Human
cauauuaccacagacauacuaa

SEQ ID NO: 3347895 - RNA, 23 nt, Human
cauagcagagaaugaaagggccc

SEQ ID NO: 3347896 - RNA, 22 nt, Human
cagucugauucccaagcucugc

SEQ ID NO: 3347897 - RNA, 21 nt, Human
cagucugauucccaagcucug

SEQ ID NO: 3347898 - RNA, 14 nt, Human
caguuacucagaau

SEQ ID NO: 3347899 - RNA, 19 nt, Human
caguggugcgaucuggguu

SEQ ID NO: 3347900 - RNA, 21 nt, Human
cagugguaugaucacggcuca

SEQ ID NO: 3347901 - RNA, 20 nt, Human
caguuacucagaauucucua

SEQ ID NO: 3347902 - RNA, 20 nt, Human
cagugguaugaucacggcuc

SEQ ID NO: 3347903 - RNA, 17 nt, Human
cagugggagcugccugu

SEQ ID NO: 3347904 - RNA, 15 nt, Human
cagugggagcugccu

SEQ ID NO: 3347905 - RNA, 16 nt, Human
cagugggagcugccug

SEQ ID NO: 3347906 - RNA, 22 nt, Human
cagugcccacaggaucagucug

SEQ ID NO: 3347907 - RNA, 18 nt, Human
cagugcccacaggaucag

SEQ ID NO: 3347908 - RNA, 21 nt, Human
cagugcccacaggaucagucu

SEQ ID NO: 3347909 - RNA, 23 nt, Human
cagucugauucccaagcucugcu

SEQ ID NO: 3347910 - RNA, 20 nt, Human
cagucugauucccaagcucu

SEQ ID NO: 3347911 - RNA, 13 nt, Human
caugacaaagacu

SEQ ID NO: 3347912 - RNA, 12 nt, Human
caugcaagguca

SEQ ID NO: 3347913 - RNA, 21 nt, Human
cauggccucuucagaucucua

SEQ ID NO: 3347914 - RNA, 18 nt, Human
caugggaaaggggaaguu

SEQ ID NO: 3347915 - RNA, 14 nt, Human
caugcuccuggccc

SEQ ID NO: 3347916 - RNA, 16 nt, Human
caugcuccuggcccac

SEQ ID NO: 3347917 - RNA, 17 nt, Human
caugcuccuggcccacu

SEQ ID NO: 3347918 - RNA, 17 nt, Human
cauucuccaccugccag

SEQ ID NO: 3347919 - RNA, 18 nt, Human
cauucuccaccugccagg

SEQ ID NO: 3347920 - RNA, 19 nt, Human
cauucuccaccugccaggg

SEQ ID NO: 3347921 - RNA, 20 nt, Human
cauucuccuuguguuacuaa

SEQ ID NO: 3347922 - RNA, 17 nt, Human
cauguuacauaagauaa

SEQ ID NO: 3347923 - RNA, 16 nt, Human
cauguuacauaagaua

SEQ ID NO: 3347924 - RNA, 15 nt, Human
cauguccaagaagcc

SEQ ID NO: 3347925 - RNA, 13 nt, Human
cauguucuuaauu

SEQ ID NO: 3347926 - RNA, 16 nt, Human
cauguucuuaauucuu

SEQ ID NO: 3347927 - RNA, 21 nt, Human
cauguuacauaagauaaaugu

SEQ ID NO: 3347928 - RNA, 18 nt, Human
cauguucuuaauucuuag

SEQ ID NO: 3347929 - RNA, 17 nt, Human
cauguuggccaggcugg

SEQ ID NO: 3347930 - RNA, 18 nt, Human
cauguuggccaggcuggu

SEQ ID NO: 3347931 - RNA, 22 nt, Human
ccaaaguacacuguuucaaacu

SEQ ID NO: 3347932 - RNA, 20 nt, Human
ccaaaguacacuguuucaaa

SEQ ID NO: 3347933 - RNA, 13 nt, Human
ccaacucacccca

SEQ ID NO: 3347934 - RNA, 23 nt, Human
ccaaaucagcugcuacuacuccu

SEQ ID NO: 3347935 - RNA, 15 nt, Human
ccaaaucagcugcua

SEQ ID NO: 3347936 - RNA, 15 nt, Human
ccaagcucugcuccu

SEQ ID NO: 3347937 - RNA, 14 nt, Human
ccaagcucugcucc

SEQ ID NO: 3347938 - RNA, 16 nt, Human
ccaagcucugcuccuc

SEQ ID NO: 3347939 - RNA, 13 nt, Human
ccaagcucugcuc

SEQ ID NO: 3347940 - RNA, 21 nt, Human
ccaacucaccccagccccaaa

SEQ ID NO: 3347941 - RNA, 23 nt, Human
ccaauggacuaacuugucuuugg

SEQ ID NO: 3347942 - RNA, 16 nt, Human
cauuuaggugaggaag

SEQ ID NO: 3347943 - RNA, 18 nt, Human
cauuuaggugaggaagca

SEQ ID NO: 3347944 - RNA, 16 nt, Human
cauuggauuauccuga

SEQ ID NO: 3347945 - RNA, 17 nt, Human
cauuggauuauccugag

SEQ ID NO: 3347946 - RNA, 23 nt, Human
cauuuuuuuuaagaaaaaggaug

SEQ ID NO: 3347947 - RNA, 22 nt, Human
cauuuuuuuuaagaaaaaggau

SEQ ID NO: 3347948 - RNA, 13 nt, Human
cagacagcugccu

SEQ ID NO: 3347949 - RNA, 14 nt, Human
cagacagcugccug

SEQ ID NO: 3347950 - RNA, 13 nt, Human
cagacaggaccag

SEQ ID NO: 3347951 - RNA, 15 nt, Human
cagacaggaccaggg

SEQ ID NO: 3347952 - RNA, 16 nt, Human
cagacaggaccaggga

SEQ ID NO: 3347953 - RNA, 15 nt, Human
cagacagcugccugg

SEQ ID NO: 3347954 - RNA, 16 nt, Human
cagacagcugccuggg

SEQ ID NO: 3347955 - RNA, 17 nt, Human
cagacagcugccuggga

SEQ ID NO: 3347956 - RNA, 18 nt, Human
cagacagcugccugggau

SEQ ID NO: 3347957 - RNA, 21 nt, Human
cagacaggcaagcaccuccug

SEQ ID NO: 3347958 - RNA, 20 nt, Human
cagacaggcaagcaccuccu

SEQ ID NO: 3347959 - RNA, 18 nt, Human
cagacaggcaagcaccuc

SEQ ID NO: 3347960 - RNA, 13 nt, Human
cagacaggcaagc

SEQ ID NO: 3347961 - RNA, 17 nt, Human
cagacaggaccagggau

SEQ ID NO: 3347962 - RNA, 24 nt, Human
cagacaggaccagggauuuccaug

SEQ ID NO: 3347963 - RNA, 11 nt, Human
cagacaggcaa

SEQ ID NO: 3347964 - RNA, 23 nt, Human
cagacaggcaagcaccuccugcc

SEQ ID NO: 3347965 - RNA, 22 nt, Human
cagacaggcaagcaccuccugc

SEQ ID NO: 3347966 - RNA, 17 nt, Human
cagacucuacagaggcc

SEQ ID NO: 3347967 - RNA, 21 nt, Human
cagacucuacagaggccaugg

SEQ ID NO: 3347968 - RNA, 20 nt, Human
cagacucuacagaggccaug

SEQ ID NO: 3347969 - RNA, 19 nt, Human
cagacucuacagaggccau

SEQ ID NO: 3347970 - RNA, 18 nt, Human
cagacucuacagaggcca

SEQ ID NO: 3347971 - RNA, 23 nt, Human
cagacucuacagaggccaugggc

SEQ ID NO: 3347972 - RNA, 18 nt, Human
cagacuggaagcacagcu

SEQ ID NO: 3347973 - RNA, 17 nt, Human
cagacuggaagcacagc

SEQ ID NO: 3347974 - RNA, 16 nt, Human
cagacuggaagcacag

SEQ ID NO: 3347975 - RNA, 14 nt, Human
cagacuggaagcac

SEQ ID NO: 3347976 - RNA, 13 nt, Human
cagacuggaagca

SEQ ID NO: 3347977 - RNA, 21 nt, Human
cagacuggaagcacagcuuca

SEQ ID NO: 3347978 - RNA, 20 nt, Human
cagacuggaagcacagcuuc

SEQ ID NO: 3347979 - RNA, 13 nt, Human
cagagcugccacc

SEQ ID NO: 3347980 - RNA, 20 nt, Human
cagagagguuaaggugggua

SEQ ID NO: 3347981 - RNA, 23 nt, Human
cagagaggguggugaccucugcc

SEQ ID NO: 3347982 - RNA, 23 nt, Human
cagagagggugggagugggccca

SEQ ID NO: 3347983 - RNA, 17 nt, Human
cagaggaaagcaaagga

SEQ ID NO: 3347984 - RNA, 19 nt, Human
cagaggaaagcaaaggaga

SEQ ID NO: 3347985 - RNA, 13 nt, Human
cagaggggguggc

SEQ ID NO: 3347986 - RNA, 12 nt, Human
cagagagggugg

SEQ ID NO: 3347987 - RNA, 17 nt, Human
cagagaggguggugacc

SEQ ID NO: 3347988 - RNA, 22 nt, Human
cagagaggguggugaccucugc

SEQ ID NO: 3347989 - RNA, 20 nt, Human
cagagaggguggugaccucu

SEQ ID NO: 3347990 - RNA, 23 nt, Human
cagagacuccugcaggcagccag

SEQ ID NO: 3347991 - RNA, 19 nt, Human
cagauagauauaugcucug

SEQ ID NO: 3347992 - RNA, 19 nt, Human
cagauacuuggggggcuga

SEQ ID NO: 3347993 - RNA, 14 nt, Human
cagaggggguggcc

SEQ ID NO: 3347994 - RNA, 16 nt, Human
cagaggggguggccuc

SEQ ID NO: 3347995 - RNA, 20 nt, Human
cagauuucacucuccuuggu

SEQ ID NO: 3347996 - RNA, 20 nt, Human
cagauugcaacaggcugggc

SEQ ID NO: 3347997 - RNA, 19 nt, Human
cagauugcaacaggcuggg

SEQ ID NO: 3347998 - RNA, 17 nt, Human
cagauugcaacaggcug

SEQ ID NO: 3347999 - RNA, 19 nt, Human
cagcaccaucucuccuccu

SEQ ID NO: 3348000 - RNA, 17 nt, Human
cagcaccaucucuccuc

SEQ ID NO: 3348001 - RNA, 19 nt, Human
cagauuucacucuccuugg

SEQ ID NO: 3348002 - RNA, 18 nt, Human
cagauugcaacaggcugg

SEQ ID NO: 3348003 - RNA, 22 nt, Human
cagccaggccacaagacccuug

SEQ ID NO: 3348004 - RNA, 14 nt, Human
cagcacgauuucug

SEQ ID NO: 3348005 - RNA, 20 nt, Human
cagcacgauuucuguuuaga

SEQ ID NO: 3348006 - RNA, 22 nt, Human
caggcugggagagccuuccagg

SEQ ID NO: 3348007 - RNA, 23 nt, Human
caggcugggagagccuuccaggg

SEQ ID NO: 3348008 - RNA, 14 nt, Human
caggggaaaagagg

SEQ ID NO: 3348009 - RNA, 16 nt, Human
caggggaaaagaggag

SEQ ID NO: 3348010 - RNA, 21 nt, Human
caggcugggagagccuuccag

SEQ ID NO: 3348011 - RNA, 20 nt, Human
caggcugggagagccuucca

SEQ ID NO: 3348012 - RNA, 12 nt, Human
caggccuccuac

SEQ ID NO: 3348013 - RNA, 14 nt, Human
caggccuccuacag

SEQ ID NO: 3348014 - RNA, 21 nt, Human
caggaccagggauuuccauga

SEQ ID NO: 3348015 - RNA, 16 nt, Human
caggaccucaggugag

SEQ ID NO: 3348016 - RNA, 23 nt, Human
caggaccucaggugagaagcaga

SEQ ID NO: 3348017 - RNA, 13 nt, Human
caggaccucaggu

SEQ ID NO: 3348018 - RNA, 16 nt, Human
caggcaaugcuggcug

SEQ ID NO: 3348019 - RNA, 15 nt, Human
caggcaaugcuggcu

SEQ ID NO: 3348020 - RNA, 14 nt, Human
caggcaaugcuggc

SEQ ID NO: 3348021 - RNA, 18 nt, Human
caggaggccagccuugac

SEQ ID NO: 3348022 - RNA, 19 nt, Human
caggaggccagccuugacc

SEQ ID NO: 3348023 - RNA, 22 nt, Human
caggaggccagccuugaccauu

SEQ ID NO: 3348024 - RNA, 19 nt, Human
caggaggaucacuugaguc

SEQ ID NO: 3348025 - RNA, 11 nt, Human
caggccaggcc

SEQ ID NO: 3348026 - RNA, 12 nt, Human
caggccaggccc

SEQ ID NO: 3348027 - RNA, 23 nt, Human
caggccagcugcuugggcuucau

SEQ ID NO: 3348028 - RNA, 15 nt, Human
cagcuaacauggaag

SEQ ID NO: 3348029 - RNA, 19 nt, Human
cagcguuucuaugacacau

SEQ ID NO: 3348030 - RNA, 16 nt, Human
cagccugcuccagcug

SEQ ID NO: 3348031 - RNA, 17 nt, Human
cagccugcuccagcugu

SEQ ID NO: 3348032 - RNA, 15 nt, Human
cagccugcuccagcu

SEQ ID NO: 3348033 - RNA, 21 nt, Human
cagcugacuuuucuguccgag

SEQ ID NO: 3348034 - RNA, 19 nt, Human
caggaaaggcuccaggagc

SEQ ID NO: 3348035 - RNA, 16 nt, Human
caggaaaggcuccagg

SEQ ID NO: 3348036 - RNA, 17 nt, Human
caggaaaggcuccagga

SEQ ID NO: 3348037 - RNA, 16 nt, Human
ccagcagaaaugccuu

SEQ ID NO: 3348038 - RNA, 17 nt, Human
ccagcagaaaugccuua

SEQ ID NO: 3348039 - RNA, 22 nt, Human
ccagcagaaaugccuuacccuc

SEQ ID NO: 3348040 - RNA, 12 nt, Human
ccagcagaaaug

SEQ ID NO: 3348041 - RNA, 11 nt, Human
ccagcagccug

SEQ ID NO: 3348042 - RNA, 12 nt, Human
ccagcagccugg

SEQ ID NO: 3348043 - RNA, 13 nt, Human
ccagccccuggau

SEQ ID NO: 3348044 - RNA, 14 nt, Human
ccagccccuggaug

SEQ ID NO: 3348045 - RNA, 15 nt, Human
ccagccccuggaugc

SEQ ID NO: 3348046 - RNA, 13 nt, Human
ccagcagccugga

SEQ ID NO: 3348047 - RNA, 23 nt, Human
ccagccccauccucuguacagag

SEQ ID NO: 3348048 - RNA, 18 nt, Human
ccagccccauccucugua

SEQ ID NO: 3348049 - RNA, 15 nt, Human
ccagccccuucugac

SEQ ID NO: 3348050 - RNA, 16 nt, Human
ccagccccuucugacc

SEQ ID NO: 3348051 - RNA, 17 nt, Human
ccagccccuucugaccc

SEQ ID NO: 3348052 - RNA, 21 nt, Human
ccagcgagcccugguggcagu

SEQ ID NO: 3348053 - RNA, 12 nt, Human
ccagccccugga

SEQ ID NO: 3348054 - RNA, 18 nt, Human
ccaggaaaggcuccagga

SEQ ID NO: 3348055 - RNA, 19 nt, Human
ccaggaaaggcuccaggag

SEQ ID NO: 3348056 - RNA, 17 nt, Human
ccaggaaaggcuccagg

SEQ ID NO: 3348057 - RNA, 17 nt, Human
ccagucaccccggccac

SEQ ID NO: 3348058 - RNA, 18 nt, Human
ccagucaccccggccacc

SEQ ID NO: 3348059 - RNA, 13 nt, Human
ccagucaccccgg

SEQ ID NO: 3348060 - RNA, 16 nt, Human
ccagucaccccggcca

SEQ ID NO: 3348061 - RNA, 19 nt, Human
ccaguaucuugaagacuuu

SEQ ID NO: 3348062 - RNA, 22 nt, Human
ccaguaucuugaagacuuuucu

SEQ ID NO: 3348063 - RNA, 20 nt, Human
ccaggggugggacacccugu

SEQ ID NO: 3348064 - RNA, 21 nt, Human
ccaggggugggacacccugug

SEQ ID NO: 3348065 - RNA, 22 nt, Human
ccaggggugggacacccuguga

SEQ ID NO: 3348066 - RNA, 13 nt, Human
ccaguaucuugaa

SEQ ID NO: 3348067 - RNA, 19 nt, Human
ccaggggugggacacccug

SEQ ID NO: 3348068 - RNA, 14 nt, Human
ccagaugcaccagc

SEQ ID NO: 3348069 - RNA, 13 nt, Human
ccagaugcaccag

SEQ ID NO: 3348070 - RNA, 20 nt, Human
ccagagggccugcaagggag

SEQ ID NO: 3348071 - RNA, 16 nt, Human
ccagagacacaagccu

SEQ ID NO: 3348072 - RNA, 18 nt, Human
ccagagacacaagccuuc

SEQ ID NO: 3348073 - RNA, 14 nt, Human
ccacuuuuguucuu

SEQ ID NO: 3348074 - RNA, 15 nt, Human
ccacuuuuguucuug

SEQ ID NO: 3348075 - RNA, 21 nt, Human
ccacuuuuguucuugguuugu

SEQ ID NO: 3348076 - RNA, 16 nt, Human
ccagacccggcugcgu

SEQ ID NO: 3348077 - RNA, 17 nt, Human
ccagacccggcugcgug

SEQ ID NO: 3348078 - RNA, 20 nt, Human
ccacuuucuagccagaggag

SEQ ID NO: 3348079 - RNA, 18 nt, Human
ccacuuucuagccagagg

SEQ ID NO: 3348080 - RNA, 19 nt, Human
ccacuuucuagccagagga

SEQ ID NO: 3348081 - RNA, 13 nt, Human
ccacuuucuagcc

SEQ ID NO: 3348082 - RNA, 19 nt, Human
ccacugcaccgggccacag

SEQ ID NO: 3348083 - RNA, 17 nt, Human
ccacugcaccgggccac

SEQ ID NO: 3348084 - RNA, 14 nt, Human
ccacugcaccgggc

SEQ ID NO: 3348085 - RNA, 13 nt, Human
ccacugcaccggg

SEQ ID NO: 3348086 - RNA, 20 nt, Human
ccacugcacuauagccuagg

SEQ ID NO: 3348087 - RNA, 19 nt, Human
ccacugcacuauagccuag

SEQ ID NO: 3348088 - RNA, 18 nt, Human
cccaggcuggcgugcagu

SEQ ID NO: 3348089 - RNA, 20 nt, Human
cccaggcuggcgugcagugg

SEQ ID NO: 3348090 - RNA, 19 nt, Human
cccaggcuggcgugcagug

SEQ ID NO: 3348091 - RNA, 14 nt, Human
cccauccucuguac

SEQ ID NO: 3348092 - RNA, 13 nt, Human
cccauccucugua

SEQ ID NO: 3348093 - RNA, 15 nt, Human
cccauccucuguaca

SEQ ID NO: 3348094 - RNA, 19 nt, Human
cccauccucuguacagagc

SEQ ID NO: 3348095 - RNA, 23 nt, Human
cccagccccaaaacucuccucug

SEQ ID NO: 3348096 - RNA, 21 nt, Human
cccagccccaaaacucuccuc

SEQ ID NO: 3348097 - RNA, 19 nt, Human
cccagcccacuucugccau

SEQ ID NO: 3348098 - RNA, 17 nt, Human
cccagcccacuucugcc

SEQ ID NO: 3348099 - RNA, 23 nt, Human
cccauucugccugcccaggcccc

SEQ ID NO: 3348100 - RNA, 18 nt, Human
ccccaaaacucuccucug

SEQ ID NO: 3348101 - RNA, 20 nt, Human
ccccaaaacucuccucugcu

SEQ ID NO: 3348102 - RNA, 14 nt, Human
ccccagccccaucc

SEQ ID NO: 3348103 - RNA, 14 nt, Human
ccccagccccaaaa

SEQ ID NO: 3348104 - RNA, 21 nt, Human
ccccauucugccugcccaggc

SEQ ID NO: 3348105 - RNA, 10 nt, Human
ccccagcccc

SEQ ID NO: 3348106 - RNA, 12 nt, Human
ccccagccccaa

SEQ ID NO: 3348107 - RNA, 14 nt, Human
ccccgcccaggcuu

SEQ ID NO: 3348108 - RNA, 14 nt, Human
ccccggccaccugc

SEQ ID NO: 3348109 - RNA, 18 nt, Human
ccccggccaccugcggug

SEQ ID NO: 3348110 - RNA, 13 nt, Human
ccccggccaccug

SEQ ID NO: 3348111 - RNA, 12 nt, Human
ccccgcccaggc

SEQ ID NO: 3348112 - RNA, 14 nt, Human
cccccuuccaugga

SEQ ID NO: 3348113 - RNA, 17 nt, Human
ccaugggccuccugugu

SEQ ID NO: 3348114 - RNA, 17 nt, Human
ccaugaggaacaaggca

SEQ ID NO: 3348115 - RNA, 16 nt, Human
ccaugaggaacaaggc

SEQ ID NO: 3348116 - RNA, 15 nt, Human
cccaccgcagacagg

SEQ ID NO: 3348117 - RNA, 18 nt, Human
cccaccgcagacaggacc

SEQ ID NO: 3348118 - RNA, 17 nt, Human
cccaagcucugcuccuc

SEQ ID NO: 3348119 - RNA, 15 nt, Human
cccaagcucugcucc

SEQ ID NO: 3348120 - RNA, 15 nt, Human
cccacccaagggccu

SEQ ID NO: 3348121 - RNA, 18 nt, Human
cccaccaucaugucuggc

SEQ ID NO: 3348122 - RNA, 11 nt, Human
ccucaggcagg

SEQ ID NO: 3348123 - RNA, 17 nt, Human
ccucccaacucacccca

SEQ ID NO: 3348124 - RNA, 20 nt, Human
ccucccaacucaccccagcc

SEQ ID NO: 3348125 - RNA, 21 nt, Human
ccucccaacucaccccagccc

SEQ ID NO: 3348126 - RNA, 17 nt, Human
ccucccaccucagccuc

SEQ ID NO: 3348127 - RNA, 15 nt, Human
ccucccaacucaccc

SEQ ID NO: 3348128 - RNA, 19 nt, Human
ccuccuuugugaggaagcc

SEQ ID NO: 3348129 - RNA, 18 nt, Human
ccuccuuugugaggaagc

SEQ ID NO: 3348130 - RNA, 15 nt, Human
ccucgaacuggcugc

SEQ ID NO: 3348131 - RNA, 16 nt, Human
ccucgaacuggcugca

SEQ ID NO: 3348132 - RNA, 20 nt, Human
ccucugccugaagucacaca

SEQ ID NO: 3348133 - RNA, 11 nt, Human
ccucugccuga

SEQ ID NO: 3348134 - RNA, 23 nt, Human
ccucugccucugacacacagcuc

SEQ ID NO: 3348135 - RNA, 21 nt, Human
ccucugccucugacacacagc

SEQ ID NO: 3348136 - RNA, 20 nt, Human
ccucugccucugacacacag

SEQ ID NO: 3348137 - RNA, 23 nt, Human
ccugccuccuuugugaggaagcc

SEQ ID NO: 3348138 - RNA, 21 nt, Human
ccugccuccuuugugaggaag

SEQ ID NO: 3348139 - RNA, 22 nt, Human
ccugccuccuuugugaggaagc

SEQ ID NO: 3348140 - RNA, 13 nt, Human
ccugccuccuuug

SEQ ID NO: 3348141 - RNA, 15 nt, Human
ccugccuccuuugug

SEQ ID NO: 3348142 - RNA, 19 nt, Human
ccugccuccuuugugagga

SEQ ID NO: 3348143 - RNA, 20 nt, Human
ccugccuccuuugugaggaa

SEQ ID NO: 3348144 - RNA, 12 nt, Human
ccugcugcaguu

SEQ ID NO: 3348145 - RNA, 11 nt, Human
ccugcugcagu

SEQ ID NO: 3348146 - RNA, 22 nt, Human
ccugcugcaguugccagucacc

SEQ ID NO: 3348147 - RNA, 21 nt, Human
ccugcugcaguugccagucac

SEQ ID NO: 3348148 - RNA, 15 nt, Human
ccugccucuucucua

SEQ ID NO: 3348149 - RNA, 15 nt, Human
ccugcaggcagccag

SEQ ID NO: 3348150 - RNA, 12 nt, Human
ccugcagagggc

SEQ ID NO: 3348151 - RNA, 16 nt, Human
ccugcaggcagccagg

SEQ ID NO: 3348152 - RNA, 17 nt, Human
ccugcaggcagccaggc

SEQ ID NO: 3348153 - RNA, 18 nt, Human
ccugcaggcagccaggcc

SEQ ID NO: 3348154 - RNA, 19 nt, Human
ccugcaggcagccaggcca

SEQ ID NO: 3348155 - RNA, 20 nt, Human
ccugcaggcagccaggccac

SEQ ID NO: 3348156 - RNA, 21 nt, Human
ccugcaggcagccaggccaca

SEQ ID NO: 3348157 - RNA, 16 nt, Human
ccugaggcugggcucc

SEQ ID NO: 3348158 - RNA, 17 nt, Human
ccugaggcugggcuccc

SEQ ID NO: 3348159 - RNA, 19 nt, Human
ccugaggcugggcucccuu

SEQ ID NO: 3348160 - RNA, 21 nt, Human
ccugaggcugggcucccuucc

SEQ ID NO: 3348161 - RNA, 12 nt, Human
ccugaggggccu

SEQ ID NO: 3348162 - RNA, 16 nt, Human
ccucuuugagugaagc

SEQ ID NO: 3348163 - RNA, 12 nt, Human
cccugaaggccc

SEQ ID NO: 3348164 - RNA, 16 nt, Human
cccugaaagcccugag

SEQ ID NO: 3348165 - RNA, 13 nt, Human
cccugaaggcccc

SEQ ID NO: 3348166 - RNA, 14 nt, Human
cccugaaggccccg

SEQ ID NO: 3348167 - RNA, 16 nt, Human
cccugaaggccccgcc

SEQ ID NO: 3348168 - RNA, 19 nt, Human
cccugaaggccccgcccag

SEQ ID NO: 3348169 - RNA, 16 nt, Human
cccugacaacacucau

SEQ ID NO: 3348170 - RNA, 22 nt, Human
cccugacaacacucauugaccu

SEQ ID NO: 3348171 - RNA, 20 nt, Human
cccugaaggccccgcccagg

SEQ ID NO: 3348172 - RNA, 22 nt, Human
cccugaaggccccgcccaggcu

SEQ ID NO: 3348173 - RNA, 14 nt, Human
cccugacaacacuc

SEQ ID NO: 3348174 - RNA, 18 nt, Human
cccugaaagcccugagcu

SEQ ID NO: 3348175 - RNA, 17 nt, Human
cccuggaugcagccuca

SEQ ID NO: 3348176 - RNA, 21 nt, Human
cccuggaugcagccucacagu

SEQ ID NO: 3348177 - RNA, 13 nt, Human
cccuggaugcagc

SEQ ID NO: 3348178 - RNA, 22 nt, Human
cccugcccaccuggccucugca

SEQ ID NO: 3348179 - RNA, 17 nt, Human
cccugcccggcugcgga

SEQ ID NO: 3348180 - RNA, 14 nt, Human
cccugcccggcugc

SEQ ID NO: 3348181 - RNA, 16 nt, Human
cccugagcuuucugcu

SEQ ID NO: 3348182 - RNA, 20 nt, Human
cccugcccaccuggccucug

SEQ ID NO: 3348183 - RNA, 16 nt, Human
ccgaauagcugggacu

SEQ ID NO: 3348184 - RNA, 17 nt, Human
ccgaccagacaccuuga

SEQ ID NO: 3348185 - RNA, 13 nt, Human
ccgaccagacacc

SEQ ID NO: 3348186 - RNA, 15 nt, Human
ccgcagacaggacca

SEQ ID NO: 3348187 - RNA, 16 nt, Human
ccgaaaacguggcugc

SEQ ID NO: 3348188 - RNA, 17 nt, Human
ccgaaaacguggcugcu

SEQ ID NO: 3348189 - RNA, 19 nt, Human
ccgaaagggacuuggaagc

SEQ ID NO: 3348190 - RNA, 15 nt, Human
cccuuccucuuucca

SEQ ID NO: 3348191 - RNA, 16 nt, Human
ccgcagacaggaccag

SEQ ID NO: 3348192 - RNA, 17 nt, Human
ccgcagacaggaccagg

SEQ ID NO: 3348193 - RNA, 21 nt, Human
cccugugauggggcccugccu

SEQ ID NO: 3348194 - RNA, 22 nt, Human
cccugugauggggcccugccuc

SEQ ID NO: 3348195 - RNA, 23 nt, Human
cccugugauggggcccugccucc

SEQ ID NO: 3348196 - RNA, 20 nt, Human
cccugugauggggcccugcc

SEQ ID NO: 3348197 - RNA, 16 nt, Human
ccggccaccugcggug

SEQ ID NO: 3348198 - RNA, 15 nt, Human
ccggccccugcuggu

SEQ ID NO: 3348199 - RNA, 18 nt, Human
ccggcaggguccuagaaa

SEQ ID NO: 3348200 - RNA, 19 nt, Human
ccuagcauacguacacauu

SEQ ID NO: 3348201 - RNA, 17 nt, Human
ccuagcacuuugggagg

SEQ ID NO: 3348202 - RNA, 14 nt, Human
ccuaaucuucugaa

SEQ ID NO: 3348203 - RNA, 14 nt, Human
ccgucuaccugagg

SEQ ID NO: 3348204 - RNA, 15 nt, Human
ccgucuaccugaggg

SEQ ID NO: 3348205 - RNA, 14 nt, Human
ccggcuccaggcuc

SEQ ID NO: 3348206 - RNA, 13 nt, Human
ccggcuccaggcu

SEQ ID NO: 3348207 - RNA, 12 nt, Human
ccggcuccaggc

SEQ ID NO: 3348208 - RNA, 17 nt, Human
ccgucuaccugaggggc

SEQ ID NO: 3348209 - RNA, 12 nt, Human
ccgugaggccag

SEQ ID NO: 3348210 - RNA, 13 nt, Human
ccgugaggccaga

SEQ ID NO: 3348211 - RNA, 14 nt, Human
ccgugaggccagag

SEQ ID NO: 3348212 - RNA, 14 nt, Human
cuaaguuuuuaugg

SEQ ID NO: 3348213 - RNA, 18 nt, Human
cuaaguauuaaaacauug

SEQ ID NO: 3348214 - RNA, 13 nt, Human
cuaaguauuaaaa

SEQ ID NO: 3348215 - RNA, 20 nt, Human
cuaaguauuaaaacauugga

SEQ ID NO: 3348216 - RNA, 19 nt, Human
cuacaaaaagcauaaaaau

SEQ ID NO: 3348217 - RNA, 12 nt, Human
cuaaguauuaaa

SEQ ID NO: 3348218 - RNA, 11 nt, Human
cuaaguauuaa

SEQ ID NO: 3348219 - RNA, 12 nt, Human
cgugacaacacu

SEQ ID NO: 3348220 - RNA, 15 nt, Human
cgugacaacacuugu

SEQ ID NO: 3348221 - RNA, 14 nt, Human
cgugacaacacuug

SEQ ID NO: 3348222 - RNA, 20 nt, Human
cgugagccacugcaccgggc

SEQ ID NO: 3348223 - RNA, 15 nt, Human
cgugagccacugcac

SEQ ID NO: 3348224 - RNA, 14 nt, Human
cgugagccacugca

SEQ ID NO: 3348225 - RNA, 14 nt, Human
cgugaggccagaga

SEQ ID NO: 3348226 - RNA, 22 nt, Human
cgugagccacugcaccgggcca

SEQ ID NO: 3348227 - RNA, 19 nt, Human
cguguuaugacuccagaau

SEQ ID NO: 3348228 - RNA, 15 nt, Human
cguguuaugacucca

SEQ ID NO: 3348229 - RNA, 19 nt, Human
cgugaguccuggcauggga

SEQ ID NO: 3348230 - RNA, 18 nt, Human
cgugaguccuggcauggg

SEQ ID NO: 3348231 - RNA, 14 nt, Human
cuaacuugucuuug

SEQ ID NO: 3348232 - RNA, 22 nt, Human
cuaacuugucuuuggacccuga

SEQ ID NO: 3348233 - RNA, 17 nt, Human
cgggccacagagaaagu

SEQ ID NO: 3348234 - RNA, 12 nt, Human
cgggcucugccu

SEQ ID NO: 3348235 - RNA, 19 nt, Human
cgggcucagcaaaagaugc

SEQ ID NO: 3348236 - RNA, 20 nt, Human
cgguggcucacgccuguaau

SEQ ID NO: 3348237 - RNA, 22 nt, Human
cguacacauuuuauuuuauuau

SEQ ID NO: 3348238 - RNA, 16 nt, Human
cguacacauuuuauuu

SEQ ID NO: 3348239 - RNA, 17 nt, Human
cggagacggagucccac

SEQ ID NO: 3348240 - RNA, 20 nt, Human
cggagacggagucccaccuu

SEQ ID NO: 3348241 - RNA, 15 nt, Human
cggagacggaguccc

SEQ ID NO: 3348242 - RNA, 22 nt, Human
cggagucccaccuuggcugcag

SEQ ID NO: 3348243 - RNA, 21 nt, Human
cggagucccaccuuggcugca

SEQ ID NO: 3348244 - RNA, 23 nt, Human
cggagucccaccuuggcugcagg

SEQ ID NO: 3348245 - RNA, 23 nt, Human
cgccaaggcugggggaagaagcu

SEQ ID NO: 3348246 - RNA, 18 nt, Human
cgcuggagugcagugagc

SEQ ID NO: 3348247 - RNA, 17 nt, Human
cgcuggagugcagugag

SEQ ID NO: 3348248 - RNA, 19 nt, Human
cgcugccccuggcagcccc

SEQ ID NO: 3348249 - RNA, 20 nt, Human
cgcugccccuggcagccccu

SEQ ID NO: 3348250 - RNA, 12 nt, Human
ccuuauggaaca

SEQ ID NO: 3348251 - RNA, 22 nt, Human
ccuuauggaacacucugagacu

SEQ ID NO: 3348252 - RNA, 19 nt, Human
ccuuauggaacacucugag

SEQ ID NO: 3348253 - RNA, 20 nt, Human
ccuuauggaacacucugaga

SEQ ID NO: 3348254 - RNA, 14 nt, Human
ccuuauggaacacu

SEQ ID NO: 3348255 - RNA, 16 nt, Human
ccuuauggaacacucu

SEQ ID NO: 3348256 - RNA, 17 nt, Human
ccuuauggaacacucug

SEQ ID NO: 3348257 - RNA, 18 nt, Human
ccuuauggaacacucuga

SEQ ID NO: 3348258 - RNA, 14 nt, Human
ccuucccaccucuc

SEQ ID NO: 3348259 - RNA, 19 nt, Human
ccuucccaccucucucacu

SEQ ID NO: 3348260 - RNA, 12 nt, Human
ccuucccaccuc

SEQ ID NO: 3348261 - RNA, 20 nt, Human
ccuuagcagggaaacagcua

SEQ ID NO: 3348262 - RNA, 19 nt, Human
ccuuagcagggaaacagcu

SEQ ID NO: 3348263 - RNA, 16 nt, Human
ccuuagcaaauucugu

SEQ ID NO: 3348264 - RNA, 17 nt, Human
ccuguugggccaggagc

SEQ ID NO: 3348265 - RNA, 18 nt, Human
ccuguugggccaggagcc

SEQ ID NO: 3348266 - RNA, 19 nt, Human
ccuguugggccaggagccu

SEQ ID NO: 3348267 - RNA, 20 nt, Human
ccuguugggccaggagccuc

SEQ ID NO: 3348268 - RNA, 16 nt, Human
ccuguugggccaggag

SEQ ID NO: 3348269 - RNA, 18 nt, Human
ccuguucccaugagauga

SEQ ID NO: 3348270 - RNA, 12 nt, Human
ccuguucuggca

SEQ ID NO: 3348271 - RNA, 17 nt, Human
ccuguucuggcagaguu

SEQ ID NO: 3348272 - RNA, 19 nt, Human
ccuguucagcuccagcuca

SEQ ID NO: 3348273 - RNA, 16 nt, Human
ccuguucagcuccagc

SEQ ID NO: 3348274 - RNA, 15 nt, Human
ccuguucagcuccag

SEQ ID NO: 3348275 - RNA, 14 nt, Human
ccuguucagcucca

SEQ ID NO: 3348276 - RNA, 21 nt, Human
ccuguucagcuccagcucacc

SEQ ID NO: 3348277 - RNA, 20 nt, Human
ccuguucagcuccagcucac

SEQ ID NO: 3348278 - RNA, 23 nt, Human
ccuguucagcuccagcucaccag

SEQ ID NO: 3348279 - RNA, 13 nt, Human
ccuguucagcucc

SEQ ID NO: 3348280 - RNA, 15 nt, Human
ccuuucaauaggaaa

SEQ ID NO: 3348281 - RNA, 17 nt, Human
ccuuucaauaggaaaaa

SEQ ID NO: 3348282 - RNA, 20 nt, Human
ccuucucuccagccccugga

SEQ ID NO: 3348283 - RNA, 16 nt, Human
ccuucucugaaggaca

SEQ ID NO: 3348284 - RNA, 14 nt, Human
ccuucucugaagga

SEQ ID NO: 3348285 - RNA, 21 nt, Human
ccuucucuccagccccuggau

SEQ ID NO: 3348286 - RNA, 23 nt, Human
ccuucucuccagccccuggaugc

SEQ ID NO: 3348287 - RNA, 19 nt, Human
ccuucucuccagccccugg

SEQ ID NO: 3348288 - RNA, 22 nt, Human
ccuucuguccuacucuguguca

SEQ ID NO: 3348289 - RNA, 21 nt, Human
ccuucuguccuacucuguguc

SEQ ID NO: 3348290 - RNA, 20 nt, Human
ccuucuguccuacucugugu

SEQ ID NO: 3348291 - RNA, 23 nt, Human
cucaggugucccugcacuugcag

SEQ ID NO: 3348292 - RNA, 19 nt, Human
cucaggugucccugcacuu

SEQ ID NO: 3348293 - RNA, 22 nt, Human
cucagucuggcccuuccuuuuc

SEQ ID NO: 3348294 - RNA, 17 nt, Human
cucaguccauagcagag

SEQ ID NO: 3348295 - RNA, 15 nt, Human
cucaguccauagcag

SEQ ID NO: 3348296 - RNA, 20 nt, Human
cucagucuggcccuuccuuu

SEQ ID NO: 3348297 - RNA, 13 nt, Human
cucagccucccga

SEQ ID NO: 3348298 - RNA, 22 nt, Human
cucagccucccgaauagcuggg

SEQ ID NO: 3348299 - RNA, 21 nt, Human
cucagccucccgaauagcugg

SEQ ID NO: 3348300 - RNA, 19 nt, Human
cucagccucccgaauagcu

SEQ ID NO: 3348301 - RNA, 23 nt, Human
cucagaagacacugaugggcaac

SEQ ID NO: 3348302 - RNA, 17 nt, Human
cucaccuuucccaucuu

SEQ ID NO: 3348303 - RNA, 22 nt, Human
cucagaagacacugaugggcaa

SEQ ID NO: 3348304 - RNA, 20 nt, Human
cucagaagacacugaugggc

SEQ ID NO: 3348305 - RNA, 17 nt, Human
cucagaagacacugaug

SEQ ID NO: 3348306 - RNA, 15 nt, Human
cucagaagacacuga

SEQ ID NO: 3348307 - RNA, 13 nt, Human
cucagaagacacu

SEQ ID NO: 3348308 - RNA, 19 nt, Human
cucaggccaaacucaccug

SEQ ID NO: 3348309 - RNA, 20 nt, Human
cucaggccaaacucaccugc

SEQ ID NO: 3348310 - RNA, 21 nt, Human
cucaggccaaacucaccugcc

SEQ ID NO: 3348311 - RNA, 15 nt, Human
cucaggccagcugcu

SEQ ID NO: 3348312 - RNA, 16 nt, Human
cucaggccagcugcuu

SEQ ID NO: 3348313 - RNA, 17 nt, Human
cucaggccagcugcuug

SEQ ID NO: 3348314 - RNA, 18 nt, Human
cucaggccagcugcuugg

SEQ ID NO: 3348315 - RNA, 22 nt, Human
cucaggccugggggcugggcag

SEQ ID NO: 3348316 - RNA, 11 nt, Human
cucaggccugg

SEQ ID NO: 3348317 - RNA, 23 nt, Human
cucaauuauuuugcauuuuuucu

SEQ ID NO: 3348318 - RNA, 21 nt, Human
cucaagugauucuccugccuc

SEQ ID NO: 3348319 - RNA, 22 nt, Human
cuauguugcccaggcaggucuu

SEQ ID NO: 3348320 - RNA, 21 nt, Human
cuauguugcccaggcaggucu

SEQ ID NO: 3348321 - RNA, 19 nt, Human
cuauguugcccaggcaggu

SEQ ID NO: 3348322 - RNA, 18 nt, Human
cuauguugcccaggcagg

SEQ ID NO: 3348323 - RNA, 17 nt, Human
cuauguugcccaggcag

SEQ ID NO: 3348324 - RNA, 13 nt, Human
cuaucucccccag

SEQ ID NO: 3348325 - RNA, 14 nt, Human
cuaugugagaccau

SEQ ID NO: 3348326 - RNA, 13 nt, Human
cucuccuccagag

SEQ ID NO: 3348327 - RNA, 15 nt, Human
cucuccuccagaguc

SEQ ID NO: 3348328 - RNA, 12 nt, Human
cucuccuccaga

SEQ ID NO: 3348329 - RNA, 16 nt, Human
cucuccuccagaguca

SEQ ID NO: 3348330 - RNA, 17 nt, Human
cuccuuugugaggaagc

SEQ ID NO: 3348331 - RNA, 18 nt, Human
cuccuuugugaggaagcc

SEQ ID NO: 3348332 - RNA, 17 nt, Human
cucgguguggagaagcg

SEQ ID NO: 3348333 - RNA, 16 nt, Human
cucgguguggagaagc

SEQ ID NO: 3348334 - RNA, 17 nt, Human
cucugcacuccccugcu

SEQ ID NO: 3348335 - RNA, 21 nt, Human
cucugcuccucuccccagcaa

SEQ ID NO: 3348336 - RNA, 20 nt, Human
cucugcuccucuccccagca

SEQ ID NO: 3348337 - RNA, 23 nt, Human
cucugcugacagacacaggcccg

SEQ ID NO: 3348338 - RNA, 13 nt, Human
cucugcugcuggc

SEQ ID NO: 3348339 - RNA, 20 nt, Human
cucugcugacagacacaggc

SEQ ID NO: 3348340 - RNA, 22 nt, Human
cucugcugacagacacaggccc

SEQ ID NO: 3348341 - RNA, 21 nt, Human
cucugcugacagacacaggcc

SEQ ID NO: 3348342 - RNA, 16 nt, Human
cucuguacagagccca

SEQ ID NO: 3348343 - RNA, 14 nt, Human
cucugcugcuggcu

SEQ ID NO: 3348344 - RNA, 15 nt, Human
cucugcugcuggcug

SEQ ID NO: 3348345 - RNA, 16 nt, Human
cucugcugcuggcugg

SEQ ID NO: 3348346 - RNA, 14 nt, Human
cucuguacagagcc

SEQ ID NO: 3348347 - RNA, 15 nt, Human
cucuguacagagccc

SEQ ID NO: 3348348 - RNA, 13 nt, Human
cucuguacagagc

SEQ ID NO: 3348349 - RNA, 15 nt, Human
cucugcacuccccug

SEQ ID NO: 3348350 - RNA, 16 nt, Human
cucugcacuccccugc

SEQ ID NO: 3348351 - RNA, 14 nt, Human
cucugcacuccccu

SEQ ID NO: 3348352 - RNA, 20 nt, Human
cucugcacaagcugcacccu

SEQ ID NO: 3348353 - RNA, 21 nt, Human
cucugcacaagcugcacccuc

SEQ ID NO: 3348354 - RNA, 19 nt, Human
cucugcacaagcugcaccc

SEQ ID NO: 3348355 - RNA, 20 nt, Human
cucccucuuucccucccuuc

SEQ ID NO: 3348356 - RNA, 22 nt, Human
cuccaggugcacaagcuccaag

SEQ ID NO: 3348357 - RNA, 20 nt, Human
cuccaggcuguaucccauga

SEQ ID NO: 3348358 - RNA, 23 nt, Human
cuccaggcuccuuuagcgcccag

SEQ ID NO: 3348359 - RNA, 15 nt, Human
cuccaggcuccuuua

SEQ ID NO: 3348360 - RNA, 23 nt, Human
cuccaggugcacaagcuccaagc

SEQ ID NO: 3348361 - RNA, 13 nt, Human
cuccucugcugcu

SEQ ID NO: 3348362 - RNA, 14 nt, Human
cuccucugcugcug

SEQ ID NO: 3348363 - RNA, 18 nt, Human
cuccuggcccacugcauc

SEQ ID NO: 3348364 - RNA, 19 nt, Human
cuccuggcccacugcaucg

SEQ ID NO: 3348365 - RNA, 18 nt, Human
cuccugggcuaagugauc

SEQ ID NO: 3348366 - RNA, 19 nt, Human
cuccuggccucaagugauu

SEQ ID NO: 3348367 - RNA, 16 nt, Human
cuccuguaccucuuga

SEQ ID NO: 3348368 - RNA, 15 nt, Human
cuccuuucaccacau

SEQ ID NO: 3348369 - RNA, 14 nt, Human
cuccuuguguuacu

SEQ ID NO: 3348370 - RNA, 23 nt, Human
cuccgcuuucuacccagcgagcc

SEQ ID NO: 3348371 - RNA, 18 nt, Human
augcuggcuguuggcugg

SEQ ID NO: 3348372 - RNA, 14 nt, Human
augcuccuggccca

SEQ ID NO: 3348373 - RNA, 14 nt, Human
uuuaucagaauucu

SEQ ID NO: 3348374 - RNA, 16 nt, Human
augcuucucacugcca

SEQ ID NO: 3348375 - RNA, 20 nt, Human
augcuucucacugccaugcc

SEQ ID NO: 3348376 - RNA, 17 nt, Human
auggaagacagcucuua

SEQ ID NO: 3348377 - RNA, 18 nt, Human
auggaagacagcucuuau

SEQ ID NO: 3348378 - RNA, 20 nt, Human
augcuggcuguuggcugggg

SEQ ID NO: 3348379 - RNA, 19 nt, Human
augcuggcuguuggcuggg

SEQ ID NO: 3348380 - RNA, 11 nt, Human
uuucagaaaug

SEQ ID NO: 3348381 - RNA, 12 nt, Human
uuucagaaaugu

SEQ ID NO: 3348382 - RNA, 16 nt, Human
uuucccuauuagagaa

SEQ ID NO: 3348383 - RNA, 12 nt, Human
uuucaaacuuua

SEQ ID NO: 3348384 - RNA, 18 nt, Human
uuuaccugaagucuuugu

SEQ ID NO: 3348385 - RNA, 16 nt, Human
uuuacugcagcuuugu

SEQ ID NO: 3348386 - RNA, 11 nt, Human
uuuacuuaaac

SEQ ID NO: 3348387 - RNA, 13 nt, Human
uuuacuucuuaua

SEQ ID NO: 3348388 - RNA, 14 nt, Human
uuuacuucuuauac

SEQ ID NO: 3348389 - RNA, 21 nt, Human
uuuaaugaaagacuguacaaa

SEQ ID NO: 3348390 - RNA, 21 nt, Human
augccaugaggaacaaggcaa

SEQ ID NO: 3348391 - RNA, 16 nt, Human
augcccagccccuucu

SEQ ID NO: 3348392 - RNA, 15 nt, Human
augcccagccccuuc

SEQ ID NO: 3348393 - RNA, 17 nt, Human
augcccagccccuucug

SEQ ID NO: 3348394 - RNA, 13 nt, Human
augccucucucag

SEQ ID NO: 3348395 - RNA, 14 nt, Human
augccucucucagg

SEQ ID NO: 3348396 - RNA, 15 nt, Human
augccucucucaggc

SEQ ID NO: 3348397 - RNA, 22 nt, Human
augcgugcauaccacuuuuguu

SEQ ID NO: 3348398 - RNA, 20 nt, Human
augcgugcauaccacuuuug

SEQ ID NO: 3348399 - RNA, 13 nt, Human
uugugaggaagcc

SEQ ID NO: 3348400 - RNA, 19 nt, Human
uugugauacaaugcugugc

SEQ ID NO: 3348401 - RNA, 20 nt, Human
uugugauacaaugcugugcc

SEQ ID NO: 3348402 - RNA, 17 nt, Human
uugugaggaagccgcug

SEQ ID NO: 3348403 - RNA, 18 nt, Human
uugugaggaagccgcugg

SEQ ID NO: 3348404 - RNA, 18 nt, Human
uuguccccaccgcagaca

SEQ ID NO: 3348405 - RNA, 20 nt, Human
uuguccccaccgcagacagg

SEQ ID NO: 3348406 - RNA, 15 nt, Human
uuguccccgacccuu

SEQ ID NO: 3348407 - RNA, 17 nt, Human
uugucacacacuuuggc

SEQ ID NO: 3348408 - RNA, 21 nt, Human
uugucauauaagauucauauu

SEQ ID NO: 3348409 - RNA, 13 nt, Human
augaguccccugu

SEQ ID NO: 3348410 - RNA, 15 nt, Human
augaggucagagccu

SEQ ID NO: 3348411 - RNA, 18 nt, Human
augaggucagagccugca

SEQ ID NO: 3348412 - RNA, 16 nt, Human
augaggucagagccug

SEQ ID NO: 3348413 - RNA, 20 nt, Human
augaggucagagccugcagu

SEQ ID NO: 3348414 - RNA, 19 nt, Human
augaggucagagccugcag

SEQ ID NO: 3348415 - RNA, 12 nt, Human
uuuaagagaaau

SEQ ID NO: 3348416 - RNA, 21 nt, Human
uuuaagcuguuacugucuuca

SEQ ID NO: 3348417 - RNA, 19 nt, Human
uuuaaggaugcuuguacau

SEQ ID NO: 3348418 - RNA, 20 nt, Human
uuuaaggaugcuuguacaua

SEQ ID NO: 3348419 - RNA, 21 nt, Human
uuuaaggaugcuuguacauaa

SEQ ID NO: 3348420 - RNA, 22 nt, Human
uuuaaggaugcuuguacauaau

SEQ ID NO: 3348421 - RNA, 16 nt, Human
uuuaaugaaagacugu

SEQ ID NO: 3348422 - RNA, 11 nt, Human
uuuaaaugcac

SEQ ID NO: 3348423 - RNA, 21 nt, Human
augcacuuuguucuggcucuu

SEQ ID NO: 3348424 - RNA, 23 nt, Human
augcacuuuguucuggcucuucc

SEQ ID NO: 3348425 - RNA, 17 nt, Human
uuguucuugguuuguaa

SEQ ID NO: 3348426 - RNA, 19 nt, Human
uuguucuugguuuguaaau

SEQ ID NO: 3348427 - RNA, 18 nt, Human
aucuagauacuguaucau

SEQ ID NO: 3348428 - RNA, 23 nt, Human
aucuaauauguaacaagccaccc

SEQ ID NO: 3348429 - RNA, 20 nt, Human
aucuaauauguaacaagcca

SEQ ID NO: 3348430 - RNA, 15 nt, Human
uugauacuacaguuu

SEQ ID NO: 3348431 - RNA, 17 nt, Human
uugauacuacaguuugu

SEQ ID NO: 3348432 - RNA, 21 nt, Human
uugagugcugucuccauguuu

SEQ ID NO: 3348433 - RNA, 11 nt, Human
uugagugccuu

SEQ ID NO: 3348434 - RNA, 17 nt, Human
aucuaggaagacuuugg

SEQ ID NO: 3348435 - RNA, 18 nt, Human
aucuaggaagacuuugga

SEQ ID NO: 3348436 - RNA, 19 nt, Human
aucuaggaagacuuuggaa

SEQ ID NO: 3348437 - RNA, 19 nt, Human
aucuagauacuguaucaug

SEQ ID NO: 3348438 - RNA, 21 nt, Human
aucucaaauaacuaaaaggua

SEQ ID NO: 3348439 - RNA, 14 nt, Human
aucucaaauaacua

SEQ ID NO: 3348440 - RNA, 14 nt, Human
aucucaaauuucua

SEQ ID NO: 3348441 - RNA, 23 nt, Human
aucucaaauaacuaaaagguaug

SEQ ID NO: 3348442 - RNA, 16 nt, Human
uugagcagggcucagc

SEQ ID NO: 3348443 - RNA, 12 nt, Human
uugagcagggcu

SEQ ID NO: 3348444 - RNA, 11 nt, Human
uugagacagag

SEQ ID NO: 3348445 - RNA, 12 nt, Human
uugacagggcac

SEQ ID NO: 3348446 - RNA, 10 nt, Human
uugacagggc

SEQ ID NO: 3348447 - RNA, 19 nt, Human
uugacaggauuauuggaaa

SEQ ID NO: 3348448 - RNA, 13 nt, Human
uugacaucaacug

SEQ ID NO: 3348449 - RNA, 16 nt, Human
uugacaucaacugcau

SEQ ID NO: 3348450 - RNA, 11 nt, Human
uugcccaggca

SEQ ID NO: 3348451 - RNA, 23 nt, Human
uugcccaggcuggcgugcagugg

SEQ ID NO: 3348452 - RNA, 14 nt, Human
uugcccaggcuggc

SEQ ID NO: 3348453 - RNA, 12 nt, Human
uugcccaggcug

SEQ ID NO: 3348454 - RNA, 11 nt, Human
uugcccaggcu

SEQ ID NO: 3348455 - RNA, 18 nt, Human
uugcccaggcaggucuug

SEQ ID NO: 3348456 - RNA, 16 nt, Human
uugcccaggcaggucu

SEQ ID NO: 3348457 - RNA, 14 nt, Human
uugcccaggcaggu

SEQ ID NO: 3348458 - RNA, 13 nt, Human
uugcccaggcagg

SEQ ID NO: 3348459 - RNA, 14 nt, Human
uugcaugaggcuag

SEQ ID NO: 3348460 - RNA, 12 nt, Human
uugcaugaggcu

SEQ ID NO: 3348461 - RNA, 18 nt, Human
uugcaccacugcacucca

SEQ ID NO: 3348462 - RNA, 21 nt, Human
uugcaccacugcacuccagcc

SEQ ID NO: 3348463 - RNA, 16 nt, Human
aucucaaauuucuaaa

SEQ ID NO: 3348464 - RNA, 17 nt, Human
aucucaaauuucuaaau

SEQ ID NO: 3348465 - RNA, 23 nt, Human
aucucacacaugagcaucaggcc

SEQ ID NO: 3348466 - RNA, 18 nt, Human
aucucuugagccugggag

SEQ ID NO: 3348467 - RNA, 16 nt, Human
aucucacacaugagca

SEQ ID NO: 3348468 - RNA, 15 nt, Human
uugauuaaauucuug

SEQ ID NO: 3348469 - RNA, 16 nt, Human
uugauuaaauucuugc

SEQ ID NO: 3348470 - RNA, 20 nt, Human
uugauuaaauucuugcaaag

SEQ ID NO: 3348471 - RNA, 23 nt, Human
uugauguucuuucacccuuuucu

SEQ ID NO: 3348472 - RNA, 15 nt, Human
uugcuuugugauuuu

SEQ ID NO: 3348473 - RNA, 17 nt, Human
uuggaaaauaaauuauu

SEQ ID NO: 3348474 - RNA, 20 nt, Human
uugcuuugugauuuuuguaa

SEQ ID NO: 3348475 - RNA, 14 nt, Human
aucuugcucugcug

SEQ ID NO: 3348476 - RNA, 13 nt, Human
aucuugcucugcu

SEQ ID NO: 3348477 - RNA, 16 nt, Human
aucuugcucugcugac

SEQ ID NO: 3348478 - RNA, 15 nt, Human
aucuugcucugcuga

SEQ ID NO: 3348479 - RNA, 17 nt, Human
aucugucauuugagcag

SEQ ID NO: 3348480 - RNA, 12 nt, Human
aucugucauuug

SEQ ID NO: 3348481 - RNA, 22 nt, Human
augaaccacaucuugcucugcu

SEQ ID NO: 3348482 - RNA, 23 nt, Human
augaaccacaucuugcucugcug

SEQ ID NO: 3348483 - RNA, 17 nt, Human
augaaugaaacauuuug

SEQ ID NO: 3348484 - RNA, 16 nt, Human
augaaugucaguguga

SEQ ID NO: 3348485 - RNA, 18 nt, Human
augaaugucagugugacu

SEQ ID NO: 3348486 - RNA, 18 nt, Human
uuggugguuucagaaaug

SEQ ID NO: 3348487 - RNA, 19 nt, Human
uuggugguuucagaaaugu

SEQ ID NO: 3348488 - RNA, 14 nt, Human
uugguuuguaaauu

SEQ ID NO: 3348489 - RNA, 18 nt, Human
uuggugucgggcaugaca

SEQ ID NO: 3348490 - RNA, 19 nt, Human
uuggugucgggcaugacac

SEQ ID NO: 3348491 - RNA, 17 nt, Human
uuggugucgggcaugac

SEQ ID NO: 3348492 - RNA, 15 nt, Human
uucugaaagggacgc

SEQ ID NO: 3348493 - RNA, 19 nt, Human
aucauugaaaucuuuuugc

SEQ ID NO: 3348494 - RNA, 23 nt, Human
uucugaacuuggcgcugccccug

SEQ ID NO: 3348495 - RNA, 22 nt, Human
uucugggacacaguucaauucu

SEQ ID NO: 3348496 - RNA, 11 nt, Human
uucugggacac

SEQ ID NO: 3348497 - RNA, 10 nt, Human
uucugggaca

SEQ ID NO: 3348498 - RNA, 16 nt, Human
uucugccgcagcccug

SEQ ID NO: 3348499 - RNA, 23 nt, Human
uucugccgcagcccugcagaggg

SEQ ID NO: 3348500 - RNA, 16 nt, Human
aucccauaugccuggg

SEQ ID NO: 3348501 - RNA, 16 nt, Human
auccagguucagcuug

SEQ ID NO: 3348502 - RNA, 15 nt, Human
auccagguucagcuu

SEQ ID NO: 3348503 - RNA, 22 nt, Human
uucucagaaucucaaauaacua

SEQ ID NO: 3348504 - RNA, 19 nt, Human
uucucagaaucucaaauaa

SEQ ID NO: 3348505 - RNA, 13 nt, Human
uucucagaaucuc

SEQ ID NO: 3348506 - RNA, 23 nt, Human
uucucagaaucucaaauaacuaa

SEQ ID NO: 3348507 - RNA, 13 nt, Human
uucuaggccuggg

SEQ ID NO: 3348508 - RNA, 17 nt, Human
aucagcacgauuucugu

SEQ ID NO: 3348509 - RNA, 15 nt, Human
aucagcacgauuucu

SEQ ID NO: 3348510 - RNA, 16 nt, Human
aucagcacgauuucug

SEQ ID NO: 3348511 - RNA, 14 nt, Human
aucauugaaaucuu

SEQ ID NO: 3348512 - RNA, 15 nt, Human
aucauugaaaucuuu

SEQ ID NO: 3348513 - RNA, 13 nt, Human
aucauugaaaucu

SEQ ID NO: 3348514 - RNA, 13 nt, Human
uuccuaauccucu

SEQ ID NO: 3348515 - RNA, 15 nt, Human
uuccuaauccucuag

SEQ ID NO: 3348516 - RNA, 11 nt, Human
uuccugugucu

SEQ ID NO: 3348517 - RNA, 17 nt, Human
uuccuguucccaugaga

SEQ ID NO: 3348518 - RNA, 11 nt, Human
uuccuucagug

SEQ ID NO: 3348519 - RNA, 14 nt, Human
uuccuucagugccu

SEQ ID NO: 3348520 - RNA, 13 nt, Human
aucaaguauuaua

SEQ ID NO: 3348521 - RNA, 14 nt, Human
aucaaguauuauac

SEQ ID NO: 3348522 - RNA, 18 nt, Human
aucaaguauuauaccuuu

SEQ ID NO: 3348523 - RNA, 19 nt, Human
aucacggcucacugcagcc

SEQ ID NO: 3348524 - RNA, 22 nt, Human
aucacggcucacugcagccuca

SEQ ID NO: 3348525 - RNA, 19 nt, Human
auauugauuuccguuaaaa

SEQ ID NO: 3348526 - RNA, 21 nt, Human
auauugauuuccguuaaaaua

SEQ ID NO: 3348527 - RNA, 22 nt, Human
auauugauuuccguuaaaauac

SEQ ID NO: 3348528 - RNA, 16 nt, Human
auauucuguuggccag

SEQ ID NO: 3348529 - RNA, 22 nt, Human
auauuaaggaagacaaugugaa

SEQ ID NO: 3348530 - RNA, 24 nt, Human
auauuaagaaagacuaucuaaaug

SEQ ID NO: 3348531 - RNA, 22 nt, Human
auauuaagaaagacuaucuaaa

SEQ ID NO: 3348532 - RNA, 20 nt, Human
auauguuuuaagaggcaggg

SEQ ID NO: 3348533 - RNA, 18 nt, Human
auauguuuuaagaggcag

SEQ ID NO: 3348534 - RNA, 20 nt, Human
auauuguuuucaguguacau

SEQ ID NO: 3348535 - RNA, 17 nt, Human
auauuguuuucagugua

SEQ ID NO: 3348536 - RNA, 17 nt, Human
auauugcugauggugca

SEQ ID NO: 3348537 - RNA, 16 nt, Human
auauaggaacuuaaau

SEQ ID NO: 3348538 - RNA, 14 nt, Human
uucagccaagaauu

SEQ ID NO: 3348539 - RNA, 19 nt, Human
uucagccaagaauucuuaa

SEQ ID NO: 3348540 - RNA, 17 nt, Human
uucagaucucuaacuuc

SEQ ID NO: 3348541 - RNA, 18 nt, Human
auauauagaaauauauac

SEQ ID NO: 3348542 - RNA, 22 nt, Human
auauauacgaacaaaacacacg

SEQ ID NO: 3348543 - RNA, 21 nt, Human
uucaucauccuaagcuauuca

SEQ ID NO: 3348544 - RNA, 18 nt, Human
uucaucauccuaagcuau

SEQ ID NO: 3348545 - RNA, 14 nt, Human
uucaguaauaacuc

SEQ ID NO: 3348546 - RNA, 21 nt, Human
uucauauuuacuucuuauaca

SEQ ID NO: 3348547 - RNA, 16 nt, Human
uucauauuuacuucuu

SEQ ID NO: 3348548 - RNA, 22 nt, Human
auaucugaaaauguauguguaa

SEQ ID NO: 3348549 - RNA, 14 nt, Human
auaugucaagccau

SEQ ID NO: 3348550 - RNA, 16 nt, Human
uuauuuaguuccuuga

SEQ ID NO: 3348551 - RNA, 22 nt, Human
uuauuuaaugaaagacuguaca

SEQ ID NO: 3348552 - RNA, 18 nt, Human
uuauuuaaugaaagacug

SEQ ID NO: 3348553 - RNA, 14 nt, Human
uuauuuaaauuuua

SEQ ID NO: 3348554 - RNA, 23 nt, Human
auagcuggucuuauuuguaaagc

SEQ ID NO: 3348555 - RNA, 22 nt, Human
auagcuggucuuauuuguaaag

SEQ ID NO: 3348556 - RNA, 17 nt, Human
auagcugggacuacagg

SEQ ID NO: 3348557 - RNA, 18 nt, Human
auagccugccucuucucu

SEQ ID NO: 3348558 - RNA, 17 nt, Human
auaagauaaaugugcug

SEQ ID NO: 3348559 - RNA, 13 nt, Human
auaagauaaaugu

SEQ ID NO: 3348560 - RNA, 12 nt, Human
auagcugggacu

SEQ ID NO: 3348561 - RNA, 21 nt, Human
auagcucaggugucccugcac

SEQ ID NO: 3348562 - RNA, 20 nt, Human
auagcucaggugucccugca

SEQ ID NO: 3348563 - RNA, 22 nt, Human
auagcucaggugucccugcacu

SEQ ID NO: 3348564 - RNA, 19 nt, Human
auagcucaggugucccugc

SEQ ID NO: 3348565 - RNA, 17 nt, Human
uucaaaauaaaaaugag

SEQ ID NO: 3348566 - RNA, 16 nt, Human
uucaaggauccugagc

SEQ ID NO: 3348567 - RNA, 18 nt, Human
uucaaggauccugagcca

SEQ ID NO: 3348568 - RNA, 19 nt, Human
uucaaggauccugagccag

SEQ ID NO: 3348569 - RNA, 21 nt, Human
uucaaggauccugagccagau

SEQ ID NO: 3348570 - RNA, 15 nt, Human
uucaaggauccugag

SEQ ID NO: 3348571 - RNA, 22 nt, Human
uucaccacaugugcacaugcac

SEQ ID NO: 3348572 - RNA, 17 nt, Human
uucacauauugauuucc

SEQ ID NO: 3348573 - RNA, 19 nt, Human
auaggaacuuaaauaaugu

SEQ ID NO: 3348574 - RNA, 13 nt, Human
auuacuucugcua

SEQ ID NO: 3348575 - RNA, 12 nt, Human
auuacuucugcu

SEQ ID NO: 3348576 - RNA, 14 nt, Human
auuacuucugcuac

SEQ ID NO: 3348577 - RNA, 23 nt, Human
uuuugugcauuaucuagauacug

SEQ ID NO: 3348578 - RNA, 23 nt, Human
uuuuuauacauaaacaagaccac

SEQ ID NO: 3348579 - RNA, 21 nt, Human
uuuuguuccacaaguuaaaua

SEQ ID NO: 3348580 - RNA, 16 nt, Human
uuuuguuuuugucuua

SEQ ID NO: 3348581 - RNA, 13 nt, Human
auuaaggaagaca

SEQ ID NO: 3348582 - RNA, 19 nt, Human
auuaaguacuauguaucaa

SEQ ID NO: 3348583 - RNA, 16 nt, Human
auuaaguacuauguau

SEQ ID NO: 3348584 - RNA, 18 nt, Human
auuaaguacuauguauca

SEQ ID NO: 3348585 - RNA, 19 nt, Human
auucccaagcucugcuccu

SEQ ID NO: 3348586 - RNA, 18 nt, Human
auucccaagcucugcucc

SEQ ID NO: 3348587 - RNA, 19 nt, Human
auuccccaggaggccagcc

SEQ ID NO: 3348588 - RNA, 20 nt, Human
auuccccaggaggccagccu

SEQ ID NO: 3348589 - RNA, 22 nt, Human
auuccccaggaggccagccuug

SEQ ID NO: 3348590 - RNA, 17 nt, Human
auucccaagcucugcuc

SEQ ID NO: 3348591 - RNA, 16 nt, Human
uuugugauacaaugcu

SEQ ID NO: 3348592 - RNA, 23 nt, Human
uuugucuuaaaaaguggaaaaau

SEQ ID NO: 3348593 - RNA, 13 nt, Human
uuugucuuaaaaa

SEQ ID NO: 3348594 - RNA, 14 nt, Human
uuugucuuaaaaag

SEQ ID NO: 3348595 - RNA, 15 nt, Human
uuugugauacaaugc

SEQ ID NO: 3348596 - RNA, 22 nt, Human
uuugugauacaaugcugugccc

SEQ ID NO: 3348597 - RNA, 19 nt, Human
uuugugcauuaucuagaua

SEQ ID NO: 3348598 - RNA, 22 nt, Human
uuugugcauuaucuagauacug

SEQ ID NO: 3348599 - RNA, 14 nt, Human
uuuguuucugaaag

SEQ ID NO: 3348600 - RNA, 16 nt, Human
uuuguuucugaaaggg

SEQ ID NO: 3348601 - RNA, 14 nt, Human
uuuguacagacaac

SEQ ID NO: 3348602 - RNA, 16 nt, Human
uuuguaauuuuuuuau

SEQ ID NO: 3348603 - RNA, 13 nt, Human
augugagaccauu

SEQ ID NO: 3348604 - RNA, 14 nt, Human
augugagacugguu

SEQ ID NO: 3348605 - RNA, 16 nt, Human
auguccaagaagccca

SEQ ID NO: 3348606 - RNA, 17 nt, Human
auguccaagaagcccag

SEQ ID NO: 3348607 - RNA, 12 nt, Human
auguaucaauga

SEQ ID NO: 3348608 - RNA, 14 nt, Human
uuugacaaggggca

SEQ ID NO: 3348609 - RNA, 19 nt, Human
uuugaccucugcagcaaua

SEQ ID NO: 3348610 - RNA, 21 nt, Human
uuugaccucugcagcaauaaa

SEQ ID NO: 3348611 - RNA, 23 nt, Human
uuucccucccuuccucuuuccau

SEQ ID NO: 3348612 - RNA, 23 nt, Human
uuugauuaaauucuugcaaagua

SEQ ID NO: 3348613 - RNA, 15 nt, Human
uuugauucagacagc

SEQ ID NO: 3348614 - RNA, 15 nt, Human
uuugauccaagcugg

SEQ ID NO: 3348615 - RNA, 14 nt, Human
uuugauccaagcug

SEQ ID NO: 3348616 - RNA, 13 nt, Human
uuugagacagagu

SEQ ID NO: 3348617 - RNA, 18 nt, Human
uuugaccucugcagcaau

SEQ ID NO: 3348618 - RNA, 12 nt, Human
uuuggcugcuga

SEQ ID NO: 3348619 - RNA, 13 nt, Human
uuuggcugcugaa

SEQ ID NO: 3348620 - RNA, 21 nt, Human
uuugggguacccacugcucug

SEQ ID NO: 3348621 - RNA, 22 nt, Human
uuugggguacccacugcucugg

SEQ ID NO: 3348622 - RNA, 22 nt, Human
uuuggauuggaugaauuccaaa

SEQ ID NO: 3348623 - RNA, 22 nt, Human
uuugcuggggccgaaagaacag

SEQ ID NO: 3348624 - RNA, 19 nt, Human
uuugcuggggccgaaagaa

SEQ ID NO: 3348625 - RNA, 22 nt, Human
auuaaaaaucucaaauuucuaa

SEQ ID NO: 3348626 - RNA, 23 nt, Human
auuaaaaaucucaaauuucuaaa

SEQ ID NO: 3348627 - RNA, 19 nt, Human
auuaaaacacaacaucuuu

SEQ ID NO: 3348628 - RNA, 17 nt, Human
auguuggccaggcuggu

SEQ ID NO: 3348629 - RNA, 13 nt, Human
uuuucuguucuuu

SEQ ID NO: 3348630 - RNA, 16 nt, Human
auguuggccaggcugg

SEQ ID NO: 3348631 - RNA, 23 nt, Human
uuuucuacucgaguuacagacaa

SEQ ID NO: 3348632 - RNA, 12 nt, Human
uuuuauuaaauu

SEQ ID NO: 3348633 - RNA, 15 nt, Human
uuuuaguagagacag

SEQ ID NO: 3348634 - RNA, 18 nt, Human
uuuuauggcuuuugugca

SEQ ID NO: 3348635 - RNA, 19 nt, Human
uuuuauggcuuuugugcau

SEQ ID NO: 3348636 - RNA, 15 nt, Human
auguugcccaggcag

SEQ ID NO: 3348637 - RNA, 14 nt, Human
auguugcccaggca

SEQ ID NO: 3348638 - RNA, 18 nt, Human
auguugaaagaucaaaag

SEQ ID NO: 3348639 - RNA, 13 nt, Human
auguugcccaggc

SEQ ID NO: 3348640 - RNA, 20 nt, Human
auguucuuucacccuuuucu

SEQ ID NO: 3348641 - RNA, 12 nt, Human
auguugaaagau

SEQ ID NO: 3348642 - RNA, 17 nt, Human
uuuuagaguugauacua

SEQ ID NO: 3348643 - RNA, 21 nt, Human
uuuuagacccuauugcugcuu

SEQ ID NO: 3348644 - RNA, 20 nt, Human
auguuacauaagauaaaugu

SEQ ID NO: 3348645 - RNA, 19 nt, Human
auguuacauaagauaaaug

SEQ ID NO: 3348646 - RNA, 18 nt, Human
uuuuaaaaaacugcugac

SEQ ID NO: 3348647 - RNA, 18 nt, Human
auugcaacaggcugggcu

SEQ ID NO: 3348648 - RNA, 17 nt, Human
auugcaacaggcugggc

SEQ ID NO: 3348649 - RNA, 12 nt, Human
auugcaccacug

SEQ ID NO: 3348650 - RNA, 16 nt, Human
auugcaacaggcuggg

SEQ ID NO: 3348651 - RNA, 23 nt, Human
auuggcuagagguucaaagauau

SEQ ID NO: 3348652 - RNA, 19 nt, Human
auuggcuagagguucaaag

SEQ ID NO: 3348653 - RNA, 20 nt, Human
auuggcuagagguucaaaga

SEQ ID NO: 3348654 - RNA, 22 nt, Human
auuggcuagagguucaaagaua

SEQ ID NO: 3348655 - RNA, 17 nt, Human
auuugaggucuguucuu

SEQ ID NO: 3348656 - RNA, 18 nt, Human
auuugaggucuguucuuu

SEQ ID NO: 3348657 - RNA, 15 nt, Human
auuugaggucuguuc

SEQ ID NO: 3348658 - RNA, 15 nt, Human
auuugagcagggcuc

SEQ ID NO: 3348659 - RNA, 21 nt, Human
auuuggugguuucagaaaugu

SEQ ID NO: 3348660 - RNA, 21 nt, Human
auuugaggucuguucuuucca

SEQ ID NO: 3348661 - RNA, 17 nt, Human
auuuccguuaaaauacc

SEQ ID NO: 3348662 - RNA, 14 nt, Human
auuucccaaagcag

SEQ ID NO: 3348663 - RNA, 20 nt, Human
auuuacuucuuauacauuug

SEQ ID NO: 3348664 - RNA, 19 nt, Human
auuuacuucuuauacauuu

SEQ ID NO: 3348665 - RNA, 17 nt, Human
auuuacuucuuauacau

SEQ ID NO: 3348666 - RNA, 22 nt, Human
auuuacaacugggggaggguga

SEQ ID NO: 3348667 - RNA, 17 nt, Human
auuguuuucaguguaca

SEQ ID NO: 3348668 - RNA, 19 nt, Human
auuguuuucaguguacaug

SEQ ID NO: 3348669 - RNA, 18 nt, Human
auuguuuucaguguacau

SEQ ID NO: 3348670 - RNA, 16 nt, Human
ugaguacguugugcau

SEQ ID NO: 3348671 - RNA, 17 nt, Human
ugaguacguugugcauu

SEQ ID NO: 3348672 - RNA, 18 nt, Human
ugaguacguugugcauuu

SEQ ID NO: 3348673 - RNA, 19 nt, Human
ugaguacguugugcauuug

SEQ ID NO: 3348674 - RNA, 23 nt, Human
agcauaaaaauuagccaagugug

SEQ ID NO: 3348675 - RNA, 19 nt, Human
agcauaaaaauuagccaag

SEQ ID NO: 3348676 - RNA, 17 nt, Human
ugagugcagcucuggag

SEQ ID NO: 3348677 - RNA, 13 nt, Human
ugagugccuuaca

SEQ ID NO: 3348678 - RNA, 14 nt, Human
ugagugccuuacac

SEQ ID NO: 3348679 - RNA, 14 nt, Human
ugagugagcaugcc

SEQ ID NO: 3348680 - RNA, 20 nt, Human
ugaguacguugugcauuugg

SEQ ID NO: 3348681 - RNA, 18 nt, Human
ugagucaccaagcccagu

SEQ ID NO: 3348682 - RNA, 18 nt, Human
ugaguucauacccuguua

SEQ ID NO: 3348683 - RNA, 21 nt, Human
ugagugggggaucacagccuc

SEQ ID NO: 3348684 - RNA, 14 nt, Human
ugauacaaugcugu

SEQ ID NO: 3348685 - RNA, 15 nt, Human
ugauacaaugcugug

SEQ ID NO: 3348686 - RNA, 13 nt, Human
agcaggacaugga

SEQ ID NO: 3348687 - RNA, 11 nt, Human
agcagccacau

SEQ ID NO: 3348688 - RNA, 16 nt, Human
agcagcagggagggcu

SEQ ID NO: 3348689 - RNA, 20 nt, Human
ugacccaugcugcccuguga

SEQ ID NO: 3348690 - RNA, 18 nt, Human
ugacccaugcugcccugu

SEQ ID NO: 3348691 - RNA, 19 nt, Human
ugacccaugcugcccugug

SEQ ID NO: 3348692 - RNA, 17 nt, Human
ugacccaugcugcccug

SEQ ID NO: 3348693 - RNA, 17 nt, Human
agcaggcucgggcuccc

SEQ ID NO: 3348694 - RNA, 13 nt, Human
agcaggcucucag

SEQ ID NO: 3348695 - RNA, 14 nt, Human
agcaggcucucagg

SEQ ID NO: 3348696 - RNA, 15 nt, Human
agcaggcucucaggc

SEQ ID NO: 3348697 - RNA, 16 nt, Human
agcaggcucucaggcc

SEQ ID NO: 3348698 - RNA, 17 nt, Human
agcaggcucucaggcca

SEQ ID NO: 3348699 - RNA, 18 nt, Human
agcaggcucucaggccag

SEQ ID NO: 3348700 - RNA, 19 nt, Human
agcaggcucucaggccagc

SEQ ID NO: 3348701 - RNA, 21 nt, Human
agcaggcucucaggccagcug

SEQ ID NO: 3348702 - RNA, 22 nt, Human
agcaggcucucaggccagcugc

SEQ ID NO: 3348703 - RNA, 23 nt, Human
agcaggcucucaggccagcugcu

SEQ ID NO: 3348704 - RNA, 15 nt, Human
agcagggaaacagcu

SEQ ID NO: 3348705 - RNA, 14 nt, Human
agcagggaaacagc

SEQ ID NO: 3348706 - RNA, 13 nt, Human
agcagggaaacag

SEQ ID NO: 3348707 - RNA, 22 nt, Human
agcagggcucagcggggacagc

SEQ ID NO: 3348708 - RNA, 15 nt, Human
agcagggcucagcgg

SEQ ID NO: 3348709 - RNA, 14 nt, Human
agcagggcucagcg

SEQ ID NO: 3348710 - RNA, 13 nt, Human
agcagggcucagc

SEQ ID NO: 3348711 - RNA, 20 nt, Human
agcagggagggcuucugcca

SEQ ID NO: 3348712 - RNA, 15 nt, Human
agcauuuugcuaaau

SEQ ID NO: 3348713 - RNA, 22 nt, Human
agcauuuugcuaaaugugaaug

SEQ ID NO: 3348714 - RNA, 19 nt, Human
agcauggcugccaauggga

SEQ ID NO: 3348715 - RNA, 13 nt, Human
agcauggcugcca

SEQ ID NO: 3348716 - RNA, 16 nt, Human
agcauauucaggaagc

SEQ ID NO: 3348717 - RNA, 22 nt, Human
agcaucaggccaggcccucugc

SEQ ID NO: 3348718 - RNA, 21 nt, Human
agcaucaggccaggcccucug

SEQ ID NO: 3348719 - RNA, 23 nt, Human
agcaucaggccaggcccucugcc

SEQ ID NO: 3348720 - RNA, 14 nt, Human
ugaucacggcucac

SEQ ID NO: 3348721 - RNA, 13 nt, Human
ugaucacggcuca

SEQ ID NO: 3348722 - RNA, 15 nt, Human
ugaucacggcucacu

SEQ ID NO: 3348723 - RNA, 17 nt, Human
agcauauucaggaagcu

SEQ ID NO: 3348724 - RNA, 19 nt, Human
agcauauucaggaagcuca

SEQ ID NO: 3348725 - RNA, 21 nt, Human
agcauauucaggaagcucagg

SEQ ID NO: 3348726 - RNA, 18 nt, Human
ugauccucccaccucagc

SEQ ID NO: 3348727 - RNA, 20 nt, Human
ugauccucccaccucagccu

SEQ ID NO: 3348728 - RNA, 19 nt, Human
ugauccucccaccucagcc

SEQ ID NO: 3348729 - RNA, 13 nt, Human
ugaucuaggaaga

SEQ ID NO: 3348730 - RNA, 16 nt, Human
ugauccucccaccuca

SEQ ID NO: 3348731 - RNA, 21 nt, Human
ugaugaucuuugcagacaggc

SEQ ID NO: 3348732 - RNA, 13 nt, Human
ugauggggcccug

SEQ ID NO: 3348733 - RNA, 22 nt, Human
ugaugggcaacccccagccugc

SEQ ID NO: 3348734 - RNA, 21 nt, Human
ugaugggcaacccccagccug

SEQ ID NO: 3348735 - RNA, 22 nt, Human
ugaugaaaugaggucagagccu

SEQ ID NO: 3348736 - RNA, 14 nt, Human
ugaucuaggaagac

SEQ ID NO: 3348737 - RNA, 20 nt, Human
ugaugaucuuugcagacagg

SEQ ID NO: 3348738 - RNA, 19 nt, Human
ugaugaucuuugcagacag

SEQ ID NO: 3348739 - RNA, 23 nt, Human
ugaugaaaugaggucagagccug

SEQ ID NO: 3348740 - RNA, 13 nt, Human
ugauuaaauucuu

SEQ ID NO: 3348741 - RNA, 16 nt, Human
ugauuaaauucuugca

SEQ ID NO: 3348742 - RNA, 20 nt, Human
ugauuaaccacuucagcuga

SEQ ID NO: 3348743 - RNA, 16 nt, Human
agccacggccaggcca

SEQ ID NO: 3348744 - RNA, 21 nt, Human
ugauguuuuaaggaugcuugu

SEQ ID NO: 3348745 - RNA, 17 nt, Human
ugauguuuuccaugagu

SEQ ID NO: 3348746 - RNA, 18 nt, Human
ugauguuuuaaggaugcu

SEQ ID NO: 3348747 - RNA, 19 nt, Human
ugauguuuuccaugagucc

SEQ ID NO: 3348748 - RNA, 22 nt, Human
ugauggggcccugccuccuuug

SEQ ID NO: 3348749 - RNA, 17 nt, Human
ugcagccucacaguccu

SEQ ID NO: 3348750 - RNA, 21 nt, Human
ugcagccucacaguccuuacc

SEQ ID NO: 3348751 - RNA, 18 nt, Human
ugcagccucacaguccuu

SEQ ID NO: 3348752 - RNA, 21 nt, Human
ugcagacaggcaagcaccucc

SEQ ID NO: 3348753 - RNA, 13 nt, Human
ugcagacaggcaa

SEQ ID NO: 3348754 - RNA, 12 nt, Human
ugcagacaggca

SEQ ID NO: 3348755 - RNA, 14 nt, Human
agccuccugcccuu

SEQ ID NO: 3348756 - RNA, 18 nt, Human
agccuccugcccuuaccu

SEQ ID NO: 3348757 - RNA, 13 nt, Human
agccuccugcccu

SEQ ID NO: 3348758 - RNA, 19 nt, Human
ugcaugcugucccuuacgu

SEQ ID NO: 3348759 - RNA, 21 nt, Human
ugcaugcugucccuuacguga

SEQ ID NO: 3348760 - RNA, 16 nt, Human
ugcaugcugucccuua

SEQ ID NO: 3348761 - RNA, 18 nt, Human
ugcaugcugucccuuacg

SEQ ID NO: 3348762 - RNA, 17 nt, Human
ugcaucguuucaucuuc

SEQ ID NO: 3348763 - RNA, 18 nt, Human
ugcauaccacuuuuguuc

SEQ ID NO: 3348764 - RNA, 20 nt, Human
ugcauaccacuuuuguucuu

SEQ ID NO: 3348765 - RNA, 16 nt, Human
ugcauaccacuuuugu

SEQ ID NO: 3348766 - RNA, 14 nt, Human
ugcauaccacuuuu

SEQ ID NO: 3348767 - RNA, 20 nt, Human
agccuuagaagucacacagu

SEQ ID NO: 3348768 - RNA, 23 nt, Human
agccuugaacuuugaccucugca

SEQ ID NO: 3348769 - RNA, 19 nt, Human
agccuugcggaagguucua

SEQ ID NO: 3348770 - RNA, 21 nt, Human
agccuugaccauucuccaccu

SEQ ID NO: 3348771 - RNA, 18 nt, Human
agccuugaccauucucca

SEQ ID NO: 3348772 - RNA, 19 nt, Human
agccuugaccauucuccac

SEQ ID NO: 3348773 - RNA, 22 nt, Human
agcgcccaguuggguggaugcc

SEQ ID NO: 3348774 - RNA, 18 nt, Human
agccugugccucugggac

SEQ ID NO: 3348775 - RNA, 17 nt, Human
agccugugccucuggga

SEQ ID NO: 3348776 - RNA, 16 nt, Human
ugcauuuaaaagauac

SEQ ID NO: 3348777 - RNA, 13 nt, Human
ugccaauggacua

SEQ ID NO: 3348778 - RNA, 14 nt, Human
ugccaaugggagcu

SEQ ID NO: 3348779 - RNA, 17 nt, Human
ugccagccgagauagcc

SEQ ID NO: 3348780 - RNA, 22 nt, Human
ugccagccgagauagccaaggc

SEQ ID NO: 3348781 - RNA, 16 nt, Human
agcccgggcucugccu

SEQ ID NO: 3348782 - RNA, 14 nt, Human
agcccugcagaggg

SEQ ID NO: 3348783 - RNA, 15 nt, Human
agcccugcagagggc

SEQ ID NO: 3348784 - RNA, 16 nt, Human
agcccugcagagggca

SEQ ID NO: 3348785 - RNA, 19 nt, Human
agcccugcagagggcacag

SEQ ID NO: 3348786 - RNA, 13 nt, Human
agcccgggcucug

SEQ ID NO: 3348787 - RNA, 14 nt, Human
agcccgggcucugc

SEQ ID NO: 3348788 - RNA, 15 nt, Human
agcccgggcucugcc

SEQ ID NO: 3348789 - RNA, 15 nt, Human
agccccuucugaccc

SEQ ID NO: 3348790 - RNA, 16 nt, Human
agccccuucugaccca

SEQ ID NO: 3348791 - RNA, 14 nt, Human
agccccuucugacc

SEQ ID NO: 3348792 - RNA, 22 nt, Human
agccccuggaugcagccucaca

SEQ ID NO: 3348793 - RNA, 14 nt, Human
agcccaggccuccu

SEQ ID NO: 3348794 - RNA, 19 nt, Human
agcccaggccuccuacagc

SEQ ID NO: 3348795 - RNA, 14 nt, Human
agccccgaggccuu

SEQ ID NO: 3348796 - RNA, 21 nt, Human
ugcaccacugcacuccagccu

SEQ ID NO: 3348797 - RNA, 13 nt, Human
ugcaccagcccuu

SEQ ID NO: 3348798 - RNA, 15 nt, Human
ugcaccacugcacuc

SEQ ID NO: 3348799 - RNA, 14 nt, Human
ugcaccggcuggcc

SEQ ID NO: 3348800 - RNA, 15 nt, Human
ugcaccggcuggccu

SEQ ID NO: 3348801 - RNA, 16 nt, Human
ugcaccggcuggccug

SEQ ID NO: 3348802 - RNA, 14 nt, Human
ugcacuccagccug

SEQ ID NO: 3348803 - RNA, 16 nt, Human
ugcacuccagccuggg

SEQ ID NO: 3348804 - RNA, 15 nt, Human
ugcacuccagccugg

SEQ ID NO: 3348805 - RNA, 12 nt, Human
agcccaggccuc

SEQ ID NO: 3348806 - RNA, 15 nt, Human
ugcaaggucauuuuu

SEQ ID NO: 3348807 - RNA, 20 nt, Human
ugcaaaguaucccuacugua

SEQ ID NO: 3348808 - RNA, 21 nt, Human
ugcaaaggguaucaggugcug

SEQ ID NO: 3348809 - RNA, 18 nt, Human
ugcaaaccaucauugaaa

SEQ ID NO: 3348810 - RNA, 12 nt, Human
ugcaaaccauca

SEQ ID NO: 3348811 - RNA, 13 nt, Human
ugcaaaccaucau

SEQ ID NO: 3348812 - RNA, 18 nt, Human
agccacggccaggccaga

SEQ ID NO: 3348813 - RNA, 17 nt, Human
agccacggccaggccag

SEQ ID NO: 3348814 - RNA, 23 nt, Human
ugccugcccaggccccugccacc

SEQ ID NO: 3348815 - RNA, 22 nt, Human
ugccugcccaggccccugccac

SEQ ID NO: 3348816 - RNA, 20 nt, Human
ugccugcccaggccccugcc

SEQ ID NO: 3348817 - RNA, 17 nt, Human
ugccucugccucugaca

SEQ ID NO: 3348818 - RNA, 20 nt, Human
ugccucugccucugacacac

SEQ ID NO: 3348819 - RNA, 18 nt, Human
ugccucugccucugacac

SEQ ID NO: 3348820 - RNA, 14 nt, Human
ugccucagccuccc

SEQ ID NO: 3348821 - RNA, 16 nt, Human
ugccuggauggggcug

SEQ ID NO: 3348822 - RNA, 17 nt, Human
ugccuggauggggcugc

SEQ ID NO: 3348823 - RNA, 20 nt, Human
ugccuggauggggcugcacc

SEQ ID NO: 3348824 - RNA, 16 nt, Human
agcugccuguucagcu

SEQ ID NO: 3348825 - RNA, 14 nt, Human
agcugccuguucag

SEQ ID NO: 3348826 - RNA, 18 nt, Human
agcugccuguucagcucc

SEQ ID NO: 3348827 - RNA, 16 nt, Human
agcugcuugggcuuca

SEQ ID NO: 3348828 - RNA, 23 nt, Human
agcugugcucuggacaggcaugu

SEQ ID NO: 3348829 - RNA, 18 nt, Human
agcugugcucuggacagg

SEQ ID NO: 3348830 - RNA, 17 nt, Human
agcugugcucuggacag

SEQ ID NO: 3348831 - RNA, 18 nt, Human
agcuguuacugucuucag

SEQ ID NO: 3348832 - RNA, 14 nt, Human
agcuguuacugucu

SEQ ID NO: 3348833 - RNA, 19 nt, Human
agcugggacuacaggcacc

SEQ ID NO: 3348834 - RNA, 22 nt, Human
agcugggguggggaccucaggc

SEQ ID NO: 3348835 - RNA, 23 nt, Human
agcugggguggggaccucaggcc

SEQ ID NO: 3348836 - RNA, 20 nt, Human
agcugggguggggaccucag

SEQ ID NO: 3348837 - RNA, 16 nt, Human
agcugggacuacaggu

SEQ ID NO: 3348838 - RNA, 23 nt, Human
agcugggacuacaggcacccacc

SEQ ID NO: 3348839 - RNA, 20 nt, Human
agcugggacuacaggcaccc

SEQ ID NO: 3348840 - RNA, 19 nt, Human
agcuguuacugucuucagu

SEQ ID NO: 3348841 - RNA, 21 nt, Human
ugccuguucagcuccagcuca

SEQ ID NO: 3348842 - RNA, 16 nt, Human
ugccuguugggccagg

SEQ ID NO: 3348843 - RNA, 17 nt, Human
ugccuguugggccagga

SEQ ID NO: 3348844 - RNA, 20 nt, Human
ugccuuacccucauguucuu

SEQ ID NO: 3348845 - RNA, 16 nt, Human
ugccuuggggacaaga

SEQ ID NO: 3348846 - RNA, 21 nt, Human
ugccuuacccucauguucuua

SEQ ID NO: 3348847 - RNA, 16 nt, Human
agcucucuccucccuu

SEQ ID NO: 3348848 - RNA, 21 nt, Human
agcuccuucuguccuacucug

SEQ ID NO: 3348849 - RNA, 16 nt, Human
agcuccuucuguccua

SEQ ID NO: 3348850 - RNA, 12 nt, Human
agcucuggucca

SEQ ID NO: 3348851 - RNA, 17 nt, Human
agcucugguccauagag

SEQ ID NO: 3348852 - RNA, 14 nt, Human
agcucuguccuggg

SEQ ID NO: 3348853 - RNA, 23 nt, Human
agcucccaggcauuccccaggag

SEQ ID NO: 3348854 - RNA, 15 nt, Human
agcuccuucuguccu

SEQ ID NO: 3348855 - RNA, 13 nt, Human
agcuccuucuguc

SEQ ID NO: 3348856 - RNA, 13 nt, Human
agcucccaggcau

SEQ ID NO: 3348857 - RNA, 21 nt, Human
agcucuguccugggagugagc

SEQ ID NO: 3348858 - RNA, 16 nt, Human
agcucuguccugggag

SEQ ID NO: 3348859 - RNA, 20 nt, Human
agcugccagccgagauagcc

SEQ ID NO: 3348860 - RNA, 14 nt, Human
agcugccagccgag

SEQ ID NO: 3348861 - RNA, 18 nt, Human
ugcccuuaccugccagga

SEQ ID NO: 3348862 - RNA, 12 nt, Human
ugccgcagcccu

SEQ ID NO: 3348863 - RNA, 13 nt, Human
ugccucagccucc

SEQ ID NO: 3348864 - RNA, 12 nt, Human
ugccucagccuc

SEQ ID NO: 3348865 - RNA, 13 nt, Human
aggaagcucaggg

SEQ ID NO: 3348866 - RNA, 14 nt, Human
aggaagcucagggc

SEQ ID NO: 3348867 - RNA, 12 nt, Human
aggaagcucagg

SEQ ID NO: 3348868 - RNA, 15 nt, Human
aggaagcucagggcc

SEQ ID NO: 3348869 - RNA, 23 nt, Human
aggaaaggcuccaggagcagcca

SEQ ID NO: 3348870 - RNA, 21 nt, Human
ugcuccagcuguucagcuggu

SEQ ID NO: 3348871 - RNA, 20 nt, Human
ugcuccagcuguucagcugg

SEQ ID NO: 3348872 - RNA, 15 nt, Human
ugcucugcugacaga

SEQ ID NO: 3348873 - RNA, 14 nt, Human
ugcucugcugacag

SEQ ID NO: 3348874 - RNA, 14 nt, Human
ugcuaucuccccca

SEQ ID NO: 3348875 - RNA, 17 nt, Human
ugcuaucucccccagcc

SEQ ID NO: 3348876 - RNA, 13 nt, Human
ugcuaucuccccc

SEQ ID NO: 3348877 - RNA, 20 nt, Human
agcuuaaaggggcuagagug

SEQ ID NO: 3348878 - RNA, 11 nt, Human
ugcuacacacu

SEQ ID NO: 3348879 - RNA, 15 nt, Human
ugcgguccacccagg

SEQ ID NO: 3348880 - RNA, 14 nt, Human
ugcgguccacccag

SEQ ID NO: 3348881 - RNA, 14 nt, Human
aggaaaagcugcug

SEQ ID NO: 3348882 - RNA, 21 nt, Human
agcuuguaaauagcucaggug

SEQ ID NO: 3348883 - RNA, 20 nt, Human
agcuugaccgugaggccaga

SEQ ID NO: 3348884 - RNA, 22 nt, Human
agcuugaccgugaggccagaga

SEQ ID NO: 3348885 - RNA, 19 nt, Human
agcuugaccgugaggccag

SEQ ID NO: 3348886 - RNA, 23 nt, Human
agcuugaccgugaggccagagac

SEQ ID NO: 3348887 - RNA, 22 nt, Human
agcuugaggguugggcuggugu

SEQ ID NO: 3348888 - RNA, 16 nt, Human
uggaagacagcucuua

SEQ ID NO: 3348889 - RNA, 15 nt, Human
uggaagacagcucuu

SEQ ID NO: 3348890 - RNA, 23 nt, Human
uggaaauuuguuauaaugaauga

SEQ ID NO: 3348891 - RNA, 21 nt, Human
uggaaauuuguuauaaugaau

SEQ ID NO: 3348892 - RNA, 18 nt, Human
ugcuuuuggucuguguga

SEQ ID NO: 3348893 - RNA, 17 nt, Human
ugcuuuuggucugugug

SEQ ID NO: 3348894 - RNA, 23 nt, Human
ugcuuuuuaauauugauaugcuu

SEQ ID NO: 3348895 - RNA, 20 nt, Human
ugcuuuugucuaugggacuc

SEQ ID NO: 3348896 - RNA, 22 nt, Human
ugcuuugugauuuuuguaauuu

SEQ ID NO: 3348897 - RNA, 17 nt, Human
ugcuuugugauuuuugu

SEQ ID NO: 3348898 - RNA, 15 nt, Human
ugcuugagcucagga

SEQ ID NO: 3348899 - RNA, 12 nt, Human
aggaucagucug

SEQ ID NO: 3348900 - RNA, 13 nt, Human
aggaucagucuga

SEQ ID NO: 3348901 - RNA, 19 nt, Human
aggauucuuccucccuccc

SEQ ID NO: 3348902 - RNA, 17 nt, Human
aggauucuuccucccuc

SEQ ID NO: 3348903 - RNA, 22 nt, Human
aggaugaucuaggaagacuuug

SEQ ID NO: 3348904 - RNA, 23 nt, Human
aggaugaucuaggaagacuuugg

SEQ ID NO: 3348905 - RNA, 22 nt, Human
aggaugcacagaguuguuacau

SEQ ID NO: 3348906 - RNA, 16 nt, Human
aggauucuuccucccu

SEQ ID NO: 3348907 - RNA, 20 nt, Human
aggaugaucuaggaagacuu

SEQ ID NO: 3348908 - RNA, 16 nt, Human
uggaagcacagcuuca

SEQ ID NO: 3348909 - RNA, 16 nt, Human
aggagccuccugcccu

SEQ ID NO: 3348910 - RNA, 12 nt, Human
aggagcagccac

SEQ ID NO: 3348911 - RNA, 13 nt, Human
aggagcagccaca

SEQ ID NO: 3348912 - RNA, 19 nt, Human
aggacuuuucuuuguggcu

SEQ ID NO: 3348913 - RNA, 17 nt, Human
aggacuuuucuuugugg

SEQ ID NO: 3348914 - RNA, 22 nt, Human
aggacuuuucuuuguggcuucc

SEQ ID NO: 3348915 - RNA, 13 nt, Human
aggccagccuuga

SEQ ID NO: 3348916 - RNA, 15 nt, Human
aggccagccuugacc

SEQ ID NO: 3348917 - RNA, 23 nt, Human
uggcagcucaccucucccuugga

SEQ ID NO: 3348918 - RNA, 21 nt, Human
uggcagcucaccucucccuug

SEQ ID NO: 3348919 - RNA, 22 nt, Human
uggcagcucaccucucccuugg

SEQ ID NO: 3348920 - RNA, 20 nt, Human
uggcacccggccccugcugg

SEQ ID NO: 3348921 - RNA, 19 nt, Human
uggcacccggccccugcug

SEQ ID NO: 3348922 - RNA, 18 nt, Human
uggcacccggccccugcu

SEQ ID NO: 3348923 - RNA, 16 nt, Human
uggcacccggccccug

SEQ ID NO: 3348924 - RNA, 13 nt, Human
aggcccagagggc

SEQ ID NO: 3348925 - RNA, 17 nt, Human
aggcccggcuccaggcu

SEQ ID NO: 3348926 - RNA, 13 nt, Human
aggcccggcucca

SEQ ID NO: 3348927 - RNA, 14 nt, Human
aggccccgcccagg

SEQ ID NO: 3348928 - RNA, 23 nt, Human
uggcacaucagcacgauuucugu

SEQ ID NO: 3348929 - RNA, 21 nt, Human
uggcacaucagcacgauuucu

SEQ ID NO: 3348930 - RNA, 23 nt, Human
uggaugccugguggcagcugcgg

SEQ ID NO: 3348931 - RNA, 21 nt, Human
uggaugccugguggcagcugc

SEQ ID NO: 3348932 - RNA, 20 nt, Human
uggaugccugguggcagcug

SEQ ID NO: 3348933 - RNA, 14 nt, Human
uggagugcagugag

SEQ ID NO: 3348934 - RNA, 16 nt, Human
aggcauuugcugaaua

SEQ ID NO: 3348935 - RNA, 20 nt, Human
uggagguacgaaaagagggg

SEQ ID NO: 3348936 - RNA, 16 nt, Human
aggcaaggcugucaau

SEQ ID NO: 3348937 - RNA, 19 nt, Human
aggcaagcaccuccugccu

SEQ ID NO: 3348938 - RNA, 18 nt, Human
aggcaagcaccuccugcc

SEQ ID NO: 3348939 - RNA, 20 nt, Human
aggcaagcaccuccugccuc

SEQ ID NO: 3348940 - RNA, 17 nt, Human
aggcaagcaccuccugc

SEQ ID NO: 3348941 - RNA, 18 nt, Human
aggauugcuacuguccua

SEQ ID NO: 3348942 - RNA, 17 nt, Human
aggauugcuacuguccu

SEQ ID NO: 3348943 - RNA, 15 nt, Human
aggauugcuacuguc

SEQ ID NO: 3348944 - RNA, 14 nt, Human
uggagaaaauggac

SEQ ID NO: 3348945 - RNA, 12 nt, Human
aggcaggauggc

SEQ ID NO: 3348946 - RNA, 22 nt, Human
aggcaggucuugaacuccuggc

SEQ ID NO: 3348947 - RNA, 12 nt, Human
aggcagggucuc

SEQ ID NO: 3348948 - RNA, 15 nt, Human
aggcauaaagucagg

SEQ ID NO: 3348949 - RNA, 17 nt, Human
aggcaggugggauggau

SEQ ID NO: 3348950 - RNA, 22 nt, Human
aggcauaaagucagggguuccc

SEQ ID NO: 3348951 - RNA, 18 nt, Human
aggcauugugggaagggg

SEQ ID NO: 3348952 - RNA, 17 nt, Human
uggugcgaucuggguuc

SEQ ID NO: 3348953 - RNA, 16 nt, Human
uggugcgaucuggguu

SEQ ID NO: 3348954 - RNA, 19 nt, Human
uggugucgggcaugacacg

SEQ ID NO: 3348955 - RNA, 15 nt, Human
ugguggcagcugcgg

SEQ ID NO: 3348956 - RNA, 13 nt, Human
ugguggcagcugc

SEQ ID NO: 3348957 - RNA, 14 nt, Human
ugguggcagcugcg

SEQ ID NO: 3348958 - RNA, 18 nt, Human
ugguuaggcauuguggga

SEQ ID NO: 3348959 - RNA, 20 nt, Human
ugguuaggcauugugggaag

SEQ ID NO: 3348960 - RNA, 15 nt, Human
uggucagauuugaac

SEQ ID NO: 3348961 - RNA, 16 nt, Human
uggucagauuugaacu

SEQ ID NO: 3348962 - RNA, 13 nt, Human
aggucagagccug

SEQ ID NO: 3348963 - RNA, 18 nt, Human
aggucagagccugcaguu

SEQ ID NO: 3348964 - RNA, 17 nt, Human
aggucagagccugcagu

SEQ ID NO: 3348965 - RNA, 15 nt, Human
aggucagagccugca

SEQ ID NO: 3348966 - RNA, 14 nt, Human
aggucagagccugc

SEQ ID NO: 3348967 - RNA, 16 nt, Human
aggucuugaacuccug

SEQ ID NO: 3348968 - RNA, 16 nt, Human
aggugagaagcagagg

SEQ ID NO: 3348969 - RNA, 21 nt, Human
aggugagaagcagaggaagga

SEQ ID NO: 3348970 - RNA, 23 nt, Human
aggugagaagcagaggaaggaga

SEQ ID NO: 3348971 - RNA, 15 nt, Human
aggugacagagugag

SEQ ID NO: 3348972 - RNA, 13 nt, Human
aggugacagagug

SEQ ID NO: 3348973 - RNA, 17 nt, Human
aggucuugaacuccugg

SEQ ID NO: 3348974 - RNA, 13 nt, Human
aggugaccccagg

SEQ ID NO: 3348975 - RNA, 22 nt, Human
aggugacagagugagacucugu

SEQ ID NO: 3348976 - RNA, 20 nt, Human
aggugauccacccaccucag

SEQ ID NO: 3348977 - RNA, 14 nt, Human
aggugauccaccca

SEQ ID NO: 3348978 - RNA, 16 nt, Human
aggugggauccuccag

SEQ ID NO: 3348979 - RNA, 17 nt, Human
aggugggauccuccagg

SEQ ID NO: 3348980 - RNA, 23 nt, Human
agguggggcagcuugaggguugg

SEQ ID NO: 3348981 - RNA, 16 nt, Human
agguggggcagcuuga

SEQ ID NO: 3348982 - RNA, 18 nt, Human
aggugccucaagagaagg

SEQ ID NO: 3348983 - RNA, 15 nt, Human
aggugggauccucca

SEQ ID NO: 3348984 - RNA, 20 nt, Human
aggugugcucugaucaucca

SEQ ID NO: 3348985 - RNA, 15 nt, Human
aggugugcucugauc

SEQ ID NO: 3348986 - RNA, 19 nt, Human
agguggggucacucuggca

SEQ ID NO: 3348987 - RNA, 20 nt, Human
aggugucccugcacuugcag

SEQ ID NO: 3348988 - RNA, 14 nt, Human
agguuuaagcuguu

SEQ ID NO: 3348989 - RNA, 12 nt, Human
aggugugcucug

SEQ ID NO: 3348990 - RNA, 17 nt, Human
ugguuuucaaaauaaaa

SEQ ID NO: 3348991 - RNA, 15 nt, Human
ugguuuucaaaauaa

SEQ ID NO: 3348992 - RNA, 15 nt, Human
ugguuuguaaauuaa

SEQ ID NO: 3348993 - RNA, 14 nt, Human
ugguuuucaaaaua

SEQ ID NO: 3348994 - RNA, 16 nt, Human
uguaaauagcucaggu

SEQ ID NO: 3348995 - RNA, 15 nt, Human
uguaaauagcucagg

SEQ ID NO: 3348996 - RNA, 20 nt, Human
aguagaagucuuagauguau

SEQ ID NO: 3348997 - RNA, 19 nt, Human
aguagaagucuuagaugua

SEQ ID NO: 3348998 - RNA, 21 nt, Human
aguagaagucuuagauguaua

SEQ ID NO: 3348999 - RNA, 17 nt, Human
aguagaagucuuagaug

SEQ ID NO: 3349000 - RNA, 11 nt, Human
aguagagacag

SEQ ID NO: 3349001 - RNA, 17 nt, Human
uguaggcauaaagucag

SEQ ID NO: 3349002 - RNA, 20 nt, Human
uguaggcauaaagucagggg

SEQ ID NO: 3349003 - RNA, 14 nt, Human
aguaauaugcacac

SEQ ID NO: 3349004 - RNA, 15 nt, Human
aguaauaugcacaca

SEQ ID NO: 3349005 - RNA, 18 nt, Human
uguagagccagggucuca

SEQ ID NO: 3349006 - RNA, 16 nt, Human
uguagagccagggucu

SEQ ID NO: 3349007 - RNA, 15 nt, Human
uguagagccaggguc

SEQ ID NO: 3349008 - RNA, 23 nt, Human
agucacacagugagucgaggaca

SEQ ID NO: 3349009 - RNA, 15 nt, Human
agucacacagugagu

SEQ ID NO: 3349010 - RNA, 19 nt, Human
agucaccccggccaccugc

SEQ ID NO: 3349011 - RNA, 17 nt, Human
agucaccccggccaccu

SEQ ID NO: 3349012 - RNA, 14 nt, Human
aguaugguggcugg

SEQ ID NO: 3349013 - RNA, 23 nt, Human
agucacacaguauuacuucugcu

SEQ ID NO: 3349014 - RNA, 16 nt, Human
aguaugguggcugggu

SEQ ID NO: 3349015 - RNA, 15 nt, Human
aguaugguggcuggg

SEQ ID NO: 3349016 - RNA, 15 nt, Human
aguauuacuucugcu

SEQ ID NO: 3349017 - RNA, 18 nt, Human
aguauuacuucugcuaca

SEQ ID NO: 3349018 - RNA, 14 nt, Human
ugucaauuacagga

SEQ ID NO: 3349019 - RNA, 15 nt, Human
ugucaauuacaggaa

SEQ ID NO: 3349020 - RNA, 17 nt, Human
ugucaauuacaggaagu

SEQ ID NO: 3349021 - RNA, 19 nt, Human
uguauucucuccuguaccu

SEQ ID NO: 3349022 - RNA, 16 nt, Human
uguauuuuuuuacuaa

SEQ ID NO: 3349023 - RNA, 17 nt, Human
uguaucaaugaguaaca

SEQ ID NO: 3349024 - RNA, 17 nt, Human
uggguggcaccagcagc

SEQ ID NO: 3349025 - RNA, 20 nt, Human
uggguggcaccagcagccug

SEQ ID NO: 3349026 - RNA, 21 nt, Human
uggguggcaccagcagccugg

SEQ ID NO: 3349027 - RNA, 23 nt, Human
uggguggaugccugguggcagcu

SEQ ID NO: 3349028 - RNA, 20 nt, Human
ugguagagugugccugaagu

SEQ ID NO: 3349029 - RNA, 16 nt, Human
aggguggugaccucug

SEQ ID NO: 3349030 - RNA, 15 nt, Human
agggugggagugggc

SEQ ID NO: 3349031 - RNA, 20 nt, Human
aggggguggccucccaacuc

SEQ ID NO: 3349032 - RNA, 18 nt, Human
aggggguggccucccaac

SEQ ID NO: 3349033 - RNA, 23 nt, Human
agggucucacuauguugcccagg

SEQ ID NO: 3349034 - RNA, 16 nt, Human
agggucucacucuguc

SEQ ID NO: 3349035 - RNA, 15 nt, Human
agggucucacucugu

SEQ ID NO: 3349036 - RNA, 14 nt, Human
agggucucacucug

SEQ ID NO: 3349037 - RNA, 15 nt, Human
aggguaaggcugugg

SEQ ID NO: 3349038 - RNA, 20 nt, Human
aggggaauguuugccucugc

SEQ ID NO: 3349039 - RNA, 19 nt, Human
aggggaauguuugccucug

SEQ ID NO: 3349040 - RNA, 23 nt, Human
aggggagcaaaaucgaugcagug

SEQ ID NO: 3349041 - RNA, 21 nt, Human
aggggaauguuugccucugcc

SEQ ID NO: 3349042 - RNA, 22 nt, Human
uggggucacucuggcagcucag

SEQ ID NO: 3349043 - RNA, 20 nt, Human
uggggucacucuggcagcuc

SEQ ID NO: 3349044 - RNA, 13 nt, Human
uggggucacucug

SEQ ID NO: 3349045 - RNA, 14 nt, Human
uggggucacucugg

SEQ ID NO: 3349046 - RNA, 15 nt, Human
ugggguaugggagag

SEQ ID NO: 3349047 - RNA, 19 nt, Human
ugggguacccacugcucug

SEQ ID NO: 3349048 - RNA, 18 nt, Human
ugggguacccacugcucu

SEQ ID NO: 3349049 - RNA, 17 nt, Human
ugggguacccacugcuc

SEQ ID NO: 3349050 - RNA, 13 nt, Human
aggggaauguuug

SEQ ID NO: 3349051 - RNA, 18 nt, Human
aggggaaaaucagccugc

SEQ ID NO: 3349052 - RNA, 22 nt, Human
aggggaaaaucagccugcucca

SEQ ID NO: 3349053 - RNA, 14 nt, Human
aggggaacagacug

SEQ ID NO: 3349054 - RNA, 13 nt, Human
aggggaaaagagg

SEQ ID NO: 3349055 - RNA, 12 nt, Human
agggcuccagac

SEQ ID NO: 3349056 - RNA, 14 nt, Human
uggggaccucaggc

SEQ ID NO: 3349057 - RNA, 15 nt, Human
uggggaccucaggcc

SEQ ID NO: 3349058 - RNA, 16 nt, Human
uggggaccucaggccu

SEQ ID NO: 3349059 - RNA, 12 nt, Human
uggggcccugcc

SEQ ID NO: 3349060 - RNA, 21 nt, Human
uggggccaguuggucccccuu

SEQ ID NO: 3349061 - RNA, 22 nt, Human
uggggcugcaccggcuggccug

SEQ ID NO: 3349062 - RNA, 23 nt, Human
uggggcugcaccggcuggccugg

SEQ ID NO: 3349063 - RNA, 15 nt, Human
agggagggagggcuc

SEQ ID NO: 3349064 - RNA, 13 nt, Human
agggagggcucca

SEQ ID NO: 3349065 - RNA, 21 nt, Human
ugggcccccaaauggaaaugg

SEQ ID NO: 3349066 - RNA, 16 nt, Human
ugggcccccaaaugga

SEQ ID NO: 3349067 - RNA, 11 nt, Human
ugggcagagca

SEQ ID NO: 3349068 - RNA, 12 nt, Human
ugggcagagcag

SEQ ID NO: 3349069 - RNA, 18 nt, Human
ugggccaggagccuccug

SEQ ID NO: 3349070 - RNA, 23 nt, Human
ugggcagaaggaagacuucaucc

SEQ ID NO: 3349071 - RNA, 20 nt, Human
ugggaggaucucuugagccu

SEQ ID NO: 3349072 - RNA, 21 nt, Human
ugggaggaucucuugagccug

SEQ ID NO: 3349073 - RNA, 19 nt, Human
ugggaggccaaggugggag

SEQ ID NO: 3349074 - RNA, 22 nt, Human
ugggaggauugcuugagcucag

SEQ ID NO: 3349075 - RNA, 20 nt, Human
ugggaggccaaggugggagg

SEQ ID NO: 3349076 - RNA, 23 nt, Human
agggcucagcggggacagcuccu

SEQ ID NO: 3349077 - RNA, 22 nt, Human
agggcucagcggggacagcucc

SEQ ID NO: 3349078 - RNA, 20 nt, Human
agggcucagcggggacagcu

SEQ ID NO: 3349079 - RNA, 19 nt, Human
agggcucagcggggacagc

SEQ ID NO: 3349080 - RNA, 14 nt, Human
agggagggcuccag

SEQ ID NO: 3349081 - RNA, 15 nt, Human
agggagggcuccaga

SEQ ID NO: 3349082 - RNA, 16 nt, Human
agggagggcuccagac

SEQ ID NO: 3349083 - RNA, 20 nt, Human
aggcccggcuccaggcuccu

SEQ ID NO: 3349084 - RNA, 18 nt, Human
aggcccggcuccaggcuc

SEQ ID NO: 3349085 - RNA, 21 nt, Human
aggcccggcuccaggcuccuu

SEQ ID NO: 3349086 - RNA, 22 nt, Human
agggaaggauacaaaagcaugu

SEQ ID NO: 3349087 - RNA, 19 nt, Human
ugggagagaagagaaugca

SEQ ID NO: 3349088 - RNA, 21 nt, Human
ugggagagaagagaaugcaca

SEQ ID NO: 3349089 - RNA, 18 nt, Human
ugggaggaucucuugagc

SEQ ID NO: 3349090 - RNA, 18 nt, Human
ugggacucaaugcacuga

SEQ ID NO: 3349091 - RNA, 20 nt, Human
ugggacucaaugcacugaca

SEQ ID NO: 3349092 - RNA, 22 nt, Human
ugggagaaccaaaaagaggcua

SEQ ID NO: 3349093 - RNA, 15 nt, Human
ugggacuacaggcac

SEQ ID NO: 3349094 - RNA, 14 nt, Human
ugggacuacaggca

SEQ ID NO: 3349095 - RNA, 17 nt, Human
uguuuucaguguacaug

SEQ ID NO: 3349096 - RNA, 20 nt, Human
uguuuuccaugaguccccug

SEQ ID NO: 3349097 - RNA, 15 nt, Human
uguuuucucuugaga

SEQ ID NO: 3349098 - RNA, 14 nt, Human
aguucugguuccua

SEQ ID NO: 3349099 - RNA, 17 nt, Human
uguuugauucagacagc

SEQ ID NO: 3349100 - RNA, 22 nt, Human
uguuugauucagacagcugccu

SEQ ID NO: 3349101 - RNA, 17 nt, Human
uguuuauugucaaagug

SEQ ID NO: 3349102 - RNA, 19 nt, Human
uguuuauugucaaaguggu

SEQ ID NO: 3349103 - RNA, 21 nt, Human
aguuggguggaugccuggugg

SEQ ID NO: 3349104 - RNA, 17 nt, Human
aguuggguggaugccug

SEQ ID NO: 3349105 - RNA, 16 nt, Human
aguuggcuaggacccc

SEQ ID NO: 3349106 - RNA, 18 nt, Human
aguuggucccccuuccau

SEQ ID NO: 3349107 - RNA, 21 nt, Human
aguuguuugauucagacagcu

SEQ ID NO: 3349108 - RNA, 23 nt, Human
aguuguuugauucagacagcugc

SEQ ID NO: 3349109 - RNA, 20 nt, Human
uuaaauucuugcaaaguauc

SEQ ID NO: 3349110 - RNA, 22 nt, Human
uuaagugcugcauuuaaaagau

SEQ ID NO: 3349111 - RNA, 17 nt, Human
uuaaguacuauguauca

SEQ ID NO: 3349112 - RNA, 16 nt, Human
uuaagaggcagggucu

SEQ ID NO: 3349113 - RNA, 15 nt, Human
uuaagaggcaggguc

SEQ ID NO: 3349114 - RNA, 13 nt, Human
uuaagaggcaggg

SEQ ID NO: 3349115 - RNA, 15 nt, Human
auaaacaagaccacg

SEQ ID NO: 3349116 - RNA, 22 nt, Human
auaaacaagaccacguuucuaa

SEQ ID NO: 3349117 - RNA, 23 nt, Human
auaaacaagaccacguuucuaaa

SEQ ID NO: 3349118 - RNA, 19 nt, Human
uuaauuuuuuugagacaga

SEQ ID NO: 3349119 - RNA, 20 nt, Human
uuaaugaaagacuguacaaa

SEQ ID NO: 3349120 - RNA, 23 nt, Human
uuaaugaaagacuguacaaagua

SEQ ID NO: 3349121 - RNA, 15 nt, Human
uuaauucuuagcuca

SEQ ID NO: 3349122 - RNA, 16 nt, Human
auaacuaaaagguaug

SEQ ID NO: 3349123 - RNA, 14 nt, Human
uuacaggaaguacu

SEQ ID NO: 3349124 - RNA, 18 nt, Human
uuacucagaauucucuag

SEQ ID NO: 3349125 - RNA, 23 nt, Human
uuacucagaauucucuaguuuga

SEQ ID NO: 3349126 - RNA, 19 nt, Human
uuacuauggcccuggccua

SEQ ID NO: 3349127 - RNA, 20 nt, Human
uuacauaagauaaaugugcu

SEQ ID NO: 3349128 - RNA, 14 nt, Human
uuagaaauauaauu

SEQ ID NO: 3349129 - RNA, 12 nt, Human
uuagaaauauaa

SEQ ID NO: 3349130 - RNA, 11 nt, Human
uuagaaauaua

SEQ ID NO: 3349131 - RNA, 11 nt, Human
uuagacagagu

SEQ ID NO: 3349132 - RNA, 18 nt, Human
ugugaaaggaaagaggcu

SEQ ID NO: 3349133 - RNA, 21 nt, Human
ugugaaaggaaagagggaggu

SEQ ID NO: 3349134 - RNA, 15 nt, Human
ugugaaaggaaagag

SEQ ID NO: 3349135 - RNA, 19 nt, Human
ugugaaccaccacacccag

SEQ ID NO: 3349136 - RNA, 20 nt, Human
ugugaaccaccacacccagc

SEQ ID NO: 3349137 - RNA, 17 nt, Human
ugugaaccaccacaccc

SEQ ID NO: 3349138 - RNA, 23 nt, Human
agucuuagauguauauauuuccu

SEQ ID NO: 3349139 - RNA, 14 nt, Human
agucuuuguacaga

SEQ ID NO: 3349140 - RNA, 16 nt, Human
ugugacugaauuucuu

SEQ ID NO: 3349141 - RNA, 15 nt, Human
ugugacugaauuucu

SEQ ID NO: 3349142 - RNA, 19 nt, Human
agugaggcucugcccuugg

SEQ ID NO: 3349143 - RNA, 20 nt, Human
agugaggcucugcccuuggu

SEQ ID NO: 3349144 - RNA, 21 nt, Human
agugaggcucugcccuugguu

SEQ ID NO: 3349145 - RNA, 21 nt, Human
agugaguugauagcacagacc

SEQ ID NO: 3349146 - RNA, 15 nt, Human
agugagucgaggaca

SEQ ID NO: 3349147 - RNA, 15 nt, Human
agugaggcucugccc

SEQ ID NO: 3349148 - RNA, 14 nt, Human
agugaggcucugcc

SEQ ID NO: 3349149 - RNA, 16 nt, Human
agugaggcucugcccu

SEQ ID NO: 3349150 - RNA, 17 nt, Human
agugaggcucugcccuu

SEQ ID NO: 3349151 - RNA, 21 nt, Human
ugugcccccauguaagcaccc

SEQ ID NO: 3349152 - RNA, 21 nt, Human
ugugcugcccugcccaccugg

SEQ ID NO: 3349153 - RNA, 17 nt, Human
uguggaguucaucuuga

SEQ ID NO: 3349154 - RNA, 21 nt, Human
uguggaguucaucuugaauug

SEQ ID NO: 3349155 - RNA, 16 nt, Human
ugugccaugugccagg

SEQ ID NO: 3349156 - RNA, 12 nt, Human
ugugccaugugc

SEQ ID NO: 3349157 - RNA, 20 nt, Human
ugugccagguuuuuggucug

SEQ ID NO: 3349158 - RNA, 23 nt, Human
ugugcauuuggugguuucagaaa

SEQ ID NO: 3349159 - RNA, 19 nt, Human
ugugauggggcccugccuc

SEQ ID NO: 3349160 - RNA, 20 nt, Human
ugugauggggcccugccucc

SEQ ID NO: 3349161 - RNA, 18 nt, Human
ugugauggggcccugccu

SEQ ID NO: 3349162 - RNA, 18 nt, Human
uguugcccaggcaggucu

SEQ ID NO: 3349163 - RNA, 17 nt, Human
uguugcccaggcagguc

SEQ ID NO: 3349164 - RNA, 16 nt, Human
uguugcccaggcaggu

SEQ ID NO: 3349165 - RNA, 15 nt, Human
uguugcccaggcagg

SEQ ID NO: 3349166 - RNA, 12 nt, Human
uguugcccaggc

SEQ ID NO: 3349167 - RNA, 13 nt, Human
uguugcccaggca

SEQ ID NO: 3349168 - RNA, 16 nt, Human
uguucugggacacagu

SEQ ID NO: 3349169 - RNA, 15 nt, Human
uguucugggacacag

SEQ ID NO: 3349170 - RNA, 20 nt, Human
uguuccacaaguuaaauaaa

SEQ ID NO: 3349171 - RNA, 19 nt, Human
uguuccacaaguuaaauaa

SEQ ID NO: 3349172 - RNA, 20 nt, Human
agugugucuuagugugugca

SEQ ID NO: 3349173 - RNA, 17 nt, Human
aguggugcgaucugggu

SEQ ID NO: 3349174 - RNA, 16 nt, Human
aguggugcgaucuggg

SEQ ID NO: 3349175 - RNA, 19 nt, Human
aguggugguuuucuguucu

SEQ ID NO: 3349176 - RNA, 20 nt, Human
aguggugguuuucuguucuu

SEQ ID NO: 3349177 - RNA, 21 nt, Human
aguggugguuuucuguucuuu

SEQ ID NO: 3349178 - RNA, 23 nt, Human
aguggugguuuucuguucuuucu

SEQ ID NO: 3349179 - RNA, 17 nt, Human
aguggugguuuucuguu

SEQ ID NO: 3349180 - RNA, 18 nt, Human
aguggugguuuucuguuc

SEQ ID NO: 3349181 - RNA, 21 nt, Human
agugguggugaacagaacaaa

SEQ ID NO: 3349182 - RNA, 16 nt, Human
agugugguguuuccug

SEQ ID NO: 3349183 - RNA, 19 nt, Human
agugugguguuuccuggca

SEQ ID NO: 3349184 - RNA, 17 nt, Human
agugugguguuuccugg

SEQ ID NO: 3349185 - RNA, 21 nt, Human
ugugucucuugguccugcugc

SEQ ID NO: 3349186 - RNA, 20 nt, Human
ugugucuugcaauggcagcc

SEQ ID NO: 3349187 - RNA, 21 nt, Human
ugugucuugcaauggcagccu

SEQ ID NO: 3349188 - RNA, 16 nt, Human
ugugucucuugguccu

SEQ ID NO: 3349189 - RNA, 17 nt, Human
ugugucucuugguccug

SEQ ID NO: 3349190 - RNA, 20 nt, Human
ugugucucuugguccugcug

SEQ ID NO: 3349191 - RNA, 19 nt, Human
uguguguuuauugucaaag

SEQ ID NO: 3349192 - RNA, 23 nt, Human
uguguguuuauugucaaaguggu

SEQ ID NO: 3349193 - RNA, 11 nt, Human
uguguguuuau

SEQ ID NO: 3349194 - RNA, 22 nt, Human
agugaguugauagcacagaccc

SEQ ID NO: 3349195 - RNA, 23 nt, Human
agugaguugauagcacagacccu

SEQ ID NO: 3349196 - RNA, 12 nt, Human
agugcugcauuu

SEQ ID NO: 3349197 - RNA, 13 nt, Human
agugcugcauuua

SEQ ID NO: 3349198 - RNA, 21 nt, Human
agugcugggauuacaggugug

SEQ ID NO: 3349199 - RNA, 16 nt, Human
agugcugcauuuaaaa

SEQ ID NO: 3349200 - RNA, 17 nt, Human
agugcugcauuuaaaag

SEQ ID NO: 3349201 - RNA, 19 nt, Human
agugcugcauuuaaaagau

SEQ ID NO: 3349202 - RNA, 20 nt, Human
agugcugggauuacaggugu

SEQ ID NO: 3349203 - RNA, 14 nt, Human
ugugguguuuccug

SEQ ID NO: 3349204 - RNA, 16 nt, Human
ugugguguuuccuggc

SEQ ID NO: 3349205 - RNA, 13 nt, Human
uguggucccaccc

SEQ ID NO: 3349206 - RNA, 15 nt, Human
uguggucccacccca

SEQ ID NO: 3349207 - RNA, 21 nt, Human
uguggguuucuaaagcugcca

SEQ ID NO: 3349208 - RNA, 23 nt, Human
uguggguuucuaaagcugccagc

SEQ ID NO: 3349209 - RNA, 22 nt, Human
accacuuuuguucuugguuugu

SEQ ID NO: 3349210 - RNA, 16 nt, Human
accagagcccaccuug

SEQ ID NO: 3349211 - RNA, 14 nt, Human
accagagcccaccu

SEQ ID NO: 3349212 - RNA, 12 nt, Human
accagagcccac

SEQ ID NO: 3349213 - RNA, 11 nt, Human
accagacaggu

SEQ ID NO: 3349214 - RNA, 14 nt, Human
accagacaccuuga

SEQ ID NO: 3349215 - RNA, 15 nt, Human
accacuuuuguucuu

SEQ ID NO: 3349216 - RNA, 16 nt, Human
accacuuuuguucuug

SEQ ID NO: 3349217 - RNA, 21 nt, Human
accacuuuuguucuugguuug

SEQ ID NO: 3349218 - RNA, 15 nt, Human
accacuucagcugac

SEQ ID NO: 3349219 - RNA, 17 nt, Human
accacugcacuccagcc

SEQ ID NO: 3349220 - RNA, 20 nt, Human
accacugcacuccagccugg

SEQ ID NO: 3349221 - RNA, 17 nt, Human
ucaccccggccaccugc

SEQ ID NO: 3349222 - RNA, 18 nt, Human
ucaccccggccaccugcg

SEQ ID NO: 3349223 - RNA, 21 nt, Human
accacugcacuccagccuggg

SEQ ID NO: 3349224 - RNA, 15 nt, Human
ucaccucucccuugg

SEQ ID NO: 3349225 - RNA, 13 nt, Human
ucaccugccccuc

SEQ ID NO: 3349226 - RNA, 15 nt, Human
ucaccugccccucaa

SEQ ID NO: 3349227 - RNA, 19 nt, Human
ucacuauguugcccaggca

SEQ ID NO: 3349228 - RNA, 17 nt, Human
ucacuauguugcccagg

SEQ ID NO: 3349229 - RNA, 18 nt, Human
ucacuauguugcccaggc

SEQ ID NO: 3349230 - RNA, 17 nt, Human
accaacauacucccauc

SEQ ID NO: 3349231 - RNA, 19 nt, Human
accaacauacucccaucug

SEQ ID NO: 3349232 - RNA, 21 nt, Human
accaacauacucccaucugug

SEQ ID NO: 3349233 - RNA, 22 nt, Human
accaacauacucccaucuguga

SEQ ID NO: 3349234 - RNA, 23 nt, Human
ucaagugaaaaaggaggaagaga

SEQ ID NO: 3349235 - RNA, 15 nt, Human
ucaagugaaaaagga

SEQ ID NO: 3349236 - RNA, 15 nt, Human
accaauguucucucu

SEQ ID NO: 3349237 - RNA, 15 nt, Human
ucaccccggccaccu

SEQ ID NO: 3349238 - RNA, 14 nt, Human
ucaccccagcccca

SEQ ID NO: 3349239 - RNA, 20 nt, Human
ucaccccagccccaaaacuc

SEQ ID NO: 3349240 - RNA, 13 nt, Human
ucaccccagcccc

SEQ ID NO: 3349241 - RNA, 15 nt, Human
ucacauaucugucau

SEQ ID NO: 3349242 - RNA, 12 nt, Human
ucacauaucugu

SEQ ID NO: 3349243 - RNA, 15 nt, Human
ucacaguucucuccu

SEQ ID NO: 3349244 - RNA, 24 nt, Human
acccagcgagcccugguggcagug

SEQ ID NO: 3349245 - RNA, 23 nt, Human
ucagccguguaaccauggaccca

SEQ ID NO: 3349246 - RNA, 23 nt, Human
acccagcgagcccugguggcagu

SEQ ID NO: 3349247 - RNA, 19 nt, Human
acccagcgagcccuggugg

SEQ ID NO: 3349248 - RNA, 17 nt, Human
acccagcgagcccuggu

SEQ ID NO: 3349249 - RNA, 22 nt, Human
ucagccaagaauucuuaaauau

SEQ ID NO: 3349250 - RNA, 12 nt, Human
acccccacccaa

SEQ ID NO: 3349251 - RNA, 15 nt, Human
accccuucgcuccug

SEQ ID NO: 3349252 - RNA, 14 nt, Human
accccuucgcuccu

SEQ ID NO: 3349253 - RNA, 14 nt, Human
ucagcggggacagc

SEQ ID NO: 3349254 - RNA, 19 nt, Human
ucagaaguuucugccgcag

SEQ ID NO: 3349255 - RNA, 22 nt, Human
ucagaaguuucugccgcagccc

SEQ ID NO: 3349256 - RNA, 14 nt, Human
ucagaagacacuga

SEQ ID NO: 3349257 - RNA, 18 nt, Human
ucagagccugcaguuauu

SEQ ID NO: 3349258 - RNA, 15 nt, Human
ucagagccugcaguu

SEQ ID NO: 3349259 - RNA, 14 nt, Human
ucagagccugcagu

SEQ ID NO: 3349260 - RNA, 13 nt, Human
ucagagccugcag

SEQ ID NO: 3349261 - RNA, 16 nt, Human
ucagagagggugggag

SEQ ID NO: 3349262 - RNA, 21 nt, Human
ucagagagggugggagugggc

SEQ ID NO: 3349263 - RNA, 12 nt, Human
ucagagccugca

SEQ ID NO: 3349264 - RNA, 17 nt, Human
ucagagacuccugcagg

SEQ ID NO: 3349265 - RNA, 20 nt, Human
ucagagacuccugcaggcag

SEQ ID NO: 3349266 - RNA, 21 nt, Human
ucagagacuccugcaggcagc

SEQ ID NO: 3349267 - RNA, 16 nt, Human
ucagagacuccugcag

SEQ ID NO: 3349268 - RNA, 19 nt, Human
ucagaaucucaaauaacua

SEQ ID NO: 3349269 - RNA, 18 nt, Human
ucagaaucucaaauaacu

SEQ ID NO: 3349270 - RNA, 22 nt, Human
accauggucggaaaacaugcua

SEQ ID NO: 3349271 - RNA, 23 nt, Human
ucacucuuauugcccacgcugga

SEQ ID NO: 3349272 - RNA, 21 nt, Human
ucacucuuauugcccacgcug

SEQ ID NO: 3349273 - RNA, 15 nt, Human
acccacugcucuggu

SEQ ID NO: 3349274 - RNA, 14 nt, Human
acccacugcucugg

SEQ ID NO: 3349275 - RNA, 13 nt, Human
acccacugcucug

SEQ ID NO: 3349276 - RNA, 11 nt, Human
acccacugcuc

SEQ ID NO: 3349277 - RNA, 10 nt, Human
acccacugcu

SEQ ID NO: 3349278 - RNA, 21 nt, Human
acauguccaagaagcccagga

SEQ ID NO: 3349279 - RNA, 19 nt, Human
acauguccaagaagcccag

SEQ ID NO: 3349280 - RNA, 15 nt, Human
ucaaauuucuaaauc

SEQ ID NO: 3349281 - RNA, 16 nt, Human
ucaaauuucuaaaucu

SEQ ID NO: 3349282 - RNA, 15 nt, Human
acauucuguuaauca

SEQ ID NO: 3349283 - RNA, 14 nt, Human
ucaaauuucuaaau

SEQ ID NO: 3349284 - RNA, 12 nt, Human
acauucuguuaa

SEQ ID NO: 3349285 - RNA, 17 nt, Human
ucaaauuucuaaaucuc

SEQ ID NO: 3349286 - RNA, 16 nt, Human
ucaacagguuuuccug

SEQ ID NO: 3349287 - RNA, 16 nt, Human
ucaaguauuauaccuu

SEQ ID NO: 3349288 - RNA, 21 nt, Human
ucaaguauuauaccuuuuuua

SEQ ID NO: 3349289 - RNA, 23 nt, Human
ucaaguauuauaccuuuuuuaga

SEQ ID NO: 3349290 - RNA, 15 nt, Human
ucaaguauuauaccu

SEQ ID NO: 3349291 - RNA, 11 nt, Human
ucaaguauuau

SEQ ID NO: 3349292 - RNA, 20 nt, Human
ucaaggcuuauauucaacca

SEQ ID NO: 3349293 - RNA, 18 nt, Human
ucaaggcuuauauucaac

SEQ ID NO: 3349294 - RNA, 17 nt, Human
ucaaggcuuauauucaa

SEQ ID NO: 3349295 - RNA, 18 nt, Human
ucaaauaacuaaaaggua

SEQ ID NO: 3349296 - RNA, 13 nt, Human
acaugagcaucag

SEQ ID NO: 3349297 - RNA, 22 nt, Human
acaugcuacacacugcauguuu

SEQ ID NO: 3349298 - RNA, 17 nt, Human
acaugaucuucuuuaua

SEQ ID NO: 3349299 - RNA, 15 nt, Human
acaugaucuucuuua

SEQ ID NO: 3349300 - RNA, 17 nt, Human
acaugagcaucaggcca

SEQ ID NO: 3349301 - RNA, 18 nt, Human
acaugagcaucaggccag

SEQ ID NO: 3349302 - RNA, 19 nt, Human
acaugagcaucaggccagg

SEQ ID NO: 3349303 - RNA, 13 nt, Human
acauacuaaccag

SEQ ID NO: 3349304 - RNA, 21 nt, Human
acauacuaaccagcagaaaug

SEQ ID NO: 3349305 - RNA, 22 nt, Human
acauacuaaccagcagaaaugc

SEQ ID NO: 3349306 - RNA, 13 nt, Human
acauacucccauc

SEQ ID NO: 3349307 - RNA, 14 nt, Human
acauacucugcuua

SEQ ID NO: 3349308 - RNA, 17 nt, Human
acauacucccaucugug

SEQ ID NO: 3349309 - RNA, 16 nt, Human
acaguuuguuaguaug

SEQ ID NO: 3349310 - RNA, 20 nt, Human
acaguuuguuaguaugaggc

SEQ ID NO: 3349311 - RNA, 15 nt, Human
acaguugaaaaacag

SEQ ID NO: 3349312 - RNA, 16 nt, Human
acaguugaaaaacagc

SEQ ID NO: 3349313 - RNA, 20 nt, Human
acaguugaaaaacagcugag

SEQ ID NO: 3349314 - RNA, 22 nt, Human
uauuucccucaccuuucccauc

SEQ ID NO: 3349315 - RNA, 23 nt, Human
uauuuccuauauuguuuucagug

SEQ ID NO: 3349316 - RNA, 18 nt, Human
acauauugauuuccguua

SEQ ID NO: 3349317 - RNA, 22 nt, Human
acauauugauuuccguuaaaau

SEQ ID NO: 3349318 - RNA, 23 nt, Human
acauauugauuuccguuaaaaua

SEQ ID NO: 3349319 - RNA, 14 nt, Human
acauauugauuucc

SEQ ID NO: 3349320 - RNA, 16 nt, Human
acauauugauuuccgu

SEQ ID NO: 3349321 - RNA, 16 nt, Human
acaugaaaacacauuu

SEQ ID NO: 3349322 - RNA, 18 nt, Human
acaugaaaacacauuuuu

SEQ ID NO: 3349323 - RNA, 19 nt, Human
acaugaaaacacauuuuuc

SEQ ID NO: 3349324 - RNA, 19 nt, Human
acaucuugcucugcugaca

SEQ ID NO: 3349325 - RNA, 18 nt, Human
acaucuugcucugcugac

SEQ ID NO: 3349326 - RNA, 17 nt, Human
acaugaaaacacauuuu

SEQ ID NO: 3349327 - RNA, 21 nt, Human
acaucuugcucugcugacaga

SEQ ID NO: 3349328 - RNA, 17 nt, Human
acaucuugcucugcuga

SEQ ID NO: 3349329 - RNA, 13 nt, Human
acaucuugcucug

SEQ ID NO: 3349330 - RNA, 18 nt, Human
acaucaacaucuugguca

SEQ ID NO: 3349331 - RNA, 16 nt, Human
acaucaacaucuuggu

SEQ ID NO: 3349332 - RNA, 14 nt, Human
accugaggcccuuc

SEQ ID NO: 3349333 - RNA, 21 nt, Human
accucuugagccuugaacuuu

SEQ ID NO: 3349334 - RNA, 15 nt, Human
accugaggcccuucu

SEQ ID NO: 3349335 - RNA, 16 nt, Human
accugaggcccuucuc

SEQ ID NO: 3349336 - RNA, 20 nt, Human
accugaggcccuucucucca

SEQ ID NO: 3349337 - RNA, 21 nt, Human
accugaggcccuucucuccag

SEQ ID NO: 3349338 - RNA, 16 nt, Human
accugaggggccucuu

SEQ ID NO: 3349339 - RNA, 15 nt, Human
accugauugugucuc

SEQ ID NO: 3349340 - RNA, 17 nt, Human
accugauugugucucuu

SEQ ID NO: 3349341 - RNA, 18 nt, Human
accugauugugucucuug

SEQ ID NO: 3349342 - RNA, 14 nt, Human
accugauugugucu

SEQ ID NO: 3349343 - RNA, 19 nt, Human
accucggugccuuccucuu

SEQ ID NO: 3349344 - RNA, 17 nt, Human
accucggugccuuccuc

SEQ ID NO: 3349345 - RNA, 13 nt, Human
accuccugggcua

SEQ ID NO: 3349346 - RNA, 22 nt, Human
ucauugaaaucuuuuugcuuug

SEQ ID NO: 3349347 - RNA, 12 nt, Human
ucauugaccuga

SEQ ID NO: 3349348 - RNA, 14 nt, Human
ucauugaccugagg

SEQ ID NO: 3349349 - RNA, 15 nt, Human
ucauugaccugaggc

SEQ ID NO: 3349350 - RNA, 12 nt, Human
ucauugaaaucu

SEQ ID NO: 3349351 - RNA, 13 nt, Human
ucauugaaaucuu

SEQ ID NO: 3349352 - RNA, 12 nt, Human
ucauucuucugu

SEQ ID NO: 3349353 - RNA, 15 nt, Human
ucauccuaagcuauu

SEQ ID NO: 3349354 - RNA, 23 nt, Human
accuccugccucgaacuggcugc

SEQ ID NO: 3349355 - RNA, 12 nt, Human
accuccugccuc

SEQ ID NO: 3349356 - RNA, 13 nt, Human
accuccugccucg

SEQ ID NO: 3349357 - RNA, 14 nt, Human
ucauccuucuggaa

SEQ ID NO: 3349358 - RNA, 18 nt, Human
ucauccucauacccaccc

SEQ ID NO: 3349359 - RNA, 13 nt, Human
ucauccuccucag

SEQ ID NO: 3349360 - RNA, 19 nt, Human
ucauccuccucagaucuuc

SEQ ID NO: 3349361 - RNA, 22 nt, Human
ucauccuucuggaauaaggaga

SEQ ID NO: 3349362 - RNA, 13 nt, Human
ucaggaagcucag

SEQ ID NO: 3349363 - RNA, 14 nt, Human
ucaggaagcucagg

SEQ ID NO: 3349364 - RNA, 15 nt, Human
ucaggaagcucaggg

SEQ ID NO: 3349365 - RNA, 12 nt, Human
ucaggaagcuca

SEQ ID NO: 3349366 - RNA, 16 nt, Human
accuggccucugcacu

SEQ ID NO: 3349367 - RNA, 17 nt, Human
accuggccucugcacuc

SEQ ID NO: 3349368 - RNA, 14 nt, Human
accuggccucugca

SEQ ID NO: 3349369 - RNA, 15 nt, Human
uccacccaggagccc

SEQ ID NO: 3349370 - RNA, 14 nt, Human
uccacccaggagcc

SEQ ID NO: 3349371 - RNA, 12 nt, Human
uccacccaggag

SEQ ID NO: 3349372 - RNA, 19 nt, Human
uccacccaccucagccucc

SEQ ID NO: 3349373 - RNA, 18 nt, Human
uccacccaccucagccuc

SEQ ID NO: 3349374 - RNA, 17 nt, Human
uccacccaccucagccu

SEQ ID NO: 3349375 - RNA, 19 nt, Human
accuuagacagucccugcc

SEQ ID NO: 3349376 - RNA, 20 nt, Human
accuuagacagucccugcca

SEQ ID NO: 3349377 - RNA, 18 nt, Human
accuuagacagucccugc

SEQ ID NO: 3349378 - RNA, 19 nt, Human
accuguuucugcagccacu

SEQ ID NO: 3349379 - RNA, 23 nt, Human
accuggccucugcacuccccugc

SEQ ID NO: 3349380 - RNA, 18 nt, Human
accuggccucugcacucc

SEQ ID NO: 3349381 - RNA, 20 nt, Human
accuggccucugcacucccc

SEQ ID NO: 3349382 - RNA, 21 nt, Human
accuggguaacuagggaagau

SEQ ID NO: 3349383 - RNA, 18 nt, Human
uccaaggguacuaaggaa

SEQ ID NO: 3349384 - RNA, 21 nt, Human
uccaagcuggucccacucagu

SEQ ID NO: 3349385 - RNA, 20 nt, Human
uccaagcuggucccacucag

SEQ ID NO: 3349386 - RNA, 16 nt, Human
uccaagcuggucccac

SEQ ID NO: 3349387 - RNA, 12 nt, Human
accugccaggaa

SEQ ID NO: 3349388 - RNA, 14 nt, Human
accugccaggaagc

SEQ ID NO: 3349389 - RNA, 14 nt, Human
uccaacccucauca

SEQ ID NO: 3349390 - RNA, 16 nt, Human
uccaacccucaucacc

SEQ ID NO: 3349391 - RNA, 17 nt, Human
uccaacccucaucacca

SEQ ID NO: 3349392 - RNA, 23 nt, Human
uccaacccucaucaccaacgucu

SEQ ID NO: 3349393 - RNA, 14 nt, Human
uccaggcuguaucc

SEQ ID NO: 3349394 - RNA, 12 nt, Human
uccagccccugg

SEQ ID NO: 3349395 - RNA, 13 nt, Human
uccagccccugga

SEQ ID NO: 3349396 - RNA, 19 nt, Human
acgccagauucuuuccuga

SEQ ID NO: 3349397 - RNA, 17 nt, Human
acgccagauucuuuccu

SEQ ID NO: 3349398 - RNA, 16 nt, Human
acgagcaggcuucuuc

SEQ ID NO: 3349399 - RNA, 19 nt, Human
accuuuuuuauacauaaac

SEQ ID NO: 3349400 - RNA, 20 nt, Human
accuuuuuuauacauaaaca

SEQ ID NO: 3349401 - RNA, 21 nt, Human
uccaggcuguaucccaugagc

SEQ ID NO: 3349402 - RNA, 21 nt, Human
accuuuuuuauacauaaacaa

SEQ ID NO: 3349403 - RNA, 14 nt, Human
uccagacccggcug

SEQ ID NO: 3349404 - RNA, 20 nt, Human
uccagaauuucccaaagcag

SEQ ID NO: 3349405 - RNA, 22 nt, Human
uccagaauuucccaaagcagug

SEQ ID NO: 3349406 - RNA, 16 nt, Human
uccagaauuucccaaa

SEQ ID NO: 3349407 - RNA, 18 nt, Human
uccagacccggcugcgug

SEQ ID NO: 3349408 - RNA, 15 nt, Human
uccagacccggcugc

SEQ ID NO: 3349409 - RNA, 19 nt, Human
uccagacccggcugcgugg

SEQ ID NO: 3349410 - RNA, 17 nt, Human
accuuuugagugccuua

SEQ ID NO: 3349411 - RNA, 20 nt, Human
accuuuugagugccuuacac

SEQ ID NO: 3349412 - RNA, 14 nt, Human
accuuuugagugcc

SEQ ID NO: 3349413 - RNA, 17 nt, Human
accuuagacagucccug

SEQ ID NO: 3349414 - RNA, 17 nt, Human
acuacucccccaggugg

SEQ ID NO: 3349415 - RNA, 21 nt, Human
acucacauuuauucugcucac

SEQ ID NO: 3349416 - RNA, 12 nt, Human
acucaccccagc

SEQ ID NO: 3349417 - RNA, 17 nt, Human
ucccgaguagcugggac

SEQ ID NO: 3349418 - RNA, 16 nt, Human
ucccgaguagcuggga

SEQ ID NO: 3349419 - RNA, 18 nt, Human
ucccgaguagcugggacu

SEQ ID NO: 3349420 - RNA, 15 nt, Human
ucccgaguagcuggg

SEQ ID NO: 3349421 - RNA, 18 nt, Human
ucccgaauagcugggacu

SEQ ID NO: 3349422 - RNA, 20 nt, Human
ucccgaauagcugggacuac

SEQ ID NO: 3349423 - RNA, 11 nt, Human
ucccugaaggc

SEQ ID NO: 3349424 - RNA, 15 nt, Human
ucccugaaggccccg

SEQ ID NO: 3349425 - RNA, 14 nt, Human
ucccucuuucccuc

SEQ ID NO: 3349426 - RNA, 20 nt, Human
ucccucuuucccucccuucc

SEQ ID NO: 3349427 - RNA, 18 nt, Human
ucccucuuucccucccuu

SEQ ID NO: 3349428 - RNA, 16 nt, Human
ucccugaaggccccgc

SEQ ID NO: 3349429 - RNA, 12 nt, Human
ucccugucccag

SEQ ID NO: 3349430 - RNA, 15 nt, Human
ucccugguggcagcu

SEQ ID NO: 3349431 - RNA, 17 nt, Human
uccggucccugucccag

SEQ ID NO: 3349432 - RNA, 16 nt, Human
uccuagaaauucccca

SEQ ID NO: 3349433 - RNA, 12 nt, Human
ucccuuuuccuu

SEQ ID NO: 3349434 - RNA, 12 nt, Human
acuccagccugg

SEQ ID NO: 3349435 - RNA, 23 nt, Human
acuccagaauuucccaaagcagu

SEQ ID NO: 3349436 - RNA, 13 nt, Human
acuccagccuggg

SEQ ID NO: 3349437 - RNA, 18 nt, Human
acuccugcaggcagccag

SEQ ID NO: 3349438 - RNA, 19 nt, Human
acuccugcaggcagccagg

SEQ ID NO: 3349439 - RNA, 17 nt, Human
acuccugcaggcagcca

SEQ ID NO: 3349440 - RNA, 15 nt, Human
acuccagaauuuccc

SEQ ID NO: 3349441 - RNA, 17 nt, Human
acuccagaauuucccaa

SEQ ID NO: 3349442 - RNA, 14 nt, Human
acucauugaccuga

SEQ ID NO: 3349443 - RNA, 15 nt, Human
acucauucuucugua

SEQ ID NO: 3349444 - RNA, 13 nt, Human
acuacaguuuguu

SEQ ID NO: 3349445 - RNA, 14 nt, Human
acuacaguuuguua

SEQ ID NO: 3349446 - RNA, 17 nt, Human
acuacaguccucccauc

SEQ ID NO: 3349447 - RNA, 15 nt, Human
acuacaggcacccac

SEQ ID NO: 3349448 - RNA, 11 nt, Human
acuacaggcac

SEQ ID NO: 3349449 - RNA, 14 nt, Human
acuacauucuguua

SEQ ID NO: 3349450 - RNA, 11 nt, Human
acuacauucug

SEQ ID NO: 3349451 - RNA, 12 nt, Human
acuacauucugu

SEQ ID NO: 3349452 - RNA, 13 nt, Human
acuacauucuguu

SEQ ID NO: 3349453 - RNA, 17 nt, Human
ucccagcugugcucugg

SEQ ID NO: 3349454 - RNA, 18 nt, Human
uccccaccgcagacagga

SEQ ID NO: 3349455 - RNA, 21 nt, Human
uccccaccgcagacaggacca

SEQ ID NO: 3349456 - RNA, 17 nt, Human
uccccaccgcagacagg

SEQ ID NO: 3349457 - RNA, 16 nt, Human
uccccaccgcagacag

SEQ ID NO: 3349458 - RNA, 15 nt, Human
acuacauucuguuaa

SEQ ID NO: 3349459 - RNA, 15 nt, Human
ucccaucacccgcua

SEQ ID NO: 3349460 - RNA, 16 nt, Human
ucccauaugccugggc

SEQ ID NO: 3349461 - RNA, 22 nt, Human
ucccauaugccugggcagaagg

SEQ ID NO: 3349462 - RNA, 14 nt, Human
acguacacauuuua

SEQ ID NO: 3349463 - RNA, 15 nt, Human
acgguuuuacugcag

SEQ ID NO: 3349464 - RNA, 23 nt, Human
acguggcugcuucaaggauccug

SEQ ID NO: 3349465 - RNA, 15 nt, Human
ucccaccccacacac

SEQ ID NO: 3349466 - RNA, 20 nt, Human
ucccaccccacacacgccag

SEQ ID NO: 3349467 - RNA, 16 nt, Human
ucccacaaaggagagc

SEQ ID NO: 3349468 - RNA, 20 nt, Human
acgggaggguaaggcugugg

SEQ ID NO: 3349469 - RNA, 14 nt, Human
ucccaccccacaca

SEQ ID NO: 3349470 - RNA, 21 nt, Human
ucccaaagcagugcaugcugu

SEQ ID NO: 3349471 - RNA, 17 nt, Human
ucccaaagcagugcaug

SEQ ID NO: 3349472 - RNA, 18 nt, Human
ucccaaagcagugcaugc

SEQ ID NO: 3349473 - RNA, 13 nt, Human
ucccaaagugcug

SEQ ID NO: 3349474 - RNA, 18 nt, Human
ucccaaacccuucagugc

SEQ ID NO: 3349475 - RNA, 16 nt, Human
ucccaaagcagugcau

SEQ ID NO: 3349476 - RNA, 22 nt, Human
acgccagauucuuuccugaggc

SEQ ID NO: 3349477 - RNA, 23 nt, Human
acgccagauucuuuccugaggcu

SEQ ID NO: 3349478 - RNA, 21 nt, Human
ucugaacuuggcgcugccccu

SEQ ID NO: 3349479 - RNA, 19 nt, Human
agaaauaucugaaaaugua

SEQ ID NO: 3349480 - RNA, 14 nt, Human
agaaauauaauuga

SEQ ID NO: 3349481 - RNA, 20 nt, Human
agaaauaucugaaaauguau

SEQ ID NO: 3349482 - RNA, 18 nt, Human
ucugcagcaauaaagcag

SEQ ID NO: 3349483 - RNA, 20 nt, Human
ucugcacuccccugcugggu

SEQ ID NO: 3349484 - RNA, 18 nt, Human
ucugcacuccccugcugg

SEQ ID NO: 3349485 - RNA, 19 nt, Human
ucugcacuccccugcuggg

SEQ ID NO: 3349486 - RNA, 17 nt, Human
ucugcacuccccugcug

SEQ ID NO: 3349487 - RNA, 23 nt, Human
ucugagacucgcgacaaugcaaa

SEQ ID NO: 3349488 - RNA, 22 nt, Human
ucugagacucgcgacaaugcaa

SEQ ID NO: 3349489 - RNA, 17 nt, Human
agaaaaaggaugcacag

SEQ ID NO: 3349490 - RNA, 20 nt, Human
ucucuuuaaugucacaggca

SEQ ID NO: 3349491 - RNA, 13 nt, Human
agaaaaagaaaaa

SEQ ID NO: 3349492 - RNA, 14 nt, Human
ucucuugauucaua

SEQ ID NO: 3349493 - RNA, 16 nt, Human
ucucuugauucauaau

SEQ ID NO: 3349494 - RNA, 18 nt, Human
ucucuugagccugggagg

SEQ ID NO: 3349495 - RNA, 17 nt, Human
ucucuugagccugggag

SEQ ID NO: 3349496 - RNA, 18 nt, Human
acuuugaccucugcagca

SEQ ID NO: 3349497 - RNA, 15 nt, Human
acuuugaccucugca

SEQ ID NO: 3349498 - RNA, 16 nt, Human
acuuugaccucugcag

SEQ ID NO: 3349499 - RNA, 13 nt, Human
ucucucacuccuu

SEQ ID NO: 3349500 - RNA, 15 nt, Human
ucucucacuccuuga

SEQ ID NO: 3349501 - RNA, 21 nt, Human
ucucucaggccaaacucaccu

SEQ ID NO: 3349502 - RNA, 17 nt, Human
ucucuccagccccugga

SEQ ID NO: 3349503 - RNA, 16 nt, Human
ucucuccagccccugg

SEQ ID NO: 3349504 - RNA, 18 nt, Human
ucucuccagccccuggau

SEQ ID NO: 3349505 - RNA, 19 nt, Human
ucucuccagccccuggaug

SEQ ID NO: 3349506 - RNA, 16 nt, Human
ucucuccuguaccucu

SEQ ID NO: 3349507 - RNA, 14 nt, Human
ucucuccuguaccu

SEQ ID NO: 3349508 - RNA, 11 nt, Human
ucucugcccuc

SEQ ID NO: 3349509 - RNA, 15 nt, Human
ucucugcccuccaag

SEQ ID NO: 3349510 - RNA, 16 nt, Human
ucucugcccuccaaga

SEQ ID NO: 3349511 - RNA, 17 nt, Human
ucucugcccuccaagac

SEQ ID NO: 3349512 - RNA, 16 nt, Human
ucuccauguuugaugu

SEQ ID NO: 3349513 - RNA, 14 nt, Human
acuuugaccucugc

SEQ ID NO: 3349514 - RNA, 16 nt, Human
acuuucuagccagagg

SEQ ID NO: 3349515 - RNA, 17 nt, Human
acuuucuagccagagga

SEQ ID NO: 3349516 - RNA, 16 nt, Human
acuuuaaaaggagcca

SEQ ID NO: 3349517 - RNA, 21 nt, Human
ucuccuccuuuucacaguucu

SEQ ID NO: 3349518 - RNA, 16 nt, Human
ucuccaggcuguaucc

SEQ ID NO: 3349519 - RNA, 17 nt, Human
ucuccaaaauaaaacuu

SEQ ID NO: 3349520 - RNA, 19 nt, Human
ucuccaaaauaaaacuuuu

SEQ ID NO: 3349521 - RNA, 22 nt, Human
ucuccaaaauaaaacuuuuuaa

SEQ ID NO: 3349522 - RNA, 13 nt, Human
ucuccaaaauaaa

SEQ ID NO: 3349523 - RNA, 11 nt, Human
ucuccaggcug

SEQ ID NO: 3349524 - RNA, 15 nt, Human
acuuguggacacagc

SEQ ID NO: 3349525 - RNA, 12 nt, Human
ucucagggccug

SEQ ID NO: 3349526 - RNA, 13 nt, Human
ucucagggccugg

SEQ ID NO: 3349527 - RNA, 14 nt, Human
ucucagggccuggu

SEQ ID NO: 3349528 - RNA, 15 nt, Human
ucucagggccugguc

SEQ ID NO: 3349529 - RNA, 19 nt, Human
ucucagggccuggucguuu

SEQ ID NO: 3349530 - RNA, 11 nt, Human
ucucacuccuu

SEQ ID NO: 3349531 - RNA, 11 nt, Human
acuucagcuga

SEQ ID NO: 3349532 - RNA, 16 nt, Human
acuucagcugacuuuu

SEQ ID NO: 3349533 - RNA, 23 nt, Human
ucucacacaugagcaucaggcca

SEQ ID NO: 3349534 - RNA, 12 nt, Human
ucucacucuguc

SEQ ID NO: 3349535 - RNA, 13 nt, Human
ucucacuccuuga

SEQ ID NO: 3349536 - RNA, 22 nt, Human
acuucgggaggucgaggcagga

SEQ ID NO: 3349537 - RNA, 14 nt, Human
acuucuccacccug

SEQ ID NO: 3349538 - RNA, 16 nt, Human
acuuguggacacagcu

SEQ ID NO: 3349539 - RNA, 17 nt, Human
acuuguggacacagcuc

SEQ ID NO: 3349540 - RNA, 19 nt, Human
acuugagcccagagugaac

SEQ ID NO: 3349541 - RNA, 19 nt, Human
acuugagaauuacccuuuu

SEQ ID NO: 3349542 - RNA, 16 nt, Human
acuucuccacccugcu

SEQ ID NO: 3349543 - RNA, 15 nt, Human
acuucuccacccugc

SEQ ID NO: 3349544 - RNA, 17 nt, Human
acuuaaauaaugugaaa

SEQ ID NO: 3349545 - RNA, 18 nt, Human
acuuaaauaaugugaaac

SEQ ID NO: 3349546 - RNA, 16 nt, Human
acuuaaauaaugugaa

SEQ ID NO: 3349547 - RNA, 15 nt, Human
acuuaaauaauguga

SEQ ID NO: 3349548 - RNA, 14 nt, Human
acuguugcccaggc

SEQ ID NO: 3349549 - RNA, 13 nt, Human
acuguugcccagg

SEQ ID NO: 3349550 - RNA, 12 nt, Human
acuguugcccag

SEQ ID NO: 3349551 - RNA, 18 nt, Human
acuguugcccaggcuggc

SEQ ID NO: 3349552 - RNA, 17 nt, Human
acuguugcccaggcugg

SEQ ID NO: 3349553 - RNA, 15 nt, Human
acuuaaucuaaaugg

SEQ ID NO: 3349554 - RNA, 16 nt, Human
acuuaaucuaaaugga

SEQ ID NO: 3349555 - RNA, 13 nt, Human
acuuaaucuaaau

SEQ ID NO: 3349556 - RNA, 17 nt, Human
acuuacuaaaauauaua

SEQ ID NO: 3349557 - RNA, 22 nt, Human
acuuacuaaaauauauauagaa

SEQ ID NO: 3349558 - RNA, 14 nt, Human
acuguucucugccc

SEQ ID NO: 3349559 - RNA, 20 nt, Human
acuguucucugcccuccaag

SEQ ID NO: 3349560 - RNA, 21 nt, Human
acuguucucugcccuccaaga

SEQ ID NO: 3349561 - RNA, 19 nt, Human
acuguucucugcccuccaa

SEQ ID NO: 3349562 - RNA, 15 nt, Human
ucuaaagcugccagc

SEQ ID NO: 3349563 - RNA, 13 nt, Human
ucuaaagcugcca

SEQ ID NO: 3349564 - RNA, 14 nt, Human
ucuaaagcugccag

SEQ ID NO: 3349565 - RNA, 17 nt, Human
acuguccuacccacccu

SEQ ID NO: 3349566 - RNA, 18 nt, Human
acuguccuacccacccuc

SEQ ID NO: 3349567 - RNA, 22 nt, Human
acugugcugagucugaaggcug

SEQ ID NO: 3349568 - RNA, 19 nt, Human
ucgggaggucgaggcagga

SEQ ID NO: 3349569 - RNA, 21 nt, Human
ucgggaggucgaggcaggagg

SEQ ID NO: 3349570 - RNA, 17 nt, Human
ucgggaggucgaggcag

SEQ ID NO: 3349571 - RNA, 11 nt, Human
ucgggcaugac

SEQ ID NO: 3349572 - RNA, 12 nt, Human
ucgggcaugaca

SEQ ID NO: 3349573 - RNA, 21 nt, Human
acugcuugugaaaggaaagag

SEQ ID NO: 3349574 - RNA, 20 nt, Human
acugcuuaacuucacauauu

SEQ ID NO: 3349575 - RNA, 15 nt, Human
acuggauuaaacuua

SEQ ID NO: 3349576 - RNA, 18 nt, Human
acugcuuaacuucacaua

SEQ ID NO: 3349577 - RNA, 16 nt, Human
acugcauaugaaagga

SEQ ID NO: 3349578 - RNA, 21 nt, Human
uccuagaaauuccccacccug

SEQ ID NO: 3349579 - RNA, 22 nt, Human
uccuagaaauuccccacccuga

SEQ ID NO: 3349580 - RNA, 15 nt, Human
acugcauguuuguga

SEQ ID NO: 3349581 - RNA, 16 nt, Human
acugcauguuugugau

SEQ ID NO: 3349582 - RNA, 20 nt, Human
acugcaucaagaugugacau

SEQ ID NO: 3349583 - RNA, 22 nt, Human
acugcaucaagaugugacaugu

SEQ ID NO: 3349584 - RNA, 16 nt, Human
ucgcgacaaugcaaac

SEQ ID NO: 3349585 - RNA, 14 nt, Human
ucgcgacaaugcaa

SEQ ID NO: 3349586 - RNA, 19 nt, Human
ucgcgacaaugcaaaccau

SEQ ID NO: 3349587 - RNA, 18 nt, Human
ucgagcaugccuggaugg

SEQ ID NO: 3349588 - RNA, 15 nt, Human
ucgagcaugccugga

SEQ ID NO: 3349589 - RNA, 16 nt, Human
ucgagcaugccuggau

SEQ ID NO: 3349590 - RNA, 22 nt, Human
uccuuuagcgcccaguugggug

SEQ ID NO: 3349591 - RNA, 22 nt, Human
uccuuggugucgggcaugacac

SEQ ID NO: 3349592 - RNA, 14 nt, Human
uccuuguguuacua

SEQ ID NO: 3349593 - RNA, 23 nt, Human
uccuuguguuacuaaguuuuuau

SEQ ID NO: 3349594 - RNA, 19 nt, Human
uccuuuagcgcccaguugg

SEQ ID NO: 3349595 - RNA, 15 nt, Human
uccuuuagcgcccag

SEQ ID NO: 3349596 - RNA, 16 nt, Human
uccuucagugccuuau

SEQ ID NO: 3349597 - RNA, 17 nt, Human
uccuucagugccuuaug

SEQ ID NO: 3349598 - RNA, 14 nt, Human
uccuucagugccuu

SEQ ID NO: 3349599 - RNA, 15 nt, Human
uccuucagugccuua

SEQ ID NO: 3349600 - RNA, 19 nt, Human
agaggcagccccauucugc

SEQ ID NO: 3349601 - RNA, 13 nt, Human
agaggcagcccca

SEQ ID NO: 3349602 - RNA, 24 nt, Human
agaggcagccccauucugccugcc

SEQ ID NO: 3349603 - RNA, 13 nt, Human
agaggcagggucu

SEQ ID NO: 3349604 - RNA, 10 nt, Human
agaggcaggg

SEQ ID NO: 3349605 - RNA, 17 nt, Human
agaggcuaugugagcac

SEQ ID NO: 3349606 - RNA, 19 nt, Human
agaggccaugggccuccug

SEQ ID NO: 3349607 - RNA, 20 nt, Human
agagguucaaagauauuuug

SEQ ID NO: 3349608 - RNA, 19 nt, Human
ugaacuuugaccucugcag

SEQ ID NO: 3349609 - RNA, 20 nt, Human
ugaacuuugaccucugcagc

SEQ ID NO: 3349610 - RNA, 17 nt, Human
ugaacuuugaccucugc

SEQ ID NO: 3349611 - RNA, 22 nt, Human
ugaacuuugaccucugcagcaa

SEQ ID NO: 3349612 - RNA, 12 nt, Human
ugaacuccuggc

SEQ ID NO: 3349613 - RNA, 11 nt, Human
ugaacuccugg

SEQ ID NO: 3349614 - RNA, 15 nt, Human
ugaacuccuggccuc

SEQ ID NO: 3349615 - RNA, 14 nt, Human
ugaacuccuggccu

SEQ ID NO: 3349616 - RNA, 22 nt, Human
ugaaccgaugagaaauaaaguu

SEQ ID NO: 3349617 - RNA, 15 nt, Human
ugaaauuuuuauuaa

SEQ ID NO: 3349618 - RNA, 21 nt, Human
agagccuugcggaagguucua

SEQ ID NO: 3349619 - RNA, 22 nt, Human
agagccuuccaggggugggaca

SEQ ID NO: 3349620 - RNA, 11 nt, Human
agagccuugcg

SEQ ID NO: 3349621 - RNA, 17 nt, Human
agagcagagaccauccc

SEQ ID NO: 3349622 - RNA, 18 nt, Human
agagcagagaccaucccu

SEQ ID NO: 3349623 - RNA, 20 nt, Human
agagcagagaccaucccuga

SEQ ID NO: 3349624 - RNA, 16 nt, Human
agagauugugguuuca

SEQ ID NO: 3349625 - RNA, 17 nt, Human
ucuuuggacccugaggc

SEQ ID NO: 3349626 - RNA, 21 nt, Human
ucuuuggacccugaggcccag

SEQ ID NO: 3349627 - RNA, 16 nt, Human
ucuuuggacccugagg

SEQ ID NO: 3349628 - RNA, 12 nt, Human
agagcagagacc

SEQ ID NO: 3349629 - RNA, 18 nt, Human
agagcugccaccugccug

SEQ ID NO: 3349630 - RNA, 14 nt, Human
agagcugccaccug

SEQ ID NO: 3349631 - RNA, 12 nt, Human
agauaaaugugc

SEQ ID NO: 3349632 - RNA, 16 nt, Human
agaucacgccacugca

SEQ ID NO: 3349633 - RNA, 15 nt, Human
agaucacgccacugc

SEQ ID NO: 3349634 - RNA, 14 nt, Human
agaucacgccacug

SEQ ID NO: 3349635 - RNA, 18 nt, Human
agaucacgccacugcacu

SEQ ID NO: 3349636 - RNA, 17 nt, Human
agaucacgccacugcac

SEQ ID NO: 3349637 - RNA, 20 nt, Human
ugacacacagcucuguccug

SEQ ID NO: 3349638 - RNA, 17 nt, Human
agaguugauacuacagu

SEQ ID NO: 3349639 - RNA, 20 nt, Human
agaguugauacuacaguuug

SEQ ID NO: 3349640 - RNA, 22 nt, Human
agaguugauacuacaguuuguu

SEQ ID NO: 3349641 - RNA, 22 nt, Human
agagucucacuguugcccaggc

SEQ ID NO: 3349642 - RNA, 12 nt, Human
agaguuguuaca

SEQ ID NO: 3349643 - RNA, 21 nt, Human
agaguuguuacauuuuuaagu

SEQ ID NO: 3349644 - RNA, 20 nt, Human
ugaaugguuuucaaaauaaa

SEQ ID NO: 3349645 - RNA, 18 nt, Human
ugaaugucagugugacug

SEQ ID NO: 3349646 - RNA, 19 nt, Human
ugaaugucagugugacuga

SEQ ID NO: 3349647 - RNA, 22 nt, Human
agagucagaaguuucugccgca

SEQ ID NO: 3349648 - RNA, 21 nt, Human
ugacacacagcucuguccugg

SEQ ID NO: 3349649 - RNA, 20 nt, Human
ugacaggcaaugcuggcugu

SEQ ID NO: 3349650 - RNA, 16 nt, Human
ugacagggcacaccgg

SEQ ID NO: 3349651 - RNA, 11 nt, Human
ugacagggcac

SEQ ID NO: 3349652 - RNA, 20 nt, Human
ugacagggcacaccgggcac

SEQ ID NO: 3349653 - RNA, 13 nt, Human
agaucagccuggg

SEQ ID NO: 3349654 - RNA, 15 nt, Human
agaucagccugggca

SEQ ID NO: 3349655 - RNA, 18 nt, Human
ugaccaaugauggucacc

SEQ ID NO: 3349656 - RNA, 21 nt, Human
ugacauuguuggccaaagcca

SEQ ID NO: 3349657 - RNA, 20 nt, Human
ugacauuguuggccaaagcc

SEQ ID NO: 3349658 - RNA, 15 nt, Human
agaugcaccagcccu

SEQ ID NO: 3349659 - RNA, 14 nt, Human
agaugcaccagccc

SEQ ID NO: 3349660 - RNA, 15 nt, Human
agaugcuucucacug

SEQ ID NO: 3349661 - RNA, 13 nt, Human
ugacccacugcuu

SEQ ID NO: 3349662 - RNA, 12 nt, Human
ugacccacugcu

SEQ ID NO: 3349663 - RNA, 23 nt, Human
ugaccauucuccaccugccaggg

SEQ ID NO: 3349664 - RNA, 12 nt, Human
agacagucccug

SEQ ID NO: 3349665 - RNA, 12 nt, Human
agacagcugccu

SEQ ID NO: 3349666 - RNA, 15 nt, Human
agacagcugccuggg

SEQ ID NO: 3349667 - RNA, 13 nt, Human
agacagucccugc

SEQ ID NO: 3349668 - RNA, 19 nt, Human
agacagucccugccaaugg

SEQ ID NO: 3349669 - RNA, 18 nt, Human
ucuuaugggcuggguucu

SEQ ID NO: 3349670 - RNA, 12 nt, Human
ucuuagauguau

SEQ ID NO: 3349671 - RNA, 23 nt, Human
ucuuacuuacuaaaauauauaua

SEQ ID NO: 3349672 - RNA, 13 nt, Human
agacagcugccug

SEQ ID NO: 3349673 - RNA, 14 nt, Human
agacagcugccugg

SEQ ID NO: 3349674 - RNA, 21 nt, Human
agacacauguccaagaagccc

SEQ ID NO: 3349675 - RNA, 22 nt, Human
agacacauguccaagaagccca

SEQ ID NO: 3349676 - RNA, 16 nt, Human
agacacaggcccggcu

SEQ ID NO: 3349677 - RNA, 23 nt, Human
agacacaggcccggcuccaggcu

SEQ ID NO: 3349678 - RNA, 24 nt, Human
agacacauguccaagaagcccagg

SEQ ID NO: 3349679 - RNA, 19 nt, Human
agacaccuugacagggcac

SEQ ID NO: 3349680 - RNA, 22 nt, Human
agacaccuugacagggcacacc

SEQ ID NO: 3349681 - RNA, 20 nt, Human
agacacauguccaagaagcc

SEQ ID NO: 3349682 - RNA, 22 nt, Human
agacacaggcccggcuccaggc

SEQ ID NO: 3349683 - RNA, 21 nt, Human
agacacaggcccggcuccagg

SEQ ID NO: 3349684 - RNA, 20 nt, Human
agacacaggcccggcuccag

SEQ ID NO: 3349685 - RNA, 19 nt, Human
agacacaggcccggcucca

SEQ ID NO: 3349686 - RNA, 17 nt, Human
agacacaggcccggcuc

SEQ ID NO: 3349687 - RNA, 18 nt, Human
agaauucucuaguuugau

SEQ ID NO: 3349688 - RNA, 19 nt, Human
agaauucucuaguuugauu

SEQ ID NO: 3349689 - RNA, 17 nt, Human
agaauucucuuauccaa

SEQ ID NO: 3349690 - RNA, 14 nt, Human
agacacaagccuuc

SEQ ID NO: 3349691 - RNA, 13 nt, Human
agacacaagccuu

SEQ ID NO: 3349692 - RNA, 18 nt, Human
ucuguacgucugacaggc

SEQ ID NO: 3349693 - RNA, 13 nt, Human
ucuguuuagauaa

SEQ ID NO: 3349694 - RNA, 23 nt, Human
ucuguuuagauaauacaccacua

SEQ ID NO: 3349695 - RNA, 16 nt, Human
ucuguuuagauaauac

SEQ ID NO: 3349696 - RNA, 19 nt, Human
ucuguuuagauaauacacc

SEQ ID NO: 3349697 - RNA, 14 nt, Human
agaauucucuaguu

SEQ ID NO: 3349698 - RNA, 20 nt, Human
agaauuauaauuaguuccuc

SEQ ID NO: 3349699 - RNA, 20 nt, Human
agaauucucagaaucucaaa

SEQ ID NO: 3349700 - RNA, 21 nt, Human
agaauguguuuaaacuugguu

SEQ ID NO: 3349701 - RNA, 19 nt, Human
agaauuaguggcacuugcu

SEQ ID NO: 3349702 - RNA, 23 nt, Human
agaaccccaggguccuguagccc

SEQ ID NO: 3349703 - RNA, 14 nt, Human
agacccggcugcgu

SEQ ID NO: 3349704 - RNA, 18 nt, Human
ucuugagccuugaacuuu

SEQ ID NO: 3349705 - RNA, 19 nt, Human
ucuugagccuugaacuuug

SEQ ID NO: 3349706 - RNA, 17 nt, Human
ucuugagccuugaacuu

SEQ ID NO: 3349707 - RNA, 16 nt, Human
ucuugagccuugaacu

SEQ ID NO: 3349708 - RNA, 22 nt, Human
ucuucuguacgucugacaggca

SEQ ID NO: 3349709 - RNA, 21 nt, Human
ucuucuguacgucugacaggc

SEQ ID NO: 3349710 - RNA, 19 nt, Human
ucuucugcuucagccuccc

SEQ ID NO: 3349711 - RNA, 22 nt, Human
ucuucugcuucagccucccgag

SEQ ID NO: 3349712 - RNA, 17 nt, Human
ucuuauuuaaugaaaga

SEQ ID NO: 3349713 - RNA, 23 nt, Human
agacauacuaaccagcagaaaug

SEQ ID NO: 3349714 - RNA, 20 nt, Human
ucuucuguacgucugacagg

SEQ ID NO: 3349715 - RNA, 22 nt, Human
ucuuuaaugucacaggcagguc

SEQ ID NO: 3349716 - RNA, 19 nt, Human
ucuuuaaugucacaggcag

SEQ ID NO: 3349717 - RNA, 16 nt, Human
ucuugguuuguaaauu

SEQ ID NO: 3349718 - RNA, 20 nt, Human
ucuuuaaugucacaggcagg

SEQ ID NO: 3349719 - RNA, 19 nt, Human
ucuugguccugcugcaguu

SEQ ID NO: 3349720 - RNA, 14 nt, Human
ucuugguuuguaaa

SEQ ID NO: 3349721 - RNA, 15 nt, Human
agacucgcgacaaug

SEQ ID NO: 3349722 - RNA, 17 nt, Human
agacucgcgacaaugca

SEQ ID NO: 3349723 - RNA, 18 nt, Human
agacucgcgacaaugcaa

SEQ ID NO: 3349724 - RNA, 19 nt, Human
agacucgcgacaaugcaaa

SEQ ID NO: 3349725 - RNA, 23 nt, Human
agacuccugcaggcagccaggcc

SEQ ID NO: 3349726 - RNA, 20 nt, Human
ucuuuauaauucuacuuuga

SEQ ID NO: 3349727 - RNA, 13 nt, Human
ucuuucugcuuug

SEQ ID NO: 3349728 - RNA, 18 nt, Human
ucuuucuggcuaugcauu

SEQ ID NO: 3349729 - RNA, 20 nt, Human
agacucgcgacaaugcaaac

SEQ ID NO: 3349730 - RNA, 14 nt, Human
agacuguacaaagu

SEQ ID NO: 3349731 - RNA, 16 nt, Human
agacuguacaaaguag

SEQ ID NO: 3349732 - RNA, 15 nt, Human
agacuguacaaagua

SEQ ID NO: 3349733 - RNA, 19 nt, Human
agacuuuucuuucagccaa

SEQ ID NO: 3349734 - RNA, 22 nt, Human
agagaaaaaauauuuuccugcc

SEQ ID NO: 3349735 - RNA, 15 nt, Human
gucacaggcaggucc

SEQ ID NO: 3349736 - RNA, 13 nt, Human
gucacaggcaggu

SEQ ID NO: 3349737 - RNA, 16 nt, Human
gucacaggcaggucca

SEQ ID NO: 3349738 - RNA, 12 nt, Human
gucacaggcagg

SEQ ID NO: 3349739 - RNA, 19 nt, Human
aacaagaccacguuucuaa

SEQ ID NO: 3349740 - RNA, 16 nt, Human
aacaagaccacguuuc

SEQ ID NO: 3349741 - RNA, 17 nt, Human
aacaagaccacguuucu

SEQ ID NO: 3349742 - RNA, 23 nt, Human
aacaaggcaaggcugucaauuac

SEQ ID NO: 3349743 - RNA, 21 nt, Human
gucauuugagcagggcucagc

SEQ ID NO: 3349744 - RNA, 21 nt, Human
aacacuguucucugcccucca

SEQ ID NO: 3349745 - RNA, 19 nt, Human
aacacuguucucugcccuc

SEQ ID NO: 3349746 - RNA, 19 nt, Human
gucauuugagcagggcuca

SEQ ID NO: 3349747 - RNA, 22 nt, Human
gucauuugagcagggcucagcg

SEQ ID NO: 3349748 - RNA, 17 nt, Human
aacacucauugaccuga

SEQ ID NO: 3349749 - RNA, 21 nt, Human
aacacucauugaccugaggcc

SEQ ID NO: 3349750 - RNA, 12 nt, Human
aacacuccuuca

SEQ ID NO: 3349751 - RNA, 11 nt, Human
aacacucugag

SEQ ID NO: 3349752 - RNA, 12 nt, Human
aacacucugaga

SEQ ID NO: 3349753 - RNA, 13 nt, Human
aacacucugagac

SEQ ID NO: 3349754 - RNA, 14 nt, Human
aacacucugagacu

SEQ ID NO: 3349755 - RNA, 15 nt, Human
aacacuguucucugc

SEQ ID NO: 3349756 - RNA, 20 nt, Human
aacacuguucucugcccucc

SEQ ID NO: 3349757 - RNA, 14 nt, Human
aacauacucccauc

SEQ ID NO: 3349758 - RNA, 15 nt, Human
aacauacucccaucu

SEQ ID NO: 3349759 - RNA, 10 nt, Human
aacagaaaug

SEQ ID NO: 3349760 - RNA, 15 nt, Human
aacagaaauguacag

SEQ ID NO: 3349761 - RNA, 21 nt, Human
aacagaaauguacagcaagga

SEQ ID NO: 3349762 - RNA, 13 nt, Human
guccgagcuuuga

SEQ ID NO: 3349763 - RNA, 13 nt, Human
aacaggcugggcu

SEQ ID NO: 3349764 - RNA, 22 nt, Human
aacaggcugggcuucaguggca

SEQ ID NO: 3349765 - RNA, 19 nt, Human
aacagacuggaagcacagc

SEQ ID NO: 3349766 - RNA, 23 nt, Human
aacaggcugggcuucaguggcag

SEQ ID NO: 3349767 - RNA, 19 nt, Human
aacagguuuuccugaagaa

SEQ ID NO: 3349768 - RNA, 18 nt, Human
aaccacaucuugcucugc

SEQ ID NO: 3349769 - RNA, 21 nt, Human
aaccaucauugaaaucuuuuu

SEQ ID NO: 3349770 - RNA, 16 nt, Human
aaccauggacuuuaua

SEQ ID NO: 3349771 - RNA, 18 nt, Human
aaccaucauugaaaucuu

SEQ ID NO: 3349772 - RNA, 19 nt, Human
aaccaucauugaaaucuuu

SEQ ID NO: 3349773 - RNA, 20 nt, Human
aaccaucauugaaaucuuuu

SEQ ID NO: 3349774 - RNA, 22 nt, Human
aaccacaucuugcucugcugac

SEQ ID NO: 3349775 - RNA, 20 nt, Human
aaccacaucuugcucugcug

SEQ ID NO: 3349776 - RNA, 16 nt, Human
aacauuuugucauaua

SEQ ID NO: 3349777 - RNA, 13 nt, Human
gucuccauguuug

SEQ ID NO: 3349778 - RNA, 14 nt, Human
aaccuccugggcua

SEQ ID NO: 3349779 - RNA, 17 nt, Human
aaccuccgccucuuggg

SEQ ID NO: 3349780 - RNA, 15 nt, Human
aacccccagccugcu

SEQ ID NO: 3349781 - RNA, 14 nt, Human
aacccccagccugc

SEQ ID NO: 3349782 - RNA, 13 nt, Human
aacccccagccug

SEQ ID NO: 3349783 - RNA, 17 nt, Human
aacccagcucuggucca

SEQ ID NO: 3349784 - RNA, 13 nt, Human
aacccagcucugg

SEQ ID NO: 3349785 - RNA, 14 nt, Human
aacccagcucuggu

SEQ ID NO: 3349786 - RNA, 11 nt, Human
aacccagcucu

SEQ ID NO: 3349787 - RNA, 23 nt, Human
aaccauuuugcugucccuuuucc

SEQ ID NO: 3349788 - RNA, 15 nt, Human
gucuuagauguauau

SEQ ID NO: 3349789 - RNA, 14 nt, Human
gucuuuggacccug

SEQ ID NO: 3349790 - RNA, 15 nt, Human
gucuuuggacccuga

SEQ ID NO: 3349791 - RNA, 17 nt, Human
gucuuuggacccugagg

SEQ ID NO: 3349792 - RNA, 14 nt, Human
gucuuuucuugcau

SEQ ID NO: 3349793 - RNA, 19 nt, Human
gucuuuucuugcaugaggc

SEQ ID NO: 3349794 - RNA, 24 nt, Human
gucuuuucuugcaugaggcuagug

SEQ ID NO: 3349795 - RNA, 16 nt, Human
aacguggcugcuucaa

SEQ ID NO: 3349796 - RNA, 19 nt, Human
aacguggcugcuucaagga

SEQ ID NO: 3349797 - RNA, 15 nt, Human
aacguggcugcuuca

SEQ ID NO: 3349798 - RNA, 19 nt, Human
gugaaccaccacacccagc

SEQ ID NO: 3349799 - RNA, 19 nt, Human
gucaaaguggugagaggca

SEQ ID NO: 3349800 - RNA, 18 nt, Human
gucaaaguggugagaggc

SEQ ID NO: 3349801 - RNA, 17 nt, Human
guauuuuuuuacuaaua

SEQ ID NO: 3349802 - RNA, 21 nt, Human
guauuuuuuuacuaauagaca

SEQ ID NO: 3349803 - RNA, 20 nt, Human
gucacacaguauuacuucug

SEQ ID NO: 3349804 - RNA, 16 nt, Human
gucacacacuuuggcu

SEQ ID NO: 3349805 - RNA, 14 nt, Human
guauuuuuuuacua

SEQ ID NO: 3349806 - RNA, 15 nt, Human
guauuuuuuuacuaa

SEQ ID NO: 3349807 - RNA, 22 nt, Human
guauuggcuagagguucaaaga

SEQ ID NO: 3349808 - RNA, 22 nt, Human
aaauuaacuuuuauaaacuuua

SEQ ID NO: 3349809 - RNA, 23 nt, Human
aaauuaacuuuuauaaacuuuac

SEQ ID NO: 3349810 - RNA, 19 nt, Human
aaauuaacuuuuauaaacu

SEQ ID NO: 3349811 - RNA, 21 nt, Human
aaauuaacuuuuauaaacuuu

SEQ ID NO: 3349812 - RNA, 16 nt, Human
aaauuccccacccuga

SEQ ID NO: 3349813 - RNA, 14 nt, Human
aaauucaugcugcu

SEQ ID NO: 3349814 - RNA, 15 nt, Human
aaaugggggugcauu

SEQ ID NO: 3349815 - RNA, 16 nt, Human
aaaugggggugcauuu

SEQ ID NO: 3349816 - RNA, 17 nt, Human
aaaugggggugcauuug

SEQ ID NO: 3349817 - RNA, 18 nt, Human
aaaugggggugcauuuga

SEQ ID NO: 3349818 - RNA, 21 nt, Human
guaucccaugagccucagcau

SEQ ID NO: 3349819 - RNA, 15 nt, Human
guaucccuacuguaa

SEQ ID NO: 3349820 - RNA, 22 nt, Human
guaugaucacggcucacugcag

SEQ ID NO: 3349821 - RNA, 14 nt, Human
guaugggagagaag

SEQ ID NO: 3349822 - RNA, 21 nt, Human
guauucucuccuguaccucuu

SEQ ID NO: 3349823 - RNA, 15 nt, Human
guauucuuauuuaau

SEQ ID NO: 3349824 - RNA, 15 nt, Human
guaugggagagaaga

SEQ ID NO: 3349825 - RNA, 21 nt, Human
guagcugggacuacaggcacc

SEQ ID NO: 3349826 - RNA, 19 nt, Human
guagcugggacuacaggca

SEQ ID NO: 3349827 - RNA, 18 nt, Human
guagcugggacuacaggc

SEQ ID NO: 3349828 - RNA, 12 nt, Human
guagcugggacu

SEQ ID NO: 3349829 - RNA, 22 nt, Human
guagcucuaggagggcuggcaa

SEQ ID NO: 3349830 - RNA, 18 nt, Human
guaggaagguuaauguuc

SEQ ID NO: 3349831 - RNA, 15 nt, Human
guaggaagacuuugg

SEQ ID NO: 3349832 - RNA, 15 nt, Human
aaaucccauuuaaaa

SEQ ID NO: 3349833 - RNA, 18 nt, Human
aaaucccuuaccucggug

SEQ ID NO: 3349834 - RNA, 13 nt, Human
aaaucgaugcagu

SEQ ID NO: 3349835 - RNA, 15 nt, Human
aaaucucaaauuucu

SEQ ID NO: 3349836 - RNA, 16 nt, Human
aaaucucaaauuucua

SEQ ID NO: 3349837 - RNA, 17 nt, Human
aaaucucaaauuucuaa

SEQ ID NO: 3349838 - RNA, 17 nt, Human
aaaugaaaaucgugaca

SEQ ID NO: 3349839 - RNA, 18 nt, Human
aaaugcaccuggaauaua

SEQ ID NO: 3349840 - RNA, 22 nt, Human
aaaugcaccuggaauauauaac

SEQ ID NO: 3349841 - RNA, 14 nt, Human
aaaugcaccuggaa

SEQ ID NO: 3349842 - RNA, 18 nt, Human
aaaugggcagagcagaga

SEQ ID NO: 3349843 - RNA, 20 nt, Human
aaaugggcagagcagagacc

SEQ ID NO: 3349844 - RNA, 15 nt, Human
aaaugggcagagcag

SEQ ID NO: 3349845 - RNA, 13 nt, Human
aaaugcccagcuu

SEQ ID NO: 3349846 - RNA, 18 nt, Human
aaaugcccagccccuucu

SEQ ID NO: 3349847 - RNA, 14 nt, Human
aaaugcccagcccc

SEQ ID NO: 3349848 - RNA, 15 nt, Human
aaaugcccagccccu

SEQ ID NO: 3349849 - RNA, 13 nt, Human
aaaugcccagccc

SEQ ID NO: 3349850 - RNA, 13 nt, Human
aaaugagccuggc

SEQ ID NO: 3349851 - RNA, 19 nt, Human
aaaugagccuggcaagaau

SEQ ID NO: 3349852 - RNA, 23 nt, Human
aaaugagguacucuccuggaaau

SEQ ID NO: 3349853 - RNA, 16 nt, Human
aaaugagguacucucc

SEQ ID NO: 3349854 - RNA, 19 nt, Human
aaaugaggucagagccugc

SEQ ID NO: 3349855 - RNA, 17 nt, Human
aaaugaggucagagccu

SEQ ID NO: 3349856 - RNA, 17 nt, Human
gugguuuucuguucuuu

SEQ ID NO: 3349857 - RNA, 18 nt, Human
aagagguuuuaaaaaaau

SEQ ID NO: 3349858 - RNA, 12 nt, Human
aagaugcagccg

SEQ ID NO: 3349859 - RNA, 12 nt, Human
aagcaaaggaga

SEQ ID NO: 3349860 - RNA, 13 nt, Human
aagcaaaggagau

SEQ ID NO: 3349861 - RNA, 14 nt, Human
aagaugugacaugu

SEQ ID NO: 3349862 - RNA, 18 nt, Human
aagaugugacauguuuua

SEQ ID NO: 3349863 - RNA, 23 nt, Human
guguuuccuggcacugcuuccag

SEQ ID NO: 3349864 - RNA, 18 nt, Human
gugucuugcaauggcagc

SEQ ID NO: 3349865 - RNA, 17 nt, Human
gugucuugcaauggcag

SEQ ID NO: 3349866 - RNA, 18 nt, Human
gugucuuuuuucacuaca

SEQ ID NO: 3349867 - RNA, 17 nt, Human
gugugacuacuccccca

SEQ ID NO: 3349868 - RNA, 17 nt, Human
aagacuguacaaaguag

SEQ ID NO: 3349869 - RNA, 21 nt, Human
aagacugaguacguugugcau

SEQ ID NO: 3349870 - RNA, 16 nt, Human
aagacuguacaaagua

SEQ ID NO: 3349871 - RNA, 17 nt, Human
aagacugaguacguugu

SEQ ID NO: 3349872 - RNA, 18 nt, Human
aagacuaucuaaauguug

SEQ ID NO: 3349873 - RNA, 17 nt, Human
aagacuaucuaaauguu

SEQ ID NO: 3349874 - RNA, 16 nt, Human
aagacuaucuaaaugu

SEQ ID NO: 3349875 - RNA, 18 nt, Human
aagacccuugugguccca

SEQ ID NO: 3349876 - RNA, 21 nt, Human
aagacccuuguggucccaccc

SEQ ID NO: 3349877 - RNA, 22 nt, Human
aagacccuuguggucccacccc

SEQ ID NO: 3349878 - RNA, 19 nt, Human
aagagauugugguuucauu

SEQ ID NO: 3349879 - RNA, 22 nt, Human
guggcgcagcauauucaggaag

SEQ ID NO: 3349880 - RNA, 23 nt, Human
guggcgcagcauauucaggaagc

SEQ ID NO: 3349881 - RNA, 22 nt, Human
gugggacacccugugauggggc

SEQ ID NO: 3349882 - RNA, 23 nt, Human
gugggaggaucucuugagccugg

SEQ ID NO: 3349883 - RNA, 13 nt, Human
gugggagugggcc

SEQ ID NO: 3349884 - RNA, 14 nt, Human
gugggagugggccc

SEQ ID NO: 3349885 - RNA, 14 nt, Human
guggguacgggagg

SEQ ID NO: 3349886 - RNA, 20 nt, Human
gugggggaucacagccucug

SEQ ID NO: 3349887 - RNA, 16 nt, Human
gugguuucagaaaugu

SEQ ID NO: 3349888 - RNA, 14 nt, Human
guggugguuuucug

SEQ ID NO: 3349889 - RNA, 16 nt, Human
aagaauugaagcagga

SEQ ID NO: 3349890 - RNA, 14 nt, Human
guggcagcucaccu

SEQ ID NO: 3349891 - RNA, 16 nt, Human
guggcagcucaccucu

SEQ ID NO: 3349892 - RNA, 18 nt, Human
guggauuuaacagaaaug

SEQ ID NO: 3349893 - RNA, 19 nt, Human
guggauuuaacagaaaugu

SEQ ID NO: 3349894 - RNA, 19 nt, Human
guggcaccagcagccugga

SEQ ID NO: 3349895 - RNA, 18 nt, Human
guggcaccagcagccugg

SEQ ID NO: 3349896 - RNA, 20 nt, Human
guggaugccugguggcagcu

SEQ ID NO: 3349897 - RNA, 21 nt, Human
guggaugccugguggcagcug

SEQ ID NO: 3349898 - RNA, 17 nt, Human
guggacacagcucuucu

SEQ ID NO: 3349899 - RNA, 22 nt, Human
guggacacagcucuucuccagg

SEQ ID NO: 3349900 - RNA, 18 nt, Human
guggacacagcucuucuc

SEQ ID NO: 3349901 - RNA, 22 nt, Human
gugcugggauuacaagcgugag

SEQ ID NO: 3349902 - RNA, 21 nt, Human
gugcugggauuacaagcguga

SEQ ID NO: 3349903 - RNA, 20 nt, Human
gugcugggauuacaggugug

SEQ ID NO: 3349904 - RNA, 19 nt, Human
gugcuaucucccccagccc

SEQ ID NO: 3349905 - RNA, 22 nt, Human
gugcuaucucccccagccccau

SEQ ID NO: 3349906 - RNA, 12 nt, Human
gugcuauguucu

SEQ ID NO: 3349907 - RNA, 18 nt, Human
aacuugucuuuggacccu

SEQ ID NO: 3349908 - RNA, 11 nt, Human
gugccuuaugg

SEQ ID NO: 3349909 - RNA, 17 nt, Human
aacuuggcgcugccccu

SEQ ID NO: 3349910 - RNA, 13 nt, Human
aacuuuaccuuuu

SEQ ID NO: 3349911 - RNA, 21 nt, Human
gugccuuauggaacacucuga

SEQ ID NO: 3349912 - RNA, 23 nt, Human
gugccuuauggaacacucugaga

SEQ ID NO: 3349913 - RNA, 14 nt, Human
gugccuuauggaac

SEQ ID NO: 3349914 - RNA, 13 nt, Human
gugccucugggac

SEQ ID NO: 3349915 - RNA, 12 nt, Human
gugccucuggga

SEQ ID NO: 3349916 - RNA, 22 nt, Human
gugccgagaaggaagccuccca

SEQ ID NO: 3349917 - RNA, 15 nt, Human
gugccucaagagaag

SEQ ID NO: 3349918 - RNA, 22 nt, Human
aagaaagacuaucuaaauguug

SEQ ID NO: 3349919 - RNA, 20 nt, Human
aagaaagacuaucuaaaugu

SEQ ID NO: 3349920 - RNA, 18 nt, Human
aagaaaaaggaugcacag

SEQ ID NO: 3349921 - RNA, 15 nt, Human
aagaaaaaggaugca

SEQ ID NO: 3349922 - RNA, 17 nt, Human
aagaaaaaggaugcaca

SEQ ID NO: 3349923 - RNA, 18 nt, Human
aagaaaaagaaaaagaaa

SEQ ID NO: 3349924 - RNA, 21 nt, Human
gugcuaucucccccagcccca

SEQ ID NO: 3349925 - RNA, 22 nt, Human
gugcuaggaacacuccuucaca

SEQ ID NO: 3349926 - RNA, 17 nt, Human
gugcuaggaacacuccu

SEQ ID NO: 3349927 - RNA, 18 nt, Human
gugcuaggaacacuccuu

SEQ ID NO: 3349928 - RNA, 20 nt, Human
guucccauuugcuccuuucu

SEQ ID NO: 3349929 - RNA, 16 nt, Human
guucccauuugcuccu

SEQ ID NO: 3349930 - RNA, 20 nt, Human
guuccauggccucuucagau

SEQ ID NO: 3349931 - RNA, 22 nt, Human
guugaugaucuuugcagacagg

SEQ ID NO: 3349932 - RNA, 17 nt, Human
guucuuaguuugcaguu

SEQ ID NO: 3349933 - RNA, 21 nt, Human
guucuugguuuguaaauuaac

SEQ ID NO: 3349934 - RNA, 18 nt, Human
guucuugguuuguaaauu

SEQ ID NO: 3349935 - RNA, 23 nt, Human
guucugggacacaguucaauucu

SEQ ID NO: 3349936 - RNA, 20 nt, Human
guucccuuugacgccauccc

SEQ ID NO: 3349937 - RNA, 21 nt, Human
guucccuuugacgccauccca

SEQ ID NO: 3349938 - RNA, 16 nt, Human
guucuacccaggugcu

SEQ ID NO: 3349939 - RNA, 17 nt, Human
guucagcuccagcucac

SEQ ID NO: 3349940 - RNA, 16 nt, Human
guucagcuccagcuca

SEQ ID NO: 3349941 - RNA, 15 nt, Human
guucagcuccagcuc

SEQ ID NO: 3349942 - RNA, 19 nt, Human
guucaggguuggccccugc

SEQ ID NO: 3349943 - RNA, 18 nt, Human
guucaggguuggccccug

SEQ ID NO: 3349944 - RNA, 17 nt, Human
guucaggguuggccccu

SEQ ID NO: 3349945 - RNA, 16 nt, Human
aagcuaggccuggcca

SEQ ID NO: 3349946 - RNA, 18 nt, Human
aagcuaggccuggccaga

SEQ ID NO: 3349947 - RNA, 17 nt, Human
aagcuaggccuggccag

SEQ ID NO: 3349948 - RNA, 19 nt, Human
aagccuccuccagccgcca

SEQ ID NO: 3349949 - RNA, 20 nt, Human
guuaguaugaggcauuuguu

SEQ ID NO: 3349950 - RNA, 17 nt, Human
guuaguaugaggcauuu

SEQ ID NO: 3349951 - RNA, 18 nt, Human
guuaaucauuagguguga

SEQ ID NO: 3349952 - RNA, 18 nt, Human
guuaaugauagcuacugu

SEQ ID NO: 3349953 - RNA, 18 nt, Human
guuggucccccuuccaug

SEQ ID NO: 3349954 - RNA, 13 nt, Human
guuggguggaugc

SEQ ID NO: 3349955 - RNA, 15 nt, Human
aaggauccugagcca

SEQ ID NO: 3349956 - RNA, 17 nt, Human
aaggauccugagccaga

SEQ ID NO: 3349957 - RNA, 18 nt, Human
aaggaugaucuaggaaga

SEQ ID NO: 3349958 - RNA, 23 nt, Human
aaggaugaucuaggaagacuuug

SEQ ID NO: 3349959 - RNA, 14 nt, Human
aaggauccugagcc

SEQ ID NO: 3349960 - RNA, 13 nt, Human
aaggauccugagc

SEQ ID NO: 3349961 - RNA, 23 nt, Human
guugaugaucuuugcagacaggc

SEQ ID NO: 3349962 - RNA, 15 nt, Human
aaggaugcuuguaca

SEQ ID NO: 3349963 - RNA, 16 nt, Human
aaggaugcuuguacau

SEQ ID NO: 3349964 - RNA, 18 nt, Human
aaggaugcacagaguugu

SEQ ID NO: 3349965 - RNA, 19 nt, Human
aaggaugcccaaagaugca

SEQ ID NO: 3349966 - RNA, 17 nt, Human
aaggaugcuuguacaua

SEQ ID NO: 3349967 - RNA, 19 nt, Human
aaggaugcuuguacauaau

SEQ ID NO: 3349968 - RNA, 17 nt, Human
guugcccaggcuggcgu

SEQ ID NO: 3349969 - RNA, 15 nt, Human
guugcccaggcaggu

SEQ ID NO: 3349970 - RNA, 21 nt, Human
guugcccaggcuggcgugcag

SEQ ID NO: 3349971 - RNA, 18 nt, Human
guugcccaggcaggucuu

SEQ ID NO: 3349972 - RNA, 14 nt, Human
aaggcuccaggagc

SEQ ID NO: 3349973 - RNA, 17 nt, Human
guugcccaggcaggucu

SEQ ID NO: 3349974 - RNA, 16 nt, Human
aaggccaaaggaagca

SEQ ID NO: 3349975 - RNA, 18 nt, Human
aaggccaaaggaagcaca

SEQ ID NO: 3349976 - RNA, 19 nt, Human
aaggcuaccuuuguauucu

SEQ ID NO: 3349977 - RNA, 15 nt, Human
aaggcuaccuuugua

SEQ ID NO: 3349978 - RNA, 12 nt, Human
aaguaauaugca

SEQ ID NO: 3349979 - RNA, 15 nt, Human
aaguaauaugcacac

SEQ ID NO: 3349980 - RNA, 16 nt, Human
aaguaauaugcacaca

SEQ ID NO: 3349981 - RNA, 19 nt, Human
guuucuaaaggcuaccuuu

SEQ ID NO: 3349982 - RNA, 20 nt, Human
guuucuaaagcugccagccg

SEQ ID NO: 3349983 - RNA, 16 nt, Human
aaggguaucaggugcu

SEQ ID NO: 3349984 - RNA, 23 nt, Human
aaggggaauguuugccucugccu

SEQ ID NO: 3349985 - RNA, 22 nt, Human
aaggggaauguuugccucugcc

SEQ ID NO: 3349986 - RNA, 19 nt, Human
aagggccuggccugagcug

SEQ ID NO: 3349987 - RNA, 14 nt, Human
aagggccuggccug

SEQ ID NO: 3349988 - RNA, 17 nt, Human
aagggccuggccugagc

SEQ ID NO: 3349989 - RNA, 13 nt, Human
aagggccuggccu

SEQ ID NO: 3349990 - RNA, 18 nt, Human
aaggcuuauauucaacca

SEQ ID NO: 3349991 - RNA, 23 nt, Human
aaggcuuauauucaaccauggac

SEQ ID NO: 3349992 - RNA, 21 nt, Human
aaggcuuauauucaaccaugg

SEQ ID NO: 3349993 - RNA, 13 nt, Human
guuugccucugcc

SEQ ID NO: 3349994 - RNA, 22 nt, Human
guuucuaaaggcuaccuuugua

SEQ ID NO: 3349995 - RNA, 23 nt, Human
guuucuaaaggcuaccuuuguau

SEQ ID NO: 3349996 - RNA, 21 nt, Human
guuugauucagacagcugccu

SEQ ID NO: 3349997 - RNA, 22 nt, Human
guuugauucagacagcugccug

SEQ ID NO: 3349998 - RNA, 11 nt, Human
guuuucuguuc

SEQ ID NO: 3349999 - RNA, 19 nt, Human
guuuucuguucuuucuggc

SEQ ID NO: 3350000 - RNA, 19 nt, Human
acacacagcucuguccugg

SEQ ID NO: 3350001 - RNA, 13 nt, Human
acacacacauaca

SEQ ID NO: 3350002 - RNA, 12 nt, Human
acacacauacac

SEQ ID NO: 3350003 - RNA, 12 nt, Human
acacacagcucu

SEQ ID NO: 3350004 - RNA, 11 nt, Human
acacacagcuc

SEQ ID NO: 3350005 - RNA, 11 nt, Human
acacacacaua

SEQ ID NO: 3350006 - RNA, 15 nt, Human
acaaugguuuucuug

SEQ ID NO: 3350007 - RNA, 21 nt, Human
acaaugguuuucuuguguguu

SEQ ID NO: 3350008 - RNA, 22 nt, Human
acacaguauuacuucugcuaca

SEQ ID NO: 3350009 - RNA, 11 nt, Human
acacagugagu

SEQ ID NO: 3350010 - RNA, 22 nt, Human
acacagcucuucuccaggcugu

SEQ ID NO: 3350011 - RNA, 21 nt, Human
uagguuggcaaaaaggcagga

SEQ ID NO: 3350012 - RNA, 13 nt, Human
uaguagagacagg

SEQ ID NO: 3350013 - RNA, 18 nt, Human
acacauguccaagaagcc

SEQ ID NO: 3350014 - RNA, 19 nt, Human
acacauguccaagaagccc

SEQ ID NO: 3350015 - RNA, 13 nt, Human
acacauguccaag

SEQ ID NO: 3350016 - RNA, 21 nt, Human
acacauguccaagaagcccag

SEQ ID NO: 3350017 - RNA, 22 nt, Human
acacauguccaagaagcccagg

SEQ ID NO: 3350018 - RNA, 13 nt, Human
acacccagcccac

SEQ ID NO: 3350019 - RNA, 12 nt, Human
acacccagccca

SEQ ID NO: 3350020 - RNA, 22 nt, Human
uauaaccaguguuguggauuua

SEQ ID NO: 3350021 - RNA, 20 nt, Human
uauaaccaguguuguggauu

SEQ ID NO: 3350022 - RNA, 17 nt, Human
acacuaaccacgcugga

SEQ ID NO: 3350023 - RNA, 16 nt, Human
acacuaaccacgcugg

SEQ ID NO: 3350024 - RNA, 19 nt, Human
acacuaaccacgcuggacc

SEQ ID NO: 3350025 - RNA, 15 nt, Human
acacuaaccacgcug

SEQ ID NO: 3350026 - RNA, 16 nt, Human
acaccuugacagggca

SEQ ID NO: 3350027 - RNA, 15 nt, Human
acaccuugacagggc

SEQ ID NO: 3350028 - RNA, 14 nt, Human
acaccuugacaggg

SEQ ID NO: 3350029 - RNA, 18 nt, Human
acaccucugcacaagcug

SEQ ID NO: 3350030 - RNA, 16 nt, Human
acagaguuguuacauu

SEQ ID NO: 3350031 - RNA, 17 nt, Human
acagaguuguuacauuu

SEQ ID NO: 3350032 - RNA, 18 nt, Human
acagaguuguuacauuuu

SEQ ID NO: 3350033 - RNA, 19 nt, Human
acagaguuguuacauuuuu

SEQ ID NO: 3350034 - RNA, 20 nt, Human
acagaguuguuacauuuuua

SEQ ID NO: 3350035 - RNA, 21 nt, Human
acagagcaagugagacccugu

SEQ ID NO: 3350036 - RNA, 18 nt, Human
acagagcuacacagggga

SEQ ID NO: 3350037 - RNA, 19 nt, Human
uaucccuacuguaauuugu

SEQ ID NO: 3350038 - RNA, 20 nt, Human
uaucccuacuguaauuugug

SEQ ID NO: 3350039 - RNA, 13 nt, Human
uaucucagggccu

SEQ ID NO: 3350040 - RNA, 21 nt, Human
acagcccgggcucugccuccc

SEQ ID NO: 3350041 - RNA, 22 nt, Human
acagcccgggcucugccuccca

SEQ ID NO: 3350042 - RNA, 20 nt, Human
acagcccgggcucugccucc

SEQ ID NO: 3350043 - RNA, 23 nt, Human
acagcccgggcucugccucccau

SEQ ID NO: 3350044 - RNA, 23 nt, Human
acagaugggugcuuggaggaagg

SEQ ID NO: 3350045 - RNA, 20 nt, Human
acagauacuccuccaagguu

SEQ ID NO: 3350046 - RNA, 20 nt, Human
acagauagauauaugcucug

SEQ ID NO: 3350047 - RNA, 21 nt, Human
acagaguuguuacauuuuuaa

SEQ ID NO: 3350048 - RNA, 15 nt, Human
acagaguuguuacau

SEQ ID NO: 3350049 - RNA, 15 nt, Human
acagacacaggcccg

SEQ ID NO: 3350050 - RNA, 17 nt, Human
acagacacaggcccggc

SEQ ID NO: 3350051 - RNA, 18 nt, Human
acagacacaggcccggcu

SEQ ID NO: 3350052 - RNA, 19 nt, Human
acagacuggaagcacagcu

SEQ ID NO: 3350053 - RNA, 17 nt, Human
acagacuggaagcacag

SEQ ID NO: 3350054 - RNA, 21 nt, Human
acagacuggaagcacagcuuc

SEQ ID NO: 3350055 - RNA, 21 nt, Human
uauauucaaccauggacuuua

SEQ ID NO: 3350056 - RNA, 14 nt, Human
uauauucaaccaug

SEQ ID NO: 3350057 - RNA, 13 nt, Human
uauauucaaccau

SEQ ID NO: 3350058 - RNA, 12 nt, Human
uauauucaacca

SEQ ID NO: 3350059 - RNA, 18 nt, Human
acagaaaauucuucucca

SEQ ID NO: 3350060 - RNA, 23 nt, Human
acacuguuucaaacuuuacuaug

SEQ ID NO: 3350061 - RNA, 15 nt, Human
acacuguuucaaacu

SEQ ID NO: 3350062 - RNA, 22 nt, Human
acacuguucucugcccuccaag

SEQ ID NO: 3350063 - RNA, 23 nt, Human
acacuguucucugcccuccaaga

SEQ ID NO: 3350064 - RNA, 16 nt, Human
acacuguucucugccc

SEQ ID NO: 3350065 - RNA, 17 nt, Human
acacuguucucugcccu

SEQ ID NO: 3350066 - RNA, 18 nt, Human
acacuguucucugcccuc

SEQ ID NO: 3350067 - RNA, 20 nt, Human
acacuguucucugcccucca

SEQ ID NO: 3350068 - RNA, 14 nt, Human
acacuguucucugc

SEQ ID NO: 3350069 - RNA, 15 nt, Human
acacuguucucugcc

SEQ ID NO: 3350070 - RNA, 22 nt, Human
acacucacauuuauucugcuca

SEQ ID NO: 3350071 - RNA, 11 nt, Human
acacucugaga

SEQ ID NO: 3350072 - RNA, 13 nt, Human
acacucugagacu

SEQ ID NO: 3350073 - RNA, 13 nt, Human
acacuccuucaca

SEQ ID NO: 3350074 - RNA, 18 nt, Human
uacuucuccacccugcuc

SEQ ID NO: 3350075 - RNA, 13 nt, Human
uacuucuccaccc

SEQ ID NO: 3350076 - RNA, 16 nt, Human
uacuucuuauacauuu

SEQ ID NO: 3350077 - RNA, 15 nt, Human
uacuucuuauacauu

SEQ ID NO: 3350078 - RNA, 14 nt, Human
uacuucuuauacau

SEQ ID NO: 3350079 - RNA, 20 nt, Human
uacuucuccacccugcucuc

SEQ ID NO: 3350080 - RNA, 15 nt, Human
uacuucugcuacaua

SEQ ID NO: 3350081 - RNA, 13 nt, Human
aauuuauuauggc

SEQ ID NO: 3350082 - RNA, 14 nt, Human
aauuuauuauggca

SEQ ID NO: 3350083 - RNA, 15 nt, Human
aauuuaccugaaguc

SEQ ID NO: 3350084 - RNA, 17 nt, Human
aauuuaccugaagucuu

SEQ ID NO: 3350085 - RNA, 23 nt, Human
uacuguaauuugugauacaaugc

SEQ ID NO: 3350086 - RNA, 15 nt, Human
uacuguaauuuguga

SEQ ID NO: 3350087 - RNA, 16 nt, Human
uacuguaauuugugau

SEQ ID NO: 3350088 - RNA, 15 nt, Human
uacgucugacaggca

SEQ ID NO: 3350089 - RNA, 16 nt, Human
uacucuacccucuuag

SEQ ID NO: 3350090 - RNA, 22 nt, Human
uacucuacccucuuagaaaaac

SEQ ID NO: 3350091 - RNA, 16 nt, Human
uacgucugacaggcaa

SEQ ID NO: 3350092 - RNA, 14 nt, Human
uacgucugacaggc

SEQ ID NO: 3350093 - RNA, 13 nt, Human
uacuaaaauauau

SEQ ID NO: 3350094 - RNA, 12 nt, Human
uacuaaaauaua

SEQ ID NO: 3350095 - RNA, 20 nt, Human
aauuugugauacaaugcugu

SEQ ID NO: 3350096 - RNA, 16 nt, Human
aauuuguuauaaugaa

SEQ ID NO: 3350097 - RNA, 18 nt, Human
aauuugggggaaaauuua

SEQ ID NO: 3350098 - RNA, 14 nt, Human
acaaaacuuuucua

SEQ ID NO: 3350099 - RNA, 21 nt, Human
acaaagcgugguggacaugca

SEQ ID NO: 3350100 - RNA, 15 nt, Human
acaagcuccaagcuc

SEQ ID NO: 3350101 - RNA, 16 nt, Human
acaagcuccaagcucc

SEQ ID NO: 3350102 - RNA, 17 nt, Human
acaagcuccaagcuccc

SEQ ID NO: 3350103 - RNA, 19 nt, Human
acaagcuccaagcucccag

SEQ ID NO: 3350104 - RNA, 22 nt, Human
acaagcuccaagcucccaggca

SEQ ID NO: 3350105 - RNA, 17 nt, Human
acaagcgugagccacug

SEQ ID NO: 3350106 - RNA, 13 nt, Human
acaagcuccaagc

SEQ ID NO: 3350107 - RNA, 17 nt, Human
acaagaccacguuucua

SEQ ID NO: 3350108 - RNA, 18 nt, Human
acaagagcccaggccucc

SEQ ID NO: 3350109 - RNA, 16 nt, Human
acaagaccacguuucu

SEQ ID NO: 3350110 - RNA, 22 nt, Human
acaagagcccaggccuccuaca

SEQ ID NO: 3350111 - RNA, 17 nt, Human
acaacaucuuuuucuac

SEQ ID NO: 3350112 - RNA, 19 nt, Human
uaaguacuauguaucaaug

SEQ ID NO: 3350113 - RNA, 20 nt, Human
uaaguuuuuauggcuuuugu

SEQ ID NO: 3350114 - RNA, 16 nt, Human
uaaguauuaaaacauu

SEQ ID NO: 3350115 - RNA, 15 nt, Human
uaaguauuaaaacau

SEQ ID NO: 3350116 - RNA, 14 nt, Human
uaaguauuaaaaca

SEQ ID NO: 3350117 - RNA, 13 nt, Human
aaucuaaauggaa

SEQ ID NO: 3350118 - RNA, 15 nt, Human
aaucuaaauggaacc

SEQ ID NO: 3350119 - RNA, 18 nt, Human
aaucuaaauggaaccacu

SEQ ID NO: 3350120 - RNA, 12 nt, Human
aaucuaaaugga

SEQ ID NO: 3350121 - RNA, 12 nt, Human
aaucucaaauuu

SEQ ID NO: 3350122 - RNA, 15 nt, Human
aaucucaaauaacua

SEQ ID NO: 3350123 - RNA, 14 nt, Human
aaucucaaauuucu

SEQ ID NO: 3350124 - RNA, 13 nt, Human
aaucucaaauaac

SEQ ID NO: 3350125 - RNA, 15 nt, Human
aaugagccuggcaag

SEQ ID NO: 3350126 - RNA, 14 nt, Human
aaugacuuacugua

SEQ ID NO: 3350127 - RNA, 17 nt, Human
aaugacuuacuguacau

SEQ ID NO: 3350128 - RNA, 18 nt, Human
aaugacuuacuguacaug

SEQ ID NO: 3350129 - RNA, 13 nt, Human
uaaugaggaaacu

SEQ ID NO: 3350130 - RNA, 19 nt, Human
uaaugaaagacuguacaaa

SEQ ID NO: 3350131 - RNA, 18 nt, Human
uaaugaaagacuguacaa

SEQ ID NO: 3350132 - RNA, 17 nt, Human
uaaugaaagacuguaca

SEQ ID NO: 3350133 - RNA, 14 nt, Human
uaaugaaagacugu

SEQ ID NO: 3350134 - RNA, 23 nt, Human
uaaugaaagacuguacaaaguag

SEQ ID NO: 3350135 - RNA, 22 nt, Human
uaaugaaagacuguacaaagua

SEQ ID NO: 3350136 - RNA, 15 nt, Human
uaaugacuuaagcac

SEQ ID NO: 3350137 - RNA, 21 nt, Human
uaaugacuuaagcacacuuga

SEQ ID NO: 3350138 - RNA, 13 nt, Human
aaucuucugaacu

SEQ ID NO: 3350139 - RNA, 20 nt, Human
aaucuucugaacuuggcgcu

SEQ ID NO: 3350140 - RNA, 13 nt, Human
aaugcugugcccu

SEQ ID NO: 3350141 - RNA, 20 nt, Human
aaugcugugcccuaaagugu

SEQ ID NO: 3350142 - RNA, 21 nt, Human
aaugcugugcccuaaagugua

SEQ ID NO: 3350143 - RNA, 20 nt, Human
aaugcccagccccuucugac

SEQ ID NO: 3350144 - RNA, 22 nt, Human
aaugcccagccccuucugaccc

SEQ ID NO: 3350145 - RNA, 23 nt, Human
aaugcccagccccuucugaccca

SEQ ID NO: 3350146 - RNA, 24 nt, Human
aaugcccagccccuucugacccau

SEQ ID NO: 3350147 - RNA, 16 nt, Human
aauggacguguuauga

SEQ ID NO: 3350148 - RNA, 18 nt, Human
aauggaagacagcucuua

SEQ ID NO: 3350149 - RNA, 14 nt, Human
aaugcccagccccu

SEQ ID NO: 3350150 - RNA, 15 nt, Human
aaugcccagccccuu

SEQ ID NO: 3350151 - RNA, 13 nt, Human
aaugcccagcccc

SEQ ID NO: 3350152 - RNA, 21 nt, Human
uacaagcgugagccacugcac

SEQ ID NO: 3350153 - RNA, 14 nt, Human
aaugagccuggcaa

SEQ ID NO: 3350154 - RNA, 15 nt, Human
uacaaaagcauguga

SEQ ID NO: 3350155 - RNA, 20 nt, Human
uacaaaaagcauaaaaauua

SEQ ID NO: 3350156 - RNA, 15 nt, Human
uacaaaaagcauaaa

SEQ ID NO: 3350157 - RNA, 19 nt, Human
uacaccacuacauucuguu

SEQ ID NO: 3350158 - RNA, 20 nt, Human
uacaccacuacauucuguua

SEQ ID NO: 3350159 - RNA, 15 nt, Human
uacaccacuacauuc

SEQ ID NO: 3350160 - RNA, 16 nt, Human
uacaccacuacauucu

SEQ ID NO: 3350161 - RNA, 17 nt, Human
uacaccacuacauucug

SEQ ID NO: 3350162 - RNA, 18 nt, Human
uacaccacuacauucugu

SEQ ID NO: 3350163 - RNA, 23 nt, Human
uacacauuuuauuuuauuaugca

SEQ ID NO: 3350164 - RNA, 23 nt, Human
uacagagcccacgcccccacugg

SEQ ID NO: 3350165 - RNA, 17 nt, Human
uacauaaugcgugcaua

SEQ ID NO: 3350166 - RNA, 19 nt, Human
uacauaaugcgugcauacc

SEQ ID NO: 3350167 - RNA, 20 nt, Human
uacauaaugcgugcauacca

SEQ ID NO: 3350168 - RNA, 15 nt, Human
uacauaaugcgugca

SEQ ID NO: 3350169 - RNA, 12 nt, Human
aauguacugcau

SEQ ID NO: 3350170 - RNA, 14 nt, Human
aauguacugcauau

SEQ ID NO: 3350171 - RNA, 14 nt, Human
aauguauguguaag

SEQ ID NO: 3350172 - RNA, 12 nt, Human
aauguaugugua

SEQ ID NO: 3350173 - RNA, 20 nt, Human
aaguuuuuauggcuuuugug

SEQ ID NO: 3350174 - RNA, 16 nt, Human
aauaaaucauaaaacu

SEQ ID NO: 3350175 - RNA, 12 nt, Human
aauaaaacuuuu

SEQ ID NO: 3350176 - RNA, 14 nt, Human
aauaaaacuuuuua

SEQ ID NO: 3350177 - RNA, 15 nt, Human
aauaaaacuuuuuaa

SEQ ID NO: 3350178 - RNA, 18 nt, Human
aauaaaacuuuuuaaaau

SEQ ID NO: 3350179 - RNA, 22 nt, Human
aauaacauguaauuaaguacua

SEQ ID NO: 3350180 - RNA, 19 nt, Human
uaaauaaugugaaacugga

SEQ ID NO: 3350181 - RNA, 14 nt, Human
uaaaucuccaaaau

SEQ ID NO: 3350182 - RNA, 15 nt, Human
uaaaucuccaaaaua

SEQ ID NO: 3350183 - RNA, 22 nt, Human
uaaaucuccaaaauaaaacuuu

SEQ ID NO: 3350184 - RNA, 20 nt, Human
uaaauguugaaagaucaaaa

SEQ ID NO: 3350185 - RNA, 15 nt, Human
uaaauguugaaagau

SEQ ID NO: 3350186 - RNA, 23 nt, Human
uaaaugcaccuggaauauauaac

SEQ ID NO: 3350187 - RNA, 12 nt, Human
uaaauuaacuuu

SEQ ID NO: 3350188 - RNA, 14 nt, Human
uaaauuaacuuuua

SEQ ID NO: 3350189 - RNA, 15 nt, Human
uaaauuaacuuuuau

SEQ ID NO: 3350190 - RNA, 16 nt, Human
uaaauuaacuuuuaua

SEQ ID NO: 3350191 - RNA, 17 nt, Human
uaaauuaacuuuuauaa

SEQ ID NO: 3350192 - RNA, 15 nt, Human
aauaggaaaaacuga

SEQ ID NO: 3350193 - RNA, 16 nt, Human
aauaggaaaaacugau

SEQ ID NO: 3350194 - RNA, 17 nt, Human
aauaggaaaaacugauu

SEQ ID NO: 3350195 - RNA, 18 nt, Human
aauaggaaaaacugauuu

SEQ ID NO: 3350196 - RNA, 19 nt, Human
aauaggaaaaacugauuuu

SEQ ID NO: 3350197 - RNA, 14 nt, Human
aauagcugggacua

SEQ ID NO: 3350198 - RNA, 13 nt, Human
aauagcugggacu

SEQ ID NO: 3350199 - RNA, 23 nt, Human
aauagacaauuuauuauggcaca

SEQ ID NO: 3350200 - RNA, 18 nt, Human
aauagacaauuuauuaug

SEQ ID NO: 3350201 - RNA, 14 nt, Human
uaacauggaaguac

SEQ ID NO: 3350202 - RNA, 15 nt, Human
uaacuaaaagguaug

SEQ ID NO: 3350203 - RNA, 14 nt, Human
uaacuaaaagguau

SEQ ID NO: 3350204 - RNA, 15 nt, Human
uaacauggaaguacu

SEQ ID NO: 3350205 - RNA, 11 nt, Human
aauauugcuga

SEQ ID NO: 3350206 - RNA, 12 nt, Human
aauauugcugau

SEQ ID NO: 3350207 - RNA, 13 nt, Human
aauauugcugaug

SEQ ID NO: 3350208 - RNA, 15 nt, Human
aauauugcugauggu

SEQ ID NO: 3350209 - RNA, 18 nt, Human
aauauugcugauggugca

SEQ ID NO: 3350210 - RNA, 21 nt, Human
aauauugcugauggugcaaug

SEQ ID NO: 3350211 - RNA, 22 nt, Human
aauauugcugauggugcaauga

SEQ ID NO: 3350212 - RNA, 18 nt, Human
aauauugauaugcuuaua

SEQ ID NO: 3350213 - RNA, 17 nt, Human
aauauugauaugcuuau

SEQ ID NO: 3350214 - RNA, 15 nt, Human
uaacuuuuauaaacu

SEQ ID NO: 3350215 - RNA, 17 nt, Human
uaacuuuuauaaacuuu

SEQ ID NO: 3350216 - RNA, 18 nt, Human
uaacuuuuauaaacuuua

SEQ ID NO: 3350217 - RNA, 19 nt, Human
aauaucugaaaauguaugu

SEQ ID NO: 3350218 - RNA, 18 nt, Human
aauaucugaaaauguaug

SEQ ID NO: 3350219 - RNA, 17 nt, Human
aauaucugaaaauguau

SEQ ID NO: 3350220 - RNA, 16 nt, Human
aauaucugaaaaugua

SEQ ID NO: 3350221 - RNA, 20 nt, Human
aauaucugaaaauguaugug

SEQ ID NO: 3350222 - RNA, 17 nt, Human
aaaacacauuuuucuua

SEQ ID NO: 3350223 - RNA, 15 nt, Human
aaaacacauuuuucu

SEQ ID NO: 3350224 - RNA, 19 nt, Human
aaaacacuguucucugccc

SEQ ID NO: 3350225 - RNA, 11 nt, Human
aaaagaaaaag

SEQ ID NO: 3350226 - RNA, 14 nt, Human
aaaauaaaacuuuu

SEQ ID NO: 3350227 - RNA, 13 nt, Human
aaaaucagccugc

SEQ ID NO: 3350228 - RNA, 17 nt, Human
aaaaucagccugcucca

SEQ ID NO: 3350229 - RNA, 21 nt, Human
aaaaucagccugcuccagcug

SEQ ID NO: 3350230 - RNA, 18 nt, Human
aaaaucucaaauuucuaa

SEQ ID NO: 3350231 - RNA, 15 nt, Human
aaaaucucaaauuuc

SEQ ID NO: 3350232 - RNA, 16 nt, Human
aaaaucucaaauuucu

SEQ ID NO: 3350233 - RNA, 15 nt, Human
aaaccgccaaggcug

SEQ ID NO: 3350234 - RNA, 16 nt, Human
aaaccgccaaggcugg

SEQ ID NO: 3350235 - RNA, 12 nt, Human
aaacccagcucu

SEQ ID NO: 3350236 - RNA, 16 nt, Human
aaacccagcucugguc

SEQ ID NO: 3350237 - RNA, 12 nt, Human
aaacucuuaaaa

SEQ ID NO: 3350238 - RNA, 23 nt, Human
aaacucuuaaaacccaagugccu

SEQ ID NO: 3350239 - RNA, 22 nt, Human
aaacugauuuuuuuuuccuuca

SEQ ID NO: 3350240 - RNA, 23 nt, Human
aaacugauuuuuuuuuccuucag

SEQ ID NO: 3350241 - RNA, 20 nt, Human
aaagauauuuugcuuuguga

SEQ ID NO: 3350242 - RNA, 16 nt, Human
aaagccuccuccagcc

SEQ ID NO: 3350243 - RNA, 16 nt, Human
aaccuuuugagugccu

SEQ ID NO: 3350244 - RNA, 23 nt, Human
aaccuuuugagugccuuacacaa

SEQ ID NO: 3350245 - RNA, 23 nt, Human
aacauggccuuugcuugaaagaa

SEQ ID NO: 3350246 - RNA, 15 nt, Human
aaauucuugcaaagu

SEQ ID NO: 3350247 - RNA, 23 nt, Human
aaauucuucuccacuuucuagcc

SEQ ID NO: 3350248 - RNA, 11 nt, Human
aacaggcagau

SEQ ID NO: 3350249 - RNA, 22 nt, Human
aacauggccuuugcuugaaaga

SEQ ID NO: 3350250 - RNA, 14 nt, Human
aaaggaugcacaga

SEQ ID NO: 3350251 - RNA, 20 nt, Human
aaaggaugcccaaagaugca

SEQ ID NO: 3350252 - RNA, 19 nt, Human
aaaugcuguaacuuucuga

SEQ ID NO: 3350253 - RNA, 13 nt, Human
aaaucuuuuugcu

SEQ ID NO: 3350254 - RNA, 14 nt, Human
aaaucuuuuugcuu

SEQ ID NO: 3350255 - RNA, 19 nt, Human
aaaucucaaauuucuaaau

SEQ ID NO: 3350256 - RNA, 13 nt, Human
aaggcaaggcugu

SEQ ID NO: 3350257 - RNA, 15 nt, Human
aaggcaaggcuguca

SEQ ID NO: 3350258 - RNA, 13 nt, Human
aagcugcacccuc

SEQ ID NO: 3350259 - RNA, 19 nt, Human
aagcugcacccucaggcag

SEQ ID NO: 3350260 - RNA, 17 nt, Human
aagauacaguuacucag

SEQ ID NO: 3350261 - RNA, 19 nt, Human
aagauaauauuaaggaaga

SEQ ID NO: 3350262 - RNA, 21 nt, Human
aagauaauauuaaggaagaca

SEQ ID NO: 3350263 - RNA, 14 nt, Human
aagauaaaugugcu

SEQ ID NO: 3350264 - RNA, 23 nt, Human
aagccaguguugccuaaguauua

SEQ ID NO: 3350265 - RNA, 18 nt, Human
aagccaguguugccuaag

SEQ ID NO: 3350266 - RNA, 15 nt, Human
aagcgugagccacug

SEQ ID NO: 3350267 - RNA, 14 nt, Human
aagcggcuggcagc

SEQ ID NO: 3350268 - RNA, 20 nt, Human
aagacaaugugaaaagaaaa

SEQ ID NO: 3350269 - RNA, 22 nt, Human
aagacaaugacuuacuguacau

SEQ ID NO: 3350270 - RNA, 19 nt, Human
aagacaaugugaaaagaaa

SEQ ID NO: 3350271 - RNA, 23 nt, Human
aagacagauacuccuccaagguu

SEQ ID NO: 3350272 - RNA, 15 nt, Human
aagaccacguuucua

SEQ ID NO: 3350273 - RNA, 17 nt, Human
aagaccacguuucuaaa

SEQ ID NO: 3350274 - RNA, 13 nt, Human
aagagaaaaaaua

SEQ ID NO: 3350275 - RNA, 19 nt, Human
aagacuuuucuuucagcca

SEQ ID NO: 3350276 - RNA, 21 nt, Human
aagacuuuuccaacccucauc

SEQ ID NO: 3350277 - RNA, 12 nt, Human
aagacuuuucuu

SEQ ID NO: 3350278 - RNA, 17 nt, Human
aagacuuuuccaacccu

SEQ ID NO: 3350279 - RNA, 20 nt, Human
aagaguaggaagacuuugga

SEQ ID NO: 3350280 - RNA, 14 nt, Human
aagugcugcauuua

SEQ ID NO: 3350281 - RNA, 22 nt, Human
aagugcugcauuuaaaagauac

SEQ ID NO: 3350282 - RNA, 12 nt, Human
aagugcugggau

SEQ ID NO: 3350283 - RNA, 16 nt, Human
aauaaugugaaacugg

SEQ ID NO: 3350284 - RNA, 17 nt, Human
aauaaugugaaacugga

SEQ ID NO: 3350285 - RNA, 22 nt, Human
aauaaugugaaacuggauuaaa

SEQ ID NO: 3350286 - RNA, 14 nt, Human
aauaaagcagcguu

SEQ ID NO: 3350287 - RNA, 13 nt, Human
aauauuaagaaag

SEQ ID NO: 3350288 - RNA, 23 nt, Human
aauauguggaguucaucuugaau

SEQ ID NO: 3350289 - RNA, 19 nt, Human
aauauauacgaacaaaaca

SEQ ID NO: 3350290 - RNA, 18 nt, Human
aauauauacgaacaaaac

SEQ ID NO: 3350291 - RNA, 15 nt, Human
aaucaccgaaaacgu

SEQ ID NO: 3350292 - RNA, 23 nt, Human
aaucaccgaaaacguggcugcuu

SEQ ID NO: 3350293 - RNA, 21 nt, Human
aaucaccgaaaacguggcugc

SEQ ID NO: 3350294 - RNA, 20 nt, Human
aaugaaagacuguacaaagu

SEQ ID NO: 3350295 - RNA, 18 nt, Human
aaugaaagacuguacaaa

SEQ ID NO: 3350296 - RNA, 21 nt, Human
aaugaaagacuguacaaagua

SEQ ID NO: 3350297 - RNA, 20 nt, Human
aaugaugccaugaggaacaa

SEQ ID NO: 3350298 - RNA, 19 nt, Human
aaugaugccaugaggaaca

SEQ ID NO: 3350299 - RNA, 20 nt, Human
acgauuucuguuuagauaau

SEQ ID NO: 3350300 - RNA, 23 nt, Human
acgauuucuguuuagauaauaca

SEQ ID NO: 3350301 - RNA, 19 nt, Human
acgauuucuguuuagauaa

SEQ ID NO: 3350302 - RNA, 22 nt, Human
acgcugugcugcccugcccacc

SEQ ID NO: 3350303 - RNA, 19 nt, Human
acgcugugcugcccugccc

SEQ ID NO: 3350304 - RNA, 12 nt, Human
acgucugugcca

SEQ ID NO: 3350305 - RNA, 13 nt, Human
acgucugugccau

SEQ ID NO: 3350306 - RNA, 15 nt, Human
acggaauaguuggcu

SEQ ID NO: 3350307 - RNA, 19 nt, Human
acggaauaguuggcuagga

SEQ ID NO: 3350308 - RNA, 17 nt, Human
acggacacucaaaagcu

SEQ ID NO: 3350309 - RNA, 18 nt, Human
acuaauggggcggugaga

SEQ ID NO: 3350310 - RNA, 23 nt, Human
accugccaggaagccagcaggcu

SEQ ID NO: 3350311 - RNA, 21 nt, Human
accugccaggaagccagcagg

SEQ ID NO: 3350312 - RNA, 22 nt, Human
accugccaggaagccagcaggc

SEQ ID NO: 3350313 - RNA, 12 nt, Human
accugccccuca

SEQ ID NO: 3350314 - RNA, 15 nt, Human
accugccccucaacu

SEQ ID NO: 3350315 - RNA, 19 nt, Human
accugccaggaagccagca

SEQ ID NO: 3350316 - RNA, 20 nt, Human
accucugccugaagucacac

SEQ ID NO: 3350317 - RNA, 12 nt, Human
accucugccuga

SEQ ID NO: 3350318 - RNA, 21 nt, Human
accucaggugauccacccacc

SEQ ID NO: 3350319 - RNA, 20 nt, Human
accucaggugauccacccac

SEQ ID NO: 3350320 - RNA, 17 nt, Human
acccugugauggggccc

SEQ ID NO: 3350321 - RNA, 19 nt, Human
acccugugauggggcccug

SEQ ID NO: 3350322 - RNA, 20 nt, Human
acccugugauggggcccugc

SEQ ID NO: 3350323 - RNA, 16 nt, Human
accgggcacucagaag

SEQ ID NO: 3350324 - RNA, 20 nt, Human
accgggccacagagaaagua

SEQ ID NO: 3350325 - RNA, 14 nt, Human
accgggcacucaga

SEQ ID NO: 3350326 - RNA, 12 nt, Human
accgggcacuca

SEQ ID NO: 3350327 - RNA, 11 nt, Human
accucagccuc

SEQ ID NO: 3350328 - RNA, 12 nt, Human
accucagccucc

SEQ ID NO: 3350329 - RNA, 23 nt, Human
accgugaggccagagacacaagc

SEQ ID NO: 3350330 - RNA, 17 nt, Human
accgugaggccagagac

SEQ ID NO: 3350331 - RNA, 19 nt, Human
accggcuggccuggccccu

SEQ ID NO: 3350332 - RNA, 18 nt, Human
accgugaggccagagaca

SEQ ID NO: 3350333 - RNA, 14 nt, Human
acccuauugcugcu

SEQ ID NO: 3350334 - RNA, 19 nt, Human
acccuauugcugcuugagg

SEQ ID NO: 3350335 - RNA, 13 nt, Human
acccuauugcugc

SEQ ID NO: 3350336 - RNA, 13 nt, Human
acccucaggcagg

SEQ ID NO: 3350337 - RNA, 14 nt, Human
acccucaggcaggu

SEQ ID NO: 3350338 - RNA, 15 nt, Human
acccucaggcaggug

SEQ ID NO: 3350339 - RNA, 16 nt, Human
acccucaggcaggugg

SEQ ID NO: 3350340 - RNA, 13 nt, Human
acccucaucacca

SEQ ID NO: 3350341 - RNA, 23 nt, Human
acccuggcacuauaauguaagcu

SEQ ID NO: 3350342 - RNA, 23 nt, Human
acccucaucaccaacgucugugc

SEQ ID NO: 3350343 - RNA, 16 nt, Human
acccuggggagaaagu

SEQ ID NO: 3350344 - RNA, 16 nt, Human
acccugugauggggcc

SEQ ID NO: 3350345 - RNA, 16 nt, Human
acugugccaugugcca

SEQ ID NO: 3350346 - RNA, 18 nt, Human
acugugccaugugccagg

SEQ ID NO: 3350347 - RNA, 17 nt, Human
acugugccaugugccag

SEQ ID NO: 3350348 - RNA, 14 nt, Human
acugccaugccagc

SEQ ID NO: 3350349 - RNA, 20 nt, Human
acugcuuuuggucuguguga

SEQ ID NO: 3350350 - RNA, 23 nt, Human
acuuggggggcugaggugggagg

SEQ ID NO: 3350351 - RNA, 13 nt, Human
acuguuucaaacu

SEQ ID NO: 3350352 - RNA, 15 nt, Human
acuguuucaaacuuu

SEQ ID NO: 3350353 - RNA, 18 nt, Human
acuguuucaaacuuuacu

SEQ ID NO: 3350354 - RNA, 19 nt, Human
acuguuucaaacuuuacua

SEQ ID NO: 3350355 - RNA, 12 nt, Human
acugaauuucuu

SEQ ID NO: 3350356 - RNA, 23 nt, Human
acugaauuucuuuugccguuauu

SEQ ID NO: 3350357 - RNA, 18 nt, Human
acugacauuguuggccaa

SEQ ID NO: 3350358 - RNA, 17 nt, Human
acugacauuguuggcca

SEQ ID NO: 3350359 - RNA, 16 nt, Human
acugauuuuuuuuucc

SEQ ID NO: 3350360 - RNA, 17 nt, Human
acugauuuuuuuuuccu

SEQ ID NO: 3350361 - RNA, 18 nt, Human
acugauuuuuuuuuccuu

SEQ ID NO: 3350362 - RNA, 19 nt, Human
acugauuuuuuuuuccuuc

SEQ ID NO: 3350363 - RNA, 23 nt, Human
acugaugggcaacccccagccug

SEQ ID NO: 3350364 - RNA, 15 nt, Human
acucuacagaggcca

SEQ ID NO: 3350365 - RNA, 22 nt, Human
acucccaucugugaaaggaaag

SEQ ID NO: 3350366 - RNA, 15 nt, Human
aauuucccaaagcag

SEQ ID NO: 3350367 - RNA, 17 nt, Human
aauuucccaaagcagug

SEQ ID NO: 3350368 - RNA, 19 nt, Human
aauucucagaaucucaaau

SEQ ID NO: 3350369 - RNA, 14 nt, Human
aauucuacuuugag

SEQ ID NO: 3350370 - RNA, 15 nt, Human
aauucucuaguuuga

SEQ ID NO: 3350371 - RNA, 17 nt, Human
aauucucuaguuugauu

SEQ ID NO: 3350372 - RNA, 15 nt, Human
aauucucuuauccaa

SEQ ID NO: 3350373 - RNA, 21 nt, Human
aauucucauuugucacacacu

SEQ ID NO: 3350374 - RNA, 16 nt, Human
aauuguaaggaaugau

SEQ ID NO: 3350375 - RNA, 22 nt, Human
aauuguaaggaaugauuaauua

SEQ ID NO: 3350376 - RNA, 14 nt, Human
aauucuguuuuucu

SEQ ID NO: 3350377 - RNA, 18 nt, Human
aauucuguuuuucuaggc

SEQ ID NO: 3350378 - RNA, 19 nt, Human
aauuaugaguuauuuuuau

SEQ ID NO: 3350379 - RNA, 15 nt, Human
acaaguuaaauaaau

SEQ ID NO: 3350380 - RNA, 16 nt, Human
acaaggcaaggcuguc

SEQ ID NO: 3350381 - RNA, 17 nt, Human
acaaggcaaggcuguca

SEQ ID NO: 3350382 - RNA, 19 nt, Human
acaaggcaaggcugucaau

SEQ ID NO: 3350383 - RNA, 15 nt, Human
acaaggcaaggcugu

SEQ ID NO: 3350384 - RNA, 16 nt, Human
acacagcucuucucca

SEQ ID NO: 3350385 - RNA, 14 nt, Human
acacagcucuucuc

SEQ ID NO: 3350386 - RNA, 18 nt, Human
acacagcucuucuccagg

SEQ ID NO: 3350387 - RNA, 13 nt, Human
acacagcucuucu

SEQ ID NO: 3350388 - RNA, 23 nt, Human
acaccagagcccaccuuggcuca

SEQ ID NO: 3350389 - RNA, 18 nt, Human
acaccagagcccaccuug

SEQ ID NO: 3350390 - RNA, 13 nt, Human
acaccagagccca

SEQ ID NO: 3350391 - RNA, 13 nt, Human
acacgcgcgcaca

SEQ ID NO: 3350392 - RNA, 14 nt, Human
accagagcugccac

SEQ ID NO: 3350393 - RNA, 16 nt, Human
accagagcugccaccu

SEQ ID NO: 3350394 - RNA, 13 nt, Human
accagagcugcca

SEQ ID NO: 3350395 - RNA, 12 nt, Human
accagagcugcc

SEQ ID NO: 3350396 - RNA, 12 nt, Human
accaagcccagu

SEQ ID NO: 3350397 - RNA, 13 nt, Human
accacguuucuaa

SEQ ID NO: 3350398 - RNA, 14 nt, Human
accacguuucuaaa

SEQ ID NO: 3350399 - RNA, 16 nt, Human
accacgcuggaccuug

SEQ ID NO: 3350400 - RNA, 14 nt, Human
accacgcuggaccu

SEQ ID NO: 3350401 - RNA, 18 nt, Human
accacgcuggaccuugaa

SEQ ID NO: 3350402 - RNA, 14 nt, Human
accaacgucugugc

SEQ ID NO: 3350403 - RNA, 17 nt, Human
accaacgucugugccau

SEQ ID NO: 3350404 - RNA, 20 nt, Human
acaugccucucucaggccaa

SEQ ID NO: 3350405 - RNA, 18 nt, Human
acaugugcacaugcacgu

SEQ ID NO: 3350406 - RNA, 13 nt, Human
acaugcacgugug

SEQ ID NO: 3350407 - RNA, 23 nt, Human
acaugcacagcuaacauggaagu

SEQ ID NO: 3350408 - RNA, 16 nt, Human
acauacaauuccaaac

SEQ ID NO: 3350409 - RNA, 20 nt, Human
acauacaggaagguagaaau

SEQ ID NO: 3350410 - RNA, 18 nt, Human
acauacacgaaagagaga

SEQ ID NO: 3350411 - RNA, 18 nt, Human
acagcucuucuccaggcu

SEQ ID NO: 3350412 - RNA, 20 nt, Human
acagcucuucuccaggcugu

SEQ ID NO: 3350413 - RNA, 19 nt, Human
acagcucuucuccaggcug

SEQ ID NO: 3350414 - RNA, 17 nt, Human
acaggcaaugcuggcug

SEQ ID NO: 3350415 - RNA, 14 nt, Human
acaggcacccacca

SEQ ID NO: 3350416 - RNA, 16 nt, Human
acaggcaaugcuggcu

SEQ ID NO: 3350417 - RNA, 15 nt, Human
acaggcaaugcuggc

SEQ ID NO: 3350418 - RNA, 14 nt, Human
acaggcaaugcugg

SEQ ID NO: 3350419 - RNA, 23 nt, Human
acagugagucgaggacagggagg

SEQ ID NO: 3350420 - RNA, 23 nt, Human
acaggcacccaccaucaugucug

SEQ ID NO: 3350421 - RNA, 14 nt, Human
agaccacguuucua

SEQ ID NO: 3350422 - RNA, 23 nt, Human
agaccaucccugaaggccccgcc

SEQ ID NO: 3350423 - RNA, 21 nt, Human
agaccaucccugaaggccccg

SEQ ID NO: 3350424 - RNA, 21 nt, Human
agacagcccgggcucugccuc

SEQ ID NO: 3350425 - RNA, 22 nt, Human
agacagcccgggcucugccucc

SEQ ID NO: 3350426 - RNA, 23 nt, Human
agacagcccgggcucugccuccc

SEQ ID NO: 3350427 - RNA, 18 nt, Human
agacgcugugcugcccug

SEQ ID NO: 3350428 - RNA, 19 nt, Human
agacgcugugcugcccugc

SEQ ID NO: 3350429 - RNA, 17 nt, Human
agacgcugugcugcccu

SEQ ID NO: 3350430 - RNA, 16 nt, Human
agacgcugugcugccc

SEQ ID NO: 3350431 - RNA, 23 nt, Human
agacaaugacuuacuguacauga

SEQ ID NO: 3350432 - RNA, 20 nt, Human
agacaaugugaaaagaaaaa

SEQ ID NO: 3350433 - RNA, 16 nt, Human
agacucuuuggacacu

SEQ ID NO: 3350434 - RNA, 18 nt, Human
agagaaaguacuucucca

SEQ ID NO: 3350435 - RNA, 15 nt, Human
agagaaacaaacuuu

SEQ ID NO: 3350436 - RNA, 14 nt, Human
agagaaacaaacuu

SEQ ID NO: 3350437 - RNA, 13 nt, Human
agagaaacaaacu

SEQ ID NO: 3350438 - RNA, 17 nt, Human
agagcccacgcccccac

SEQ ID NO: 3350439 - RNA, 11 nt, Human
agagagcaaga

SEQ ID NO: 3350440 - RNA, 19 nt, Human
agagagcaagacgcugugc

SEQ ID NO: 3350441 - RNA, 18 nt, Human
agagcccacgcccccacu

SEQ ID NO: 3350442 - RNA, 23 nt, Human
agaaugcacaaacagaggccgcc

SEQ ID NO: 3350443 - RNA, 22 nt, Human
agaaugcacaaacagaggccgc

SEQ ID NO: 3350444 - RNA, 18 nt, Human
agaaugcucuuuacuuca

SEQ ID NO: 3350445 - RNA, 17 nt, Human
agaaucucaaauaacua

SEQ ID NO: 3350446 - RNA, 14 nt, Human
agaagucacacagu

SEQ ID NO: 3350447 - RNA, 19 nt, Human
agaagucuuagauguauau

SEQ ID NO: 3350448 - RNA, 17 nt, Human
agaagucuuagauguau

SEQ ID NO: 3350449 - RNA, 21 nt, Human
agaaccaaaaagaggcuaugu

SEQ ID NO: 3350450 - RNA, 15 nt, Human
agaagagaaugcaca

SEQ ID NO: 3350451 - RNA, 21 nt, Human
agaagagauugugguuucauu

SEQ ID NO: 3350452 - RNA, 17 nt, Human
agaaccaaaaagaggcu

SEQ ID NO: 3350453 - RNA, 18 nt, Human
agaaccaaaaagaggcua

SEQ ID NO: 3350454 - RNA, 20 nt, Human
agcacuaaggugugcucuga

SEQ ID NO: 3350455 - RNA, 21 nt, Human
agcacagacccugcccugugg

SEQ ID NO: 3350456 - RNA, 20 nt, Human
agcacagacccugcccugug

SEQ ID NO: 3350457 - RNA, 17 nt, Human
agcagugcaugcugucc

SEQ ID NO: 3350458 - RNA, 13 nt, Human
agcagugcaugcu

SEQ ID NO: 3350459 - RNA, 16 nt, Human
agcagugcaugcuguc

SEQ ID NO: 3350460 - RNA, 18 nt, Human
agcagcguuucuaugaca

SEQ ID NO: 3350461 - RNA, 19 nt, Human
agcagcguuucuaugacac

SEQ ID NO: 3350462 - RNA, 20 nt, Human
agcagccuggacccugugga

SEQ ID NO: 3350463 - RNA, 16 nt, Human
agcagccuggacccug

SEQ ID NO: 3350464 - RNA, 16 nt, Human
agcaucuaugugagac

SEQ ID NO: 3350465 - RNA, 23 nt, Human
agccagcaggcucucaggccagc

SEQ ID NO: 3350466 - RNA, 22 nt, Human
agccagcaggcucucaggccag

SEQ ID NO: 3350467 - RNA, 21 nt, Human
agccagcaggcucucaggcca

SEQ ID NO: 3350468 - RNA, 17 nt, Human
agcccacgcccccacug

SEQ ID NO: 3350469 - RNA, 18 nt, Human
agcccacgcccccacugg

SEQ ID NO: 3350470 - RNA, 15 nt, Human
agcccacgcccccac

SEQ ID NO: 3350471 - RNA, 19 nt, Human
agcccacgcccccacuggu

SEQ ID NO: 3350472 - RNA, 23 nt, Human
agcccaccccucaacaccucugc

SEQ ID NO: 3350473 - RNA, 15 nt, Human
agcccaccccucaac

SEQ ID NO: 3350474 - RNA, 13 nt, Human
agcccaccuuggc

SEQ ID NO: 3350475 - RNA, 14 nt, Human
agccagauuucacu

SEQ ID NO: 3350476 - RNA, 17 nt, Human
agccagauuucacucuc

SEQ ID NO: 3350477 - RNA, 20 nt, Human
agccagauuucacucuccuu

SEQ ID NO: 3350478 - RNA, 14 nt, Human
agauucuuuccuga

SEQ ID NO: 3350479 - RNA, 20 nt, Human
agaugggugcuuggaggaag

SEQ ID NO: 3350480 - RNA, 22 nt, Human
agaugggugcuuggaggaagga

SEQ ID NO: 3350481 - RNA, 18 nt, Human
agaugacaucugucuagg

SEQ ID NO: 3350482 - RNA, 18 nt, Human
agaucucuaacuucacca

SEQ ID NO: 3350483 - RNA, 16 nt, Human
agauugcaacaggcug

SEQ ID NO: 3350484 - RNA, 15 nt, Human
agauucuuuccugag

SEQ ID NO: 3350485 - RNA, 16 nt, Human
agauucuuuccugagg

SEQ ID NO: 3350486 - RNA, 16 nt, Human
agauugcaccacugca

SEQ ID NO: 3350487 - RNA, 17 nt, Human
agauugcaacaggcugg

SEQ ID NO: 3350488 - RNA, 23 nt, Human
agauugcaacaggcugggcuuca

SEQ ID NO: 3350489 - RNA, 19 nt, Human
agcaaauucuguuuuucua

SEQ ID NO: 3350490 - RNA, 13 nt, Human
agaguugaagaca

SEQ ID NO: 3350491 - RNA, 14 nt, Human
agaguugaagacag

SEQ ID NO: 3350492 - RNA, 15 nt, Human
agaguugaagacaga

SEQ ID NO: 3350493 - RNA, 20 nt, Human
agauagccaaggccaaagga

SEQ ID NO: 3350494 - RNA, 23 nt, Human
agaggggguggccucccaacuca

SEQ ID NO: 3350495 - RNA, 20 nt, Human
agagggucugaggaauccag

SEQ ID NO: 3350496 - RNA, 19 nt, Human
agaguggggauaugauuua

SEQ ID NO: 3350497 - RNA, 19 nt, Human
aggcccucugcccacuccc

SEQ ID NO: 3350498 - RNA, 20 nt, Human
aggcccucugcccacucccu

SEQ ID NO: 3350499 - RNA, 24 nt, Human
aggcuguaucccaugagccucagc

SEQ ID NO: 3350500 - RNA, 12 nt, Human
aggcugucaauu

SEQ ID NO: 3350501 - RNA, 17 nt, Human
aggcugcagugagccga

SEQ ID NO: 3350502 - RNA, 19 nt, Human
aggcugcagugagccgaga

SEQ ID NO: 3350503 - RNA, 23 nt, Human
aggcuguaucccaugagccucag

SEQ ID NO: 3350504 - RNA, 18 nt, Human
agggccuggcucaggugg

SEQ ID NO: 3350505 - RNA, 13 nt, Human
agggccuggcuca

SEQ ID NO: 3350506 - RNA, 14 nt, Human
agggccuggcucag

SEQ ID NO: 3350507 - RNA, 18 nt, Human
agggccuggccugagcug

SEQ ID NO: 3350508 - RNA, 13 nt, Human
aggccagcugcuu

SEQ ID NO: 3350509 - RNA, 14 nt, Human
aggccagcugcuug

SEQ ID NO: 3350510 - RNA, 16 nt, Human
aggccagcugcuuggg

SEQ ID NO: 3350511 - RNA, 16 nt, Human
aggccaggcccucugc

SEQ ID NO: 3350512 - RNA, 17 nt, Human
aggccaggcccucugcc

SEQ ID NO: 3350513 - RNA, 18 nt, Human
aggccaggcccucugccc

SEQ ID NO: 3350514 - RNA, 19 nt, Human
aggccaggcccucugccca

SEQ ID NO: 3350515 - RNA, 23 nt, Human
aggccaggcccucugcccacucc

SEQ ID NO: 3350516 - RNA, 17 nt, Human
aggcccucugcccacuc

SEQ ID NO: 3350517 - RNA, 15 nt, Human
aggcccucugcccac

SEQ ID NO: 3350518 - RNA, 16 nt, Human
aggccaugggccuccu

SEQ ID NO: 3350519 - RNA, 14 nt, Human
aggccaugggccuc

SEQ ID NO: 3350520 - RNA, 22 nt, Human
aggcauguucucugaggacacu

SEQ ID NO: 3350521 - RNA, 20 nt, Human
aggcauguucucugaggaca

SEQ ID NO: 3350522 - RNA, 21 nt, Human
aggcauuccccaggaggccag

SEQ ID NO: 3350523 - RNA, 21 nt, Human
aggcaugugaugagaggaaau

SEQ ID NO: 3350524 - RNA, 22 nt, Human
aggcauuccccaggaggccagc

SEQ ID NO: 3350525 - RNA, 23 nt, Human
aggcauuccccaggaggccagcc

SEQ ID NO: 3350526 - RNA, 12 nt, Human
aggccagcugcu

SEQ ID NO: 3350527 - RNA, 23 nt, Human
aggcaugugaugagaggaaauca

SEQ ID NO: 3350528 - RNA, 24 nt, Human
aggcaugugaugagaggaaaucac

SEQ ID NO: 3350529 - RNA, 15 nt, Human
aggcagccaggccac

SEQ ID NO: 3350530 - RNA, 16 nt, Human
aggcagccaggccaca

SEQ ID NO: 3350531 - RNA, 14 nt, Human
aggcagccaggcca

SEQ ID NO: 3350532 - RNA, 13 nt, Human
aggcagauacagg

SEQ ID NO: 3350533 - RNA, 14 nt, Human
aggagugagcacua

SEQ ID NO: 3350534 - RNA, 12 nt, Human
aggagugagcac

SEQ ID NO: 3350535 - RNA, 15 nt, Human
aggaggucucuaaga

SEQ ID NO: 3350536 - RNA, 19 nt, Human
aggaaguacuggagaaaau

SEQ ID NO: 3350537 - RNA, 14 nt, Human
aggaggucucuaag

SEQ ID NO: 3350538 - RNA, 23 nt, Human
agcucaccagccccagugcccac

SEQ ID NO: 3350539 - RNA, 22 nt, Human
agcucaccagccccagugccca

SEQ ID NO: 3350540 - RNA, 15 nt, Human
agcugacuuuucugu

SEQ ID NO: 3350541 - RNA, 15 nt, Human
agcuggucccacuca

SEQ ID NO: 3350542 - RNA, 22 nt, Human
agcugccuguucagcuccagcu

SEQ ID NO: 3350543 - RNA, 15 nt, Human
aggaacacuccuuca

SEQ ID NO: 3350544 - RNA, 23 nt, Human
aggaacuuaaauaaugugaaacu

SEQ ID NO: 3350545 - RNA, 12 nt, Human
aggaacacuccu

SEQ ID NO: 3350546 - RNA, 23 nt, Human
aggaacaaggcaaggcugucaau

SEQ ID NO: 3350547 - RNA, 14 nt, Human
aggaagguagaaau

SEQ ID NO: 3350548 - RNA, 11 nt, Human
aggaaguacug

SEQ ID NO: 3350549 - RNA, 15 nt, Human
aggaaguacuggaga

SEQ ID NO: 3350550 - RNA, 21 nt, Human
agcuuuguuuguugucagcug

SEQ ID NO: 3350551 - RNA, 14 nt, Human
agccuggacccugu

SEQ ID NO: 3350552 - RNA, 18 nt, Human
agccugggcaaugugaua

SEQ ID NO: 3350553 - RNA, 20 nt, Human
agccugggaggucaaggcug

SEQ ID NO: 3350554 - RNA, 21 nt, Human
agcucaccagccccagugccc

SEQ ID NO: 3350555 - RNA, 20 nt, Human
agcucaccagccccagugcc

SEQ ID NO: 3350556 - RNA, 14 nt, Human
agcucaccagcccc

SEQ ID NO: 3350557 - RNA, 13 nt, Human
agcucaccagccc

SEQ ID NO: 3350558 - RNA, 14 nt, Human
agcuaaugggacac

SEQ ID NO: 3350559 - RNA, 13 nt, Human
agcuaaugggaca

SEQ ID NO: 3350560 - RNA, 19 nt, Human
agcuaacauggaaguacua

SEQ ID NO: 3350561 - RNA, 20 nt, Human
agcuaacauggaaguacuau

SEQ ID NO: 3350562 - RNA, 15 nt, Human
agcgauucuucugcu

SEQ ID NO: 3350563 - RNA, 17 nt, Human
agcgauucuucugcuuc

SEQ ID NO: 3350564 - RNA, 14 nt, Human
aguucauacccugu

SEQ ID NO: 3350565 - RNA, 18 nt, Human
aguuccaccaucaagcca

SEQ ID NO: 3350566 - RNA, 21 nt, Human
aguuccaccaucaagccacca

SEQ ID NO: 3350567 - RNA, 18 nt, Human
aguugaaaaacagcugag

SEQ ID NO: 3350568 - RNA, 16 nt, Human
aguugaagacagagcu

SEQ ID NO: 3350569 - RNA, 17 nt, Human
aguugaagacagagcua

SEQ ID NO: 3350570 - RNA, 17 nt, Human
aguugaaaaacagcuga

SEQ ID NO: 3350571 - RNA, 17 nt, Human
aguuguuagugugucuu

SEQ ID NO: 3350572 - RNA, 22 nt, Human
aguuguuagugugucuuagugu

SEQ ID NO: 3350573 - RNA, 14 nt, Human
aguuugauuaaauu

SEQ ID NO: 3350574 - RNA, 11 nt, Human
aguuugcaguu

SEQ ID NO: 3350575 - RNA, 17 nt, Human
auacaccacuacauucu

SEQ ID NO: 3350576 - RNA, 21 nt, Human
auacaccacuacauucuguua

SEQ ID NO: 3350577 - RNA, 15 nt, Human
auacacgaaagagag

SEQ ID NO: 3350578 - RNA, 21 nt, Human
auaaagaugagugagcaugcc

SEQ ID NO: 3350579 - RNA, 23 nt, Human
auacaaugcugugcccuaaagug

SEQ ID NO: 3350580 - RNA, 17 nt, Human
auacaaugcugugcccu

SEQ ID NO: 3350581 - RNA, 12 nt, Human
auaauguuaaca

SEQ ID NO: 3350582 - RNA, 15 nt, Human
auacaccacuacauu

SEQ ID NO: 3350583 - RNA, 18 nt, Human
agucuggcccuuccuuuu

SEQ ID NO: 3350584 - RNA, 16 nt, Human
agucgaggacagggag

SEQ ID NO: 3350585 - RNA, 18 nt, Human
agucuggaaugcaguggu

SEQ ID NO: 3350586 - RNA, 20 nt, Human
agucugauucccaagcucug

SEQ ID NO: 3350587 - RNA, 22 nt, Human
agucugauucccaagcucugcu

SEQ ID NO: 3350588 - RNA, 21 nt, Human
agucugauucccaagcucugc

SEQ ID NO: 3350589 - RNA, 16 nt, Human
aguccuuaccagcaga

SEQ ID NO: 3350590 - RNA, 18 nt, Human
aguccuuaccagcagagc

SEQ ID NO: 3350591 - RNA, 19 nt, Human
agugacagaggcagcccca

SEQ ID NO: 3350592 - RNA, 16 nt, Human
agugacagaggcagcc

SEQ ID NO: 3350593 - RNA, 14 nt, Human
agugacagaggcag

SEQ ID NO: 3350594 - RNA, 19 nt, Human
agugccuuauggaacacuc

SEQ ID NO: 3350595 - RNA, 20 nt, Human
agugccuuauggaacacucu

SEQ ID NO: 3350596 - RNA, 21 nt, Human
agugccuuauggaacacucug

SEQ ID NO: 3350597 - RNA, 22 nt, Human
agugccuuauggaacacucuga

SEQ ID NO: 3350598 - RNA, 18 nt, Human
agugccuuauggaacacu

SEQ ID NO: 3350599 - RNA, 17 nt, Human
agugauucuccugccuc

SEQ ID NO: 3350600 - RNA, 20 nt, Human
agugauucuccugccucagc

SEQ ID NO: 3350601 - RNA, 18 nt, Human
agugauucuccugccuca

SEQ ID NO: 3350602 - RNA, 19 nt, Human
agugauucuccugccucag

SEQ ID NO: 3350603 - RNA, 22 nt, Human
agugauccucccaccucagccu

SEQ ID NO: 3350604 - RNA, 20 nt, Human
agugauccucccaccucagc

SEQ ID NO: 3350605 - RNA, 19 nt, Human
agugauccucccaccucag

SEQ ID NO: 3350606 - RNA, 18 nt, Human
aguaaaugggggugcauu

SEQ ID NO: 3350607 - RNA, 19 nt, Human
aguaaaugggggugcauuu

SEQ ID NO: 3350608 - RNA, 20 nt, Human
aguaaaugggggugcauuug

SEQ ID NO: 3350609 - RNA, 21 nt, Human
aguaaaugggggugcauuuga

SEQ ID NO: 3350610 - RNA, 17 nt, Human
aguaacuuacuuaggug

SEQ ID NO: 3350611 - RNA, 21 nt, Human
aguacuucuccacccugcucu

SEQ ID NO: 3350612 - RNA, 19 nt, Human
aguacuucuccacccugcu

SEQ ID NO: 3350613 - RNA, 20 nt, Human
aguacuucuccacccugcuc

SEQ ID NO: 3350614 - RNA, 15 nt, Human
aguacuggagaaaau

SEQ ID NO: 3350615 - RNA, 22 nt, Human
augaggcauuuguuugaacuga

SEQ ID NO: 3350616 - RNA, 15 nt, Human
augaccuuucaauag

SEQ ID NO: 3350617 - RNA, 13 nt, Human
augaccuuucaau

SEQ ID NO: 3350618 - RNA, 11 nt, Human
augagccuggc

SEQ ID NO: 3350619 - RNA, 19 nt, Human
augagccucagcauccugg

SEQ ID NO: 3350620 - RNA, 21 nt, Human
augagccucagcauccuggca

SEQ ID NO: 3350621 - RNA, 23 nt, Human
augaaguaauaugcacacauuuu

SEQ ID NO: 3350622 - RNA, 14 nt, Human
augaaguaauaugc

SEQ ID NO: 3350623 - RNA, 21 nt, Human
augaaguaauaugcacacauu

SEQ ID NO: 3350624 - RNA, 12 nt, Human
augaaagacugu

SEQ ID NO: 3350625 - RNA, 23 nt, Human
augaagcauuuacuuuguguuca

SEQ ID NO: 3350626 - RNA, 23 nt, Human
aucuaggaagacuuuggaaagag

SEQ ID NO: 3350627 - RNA, 18 nt, Human
augccugguggcagcugc

SEQ ID NO: 3350628 - RNA, 19 nt, Human
augccugguggcagcugcg

SEQ ID NO: 3350629 - RNA, 13 nt, Human
augccugguggca

SEQ ID NO: 3350630 - RNA, 12 nt, Human
augccugguggc

SEQ ID NO: 3350631 - RNA, 11 nt, Human
augccuggugg

SEQ ID NO: 3350632 - RNA, 21 nt, Human
augccugguggcagcugcggu

SEQ ID NO: 3350633 - RNA, 16 nt, Human
augcuuugaucccuuc

SEQ ID NO: 3350634 - RNA, 19 nt, Human
augcucugcauguuacaua

SEQ ID NO: 3350635 - RNA, 18 nt, Human
augcucugcauguuacau

SEQ ID NO: 3350636 - RNA, 15 nt, Human
augcucugcauguua

SEQ ID NO: 3350637 - RNA, 14 nt, Human
augcuucuucagag

SEQ ID NO: 3350638 - RNA, 17 nt, Human
augcuucuucagagacu

SEQ ID NO: 3350639 - RNA, 20 nt, Human
augcuucuucagagacuccu

SEQ ID NO: 3350640 - RNA, 18 nt, Human
auggcuuuugugcauuau

SEQ ID NO: 3350641 - RNA, 21 nt, Human
augggaaugaaugucagugug

SEQ ID NO: 3350642 - RNA, 22 nt, Human
aucuaggaagacuuuggaaaga

SEQ ID NO: 3350643 - RNA, 21 nt, Human
auccacugugccaugugccag

SEQ ID NO: 3350644 - RNA, 15 nt, Human
aucauccuaagcuau

SEQ ID NO: 3350645 - RNA, 23 nt, Human
aucauccacugugccaugugcca

SEQ ID NO: 3350646 - RNA, 20 nt, Human
aucaugacaaagacugagua

SEQ ID NO: 3350647 - RNA, 14 nt, Human
auagcacagacccu

SEQ ID NO: 3350648 - RNA, 20 nt, Human
aucaaaagguuaauaaagua

SEQ ID NO: 3350649 - RNA, 19 nt, Human
aucaaagagguuuuaaaaa

SEQ ID NO: 3350650 - RNA, 18 nt, Human
auauuuuuuucuuuucuu

SEQ ID NO: 3350651 - RNA, 20 nt, Human
caacaggcugggcuucagug

SEQ ID NO: 3350652 - RNA, 14 nt, Human
caaaggagauugga

SEQ ID NO: 3350653 - RNA, 20 nt, Human
caaaggagauuggaaggaac

SEQ ID NO: 3350654 - RNA, 16 nt, Human
caaaguggugagaggc

SEQ ID NO: 3350655 - RNA, 17 nt, Human
caaaguggugagaggca

SEQ ID NO: 3350656 - RNA, 23 nt, Human
caaaggguaucaggugcugccau

SEQ ID NO: 3350657 - RNA, 19 nt, Human
caaaggguaucaggugcug

SEQ ID NO: 3350658 - RNA, 21 nt, Human
caaaggguaucaggugcugcc

SEQ ID NO: 3350659 - RNA, 20 nt, Human
caaaggguaucaggugcugc

SEQ ID NO: 3350660 - RNA, 14 nt, Human
caaagagguuuuaa

SEQ ID NO: 3350661 - RNA, 21 nt, Human
caaagagguuuuaaaaaaauc

SEQ ID NO: 3350662 - RNA, 23 nt, Human
caaggggaauguuugccucugcc

SEQ ID NO: 3350663 - RNA, 13 nt, Human
caagggccuggcc

SEQ ID NO: 3350664 - RNA, 14 nt, Human
caagggccuggccu

SEQ ID NO: 3350665 - RNA, 15 nt, Human
caagggccuggccug

SEQ ID NO: 3350666 - RNA, 21 nt, Human
caaggggaauguuugccucug

SEQ ID NO: 3350667 - RNA, 20 nt, Human
caagugauucuccugccuca

SEQ ID NO: 3350668 - RNA, 15 nt, Human
caagugagacccugu

SEQ ID NO: 3350669 - RNA, 18 nt, Human
caagugauucuccugccu

SEQ ID NO: 3350670 - RNA, 19 nt, Human
caagugauucuccugccuc

SEQ ID NO: 3350671 - RNA, 19 nt, Human
caagugaaaaaggaggaag

SEQ ID NO: 3350672 - RNA, 22 nt, Human
caagugaaaaaggaggaagaga

SEQ ID NO: 3350673 - RNA, 23 nt, Human
caagugaaaaaggaggaagagaa

SEQ ID NO: 3350674 - RNA, 14 nt, Human
caagugagacccug

SEQ ID NO: 3350675 - RNA, 14 nt, Human
caaggauccugagc

SEQ ID NO: 3350676 - RNA, 15 nt, Human
caaggauccugagcc

SEQ ID NO: 3350677 - RNA, 16 nt, Human
caaggauccugagcca

SEQ ID NO: 3350678 - RNA, 13 nt, Human
caaggauccugag

SEQ ID NO: 3350679 - RNA, 18 nt, Human
caaggcugggggaagaag

SEQ ID NO: 3350680 - RNA, 21 nt, Human
caaggcugggggaagaagcuc

SEQ ID NO: 3350681 - RNA, 13 nt, Human
caaggcugucaau

SEQ ID NO: 3350682 - RNA, 14 nt, Human
caaggcugucaauu

SEQ ID NO: 3350683 - RNA, 17 nt, Human
caagagcccaggccucc

SEQ ID NO: 3350684 - RNA, 17 nt, Human
caagagggucugaggaa

SEQ ID NO: 3350685 - RNA, 16 nt, Human
caagagggucugagga

SEQ ID NO: 3350686 - RNA, 12 nt, Human
caagagggucug

SEQ ID NO: 3350687 - RNA, 13 nt, Human
caagaccuucucc

SEQ ID NO: 3350688 - RNA, 19 nt, Human
caagacgcugugcugcccu

SEQ ID NO: 3350689 - RNA, 20 nt, Human
caagacgcugugcugcccug

SEQ ID NO: 3350690 - RNA, 21 nt, Human
caagacgcugugcugcccugc

SEQ ID NO: 3350691 - RNA, 22 nt, Human
caagacgcugugcugcccugcc

SEQ ID NO: 3350692 - RNA, 23 nt, Human
caagacccuuguggucccacccc

SEQ ID NO: 3350693 - RNA, 20 nt, Human
caacugcaucaagaugugac

SEQ ID NO: 3350694 - RNA, 23 nt, Human
caacugcaucaagaugugacaug

SEQ ID NO: 3350695 - RNA, 17 nt, Human
caacugcaucaagaugu

SEQ ID NO: 3350696 - RNA, 19 nt, Human
caaccugauugugucucuu

SEQ ID NO: 3350697 - RNA, 21 nt, Human
caaccugauugugucucuugg

SEQ ID NO: 3350698 - RNA, 16 nt, Human
caaccugauugugucu

SEQ ID NO: 3350699 - RNA, 17 nt, Human
caaccugauugugucuc

SEQ ID NO: 3350700 - RNA, 14 nt, Human
caacauacucccau

SEQ ID NO: 3350701 - RNA, 15 nt, Human
caacauacucccauc

SEQ ID NO: 3350702 - RNA, 17 nt, Human
caacaggcugggcuuca

SEQ ID NO: 3350703 - RNA, 13 nt, Human
caacaggcugggc

SEQ ID NO: 3350704 - RNA, 14 nt, Human
caacaggcugggcu

SEQ ID NO: 3350705 - RNA, 15 nt, Human
caaugaccuuucaau

SEQ ID NO: 3350706 - RNA, 16 nt, Human
caaugaccuuucaaua

SEQ ID NO: 3350707 - RNA, 13 nt, Human
caaugauggucac

SEQ ID NO: 3350708 - RNA, 14 nt, Human
caaugaccuuucaa

SEQ ID NO: 3350709 - RNA, 13 nt, Human
caaugaccuuuca

SEQ ID NO: 3350710 - RNA, 21 nt, Human
caaugcaaaccaucauugaaa

SEQ ID NO: 3350711 - RNA, 22 nt, Human
caaugcaaaccaucauugaaau

SEQ ID NO: 3350712 - RNA, 14 nt, Human
caaugauggucacc

SEQ ID NO: 3350713 - RNA, 13 nt, Human
caaugcacuuugu

SEQ ID NO: 3350714 - RNA, 14 nt, Human
caaugcacugacau

SEQ ID NO: 3350715 - RNA, 23 nt, Human
caaugcaaaccaucauugaaauc

SEQ ID NO: 3350716 - RNA, 20 nt, Human
caaugcaaaccaucauugaa

SEQ ID NO: 3350717 - RNA, 13 nt, Human
cacacccagccca

SEQ ID NO: 3350718 - RNA, 22 nt, Human
cacaccagagcccaccuuggcu

SEQ ID NO: 3350719 - RNA, 21 nt, Human
cacaccagagcccaccuuggc

SEQ ID NO: 3350720 - RNA, 15 nt, Human
cacacagcucugucc

SEQ ID NO: 3350721 - RNA, 14 nt, Human
cacacagcucuguc

SEQ ID NO: 3350722 - RNA, 13 nt, Human
cacacagcucugu

SEQ ID NO: 3350723 - RNA, 12 nt, Human
cacacagcucug

SEQ ID NO: 3350724 - RNA, 20 nt, Human
cacacccagcccacuucugc

SEQ ID NO: 3350725 - RNA, 14 nt, Human
cacacccagcccac

SEQ ID NO: 3350726 - RNA, 17 nt, Human
cacaccgggcacucaga

SEQ ID NO: 3350727 - RNA, 20 nt, Human
cacacaccagagcccaccuu

SEQ ID NO: 3350728 - RNA, 16 nt, Human
cacacaccagagccca

SEQ ID NO: 3350729 - RNA, 15 nt, Human
cacacaccagagccc

SEQ ID NO: 3350730 - RNA, 14 nt, Human
cacacacuuuggcu

SEQ ID NO: 3350731 - RNA, 21 nt, Human
cacacagaggcugccucuccc

SEQ ID NO: 3350732 - RNA, 15 nt, Human
cacaaacagaggccg

SEQ ID NO: 3350733 - RNA, 17 nt, Human
cacaaacgggcucagca

SEQ ID NO: 3350734 - RNA, 18 nt, Human
caaugguuuucuugugug

SEQ ID NO: 3350735 - RNA, 17 nt, Human
cacaaagguagcuuuuc

SEQ ID NO: 3350736 - RNA, 14 nt, Human
caccaccucuuugg

SEQ ID NO: 3350737 - RNA, 17 nt, Human
caccacacccagcccac

SEQ ID NO: 3350738 - RNA, 19 nt, Human
caccacacccagcccacuu

SEQ ID NO: 3350739 - RNA, 15 nt, Human
caccagagcccaccu

SEQ ID NO: 3350740 - RNA, 22 nt, Human
caccagagcccaccuuggcuca

SEQ ID NO: 3350741 - RNA, 20 nt, Human
caccagagcccaccuuggcu

SEQ ID NO: 3350742 - RNA, 18 nt, Human
caccagagcccaccuugg

SEQ ID NO: 3350743 - RNA, 17 nt, Human
caccagagcccaccuug

SEQ ID NO: 3350744 - RNA, 18 nt, Human
cacauguccaagaagccc

SEQ ID NO: 3350745 - RNA, 19 nt, Human
cacauguccaagaagccca

SEQ ID NO: 3350746 - RNA, 21 nt, Human
cacauguccaagaagcccagg

SEQ ID NO: 3350747 - RNA, 22 nt, Human
cacauguccaagaagcccagga

SEQ ID NO: 3350748 - RNA, 16 nt, Human
caccaacgucugugcc

SEQ ID NO: 3350749 - RNA, 17 nt, Human
caccaacgucugugcca

SEQ ID NO: 3350750 - RNA, 13 nt, Human
caccaagcccagu

SEQ ID NO: 3350751 - RNA, 12 nt, Human
caccaagcccag

SEQ ID NO: 3350752 - RNA, 21 nt, Human
caccauauuaccacagacaua

SEQ ID NO: 3350753 - RNA, 14 nt, Human
caccaucaagccac

SEQ ID NO: 3350754 - RNA, 15 nt, Human
caccaucaagccacc

SEQ ID NO: 3350755 - RNA, 13 nt, Human
caccaucaagcca

SEQ ID NO: 3350756 - RNA, 16 nt, Human
caccaucaagccacca

SEQ ID NO: 3350757 - RNA, 17 nt, Human
caccaucaagccaccaa

SEQ ID NO: 3350758 - RNA, 19 nt, Human
caccaucaagccaccaaca

SEQ ID NO: 3350759 - RNA, 24 nt, Human
caccaucaagccaccaacauacuc

SEQ ID NO: 3350760 - RNA, 17 nt, Human
caccaucaugucuggcu

SEQ ID NO: 3350761 - RNA, 15 nt, Human
caccaucaugucugg

SEQ ID NO: 3350762 - RNA, 18 nt, Human
caccaucaugucuggcua

SEQ ID NO: 3350763 - RNA, 17 nt, Human
cacaugcaaggucauuu

SEQ ID NO: 3350764 - RNA, 19 nt, Human
cacaugcaaggucauuuuu

SEQ ID NO: 3350765 - RNA, 20 nt, Human
cacaugcaaggucauuuuuu

SEQ ID NO: 3350766 - RNA, 18 nt, Human
cacaugcacgugugugca

SEQ ID NO: 3350767 - RNA, 16 nt, Human
cacauguccaagaagc

SEQ ID NO: 3350768 - RNA, 17 nt, Human
cacauguccaagaagcc

SEQ ID NO: 3350769 - RNA, 20 nt, Human
cacaugccucucucaggcca

SEQ ID NO: 3350770 - RNA, 21 nt, Human
cacaugccucucucaggccaa

SEQ ID NO: 3350771 - RNA, 19 nt, Human
cacaugccucucucaggcc

SEQ ID NO: 3350772 - RNA, 13 nt, Human
cacaugagcauca

SEQ ID NO: 3350773 - RNA, 17 nt, Human
cacaugagcaucaggcc

SEQ ID NO: 3350774 - RNA, 18 nt, Human
cacaugagcaucaggcca

SEQ ID NO: 3350775 - RNA, 19 nt, Human
cacaugagcaucaggccag

SEQ ID NO: 3350776 - RNA, 20 nt, Human
cacaugagcaucaggccagg

SEQ ID NO: 3350777 - RNA, 21 nt, Human
cacaugagcaucaggccaggc

SEQ ID NO: 3350778 - RNA, 22 nt, Human
cacacggacacucaaaagcugg

SEQ ID NO: 3350779 - RNA, 18 nt, Human
cacacgcgcgcacacaca

SEQ ID NO: 3350780 - RNA, 14 nt, Human
cacacgcgcgcaca

SEQ ID NO: 3350781 - RNA, 18 nt, Human
cacagcucuucuccaggc

SEQ ID NO: 3350782 - RNA, 19 nt, Human
cacaggcagguccaggguu

SEQ ID NO: 3350783 - RNA, 23 nt, Human
cacaguccuuaccagcagagcac

SEQ ID NO: 3350784 - RNA, 22 nt, Human
cacaguccuuaccagcagagca

SEQ ID NO: 3350785 - RNA, 17 nt, Human
cacaggaucagucugau

SEQ ID NO: 3350786 - RNA, 20 nt, Human
cacagcucuucuccaggcug

SEQ ID NO: 3350787 - RNA, 19 nt, Human
cacagcucuucuccaggcu

SEQ ID NO: 3350788 - RNA, 12 nt, Human
ucacucuccuug

SEQ ID NO: 3350789 - RNA, 14 nt, Human
ucacucuccuuggu

SEQ ID NO: 3350790 - RNA, 12 nt, Human
ucacucuggcag

SEQ ID NO: 3350791 - RNA, 13 nt, Human
ucacucuggcagc

SEQ ID NO: 3350792 - RNA, 23 nt, Human
ucacucuccuuggugucgggcau

SEQ ID NO: 3350793 - RNA, 14 nt, Human
ucacucuggcagcu

SEQ ID NO: 3350794 - RNA, 15 nt, Human
ucacucuggcagcuc

SEQ ID NO: 3350795 - RNA, 16 nt, Human
ucacucuggcagcuca

SEQ ID NO: 3350796 - RNA, 17 nt, Human
ucacucuggcagcucag

SEQ ID NO: 3350797 - RNA, 18 nt, Human
ucacucuggcagcucaga

SEQ ID NO: 3350798 - RNA, 19 nt, Human
ucacucuggcagcucagag

SEQ ID NO: 3350799 - RNA, 20 nt, Human
ucacucuggcagcucagaga

SEQ ID NO: 3350800 - RNA, 22 nt, Human
ucacucuggcagcucagagagg

SEQ ID NO: 3350801 - RNA, 13 nt, Human
ucacuccuugaaa

SEQ ID NO: 3350802 - RNA, 20 nt, Human
ucacggcucacugcagccuc

SEQ ID NO: 3350803 - RNA, 15 nt, Human
ucacggcucacugca

SEQ ID NO: 3350804 - RNA, 13 nt, Human
ucacggcucacug

SEQ ID NO: 3350805 - RNA, 16 nt, Human
ucacggaagagccuug

SEQ ID NO: 3350806 - RNA, 17 nt, Human
ucacggaagagccuugc

SEQ ID NO: 3350807 - RNA, 14 nt, Human
ucacggaagagccu

SEQ ID NO: 3350808 - RNA, 15 nt, Human
ucacaggcaggucca

SEQ ID NO: 3350809 - RNA, 12 nt, Human
ucacaggcaggu

SEQ ID NO: 3350810 - RNA, 19 nt, Human
ucacaggcagguccagggu

SEQ ID NO: 3350811 - RNA, 14 nt, Human
ucaccuuucccauc

SEQ ID NO: 3350812 - RNA, 12 nt, Human
ucaccuuugucc

SEQ ID NO: 3350813 - RNA, 14 nt, Human
ucaccuuugucccc

SEQ ID NO: 3350814 - RNA, 15 nt, Human
ucaccuuugucccca

SEQ ID NO: 3350815 - RNA, 17 nt, Human
ucaccuuuguccccacc

SEQ ID NO: 3350816 - RNA, 18 nt, Human
ucaccuuuguccccaccg

SEQ ID NO: 3350817 - RNA, 22 nt, Human
ucaccuuuguccccaccgcaga

SEQ ID NO: 3350818 - RNA, 20 nt, Human
ucacgccuguaauccuagca

SEQ ID NO: 3350819 - RNA, 19 nt, Human
ucacgccuguaauccuagc

SEQ ID NO: 3350820 - RNA, 14 nt, Human
ucacgccacugcac

SEQ ID NO: 3350821 - RNA, 13 nt, Human
ucacgccacugca

SEQ ID NO: 3350822 - RNA, 16 nt, Human
ucacgccacugcacua

SEQ ID NO: 3350823 - RNA, 15 nt, Human
ucacugcuuaacuuc

SEQ ID NO: 3350824 - RNA, 17 nt, Human
ucacugcuuaacuucac

SEQ ID NO: 3350825 - RNA, 18 nt, Human
ucacugcuuaacuucaca

SEQ ID NO: 3350826 - RNA, 16 nt, Human
ucacucugucgcccag

SEQ ID NO: 3350827 - RNA, 12 nt, Human
ucacucugucgc

SEQ ID NO: 3350828 - RNA, 19 nt, Human
ucacucugucgcccagucu

SEQ ID NO: 3350829 - RNA, 19 nt, Human
ucagcacgauuucuguuua

SEQ ID NO: 3350830 - RNA, 18 nt, Human
ucagcacgauuucuguuu

SEQ ID NO: 3350831 - RNA, 15 nt, Human
ucagacagcugccug

SEQ ID NO: 3350832 - RNA, 16 nt, Human
ucagacagcugccugg

SEQ ID NO: 3350833 - RNA, 17 nt, Human
ucagacagcugccuggg

SEQ ID NO: 3350834 - RNA, 18 nt, Human
ucagacagcugccuggga

SEQ ID NO: 3350835 - RNA, 19 nt, Human
ucagacagcugccugggau

SEQ ID NO: 3350836 - RNA, 20 nt, Human
ucagacagcugccugggauc

SEQ ID NO: 3350837 - RNA, 14 nt, Human
ucagacagcugccu

SEQ ID NO: 3350838 - RNA, 23 nt, Human
uauuuauuaaaugcccagccccu

SEQ ID NO: 3350839 - RNA, 22 nt, Human
uauuuauuaaaugcccagcccc

SEQ ID NO: 3350840 - RNA, 15 nt, Human
uaucugaaaauguau

SEQ ID NO: 3350841 - RNA, 14 nt, Human
uaucugaaaaugua

SEQ ID NO: 3350842 - RNA, 20 nt, Human
uaucugaaaauguaugugua

SEQ ID NO: 3350843 - RNA, 15 nt, Human
uauuuuuuuacuaau

SEQ ID NO: 3350844 - RNA, 22 nt, Human
ucaaaacgguuuuacugcagcu

SEQ ID NO: 3350845 - RNA, 14 nt, Human
ucaaacucuuaaaa

SEQ ID NO: 3350846 - RNA, 16 nt, Human
ucaaacuuuacuaugg

SEQ ID NO: 3350847 - RNA, 15 nt, Human
ucaaacuuuacuaug

SEQ ID NO: 3350848 - RNA, 13 nt, Human
ucaaacuuuacua

SEQ ID NO: 3350849 - RNA, 22 nt, Human
ucaaacucuugaccucagguga

SEQ ID NO: 3350850 - RNA, 13 nt, Human
ucaaccuccuggg

SEQ ID NO: 3350851 - RNA, 21 nt, Human
ucaagcgauucuucugcuuca

SEQ ID NO: 3350852 - RNA, 16 nt, Human
ucaagcgauucuucug

SEQ ID NO: 3350853 - RNA, 20 nt, Human
ucaaggauccugagccagau

SEQ ID NO: 3350854 - RNA, 21 nt, Human
ucaagugauucuccugccuca

SEQ ID NO: 3350855 - RNA, 17 nt, Human
ucaaggauccugagcca

SEQ ID NO: 3350856 - RNA, 22 nt, Human
ucaagugauucuccugccucag

SEQ ID NO: 3350857 - RNA, 18 nt, Human
ucaaggauccugagccag

SEQ ID NO: 3350858 - RNA, 19 nt, Human
ucaaggauccugagccaga

SEQ ID NO: 3350859 - RNA, 13 nt, Human
ucaauuacaggaa

SEQ ID NO: 3350860 - RNA, 18 nt, Human
ucaauuacaggaaguacu

SEQ ID NO: 3350861 - RNA, 18 nt, Human
ucaaugcacugacauugu

SEQ ID NO: 3350862 - RNA, 14 nt, Human
ucaauaggaaaaac

SEQ ID NO: 3350863 - RNA, 14 nt, Human
ucaaugcacugaca

SEQ ID NO: 3350864 - RNA, 13 nt, Human
ucaauaggaaaaa

SEQ ID NO: 3350865 - RNA, 13 nt, Human
ucacacagugagu

SEQ ID NO: 3350866 - RNA, 22 nt, Human
ucacacaguauuacuucugcua

SEQ ID NO: 3350867 - RNA, 21 nt, Human
ucacacaguauuacuucugcu

SEQ ID NO: 3350868 - RNA, 19 nt, Human
ucaauuacaggaaguacug

SEQ ID NO: 3350869 - RNA, 23 nt, Human
ucacacagugagucgaggacagg

SEQ ID NO: 3350870 - RNA, 22 nt, Human
ucacacagugagucgaggacag

SEQ ID NO: 3350871 - RNA, 21 nt, Human
ucacacaugagcaucaggcca

SEQ ID NO: 3350872 - RNA, 11 nt, Human
ucacaggcagg

SEQ ID NO: 3350873 - RNA, 22 nt, Human
ucccccagccccauccucugua

SEQ ID NO: 3350874 - RNA, 20 nt, Human
uccccgcacugggcuugggg

SEQ ID NO: 3350875 - RNA, 21 nt, Human
ucccccuuccauggacuuugu

SEQ ID NO: 3350876 - RNA, 15 nt, Human
ucccuacuguaauuu

SEQ ID NO: 3350877 - RNA, 17 nt, Human
ucccucccucuuucccu

SEQ ID NO: 3350878 - RNA, 15 nt, Human
ucccucccucuuucc

SEQ ID NO: 3350879 - RNA, 14 nt, Human
uccccugcugggug

SEQ ID NO: 3350880 - RNA, 15 nt, Human
uccccugcugggugu

SEQ ID NO: 3350881 - RNA, 20 nt, Human
uccccugcuggguguggcgc

SEQ ID NO: 3350882 - RNA, 21 nt, Human
uccccugcuggguguggcgca

SEQ ID NO: 3350883 - RNA, 22 nt, Human
uccccuguagagugggagcuga

SEQ ID NO: 3350884 - RNA, 23 nt, Human
uccccuguccccgcacugggcuu

SEQ ID NO: 3350885 - RNA, 24 nt, Human
uccccugcuggguguggcgcagca

SEQ ID NO: 3350886 - RNA, 19 nt, Human
uccccuguagagugggagc

SEQ ID NO: 3350887 - RNA, 22 nt, Human
uccccacuugagaauuacccuu

SEQ ID NO: 3350888 - RNA, 20 nt, Human
ucccaucucacacaugagca

SEQ ID NO: 3350889 - RNA, 23 nt, Human
ucccaucucacacaugagcauca

SEQ ID NO: 3350890 - RNA, 22 nt, Human
ucccaggcauuccccaggaggc

SEQ ID NO: 3350891 - RNA, 19 nt, Human
ucccaggcauuccccagga

SEQ ID NO: 3350892 - RNA, 20 nt, Human
ucccaggcauuccccaggag

SEQ ID NO: 3350893 - RNA, 21 nt, Human
ucccaggcauuccccaggagg

SEQ ID NO: 3350894 - RNA, 15 nt, Human
ucccaccucagccuc

SEQ ID NO: 3350895 - RNA, 14 nt, Human
ucccaccucagccu

SEQ ID NO: 3350896 - RNA, 13 nt, Human
ucccaccucagcc

SEQ ID NO: 3350897 - RNA, 15 nt, Human
ucccaagcucugcuc

SEQ ID NO: 3350898 - RNA, 14 nt, Human
ucccaagcucugcu

SEQ ID NO: 3350899 - RNA, 13 nt, Human
ucccaagcucugc

SEQ ID NO: 3350900 - RNA, 12 nt, Human
ucccaagcucug

SEQ ID NO: 3350901 - RNA, 17 nt, Human
ucccaagcucugcuccu

SEQ ID NO: 3350902 - RNA, 14 nt, Human
ucccaacucacccc

SEQ ID NO: 3350903 - RNA, 15 nt, Human
ucccaacucacccca

SEQ ID NO: 3350904 - RNA, 16 nt, Human
ucccaacucaccccag

SEQ ID NO: 3350905 - RNA, 13 nt, Human
ucccaacucaccc

SEQ ID NO: 3350906 - RNA, 23 nt, Human
uccagcucaccagccccagugcc

SEQ ID NO: 3350907 - RNA, 21 nt, Human
ucccaaagugcugggauuaca

SEQ ID NO: 3350908 - RNA, 14 nt, Human
uccauggacuuugu

SEQ ID NO: 3350909 - RNA, 15 nt, Human
uccauggacuuuguu

SEQ ID NO: 3350910 - RNA, 13 nt, Human
uccauggacuuug

SEQ ID NO: 3350911 - RNA, 18 nt, Human
ucauuaggugugacugaa

SEQ ID NO: 3350912 - RNA, 21 nt, Human
ucauuaggugugacugaauuu

SEQ ID NO: 3350913 - RNA, 16 nt, Human
ucauuaggugugacug

SEQ ID NO: 3350914 - RNA, 20 nt, Human
ucauacccacccccacccaa

SEQ ID NO: 3350915 - RNA, 14 nt, Human
ucauacccaccccc

SEQ ID NO: 3350916 - RNA, 15 nt, Human
ucauacccaccccca

SEQ ID NO: 3350917 - RNA, 17 nt, Human
ucagugugacugaucuc

SEQ ID NO: 3350918 - RNA, 13 nt, Human
ucagugugacuga

SEQ ID NO: 3350919 - RNA, 23 nt, Human
ucagugguuggcaauuguuucaa

SEQ ID NO: 3350920 - RNA, 23 nt, Human
ucagucugauucccaagcucugc

SEQ ID NO: 3350921 - RNA, 15 nt, Human
ucagucuggcccuuc

SEQ ID NO: 3350922 - RNA, 24 nt, Human
ucagucugauucccaagcucugcu

SEQ ID NO: 3350923 - RNA, 13 nt, Human
ucauacccacccc

SEQ ID NO: 3350924 - RNA, 13 nt, Human
ucauaaugacuua

SEQ ID NO: 3350925 - RNA, 16 nt, Human
uccaaaauaaaacuuu

SEQ ID NO: 3350926 - RNA, 17 nt, Human
uccaaaauaaaacuuuu

SEQ ID NO: 3350927 - RNA, 20 nt, Human
uccaagaagcccaggaaagg

SEQ ID NO: 3350928 - RNA, 22 nt, Human
uccaagaagcccaggaaaggcu

SEQ ID NO: 3350929 - RNA, 19 nt, Human
uccaagaagcccaggaaag

SEQ ID NO: 3350930 - RNA, 22 nt, Human
uccaagcaggacauggacaagg

SEQ ID NO: 3350931 - RNA, 14 nt, Human
uccacaagagccca

SEQ ID NO: 3350932 - RNA, 12 nt, Human
uccaccugccag

SEQ ID NO: 3350933 - RNA, 18 nt, Human
uccagcucaccagcccca

SEQ ID NO: 3350934 - RNA, 13 nt, Human
uccaccugccagg

SEQ ID NO: 3350935 - RNA, 15 nt, Human
ucgaguuacagacaa

SEQ ID NO: 3350936 - RNA, 17 nt, Human
ucgaguuacagacaaag

SEQ ID NO: 3350937 - RNA, 23 nt, Human
ucgcugugucagcauagaaguaa

SEQ ID NO: 3350938 - RNA, 10 nt, Human
ucccucccuu

SEQ ID NO: 3350939 - RNA, 22 nt, Human
uccuggcaugggaaugaauguc

SEQ ID NO: 3350940 - RNA, 17 nt, Human
uccuggcccacugcauc

SEQ ID NO: 3350941 - RNA, 15 nt, Human
uccugguguggaaga

SEQ ID NO: 3350942 - RNA, 12 nt, Human
uccuucuguccu

SEQ ID NO: 3350943 - RNA, 19 nt, Human
uccuucuguccuacucugu

SEQ ID NO: 3350944 - RNA, 17 nt, Human
ucucacucugucgccca

SEQ ID NO: 3350945 - RNA, 16 nt, Human
ucucacucugucgccc

SEQ ID NO: 3350946 - RNA, 18 nt, Human
ucucacucugucgcccag

SEQ ID NO: 3350947 - RNA, 21 nt, Human
ucucacuguugcccaggcugg

SEQ ID NO: 3350948 - RNA, 20 nt, Human
ucucacuguugcccaggcug

SEQ ID NO: 3350949 - RNA, 19 nt, Human
ucucacuguugcccaggcu

SEQ ID NO: 3350950 - RNA, 18 nt, Human
ucucacuguugcccaggc

SEQ ID NO: 3350951 - RNA, 21 nt, Human
ucucagaaucucaaauaacua

SEQ ID NO: 3350952 - RNA, 17 nt, Human
ucucagaaucucaaaua

SEQ ID NO: 3350953 - RNA, 17 nt, Human
ucucacuguugcccagg

SEQ ID NO: 3350954 - RNA, 21 nt, Human
ucucaaacucuugaccucagg

SEQ ID NO: 3350955 - RNA, 13 nt, Human
ucucaaacucuug

SEQ ID NO: 3350956 - RNA, 22 nt, Human
ucucaaacucuugaccucaggu

SEQ ID NO: 3350957 - RNA, 18 nt, Human
ucucaaauuucuaaaucu

SEQ ID NO: 3350958 - RNA, 22 nt, Human
ucuaaaucuccaaaauaaaacu

SEQ ID NO: 3350959 - RNA, 15 nt, Human
ucuaacuucaccaua

SEQ ID NO: 3350960 - RNA, 16 nt, Human
ucuaacuucaccauau

SEQ ID NO: 3350961 - RNA, 22 nt, Human
ucuacugaggugcuauguucuu

SEQ ID NO: 3350962 - RNA, 22 nt, Human
ucuagggaaaaaccagcgugug

SEQ ID NO: 3350963 - RNA, 19 nt, Human
ucuagggaaaaaccagcgu

SEQ ID NO: 3350964 - RNA, 19 nt, Human
ucuacugaggugcuauguu

SEQ ID NO: 3350965 - RNA, 18 nt, Human
ucuacugaggugcuaugu

SEQ ID NO: 3350966 - RNA, 15 nt, Human
ucuacacugugcuga

SEQ ID NO: 3350967 - RNA, 12 nt, Human
ucuacacugugc

SEQ ID NO: 3350968 - RNA, 14 nt, Human
ucuacacugugcug

SEQ ID NO: 3350969 - RNA, 13 nt, Human
ucucugaggacac

SEQ ID NO: 3350970 - RNA, 15 nt, Human
ucucuacaaaaagca

SEQ ID NO: 3350971 - RNA, 18 nt, Human
ucucuaguuugauuaaau

SEQ ID NO: 3350972 - RNA, 19 nt, Human
ucucuaguuugauuaaauu

SEQ ID NO: 3350973 - RNA, 16 nt, Human
ucucuaguuugauuaa

SEQ ID NO: 3350974 - RNA, 19 nt, Human
ucuccugccucagccuccc

SEQ ID NO: 3350975 - RNA, 22 nt, Human
ucuccugccucagccucccaaa

SEQ ID NO: 3350976 - RNA, 22 nt, Human
ucucccccagccccauccucug

SEQ ID NO: 3350977 - RNA, 13 nt, Human
ucucccccagccc

SEQ ID NO: 3350978 - RNA, 18 nt, Human
ucucccccagccccaucc

SEQ ID NO: 3350979 - RNA, 20 nt, Human
ucucccccagccccauccuc

SEQ ID NO: 3350980 - RNA, 15 nt, Human
ucucccccagcccca

SEQ ID NO: 3350981 - RNA, 17 nt, Human
ucucccccagccccauc

SEQ ID NO: 3350982 - RNA, 14 nt, Human
ucucccccagcccc

SEQ ID NO: 3350983 - RNA, 23 nt, Human
ucugaggacacuaaccacgcugg

SEQ ID NO: 3350984 - RNA, 20 nt, Human
ucugaggacacuaaccacgc

SEQ ID NO: 3350985 - RNA, 16 nt, Human
ucugaggaauccagac

SEQ ID NO: 3350986 - RNA, 23 nt, Human
ucugauucccaagcucugcuccu

SEQ ID NO: 3350987 - RNA, 21 nt, Human
ucugauucccaagcucugcuc

SEQ ID NO: 3350988 - RNA, 14 nt, Human
ucugcacaagcugc

SEQ ID NO: 3350989 - RNA, 19 nt, Human
ucugcacaagcugcacccu

SEQ ID NO: 3350990 - RNA, 15 nt, Human
ucugacccaugcugc

SEQ ID NO: 3350991 - RNA, 16 nt, Human
ucugacccaugcugcc

SEQ ID NO: 3350992 - RNA, 17 nt, Human
ucugacccaugcugccc

SEQ ID NO: 3350993 - RNA, 18 nt, Human
ucugacccaugcugcccu

SEQ ID NO: 3350994 - RNA, 24 nt, Human
ucugagaucaaaacgguuuuacug

SEQ ID NO: 3350995 - RNA, 20 nt, Human
ucugaacuuggcgcugcccc

SEQ ID NO: 3350996 - RNA, 15 nt, Human
ucugacccacugcuu

SEQ ID NO: 3350997 - RNA, 14 nt, Human
ucugacccaugcug

SEQ ID NO: 3350998 - RNA, 13 nt, Human
ucugaaagggacg

SEQ ID NO: 3350999 - RNA, 23 nt, Human
ucugaaaauguauguguaaguau

SEQ ID NO: 3351000 - RNA, 14 nt, Human
ucugaaaauguaug

SEQ ID NO: 3351001 - RNA, 16 nt, Human
ucucuuuucaaaacau

SEQ ID NO: 3351002 - RNA, 15 nt, Human
ucucuuuucaaaaca

SEQ ID NO: 3351003 - RNA, 16 nt, Human
ucugaaaauguaugug

SEQ ID NO: 3351004 - RNA, 14 nt, Human
ugaagacagagcua

SEQ ID NO: 3351005 - RNA, 16 nt, Human
ugaagacagagcuaca

SEQ ID NO: 3351006 - RNA, 13 nt, Human
ugaagacagagcu

SEQ ID NO: 3351007 - RNA, 14 nt, Human
ugaacuuggcgcug

SEQ ID NO: 3351008 - RNA, 12 nt, Human
ugaacuugguuc

SEQ ID NO: 3351009 - RNA, 19 nt, Human
ugaacuggguacuugugga

SEQ ID NO: 3351010 - RNA, 17 nt, Human
ugaagacuuuucuuuca

SEQ ID NO: 3351011 - RNA, 22 nt, Human
ugaagacuuuucuuucagccaa

SEQ ID NO: 3351012 - RNA, 14 nt, Human
ugaagacuuuucuu

SEQ ID NO: 3351013 - RNA, 20 nt, Human
ugaaggcucgagcaugccug

SEQ ID NO: 3351014 - RNA, 21 nt, Human
ugaaggcucgagcaugccugg

SEQ ID NO: 3351015 - RNA, 13 nt, Human
ugaacugauaaag

SEQ ID NO: 3351016 - RNA, 15 nt, Human
ugaacugauaaagau

SEQ ID NO: 3351017 - RNA, 15 nt, Human
ugaacucuucaaucu

SEQ ID NO: 3351018 - RNA, 21 nt, Human
ugaaccacaucuugcucugcu

SEQ ID NO: 3351019 - RNA, 20 nt, Human
ugaaccacaucuugcucugc

SEQ ID NO: 3351020 - RNA, 18 nt, Human
ugaacucuucaaucucuu

SEQ ID NO: 3351021 - RNA, 19 nt, Human
ugaaccacaucuugcucug

SEQ ID NO: 3351022 - RNA, 17 nt, Human
ucuuuugccguuauuaa

SEQ ID NO: 3351023 - RNA, 19 nt, Human
ucuuuugccguuauuaaaa

SEQ ID NO: 3351024 - RNA, 16 nt, Human
ucuuuuugcuuugcuu

SEQ ID NO: 3351025 - RNA, 22 nt, Human
ugaaaagaaaaaugagccuggc

SEQ ID NO: 3351026 - RNA, 17 nt, Human
ugaaaucuuuuugcuuu

SEQ ID NO: 3351027 - RNA, 17 nt, Human
ugaaagggcccagagag

SEQ ID NO: 3351028 - RNA, 16 nt, Human
ugaaagggcccagaga

SEQ ID NO: 3351029 - RNA, 15 nt, Human
ugaaagggcccagag

SEQ ID NO: 3351030 - RNA, 22 nt, Human
ugaaaugaggucagagccugca

SEQ ID NO: 3351031 - RNA, 21 nt, Human
ugaaaugaggucagagccugc

SEQ ID NO: 3351032 - RNA, 23 nt, Human
ugaaaugaggucagagccugcag

SEQ ID NO: 3351033 - RNA, 20 nt, Human
ugaaaugaggucagagccug

SEQ ID NO: 3351034 - RNA, 19 nt, Human
ugaaaugaggucagagccu

SEQ ID NO: 3351035 - RNA, 17 nt, Human
ugaaaggaaagaggcuc

SEQ ID NO: 3351036 - RNA, 12 nt, Human
ugaaaggaaaga

SEQ ID NO: 3351037 - RNA, 14 nt, Human
ucuuauacauuuga

SEQ ID NO: 3351038 - RNA, 15 nt, Human
ucuuauacauuugau

SEQ ID NO: 3351039 - RNA, 16 nt, Human
ucuuaguggauguucu

SEQ ID NO: 3351040 - RNA, 14 nt, Human
ucuuagugugugca

SEQ ID NO: 3351041 - RNA, 13 nt, Human
ucuuaaaaagugg

SEQ ID NO: 3351042 - RNA, 15 nt, Human
ucuucaguaagccgu

SEQ ID NO: 3351043 - RNA, 16 nt, Human
ucuucaguaagccgug

SEQ ID NO: 3351044 - RNA, 21 nt, Human
ucuuccacaagagcccaggcc

SEQ ID NO: 3351045 - RNA, 19 nt, Human
ucuucuccacuuucuagcc

SEQ ID NO: 3351046 - RNA, 21 nt, Human
ucuucuccacuuucuagccag

SEQ ID NO: 3351047 - RNA, 11 nt, Human
ucuugcucugc

SEQ ID NO: 3351048 - RNA, 12 nt, Human
ucuugcucugcu

SEQ ID NO: 3351049 - RNA, 17 nt, Human
ucuugaauuguaaggaa

SEQ ID NO: 3351050 - RNA, 21 nt, Human
ucuugaauuguaaggaaugau

SEQ ID NO: 3351051 - RNA, 12 nt, Human
ucuucuccaggc

SEQ ID NO: 3351052 - RNA, 14 nt, Human
ucuucuccaggcug

SEQ ID NO: 3351053 - RNA, 13 nt, Human
ucuucuccaggcu

SEQ ID NO: 3351054 - RNA, 18 nt, Human
ucuugaacuccuggccuc

SEQ ID NO: 3351055 - RNA, 17 nt, Human
ucuugaacuccuggccu

SEQ ID NO: 3351056 - RNA, 16 nt, Human
ucuugaacuccuggcc

SEQ ID NO: 3351057 - RNA, 15 nt, Human
ucuugaacuccuggc

SEQ ID NO: 3351058 - RNA, 18 nt, Human
ucuuaaaaaguggaaaaa

SEQ ID NO: 3351059 - RNA, 17 nt, Human
ucuguacgucugacagg

SEQ ID NO: 3351060 - RNA, 22 nt, Human
ucuguggguuucuaaagcugcc

SEQ ID NO: 3351061 - RNA, 19 nt, Human
ucuguccgagcuuugaaaa

SEQ ID NO: 3351062 - RNA, 23 nt, Human
ucuguggguuucuaaagcugcca

SEQ ID NO: 3351063 - RNA, 22 nt, Human
ucugugucagguggggcagcuu

SEQ ID NO: 3351064 - RNA, 23 nt, Human
ucuguacagagcccacgccccca

SEQ ID NO: 3351065 - RNA, 12 nt, Human
ucugggacacag

SEQ ID NO: 3351066 - RNA, 15 nt, Human
ucuggcucuuccagg

SEQ ID NO: 3351067 - RNA, 16 nt, Human
ucuggcucuuccaggc

SEQ ID NO: 3351068 - RNA, 17 nt, Human
ucuggcucuuccaggcu

SEQ ID NO: 3351069 - RNA, 14 nt, Human
ucuggcuaugcauu

SEQ ID NO: 3351070 - RNA, 21 nt, Human
uaguuugauuaaauucuugca

SEQ ID NO: 3351071 - RNA, 20 nt, Human
uauaaugaaugaaacauuuu

SEQ ID NO: 3351072 - RNA, 18 nt, Human
uauaaugaaugaaacauu

SEQ ID NO: 3351073 - RNA, 20 nt, Human
uauaauguaagcucuacuga

SEQ ID NO: 3351074 - RNA, 19 nt, Human
uauaauguaagcucuacug

SEQ ID NO: 3351075 - RNA, 14 nt, Human
uauaauguaagcuc

SEQ ID NO: 3351076 - RNA, 17 nt, Human
uauaauucuacuuugag

SEQ ID NO: 3351077 - RNA, 15 nt, Human
uaguggauguucuga

SEQ ID NO: 3351078 - RNA, 23 nt, Human
uaguuugauuaaauucuugcaaa

SEQ ID NO: 3351079 - RNA, 12 nt, Human
uaguuugcaguu

SEQ ID NO: 3351080 - RNA, 13 nt, Human
uaguuucuccaag

SEQ ID NO: 3351081 - RNA, 15 nt, Human
uaucuaaauguugaa

SEQ ID NO: 3351082 - RNA, 16 nt, Human
uaucgucacugcuuaa

SEQ ID NO: 3351083 - RNA, 19 nt, Human
uaucgucacugcuuaacuu

SEQ ID NO: 3351084 - RNA, 16 nt, Human
uaucaugacaaagacu

SEQ ID NO: 3351085 - RNA, 17 nt, Human
uauauacgaacaaaaca

SEQ ID NO: 3351086 - RNA, 17 nt, Human
uauauagaaauauauac

SEQ ID NO: 3351087 - RNA, 16 nt, Human
uagccuaggugacaga

SEQ ID NO: 3351088 - RNA, 14 nt, Human
uagcccaaaaccaa

SEQ ID NO: 3351089 - RNA, 11 nt, Human
uagcugggacu

SEQ ID NO: 3351090 - RNA, 19 nt, Human
uagcugggacuacaggcac

SEQ ID NO: 3351091 - RNA, 20 nt, Human
uagcugggacuacaggcacc

SEQ ID NO: 3351092 - RNA, 18 nt, Human
uagcugggacuacaggug

SEQ ID NO: 3351093 - RNA, 22 nt, Human
uagcucauucuccuuguguuac

SEQ ID NO: 3351094 - RNA, 21 nt, Human
uagcucuaggagggcuggcaa

SEQ ID NO: 3351095 - RNA, 16 nt, Human
uaggaagacuuuggaa

SEQ ID NO: 3351096 - RNA, 17 nt, Human
uaggaagacuuuggaaa

SEQ ID NO: 3351097 - RNA, 14 nt, Human
uaggaagacuuugg

SEQ ID NO: 3351098 - RNA, 15 nt, Human
uaggaagacuuugga

SEQ ID NO: 3351099 - RNA, 13 nt, Human
uaggaagacuuug

SEQ ID NO: 3351100 - RNA, 13 nt, Human
uaggaacacuccu

SEQ ID NO: 3351101 - RNA, 14 nt, Human
uaggaacacuccuu

SEQ ID NO: 3351102 - RNA, 17 nt, Human
uaggaacacuccuucac

SEQ ID NO: 3351103 - RNA, 21 nt, Human
uaggaacuuaaauaaugugaa

SEQ ID NO: 3351104 - RNA, 15 nt, Human
uaggaagguuaaugu

SEQ ID NO: 3351105 - RNA, 13 nt, Human
uaggccuggccag

SEQ ID NO: 3351106 - RNA, 11 nt, Human
uagagacaggg

SEQ ID NO: 3351107 - RNA, 16 nt, Human
uagagagagaccacuu

SEQ ID NO: 3351108 - RNA, 19 nt, Human
uagagguucaaagauauuu

SEQ ID NO: 3351109 - RNA, 16 nt, Human
uagagguucaaagaua

SEQ ID NO: 3351110 - RNA, 21 nt, Human
uagagguucaaagauauuuug

SEQ ID NO: 3351111 - RNA, 16 nt, Human
uagcacuuugggaggc

SEQ ID NO: 3351112 - RNA, 23 nt, Human
uagcagagaaugaaagggcccag

SEQ ID NO: 3351113 - RNA, 19 nt, Human
uagcagagaaugaaagggc

SEQ ID NO: 3351114 - RNA, 18 nt, Human
uagauaauacaccacuac

SEQ ID NO: 3351115 - RNA, 12 nt, Human
uagauguauaua

SEQ ID NO: 3351116 - RNA, 17 nt, Human
uacacacugcauguuug

SEQ ID NO: 3351117 - RNA, 15 nt, Human
uacacacacauacac

SEQ ID NO: 3351118 - RNA, 21 nt, Human
uacacacacacgcgugcacac

SEQ ID NO: 3351119 - RNA, 21 nt, Human
uacacaaugguuuucuugugu

SEQ ID NO: 3351120 - RNA, 17 nt, Human
uacacaaugguuuucuu

SEQ ID NO: 3351121 - RNA, 14 nt, Human
uacacuguuucaaa

SEQ ID NO: 3351122 - RNA, 22 nt, Human
uacacacugcauguuugugauu

SEQ ID NO: 3351123 - RNA, 24 nt, Human
uacagcaaggagauuuacaacugg

SEQ ID NO: 3351124 - RNA, 17 nt, Human
uacacuguuucaaacuu

SEQ ID NO: 3351125 - RNA, 18 nt, Human
uacacuguuucaaacuuu

SEQ ID NO: 3351126 - RNA, 13 nt, Human
uacacuuuaugca

SEQ ID NO: 3351127 - RNA, 21 nt, Human
uacagcuugaccgugaggcca

SEQ ID NO: 3351128 - RNA, 22 nt, Human
uacagcuugaccgugaggccag

SEQ ID NO: 3351129 - RNA, 18 nt, Human
uacaggaaaagcugcuga

SEQ ID NO: 3351130 - RNA, 17 nt, Human
uacaggaaaagcugcug

SEQ ID NO: 3351131 - RNA, 23 nt, Human
uacagcuugaccgugaggccaga

SEQ ID NO: 3351132 - RNA, 19 nt, Human
uacaggaaaagcugcugac

SEQ ID NO: 3351133 - RNA, 16 nt, Human
uacaggcacccaccau

SEQ ID NO: 3351134 - RNA, 22 nt, Human
uacccaggugcuaggaacacuc

SEQ ID NO: 3351135 - RNA, 18 nt, Human
uacccagcgagcccuggu

SEQ ID NO: 3351136 - RNA, 16 nt, Human
uacccagcgagcccug

SEQ ID NO: 3351137 - RNA, 14 nt, Human
uacccacugcucug

SEQ ID NO: 3351138 - RNA, 13 nt, Human
uacccacugcucu

SEQ ID NO: 3351139 - RNA, 12 nt, Human
uacccacugcuc

SEQ ID NO: 3351140 - RNA, 11 nt, Human
uacccacugcu

SEQ ID NO: 3351141 - RNA, 17 nt, Human
uacccacccccacccaa

SEQ ID NO: 3351142 - RNA, 19 nt, Human
uacccacccccacccaagg

SEQ ID NO: 3351143 - RNA, 23 nt, Human
uacccacccccacccaagggccu

SEQ ID NO: 3351144 - RNA, 12 nt, Human
uacccaccccca

SEQ ID NO: 3351145 - RNA, 15 nt, Human
uacccacccccaccc

SEQ ID NO: 3351146 - RNA, 13 nt, Human
uaccacagacaua

SEQ ID NO: 3351147 - RNA, 23 nt, Human
uaccauuuugggguacccacugc

SEQ ID NO: 3351148 - RNA, 19 nt, Human
uacaguuacucagaauucu

SEQ ID NO: 3351149 - RNA, 23 nt, Human
uacaguuacucagaauucucuag

SEQ ID NO: 3351150 - RNA, 19 nt, Human
uacauaagauaaaugugcu

SEQ ID NO: 3351151 - RNA, 18 nt, Human
uacauaagauaaaugugc

SEQ ID NO: 3351152 - RNA, 17 nt, Human
uacauaagauaaaugug

SEQ ID NO: 3351153 - RNA, 22 nt, Human
uacauaagauaaaugugcugaa

SEQ ID NO: 3351154 - RNA, 14 nt, Human
uacuuguggacaca

SEQ ID NO: 3351155 - RNA, 18 nt, Human
uacuuguggacacagcuc

SEQ ID NO: 3351156 - RNA, 15 nt, Human
uacuuguggacacag

SEQ ID NO: 3351157 - RNA, 17 nt, Human
uacuuacuaaaauauau

SEQ ID NO: 3351158 - RNA, 15 nt, Human
uacuuacuaaaauau

SEQ ID NO: 3351159 - RNA, 21 nt, Human
uacuguaucaugacaaagacu

SEQ ID NO: 3351160 - RNA, 23 nt, Human
uagaaauaucugaaaauguaugu

SEQ ID NO: 3351161 - RNA, 21 nt, Human
uagaaauaucugaaaauguau

SEQ ID NO: 3351162 - RNA, 20 nt, Human
uagaaauaucugaaaaugua

SEQ ID NO: 3351163 - RNA, 15 nt, Human
uagaaauauaauuga

SEQ ID NO: 3351164 - RNA, 20 nt, Human
uaccuuuguauucucuccug

SEQ ID NO: 3351165 - RNA, 19 nt, Human
uaccuuuuuuauacauaaa

SEQ ID NO: 3351166 - RNA, 20 nt, Human
uaccuuuuuuauacauaaac

SEQ ID NO: 3351167 - RNA, 18 nt, Human
uaccuuuuuuauacauaa

SEQ ID NO: 3351168 - RNA, 22 nt, Human
uacccaucccauaugccugggc

SEQ ID NO: 3351169 - RNA, 12 nt, Human
uacuacaguccu

SEQ ID NO: 3351170 - RNA, 17 nt, Human
uacuacaguccucccau

SEQ ID NO: 3351171 - RNA, 15 nt, Human
uacuaauagacaauu

SEQ ID NO: 3351172 - RNA, 17 nt, Human
uacuaauagacaauuua

SEQ ID NO: 3351173 - RNA, 22 nt, Human
uacuaauaaaauuuaaaagucu

SEQ ID NO: 3351174 - RNA, 18 nt, Human
uacuaaccagcagaaaug

SEQ ID NO: 3351175 - RNA, 17 nt, Human
uacuaaccagcagaaau

SEQ ID NO: 3351176 - RNA, 19 nt, Human
uacuaaccagcagaaaugc

SEQ ID NO: 3351177 - RNA, 16 nt, Human
uacucagaauucucua

SEQ ID NO: 3351178 - RNA, 22 nt, Human
uacucagaauucucuaguuuga

SEQ ID NO: 3351179 - RNA, 20 nt, Human
uacuacaguuuguuaguaug

SEQ ID NO: 3351180 - RNA, 14 nt, Human
uacucaccucaccc

SEQ ID NO: 3351181 - RNA, 12 nt, Human
uacucaccucac

SEQ ID NO: 3351182 - RNA, 12 nt, Human
uacucccaucug

SEQ ID NO: 3351183 - RNA, 14 nt, Human
uacucccaucugug

SEQ ID NO: 3351184 - RNA, 16 nt, Human
uacucccaucugugaa

SEQ ID NO: 3351185 - RNA, 17 nt, Human
uacucccaucugugaaa

SEQ ID NO: 3351186 - RNA, 15 nt, Human
uacugaggugcuaug

SEQ ID NO: 3351187 - RNA, 15 nt, Human
uaauuugugauacaa

SEQ ID NO: 3351188 - RNA, 18 nt, Human
uaauuugugauacaaugc

SEQ ID NO: 3351189 - RNA, 14 nt, Human
uaauuugugauaca

SEQ ID NO: 3351190 - RNA, 19 nt, Human
uaauuugugauacaaugcu

SEQ ID NO: 3351191 - RNA, 22 nt, Human
uaauuugugauacaaugcugug

SEQ ID NO: 3351192 - RNA, 20 nt, Human
uaauuaaguacuauguauca

SEQ ID NO: 3351193 - RNA, 17 nt, Human
uaauuaaaacacaacau

SEQ ID NO: 3351194 - RNA, 18 nt, Human
uaauucuuagcucauucu

SEQ ID NO: 3351195 - RNA, 20 nt, Human
uaauugacaggauuauugga

SEQ ID NO: 3351196 - RNA, 22 nt, Human
uaauugacaggauuauuggaaa

SEQ ID NO: 3351197 - RNA, 21 nt, Human
uaauaguucagguaacaggca

SEQ ID NO: 3351198 - RNA, 20 nt, Human
uaauccucuaggaggucucu

SEQ ID NO: 3351199 - RNA, 11 nt, Human
uaaucuaaaug

SEQ ID NO: 3351200 - RNA, 17 nt, Human
uaagauaaaugugcuga

SEQ ID NO: 3351201 - RNA, 16 nt, Human
uaagauaaaugugcug

SEQ ID NO: 3351202 - RNA, 14 nt, Human
uaagauaaaugugc

SEQ ID NO: 3351203 - RNA, 12 nt, Human
uaagagggaggg

SEQ ID NO: 3351204 - RNA, 22 nt, Human
uaagagggagggagggcuccag

SEQ ID NO: 3351205 - RNA, 23 nt, Human
uaagagggagggagggcuccaga

SEQ ID NO: 3351206 - RNA, 21 nt, Human
uaacuuuuauaaacuuuaccu

SEQ ID NO: 3351207 - RNA, 22 nt, Human
uaacuuuuauaaacuuuaccuu

SEQ ID NO: 3351208 - RNA, 19 nt, Human
uaacuuuuauaaacuuuac

SEQ ID NO: 3351209 - RNA, 24 nt, Human
uaagaaagacuaucuaaauguuga

SEQ ID NO: 3351210 - RNA, 22 nt, Human
uaagaaccuuuugagugccuua

SEQ ID NO: 3351211 - RNA, 22 nt, Human
uaagaggcagggucucacucug

SEQ ID NO: 3351212 - RNA, 20 nt, Human
uaaggaugcuuguacauaau

SEQ ID NO: 3351213 - RNA, 21 nt, Human
uaaggaugcuuguacauaaug

SEQ ID NO: 3351214 - RNA, 22 nt, Human
uaaggaugcuuguacauaaugc

SEQ ID NO: 3351215 - RNA, 23 nt, Human
uaaggaugcuuguacauaaugcg

SEQ ID NO: 3351216 - RNA, 18 nt, Human
uaaggaugcuuguacaua

SEQ ID NO: 3351217 - RNA, 19 nt, Human
uaaggaugcuuguacauaa

SEQ ID NO: 3351218 - RNA, 19 nt, Human
uaagccaguguugccuaag

SEQ ID NO: 3351219 - RNA, 18 nt, Human
uaagccaguguugccuaa

SEQ ID NO: 3351220 - RNA, 19 nt, Human
uaacaggcagauacaggaa

SEQ ID NO: 3351221 - RNA, 14 nt, Human
uaaccagcagaaau

SEQ ID NO: 3351222 - RNA, 16 nt, Human
uaaccagcagaaaugc

SEQ ID NO: 3351223 - RNA, 19 nt, Human
uaaccagcagaaaugccuu

SEQ ID NO: 3351224 - RNA, 20 nt, Human
uaacuuuuauaaacuuuacc

SEQ ID NO: 3351225 - RNA, 12 nt, Human
uaacagaaaugu

SEQ ID NO: 3351226 - RNA, 14 nt, Human
uaacagaaauguac

SEQ ID NO: 3351227 - RNA, 15 nt, Human
uaacagaaauguaca

SEQ ID NO: 3351228 - RNA, 13 nt, Human
uaacagaaaugua

SEQ ID NO: 3351229 - RNA, 23 nt, Human
uaaacaagaccacguuucuaaag

SEQ ID NO: 3351230 - RNA, 18 nt, Human
uaaacaagaccacguuuc

SEQ ID NO: 3351231 - RNA, 16 nt, Human
uaaacuuuaccuuuuu

SEQ ID NO: 3351232 - RNA, 22 nt, Human
uaaacuuuaccuuuuuuauaca

SEQ ID NO: 3351233 - RNA, 14 nt, Human
uaaacuuaaucuaa

SEQ ID NO: 3351234 - RNA, 13 nt, Human
uaaacuuaaucua

SEQ ID NO: 3351235 - RNA, 18 nt, Human
uaaacuuaaucuaaaugg

SEQ ID NO: 3351236 - RNA, 19 nt, Human
uaaacuuaaucuaaaugga

SEQ ID NO: 3351237 - RNA, 19 nt, Human
uaaaucagccguguaacca

SEQ ID NO: 3351238 - RNA, 21 nt, Human
uaaaguguauuuuuuuacuaa

SEQ ID NO: 3351239 - RNA, 22 nt, Human
uaaaguguauuuuuuuacuaau

SEQ ID NO: 3351240 - RNA, 23 nt, Human
uaaaguguauuuuuuuacuaaua

SEQ ID NO: 3351241 - RNA, 20 nt, Human
uaaaguguauuuuuuuacua

SEQ ID NO: 3351242 - RNA, 13 nt, Human
uaaaguuucuguu

SEQ ID NO: 3351243 - RNA, 19 nt, Human
guuuuuauggcuuuugugc

SEQ ID NO: 3351244 - RNA, 22 nt, Human
guuuuuauggcuuuugugcauu

SEQ ID NO: 3351245 - RNA, 23 nt, Human
guuuuuauggcuuuugugcauua

SEQ ID NO: 3351246 - RNA, 12 nt, Human
guuuucucuuga

SEQ ID NO: 3351247 - RNA, 19 nt, Human
guuuucucuugagagggug

SEQ ID NO: 3351248 - RNA, 17 nt, Human
guuuucaguguacaugg

SEQ ID NO: 3351249 - RNA, 16 nt, Human
guuuucaguguacaug

SEQ ID NO: 3351250 - RNA, 13 nt, Human
guuuuccugaaga

SEQ ID NO: 3351251 - RNA, 22 nt, Human
uaaaaaugagguacucuccugg

SEQ ID NO: 3351252 - RNA, 20 nt, Human
uaaaaaacugcugacuguuu

SEQ ID NO: 3351253 - RNA, 23 nt, Human
uaaaaaacugcugacuguuuucu

SEQ ID NO: 3351254 - RNA, 16 nt, Human
guuugaaccaagaacu

SEQ ID NO: 3351255 - RNA, 18 nt, Human
guuugagaucagccuggg

SEQ ID NO: 3351256 - RNA, 14 nt, Human
guuucuaaagcugc

SEQ ID NO: 3351257 - RNA, 15 nt, Human
guuucuaaagcugcc

SEQ ID NO: 3351258 - RNA, 16 nt, Human
guuucuaaagcugcca

SEQ ID NO: 3351259 - RNA, 19 nt, Human
guuuguaaauuaacuuuua

SEQ ID NO: 3351260 - RNA, 17 nt, Human
guuuguaaauuaacuuu

SEQ ID NO: 3351261 - RNA, 17 nt, Human
guuugauuaaauucuug

SEQ ID NO: 3351262 - RNA, 19 nt, Human
guuugauuaaauucuugca

SEQ ID NO: 3351263 - RNA, 22 nt, Human
guuugauuaaauucuugcaaag

SEQ ID NO: 3351264 - RNA, 21 nt, Human
guuuccuggcacugcuuccag

SEQ ID NO: 3351265 - RNA, 22 nt, Human
guuuccuggcacugcuuccagu

SEQ ID NO: 3351266 - RNA, 16 nt, Human
guuuccuggcacugcu

SEQ ID NO: 3351267 - RNA, 20 nt, Human
guuuccuggcacugcuucca

SEQ ID NO: 3351268 - RNA, 14 nt, Human
guuucagaaaugug

SEQ ID NO: 3351269 - RNA, 18 nt, Human
guuucagaaauguguuau

SEQ ID NO: 3351270 - RNA, 21 nt, Human
gguuggccccugcccggcugc

SEQ ID NO: 3351271 - RNA, 18 nt, Human
gguuggcaaaaaggcagg

SEQ ID NO: 3351272 - RNA, 15 nt, Human
guuuagauaauacac

SEQ ID NO: 3351273 - RNA, 16 nt, Human
ugggccuccugugugu

SEQ ID NO: 3351274 - RNA, 14 nt, Human
ugggccuccugugu

SEQ ID NO: 3351275 - RNA, 24 nt, Human
ugggagcugccuguucagcuccag

SEQ ID NO: 3351276 - RNA, 19 nt, Human
ugggcuucaguggcagcug

SEQ ID NO: 3351277 - RNA, 18 nt, Human
ugggcuucaguggcagcu

SEQ ID NO: 3351278 - RNA, 13 nt, Human
uggggcagcuuga

SEQ ID NO: 3351279 - RNA, 21 nt, Human
ugggcuuggggaccagagcug

SEQ ID NO: 3351280 - RNA, 16 nt, Human
uggggcagcuugaggg

SEQ ID NO: 3351281 - RNA, 19 nt, Human
ugggcuuggggaccagagc

SEQ ID NO: 3351282 - RNA, 20 nt, Human
ugggcuucaguggcagcugc

SEQ ID NO: 3351283 - RNA, 17 nt, Human
ugggcuucaguggcagc

SEQ ID NO: 3351284 - RNA, 23 nt, Human
ugggugucaagagggucugagga

SEQ ID NO: 3351285 - RNA, 21 nt, Human
ugggugucaagagggucugag

SEQ ID NO: 3351286 - RNA, 16 nt, Human
uggguucacugcaacc

SEQ ID NO: 3351287 - RNA, 23 nt, Human
uggguucaagcgauucuucugcu

SEQ ID NO: 3351288 - RNA, 17 nt, Human
ugggguggggaccucag

SEQ ID NO: 3351289 - RNA, 13 nt, Human
uggcucuuccagg

SEQ ID NO: 3351290 - RNA, 15 nt, Human
uggcucuuccaggcu

SEQ ID NO: 3351291 - RNA, 12 nt, Human
uggcugggggcc

SEQ ID NO: 3351292 - RNA, 16 nt, Human
uggcucuuccaggcug

SEQ ID NO: 3351293 - RNA, 20 nt, Human
uggcucagguggggucacuc

SEQ ID NO: 3351294 - RNA, 22 nt, Human
uggcucagguggggucacucug

SEQ ID NO: 3351295 - RNA, 14 nt, Human
uggcgcugccccug

SEQ ID NO: 3351296 - RNA, 22 nt, Human
uggcgugcaguggugcgaucug

SEQ ID NO: 3351297 - RNA, 22 nt, Human
uggcugguuagagguucccuuu

SEQ ID NO: 3351298 - RNA, 14 nt, Human
uggcugggggccuc

SEQ ID NO: 3351299 - RNA, 21 nt, Human
ugggaaugaaugucaguguga

SEQ ID NO: 3351300 - RNA, 22 nt, Human
ugggaaugaaugucagugugac

SEQ ID NO: 3351301 - RNA, 23 nt, Human
ugggagcugccuguucagcucca

SEQ ID NO: 3351302 - RNA, 16 nt, Human
ugggacaugggaaagg

SEQ ID NO: 3351303 - RNA, 16 nt, Human
uggacaggcauguucu

SEQ ID NO: 3351304 - RNA, 12 nt, Human
uggacaggcaug

SEQ ID NO: 3351305 - RNA, 22 nt, Human
uggaggcaugugaugagaggaa

SEQ ID NO: 3351306 - RNA, 20 nt, Human
uggcagugggagcugccugu

SEQ ID NO: 3351307 - RNA, 19 nt, Human
uggcagugggagcugccug

SEQ ID NO: 3351308 - RNA, 16 nt, Human
uggcagugggagcugc

SEQ ID NO: 3351309 - RNA, 15 nt, Human
uggcagugggagcug

SEQ ID NO: 3351310 - RNA, 14 nt, Human
uggcagugggagcu

SEQ ID NO: 3351311 - RNA, 13 nt, Human
uggcagugggagc

SEQ ID NO: 3351312 - RNA, 22 nt, Human
uggcagcugcgguccacccagg

SEQ ID NO: 3351313 - RNA, 21 nt, Human
uggcagcugcgguccacccag

SEQ ID NO: 3351314 - RNA, 19 nt, Human
uggcagcugcgguccaccc

SEQ ID NO: 3351315 - RNA, 14 nt, Human
uggaugccuggugg

SEQ ID NO: 3351316 - RNA, 14 nt, Human
uggcacugcuucca

SEQ ID NO: 3351317 - RNA, 16 nt, Human
uggcacugcuuccagu

SEQ ID NO: 3351318 - RNA, 18 nt, Human
uggcacugcuuccaguga

SEQ ID NO: 3351319 - RNA, 19 nt, Human
ugcuuccagugaggcucug

SEQ ID NO: 3351320 - RNA, 20 nt, Human
ugcuuccagugaggcucugc

SEQ ID NO: 3351321 - RNA, 16 nt, Human
ugcuuccagugaggcu

SEQ ID NO: 3351322 - RNA, 18 nt, Human
ugcuuccagugaggcucu

SEQ ID NO: 3351323 - RNA, 16 nt, Human
ugcuucuucagagacu

SEQ ID NO: 3351324 - RNA, 13 nt, Human
ugcuucuucagag

SEQ ID NO: 3351325 - RNA, 14 nt, Human
uggaagacagcucu

SEQ ID NO: 3351326 - RNA, 16 nt, Human
uggaaaauaaauuauu

SEQ ID NO: 3351327 - RNA, 15 nt, Human
uggaaaauaaauuau

SEQ ID NO: 3351328 - RNA, 11 nt, Human
uggaagacagc

SEQ ID NO: 3351329 - RNA, 12 nt, Human
uggaagacagcu

SEQ ID NO: 3351330 - RNA, 14 nt, Human
ugccagucaccccg

SEQ ID NO: 3351331 - RNA, 24 nt, Human
ugccagguuuuuggucugacccac

SEQ ID NO: 3351332 - RNA, 11 nt, Human
ugccagggaca

SEQ ID NO: 3351333 - RNA, 22 nt, Human
ugccagggacagaggggguggc

SEQ ID NO: 3351334 - RNA, 15 nt, Human
ugcccaccuggccuc

SEQ ID NO: 3351335 - RNA, 17 nt, Human
ugcccaccuggccucug

SEQ ID NO: 3351336 - RNA, 18 nt, Human
ugcccaccuggccucugc

SEQ ID NO: 3351337 - RNA, 14 nt, Human
ugcccaccuggccu

SEQ ID NO: 3351338 - RNA, 10 nt, Human
ugcccagccc

SEQ ID NO: 3351339 - RNA, 15 nt, Human
ugcaucguuucaucu

SEQ ID NO: 3351340 - RNA, 15 nt, Human
ugcaggcagccaggc

SEQ ID NO: 3351341 - RNA, 16 nt, Human
ugcaggcagccaggcc

SEQ ID NO: 3351342 - RNA, 17 nt, Human
ugcaggcagccaggcca

SEQ ID NO: 3351343 - RNA, 18 nt, Human
ugcaggcagccaggccac

SEQ ID NO: 3351344 - RNA, 21 nt, Human
ugcacagaguuguuacauuuu

SEQ ID NO: 3351345 - RNA, 22 nt, Human
ugcacagaguuguuacauuuuu

SEQ ID NO: 3351346 - RNA, 20 nt, Human
ugcacagaguuguuacauuu

SEQ ID NO: 3351347 - RNA, 23 nt, Human
ugcacagaguuguuacauuuuua

SEQ ID NO: 3351348 - RNA, 17 nt, Human
ugcacagcuaacaugga

SEQ ID NO: 3351349 - RNA, 22 nt, Human
ugaagucuuuguacagacaaca

SEQ ID NO: 3351350 - RNA, 17 nt, Human
ugaagucuuuguacaga

SEQ ID NO: 3351351 - RNA, 20 nt, Human
ugaagucuuuguacagacaa

SEQ ID NO: 3351352 - RNA, 18 nt, Human
ugcacagcuaacauggaa

SEQ ID NO: 3351353 - RNA, 20 nt, Human
ugcacagcuaacauggaagu

SEQ ID NO: 3351354 - RNA, 23 nt, Human
ugcacagcuaacauggaaguacu

SEQ ID NO: 3351355 - RNA, 14 nt, Human
ugcaggaccucagg

SEQ ID NO: 3351356 - RNA, 15 nt, Human
ugcaggaccucaggu

SEQ ID NO: 3351357 - RNA, 16 nt, Human
ugcaggaccucaggug

SEQ ID NO: 3351358 - RNA, 18 nt, Human
ugcaggaccucaggugag

SEQ ID NO: 3351359 - RNA, 14 nt, Human
ugcagcaauaaagc

SEQ ID NO: 3351360 - RNA, 15 nt, Human
ugcagcaauaaagca

SEQ ID NO: 3351361 - RNA, 16 nt, Human
ugcagcaauaaagcag

SEQ ID NO: 3351362 - RNA, 16 nt, Human
ugcacguacacacaca

SEQ ID NO: 3351363 - RNA, 16 nt, Human
ugcacuugcagacucu

SEQ ID NO: 3351364 - RNA, 21 nt, Human
ugcacuugcagacucuacaga

SEQ ID NO: 3351365 - RNA, 14 nt, Human
ugcacuuuguucug

SEQ ID NO: 3351366 - RNA, 15 nt, Human
ugcacuuuguucugg

SEQ ID NO: 3351367 - RNA, 18 nt, Human
ugcacuuuguucuggcuc

SEQ ID NO: 3351368 - RNA, 19 nt, Human
ugcacuuuguucuggcucu

SEQ ID NO: 3351369 - RNA, 16 nt, Human
ugccuccuuugugagg

SEQ ID NO: 3351370 - RNA, 17 nt, Human
ugccuccuuugugagga

SEQ ID NO: 3351371 - RNA, 18 nt, Human
ugccuccuuugugaggaa

SEQ ID NO: 3351372 - RNA, 14 nt, Human
ugccucugggacug

SEQ ID NO: 3351373 - RNA, 17 nt, Human
ugccugaagucacacag

SEQ ID NO: 3351374 - RNA, 18 nt, Human
ugccugaagucacacagu

SEQ ID NO: 3351375 - RNA, 22 nt, Human
ugccugaagucacacagugagu

SEQ ID NO: 3351376 - RNA, 11 nt, Human
ugcccagcccc

SEQ ID NO: 3351377 - RNA, 23 nt, Human
ugcccaggcuggcgugcaguggu

SEQ ID NO: 3351378 - RNA, 15 nt, Human
ugccuaaguauuaaa

SEQ ID NO: 3351379 - RNA, 13 nt, Human
ugccuaaguauua

SEQ ID NO: 3351380 - RNA, 21 nt, Human
ugccuaaguauuaaaacauug

SEQ ID NO: 3351381 - RNA, 20 nt, Human
ugccuaaguauuaaaacauu

SEQ ID NO: 3351382 - RNA, 19 nt, Human
ugccuaaguauuaaaacau

SEQ ID NO: 3351383 - RNA, 17 nt, Human
ugccuaaguauuaaaac

SEQ ID NO: 3351384 - RNA, 23 nt, Human
ugccuaaguauuaaaacauugga

SEQ ID NO: 3351385 - RNA, 22 nt, Human
ugccuaaguauuaaaacauugg

SEQ ID NO: 3351386 - RNA, 18 nt, Human
ugccuuauggaacacucu

SEQ ID NO: 3351387 - RNA, 20 nt, Human
ugccuuauggaacacucuga

SEQ ID NO: 3351388 - RNA, 21 nt, Human
ugccuuauggaacacucugag

SEQ ID NO: 3351389 - RNA, 22 nt, Human
ugccuuauggaacacucugaga

SEQ ID NO: 3351390 - RNA, 21 nt, Human
ugccuggauggggcugcaccg

SEQ ID NO: 3351391 - RNA, 23 nt, Human
ugcggugcuaucucccccagccc

SEQ ID NO: 3351392 - RNA, 21 nt, Human
ugcggugcuaucucccccagc

SEQ ID NO: 3351393 - RNA, 19 nt, Human
ugcuccuggcccacugcau

SEQ ID NO: 3351394 - RNA, 22 nt, Human
ugcugaaugguuuucaaaauaa

SEQ ID NO: 3351395 - RNA, 18 nt, Human
ugcugaaugguuuucaaa

SEQ ID NO: 3351396 - RNA, 17 nt, Human
ugcugaaugguuuucaa

SEQ ID NO: 3351397 - RNA, 18 nt, Human
ugcugaauacagaggcaa

SEQ ID NO: 3351398 - RNA, 23 nt, Human
ugcugaauacagaggcaacugca

SEQ ID NO: 3351399 - RNA, 21 nt, Human
ugcugaaggcucgagcaugcc

SEQ ID NO: 3351400 - RNA, 16 nt, Human
ugcugacagacacagg

SEQ ID NO: 3351401 - RNA, 23 nt, Human
ugcugagucugaaggcuggguuc

SEQ ID NO: 3351402 - RNA, 15 nt, Human
ugcugacagacacag

SEQ ID NO: 3351403 - RNA, 18 nt, Human
ugcugauggugcaaugac

SEQ ID NO: 3351404 - RNA, 20 nt, Human
ugcugauggugcaaugaccu

SEQ ID NO: 3351405 - RNA, 23 nt, Human
ugcugauggugcaaugaccuuuc

SEQ ID NO: 3351406 - RNA, 15 nt, Human
ugcugcaguugccag

SEQ ID NO: 3351407 - RNA, 19 nt, Human
ugcuccucuccccagcaag

SEQ ID NO: 3351408 - RNA, 18 nt, Human
ugcuccucuccccagcaa

SEQ ID NO: 3351409 - RNA, 16 nt, Human
ugcuaggaacacuccu

SEQ ID NO: 3351410 - RNA, 17 nt, Human
ugcuaggaacacuccuu

SEQ ID NO: 3351411 - RNA, 19 nt, Human
ugcuaggaacacuccuuca

SEQ ID NO: 3351412 - RNA, 15 nt, Human
ugcgugcauaccacu

SEQ ID NO: 3351413 - RNA, 23 nt, Human
uguaucccaugagccucagcauc

SEQ ID NO: 3351414 - RNA, 19 nt, Human
uguaucccaugagccucag

SEQ ID NO: 3351415 - RNA, 16 nt, Human
uguaucccaugagccu

SEQ ID NO: 3351416 - RNA, 12 nt, Human
ugucagugugac

SEQ ID NO: 3351417 - RNA, 20 nt, Human
ugucagugugacugaucucu

SEQ ID NO: 3351418 - RNA, 19 nt, Human
ugucagugugacugaucuc

SEQ ID NO: 3351419 - RNA, 16 nt, Human
uguacgucugacaggc

SEQ ID NO: 3351420 - RNA, 17 nt, Human
uguacgucugacaggca

SEQ ID NO: 3351421 - RNA, 14 nt, Human
uguagagugggagc

SEQ ID NO: 3351422 - RNA, 23 nt, Human
uguaccucuugagccuugaacuu

SEQ ID NO: 3351423 - RNA, 22 nt, Human
uguaccucuugagccuugaacu

SEQ ID NO: 3351424 - RNA, 14 nt, Human
uguaccucuugagc

SEQ ID NO: 3351425 - RNA, 13 nt, Human
uguaaauuaacuu

SEQ ID NO: 3351426 - RNA, 14 nt, Human
uguaaauuaacuuu

SEQ ID NO: 3351427 - RNA, 15 nt, Human
uguaaauuaacuuuu

SEQ ID NO: 3351428 - RNA, 16 nt, Human
uguaaauuaacuuuua

SEQ ID NO: 3351429 - RNA, 17 nt, Human
uguaaauuaacuuuuau

SEQ ID NO: 3351430 - RNA, 21 nt, Human
ugugauacaaugcugugcccu

SEQ ID NO: 3351431 - RNA, 19 nt, Human
ugugaguacuacaguccuc

SEQ ID NO: 3351432 - RNA, 20 nt, Human
ugugaguacuacaguccucc

SEQ ID NO: 3351433 - RNA, 23 nt, Human
ugugaguacuacaguccucccau

SEQ ID NO: 3351434 - RNA, 18 nt, Human
ugugaguacuacaguccu

SEQ ID NO: 3351435 - RNA, 21 nt, Human
ugugacaaggauugcuacugu

SEQ ID NO: 3351436 - RNA, 16 nt, Human
ugucuuuuuucacuac

SEQ ID NO: 3351437 - RNA, 19 nt, Human
ugucuuuggacccugaggc

SEQ ID NO: 3351438 - RNA, 22 nt, Human
ugucuuuggacccugaggccca

SEQ ID NO: 3351439 - RNA, 17 nt, Human
ugucuuuggacccugag

SEQ ID NO: 3351440 - RNA, 18 nt, Human
ugucuuuggacccugagg

SEQ ID NO: 3351441 - RNA, 13 nt, Human
ugugaaaggaaag

SEQ ID NO: 3351442 - RNA, 14 nt, Human
ugugaaaggaaaga

SEQ ID NO: 3351443 - RNA, 20 nt, Human
ugugcgugcauguguguuca

SEQ ID NO: 3351444 - RNA, 17 nt, Human
ugugccucugggacugg

SEQ ID NO: 3351445 - RNA, 16 nt, Human
ugugccucugggacug

SEQ ID NO: 3351446 - RNA, 15 nt, Human
ugugccucugggacu

SEQ ID NO: 3351447 - RNA, 13 nt, Human
ugugccucuggga

SEQ ID NO: 3351448 - RNA, 22 nt, Human
ugugcacaugcacgugugugca

SEQ ID NO: 3351449 - RNA, 16 nt, Human
ugugcacaugcacgug

SEQ ID NO: 3351450 - RNA, 13 nt, Human
uguggacacagcu

SEQ ID NO: 3351451 - RNA, 14 nt, Human
uguggacacagcuc

SEQ ID NO: 3351452 - RNA, 12 nt, Human
uguggagaagcg

SEQ ID NO: 3351453 - RNA, 15 nt, Human
uguggacacagcucu

SEQ ID NO: 3351454 - RNA, 12 nt, Human
ugugggaagggg

SEQ ID NO: 3351455 - RNA, 22 nt, Human
ugugggcuaguugggcuuccuc

SEQ ID NO: 3351456 - RNA, 13 nt, Human
uguuuuugucuua

SEQ ID NO: 3351457 - RNA, 17 nt, Human
uuaaaacaacacucaca

SEQ ID NO: 3351458 - RNA, 20 nt, Human
uguuuccuggcacugcuucc

SEQ ID NO: 3351459 - RNA, 21 nt, Human
uguuuccuggcacugcuucca

SEQ ID NO: 3351460 - RNA, 22 nt, Human
uguuuccuggcacugcuuccag

SEQ ID NO: 3351461 - RNA, 15 nt, Human
uguuuccuggcacug

SEQ ID NO: 3351462 - RNA, 17 nt, Human
uguuuguugucagcuga

SEQ ID NO: 3351463 - RNA, 16 nt, Human
uguuuguugucagcug

SEQ ID NO: 3351464 - RNA, 17 nt, Human
uuaaaugcccagccccu

SEQ ID NO: 3351465 - RNA, 18 nt, Human
uuaaaugcccagccccuu

SEQ ID NO: 3351466 - RNA, 17 nt, Human
uuaaaugcaccuggaau

SEQ ID NO: 3351467 - RNA, 18 nt, Human
uuaaaugcaccuggaaua

SEQ ID NO: 3351468 - RNA, 16 nt, Human
uuaaaugcaccuggaa

SEQ ID NO: 3351469 - RNA, 11 nt, Human
uuaaaugcacc

SEQ ID NO: 3351470 - RNA, 16 nt, Human
uuaaacuuaaucuaaa

SEQ ID NO: 3351471 - RNA, 18 nt, Human
uuaaacuuaaucuaaaug

SEQ ID NO: 3351472 - RNA, 20 nt, Human
uuaaacuuaaucuaaaugga

SEQ ID NO: 3351473 - RNA, 17 nt, Human
uuaaggaugcuuguaca

SEQ ID NO: 3351474 - RNA, 18 nt, Human
uuaaggaugcuuguacau

SEQ ID NO: 3351475 - RNA, 19 nt, Human
uuaaggaugcuuguacaua

SEQ ID NO: 3351476 - RNA, 20 nt, Human
uuaaggaugcuuguacauaa

SEQ ID NO: 3351477 - RNA, 21 nt, Human
uuaaggaagacaaugugaaaa

SEQ ID NO: 3351478 - RNA, 22 nt, Human
uuaaggaugcuuguacauaaug

SEQ ID NO: 3351479 - RNA, 18 nt, Human
uuaaugucacaggcaggu

SEQ ID NO: 3351480 - RNA, 17 nt, Human
uuaaugucacaggcagg

SEQ ID NO: 3351481 - RNA, 22 nt, Human
uuaccuuuuuuauacauaaaca

SEQ ID NO: 3351482 - RNA, 19 nt, Human
uuaccuuuuuuauacauaa

SEQ ID NO: 3351483 - RNA, 20 nt, Human
uuaccuuuuuuauacauaaa

SEQ ID NO: 3351484 - RNA, 20 nt, Human
uuacgguuuuccagguuuaa

SEQ ID NO: 3351485 - RNA, 20 nt, Human
uuacauuuuuaagugcugca

SEQ ID NO: 3351486 - RNA, 21 nt, Human
uuacauuuuuaagugcugcau

SEQ ID NO: 3351487 - RNA, 22 nt, Human
uuacauuuuuaagugcugcauu

SEQ ID NO: 3351488 - RNA, 16 nt, Human
uguucucugcccucca

SEQ ID NO: 3351489 - RNA, 18 nt, Human
uguucucugaggacacua

SEQ ID NO: 3351490 - RNA, 16 nt, Human
uguucucugaggacac

SEQ ID NO: 3351491 - RNA, 13 nt, Human
uguucucugagga

SEQ ID NO: 3351492 - RNA, 20 nt, Human
uguucuuucuggcuaugcau

SEQ ID NO: 3351493 - RNA, 22 nt, Human
uguucuuucuggcuaugcauuu

SEQ ID NO: 3351494 - RNA, 20 nt, Human
uguucuuuccaaaguacacu

SEQ ID NO: 3351495 - RNA, 11 nt, Human
uguugaaagau

SEQ ID NO: 3351496 - RNA, 15 nt, Human
uguucugacccugcu

SEQ ID NO: 3351497 - RNA, 19 nt, Human
uguucucugcccuccaaga

SEQ ID NO: 3351498 - RNA, 18 nt, Human
uguucugacccugcuuca

SEQ ID NO: 3351499 - RNA, 14 nt, Human
uguucuuucuggcu

SEQ ID NO: 3351500 - RNA, 11 nt, Human
uguuggccagg

SEQ ID NO: 3351501 - RNA, 15 nt, Human
uguuggccaaagcca

SEQ ID NO: 3351502 - RNA, 14 nt, Human
uguuggccaggcug

SEQ ID NO: 3351503 - RNA, 22 nt, Human
uguuacauuuuuaagugcugca

SEQ ID NO: 3351504 - RNA, 13 nt, Human
uguuacauuuuua

SEQ ID NO: 3351505 - RNA, 19 nt, Human
uguuacauaagauaaaugu

SEQ ID NO: 3351506 - RNA, 15 nt, Human
uguuacugucuucag

SEQ ID NO: 3351507 - RNA, 16 nt, Human
uguuacugucuucagu

SEQ ID NO: 3351508 - RNA, 11 nt, Human
uguucagcugg

SEQ ID NO: 3351509 - RNA, 22 nt, Human
uguucagcuccagcucaccagc

SEQ ID NO: 3351510 - RNA, 16 nt, Human
uguucagcuccagcuc

SEQ ID NO: 3351511 - RNA, 15 nt, Human
uguucagcuccagcu

SEQ ID NO: 3351512 - RNA, 14 nt, Human
uguucagcuccagc

SEQ ID NO: 3351513 - RNA, 16 nt, Human
uguguagggcgggagg

SEQ ID NO: 3351514 - RNA, 12 nt, Human
uuuuuuacuaau

SEQ ID NO: 3351515 - RNA, 17 nt, Human
uuuuuuccuucagugcc

SEQ ID NO: 3351516 - RNA, 20 nt, Human
uuucaauaggaaaaacugau

SEQ ID NO: 3351517 - RNA, 22 nt, Human
uuucaauaggaaaaacugauuu

SEQ ID NO: 3351518 - RNA, 19 nt, Human
uuucaauaggaaaaacuga

SEQ ID NO: 3351519 - RNA, 22 nt, Human
uuucauugcugggcuugucugu

SEQ ID NO: 3351520 - RNA, 15 nt, Human
uuucagccaagaauu

SEQ ID NO: 3351521 - RNA, 13 nt, Human
uuuccaggaaggc

SEQ ID NO: 3351522 - RNA, 12 nt, Human
uuuccaaaguac

SEQ ID NO: 3351523 - RNA, 15 nt, Human
uuuccaaaguacacu

SEQ ID NO: 3351524 - RNA, 15 nt, Human
uuucuagccagagga

SEQ ID NO: 3351525 - RNA, 21 nt, Human
uuuccucuuuggucuacacug

SEQ ID NO: 3351526 - RNA, 14 nt, Human
uuucuaaaggcuac

SEQ ID NO: 3351527 - RNA, 14 nt, Human
uuucuaaagcugcc

SEQ ID NO: 3351528 - RNA, 17 nt, Human
uuucuaaagcugccagc

SEQ ID NO: 3351529 - RNA, 14 nt, Human
uuuauugucaaagu

SEQ ID NO: 3351530 - RNA, 16 nt, Human
uuuauugucaaagugg

SEQ ID NO: 3351531 - RNA, 19 nt, Human
uuuauuuaguuccuugagu

SEQ ID NO: 3351532 - RNA, 14 nt, Human
uuuauaaacuuuac

SEQ ID NO: 3351533 - RNA, 16 nt, Human
uuuaucgucacugcuu

SEQ ID NO: 3351534 - RNA, 16 nt, Human
uuuauaaacuuuaccu

SEQ ID NO: 3351535 - RNA, 21 nt, Human
uuuaucgucacugcuuaacuu

SEQ ID NO: 3351536 - RNA, 15 nt, Human
uuuacuuuguguuca

SEQ ID NO: 3351537 - RNA, 16 nt, Human
uuuguaaauuaacuuu

SEQ ID NO: 3351538 - RNA, 17 nt, Human
uuuguaaauuaacuuuu

SEQ ID NO: 3351539 - RNA, 15 nt, Human
uuuguaaauuaacuu

SEQ ID NO: 3351540 - RNA, 19 nt, Human
uuuggugguuucagaaaug

SEQ ID NO: 3351541 - RNA, 13 nt, Human
uuuguccccaccg

SEQ ID NO: 3351542 - RNA, 21 nt, Human
uuuguccccaccgcagacagg

SEQ ID NO: 3351543 - RNA, 16 nt, Human
uuuguugucagcugaa

SEQ ID NO: 3351544 - RNA, 17 nt, Human
uuugaggucuguucuuu

SEQ ID NO: 3351545 - RNA, 22 nt, Human
uuugaggucuguucuuuccaaa

SEQ ID NO: 3351546 - RNA, 15 nt, Human
uuugagcagggcuca

SEQ ID NO: 3351547 - RNA, 14 nt, Human
uuugcagacaggca

SEQ ID NO: 3351548 - RNA, 18 nt, Human
uuugccauguuggccagg

SEQ ID NO: 3351549 - RNA, 14 nt, Human
uuuucuucucccuc

SEQ ID NO: 3351550 - RNA, 17 nt, Human
uuuucuugcaugaggcu

SEQ ID NO: 3351551 - RNA, 15 nt, Human
uuuuccuucagugcc

SEQ ID NO: 3351552 - RNA, 18 nt, Human
uuuuccaugaguccccug

SEQ ID NO: 3351553 - RNA, 19 nt, Human
uuuuccaugaguccccugu

SEQ ID NO: 3351554 - RNA, 15 nt, Human
uuuucacaguucucu

SEQ ID NO: 3351555 - RNA, 18 nt, Human
uuuucaaggcuuauauuc

SEQ ID NO: 3351556 - RNA, 18 nt, Human
uuuuaucgucacugcuua

SEQ ID NO: 3351557 - RNA, 16 nt, Human
uucucuccagccccug

SEQ ID NO: 3351558 - RNA, 18 nt, Human
uucucuccagccccugga

SEQ ID NO: 3351559 - RNA, 22 nt, Human
uucucuccuguaccucuugagc

SEQ ID NO: 3351560 - RNA, 16 nt, Human
uucuccaagcaggaca

SEQ ID NO: 3351561 - RNA, 13 nt, Human
uucuccacccugc

SEQ ID NO: 3351562 - RNA, 11 nt, Human
uucuccaggcu

SEQ ID NO: 3351563 - RNA, 16 nt, Human
uucugacccaugcugc

SEQ ID NO: 3351564 - RNA, 18 nt, Human
uucugacccaugcugccc

SEQ ID NO: 3351565 - RNA, 20 nt, Human
uucugacccaugcugcccug

SEQ ID NO: 3351566 - RNA, 21 nt, Human
uucugacccaugcugcccugu

SEQ ID NO: 3351567 - RNA, 21 nt, Human
uucugacccugcuucaaauau

SEQ ID NO: 3351568 - RNA, 20 nt, Human
uucucugaggacacuaacca

SEQ ID NO: 3351569 - RNA, 17 nt, Human
uucucugcccuccaaga

SEQ ID NO: 3351570 - RNA, 14 nt, Human
uucuauuguuucuu

SEQ ID NO: 3351571 - RNA, 16 nt, Human
uucuaugacacaugca

SEQ ID NO: 3351572 - RNA, 17 nt, Human
uucuaugacacaugcaa

SEQ ID NO: 3351573 - RNA, 22 nt, Human
uuccucccucccucuuucccuc

SEQ ID NO: 3351574 - RNA, 21 nt, Human
uuccucccucccucuuucccu

SEQ ID NO: 3351575 - RNA, 19 nt, Human
uuccucccucccucuuucc

SEQ ID NO: 3351576 - RNA, 12 nt, Human
uuccucccuccc

SEQ ID NO: 3351577 - RNA, 23 nt, Human
uuccucauaguaugguggcuggg

SEQ ID NO: 3351578 - RNA, 22 nt, Human
uuccccacuugagaauuacccu

SEQ ID NO: 3351579 - RNA, 19 nt, Human
uucccuuugacgccauccc

SEQ ID NO: 3351580 - RNA, 19 nt, Human
uuccuucauucaacccacc

SEQ ID NO: 3351581 - RNA, 23 nt, Human
uuccuucagugccuuauggaaca

SEQ ID NO: 3351582 - RNA, 16 nt, Human
uuccuucagugccuua

SEQ ID NO: 3351583 - RNA, 19 nt, Human
uuccuucagugccuuaugg

SEQ ID NO: 3351584 - RNA, 15 nt, Human
uuccuucagugccuu

SEQ ID NO: 3351585 - RNA, 16 nt, Human
uucuaaaggcuaccuu

SEQ ID NO: 3351586 - RNA, 17 nt, Human
uucuaaagcugccagcc

SEQ ID NO: 3351587 - RNA, 17 nt, Human
uucuaaaggcuaccuuu

SEQ ID NO: 3351588 - RNA, 18 nt, Human
uucuaaaggcuaccuuug

SEQ ID NO: 3351589 - RNA, 13 nt, Human
uucaaagauauuu

SEQ ID NO: 3351590 - RNA, 13 nt, Human
uuacgugaguccu

SEQ ID NO: 3351591 - RNA, 14 nt, Human
uuacgugaguccug

SEQ ID NO: 3351592 - RNA, 17 nt, Human
uuacuaaaauauauaua

SEQ ID NO: 3351593 - RNA, 14 nt, Human
uuacuaaaauauau

SEQ ID NO: 3351594 - RNA, 18 nt, Human
uucaauucucauuuguca

SEQ ID NO: 3351595 - RNA, 14 nt, Human
uucacucuccuugg

SEQ ID NO: 3351596 - RNA, 22 nt, Human
uucagcuccagcucaccagccc

SEQ ID NO: 3351597 - RNA, 15 nt, Human
uucagagacuccugc

SEQ ID NO: 3351598 - RNA, 18 nt, Human
uucagcugcauacaguuu

SEQ ID NO: 3351599 - RNA, 17 nt, Human
uucagcugacuuuucug

SEQ ID NO: 3351600 - RNA, 16 nt, Human
uucaggaagcucaggg

SEQ ID NO: 3351601 - RNA, 17 nt, Human
uucagcucugcaagaau

SEQ ID NO: 3351602 - RNA, 24 nt, Human
uucagcucugcaagaauugaagca

SEQ ID NO: 3351603 - RNA, 23 nt, Human
uucagcuccagcucaccagcccc

SEQ ID NO: 3351604 - RNA, 15 nt, Human
uucaggaagcucagg

SEQ ID NO: 3351605 - RNA, 20 nt, Human
uucaggaagcucagggccug

SEQ ID NO: 3351606 - RNA, 17 nt, Human
uucaggaagcucagggc

SEQ ID NO: 3351607 - RNA, 19 nt, Human
uucaggaagcucagggccu

SEQ ID NO: 3351608 - RNA, 13 nt, Human
uucauaaugacuu

SEQ ID NO: 3351609 - RNA, 23 nt, Human
uucauaaugacuuaagcacacuu

SEQ ID NO: 3351610 - RNA, 19 nt, Human
uucagugccuuauggaaca

SEQ ID NO: 3351611 - RNA, 21 nt, Human
uucagugccuuauggaacacu

SEQ ID NO: 3351612 - RNA, 18 nt, Human
uucagugccuuauggaac

SEQ ID NO: 3351613 - RNA, 18 nt, Human
uucauuuaggugaggaag

SEQ ID NO: 3351614 - RNA, 19 nt, Human
uucauuuaggugaggaagc

SEQ ID NO: 3351615 - RNA, 12 nt, Human
uucaucuugaau

SEQ ID NO: 3351616 - RNA, 20 nt, Human
uucaucuuccaacucaaacu

SEQ ID NO: 3351617 - RNA, 11 nt, Human
uucaucuugaa

SEQ ID NO: 3351618 - RNA, 17 nt, Human
uuccaugaguccccugu

SEQ ID NO: 3351619 - RNA, 18 nt, Human
uugauuuccguuaaaaua

SEQ ID NO: 3351620 - RNA, 17 nt, Human
uugcaacaggcugggcu

SEQ ID NO: 3351621 - RNA, 14 nt, Human
uugcaacaggcugg

SEQ ID NO: 3351622 - RNA, 18 nt, Human
uugauagcacagacccug

SEQ ID NO: 3351623 - RNA, 21 nt, Human
uugauagcacagacccugccc

SEQ ID NO: 3351624 - RNA, 16 nt, Human
uugcagacaggcaagc

SEQ ID NO: 3351625 - RNA, 20 nt, Human
uugaccgugaggccagagac

SEQ ID NO: 3351626 - RNA, 21 nt, Human
uugaccgugaggccagagaca

SEQ ID NO: 3351627 - RNA, 17 nt, Human
uugaccgugaggccaga

SEQ ID NO: 3351628 - RNA, 16 nt, Human
uugaccucugcagcaa

SEQ ID NO: 3351629 - RNA, 15 nt, Human
uugaccucaggugau

SEQ ID NO: 3351630 - RNA, 14 nt, Human
uugacgccauccca

SEQ ID NO: 3351631 - RNA, 22 nt, Human
uugacgccaucccagccccaau

SEQ ID NO: 3351632 - RNA, 12 nt, Human
uugaccugaggc

SEQ ID NO: 3351633 - RNA, 19 nt, Human
uugaccugaggcccuucuc

SEQ ID NO: 3351634 - RNA, 22 nt, Human
uugaccugaggcccuucucucc

SEQ ID NO: 3351635 - RNA, 20 nt, Human
uugacgccaucccagcccca

SEQ ID NO: 3351636 - RNA, 19 nt, Human
uugauagcacagacccugc

SEQ ID NO: 3351637 - RNA, 20 nt, Human
uugauagcacagacccugcc

SEQ ID NO: 3351638 - RNA, 23 nt, Human
uucuugguuuguaaauuaacuuu

SEQ ID NO: 3351639 - RNA, 17 nt, Human
uucuugguuuguaaauu

SEQ ID NO: 3351640 - RNA, 18 nt, Human
uucuugguuuguaaauua

SEQ ID NO: 3351641 - RNA, 13 nt, Human
uucuugguuugua

SEQ ID NO: 3351642 - RNA, 16 nt, Human
uucuugguuuguaaau

SEQ ID NO: 3351643 - RNA, 23 nt, Human
uucuuauuuaaugaaagacugua

SEQ ID NO: 3351644 - RNA, 19 nt, Human
uucuuauuuaaugaaagac

SEQ ID NO: 3351645 - RNA, 23 nt, Human
uucuguggguuucuaaagcugcc

SEQ ID NO: 3351646 - RNA, 17 nt, Human
uucuguccuacucugug

SEQ ID NO: 3351647 - RNA, 17 nt, Human
uucuguccgagcuuuga

SEQ ID NO: 3351648 - RNA, 21 nt, Human
uucuguccgagcuuugaaaau

SEQ ID NO: 3351649 - RNA, 19 nt, Human
uugaaaacacuguucucug

SEQ ID NO: 3351650 - RNA, 21 nt, Human
uugaaaacacuguucucugcc

SEQ ID NO: 3351651 - RNA, 18 nt, Human
uucuuuauaauucuacuu

SEQ ID NO: 3351652 - RNA, 16 nt, Human
uugaacugauaaagau

SEQ ID NO: 3351653 - RNA, 19 nt, Human
uugaacucuucaaucucuu

SEQ ID NO: 3351654 - RNA, 22 nt, Human
uugaacuuugaccucugcagca

SEQ ID NO: 3351655 - RNA, 20 nt, Human
uugaacuuugaccucugcag

SEQ ID NO: 3351656 - RNA, 17 nt, Human
uugaagacagagcuaca

SEQ ID NO: 3351657 - RNA, 19 nt, Human
uugaagacuuuucuuucag

SEQ ID NO: 3351658 - RNA, 17 nt, Human
uuggcaaaaaggcagga

SEQ ID NO: 3351659 - RNA, 11 nt, Human
uuggaaggaac

SEQ ID NO: 3351660 - RNA, 19 nt, Human
uuggaaggaacguccccug

SEQ ID NO: 3351661 - RNA, 23 nt, Human
uuggaaagaguaggaagacuuug

SEQ ID NO: 3351662 - RNA, 20 nt, Human
uugcuggggccgaaagaaca

SEQ ID NO: 3351663 - RNA, 22 nt, Human
uugcugauggugcaaugaccuu

SEQ ID NO: 3351664 - RNA, 20 nt, Human
uugcugauggugcaaugacc

SEQ ID NO: 3351665 - RNA, 19 nt, Human
uugcugauggugcaaugac

SEQ ID NO: 3351666 - RNA, 18 nt, Human
uugccucugccucugaca

SEQ ID NO: 3351667 - RNA, 16 nt, Human
uugccucugccucuga

SEQ ID NO: 3351668 - RNA, 14 nt, Human
uugccucugccucu

SEQ ID NO: 3351669 - RNA, 11 nt, Human
uugccucugcc

SEQ ID NO: 3351670 - RNA, 18 nt, Human
uugccagucaccccggcc

SEQ ID NO: 3351671 - RNA, 13 nt, Human
uugccagucaccc

SEQ ID NO: 3351672 - RNA, 23 nt, Human
uugcccacgcuggagugcaguga

SEQ ID NO: 3351673 - RNA, 15 nt, Human
uuguagagccagggu

SEQ ID NO: 3351674 - RNA, 14 nt, Human
uuguagagccaggg

SEQ ID NO: 3351675 - RNA, 21 nt, Human
uuguauucucuccuguaccuc

SEQ ID NO: 3351676 - RNA, 12 nt, Human
uuguacagacaa

SEQ ID NO: 3351677 - RNA, 13 nt, Human
uuguacagacaac

SEQ ID NO: 3351678 - RNA, 12 nt, Human
uugguccugcug

SEQ ID NO: 3351679 - RNA, 22 nt, Human
uuggucccccuuccauggacuu

SEQ ID NO: 3351680 - RNA, 16 nt, Human
uuggucccccuuccau

SEQ ID NO: 3351681 - RNA, 13 nt, Human
uuggcauucccca

SEQ ID NO: 3351682 - RNA, 24 nt, Human
uuggccaaagccaaagcuaggccu

SEQ ID NO: 3351683 - RNA, 14 nt, Human
uuggccaggcuggu

SEQ ID NO: 3351684 - RNA, 16 nt, Human
uuggcugcugaaggcu

SEQ ID NO: 3351685 - RNA, 18 nt, Human
uuggcugggggccucagu

SEQ ID NO: 3351686 - RNA, 22 nt, Human
uuggcugggggccucagugcca

SEQ ID NO: 3351687 - RNA, 21 nt, Human
uuggcugggggccucagugcc

SEQ ID NO: 3351688 - RNA, 16 nt, Human
uuggguggaugccugg

SEQ ID NO: 3351689 - RNA, 22 nt, Human
uuggcuuuggguugcaggaccu

SEQ ID NO: 3351690 - RNA, 16 nt, Human
uugggaggccauuugu

SEQ ID NO: 3351691 - RNA, 22 nt, Human
ccccaaauggaaaugggcagag

SEQ ID NO: 3351692 - RNA, 21 nt, Human
ccccaaauggaaaugggcaga

SEQ ID NO: 3351693 - RNA, 14 nt, Human
ccccacccaagggc

SEQ ID NO: 3351694 - RNA, 20 nt, Human
ccccacccaagggccuggcc

SEQ ID NO: 3351695 - RNA, 17 nt, Human
cccaugcugcccuguga

SEQ ID NO: 3351696 - RNA, 14 nt, Human
cccaugcugcccug

SEQ ID NO: 3351697 - RNA, 15 nt, Human
cccaugcugcccugu

SEQ ID NO: 3351698 - RNA, 16 nt, Human
cccaugcugcccugug

SEQ ID NO: 3351699 - RNA, 18 nt, Human
cccagugccgagaaggaa

SEQ ID NO: 3351700 - RNA, 17 nt, Human
cccagugccgagaagga

SEQ ID NO: 3351701 - RNA, 20 nt, Human
cccagugcccacaggaucag

SEQ ID NO: 3351702 - RNA, 15 nt, Human
cccagugcccacagg

SEQ ID NO: 3351703 - RNA, 17 nt, Human
ccccaggaggccagccu

SEQ ID NO: 3351704 - RNA, 13 nt, Human
cccaggcaggucu

SEQ ID NO: 3351705 - RNA, 11 nt, Human
cccaggcaggu

SEQ ID NO: 3351706 - RNA, 18 nt, Human
cccaggaggccagccuug

SEQ ID NO: 3351707 - RNA, 22 nt, Human
cccaggaggccagccuugacca

SEQ ID NO: 3351708 - RNA, 18 nt, Human
cccaggagccccgaggcc

SEQ ID NO: 3351709 - RNA, 21 nt, Human
cccaggagccccgaggccuuc

SEQ ID NO: 3351710 - RNA, 22 nt, Human
cccaggccccugccacccuggg

SEQ ID NO: 3351711 - RNA, 21 nt, Human
cccaggccccugccacccugg

SEQ ID NO: 3351712 - RNA, 18 nt, Human
cccaggccccugccaccc

SEQ ID NO: 3351713 - RNA, 16 nt, Human
cccaggccccugccac

SEQ ID NO: 3351714 - RNA, 11 nt, Human
cccaggccccu

SEQ ID NO: 3351715 - RNA, 22 nt, Human
cccaggcauuccccaggaggcc

SEQ ID NO: 3351716 - RNA, 23 nt, Human
cccaggcauuccccaggaggcca

SEQ ID NO: 3351717 - RNA, 20 nt, Human
cccaggcauuccccaggagg

SEQ ID NO: 3351718 - RNA, 21 nt, Human
cccaggcauuccccaggaggc

SEQ ID NO: 3351719 - RNA, 18 nt, Human
cccaggcauuccccagga

SEQ ID NO: 3351720 - RNA, 17 nt, Human
cccaggccuccuacagc

SEQ ID NO: 3351721 - RNA, 18 nt, Human
cccaggccuccuacagcu

SEQ ID NO: 3351722 - RNA, 13 nt, Human
cccagugcccaca

SEQ ID NO: 3351723 - RNA, 20 nt, Human
cccagucuggaaugcagugg

SEQ ID NO: 3351724 - RNA, 23 nt, Human
cccaggugcuaggaacacuccuu

SEQ ID NO: 3351725 - RNA, 22 nt, Human
cccaggugcuaggaacacuccu

SEQ ID NO: 3351726 - RNA, 15 nt, Human
cccagcgagcccugg

SEQ ID NO: 3351727 - RNA, 18 nt, Human
cccagcgagcccuggugg

SEQ ID NO: 3351728 - RNA, 17 nt, Human
cccagcgagcccuggug

SEQ ID NO: 3351729 - RNA, 23 nt, Human
cccagcgagcccugguggcagug

SEQ ID NO: 3351730 - RNA, 19 nt, Human
cccagcgagcccugguggc

SEQ ID NO: 3351731 - RNA, 12 nt, Human
cccagccugcua

SEQ ID NO: 3351732 - RNA, 22 nt, Human
cccagcaagugagagcugggug

SEQ ID NO: 3351733 - RNA, 21 nt, Human
cccagcaagugagagcugggu

SEQ ID NO: 3351734 - RNA, 20 nt, Human
cccagcaagugagagcuggg

SEQ ID NO: 3351735 - RNA, 19 nt, Human
cccagcaagugagagcugg

SEQ ID NO: 3351736 - RNA, 11 nt, Human
cccagccccuu

SEQ ID NO: 3351737 - RNA, 20 nt, Human
cccagagggccugcaaggga

SEQ ID NO: 3351738 - RNA, 18 nt, Human
cccagagggccugcaagg

SEQ ID NO: 3351739 - RNA, 18 nt, Human
cccagcaagugagagcug

SEQ ID NO: 3351740 - RNA, 16 nt, Human
cccagcaagugagagc

SEQ ID NO: 3351741 - RNA, 22 nt, Human
cccagauugcaacaggcugggc

SEQ ID NO: 3351742 - RNA, 21 nt, Human
cccagauugcaacaggcuggg

SEQ ID NO: 3351743 - RNA, 20 nt, Human
cccagauugcaacaggcugg

SEQ ID NO: 3351744 - RNA, 23 nt, Human
cccaaugcacuuuguucuggcuc

SEQ ID NO: 3351745 - RNA, 18 nt, Human
cccaagggccuggccuga

SEQ ID NO: 3351746 - RNA, 19 nt, Human
cccaagggccuggccugag

SEQ ID NO: 3351747 - RNA, 23 nt, Human
cccaagggccuggccugagcugg

SEQ ID NO: 3351748 - RNA, 23 nt, Human
cccaaauggaaaugggcagagca

SEQ ID NO: 3351749 - RNA, 17 nt, Human
cccaagggccuggccug

SEQ ID NO: 3351750 - RNA, 20 nt, Human
ccaggaagccagcaggcucu

SEQ ID NO: 3351751 - RNA, 22 nt, Human
ccaggaagccagcaggcucuca

SEQ ID NO: 3351752 - RNA, 14 nt, Human
ccagcucuggucca

SEQ ID NO: 3351753 - RNA, 17 nt, Human
ccagcucugguccauag

SEQ ID NO: 3351754 - RNA, 21 nt, Human
ccagcucugguccauagagag

SEQ ID NO: 3351755 - RNA, 22 nt, Human
ccagcucugguccauagagagc

SEQ ID NO: 3351756 - RNA, 20 nt, Human
ccagcugcuugggcuucauc

SEQ ID NO: 3351757 - RNA, 23 nt, Human
ccagcugcuugggcuucauccuc

SEQ ID NO: 3351758 - RNA, 19 nt, Human
ccagccuugaccauucucc

SEQ ID NO: 3351759 - RNA, 20 nt, Human
ccagccuugaccauucucca

SEQ ID NO: 3351760 - RNA, 16 nt, Human
ccagagcccaccuugg

SEQ ID NO: 3351761 - RNA, 22 nt, Human
ccagagcccaccuuggcucaag

SEQ ID NO: 3351762 - RNA, 14 nt, Human
ccagagcccaccuu

SEQ ID NO: 3351763 - RNA, 16 nt, Human
ccagcgagcccuggug

SEQ ID NO: 3351764 - RNA, 15 nt, Human
ccagcgagcccuggu

SEQ ID NO: 3351765 - RNA, 13 nt, Human
ccagcgagcccug

SEQ ID NO: 3351766 - RNA, 14 nt, Human
ccagcgagcccugg

SEQ ID NO: 3351767 - RNA, 12 nt, Human
ccagcucugguc

SEQ ID NO: 3351768 - RNA, 13 nt, Human
ccagcucuggucc

SEQ ID NO: 3351769 - RNA, 11 nt, Human
ccagcucuggu

SEQ ID NO: 3351770 - RNA, 15 nt, Human
ccaggagcagccaca

SEQ ID NO: 3351771 - RNA, 16 nt, Human
ccaggagcagccacau

SEQ ID NO: 3351772 - RNA, 15 nt, Human
ccaggagccccgagg

SEQ ID NO: 3351773 - RNA, 13 nt, Human
ccaggcauggugg

SEQ ID NO: 3351774 - RNA, 14 nt, Human
ccaggcauucccca

SEQ ID NO: 3351775 - RNA, 24 nt, Human
ccaggcauuccccaggaggccagc

SEQ ID NO: 3351776 - RNA, 23 nt, Human
ccaggcauuccccaggaggccag

SEQ ID NO: 3351777 - RNA, 22 nt, Human
ccaggcauuccccaggaggcca

SEQ ID NO: 3351778 - RNA, 13 nt, Human
ccaggagccuccu

SEQ ID NO: 3351779 - RNA, 14 nt, Human
ccaggagccuccug

SEQ ID NO: 3351780 - RNA, 18 nt, Human
ccaggagccuccugcccu

SEQ ID NO: 3351781 - RNA, 12 nt, Human
ccaggagccucc

SEQ ID NO: 3351782 - RNA, 12 nt, Human
ccaggaggccag

SEQ ID NO: 3351783 - RNA, 13 nt, Human
ccaggaggccagc

SEQ ID NO: 3351784 - RNA, 19 nt, Human
ccaggcuggucucaaacuc

SEQ ID NO: 3351785 - RNA, 14 nt, Human
ccaggcuggucuca

SEQ ID NO: 3351786 - RNA, 20 nt, Human
ccaggcuguaucccaugagc

SEQ ID NO: 3351787 - RNA, 19 nt, Human
ccaggugcuaggaacacuc

SEQ ID NO: 3351788 - RNA, 14 nt, Human
ccagguucagcuug

SEQ ID NO: 3351789 - RNA, 23 nt, Human
ccaguaaaugggggugcauuuga

SEQ ID NO: 3351790 - RNA, 18 nt, Human
ccagugaggcucugcccu

SEQ ID NO: 3351791 - RNA, 19 nt, Human
ccagugaggcucugcccuu

SEQ ID NO: 3351792 - RNA, 20 nt, Human
ccagugaggcucugcccuug

SEQ ID NO: 3351793 - RNA, 17 nt, Human
ccagugaggcucugccc

SEQ ID NO: 3351794 - RNA, 12 nt, Human
ccauccucugua

SEQ ID NO: 3351795 - RNA, 19 nt, Human
ccauccucuguacagagcc

SEQ ID NO: 3351796 - RNA, 17 nt, Human
ccaucauugaaaucuuu

SEQ ID NO: 3351797 - RNA, 22 nt, Human
ccaucauugaaaucuuuuugcu

SEQ ID NO: 3351798 - RNA, 14 nt, Human
ccaugcugcccugu

SEQ ID NO: 3351799 - RNA, 11 nt, Human
ccaugcugccc

SEQ ID NO: 3351800 - RNA, 13 nt, Human
ccaugcugcccug

SEQ ID NO: 3351801 - RNA, 19 nt, Human
ccaugauuaaccacuucag

SEQ ID NO: 3351802 - RNA, 21 nt, Human
ccaugauuaaccacuucagcu

SEQ ID NO: 3351803 - RNA, 18 nt, Human
ccaugauguuuuccauga

SEQ ID NO: 3351804 - RNA, 13 nt, Human
ccauggacuuugu

SEQ ID NO: 3351805 - RNA, 14 nt, Human
ccauggacuuuguu

SEQ ID NO: 3351806 - RNA, 15 nt, Human
ccauucuccaccugc

SEQ ID NO: 3351807 - RNA, 16 nt, Human
ccauucuccaccugcc

SEQ ID NO: 3351808 - RNA, 14 nt, Human
ccauggacuuuaua

SEQ ID NO: 3351809 - RNA, 18 nt, Human
ccauucugccugcccagg

SEQ ID NO: 3351810 - RNA, 17 nt, Human
ccauucugccugcccag

SEQ ID NO: 3351811 - RNA, 17 nt, Human
ccauucuccaccugcca

SEQ ID NO: 3351812 - RNA, 16 nt, Human
ccauucugccugccca

SEQ ID NO: 3351813 - RNA, 20 nt, Human
ccauucugccugcccaggcc

SEQ ID NO: 3351814 - RNA, 19 nt, Human
ccauucugccugcccaggc

SEQ ID NO: 3351815 - RNA, 14 nt, Human
ccauucuccaccug

SEQ ID NO: 3351816 - RNA, 21 nt, Human
ccauucugccugcccaggccc

SEQ ID NO: 3351817 - RNA, 12 nt, Human
cccaaagaugca

SEQ ID NO: 3351818 - RNA, 15 nt, Human
cccaaagaugcagcc

SEQ ID NO: 3351819 - RNA, 23 nt, Human
ccauuuuggauucuuauggacaa

SEQ ID NO: 3351820 - RNA, 20 nt, Human
ccauuuugggguacccacug

SEQ ID NO: 3351821 - RNA, 22 nt, Human
ccauuuugggguacccacugcu

SEQ ID NO: 3351822 - RNA, 20 nt, Human
cccaaaacucuccucugcug

SEQ ID NO: 3351823 - RNA, 11 nt, Human
ccacuacauuc

SEQ ID NO: 3351824 - RNA, 15 nt, Human
ccacuacauucuguu

SEQ ID NO: 3351825 - RNA, 14 nt, Human
ccacuacauucugu

SEQ ID NO: 3351826 - RNA, 16 nt, Human
ccacuacauucuguua

SEQ ID NO: 3351827 - RNA, 17 nt, Human
ccacuacauucuguuaa

SEQ ID NO: 3351828 - RNA, 23 nt, Human
ccacggccaggccagagggagug

SEQ ID NO: 3351829 - RNA, 18 nt, Human
ccacggccaggccagagg

SEQ ID NO: 3351830 - RNA, 16 nt, Human
ccacggccaggccaga

SEQ ID NO: 3351831 - RNA, 18 nt, Human
ccacgcuggagugcagug

SEQ ID NO: 3351832 - RNA, 15 nt, Human
ccacccccacccaag

SEQ ID NO: 3351833 - RNA, 13 nt, Human
ccacgcuggagug

SEQ ID NO: 3351834 - RNA, 16 nt, Human
ccacgcuggagugcag

SEQ ID NO: 3351835 - RNA, 15 nt, Human
ccaccccacacacgc

SEQ ID NO: 3351836 - RNA, 20 nt, Human
ccagacaccuugacagggca

SEQ ID NO: 3351837 - RNA, 21 nt, Human
ccagacaccuugacagggcac

SEQ ID NO: 3351838 - RNA, 21 nt, Human
ccagaauuucccaaagcagug

SEQ ID NO: 3351839 - RNA, 18 nt, Human
ccagaauuucccaaagca

SEQ ID NO: 3351840 - RNA, 12 nt, Human
ccagaauuuccc

SEQ ID NO: 3351841 - RNA, 19 nt, Human
ccagaauuucccaaagcag

SEQ ID NO: 3351842 - RNA, 23 nt, Human
ccagaaguuugagaucagccugg

SEQ ID NO: 3351843 - RNA, 22 nt, Human
ccagaaguuugagaucagccug

SEQ ID NO: 3351844 - RNA, 13 nt, Human
ccacuucagcuga

SEQ ID NO: 3351845 - RNA, 14 nt, Human
ccacuucagcugac

SEQ ID NO: 3351846 - RNA, 23 nt, Human
ccacugcacuccagccuggguga

SEQ ID NO: 3351847 - RNA, 17 nt, Human
ccacccccacccaaggg

SEQ ID NO: 3351848 - RNA, 23 nt, Human
ccacccaggagccccgaggccuu

SEQ ID NO: 3351849 - RNA, 21 nt, Human
ccacccaggagccccgaggcc

SEQ ID NO: 3351850 - RNA, 21 nt, Human
ccaccaacauacucccaucug

SEQ ID NO: 3351851 - RNA, 17 nt, Human
ccacaucuugcucugcu

SEQ ID NO: 3351852 - RNA, 18 nt, Human
ccacaucuugcucugcug

SEQ ID NO: 3351853 - RNA, 19 nt, Human
ccacaucuugcucugcuga

SEQ ID NO: 3351854 - RNA, 16 nt, Human
ccacauuccugaugcu

SEQ ID NO: 3351855 - RNA, 16 nt, Human
ccacaugugcacaugc

SEQ ID NO: 3351856 - RNA, 16 nt, Human
ccacaggaucagucug

SEQ ID NO: 3351857 - RNA, 15 nt, Human
ccacacccagcccac

SEQ ID NO: 3351858 - RNA, 20 nt, Human
ccacacccagcccacuucug

SEQ ID NO: 3351859 - RNA, 22 nt, Human
ccacacccagcccacuucugcc

SEQ ID NO: 3351860 - RNA, 21 nt, Human
ccacacccagcccacuucugc

SEQ ID NO: 3351861 - RNA, 15 nt, Human
ccaagaagcccagga

SEQ ID NO: 3351862 - RNA, 12 nt, Human
ccaacccucauc

SEQ ID NO: 3351863 - RNA, 19 nt, Human
ccaagaagcccaggaaagg

SEQ ID NO: 3351864 - RNA, 20 nt, Human
ccaagaagcccaggaaaggc

SEQ ID NO: 3351865 - RNA, 20 nt, Human
ccaaacucaccugccccuca

SEQ ID NO: 3351866 - RNA, 17 nt, Human
ccaaagccuccuccagc

SEQ ID NO: 3351867 - RNA, 22 nt, Human
ccaaagccuccuccagccgcca

SEQ ID NO: 3351868 - RNA, 23 nt, Human
ccaaagcagugcaugcugucccu

SEQ ID NO: 3351869 - RNA, 19 nt, Human
ccaaagccaaagcuaggcc

SEQ ID NO: 3351870 - RNA, 19 nt, Human
ccaaagcagugcaugcugu

SEQ ID NO: 3351871 - RNA, 15 nt, Human
ccaaagcuaggccug

SEQ ID NO: 3351872 - RNA, 17 nt, Human
ccaaagcuaggccuggc

SEQ ID NO: 3351873 - RNA, 16 nt, Human
ccaaagcuaggccugg

SEQ ID NO: 3351874 - RNA, 21 nt, Human
ccaaagcuaggccuggccaga

SEQ ID NO: 3351875 - RNA, 15 nt, Human
ccaaaggaagcacau

SEQ ID NO: 3351876 - RNA, 23 nt, Human
ccaaaggaagcacaugccucucu

SEQ ID NO: 3351877 - RNA, 17 nt, Human
ccaacauacucccaucu

SEQ ID NO: 3351878 - RNA, 18 nt, Human
ccaacauacucccaucug

SEQ ID NO: 3351879 - RNA, 19 nt, Human
ccaacauacucccaucugu

SEQ ID NO: 3351880 - RNA, 20 nt, Human
ccaacauacucccaucugug

SEQ ID NO: 3351881 - RNA, 16 nt, Human
ccaacauacucccauc

SEQ ID NO: 3351882 - RNA, 21 nt, Human
ccaacauacucccaucuguga

SEQ ID NO: 3351883 - RNA, 22 nt, Human
ccaacauacucccaucugugaa

SEQ ID NO: 3351884 - RNA, 15 nt, Human
ccaaaguacacuguu

SEQ ID NO: 3351885 - RNA, 18 nt, Human
ccaaaguacacuguuuca

SEQ ID NO: 3351886 - RNA, 22 nt, Human
ccaaggggaauguuugccucug

SEQ ID NO: 3351887 - RNA, 19 nt, Human
ccaagggccuggccugagc

SEQ ID NO: 3351888 - RNA, 16 nt, Human
ccaagggccuggccug

SEQ ID NO: 3351889 - RNA, 18 nt, Human
ccaagggccuggccugag

SEQ ID NO: 3351890 - RNA, 18 nt, Human
ccaaggccaaaggaagca

SEQ ID NO: 3351891 - RNA, 21 nt, Human
ccaaggccaaaggaagcacau

SEQ ID NO: 3351892 - RNA, 16 nt, Human
ccaaggccaaaggaag

SEQ ID NO: 3351893 - RNA, 15 nt, Human
ccaagggccuggccu

SEQ ID NO: 3351894 - RNA, 23 nt, Human
ccaagguuuggggaagaacgaag

SEQ ID NO: 3351895 - RNA, 13 nt, Human
ccaaggugggagg

SEQ ID NO: 3351896 - RNA, 20 nt, Human
ccaagucaagugaaaaagga

SEQ ID NO: 3351897 - RNA, 15 nt, Human
ccaagcucccaggca

SEQ ID NO: 3351898 - RNA, 16 nt, Human
ccaagcucccaggcau

SEQ ID NO: 3351899 - RNA, 17 nt, Human
ccaaggccaaaggaagc

SEQ ID NO: 3351900 - RNA, 14 nt, Human
ccaagcucccaggc

SEQ ID NO: 3351901 - RNA, 22 nt, Human
cauuugaaaauuuugauguuuu

SEQ ID NO: 3351902 - RNA, 20 nt, Human
cauuugaaaauuuugauguu

SEQ ID NO: 3351903 - RNA, 18 nt, Human
cauuugagcagggcucag

SEQ ID NO: 3351904 - RNA, 17 nt, Human
cauuugagcagggcuca

SEQ ID NO: 3351905 - RNA, 20 nt, Human
cauuugagcagggcucagcg

SEQ ID NO: 3351906 - RNA, 16 nt, Human
cauuugagcagggcuc

SEQ ID NO: 3351907 - RNA, 17 nt, Human
cauuuguuugaacugau

SEQ ID NO: 3351908 - RNA, 20 nt, Human
cauuuguuugaacugauaaa

SEQ ID NO: 3351909 - RNA, 22 nt, Human
cauuuguuugaacugauaaaga

SEQ ID NO: 3351910 - RNA, 13 nt, Human
cauuugcuccuuu

SEQ ID NO: 3351911 - RNA, 14 nt, Human
cauuugcuccuuuc

SEQ ID NO: 3351912 - RNA, 17 nt, Human
ccaaacucaccugcccc

SEQ ID NO: 3351913 - RNA, 13 nt, Human
cacccaagggccu

SEQ ID NO: 3351914 - RNA, 14 nt, Human
cacccaagggccug

SEQ ID NO: 3351915 - RNA, 15 nt, Human
cacccaagggccugg

SEQ ID NO: 3351916 - RNA, 18 nt, Human
cauuguuggccaaagcca

SEQ ID NO: 3351917 - RNA, 17 nt, Human
cauuguuggccaaagcc

SEQ ID NO: 3351918 - RNA, 13 nt, Human
cauuuccuguguc

SEQ ID NO: 3351919 - RNA, 12 nt, Human
cauuuccugugu

SEQ ID NO: 3351920 - RNA, 15 nt, Human
cauuuaaaagauaca

SEQ ID NO: 3351921 - RNA, 16 nt, Human
cauuuaaaagauacag

SEQ ID NO: 3351922 - RNA, 12 nt, Human
cauuuaaaagau

SEQ ID NO: 3351923 - RNA, 21 nt, Human
cccccgcugucagccauuccu

SEQ ID NO: 3351924 - RNA, 12 nt, Human
cccccagcccca

SEQ ID NO: 3351925 - RNA, 12 nt, Human
ccccacugguga

SEQ ID NO: 3351926 - RNA, 13 nt, Human
ccccacuggugac

SEQ ID NO: 3351927 - RNA, 13 nt, Human
ccccaggaggcca

SEQ ID NO: 3351928 - RNA, 14 nt, Human
ccccaggaggccag

SEQ ID NO: 3351929 - RNA, 15 nt, Human
ccccaggaggccagc

SEQ ID NO: 3351930 - RNA, 21 nt, Human
ccccaggaggccagccuugac

SEQ ID NO: 3351931 - RNA, 22 nt, Human
ccccaggaggccagccuugacc

SEQ ID NO: 3351932 - RNA, 16 nt, Human
ccccucagggucccug

SEQ ID NO: 3351933 - RNA, 19 nt, Human
cccugguggcagugggagc

SEQ ID NO: 3351934 - RNA, 16 nt, Human
cccugguggcaguggg

SEQ ID NO: 3351935 - RNA, 15 nt, Human
cccugguggcagugg

SEQ ID NO: 3351936 - RNA, 18 nt, Human
ccccucagggucccuggu

SEQ ID NO: 3351937 - RNA, 20 nt, Human
ccccucagggucccuggugg

SEQ ID NO: 3351938 - RNA, 17 nt, Human
ccccucagggucccugg

SEQ ID NO: 3351939 - RNA, 16 nt, Human
cccugugggcccccaa

SEQ ID NO: 3351940 - RNA, 15 nt, Human
cccugugggccccca

SEQ ID NO: 3351941 - RNA, 15 nt, Human
cccuguuuguuucug

SEQ ID NO: 3351942 - RNA, 18 nt, Human
cccugugggcccccaaau

SEQ ID NO: 3351943 - RNA, 18 nt, Human
cccuuggggagcaggcuc

SEQ ID NO: 3351944 - RNA, 14 nt, Human
cccuugugguccca

SEQ ID NO: 3351945 - RNA, 16 nt, Human
cccuuguggucccacc

SEQ ID NO: 3351946 - RNA, 18 nt, Human
cccuuguggucccacccc

SEQ ID NO: 3351947 - RNA, 20 nt, Human
cccuuugacgccaucccagc

SEQ ID NO: 3351948 - RNA, 17 nt, Human
cccuugccgucuaccug

SEQ ID NO: 3351949 - RNA, 18 nt, Human
cccuugccgucuaccuga

SEQ ID NO: 3351950 - RNA, 17 nt, Human
ccgaggccuucucugaa

SEQ ID NO: 3351951 - RNA, 18 nt, Human
ccgagaucacgccacugc

SEQ ID NO: 3351952 - RNA, 11 nt, Human
cccuuuuccuu

SEQ ID NO: 3351953 - RNA, 13 nt, Human
cccuuuucuguuu

SEQ ID NO: 3351954 - RNA, 17 nt, Human
cccuuuuuuggcugcug

SEQ ID NO: 3351955 - RNA, 18 nt, Human
cccuuuuuuggcugcuga

SEQ ID NO: 3351956 - RNA, 17 nt, Human
ccgagaaggaagccucc

SEQ ID NO: 3351957 - RNA, 18 nt, Human
ccgagauagccaaggcca

SEQ ID NO: 3351958 - RNA, 19 nt, Human
ccgagauagccaaggccaa

SEQ ID NO: 3351959 - RNA, 22 nt, Human
ccgagauagccaaggccaaagg

SEQ ID NO: 3351960 - RNA, 17 nt, Human
ccucacaguccuuacca

SEQ ID NO: 3351961 - RNA, 23 nt, Human
ccucaagugauucuccugccuca

SEQ ID NO: 3351962 - RNA, 12 nt, Human
ccucaccccacu

SEQ ID NO: 3351963 - RNA, 20 nt, Human
ccucacaguccuuaccagca

SEQ ID NO: 3351964 - RNA, 22 nt, Human
ccucacaguccuuaccagcaga

SEQ ID NO: 3351965 - RNA, 15 nt, Human
ccucaccccacugug

SEQ ID NO: 3351966 - RNA, 17 nt, Human
ccucaccuuucccaucu

SEQ ID NO: 3351967 - RNA, 23 nt, Human
ccgcuuucuacccagcgagcccu

SEQ ID NO: 3351968 - RNA, 14 nt, Human
ccgcuggggccagu

SEQ ID NO: 3351969 - RNA, 12 nt, Human
ccggcuggccug

SEQ ID NO: 3351970 - RNA, 15 nt, Human
ccgggcacucagaag

SEQ ID NO: 3351971 - RNA, 13 nt, Human
ccggcuggccugg

SEQ ID NO: 3351972 - RNA, 19 nt, Human
ccucugcagcaauaaagca

SEQ ID NO: 3351973 - RNA, 22 nt, Human
ccucugcacuccccugcugggu

SEQ ID NO: 3351974 - RNA, 14 nt, Human
ccucugcacucccc

SEQ ID NO: 3351975 - RNA, 19 nt, Human
ccucugcacuccccugcug

SEQ ID NO: 3351976 - RNA, 20 nt, Human
ccucugcacuccccugcugg

SEQ ID NO: 3351977 - RNA, 21 nt, Human
ccucugcacuccccugcuggg

SEQ ID NO: 3351978 - RNA, 20 nt, Human
ccucugcacaagcugcaccc

SEQ ID NO: 3351979 - RNA, 17 nt, Human
ccucugcacaagcugca

SEQ ID NO: 3351980 - RNA, 19 nt, Human
ccucugcacaagcugcacc

SEQ ID NO: 3351981 - RNA, 11 nt, Human
ccucugcacaa

SEQ ID NO: 3351982 - RNA, 15 nt, Human
ccucugcacaagcug

SEQ ID NO: 3351983 - RNA, 17 nt, Human
ccucugacacacagcuc

SEQ ID NO: 3351984 - RNA, 12 nt, Human
ccucugggacug

SEQ ID NO: 3351985 - RNA, 23 nt, Human
ccucugaaaaccaauguucucuc

SEQ ID NO: 3351986 - RNA, 15 nt, Human
ccucugacacacagc

SEQ ID NO: 3351987 - RNA, 16 nt, Human
ccucugacacacagcu

SEQ ID NO: 3351988 - RNA, 12 nt, Human
ccucucccauca

SEQ ID NO: 3351989 - RNA, 23 nt, Human
ccuccugugugugcgccuacagg

SEQ ID NO: 3351990 - RNA, 15 nt, Human
ccucagucuggcccu

SEQ ID NO: 3351991 - RNA, 19 nt, Human
ccucaggugauccacccac

SEQ ID NO: 3351992 - RNA, 17 nt, Human
ccucaggugauccaccc

SEQ ID NO: 3351993 - RNA, 22 nt, Human
ccucaggugagaagcagaggaa

SEQ ID NO: 3351994 - RNA, 22 nt, Human
ccucaggugauccacccaccuc

SEQ ID NO: 3351995 - RNA, 22 nt, Human
ccucagggucccugguggcagc

SEQ ID NO: 3351996 - RNA, 16 nt, Human
ccucaggugagaagca

SEQ ID NO: 3351997 - RNA, 14 nt, Human
ccucaggccugggg

SEQ ID NO: 3351998 - RNA, 21 nt, Human
ccucaggccugggggcugggc

SEQ ID NO: 3351999 - RNA, 10 nt, Human
ccucaggccu

SEQ ID NO: 3352000 - RNA, 11 nt, Human
ccucaggccug

SEQ ID NO: 3352001 - RNA, 14 nt, Human
ccucagggucccug

SEQ ID NO: 3352002 - RNA, 14 nt, Human
ccucagcauccugg

SEQ ID NO: 3352003 - RNA, 17 nt, Human
ccucagcauccuggcac

SEQ ID NO: 3352004 - RNA, 16 nt, Human
ccucagcauccuggca

SEQ ID NO: 3352005 - RNA, 15 nt, Human
ccucccucccucuuu

SEQ ID NO: 3352006 - RNA, 13 nt, Human
ccucccucccucu

SEQ ID NO: 3352007 - RNA, 13 nt, Human
ccucccucuuucc

SEQ ID NO: 3352008 - RNA, 16 nt, Human
ccucccucccucuuuc

SEQ ID NO: 3352009 - RNA, 13 nt, Human
ccuccugggcuaa

SEQ ID NO: 3352010 - RNA, 22 nt, Human
ccuccugugugugcgccuacag

SEQ ID NO: 3352011 - RNA, 15 nt, Human
ccuccugugugugcg

SEQ ID NO: 3352012 - RNA, 13 nt, Human
ccuccugugugug

SEQ ID NO: 3352013 - RNA, 12 nt, Human
ccugaggcccag

SEQ ID NO: 3352014 - RNA, 13 nt, Human
ccugaggcccaga

SEQ ID NO: 3352015 - RNA, 12 nt, Human
ccugacaacacu

SEQ ID NO: 3352016 - RNA, 14 nt, Human
ccugacaacacuca

SEQ ID NO: 3352017 - RNA, 15 nt, Human
ccugacaacacucau

SEQ ID NO: 3352018 - RNA, 16 nt, Human
ccugacaacacucauu

SEQ ID NO: 3352019 - RNA, 16 nt, Human
ccugaggcccuucucu

SEQ ID NO: 3352020 - RNA, 17 nt, Human
ccugaggcccuucucuc

SEQ ID NO: 3352021 - RNA, 19 nt, Human
ccugaggcccuucucucca

SEQ ID NO: 3352022 - RNA, 20 nt, Human
ccugaggcccuucucuccag

SEQ ID NO: 3352023 - RNA, 21 nt, Human
ccugaggcccuucucuccagc

SEQ ID NO: 3352024 - RNA, 22 nt, Human
ccugaggcccuucucuccagcc

SEQ ID NO: 3352025 - RNA, 23 nt, Human
ccugaggcccuucucuccagccc

SEQ ID NO: 3352026 - RNA, 19 nt, Human
ccugauugugucucuuggu

SEQ ID NO: 3352027 - RNA, 23 nt, Human
ccugauugugucucuugguccug

SEQ ID NO: 3352028 - RNA, 17 nt, Human
ccugaugcuucuucaga

SEQ ID NO: 3352029 - RNA, 18 nt, Human
ccugaugcuucuucagag

SEQ ID NO: 3352030 - RNA, 22 nt, Human
ccugaugcuucuucagagacuc

SEQ ID NO: 3352031 - RNA, 14 nt, Human
ccugaugcuucuuc

SEQ ID NO: 3352032 - RNA, 14 nt, Human
ccugaggcccuucu

SEQ ID NO: 3352033 - RNA, 14 nt, Human
ccucuguacagagc

SEQ ID NO: 3352034 - RNA, 15 nt, Human
ccucuguacagagcc

SEQ ID NO: 3352035 - RNA, 16 nt, Human
ccucuguacagagccc

SEQ ID NO: 3352036 - RNA, 17 nt, Human
ccucuguacagagccca

SEQ ID NO: 3352037 - RNA, 18 nt, Human
ccucuguacagagcccac

SEQ ID NO: 3352038 - RNA, 23 nt, Human
ccucuguacagagcccacgcccc

SEQ ID NO: 3352039 - RNA, 14 nt, Human
ccucuuagaaaaac

SEQ ID NO: 3352040 - RNA, 15 nt, Human
ccucuuaugggcugg

SEQ ID NO: 3352041 - RNA, 16 nt, Human
ccucuuaugggcuggg

SEQ ID NO: 3352042 - RNA, 14 nt, Human
ccucuuaugggcug

SEQ ID NO: 3352043 - RNA, 17 nt, Human
ccugaagucacacagug

SEQ ID NO: 3352044 - RNA, 16 nt, Human
ccugaagucacacagu

SEQ ID NO: 3352045 - RNA, 13 nt, Human
ccugaaggccccg

SEQ ID NO: 3352046 - RNA, 15 nt, Human
ccugaagucacacag

SEQ ID NO: 3352047 - RNA, 22 nt, Human
ccucuuuggucuacacugugcu

SEQ ID NO: 3352048 - RNA, 19 nt, Human
ccucuuuggucuacacugu

SEQ ID NO: 3352049 - RNA, 17 nt, Human
ccucuuaugggcugggu

SEQ ID NO: 3352050 - RNA, 20 nt, Human
cguuucuaugacacaugcaa

SEQ ID NO: 3352051 - RNA, 19 nt, Human
cguuucuaaaggcuaccuu

SEQ ID NO: 3352052 - RNA, 21 nt, Human
cguuucuaaaggcuaccuuug

SEQ ID NO: 3352053 - RNA, 12 nt, Human
cguggcugcuuc

SEQ ID NO: 3352054 - RNA, 14 nt, Human
cguggcugcuucaa

SEQ ID NO: 3352055 - RNA, 15 nt, Human
cguggcugcuucaag

SEQ ID NO: 3352056 - RNA, 13 nt, Human
cgucugacaggca

SEQ ID NO: 3352057 - RNA, 14 nt, Human
cgucuaccugaggg

SEQ ID NO: 3352058 - RNA, 11 nt, Human
cguccccuguc

SEQ ID NO: 3352059 - RNA, 14 nt, Human
cguccccugucccc

SEQ ID NO: 3352060 - RNA, 19 nt, Human
cgugcauaccacuuuuguu

SEQ ID NO: 3352061 - RNA, 14 nt, Human
cgugcauaccacuu

SEQ ID NO: 3352062 - RNA, 18 nt, Human
cgugcauaccacuuuugu

SEQ ID NO: 3352063 - RNA, 22 nt, Human
cgugcacacaccagagcccacc

SEQ ID NO: 3352064 - RNA, 22 nt, Human
cgugcaguggugcgaucugggu

SEQ ID NO: 3352065 - RNA, 21 nt, Human
cgugcacacaccagagcccac

SEQ ID NO: 3352066 - RNA, 20 nt, Human
cgugcacacaccagagccca

SEQ ID NO: 3352067 - RNA, 22 nt, Human
cggugcuaucucccccagcccc

SEQ ID NO: 3352068 - RNA, 23 nt, Human
cggugcuaucucccccagcccca

SEQ ID NO: 3352069 - RNA, 16 nt, Human
cgcgacaaugcaaacc

SEQ ID NO: 3352070 - RNA, 17 nt, Human
cgcgacaaugcaaacca

SEQ ID NO: 3352071 - RNA, 15 nt, Human
cgcgacaaugcaaac

SEQ ID NO: 3352072 - RNA, 15 nt, Human
cgcccccacugguga

SEQ ID NO: 3352073 - RNA, 13 nt, Human
cgcagacaggacc

SEQ ID NO: 3352074 - RNA, 14 nt, Human
cgcagacaggacca

SEQ ID NO: 3352075 - RNA, 14 nt, Human
cgcuaagagggagg

SEQ ID NO: 3352076 - RNA, 15 nt, Human
cgcuaagagggaggg

SEQ ID NO: 3352077 - RNA, 16 nt, Human
cgcuaagagggaggga

SEQ ID NO: 3352078 - RNA, 20 nt, Human
cgcgugcacacaccagagcc

SEQ ID NO: 3352079 - RNA, 19 nt, Human
cgcgugcacacaccagagc

SEQ ID NO: 3352080 - RNA, 16 nt, Human
cgcgugcacacaccag

SEQ ID NO: 3352081 - RNA, 23 nt, Human
ccuuugacgccaucccagcccca

SEQ ID NO: 3352082 - RNA, 16 nt, Human
ccuuugcuugaaagaa

SEQ ID NO: 3352083 - RNA, 13 nt, Human
ccuuggcugcagg

SEQ ID NO: 3352084 - RNA, 12 nt, Human
ccuuggcugcag

SEQ ID NO: 3352085 - RNA, 16 nt, Human
ccuuguggucccaccc

SEQ ID NO: 3352086 - RNA, 19 nt, Human
ccuuguggucccaccccac

SEQ ID NO: 3352087 - RNA, 20 nt, Human
ccuuguggucccaccccaca

SEQ ID NO: 3352088 - RNA, 13 nt, Human
ccuuuaagagaaa

SEQ ID NO: 3352089 - RNA, 12 nt, Human
cgaggacaggga

SEQ ID NO: 3352090 - RNA, 13 nt, Human
cgaggacagggag

SEQ ID NO: 3352091 - RNA, 19 nt, Human
cgaggccuucucugaagga

SEQ ID NO: 3352092 - RNA, 18 nt, Human
cgaggccuucucugaagg

SEQ ID NO: 3352093 - RNA, 18 nt, Human
ccuuuguauucucuccug

SEQ ID NO: 3352094 - RNA, 15 nt, Human
ccuuuguauucucuc

SEQ ID NO: 3352095 - RNA, 12 nt, Human
cgauuucuguuu

SEQ ID NO: 3352096 - RNA, 23 nt, Human
cgcacuucgggaggucgaggcag

SEQ ID NO: 3352097 - RNA, 19 nt, Human
cgaucuggguucacugcaa

SEQ ID NO: 3352098 - RNA, 19 nt, Human
cgauucuucugcuucagcc

SEQ ID NO: 3352099 - RNA, 13 nt, Human
cgauucuucugcu

SEQ ID NO: 3352100 - RNA, 21 nt, Human
cgauucuucugcuucagccuc

SEQ ID NO: 3352101 - RNA, 13 nt, Human
cgcuccugugucu

SEQ ID NO: 3352102 - RNA, 20 nt, Human
cggaaugaaccacaucuugc

SEQ ID NO: 3352103 - RNA, 18 nt, Human
cggacagccacggccagg

SEQ ID NO: 3352104 - RNA, 16 nt, Human
cggacagccacggcca

SEQ ID NO: 3352105 - RNA, 15 nt, Human
cggacagccacggcc

SEQ ID NO: 3352106 - RNA, 12 nt, Human
cgggcaugacac

SEQ ID NO: 3352107 - RNA, 15 nt, Human
cgggcaugacacgaa

SEQ ID NO: 3352108 - RNA, 17 nt, Human
cgggaggucgaggcagg

SEQ ID NO: 3352109 - RNA, 16 nt, Human
cgggaggucgaggcag

SEQ ID NO: 3352110 - RNA, 20 nt, Human
cgggaggauguucugggaca

SEQ ID NO: 3352111 - RNA, 15 nt, Human
cggcuggccuggccc

SEQ ID NO: 3352112 - RNA, 16 nt, Human
cggcuggccuggcccc

SEQ ID NO: 3352113 - RNA, 14 nt, Human
cggcuggccuggcc

SEQ ID NO: 3352114 - RNA, 18 nt, Human
cggcuggccuggccccuc

SEQ ID NO: 3352115 - RNA, 20 nt, Human
ccugugaguacuacaguccu

SEQ ID NO: 3352116 - RNA, 17 nt, Human
ccugucccccugacaac

SEQ ID NO: 3352117 - RNA, 16 nt, Human
ccugucccccugacaa

SEQ ID NO: 3352118 - RNA, 18 nt, Human
ccuguccccgcacugggc

SEQ ID NO: 3352119 - RNA, 17 nt, Human
ccugugccucugggacu

SEQ ID NO: 3352120 - RNA, 15 nt, Human
ccugugccucuggga

SEQ ID NO: 3352121 - RNA, 20 nt, Human
ccugugauggggcccugccu

SEQ ID NO: 3352122 - RNA, 21 nt, Human
ccugugauggggcccugccuc

SEQ ID NO: 3352123 - RNA, 22 nt, Human
ccugugauggggcccugccucc

SEQ ID NO: 3352124 - RNA, 18 nt, Human
ccugugauggggcccugc

SEQ ID NO: 3352125 - RNA, 19 nt, Human
ccugugauggggcccugcc

SEQ ID NO: 3352126 - RNA, 17 nt, Human
ccugugauggggcccug

SEQ ID NO: 3352127 - RNA, 13 nt, Human
ccugguggcagcu

SEQ ID NO: 3352128 - RNA, 12 nt, Human
ccugguggcagc

SEQ ID NO: 3352129 - RNA, 14 nt, Human
ccugguggcagcuc

SEQ ID NO: 3352130 - RNA, 16 nt, Human
ccugguggcagcucac

SEQ ID NO: 3352131 - RNA, 17 nt, Human
ccugguggcagcucacc

SEQ ID NO: 3352132 - RNA, 18 nt, Human
ccugguggcagcucaccu

SEQ ID NO: 3352133 - RNA, 12 nt, Human
ccuguaccucuu

SEQ ID NO: 3352134 - RNA, 20 nt, Human
ccuguaauccuagcacuuug

SEQ ID NO: 3352135 - RNA, 21 nt, Human
ccuguagagugggagcugagu

SEQ ID NO: 3352136 - RNA, 19 nt, Human
ccuguagagugggagcuga

SEQ ID NO: 3352137 - RNA, 23 nt, Human
ccuguagagugggagcugagugg

SEQ ID NO: 3352138 - RNA, 21 nt, Human
ccugcuggguguggcgcagca

SEQ ID NO: 3352139 - RNA, 13 nt, Human
ccugcugguucag

SEQ ID NO: 3352140 - RNA, 19 nt, Human
ccugcugguucaggguugg

SEQ ID NO: 3352141 - RNA, 23 nt, Human
ccugcgucucauacucaccucac

SEQ ID NO: 3352142 - RNA, 19 nt, Human
ccugcaacaccuuguuucc

SEQ ID NO: 3352143 - RNA, 16 nt, Human
ccugcaaccugauugu

SEQ ID NO: 3352144 - RNA, 18 nt, Human
ccugcaacaccuuguuuc

SEQ ID NO: 3352145 - RNA, 13 nt, Human
ccugcuccagcug

SEQ ID NO: 3352146 - RNA, 14 nt, Human
ccugcuccagcugu

SEQ ID NO: 3352147 - RNA, 22 nt, Human
ccugcuccagcuguucagcugg

SEQ ID NO: 3352148 - RNA, 12 nt, Human
ccugcuccagcu

SEQ ID NO: 3352149 - RNA, 14 nt, Human
ccuggccccucagg

SEQ ID NO: 3352150 - RNA, 18 nt, Human
ccuggcaugggaaugaau

SEQ ID NO: 3352151 - RNA, 16 nt, Human
ccugggaucccucauc

SEQ ID NO: 3352152 - RNA, 20 nt, Human
ccugggaucccucauccuca

SEQ ID NO: 3352153 - RNA, 14 nt, Human
ccugggcagaagga

SEQ ID NO: 3352154 - RNA, 12 nt, Human
ccugggcagaag

SEQ ID NO: 3352155 - RNA, 20 nt, Human
ccuggcacugcuuccaguga

SEQ ID NO: 3352156 - RNA, 17 nt, Human
ccuggcacugcuuccag

SEQ ID NO: 3352157 - RNA, 21 nt, Human
ccuggcacugcuuccagugag

SEQ ID NO: 3352158 - RNA, 14 nt, Human
ccuggcagccccug

SEQ ID NO: 3352159 - RNA, 16 nt, Human
ccuggcagccccuguu

SEQ ID NO: 3352160 - RNA, 16 nt, Human
ccuggcaugggaauga

SEQ ID NO: 3352161 - RNA, 17 nt, Human
ccuggcaugggaaugaa

SEQ ID NO: 3352162 - RNA, 14 nt, Human
ccuggcaugggaau

SEQ ID NO: 3352163 - RNA, 13 nt, Human
ccuggacccugug

SEQ ID NO: 3352164 - RNA, 14 nt, Human
ccuggacccugugg

SEQ ID NO: 3352165 - RNA, 13 nt, Human
ccuugacagggca

SEQ ID NO: 3352166 - RNA, 14 nt, Human
ccuugacagggcac

SEQ ID NO: 3352167 - RNA, 19 nt, Human
ccuugaccauucuccaccu

SEQ ID NO: 3352168 - RNA, 20 nt, Human
ccuugaccauucuccaccug

SEQ ID NO: 3352169 - RNA, 17 nt, Human
ccuugacagggcacacc

SEQ ID NO: 3352170 - RNA, 15 nt, Human
ccuugacagggcaca

SEQ ID NO: 3352171 - RNA, 19 nt, Human
ccuuggauuguccccgacc

SEQ ID NO: 3352172 - RNA, 22 nt, Human
ccuugaguugauucagcucugc

SEQ ID NO: 3352173 - RNA, 23 nt, Human
ccuugaguugauucagcucugca

SEQ ID NO: 3352174 - RNA, 21 nt, Human
ccuugaccauucuccaccugc

SEQ ID NO: 3352175 - RNA, 20 nt, Human
ccuugaguugauucagcucu

SEQ ID NO: 3352176 - RNA, 17 nt, Human
ccuugaaugaugccaug

SEQ ID NO: 3352177 - RNA, 17 nt, Human
ccuugaacuuugaccuc

SEQ ID NO: 3352178 - RNA, 16 nt, Human
ccuugaacuggguacu

SEQ ID NO: 3352179 - RNA, 19 nt, Human
ccuugaaaacacuguucuc

SEQ ID NO: 3352180 - RNA, 21 nt, Human
ccuugaaaacacuguucucug

SEQ ID NO: 3352181 - RNA, 22 nt, Human
ccuugaaaacacuguucucugc

SEQ ID NO: 3352182 - RNA, 14 nt, Human
ccuugaacugggua

SEQ ID NO: 3352183 - RNA, 15 nt, Human
ccuucgcuccugugu

SEQ ID NO: 3352184 - RNA, 14 nt, Human
ccuucgcuccugug

SEQ ID NO: 3352185 - RNA, 13 nt, Human
ccuucgcuccugu

SEQ ID NO: 3352186 - RNA, 15 nt, Human
ccuugaaaacacugu

SEQ ID NO: 3352187 - RNA, 11 nt, Human
ccuuuggcuuc

SEQ ID NO: 3352188 - RNA, 14 nt, Human
ccuuaccagcagag

SEQ ID NO: 3352189 - RNA, 15 nt, Human
ccuuaccagcagagc

SEQ ID NO: 3352190 - RNA, 16 nt, Human
ccuuaccagcagagca

SEQ ID NO: 3352191 - RNA, 19 nt, Human
ccuuacccucauguucuua

SEQ ID NO: 3352192 - RNA, 13 nt, Human
ccuuaccagcaga

SEQ ID NO: 3352193 - RNA, 20 nt, Human
ccuuaccucggugccuuccu

SEQ ID NO: 3352194 - RNA, 14 nt, Human
ccuuagacaguccc

SEQ ID NO: 3352195 - RNA, 21 nt, Human
ccuuagacagucccugccaau

SEQ ID NO: 3352196 - RNA, 18 nt, Human
ccuuagacagucccugcc

SEQ ID NO: 3352197 - RNA, 19 nt, Human
ccuuagacagucccugcca

SEQ ID NO: 3352198 - RNA, 16 nt, Human
ccuuagacagucccug

SEQ ID NO: 3352199 - RNA, 17 nt, Human
ccuuagacagucccugc

SEQ ID NO: 3352200 - RNA, 15 nt, Human
ccuuccagggguggg

SEQ ID NO: 3352201 - RNA, 16 nt, Human
ccuuccagggguggga

SEQ ID NO: 3352202 - RNA, 18 nt, Human
ccuuccaggggugggaca

SEQ ID NO: 3352203 - RNA, 14 nt, Human
ccuuccucuuucca

SEQ ID NO: 3352204 - RNA, 20 nt, Human
ccuucagugccuuauggaac

SEQ ID NO: 3352205 - RNA, 15 nt, Human
ccuucagugccuuau

SEQ ID NO: 3352206 - RNA, 19 nt, Human
ccuucagugccuuauggaa

SEQ ID NO: 3352207 - RNA, 13 nt, Human
ccuucagugccuu

SEQ ID NO: 3352208 - RNA, 14 nt, Human
ccuucagugccuua

SEQ ID NO: 3352209 - RNA, 12 nt, Human
ccuucagugccu

SEQ ID NO: 3352210 - RNA, 19 nt, Human
cugcccuccaagaccuucu

SEQ ID NO: 3352211 - RNA, 15 nt, Human
cugcccggcugcgga

SEQ ID NO: 3352212 - RNA, 11 nt, Human
cugcccggcug

SEQ ID NO: 3352213 - RNA, 13 nt, Human
cugcccugcccac

SEQ ID NO: 3352214 - RNA, 14 nt, Human
cugcccugcccacc

SEQ ID NO: 3352215 - RNA, 15 nt, Human
cugcccugcccaccu

SEQ ID NO: 3352216 - RNA, 16 nt, Human
cugcccugcccaccug

SEQ ID NO: 3352217 - RNA, 16 nt, Human
cugccauuucugagau

SEQ ID NO: 3352218 - RNA, 14 nt, Human
cugccccuggcagc

SEQ ID NO: 3352219 - RNA, 15 nt, Human
cugccccuggcagcc

SEQ ID NO: 3352220 - RNA, 16 nt, Human
cugccccuggcagccc

SEQ ID NO: 3352221 - RNA, 20 nt, Human
cugcccggcaggguccuaga

SEQ ID NO: 3352222 - RNA, 19 nt, Human
cugccagccgagauagcca

SEQ ID NO: 3352223 - RNA, 15 nt, Human
cugccaggaagccag

SEQ ID NO: 3352224 - RNA, 16 nt, Human
cugccaggaagccagc

SEQ ID NO: 3352225 - RNA, 18 nt, Human
cugccaggaagccagcag

SEQ ID NO: 3352226 - RNA, 15 nt, Human
cugccaugccagcuu

SEQ ID NO: 3352227 - RNA, 17 nt, Human
cugccaugccagcuuau

SEQ ID NO: 3352228 - RNA, 19 nt, Human
cugccaugccagcuuaucu

SEQ ID NO: 3352229 - RNA, 16 nt, Human
cugccacccuggggag

SEQ ID NO: 3352230 - RNA, 15 nt, Human
cugccacccugggga

SEQ ID NO: 3352231 - RNA, 14 nt, Human
cugccacccugggg

SEQ ID NO: 3352232 - RNA, 17 nt, Human
cugcuccucuccccagc

SEQ ID NO: 3352233 - RNA, 16 nt, Human
cugcuccucuccccag

SEQ ID NO: 3352234 - RNA, 18 nt, Human
cugcuccucuccccagca

SEQ ID NO: 3352235 - RNA, 20 nt, Human
cugcggaaugaaccacaucu

SEQ ID NO: 3352236 - RNA, 15 nt, Human
cugcgguccacccag

SEQ ID NO: 3352237 - RNA, 21 nt, Human
cugcggaaugaaccacaucuu

SEQ ID NO: 3352238 - RNA, 16 nt, Human
cugcgguccacccagg

SEQ ID NO: 3352239 - RNA, 14 nt, Human
cugcuccagcuguu

SEQ ID NO: 3352240 - RNA, 13 nt, Human
cugccucuucucu

SEQ ID NO: 3352241 - RNA, 23 nt, Human
cugccugaagucacacagugagu

SEQ ID NO: 3352242 - RNA, 23 nt, Human
cugccuguugggccaggagccuc

SEQ ID NO: 3352243 - RNA, 14 nt, Human
cugccugcccaggc

SEQ ID NO: 3352244 - RNA, 13 nt, Human
cugccugcccagg

SEQ ID NO: 3352245 - RNA, 13 nt, Human
cugccucagccuc

SEQ ID NO: 3352246 - RNA, 13 nt, Human
cugagucugaagg

SEQ ID NO: 3352247 - RNA, 14 nt, Human
cugagucugaaggc

SEQ ID NO: 3352248 - RNA, 15 nt, Human
cugagucugaaggcu

SEQ ID NO: 3352249 - RNA, 16 nt, Human
cugagucugaaggcug

SEQ ID NO: 3352250 - RNA, 13 nt, Human
cugauaaagauga

SEQ ID NO: 3352251 - RNA, 15 nt, Human
cugauucccaagcuc

SEQ ID NO: 3352252 - RNA, 18 nt, Human
cugauucccaagcucugc

SEQ ID NO: 3352253 - RNA, 17 nt, Human
cugauucccaagcucug

SEQ ID NO: 3352254 - RNA, 20 nt, Human
cugauucccaagcucugcuc

SEQ ID NO: 3352255 - RNA, 19 nt, Human
cugauucccaagcucugcu

SEQ ID NO: 3352256 - RNA, 22 nt, Human
cugauucccaagcucugcuccu

SEQ ID NO: 3352257 - RNA, 17 nt, Human
cugcacccucaggcagg

SEQ ID NO: 3352258 - RNA, 16 nt, Human
cugcacccucaggcag

SEQ ID NO: 3352259 - RNA, 18 nt, Human
cugcacccucaggcaggu

SEQ ID NO: 3352260 - RNA, 13 nt, Human
cugcacaagcugc

SEQ ID NO: 3352261 - RNA, 14 nt, Human
cugcacaagcugca

SEQ ID NO: 3352262 - RNA, 15 nt, Human
cugcacaagcugcac

SEQ ID NO: 3352263 - RNA, 16 nt, Human
cugcacaagcugcacc

SEQ ID NO: 3352264 - RNA, 11 nt, Human
cugcagccuca

SEQ ID NO: 3352265 - RNA, 20 nt, Human
cugcagccucaaccuccugg

SEQ ID NO: 3352266 - RNA, 19 nt, Human
cugcagccucaaccuccug

SEQ ID NO: 3352267 - RNA, 22 nt, Human
cugcagccucaaccuccugggc

SEQ ID NO: 3352268 - RNA, 22 nt, Human
cugcagggaguccgaaagggac

SEQ ID NO: 3352269 - RNA, 17 nt, Human
cugcaccggcuggccug

SEQ ID NO: 3352270 - RNA, 18 nt, Human
cugcaccggcuggccugg

SEQ ID NO: 3352271 - RNA, 19 nt, Human
cugcaccggcuggccuggc

SEQ ID NO: 3352272 - RNA, 16 nt, Human
cugcacuugcagacuc

SEQ ID NO: 3352273 - RNA, 14 nt, Human
cugcacuugcagac

SEQ ID NO: 3352274 - RNA, 16 nt, Human
cugcaccggcuggccu

SEQ ID NO: 3352275 - RNA, 17 nt, Human
cugggguggggaccuca

SEQ ID NO: 3352276 - RNA, 18 nt, Human
cugggguggggaccucag

SEQ ID NO: 3352277 - RNA, 19 nt, Human
cugggguggggaccucagg

SEQ ID NO: 3352278 - RNA, 17 nt, Human
cugggggccucagugcc

SEQ ID NO: 3352279 - RNA, 13 nt, Human
cugggggccucag

SEQ ID NO: 3352280 - RNA, 21 nt, Human
cugggguggggaccucaggcc

SEQ ID NO: 3352281 - RNA, 22 nt, Human
cugggguggggaccucaggccu

SEQ ID NO: 3352282 - RNA, 23 nt, Human
cugggguggggaccucaggccug

SEQ ID NO: 3352283 - RNA, 20 nt, Human
cuggguacuuguggacacag

SEQ ID NO: 3352284 - RNA, 23 nt, Human
cuggguacuuguggacacagcuc

SEQ ID NO: 3352285 - RNA, 21 nt, Human
cuggguacuuguggacacagc

SEQ ID NO: 3352286 - RNA, 19 nt, Human
cuggguacuuguggacaca

SEQ ID NO: 3352287 - RNA, 20 nt, Human
cugggcuucaguggcagcug

SEQ ID NO: 3352288 - RNA, 19 nt, Human
cugggcuucaguggcagcu

SEQ ID NO: 3352289 - RNA, 17 nt, Human
cugggcuucaguggcag

SEQ ID NO: 3352290 - RNA, 18 nt, Human
cugggcuucaguggcagc

SEQ ID NO: 3352291 - RNA, 17 nt, Human
cugggcuuggggaccag

SEQ ID NO: 3352292 - RNA, 20 nt, Human
cugggcuuggggaccagagc

SEQ ID NO: 3352293 - RNA, 13 nt, Human
cugggcuugggga

SEQ ID NO: 3352294 - RNA, 22 nt, Human
cugggcuucaguggcagcugcu

SEQ ID NO: 3352295 - RNA, 21 nt, Human
cugggcuucaguggcagcugc

SEQ ID NO: 3352296 - RNA, 18 nt, Human
cugguccauagagagcaa

SEQ ID NO: 3352297 - RNA, 14 nt, Human
cuggucccacucag

SEQ ID NO: 3352298 - RNA, 18 nt, Human
cuggucccacucagucca

SEQ ID NO: 3352299 - RNA, 15 nt, Human
cuggucccacucagu

SEQ ID NO: 3352300 - RNA, 15 nt, Human
cugguccauagagag

SEQ ID NO: 3352301 - RNA, 17 nt, Human
cugguccauagagagca

SEQ ID NO: 3352302 - RNA, 13 nt, Human
cuggguuggaggg

SEQ ID NO: 3352303 - RNA, 19 nt, Human
cuggguucuacccaggugc

SEQ ID NO: 3352304 - RNA, 23 nt, Human
cugguggcagugggagcugccug

SEQ ID NO: 3352305 - RNA, 19 nt, Human
cugguggcagugggagcug

SEQ ID NO: 3352306 - RNA, 20 nt, Human
cuggcuguuggcugggggcc

SEQ ID NO: 3352307 - RNA, 18 nt, Human
cuggcuguuggcuggggg

SEQ ID NO: 3352308 - RNA, 21 nt, Human
cuggcuggguggcaccagcag

SEQ ID NO: 3352309 - RNA, 19 nt, Human
cuggcuguuggcugggggc

SEQ ID NO: 3352310 - RNA, 18 nt, Human
cuggcucuuccaggcugg

SEQ ID NO: 3352311 - RNA, 19 nt, Human
cuggcucuuccaggcuggg

SEQ ID NO: 3352312 - RNA, 17 nt, Human
cuggcucuuccaggcug

SEQ ID NO: 3352313 - RNA, 13 nt, Human
cuggccugagcug

SEQ ID NO: 3352314 - RNA, 20 nt, Human
cugggcaaugugauaaaacc

SEQ ID NO: 3352315 - RNA, 12 nt, Human
cugggagugagc

SEQ ID NO: 3352316 - RNA, 13 nt, Human
cugggagugagcu

SEQ ID NO: 3352317 - RNA, 16 nt, Human
cugggagugagcuggu

SEQ ID NO: 3352318 - RNA, 18 nt, Human
cugggaggucaaggcugc

SEQ ID NO: 3352319 - RNA, 15 nt, Human
cuggaaugcaguggu

SEQ ID NO: 3352320 - RNA, 14 nt, Human
cuggaaugcagugg

SEQ ID NO: 3352321 - RNA, 15 nt, Human
cuggaagcacagcuu

SEQ ID NO: 3352322 - RNA, 18 nt, Human
cuggaagcacagcuucau

SEQ ID NO: 3352323 - RNA, 14 nt, Human
cuggaagcacagcu

SEQ ID NO: 3352324 - RNA, 13 nt, Human
cuggauuaaacuu

SEQ ID NO: 3352325 - RNA, 23 nt, Human
cuggauuaaacuuaaucuaaaug

SEQ ID NO: 3352326 - RNA, 16 nt, Human
cuggauggggcugcac

SEQ ID NO: 3352327 - RNA, 15 nt, Human
cuggauggggcugca

SEQ ID NO: 3352328 - RNA, 22 nt, Human
cuggcacuauaauguaagcucu

SEQ ID NO: 3352329 - RNA, 23 nt, Human
cuggcacuauaauguaagcucua

SEQ ID NO: 3352330 - RNA, 13 nt, Human
cuggcacugcuuc

SEQ ID NO: 3352331 - RNA, 14 nt, Human
cuggcacugcuucc

SEQ ID NO: 3352332 - RNA, 14 nt, Human
cuggccuagcauac

SEQ ID NO: 3352333 - RNA, 23 nt, Human
cuggccuagcauacguacacauu

SEQ ID NO: 3352334 - RNA, 17 nt, Human
cuggccuagcauacgua

SEQ ID NO: 3352335 - RNA, 12 nt, Human
cuggcccacugc

SEQ ID NO: 3352336 - RNA, 13 nt, Human
cuggcccacugca

SEQ ID NO: 3352337 - RNA, 20 nt, Human
cuggccagaugcaccagccc

SEQ ID NO: 3352338 - RNA, 19 nt, Human
cuggccagaugcaccagcc

SEQ ID NO: 3352339 - RNA, 18 nt, Human
cuggccagaugcaccagc

SEQ ID NO: 3352340 - RNA, 17 nt, Human
cuggccagaugcaccag

SEQ ID NO: 3352341 - RNA, 21 nt, Human
cuggccagaugcaccagcccu

SEQ ID NO: 3352342 - RNA, 14 nt, Human
cuggccagaugcac

SEQ ID NO: 3352343 - RNA, 15 nt, Human
cuggcacugcuucca

SEQ ID NO: 3352344 - RNA, 16 nt, Human
cuggcacugcuuccag

SEQ ID NO: 3352345 - RNA, 17 nt, Human
cuggcacugcuuccagu

SEQ ID NO: 3352346 - RNA, 16 nt, Human
cuggccagaugcacca

SEQ ID NO: 3352347 - RNA, 20 nt, Human
cuccagcucaccagccccag

SEQ ID NO: 3352348 - RNA, 19 nt, Human
cuccagcucaccagcccca

SEQ ID NO: 3352349 - RNA, 12 nt, Human
cuccacccugcu

SEQ ID NO: 3352350 - RNA, 15 nt, Human
cuccaccugccaggg

SEQ ID NO: 3352351 - RNA, 17 nt, Human
cuccaccugccagggac

SEQ ID NO: 3352352 - RNA, 18 nt, Human
cuccaccugccagggaca

SEQ ID NO: 3352353 - RNA, 21 nt, Human
cuccaccugccagggacagag

SEQ ID NO: 3352354 - RNA, 11 nt, Human
cuccacccugc

SEQ ID NO: 3352355 - RNA, 17 nt, Human
cucccaggcauucccca

SEQ ID NO: 3352356 - RNA, 19 nt, Human
cucccaggcauuccccagg

SEQ ID NO: 3352357 - RNA, 20 nt, Human
cucccaggcauuccccagga

SEQ ID NO: 3352358 - RNA, 21 nt, Human
cucccaggcauuccccaggag

SEQ ID NO: 3352359 - RNA, 22 nt, Human
cucccaggcauuccccaggagg

SEQ ID NO: 3352360 - RNA, 22 nt, Human
cucccaaggggcccaaauucuu

SEQ ID NO: 3352361 - RNA, 21 nt, Human
cucccaaggggcccaaauucu

SEQ ID NO: 3352362 - RNA, 15 nt, Human
cucccaggcauuccc

SEQ ID NO: 3352363 - RNA, 14 nt, Human
cuccaugugggcua

SEQ ID NO: 3352364 - RNA, 13 nt, Human
cuccagcuguuca

SEQ ID NO: 3352365 - RNA, 18 nt, Human
cuccagcuguucagcugg

SEQ ID NO: 3352366 - RNA, 19 nt, Human
cuccagcuguucagcuggu

SEQ ID NO: 3352367 - RNA, 11 nt, Human
cuccaggcucc

SEQ ID NO: 3352368 - RNA, 22 nt, Human
cucagguggggucacucuggca

SEQ ID NO: 3352369 - RNA, 23 nt, Human
cucagguggggucacucuggcag

SEQ ID NO: 3352370 - RNA, 16 nt, Human
cucaggugucccugca

SEQ ID NO: 3352371 - RNA, 15 nt, Human
cucaggugucccugc

SEQ ID NO: 3352372 - RNA, 12 nt, Human
cucagggucccu

SEQ ID NO: 3352373 - RNA, 23 nt, Human
cuaaaagguaugcaaucaaaucu

SEQ ID NO: 3352374 - RNA, 19 nt, Human
cucauaguaugguggcugg

SEQ ID NO: 3352375 - RNA, 18 nt, Human
cucauaguaugguggcug

SEQ ID NO: 3352376 - RNA, 18 nt, Human
cucaggugucccugcacu

SEQ ID NO: 3352377 - RNA, 17 nt, Human
cucaggugucccugcac

SEQ ID NO: 3352378 - RNA, 13 nt, Human
cucauugaccuga

SEQ ID NO: 3352379 - RNA, 15 nt, Human
cucauugaccugagg

SEQ ID NO: 3352380 - RNA, 23 nt, Human
cucauucuucuguacgucugaca

SEQ ID NO: 3352381 - RNA, 16 nt, Human
cucauugaccugaggc

SEQ ID NO: 3352382 - RNA, 12 nt, Human
cucauucuucug

SEQ ID NO: 3352383 - RNA, 14 nt, Human
cucauucuucugua

SEQ ID NO: 3352384 - RNA, 13 nt, Human
cucauucuucugu

SEQ ID NO: 3352385 - RNA, 21 nt, Human
cucauuagcauuuugcuaaau

SEQ ID NO: 3352386 - RNA, 13 nt, Human
cucgcgacaaugc

SEQ ID NO: 3352387 - RNA, 15 nt, Human
cucgcgacaaugcaa

SEQ ID NO: 3352388 - RNA, 16 nt, Human
cucgaguuacagacaa

SEQ ID NO: 3352389 - RNA, 20 nt, Human
cucgaguuacagacaaagcg

SEQ ID NO: 3352390 - RNA, 20 nt, Human
cuccuucuguccuacucugu

SEQ ID NO: 3352391 - RNA, 15 nt, Human
cuccuucuguccuac

SEQ ID NO: 3352392 - RNA, 14 nt, Human
cuccuucuguccua

SEQ ID NO: 3352393 - RNA, 13 nt, Human
cuccuucaccuuu

SEQ ID NO: 3352394 - RNA, 16 nt, Human
cucgaacuggcugcaa

SEQ ID NO: 3352395 - RNA, 11 nt, Human
cuccuucuucc

SEQ ID NO: 3352396 - RNA, 21 nt, Human
cuccuugaaaacacuguucuc

SEQ ID NO: 3352397 - RNA, 15 nt, Human
cuccugcaggcagcc

SEQ ID NO: 3352398 - RNA, 21 nt, Human
cuccugcaggcagccaggcca

SEQ ID NO: 3352399 - RNA, 22 nt, Human
cuccugcaggcagccaggccac

SEQ ID NO: 3352400 - RNA, 11 nt, Human
cuccugugugu

SEQ ID NO: 3352401 - RNA, 23 nt, Human
cuccugugucuugcaauggcagc

SEQ ID NO: 3352402 - RNA, 15 nt, Human
cuccugugucuugca

SEQ ID NO: 3352403 - RNA, 14 nt, Human
cuccuucaccuuug

SEQ ID NO: 3352404 - RNA, 16 nt, Human
cuccuucaccuuuguc

SEQ ID NO: 3352405 - RNA, 19 nt, Human
cuccuucaccuuugucccc

SEQ ID NO: 3352406 - RNA, 21 nt, Human
cuccuucaccuuuguccccac

SEQ ID NO: 3352407 - RNA, 12 nt, Human
cuccucagaucu

SEQ ID NO: 3352408 - RNA, 14 nt, Human
cuccucagaucuuc

SEQ ID NO: 3352409 - RNA, 13 nt, Human
cuccugcaggcag

SEQ ID NO: 3352410 - RNA, 14 nt, Human
cuccugcaggcagc

SEQ ID NO: 3352411 - RNA, 12 nt, Human
cuccugcaggca

SEQ ID NO: 3352412 - RNA, 14 nt, Human
cucccaucucacac

SEQ ID NO: 3352413 - RNA, 15 nt, Human
cucccaucucacaca

SEQ ID NO: 3352414 - RNA, 18 nt, Human
cucccaucucacacauga

SEQ ID NO: 3352415 - RNA, 10 nt, Human
cucccuuccu

SEQ ID NO: 3352416 - RNA, 23 nt, Human
cucccuucccaccucucucacuc

SEQ ID NO: 3352417 - RNA, 17 nt, Human
cucccuuggauuguccc

SEQ ID NO: 3352418 - RNA, 13 nt, Human
cucccuuccucuu

SEQ ID NO: 3352419 - RNA, 14 nt, Human
cucccuuccucuuu

SEQ ID NO: 3352420 - RNA, 15 nt, Human
cucuugaccucaggu

SEQ ID NO: 3352421 - RNA, 13 nt, Human
cucuugaccucag

SEQ ID NO: 3352422 - RNA, 16 nt, Human
cucuugaccucaggug

SEQ ID NO: 3352423 - RNA, 18 nt, Human
cucuugguccugcugcag

SEQ ID NO: 3352424 - RNA, 19 nt, Human
cucuugguccugcugcagu

SEQ ID NO: 3352425 - RNA, 17 nt, Human
cucuugguccugcugca

SEQ ID NO: 3352426 - RNA, 17 nt, Human
cucuuuccaucuacccu

SEQ ID NO: 3352427 - RNA, 15 nt, Human
cucuuuggacacuca

SEQ ID NO: 3352428 - RNA, 18 nt, Human
cucuuuggacacucacac

SEQ ID NO: 3352429 - RNA, 17 nt, Human
cucuuucuauuguuucu

SEQ ID NO: 3352430 - RNA, 16 nt, Human
cucuggcagcucagag

SEQ ID NO: 3352431 - RNA, 17 nt, Human
cucuggcagcucagaga

SEQ ID NO: 3352432 - RNA, 18 nt, Human
cucuggcagcucagagag

SEQ ID NO: 3352433 - RNA, 19 nt, Human
cucuggcagcucagagagg

SEQ ID NO: 3352434 - RNA, 24 nt, Human
cucuuaaaacccaagugccuuagc

SEQ ID NO: 3352435 - RNA, 13 nt, Human
cucuuaaaaccca

SEQ ID NO: 3352436 - RNA, 22 nt, Human
cucuuccaggcugggagagccu

SEQ ID NO: 3352437 - RNA, 21 nt, Human
cucuuccaggcugggagagcc

SEQ ID NO: 3352438 - RNA, 23 nt, Human
cucuuccaggcugggagagccuu

SEQ ID NO: 3352439 - RNA, 12 nt, Human
cucuucuccagg

SEQ ID NO: 3352440 - RNA, 19 nt, Human
cugacagacacaggcccgg

SEQ ID NO: 3352441 - RNA, 21 nt, Human
cugacagacacaggcccggcu

SEQ ID NO: 3352442 - RNA, 11 nt, Human
cugacaggcaa

SEQ ID NO: 3352443 - RNA, 19 nt, Human
cugacaggcaaugcuggcu

SEQ ID NO: 3352444 - RNA, 18 nt, Human
cugacaggcaaugcuggc

SEQ ID NO: 3352445 - RNA, 17 nt, Human
cugacaggcaaugcugg

SEQ ID NO: 3352446 - RNA, 16 nt, Human
cugacaggcaaugcug

SEQ ID NO: 3352447 - RNA, 20 nt, Human
cugacaggcaaugcuggcug

SEQ ID NO: 3352448 - RNA, 17 nt, Human
cugacauuguuggccaa

SEQ ID NO: 3352449 - RNA, 11 nt, Human
cugacccacug

SEQ ID NO: 3352450 - RNA, 24 nt, Human
cugaagucuuuguacagacaacaa

SEQ ID NO: 3352451 - RNA, 15 nt, Human
cugaagucacacagu

SEQ ID NO: 3352452 - RNA, 14 nt, Human
cugaagucacacag

SEQ ID NO: 3352453 - RNA, 16 nt, Human
cugaauacagaggcaa

SEQ ID NO: 3352454 - RNA, 19 nt, Human
cucuuuggucuacacugug

SEQ ID NO: 3352455 - RNA, 18 nt, Human
cucuuugggccuggcucc

SEQ ID NO: 3352456 - RNA, 21 nt, Human
cugaaccuggguaacuaggga

SEQ ID NO: 3352457 - RNA, 16 nt, Human
cugaacuuggcgcugc

SEQ ID NO: 3352458 - RNA, 21 nt, Human
cugaacuuggcgcugccccug

SEQ ID NO: 3352459 - RNA, 15 nt, Human
cugaacuuggcgcug

SEQ ID NO: 3352460 - RNA, 21 nt, Human
cugaagacucauucuucugua

SEQ ID NO: 3352461 - RNA, 19 nt, Human
cugaagacucauucuucug

SEQ ID NO: 3352462 - RNA, 15 nt, Human
cucucucacuccuug

SEQ ID NO: 3352463 - RNA, 16 nt, Human
cucucucacuccuuga

SEQ ID NO: 3352464 - RNA, 12 nt, Human
cucucucaggcc

SEQ ID NO: 3352465 - RNA, 14 nt, Human
cucucucacuccuu

SEQ ID NO: 3352466 - RNA, 14 nt, Human
cucuccuguaccuc

SEQ ID NO: 3352467 - RNA, 15 nt, Human
cucuccuguaccucu

SEQ ID NO: 3352468 - RNA, 13 nt, Human
cucuccuguaccu

SEQ ID NO: 3352469 - RNA, 22 nt, Human
cucuccuguaccucuugagccu

SEQ ID NO: 3352470 - RNA, 17 nt, Human
cucuccuguaccucuug

SEQ ID NO: 3352471 - RNA, 18 nt, Human
cucuccuguaccucuuga

SEQ ID NO: 3352472 - RNA, 13 nt, Human
cucuccagccccu

SEQ ID NO: 3352473 - RNA, 12 nt, Human
cucuccagcccc

SEQ ID NO: 3352474 - RNA, 18 nt, Human
cucucccaucacuucccu

SEQ ID NO: 3352475 - RNA, 14 nt, Human
cucucccaucacuu

SEQ ID NO: 3352476 - RNA, 20 nt, Human
cucucccaucacuucccuac

SEQ ID NO: 3352477 - RNA, 13 nt, Human
cucucccaucacu

SEQ ID NO: 3352478 - RNA, 23 nt, Human
cucucaggccagcugcuugggcu

SEQ ID NO: 3352479 - RNA, 22 nt, Human
cucucaggccagcugcuugggc

SEQ ID NO: 3352480 - RNA, 22 nt, Human
cucuggacaggcauguucucug

SEQ ID NO: 3352481 - RNA, 14 nt, Human
cucugccucugaca

SEQ ID NO: 3352482 - RNA, 14 nt, Human
cucugcccuccaag

SEQ ID NO: 3352483 - RNA, 15 nt, Human
cucugcccuccaaga

SEQ ID NO: 3352484 - RNA, 16 nt, Human
cucugcccuccaagac

SEQ ID NO: 3352485 - RNA, 23 nt, Human
cucugcccuccaagaccuucucc

SEQ ID NO: 3352486 - RNA, 20 nt, Human
cucugcccacucccugcaac

SEQ ID NO: 3352487 - RNA, 16 nt, Human
cucugaggacacuaac

SEQ ID NO: 3352488 - RNA, 22 nt, Human
cucugcaagaauugaagcagga

SEQ ID NO: 3352489 - RNA, 15 nt, Human
cuuccagugaggcuc

SEQ ID NO: 3352490 - RNA, 14 nt, Human
cuuccagugaggcu

SEQ ID NO: 3352491 - RNA, 21 nt, Human
cuuccaggggugggacacccu

SEQ ID NO: 3352492 - RNA, 22 nt, Human
cuuccaggggugggacacccug

SEQ ID NO: 3352493 - RNA, 24 nt, Human
cuuccaggggugggacacccugug

SEQ ID NO: 3352494 - RNA, 22 nt, Human
cuuccacaagagcccaggccuc

SEQ ID NO: 3352495 - RNA, 23 nt, Human
cuuccacaagagcccaggccucc

SEQ ID NO: 3352496 - RNA, 11 nt, Human
cuucagugccu

SEQ ID NO: 3352497 - RNA, 12 nt, Human
cuucagugccuu

SEQ ID NO: 3352498 - RNA, 13 nt, Human
cuucagugccuua

SEQ ID NO: 3352499 - RNA, 18 nt, Human
cuucauuuccugugucuu

SEQ ID NO: 3352500 - RNA, 11 nt, Human
cuucagcugac

SEQ ID NO: 3352501 - RNA, 17 nt, Human
cuucugccauauucugu

SEQ ID NO: 3352502 - RNA, 15 nt, Human
cuucugccauauucu

SEQ ID NO: 3352503 - RNA, 21 nt, Human
cuucugccauauucuguuggc

SEQ ID NO: 3352504 - RNA, 17 nt, Human
cuucugcuucagccucc

SEQ ID NO: 3352505 - RNA, 16 nt, Human
cuucugcuucagccuc

SEQ ID NO: 3352506 - RNA, 13 nt, Human
cuucugcuucagc

SEQ ID NO: 3352507 - RNA, 18 nt, Human
cuucugcuucagccuccc

SEQ ID NO: 3352508 - RNA, 22 nt, Human
cuucuccuucaccuuugucccc

SEQ ID NO: 3352509 - RNA, 19 nt, Human
cuucuccuucaccuuuguc

SEQ ID NO: 3352510 - RNA, 15 nt, Human
cuucuccacccugcu

SEQ ID NO: 3352511 - RNA, 14 nt, Human
cuucuccacccugc

SEQ ID NO: 3352512 - RNA, 14 nt, Human
cuucuccaggcugu

SEQ ID NO: 3352513 - RNA, 17 nt, Human
cuucuccaggcuguauc

SEQ ID NO: 3352514 - RNA, 15 nt, Human
cuucgcuccuguguc

SEQ ID NO: 3352515 - RNA, 14 nt, Human
cuucgcuccugugu

SEQ ID NO: 3352516 - RNA, 13 nt, Human
cuucgcuccugug

SEQ ID NO: 3352517 - RNA, 20 nt, Human
cuucgggaggucgaggcagg

SEQ ID NO: 3352518 - RNA, 21 nt, Human
cuucgggaggucgaggcagga

SEQ ID NO: 3352519 - RNA, 19 nt, Human
cuucgggaggucgaggcag

SEQ ID NO: 3352520 - RNA, 12 nt, Human
cuguuuagauaa

SEQ ID NO: 3352521 - RNA, 18 nt, Human
cuguuuguuucugaaagg

SEQ ID NO: 3352522 - RNA, 13 nt, Human
cuguuuucucuug

SEQ ID NO: 3352523 - RNA, 14 nt, Human
cuguuuucucuuga

SEQ ID NO: 3352524 - RNA, 21 nt, Human
cuguuuguuucugaaagggac

SEQ ID NO: 3352525 - RNA, 23 nt, Human
cuguuuguuucugaaagggacgc

SEQ ID NO: 3352526 - RNA, 17 nt, Human
cuguuuucucuugagag

SEQ ID NO: 3352527 - RNA, 15 nt, Human
cuuaacuucacauau

SEQ ID NO: 3352528 - RNA, 16 nt, Human
cuuaacuucacauauu

SEQ ID NO: 3352529 - RNA, 17 nt, Human
cuuaacuucacauauug

SEQ ID NO: 3352530 - RNA, 22 nt, Human
cuuaacuucacauauugauuuc

SEQ ID NO: 3352531 - RNA, 12 nt, Human
cuuaacuucaca

SEQ ID NO: 3352532 - RNA, 14 nt, Human
cuuaacuucacaua

SEQ ID NO: 3352533 - RNA, 14 nt, Human
cuuaaucuaaaugg

SEQ ID NO: 3352534 - RNA, 17 nt, Human
cuuagguuggcaaaaag

SEQ ID NO: 3352535 - RNA, 21 nt, Human
cuuauauucaaccauggacuu

SEQ ID NO: 3352536 - RNA, 19 nt, Human
cuuauauucaaccauggac

SEQ ID NO: 3352537 - RNA, 15 nt, Human
cuuagacagucccug

SEQ ID NO: 3352538 - RNA, 16 nt, Human
cuuagacagucccugc

SEQ ID NO: 3352539 - RNA, 14 nt, Human
cuuagacagucccu

SEQ ID NO: 3352540 - RNA, 15 nt, Human
cuuagaagucacaca

SEQ ID NO: 3352541 - RNA, 17 nt, Human
cuuagacagucccugcc

SEQ ID NO: 3352542 - RNA, 18 nt, Human
cuuagacagucccugcca

SEQ ID NO: 3352543 - RNA, 19 nt, Human
cuuagacagucccugccaa

SEQ ID NO: 3352544 - RNA, 11 nt, Human
cuuagacaguc

SEQ ID NO: 3352545 - RNA, 16 nt, Human
cuuacuguacaugaaa

SEQ ID NO: 3352546 - RNA, 13 nt, Human
cuuacuguacaug

SEQ ID NO: 3352547 - RNA, 16 nt, Human
cuuacuuacuaaaaua

SEQ ID NO: 3352548 - RNA, 19 nt, Human
cuuacuuacuaaaauauau

SEQ ID NO: 3352549 - RNA, 15 nt, Human
cuuacgugaguccug

SEQ ID NO: 3352550 - RNA, 22 nt, Human
cuuacuaaaauauauauagaaa

SEQ ID NO: 3352551 - RNA, 15 nt, Human
cuuacuaaaauauau

SEQ ID NO: 3352552 - RNA, 14 nt, Human
cuuacuaaaauaua

SEQ ID NO: 3352553 - RNA, 22 nt, Human
cuuuuguucuugguuuguaaau

SEQ ID NO: 3352554 - RNA, 20 nt, Human
cuuuuguucuugguuuguaa

SEQ ID NO: 3352555 - RNA, 15 nt, Human
cuuuucuguuugcua

SEQ ID NO: 3352556 - RNA, 23 nt, Human
cuuuucuguccgagcuuugaaaa

SEQ ID NO: 3352557 - RNA, 21 nt, Human
cuuuguuuguugucagcugaa

SEQ ID NO: 3352558 - RNA, 20 nt, Human
cuuuguuuguugucagcuga

SEQ ID NO: 3352559 - RNA, 16 nt, Human
gaaaacaugcuacaca

SEQ ID NO: 3352560 - RNA, 18 nt, Human
gaaaacaugcuacacacu

SEQ ID NO: 3352561 - RNA, 20 nt, Human
gaaaacacuguucucugccc

SEQ ID NO: 3352562 - RNA, 21 nt, Human
gaaaacacuguucucugcccu

SEQ ID NO: 3352563 - RNA, 18 nt, Human
gaaaacacuguucucugc

SEQ ID NO: 3352564 - RNA, 19 nt, Human
gaaaacacuguucucugcc

SEQ ID NO: 3352565 - RNA, 16 nt, Human
cuuuuuuagaguugau

SEQ ID NO: 3352566 - RNA, 19 nt, Human
gaaaacaugcuacacacug

SEQ ID NO: 3352567 - RNA, 14 nt, Human
cuuugcuugaaaga

SEQ ID NO: 3352568 - RNA, 23 nt, Human
cuuuggaaagacuuuuccaaccc

SEQ ID NO: 3352569 - RNA, 12 nt, Human
cuuuggaaagac

SEQ ID NO: 3352570 - RNA, 15 nt, Human
cuuuguucuggcucu

SEQ ID NO: 3352571 - RNA, 16 nt, Human
cuuuguucuggcucuu

SEQ ID NO: 3352572 - RNA, 21 nt, Human
cuuuguucuggcucuuccagg

SEQ ID NO: 3352573 - RNA, 19 nt, Human
cuuugugaggaagccgcug

SEQ ID NO: 3352574 - RNA, 13 nt, Human
cuuuguggcuucc

SEQ ID NO: 3352575 - RNA, 23 nt, Human
cuuugugaggaagccgcuggggc

SEQ ID NO: 3352576 - RNA, 23 nt, Human
cuuugggaggccaaggugggagg

SEQ ID NO: 3352577 - RNA, 13 nt, Human
cuuucugaaauaa

SEQ ID NO: 3352578 - RNA, 15 nt, Human
cuuuagcgcccaguu

SEQ ID NO: 3352579 - RNA, 19 nt, Human
cuuuaccuuuuuuauacau

SEQ ID NO: 3352580 - RNA, 20 nt, Human
cuuuaccuuuuuuauacaua

SEQ ID NO: 3352581 - RNA, 17 nt, Human
cuuuaccuuuuuuauac

SEQ ID NO: 3352582 - RNA, 16 nt, Human
cuuguuaagauaguua

SEQ ID NO: 3352583 - RNA, 16 nt, Human
cuuguggucccacccc

SEQ ID NO: 3352584 - RNA, 19 nt, Human
cuuguggucccaccccaca

SEQ ID NO: 3352585 - RNA, 15 nt, Human
cuuguggucccaccc

SEQ ID NO: 3352586 - RNA, 18 nt, Human
cuugggccacugugaaga

SEQ ID NO: 3352587 - RNA, 20 nt, Human
cuugggccacugugaagaga

SEQ ID NO: 3352588 - RNA, 14 nt, Human
cuugguuuguaaau

SEQ ID NO: 3352589 - RNA, 15 nt, Human
cuugguuuguaaauu

SEQ ID NO: 3352590 - RNA, 12 nt, Human
cuugagccuggg

SEQ ID NO: 3352591 - RNA, 15 nt, Human
cuugagccugggagg

SEQ ID NO: 3352592 - RNA, 15 nt, Human
cuugaggguugggcu

SEQ ID NO: 3352593 - RNA, 20 nt, Human
cuugaguugauucagcucug

SEQ ID NO: 3352594 - RNA, 18 nt, Human
cuugaguugauucagcuc

SEQ ID NO: 3352595 - RNA, 19 nt, Human
cuugaguugauucagcucu

SEQ ID NO: 3352596 - RNA, 18 nt, Human
cuugcaauggcagccuug

SEQ ID NO: 3352597 - RNA, 17 nt, Human
cuugcaauggcagccuu

SEQ ID NO: 3352598 - RNA, 16 nt, Human
cuugcaauggcagccu

SEQ ID NO: 3352599 - RNA, 15 nt, Human
cuugcaauggcagcc

SEQ ID NO: 3352600 - RNA, 20 nt, Human
cuugcagacucuacagaggc

SEQ ID NO: 3352601 - RNA, 21 nt, Human
cuugcagacucuacagaggcc

SEQ ID NO: 3352602 - RNA, 22 nt, Human
cuugcucugcugacagacacag

SEQ ID NO: 3352603 - RNA, 17 nt, Human
cuugcucugcugacaga

SEQ ID NO: 3352604 - RNA, 20 nt, Human
cuugcuucaaccccaugaga

SEQ ID NO: 3352605 - RNA, 14 nt, Human
cuuggaagcuccgc

SEQ ID NO: 3352606 - RNA, 20 nt, Human
cuuggaagcuccgcuuucua

SEQ ID NO: 3352607 - RNA, 13 nt, Human
cuugcaugaggcu

SEQ ID NO: 3352608 - RNA, 14 nt, Human
cuugcaugaggcua

SEQ ID NO: 3352609 - RNA, 22 nt, Human
gaaugguuuucaaaauaaaaau

SEQ ID NO: 3352610 - RNA, 13 nt, Human
gaaugucagugug

SEQ ID NO: 3352611 - RNA, 14 nt, Human
gaaugucaguguga

SEQ ID NO: 3352612 - RNA, 23 nt, Human
gaaugaaccacaucuugcucugc

SEQ ID NO: 3352613 - RNA, 18 nt, Human
gaaugaaccacaucuugc

SEQ ID NO: 3352614 - RNA, 22 nt, Human
gaaugaaccacaucuugcucug

SEQ ID NO: 3352615 - RNA, 11 nt, Human
gaaugcagugg

SEQ ID NO: 3352616 - RNA, 15 nt, Human
gaauuguaaggaaug

SEQ ID NO: 3352617 - RNA, 22 nt, Human
gaauuguaaggaaugauuaauu

SEQ ID NO: 3352618 - RNA, 15 nt, Human
gaauuucccaaagca

SEQ ID NO: 3352619 - RNA, 17 nt, Human
gaauucucuaguuugau

SEQ ID NO: 3352620 - RNA, 17 nt, Human
gaauucucagaaucuca

SEQ ID NO: 3352621 - RNA, 20 nt, Human
gaaugucagugugacugauc

SEQ ID NO: 3352622 - RNA, 21 nt, Human
gaaugucagugugacugaucu

SEQ ID NO: 3352623 - RNA, 14 nt, Human
gaauugaaaaacca

SEQ ID NO: 3352624 - RNA, 19 nt, Human
gaauucucuaguuugauua

SEQ ID NO: 3352625 - RNA, 17 nt, Human
gaauaauacaguaucuc

SEQ ID NO: 3352626 - RNA, 21 nt, Human
gaauacagaggcaacugcauu

SEQ ID NO: 3352627 - RNA, 19 nt, Human
gaauaacauguaauuaagu

SEQ ID NO: 3352628 - RNA, 18 nt, Human
gaauaacauguaauuaag

SEQ ID NO: 3352629 - RNA, 14 nt, Human
gaauaacauguaau

SEQ ID NO: 3352630 - RNA, 20 nt, Human
gaaguuugagaucagccugg

SEQ ID NO: 3352631 - RNA, 22 nt, Human
gaauagcugggacuacaggugu

SEQ ID NO: 3352632 - RNA, 15 nt, Human
gaauagcugggacua

SEQ ID NO: 3352633 - RNA, 23 nt, Human
gaauagcugggacuacaggugug

SEQ ID NO: 3352634 - RNA, 15 nt, Human
gaauaccuguccccc

SEQ ID NO: 3352635 - RNA, 13 nt, Human
gaauaccuguccc

SEQ ID NO: 3352636 - RNA, 22 nt, Human
gaaguaauaugcacacauuuuu

SEQ ID NO: 3352637 - RNA, 21 nt, Human
gaaguaauaugcacacauuuu

SEQ ID NO: 3352638 - RNA, 15 nt, Human
gaaguacuggagaaa

SEQ ID NO: 3352639 - RNA, 18 nt, Human
gaaguacuauaauuuacc

SEQ ID NO: 3352640 - RNA, 16 nt, Human
gaagggggcugggaca

SEQ ID NO: 3352641 - RNA, 19 nt, Human
gaagggggcugggacaugg

SEQ ID NO: 3352642 - RNA, 14 nt, Human
gaagcggcuggcag

SEQ ID NO: 3352643 - RNA, 15 nt, Human
gaagggggcugggac

SEQ ID NO: 3352644 - RNA, 21 nt, Human
gaaguuucugccgcagcccug

SEQ ID NO: 3352645 - RNA, 15 nt, Human
gaagucuuagaugua

SEQ ID NO: 3352646 - RNA, 20 nt, Human
gaaguuucugccgcagcccu

SEQ ID NO: 3352647 - RNA, 23 nt, Human
gaacuuugaccucugcagcaaua

SEQ ID NO: 3352648 - RNA, 11 nt, Human
gaagacuuugg

SEQ ID NO: 3352649 - RNA, 13 nt, Human
gaagacuuuggaa

SEQ ID NO: 3352650 - RNA, 19 nt, Human
gaagacuucaucccucugg

SEQ ID NO: 3352651 - RNA, 20 nt, Human
gaagacuuuucuuucagcca

SEQ ID NO: 3352652 - RNA, 14 nt, Human
gaagacuuuggaaa

SEQ ID NO: 3352653 - RNA, 17 nt, Human
gaagacuuuggaaagag

SEQ ID NO: 3352654 - RNA, 19 nt, Human
gaagagaaugcacaaacag

SEQ ID NO: 3352655 - RNA, 20 nt, Human
gaagccagcaggcucucagg

SEQ ID NO: 3352656 - RNA, 19 nt, Human
gaagccagcaggcucucag

SEQ ID NO: 3352657 - RNA, 21 nt, Human
gaagccagcaggcucucaggc

SEQ ID NO: 3352658 - RNA, 22 nt, Human
gaagccagcaggcucucaggcc

SEQ ID NO: 3352659 - RNA, 13 nt, Human
gaagcccaggaaa

SEQ ID NO: 3352660 - RNA, 15 nt, Human
gaagcccaggaaagg

SEQ ID NO: 3352661 - RNA, 16 nt, Human
gaagcccaggaaaggc

SEQ ID NO: 3352662 - RNA, 23 nt, Human
gaagcccuucuaccuuccugcaa

SEQ ID NO: 3352663 - RNA, 23 nt, Human
gaagcccaggaaaggcuccagga

SEQ ID NO: 3352664 - RNA, 17 nt, Human
gaagcauuuacuuugug

SEQ ID NO: 3352665 - RNA, 20 nt, Human
gaagauaauauuaaggaaga

SEQ ID NO: 3352666 - RNA, 22 nt, Human
gaaccuuuugagugccuuacac

SEQ ID NO: 3352667 - RNA, 19 nt, Human
gaaccuuuugagugccuua

SEQ ID NO: 3352668 - RNA, 21 nt, Human
gaaccuuuugagugccuuaca

SEQ ID NO: 3352669 - RNA, 18 nt, Human
gaaccuuuugagugccuu

SEQ ID NO: 3352670 - RNA, 13 nt, Human
gaacacucugaga

SEQ ID NO: 3352671 - RNA, 14 nt, Human
gaacacucugagac

SEQ ID NO: 3352672 - RNA, 15 nt, Human
gaacacucugagacu

SEQ ID NO: 3352673 - RNA, 20 nt, Human
gaccuucuccuucaccuuug

SEQ ID NO: 3352674 - RNA, 21 nt, Human
gaccuucuccuucaccuuugu

SEQ ID NO: 3352675 - RNA, 14 nt, Human
gaccuugaacuggg

SEQ ID NO: 3352676 - RNA, 15 nt, Human
gaccuucuccuucac

SEQ ID NO: 3352677 - RNA, 16 nt, Human
gaccuucuccuucacc

SEQ ID NO: 3352678 - RNA, 14 nt, Human
gaccuucuccuuca

SEQ ID NO: 3352679 - RNA, 20 nt, Human
gacccuugccgucuaccuga

SEQ ID NO: 3352680 - RNA, 23 nt, Human
gacccuugccgucuaccugaggg

SEQ ID NO: 3352681 - RNA, 19 nt, Human
gacccuugccgucuaccug

SEQ ID NO: 3352682 - RNA, 16 nt, Human
gacuaacuugucuuug

SEQ ID NO: 3352683 - RNA, 23 nt, Human
gacuaacuugucuuuggacccug

SEQ ID NO: 3352684 - RNA, 11 nt, Human
gacguguuaug

SEQ ID NO: 3352685 - RNA, 14 nt, Human
gacguguuaugacu

SEQ ID NO: 3352686 - RNA, 22 nt, Human
gaccuuuaagagaaaugagcug

SEQ ID NO: 3352687 - RNA, 11 nt, Human
gaccuuucaau

SEQ ID NO: 3352688 - RNA, 19 nt, Human
gaccuuucaauaggaaaaa

SEQ ID NO: 3352689 - RNA, 22 nt, Human
gacgcugugcugcccugcccac

SEQ ID NO: 3352690 - RNA, 21 nt, Human
gacgcugugcugcccugccca

SEQ ID NO: 3352691 - RNA, 13 nt, Human
gacggagucccac

SEQ ID NO: 3352692 - RNA, 23 nt, Human
gacggagucccaccuuggcugca

SEQ ID NO: 3352693 - RNA, 12 nt, Human
gacuucaucccu

SEQ ID NO: 3352694 - RNA, 20 nt, Human
gacuucaucccucuggggcu

SEQ ID NO: 3352695 - RNA, 15 nt, Human
gacuuacuguacaug

SEQ ID NO: 3352696 - RNA, 16 nt, Human
gacuuacuguacauga

SEQ ID NO: 3352697 - RNA, 12 nt, Human
gacuuacuguac

SEQ ID NO: 3352698 - RNA, 18 nt, Human
gacuuacuguacaugaaa

SEQ ID NO: 3352699 - RNA, 23 nt, Human
gacuuacuguacaugaaaacaca

SEQ ID NO: 3352700 - RNA, 23 nt, Human
gacuggccaagguuuggggaaga

SEQ ID NO: 3352701 - RNA, 16 nt, Human
gacugaauuucuuuug

SEQ ID NO: 3352702 - RNA, 21 nt, Human
gacucuacagaggccaugggc

SEQ ID NO: 3352703 - RNA, 15 nt, Human
gacucuacagaggcc

SEQ ID NO: 3352704 - RNA, 18 nt, Human
gacuccugcaggcagcca

SEQ ID NO: 3352705 - RNA, 19 nt, Human
gacuccugcaggcagccag

SEQ ID NO: 3352706 - RNA, 20 nt, Human
gacuccugcaggcagccagg

SEQ ID NO: 3352707 - RNA, 15 nt, Human
gacuacaggcaccca

SEQ ID NO: 3352708 - RNA, 13 nt, Human
gacuacaggcacc

SEQ ID NO: 3352709 - RNA, 18 nt, Human
gacuacaggcacccacca

SEQ ID NO: 3352710 - RNA, 12 nt, Human
gacuacaggcac

SEQ ID NO: 3352711 - RNA, 20 nt, Human
gacagagcuacacaggggaa

SEQ ID NO: 3352712 - RNA, 16 nt, Human
gacagagugagacucu

SEQ ID NO: 3352713 - RNA, 21 nt, Human
gacagagucucacuguugccc

SEQ ID NO: 3352714 - RNA, 23 nt, Human
gacagaggcagccccauucugcc

SEQ ID NO: 3352715 - RNA, 14 nt, Human
gacagagucucacu

SEQ ID NO: 3352716 - RNA, 22 nt, Human
gaauuucccaaagcagugcaug

SEQ ID NO: 3352717 - RNA, 16 nt, Human
gaauuucccaaagcag

SEQ ID NO: 3352718 - RNA, 18 nt, Human
gaauuucccaaagcagug

SEQ ID NO: 3352719 - RNA, 22 nt, Human
gacacgaauauugcugauggug

SEQ ID NO: 3352720 - RNA, 21 nt, Human
gacacuaaccacgcuggaccu

SEQ ID NO: 3352721 - RNA, 22 nt, Human
gacagacacaggcccggcucca

SEQ ID NO: 3352722 - RNA, 20 nt, Human
gacagacacaggcccggcuc

SEQ ID NO: 3352723 - RNA, 16 nt, Human
gacacuagaagauuuu

SEQ ID NO: 3352724 - RNA, 17 nt, Human
gacagacacaggcccgg

SEQ ID NO: 3352725 - RNA, 19 nt, Human
gacaggcaaugcuggcugu

SEQ ID NO: 3352726 - RNA, 18 nt, Human
gacaggcaaugcuggcug

SEQ ID NO: 3352727 - RNA, 20 nt, Human
gacaggcaagcaccuccugc

SEQ ID NO: 3352728 - RNA, 21 nt, Human
gacaggcauguucucugagga

SEQ ID NO: 3352729 - RNA, 20 nt, Human
gacaggcauguucucugagg

SEQ ID NO: 3352730 - RNA, 23 nt, Human
gacaggcaaugcuggcuguuggc

SEQ ID NO: 3352731 - RNA, 18 nt, Human
gacaggcaagcaccuccu

SEQ ID NO: 3352732 - RNA, 17 nt, Human
gacaggcaagcaccucc

SEQ ID NO: 3352733 - RNA, 13 nt, Human
gacaggcaagcac

SEQ ID NO: 3352734 - RNA, 22 nt, Human
gacaggcauguucucugaggac

SEQ ID NO: 3352735 - RNA, 24 nt, Human
gacagggcacaccgggcacucaga

SEQ ID NO: 3352736 - RNA, 22 nt, Human
gacaguuaagagaaaugagcuu

SEQ ID NO: 3352737 - RNA, 23 nt, Human
gacaucaacugcaucaagaugug

SEQ ID NO: 3352738 - RNA, 16 nt, Human
gacaucaacugcauca

SEQ ID NO: 3352739 - RNA, 10 nt, Human
gacccugagg

SEQ ID NO: 3352740 - RNA, 11 nt, Human
gacccugaggc

SEQ ID NO: 3352741 - RNA, 12 nt, Human
gacccugaggcc

SEQ ID NO: 3352742 - RNA, 16 nt, Human
gacccugaggcccaga

SEQ ID NO: 3352743 - RNA, 17 nt, Human
gacccugcccugugggc

SEQ ID NO: 3352744 - RNA, 20 nt, Human
gacccugcccugugggcccc

SEQ ID NO: 3352745 - RNA, 22 nt, Human
gacccugcccugugggccccca

SEQ ID NO: 3352746 - RNA, 17 nt, Human
gacccaugcugcccugu

SEQ ID NO: 3352747 - RNA, 19 nt, Human
gacccaugcugcccuguga

SEQ ID NO: 3352748 - RNA, 20 nt, Human
gacccaugcugcccugugag

SEQ ID NO: 3352749 - RNA, 18 nt, Human
gacccaugcugcccugug

SEQ ID NO: 3352750 - RNA, 12 nt, Human
gacccacugcuu

SEQ ID NO: 3352751 - RNA, 18 nt, Human
gaccacaaaacuuuucua

SEQ ID NO: 3352752 - RNA, 20 nt, Human
gaccagcaccaucucuccuc

SEQ ID NO: 3352753 - RNA, 21 nt, Human
gaccagcaccaucucuccucc

SEQ ID NO: 3352754 - RNA, 19 nt, Human
gaccagagcugccaccugc

SEQ ID NO: 3352755 - RNA, 23 nt, Human
gaccagacaccuugacagggcac

SEQ ID NO: 3352756 - RNA, 21 nt, Human
gaccagagcugccaccugccu

SEQ ID NO: 3352757 - RNA, 16 nt, Human
gaccacguuucuaaag

SEQ ID NO: 3352758 - RNA, 21 nt, Human
gaccagacaccuugacagggc

SEQ ID NO: 3352759 - RNA, 22 nt, Human
gaccagacaccuugacagggca

SEQ ID NO: 3352760 - RNA, 21 nt, Human
gaugaaaugaggucagagccu

SEQ ID NO: 3352761 - RNA, 15 nt, Human
gaugaaaugagguca

SEQ ID NO: 3352762 - RNA, 19 nt, Human
gaucuucuuuauaauucua

SEQ ID NO: 3352763 - RNA, 22 nt, Human
gaucuucuguggguuucuaaag

SEQ ID NO: 3352764 - RNA, 23 nt, Human
gaugcaccagcccuuagcaggga

SEQ ID NO: 3352765 - RNA, 15 nt, Human
gaugcaccagcccuu

SEQ ID NO: 3352766 - RNA, 14 nt, Human
gaugagaggaaauc

SEQ ID NO: 3352767 - RNA, 14 nt, Human
gaugcaccagcccu

SEQ ID NO: 3352768 - RNA, 23 nt, Human
gaugagaaauaaaguuucuguug

SEQ ID NO: 3352769 - RNA, 18 nt, Human
gaugaccuugaaugaugc

SEQ ID NO: 3352770 - RNA, 16 nt, Human
gaugccugguggcagc

SEQ ID NO: 3352771 - RNA, 15 nt, Human
gaugccugguggcag

SEQ ID NO: 3352772 - RNA, 14 nt, Human
gaugcagugcuucc

SEQ ID NO: 3352773 - RNA, 14 nt, Human
gaugccugguggca

SEQ ID NO: 3352774 - RNA, 19 nt, Human
gaugcagccucacaguccu

SEQ ID NO: 3352775 - RNA, 17 nt, Human
gauccucccaccucagc

SEQ ID NO: 3352776 - RNA, 21 nt, Human
gauccucccaccucagccucc

SEQ ID NO: 3352777 - RNA, 14 nt, Human
gauccuccaggugc

SEQ ID NO: 3352778 - RNA, 16 nt, Human
gauccucccaccucag

SEQ ID NO: 3352779 - RNA, 12 nt, Human
gauccuccaggu

SEQ ID NO: 3352780 - RNA, 13 nt, Human
gaucauccacugu

SEQ ID NO: 3352781 - RNA, 13 nt, Human
gaucuaggaagac

SEQ ID NO: 3352782 - RNA, 14 nt, Human
gaucuaggaagacu

SEQ ID NO: 3352783 - RNA, 18 nt, Human
gaucuaggaagacuuugg

SEQ ID NO: 3352784 - RNA, 20 nt, Human
gaucuggguucacugcaacc

SEQ ID NO: 3352785 - RNA, 20 nt, Human
gaucuaggaagacuuuggaa

SEQ ID NO: 3352786 - RNA, 12 nt, Human
gauccugagcca

SEQ ID NO: 3352787 - RNA, 16 nt, Human
gauacaaaagcaugug

SEQ ID NO: 3352788 - RNA, 18 nt, Human
gauauaugcucugcaugu

SEQ ID NO: 3352789 - RNA, 20 nt, Human
gauagugucccacggugccu

SEQ ID NO: 3352790 - RNA, 14 nt, Human
gaucacagccucug

SEQ ID NO: 3352791 - RNA, 20 nt, Human
gaucacggcucacugcagcc

SEQ ID NO: 3352792 - RNA, 23 nt, Human
gaucacggcucacugcagccuca

SEQ ID NO: 3352793 - RNA, 23 nt, Human
gauaauacaccacuacauucugu

SEQ ID NO: 3352794 - RNA, 24 nt, Human
gauaauacaccacuacauucuguu

SEQ ID NO: 3352795 - RNA, 12 nt, Human
gauaauacacca

SEQ ID NO: 3352796 - RNA, 15 nt, Human
gcaaaccaucauuga

SEQ ID NO: 3352797 - RNA, 17 nt, Human
gcaaaccaucauugaaa

SEQ ID NO: 3352798 - RNA, 19 nt, Human
gcaaaccaucauugaaauc

SEQ ID NO: 3352799 - RNA, 20 nt, Human
gcaaaccaucauugaaaucu

SEQ ID NO: 3352800 - RNA, 21 nt, Human
gcaaaccaucauugaaaucuu

SEQ ID NO: 3352801 - RNA, 16 nt, Human
gcaaaccaucauugaa

SEQ ID NO: 3352802 - RNA, 18 nt, Human
gcaacugcauuggcuuug

SEQ ID NO: 3352803 - RNA, 14 nt, Human
gcaaggcugucaau

SEQ ID NO: 3352804 - RNA, 18 nt, Human
gcaaggcugucaauuaca

SEQ ID NO: 3352805 - RNA, 14 nt, Human
gcaaggucauuuuu

SEQ ID NO: 3352806 - RNA, 13 nt, Human
gcaaggcugucaa

SEQ ID NO: 3352807 - RNA, 17 nt, Human
gcaauccugcaagaaca

SEQ ID NO: 3352808 - RNA, 16 nt, Human
gcaagcaccuccugcc

SEQ ID NO: 3352809 - RNA, 15 nt, Human
gcaagcaccuccugc

SEQ ID NO: 3352810 - RNA, 20 nt, Human
gcaagcaccuccugccucga

SEQ ID NO: 3352811 - RNA, 18 nt, Human
gcaagcaccuccugccuc

SEQ ID NO: 3352812 - RNA, 22 nt, Human
gauuucuguuuagauaauacac

SEQ ID NO: 3352813 - RNA, 21 nt, Human
gauuucuguuuagauaauaca

SEQ ID NO: 3352814 - RNA, 19 nt, Human
gauuuguuaaugauagcua

SEQ ID NO: 3352815 - RNA, 19 nt, Human
gauucuuuccugaggcugg

SEQ ID NO: 3352816 - RNA, 17 nt, Human
gauucccaagcucugcu

SEQ ID NO: 3352817 - RNA, 16 nt, Human
gauucccaagcucugc

SEQ ID NO: 3352818 - RNA, 20 nt, Human
gauucuuuccugaggcuggg

SEQ ID NO: 3352819 - RNA, 22 nt, Human
gauucuuuccugaggcugggcu

SEQ ID NO: 3352820 - RNA, 16 nt, Human
gauugcaacaggcugg

SEQ ID NO: 3352821 - RNA, 17 nt, Human
gauugcaacaggcuggg

SEQ ID NO: 3352822 - RNA, 15 nt, Human
gauugcaacaggcug

SEQ ID NO: 3352823 - RNA, 13 nt, Human
gauuacaagcgug

SEQ ID NO: 3352824 - RNA, 12 nt, Human
gauucagacagc

SEQ ID NO: 3352825 - RNA, 13 nt, Human
gauucagacagcu

SEQ ID NO: 3352826 - RNA, 14 nt, Human
gauucagacagcug

SEQ ID NO: 3352827 - RNA, 17 nt, Human
gauucagacagcugccu

SEQ ID NO: 3352828 - RNA, 15 nt, Human
gauucagcucugcaa

SEQ ID NO: 3352829 - RNA, 15 nt, Human
gauucccaagcucug

SEQ ID NO: 3352830 - RNA, 18 nt, Human
gauguucuagcauggcug

SEQ ID NO: 3352831 - RNA, 20 nt, Human
gaugccugguggcagcugcg

SEQ ID NO: 3352832 - RNA, 23 nt, Human
gcaugaaguaauaugcacacauu

SEQ ID NO: 3352833 - RNA, 16 nt, Human
gcaucaggccaggccc

SEQ ID NO: 3352834 - RNA, 17 nt, Human
gcaucaggccaggcccu

SEQ ID NO: 3352835 - RNA, 13 nt, Human
gcaucaggccagg

SEQ ID NO: 3352836 - RNA, 15 nt, Human
gcaucaggccaggcc

SEQ ID NO: 3352837 - RNA, 17 nt, Human
gcaugccuggauggggc

SEQ ID NO: 3352838 - RNA, 22 nt, Human
gcaugccuggauggggcugcac

SEQ ID NO: 3352839 - RNA, 15 nt, Human
gcaugcugucccuua

SEQ ID NO: 3352840 - RNA, 15 nt, Human
gcaugccuggauggg

SEQ ID NO: 3352841 - RNA, 17 nt, Human
gcauguuugugauugac

SEQ ID NO: 3352842 - RNA, 22 nt, Human
gcauguucucugaggacacuaa

SEQ ID NO: 3352843 - RNA, 18 nt, Human
gcauuuguuugaacugau

SEQ ID NO: 3352844 - RNA, 17 nt, Human
gcauuugcugaauacag

SEQ ID NO: 3352845 - RNA, 23 nt, Human
gcauuugcugaauacagaggcaa

SEQ ID NO: 3352846 - RNA, 12 nt, Human
gcauuccccacu

SEQ ID NO: 3352847 - RNA, 22 nt, Human
gcauuuugcuaaaugugaauga

SEQ ID NO: 3352848 - RNA, 16 nt, Human
gccaaaggaagcacau

SEQ ID NO: 3352849 - RNA, 20 nt, Human
gccaaaggaagcacaugccu

SEQ ID NO: 3352850 - RNA, 14 nt, Human
gccaaaggaagcac

SEQ ID NO: 3352851 - RNA, 21 nt, Human
gccaaacucaccugccccuca

SEQ ID NO: 3352852 - RNA, 19 nt, Human
gccaaacucaccugccccu

SEQ ID NO: 3352853 - RNA, 15 nt, Human
gcagugggagcugcc

SEQ ID NO: 3352854 - RNA, 16 nt, Human
gcagugggagcugccu

SEQ ID NO: 3352855 - RNA, 23 nt, Human
gcagugcuuccaaggauggacca

SEQ ID NO: 3352856 - RNA, 12 nt, Human
gcagggcucagc

SEQ ID NO: 3352857 - RNA, 16 nt, Human
gcagggagggcuucug

SEQ ID NO: 3352858 - RNA, 20 nt, Human
gcaggauucuuccucccucc

SEQ ID NO: 3352859 - RNA, 15 nt, Human
gcauauucaggaagc

SEQ ID NO: 3352860 - RNA, 17 nt, Human
gcauauucaggaagcuc

SEQ ID NO: 3352861 - RNA, 18 nt, Human
gcauauucaggaagcuca

SEQ ID NO: 3352862 - RNA, 20 nt, Human
gcauauucaggaagcucagg

SEQ ID NO: 3352863 - RNA, 21 nt, Human
gcaucaagaugugacauguuu

SEQ ID NO: 3352864 - RNA, 18 nt, Human
gcagugggagcugccugu

SEQ ID NO: 3352865 - RNA, 17 nt, Human
gcagugggagcugccug

SEQ ID NO: 3352866 - RNA, 15 nt, Human
gcagaguugaagaca

SEQ ID NO: 3352867 - RNA, 17 nt, Human
gcagagaccaucccuga

SEQ ID NO: 3352868 - RNA, 14 nt, Human
gcagagaccauccc

SEQ ID NO: 3352869 - RNA, 15 nt, Human
gcagagaccaucccu

SEQ ID NO: 3352870 - RNA, 23 nt, Human
gcagagaaugaaagggcccagag

SEQ ID NO: 3352871 - RNA, 22 nt, Human
gcagagaaugaaagggcccaga

SEQ ID NO: 3352872 - RNA, 21 nt, Human
gcagagaauucucuuauccaa

SEQ ID NO: 3352873 - RNA, 21 nt, Human
gcagagaaugaaagggcccag

SEQ ID NO: 3352874 - RNA, 20 nt, Human
gcagagaaugaaagggccca

SEQ ID NO: 3352875 - RNA, 19 nt, Human
gcagagaaugaaagggccc

SEQ ID NO: 3352876 - RNA, 19 nt, Human
gcagaguugaagacagagc

SEQ ID NO: 3352877 - RNA, 16 nt, Human
gcagaguugaagacag

SEQ ID NO: 3352878 - RNA, 17 nt, Human
gcagaguugaagacaga

SEQ ID NO: 3352879 - RNA, 14 nt, Human
gcagccuggacccu

SEQ ID NO: 3352880 - RNA, 22 nt, Human
gcagccucaaccuccugggcua

SEQ ID NO: 3352881 - RNA, 21 nt, Human
gcagccucaaccuccugggcu

SEQ ID NO: 3352882 - RNA, 20 nt, Human
gcagccucaaccuccugggc

SEQ ID NO: 3352883 - RNA, 19 nt, Human
gcagccucaaccuccuggg

SEQ ID NO: 3352884 - RNA, 20 nt, Human
gcagcagggagggcuucugc

SEQ ID NO: 3352885 - RNA, 19 nt, Human
gcaccacugcacuccagcc

SEQ ID NO: 3352886 - RNA, 15 nt, Human
gcaccuccugccucg

SEQ ID NO: 3352887 - RNA, 14 nt, Human
gcaccuccugccuc

SEQ ID NO: 3352888 - RNA, 17 nt, Human
gcacccggccccugcug

SEQ ID NO: 3352889 - RNA, 15 nt, Human
gcacccggccccugc

SEQ ID NO: 3352890 - RNA, 14 nt, Human
gcacccggccccug

SEQ ID NO: 3352891 - RNA, 22 nt, Human
gcacaugccucucucaggccaa

SEQ ID NO: 3352892 - RNA, 16 nt, Human
gcacagcuucauuucc

SEQ ID NO: 3352893 - RNA, 13 nt, Human
gcaaugaccuuuc

SEQ ID NO: 3352894 - RNA, 14 nt, Human
gcaaugaccuuuca

SEQ ID NO: 3352895 - RNA, 19 nt, Human
gcacagcuaacauggaagu

SEQ ID NO: 3352896 - RNA, 18 nt, Human
gcacuaaggugugcucug

SEQ ID NO: 3352897 - RNA, 17 nt, Human
gcacuaaggugugcucu

SEQ ID NO: 3352898 - RNA, 22 nt, Human
gcacugggcuuggggaccagag

SEQ ID NO: 3352899 - RNA, 23 nt, Human
gcacugggcuuggggaccagagc

SEQ ID NO: 3352900 - RNA, 14 nt, Human
gcacugggcuuggg

SEQ ID NO: 3352901 - RNA, 13 nt, Human
gcagaaggaagac

SEQ ID NO: 3352902 - RNA, 14 nt, Human
gcagaaggaagacu

SEQ ID NO: 3352903 - RNA, 12 nt, Human
gcagaaggaaga

SEQ ID NO: 3352904 - RNA, 14 nt, Human
gccuggacccugug

SEQ ID NO: 3352905 - RNA, 11 nt, Human
gccugcccagg

SEQ ID NO: 3352906 - RNA, 21 nt, Human
gccucugcacuccccugcugg

SEQ ID NO: 3352907 - RNA, 15 nt, Human
gccucugcacucccc

SEQ ID NO: 3352908 - RNA, 17 nt, Human
gccucugcacuccccug

SEQ ID NO: 3352909 - RNA, 18 nt, Human
gccucugcacuccccugc

SEQ ID NO: 3352910 - RNA, 19 nt, Human
gccucugcacuccccugcu

SEQ ID NO: 3352911 - RNA, 20 nt, Human
gccucugcacuccccugcug

SEQ ID NO: 3352912 - RNA, 16 nt, Human
gccucugcacuccccu

SEQ ID NO: 3352913 - RNA, 15 nt, Human
gccucugacacacag

SEQ ID NO: 3352914 - RNA, 15 nt, Human
gccucucccaucacu

SEQ ID NO: 3352915 - RNA, 19 nt, Human
gccucccgaauagcuggga

SEQ ID NO: 3352916 - RNA, 18 nt, Human
gccucccgaauagcuggg

SEQ ID NO: 3352917 - RNA, 23 nt, Human
gccucccgaguagcugggacuac

SEQ ID NO: 3352918 - RNA, 21 nt, Human
gccucccgaguagcugggacu

SEQ ID NO: 3352919 - RNA, 20 nt, Human
gccucccgaauagcugggac

SEQ ID NO: 3352920 - RNA, 20 nt, Human
gccucccgaguagcugggac

SEQ ID NO: 3352921 - RNA, 14 nt, Human
gccucagccuccca

SEQ ID NO: 3352922 - RNA, 12 nt, Human
gccucagccucc

SEQ ID NO: 3352923 - RNA, 17 nt, Human
gccucccaucacccgcu

SEQ ID NO: 3352924 - RNA, 21 nt, Human
gccucagcauccuggcacccg

SEQ ID NO: 3352925 - RNA, 17 nt, Human
gccucagcauccuggca

SEQ ID NO: 3352926 - RNA, 18 nt, Human
gccucagcauccuggcac

SEQ ID NO: 3352927 - RNA, 24 nt, Human
gccucaagugauucuccugccuca

SEQ ID NO: 3352928 - RNA, 22 nt, Human
gccucaagugauucuccugccu

SEQ ID NO: 3352929 - RNA, 18 nt, Human
gccgucuaccugaggggc

SEQ ID NO: 3352930 - RNA, 20 nt, Human
gccgucuaccugaggggccu

SEQ ID NO: 3352931 - RNA, 22 nt, Human
gccgucuaccugaggggccucu

SEQ ID NO: 3352932 - RNA, 23 nt, Human
gccgucuaccugaggggccucuu

SEQ ID NO: 3352933 - RNA, 16 nt, Human
gccgcagcccugcaga

SEQ ID NO: 3352934 - RNA, 17 nt, Human
gccgcagcccugcagag

SEQ ID NO: 3352935 - RNA, 15 nt, Human
gccgcagcccugcag

SEQ ID NO: 3352936 - RNA, 17 nt, Human
gccgagauagccaaggc

SEQ ID NO: 3352937 - RNA, 13 nt, Human
gccgcagcccugc

SEQ ID NO: 3352938 - RNA, 23 nt, Human
gcccuucucuccagccccuggau

SEQ ID NO: 3352939 - RNA, 16 nt, Human
gccgagauagccaagg

SEQ ID NO: 3352940 - RNA, 22 nt, Human
gcuacacaggggaaaagaggag

SEQ ID NO: 3352941 - RNA, 14 nt, Human
gcgugagccacugc

SEQ ID NO: 3352942 - RNA, 15 nt, Human
gcgugagccacugca

SEQ ID NO: 3352943 - RNA, 17 nt, Human
gcuaacauggaaguacu

SEQ ID NO: 3352944 - RNA, 18 nt, Human
gcuaacauggaaguacua

SEQ ID NO: 3352945 - RNA, 14 nt, Human
gcuaacauggaagu

SEQ ID NO: 3352946 - RNA, 21 nt, Human
gcuagacgagcaggcuucuuc

SEQ ID NO: 3352947 - RNA, 22 nt, Human
gcuagacgagcaggcuucuucc

SEQ ID NO: 3352948 - RNA, 23 nt, Human
gcgguccacccaggagccccgag

SEQ ID NO: 3352949 - RNA, 20 nt, Human
gcgguccacccaggagcccc

SEQ ID NO: 3352950 - RNA, 23 nt, Human
gcggggacagcuccuucuguccu

SEQ ID NO: 3352951 - RNA, 19 nt, Human
gcggacagccacggccagg

SEQ ID NO: 3352952 - RNA, 16 nt, Human
gcggacagccacggcc

SEQ ID NO: 3352953 - RNA, 23 nt, Human
gcggacagccacggccaggccag

SEQ ID NO: 3352954 - RNA, 19 nt, Human
gcggggacagcuccuucug

SEQ ID NO: 3352955 - RNA, 18 nt, Human
gcggggacagcuccuucu

SEQ ID NO: 3352956 - RNA, 18 nt, Human
gcgccuacaggagugagc

SEQ ID NO: 3352957 - RNA, 21 nt, Human
gcgccuacaggagugagcacu

SEQ ID NO: 3352958 - RNA, 20 nt, Human
gcgccuacaggagugagcac

SEQ ID NO: 3352959 - RNA, 14 nt, Human
gcgcugccccuggc

SEQ ID NO: 3352960 - RNA, 19 nt, Human
gccuuacccucauguucuu

SEQ ID NO: 3352961 - RNA, 20 nt, Human
gccuuagaagucacacagua

SEQ ID NO: 3352962 - RNA, 21 nt, Human
gccuuauggaacacucugaga

SEQ ID NO: 3352963 - RNA, 22 nt, Human
gccuuauggaacacucugagac

SEQ ID NO: 3352964 - RNA, 23 nt, Human
gccuuauggaacacucugagacu

SEQ ID NO: 3352965 - RNA, 20 nt, Human
gccuuauggaacacucugag

SEQ ID NO: 3352966 - RNA, 15 nt, Human
gccugguggcagcug

SEQ ID NO: 3352967 - RNA, 14 nt, Human
gccugguggcagcu

SEQ ID NO: 3352968 - RNA, 17 nt, Human
gccugguggcagcugcg

SEQ ID NO: 3352969 - RNA, 16 nt, Human
gccugguggcagcugc

SEQ ID NO: 3352970 - RNA, 21 nt, Human
gccuuccaggggugggacacc

SEQ ID NO: 3352971 - RNA, 13 nt, Human
gccuuuggcuuca

SEQ ID NO: 3352972 - RNA, 14 nt, Human
gccagcugcuuggg

SEQ ID NO: 3352973 - RNA, 15 nt, Human
gccagcugcuugggc

SEQ ID NO: 3352974 - RNA, 14 nt, Human
gccagccuugacca

SEQ ID NO: 3352975 - RNA, 20 nt, Human
gccagccuugaccauucucc

SEQ ID NO: 3352976 - RNA, 21 nt, Human
gccagccuugaccauucucca

SEQ ID NO: 3352977 - RNA, 22 nt, Human
gccagccuugaccauucuccac

SEQ ID NO: 3352978 - RNA, 20 nt, Human
gccagccgagauagccaagg

SEQ ID NO: 3352979 - RNA, 12 nt, Human
gccagccuugac

SEQ ID NO: 3352980 - RNA, 16 nt, Human
gccagauucuuuccug

SEQ ID NO: 3352981 - RNA, 19 nt, Human
gccagagggagugacagag

SEQ ID NO: 3352982 - RNA, 17 nt, Human
gccagauucuuuccuga

SEQ ID NO: 3352983 - RNA, 18 nt, Human
gccagagggagugacaga

SEQ ID NO: 3352984 - RNA, 17 nt, Human
gccagagggagugacag

SEQ ID NO: 3352985 - RNA, 12 nt, Human
gccagagacaca

SEQ ID NO: 3352986 - RNA, 15 nt, Human
gccagagacacaagc

SEQ ID NO: 3352987 - RNA, 18 nt, Human
gccacugcaccgggccac

SEQ ID NO: 3352988 - RNA, 17 nt, Human
gccacugcaccgggcca

SEQ ID NO: 3352989 - RNA, 15 nt, Human
gccacggccaggcca

SEQ ID NO: 3352990 - RNA, 14 nt, Human
gccacggccaggcc

SEQ ID NO: 3352991 - RNA, 12 nt, Human
gccaaaggaagc

SEQ ID NO: 3352992 - RNA, 21 nt, Human
gccacuauuguuagucucuug

SEQ ID NO: 3352993 - RNA, 20 nt, Human
gccacuauuguuagucucuu

SEQ ID NO: 3352994 - RNA, 16 nt, Human
gccacggccaggccag

SEQ ID NO: 3352995 - RNA, 17 nt, Human
gccaucccagccccaau

SEQ ID NO: 3352996 - RNA, 14 nt, Human
gccauccagguuca

SEQ ID NO: 3352997 - RNA, 13 nt, Human
gccaucccagccc

SEQ ID NO: 3352998 - RNA, 14 nt, Human
gccaucccagcccc

SEQ ID NO: 3352999 - RNA, 15 nt, Human
gccaucccagcccca

SEQ ID NO: 3353000 - RNA, 16 nt, Human
gccaucccagccccaa

SEQ ID NO: 3353001 - RNA, 20 nt, Human
gccauccagguucagcuugu

SEQ ID NO: 3353002 - RNA, 19 nt, Human
gccauccagguucagcuug

SEQ ID NO: 3353003 - RNA, 21 nt, Human
gccaggggaaaaucagccugc

SEQ ID NO: 3353004 - RNA, 22 nt, Human
gccaggggaaaaucagccugcu

SEQ ID NO: 3353005 - RNA, 17 nt, Human
gccaggggaaaaucagc

SEQ ID NO: 3353006 - RNA, 19 nt, Human
gccaggaagccagcaggcu

SEQ ID NO: 3353007 - RNA, 17 nt, Human
gccaggaagccagcagg

SEQ ID NO: 3353008 - RNA, 18 nt, Human
gccaggaagccagcaggc

SEQ ID NO: 3353009 - RNA, 15 nt, Human
gccaggaagccagca

SEQ ID NO: 3353010 - RNA, 18 nt, Human
gcccacaggaucagucug

SEQ ID NO: 3353011 - RNA, 13 nt, Human
gcccacaggauca

SEQ ID NO: 3353012 - RNA, 19 nt, Human
gcccacaggaucagucuga

SEQ ID NO: 3353013 - RNA, 15 nt, Human
gcccaccccucaaca

SEQ ID NO: 3353014 - RNA, 15 nt, Human
gcccaaagaugcagc

SEQ ID NO: 3353015 - RNA, 16 nt, Human
gcccaaagaugcagcc

SEQ ID NO: 3353016 - RNA, 20 nt, Human
gccauuucuuccacaagagc

SEQ ID NO: 3353017 - RNA, 22 nt, Human
gccauuucuuccacaagagccc

SEQ ID NO: 3353018 - RNA, 17 nt, Human
gccauuucuuccacaag

SEQ ID NO: 3353019 - RNA, 17 nt, Human
gccccagugcccacagg

SEQ ID NO: 3353020 - RNA, 16 nt, Human
gccccagugcccacag

SEQ ID NO: 3353021 - RNA, 15 nt, Human
gccccagugcccaca

SEQ ID NO: 3353022 - RNA, 21 nt, Human
gccccauucugccugcccagg

SEQ ID NO: 3353023 - RNA, 20 nt, Human
gccccauucugccugcccag

SEQ ID NO: 3353024 - RNA, 18 nt, Human
gccccauucugccugccc

SEQ ID NO: 3353025 - RNA, 17 nt, Human
gccccauucugccugcc

SEQ ID NO: 3353026 - RNA, 23 nt, Human
gccccauccucuguacagagccc

SEQ ID NO: 3353027 - RNA, 15 nt, Human
gcccaggcuggcgug

SEQ ID NO: 3353028 - RNA, 14 nt, Human
gcccaggcuggcgu

SEQ ID NO: 3353029 - RNA, 16 nt, Human
gcccaggcuggcgugc

SEQ ID NO: 3353030 - RNA, 20 nt, Human
gcccagucuggaaugcagug

SEQ ID NO: 3353031 - RNA, 22 nt, Human
gcccagucuggaaugcaguggu

SEQ ID NO: 3353032 - RNA, 12 nt, Human
gcccaggaaagg

SEQ ID NO: 3353033 - RNA, 15 nt, Human
gcccaggaaaggcuc

SEQ ID NO: 3353034 - RNA, 16 nt, Human
gcccaggaaaggcucc

SEQ ID NO: 3353035 - RNA, 18 nt, Human
gcccaggccuccuacagc

SEQ ID NO: 3353036 - RNA, 11 nt, Human
gcccaggcugg

SEQ ID NO: 3353037 - RNA, 13 nt, Human
gcccaggccuccu

SEQ ID NO: 3353038 - RNA, 19 nt, Human
gcccucugcccacucccug

SEQ ID NO: 3353039 - RNA, 22 nt, Human
gcccucugcccacucccugcaa

SEQ ID NO: 3353040 - RNA, 19 nt, Human
gcccgggcucugccuccca

SEQ ID NO: 3353041 - RNA, 20 nt, Human
gcccgggcucugccucccau

SEQ ID NO: 3353042 - RNA, 13 nt, Human
gcccgggcucugc

SEQ ID NO: 3353043 - RNA, 14 nt, Human
gcccgggcucugcc

SEQ ID NO: 3353044 - RNA, 15 nt, Human
gcccgggcucugccu

SEQ ID NO: 3353045 - RNA, 18 nt, Human
gcccgggcucugccuccc

SEQ ID NO: 3353046 - RNA, 12 nt, Human
gcccgggcucug

SEQ ID NO: 3353047 - RNA, 14 nt, Human
gcccggcuccaggc

SEQ ID NO: 3353048 - RNA, 13 nt, Human
gcccggcuccagg

SEQ ID NO: 3353049 - RNA, 12 nt, Human
gcccggcuccag

SEQ ID NO: 3353050 - RNA, 19 nt, Human
gccccuucugacccaugcu

SEQ ID NO: 3353051 - RNA, 23 nt, Human
gccccauucugccugcccaggcc

SEQ ID NO: 3353052 - RNA, 22 nt, Human
gccccauucugccugcccaggc

SEQ ID NO: 3353053 - RNA, 23 nt, Human
gccccgaggccuucucugaagga

SEQ ID NO: 3353054 - RNA, 15 nt, Human
gccccauucugccug

SEQ ID NO: 3353055 - RNA, 14 nt, Human
gccccgcccaggcu

SEQ ID NO: 3353056 - RNA, 22 nt, Human
gccccgaggccuucucugaagg

SEQ ID NO: 3353057 - RNA, 19 nt, Human
gccccucagggucccuggu

SEQ ID NO: 3353058 - RNA, 21 nt, Human
gccccucagggucccuggugg

SEQ ID NO: 3353059 - RNA, 18 nt, Human
gccccucagggucccugg

SEQ ID NO: 3353060 - RNA, 17 nt, Human
gccccuggcagccccug

SEQ ID NO: 3353061 - RNA, 23 nt, Human
gccccuggcagccccuguucugg

SEQ ID NO: 3353062 - RNA, 21 nt, Human
ggaagcacaugccucucucag

SEQ ID NO: 3353063 - RNA, 22 nt, Human
ggaagcacaugccucucucagg

SEQ ID NO: 3353064 - RNA, 23 nt, Human
ggaagcacaugccucucucaggc

SEQ ID NO: 3353065 - RNA, 15 nt, Human
ggaagccagcaggcu

SEQ ID NO: 3353066 - RNA, 16 nt, Human
ggaagccagcaggcuc

SEQ ID NO: 3353067 - RNA, 17 nt, Human
ggaagccagcaggcucu

SEQ ID NO: 3353068 - RNA, 18 nt, Human
ggaagccagcaggcucuc

SEQ ID NO: 3353069 - RNA, 13 nt, Human
ggaagccagcagg

SEQ ID NO: 3353070 - RNA, 14 nt, Human
ggaagccagcaggc

SEQ ID NO: 3353071 - RNA, 13 nt, Human
ggaagcacaugcc

SEQ ID NO: 3353072 - RNA, 14 nt, Human
ggaagcacaugccu

SEQ ID NO: 3353073 - RNA, 15 nt, Human
ggaagcacaugccuc

SEQ ID NO: 3353074 - RNA, 17 nt, Human
ggaagcacaugccucuc

SEQ ID NO: 3353075 - RNA, 17 nt, Human
ggaagcacagcuucauu

SEQ ID NO: 3353076 - RNA, 13 nt, Human
ggaagagccuugc

SEQ ID NO: 3353077 - RNA, 14 nt, Human
ggaaaauaaauuau

SEQ ID NO: 3353078 - RNA, 17 nt, Human
ggaacagacuggaagca

SEQ ID NO: 3353079 - RNA, 20 nt, Human
ggaacagacuggaagcacag

SEQ ID NO: 3353080 - RNA, 19 nt, Human
ggaacagacuggaagcaca

SEQ ID NO: 3353081 - RNA, 15 nt, Human
ggaaaaauagccugc

SEQ ID NO: 3353082 - RNA, 14 nt, Human
ggaaaaacugauuu

SEQ ID NO: 3353083 - RNA, 13 nt, Human
ggaaaaauagccu

SEQ ID NO: 3353084 - RNA, 14 nt, Human
gcuuuuacuuaaac

SEQ ID NO: 3353085 - RNA, 18 nt, Human
gcuuccagugaggcucug

SEQ ID NO: 3353086 - RNA, 19 nt, Human
gcuuccagugaggcucugc

SEQ ID NO: 3353087 - RNA, 20 nt, Human
gcuuccagugaggcucugcc

SEQ ID NO: 3353088 - RNA, 21 nt, Human
gcuuccagugaggcucugccc

SEQ ID NO: 3353089 - RNA, 22 nt, Human
gcuugaggguugggcugguguc

SEQ ID NO: 3353090 - RNA, 13 nt, Human
gcuuggaggaagg

SEQ ID NO: 3353091 - RNA, 14 nt, Human
gcuuggaggaagga

SEQ ID NO: 3353092 - RNA, 15 nt, Human
gcuuggaggaaggaa

SEQ ID NO: 3353093 - RNA, 17 nt, Human
gcugucaauuacaggaa

SEQ ID NO: 3353094 - RNA, 19 nt, Human
gcugucaauuacaggaagu

SEQ ID NO: 3353095 - RNA, 22 nt, Human
gcugucaauuacaggaaguacu

SEQ ID NO: 3353096 - RNA, 23 nt, Human
gcugucaauuacaggaaguacug

SEQ ID NO: 3353097 - RNA, 21 nt, Human
gcugucccuuacgugaguccu

SEQ ID NO: 3353098 - RNA, 19 nt, Human
gcugucccuuacgugaguc

SEQ ID NO: 3353099 - RNA, 17 nt, Human
gcugucuccauguuuga

SEQ ID NO: 3353100 - RNA, 14 nt, Human
gcuggucccacuca

SEQ ID NO: 3353101 - RNA, 18 nt, Human
gcuggugucaccugaaga

SEQ ID NO: 3353102 - RNA, 16 nt, Human
gcuggugucaccugaa

SEQ ID NO: 3353103 - RNA, 21 nt, Human
gcugguuagagguucccuuug

SEQ ID NO: 3353104 - RNA, 15 nt, Human
gcugguucaggguug

SEQ ID NO: 3353105 - RNA, 16 nt, Human
gcugucaauuacagga

SEQ ID NO: 3353106 - RNA, 22 nt, Human
gcugguucaggguuggccccug

SEQ ID NO: 3353107 - RNA, 18 nt, Human
gcugggcuucaguggcag

SEQ ID NO: 3353108 - RNA, 23 nt, Human
gcugggggaagaagcucucuccu

SEQ ID NO: 3353109 - RNA, 12 nt, Human
gcuggggccagu

SEQ ID NO: 3353110 - RNA, 19 nt, Human
gcuggucccacucagucca

SEQ ID NO: 3353111 - RNA, 15 nt, Human
gcuggucccacucag

SEQ ID NO: 3353112 - RNA, 18 nt, Human
gcugggggccucagugcc

SEQ ID NO: 3353113 - RNA, 20 nt, Human
gcugggggccucagugccac

SEQ ID NO: 3353114 - RNA, 19 nt, Human
gcugggggccucagugcca

SEQ ID NO: 3353115 - RNA, 12 nt, Human
gcugggagagcc

SEQ ID NO: 3353116 - RNA, 13 nt, Human
gcugggagagccu

SEQ ID NO: 3353117 - RNA, 17 nt, Human
gcugggagagccuucca

SEQ ID NO: 3353118 - RNA, 18 nt, Human
gcugggagagccuuccag

SEQ ID NO: 3353119 - RNA, 19 nt, Human
gcugggagagccuuccagg

SEQ ID NO: 3353120 - RNA, 22 nt, Human
gcugggagagccuuccaggggu

SEQ ID NO: 3353121 - RNA, 17 nt, Human
gcugggcuucaguggca

SEQ ID NO: 3353122 - RNA, 21 nt, Human
gcugggaugauuggagggggg

SEQ ID NO: 3353123 - RNA, 18 nt, Human
gcugcgguccacccagga

SEQ ID NO: 3353124 - RNA, 17 nt, Human
gcugcgguccacccagg

SEQ ID NO: 3353125 - RNA, 13 nt, Human
gcugcuucaagga

SEQ ID NO: 3353126 - RNA, 16 nt, Human
gcugcuugggcuucau

SEQ ID NO: 3353127 - RNA, 21 nt, Human
gcugcuucaaggauccugagc

SEQ ID NO: 3353128 - RNA, 22 nt, Human
gcugcuucaaggauccugagcc

SEQ ID NO: 3353129 - RNA, 23 nt, Human
gcugcuucaaggauccugagcca

SEQ ID NO: 3353130 - RNA, 11 nt, Human
gcugcccugug

SEQ ID NO: 3353131 - RNA, 12 nt, Human
gcugcccuguga

SEQ ID NO: 3353132 - RNA, 14 nt, Human
gcugcccugugagu

SEQ ID NO: 3353133 - RNA, 16 nt, Human
gcugcgguccacccag

SEQ ID NO: 3353134 - RNA, 20 nt, Human
gcugggacuacaggcaccca

SEQ ID NO: 3353135 - RNA, 19 nt, Human
gcugggacuacaggcaccc

SEQ ID NO: 3353136 - RNA, 18 nt, Human
gcugggacuacaggcacc

SEQ ID NO: 3353137 - RNA, 13 nt, Human
gcugggacuacag

SEQ ID NO: 3353138 - RNA, 19 nt, Human
gcugggacuacagguguga

SEQ ID NO: 3353139 - RNA, 20 nt, Human
gcugggacaugggaaagggg

SEQ ID NO: 3353140 - RNA, 17 nt, Human
gcugcuugggcuucauc

SEQ ID NO: 3353141 - RNA, 18 nt, Human
gcuggaccuugaacuggg

SEQ ID NO: 3353142 - RNA, 16 nt, Human
gcuggaccuugaacug

SEQ ID NO: 3353143 - RNA, 21 nt, Human
gcuggaccuugaacuggguac

SEQ ID NO: 3353144 - RNA, 23 nt, Human
ggcaggucuugaacuccuggccu

SEQ ID NO: 3353145 - RNA, 13 nt, Human
ggcagguccaggg

SEQ ID NO: 3353146 - RNA, 19 nt, Human
ggcagcugcgguccaccca

SEQ ID NO: 3353147 - RNA, 17 nt, Human
ggcagcuugaggguugg

SEQ ID NO: 3353148 - RNA, 21 nt, Human
ggcagcuugaggguugggcug

SEQ ID NO: 3353149 - RNA, 16 nt, Human
ggcagcucaccucucc

SEQ ID NO: 3353150 - RNA, 22 nt, Human
ggcagcucaccucucccuugga

SEQ ID NO: 3353151 - RNA, 18 nt, Human
ggcagcucaccucucccu

SEQ ID NO: 3353152 - RNA, 21 nt, Human
ggcagcucaccucucccuugg

SEQ ID NO: 3353153 - RNA, 23 nt, Human
ggcagaguugaagacagagcuac

SEQ ID NO: 3353154 - RNA, 23 nt, Human
ggcagauacaggaaaagcugcug

SEQ ID NO: 3353155 - RNA, 21 nt, Human
ggcagaguugaagacagagcu

SEQ ID NO: 3353156 - RNA, 17 nt, Human
ggcagaggaaagcaaag

SEQ ID NO: 3353157 - RNA, 20 nt, Human
ggcagagcagagaccauccc

SEQ ID NO: 3353158 - RNA, 15 nt, Human
ggcagagcagagacc

SEQ ID NO: 3353159 - RNA, 16 nt, Human
ggcagagcagagacca

SEQ ID NO: 3353160 - RNA, 12 nt, Human
ggcagagcagag

SEQ ID NO: 3353161 - RNA, 16 nt, Human
ggcacccggccccugc

SEQ ID NO: 3353162 - RNA, 15 nt, Human
ggcacccggccccug

SEQ ID NO: 3353163 - RNA, 16 nt, Human
ggcaaggcugucaauu

SEQ ID NO: 3353164 - RNA, 21 nt, Human
ggaucagucugauucccaagc

SEQ ID NO: 3353165 - RNA, 19 nt, Human
ggcaacccccagccugcua

SEQ ID NO: 3353166 - RNA, 19 nt, Human
ggcaacugcauuggcuuug

SEQ ID NO: 3353167 - RNA, 15 nt, Human
ggcaaggcugucaau

SEQ ID NO: 3353168 - RNA, 18 nt, Human
ggcaacugcauuggcuuu

SEQ ID NO: 3353169 - RNA, 11 nt, Human
ggccaggcugg

SEQ ID NO: 3353170 - RNA, 16 nt, Human
ggccaggccagaggga

SEQ ID NO: 3353171 - RNA, 14 nt, Human
ggccaggccagagg

SEQ ID NO: 3353172 - RNA, 16 nt, Human
ggccacugugaagaga

SEQ ID NO: 3353173 - RNA, 14 nt, Human
ggccaggagccucc

SEQ ID NO: 3353174 - RNA, 16 nt, Human
ggccaggagccuccug

SEQ ID NO: 3353175 - RNA, 11 nt, Human
ggccacuguga

SEQ ID NO: 3353176 - RNA, 15 nt, Human
ggcauuccccaggag

SEQ ID NO: 3353177 - RNA, 16 nt, Human
ggccacaagacccuug

SEQ ID NO: 3353178 - RNA, 17 nt, Human
ggccacaagacccuugu

SEQ ID NO: 3353179 - RNA, 16 nt, Human
ggccaccugcggugcu

SEQ ID NO: 3353180 - RNA, 22 nt, Human
ggccaccugcggugcuaucucc

SEQ ID NO: 3353181 - RNA, 23 nt, Human
ggcauguucucugaggacacuaa

SEQ ID NO: 3353182 - RNA, 15 nt, Human
ggcagguuggugggg

SEQ ID NO: 3353183 - RNA, 12 nt, Human
ggccccugccac

SEQ ID NO: 3353184 - RNA, 16 nt, Human
ggccccugccacccug

SEQ ID NO: 3353185 - RNA, 13 nt, Human
ggccccugccacc

SEQ ID NO: 3353186 - RNA, 13 nt, Human
ggccccugcccgg

SEQ ID NO: 3353187 - RNA, 18 nt, Human
ggccccugccacccuggg

SEQ ID NO: 3353188 - RNA, 17 nt, Human
ggccccugccacccugg

SEQ ID NO: 3353189 - RNA, 16 nt, Human
ggccccucaggguccc

SEQ ID NO: 3353190 - RNA, 19 nt, Human
ggccccucagggucccugg

SEQ ID NO: 3353191 - RNA, 20 nt, Human
ggccccucagggucccuggu

SEQ ID NO: 3353192 - RNA, 21 nt, Human
ggccccucagggucccuggug

SEQ ID NO: 3353193 - RNA, 13 nt, Human
ggccaugggccuc

SEQ ID NO: 3353194 - RNA, 20 nt, Human
ggagcaaaaucgaugcagug

SEQ ID NO: 3353195 - RNA, 20 nt, Human
ggagauuuacaacuggggga

SEQ ID NO: 3353196 - RNA, 15 nt, Human
ggagaggggcacagg

SEQ ID NO: 3353197 - RNA, 17 nt, Human
ggagagcuagcagcagg

SEQ ID NO: 3353198 - RNA, 21 nt, Human
ggagagcuagcagcagggagg

SEQ ID NO: 3353199 - RNA, 21 nt, Human
ggagaccccuuggggagcagg

SEQ ID NO: 3353200 - RNA, 20 nt, Human
ggaagccagcaggcucucag

SEQ ID NO: 3353201 - RNA, 23 nt, Human
ggaggaucacuugaguccagaag

SEQ ID NO: 3353202 - RNA, 17 nt, Human
ggaggaucucuugagcc

SEQ ID NO: 3353203 - RNA, 21 nt, Human
ggaggaucucuugagccuggg

SEQ ID NO: 3353204 - RNA, 12 nt, Human
ggagggcuccag

SEQ ID NO: 3353205 - RNA, 13 nt, Human
ggagggcuccaga

SEQ ID NO: 3353206 - RNA, 16 nt, Human
ggagugacagaggcag

SEQ ID NO: 3353207 - RNA, 11 nt, Human
ggagugacaga

SEQ ID NO: 3353208 - RNA, 20 nt, Human
ggagucccaccuuggcugca

SEQ ID NO: 3353209 - RNA, 17 nt, Human
ggagggcuccagacaca

SEQ ID NO: 3353210 - RNA, 14 nt, Human
ggagggcuccagac

SEQ ID NO: 3353211 - RNA, 15 nt, Human
ggagggcuccagaca

SEQ ID NO: 3353212 - RNA, 21 nt, Human
ggagugacagaggcagcccca

SEQ ID NO: 3353213 - RNA, 19 nt, Human
ggagugacagaggcagccc

SEQ ID NO: 3353214 - RNA, 18 nt, Human
ggagugacagaggcagcc

SEQ ID NO: 3353215 - RNA, 17 nt, Human
ggagugacagaggcagc

SEQ ID NO: 3353216 - RNA, 21 nt, Human
ggagugaguugauagcacaga

SEQ ID NO: 3353217 - RNA, 14 nt, Human
ggagugagcugguu

SEQ ID NO: 3353218 - RNA, 12 nt, Human
ggagugagcugg

SEQ ID NO: 3353219 - RNA, 16 nt, Human
ggaucacagccucuga

SEQ ID NO: 3353220 - RNA, 17 nt, Human
gggugaagugaagacaa

SEQ ID NO: 3353221 - RNA, 19 nt, Human
gggugacagagcaagugag

SEQ ID NO: 3353222 - RNA, 22 nt, Human
ggguucaagcgauucuucugcu

SEQ ID NO: 3353223 - RNA, 23 nt, Human
ggguucaagcgauucuucugcuu

SEQ ID NO: 3353224 - RNA, 12 nt, Human
ggguucuaccca

SEQ ID NO: 3353225 - RNA, 23 nt, Human
gguagaaauaucugaaaauguau

SEQ ID NO: 3353226 - RNA, 22 nt, Human
gguagaagcccuucuaccuucc

SEQ ID NO: 3353227 - RNA, 13 nt, Human
gguacccacugcu

SEQ ID NO: 3353228 - RNA, 11 nt, Human
gguacccacug

SEQ ID NO: 3353229 - RNA, 22 nt, Human
gguagaaauaucugaaaaugua

SEQ ID NO: 3353230 - RNA, 17 nt, Human
gguacuuguggacacag

SEQ ID NO: 3353231 - RNA, 16 nt, Human
gguacuuguggacaca

SEQ ID NO: 3353232 - RNA, 15 nt, Human
ggucccaccccacac

SEQ ID NO: 3353233 - RNA, 16 nt, Human
ggucccaccccacaca

SEQ ID NO: 3353234 - RNA, 17 nt, Human
ggguaagugagagaggg

SEQ ID NO: 3353235 - RNA, 14 nt, Human
gggucucacucugu

SEQ ID NO: 3353236 - RNA, 12 nt, Human
gggucucacucu

SEQ ID NO: 3353237 - RNA, 21 nt, Human
gggucugaggaauccagaccc

SEQ ID NO: 3353238 - RNA, 12 nt, Human
gggucugaggaa

SEQ ID NO: 3353239 - RNA, 17 nt, Human
gggguggggaccucagg

SEQ ID NO: 3353240 - RNA, 12 nt, Human
gggguggccucc

SEQ ID NO: 3353241 - RNA, 19 nt, Human
ggggcugaggugggaggau

SEQ ID NO: 3353242 - RNA, 12 nt, Human
ggggcugcaccg

SEQ ID NO: 3353243 - RNA, 21 nt, Human
ggggcugcaccggcuggccug

SEQ ID NO: 3353244 - RNA, 22 nt, Human
ggggcugcaccggcuggccugg

SEQ ID NO: 3353245 - RNA, 22 nt, Human
gggggaggugggauccuccagg

SEQ ID NO: 3353246 - RNA, 21 nt, Human
ggggaaaaucagccugcucca

SEQ ID NO: 3353247 - RNA, 17 nt, Human
ggggaaaaucagccugc

SEQ ID NO: 3353248 - RNA, 19 nt, Human
ggggaaaaucagccugcuc

SEQ ID NO: 3353249 - RNA, 16 nt, Human
ggggaaaaucagccug

SEQ ID NO: 3353250 - RNA, 22 nt, Human
gggcuuggggaccagagcugcc

SEQ ID NO: 3353251 - RNA, 17 nt, Human
ggggcugaggugggagg

SEQ ID NO: 3353252 - RNA, 16 nt, Human
ggggcaacccugguga

SEQ ID NO: 3353253 - RNA, 21 nt, Human
ggugaccucugccugaaguca

SEQ ID NO: 3353254 - RNA, 22 nt, Human
ggugaccagcaccaucucuccu

SEQ ID NO: 3353255 - RNA, 21 nt, Human
ggugacagagugagacucugu

SEQ ID NO: 3353256 - RNA, 17 nt, Human
ggucccaccccacacac

SEQ ID NO: 3353257 - RNA, 14 nt, Human
ggucccaccccaca

SEQ ID NO: 3353258 - RNA, 23 nt, Human
ggucucacucugucgcccagucu

SEQ ID NO: 3353259 - RNA, 22 nt, Human
ggucucacucugucgcccaguc

SEQ ID NO: 3353260 - RNA, 16 nt, Human
ggucucacucugucgc

SEQ ID NO: 3353261 - RNA, 23 nt, Human
gguggccucccaacucaccccag

SEQ ID NO: 3353262 - RNA, 17 nt, Human
gguggccucccaacuca

SEQ ID NO: 3353263 - RNA, 22 nt, Human
gguggccucccaacucacccca

SEQ ID NO: 3353264 - RNA, 16 nt, Human
gguggcagugggagcu

SEQ ID NO: 3353265 - RNA, 22 nt, Human
gguggcagugggagcugccugu

SEQ ID NO: 3353266 - RNA, 19 nt, Human
gguggcagugggagcugcc

SEQ ID NO: 3353267 - RNA, 15 nt, Human
ggugcugccauccag

SEQ ID NO: 3353268 - RNA, 16 nt, Human
ggugagaggggaacag

SEQ ID NO: 3353269 - RNA, 15 nt, Human
ggugagaagcagagg

SEQ ID NO: 3353270 - RNA, 16 nt, Human
ggugcuaucuccccca

SEQ ID NO: 3353271 - RNA, 17 nt, Human
ggugcuaucucccccag

SEQ ID NO: 3353272 - RNA, 19 nt, Human
ggugcuaucucccccagcc

SEQ ID NO: 3353273 - RNA, 20 nt, Human
ggugcuaucucccccagccc

SEQ ID NO: 3353274 - RNA, 17 nt, Human
ggugguuucagaaaugu

SEQ ID NO: 3353275 - RNA, 18 nt, Human
ggugguuucagaaaugug

SEQ ID NO: 3353276 - RNA, 21 nt, Human
ggugguuauggagaggguguc

SEQ ID NO: 3353277 - RNA, 15 nt, Human
ggugguuuucuguuc

SEQ ID NO: 3353278 - RNA, 18 nt, Human
ggugguuuucuguucuuu

SEQ ID NO: 3353279 - RNA, 17 nt, Human
ggugucaagagggucug

SEQ ID NO: 3353280 - RNA, 19 nt, Human
ggugucaagagggucugag

SEQ ID NO: 3353281 - RNA, 19 nt, Human
ggugucaccugaagacuca

SEQ ID NO: 3353282 - RNA, 15 nt, Human
gguggugaccucugc

SEQ ID NO: 3353283 - RNA, 14 nt, Human
gguggugaccucug

SEQ ID NO: 3353284 - RNA, 16 nt, Human
gguggugaccucugcc

SEQ ID NO: 3353285 - RNA, 13 nt, Human
gguugagguuuca

SEQ ID NO: 3353286 - RNA, 21 nt, Human
gguucaaagauauuuugcuuu

SEQ ID NO: 3353287 - RNA, 23 nt, Human
gguucaagcgauucuucugcuuc

SEQ ID NO: 3353288 - RNA, 13 nt, Human
gguucaaagauau

SEQ ID NO: 3353289 - RNA, 17 nt, Human
gguuaggcauuguggga

SEQ ID NO: 3353290 - RNA, 13 nt, Human
gguuauggagagg

SEQ ID NO: 3353291 - RNA, 21 nt, Human
gguuacccaguuagcucucaa

SEQ ID NO: 3353292 - RNA, 23 nt, Human
ggcugcuucaaggauccugagcc

SEQ ID NO: 3353293 - RNA, 21 nt, Human
ggcugcuucaaggauccugag

SEQ ID NO: 3353294 - RNA, 19 nt, Human
ggcugggagagccuuccag

SEQ ID NO: 3353295 - RNA, 18 nt, Human
ggcugggagagccuucca

SEQ ID NO: 3353296 - RNA, 15 nt, Human
ggcugggcagaggaa

SEQ ID NO: 3353297 - RNA, 19 nt, Human
ggcugggcagaggaaagca

SEQ ID NO: 3353298 - RNA, 13 nt, Human
ggcugggcagagg

SEQ ID NO: 3353299 - RNA, 14 nt, Human
ggcugggcagagga

SEQ ID NO: 3353300 - RNA, 20 nt, Human
ggcugggagagccuuccagg

SEQ ID NO: 3353301 - RNA, 23 nt, Human
ggcugggagagccuuccaggggu

SEQ ID NO: 3353302 - RNA, 13 nt, Human
ggcugcugaaggc

SEQ ID NO: 3353303 - RNA, 18 nt, Human
ggcugcugaaggcucgag

SEQ ID NO: 3353304 - RNA, 15 nt, Human
ggcugcugaaggcuc

SEQ ID NO: 3353305 - RNA, 17 nt, Human
ggcugcugaaggcucga

SEQ ID NO: 3353306 - RNA, 14 nt, Human
ggcugcugaaggcu

SEQ ID NO: 3353307 - RNA, 13 nt, Human
ggcugcagggagu

SEQ ID NO: 3353308 - RNA, 12 nt, Human
ggcugcagggag

SEQ ID NO: 3353309 - RNA, 11 nt, Human
ggcugcuucaa

SEQ ID NO: 3353310 - RNA, 12 nt, Human
ggcugcuucaag

SEQ ID NO: 3353311 - RNA, 22 nt, Human
ggcugcuucaaggauccugagc

SEQ ID NO: 3353312 - RNA, 18 nt, Human
ggcugcaccggcuggccu

SEQ ID NO: 3353313 - RNA, 19 nt, Human
ggcugcaccggcuggccug

SEQ ID NO: 3353314 - RNA, 17 nt, Human
ggcugcaccggcuggcc

SEQ ID NO: 3353315 - RNA, 24 nt, Human
ggcugcaaaggguaucaggugcug

SEQ ID NO: 3353316 - RNA, 23 nt, Human
ggcugcaaaggguaucaggugcu

SEQ ID NO: 3353317 - RNA, 22 nt, Human
ggcugcaaaggguaucaggugc

SEQ ID NO: 3353318 - RNA, 18 nt, Human
ggcugcaaaggguaucag

SEQ ID NO: 3353319 - RNA, 17 nt, Human
ggccccugcccggcugc

SEQ ID NO: 3353320 - RNA, 16 nt, Human
ggccccugcccggcug

SEQ ID NO: 3353321 - RNA, 17 nt, Human
ggcucugccucccauca

SEQ ID NO: 3353322 - RNA, 20 nt, Human
ggccccugcccggcugcgga

SEQ ID NO: 3353323 - RNA, 13 nt, Human
ggcugagguggga

SEQ ID NO: 3353324 - RNA, 15 nt, Human
ggcugaggugggagg

SEQ ID NO: 3353325 - RNA, 15 nt, Human
ggcuuagucacugag

SEQ ID NO: 3353326 - RNA, 21 nt, Human
ggcuuagucacugagacagcc

SEQ ID NO: 3353327 - RNA, 23 nt, Human
ggcuuauauucaaccauggacuu

SEQ ID NO: 3353328 - RNA, 14 nt, Human
ggcuuauauucaac

SEQ ID NO: 3353329 - RNA, 22 nt, Human
ggcuuauauucaaccauggacu

SEQ ID NO: 3353330 - RNA, 21 nt, Human
ggcuuauauucaaccauggac

SEQ ID NO: 3353331 - RNA, 20 nt, Human
ggcuuauauucaaccaugga

SEQ ID NO: 3353332 - RNA, 15 nt, Human
ggcuuauauucaacc

SEQ ID NO: 3353333 - RNA, 17 nt, Human
ggcugggcuucaguggc

SEQ ID NO: 3353334 - RNA, 13 nt, Human
ggcugggcuucag

SEQ ID NO: 3353335 - RNA, 15 nt, Human
ggcuuaaaacaacac

SEQ ID NO: 3353336 - RNA, 12 nt, Human
ggcugggcuuca

SEQ ID NO: 3353337 - RNA, 17 nt, Human
ggcugggcucccuuccc

SEQ ID NO: 3353338 - RNA, 10 nt, Human
ggcuuuugug

SEQ ID NO: 3353339 - RNA, 19 nt, Human
ggcuuggggaccagagcug

SEQ ID NO: 3353340 - RNA, 21 nt, Human
ggcuuggggaccagagcugcc

SEQ ID NO: 3353341 - RNA, 12 nt, Human
gggaccucaggc

SEQ ID NO: 3353342 - RNA, 13 nt, Human
gggaccucaggcc

SEQ ID NO: 3353343 - RNA, 15 nt, Human
gggaccucaggccug

SEQ ID NO: 3353344 - RNA, 17 nt, Human
gggacuacaggcaccca

SEQ ID NO: 3353345 - RNA, 14 nt, Human
gggaagggggcugg

SEQ ID NO: 3353346 - RNA, 16 nt, Human
gggaagggggcuggga

SEQ ID NO: 3353347 - RNA, 17 nt, Human
gggaagggggcugggac

SEQ ID NO: 3353348 - RNA, 21 nt, Human
gggaaggauacaaaagcaugu

SEQ ID NO: 3353349 - RNA, 23 nt, Human
gggaaggauacaaaagcauguga

SEQ ID NO: 3353350 - RNA, 16 nt, Human
gggaaggauacaaaag

SEQ ID NO: 3353351 - RNA, 23 nt, Human
gggccacagagaaaguacuucuc

SEQ ID NO: 3353352 - RNA, 16 nt, Human
gggccacagagaaagu

SEQ ID NO: 3353353 - RNA, 17 nt, Human
gggcccagagagggugg

SEQ ID NO: 3353354 - RNA, 12 nt, Human
gggcaugacacg

SEQ ID NO: 3353355 - RNA, 13 nt, Human
gggcccugccucc

SEQ ID NO: 3353356 - RNA, 13 nt, Human
gggccuggccuga

SEQ ID NO: 3353357 - RNA, 12 nt, Human
gggccuggccug

SEQ ID NO: 3353358 - RNA, 14 nt, Human
gggccuggccugag

SEQ ID NO: 3353359 - RNA, 18 nt, Human
gggccuggccugagcugg

SEQ ID NO: 3353360 - RNA, 17 nt, Human
gggccuggcucaggugg

SEQ ID NO: 3353361 - RNA, 13 nt, Human
gggccuggcuccc

SEQ ID NO: 3353362 - RNA, 23 nt, Human
gggcacaccgggcacucagaaga

SEQ ID NO: 3353363 - RNA, 18 nt, Human
gggcacagaaaauggaag

SEQ ID NO: 3353364 - RNA, 20 nt, Human
gggcacagaaaauggaagac

SEQ ID NO: 3353365 - RNA, 21 nt, Human
gggcacagaaaauggaagaca

SEQ ID NO: 3353366 - RNA, 19 nt, Human
gggcacucagaagacacug

SEQ ID NO: 3353367 - RNA, 16 nt, Human
gggcacucagaagaca

SEQ ID NO: 3353368 - RNA, 13 nt, Human
gggcacagggucu

SEQ ID NO: 3353369 - RNA, 16 nt, Human
gggcacagggucucua

SEQ ID NO: 3353370 - RNA, 18 nt, Human
gggcagaaggaagacuuc

SEQ ID NO: 3353371 - RNA, 14 nt, Human
gggcagaaggaaga

SEQ ID NO: 3353372 - RNA, 20 nt, Human
gggcacucagaagacacuga

SEQ ID NO: 3353373 - RNA, 11 nt, Human
gggcagagcag

SEQ ID NO: 3353374 - RNA, 17 nt, Human
gggcagguugguggggg

SEQ ID NO: 3353375 - RNA, 16 nt, Human
gggaggugaccccagg

SEQ ID NO: 3353376 - RNA, 17 nt, Human
gggaggugggauccucc

SEQ ID NO: 3353377 - RNA, 14 nt, Human
gggagugagcuggu

SEQ ID NO: 3353378 - RNA, 11 nt, Human
gggagugagcu

SEQ ID NO: 3353379 - RNA, 18 nt, Human
gggagugacagaggcagc

SEQ ID NO: 3353380 - RNA, 17 nt, Human
gggagugacagaggcag

SEQ ID NO: 3353381 - RNA, 23 nt, Human
gggauccuggaguucugguuccu

SEQ ID NO: 3353382 - RNA, 18 nt, Human
gggcaacccuggugacca

SEQ ID NO: 3353383 - RNA, 20 nt, Human
gggcaacccccagccugcua

SEQ ID NO: 3353384 - RNA, 15 nt, Human
gggauccuccaggug

SEQ ID NO: 3353385 - RNA, 16 nt, Human
gggauccuccaggugc

SEQ ID NO: 3353386 - RNA, 21 nt, Human
gggauaugauuuaaaucagcc

SEQ ID NO: 3353387 - RNA, 13 nt, Human
gggauagagagag

SEQ ID NO: 3353388 - RNA, 16 nt, Western equine encephalomyelitis virus
uucacacagcugcucu

SEQ ID NO: 3353389 - RNA, 18 nt, Western equine encephalomyelitis virus
gaaacagcaccauuugga

SEQ ID NO: 3353390 - RNA, 16 nt, Western equine encephalomyelitis virus
caugcgacaaaccacc

SEQ ID NO: 3353391 - RNA, 14 nt, Western equine encephalomyelitis virus
ugccguaggcagca

SEQ ID NO: 3353392 - RNA, 12 nt, Western equine encephalomyelitis virus
ugugcugcauuc

SEQ ID NO: 3353393 - RNA, 16 nt, Western equine encephalomyelitis virus
gcagacgcaacagcag

SEQ ID NO: 3353394 - RNA, 17 nt, Western equine encephalomyelitis virus
ugcccguauugcagaca

SEQ ID NO: 3353395 - RNA, 23 nt, Western equine encephalomyelitis virus
gcacuguuugggggagcaucauc

SEQ ID NO: 3353396 - RNA, 15 nt, Western equine encephalomyelitis virus
uccacguugaaggaa

SEQ ID NO: 3353397 - RNA, 22 nt, Western equine encephalomyelitis virus
uacgugaccugcaaauuccaca

SEQ ID NO: 3353398 - RNA, 14 nt, Western equine encephalomyelitis virus
cagaauggauuaca

SEQ ID NO: 3353399 - RNA, 14 nt, Western equine encephalomyelitis virus
ccugacugcaaugc

SEQ ID NO: 3353400 - RNA, 22 nt, Western equine encephalomyelitis virus
cauauuuuacuuaaaaacacua

SEQ ID NO: 3353401 - RNA, 16 nt, Western equine encephalomyelitis virus
acggcugcugaagccu

SEQ ID NO: 3353402 - RNA, 14 nt, Western equine encephalomyelitis virus
cgguagagaggagu

SEQ ID NO: 3353403 - RNA, 15 nt, Western equine encephalomyelitis virus
caaaggcggauuaca

SEQ ID NO: 3353404 - RNA, 22 nt, Western equine encephalomyelitis virus
cugcguugucggaggaaggcug

SEQ ID NO: 3353405 - RNA, 17 nt, Western equine encephalomyelitis virus
acacgcugcuggagaac

SEQ ID NO: 3353406 - RNA, 16 nt, Western equine encephalomyelitis virus
ugaaauguggaagaac

SEQ ID NO: 3353407 - RNA, 19 nt, Western equine encephalomyelitis virus
ccgaggaagcacagugcau

SEQ ID NO: 3353408 - RNA, 16 nt, Western equine encephalomyelitis virus
ggccgugaaauugaag

SEQ ID NO: 3353409 - RNA, 15 nt, Western equine encephalomyelitis virus
agugagaacacacaa

SEQ ID NO: 3353410 - RNA, 22 nt, Western equine encephalomyelitis virus
acacuauaucacuuuuaugaga

SEQ ID NO: 3353411 - RNA, 13 nt, Western equine encephalomyelitis virus
ccacguugaagga

SEQ ID NO: 3353412 - RNA, 17 nt, Western equine encephalomyelitis virus
guccaccgccaaagaag

SEQ ID NO: 3353413 - RNA, 21 nt, Western equine encephalomyelitis virus
cauuaccgaugacuucacacu

SEQ ID NO: 3353414 - RNA, 14 nt, Western equine encephalomyelitis virus
aggaagcgucaggc

SEQ ID NO: 3353415 - RNA, 11 nt, Western equine encephalomyelitis virus
acagcaccauu

SEQ ID NO: 3353416 - RNA, 16 nt, Western equine encephalomyelitis virus
cuuggaacuggcugcu

SEQ ID NO: 3353417 - RNA, 14 nt, Western equine encephalomyelitis virus
ugcaagaaacagca

SEQ ID NO: 3353418 - RNA, 19 nt, Western equine encephalomyelitis virus
gacagcuguuuugaaggaa

SEQ ID NO: 3353419 - RNA, 22 nt, Western equine encephalomyelitis virus
guccaguucacucccacuccac

SEQ ID NO: 3353420 - RNA, 20 nt, Western equine encephalomyelitis virus
gcaagaagagacugccugac

SEQ ID NO: 3353421 - RNA, 12 nt, Western equine encephalomyelitis virus
cggcaacaccac

SEQ ID NO: 3353422 - RNA, 15 nt, Western equine encephalomyelitis virus
cgauguacuuccgag

SEQ ID NO: 3353423 - RNA, 18 nt, Western equine encephalomyelitis virus
ccacugugccaaauguuc

SEQ ID NO: 3353424 - RNA, 15 nt, Western equine encephalomyelitis virus
uucaugcugcaugcc

SEQ ID NO: 3353425 - RNA, 16 nt, Western equine encephalomyelitis virus
caccagcgacaaacca

SEQ ID NO: 3353426 - RNA, 20 nt, Western equine encephalomyelitis virus
aguccuaucuggaggaagcg

SEQ ID NO: 3353427 - RNA, 18 nt, Western equine encephalomyelitis virus
aaaagaagaagcagcaag

SEQ ID NO: 3353428 - RNA, 17 nt, Western equine encephalomyelitis virus
caccgccaaagaagaag

SEQ ID NO: 3353429 - RNA, 13 nt, Western equine encephalomyelitis virus
ugcacuaaagcaa

SEQ ID NO: 3353430 - RNA, 23 nt, Western equine encephalomyelitis virus
cacguuuacgaucacuugaagga

SEQ ID NO: 3353431 - RNA, 20 nt, Western equine encephalomyelitis virus
gcagacgcaacagcagaaug

SEQ ID NO: 3353432 - RNA, 13 nt, Western equine encephalomyelitis virus
uggaagaacaacu

SEQ ID NO: 3353433 - RNA, 16 nt, Western equine encephalomyelitis virus
uucuggcaagaacguc

SEQ ID NO: 3353434 - RNA, 16 nt, Western equine encephalomyelitis virus
ggaagcguggugcaua

SEQ ID NO: 3353435 - RNA, 23 nt, Western equine encephalomyelitis virus
gccaagugaauggauaugccugc

SEQ ID NO: 3353436 - RNA, 19 nt, Western equine encephalomyelitis virus
cgauguauuuccgaggaag

SEQ ID NO: 3353437 - RNA, 15 nt, Western equine encephalomyelitis virus
acgacacgcugcugg

SEQ ID NO: 3353438 - RNA, 17 nt, Western equine encephalomyelitis virus
ucccaugcgacaaacca

SEQ ID NO: 3353439 - RNA, 18 nt, Western equine encephalomyelitis virus
caucccugaugcagcuuu

SEQ ID NO: 3353440 - RNA, 16 nt, Western equine encephalomyelitis virus
guccauggaaagcugg

SEQ ID NO: 3353441 - RNA, 12 nt, Western equine encephalomyelitis virus
ccgaucaugcug

SEQ ID NO: 3353442 - RNA, 13 nt, Western equine encephalomyelitis virus
guagaugacugag

SEQ ID NO: 3353443 - RNA, 15 nt, Western equine encephalomyelitis virus
gacagugagaacaca

SEQ ID NO: 3353444 - RNA, 11 nt, Western equine encephalomyelitis virus
acucagugcaa

SEQ ID NO: 3353445 - RNA, 17 nt, Western equine encephalomyelitis virus
cggcaagaaguccaccu

SEQ ID NO: 3353446 - RNA, 21 nt, Western equine encephalomyelitis virus
ucggcuacaaucaggcaggca

SEQ ID NO: 3353447 - RNA, 13 nt, Western equine encephalomyelitis virus
ugacagugagaac

SEQ ID NO: 3353448 - RNA, 20 nt, Western equine encephalomyelitis virus
cacgagcggagcaucugaga

SEQ ID NO: 3353449 - RNA, 19 nt, Western equine encephalomyelitis virus
aacggcugcacuaaagcaa

SEQ ID NO: 3353450 - RNA, 20 nt, Western equine encephalomyelitis virus
cgugaccugcaaauuccaca

SEQ ID NO: 3353451 - RNA, 23 nt, Western equine encephalomyelitis virus
auacguuugucaauggcgucacg

SEQ ID NO: 3353452 - RNA, 20 nt, Western equine encephalomyelitis virus
gcuugacaccgacagucugc

SEQ ID NO: 3353453 - RNA, 20 nt, Western equine encephalomyelitis virus
auuuuacuuaaaaacacuau

SEQ ID NO: 3353454 - RNA, 15 nt, Western equine encephalomyelitis virus
cagcgacaaaccacc

SEQ ID NO: 3353455 - RNA, 17 nt, Western equine encephalomyelitis virus
guggagaaaaagaucag

SEQ ID NO: 3353456 - RNA, 17 nt, Western equine encephalomyelitis virus
aaacauuuggagaaacu

SEQ ID NO: 3353457 - RNA, 21 nt, Western equine encephalomyelitis virus
accaugaaccagucagagucu

SEQ ID NO: 3353458 - RNA, 15 nt, Western equine encephalomyelitis virus
ugcaaggcauccuca

SEQ ID NO: 3353459 - RNA, 16 nt, Western equine encephalomyelitis virus
gcaggcgucugccugg

SEQ ID NO: 3353460 - RNA, 17 nt, Western equine encephalomyelitis virus
agucugggcccaggagu

SEQ ID NO: 3353461 - RNA, 17 nt, Western equine encephalomyelitis virus
ugcaaugcgaccaacau

SEQ ID NO: 3353462 - RNA, 23 nt, Western equine encephalomyelitis virus
ggucauagcagggccgauaucag

SEQ ID NO: 3353463 - RNA, 22 nt, Western equine encephalomyelitis virus
acucgauguacuuccgaggaag

SEQ ID NO: 3353464 - RNA, 15 nt, Western equine encephalomyelitis virus
caggcgucugccugg

SEQ ID NO: 3353465 - RNA, 15 nt, Western equine encephalomyelitis virus
ggcacacagaccacu

SEQ ID NO: 3353466 - RNA, 14 nt, Western equine encephalomyelitis virus
gcccaggagucggc

SEQ ID NO: 3353467 - RNA, 18 nt, Western equine encephalomyelitis virus
acgcaagccuaaaccagg

SEQ ID NO: 3353468 - RNA, 23 nt, Western equine encephalomyelitis virus
aaaacucgauguacuuccgagga

SEQ ID NO: 3353469 - RNA, 19 nt, Western equine encephalomyelitis virus
uucagcccaauaaaaauug

SEQ ID NO: 3353470 - RNA, 23 nt, Western equine encephalomyelitis virus
uuagcgguuuugugcugcauucg

SEQ ID NO: 3353471 - RNA, 18 nt, Western equine encephalomyelitis virus
agcuaugaaaccaggagc

SEQ ID NO: 3353472 - RNA, 13 nt, Western equine encephalomyelitis virus
cauuccuucacca

SEQ ID NO: 3353473 - RNA, 12 nt, Western equine encephalomyelitis virus
aagcacagugca

SEQ ID NO: 3353474 - RNA, 19 nt, Western equine encephalomyelitis virus
gaucuuauuaggcacacag

SEQ ID NO: 3353475 - RNA, 13 nt, Western equine encephalomyelitis virus
acgccagaacgaa

SEQ ID NO: 3353476 - RNA, 20 nt, Western equine encephalomyelitis virus
aagccuucugucaagaacau

SEQ ID NO: 3353477 - RNA, 15 nt, Western equine encephalomyelitis virus
gugagaacacacaac

SEQ ID NO: 3353478 - RNA, 18 nt, Western equine encephalomyelitis virus
acaacguauguguaugaa

SEQ ID NO: 3353479 - RNA, 16 nt, Western equine encephalomyelitis virus
ccacacaugugacugc

SEQ ID NO: 3353480 - RNA, 16 nt, Western equine encephalomyelitis virus
cagaacgaacacucga

SEQ ID NO: 3353481 - RNA, 18 nt, Western equine encephalomyelitis virus
ugguucaaaggcaucacc

SEQ ID NO: 3353482 - RNA, 14 nt, Western equine encephalomyelitis virus
ugcagacacucaac

SEQ ID NO: 3353483 - RNA, 17 nt, Western equine encephalomyelitis virus
cuccacgacagcuguuu

SEQ ID NO: 3353484 - RNA, 19 nt, Western equine encephalomyelitis virus
gauguacuuccgaggaagc

SEQ ID NO: 3353485 - RNA, 12 nt, Western equine encephalomyelitis virus
gaaacauuugga

SEQ ID NO: 3353486 - RNA, 19 nt, Western equine encephalomyelitis virus
uuuacuuaaaaacacuaua

SEQ ID NO: 3353487 - RNA, 14 nt, Western equine encephalomyelitis virus
uuaacaacacuaua

SEQ ID NO: 3353488 - RNA, 16 nt, Western equine encephalomyelitis virus
aguacgugaccugcaa

SEQ ID NO: 3353489 - RNA, 14 nt, Western equine encephalomyelitis virus
accacucagugcaa

SEQ ID NO: 3353490 - RNA, 18 nt, Western equine encephalomyelitis virus
cgauguacuuccgaggaa

SEQ ID NO: 3353491 - RNA, 16 nt, Western equine encephalomyelitis virus
augcaccguggagaaa

SEQ ID NO: 3353492 - RNA, 14 nt, Western equine encephalomyelitis virus
cuugacacuaaaac

SEQ ID NO: 3353493 - RNA, 17 nt, Western equine encephalomyelitis virus
cccuccuaggcgccgcu

SEQ ID NO: 3353494 - RNA, 19 nt, Western equine encephalomyelitis virus
auuuuacuuaaaaacacua

SEQ ID NO: 3353495 - RNA, 21 nt, Western equine encephalomyelitis virus
gcuucuacaacuggcaccacg

SEQ ID NO: 3353496 - RNA, 12 nt, Western equine encephalomyelitis virus
uaggcacacaga

SEQ ID NO: 3353497 - RNA, 21 nt, Western equine encephalomyelitis virus
ccgaggaagcguggugcauaa

SEQ ID NO: 3353498 - RNA, 18 nt, Western equine encephalomyelitis virus
cugcguugucggaggaag

SEQ ID NO: 3353499 - RNA, 20 nt, Western equine encephalomyelitis virus
cguaggcagcauaacacuac

SEQ ID NO: 3353500 - RNA, 18 nt, Western equine encephalomyelitis virus
gccgucgucuuggccaca

SEQ ID NO: 3353501 - RNA, 14 nt, Western equine encephalomyelitis virus
ugcaucaucagcag

SEQ ID NO: 3353502 - RNA, 18 nt, Western equine encephalomyelitis virus
cauaaggucgucaucaga

SEQ ID NO: 3353503 - RNA, 16 nt, Western equine encephalomyelitis virus
cagagucugggcccag

SEQ ID NO: 3353504 - RNA, 18 nt, Western equine encephalomyelitis virus
cggcccccgcuggcugcu

SEQ ID NO: 3353505 - RNA, 18 nt, Western equine encephalomyelitis virus
cagccuaaaaagaagaag

SEQ ID NO: 3353506 - RNA, 23 nt, Western equine encephalomyelitis virus
acuccacguugaaggaaaaauug

SEQ ID NO: 3353507 - RNA, 16 nt, Western equine encephalomyelitis virus
uacauauuaacaacac

SEQ ID NO: 3353508 - RNA, 16 nt, Western equine encephalomyelitis virus
accuucaacuaacaag

SEQ ID NO: 3353509 - RNA, 16 nt, Western equine encephalomyelitis virus
ugcaucgccaaagcaa

SEQ ID NO: 3353510 - RNA, 16 nt, Western equine encephalomyelitis virus
agcuugcaucgccaaa

SEQ ID NO: 3353511 - RNA, 16 nt, Western equine encephalomyelitis virus
aaacauuuggagaaac

SEQ ID NO: 3353512 - RNA, 18 nt, Western equine encephalomyelitis virus
caugcaccguggagaaaa

SEQ ID NO: 3353513 - RNA, 21 nt, Western equine encephalomyelitis virus
cucgauguacuuccgaggaag

SEQ ID NO: 3353514 - RNA, 21 nt, Western equine encephalomyelitis virus
aguucgcuccagacugcacua

SEQ ID NO: 3353515 - RNA, 11 nt, Western equine encephalomyelitis virus
gccaaagcaag

SEQ ID NO: 3353516 - RNA, 22 nt, Western equine encephalomyelitis virus
ucugugacagugagaacacaca

SEQ ID NO: 3353517 - RNA, 14 nt, Western equine encephalomyelitis virus
uaaaaauugagaac

SEQ ID NO: 3353518 - RNA, 16 nt, Western equine encephalomyelitis virus
agcuaucagcacaucu

SEQ ID NO: 3353519 - RNA, 15 nt, Western equine encephalomyelitis virus
gcugaugaaaccacu

SEQ ID NO: 3353520 - RNA, 15 nt, Western equine encephalomyelitis virus
uauugcagacacuca

SEQ ID NO: 3353521 - RNA, 21 nt, Western equine encephalomyelitis virus
cucgauguauuuccgaggaag

SEQ ID NO: 3353522 - RNA, 13 nt, Western equine encephalomyelitis virus
cacgccggcccaa

SEQ ID NO: 3353523 - RNA, 15 nt, Western equine encephalomyelitis virus
gcaacgguacccaca

SEQ ID NO: 3353524 - RNA, 20 nt, Western equine encephalomyelitis virus
gcucuaugcuuauaaacaca

SEQ ID NO: 3353525 - RNA, 14 nt, Western equine encephalomyelitis virus
aagagacugccuga

SEQ ID NO: 3353526 - RNA, 13 nt, Western equine encephalomyelitis virus
gcacugcaucauc

SEQ ID NO: 3353527 - RNA, 22 nt, Western equine encephalomyelitis virus
guucacucccacuccacgacag

SEQ ID NO: 3353528 - RNA, 18 nt, Western equine encephalomyelitis virus
cgauguauuuccgaggaa

SEQ ID NO: 3353529 - RNA, 17 nt, Western equine encephalomyelitis virus
gcaccaggcgacccaca

SEQ ID NO: 3353530 - RNA, 11 nt, Western equine encephalomyelitis virus
gcuggcugcuc

SEQ ID NO: 3353531 - RNA, 17 nt, Western equine encephalomyelitis virus
ugcucgaagagaacguc

SEQ ID NO: 3353532 - RNA, 15 nt, Western equine encephalomyelitis virus
caggccaggcccaca

SEQ ID NO: 3353533 - RNA, 15 nt, Western equine encephalomyelitis virus
gagaacgucuugaaa

SEQ ID NO: 3353534 - RNA, 13 nt, Western equine encephalomyelitis virus
ggcccaaacgaag

SEQ ID NO: 3353535 - RNA, 13 nt, Western equine encephalomyelitis virus
cgcgcuugcaccg

SEQ ID NO: 3353536 - RNA, 23 nt, Western equine encephalomyelitis virus
cagguccaccgccaaagaagaag

SEQ ID NO: 3353537 - RNA, 17 nt, Western equine encephalomyelitis virus
aucugugguuuaacaac

SEQ ID NO: 3353538 - RNA, 15 nt, Western equine encephalomyelitis virus
cacagaccacucagu

SEQ ID NO: 3353539 - RNA, 17 nt, Western equine encephalomyelitis virus
accgacagucugcccgg

SEQ ID NO: 3353540 - RNA, 13 nt, Western equine encephalomyelitis virus
gacuacagcacag

SEQ ID NO: 3353541 - RNA, 15 nt, Western equine encephalomyelitis virus
agguccaccgccaaa

SEQ ID NO: 3353542 - RNA, 13 nt, Western equine encephalomyelitis virus
gcgacaaaccacc

SEQ ID NO: 3353543 - RNA, 17 nt, Western equine encephalomyelitis virus
agugcuccuaagccaaa

SEQ ID NO: 3353544 - RNA, 18 nt, Western equine encephalomyelitis virus
acugacauacggcugcug

SEQ ID NO: 3353545 - RNA, 11 nt, Western equine encephalomyelitis virus
ccagaaagggg

SEQ ID NO: 3353546 - RNA, 15 nt, Western equine encephalomyelitis virus
aguucacacagcugc

SEQ ID NO: 3353547 - RNA, 13 nt, Western equine encephalomyelitis virus
gguaaaacucgau

SEQ ID NO: 3353548 - RNA, 17 nt, Western equine encephalomyelitis virus
guaaaacucgauguacu

SEQ ID NO: 3353549 - RNA, 22 nt, Western equine encephalomyelitis virus
ccgcuugacacuaaaacucgau

SEQ ID NO: 3353550 - RNA, 19 nt, Western equine encephalomyelitis virus
ggaucgauuagaauccagg

SEQ ID NO: 3353551 - RNA, 15 nt, Western equine encephalomyelitis virus
aggacgaaacgcaag

SEQ ID NO: 3353552 - RNA, 16 nt, Western equine encephalomyelitis virus
agugcaagguaaauug

SEQ ID NO: 3353553 - RNA, 21 nt, Western equine encephalomyelitis virus
cacgaccaugacaucaaggaa

SEQ ID NO: 3353554 - RNA, 21 nt, Western equine encephalomyelitis virus
cacgcgccgcuugacacuaaa

SEQ ID NO: 3353555 - RNA, 16 nt, Western equine encephalomyelitis virus
ucacacagcugcucug

SEQ ID NO: 3353556 - RNA, 14 nt, Western equine encephalomyelitis virus
aacuuugaaccauc

SEQ ID NO: 3353557 - RNA, 14 nt, Western equine encephalomyelitis virus
ugaaauugaagaag

SEQ ID NO: 3353558 - RNA, 20 nt, Western equine encephalomyelitis virus
ccgaggaagcacagugcaua

SEQ ID NO: 3353559 - RNA, 21 nt, Western equine encephalomyelitis virus
uggauggccgcaugagaucau

SEQ ID NO: 3353560 - RNA, 17 nt, Western equine encephalomyelitis virus
uuggaacuggcugcuug

SEQ ID NO: 3353561 - RNA, 23 nt, Western equine encephalomyelitis virus
cugcacaguagcagacugcauuu

SEQ ID NO: 3353562 - RNA, 18 nt, Western equine encephalomyelitis virus
acgaucacuugaaggaga

SEQ ID NO: 3353563 - RNA, 23 nt, Western equine encephalomyelitis virus
gccuggggaagguagacgccuuc

SEQ ID NO: 3353564 - RNA, 19 nt, Western equine encephalomyelitis virus
auggagcuaugaaaccagg

SEQ ID NO: 3353565 - RNA, 23 nt, Western equine encephalomyelitis virus
aucuuggaacuggcugcuugcac

SEQ ID NO: 3353566 - RNA, 11 nt, Western equine encephalomyelitis virus
ccgaggaagcg

SEQ ID NO: 3353567 - RNA, 19 nt, Western equine encephalomyelitis virus
cauuaaucguauaucacac

SEQ ID NO: 3353568 - RNA, 13 nt, Western equine encephalomyelitis virus
aacuggcugcuug

SEQ ID NO: 3353569 - RNA, 14 nt, Western equine encephalomyelitis virus
ugccacgcgccgcu

SEQ ID NO: 3353570 - RNA, 23 nt, Western equine encephalomyelitis virus
aaaacucgauguauuuccgagga

SEQ ID NO: 3353571 - RNA, 14 nt, Western equine encephalomyelitis virus
ugcuggagaacguc

SEQ ID NO: 3353572 - RNA, 16 nt, Western equine encephalomyelitis virus
aggcacacagaccacu

SEQ ID NO: 3353573 - RNA, 18 nt, Western equine encephalomyelitis virus
acauauuaacaacacuau

SEQ ID NO: 3353574 - RNA, 15 nt, Western equine encephalomyelitis virus
aagaagagacugccu

SEQ ID NO: 3353575 - RNA, 17 nt, Western equine encephalomyelitis virus
aaaguucacacagcugc

SEQ ID NO: 3353576 - RNA, 17 nt, Western equine encephalomyelitis virus
uacccaccggcagaaug

SEQ ID NO: 3353577 - RNA, 17 nt, Western equine encephalomyelitis virus
cuaggaggugcaaauga

SEQ ID NO: 3353578 - RNA, 21 nt, Western equine encephalomyelitis virus
aaacaucuuggaacuggcugc

SEQ ID NO: 3353579 - RNA, 18 nt, Western equine encephalomyelitis virus
caggagucggcaccaggc

SEQ ID NO: 3353580 - RNA, 22 nt, Western equine encephalomyelitis virus
cuucaccacaaguuaaaugcug

SEQ ID NO: 3353581 - RNA, 20 nt, Western equine encephalomyelitis virus
cagcuguuuugaaggaagcg

SEQ ID NO: 3353582 - RNA, 22 nt, Western equine encephalomyelitis virus
ccacgacagcuguuuugaagga

SEQ ID NO: 3353583 - RNA, 14 nt, Western equine encephalomyelitis virus
auacgcgcuugcac

SEQ ID NO: 3353584 - RNA, 17 nt, Western equine encephalomyelitis virus
cugucaagaacauccac

SEQ ID NO: 3353585 - RNA, 14 nt, Western equine encephalomyelitis virus
gccguaggcagcau

SEQ ID NO: 3353586 - RNA, 12 nt, Western equine encephalomyelitis virus
aacgaacacucg

SEQ ID NO: 3353587 - RNA, 18 nt, Western equine encephalomyelitis virus
aagacaguauggagaaaa

SEQ ID NO: 3353588 - RNA, 15 nt, Western equine encephalomyelitis virus
caaagcaagaagaga

SEQ ID NO: 3353589 - RNA, 21 nt, Western equine encephalomyelitis virus
gcguauaguauacggcaacac

SEQ ID NO: 3353590 - RNA, 19 nt, Western equine encephalomyelitis virus
caccaggcgacccacaugg

SEQ ID NO: 3353591 - RNA, 19 nt, Western equine encephalomyelitis virus
ccuguuagcucaauguccu

SEQ ID NO: 3353592 - RNA, 20 nt, Western equine encephalomyelitis virus
acuaaagcaaaacagugcau

SEQ ID NO: 3353593 - RNA, 16 nt, Western equine encephalomyelitis virus
caugcacaggccaggc

SEQ ID NO: 3353594 - RNA, 21 nt, Western equine encephalomyelitis virus
cacagaccacucagugcaagg

SEQ ID NO: 3353595 - RNA, 19 nt, Western equine encephalomyelitis virus
aaaauagcuaucagcacau

SEQ ID NO: 3353596 - RNA, 20 nt, Western equine encephalomyelitis virus
acauggauggccgcaugaga

SEQ ID NO: 3353597 - RNA, 20 nt, Western equine encephalomyelitis virus
cacaucgagcccacaagcaa

SEQ ID NO: 3353598 - RNA, 18 nt, Western equine encephalomyelitis virus
ugaccagucccuaccugg

SEQ ID NO: 3353599 - RNA, 22 nt, Western equine encephalomyelitis virus
agcugcacaguagcagacugca

SEQ ID NO: 3353600 - RNA, 17 nt, Western equine encephalomyelitis virus
cugugacagugagaaca

SEQ ID NO: 3353601 - RNA, 20 nt, Western equine encephalomyelitis virus
ugaagccuucugucaagaac

SEQ ID NO: 3353602 - RNA, 13 nt, Western equine encephalomyelitis virus
uguuuugaaggaa

SEQ ID NO: 3353603 - RNA, 22 nt, Western equine encephalomyelitis virus
aaguguggcgacuacagcacag

SEQ ID NO: 3353604 - RNA, 12 nt, Western equine encephalomyelitis virus
cacuauaucacu

SEQ ID NO: 3353605 - RNA, 19 nt, Western equine encephalomyelitis virus
aaguguacauuaaaccacc

SEQ ID NO: 3353606 - RNA, 23 nt, Western equine encephalomyelitis virus
uaugcggcaagaaguccaccugc

SEQ ID NO: 3353607 - RNA, 13 nt, Western equine encephalomyelitis virus
auaauuggagaac

SEQ ID NO: 3353608 - RNA, 12 nt, Western equine encephalomyelitis virus
cguugaaggaaa

SEQ ID NO: 3353609 - RNA, 19 nt, Western equine encephalomyelitis virus
gcacaguugugcauuccuc

SEQ ID NO: 3353610 - RNA, 23 nt, Western equine encephalomyelitis virus
gcgcagguuacgcgccacuuaac

SEQ ID NO: 3353611 - RNA, 17 nt, Western equine encephalomyelitis virus
ggcugcucaaaucgaag

SEQ ID NO: 3353612 - RNA, 12 nt, Western equine encephalomyelitis virus
acacuaaaacuc

SEQ ID NO: 3353613 - RNA, 22 nt, Western equine encephalomyelitis virus
gggcccaggagucggcaccagg

SEQ ID NO: 3353614 - RNA, 23 nt, Western equine encephalomyelitis virus
uccaaacccuccuaggcgccgcu

SEQ ID NO: 3353615 - RNA, 17 nt, Western equine encephalomyelitis virus
augaaauguggaagaac

SEQ ID NO: 3353616 - RNA, 15 nt, Western equine encephalomyelitis virus
cguaccgagaggagu

SEQ ID NO: 3353617 - RNA, 18 nt, Western equine encephalomyelitis virus
gcuucuacaacuggcacc

SEQ ID NO: 3353618 - RNA, 13 nt, Western equine encephalomyelitis virus
ggccaggcccaca

SEQ ID NO: 3353619 - RNA, 23 nt, Western equine encephalomyelitis virus
cauaaugcugugcagugucacau

SEQ ID NO: 3353620 - RNA, 20 nt, Western equine encephalomyelitis virus
caccagcgacaaaccaccgg

SEQ ID NO: 3353621 - RNA, 23 nt, Western equine encephalomyelitis virus
cguacggcgcuuucaguggucac

SEQ ID NO: 3353622 - RNA, 12 nt, Western equine encephalomyelitis virus
cccgcacugaca

SEQ ID NO: 3353623 - RNA, 16 nt, Western equine encephalomyelitis virus
aaucagacacgcugca

SEQ ID NO: 3353624 - RNA, 20 nt, Western equine encephalomyelitis virus
ccgaugacuucacacugacc

SEQ ID NO: 3353625 - RNA, 16 nt, Western equine encephalomyelitis virus
gcuuucaguggucacu

SEQ ID NO: 3353626 - RNA, 14 nt, Western equine encephalomyelitis virus
cugaaccgugguca

SEQ ID NO: 3353627 - RNA, 19 nt, Western equine encephalomyelitis virus
cgaccaugacaucaaggaa

SEQ ID NO: 3353628 - RNA, 14 nt, Western equine encephalomyelitis virus
agcagcaagccaag

SEQ ID NO: 3353629 - RNA, 18 nt, Western equine encephalomyelitis virus
ugggcgggaaaggcgaca

SEQ ID NO: 3353630 - RNA, 15 nt, Western equine encephalomyelitis virus
gaagagacugccuga

SEQ ID NO: 3353631 - RNA, 20 nt, Western equine encephalomyelitis virus
aggaggugcaaaugagggca

SEQ ID NO: 3353632 - RNA, 21 nt, Western equine encephalomyelitis virus
ccgaggaagcacagugcauaa

SEQ ID NO: 3353633 - RNA, 13 nt, Western equine encephalomyelitis virus
gcuccagacugca

SEQ ID NO: 3353634 - RNA, 16 nt, Western equine encephalomyelitis virus
gccacgcgccgcuuga

SEQ ID NO: 3353635 - RNA, 14 nt, Western equine encephalomyelitis virus
cuaucuggaggaag

SEQ ID NO: 3353636 - RNA, 14 nt, Western equine encephalomyelitis virus
cgccaaagaagaag

SEQ ID NO: 3353637 - RNA, 15 nt, Western equine encephalomyelitis virus
cagucgcacuaaaag

SEQ ID NO: 3353638 - RNA, 13 nt, Western equine encephalomyelitis virus
cggcauccagucu

SEQ ID NO: 3353639 - RNA, 14 nt, Western equine encephalomyelitis virus
ccaacauugcugac

SEQ ID NO: 3353640 - RNA, 17 nt, Western equine encephalomyelitis virus
caggacgaccccugcaa

SEQ ID NO: 3353641 - RNA, 14 nt, Western equine encephalomyelitis virus
agccuaaaaagaag

SEQ ID NO: 3353642 - RNA, 23 nt, Western equine encephalomyelitis virus
auaaguccuaucuggaggaagcg

SEQ ID NO: 3353643 - RNA, 22 nt, Western equine encephalomyelitis virus
acacugaccagucccuaccugg

SEQ ID NO: 3353644 - RNA, 16 nt, Western equine encephalomyelitis virus
acugccugacgccaua

SEQ ID NO: 3353645 - RNA, 14 nt, Western equine encephalomyelitis virus
acaacagaggcaga

SEQ ID NO: 3353646 - RNA, 22 nt, Western equine encephalomyelitis virus
acucgauguauuuccgaggaag

SEQ ID NO: 3353647 - RNA, 16 nt, Western equine encephalomyelitis virus
gaccacacaugugacu

SEQ ID NO: 3353648 - RNA, 16 nt, Western equine encephalomyelitis virus
acuacauauuaacaac

SEQ ID NO: 3353649 - RNA, 14 nt, Western equine encephalomyelitis virus
caagaggacgaaac

SEQ ID NO: 3353650 - RNA, 17 nt, Western equine encephalomyelitis virus
caaauuccacacaguca

SEQ ID NO: 3353651 - RNA, 22 nt, Western equine encephalomyelitis virus
gccggaucuuauuaggcacaca

SEQ ID NO: 3353652 - RNA, 21 nt, Western equine encephalomyelitis virus
gccggaucuuauuaggcacac

SEQ ID NO: 3353653 - RNA, 17 nt, Western equine encephalomyelitis virus
ugaugaaaccacuccac

SEQ ID NO: 3353654 - RNA, 15 nt, Western equine encephalomyelitis virus
ucacccuccaccuga

SEQ ID NO: 3353655 - RNA, 24 nt, Western equine encephalomyelitis virus
acgaucacuugaaggagacgucug

SEQ ID NO: 3353656 - RNA, 18 nt, Western equine encephalomyelitis virus
caggcgucugccugggga

SEQ ID NO: 3353657 - RNA, 15 nt, Western equine encephalomyelitis virus
gacauacggcugcug

SEQ ID NO: 3353658 - RNA, 22 nt, Western equine encephalomyelitis virus
gaugcagcuuuugugagaucau

SEQ ID NO: 3353659 - RNA, 21 nt, Western equine encephalomyelitis virus
caagaaguccaccugcaaugc

SEQ ID NO: 3353660 - RNA, 15 nt, Western equine encephalomyelitis virus
uugacacuaaaacuc

SEQ ID NO: 3353661 - RNA, 15 nt, Western equine encephalomyelitis virus
cugcuuuucaugcug

SEQ ID NO: 3353662 - RNA, 20 nt, Western equine encephalomyelitis virus
acgacacgcugcuggagaac

SEQ ID NO: 3353663 - RNA, 17 nt, Western equine encephalomyelitis virus
aaguucacacagcugcu

SEQ ID NO: 3353664 - RNA, 22 nt, Western equine encephalomyelitis virus
ugaaauguggaagaacaacuca

SEQ ID NO: 3353665 - RNA, 14 nt, Western equine encephalomyelitis virus
ggaacuggcugcuu

SEQ ID NO: 3353666 - RNA, 12 nt, Western equine encephalomyelitis virus
uacacacuuuau

SEQ ID NO: 3353667 - RNA, 15 nt, Western equine encephalomyelitis virus
gcucugaaagucggc

SEQ ID NO: 3353668 - RNA, 22 nt, Western equine encephalomyelitis virus
gcaucacccuccaccugacugc

SEQ ID NO: 3353669 - RNA, 23 nt, Western equine encephalomyelitis virus
auuuccgaggaagcacagugcau

SEQ ID NO: 3353670 - RNA, 13 nt, Western equine encephalomyelitis virus
cggccgaccacau

SEQ ID NO: 3353671 - RNA, 15 nt, Western equine encephalomyelitis virus
aagaagaagagugcu

SEQ ID NO: 3353672 - RNA, 22 nt, Western equine encephalomyelitis virus
cggaggaaggcugaugaaacca

SEQ ID NO: 3353673 - RNA, 16 nt, Western equine encephalomyelitis virus
ggaagcacagugcaua

SEQ ID NO: 3353674 - RNA, 16 nt, Western equine encephalomyelitis virus
cuggcugcuugcacug

SEQ ID NO: 3353675 - RNA, 21 nt, Western equine encephalomyelitis virus
ccgugaaauugaagaaggcua

SEQ ID NO: 3353676 - RNA, 14 nt, Western equine encephalomyelitis virus
gcuccuaagccaaa

SEQ ID NO: 3353677 - RNA, 16 nt, Western equine encephalomyelitis virus
cauauuaacaacacua

SEQ ID NO: 3353678 - RNA, 15 nt, Western equine encephalomyelitis virus
aaacauuuggagaaa

SEQ ID NO: 3353679 - RNA, 17 nt, Western equine encephalomyelitis virus
caauguccuccagguga

SEQ ID NO: 3353680 - RNA, 16 nt, Western equine encephalomyelitis virus
gcacaucgagcccaca

SEQ ID NO: 3353681 - RNA, 15 nt, Western equine encephalomyelitis virus
aaccuggagaucacg

SEQ ID NO: 3353682 - RNA, 20 nt, Western equine encephalomyelitis virus
acagcuguuuugaaggaagc

SEQ ID NO: 3353683 - RNA, 18 nt, Western equine encephalomyelitis virus
ucagcacaucuggacccu

SEQ ID NO: 3353684 - RNA, 20 nt, Western equine encephalomyelitis virus
uauggagcuaugaaaccagg

SEQ ID NO: 3353685 - RNA, 14 nt, Western equine encephalomyelitis virus
cacagucauuccuu

SEQ ID NO: 3353686 - RNA, 16 nt, Western equine encephalomyelitis virus
auuccauuccgcuuga

SEQ ID NO: 3353687 - RNA, 21 nt, Western equine encephalomyelitis virus
cguucggcgauauucaagcau

SEQ ID NO: 3353688 - RNA, 20 nt, Western equine encephalomyelitis virus
cgucugccuggggaagguag

SEQ ID NO: 3353689 - RNA, 20 nt, Western equine encephalomyelitis virus
accugcaaauuccacacagu

SEQ ID NO: 3353690 - RNA, 16 nt, Western equine encephalomyelitis virus
gucucuaauauacacu

SEQ ID NO: 3353691 - RNA, 14 nt, Western equine encephalomyelitis virus
ccuucugucaagaa

SEQ ID NO: 3353692 - RNA, 22 nt, Western equine encephalomyelitis virus
gucucuaauauacacuacacau

SEQ ID NO: 3353693 - RNA, 14 nt, Western equine encephalomyelitis virus
accaccuucuggca

SEQ ID NO: 3353694 - RNA, 11 nt, Western equine encephalomyelitis virus
uagagaggagu

SEQ ID NO: 3353695 - RNA, 13 nt, Western equine encephalomyelitis virus
ugagaucaucaga

SEQ ID NO: 3353696 - RNA, 20 nt, Western equine encephalomyelitis virus
caugcacaggccaggcccac

SEQ ID NO: 3353697 - RNA, 11 nt, Western equine encephalomyelitis virus
ccgagaggagu

SEQ ID NO: 3353698 - RNA, 22 nt, Western equine encephalomyelitis virus
uagucaacuugacuuucaaaca

SEQ ID NO: 3353699 - RNA, 15 nt, Western equine encephalomyelitis virus
cacaguugugcauuc

SEQ ID NO: 3353700 - RNA, 21 nt, Western equine encephalomyelitis virus
aguaucaggguaugaaaugug

SEQ ID NO: 3353701 - RNA, 18 nt, Western equine encephalomyelitis virus
cuuggaacuggcugcuug

SEQ ID NO: 3353702 - RNA, 16 nt, Western equine encephalomyelitis virus
aucagacacgcugcag

SEQ ID NO: 3353703 - RNA, 13 nt, Western equine encephalomyelitis virus
ccugcaaauucca

SEQ ID NO: 3353704 - RNA, 22 nt, Western equine encephalomyelitis virus
ugcaaugcgaccaacauugcug

SEQ ID NO: 3353705 - RNA, 22 nt, Western equine encephalomyelitis virus
cauuaaucguauaucacacuac

SEQ ID NO: 3353706 - RNA, 24 nt, Western equine encephalomyelitis virus
cauuaaucguauaucacacuacau

SEQ ID NO: 3353707 - RNA, 19 nt, Western equine encephalomyelitis virus
cgauguacuuccgaggaag

SEQ ID NO: 3353708 - RNA, 15 nt, Western equine encephalomyelitis virus
acacuaaaacucgau

SEQ ID NO: 3353709 - RNA, 21 nt, Western equine encephalomyelitis virus
cugaaacauuuggagaaacuu

SEQ ID NO: 3353710 - RNA, 22 nt, Western equine encephalomyelitis virus
cgccuucgaacaugcgaccacu

SEQ ID NO: 3353711 - RNA, 15 nt, Western equine encephalomyelitis virus
auuccuucaccacaa

SEQ ID NO: 3353712 - RNA, 17 nt, Western equine encephalomyelitis virus
cacagguaucgugagca

SEQ ID NO: 3353713 - RNA, 23 nt, Western equine encephalomyelitis virus
gaccacauaauuggagaaccaca

SEQ ID NO: 3353714 - RNA, 22 nt, Western equine encephalomyelitis virus
ucugcccguauugcagacacuc

SEQ ID NO: 3353715 - RNA, 15 nt, Western equine encephalomyelitis virus
guacauuaaaccacc

SEQ ID NO: 3353716 - RNA, 16 nt, Western equine encephalomyelitis virus
ggucacuuggaaccag

SEQ ID NO: 3353717 - RNA, 12 nt, Western equine encephalomyelitis virus
cgaggaagcgug

SEQ ID NO: 3353718 - RNA, 20 nt, Western equine encephalomyelitis virus
uaugaaauguggaagaacaa

SEQ ID NO: 3353719 - RNA, 14 nt, Western equine encephalomyelitis virus
uaacaacacuauau

SEQ ID NO: 3353720 - RNA, 17 nt, Western equine encephalomyelitis virus
ggguaaccaugaaccag

SEQ ID NO: 3353721 - RNA, 13 nt, Western equine encephalomyelitis virus
gcugcaugccuuu

SEQ ID NO: 3353722 - RNA, 16 nt, Western equine encephalomyelitis virus
guauaucacacuacau

SEQ ID NO: 3353723 - RNA, 13 nt, Western equine encephalomyelitis virus
ucacuugaaggag

SEQ ID NO: 3353724 - RNA, 17 nt, Western equine encephalomyelitis virus
agcaagaagagacugcc

SEQ ID NO: 3353725 - RNA, 16 nt, Western equine encephalomyelitis virus
augacaucaaggaaga

SEQ ID NO: 3353726 - RNA, 15 nt, Western equine encephalomyelitis virus
cagcagcuugcaucg

SEQ ID NO: 3353727 - RNA, 10 nt, Western equine encephalomyelitis virus
uggagaucac

SEQ ID NO: 3353728 - RNA, 16 nt, Western equine encephalomyelitis virus
gaagcguggugcauaa

SEQ ID NO: 3353729 - RNA, 16 nt, Western equine encephalomyelitis virus
agcgguaaaacucgau

SEQ ID NO: 3353730 - RNA, 18 nt, Western equine encephalomyelitis virus
uaacaacacuauaucacu

SEQ ID NO: 3353731 - RNA, 15 nt, Western equine encephalomyelitis virus
caaauguuccgggga

SEQ ID NO: 3353732 - RNA, 12 nt, Western equine encephalomyelitis virus
ugaagaaggcua

SEQ ID NO: 3353733 - RNA, 11 nt, Western equine encephalomyelitis virus
ccgcuggcugc

SEQ ID NO: 3353734 - RNA, 20 nt, Western equine encephalomyelitis virus
agacugcacuauagaucacg

SEQ ID NO: 3353735 - RNA, 18 nt, Western equine encephalomyelitis virus
gaagaugaacggcugcac

SEQ ID NO: 3353736 - RNA, 18 nt, Western equine encephalomyelitis virus
aauuacgacacgcugcug

SEQ ID NO: 3353737 - RNA, 19 nt, Western equine encephalomyelitis virus
gaggaagcacagugcauaa

SEQ ID NO: 3353738 - RNA, 20 nt, Western equine encephalomyelitis virus
cugacauagcgguaaaacuc

SEQ ID NO: 3353739 - RNA, 15 nt, Western equine encephalomyelitis virus
cguugucggaggaag

SEQ ID NO: 3353740 - RNA, 12 nt, Western equine encephalomyelitis virus
uuccgcugcuuu

SEQ ID NO: 3353741 - RNA, 16 nt, Western equine encephalomyelitis virus
agucggcaccaggcga

SEQ ID NO: 3353742 - RNA, 20 nt, Western equine encephalomyelitis virus
accaaccguuucucugggca

SEQ ID NO: 3353743 - RNA, 23 nt, Western equine encephalomyelitis virus
uagcggccgugaaauugaagaag

SEQ ID NO: 3353744 - RNA, 16 nt, Western equine encephalomyelitis virus
aguagcagacugcauu

SEQ ID NO: 3353745 - RNA, 19 nt, Western equine encephalomyelitis virus
cagcaagccaagaggacga

SEQ ID NO: 3353746 - RNA, 12 nt, Western equine encephalomyelitis virus
cacagucauucc

SEQ ID NO: 3353747 - RNA, 20 nt, Western equine encephalomyelitis virus
cucuaauauacacuacacau

SEQ ID NO: 3353748 - RNA, 20 nt, Western equine encephalomyelitis virus
ccaccaguuuacccuacaaa

SEQ ID NO: 3353749 - RNA, 14 nt, Western equine encephalomyelitis virus
uaaaaguucacaca

SEQ ID NO: 3353750 - RNA, 13 nt, Western equine encephalomyelitis virus
cacuugaaggaga

SEQ ID NO: 3353751 - RNA, 14 nt, Western equine encephalomyelitis virus
aacgcaagccuaaa

SEQ ID NO: 3353752 - RNA, 15 nt, Western equine encephalomyelitis virus
cccucgagugcaagg

SEQ ID NO: 3353753 - RNA, 17 nt, Western equine encephalomyelitis virus
ggcugcacuaaagcaaa

SEQ ID NO: 3353754 - RNA, 15 nt, Western equine encephalomyelitis virus
caugaaccagucaga

SEQ ID NO: 3353755 - RNA, 17 nt, Western equine encephalomyelitis virus
gacauagcgguaaaacu

SEQ ID NO: 3353756 - RNA, 14 nt, Western equine encephalomyelitis virus
cacuauacacacuu

SEQ ID NO: 3353757 - RNA, 19 nt, Western equine encephalomyelitis virus
cagucuacacugucauugu

SEQ ID NO: 3353758 - RNA, 16 nt, Western equine encephalomyelitis virus
agacaguauggagaaa

SEQ ID NO: 3353759 - RNA, 21 nt, Western equine encephalomyelitis virus
caccagcgacaaaccaccggg

SEQ ID NO: 3353760 - RNA, 19 nt, Western equine encephalomyelitis virus
cgcacuaaaaguucacaca

SEQ ID NO: 3353761 - RNA, 12 nt, Western equine encephalomyelitis virus
ucgaaugucacg

SEQ ID NO: 3353762 - RNA, 12 nt, Western equine encephalomyelitis virus
agaaccacauaa

SEQ ID NO: 3353763 - RNA, 18 nt, Western equine encephalomyelitis virus
gaggaagcguggugcaua

SEQ ID NO: 3353764 - RNA, 23 nt, Western equine encephalomyelitis virus
uggagaaaaagaucaggaggaag

SEQ ID NO: 3353765 - RNA, 14 nt, Western equine encephalomyelitis virus
aaacaucuuggaac

SEQ ID NO: 3353766 - RNA, 18 nt, Western equine encephalomyelitis virus
ggcaccaggcgacccaca

SEQ ID NO: 3353767 - RNA, 18 nt, Western equine encephalomyelitis virus
auguauuuccgaggaagc

SEQ ID NO: 3353768 - RNA, 21 nt, Western equine encephalomyelitis virus
gauguauuuccgaggaagcac

SEQ ID NO: 3353769 - RNA, 15 nt, Western equine encephalomyelitis virus
aucagcagcuugcau

SEQ ID NO: 3353770 - RNA, 20 nt, Western equine encephalomyelitis virus
agcaagaagagacugccuga

SEQ ID NO: 3353771 - RNA, 14 nt, Western equine encephalomyelitis virus
ugcaccgaacgcaa

SEQ ID NO: 3353772 - RNA, 13 nt, Western equine encephalomyelitis virus
aguccaccugcaa

SEQ ID NO: 3353773 - RNA, 12 nt, Western equine encephalomyelitis virus
aguucacacagc

SEQ ID NO: 3353774 - RNA, 21 nt, Western equine encephalomyelitis virus
acggcgcaguccaguaugaga

SEQ ID NO: 3353775 - RNA, 18 nt, Western equine encephalomyelitis virus
acaacagaggcagaguug

SEQ ID NO: 3353776 - RNA, 11 nt, Western equine encephalomyelitis virus
ccuaaaccagg

SEQ ID NO: 3353777 - RNA, 15 nt, Western equine encephalomyelitis virus
auagcgguaaaacuc

SEQ ID NO: 3353778 - RNA, 16 nt, Western equine encephalomyelitis virus
uucugucaagaacauc

SEQ ID NO: 3353779 - RNA, 16 nt, Western equine encephalomyelitis virus
aagaugaacggcugca

SEQ ID NO: 3353780 - RNA, 19 nt, Western equine encephalomyelitis virus
caguggucacuuggaacca

SEQ ID NO: 3353781 - RNA, 15 nt, Western equine encephalomyelitis virus
uucugucaagaacau

SEQ ID NO: 3353782 - RNA, 23 nt, Western equine encephalomyelitis virus
ccugcguugucggaggaaggcug

SEQ ID NO: 3353783 - RNA, 19 nt, Western equine encephalomyelitis virus
agguccaccgccaaagaag

SEQ ID NO: 3353784 - RNA, 15 nt, Western equine encephalomyelitis virus
uauacggcaacacca

SEQ ID NO: 3353785 - RNA, 21 nt, Western equine encephalomyelitis virus
guucccaugcgacaaaccacc

SEQ ID NO: 3353786 - RNA, 15 nt, Western equine encephalomyelitis virus
ccuacucagccuaaa

SEQ ID NO: 3353787 - RNA, 19 nt, Western equine encephalomyelitis virus
cagguccaccgccaaagaa

SEQ ID NO: 3353788 - RNA, 18 nt, Western equine encephalomyelitis virus
agggucuacauccaggaa

SEQ ID NO: 3353789 - RNA, 18 nt, Western equine encephalomyelitis virus
acgcugcuggagaacguc

SEQ ID NO: 3353790 - RNA, 21 nt, Western equine encephalomyelitis virus
acucagccuaaaaagaagaag

SEQ ID NO: 3353791 - RNA, 23 nt, Western equine encephalomyelitis virus
cugacagggagggacauugucca

SEQ ID NO: 3353792 - RNA, 11 nt, Western equine encephalomyelitis virus
cgccgccaggu

SEQ ID NO: 3353793 - RNA, 20 nt, Western equine encephalomyelitis virus
agcagacgcaacagcagaau

SEQ ID NO: 3353794 - RNA, 15 nt, Western equine encephalomyelitis virus
acauuuuagcacauc

SEQ ID NO: 3353795 - RNA, 13 nt, Western equine encephalomyelitis virus
cuugaaaugucca

SEQ ID NO: 3353796 - RNA, 15 nt, Western equine encephalomyelitis virus
gcugcugaagccuuc

SEQ ID NO: 3353797 - RNA, 18 nt, Western equine encephalomyelitis virus
uaccgaugacuucacacu

SEQ ID NO: 3353798 - RNA, 18 nt, Western equine encephalomyelitis virus
agaugaacggcugcacua

SEQ ID NO: 3353799 - RNA, 16 nt, Western equine encephalomyelitis virus
gcuguuuugaaggaag

SEQ ID NO: 3353800 - RNA, 11 nt, Western equine encephalomyelitis virus
uuggagaacca

SEQ ID NO: 3353801 - RNA, 23 nt, Western equine encephalomyelitis virus
uaaaccaccggccgaccacauaa

SEQ ID NO: 3353802 - RNA, 13 nt, Western equine encephalomyelitis virus
cccugaguaugga

SEQ ID NO: 3353803 - RNA, 15 nt, Western equine encephalomyelitis virus
cgauguauuuccgag

SEQ ID NO: 3353804 - RNA, 21 nt, Western equine encephalomyelitis virus
agccuaaaccagggaaacgac

SEQ ID NO: 3353805 - RNA, 13 nt, Western equine encephalomyelitis virus
aaguucacacagc

SEQ ID NO: 3353806 - RNA, 18 nt, Western equine encephalomyelitis virus
gaaggagacgucugccgg

SEQ ID NO: 3353807 - RNA, 18 nt, Western equine encephalomyelitis virus
cagcuguuuugaaggaag

SEQ ID NO: 3353808 - RNA, 17 nt, Western equine encephalomyelitis virus
gcugaauguaaaccacc

SEQ ID NO: 3353809 - RNA, 13 nt, Western equine encephalomyelitis virus
caucagaaagggg

SEQ ID NO: 3353810 - RNA, 11 nt, Western equine encephalomyelitis virus
ccgaggaagca

SEQ ID NO: 3353811 - RNA, 18 nt, Western equine encephalomyelitis virus
acagucauuccuucacca

SEQ ID NO: 3353812 - RNA, 12 nt, Western equine encephalomyelitis virus
cacuacacauau

SEQ ID NO: 3353813 - RNA, 14 nt, Western equine encephalomyelitis virus
gaucacgcagucgc

SEQ ID NO: 3353814 - RNA, 17 nt, Western equine encephalomyelitis virus
acgccagaacgaacacu

SEQ ID NO: 3353815 - RNA, 23 nt, Western equine encephalomyelitis virus
aacgagaaaauuggggcugcgag

SEQ ID NO: 3353816 - RNA, 14 nt, Western equine encephalomyelitis virus
uccgcuugacaccg

SEQ ID NO: 3353817 - RNA, 21 nt, Western equine encephalomyelitis virus
gaagccuucugucaagaacau

SEQ ID NO: 3353818 - RNA, 18 nt, Western equine encephalomyelitis virus
uauggagcuaugaaacca

SEQ ID NO: 3353819 - RNA, 20 nt, Western equine encephalomyelitis virus
acugagcgcggacacugaca

SEQ ID NO: 3353820 - RNA, 21 nt, Western equine encephalomyelitis virus
cccgugugcuauucacugacg

SEQ ID NO: 3353821 - RNA, 20 nt, Western equine encephalomyelitis virus
agguucugaaccguggucac

SEQ ID NO: 3353822 - RNA, 21 nt, Western equine encephalomyelitis virus
agcucaauguccuccagguga

SEQ ID NO: 3353823 - RNA, 15 nt, Western equine encephalomyelitis virus
agcaaaacagugcau

SEQ ID NO: 3353824 - RNA, 17 nt, Western equine encephalomyelitis virus
gcacugcggaugucacc

SEQ ID NO: 3353825 - RNA, 23 nt, Western equine encephalomyelitis virus
gugaccugcaaauuccacacagu

SEQ ID NO: 3353826 - RNA, 18 nt, Western equine encephalomyelitis virus
aaggcugaugaaaccacu

SEQ ID NO: 3353827 - RNA, 22 nt, Western equine encephalomyelitis virus
accaccuucuggcaagaacguc

SEQ ID NO: 3353828 - RNA, 14 nt, Western equine encephalomyelitis virus
auuaggcacacaga

SEQ ID NO: 3353829 - RNA, 22 nt, Western equine encephalomyelitis virus
accaugaaccagucagagucug

SEQ ID NO: 3353830 - RNA, 21 nt, Western equine encephalomyelitis virus
caaugcugaauguaaaccacc

SEQ ID NO: 3353831 - RNA, 15 nt, Western equine encephalomyelitis virus
acuuccgaggaagcg

SEQ ID NO: 3353832 - RNA, 17 nt, Western equine encephalomyelitis virus
auauuaacaacacuaua

SEQ ID NO: 3353833 - RNA, 18 nt, Western equine encephalomyelitis virus
auuacaguacaaagcuga

SEQ ID NO: 3353834 - RNA, 17 nt, Western equine encephalomyelitis virus
ccugcaagaaacagcac

SEQ ID NO: 3353835 - RNA, 15 nt, Western equine encephalomyelitis virus
agccuaaaccaggga

SEQ ID NO: 3353836 - RNA, 21 nt, Western equine encephalomyelitis virus
uccucaaaggcggauuacaca

SEQ ID NO: 3353837 - RNA, 22 nt, Western equine encephalomyelitis virus
ugaagccuucugucaagaacau

SEQ ID NO: 3353838 - RNA, 23 nt, Western equine encephalomyelitis virus
cauauuuuacuuaaaaacacuau

SEQ ID NO: 3353839 - RNA, 17 nt, Western equine encephalomyelitis virus
agccuaaaaagaagaag

SEQ ID NO: 3353840 - RNA, 13 nt, Western equine encephalomyelitis virus
aaguccaccugca

SEQ ID NO: 3353841 - RNA, 22 nt, Western equine encephalomyelitis virus
aagaugaacggcugcacuaaag

SEQ ID NO: 3353842 - RNA, 18 nt, Western equine encephalomyelitis virus
cacuacauuuuagcacau

SEQ ID NO: 3353843 - RNA, 14 nt, Western equine encephalomyelitis virus
agcgucuaacugug

SEQ ID NO: 3353844 - RNA, 18 nt, Western equine encephalomyelitis virus
agcuguuuugaaggaagc

SEQ ID NO: 3353845 - RNA, 19 nt, Western equine encephalomyelitis virus
cacagugcauaaugcugug

SEQ ID NO: 3353846 - RNA, 12 nt, Western equine encephalomyelitis virus
ccaagaauucca

SEQ ID NO: 3353847 - RNA, 14 nt, Western equine encephalomyelitis virus
ggcagcauaacacu

SEQ ID NO: 3353848 - RNA, 20 nt, Western equine encephalomyelitis virus
ccgaggaagcguggugcaua

SEQ ID NO: 3353849 - RNA, 15 nt, Western equine encephalomyelitis virus
guggucacuuggaac

SEQ ID NO: 3353850 - RNA, 15 nt, Western equine encephalomyelitis virus
ugcacauuccauucc

SEQ ID NO: 3353851 - RNA, 17 nt, Western equine encephalomyelitis virus
gaaauguggaagaacaa

SEQ ID NO: 3353852 - RNA, 21 nt, Western equine encephalomyelitis virus
ccuggauacguuugucaaugg

SEQ ID NO: 3353853 - RNA, 22 nt, Western equine encephalomyelitis virus
auaaguccuaucuggaggaagc

SEQ ID NO: 3353854 - RNA, 17 nt, Western equine encephalomyelitis virus
ggaggugcaaaugaggg

SEQ ID NO: 3353855 - RNA, 13 nt, Western equine encephalomyelitis virus
cgucacgccaggu

SEQ ID NO: 3353856 - RNA, 22 nt, Human
acgccagacuucccacggcucc

SEQ ID NO: 3353857 - RNA, 16 nt, Human
acgccagacuucccac

SEQ ID NO: 3353858 - RNA, 11 nt, Human
acacugccagc

SEQ ID NO: 3353859 - RNA, 15 nt, Human
acagguuagcugcuc

SEQ ID NO: 3353860 - RNA, 15 nt, Human
accccgacuuuuguu

SEQ ID NO: 3353861 - RNA, 12 nt, Human
accccgacuuuu

SEQ ID NO: 3353862 - RNA, 14 nt, Human
agacgggcccuggu

SEQ ID NO: 3353863 - RNA, 16 nt, Human
agaggguguccugcac

SEQ ID NO: 3353864 - RNA, 23 nt, Human
aggugcuucuaguucugccagga

SEQ ID NO: 3353865 - RNA, 22 nt, Human
aggugcuucuaguucugccagg

SEQ ID NO: 3353866 - RNA, 21 nt, Human
aggugcuucuaguucugccag

SEQ ID NO: 3353867 - RNA, 15 nt, Human
cuuccucuccugucu

SEQ ID NO: 3353868 - RNA, 16 nt, Human
gagacgggcccuggug

SEQ ID NO: 3353869 - RNA, 20 nt, Human
gacccucaucuuucuuccaa

SEQ ID NO: 3353870 - RNA, 21 nt, Human
gcauccagagucccugccugg

SEQ ID NO: 3353871 - RNA, 23 nt, Human
gcauccagagucccugccuggac

SEQ ID NO: 3353872 - RNA, 22 nt, Human
gcauccagagucccugccugga

SEQ ID NO: 3353873 - RNA, 17 nt, Human
gcaucggggagccggga

SEQ ID NO: 3353874 - RNA, 19 nt, Human
gaucccaacacugccagca

SEQ ID NO: 3353875 - RNA, 18 nt, Human
gaucccaacacugccagc

SEQ ID NO: 3353876 - RNA, 17 nt, Human
gaucccaacacugccag

SEQ ID NO: 3353877 - RNA, 16 nt, Human
gaucccaacacugcca

SEQ ID NO: 3353878 - RNA, 23 nt, Human
ggcaucggggagccgggagccug

SEQ ID NO: 3353879 - RNA, 22 nt, Human
ggcaucggggagccgggagccu

SEQ ID NO: 3353880 - RNA, 16 nt, Human
ggcauccagagucccu

SEQ ID NO: 3353881 - RNA, 14 nt, Human
ggcaggagggaggu

SEQ ID NO: 3353882 - RNA, 12 nt, Human
ggcaggggccgg

SEQ ID NO: 3353883 - RNA, 14 nt, Human
ggagggggagaggg

SEQ ID NO: 3353884 - RNA, 22 nt, Human
gggggcagucugagagaggcca

SEQ ID NO: 3353885 - RNA, 21 nt, Human
ggguguccugcaccggggccu

SEQ ID NO: 3353886 - RNA, 17 nt, Human
ggguguccugcaccggg

SEQ ID NO: 3353887 - RNA, 22 nt, Human
gguggggggggggcgcggcugg

SEQ ID NO: 3353888 - RNA, 18 nt, Human
gcuaggguggggagagac

SEQ ID NO: 3353889 - RNA, 17 nt, Human
gcuaggguggggagaga

SEQ ID NO: 3353890 - RNA, 19 nt, Human
gcucagaggguguccugca

SEQ ID NO: 3353891 - RNA, 18 nt, Human
gcucagaggguguccugc

SEQ ID NO: 3353892 - RNA, 21 nt, Human
gcguggaacucgugucuggca

SEQ ID NO: 3353893 - RNA, 12 nt, Human
gccauucuuucc

SEQ ID NO: 3353894 - RNA, 19 nt, Human
gccauucuuucccaacacc

SEQ ID NO: 3353895 - RNA, 16 nt, Human
ggacaccuaggcuagg

SEQ ID NO: 3353896 - RNA, 16 nt, Human
ggacaccccgacuuuu

SEQ ID NO: 3353897 - RNA, 17 nt, Human
cagaggguguccugcac

SEQ ID NO: 3353898 - RNA, 13 nt, Human
cacuggggcaggg

SEQ ID NO: 3353899 - RNA, 15 nt, Human
cacuggggcaggggc

SEQ ID NO: 3353900 - RNA, 18 nt, Human
caacaccucuuggggagu

SEQ ID NO: 3353901 - RNA, 15 nt, Human
cucgugucuggcaca

SEQ ID NO: 3353902 - RNA, 14 nt, Human
cucaugugacucuu

SEQ ID NO: 3353903 - RNA, 18 nt, Human
cucaugugacucuuucca

SEQ ID NO: 3353904 - RNA, 13 nt, Human
cugagagaggcca

SEQ ID NO: 3353905 - RNA, 22 nt, Human
cugagagaggccauucuuuccc

SEQ ID NO: 3353906 - RNA, 21 nt, Human
cugagagaggccauucuuucc

SEQ ID NO: 3353907 - RNA, 14 nt, Human
cugagagaggccau

SEQ ID NO: 3353908 - RNA, 15 nt, Human
guccaucagccucca

SEQ ID NO: 3353909 - RNA, 22 nt, Human
gucccgggacaccuaggcuagg

SEQ ID NO: 3353910 - RNA, 16 nt, Human
acaccucuuggggagu

SEQ ID NO: 3353911 - RNA, 18 nt, Human
uccugcaccggggccugg

SEQ ID NO: 3353912 - RNA, 19 nt, Human
ucaugugacucuuuccaac

SEQ ID NO: 3353913 - RNA, 18 nt, Human
ucaugugacucuuuccaa

SEQ ID NO: 3353914 - RNA, 17 nt, Human
ucaugugacucuuucca

SEQ ID NO: 3353915 - RNA, 14 nt, Human
ucaugugacucuuu

SEQ ID NO: 3353916 - RNA, 17 nt, Human
accuaggcuaggguggg

SEQ ID NO: 3353917 - RNA, 12 nt, Human
accuaggcuagg

SEQ ID NO: 3353918 - RNA, 13 nt, Human
accgaggcaggga

SEQ ID NO: 3353919 - RNA, 14 nt, Human
ucuaguucugccag

SEQ ID NO: 3353920 - RNA, 17 nt, Human
ucuaguucugccaggag

SEQ ID NO: 3353921 - RNA, 16 nt, Human
ucuaguucugccagga

SEQ ID NO: 3353922 - RNA, 15 nt, Human
ucuaguucugccagg

SEQ ID NO: 3353923 - RNA, 13 nt, Human
ugagagaggccau

SEQ ID NO: 3353924 - RNA, 16 nt, Human
uuuuguuuaccagaga

SEQ ID NO: 3353925 - RNA, 20 nt, Human
auuucccuuccuuccucucc

SEQ ID NO: 3353926 - RNA, 16 nt, Human
aucggggagccgggag

SEQ ID NO: 3353927 - RNA, 18 nt, Human
aucggggagccgggagcc

SEQ ID NO: 3353928 - RNA, 20 nt, Human
uugucacgccagacuuccca

SEQ ID NO: 3353929 - RNA, 13 nt, Human
uugucacgccaga

SEQ ID NO: 3353930 - RNA, 22 nt, Human
uuguccucagccccgcguggaa

SEQ ID NO: 3353931 - RNA, 19 nt, Human
aggccauucuuucccaaca

SEQ ID NO: 3353932 - RNA, 18 nt, Human
aggccauucuuucccaac

SEQ ID NO: 3353933 - RNA, 17 nt, Human
aggccauucuuucccaa

SEQ ID NO: 3353934 - RNA, 15 nt, Human
aggccauucuuuccc

SEQ ID NO: 3353935 - RNA, 13 nt, Human
ugcuccccacguc

SEQ ID NO: 3353936 - RNA, 22 nt, Human
uggaccagccucuccacucaug

SEQ ID NO: 3353937 - RNA, 16 nt, Human
uggaccagccucucca

SEQ ID NO: 3353938 - RNA, 14 nt, Human
aguccaucagccuc

SEQ ID NO: 3353939 - RNA, 13 nt, Human
aguccaucagccu

SEQ ID NO: 3353940 - RNA, 12 nt, Human
caacacugccag

SEQ ID NO: 3353941 - RNA, 14 nt, Human
caacacugccagca

SEQ ID NO: 3353942 - RNA, 13 nt, Human
caacacugccagc

SEQ ID NO: 3353943 - RNA, 22 nt, Human
caaccggcuuuguggcacuggg

SEQ ID NO: 3353944 - RNA, 13 nt, Human
caaccggcuuugu

SEQ ID NO: 3353945 - RNA, 23 nt, Human
caggagacagguuagcugcuccc

SEQ ID NO: 3353946 - RNA, 21 nt, Human
caggcaucggggagccgggag

SEQ ID NO: 3353947 - RNA, 20 nt, Human
caggcaucggggagccggga

SEQ ID NO: 3353948 - RNA, 18 nt, Human
cagggaaggaucccauga

SEQ ID NO: 3353949 - RNA, 13 nt, Human
cagggaaggaucc

SEQ ID NO: 3353950 - RNA, 11 nt, Human
caggcucagag

SEQ ID NO: 3353951 - RNA, 15 nt, Human
caggcucagagggug

SEQ ID NO: 3353952 - RNA, 23 nt, Human
cagccucuccacucaugugacuc

SEQ ID NO: 3353953 - RNA, 23 nt, Human
cagccuggcuguggccuaaccug

SEQ ID NO: 3353954 - RNA, 21 nt, Human
cagccuccauccuacccccug

SEQ ID NO: 3353955 - RNA, 18 nt, Human
cagccuccauccuacccc

SEQ ID NO: 3353956 - RNA, 18 nt, Human
caggaaccgaggcaggga

SEQ ID NO: 3353957 - RNA, 17 nt, Human
caggaaccgaggcaggg

SEQ ID NO: 3353958 - RNA, 15 nt, Human
caggaaccgaggcag

SEQ ID NO: 3353959 - RNA, 15 nt, Human
cagcauuucccuucc

SEQ ID NO: 3353960 - RNA, 18 nt, Human
cagagucccugccuggac

SEQ ID NO: 3353961 - RNA, 14 nt, Human
cagagucccugccu

SEQ ID NO: 3353962 - RNA, 12 nt, Human
cagagaaaaagg

SEQ ID NO: 3353963 - RNA, 18 nt, Human
cagagaaaaagggagggg

SEQ ID NO: 3353964 - RNA, 17 nt, Human
cagagaaaaagggaggg

SEQ ID NO: 3353965 - RNA, 22 nt, Human
cagacuucccacggcuccucga

SEQ ID NO: 3353966 - RNA, 12 nt, Human
cagacuucccac

SEQ ID NO: 3353967 - RNA, 22 nt, Human
cacucaugugacucuuuccaac

SEQ ID NO: 3353968 - RNA, 16 nt, Human
cacucaugugacucuu

SEQ ID NO: 3353969 - RNA, 22 nt, Human
cacggcuccucgagaucccaac

SEQ ID NO: 3353970 - RNA, 20 nt, Human
cacggcuccucgagauccca

SEQ ID NO: 3353971 - RNA, 22 nt, Human
caccggggccugggcaggaggg

SEQ ID NO: 3353972 - RNA, 21 nt, Human
caccggggccugggcaggagg

SEQ ID NO: 3353973 - RNA, 14 nt, Human
caccggggccuggg

SEQ ID NO: 3353974 - RNA, 19 nt, Human
ggagacagguuagcugcuc

SEQ ID NO: 3353975 - RNA, 12 nt, Human
ggaccagccucu

SEQ ID NO: 3353976 - RNA, 14 nt, Human
ggagggcaggcauc

SEQ ID NO: 3353977 - RNA, 21 nt, Human
ggagcucaggaaccgaggcag

SEQ ID NO: 3353978 - RNA, 14 nt, Human
gggacaccuaggcu

SEQ ID NO: 3353979 - RNA, 16 nt, Human
gggaggagggcaggca

SEQ ID NO: 3353980 - RNA, 12 nt, Human
gggaggagggca

SEQ ID NO: 3353981 - RNA, 23 nt, Human
gggagcucaggaaccgaggcagg

SEQ ID NO: 3353982 - RNA, 22 nt, Human
gggagcucaggaaccgaggcag

SEQ ID NO: 3353983 - RNA, 12 nt, Human
gggagcucagga

SEQ ID NO: 3353984 - RNA, 13 nt, Human
gggagccgggagc

SEQ ID NO: 3353985 - RNA, 23 nt, Human
ggcuguggcauccagagucccug

SEQ ID NO: 3353986 - RNA, 21 nt, Human
ggcuguggcauccagaguccc

SEQ ID NO: 3353987 - RNA, 13 nt, Human
ggcugggaggagg

SEQ ID NO: 3353988 - RNA, 21 nt, Human
ggcugggaggagggcaggcau

SEQ ID NO: 3353989 - RNA, 20 nt, Human
ggcugggaggagggcaggca

SEQ ID NO: 3353990 - RNA, 19 nt, Human
ggccugggcaggagggagg

SEQ ID NO: 3353991 - RNA, 17 nt, Human
ggccugggcaggaggga

SEQ ID NO: 3353992 - RNA, 15 nt, Human
ggccugggcaggagg

SEQ ID NO: 3353993 - RNA, 16 nt, Human
ggccuaaccugccgag

SEQ ID NO: 3353994 - RNA, 15 nt, Human
ggccuaaccugccga

SEQ ID NO: 3353995 - RNA, 16 nt, Human
gccuggaccagccucu

SEQ ID NO: 3353996 - RNA, 17 nt, Human
gccuggaccagccucuc

SEQ ID NO: 3353997 - RNA, 16 nt, Human
gccugggcaggaggga

SEQ ID NO: 3353998 - RNA, 17 nt, Human
gccuugucacgccagac

SEQ ID NO: 3353999 - RNA, 16 nt, Human
gccuugucacgccaga

SEQ ID NO: 3354000 - RNA, 15 nt, Human
gccuugucacgccag

SEQ ID NO: 3354001 - RNA, 17 nt, Human
gcgaagcguuguccuca

SEQ ID NO: 3354002 - RNA, 21 nt, Human
gcuccuuaaggcucuuuugua

SEQ ID NO: 3354003 - RNA, 17 nt, Human
gcuccuuaaggcucuuu

SEQ ID NO: 3354004 - RNA, 15 nt, Human
gcuccuuaaggcucu

SEQ ID NO: 3354005 - RNA, 19 nt, Human
gcugggaggagggcaggca

SEQ ID NO: 3354006 - RNA, 21 nt, Human
gcugggaggagggcaggcauc

SEQ ID NO: 3354007 - RNA, 20 nt, Human
gcuguggccuaaccugccga

SEQ ID NO: 3354008 - RNA, 19 nt, Human
gcuguggccuaaccugccg

SEQ ID NO: 3354009 - RNA, 22 nt, Human
gcaggcaucggggagccgggag

SEQ ID NO: 3354010 - RNA, 21 nt, Human
gcaggcaucggggagccggga

SEQ ID NO: 3354011 - RNA, 23 nt, Human
gcaggcaucggggagccgggagc

SEQ ID NO: 3354012 - RNA, 16 nt, Human
gccaccugaauaaaga

SEQ ID NO: 3354013 - RNA, 15 nt, Human
gaggagggcaggcau

SEQ ID NO: 3354014 - RNA, 14 nt, Human
gaggagggcaggca

SEQ ID NO: 3354015 - RNA, 13 nt, Human
gaggagggcaggc

SEQ ID NO: 3354016 - RNA, 22 nt, Human
gagcucaggaaccgaggcaggg

SEQ ID NO: 3354017 - RNA, 23 nt, Human
gagcucaggaaccgaggcaggga

SEQ ID NO: 3354018 - RNA, 15 nt, Human
gagucccugccugga

SEQ ID NO: 3354019 - RNA, 14 nt, Human
gagucccugccugg

SEQ ID NO: 3354020 - RNA, 16 nt, Human
gagucccugccuggac

SEQ ID NO: 3354021 - RNA, 20 nt, Human
cucugcccgggagcucagga

SEQ ID NO: 3354022 - RNA, 14 nt, Human
cucugcccgggagc

SEQ ID NO: 3354023 - RNA, 17 nt, Human
cugccuggaccagccuc

SEQ ID NO: 3354024 - RNA, 13 nt, Human
cucgagaucccaa

SEQ ID NO: 3354025 - RNA, 23 nt, Human
cucgagaucccaacacugccagc

SEQ ID NO: 3354026 - RNA, 22 nt, Human
cucgagaucccaacacugccag

SEQ ID NO: 3354027 - RNA, 21 nt, Human
cucgagaucccaacacugcca

SEQ ID NO: 3354028 - RNA, 17 nt, Human
gaauaaagaaugaaugg

SEQ ID NO: 3354029 - RNA, 19 nt, Human
gaaggaucccaugagcucc

SEQ ID NO: 3354030 - RNA, 17 nt, Human
cuuucccaacaccucuu

SEQ ID NO: 3354031 - RNA, 13 nt, Human
cuuucccaacacc

SEQ ID NO: 3354032 - RNA, 19 nt, Human
cuuccaaacaggcucagag

SEQ ID NO: 3354033 - RNA, 15 nt, Human
cuuaaggcucuuuug

SEQ ID NO: 3354034 - RNA, 18 nt, Human
cuguggccuaaccugccg

SEQ ID NO: 3354035 - RNA, 22 nt, Human
cuggugguggcucgggaggcga

SEQ ID NO: 3354036 - RNA, 14 nt, Human
cuggugguggcucg

SEQ ID NO: 3354037 - RNA, 19 nt, Human
ccgggacaccuaggcuagg

SEQ ID NO: 3354038 - RNA, 20 nt, Human
ccgggacaccuaggcuaggg

SEQ ID NO: 3354039 - RNA, 15 nt, Human
ccgaggcagggaagg

SEQ ID NO: 3354040 - RNA, 16 nt, Human
ccuaggcuaggguggg

SEQ ID NO: 3354041 - RNA, 18 nt, Human
ccucuccacucaugugac

SEQ ID NO: 3354042 - RNA, 18 nt, Human
ccuugucacgccagacuu

SEQ ID NO: 3354043 - RNA, 15 nt, Human
ccuugucacgccaga

SEQ ID NO: 3354044 - RNA, 13 nt, Human
ccuuaaggcucuu

SEQ ID NO: 3354045 - RNA, 18 nt, Human
ccuuaaggcucuuuugua

SEQ ID NO: 3354046 - RNA, 16 nt, Human
ccuuaaggcucuuuug

SEQ ID NO: 3354047 - RNA, 22 nt, Human
cgagaucccaacacugccagca

SEQ ID NO: 3354048 - RNA, 13 nt, Human
cgagaucccaaca

SEQ ID NO: 3354049 - RNA, 21 nt, Human
cgagaucccaacacugccagc

SEQ ID NO: 3354050 - RNA, 15 nt, Human
cgagaucccaacacu

SEQ ID NO: 3354051 - RNA, 12 nt, Human
ccugggcaggag

SEQ ID NO: 3354052 - RNA, 14 nt, Human
ccugggcaggaggg

SEQ ID NO: 3354053 - RNA, 17 nt, Human
ccauccuacccccugug

SEQ ID NO: 3354054 - RNA, 18 nt, Human
ccauccuacccccugugc

SEQ ID NO: 3354055 - RNA, 13 nt, Human
ccaggagacaggu

SEQ ID NO: 3354056 - RNA, 21 nt, Human
ccagcauuucccuuccuuccu

SEQ ID NO: 3354057 - RNA, 16 nt, Human
ccagcauuucccuucc

SEQ ID NO: 3354058 - RNA, 20 nt, Human
ccaccugaauaaagaaugaa

SEQ ID NO: 3354059 - RNA, 19 nt, Human
ccacucaugugacucuuuc

SEQ ID NO: 3354060 - RNA, 22 nt, Human
ccacucaugugacucuuuccaa

SEQ ID NO: 3354061 - RNA, 23 nt, Human
caugagcuccuuaaggcucuuuu

SEQ ID NO: 3354062 - RNA, 18 nt, Human
cauccuacccccugugcc

SEQ ID NO: 3354063 - RNA, 15 nt, Human
cauccuacccccugu

SEQ ID NO: 3354064 - RNA, 20 nt, Human
cauccagagucccugccugg

SEQ ID NO: 3354065 - RNA, 18 nt, Human
cauccagagucccugccu

SEQ ID NO: 3354066 - RNA, 17 nt, Human
cauccagagucccugcc

SEQ ID NO: 3354067 - RNA, 13 nt, Human
cauccagaguccc

SEQ ID NO: 3354068 - RNA, 14 nt, Human
caugugacucuuuc

SEQ ID NO: 3354069 - RNA, 17 nt, Human
caugugacucuuuccaa

SEQ ID NO: 3354070 - RNA, 16 nt, Human
caugugacucuuucca

SEQ ID NO: 3354071 - RNA, 12 nt, Human
cauucuuuccca

SEQ ID NO: 3354072 - RNA, 14 nt, Human
cauucuuucccaac

SEQ ID NO: 3354073 - RNA, 19 nt, Human
uuuccaaccggcuuugugg

SEQ ID NO: 3354074 - RNA, 18 nt, Human
ugggaggagggcaggcau

SEQ ID NO: 3354075 - RNA, 17 nt, Human
ugggaggagggcaggca

SEQ ID NO: 3354076 - RNA, 14 nt, Human
ugggaggagggcag

SEQ ID NO: 3354077 - RNA, 23 nt, Human
uggccuaaccugccgagagucca

SEQ ID NO: 3354078 - RNA, 16 nt, Human
uggccuaaccugccga

SEQ ID NO: 3354079 - RNA, 18 nt, Human
uguccugcaccggggccu

SEQ ID NO: 3354080 - RNA, 13 nt, Human
uguccucagcccc

SEQ ID NO: 3354081 - RNA, 21 nt, Human
ugacccucaucuuucuuccaa

SEQ ID NO: 3354082 - RNA, 17 nt, Human
ugcccgggagcucagga

SEQ ID NO: 3354083 - RNA, 18 nt, Human
ugcccgggagcucaggaa

SEQ ID NO: 3354084 - RNA, 18 nt, Human
ugauuuuuaugccaccug

SEQ ID NO: 3354085 - RNA, 21 nt, Human
ucgugucuggcacagccuggc

SEQ ID NO: 3354086 - RNA, 14 nt, Human
ucgugucuggcaca

SEQ ID NO: 3354087 - RNA, 19 nt, Human
ucccuuccuuccucuccug

SEQ ID NO: 3354088 - RNA, 16 nt, Human
ucccuuccuuccucuc

SEQ ID NO: 3354089 - RNA, 13 nt, Human
ucccugccuggac

SEQ ID NO: 3354090 - RNA, 21 nt, Human
ucccgggacaccuaggcuagg

SEQ ID NO: 3354091 - RNA, 16 nt, Human
ucccuccucugcccgg

SEQ ID NO: 3354092 - RNA, 15 nt, Human
ucugccaggagacag

SEQ ID NO: 3354093 - RNA, 19 nt, Human
ucagaggguguccugcacc

SEQ ID NO: 3354094 - RNA, 19 nt, Human
cuuccucuccugucucccu

SEQ ID NO: 3354095 - RNA, 19 nt, Human
cuucuaguucugccaggag

SEQ ID NO: 3354096 - RNA, 16 nt, Human
cuucuaguucugccag

SEQ ID NO: 3354097 - RNA, 18 nt, Human
cuucuaguucugccagga

SEQ ID NO: 3354098 - RNA, 17 nt, Human
cuucuaguucugccagg

SEQ ID NO: 3354099 - RNA, 20 nt, Human
cugugccuugucacgccaga

SEQ ID NO: 3354100 - RNA, 18 nt, Human
gcauuucccuuccuuccu

SEQ ID NO: 3354101 - RNA, 19 nt, Human
gacccucaucuuucuucca

SEQ ID NO: 3354102 - RNA, 15 nt, Human
gacccucaucuuucu

SEQ ID NO: 3354103 - RNA, 15 nt, Human
ggcacuggggcaggg

SEQ ID NO: 3354104 - RNA, 20 nt, Human
ggcucagaggguguccugca

SEQ ID NO: 3354105 - RNA, 22 nt, Human
gggacaccuaggcuaggguggg

SEQ ID NO: 3354106 - RNA, 17 nt, Human
ggggccgggggcagucu

SEQ ID NO: 3354107 - RNA, 18 nt, Human
gggggcgcggcugggagg

SEQ ID NO: 3354108 - RNA, 18 nt, Human
ggguggggagagacgggc

SEQ ID NO: 3354109 - RNA, 14 nt, Human
ggguggggagagac

SEQ ID NO: 3354110 - RNA, 13 nt, Human
ggguggggagaga

SEQ ID NO: 3354111 - RNA, 22 nt, Human
ggugcuucuaguucugccagga

SEQ ID NO: 3354112 - RNA, 21 nt, Human
ggugcuucuaguucugccagg

SEQ ID NO: 3354113 - RNA, 19 nt, Human
gcucaggaaccgaggcagg

SEQ ID NO: 3354114 - RNA, 16 nt, Human
gcucaggaaccgaggc

SEQ ID NO: 3354115 - RNA, 21 nt, Human
gcucaggaaccgaggcaggga

SEQ ID NO: 3354116 - RNA, 20 nt, Human
gcucaggaaccgaggcaggg

SEQ ID NO: 3354117 - RNA, 23 nt, Human
gccuccauccuacccccugugcc

SEQ ID NO: 3354118 - RNA, 17 nt, Human
gcuucuaguucugccag

SEQ ID NO: 3354119 - RNA, 16 nt, Human
gcuucuaguucugcca

SEQ ID NO: 3354120 - RNA, 18 nt, Human
cugacccucaucuuucuu

SEQ ID NO: 3354121 - RNA, 16 nt, Human
cuaguucugccaggag

SEQ ID NO: 3354122 - RNA, 15 nt, Human
cuaguucugccagga

SEQ ID NO: 3354123 - RNA, 14 nt, Human
cuaguucugccagg

SEQ ID NO: 3354124 - RNA, 15 nt, Human
cuaggguggggagag

SEQ ID NO: 3354125 - RNA, 13 nt, Human
cuaguucugccag

SEQ ID NO: 3354126 - RNA, 15 nt, Human
cuaggcuaggguggg

SEQ ID NO: 3354127 - RNA, 12 nt, Human
ccauucuuuccc

SEQ ID NO: 3354128 - RNA, 20 nt, Human
ccauucuuucccaacaccuc

SEQ ID NO: 3354129 - RNA, 14 nt, Human
ccauucuuucccaa

SEQ ID NO: 3354130 - RNA, 18 nt, Human
ccugacccucaucuuucu

SEQ ID NO: 3354131 - RNA, 19 nt, Human
ccugacccucaucuuucuu

SEQ ID NO: 3354132 - RNA, 18 nt, Human
ccuggugguggcucggga

SEQ ID NO: 3354133 - RNA, 21 nt, Human
ccuggugguggcucgggaggc

SEQ ID NO: 3354134 - RNA, 21 nt, Human
ccugucucccuccucugcccg

SEQ ID NO: 3354135 - RNA, 18 nt, Human
cagucugagagaggccau

SEQ ID NO: 3354136 - RNA, 17 nt, Human
cagucugagagaggcca

SEQ ID NO: 3354137 - RNA, 12 nt, Human
acagccuggcug

SEQ ID NO: 3354138 - RNA, 20 nt, Human
acaccuaggcuagggugggg

SEQ ID NO: 3354139 - RNA, 23 nt, Human
acaccuaggcuaggguggggaga

SEQ ID NO: 3354140 - RNA, 14 nt, Human
uaguucugccagga

SEQ ID NO: 3354141 - RNA, 13 nt, Human
uaguucugccagg

SEQ ID NO: 3354142 - RNA, 23 nt, Human
guggggggggggcgcggcuggga

SEQ ID NO: 3354143 - RNA, 18 nt, Human
guggcacuggggcagggg

SEQ ID NO: 3354144 - RNA, 17 nt, Human
guggcacuggggcaggg

SEQ ID NO: 3354145 - RNA, 20 nt, Human
guccugcaccggggccuggg

SEQ ID NO: 3354146 - RNA, 19 nt, Human
guccugcaccggggccugg

SEQ ID NO: 3354147 - RNA, 15 nt, Human
guccugcaccggggc

SEQ ID NO: 3354148 - RNA, 21 nt, Human
uccugcaccggggccugggca

SEQ ID NO: 3354149 - RNA, 19 nt, Human
uccugcaccggggccuggg

SEQ ID NO: 3354150 - RNA, 20 nt, Human
uccugcaccggggccugggc

SEQ ID NO: 3354151 - RNA, 14 nt, Human
acuggggcaggggc

SEQ ID NO: 3354152 - RNA, 23 nt, Human
ucgagaucccaacacugccagca

SEQ ID NO: 3354153 - RNA, 22 nt, Human
ucgagaucccaacacugccagc

SEQ ID NO: 3354154 - RNA, 11 nt, Human
uccucagcccc

SEQ ID NO: 3354155 - RNA, 17 nt, Human
acucaugugacucuuuc

SEQ ID NO: 3354156 - RNA, 16 nt, Human
acucaugugacucuuu

SEQ ID NO: 3354157 - RNA, 15 nt, Human
acucaugugacucuu

SEQ ID NO: 3354158 - RNA, 18 nt, Human
ucaggaaccgaggcaggg

SEQ ID NO: 3354159 - RNA, 17 nt, Human
ucaggaaccgaggcagg

SEQ ID NO: 3354160 - RNA, 16 nt, Human
ucagccccgcguggaa

SEQ ID NO: 3354161 - RNA, 18 nt, Human
accagagaaaaagggagg

SEQ ID NO: 3354162 - RNA, 20 nt, Human
accagagaaaaagggagggg

SEQ ID NO: 3354163 - RNA, 18 nt, Human
accugaauaaagaaugaa

SEQ ID NO: 3354164 - RNA, 16 nt, Human
aguccaucagccucca

SEQ ID NO: 3354165 - RNA, 20 nt, Human
uguagugauuuuuaugccac

SEQ ID NO: 3354166 - RNA, 21 nt, Human
agugauuuuuaugccaccuga

SEQ ID NO: 3354167 - RNA, 20 nt, Human
agugauuuuuaugccaccug

SEQ ID NO: 3354168 - RNA, 16 nt, Human
agugauuuuuaugcca

SEQ ID NO: 3354169 - RNA, 20 nt, Human
uggcuguggccuaaccugcc

SEQ ID NO: 3354170 - RNA, 17 nt, Human
uggcuguggcauccaga

SEQ ID NO: 3354171 - RNA, 20 nt, Human
uggcauccagagucccugcc

SEQ ID NO: 3354172 - RNA, 22 nt, Human
uggcauccagagucccugccug

SEQ ID NO: 3354173 - RNA, 21 nt, Human
uggcauccagagucccugccu

SEQ ID NO: 3354174 - RNA, 14 nt, Human
aggccauucuuucc

SEQ ID NO: 3354175 - RNA, 22 nt, Human
uggcacagccuggcuguggccu

SEQ ID NO: 3354176 - RNA, 20 nt, Human
aggcucagaggguguccugc

SEQ ID NO: 3354177 - RNA, 19 nt, Human
aggcucagaggguguccug

SEQ ID NO: 3354178 - RNA, 18 nt, Human
aggcucagaggguguccu

SEQ ID NO: 3354179 - RNA, 18 nt, Human
aggcgaagcguuguccuc

SEQ ID NO: 3354180 - RNA, 17 nt, Human
ugccuugucacgccaga

SEQ ID NO: 3354181 - RNA, 18 nt, Human
agccugacccucaucuuu

SEQ ID NO: 3354182 - RNA, 19 nt, Human
agccugacccucaucuuuc

SEQ ID NO: 3354183 - RNA, 16 nt, Human
auuucccuuccuuccu

SEQ ID NO: 3354184 - RNA, 13 nt, Human
uucugccaggaga

SEQ ID NO: 3354185 - RNA, 16 nt, Human
auccuacccccugugc

SEQ ID NO: 3354186 - RNA, 14 nt, Human
auccuacccccugu

SEQ ID NO: 3354187 - RNA, 21 nt, Human
augugacucuuuccaaccggc

SEQ ID NO: 3354188 - RNA, 16 nt, Human
augugacucuuuccaa

SEQ ID NO: 3354189 - RNA, 12 nt, Human
augugacucuuu

SEQ ID NO: 3354190 - RNA, 19 nt, Human
augagcuccuuaaggcucu

SEQ ID NO: 3354191 - RNA, 17 nt, Human
aggggccgggggcaguc

SEQ ID NO: 3354192 - RNA, 22 nt, Human
agcuccuuaaggcucuuuugua

SEQ ID NO: 3354193 - RNA, 18 nt, Human
agcuccuuaaggcucuuu

SEQ ID NO: 3354194 - RNA, 17 nt, Human
agcugcuccccacguca

SEQ ID NO: 3354195 - RNA, 14 nt, Human
agcugcuccccacg

SEQ ID NO: 3354196 - RNA, 14 nt, Human
agccgggagccuga

SEQ ID NO: 3354197 - RNA, 13 nt, Human
acccccugugccu

SEQ ID NO: 3354198 - RNA, 12 nt, Human
acugccagcauu

SEQ ID NO: 3354199 - RNA, 23 nt, Human
accugccgagaguccaucagccu

SEQ ID NO: 3354200 - RNA, 16 nt, Human
accugccgagagucca

SEQ ID NO: 3354201 - RNA, 16 nt, Human
caccccgacuuuuguu

SEQ ID NO: 3354202 - RNA, 16 nt, Human
cuccacucaugugacu

SEQ ID NO: 3354203 - RNA, 22 nt, Human
cuccacucaugugacucuuucc

SEQ ID NO: 3354204 - RNA, 20 nt, Human
cuccccacgucagcugggac

SEQ ID NO: 3354205 - RNA, 17 nt, Human
cucaggaaccgaggcag

SEQ ID NO: 3354206 - RNA, 19 nt, Human
cucaggaaccgaggcaggg

SEQ ID NO: 3354207 - RNA, 18 nt, Human
cucaggaaccgaggcagg

SEQ ID NO: 3354208 - RNA, 16 nt, Human
cucagaggguguccug

SEQ ID NO: 3354209 - RNA, 17 nt, Human
cucagccccgcguggaa

SEQ ID NO: 3354210 - RNA, 14 nt, Human
ccugccgagagucc

SEQ ID NO: 3354211 - RNA, 23 nt, Human
ccugccgagaguccaucagccuc

SEQ ID NO: 3354212 - RNA, 22 nt, Human
ccugccgagaguccaucagccu

SEQ ID NO: 3354213 - RNA, 15 nt, Human
ccugcaccggggccu

SEQ ID NO: 3354214 - RNA, 17 nt, Human
ccugcaccggggccugg

SEQ ID NO: 3354215 - RNA, 21 nt, Human
cgaagcguuguccucagcccc

SEQ ID NO: 3354216 - RNA, 17 nt, Human
cgaagcguuguccucag

SEQ ID NO: 3354217 - RNA, 16 nt, Human
cgaagcguuguccuca

SEQ ID NO: 3354218 - RNA, 15 nt, Human
cgaagcguuguccuc

SEQ ID NO: 3354219 - RNA, 19 nt, Human
cgggacaccuaggcuaggg

SEQ ID NO: 3354220 - RNA, 18 nt, Human
cgggacaccuaggcuagg

SEQ ID NO: 3354221 - RNA, 16 nt, Human
cgcggcugggaggagg

SEQ ID NO: 3354222 - RNA, 12 nt, Human
cgcggcugggag

SEQ ID NO: 3354223 - RNA, 11 nt, Human
cgcggcuggga

SEQ ID NO: 3354224 - RNA, 15 nt, Human
cccacggcuccucga

SEQ ID NO: 3354225 - RNA, 15 nt, Human
cccacgucagcuggg

SEQ ID NO: 3354226 - RNA, 14 nt, Human
cccaacacugccag

SEQ ID NO: 3354227 - RNA, 16 nt, Human
cccaacacugccagca

SEQ ID NO: 3354228 - RNA, 15 nt, Human
cccaacacugccagc

SEQ ID NO: 3354229 - RNA, 14 nt, Human
ccccugugccuugu

SEQ ID NO: 3354230 - RNA, 13 nt, Human
cccaugagcuccu

SEQ ID NO: 3354231 - RNA, 22 nt, Human
cccaugagcuccuuaaggcucu

SEQ ID NO: 3354232 - RNA, 15 nt, Human
cccaugagcuccuua

SEQ ID NO: 3354233 - RNA, 14 nt, Human
cccaugagcuccuu

SEQ ID NO: 3354234 - RNA, 19 nt, Human
ccggggccugggcaggagg

SEQ ID NO: 3354235 - RNA, 20 nt, Human
ccggggccugggcaggaggg

SEQ ID NO: 3354236 - RNA, 21 nt, Human
ccgggggcagucugagagagg

SEQ ID NO: 3354237 - RNA, 21 nt, Human
ccgagaguccaucagccucca

SEQ ID NO: 3354238 - RNA, 20 nt, Human
ccgagaguccaucagccucc

SEQ ID NO: 3354239 - RNA, 13 nt, Human
ccuaaccugccga

SEQ ID NO: 3354240 - RNA, 12 nt, Human
ccuaaccugccg

SEQ ID NO: 3354241 - RNA, 23 nt, Human
ccguggcuguggcauccagaguc

SEQ ID NO: 3354242 - RNA, 18 nt, Human
cuggaccagccucuccac

SEQ ID NO: 3354243 - RNA, 14 nt, Human
cuggaccagccucu

SEQ ID NO: 3354244 - RNA, 22 nt, Human
cugccgagaguccaucagccuc

SEQ ID NO: 3354245 - RNA, 23 nt, Human
cugccgagaguccaucagccucc

SEQ ID NO: 3354246 - RNA, 21 nt, Human
cugucucccuccucugcccgg

SEQ ID NO: 3354247 - RNA, 14 nt, Human
cuuuguggcacugg

SEQ ID NO: 3354248 - RNA, 22 nt, Human
cuuucuuccaaacaggcucaga

SEQ ID NO: 3354249 - RNA, 13 nt, Human
cuugucacgccag

SEQ ID NO: 3354250 - RNA, 16 nt, Human
cuugucacgccagacu

SEQ ID NO: 3354251 - RNA, 23 nt, Human
gcacuggggcaggggccgggggc

SEQ ID NO: 3354252 - RNA, 18 nt, Human
gcacuggggcaggggccg

SEQ ID NO: 3354253 - RNA, 15 nt, Human
gcacuggggcagggg

SEQ ID NO: 3354254 - RNA, 20 nt, Human
gaggcgaagcguuguccuca

SEQ ID NO: 3354255 - RNA, 21 nt, Human
gaggcgaagcguuguccucag

SEQ ID NO: 3354256 - RNA, 14 nt, Human
gaggcagggaagga

SEQ ID NO: 3354257 - RNA, 13 nt, Human
gaggguguccugc

SEQ ID NO: 3354258 - RNA, 14 nt, Human
gagggggagagggc

SEQ ID NO: 3354259 - RNA, 19 nt, Human
gagucccugccuggaccag

SEQ ID NO: 3354260 - RNA, 23 nt, Human
gagucccugccuggaccagccuc

SEQ ID NO: 3354261 - RNA, 21 nt, Human
gagucccugccuggaccagcc

SEQ ID NO: 3354262 - RNA, 14 nt, Human
gaccagccucucca

SEQ ID NO: 3354263 - RNA, 13 nt, Human
gagagacgggccc

SEQ ID NO: 3354264 - RNA, 20 nt, Human
gagaucccaacacugccagc

SEQ ID NO: 3354265 - RNA, 19 nt, Human
gagaucccaacacugccag

SEQ ID NO: 3354266 - RNA, 18 nt, Human
gagaucccaacacugcca

SEQ ID NO: 3354267 - RNA, 23 nt, Human
gcccuggugguggcucgggaggc

SEQ ID NO: 3354268 - RNA, 21 nt, Human
gcucagaggguguccugcacc

SEQ ID NO: 3354269 - RNA, 16 nt, Human
ggcuaggguggggaga

SEQ ID NO: 3354270 - RNA, 13 nt, Human
ggccugggcagga

SEQ ID NO: 3354271 - RNA, 14 nt, Human
ggccugggcaggag

SEQ ID NO: 3354272 - RNA, 16 nt, Human
ggcgcggcugggagga

SEQ ID NO: 3354273 - RNA, 22 nt, Human
ggccuaaccugccgagagucca

SEQ ID NO: 3354274 - RNA, 21 nt, Human
ggccuaaccugccgagagucc

SEQ ID NO: 3354275 - RNA, 20 nt, Human
ggccauucuuucccaacacc

SEQ ID NO: 3354276 - RNA, 22 nt, Human
ggaaggaucccaugagcuccuu

SEQ ID NO: 3354277 - RNA, 14 nt, Human
gcuuuguggcacug

SEQ ID NO: 3354278 - RNA, 22 nt, Human
gcuuuguggcacuggggcaggg

SEQ ID NO: 3354279 - RNA, 18 nt, Human
ggggaguuuagggugggg

SEQ ID NO: 3354280 - RNA, 14 nt, Human
gggcgcggcuggga

SEQ ID NO: 3354281 - RNA, 14 nt, Human
gucacgccagacuu

SEQ ID NO: 3354282 - RNA, 23 nt, Human
gucccugccuggaccagccucuc

SEQ ID NO: 3354283 - RNA, 22 nt, Human
gucccugccuggaccagccucu

SEQ ID NO: 3354284 - RNA, 14 nt, Human
gucccugccuggac

SEQ ID NO: 3354285 - RNA, 21 nt, Human
gucccugccuggaccagccuc

SEQ ID NO: 3354286 - RNA, 20 nt, Human
gucccugccuggaccagccu

SEQ ID NO: 3354287 - RNA, 12 nt, Human
guccucagcccc

SEQ ID NO: 3354288 - RNA, 16 nt, Human
gugauuuuuaugccac

SEQ ID NO: 3354289 - RNA, 20 nt, Human
gugauuuuuaugccaccuga

SEQ ID NO: 3354290 - RNA, 19 nt, Human
gugauuuuuaugccaccug

SEQ ID NO: 3354291 - RNA, 17 nt, Human
gugauuuuuaugccacc

SEQ ID NO: 3354292 - RNA, 12 nt, Human
gugacucuuucc

SEQ ID NO: 3354293 - RNA, 19 nt, Human
gugccuugucacgccagac

SEQ ID NO: 3354294 - RNA, 20 nt, Human
gugcuucuaguucugccagg

SEQ ID NO: 3354295 - RNA, 22 nt, Human
gugcuucuaguucugccaggag

SEQ ID NO: 3354296 - RNA, 21 nt, Human
gugcuucuaguucugccagga

SEQ ID NO: 3354297 - RNA, 14 nt, Human
guggcauccagagu

SEQ ID NO: 3354298 - RNA, 18 nt, Human
guggcucgggaggcgaag

SEQ ID NO: 3354299 - RNA, 16 nt, Human
guggcucgggaggcga

SEQ ID NO: 3354300 - RNA, 15 nt, Human
uggaccagccucucc

SEQ ID NO: 3354301 - RNA, 20 nt, Human
uggggaguuuaggguggggg

SEQ ID NO: 3354302 - RNA, 18 nt, Human
ugggcaggagggaggugc

SEQ ID NO: 3354303 - RNA, 16 nt, Human
ugggcaggagggaggu

SEQ ID NO: 3354304 - RNA, 15 nt, Human
ugggcaggagggagg

SEQ ID NO: 3354305 - RNA, 13 nt, Human
ugggcaggaggga

SEQ ID NO: 3354306 - RNA, 21 nt, Human
ugagcuccuuaaggcucuuuu

SEQ ID NO: 3354307 - RNA, 19 nt, Human
ugagcuccuuaaggcucuu

SEQ ID NO: 3354308 - RNA, 18 nt, Human
uccagagucccugccugg

SEQ ID NO: 3354309 - RNA, 15 nt, Human
uccagagucccugcc

SEQ ID NO: 3354310 - RNA, 21 nt, Human
uccagagucccugccuggacc

SEQ ID NO: 3354311 - RNA, 20 nt, Human
uccagagucccugccuggac

SEQ ID NO: 3354312 - RNA, 19 nt, Human
uccagagucccugccugga

SEQ ID NO: 3354313 - RNA, 14 nt, Human
uccaaacaggcuca

SEQ ID NO: 3354314 - RNA, 23 nt, Human
uccugucucccuccucugcccgg

SEQ ID NO: 3354315 - RNA, 15 nt, Human
uccugucucccuccu

SEQ ID NO: 3354316 - RNA, 17 nt, Human
uccuacccccugugccu

SEQ ID NO: 3354317 - RNA, 16 nt, Human
uccuacccccugugcc

SEQ ID NO: 3354318 - RNA, 15 nt, Human
uccuacccccugugc

SEQ ID NO: 3354319 - RNA, 13 nt, Human
uccuacccccugu

SEQ ID NO: 3354320 - RNA, 16 nt, Human
uaggcuagggugggga

SEQ ID NO: 3354321 - RNA, 15 nt, Human
uaggcuagggugggg

SEQ ID NO: 3354322 - RNA, 16 nt, Human
uuaugccaccugaaua

SEQ ID NO: 3354323 - RNA, 13 nt, Human
uuaugccaccuga

SEQ ID NO: 3354324 - RNA, 14 nt, Human
uuuaugccaccuga

SEQ ID NO: 3354325 - RNA, 19 nt, Human
auccagagucccugccugg

SEQ ID NO: 3354326 - RNA, 21 nt, Human
auccagagucccugccuggac

SEQ ID NO: 3354327 - RNA, 20 nt, Human
auccagagucccugccugga

SEQ ID NO: 3354328 - RNA, 16 nt, Human
agucugagagaggcca

SEQ ID NO: 3354329 - RNA, 23 nt, Human
agucugagagaggccauucuuuc

SEQ ID NO: 3354330 - RNA, 16 nt, Human
aggaaccgaggcaggg

SEQ ID NO: 3354331 - RNA, 17 nt, Human
agcuccuuaaggcucuu

SEQ ID NO: 3354332 - RNA, 16 nt, Human
agcuccuuaaggcucu

SEQ ID NO: 3354333 - RNA, 23 nt, Human
agagaggccauucuuucccaaca

SEQ ID NO: 3354334 - RNA, 10 nt, Human
agagggcugc

SEQ ID NO: 3354335 - RNA, 13 nt, Human
aagggagggggag

SEQ ID NO: 3354336 - RNA, 19 nt, Human
accggggccugggcaggag

SEQ ID NO: 3354337 - RNA, 15 nt, Human
gaguccaucagccuc

SEQ ID NO: 3354338 - RNA, 14 nt, Human
gaguccaucagccu

SEQ ID NO: 3354339 - RNA, 13 nt, Human
gaguccaucagcc

SEQ ID NO: 3354340 - RNA, 15 nt, Human
gaguuuagggugggg

SEQ ID NO: 3354341 - RNA, 14 nt, Human
gaguuuaggguggg

SEQ ID NO: 3354342 - RNA, 12 nt, Human
gaucccaacacu

SEQ ID NO: 3354343 - RNA, 19 nt, Human
gcaccggggccugggcagg

SEQ ID NO: 3354344 - RNA, 20 nt, Human
gcaccggggccugggcagga

SEQ ID NO: 3354345 - RNA, 16 nt, Human
gacagguuagcugcuc

SEQ ID NO: 3354346 - RNA, 22 nt, Human
ggcgaagcguuguccucagccc

SEQ ID NO: 3354347 - RNA, 18 nt, Human
ggcauccagagucccugc

SEQ ID NO: 3354348 - RNA, 22 nt, Human
ggcauccagagucccugccugg

SEQ ID NO: 3354349 - RNA, 13 nt, Human
ggcacagccuggc

SEQ ID NO: 3354350 - RNA, 12 nt, Human
ggcacagccugg

SEQ ID NO: 3354351 - RNA, 14 nt, Human
aaaagggaggggga

SEQ ID NO: 3354352 - RNA, 22 nt, Human
gggcccuggugguggcucggga

SEQ ID NO: 3354353 - RNA, 21 nt, Human
gguggggagagacgggcccug

SEQ ID NO: 3354354 - RNA, 23 nt, Human
ggguguccugcaccggggccugg

SEQ ID NO: 3354355 - RNA, 22 nt, Human
gcugcuccccacgucagcuggg

SEQ ID NO: 3354356 - RNA, 13 nt, Human
gcugcuccccacg

SEQ ID NO: 3354357 - RNA, 18 nt, Human
gcuccucgagaucccaac

SEQ ID NO: 3354358 - RNA, 14 nt, Human
gcggcugggaggag

SEQ ID NO: 3354359 - RNA, 13 nt, Human
gcggcugggagga

SEQ ID NO: 3354360 - RNA, 22 nt, Human
gcggcugggaggagggcaggca

SEQ ID NO: 3354361 - RNA, 19 nt, Human
gcggcugggaggagggcag

SEQ ID NO: 3354362 - RNA, 18 nt, Human
gcggcugggaggagggca

SEQ ID NO: 3354363 - RNA, 17 nt, Human
gcggcugggaggagggc

SEQ ID NO: 3354364 - RNA, 13 nt, Human
cucccuccucugc

SEQ ID NO: 3354365 - RNA, 14 nt, Human
cucccuccucugcc

SEQ ID NO: 3354366 - RNA, 16 nt, Human
cucaucuuucuuccaa

SEQ ID NO: 3354367 - RNA, 23 nt, Human
cggcuccucgagaucccaacacu

SEQ ID NO: 3354368 - RNA, 12 nt, Human
cuaaccugccga

SEQ ID NO: 3354369 - RNA, 21 nt, Human
cuaaccugccgagaguccauc

SEQ ID NO: 3354370 - RNA, 19 nt, Human
cuaaccugccgagagucca

SEQ ID NO: 3354371 - RNA, 21 nt, Human
cgugucuggcacagccuggcu

SEQ ID NO: 3354372 - RNA, 13 nt, Human
cgugucuggcaca

SEQ ID NO: 3354373 - RNA, 14 nt, Human
cgugucuggcacag

SEQ ID NO: 3354374 - RNA, 22 nt, Human
ccugacccucaucuuucuucca

SEQ ID NO: 3354375 - RNA, 15 nt, Human
cccugugccuuguca

SEQ ID NO: 3354376 - RNA, 22 nt, Human
cccugugccuugucacgccaga

SEQ ID NO: 3354377 - RNA, 20 nt, Human
cccugugccuugucacgcca

SEQ ID NO: 3354378 - RNA, 14 nt, Human
cccgggagcucagg

SEQ ID NO: 3354379 - RNA, 14 nt, Human
ccccgacuuuuguu

SEQ ID NO: 3354380 - RNA, 16 nt, Human
ccagagucccugccug

SEQ ID NO: 3354381 - RNA, 22 nt, Human
ccagagucccugccuggaccag

SEQ ID NO: 3354382 - RNA, 19 nt, Human
ccagagucccugccuggac

SEQ ID NO: 3354383 - RNA, 18 nt, Human
ccagagucccugccugga

SEQ ID NO: 3354384 - RNA, 17 nt, Human
ccagagucccugccugg

SEQ ID NO: 3354385 - RNA, 24 nt, Human
cagccucuccacucaugugacucu

SEQ ID NO: 3354386 - RNA, 24 nt, Human
cagccccgcguggaacucgugucu

SEQ ID NO: 3354387 - RNA, 15 nt, Human
caaacaggcucagag

SEQ ID NO: 3354388 - RNA, 14 nt, Human
caaacaggcucaga

SEQ ID NO: 3354389 - RNA, 19 nt, Human
auucuuucccaacaccucu

SEQ ID NO: 3354390 - RNA, 16 nt, Human
auucuuucccaacacc

SEQ ID NO: 3354391 - RNA, 13 nt, Human
auucuuucccaac

SEQ ID NO: 3354392 - RNA, 22 nt, Human
cacugccagcauuucccuuccu

SEQ ID NO: 3354393 - RNA, 18 nt, Human
cacugccagcauuucccu

SEQ ID NO: 3354394 - RNA, 19 nt, Human
cacuggggcaggggccggg

SEQ ID NO: 3354395 - RNA, 20 nt, Human
uaugccaccugaauaaagaa

SEQ ID NO: 3354396 - RNA, 19 nt, Human
uaccagagaaaaagggagg

SEQ ID NO: 3354397 - RNA, 15 nt, Human
uacccccugugccuu

SEQ ID NO: 3354398 - RNA, 22 nt, Human
guggccuaaccugccgagaguc

SEQ ID NO: 3354399 - RNA, 21 nt, Human
guggccuaaccugccgagagu

SEQ ID NO: 3354400 - RNA, 14 nt, Human
aaggcucuuuugua

SEQ ID NO: 3354401 - RNA, 19 nt, Human
gucuggcacagccuggcug

SEQ ID NO: 3354402 - RNA, 17 nt, Human
gucuggcacagccuggc

SEQ ID NO: 3354403 - RNA, 19 nt, Human
gucucccuccucugcccgg

SEQ ID NO: 3354404 - RNA, 17 nt, Human
agagacgggcccuggug

SEQ ID NO: 3354405 - RNA, 23 nt, Human
ucuuggggaguuuaggguggggg

SEQ ID NO: 3354406 - RNA, 22 nt, Human
ucuuggggaguuuagggugggg

SEQ ID NO: 3354407 - RNA, 22 nt, Human
ucuggcacagccuggcuguggc

SEQ ID NO: 3354408 - RNA, 23 nt, Human
acuugucccgggacaccuaggcu

SEQ ID NO: 3354409 - RNA, 16 nt, Human
acuggggcaggggccg

SEQ ID NO: 3354410 - RNA, 20 nt, Human
ucggggagccgggagccuga

SEQ ID NO: 3354411 - RNA, 20 nt, Human
uccauccuacccccugugcc

SEQ ID NO: 3354412 - RNA, 16 nt, Human
uccauccuacccccug

SEQ ID NO: 3354413 - RNA, 22 nt, Human
uccucugcccgggagcucagga

SEQ ID NO: 3354414 - RNA, 16 nt, Human
uccucugcccgggagc

SEQ ID NO: 3354415 - RNA, 13 nt, Human
uccucuccugucu

SEQ ID NO: 3354416 - RNA, 23 nt, Human
acucgugucuggcacagccuggc

SEQ ID NO: 3354417 - RNA, 22 nt, Human
acucgugucuggcacagccugg

SEQ ID NO: 3354418 - RNA, 19 nt, Human
uguggcacuggggcagggg

SEQ ID NO: 3354419 - RNA, 23 nt, Human
agucccugccuggaccagccucu

SEQ ID NO: 3354420 - RNA, 22 nt, Human
agucccugccuggaccagccuc

SEQ ID NO: 3354421 - RNA, 14 nt, Human
agucccugccugga

SEQ ID NO: 3354422 - RNA, 21 nt, Human
agucccugccuggaccagccu

SEQ ID NO: 3354423 - RNA, 15 nt, Human
agucccugccuggac

SEQ ID NO: 3354424 - RNA, 13 nt, Human
agucccugccugg

SEQ ID NO: 3354425 - RNA, 19 nt, Human
uggggaguuuagggugggg

SEQ ID NO: 3354426 - RNA, 18 nt, Human
uggggaguuuaggguggg

SEQ ID NO: 3354427 - RNA, 16 nt, Human
agggggagagggcugc

SEQ ID NO: 3354428 - RNA, 15 nt, Human
agggggagagggcug

SEQ ID NO: 3354429 - RNA, 21 nt, Human
agcugggacaccccgacuuuu

SEQ ID NO: 3354430 - RNA, 19 nt, Human
aggaucccaugagcuccuu

SEQ ID NO: 3354431 - RNA, 20 nt, Human
agcucaggaaccgaggcagg

SEQ ID NO: 3354432 - RNA, 22 nt, Human
agcucaggaaccgaggcaggga

SEQ ID NO: 3354433 - RNA, 21 nt, Human
agcucaggaaccgaggcaggg

SEQ ID NO: 3354434 - RNA, 17 nt, Human
agcauuucccuuccuuc

SEQ ID NO: 3354435 - RNA, 15 nt, Human
uucuaguucugccag

SEQ ID NO: 3354436 - RNA, 23 nt, Human
ccuccauccuacccccugugccu

SEQ ID NO: 3354437 - RNA, 22 nt, Human
ccuccauccuacccccugugcc

SEQ ID NO: 3354438 - RNA, 17 nt, Human
ccuccauccuacccccu

SEQ ID NO: 3354439 - RNA, 16 nt, Human
ccggcuuuguggcacu

SEQ ID NO: 3354440 - RNA, 19 nt, Human
ccggcuuuguggcacuggg

SEQ ID NO: 3354441 - RNA, 17 nt, Human
ccggcuuuguggcacug

SEQ ID NO: 3354442 - RNA, 15 nt, Human
ccgggagcucaggaa

SEQ ID NO: 3354443 - RNA, 13 nt, Human
ccgggagcucagg

SEQ ID NO: 3354444 - RNA, 15 nt, Human
ccggggccugggcag

SEQ ID NO: 3354445 - RNA, 18 nt, Human
ccucagccccgcguggaa

SEQ ID NO: 3354446 - RNA, 18 nt, Human
cccugccuggaccagccu

SEQ ID NO: 3354447 - RNA, 13 nt, Human
cccugccuggacc

SEQ ID NO: 3354448 - RNA, 12 nt, Human
cccugccuggac

SEQ ID NO: 3354449 - RNA, 14 nt, Human
cccucaucuuucuu

SEQ ID NO: 3354450 - RNA, 19 nt, Human
cauccuacccccugugccu

SEQ ID NO: 3354451 - RNA, 21 nt, Human
cauccagagucccugccugga

SEQ ID NO: 3354452 - RNA, 15 nt, Human
gcccgggagcucagg

SEQ ID NO: 3354453 - RNA, 19 nt, Human
gcccgggagcucaggaacc

SEQ ID NO: 3354454 - RNA, 17 nt, Human
gcccgggagcucaggaa

SEQ ID NO: 3354455 - RNA, 21 nt, Human
gccucuccacucaugugacuc

SEQ ID NO: 3354456 - RNA, 24 nt, Human
gccucuccacucaugugacucuuu

SEQ ID NO: 3354457 - RNA, 17 nt, Human
gccugacccucaucuuu

SEQ ID NO: 3354458 - RNA, 12 nt, Human
gcgcggcuggga

SEQ ID NO: 3354459 - RNA, 18 nt, Human
gcgcggcugggaggaggg

SEQ ID NO: 3354460 - RNA, 18 nt, Human
gccuuuggacuugucccg

SEQ ID NO: 3354461 - RNA, 20 nt, Human
gcaggggccgggggcagucu

SEQ ID NO: 3354462 - RNA, 19 nt, Human
gcaggggccgggggcaguc

SEQ ID NO: 3354463 - RNA, 17 nt, Human
gaucccaugagcuccuu

SEQ ID NO: 3354464 - RNA, 15 nt, Human
gaucccaugagcucc

SEQ ID NO: 3354465 - RNA, 18 nt, Human
gacuugucccgggacacc

SEQ ID NO: 3354466 - RNA, 21 nt, Human
gagagaggccauucuuuccca

SEQ ID NO: 3354467 - RNA, 13 nt, Human
gagagaggccauu

SEQ ID NO: 3354468 - RNA, 20 nt, Human
gagcuccuuaaggcucuuuu

SEQ ID NO: 3354469 - RNA, 20 nt, Human
gagcucaggaaccgaggcag

SEQ ID NO: 3354470 - RNA, 21 nt, Human
gagcucaggaaccgaggcagg

SEQ ID NO: 3354471 - RNA, 21 nt, Human
gagccugacccucaucuuucu

SEQ ID NO: 3354472 - RNA, 20 nt, Human
gacaccuaggcuaggguggg

SEQ ID NO: 3354473 - RNA, 16 nt, Human
gacaccuaggcuaggg

SEQ ID NO: 3354474 - RNA, 15 nt, Human
gacaccuaggcuagg

SEQ ID NO: 3354475 - RNA, 18 nt, Human
cuugucacgccagacuuc

SEQ ID NO: 3354476 - RNA, 23 nt, Human
cuugucacgccagacuucccacg

SEQ ID NO: 3354477 - RNA, 21 nt, Human
cuuggggaguuuagggugggg

SEQ ID NO: 3354478 - RNA, 20 nt, Human
cuuggggaguuuaggguggg

SEQ ID NO: 3354479 - RNA, 13 nt, Human
cuuucuuccaaac

SEQ ID NO: 3354480 - RNA, 19 nt, Human
cuuucuuccaaacaggcuc

SEQ ID NO: 3354481 - RNA, 12 nt, Human
cuuuggacuugu

SEQ ID NO: 3354482 - RNA, 21 nt, Human
gaaggaucccaugagcuccuu

SEQ ID NO: 3354483 - RNA, 23 nt, Human
cuggcacagccuggcuguggccu

SEQ ID NO: 3354484 - RNA, 15 nt, Human
cuggcacagccuggc

SEQ ID NO: 3354485 - RNA, 21 nt, Human
cuggcacagccuggcuguggc

SEQ ID NO: 3354486 - RNA, 16 nt, Human
cuggcacagccuggcu

SEQ ID NO: 3354487 - RNA, 18 nt, Human
cuggcuguggccuaaccu

SEQ ID NO: 3354488 - RNA, 19 nt, Human
cugggaggagggcaggcau

SEQ ID NO: 3354489 - RNA, 18 nt, Human
cugcccgggagcucagga

SEQ ID NO: 3354490 - RNA, 19 nt, Human
cugcccgggagcucaggaa

SEQ ID NO: 3354491 - RNA, 11 nt, Human
cugccaggaga

SEQ ID NO: 3354492 - RNA, 18 nt, Human
cuccauccuacccccugu

SEQ ID NO: 3354493 - RNA, 23 nt, Human
cuccauccuacccccugugccuu

SEQ ID NO: 3354494 - RNA, 22 nt, Human
cuccauccuacccccugugccu

SEQ ID NO: 3354495 - RNA, 20 nt, Human
cuccauccuacccccugugc

SEQ ID NO: 3354496 - RNA, 17 nt, Human
cuccucgagaucccaac

SEQ ID NO: 3354497 - RNA, 24 nt, Human
cuccucgagaucccaacacugcca

SEQ ID NO: 3354498 - RNA, 21 nt, Human
cuccucgagaucccaacacug

SEQ ID NO: 3354499 - RNA, 18 nt, Human
cucuccugucucccuccu

SEQ ID NO: 3354500 - RNA, 17 nt, Human
cucuccugucucccucc

SEQ ID NO: 3354501 - RNA, 15 nt, Human
cucuccugucucccu

SEQ ID NO: 3354502 - RNA, 22 nt, Human
cucuccacucaugugacucuuu

SEQ ID NO: 3354503 - RNA, 19 nt, Human
cucuccacucaugugacuc

SEQ ID NO: 3354504 - RNA, 21 nt, Human
cucuccacucaugugacucuu

SEQ ID NO: 3354505 - RNA, 23 nt, Human
cucuuggggaguuuagggugggg

SEQ ID NO: 3354506 - RNA, 21 nt, Human
cucuuggggaguuuagggugg

SEQ ID NO: 3354507 - RNA, 17 nt, Human
cggggccugggcaggag

SEQ ID NO: 3354508 - RNA, 19 nt, Human
cggggccugggcaggaggg

SEQ ID NO: 3354509 - RNA, 17 nt, Human
cgggggcagucugagag

SEQ ID NO: 3354510 - RNA, 21 nt, Human
cgggggcagucugagagaggc

SEQ ID NO: 3354511 - RNA, 18 nt, Human
cgggggcagucugagaga

SEQ ID NO: 3354512 - RNA, 12 nt, Human
cggcugggagga

SEQ ID NO: 3354513 - RNA, 17 nt, Human
cgggagccugacccuca

SEQ ID NO: 3354514 - RNA, 16 nt, Human
cguuguccucagcccc

SEQ ID NO: 3354515 - RNA, 23 nt, Human
cguggcuguggcauccagagucc

SEQ ID NO: 3354516 - RNA, 14 nt, Human
cuacccccugugcc

SEQ ID NO: 3354517 - RNA, 13 nt, Human
cuacccccugugc

SEQ ID NO: 3354518 - RNA, 22 nt, Human
gucagcugggacaccccgacuu

SEQ ID NO: 3354519 - RNA, 19 nt, Human
guagugauuuuuaugccac

SEQ ID NO: 3354520 - RNA, 21 nt, Human
gugauuuuuaugccaccugaa

SEQ ID NO: 3354521 - RNA, 18 nt, Human
gucugagagaggccauuc

SEQ ID NO: 3354522 - RNA, 15 nt, Human
gucugagagaggcca

SEQ ID NO: 3354523 - RNA, 14 nt, Human
gucugagagaggcc

SEQ ID NO: 3354524 - RNA, 13 nt, Human
gucugagagaggc

SEQ ID NO: 3354525 - RNA, 13 nt, Human
gucccugccugga

SEQ ID NO: 3354526 - RNA, 12 nt, Human
guucugccagga

SEQ ID NO: 3354527 - RNA, 14 nt, Human
guucugccaggaga

SEQ ID NO: 3354528 - RNA, 13 nt, Human
guucugccaggag

SEQ ID NO: 3354529 - RNA, 17 nt, Human
gugucuggcacagccug

SEQ ID NO: 3354530 - RNA, 21 nt, Human
guguccugcaccggggccugg

SEQ ID NO: 3354531 - RNA, 21 nt, Human
guggggagagacgggcccugg

SEQ ID NO: 3354532 - RNA, 23 nt, Human
guuguccucagccccgcguggaa

SEQ ID NO: 3354533 - RNA, 17 nt, Human
guuguccucagccccgc

SEQ ID NO: 3354534 - RNA, 15 nt, Human
uguggccuaaccugc

SEQ ID NO: 3354535 - RNA, 17 nt, Human
ugugccuugucacgcca

SEQ ID NO: 3354536 - RNA, 20 nt, Human
ugugccuugucacgccagac

SEQ ID NO: 3354537 - RNA, 19 nt, Human
ugugccuugucacgccaga

SEQ ID NO: 3354538 - RNA, 17 nt, Human
ugucuggcacagccugg

SEQ ID NO: 3354539 - RNA, 21 nt, Human
uguccucagccccgcguggaa

SEQ ID NO: 3354540 - RNA, 12 nt, Human
ugcaccggggcc

SEQ ID NO: 3354541 - RNA, 22 nt, Human
ugcaccggggccugggcaggag

SEQ ID NO: 3354542 - RNA, 16 nt, Human
ugcaccggggccuggg

SEQ ID NO: 3354543 - RNA, 21 nt, Human
ugggacaccccgacuuuuguu

SEQ ID NO: 3354544 - RNA, 18 nt, Human
uggaacucgugucuggca

SEQ ID NO: 3354545 - RNA, 23 nt, Human
uccucgagaucccaacacugcca

SEQ ID NO: 3354546 - RNA, 16 nt, Human
uccucgagaucccaac

SEQ ID NO: 3354547 - RNA, 23 nt, Human
ucccaugagcuccuuaaggcucu

SEQ ID NO: 3354548 - RNA, 23 nt, Human
ucagccuccauccuacccccugu

SEQ ID NO: 3354549 - RNA, 17 nt, Human
ucaucuuucuuccaaac

SEQ ID NO: 3354550 - RNA, 14 nt, Human
ucaucuuucuucca

SEQ ID NO: 3354551 - RNA, 12 nt, Human
ucaucuuucuuc

SEQ ID NO: 3354552 - RNA, 16 nt, Human
ucccaacacugccagc

SEQ ID NO: 3354553 - RNA, 15 nt, Human
ucccaacacugccag

SEQ ID NO: 3354554 - RNA, 14 nt, Human
ucccaacacugcca

SEQ ID NO: 3354555 - RNA, 19 nt, Human
ucuuuccaaccggcuuugu

SEQ ID NO: 3354556 - RNA, 16 nt, Human
ugacucuuuccaaccg

SEQ ID NO: 3354557 - RNA, 14 nt, Human
ugacucuuuccaac

SEQ ID NO: 3354558 - RNA, 13 nt, Human
ugacucuuuccaa

SEQ ID NO: 3354559 - RNA, 19 nt, Human
ugacucuuuccaaccggcu

SEQ ID NO: 3354560 - RNA, 23 nt, Human
ggcaggcaucggggagccgggag

SEQ ID NO: 3354561 - RNA, 17 nt, Human
ggagagacgggcccugg

SEQ ID NO: 3354562 - RNA, 15 nt, Human
ggagagacgggcccu

SEQ ID NO: 3354563 - RNA, 15 nt, Human
aaaaagggaggggga

SEQ ID NO: 3354564 - RNA, 20 nt, Human
ggcuccucgagaucccaaca

SEQ ID NO: 3354565 - RNA, 14 nt, Human
gggagggggagagg

SEQ ID NO: 3354566 - RNA, 15 nt, Human
ggggccugggcagga

SEQ ID NO: 3354567 - RNA, 12 nt, Human
ggggccugggca

SEQ ID NO: 3354568 - RNA, 15 nt, Human
gaaccgaggcaggga

SEQ ID NO: 3354569 - RNA, 12 nt, Human
gaaccgaggcag

SEQ ID NO: 3354570 - RNA, 16 nt, Human
gagggcugccuuugga

SEQ ID NO: 3354571 - RNA, 9 nt, Human
gagggcugc

SEQ ID NO: 3354572 - RNA, 17 nt, Human
gaguccaucagccucca

SEQ ID NO: 3354573 - RNA, 16 nt, Human
gaguccaucagccucc

SEQ ID NO: 3354574 - RNA, 23 nt, Human
gaggugcuucuaguucugccagg

SEQ ID NO: 3354575 - RNA, 22 nt, Human
gaggugcuucuaguucugccag

SEQ ID NO: 3354576 - RNA, 14 nt, Human
gcaccggggccugg

SEQ ID NO: 3354577 - RNA, 16 nt, Human
gcaccggggccugggc

SEQ ID NO: 3354578 - RNA, 13 nt, Human
cugggcaggaggg

SEQ ID NO: 3354579 - RNA, 16 nt, Human
cugcaccggggccugg

SEQ ID NO: 3354580 - RNA, 14 nt, Human
cugcaccggggccu

SEQ ID NO: 3354581 - RNA, 19 nt, Human
cugcaccggggccugggca

SEQ ID NO: 3354582 - RNA, 18 nt, Human
cugcaccggggccugggc

SEQ ID NO: 3354583 - RNA, 24 nt, Human
cuccucugcccgggagcucaggaa

SEQ ID NO: 3354584 - RNA, 22 nt, Human
cuccucugcccgggagcucagg

SEQ ID NO: 3354585 - RNA, 16 nt, Human
cuccugucucccuccu

SEQ ID NO: 3354586 - RNA, 23 nt, Human
ccucuuggggaguuuaggguggg

SEQ ID NO: 3354587 - RNA, 22 nt, Human
ccucuuggggaguuuagggugg

SEQ ID NO: 3354588 - RNA, 12 nt, Human
ccugccuggacc

SEQ ID NO: 3354589 - RNA, 19 nt, Human
ccugccuggaccagccucu

SEQ ID NO: 3354590 - RNA, 22 nt, Human
ccucugcccgggagcucaggaa

SEQ ID NO: 3354591 - RNA, 21 nt, Human
ccucugcccgggagcucagga

SEQ ID NO: 3354592 - RNA, 12 nt, Human
ccaugagcuccu

SEQ ID NO: 3354593 - RNA, 21 nt, Human
ccaugagcuccuuaaggcucu

SEQ ID NO: 3354594 - RNA, 22 nt, Human
cccccugugccuugucacgcca

SEQ ID NO: 3354595 - RNA, 21 nt, Human
ccccgcguggaacucgugucu

SEQ ID NO: 3354596 - RNA, 18 nt, Human
ccagagaaaaagggaggg

SEQ ID NO: 3354597 - RNA, 23 nt, Human
ccagacuucccacggcuccucga

SEQ ID NO: 3354598 - RNA, 17 nt, Human
auuuuuaugccaccuga

SEQ ID NO: 3354599 - RNA, 17 nt, Human
caccuaggcuagggugg

SEQ ID NO: 3354600 - RNA, 19 nt, Human
caccuaggcuagggugggg

SEQ ID NO: 3354601 - RNA, 18 nt, Human
caccuaggcuaggguggg

SEQ ID NO: 3354602 - RNA, 17 nt, Human
acaccccgacuuuuguu

SEQ ID NO: 3354603 - RNA, 14 nt, Human
guggcacuggggca

SEQ ID NO: 3354604 - RNA, 14 nt, Human
gugguggcucggga

SEQ ID NO: 3354605 - RNA, 19 nt, Human
aacucgugucuggcacagc

SEQ ID NO: 3354606 - RNA, 16 nt, Human
gucucccuccucugcc

SEQ ID NO: 3354607 - RNA, 12 nt, Human
gucucccuccuc

SEQ ID NO: 3354608 - RNA, 22 nt, Human
aacacugccagcauuucccuuc

SEQ ID NO: 3354609 - RNA, 12 nt, Human
aacacugccagc

SEQ ID NO: 3354610 - RNA, 19 nt, Human
agacuucccacggcuccuc

SEQ ID NO: 3354611 - RNA, 13 nt, Human
ucuuucuuccaaa

SEQ ID NO: 3354612 - RNA, 20 nt, Human
agaucccaacacugccagca

SEQ ID NO: 3354613 - RNA, 19 nt, Human
agaucccaacacugccagc

SEQ ID NO: 3354614 - RNA, 18 nt, Human
agaucccaacacugccag

SEQ ID NO: 3354615 - RNA, 17 nt, Human
agagucccugccuggac

SEQ ID NO: 3354616 - RNA, 14 nt, Human
agagucccugccug

SEQ ID NO: 3354617 - RNA, 23 nt, Human
agaguccaucagccuccauccua

SEQ ID NO: 3354618 - RNA, 21 nt, Human
agaggccauucuuucccaaca

SEQ ID NO: 3354619 - RNA, 17 nt, Human
ucgagaucccaacacug

SEQ ID NO: 3354620 - RNA, 21 nt, Human
ucgagaucccaacacugccag

SEQ ID NO: 3354621 - RNA, 18 nt, Human
ucgagaucccaacacugc

SEQ ID NO: 3354622 - RNA, 20 nt, Human
ucugagagaggccauucuuu

SEQ ID NO: 3354623 - RNA, 14 nt, Human
ucugagagaggcca

SEQ ID NO: 3354624 - RNA, 19 nt, Human
acucaugugacucuuucca

SEQ ID NO: 3354625 - RNA, 18 nt, Human
acucaugugacucuuucc

SEQ ID NO: 3354626 - RNA, 21 nt, Human
uccacucaugugacucuuucc

SEQ ID NO: 3354627 - RNA, 14 nt, Human
uccacucaugugac

SEQ ID NO: 3354628 - RNA, 21 nt, Human
uccaaccggcuuuguggcacu

SEQ ID NO: 3354629 - RNA, 16 nt, Human
uguggcauccagaguc

SEQ ID NO: 3354630 - RNA, 21 nt, Human
uguggcauccagagucccugc

SEQ ID NO: 3354631 - RNA, 19 nt, Human
uguggcauccagagucccu

SEQ ID NO: 3354632 - RNA, 17 nt, Human
ugugacucuuuccaacc

SEQ ID NO: 3354633 - RNA, 15 nt, Human
ugugacucuuuccaa

SEQ ID NO: 3354634 - RNA, 14 nt, Human
ugugacucuuucca

SEQ ID NO: 3354635 - RNA, 12 nt, Human
ugugacucuuuc

SEQ ID NO: 3354636 - RNA, 14 nt, Human
aguuuagggugggg

SEQ ID NO: 3354637 - RNA, 13 nt, Human
aguuuaggguggg

SEQ ID NO: 3354638 - RNA, 12 nt, Human
aguuuagggugg

SEQ ID NO: 3354639 - RNA, 20 nt, Human
aguucugccaggagacaggu

SEQ ID NO: 3354640 - RNA, 14 nt, Human
aguucugccaggag

SEQ ID NO: 3354641 - RNA, 13 nt, Human
aguucugccagga

SEQ ID NO: 3354642 - RNA, 12 nt, Human
aguucugccagg

SEQ ID NO: 3354643 - RNA, 22 nt, Human
agggaaggaucccaugagcucc

SEQ ID NO: 3354644 - RNA, 15 nt, Human
agggaaggaucccau

SEQ ID NO: 3354645 - RNA, 23 nt, Human
agggaaggaucccaugagcuccu

SEQ ID NO: 3354646 - RNA, 13 nt, Human
uggggagagacgg

SEQ ID NO: 3354647 - RNA, 21 nt, Human
aggguggggggggggcgcggc

SEQ ID NO: 3354648 - RNA, 19 nt, Human
agguuuuuguagugauuuu

SEQ ID NO: 3354649 - RNA, 21 nt, Human
uguagugauuuuuaugccacc

SEQ ID NO: 3354650 - RNA, 15 nt, Human
ugccuugucacgcca

SEQ ID NO: 3354651 - RNA, 22 nt, Human
ugccgagaguccaucagccucc

SEQ ID NO: 3354652 - RNA, 23 nt, Human
agccccgcguggaacucgugucu

SEQ ID NO: 3354653 - RNA, 16 nt, Human
agccucuccacucaug

SEQ ID NO: 3354654 - RNA, 19 nt, Human
uuucccuuccuuccucucc

SEQ ID NO: 3354655 - RNA, 15 nt, Human
uuuguagugauuuuu

SEQ ID NO: 3354656 - RNA, 22 nt, Human
uuuguagugauuuuuaugccac

SEQ ID NO: 3354657 - RNA, 18 nt, Human
uuuguaagguuuuuguag

SEQ ID NO: 3354658 - RNA, 17 nt, Human
uucuaguucugccagga

SEQ ID NO: 3354659 - RNA, 16 nt, Human
uucuaguucugccagg

SEQ ID NO: 3354660 - RNA, 17 nt, Human
aucccaacacugccagc

SEQ ID NO: 3354661 - RNA, 16 nt, Human
aucccaacacugccag

SEQ ID NO: 3354662 - RNA, 15 nt, Human
aucccaacacugcca

SEQ ID NO: 3354663 - RNA, 11 nt, Human
aucccaacacu

SEQ ID NO: 3354664 - RNA, 12 nt, Human
uucugccaggag

SEQ ID NO: 3354665 - RNA, 16 nt, Human
uuggacuugucccggg

SEQ ID NO: 3354666 - RNA, 15 nt, Human
aggagggcaggcauc

SEQ ID NO: 3354667 - RNA, 13 nt, Human
aggagggcaggca

SEQ ID NO: 3354668 - RNA, 15 nt, Human
aggagggaggugcuu

SEQ ID NO: 3354669 - RNA, 20 nt, Human
aggagacagguuagcugcuc

SEQ ID NO: 3354670 - RNA, 19 nt, Human
aggcaucggggagccggga

SEQ ID NO: 3354671 - RNA, 19 nt, Human
aggcuaggguggggagaga

SEQ ID NO: 3354672 - RNA, 16 nt, Human
aggcuaggguggggag

SEQ ID NO: 3354673 - RNA, 15 nt, Human
aggcuagggugggga

SEQ ID NO: 3354674 - RNA, 14 nt, Human
aggcuagggugggg

SEQ ID NO: 3354675 - RNA, 22 nt, Human
agagaggccauucuuucccaac

SEQ ID NO: 3354676 - RNA, 12 nt, Human
agagaggccauu

SEQ ID NO: 3354677 - RNA, 14 nt, Human
acccucaucuuucu

SEQ ID NO: 3354678 - RNA, 13 nt, Human
acccucaucuuuc

SEQ ID NO: 3354679 - RNA, 19 nt, Human
acccucaucuuucuuccaa

SEQ ID NO: 3354680 - RNA, 16 nt, Human
acccucaucuuucuuc

SEQ ID NO: 3354681 - RNA, 13 nt, Human
accggggccuggg

SEQ ID NO: 3354682 - RNA, 14 nt, Human
aacaggcucagagg

SEQ ID NO: 3354683 - RNA, 16 nt, Human
gggaguuuaggguggg

SEQ ID NO: 3354684 - RNA, 23 nt, Human
gggaggugcuucuaguucugcca

SEQ ID NO: 3354685 - RNA, 17 nt, Human
gggcagucugagagagg

SEQ ID NO: 3354686 - RNA, 19 nt, Human
gggcagucugagagaggcc

SEQ ID NO: 3354687 - RNA, 18 nt, Human
gggcagucugagagaggc

SEQ ID NO: 3354688 - RNA, 12 nt, Human
gggccugggcag

SEQ ID NO: 3354689 - RNA, 15 nt, Human
gggccugggcaggag

SEQ ID NO: 3354690 - RNA, 13 nt, Human
gggccugggcagg

SEQ ID NO: 3354691 - RNA, 21 nt, Human
gggcagucugagagaggccau

SEQ ID NO: 3354692 - RNA, 20 nt, Human
gggcagucugagagaggcca

SEQ ID NO: 3354693 - RNA, 15 nt, Human
gggaaggaucccaug

SEQ ID NO: 3354694 - RNA, 21 nt, Human
gguguccugcaccggggccug

SEQ ID NO: 3354695 - RNA, 15 nt, Human
ggugguggcucggga

SEQ ID NO: 3354696 - RNA, 15 nt, Human
ggggcagucugagag

SEQ ID NO: 3354697 - RNA, 18 nt, Human
ggggcagucugagagagg

SEQ ID NO: 3354698 - RNA, 19 nt, Human
ggggcagucugagagaggc

SEQ ID NO: 3354699 - RNA, 16 nt, Human
ggggcgcggcugggag

SEQ ID NO: 3354700 - RNA, 15 nt, Human
ggggcgcggcuggga

SEQ ID NO: 3354701 - RNA, 17 nt, Human
gggccugggcaggaggg

SEQ ID NO: 3354702 - RNA, 16 nt, Human
gggccugggcaggagg

SEQ ID NO: 3354703 - RNA, 15 nt, Human
gggggagagggcugc

SEQ ID NO: 3354704 - RNA, 13 nt, Human
ggagggcaggcau

SEQ ID NO: 3354705 - RNA, 16 nt, Human
ggagccgggagccuga

SEQ ID NO: 3354706 - RNA, 20 nt, Human
ggaggagggcaggcaucggg

SEQ ID NO: 3354707 - RNA, 15 nt, Human
ggaggagggcaggca

SEQ ID NO: 3354708 - RNA, 14 nt, Human
ggaggagggcaggc

SEQ ID NO: 3354709 - RNA, 17 nt, Human
ggaaggaucccaugagc

SEQ ID NO: 3354710 - RNA, 20 nt, Human
ggcagucugagagaggccau

SEQ ID NO: 3354711 - RNA, 20 nt, Human
ggaucccaugagcuccuuaa

SEQ ID NO: 3354712 - RNA, 17 nt, Human
ggaucccaugagcuccu

SEQ ID NO: 3354713 - RNA, 23 nt, Human
gcugggacaccccgacuuuuguu

SEQ ID NO: 3354714 - RNA, 20 nt, Human
gcugccuuuggacuuguccc

SEQ ID NO: 3354715 - RNA, 15 nt, Human
gcugccuuuggacuu

SEQ ID NO: 3354716 - RNA, 17 nt, Human
gcugggaggagggcagg

SEQ ID NO: 3354717 - RNA, 18 nt, Human
gcuucuaguucugccagg

SEQ ID NO: 3354718 - RNA, 21 nt, Human
gcuucuaguucugccaggaga

SEQ ID NO: 3354719 - RNA, 20 nt, Human
gcuucuaguucugccaggag

SEQ ID NO: 3354720 - RNA, 19 nt, Human
gcuucuaguucugccagga

SEQ ID NO: 3354721 - RNA, 20 nt, Human
ggaaccgaggcagggaagga

SEQ ID NO: 3354722 - RNA, 16 nt, Human
ggaaccgaggcaggga

SEQ ID NO: 3354723 - RNA, 15 nt, Human
ggaaccgaggcaggg

SEQ ID NO: 3354724 - RNA, 17 nt, Human
ggaacucgugucuggca

SEQ ID NO: 3354725 - RNA, 13 nt, Human
gccccgcguggaa

SEQ ID NO: 3354726 - RNA, 21 nt, Human
gccagacuucccacggcuccu

SEQ ID NO: 3354727 - RNA, 21 nt, Human
gccgagaguccaucagccucc

SEQ ID NO: 3354728 - RNA, 14 nt, Human
gccgggagccugac

SEQ ID NO: 3354729 - RNA, 13 nt, Human
gccgggagccuga

SEQ ID NO: 3354730 - RNA, 19 nt, Human
gccgggagccugacccuca

SEQ ID NO: 3354731 - RNA, 17 nt, Human
gccuaaccugccgagag

SEQ ID NO: 3354732 - RNA, 19 nt, Human
gcacagccuggcuguggcc

SEQ ID NO: 3354733 - RNA, 12 nt, Human
gcacagccuggc

SEQ ID NO: 3354734 - RNA, 15 nt, Human
gcaggagggaggugc

SEQ ID NO: 3354735 - RNA, 18 nt, Human
gacuucccacggcuccuc

SEQ ID NO: 3354736 - RNA, 20 nt, Human
gaagcguuguccucagcccc

SEQ ID NO: 3354737 - RNA, 19 nt, Human
gaagcguuguccucagccc

SEQ ID NO: 3354738 - RNA, 13 nt, Human
gaagcguuguccu

SEQ ID NO: 3354739 - RNA, 14 nt, Human
cuuccuuccucucc

SEQ ID NO: 3354740 - RNA, 13 nt, Human
cuccuuaaggcuc

SEQ ID NO: 3354741 - RNA, 22 nt, Human
cuccuuaaggcucuuuuguaag

SEQ ID NO: 3354742 - RNA, 14 nt, Human
cuggcacagccugg

SEQ ID NO: 3354743 - RNA, 12 nt, Human
cuggaccagccu

SEQ ID NO: 3354744 - RNA, 20 nt, Human
cugccagcauuucccuuccu

SEQ ID NO: 3354745 - RNA, 16 nt, Human
cugccaggagacaggu

SEQ ID NO: 3354746 - RNA, 14 nt, Human
ccuggaccagccuc

SEQ ID NO: 3354747 - RNA, 16 nt, Human
ccuggaccagccucuc

SEQ ID NO: 3354748 - RNA, 15 nt, Human
ccuggaccagccucu

SEQ ID NO: 3354749 - RNA, 16 nt, Human
cgggagcucaggaacc

SEQ ID NO: 3354750 - RNA, 23 nt, Human
cggcugggaggagggcaggcauc

SEQ ID NO: 3354751 - RNA, 18 nt, Human
cggcugggaggagggcag

SEQ ID NO: 3354752 - RNA, 22 nt, Human
cggcugggaggagggcaggcau

SEQ ID NO: 3354753 - RNA, 19 nt, Human
cgucagcugggacaccccg

SEQ ID NO: 3354754 - RNA, 15 nt, Human
ccuccucugcccggg

SEQ ID NO: 3354755 - RNA, 14 nt, Human
ccuccucugcccgg

SEQ ID NO: 3354756 - RNA, 23 nt, Human
ccucuccacucaugugacucuuu

SEQ ID NO: 3354757 - RNA, 22 nt, Human
ccgacuuuuguuuaccagagaa

SEQ ID NO: 3354758 - RNA, 16 nt, Human
ccaaacaggcucagag

SEQ ID NO: 3354759 - RNA, 13 nt, Human
ccaacacugccag

SEQ ID NO: 3354760 - RNA, 16 nt, Human
ccaacacugccagcau

SEQ ID NO: 3354761 - RNA, 15 nt, Human
ccaacacugccagca

SEQ ID NO: 3354762 - RNA, 14 nt, Human
ccaacacugccagc

SEQ ID NO: 3354763 - RNA, 21 nt, Human
ccacgucagcugggacacccc

SEQ ID NO: 3354764 - RNA, 13 nt, Human
ccaucagccucca

SEQ ID NO: 3354765 - RNA, 13 nt, Human
cccaacaccucuu

SEQ ID NO: 3354766 - RNA, 14 nt, Human
ugucacgccagacu

SEQ ID NO: 3354767 - RNA, 20 nt, Human
ugcuucuaguucugccagga

SEQ ID NO: 3354768 - RNA, 19 nt, Human
ugcuucuaguucugccagg

SEQ ID NO: 3354769 - RNA, 18 nt, Human
ugcuucuaguucugccag

SEQ ID NO: 3354770 - RNA, 16 nt, Human
uggggcaggggccggg

SEQ ID NO: 3354771 - RNA, 18 nt, Human
uggggcaggggccggggg

SEQ ID NO: 3354772 - RNA, 13 nt, Human
uaggcuagggugg

SEQ ID NO: 3354773 - RNA, 21 nt, Human
uagugauuuuuaugccaccug

SEQ ID NO: 3354774 - RNA, 20 nt, Human
uagugauuuuuaugccaccu

SEQ ID NO: 3354775 - RNA, 22 nt, Human
uagugauuuuuaugccaccuga

SEQ ID NO: 3354776 - RNA, 19 nt, Human
ucuuuuguaagguuuuugu

SEQ ID NO: 3354777 - RNA, 18 nt, Human
ucucccuccucugcccgg

SEQ ID NO: 3354778 - RNA, 16 nt, Human
uccuuaaggcucuuuu

SEQ ID NO: 3354779 - RNA, 19 nt, Human
uccuuaaggcucuuuugua

SEQ ID NO: 3354780 - RNA, 18 nt, Human
ucacgccagacuucccac

SEQ ID NO: 3354781 - RNA, 18 nt, Zaire Ebola virus (ZEBOV)
agccaaaaacaucagugg

SEQ ID NO: 3354782 - RNA, 22 nt, Zaire Ebola virus (ZEBOV)
gcaccuuuucaauccucaaccg

SEQ ID NO: 3354783 - RNA, 21 nt, Zaire Ebola virus (ZEBOV)
uacacgaucguuuuauaauua

SEQ ID NO: 3354784 - RNA, 17 nt, Zaire Ebola virus (ZEBOV)
agaccacaaaaucaugg

SEQ ID NO: 3354785 - RNA, 18 nt, Zaire Ebola virus (ZEBOV)
aucaaagaaaaucauaau

SEQ ID NO: 3354786 - RNA, 19 nt, Zaire Ebola virus (ZEBOV)
uauacucguaauuaacauu

SEQ ID NO: 3354787 - RNA, 13 nt, Zaire Ebola virus (ZEBOV)
ugauacuugcaaa

SEQ ID NO: 3354788 - RNA, 16 nt, Zaire Ebola virus (ZEBOV)
aaauuccucugcaaug

SEQ ID NO: 3354789 - RNA, 23 nt, Zaire Ebola virus (ZEBOV)
uaccauauuucgggccagcagcc

SEQ ID NO: 3354790 - RNA, 19 nt, Zaire Ebola virus (ZEBOV)
ucuacuugaucacaauacu

SEQ ID NO: 3354791 - RNA, 18 nt, Zaire Ebola virus (ZEBOV)
caaaccaaaagugaugaa

SEQ ID NO: 3354792 - RNA, 16 nt, Zaire Ebola virus (ZEBOV)
uuacaccauugucuuu

SEQ ID NO: 3354793 - RNA, 13 nt, Zaire Ebola virus (ZEBOV)
uguauaaacuuga

SEQ ID NO: 3354794 - RNA, 16 nt, Zaire Ebola virus (ZEBOV)
gaacauaacagacaaa

SEQ ID NO: 3354795 - RNA, 22 nt, Zaire Ebola virus (ZEBOV)
agccuccgacacucccucugcc

SEQ ID NO: 3354796 - RNA, 19 nt, Zaire Ebola virus (ZEBOV)
uuacuagccguuuuucaaa

SEQ ID NO: 3354797 - RNA, 16 nt, Zaire Ebola virus (ZEBOV)
aaaucaaugaaaccag

SEQ ID NO: 3354798 - RNA, 21 nt, Zaire Ebola virus (ZEBOV)
gcuucagaaaauuccucugca

SEQ ID NO: 3354799 - RNA, 13 nt, Zaire Ebola virus (ZEBOV)
gaacuucuuccga

SEQ ID NO: 3354800 - RNA, 20 nt, Zaire Ebola virus (ZEBOV)
uucuguauaugcaaauuugu

SEQ ID NO: 3354801 - RNA, 20 nt, Zaire Ebola virus (ZEBOV)
cacuugugaguaucagcccu

SEQ ID NO: 3354802 - RNA, 18 nt, Zaire Ebola virus (ZEBOV)
uuaaauuacauuaugcuu

SEQ ID NO: 3354803 - RNA, 18 nt, Zaire Ebola virus (ZEBOV)
gaccagggggacaaugac

SEQ ID NO: 3354804 - RNA, 14 nt, Zaire Ebola virus (ZEBOV)
aaaauauaaaugua

SEQ ID NO: 3354805 - RNA, 23 nt, Zaire Ebola virus (ZEBOV)
aacagacaacgacagcacagccu

SEQ ID NO: 3354806 - RNA, 23 nt, Zaire Ebola virus (ZEBOV)
gaauuauuaucacaauaaaagug

SEQ ID NO: 3354807 - RNA, 17 nt, Zaire Ebola virus (ZEBOV)
aaagcagagaacaccaa

SEQ ID NO: 3354808 - RNA, 12 nt, Zaire Ebola virus (ZEBOV)
aguauccugaua

SEQ ID NO: 3354809 - RNA, 14 nt, Zaire Ebola virus (ZEBOV)
uugucaaugcucaa

SEQ ID NO: 3354810 - RNA, 13 nt, Zaire Ebola virus (ZEBOV)
auaauauacuugu

SEQ ID NO: 3354811 - RNA, 16 nt, Zaire Ebola virus (ZEBOV)
cuaauaacauuacaaa

SEQ ID NO: 3354812 - RNA, 20 nt, Zaire Ebola virus (ZEBOV)
cuuucucauugcacauacuu

SEQ ID NO: 3354813 - RNA, 17 nt, Zaire Ebola virus (ZEBOV)
cauaguauccugauacu

SEQ ID NO: 3354814 - RNA, 14 nt, Zaire Ebola virus (ZEBOV)
cucauauuucuuga

SEQ ID NO: 3354815 - RNA, 17 nt, Zaire Ebola virus (ZEBOV)
cuuaaaauauaaaugua

SEQ ID NO: 3354816 - RNA, 18 nt, Zaire Ebola virus (ZEBOV)
cuuauuuuugaauuuaaa

SEQ ID NO: 3354817 - RNA, 19 nt, Zaire Ebola virus (ZEBOV)
ggacccccaaaagcagaga

SEQ ID NO: 3354818 - RNA, 13 nt, Zaire Ebola virus (ZEBOV)
caacaacaacacu

SEQ ID NO: 3354819 - RNA, 14 nt, Zaire Ebola virus (ZEBOV)
cuuacaucugagga

SEQ ID NO: 3354820 - RNA, 18 nt, Zaire Ebola virus (ZEBOV)
cgcagaacagacaacgac

SEQ ID NO: 3354821 - RNA, 17 nt, Zaire Ebola virus (ZEBOV)
uagccagugugacuugg

SEQ ID NO: 3354822 - RNA, 14 nt, Zaire Ebola virus (ZEBOV)
ucgggccagcagcc

SEQ ID NO: 3354823 - RNA, 13 nt, Zaire Ebola virus (ZEBOV)
gauacuugcaaag

SEQ ID NO: 3354824 - RNA, 16 nt, Zaire Ebola virus (ZEBOV)
accagaaauccuauau

SEQ ID NO: 3354825 - RNA, 21 nt, Zaire Ebola virus (ZEBOV)
acagcgagaccgcuggcaaca

SEQ ID NO: 3354826 - RNA, 22 nt, Zaire Ebola virus (ZEBOV)
aacacgagcaagagcacugacu

SEQ ID NO: 3354827 - RNA, 13 nt, Zaire Ebola virus (ZEBOV)
acagauucuauau

SEQ ID NO: 3354828 - RNA, 14 nt, Zaire Ebola virus (ZEBOV)
cuucaacugcugaa

SEQ ID NO: 3354829 - RNA, 15 nt, Zaire Ebola virus (ZEBOV)
ucugaggcaacucaa

SEQ ID NO: 3354830 - RNA, 17 nt, Zaire Ebola virus (ZEBOV)
aagugauucuuguacac

SEQ ID NO: 3354831 - RNA, 17 nt, Zaire Ebola virus (ZEBOV)
cagcuuccaaguugaca

SEQ ID NO: 3354832 - RNA, 14 nt, Zaire Ebola virus (ZEBOV)
agaacucgaagaga

SEQ ID NO: 3354833 - RNA, 13 nt, Zaire Ebola virus (ZEBOV)
agauuacuugaca

SEQ ID NO: 3354834 - RNA, 18 nt, Zaire Ebola virus (ZEBOV)
cugagagccacaacugag

SEQ ID NO: 3354835 - RNA, 12 nt, Zaire Ebola virus (ZEBOV)
auugcacauacu

SEQ ID NO: 3354836 - RNA, 15 nt, Zaire Ebola virus (ZEBOV)
auugacucagaucca

SEQ ID NO: 3354837 - RNA, 12 nt, Zaire Ebola virus (ZEBOV)
auaaacuugaca

SEQ ID NO: 3354838 - RNA, 20 nt, Zaire Ebola virus (ZEBOV)
ccggacccccaaaagcagag

SEQ ID NO: 3354839 - RNA, 16 nt, Zaire Ebola virus (ZEBOV)
aggauggagacaaugg

SEQ ID NO: 3354840 - RNA, 18 nt, Zaire Ebola virus (ZEBOV)
gauaaacuugaugaagau

SEQ ID NO: 3354841 - RNA, 15 nt, Zaire Ebola virus (ZEBOV)
uccacgaguccccaa

SEQ ID NO: 3354842 - RNA, 16 nt, Zaire Ebola virus (ZEBOV)
ucauggaaaagcucag

SEQ ID NO: 3354843 - RNA, 20 nt, Zaire Ebola virus (ZEBOV)
acguuacauuaaugauacac

SEQ ID NO: 3354844 - RNA, 18 nt, Zaire Ebola virus (ZEBOV)
aauugguggacaggaugg

SEQ ID NO: 3354845 - RNA, 17 nt, Zaire Ebola virus (ZEBOV)
caauacggugauucaaa

SEQ ID NO: 3354846 - RNA, 13 nt, Zaire Ebola virus (ZEBOV)
guuguucacaauc

SEQ ID NO: 3354847 - RNA, 15 nt, Zaire Ebola virus (ZEBOV)
ucaaccgacaaauag

SEQ ID NO: 3354848 - RNA, 14 nt, Zaire Ebola virus (ZEBOV)
acaaccaaaccagg

SEQ ID NO: 3354849 - RNA, 20 nt, Zaire Ebola virus (ZEBOV)
uucuuguacacaaauaaugu

SEQ ID NO: 3354850 - RNA, 21 nt, Zaire Ebola virus (ZEBOV)
gccaccacaacaaguccccaa

SEQ ID NO: 3354851 - RNA, 22 nt, Zaire Ebola virus (ZEBOV)
aacgacagcacagccuccgaca

SEQ ID NO: 3354852 - RNA, 20 nt, Zaire Ebola virus (ZEBOV)
aaccaaaccagguccggaca

SEQ ID NO: 3354853 - RNA, 15 nt, Zaire Ebola virus (ZEBOV)
agcuaacucauauau

SEQ ID NO: 3354854 - RNA, 12 nt, Zaire Ebola virus (ZEBOV)
aaugaaaccagg

SEQ ID NO: 3354855 - RNA, 19 nt, Zaire Ebola virus (ZEBOV)
uugagaaugauaaacuuga

SEQ ID NO: 3354856 - RNA, 19 nt, Zaire Ebola virus (ZEBOV)
aguauccugauacuugcaa

SEQ ID NO: 3354857 - RNA, 12 nt, Zaire Ebola virus (ZEBOV)
ugaauuuaaagc

SEQ ID NO: 3354858 - RNA, 16 nt, Zaire Ebola virus (ZEBOV)
auaauuuguuuaacca

SEQ ID NO: 3354859 - RNA, 17 nt, Zaire Ebola virus (ZEBOV)
ugccagcagcgggaagc

SEQ ID NO: 3354860 - RNA, 12 nt, Zaire Ebola virus (ZEBOV)
aucaucauauau

SEQ ID NO: 3354861 - RNA, 15 nt, Zaire Ebola virus (ZEBOV)
auuuuugaugucuaa

SEQ ID NO: 3354862 - RNA, 13 nt, Zaire Ebola virus (ZEBOV)
cacucccucugcc

SEQ ID NO: 3354863 - RNA, 23 nt, Zaire Ebola virus (ZEBOV)
ugcugacucaauaguuaucuuga

SEQ ID NO: 3354864 - RNA, 19 nt, Zaire Ebola virus (ZEBOV)
aggaagggaagcugcagug

SEQ ID NO: 3354865 - RNA, 17 nt, Zaire Ebola virus (ZEBOV)
ucaaggaacgaaaacag

SEQ ID NO: 3354866 - RNA, 21 nt, Zaire Ebola virus (ZEBOV)
agaauuuuugaugucuaaggu

SEQ ID NO: 3354867 - RNA, 19 nt, Zaire Ebola virus (ZEBOV)
cuugaugaagauuaagaaa

SEQ ID NO: 3354868 - RNA, 14 nt, Zaire Ebola virus (ZEBOV)
ucaacuguuccuga

SEQ ID NO: 3354869 - RNA, 20 nt, Zaire Ebola virus (ZEBOV)
auuuacacgaucguuuuaua

SEQ ID NO: 3354870 - RNA, 21 nt, Zaire Ebola virus (ZEBOV)
gauugaugaaagaucauaacu

SEQ ID NO: 3354871 - RNA, 21 nt, Zaire Ebola virus (ZEBOV)
uucaugacuuacuaaugaucu

SEQ ID NO: 3354872 - RNA, 13 nt, Zaire Ebola virus (ZEBOV)
uugagacagcugg

SEQ ID NO: 3354873 - RNA, 15 nt, Zaire Ebola virus (ZEBOV)
agagaacaccaacac

SEQ ID NO: 3354874 - RNA, 16 nt, Zaire Ebola virus (ZEBOV)
caaucggacuggccug

SEQ ID NO: 3354875 - RNA, 20 nt, Zaire Ebola virus (ZEBOV)
cuucagaaaauuccucugca

SEQ ID NO: 3354876 - RNA, 14 nt, Zaire Ebola virus (ZEBOV)
aguuuuauagaauc

SEQ ID NO: 3354877 - RNA, 15 nt, Zaire Ebola virus (ZEBOV)
caacaucaccgcaga

SEQ ID NO: 3354878 - RNA, 12 nt, Zaire Ebola virus (ZEBOV)
guucacaaucca

SEQ ID NO: 3354879 - RNA, 19 nt, Zaire Ebola virus (ZEBOV)
ggagaagaacucgaagaga

SEQ ID NO: 3354880 - RNA, 18 nt, Zaire Ebola virus (ZEBOV)
agaugguuuaaucugugg

SEQ ID NO: 3354881 - RNA, 13 nt, Zaire Ebola virus (ZEBOV)
gacauugcccuuc

SEQ ID NO: 3354882 - RNA, 21 nt, Zaire Ebola virus (ZEBOV)
cccagggaccaacacaacaac

SEQ ID NO: 3354883 - RNA, 14 nt, Zaire Ebola virus (ZEBOV)
ucaaugaaaccagg

SEQ ID NO: 3354884 - RNA, 13 nt, Zaire Ebola virus (ZEBOV)
auuuaucuaaauu

SEQ ID NO: 3354885 - RNA, 19 nt, Zaire Ebola virus (ZEBOV)
caaagguugguuauuaaca

SEQ ID NO: 3354886 - RNA, 19 nt, Zaire Ebola virus (ZEBOV)
caaggaagggaagcugcag

SEQ ID NO: 3354887 - RNA, 21 nt, Zaire Ebola virus (ZEBOV)
ucacauguguuagguuucaca

SEQ ID NO: 3354888 - RNA, 10 nt, Zaire Ebola virus (ZEBOV)
auaauacacc

SEQ ID NO: 3354889 - RNA, 19 nt, Zaire Ebola virus (ZEBOV)
caagauaccggagaagaga

SEQ ID NO: 3354890 - RNA, 19 nt, Zaire Ebola virus (ZEBOV)
cagcacagccuccgacacu

SEQ ID NO: 3354891 - RNA, 19 nt, Zaire Ebola virus (ZEBOV)
cucugccacgaccgcagcc

SEQ ID NO: 3354892 - RNA, 18 nt, Zaire Ebola virus (ZEBOV)
uaauauaugaagagguau

SEQ ID NO: 3354893 - RNA, 18 nt, Zaire Ebola virus (ZEBOV)
aacauuagauaaguagau

SEQ ID NO: 3354894 - RNA, 11 nt, Zaire Ebola virus (ZEBOV)
acauuaaugau

SEQ ID NO: 3354895 - RNA, 23 nt, Zaire Ebola virus (ZEBOV)
aagguugguuauuaacauacaga

SEQ ID NO: 3354896 - RNA, 12 nt, Zaire Ebola virus (ZEBOV)
acagcuggccaa

SEQ ID NO: 3354897 - RNA, 20 nt, Zaire Ebola virus (ZEBOV)
aaguccccaaaaccacagcg

SEQ ID NO: 3354898 - RNA, 14 nt, Zaire Ebola virus (ZEBOV)
caugcuuacaucug

SEQ ID NO: 3354899 - RNA, 17 nt, Zaire Ebola virus (ZEBOV)
augcacaaucaagaugg

SEQ ID NO: 3354900 - RNA, 23 nt, Zaire Ebola virus (ZEBOV)
uuaaacauagccaaugugauucu

SEQ ID NO: 3354901 - RNA, 16 nt, Zaire Ebola virus (ZEBOV)
cauaauuguaacucaa

SEQ ID NO: 3354902 - RNA, 14 nt, Zaire Ebola virus (ZEBOV)
auuaugcuuuuaua

SEQ ID NO: 3354903 - RNA, 20 nt, Zaire Ebola virus (ZEBOV)
uuuaaagcuagcuuauuauu

SEQ ID NO: 3354904 - RNA, 13 nt, Zaire Ebola virus (ZEBOV)
gacaaaugauaau

SEQ ID NO: 3354905 - RNA, 20 nt, Zaire Ebola virus (ZEBOV)
auuguaacucaauauucuaa

SEQ ID NO: 3354906 - RNA, 12 nt, Zaire Ebola virus (ZEBOV)
gcucuucaacug

SEQ ID NO: 3354907 - RNA, 20 nt, Zaire Ebola virus (ZEBOV)
ugcaaagguugguuauuaac

SEQ ID NO: 3354908 - RNA, 15 nt, Zaire Ebola virus (ZEBOV)
agcuuccaaguugac

SEQ ID NO: 3354909 - RNA, 17 nt, Zaire Ebola virus (ZEBOV)
uucaaauguuaaucuuu

SEQ ID NO: 3354910 - RNA, 17 nt, Zaire Ebola virus (ZEBOV)
ucaaguugaacaacauc

SEQ ID NO: 3354911 - RNA, 18 nt, Zaire Ebola virus (ZEBOV)
gacaauugguggacagga

SEQ ID NO: 3354912 - RNA, 14 nt, Zaire Ebola virus (ZEBOV)
gagugccagcagcg

SEQ ID NO: 3354913 - RNA, 18 nt, Zaire Ebola virus (ZEBOV)
aaggaagggaagcugcag

SEQ ID NO: 3354914 - RNA, 17 nt, Zaire Ebola virus (ZEBOV)
uacguuacauuaaugau

SEQ ID NO: 3354915 - RNA, 19 nt, Zaire Ebola virus (ZEBOV)
uaccauauuucgggccagc

SEQ ID NO: 3354916 - RNA, 22 nt, Zaire Ebola virus (ZEBOV)
ucaaacggagccaaaaacauca

SEQ ID NO: 3354917 - RNA, 20 nt, Zaire Ebola virus (ZEBOV)
uaacauuaaguagucaagga

SEQ ID NO: 3354918 - RNA, 12 nt, Zaire Ebola virus (ZEBOV)
aacauacagauu

SEQ ID NO: 3354919 - RNA, 22 nt, Zaire Ebola virus (ZEBOV)
gccggacccccaaaagcagaga

SEQ ID NO: 3354920 - RNA, 18 nt, Zaire Ebola virus (ZEBOV)
ucaaguugaacaacauca

SEQ ID NO: 3354921 - RNA, 21 nt, Zaire Ebola virus (ZEBOV)
aacauaacagacaaaauugau

SEQ ID NO: 3354922 - RNA, 21 nt, Zaire Ebola virus (ZEBOV)
uugacaucaaucuaguuaucu

SEQ ID NO: 3354923 - RNA, 11 nt, Zaire Ebola virus (ZEBOV)
uuauuaacaua

SEQ ID NO: 3354924 - RNA, 18 nt, Zaire Ebola virus (ZEBOV)
caaggaagggaagcugca

SEQ ID NO: 3354925 - RNA, 20 nt, Zaire Ebola virus (ZEBOV)
acaguuaaucauaaacaagg

SEQ ID NO: 3354926 - RNA, 21 nt, Zaire Ebola virus (ZEBOV)
acgacucaagcucuucaacug

SEQ ID NO: 3354927 - RNA, 17 nt, Zaire Ebola virus (ZEBOV)
cagagaacaccaacacg

SEQ ID NO: 3354928 - RNA, 14 nt, Zaire Ebola virus (ZEBOV)
agacagcuggccaa

SEQ ID NO: 3354929 - RNA, 17 nt, Zaire Ebola virus (ZEBOV)
ccaaaagcagagaacac

SEQ ID NO: 3354930 - RNA, 15 nt, Zaire Ebola virus (ZEBOV)
auaaauacucauauu

SEQ ID NO: 3354931 - RNA, 14 nt, Zaire Ebola virus (ZEBOV)
ccacgaccgcagcc

SEQ ID NO: 3354932 - RNA, 22 nt, Zaire Ebola virus (ZEBOV)
ccucugcaaugguucaagugca

SEQ ID NO: 3354933 - RNA, 15 nt, Zaire Ebola virus (ZEBOV)
ucaaaaaauaaguau

SEQ ID NO: 3354934 - RNA, 17 nt, Zaire Ebola virus (ZEBOV)
gacaacgacagcacagc

SEQ ID NO: 3354935 - RNA, 13 nt, Zaire Ebola virus (ZEBOV)
ugagucuuaaugc

SEQ ID NO: 3354936 - RNA, 16 nt, Zaire Ebola virus (ZEBOV)
cccagggaccaacaca

SEQ ID NO: 3354937 - RNA, 19 nt, Zaire Ebola virus (ZEBOV)
augaauaagcauuuuauca

SEQ ID NO: 3354938 - RNA, 17 nt, Zaire Ebola virus (ZEBOV)
uaacaacccuugccaca

SEQ ID NO: 3354939 - RNA, 18 nt, Zaire Ebola virus (ZEBOV)
ccagcagcgggaagcuag

SEQ ID NO: 3354940 - RNA, 14 nt, Zaire Ebola virus (ZEBOV)
gaaccacaugauug

SEQ ID NO: 3354941 - RNA, 16 nt, Zaire Ebola virus (ZEBOV)
gauaauauaagucaau

SEQ ID NO: 3354942 - RNA, 23 nt, Zaire Ebola virus (ZEBOV)
cugacucaauaguuaucuugaca

SEQ ID NO: 3354943 - RNA, 22 nt, Zaire Ebola virus (ZEBOV)
auaguauccugauacuugcaaa

SEQ ID NO: 3354944 - RNA, 22 nt, Zaire Ebola virus (ZEBOV)
uucaauuugagucuuaaugcaa

SEQ ID NO: 3354945 - RNA, 16 nt, Zaire Ebola virus (ZEBOV)
aagagguaugauacaa

SEQ ID NO: 3354946 - RNA, 14 nt, Zaire Ebola virus (ZEBOV)
aagugauucuuauu

SEQ ID NO: 3354947 - RNA, 23 nt, Zaire Ebola virus (ZEBOV)
gccacaguuauagccauaauugu

SEQ ID NO: 3354948 - RNA, 13 nt, Zaire Ebola virus (ZEBOV)
aacucaaguugaa

SEQ ID NO: 3354949 - RNA, 12 nt, Zaire Ebola virus (ZEBOV)
caacaacacuca

SEQ ID NO: 3354950 - RNA, 15 nt, Zaire Ebola virus (ZEBOV)
ucaaggaagggaagc

SEQ ID NO: 3354951 - RNA, 18 nt, Zaire Ebola virus (ZEBOV)
auuuuugaugucuaaggu

SEQ ID NO: 3354952 - RNA, 21 nt, Zaire Ebola virus (ZEBOV)
agccuccgacacucccucugc

SEQ ID NO: 3354953 - RNA, 21 nt, Zaire Ebola virus (ZEBOV)
aguucaauuugagucuuaaug

SEQ ID NO: 3354954 - RNA, 22 nt, Zaire Ebola virus (ZEBOV)
ccaaaccagguccggacaacag

SEQ ID NO: 3354955 - RNA, 11 nt, Zaire Ebola virus (ZEBOV)
ugccagcagcg

SEQ ID NO: 3354956 - RNA, 22 nt, Zaire Ebola virus (ZEBOV)
ugcaaagguugguuauuaacau

SEQ ID NO: 3354957 - RNA, 16 nt, Zaire Ebola virus (ZEBOV)
agcacugacuuccugg

SEQ ID NO: 3354958 - RNA, 14 nt, Zaire Ebola virus (ZEBOV)
agauauauaagcau

SEQ ID NO: 3354959 - RNA, 12 nt, Zaire Ebola virus (ZEBOV)
augaauaagcau

SEQ ID NO: 3354960 - RNA, 20 nt, Zaire Ebola virus (ZEBOV)
agaacagacaacgacagcac

SEQ ID NO: 3354961 - RNA, 14 nt, Zaire Ebola virus (ZEBOV)
uaauauaauacacu

SEQ ID NO: 3354962 - RNA, 23 nt, Zaire Ebola virus (ZEBOV)
gcaauugauuucuugcugcagcg

SEQ ID NO: 3354963 - RNA, 11 nt, Zaire Ebola virus (ZEBOV)
gaacagacaac

SEQ ID NO: 3354964 - RNA, 20 nt, Zaire Ebola virus (ZEBOV)
ucacuguaagccagcuucca

SEQ ID NO: 3354965 - RNA, 23 nt, Zaire Ebola virus (ZEBOV)
gcaaagguugguuauuaacauac

SEQ ID NO: 3354966 - RNA, 15 nt, Zaire Ebola virus (ZEBOV)
uucuuguacacaaau

SEQ ID NO: 3354967 - RNA, 16 nt, Zaire Ebola virus (ZEBOV)
uagaaucuucucaggg

SEQ ID NO: 3354968 - RNA, 17 nt, Zaire Ebola virus (ZEBOV)
cacagucaaggaaggga

SEQ ID NO: 3354969 - RNA, 19 nt, Zaire Ebola virus (ZEBOV)
acuggacuacucaggauga

SEQ ID NO: 3354970 - RNA, 12 nt, Zaire Ebola virus (ZEBOV)
ggcaauugauuu

SEQ ID NO: 3354971 - RNA, 22 nt, Zaire Ebola virus (ZEBOV)
acaaucaagaugguuuaaucug

SEQ ID NO: 3354972 - RNA, 20 nt, Zaire Ebola virus (ZEBOV)
gcacauacuuuuugcccuua

SEQ ID NO: 3354973 - RNA, 12 nt, Human
aaaaacaacuuu

SEQ ID NO: 3354974 - RNA, 12 nt, Human
aaaacaacuuua

SEQ ID NO: 3354975 - RNA, 19 nt, Human
aaaaacuucaguaaguacg

SEQ ID NO: 3354976 - RNA, 21 nt, Human
aggugcuucuaguucugccag

SEQ ID NO: 3354977 - RNA, 22 nt, Human
aggugcuucuaguucugccagg

SEQ ID NO: 3354978 - RNA, 15 nt, Human
agguggaaauaaacu

SEQ ID NO: 3354979 - RNA, 23 nt, Human
aggugcuucuaguucugccagga

SEQ ID NO: 3354980 - RNA, 16 nt, Human
agguggaagagggcug

SEQ ID NO: 3354981 - RNA, 22 nt, Human
agguuaauuccaauuauaugag

SEQ ID NO: 3354982 - RNA, 15 nt, Human
agguuaauuccaauu

SEQ ID NO: 3354983 - RNA, 23 nt, Human
agguggcaucagugucuuuccac

SEQ ID NO: 3354984 - RNA, 22 nt, Human
agguggcaucagugucuuucca

SEQ ID NO: 3354985 - RNA, 17 nt, Human
agguucaugcaaacuuu

SEQ ID NO: 3354986 - RNA, 17 nt, Human
aggucccuaauaaagcu

SEQ ID NO: 3354987 - RNA, 20 nt, Human
aggucccuaauaaagcugug

SEQ ID NO: 3354988 - RNA, 16 nt, Human
aggucccuaauaaagc

SEQ ID NO: 3354989 - RNA, 19 nt, Human
aggucccuaauaaagcugu

SEQ ID NO: 3354990 - RNA, 18 nt, Human
aggucccuaauaaagcug

SEQ ID NO: 3354991 - RNA, 21 nt, Human
aggcuauggggauagaugugu

SEQ ID NO: 3354992 - RNA, 22 nt, Human
aggcuauggggauagaugugug

SEQ ID NO: 3354993 - RNA, 19 nt, Human
aggcuauggggauagaugu

SEQ ID NO: 3354994 - RNA, 18 nt, Human
aggcugcagccaggccac

SEQ ID NO: 3354995 - RNA, 15 nt, Human
aggaacuacugagga

SEQ ID NO: 3354996 - RNA, 15 nt, Human
agcuuuucccuuuuu

SEQ ID NO: 3354997 - RNA, 21 nt, Human
agcuuuuaugugaaacauguu

SEQ ID NO: 3354998 - RNA, 20 nt, Human
aggaaauggcuguggagugu

SEQ ID NO: 3354999 - RNA, 19 nt, Human
agcuuccuucugugaaagu

SEQ ID NO: 3355000 - RNA, 18 nt, Human
agcuucacuguaaaauaa

SEQ ID NO: 3355001 - RNA, 16 nt, Human
agaggguguccugcac

SEQ ID NO: 3355002 - RNA, 18 nt, Human
agaggggaaaagagauga

SEQ ID NO: 3355003 - RNA, 16 nt, Human
agaggggaaaagagau

SEQ ID NO: 3355004 - RNA, 21 nt, Human
agauaggucagugcaaauacu

SEQ ID NO: 3355005 - RNA, 14 nt, Human
agacgggcccuggu

SEQ ID NO: 3355006 - RNA, 14 nt, Human
agacacaacuauuu

SEQ ID NO: 3355007 - RNA, 15 nt, Human
agaccauagugacca

SEQ ID NO: 3355008 - RNA, 13 nt, Human
agccagaggucug

SEQ ID NO: 3355009 - RNA, 14 nt, Human
agcaugcacaaauu

SEQ ID NO: 3355010 - RNA, 15 nt, Human
auauccuuucuaaca

SEQ ID NO: 3355011 - RNA, 16 nt, Human
auauuuauaaaaauaa

SEQ ID NO: 3355012 - RNA, 18 nt, Human
auauuuaguguucauaaa

SEQ ID NO: 3355013 - RNA, 16 nt, Human
auacuugaaaauuaac

SEQ ID NO: 3355014 - RNA, 15 nt, Human
auacuugaaaauuaa

SEQ ID NO: 3355015 - RNA, 22 nt, Human
auauaaguauucuaaauuuuau

SEQ ID NO: 3355016 - RNA, 19 nt, Human
auauaaguauucuaaauuu

SEQ ID NO: 3355017 - RNA, 15 nt, Human
auauaagugauugcu

SEQ ID NO: 3355018 - RNA, 22 nt, Human
auaaguguguguuuuucauaaa

SEQ ID NO: 3355019 - RNA, 19 nt, Human
auaaguguguguuuuucau

SEQ ID NO: 3355020 - RNA, 19 nt, Human
auaaguauuuaauucaugu

SEQ ID NO: 3355021 - RNA, 16 nt, Human
agugucuuuccacucc

SEQ ID NO: 3355022 - RNA, 20 nt, Human
aguuguaucagcacgugugg

SEQ ID NO: 3355023 - RNA, 23 nt, Human
aguuguaucagcacguguggccu

SEQ ID NO: 3355024 - RNA, 16 nt, Human
augugggggucugugu

SEQ ID NO: 3355025 - RNA, 17 nt, Human
augugggggucugugug

SEQ ID NO: 3355026 - RNA, 18 nt, Human
augugggggucugugugu

SEQ ID NO: 3355027 - RNA, 18 nt, Human
auguuucuuuguaaugaa

SEQ ID NO: 3355028 - RNA, 17 nt, Human
auguaauaacugugaag

SEQ ID NO: 3355029 - RNA, 23 nt, Human
auggugacuuuugaaaagaggug

SEQ ID NO: 3355030 - RNA, 21 nt, Human
augccuuuguacuuuagggaa

SEQ ID NO: 3355031 - RNA, 13 nt, Human
auccuuucuaaca

SEQ ID NO: 3355032 - RNA, 14 nt, Human
augacucagaauau

SEQ ID NO: 3355033 - RNA, 20 nt, Human
augaagcuuuuaugugaaac

SEQ ID NO: 3355034 - RNA, 19 nt, Human
augaagcuuuuaugugaaa

SEQ ID NO: 3355035 - RNA, 18 nt, Human
augaagcuuuuaugugaa

SEQ ID NO: 3355036 - RNA, 20 nt, Human
augaaacacucaguuguuca

SEQ ID NO: 3355037 - RNA, 17 nt, Human
augaaaaaauauauauc

SEQ ID NO: 3355038 - RNA, 14 nt, Human
augaaaaaauauau

SEQ ID NO: 3355039 - RNA, 22 nt, Human
augaaaaaauauauaucaaaua

SEQ ID NO: 3355040 - RNA, 16 nt, Human
aucuuauaauuuaaaa

SEQ ID NO: 3355041 - RNA, 22 nt, Human
aucuuauaauuuaaaauaugcu

SEQ ID NO: 3355042 - RNA, 12 nt, Human
accccgacuuuu

SEQ ID NO: 3355043 - RNA, 15 nt, Human
accccgacuuuuguu

SEQ ID NO: 3355044 - RNA, 15 nt, Human
acagguuagcugcuc

SEQ ID NO: 3355045 - RNA, 15 nt, Human
acagguuugggaccc

SEQ ID NO: 3355046 - RNA, 18 nt, Human
acagguuugggaccccug

SEQ ID NO: 3355047 - RNA, 23 nt, Human
accacuaaaagaucgcaguuugc

SEQ ID NO: 3355048 - RNA, 19 nt, Human
accaagccuggucagccca

SEQ ID NO: 3355049 - RNA, 20 nt, Human
accaagccuggucagcccaa

SEQ ID NO: 3355050 - RNA, 18 nt, Human
accaagccuggucagccc

SEQ ID NO: 3355051 - RNA, 11 nt, Human
acacugccagc

SEQ ID NO: 3355052 - RNA, 15 nt, Human
acacugauccagccc

SEQ ID NO: 3355053 - RNA, 19 nt, Human
acagaauauguuucaaacu

SEQ ID NO: 3355054 - RNA, 21 nt, Human
acagaauauguuucaaacuuu

SEQ ID NO: 3355055 - RNA, 16 nt, Human
acagaauauguuucaa

SEQ ID NO: 3355056 - RNA, 17 nt, Human
acagaauauguuucaaa

SEQ ID NO: 3355057 - RNA, 19 nt, Human
acaggucauauuaauauau

SEQ ID NO: 3355058 - RNA, 15 nt, Human
acaggggcaggagga

SEQ ID NO: 3355059 - RNA, 20 nt, Human
aauuuugaguucuacauaag

SEQ ID NO: 3355060 - RNA, 15 nt, Human
aauuuuauaucuugu

SEQ ID NO: 3355061 - RNA, 13 nt, Human
aauuuugaaaaac

SEQ ID NO: 3355062 - RNA, 16 nt, Human
acaacuauuuuuccaa

SEQ ID NO: 3355063 - RNA, 17 nt, Human
acaacuucaauauccaa

SEQ ID NO: 3355064 - RNA, 18 nt, Human
acaacuucccagugaauu

SEQ ID NO: 3355065 - RNA, 13 nt, Human
acaacuuuauacc

SEQ ID NO: 3355066 - RNA, 14 nt, Human
acaacuuuauaccc

SEQ ID NO: 3355067 - RNA, 16 nt, Human
acgccagacuucccac

SEQ ID NO: 3355068 - RNA, 22 nt, Human
acgccagacuucccacggcucc

SEQ ID NO: 3355069 - RNA, 13 nt, Human
acucuaccucaua

SEQ ID NO: 3355070 - RNA, 22 nt, Human
acucuaccucauaucaguuugc

SEQ ID NO: 3355071 - RNA, 12 nt, Human
acuccccuccuu

SEQ ID NO: 3355072 - RNA, 13 nt, Human
acucagucuuuaa

SEQ ID NO: 3355073 - RNA, 17 nt, Human
acucaggcccaaagccu

SEQ ID NO: 3355074 - RNA, 16 nt, Human
acucaggcccaaagcc

SEQ ID NO: 3355075 - RNA, 14 nt, Human
acuagcuauggugu

SEQ ID NO: 3355076 - RNA, 22 nt, Human
acuucugccagcauaauacuug

SEQ ID NO: 3355077 - RNA, 18 nt, Human
acuuguaaaggaauuuaa

SEQ ID NO: 3355078 - RNA, 19 nt, Human
acuuguaaaggaauuuaaa

SEQ ID NO: 3355079 - RNA, 20 nt, Human
acuuguaaaggaauuuaaaa

SEQ ID NO: 3355080 - RNA, 12 nt, Human
acuguuuugaau

SEQ ID NO: 3355081 - RNA, 23 nt, Human
agaaaauauuauguguuuccaua

SEQ ID NO: 3355082 - RNA, 13 nt, Human
acuuuagggaagu

SEQ ID NO: 3355083 - RNA, 23 nt, Human
acuuuagggaaguacuuuuggca

SEQ ID NO: 3355084 - RNA, 17 nt, Human
aauaagugccaggaugg

SEQ ID NO: 3355085 - RNA, 18 nt, Human
aauaaacuggcagcucag

SEQ ID NO: 3355086 - RNA, 19 nt, Human
aauaaacuauuuguaaagu

SEQ ID NO: 3355087 - RNA, 21 nt, Human
aauaauccuaaacauaugaau

SEQ ID NO: 3355088 - RNA, 13 nt, Human
aauaaucauugga

SEQ ID NO: 3355089 - RNA, 19 nt, Human
aauaauguaagacaaauau

SEQ ID NO: 3355090 - RNA, 12 nt, Human
aauaauguaaga

SEQ ID NO: 3355091 - RNA, 19 nt, Human
aagucucuggaauuugaaa

SEQ ID NO: 3355092 - RNA, 15 nt, Human
aaguacuuuuggcau

SEQ ID NO: 3355093 - RNA, 14 nt, Human
aaguacuuuuggca

SEQ ID NO: 3355094 - RNA, 23 nt, Human
aaguccaggcuuuuuuaucaugu

SEQ ID NO: 3355095 - RNA, 22 nt, Human
aagaaauuaugugccagauuua

SEQ ID NO: 3355096 - RNA, 13 nt, Human
aagaaauuaugug

SEQ ID NO: 3355097 - RNA, 16 nt, Human
aaugucaguaugugga

SEQ ID NO: 3355098 - RNA, 22 nt, Human
aaugucaguauguggaagugug

SEQ ID NO: 3355099 - RNA, 14 nt, Human
aauuaaauuuugag

SEQ ID NO: 3355100 - RNA, 18 nt, Human
aaucucauaauuuauaca

SEQ ID NO: 3355101 - RNA, 21 nt, Human
aaugauaaguaaaugcuaggu

SEQ ID NO: 3355102 - RNA, 18 nt, Human
aaugauaaguaaaugcua

SEQ ID NO: 3355103 - RNA, 16 nt, Human
aaucucauaauuuaua

SEQ ID NO: 3355104 - RNA, 14 nt, Human
aauauuauguguuu

SEQ ID NO: 3355105 - RNA, 17 nt, Human
aacaaagaaauuaugug

SEQ ID NO: 3355106 - RNA, 15 nt, Human
aacaaagaaauuaug

SEQ ID NO: 3355107 - RNA, 21 nt, Human
aaauugauguguuuauuuaua

SEQ ID NO: 3355108 - RNA, 12 nt, Human
aaccagaucauu

SEQ ID NO: 3355109 - RNA, 14 nt, Human
aaccagaucauugu

SEQ ID NO: 3355110 - RNA, 13 nt, Human
aacaugauuuggg

SEQ ID NO: 3355111 - RNA, 16 nt, Human
aacuuuggaacaagau

SEQ ID NO: 3355112 - RNA, 14 nt, Human
aaauaguauuugag

SEQ ID NO: 3355113 - RNA, 12 nt, Human
aaauaacaauga

SEQ ID NO: 3355114 - RNA, 13 nt, Human
aaauaaaggaacc

SEQ ID NO: 3355115 - RNA, 22 nt, Human
aaagucucuggaauuugaaaca

SEQ ID NO: 3355116 - RNA, 20 nt, Human
aaagucucuggaauuugaaa

SEQ ID NO: 3355117 - RNA, 16 nt, Human
aaagggacugagaaau

SEQ ID NO: 3355118 - RNA, 19 nt, Human
aaagucucuggaauuugaa

SEQ ID NO: 3355119 - RNA, 11 nt, Human
aaagaacaucc

SEQ ID NO: 3355120 - RNA, 15 nt, Human
aaagaaauuaugugc

SEQ ID NO: 3355121 - RNA, 13 nt, Human
aaagaaauuaugu

SEQ ID NO: 3355122 - RNA, 17 nt, Human
aaagaguacucuuguuu

SEQ ID NO: 3355123 - RNA, 12 nt, Human
aaagaguacucu

SEQ ID NO: 3355124 - RNA, 20 nt, Human
aaagaaaacuuguauuaugu

SEQ ID NO: 3355125 - RNA, 12 nt, Human
aaagaaaacuug

SEQ ID NO: 3355126 - RNA, 21 nt, Human
aaaauuauuuuguucauacau

SEQ ID NO: 3355127 - RNA, 17 nt, Human
aaacacucuugaaaaau

SEQ ID NO: 3355128 - RNA, 14 nt, Human
aaacacucuugaaa

SEQ ID NO: 3355129 - RNA, 13 nt, Human
aaacacucuugaa

SEQ ID NO: 3355130 - RNA, 16 nt, Human
cuguacuugcucuuga

SEQ ID NO: 3355131 - RNA, 20 nt, Human
cuguacuugcucuugaugcc

SEQ ID NO: 3355132 - RNA, 19 nt, Human
cuguacuugcucuugaugc

SEQ ID NO: 3355133 - RNA, 22 nt, Human
cuggugaccuuccaagagccug

SEQ ID NO: 3355134 - RNA, 23 nt, Human
cuggugaccuuccaagagccuga

SEQ ID NO: 3355135 - RNA, 23 nt, Human
cugugaaguuuacauuguaaaua

SEQ ID NO: 3355136 - RNA, 18 nt, Human
cugugaaguuuacauugu

SEQ ID NO: 3355137 - RNA, 19 nt, Human
cuguuaucccugccugguc

SEQ ID NO: 3355138 - RNA, 23 nt, Human
cuggcccuaugcuuccggccucc

SEQ ID NO: 3355139 - RNA, 16 nt, Human
gaacaagaugguucua

SEQ ID NO: 3355140 - RNA, 19 nt, Human
gaaaucaaagagagaaaau

SEQ ID NO: 3355141 - RNA, 11 nt, Human
gaaacuuggau

SEQ ID NO: 3355142 - RNA, 18 nt, Human
cuuuuaugugaaacaugu

SEQ ID NO: 3355143 - RNA, 19 nt, Human
cuuuuaugugaaacauguu

SEQ ID NO: 3355144 - RNA, 14 nt, Human
cuuuugucccagaa

SEQ ID NO: 3355145 - RNA, 14 nt, Human
gaaaaaauauauau

SEQ ID NO: 3355146 - RNA, 14 nt, Human
gaaaauuaacauga

SEQ ID NO: 3355147 - RNA, 13 nt, Human
cuugaugccuggc

SEQ ID NO: 3355148 - RNA, 17 nt, Human
cuugguuccagccugcc

SEQ ID NO: 3355149 - RNA, 19 nt, Human
cuugguuccagccugccac

SEQ ID NO: 3355150 - RNA, 20 nt, Human
cuugguuccagccugccacu

SEQ ID NO: 3355151 - RNA, 15 nt, Human
cuuccucuccugucu

SEQ ID NO: 3355152 - RNA, 17 nt, Human
cuucuaccucuuggcug

SEQ ID NO: 3355153 - RNA, 15 nt, Human
gacaaagucaagcca

SEQ ID NO: 3355154 - RNA, 13 nt, Human
gaauuauuuuaaa

SEQ ID NO: 3355155 - RNA, 16 nt, Human
gaauuauuuuaaaaga

SEQ ID NO: 3355156 - RNA, 18 nt, Human
gaauuauuuuaaaagaua

SEQ ID NO: 3355157 - RNA, 20 nt, Human
gacccucaucuuucuuccaa

SEQ ID NO: 3355158 - RNA, 16 nt, Human
gagacgggcccuggug

SEQ ID NO: 3355159 - RNA, 20 nt, Human
gaggcucuggagcccacugu

SEQ ID NO: 3355160 - RNA, 22 nt, Human
gaggacaguauuuguggggagg

SEQ ID NO: 3355161 - RNA, 12 nt, Human
gagcccugggag

SEQ ID NO: 3355162 - RNA, 20 nt, Human
gagcccugggaggcucugga

SEQ ID NO: 3355163 - RNA, 19 nt, Human
gagcccugggaggcucugg

SEQ ID NO: 3355164 - RNA, 18 nt, Human
gagcccugggaggcucug

SEQ ID NO: 3355165 - RNA, 16 nt, Human
gagcccugggaggcuc

SEQ ID NO: 3355166 - RNA, 20 nt, Human
gcagccaggccacuggcccc

SEQ ID NO: 3355167 - RNA, 17 nt, Human
gcagagcugcgggcugg

SEQ ID NO: 3355168 - RNA, 19 nt, Human
gcagagcugcgggcugggu

SEQ ID NO: 3355169 - RNA, 22 nt, Human
gcauccagagucccugccugga

SEQ ID NO: 3355170 - RNA, 23 nt, Human
gcauccagagucccugccuggac

SEQ ID NO: 3355171 - RNA, 21 nt, Human
gcauccagagucccugccugg

SEQ ID NO: 3355172 - RNA, 17 nt, Human
gcaucggggagccggga

SEQ ID NO: 3355173 - RNA, 17 nt, Human
gauacuugaaaauuaac

SEQ ID NO: 3355174 - RNA, 16 nt, Human
gaucccaacacugcca

SEQ ID NO: 3355175 - RNA, 17 nt, Human
gaucccaacacugccag

SEQ ID NO: 3355176 - RNA, 23 nt, Human
gauccagcccugaguuccuagcc

SEQ ID NO: 3355177 - RNA, 18 nt, Human
gaucccaacacugccagc

SEQ ID NO: 3355178 - RNA, 19 nt, Human
gaucccaacacugccagca

SEQ ID NO: 3355179 - RNA, 23 nt, Human
gaucucugcaggaaauggcugug

SEQ ID NO: 3355180 - RNA, 12 nt, Human
gaucucugcagg

SEQ ID NO: 3355181 - RNA, 13 nt, Human
gauggaaugaugg

SEQ ID NO: 3355182 - RNA, 20 nt, Human
ggcuaagcuucacuguaaaa

SEQ ID NO: 3355183 - RNA, 19 nt, Human
ggccccugccucucugcag

SEQ ID NO: 3355184 - RNA, 18 nt, Human
ggccccugccucucugca

SEQ ID NO: 3355185 - RNA, 17 nt, Human
ggccccugccucucugc

SEQ ID NO: 3355186 - RNA, 13 nt, Human
ggccccugccucu

SEQ ID NO: 3355187 - RNA, 18 nt, Human
ggcucuugaacugagcuu

SEQ ID NO: 3355188 - RNA, 19 nt, Human
ggcucuugaacugagcuug

SEQ ID NO: 3355189 - RNA, 20 nt, Human
ggcucuugaacugagcuugg

SEQ ID NO: 3355190 - RNA, 23 nt, Human
aaaaagauuuucagaaaauauua

SEQ ID NO: 3355191 - RNA, 14 nt, Human
aaaaauaaaaaaca

SEQ ID NO: 3355192 - RNA, 16 nt, Human
ggcauccagagucccu

SEQ ID NO: 3355193 - RNA, 22 nt, Human
ggcaucggggagccgggagccu

SEQ ID NO: 3355194 - RNA, 23 nt, Human
ggcaucggggagccgggagccug

SEQ ID NO: 3355195 - RNA, 12 nt, Human
ggcaggggccgg

SEQ ID NO: 3355196 - RNA, 14 nt, Human
ggcaggagggaggu

SEQ ID NO: 3355197 - RNA, 14 nt, Human
ggagggggagaggg

SEQ ID NO: 3355198 - RNA, 11 nt, Human
ggaguguguaa

SEQ ID NO: 3355199 - RNA, 22 nt, Human
ggaguguguaauuuaaaauugu

SEQ ID NO: 3355200 - RNA, 14 nt, Human
ggauuguaguccca

SEQ ID NO: 3355201 - RNA, 22 nt, Human
ggaucuucaucugacuaugaca

SEQ ID NO: 3355202 - RNA, 23 nt, Human
ggaucuucaucugacuaugacau

SEQ ID NO: 3355203 - RNA, 22 nt, Human
gguggggggggggcgcggcugg

SEQ ID NO: 3355204 - RNA, 16 nt, Human
gguggggggcuucaua

SEQ ID NO: 3355205 - RNA, 18 nt, Human
gguggggggcuucauaca

SEQ ID NO: 3355206 - RNA, 20 nt, Human
gguucuagcauggcauauuu

SEQ ID NO: 3355207 - RNA, 14 nt, Human
gguuccagccugcc

SEQ ID NO: 3355208 - RNA, 15 nt, Human
gguuccagccugcca

SEQ ID NO: 3355209 - RNA, 16 nt, Human
gguuccagccugccac

SEQ ID NO: 3355210 - RNA, 22 nt, Human
gguuuguuuagaagaagugugu

SEQ ID NO: 3355211 - RNA, 14 nt, Human
gguuugggaccccu

SEQ ID NO: 3355212 - RNA, 14 nt, Human
aaagcuguguggca

SEQ ID NO: 3355213 - RNA, 18 nt, Human
aaagguucaugcaaacuu

SEQ ID NO: 3355214 - RNA, 21 nt, Human
aaaguaaaaacaaagaaauua

SEQ ID NO: 3355215 - RNA, 15 nt, Human
guaauagagcaaaau

SEQ ID NO: 3355216 - RNA, 13 nt, Human
guaaaccuuuuau

SEQ ID NO: 3355217 - RNA, 20 nt, Human
aaauauuguguugugaaugu

SEQ ID NO: 3355218 - RNA, 18 nt, Human
aaauauaugcuaagucuu

SEQ ID NO: 3355219 - RNA, 14 nt, Human
aaauauauaucaaa

SEQ ID NO: 3355220 - RNA, 14 nt, Human
aaauauauuuaaug

SEQ ID NO: 3355221 - RNA, 15 nt, Human
aaauauauuuaauga

SEQ ID NO: 3355222 - RNA, 22 nt, Human
aaauauauuuuaagacgaaaca

SEQ ID NO: 3355223 - RNA, 16 nt, Human
aaauauauuuuaagac

SEQ ID NO: 3355224 - RNA, 17 nt, Human
ggguguccugcaccggg

SEQ ID NO: 3355225 - RNA, 22 nt, Human
gguaaaucagacuaugaaguuu

SEQ ID NO: 3355226 - RNA, 16 nt, Human
gguaggaacugcuggg

SEQ ID NO: 3355227 - RNA, 18 nt, Human
gguaggaacugcugggcu

SEQ ID NO: 3355228 - RNA, 21 nt, Human
aaacuucccuuucugcuugug

SEQ ID NO: 3355229 - RNA, 14 nt, Human
ggucagugcaaaua

SEQ ID NO: 3355230 - RNA, 22 nt, Human
gggggcagucugagagaggcca

SEQ ID NO: 3355231 - RNA, 21 nt, Human
gggucaucuguaccucugccu

SEQ ID NO: 3355232 - RNA, 18 nt, Human
gggucauucauggccugg

SEQ ID NO: 3355233 - RNA, 15 nt, Human
aaaccaccagaagcc

SEQ ID NO: 3355234 - RNA, 18 nt, Human
aaaccaccagaagcccag

SEQ ID NO: 3355235 - RNA, 14 nt, Human
aaaccaccagaagc

SEQ ID NO: 3355236 - RNA, 19 nt, Human
aaaccaccagaagcccaga

SEQ ID NO: 3355237 - RNA, 14 nt, Human
aaaauauuuaaagg

SEQ ID NO: 3355238 - RNA, 15 nt, Human
aaaauauauuuaaug

SEQ ID NO: 3355239 - RNA, 16 nt, Human
aaaauauauuuaauga

SEQ ID NO: 3355240 - RNA, 12 nt, Human
aaaaugagaaau

SEQ ID NO: 3355241 - RNA, 11 nt, Human
aaaaugagaaa

SEQ ID NO: 3355242 - RNA, 18 nt, Human
gcucagaggguguccugc

SEQ ID NO: 3355243 - RNA, 19 nt, Human
gcucagaggguguccugca

SEQ ID NO: 3355244 - RNA, 22 nt, Human
gcucaggagcccugggaggcuc

SEQ ID NO: 3355245 - RNA, 23 nt, Human
gcucaggagcccugggaggcucu

SEQ ID NO: 3355246 - RNA, 21 nt, Human
gcucaggagcccugggaggcu

SEQ ID NO: 3355247 - RNA, 16 nt, Human
gcucagagcaguguuu

SEQ ID NO: 3355248 - RNA, 21 nt, Human
gcucacugcuaagaauauuug

SEQ ID NO: 3355249 - RNA, 17 nt, Human
gcuaggguggggagaga

SEQ ID NO: 3355250 - RNA, 18 nt, Human
gcuaggguggggagagac

SEQ ID NO: 3355251 - RNA, 21 nt, Human
gcuaggaauuguguuuauaau

SEQ ID NO: 3355252 - RNA, 21 nt, Human
gcguggaacucgugucuggca

SEQ ID NO: 3355253 - RNA, 16 nt, Human
gcggcuggacuuggag

SEQ ID NO: 3355254 - RNA, 15 nt, Human
gcggcuggacuugga

SEQ ID NO: 3355255 - RNA, 19 nt, Human
gccauucuuucccaacacc

SEQ ID NO: 3355256 - RNA, 12 nt, Human
gccauucuuucc

SEQ ID NO: 3355257 - RNA, 22 nt, Human
gcccacuguacuugcucuugau

SEQ ID NO: 3355258 - RNA, 20 nt, Human
gcccacuguacuugcucuug

SEQ ID NO: 3355259 - RNA, 15 nt, Human
gcccacuguacuugc

SEQ ID NO: 3355260 - RNA, 13 nt, Human
gcuggacuuggag

SEQ ID NO: 3355261 - RNA, 20 nt, Human
gcugggaauaagugccagga

SEQ ID NO: 3355262 - RNA, 18 nt, Human
gcugggccccugccucuc

SEQ ID NO: 3355263 - RNA, 12 nt, Human
gcugggccccug

SEQ ID NO: 3355264 - RNA, 14 nt, Human
gcugggccccugcc

SEQ ID NO: 3355265 - RNA, 13 nt, Human
gcugggccccugc

SEQ ID NO: 3355266 - RNA, 23 nt, Human
gcugcagccaggccacuggcccc

SEQ ID NO: 3355267 - RNA, 15 nt, Human
gcugcagccaggcca

SEQ ID NO: 3355268 - RNA, 16 nt, Human
ggacaccccgacuuuu

SEQ ID NO: 3355269 - RNA, 18 nt, Human
ggaaugaagcaaugcuuc

SEQ ID NO: 3355270 - RNA, 16 nt, Human
ggacaccuaggcuagg

SEQ ID NO: 3355271 - RNA, 18 nt, Human
ggacaguauuugugggga

SEQ ID NO: 3355272 - RNA, 17 nt, Human
ggacaggggcaggagga

SEQ ID NO: 3355273 - RNA, 19 nt, Human
ggacaguauuuguggggag

SEQ ID NO: 3355274 - RNA, 21 nt, Human
ggaaacuaggugcauauuuau

SEQ ID NO: 3355275 - RNA, 20 nt, Human
gcuuuucccuuuuuuuaagu

SEQ ID NO: 3355276 - RNA, 22 nt, Human
gcuuuuccucaaagggagagag

SEQ ID NO: 3355277 - RNA, 21 nt, Human
gcuuuucccuuuuuuuaagua

SEQ ID NO: 3355278 - RNA, 17 nt, Human
gcuuuucuuucuaccaa

SEQ ID NO: 3355279 - RNA, 14 nt, Human
cugagagaggccau

SEQ ID NO: 3355280 - RNA, 21 nt, Human
cugagagaggccauucuuucc

SEQ ID NO: 3355281 - RNA, 22 nt, Human
cugagagaggccauucuuuccc

SEQ ID NO: 3355282 - RNA, 13 nt, Human
cugagagaggcca

SEQ ID NO: 3355283 - RNA, 12 nt, Human
cugagaggccac

SEQ ID NO: 3355284 - RNA, 16 nt, Human
cugagaucucugcagg

SEQ ID NO: 3355285 - RNA, 17 nt, Human
cugagaucucugcagga

SEQ ID NO: 3355286 - RNA, 18 nt, Human
cugagaucucugcaggaa

SEQ ID NO: 3355287 - RNA, 13 nt, Human
cucugcagguccc

SEQ ID NO: 3355288 - RNA, 17 nt, Human
cucugcaggucccuaau

SEQ ID NO: 3355289 - RNA, 16 nt, Human
cucugcaggucccuaa

SEQ ID NO: 3355290 - RNA, 15 nt, Human
cucugcaggucccua

SEQ ID NO: 3355291 - RNA, 14 nt, Human
cucugcaggucccu

SEQ ID NO: 3355292 - RNA, 22 nt, Human
cugaagcuaucguaaaauuaag

SEQ ID NO: 3355293 - RNA, 21 nt, Human
cugaagcuaucguaaaauuaa

SEQ ID NO: 3355294 - RNA, 13 nt, Human
cugaaacuucccu

SEQ ID NO: 3355295 - RNA, 22 nt, Human
cugaaaauugaugggauuuggu

SEQ ID NO: 3355296 - RNA, 21 nt, Human
cucuugaugccuggcggggug

SEQ ID NO: 3355297 - RNA, 16 nt, Human
cucuugaugccuggcg

SEQ ID NO: 3355298 - RNA, 15 nt, Human
cucuugaugccuggc

SEQ ID NO: 3355299 - RNA, 13 nt, Human
cucuugaugccug

SEQ ID NO: 3355300 - RNA, 18 nt, Human
cucaugugacucuuucca

SEQ ID NO: 3355301 - RNA, 14 nt, Human
cucaugugacucuu

SEQ ID NO: 3355302 - RNA, 23 nt, Human
cuccaagcccaguucagcuuggg

SEQ ID NO: 3355303 - RNA, 15 nt, Human
cucgugucuggcaca

SEQ ID NO: 3355304 - RNA, 12 nt, Human
cuccuacagccc

SEQ ID NO: 3355305 - RNA, 21 nt, Human
cuaauucuuugaccuguuggg

SEQ ID NO: 3355306 - RNA, 22 nt, Human
cuaauucuuugaccuguuggga

SEQ ID NO: 3355307 - RNA, 19 nt, Human
cuagccaccgccuccuaca

SEQ ID NO: 3355308 - RNA, 17 nt, Human
cuaucguaaaauuaaga

SEQ ID NO: 3355309 - RNA, 18 nt, Human
cuaucguaaaauuaagaa

SEQ ID NO: 3355310 - RNA, 23 nt, Human
cgccacuguuuugaaucucauaa

SEQ ID NO: 3355311 - RNA, 16 nt, Human
cgacagagcgagacuu

SEQ ID NO: 3355312 - RNA, 16 nt, Human
cgaauuuuaaaagaug

SEQ ID NO: 3355313 - RNA, 14 nt, Human
cguaaaauuaagaa

SEQ ID NO: 3355314 - RNA, 18 nt, Human
caacaccucuuggggagu

SEQ ID NO: 3355315 - RNA, 20 nt, Human
caaauccuugugggaaaaga

SEQ ID NO: 3355316 - RNA, 22 nt, Human
caaauccagccugcugccugcu

SEQ ID NO: 3355317 - RNA, 22 nt, Human
caaaugagggucuugguuccag

SEQ ID NO: 3355318 - RNA, 20 nt, Human
caacuauuuuuccaaaauaa

SEQ ID NO: 3355319 - RNA, 15 nt, Human
caaaccaccagaagc

SEQ ID NO: 3355320 - RNA, 16 nt, Human
caaaccaccagaagcc

SEQ ID NO: 3355321 - RNA, 20 nt, Human
caaaccaccagaagcccaga

SEQ ID NO: 3355322 - RNA, 22 nt, Human
caaaccaccagaagcccagaau

SEQ ID NO: 3355323 - RNA, 22 nt, Human
auucaagaaaacaacuucaaua

SEQ ID NO: 3355324 - RNA, 18 nt, Human
auuaaauuuugaguucua

SEQ ID NO: 3355325 - RNA, 21 nt, Human
auuauguguguuuuaaaauga

SEQ ID NO: 3355326 - RNA, 20 nt, Human
auuauguguguuuuaaaaug

SEQ ID NO: 3355327 - RNA, 15 nt, Human
auuauguguguuuua

SEQ ID NO: 3355328 - RNA, 23 nt, Human
auuaugugccagauuuaugcaua

SEQ ID NO: 3355329 - RNA, 19 nt, Human
auucuuugaccuguuggga

SEQ ID NO: 3355330 - RNA, 13 nt, Human
auucugagagcug

SEQ ID NO: 3355331 - RNA, 14 nt, Human
auucugagagcugu

SEQ ID NO: 3355332 - RNA, 17 nt, Human
auucuugccaaauauaa

SEQ ID NO: 3355333 - RNA, 17 nt, Human
auugauccagaaagaaa

SEQ ID NO: 3355334 - RNA, 16 nt, Human
auugauccagaaagaa

SEQ ID NO: 3355335 - RNA, 18 nt, Human
auuguaagcaugcacaaa

SEQ ID NO: 3355336 - RNA, 14 nt, Human
auuguaaauaguau

SEQ ID NO: 3355337 - RNA, 19 nt, Human
auugauccagaaagaaaac

SEQ ID NO: 3355338 - RNA, 18 nt, Human
auugauccagaaagaaaa

SEQ ID NO: 3355339 - RNA, 22 nt, Human
auugauccagaaagaaaacuug

SEQ ID NO: 3355340 - RNA, 22 nt, Human
auuuaaugauaaguaaaugcua

SEQ ID NO: 3355341 - RNA, 19 nt, Human
auuuauacaggucauauua

SEQ ID NO: 3355342 - RNA, 15 nt, Human
cacuggggcaggggc

SEQ ID NO: 3355343 - RNA, 13 nt, Human
cacuggggcaggg

SEQ ID NO: 3355344 - RNA, 23 nt, Human
cacuggggauugggccccugcca

SEQ ID NO: 3355345 - RNA, 15 nt, Human
cacuggggauugggc

SEQ ID NO: 3355346 - RNA, 16 nt, Human
cacuggggauugggcc

SEQ ID NO: 3355347 - RNA, 17 nt, Human
cacuggggauugggccc

SEQ ID NO: 3355348 - RNA, 18 nt, Human
cacuggggauugggcccc

SEQ ID NO: 3355349 - RNA, 21 nt, Human
cagaauaaacuggcagcucag

SEQ ID NO: 3355350 - RNA, 12 nt, Human
cagaauauguuu

SEQ ID NO: 3355351 - RNA, 13 nt, Human
cagaauauguuuc

SEQ ID NO: 3355352 - RNA, 14 nt, Human
cagaauauguuuca

SEQ ID NO: 3355353 - RNA, 15 nt, Human
cagaauauguuucaa

SEQ ID NO: 3355354 - RNA, 17 nt, Human
cagaauauguuucaaac

SEQ ID NO: 3355355 - RNA, 18 nt, Human
cagaauauguuucaaacu

SEQ ID NO: 3355356 - RNA, 20 nt, Human
cagaauauguuucaaacuuu

SEQ ID NO: 3355357 - RNA, 13 nt, Human
cagaauauugcuu

SEQ ID NO: 3355358 - RNA, 17 nt, Human
cacucuugaaaaaugca

SEQ ID NO: 3355359 - RNA, 15 nt, Human
cacucuuggagccug

SEQ ID NO: 3355360 - RNA, 16 nt, Human
cacucuuggagccugc

SEQ ID NO: 3355361 - RNA, 14 nt, Human
cacucuuggagccu

SEQ ID NO: 3355362 - RNA, 17 nt, Human
cacucuuggagccugca

SEQ ID NO: 3355363 - RNA, 19 nt, Human
cacucuuggagccugcaga

SEQ ID NO: 3355364 - RNA, 17 nt, Human
cagaggguguccugcac

SEQ ID NO: 3355365 - RNA, 17 nt, Human
cagagguugcagugugg

SEQ ID NO: 3355366 - RNA, 21 nt, Human
cagaguaauccaagcaaaugu

SEQ ID NO: 3355367 - RNA, 13 nt, Human
cagcauaauacuu

SEQ ID NO: 3355368 - RNA, 23 nt, Human
cagguuugggaccccuggugguu

SEQ ID NO: 3355369 - RNA, 23 nt, Human
caguaaagaacaucccuccuggg

SEQ ID NO: 3355370 - RNA, 21 nt, Human
cagugggccuggccagcaggu

SEQ ID NO: 3355371 - RNA, 14 nt, Human
cagugggccuggcc

SEQ ID NO: 3355372 - RNA, 15 nt, Human
cagugggccuggcca

SEQ ID NO: 3355373 - RNA, 16 nt, Human
cagggcugaggccucu

SEQ ID NO: 3355374 - RNA, 18 nt, Human
cagggcugaggccucuca

SEQ ID NO: 3355375 - RNA, 16 nt, Human
cagggaugguguucaa

SEQ ID NO: 3355376 - RNA, 21 nt, Human
ccaccacacugauccagcccu

SEQ ID NO: 3355377 - RNA, 13 nt, Human
ccaccgccuccua

SEQ ID NO: 3355378 - RNA, 14 nt, Human
ccacuccuccuagc

SEQ ID NO: 3355379 - RNA, 23 nt, Human
cauaugcuguauauccuuucuaa

SEQ ID NO: 3355380 - RNA, 14 nt, Human
cauauuaauauauu

SEQ ID NO: 3355381 - RNA, 15 nt, Human
cauauuaauauauuu

SEQ ID NO: 3355382 - RNA, 19 nt, Human
cauauuaauauauuuccau

SEQ ID NO: 3355383 - RNA, 17 nt, Human
cauggcucccccuccac

SEQ ID NO: 3355384 - RNA, 13 nt, Human
aguccaucagccu

SEQ ID NO: 3355385 - RNA, 14 nt, Human
aguccaucagccuc

SEQ ID NO: 3355386 - RNA, 22 nt, Human
aguccaggcuuuuuuaucaugu

SEQ ID NO: 3355387 - RNA, 18 nt, Human
ugucuaaauuugaauguu

SEQ ID NO: 3355388 - RNA, 14 nt, Human
ugucuaagauagua

SEQ ID NO: 3355389 - RNA, 15 nt, Human
ugucuaagauaguaa

SEQ ID NO: 3355390 - RNA, 21 nt, Human
aguauuuaauucauguugccu

SEQ ID NO: 3355391 - RNA, 14 nt, Human
aguauguguaaaau

SEQ ID NO: 3355392 - RNA, 20 nt, Human
uguaugugggggucugugug

SEQ ID NO: 3355393 - RNA, 21 nt, Human
uguaugugggggucugugugu

SEQ ID NO: 3355394 - RNA, 22 nt, Human
uguaugugggggucuguguguu

SEQ ID NO: 3355395 - RNA, 22 nt, Human
uguauccauccauggggcugau

SEQ ID NO: 3355396 - RNA, 16 nt, Human
agguuugggaccccug

SEQ ID NO: 3355397 - RNA, 21 nt, Human
agguuugggaccccugguggu

SEQ ID NO: 3355398 - RNA, 22 nt, Human
uguauuacaaauccaaugaaau

SEQ ID NO: 3355399 - RNA, 22 nt, Human
ugucucuggauuauauuaugaa

SEQ ID NO: 3355400 - RNA, 19 nt, Human
agucuccaaagucucugga

SEQ ID NO: 3355401 - RNA, 17 nt, Human
agugaaagaaaauaaca

SEQ ID NO: 3355402 - RNA, 16 nt, Human
ugugauguauucuagc

SEQ ID NO: 3355403 - RNA, 11 nt, Human
ugugauguguc

SEQ ID NO: 3355404 - RNA, 22 nt, Human
ugguguucaaaaaacuuguaaa

SEQ ID NO: 3355405 - RNA, 21 nt, Human
ugguguucaaaaaacuuguaa

SEQ ID NO: 3355406 - RNA, 20 nt, Human
ugguucacucuuggagccug

SEQ ID NO: 3355407 - RNA, 21 nt, Human
ugguucacucuuggagccugc

SEQ ID NO: 3355408 - RNA, 22 nt, Human
ugguucacucuuggagccugca

SEQ ID NO: 3355409 - RNA, 17 nt, Human
ugguucacucuuggagc

SEQ ID NO: 3355410 - RNA, 18 nt, Human
ugguuuuaguugcaacuu

SEQ ID NO: 3355411 - RNA, 15 nt, Human
uguacuuaacuauuc

SEQ ID NO: 3355412 - RNA, 15 nt, Human
uguacuugcucuuga

SEQ ID NO: 3355413 - RNA, 14 nt, Human
uguacauauaagug

SEQ ID NO: 3355414 - RNA, 15 nt, Human
uguaaggcaaucaug

SEQ ID NO: 3355415 - RNA, 23 nt, Human
agguagcuuugagguggaagagg

SEQ ID NO: 3355416 - RNA, 15 nt, Human
aggucagugcaaaua

SEQ ID NO: 3355417 - RNA, 16 nt, Human
uggucugggacucucu

SEQ ID NO: 3355418 - RNA, 22 nt, Human
ugguccaugggccauaugaaaa

SEQ ID NO: 3355419 - RNA, 15 nt, Human
ugggucugugugugu

SEQ ID NO: 3355420 - RNA, 13 nt, Human
ugggucugugugu

SEQ ID NO: 3355421 - RNA, 15 nt, Human
agggugaaaauuauu

SEQ ID NO: 3355422 - RNA, 23 nt, Human
ugggaauaagugccaggauggaa

SEQ ID NO: 3355423 - RNA, 22 nt, Human
agggucuugguuccagccugcc

SEQ ID NO: 3355424 - RNA, 21 nt, Human
agggucuugguuccagccugc

SEQ ID NO: 3355425 - RNA, 22 nt, Human
aguugcauagguuuaauaauuu

SEQ ID NO: 3355426 - RNA, 16 nt, Human
aguuucguuuucaaaa

SEQ ID NO: 3355427 - RNA, 15 nt, Human
aguuucguuuucaaa

SEQ ID NO: 3355428 - RNA, 20 nt, Human
aguucucuucacucaaggau

SEQ ID NO: 3355429 - RNA, 15 nt, Human
uguuugcaucugaaa

SEQ ID NO: 3355430 - RNA, 19 nt, Human
aguugcaacuuuguauaaa

SEQ ID NO: 3355431 - RNA, 18 nt, Human
uguugggagugaggaugu

SEQ ID NO: 3355432 - RNA, 15 nt, Human
aguucuaaauuuugu

SEQ ID NO: 3355433 - RNA, 20 nt, Human
aguucggugagcuacaaaug

SEQ ID NO: 3355434 - RNA, 17 nt, Human
aguuauugauaaguuca

SEQ ID NO: 3355435 - RNA, 19 nt, Human
aguuauugauaaguucaua

SEQ ID NO: 3355436 - RNA, 21 nt, Human
aguuauugauaaguucauaca

SEQ ID NO: 3355437 - RNA, 22 nt, Human
aguuauugauaaguucauacau

SEQ ID NO: 3355438 - RNA, 23 nt, Human
aguuauugauaaguucauacauu

SEQ ID NO: 3355439 - RNA, 20 nt, Human
aguuauuauauuuacaaaug

SEQ ID NO: 3355440 - RNA, 21 nt, Human
auaauuuuaagaaaucaaaga

SEQ ID NO: 3355441 - RNA, 15 nt, Human
auaauuuuaagaaau

SEQ ID NO: 3355442 - RNA, 14 nt, Human
auaauuuuaagaaa

SEQ ID NO: 3355443 - RNA, 19 nt, Human
uuauauauauauauauuuc

SEQ ID NO: 3355444 - RNA, 14 nt, Human
uuauauaaguauuc

SEQ ID NO: 3355445 - RNA, 16 nt, Human
uuauauaaguauucua

SEQ ID NO: 3355446 - RNA, 13 nt, Human
uuauauaaguauu

SEQ ID NO: 3355447 - RNA, 18 nt, Human
uuauacccagaaaguuau

SEQ ID NO: 3355448 - RNA, 19 nt, Human
uuauacccagaaaguuauu

SEQ ID NO: 3355449 - RNA, 23 nt, Human
uuauacccagaaaguuauugaua

SEQ ID NO: 3355450 - RNA, 23 nt, Human
uuauagaguguacuuaacuauuc

SEQ ID NO: 3355451 - RNA, 14 nt, Human
uuaucaacauuugu

SEQ ID NO: 3355452 - RNA, 22 nt, Human
uuaucaaagggugaaaauuauu

SEQ ID NO: 3355453 - RNA, 17 nt, Human
uuaucaugugaaaucau

SEQ ID NO: 3355454 - RNA, 20 nt, Human
uuaucaugugaaaucauuca

SEQ ID NO: 3355455 - RNA, 18 nt, Human
uuaucaugugaaaucauu

SEQ ID NO: 3355456 - RNA, 22 nt, Human
uuaucaugugaaaucauucauu

SEQ ID NO: 3355457 - RNA, 21 nt, Human
auacauuguacgaagaguauu

SEQ ID NO: 3355458 - RNA, 22 nt, Human
auacauuguacgaagaguauuu

SEQ ID NO: 3355459 - RNA, 14 nt, Human
auacauuguacgaa

SEQ ID NO: 3355460 - RNA, 19 nt, Human
auacauauuuuuguagcac

SEQ ID NO: 3355461 - RNA, 16 nt, Human
auacagggaugguguu

SEQ ID NO: 3355462 - RNA, 21 nt, Human
auacaguucggugagcuacaa

SEQ ID NO: 3355463 - RNA, 15 nt, Human
auacaggucauauua

SEQ ID NO: 3355464 - RNA, 21 nt, Human
auacaggucauauuaauauau

SEQ ID NO: 3355465 - RNA, 14 nt, Human
auaaugaauacuuu

SEQ ID NO: 3355466 - RNA, 18 nt, Human
auaaucacaacccuucag

SEQ ID NO: 3355467 - RNA, 20 nt, Human
auaaucagugugucuaaauu

SEQ ID NO: 3355468 - RNA, 11 nt, Human
auaaguucaua

SEQ ID NO: 3355469 - RNA, 13 nt, Human
auaaguucauaca

SEQ ID NO: 3355470 - RNA, 14 nt, Human
auaaguucauacau

SEQ ID NO: 3355471 - RNA, 15 nt, Human
auaaguucauacauu

SEQ ID NO: 3355472 - RNA, 21 nt, Human
auaaguucauacauuguacga

SEQ ID NO: 3355473 - RNA, 12 nt, Human
auaacugugaag

SEQ ID NO: 3355474 - RNA, 19 nt, Human
auaaauaaaguuuguugaa

SEQ ID NO: 3355475 - RNA, 13 nt, Human
auaaauaaaguuu

SEQ ID NO: 3355476 - RNA, 14 nt, Human
auaaauaaaaauaa

SEQ ID NO: 3355477 - RNA, 18 nt, Human
auaaacuggcagcucagc

SEQ ID NO: 3355478 - RNA, 16 nt, Human
auaaaccucaaaaugu

SEQ ID NO: 3355479 - RNA, 18 nt, Human
auaaacacucuugaaaaa

SEQ ID NO: 3355480 - RNA, 23 nt, Human
auaaacacucuugaaaaaugcau

SEQ ID NO: 3355481 - RNA, 16 nt, Human
uggaccagccucucca

SEQ ID NO: 3355482 - RNA, 22 nt, Human
uggaccagccucuccacucaug

SEQ ID NO: 3355483 - RNA, 22 nt, Human
uggaauuggguggggggcuuca

SEQ ID NO: 3355484 - RNA, 18 nt, Human
aggagcccugggaggcuc

SEQ ID NO: 3355485 - RNA, 19 nt, Human
aggagcccugggaggcucu

SEQ ID NO: 3355486 - RNA, 13 nt, Human
ugcuccccacguc

SEQ ID NO: 3355487 - RNA, 18 nt, Human
ugcuauuguagagccaga

SEQ ID NO: 3355488 - RNA, 22 nt, Human
ugcuauuguagagccagagguc

SEQ ID NO: 3355489 - RNA, 11 nt, Human
aggaauuuaaa

SEQ ID NO: 3355490 - RNA, 23 nt, Human
aggaauuguguuuauaauuuuaa

SEQ ID NO: 3355491 - RNA, 11 nt, Human
ugcuucauaca

SEQ ID NO: 3355492 - RNA, 14 nt, Human
ugcuucauacaggg

SEQ ID NO: 3355493 - RNA, 15 nt, Human
ugcuucauacaggga

SEQ ID NO: 3355494 - RNA, 16 nt, Human
ugcuucauacagggau

SEQ ID NO: 3355495 - RNA, 15 nt, Human
aggccauucuuuccc

SEQ ID NO: 3355496 - RNA, 22 nt, Human
uggaccuuuccugaggaagagg

SEQ ID NO: 3355497 - RNA, 18 nt, Human
uggacgagaaaacaauaa

SEQ ID NO: 3355498 - RNA, 17 nt, Human
aggccauucuuucccaa

SEQ ID NO: 3355499 - RNA, 18 nt, Human
aggccauucuuucccaac

SEQ ID NO: 3355500 - RNA, 19 nt, Human
aggccauucuuucccaaca

SEQ ID NO: 3355501 - RNA, 12 nt, Human
aggcccaaagcc

SEQ ID NO: 3355502 - RNA, 13 nt, Human
aggcccaaagccu

SEQ ID NO: 3355503 - RNA, 15 nt, Human
aggcccaaagccucg

SEQ ID NO: 3355504 - RNA, 21 nt, Human
aggccucucauuccagaggaa

SEQ ID NO: 3355505 - RNA, 16 nt, Human
uggccaguggcuggau

SEQ ID NO: 3355506 - RNA, 14 nt, Human
uggccaguggcugg

SEQ ID NO: 3355507 - RNA, 15 nt, Human
uggccaguggcugga

SEQ ID NO: 3355508 - RNA, 22 nt, Human
uggcugccuugugaaggaauua

SEQ ID NO: 3355509 - RNA, 16 nt, Human
uggcuaugagggccuu

SEQ ID NO: 3355510 - RNA, 16 nt, Human
uggcucuugaacugag

SEQ ID NO: 3355511 - RNA, 13 nt, Human
aggcucuggagcc

SEQ ID NO: 3355512 - RNA, 15 nt, Human
aggcucuggagccca

SEQ ID NO: 3355513 - RNA, 14 nt, Human
aggcucuggagccc

SEQ ID NO: 3355514 - RNA, 18 nt, Human
aggcucuggagcccacug

SEQ ID NO: 3355515 - RNA, 15 nt, Human
aggcugcuuuccaaa

SEQ ID NO: 3355516 - RNA, 17 nt, Human
aggcugcuuuccaaagc

SEQ ID NO: 3355517 - RNA, 18 nt, Human
aggcugcuuuccaaagcc

SEQ ID NO: 3355518 - RNA, 19 nt, Human
aggcugcuuuccaaagcca

SEQ ID NO: 3355519 - RNA, 21 nt, Human
aggcugcuuuccaaagccaau

SEQ ID NO: 3355520 - RNA, 13 nt, Human
aggcugcuuucca

SEQ ID NO: 3355521 - RNA, 14 nt, Human
aggcugcuuuccaa

SEQ ID NO: 3355522 - RNA, 14 nt, Human
ugaugggauuuggu

SEQ ID NO: 3355523 - RNA, 15 nt, Human
agccacgguguucug

SEQ ID NO: 3355524 - RNA, 16 nt, Human
agcccacuguacuugc

SEQ ID NO: 3355525 - RNA, 14 nt, Human
agcccacuguacuu

SEQ ID NO: 3355526 - RNA, 12 nt, Human
ugccucucugca

SEQ ID NO: 3355527 - RNA, 11 nt, Human
ugccucucugc

SEQ ID NO: 3355528 - RNA, 14 nt, Human
agcugccugugccu

SEQ ID NO: 3355529 - RNA, 23 nt, Human
ugccucucugcaggucccuaaua

SEQ ID NO: 3355530 - RNA, 21 nt, Human
ugccucucugcaggucccuaa

SEQ ID NO: 3355531 - RNA, 19 nt, Human
agcuauggugucauaggcu

SEQ ID NO: 3355532 - RNA, 17 nt, Human
agcuaucguaaaauuaa

SEQ ID NO: 3355533 - RNA, 17 nt, Human
agcggcuggacuuggag

SEQ ID NO: 3355534 - RNA, 21 nt, Human
agcggcuggacuuggagguag

SEQ ID NO: 3355535 - RNA, 22 nt, Human
uuguccucagccccgcguggaa

SEQ ID NO: 3355536 - RNA, 18 nt, Human
uugucccugaagagaagg

SEQ ID NO: 3355537 - RNA, 13 nt, Human
uugugaaauuauu

SEQ ID NO: 3355538 - RNA, 13 nt, Human
uugucacgccaga

SEQ ID NO: 3355539 - RNA, 20 nt, Human
uugucacgccagacuuccca

SEQ ID NO: 3355540 - RNA, 19 nt, Human
augacauaaaaacaacuuu

SEQ ID NO: 3355541 - RNA, 10 nt, Human
uugugugugg

SEQ ID NO: 3355542 - RNA, 13 nt, Human
uugugugugggag

SEQ ID NO: 3355543 - RNA, 16 nt, Human
uugugugugggagugu

SEQ ID NO: 3355544 - RNA, 18 nt, Human
uugugaagguggaaauaa

SEQ ID NO: 3355545 - RNA, 17 nt, Human
uugugaagguggaaaua

SEQ ID NO: 3355546 - RNA, 22 nt, Human
augcaaacuuuauuuuguguuu

SEQ ID NO: 3355547 - RNA, 14 nt, Human
uugcugaaagaucu

SEQ ID NO: 3355548 - RNA, 16 nt, Human
uugcuuuuaaaaucca

SEQ ID NO: 3355549 - RNA, 12 nt, Human
uuguaaugaaaa

SEQ ID NO: 3355550 - RNA, 13 nt, Human
uuguaaugaaaac

SEQ ID NO: 3355551 - RNA, 22 nt, Human
uuguaagcaugcacaaauucug

SEQ ID NO: 3355552 - RNA, 17 nt, Human
uuuaaaggcccuaucug

SEQ ID NO: 3355553 - RNA, 14 nt, Human
uuuaugugaaacau

SEQ ID NO: 3355554 - RNA, 19 nt, Human
augcuguauauccuuucua

SEQ ID NO: 3355555 - RNA, 22 nt, Human
uuucagaaaauauuauguguuu

SEQ ID NO: 3355556 - RNA, 12 nt, Human
uuucauaaagca

SEQ ID NO: 3355557 - RNA, 17 nt, Human
uuuauuuuuuucugaau

SEQ ID NO: 3355558 - RNA, 19 nt, Human
uuugaaacacuuugcauaa

SEQ ID NO: 3355559 - RNA, 17 nt, Human
uuugaaacacuuugcau

SEQ ID NO: 3355560 - RNA, 18 nt, Human
aucggggagccgggagcc

SEQ ID NO: 3355561 - RNA, 12 nt, Human
aucguaaaauua

SEQ ID NO: 3355562 - RNA, 16 nt, Human
aucggggagccgggag

SEQ ID NO: 3355563 - RNA, 17 nt, Human
aucguaaaauuaagaaa

SEQ ID NO: 3355564 - RNA, 14 nt, Human
aucguaaaauuaag

SEQ ID NO: 3355565 - RNA, 13 nt, Human
aucguaaaauuaa

SEQ ID NO: 3355566 - RNA, 17 nt, Human
uugaaggaaaaugauac

SEQ ID NO: 3355567 - RNA, 17 nt, Human
uugaagggaaauuucag

SEQ ID NO: 3355568 - RNA, 16 nt, Human
uugauaaguucauaca

SEQ ID NO: 3355569 - RNA, 17 nt, Human
uugauaaguucauacau

SEQ ID NO: 3355570 - RNA, 14 nt, Human
uugagaguucuaaa

SEQ ID NO: 3355571 - RNA, 20 nt, Human
auccauggggcugauuguau

SEQ ID NO: 3355572 - RNA, 16 nt, Human
auccaagcaaauguga

SEQ ID NO: 3355573 - RNA, 22 nt, Human
uucuuaaccagaucauugugaa

SEQ ID NO: 3355574 - RNA, 20 nt, Human
aucagugugucuaaauuuga

SEQ ID NO: 3355575 - RNA, 23 nt, Human
aucagugugucuaaauuugaaug

SEQ ID NO: 3355576 - RNA, 22 nt, Human
aucaguuugcuagcagaaaucu

SEQ ID NO: 3355577 - RNA, 19 nt, Human
aucauugugaaauuauuca

SEQ ID NO: 3355578 - RNA, 15 nt, Human
aucauugugaaauua

SEQ ID NO: 3355579 - RNA, 13 nt, Human
aucauugugaaau

SEQ ID NO: 3355580 - RNA, 17 nt, Human
auauuuuucacauaucu

SEQ ID NO: 3355581 - RNA, 18 nt, Human
auauuuuucacauaucua

SEQ ID NO: 3355582 - RNA, 16 nt, Human
auauuuuuguagcacu

SEQ ID NO: 3355583 - RNA, 23 nt, Human
auauuuuuguagcacugacagau

SEQ ID NO: 3355584 - RNA, 15 nt, Human
auauuuuuguagcac

SEQ ID NO: 3355585 - RNA, 15 nt, Human
uucccuuuuuuuaag

SEQ ID NO: 3355586 - RNA, 21 nt, Human
auauuugaauguaugcuucau

SEQ ID NO: 3355587 - RNA, 21 nt, Human
uuccuaaauauauuuuaagac

SEQ ID NO: 3355588 - RNA, 20 nt, Human
uuccuaaauauauuuuaaga

SEQ ID NO: 3355589 - RNA, 17 nt, Human
uucccagugaauucuug

SEQ ID NO: 3355590 - RNA, 16 nt, Human
auauguucugacauaa

SEQ ID NO: 3355591 - RNA, 13 nt, Human
auauguuucaaac

SEQ ID NO: 3355592 - RNA, 14 nt, Human
auauguuucaaacu

SEQ ID NO: 3355593 - RNA, 16 nt, Human
auauguuucaaacuuu

SEQ ID NO: 3355594 - RNA, 22 nt, Human
auauuuaaaggcccuaucuguu

SEQ ID NO: 3355595 - RNA, 23 nt, Human
auauuuaaugauaaguaaaugcu

SEQ ID NO: 3355596 - RNA, 13 nt, Human
auauuuaaugaua

SEQ ID NO: 3355597 - RNA, 12 nt, Human
auauuuaaugau

SEQ ID NO: 3355598 - RNA, 13 nt, Human
auauuuacaaaug

SEQ ID NO: 3355599 - RNA, 22 nt, Human
auaugagcuuccuucugugaaa

SEQ ID NO: 3355600 - RNA, 21 nt, Human
auaugagcuuccuucugugaa

SEQ ID NO: 3355601 - RNA, 15 nt, Human
auauauuuaaugaua

SEQ ID NO: 3355602 - RNA, 16 nt, Human
auauauuuaaugauaa

SEQ ID NO: 3355603 - RNA, 9 nt, Human
auauauuuc

SEQ ID NO: 3355604 - RNA, 15 nt, Human
auauauuuuaagacg

SEQ ID NO: 3355605 - RNA, 13 nt, Human
auauaugcuaagu

SEQ ID NO: 3355606 - RNA, 16 nt, Human
uucagauuugccuuau

SEQ ID NO: 3355607 - RNA, 20 nt, Human
auuucccuuccuuccucucc

SEQ ID NO: 3355608 - RNA, 22 nt, Human
auuuauaaaaauaaaaaacacu

SEQ ID NO: 3355609 - RNA, 17 nt, Human
auuuauaaaaauaaaaa

SEQ ID NO: 3355610 - RNA, 20 nt, Human
auuuaguaucuuuuuauuca

SEQ ID NO: 3355611 - RNA, 16 nt, Human
auugggccccugccag

SEQ ID NO: 3355612 - RNA, 15 nt, Human
auugggccccugcca

SEQ ID NO: 3355613 - RNA, 20 nt, Human
auuggguggggggcuucaua

SEQ ID NO: 3355614 - RNA, 21 nt, Human
auuggguggggggcuucauac

SEQ ID NO: 3355615 - RNA, 24 nt, Human
auucugucucuggauuauauuaug

SEQ ID NO: 3355616 - RNA, 13 nt, Human
auugugauguguc

SEQ ID NO: 3355617 - RNA, 14 nt, Human
auugugaugugucc

SEQ ID NO: 3355618 - RNA, 15 nt, Human
auugugauguguccu

SEQ ID NO: 3355619 - RNA, 12 nt, Human
auugguguugac

SEQ ID NO: 3355620 - RNA, 15 nt, Human
auuguauuacaaauc

SEQ ID NO: 3355621 - RNA, 13 nt, Human
auuguauucagag

SEQ ID NO: 3355622 - RNA, 23 nt, Human
auuugugaagguggaaauaaacu

SEQ ID NO: 3355623 - RNA, 17 nt, Human
auuuucagaaaauauua

SEQ ID NO: 3355624 - RNA, 14 nt, Human
auuuucagaaaaua

SEQ ID NO: 3355625 - RNA, 22 nt, Human
auuuucaguuauuauauuuaca

SEQ ID NO: 3355626 - RNA, 21 nt, Human
auuuuauuuuuuucugaauua

SEQ ID NO: 3355627 - RNA, 16 nt, Human
uuuuguuuaccagaga

SEQ ID NO: 3355628 - RNA, 17 nt, Human
uuuuguucauacauauu

SEQ ID NO: 3355629 - RNA, 14 nt, Human
uuuuguucauacau

SEQ ID NO: 3355630 - RNA, 12 nt, Human
uuuuuaucaugu

SEQ ID NO: 3355631 - RNA, 14 nt, Human
uuuugaguucuaca

SEQ ID NO: 3355632 - RNA, 19 nt, Human
uuuuugugaaaagcuccau

SEQ ID NO: 3355633 - RNA, 14 nt, Human
auuauauaaguauu

SEQ ID NO: 3355634 - RNA, 17 nt, Human
auuauauaaguauucua

SEQ ID NO: 3355635 - RNA, 20 nt, Human
auuauauaaguauucuaaau

SEQ ID NO: 3355636 - RNA, 22 nt, Human
auguggaagugugggucugugu

SEQ ID NO: 3355637 - RNA, 23 nt, Human
auguggaagugugggucugugug

SEQ ID NO: 3355638 - RNA, 15 nt, Human
auguggaaguguggg

SEQ ID NO: 3355639 - RNA, 16 nt, Human
auguggaagugugggu

SEQ ID NO: 3355640 - RNA, 13 nt, Human
auguggaagugug

SEQ ID NO: 3355641 - RNA, 10 nt, Human
augugugugu

SEQ ID NO: 3355642 - RNA, 23 nt, Human
auguguguuuuaaaaugagaaau

SEQ ID NO: 3355643 - RNA, 15 nt, Human
auguguguuuuaaaa

SEQ ID NO: 3355644 - RNA, 14 nt, Human
uuuuaauaaacacu

SEQ ID NO: 3355645 - RNA, 15 nt, Human
auguugcauagaaua

SEQ ID NO: 3355646 - RNA, 18 nt, Human
auguugcauagaauaaaa

SEQ ID NO: 3355647 - RNA, 17 nt, Human
auguugcauagaauaaa

SEQ ID NO: 3355648 - RNA, 20 nt, Human
auguugcccuguugcugccu

SEQ ID NO: 3355649 - RNA, 13 nt, Human
auguuaagcagau

SEQ ID NO: 3355650 - RNA, 17 nt, Human
auguuuaguaaucauau

SEQ ID NO: 3355651 - RNA, 17 nt, Human
auucagaguugaugguu

SEQ ID NO: 3355652 - RNA, 13 nt, Human
ugagagaggccau

SEQ ID NO: 3355653 - RNA, 17 nt, Human
ugagagcugugcaucag

SEQ ID NO: 3355654 - RNA, 23 nt, Human
ugagauguagccccucuccugga

SEQ ID NO: 3355655 - RNA, 14 nt, Human
ugagauguguucac

SEQ ID NO: 3355656 - RNA, 15 nt, Human
agcaagucagaauag

SEQ ID NO: 3355657 - RNA, 14 nt, Human
ugacuaugacauaa

SEQ ID NO: 3355658 - RNA, 15 nt, Human
ugacagguuugggac

SEQ ID NO: 3355659 - RNA, 21 nt, Human
agauguagccccucuccugga

SEQ ID NO: 3355660 - RNA, 22 nt, Human
agauguagccccucuccuggaa

SEQ ID NO: 3355661 - RNA, 23 nt, Human
ugaauaauguaagacaaauaugu

SEQ ID NO: 3355662 - RNA, 18 nt, Human
ugaauauuuaguguucau

SEQ ID NO: 3355663 - RNA, 20 nt, Human
agaguaauccaagcaaaugu

SEQ ID NO: 3355664 - RNA, 18 nt, Human
agaguaauccaagcaaau

SEQ ID NO: 3355665 - RNA, 16 nt, Human
agaggcugcagccagg

SEQ ID NO: 3355666 - RNA, 16 nt, Human
ucuuuguaaugaaaac

SEQ ID NO: 3355667 - RNA, 22 nt, Human
ucuuuuuucuaaaguaaaaaca

SEQ ID NO: 3355668 - RNA, 21 nt, Human
ucuuuuuucuaaaguaaaaac

SEQ ID NO: 3355669 - RNA, 12 nt, Human
agacuuuuauga

SEQ ID NO: 3355670 - RNA, 15 nt, Human
agacuuuuaugauac

SEQ ID NO: 3355671 - RNA, 12 nt, Human
agacuccaccaa

SEQ ID NO: 3355672 - RNA, 16 nt, Human
agacuccaccaagccu

SEQ ID NO: 3355673 - RNA, 13 nt, Human
ugaaagaaaauaa

SEQ ID NO: 3355674 - RNA, 20 nt, Human
ugaaaaucuuauaauuuaaa

SEQ ID NO: 3355675 - RNA, 15 nt, Human
ucuaguucugccagg

SEQ ID NO: 3355676 - RNA, 16 nt, Human
ucuaguucugccagga

SEQ ID NO: 3355677 - RNA, 17 nt, Human
ucuaguucugccaggag

SEQ ID NO: 3355678 - RNA, 14 nt, Human
ucuaguucugccag

SEQ ID NO: 3355679 - RNA, 22 nt, Human
ucuagcauggcauauuuuucac

SEQ ID NO: 3355680 - RNA, 23 nt, Human
ucuagcauggcauauuuuucaca

SEQ ID NO: 3355681 - RNA, 21 nt, Human
ucuagcauggcauauuuuuca

SEQ ID NO: 3355682 - RNA, 18 nt, Human
ucuagcauggcauauuuu

SEQ ID NO: 3355683 - RNA, 23 nt, Human
acuuaacuauucaggagaguaga

SEQ ID NO: 3355684 - RNA, 15 nt, Human
acuuguauuaugugu

SEQ ID NO: 3355685 - RNA, 19 nt, Human
acuuguauuauguguguuu

SEQ ID NO: 3355686 - RNA, 18 nt, Human
acuuguauuauguguguu

SEQ ID NO: 3355687 - RNA, 14 nt, Human
acuugcuuuuaaaa

SEQ ID NO: 3355688 - RNA, 16 nt, Human
acuugcucuugaugcc

SEQ ID NO: 3355689 - RNA, 14 nt, Human
acuugcucuugaug

SEQ ID NO: 3355690 - RNA, 20 nt, Human
acuugcucuugaugccuggc

SEQ ID NO: 3355691 - RNA, 18 nt, Human
acuugcucuugaugccug

SEQ ID NO: 3355692 - RNA, 17 nt, Human
acuugcucuugaugccu

SEQ ID NO: 3355693 - RNA, 15 nt, Human
acuuuggaacaagau

SEQ ID NO: 3355694 - RNA, 14 nt, Human
ucugcuuguguuaa

SEQ ID NO: 3355695 - RNA, 19 nt, Human
agaauauguuucaaacuuu

SEQ ID NO: 3355696 - RNA, 21 nt, Human
agaauauguuucaaacuuugg

SEQ ID NO: 3355697 - RNA, 17 nt, Human
agaauauguuucaaacu

SEQ ID NO: 3355698 - RNA, 18 nt, Human
agaauauguuucaaacuu

SEQ ID NO: 3355699 - RNA, 13 nt, Human
agaauauguuuca

SEQ ID NO: 3355700 - RNA, 14 nt, Human
agaauaaaauuuuu

SEQ ID NO: 3355701 - RNA, 12 nt, Human
agaauaaaauuu

SEQ ID NO: 3355702 - RNA, 17 nt, Human
agaauaaaauuuuuaau

SEQ ID NO: 3355703 - RNA, 16 nt, Human
ucugugaaaguacauu

SEQ ID NO: 3355704 - RNA, 14 nt, Human
ucuguuuacagugu

SEQ ID NO: 3355705 - RNA, 15 nt, Human
ucugaauuauuuucu

SEQ ID NO: 3355706 - RNA, 10 nt, Human
ucugaauuau

SEQ ID NO: 3355707 - RNA, 12 nt, Human
ucugcagguccc

SEQ ID NO: 3355708 - RNA, 11 nt, Human
ucugcaggucc

SEQ ID NO: 3355709 - RNA, 13 nt, Human
ucugcaggucccu

SEQ ID NO: 3355710 - RNA, 12 nt, Human
agaagcccagaa

SEQ ID NO: 3355711 - RNA, 13 nt, Human
agaagcccagaau

SEQ ID NO: 3355712 - RNA, 11 nt, Human
agaagcccaga

SEQ ID NO: 3355713 - RNA, 14 nt, Human
agaagaaguguguc

SEQ ID NO: 3355714 - RNA, 13 nt, Human
accgaggcaggga

SEQ ID NO: 3355715 - RNA, 16 nt, Human
ucauaaauuuaugguu

SEQ ID NO: 3355716 - RNA, 14 nt, Human
ucaguauguggaag

SEQ ID NO: 3355717 - RNA, 12 nt, Human
ucaguaugugga

SEQ ID NO: 3355718 - RNA, 15 nt, Human
ucaguuuuugugaaa

SEQ ID NO: 3355719 - RNA, 17 nt, Human
ucaguuuuugugaaaag

SEQ ID NO: 3355720 - RNA, 22 nt, Human
ucauaaaaagccugcaauuuca

SEQ ID NO: 3355721 - RNA, 12 nt, Human
accuaggcuagg

SEQ ID NO: 3355722 - RNA, 17 nt, Human
accuaggcuaggguggg

SEQ ID NO: 3355723 - RNA, 14 nt, Human
ucaugugacucuuu

SEQ ID NO: 3355724 - RNA, 17 nt, Human
ucaugugacucuuucca

SEQ ID NO: 3355725 - RNA, 16 nt, Human
ucaugugaaaucauuc

SEQ ID NO: 3355726 - RNA, 17 nt, Human
ucaugugaaaucauuca

SEQ ID NO: 3355727 - RNA, 23 nt, Human
ucaugcaaacuuuauuuuguguu

SEQ ID NO: 3355728 - RNA, 18 nt, Human
ucaugugacucuuuccaa

SEQ ID NO: 3355729 - RNA, 19 nt, Human
ucaugugacucuuuccaac

SEQ ID NO: 3355730 - RNA, 17 nt, Human
ucauguuuacagaggac

SEQ ID NO: 3355731 - RNA, 13 nt, Human
ucaucuaggauuu

SEQ ID NO: 3355732 - RNA, 14 nt, Human
ucaugcaaacuuua

SEQ ID NO: 3355733 - RNA, 17 nt, Human
ucagauuugccuuauug

SEQ ID NO: 3355734 - RNA, 14 nt, Human
accccugcuucuga

SEQ ID NO: 3355735 - RNA, 16 nt, Human
accccuggugguucac

SEQ ID NO: 3355736 - RNA, 12 nt, Human
ucagcucaugga

SEQ ID NO: 3355737 - RNA, 20 nt, Human
acaugaauauuuaguguuca

SEQ ID NO: 3355738 - RNA, 18 nt, Human
ucaauauccaaaccaaau

SEQ ID NO: 3355739 - RNA, 19 nt, Human
acauucuuccaaaaagauu

SEQ ID NO: 3355740 - RNA, 19 nt, Human
acauuguacgaagaguauu

SEQ ID NO: 3355741 - RNA, 23 nt, Human
ucacagcaagucacuggccagug

SEQ ID NO: 3355742 - RNA, 16 nt, Human
ucaauucuugccaaau

SEQ ID NO: 3355743 - RNA, 16 nt, Human
accaaagcgaauuuua

SEQ ID NO: 3355744 - RNA, 24 nt, Human
accacauuggagauguuuaguaau

SEQ ID NO: 3355745 - RNA, 18 nt, Human
uccugcaccggggccugg

SEQ ID NO: 3355746 - RNA, 23 nt, Human
uccuggaagugcuaauuuugaaa

SEQ ID NO: 3355747 - RNA, 12 nt, Human
acugagaaauuu

SEQ ID NO: 3355748 - RNA, 21 nt, Human
acugagaaauuuauaaacuuu

SEQ ID NO: 3355749 - RNA, 17 nt, Human
acugagaaauuuauaaa

SEQ ID NO: 3355750 - RNA, 15 nt, Human
acucuuguuuccuua

SEQ ID NO: 3355751 - RNA, 13 nt, Human
ucccuuuuuuuaa

SEQ ID NO: 3355752 - RNA, 21 nt, Human
ucccuuuuuuuaaguaaggaa

SEQ ID NO: 3355753 - RNA, 16 nt, Human
ucccuuuuuuuaagua

SEQ ID NO: 3355754 - RNA, 21 nt, Human
acucuggagguuuguuuagaa

SEQ ID NO: 3355755 - RNA, 21 nt, Human
acucuugaaaaaugcauguug

SEQ ID NO: 3355756 - RNA, 22 nt, Human
acucuuggagccugcagagcug

SEQ ID NO: 3355757 - RNA, 23 nt, Human
acucuuggagccugcagagcugc

SEQ ID NO: 3355758 - RNA, 15 nt, Human
acucuuggagccugc

SEQ ID NO: 3355759 - RNA, 16 nt, Human
acucuuggagccugca

SEQ ID NO: 3355760 - RNA, 14 nt, Human
acucuuggagccug

SEQ ID NO: 3355761 - RNA, 21 nt, Human
uccacuccuccuagccaccca

SEQ ID NO: 3355762 - RNA, 22 nt, Human
accuuuguuugcaucugaaaau

SEQ ID NO: 3355763 - RNA, 18 nt, Human
accuuugacaaagguaaa

SEQ ID NO: 3355764 - RNA, 17 nt, Human
accuuugacaaagguaa

SEQ ID NO: 3355765 - RNA, 11 nt, Human
uccagccugcc

SEQ ID NO: 3355766 - RNA, 13 nt, Human
uccagccugccac

SEQ ID NO: 3355767 - RNA, 20 nt, Human
uccagccugcugccugcuuu

SEQ ID NO: 3355768 - RNA, 20 nt, Human
uccagcccugaguuccuagc

SEQ ID NO: 3355769 - RNA, 22 nt, Human
uccagcccugaguuccuagcca

SEQ ID NO: 3355770 - RNA, 18 nt, Human
acguaaugaaacuuggau

SEQ ID NO: 3355771 - RNA, 15 nt, Human
acuaauuuuaaaaug

SEQ ID NO: 3355772 - RNA, 16 nt, Human
acaccucuuggggagu

SEQ ID NO: 3355773 - RNA, 15 nt, Human
uauaaguguguguuu

SEQ ID NO: 3355774 - RNA, 20 nt, Human
uauaaaagccuguuuaagag

SEQ ID NO: 3355775 - RNA, 19 nt, Human
uauaaaaauaaaaaacacu

SEQ ID NO: 3355776 - RNA, 22 nt, Human
uauaaaagggacugagaaauuu

SEQ ID NO: 3355777 - RNA, 19 nt, Human
uauaaaagccuguuuaaga

SEQ ID NO: 3355778 - RNA, 19 nt, Human
acaauggauaggcacagga

SEQ ID NO: 3355779 - RNA, 24 nt, Human
uagugaaaccccaucucuacugaa

SEQ ID NO: 3355780 - RNA, 22 nt, Human
uagcauggcauauuuuucacau

SEQ ID NO: 3355781 - RNA, 21 nt, Human
uagcauggcauauuuuucaca

SEQ ID NO: 3355782 - RNA, 22 nt, Human
uagagcaaaauugauguguuua

SEQ ID NO: 3355783 - RNA, 21 nt, Human
uagagcaaaauugauguguuu

SEQ ID NO: 3355784 - RNA, 14 nt, Human
uagagcaaaauuga

SEQ ID NO: 3355785 - RNA, 16 nt, Human
aauuguuacaaauugu

SEQ ID NO: 3355786 - RNA, 20 nt, Human
aauuguguuuauaauuuuaa

SEQ ID NO: 3355787 - RNA, 21 nt, Human
aauuguguuuauaauuuuaaa

SEQ ID NO: 3355788 - RNA, 18 nt, Human
uaggcaaccuuuauuuuu

SEQ ID NO: 3355789 - RNA, 19 nt, Human
uagcuaauguaauaacugu

SEQ ID NO: 3355790 - RNA, 12 nt, Human
uagcuaauguaa

SEQ ID NO: 3355791 - RNA, 20 nt, Human
uauggggauagaugugugga

SEQ ID NO: 3355792 - RNA, 19 nt, Human
uauggggauagaugugugg

SEQ ID NO: 3355793 - RNA, 19 nt, Human
acagcggcuggacuuggag

SEQ ID NO: 3355794 - RNA, 20 nt, Human
acagauuuccauccuaguca

SEQ ID NO: 3355795 - RNA, 19 nt, Human
uaugaaauuauauaaguau

SEQ ID NO: 3355796 - RNA, 16 nt, Human
uauauuuaguaucuuu

SEQ ID NO: 3355797 - RNA, 23 nt, Human
uauaaguguguguuuuucauaaa

SEQ ID NO: 3355798 - RNA, 17 nt, Human
uauaaguguguguuuuu

SEQ ID NO: 3355799 - RNA, 19 nt, Human
uauccaaaccaaauaaaaa

SEQ ID NO: 3355800 - RNA, 15 nt, Human
uauucagcucaugga

SEQ ID NO: 3355801 - RNA, 21 nt, Human
uauucagcucauggacuucug

SEQ ID NO: 3355802 - RNA, 22 nt, Human
acagcggcuggacuuggaggua

SEQ ID NO: 3355803 - RNA, 21 nt, Human
acagcggcuggacuuggaggu

SEQ ID NO: 3355804 - RNA, 12 nt, Human
uauguggaagug

SEQ ID NO: 3355805 - RNA, 16 nt, Human
uauguggaaguguggg

SEQ ID NO: 3355806 - RNA, 23 nt, Human
uaugugccagauuuaugcauauu

SEQ ID NO: 3355807 - RNA, 17 nt, Human
uaugugaaacauguuuc

SEQ ID NO: 3355808 - RNA, 14 nt, Human
uaugugaaacaugu

SEQ ID NO: 3355809 - RNA, 17 nt, Human
uauguguaaaaugugaa

SEQ ID NO: 3355810 - RNA, 18 nt, Human
aauuccaagugauugaaa

SEQ ID NO: 3355811 - RNA, 16 nt, Human
aauuauuuuguucaua

SEQ ID NO: 3355812 - RNA, 18 nt, Human
aauuauuuuguucauaca

SEQ ID NO: 3355813 - RNA, 19 nt, Human
aauuauuuuguucauacau

SEQ ID NO: 3355814 - RNA, 20 nt, Human
aauuauuuuguucauacaua

SEQ ID NO: 3355815 - RNA, 21 nt, Human
aauuauuuuguucauacauau

SEQ ID NO: 3355816 - RNA, 22 nt, Human
aauuauuuuguucauacauauu

SEQ ID NO: 3355817 - RNA, 16 nt, Human
aauuauuauuuggccc

SEQ ID NO: 3355818 - RNA, 13 nt, Human
aauugauguguuu

SEQ ID NO: 3355819 - RNA, 14 nt, Human
aauugauguguuua

SEQ ID NO: 3355820 - RNA, 19 nt, Human
aauugaugggauuugguca

SEQ ID NO: 3355821 - RNA, 19 nt, Human
uacuguaaggcaaucaugg

SEQ ID NO: 3355822 - RNA, 18 nt, Human
uacuguaaggcaaucaug

SEQ ID NO: 3355823 - RNA, 13 nt, Human
aaugcuguguuaa

SEQ ID NO: 3355824 - RNA, 12 nt, Human
aaugcuguguua

SEQ ID NO: 3355825 - RNA, 16 nt, Human
aaugcuucaucccuuu

SEQ ID NO: 3355826 - RNA, 13 nt, Human
aauguuaagcaga

SEQ ID NO: 3355827 - RNA, 17 nt, Human
uacauuguaaauaguau

SEQ ID NO: 3355828 - RNA, 20 nt, Human
aauuaagaaaggauaaaguu

SEQ ID NO: 3355829 - RNA, 21 nt, Human
aauuaagaaaggauaaaguug

SEQ ID NO: 3355830 - RNA, 23 nt, Human
uacaggucauauuaauauauuuc

SEQ ID NO: 3355831 - RNA, 22 nt, Human
uacauauaagugauugcugguu

SEQ ID NO: 3355832 - RNA, 19 nt, Human
aaugaaacacucaguuguu

SEQ ID NO: 3355833 - RNA, 14 nt, Human
aaugaaacuuggau

SEQ ID NO: 3355834 - RNA, 18 nt, Human
uaauguaauaacugugaa

SEQ ID NO: 3355835 - RNA, 16 nt, Human
aaucuuuaauuuuaca

SEQ ID NO: 3355836 - RNA, 15 nt, Human
aaucuuuaauuuuac

SEQ ID NO: 3355837 - RNA, 21 nt, Human
uaauagagcaaaauugaugug

SEQ ID NO: 3355838 - RNA, 12 nt, Human
uaauagagcaaa

SEQ ID NO: 3355839 - RNA, 16 nt, Human
aaucuuauaauuuaaa

SEQ ID NO: 3355840 - RNA, 12 nt, Human
aauccgcccauc

SEQ ID NO: 3355841 - RNA, 19 nt, Human
aaucuuauaauuuaaaaua

SEQ ID NO: 3355842 - RNA, 16 nt, Human
uaaguauucuaaauuu

SEQ ID NO: 3355843 - RNA, 14 nt, Human
uaaguucauacauu

SEQ ID NO: 3355844 - RNA, 13 nt, Human
uaaguaaaugcua

SEQ ID NO: 3355845 - RNA, 18 nt, Human
uaauaaacacucuugaaa

SEQ ID NO: 3355846 - RNA, 12 nt, Human
uaauaaacacuc

SEQ ID NO: 3355847 - RNA, 17 nt, Human
aauauuguguugugaau

SEQ ID NO: 3355848 - RNA, 12 nt, Human
aauauuuagugu

SEQ ID NO: 3355849 - RNA, 21 nt, Human
aauauuugaauguaugcuuca

SEQ ID NO: 3355850 - RNA, 23 nt, Human
aauauuugaauguaugcuucaua

SEQ ID NO: 3355851 - RNA, 14 nt, Human
aauauuugaaugua

SEQ ID NO: 3355852 - RNA, 13 nt, Human
uaagaauauuuga

SEQ ID NO: 3355853 - RNA, 14 nt, Human
uaagaauauuugaa

SEQ ID NO: 3355854 - RNA, 13 nt, Human
uaagacaaauaug

SEQ ID NO: 3355855 - RNA, 22 nt, Human
uaacuuaaaagaacauguauau

SEQ ID NO: 3355856 - RNA, 23 nt, Human
aauaguauuugagaguucuaaau

SEQ ID NO: 3355857 - RNA, 15 nt, Human
aauaguauuugagag

SEQ ID NO: 3355858 - RNA, 22 nt, Human
aauaguauuugagaguucuaaa

SEQ ID NO: 3355859 - RNA, 20 nt, Human
aauaguauuugagaguucua

SEQ ID NO: 3355860 - RNA, 15 nt, Human
aauauauuuuaagac

SEQ ID NO: 3355861 - RNA, 14 nt, Human
aauauauuuuaaga

SEQ ID NO: 3355862 - RNA, 22 nt, Human
gucccgggacaccuaggcuagg

SEQ ID NO: 3355863 - RNA, 12 nt, Human
gucccuaauaaa

SEQ ID NO: 3355864 - RNA, 15 nt, Human
guccaucagccucca

SEQ ID NO: 3355865 - RNA, 22 nt, Human
guccccagacuccaccaagccu

SEQ ID NO: 3355866 - RNA, 21 nt, Human
aacacugggagaaaugaaaaa

SEQ ID NO: 3355867 - RNA, 18 nt, Human
gucgcccuggacugugug

SEQ ID NO: 3355868 - RNA, 21 nt, Human
guauucuaaauuuuauaucuu

SEQ ID NO: 3355869 - RNA, 24 nt, Human
guauucuaaauuuuauaucuugua

SEQ ID NO: 3355870 - RNA, 19 nt, Human
guauucuagcuaauguaau

SEQ ID NO: 3355871 - RNA, 16 nt, Human
aaaucauucauuuucu

SEQ ID NO: 3355872 - RNA, 17 nt, Human
aaauuccaagugauuga

SEQ ID NO: 3355873 - RNA, 17 nt, Human
aaauuguauuacaaauc

SEQ ID NO: 3355874 - RNA, 15 nt, Human
aaauucuacaacaca

SEQ ID NO: 3355875 - RNA, 19 nt, Human
aaauucuauuacaguaugu

SEQ ID NO: 3355876 - RNA, 23 nt, Human
aaauuaugugccagauuuaugca

SEQ ID NO: 3355877 - RNA, 14 nt, Human
gugaaguuuacauu

SEQ ID NO: 3355878 - RNA, 19 nt, Human
gucuuauauauuguagaua

SEQ ID NO: 3355879 - RNA, 22 nt, Human
gucuuuccacuccuccuagcca

SEQ ID NO: 3355880 - RNA, 21 nt, Human
aacuaggugcauauuuauaaa

SEQ ID NO: 3355881 - RNA, 23 nt, Human
aacuauucaggagaguagaacag

SEQ ID NO: 3355882 - RNA, 12 nt, Human
aacuauggccug

SEQ ID NO: 3355883 - RNA, 19 nt, Human
aacugugaaguuuacauug

SEQ ID NO: 3355884 - RNA, 17 nt, Human
aacugugaaguuuacau

SEQ ID NO: 3355885 - RNA, 10 nt, Human
gugauguguc

SEQ ID NO: 3355886 - RNA, 23 nt, Human
aagaaagagcaacaauccaucuc

SEQ ID NO: 3355887 - RNA, 14 nt, Human
aagaaaacaacuuc

SEQ ID NO: 3355888 - RNA, 19 nt, Human
gugccagauuuaugcauau

SEQ ID NO: 3355889 - RNA, 19 nt, Human
aagaagugugucacccuua

SEQ ID NO: 3355890 - RNA, 15 nt, Human
gugcucuccaagccc

SEQ ID NO: 3355891 - RNA, 16 nt, Human
gugcucaggagcccug

SEQ ID NO: 3355892 - RNA, 18 nt, Human
gugcucaggagcccuggg

SEQ ID NO: 3355893 - RNA, 19 nt, Human
gugcucaggagcccuggga

SEQ ID NO: 3355894 - RNA, 12 nt, Human
aaguaaaugcua

SEQ ID NO: 3355895 - RNA, 21 nt, Human
aagucacuggccaguggcugg

SEQ ID NO: 3355896 - RNA, 18 nt, Human
aaguauguguaaaaugug

SEQ ID NO: 3355897 - RNA, 19 nt, Human
aaguauguguaaaauguga

SEQ ID NO: 3355898 - RNA, 17 nt, Human
guuuuaaaaugagaaau

SEQ ID NO: 3355899 - RNA, 21 nt, Human
uaaaaauauuguguugugaau

SEQ ID NO: 3355900 - RNA, 22 nt, Human
uaaaaagccugcaauuucauau

SEQ ID NO: 3355901 - RNA, 19 nt, Human
uaaaaagccugcaauuuca

SEQ ID NO: 3355902 - RNA, 14 nt, Human
uaaaaauauugugu

SEQ ID NO: 3355903 - RNA, 20 nt, Human
aagugugggucugugugugu

SEQ ID NO: 3355904 - RNA, 12 nt, Human
aaguguguguuu

SEQ ID NO: 3355905 - RNA, 10 nt, Human
aagugugggu

SEQ ID NO: 3355906 - RNA, 17 nt, Human
aagugugggucugugug

SEQ ID NO: 3355907 - RNA, 18 nt, Human
aagugugggucugugugu

SEQ ID NO: 3355908 - RNA, 21 nt, Human
aaguguguguuuuucauaaag

SEQ ID NO: 3355909 - RNA, 16 nt, Human
aaguguguguuuuuca

SEQ ID NO: 3355910 - RNA, 11 nt, Human
uaaaaugugaa

SEQ ID NO: 3355911 - RNA, 15 nt, Human
uaaaauugugaugug

SEQ ID NO: 3355912 - RNA, 16 nt, Human
uaaaauugugaugugu

SEQ ID NO: 3355913 - RNA, 13 nt, Human
uaaaaugugaagu

SEQ ID NO: 3355914 - RNA, 13 nt, Human
guguauguggggg

SEQ ID NO: 3355915 - RNA, 21 nt, Human
guguaugugggggucugugug

SEQ ID NO: 3355916 - RNA, 20 nt, Human
aagcaaaugugaaucauuuu

SEQ ID NO: 3355917 - RNA, 22 nt, Human
gugguucacucuuggagccugc

SEQ ID NO: 3355918 - RNA, 23 nt, Human
gugguucacucuuggagccugca

SEQ ID NO: 3355919 - RNA, 21 nt, Human
gugguucacucuuggagccug

SEQ ID NO: 3355920 - RNA, 15 nt, Human
guguaaaaugugaag

SEQ ID NO: 3355921 - RNA, 16 nt, Human
aagaggugugcaagag

SEQ ID NO: 3355922 - RNA, 18 nt, Human
aagaggugugcaagagag

SEQ ID NO: 3355923 - RNA, 23 nt, Human
aagcaugcacaaauucugucucu

SEQ ID NO: 3355924 - RNA, 16 nt, Human
aagcacuaaacaaaga

SEQ ID NO: 3355925 - RNA, 19 nt, Human
guuauuauauuuacaaaug

SEQ ID NO: 3355926 - RNA, 17 nt, Human
guuauuauauuuacaaa

SEQ ID NO: 3355927 - RNA, 18 nt, Human
guuauugauaaguucaua

SEQ ID NO: 3355928 - RNA, 21 nt, Human
guuauugauaaguucauacau

SEQ ID NO: 3355929 - RNA, 22 nt, Human
guuauugauaaguucauacauu

SEQ ID NO: 3355930 - RNA, 19 nt, Human
guuaauuccaauuauauga

SEQ ID NO: 3355931 - RNA, 12 nt, Human
guucagcuuggg

SEQ ID NO: 3355932 - RNA, 17 nt, Human
aagccuggucagcccaa

SEQ ID NO: 3355933 - RNA, 18 nt, Human
aagccuggucagcccaaa

SEQ ID NO: 3355934 - RNA, 18 nt, Human
aagccuguuuaagagaca

SEQ ID NO: 3355935 - RNA, 15 nt, Human
aagccuguuuaagag

SEQ ID NO: 3355936 - RNA, 19 nt, Human
guucuagcauggcauauuu

SEQ ID NO: 3355937 - RNA, 22 nt, Human
guucuagcauggcauauuuuuc

SEQ ID NO: 3355938 - RNA, 21 nt, Human
aagcuuuuaugugaaacaugu

SEQ ID NO: 3355939 - RNA, 19 nt, Human
aagcuuuuaugugaaacau

SEQ ID NO: 3355940 - RNA, 16 nt, Human
aagcuuuuaugugaaa

SEQ ID NO: 3355941 - RNA, 19 nt, Human
aaggaaaaaauaacaauga

SEQ ID NO: 3355942 - RNA, 13 nt, Human
caaccggcuuugu

SEQ ID NO: 3355943 - RNA, 22 nt, Human
caaccggcuuuguggcacuggg

SEQ ID NO: 3355944 - RNA, 13 nt, Human
caacacugccagc

SEQ ID NO: 3355945 - RNA, 14 nt, Human
caacacugccagca

SEQ ID NO: 3355946 - RNA, 12 nt, Human
caacacugccag

SEQ ID NO: 3355947 - RNA, 15 nt, Human
caagaaaacaacuuc

SEQ ID NO: 3355948 - RNA, 12 nt, Human
caacuuuguaua

SEQ ID NO: 3355949 - RNA, 14 nt, Human
caagaggcugcagc

SEQ ID NO: 3355950 - RNA, 16 nt, Human
caagaggcugcagcca

SEQ ID NO: 3355951 - RNA, 19 nt, Human
caauguagaggggaaaaga

SEQ ID NO: 3355952 - RNA, 16 nt, Human
caaaaauucucaguuc

SEQ ID NO: 3355953 - RNA, 19 nt, Human
caaagcugaugacaacuuc

SEQ ID NO: 3355954 - RNA, 20 nt, Human
caaagcgaauuuuaaaagau

SEQ ID NO: 3355955 - RNA, 14 nt, Human
caaagcgaauuuua

SEQ ID NO: 3355956 - RNA, 19 nt, Human
caaagcgaauuuuaaaaga

SEQ ID NO: 3355957 - RNA, 16 nt, Human
caaaauugauguguuu

SEQ ID NO: 3355958 - RNA, 15 nt, Human
caaaauugauguguu

SEQ ID NO: 3355959 - RNA, 22 nt, Human
caaaauugauguguuuauuuau

SEQ ID NO: 3355960 - RNA, 16 nt, Human
caaaauuguuacaaau

SEQ ID NO: 3355961 - RNA, 21 nt, Human
caaauuguaagcaugcacaaa

SEQ ID NO: 3355962 - RNA, 17 nt, Human
caaauuguaagcaugca

SEQ ID NO: 3355963 - RNA, 19 nt, Human
ucagaggguguccugcacc

SEQ ID NO: 3355964 - RNA, 22 nt, Human
ucagaguaauccaagcaaaugu

SEQ ID NO: 3355965 - RNA, 21 nt, Human
ucagaguaauccaagcaaaug

SEQ ID NO: 3355966 - RNA, 19 nt, Human
ucacugcuaagaauauuug

SEQ ID NO: 3355967 - RNA, 18 nt, Human
ucaggagcccugggaggc

SEQ ID NO: 3355968 - RNA, 19 nt, Human
ucaggagcccugggaggcu

SEQ ID NO: 3355969 - RNA, 20 nt, Human
ucaggaugauacacuaugaa

SEQ ID NO: 3355970 - RNA, 23 nt, Human
ucaggagcccugggaggcucugg

SEQ ID NO: 3355971 - RNA, 20 nt, Human
ucaggagcccugggaggcuc

SEQ ID NO: 3355972 - RNA, 14 nt, Human
uccagguggcauca

SEQ ID NO: 3355973 - RNA, 19 nt, Human
uccaaaauaauuuuaagaa

SEQ ID NO: 3355974 - RNA, 15 nt, Human
uccaaaauaauuuua

SEQ ID NO: 3355975 - RNA, 17 nt, Human
ucaucugacuaugacau

SEQ ID NO: 3355976 - RNA, 18 nt, Human
ucaucugacuaugacaua

SEQ ID NO: 3355977 - RNA, 14 nt, Human
ucauuccagaggaa

SEQ ID NO: 3355978 - RNA, 18 nt, Human
ucauugugaaauuauuca

SEQ ID NO: 3355979 - RNA, 17 nt, Human
ucauugugaaauuauuc

SEQ ID NO: 3355980 - RNA, 15 nt, Human
ucauugugaaauuau

SEQ ID NO: 3355981 - RNA, 12 nt, Human
ucauugugaaau

SEQ ID NO: 3355982 - RNA, 20 nt, Human
ucaaauuguaagcaugcaca

SEQ ID NO: 3355983 - RNA, 17 nt, Human
ucaaauuguaagcaugc

SEQ ID NO: 3355984 - RNA, 21 nt, Human
ucaaauauauucagccuggcu

SEQ ID NO: 3355985 - RNA, 23 nt, Human
ucaaauauauucagccuggcuuc

SEQ ID NO: 3355986 - RNA, 22 nt, Human
ucaaauauauucagccuggcuu

SEQ ID NO: 3355987 - RNA, 14 nt, Human
ucaaaaaacuugua

SEQ ID NO: 3355988 - RNA, 15 nt, Human
ucaaaaaacuuguaa

SEQ ID NO: 3355989 - RNA, 22 nt, Human
uauuuuuuucugaauuauuuuc

SEQ ID NO: 3355990 - RNA, 17 nt, Human
uauuuuauguugcauag

SEQ ID NO: 3355991 - RNA, 14 nt, Human
uauuguguugugaa

SEQ ID NO: 3355992 - RNA, 24 nt, Human
uauuuauaaaaauaaaaaacacug

SEQ ID NO: 3355993 - RNA, 12 nt, Human
uauucccaugag

SEQ ID NO: 3355994 - RNA, 19 nt, Human
uauucuagcuaauguaaua

SEQ ID NO: 3355995 - RNA, 15 nt, Human
uauucuaaauuuuau

SEQ ID NO: 3355996 - RNA, 19 nt, Human
uauucuaaauuuuauaucu

SEQ ID NO: 3355997 - RNA, 20 nt, Human
uauucuaaauuuuauaucuu

SEQ ID NO: 3355998 - RNA, 14 nt, Human
uauucuaaauuuua

SEQ ID NO: 3355999 - RNA, 16 nt, Human
uauguugcauagaaua

SEQ ID NO: 3356000 - RNA, 13 nt, Human
uauguuucaaacu

SEQ ID NO: 3356001 - RNA, 15 nt, Human
uauguuucaaacuuu

SEQ ID NO: 3356002 - RNA, 16 nt, Human
uauguuucaaacuuug

SEQ ID NO: 3356003 - RNA, 12 nt, Human
uauguugcauag

SEQ ID NO: 3356004 - RNA, 12 nt, Human
uauuaauauauu

SEQ ID NO: 3356005 - RNA, 15 nt, Human
ucugccaggagacag

SEQ ID NO: 3356006 - RNA, 22 nt, Human
ucugucucuggauuauauuaug

SEQ ID NO: 3356007 - RNA, 17 nt, Human
ucuuaaccagaucauug

SEQ ID NO: 3356008 - RNA, 16 nt, Human
ucuuaaccagaucauu

SEQ ID NO: 3356009 - RNA, 22 nt, Human
ucuuaaccagaucauugugaaa

SEQ ID NO: 3356010 - RNA, 19 nt, Human
ucuucaucugacuaugaca

SEQ ID NO: 3356011 - RNA, 13 nt, Human
ucuugaaaaaugc

SEQ ID NO: 3356012 - RNA, 14 nt, Human
ucucugcagguccc

SEQ ID NO: 3356013 - RNA, 13 nt, Human
ucucugcaggucc

SEQ ID NO: 3356014 - RNA, 16 nt, Human
ucucugcaggucccua

SEQ ID NO: 3356015 - RNA, 15 nt, Human
ucucugcaggucccu

SEQ ID NO: 3356016 - RNA, 21 nt, Human
ucuccuggaagugcuaauuuu

SEQ ID NO: 3356017 - RNA, 14 nt, Human
ucugaaaauugaug

SEQ ID NO: 3356018 - RNA, 22 nt, Human
ucugaaaauugaugggauuugg

SEQ ID NO: 3356019 - RNA, 15 nt, Human
ucugacauaaguauu

SEQ ID NO: 3356020 - RNA, 16 nt, Human
ucccuccucugcccgg

SEQ ID NO: 3356021 - RNA, 11 nt, Human
ucccuccuggg

SEQ ID NO: 3356022 - RNA, 19 nt, Human
ucccuccugggaaugaagc

SEQ ID NO: 3356023 - RNA, 15 nt, Human
ucccucuacugggag

SEQ ID NO: 3356024 - RNA, 16 nt, Human
ucccuaauaaagcugu

SEQ ID NO: 3356025 - RNA, 21 nt, Human
ucccgggacaccuaggcuagg

SEQ ID NO: 3356026 - RNA, 15 nt, Human
ucccuaauaaagcug

SEQ ID NO: 3356027 - RNA, 14 nt, Human
ucccuaauaaagcu

SEQ ID NO: 3356028 - RNA, 13 nt, Human
ucccugccuggac

SEQ ID NO: 3356029 - RNA, 23 nt, Human
ucccugccugguccucacacuca

SEQ ID NO: 3356030 - RNA, 16 nt, Human
ucccuuccuuccucuc

SEQ ID NO: 3356031 - RNA, 19 nt, Human
ucccuuccuuccucuccug

SEQ ID NO: 3356032 - RNA, 20 nt, Human
uccuaauaaucauuggauuc

SEQ ID NO: 3356033 - RNA, 14 nt, Human
ucgugucuggcaca

SEQ ID NO: 3356034 - RNA, 21 nt, Human
ucgugucuggcacagccuggc

SEQ ID NO: 3356035 - RNA, 22 nt, Human
ucuaugauuccagguggcauca

SEQ ID NO: 3356036 - RNA, 18 nt, Human
ugauuuuuaugccaccug

SEQ ID NO: 3356037 - RNA, 18 nt, Human
ugcaacuuuguauaaaag

SEQ ID NO: 3356038 - RNA, 20 nt, Human
ugcaauuucauaugcuguau

SEQ ID NO: 3356039 - RNA, 14 nt, Human
ugcaauuucauaug

SEQ ID NO: 3356040 - RNA, 22 nt, Human
ugcaauguagaggggaaaagag

SEQ ID NO: 3356041 - RNA, 17 nt, Human
ugcaaugguuaacaucu

SEQ ID NO: 3356042 - RNA, 18 nt, Human
ugcccgggagcucaggaa

SEQ ID NO: 3356043 - RNA, 17 nt, Human
ugcccgggagcucagga

SEQ ID NO: 3356044 - RNA, 17 nt, Human
ugcccagaaugaggcug

SEQ ID NO: 3356045 - RNA, 18 nt, Human
ugcccagaaugaggcugc

SEQ ID NO: 3356046 - RNA, 16 nt, Human
ugccaucauguuuaca

SEQ ID NO: 3356047 - RNA, 22 nt, Human
ugccaucauguuuacagaggac

SEQ ID NO: 3356048 - RNA, 21 nt, Human
ugcauuauauuuguaaauuua

SEQ ID NO: 3356049 - RNA, 21 nt, Human
ugacccucaucuuucuuccaa

SEQ ID NO: 3356050 - RNA, 19 nt, Human
ucuugaaggaaaaugauac

SEQ ID NO: 3356051 - RNA, 16 nt, Human
ucuugaauaauguaag

SEQ ID NO: 3356052 - RNA, 13 nt, Human
ugagaaaucuaaa

SEQ ID NO: 3356053 - RNA, 17 nt, Human
ugagaaaucuaaaaaac

SEQ ID NO: 3356054 - RNA, 23 nt, Human
ugauauaaguguguguuuuucau

SEQ ID NO: 3356055 - RNA, 17 nt, Human
ugauauaaguguguguu

SEQ ID NO: 3356056 - RNA, 23 nt, Human
ugaugcuacaggauuugaaauug

SEQ ID NO: 3356057 - RNA, 13 nt, Human
ugauguauucuag

SEQ ID NO: 3356058 - RNA, 20 nt, Human
ugauguauucuagcuaaugu

SEQ ID NO: 3356059 - RNA, 14 nt, Human
ugauguauucuagc

SEQ ID NO: 3356060 - RNA, 21 nt, Human
ugaugguuguacauauaagug

SEQ ID NO: 3356061 - RNA, 13 nt, Human
ugauguacaugua

SEQ ID NO: 3356062 - RNA, 14 nt, Human
ugaugaaaauauuu

SEQ ID NO: 3356063 - RNA, 14 nt, Human
ugaguuggcuggga

SEQ ID NO: 3356064 - RNA, 16 nt, Human
ugaguuggcugggaau

SEQ ID NO: 3356065 - RNA, 17 nt, Human
ugaguuggcugggaaua

SEQ ID NO: 3356066 - RNA, 19 nt, Human
ugagguggaagagggcugc

SEQ ID NO: 3356067 - RNA, 16 nt, Human
ugaggcugcuuuccaa

SEQ ID NO: 3356068 - RNA, 20 nt, Human
ugaggcugcuuuccaaagcc

SEQ ID NO: 3356069 - RNA, 23 nt, Human
ugaggcugcuuuccaaagccaau

SEQ ID NO: 3356070 - RNA, 13 nt, Human
uguccucagcccc

SEQ ID NO: 3356071 - RNA, 18 nt, Human
uguccugcaccggggccu

SEQ ID NO: 3356072 - RNA, 13 nt, Human
uguaugcuucaua

SEQ ID NO: 3356073 - RNA, 14 nt, Human
uguaugcuucauac

SEQ ID NO: 3356074 - RNA, 16 nt, Human
uguaugcuucauacag

SEQ ID NO: 3356075 - RNA, 19 nt, Human
uguaugcuucauacaggga

SEQ ID NO: 3356076 - RNA, 14 nt, Human
uguagcuuuaucaa

SEQ ID NO: 3356077 - RNA, 15 nt, Human
uguagcuuuaucaaa

SEQ ID NO: 3356078 - RNA, 20 nt, Human
ugguuguacauauaagugau

SEQ ID NO: 3356079 - RNA, 17 nt, Human
uguaaauuuaugugaug

SEQ ID NO: 3356080 - RNA, 22 nt, Human
uguaauaacugugaaguuuaca

SEQ ID NO: 3356081 - RNA, 14 nt, Human
uguaauaacuguga

SEQ ID NO: 3356082 - RNA, 17 nt, Human
uguaaugaaaaccacau

SEQ ID NO: 3356083 - RNA, 11 nt, Human
uguaaugaaaa

SEQ ID NO: 3356084 - RNA, 13 nt, Human
uguaaugaaaacc

SEQ ID NO: 3356085 - RNA, 12 nt, Human
uguaaugaaaac

SEQ ID NO: 3356086 - RNA, 15 nt, Human
ugguuccagccugcc

SEQ ID NO: 3356087 - RNA, 16 nt, Human
ugguuccagccugcca

SEQ ID NO: 3356088 - RNA, 16 nt, Human
uggccuaaccugccga

SEQ ID NO: 3356089 - RNA, 14 nt, Human
uggccccugagauc

SEQ ID NO: 3356090 - RNA, 23 nt, Human
uggccuaaccugccgagagucca

SEQ ID NO: 3356091 - RNA, 15 nt, Human
uggcuccaggccagg

SEQ ID NO: 3356092 - RNA, 21 nt, Human
uggcuugaguuuaaauuguaa

SEQ ID NO: 3356093 - RNA, 14 nt, Human
ugggaaugaagcaa

SEQ ID NO: 3356094 - RNA, 14 nt, Human
ugggaggagggcag

SEQ ID NO: 3356095 - RNA, 17 nt, Human
ugggaggagggcaggca

SEQ ID NO: 3356096 - RNA, 18 nt, Human
ugggaggagggcaggcau

SEQ ID NO: 3356097 - RNA, 13 nt, Human
ugggaguguguaa

SEQ ID NO: 3356098 - RNA, 17 nt, Human
uggggggcuucauacac

SEQ ID NO: 3356099 - RNA, 17 nt, Human
uggggccaggcuggguc

SEQ ID NO: 3356100 - RNA, 17 nt, Human
uggagacacaacuauuu

SEQ ID NO: 3356101 - RNA, 19 nt, Human
uggaucaaauccagccugc

SEQ ID NO: 3356102 - RNA, 12 nt, Human
ugcuuguguuaa

SEQ ID NO: 3356103 - RNA, 15 nt, Human
ugcuuguguuaagua

SEQ ID NO: 3356104 - RNA, 17 nt, Human
ugcuuuggaaaacccag

SEQ ID NO: 3356105 - RNA, 16 nt, Human
uggaaaagccaagagg

SEQ ID NO: 3356106 - RNA, 19 nt, Human
uggaaaagccaagaggcug

SEQ ID NO: 3356107 - RNA, 19 nt, Human
uuuccaaccggcuuugugg

SEQ ID NO: 3356108 - RNA, 19 nt, Human
uuuaacucuauaauguguu

SEQ ID NO: 3356109 - RNA, 23 nt, Human
uuuauaaaaauaaaaaacacugg

SEQ ID NO: 3356110 - RNA, 21 nt, Human
uuuauaaaaauaaaaaacacu

SEQ ID NO: 3356111 - RNA, 20 nt, Human
uuuacauuguaaauaguauu

SEQ ID NO: 3356112 - RNA, 13 nt, Human
uuguguugugaau

SEQ ID NO: 3356113 - RNA, 17 nt, Human
uuguaaauaguauuuga

SEQ ID NO: 3356114 - RNA, 21 nt, Human
uuguauucagaguugaugguu

SEQ ID NO: 3356115 - RNA, 19 nt, Human
uuguacgaagaguauuuuu

SEQ ID NO: 3356116 - RNA, 21 nt, Human
uuguacgaagaguauuuuuga

SEQ ID NO: 3356117 - RNA, 23 nt, Human
uuguacgaagaguauuuuugaca

SEQ ID NO: 3356118 - RNA, 19 nt, Human
uugacaaagucaagccaca

SEQ ID NO: 3356119 - RNA, 20 nt, Human
uugacaaagucaagccacau

SEQ ID NO: 3356120 - RNA, 13 nt, Human
uugaaaagaggug

SEQ ID NO: 3356121 - RNA, 14 nt, Human
uugaaaagaggugu

SEQ ID NO: 3356122 - RNA, 21 nt, Human
uugaaaagaggugugcaagag

SEQ ID NO: 3356123 - RNA, 17 nt, Human
uucuuccaaaaagauuu

SEQ ID NO: 3356124 - RNA, 18 nt, Human
uucugcuuguguuaagua

SEQ ID NO: 3356125 - RNA, 21 nt, Human
uuccugaggaagagggacugu

SEQ ID NO: 3356126 - RNA, 18 nt, Human
uucggugagcuacaaaug

SEQ ID NO: 3356127 - RNA, 22 nt, Human
uucuacauaaguaauucaagaa

SEQ ID NO: 3356128 - RNA, 14 nt, Human
uucuauaauuuaaa

SEQ ID NO: 3356129 - RNA, 14 nt, Human
uucuauagcuuuuc

SEQ ID NO: 3356130 - RNA, 13 nt, Human
uucugagagcugu

SEQ ID NO: 3356131 - RNA, 19 nt, Human
uucugagagcugugcauca

SEQ ID NO: 3356132 - RNA, 17 nt, Human
uuauguugcauagaaua

SEQ ID NO: 3356133 - RNA, 16 nt, Human
uuaucuugaauaaugu

SEQ ID NO: 3356134 - RNA, 14 nt, Human
uuaucuugaauaau

SEQ ID NO: 3356135 - RNA, 16 nt, Human
uuauauuuacaaaugg

SEQ ID NO: 3356136 - RNA, 16 nt, Human
uuauauuaugaagcuu

SEQ ID NO: 3356137 - RNA, 22 nt, Human
uuauaucuuguagcuuuaucaa

SEQ ID NO: 3356138 - RNA, 15 nt, Human
uuauaucuuguagcu

SEQ ID NO: 3356139 - RNA, 22 nt, Human
uuauacaggucauauuaauaua

SEQ ID NO: 3356140 - RNA, 14 nt, Human
uuauacaggucaua

SEQ ID NO: 3356141 - RNA, 21 nt, Human
uuauaauuuuaaauguuuuuu

SEQ ID NO: 3356142 - RNA, 17 nt, Human
uuauaauuuuaaauguu

SEQ ID NO: 3356143 - RNA, 12 nt, Human
uuauaauuuaaa

SEQ ID NO: 3356144 - RNA, 12 nt, Human
uuauaauuuuaa

SEQ ID NO: 3356145 - RNA, 13 nt, Human
uuauuuuaaaaga

SEQ ID NO: 3356146 - RNA, 16 nt, Human
uucaauaauaaauauu

SEQ ID NO: 3356147 - RNA, 14 nt, Human
uuauuuuguucaua

SEQ ID NO: 3356148 - RNA, 21 nt, Human
uuccaaaaagauuuucagaaa

SEQ ID NO: 3356149 - RNA, 20 nt, Human
uucaucugacuaugacauaa

SEQ ID NO: 3356150 - RNA, 23 nt, Human
uucaguuauuauauuuacaaaug

SEQ ID NO: 3356151 - RNA, 20 nt, Human
uucauaaauaaaguuuguug

SEQ ID NO: 3356152 - RNA, 13 nt, Human
uucagcuugggga

SEQ ID NO: 3356153 - RNA, 21 nt, Human
uuuuauuuuucucaugaugag

SEQ ID NO: 3356154 - RNA, 19 nt, Human
uuuuacguccaucucuugu

SEQ ID NO: 3356155 - RNA, 21 nt, Human
uuuuaaaguaacccuacaaaa

SEQ ID NO: 3356156 - RNA, 23 nt, Human
uuuucagaaaauauuauguguuu

SEQ ID NO: 3356157 - RNA, 16 nt, Human
uuuucacauaucuagu

SEQ ID NO: 3356158 - RNA, 21 nt, Human
uuuucaaaauuguuacaaauu

SEQ ID NO: 3356159 - RNA, 22 nt, Human
uuuucagaaaauauuauguguu

SEQ ID NO: 3356160 - RNA, 21 nt, Human
uuuucuuaaccagaucauugu

SEQ ID NO: 3356161 - RNA, 15 nt, Human
uuuggucaacacuaa

SEQ ID NO: 3356162 - RNA, 14 nt, Human
uuuuaaaauccacu

SEQ ID NO: 3356163 - RNA, 23 nt, Human
uuuuaaaauccacuuuaucuuga

SEQ ID NO: 3356164 - RNA, 18 nt, Human
uuugcauaacguauaaaa

SEQ ID NO: 3356165 - RNA, 23 nt, Human
uuuugacagaauauguuucaaac

SEQ ID NO: 3356166 - RNA, 22 nt, Human
uuuugacagaauauguuucaaa

SEQ ID NO: 3356167 - RNA, 11 nt, Human
uuuugacagaa

SEQ ID NO: 3356168 - RNA, 13 nt, Human
uuuuuaaucuuua

SEQ ID NO: 3356169 - RNA, 14 nt, Human
cauucuuucccaac

SEQ ID NO: 3356170 - RNA, 12 nt, Human
cauucuuuccca

SEQ ID NO: 3356171 - RNA, 13 nt, Human
cauucuggaauaa

SEQ ID NO: 3356172 - RNA, 14 nt, Human
cauuccagaggaag

SEQ ID NO: 3356173 - RNA, 13 nt, Human
cauuccagaggaa

SEQ ID NO: 3356174 - RNA, 19 nt, Human
cauucauuuucuggguguu

SEQ ID NO: 3356175 - RNA, 19 nt, Human
cauuguacgaagaguauuu

SEQ ID NO: 3356176 - RNA, 23 nt, Human
cauuuuaccuuugacaaagguaa

SEQ ID NO: 3356177 - RNA, 17 nt, Human
ccaaaccaccagaagcc

SEQ ID NO: 3356178 - RNA, 16 nt, Human
caugugacucuuucca

SEQ ID NO: 3356179 - RNA, 17 nt, Human
caugugacucuuuccaa

SEQ ID NO: 3356180 - RNA, 14 nt, Human
caugugacucuuuc

SEQ ID NO: 3356181 - RNA, 21 nt, Human
cauuaaaaaaucaguuguaca

SEQ ID NO: 3356182 - RNA, 15 nt, Human
cauggcauauuuuuc

SEQ ID NO: 3356183 - RNA, 19 nt, Human
cauggcauauuuuucacau

SEQ ID NO: 3356184 - RNA, 23 nt, Human
cauggcauauuuuucacauaucu

SEQ ID NO: 3356185 - RNA, 13 nt, Human
cauggcauauuuu

SEQ ID NO: 3356186 - RNA, 13 nt, Human
cauccagaguccc

SEQ ID NO: 3356187 - RNA, 17 nt, Human
cauccagagucccugcc

SEQ ID NO: 3356188 - RNA, 18 nt, Human
cauccagagucccugccu

SEQ ID NO: 3356189 - RNA, 20 nt, Human
cauccagagucccugccugg

SEQ ID NO: 3356190 - RNA, 13 nt, Human
caucccuccuggg

SEQ ID NO: 3356191 - RNA, 19 nt, Human
caucauguuuacagaggac

SEQ ID NO: 3356192 - RNA, 21 nt, Human
caucauguuuacagaggacag

SEQ ID NO: 3356193 - RNA, 13 nt, Human
caucauguuuaca

SEQ ID NO: 3356194 - RNA, 21 nt, Human
cauaucuaguaugaaauuaua

SEQ ID NO: 3356195 - RNA, 13 nt, Human
cauauuguuacug

SEQ ID NO: 3356196 - RNA, 19 nt, Human
cauauuguuacugguacca

SEQ ID NO: 3356197 - RNA, 16 nt, Human
cauagguuuaauaauu

SEQ ID NO: 3356198 - RNA, 16 nt, Human
cauauaagugauugcu

SEQ ID NO: 3356199 - RNA, 17 nt, Human
cauaucuaguaugaaau

SEQ ID NO: 3356200 - RNA, 18 nt, Human
cauaucuaguaugaaauu

SEQ ID NO: 3356201 - RNA, 15 nt, Human
cauaucuaguaugaa

SEQ ID NO: 3356202 - RNA, 15 nt, Human
cauccuacccccugu

SEQ ID NO: 3356203 - RNA, 18 nt, Human
cauccuacccccugugcc

SEQ ID NO: 3356204 - RNA, 17 nt, Human
caucugacuaugacaua

SEQ ID NO: 3356205 - RNA, 16 nt, Human
caucucuuguuuaaau

SEQ ID NO: 3356206 - RNA, 23 nt, Human
caugagcuccuuaaggcucuuuu

SEQ ID NO: 3356207 - RNA, 19 nt, Human
caugaguuggcugggaaua

SEQ ID NO: 3356208 - RNA, 18 nt, Human
caugagauaauaugcaga

SEQ ID NO: 3356209 - RNA, 22 nt, Human
ccacucaugugacucuuuccaa

SEQ ID NO: 3356210 - RNA, 19 nt, Human
ccacucaugugacucuuuc

SEQ ID NO: 3356211 - RNA, 22 nt, Human
ccacuaaaagaucgcaguuugc

SEQ ID NO: 3356212 - RNA, 20 nt, Human
ccaccugaauaaagaaugaa

SEQ ID NO: 3356213 - RNA, 15 nt, Human
ccacccuccacucuc

SEQ ID NO: 3356214 - RNA, 20 nt, Human
ccaaaccaccagaagcccag

SEQ ID NO: 3356215 - RNA, 22 nt, Human
ccacacugauccagcccugagu

SEQ ID NO: 3356216 - RNA, 19 nt, Human
ccacacugauccagcccug

SEQ ID NO: 3356217 - RNA, 22 nt, Human
ccaccaagccuggucagcccaa

SEQ ID NO: 3356218 - RNA, 21 nt, Human
ccaccaagccuggucagccca

SEQ ID NO: 3356219 - RNA, 16 nt, Human
ccagcauuucccuucc

SEQ ID NO: 3356220 - RNA, 21 nt, Human
ccagcauuucccuuccuuccu

SEQ ID NO: 3356221 - RNA, 23 nt, Human
ccagcauaauacuugcuuuggaa

SEQ ID NO: 3356222 - RNA, 20 nt, Human
ccacuguacuugcucuugau

SEQ ID NO: 3356223 - RNA, 19 nt, Human
ccacuguacuugcucuuga

SEQ ID NO: 3356224 - RNA, 18 nt, Human
ccacuguacuugcucuug

SEQ ID NO: 3356225 - RNA, 17 nt, Human
ccacuguacuugcucuu

SEQ ID NO: 3356226 - RNA, 18 nt, Human
ccagacccccuggagacu

SEQ ID NO: 3356227 - RNA, 12 nt, Human
ccagacccccug

SEQ ID NO: 3356228 - RNA, 16 nt, Human
ccagacccccuggaga

SEQ ID NO: 3356229 - RNA, 22 nt, Human
ccagauuuaugcauauuauuuu

SEQ ID NO: 3356230 - RNA, 13 nt, Human
ccagauuuaugca

SEQ ID NO: 3356231 - RNA, 13 nt, Human
ccaggagacaggu

SEQ ID NO: 3356232 - RNA, 19 nt, Human
ccaggccagggggccaguc

SEQ ID NO: 3356233 - RNA, 18 nt, Human
ccauccuacccccugugc

SEQ ID NO: 3356234 - RNA, 17 nt, Human
ccauccuacccccugug

SEQ ID NO: 3356235 - RNA, 21 nt, Human
cccaaaacaccggguuccagc

SEQ ID NO: 3356236 - RNA, 19 nt, Human
cccaaaacaccggguucca

SEQ ID NO: 3356237 - RNA, 14 nt, Human
ccugggcaggaggg

SEQ ID NO: 3356238 - RNA, 12 nt, Human
ccugggcaggag

SEQ ID NO: 3356239 - RNA, 14 nt, Human
ccuggucagcccaa

SEQ ID NO: 3356240 - RNA, 12 nt, Human
ccuggucagccc

SEQ ID NO: 3356241 - RNA, 19 nt, Human
ccuggagacuaaccccacc

SEQ ID NO: 3356242 - RNA, 15 nt, Human
ccuggcuccaggcca

SEQ ID NO: 3356243 - RNA, 16 nt, Human
ccuggcuccaggccag

SEQ ID NO: 3356244 - RNA, 17 nt, Human
ccuggcuccaggccagg

SEQ ID NO: 3356245 - RNA, 18 nt, Human
ccugccugguccucacac

SEQ ID NO: 3356246 - RNA, 19 nt, Human
ccugaggaagagggacugu

SEQ ID NO: 3356247 - RNA, 19 nt, Human
ccugcaauuucauaugcug

SEQ ID NO: 3356248 - RNA, 22 nt, Human
ccugccacucaggcccaaagcc

SEQ ID NO: 3356249 - RNA, 23 nt, Human
ccugccacucaggcccaaagccu

SEQ ID NO: 3356250 - RNA, 14 nt, Human
ccugccagaccccc

SEQ ID NO: 3356251 - RNA, 14 nt, Human
ccugccacucaggc

SEQ ID NO: 3356252 - RNA, 15 nt, Human
cgagaucccaacacu

SEQ ID NO: 3356253 - RNA, 21 nt, Human
cgagaucccaacacugccagc

SEQ ID NO: 3356254 - RNA, 13 nt, Human
cgagaucccaaca

SEQ ID NO: 3356255 - RNA, 22 nt, Human
cgagaucccaacacugccagca

SEQ ID NO: 3356256 - RNA, 21 nt, Human
cgaagaguauuuuugacagaa

SEQ ID NO: 3356257 - RNA, 16 nt, Human
ccuuaaggcucuuuug

SEQ ID NO: 3356258 - RNA, 18 nt, Human
ccuuaaggcucuuuugua

SEQ ID NO: 3356259 - RNA, 13 nt, Human
ccuuaaggcucuu

SEQ ID NO: 3356260 - RNA, 15 nt, Human
ccuguuuaagagaca

SEQ ID NO: 3356261 - RNA, 12 nt, Human
ccuguuuaagag

SEQ ID NO: 3356262 - RNA, 15 nt, Human
ccuugucacgccaga

SEQ ID NO: 3356263 - RNA, 18 nt, Human
ccuugucacgccagacuu

SEQ ID NO: 3356264 - RNA, 13 nt, Human
ccuugaacuagga

SEQ ID NO: 3356265 - RNA, 15 nt, Human
ccuucugugaaagua

SEQ ID NO: 3356266 - RNA, 16 nt, Human
ccuuccaagagccuga

SEQ ID NO: 3356267 - RNA, 17 nt, Human
ccuuccaagagccugag

SEQ ID NO: 3356268 - RNA, 15 nt, Human
ccuuccaagagccug

SEQ ID NO: 3356269 - RNA, 18 nt, Human
ccucuccacucaugugac

SEQ ID NO: 3356270 - RNA, 18 nt, Human
ccucucauuccagaggaa

SEQ ID NO: 3356271 - RNA, 21 nt, Human
ccucaucuccccaucauuggu

SEQ ID NO: 3356272 - RNA, 16 nt, Human
ccuaggcuaggguggg

SEQ ID NO: 3356273 - RNA, 18 nt, Human
ccuaaauauauuuuaaga

SEQ ID NO: 3356274 - RNA, 16 nt, Human
ccuaaauauauuuuaa

SEQ ID NO: 3356275 - RNA, 15 nt, Human
ccgaggcagggaagg

SEQ ID NO: 3356276 - RNA, 20 nt, Human
ccgggacaccuaggcuaggg

SEQ ID NO: 3356277 - RNA, 19 nt, Human
ccgggacaccuaggcuagg

SEQ ID NO: 3356278 - RNA, 22 nt, Human
ccgggucaucuguaccucugcc

SEQ ID NO: 3356279 - RNA, 12 nt, Human
ccggguuccagc

SEQ ID NO: 3356280 - RNA, 15 nt, Human
ccggguuccagcacc

SEQ ID NO: 3356281 - RNA, 21 nt, Human
cccacaggagguggucuggga

SEQ ID NO: 3356282 - RNA, 16 nt, Human
cccacaggaggugguc

SEQ ID NO: 3356283 - RNA, 17 nt, Human
cccaccacacccucccu

SEQ ID NO: 3356284 - RNA, 15 nt, Human
cccuggacugugugc

SEQ ID NO: 3356285 - RNA, 13 nt, Human
cccugccagaccc

SEQ ID NO: 3356286 - RNA, 21 nt, Human
cccugccagacccccuggaga

SEQ ID NO: 3356287 - RNA, 13 nt, Human
cccuccaccugcu

SEQ ID NO: 3356288 - RNA, 23 nt, Human
cccuccacucuccucuuccaggc

SEQ ID NO: 3356289 - RNA, 14 nt, Human
cuggugguggcucg

SEQ ID NO: 3356290 - RNA, 22 nt, Human
cuggugguggcucgggaggcga

SEQ ID NO: 3356291 - RNA, 12 nt, Human
cuggugguucac

SEQ ID NO: 3356292 - RNA, 20 nt, Human
cuggugguucacucuuggag

SEQ ID NO: 3356293 - RNA, 21 nt, Human
cuggugguucacucuuggagc

SEQ ID NO: 3356294 - RNA, 23 nt, Human
cuggugguucacucuuggagccu

SEQ ID NO: 3356295 - RNA, 16 nt, Human
cugggggccucuucug

SEQ ID NO: 3356296 - RNA, 13 nt, Human
cugggucgcccug

SEQ ID NO: 3356297 - RNA, 15 nt, Human
cugggucgcccugga

SEQ ID NO: 3356298 - RNA, 23 nt, Human
cugggccccugccucucugcagg

SEQ ID NO: 3356299 - RNA, 20 nt, Human
cugggccccugccucucugc

SEQ ID NO: 3356300 - RNA, 19 nt, Human
cugggccccugccucucug

SEQ ID NO: 3356301 - RNA, 18 nt, Human
cuguggccuaaccugccg

SEQ ID NO: 3356302 - RNA, 24 nt, Human
cuguggaucaaauccagccugcug

SEQ ID NO: 3356303 - RNA, 14 nt, Human
cuguggaucaaauc

SEQ ID NO: 3356304 - RNA, 14 nt, Human
cugugugcucagga

SEQ ID NO: 3356305 - RNA, 18 nt, Human
cuguguguguguaugugg

SEQ ID NO: 3356306 - RNA, 20 nt, Human
cuguguguguguaugugggg

SEQ ID NO: 3356307 - RNA, 18 nt, Human
cuguguguuuaugugugu

SEQ ID NO: 3356308 - RNA, 20 nt, Human
cuguguguuuaugugugugu

SEQ ID NO: 3356309 - RNA, 15 nt, Human
cuguguguguguaug

SEQ ID NO: 3356310 - RNA, 16 nt, Human
cuguguguguguaugu

SEQ ID NO: 3356311 - RNA, 14 nt, Human
cuguguguguguau

SEQ ID NO: 3356312 - RNA, 18 nt, Human
cugugaaaguacauuugg

SEQ ID NO: 3356313 - RNA, 17 nt, Human
cugugcccacccuccac

SEQ ID NO: 3356314 - RNA, 23 nt, Human
cugugcccacccuccacucuccu

SEQ ID NO: 3356315 - RNA, 21 nt, Human
cugucuuuuuucuaaaguaaa

SEQ ID NO: 3356316 - RNA, 15 nt, Human
cuuaaggcucuuuug

SEQ ID NO: 3356317 - RNA, 17 nt, Human
cuuaaccagaucauugu

SEQ ID NO: 3356318 - RNA, 19 nt, Human
cuuccaaacaggcucagag

SEQ ID NO: 3356319 - RNA, 13 nt, Human
cuuucccaacacc

SEQ ID NO: 3356320 - RNA, 17 nt, Human
cuuucccaacaccucuu

SEQ ID NO: 3356321 - RNA, 19 nt, Human
cuuguguuaaguaugugua

SEQ ID NO: 3356322 - RNA, 18 nt, Human
cuuguaaaggaauuuaaa

SEQ ID NO: 3356323 - RNA, 19 nt, Human
cuuguaaaggaauuuaaaa

SEQ ID NO: 3356324 - RNA, 20 nt, Human
cuuggggacaggggcaggag

SEQ ID NO: 3356325 - RNA, 17 nt, Human
cuuggagguagcuuuga

SEQ ID NO: 3356326 - RNA, 18 nt, Human
gaaaaucuuauaauuuaa

SEQ ID NO: 3356327 - RNA, 19 nt, Human
gaaaaucuuauaauuuaaa

SEQ ID NO: 3356328 - RNA, 19 nt, Human
gaaaauaacgauaaaagac

SEQ ID NO: 3356329 - RNA, 19 nt, Human
gaaaauaacaauaaaagac

SEQ ID NO: 3356330 - RNA, 16 nt, Human
gaaacacuuugcauaa

SEQ ID NO: 3356331 - RNA, 22 nt, Human
gaaaacaauaacgauaaaagac

SEQ ID NO: 3356332 - RNA, 14 nt, Human
cuuuuuucuaaagu

SEQ ID NO: 3356333 - RNA, 20 nt, Human
cuuuuacguccaucucuugu

SEQ ID NO: 3356334 - RNA, 19 nt, Human
gaaggaucccaugagcucc

SEQ ID NO: 3356335 - RNA, 14 nt, Human
gaaggaaaaugaua

SEQ ID NO: 3356336 - RNA, 22 nt, Human
gaagggguaggauuacuaggug

SEQ ID NO: 3356337 - RNA, 22 nt, Human
gaagcuucuggugaccuuccaa

SEQ ID NO: 3356338 - RNA, 18 nt, Human
gaagcuuuuaugugaaac

SEQ ID NO: 3356339 - RNA, 10 nt, Human
gaagcccaga

SEQ ID NO: 3356340 - RNA, 12 nt, Human
gaagcccagaau

SEQ ID NO: 3356341 - RNA, 22 nt, Human
gaagccacgguguucugugaua

SEQ ID NO: 3356342 - RNA, 17 nt, Human
gaauaaagaaugaaugg

SEQ ID NO: 3356343 - RNA, 12 nt, Human
gaauaaaauuuu

SEQ ID NO: 3356344 - RNA, 17 nt, Human
gaaguuuacauuguaaa

SEQ ID NO: 3356345 - RNA, 16 nt, Human
gaaguuuacauuguaa

SEQ ID NO: 3356346 - RNA, 20 nt, Human
gaauaagugccaggauggaa

SEQ ID NO: 3356347 - RNA, 20 nt, Human
gaauaauccuaaacauauga

SEQ ID NO: 3356348 - RNA, 14 nt, Human
gaauacuuuauaaa

SEQ ID NO: 3356349 - RNA, 14 nt, Human
gaaugccuccugca

SEQ ID NO: 3356350 - RNA, 22 nt, Human
gaacucaucuagguaaauuaca

SEQ ID NO: 3356351 - RNA, 21 nt, Human
gaacuuguaaaggaauuuaaa

SEQ ID NO: 3356352 - RNA, 13 nt, Human
gaacuauuagagc

SEQ ID NO: 3356353 - RNA, 18 nt, Human
gaaauuguauuacaaauc

SEQ ID NO: 3356354 - RNA, 21 nt, Human
cucgagaucccaacacugcca

SEQ ID NO: 3356355 - RNA, 22 nt, Human
cucgagaucccaacacugccag

SEQ ID NO: 3356356 - RNA, 23 nt, Human
cucgagaucccaacacugccagc

SEQ ID NO: 3356357 - RNA, 13 nt, Human
cucgagaucccaa

SEQ ID NO: 3356358 - RNA, 12 nt, Human
cuccuccuagcc

SEQ ID NO: 3356359 - RNA, 13 nt, Human
cuccaccugcucu

SEQ ID NO: 3356360 - RNA, 23 nt, Human
cuccaccaagccuggucagccca

SEQ ID NO: 3356361 - RNA, 21 nt, Human
cuccaaugcuguuaucccugc

SEQ ID NO: 3356362 - RNA, 15 nt, Human
cucauaucaguuugc

SEQ ID NO: 3356363 - RNA, 12 nt, Human
cucaaauuugga

SEQ ID NO: 3356364 - RNA, 14 nt, Human
cuauuguagagcca

SEQ ID NO: 3356365 - RNA, 13 nt, Human
cucacauuuauau

SEQ ID NO: 3356366 - RNA, 13 nt, Human
cuauaauuuaaau

SEQ ID NO: 3356367 - RNA, 13 nt, Human
cuauggccugugg

SEQ ID NO: 3356368 - RNA, 13 nt, Human
cuaugagggccuu

SEQ ID NO: 3356369 - RNA, 16 nt, Human
cuaucuguuuacagug

SEQ ID NO: 3356370 - RNA, 15 nt, Human
cuaugagggccuuga

SEQ ID NO: 3356371 - RNA, 17 nt, Human
cuaugagggccuugagu

SEQ ID NO: 3356372 - RNA, 22 nt, Human
cuagguaaauuacaguuccuag

SEQ ID NO: 3356373 - RNA, 15 nt, Human
cuaggguggggagag

SEQ ID NO: 3356374 - RNA, 17 nt, Human
cugccuggaccagccuc

SEQ ID NO: 3356375 - RNA, 18 nt, Human
cugccucucugcaggucc

SEQ ID NO: 3356376 - RNA, 17 nt, Human
cugccucucugcagguc

SEQ ID NO: 3356377 - RNA, 16 nt, Human
cugccucucugcaggu

SEQ ID NO: 3356378 - RNA, 15 nt, Human
cugccucucugcagg

SEQ ID NO: 3356379 - RNA, 16 nt, Human
cugccacucaggccca

SEQ ID NO: 3356380 - RNA, 23 nt, Human
cugccacucaggcccaaagccuc

SEQ ID NO: 3356381 - RNA, 15 nt, Human
cugaguuccuagcca

SEQ ID NO: 3356382 - RNA, 16 nt, Human
cugaguuccuagccac

SEQ ID NO: 3356383 - RNA, 17 nt, Human
cugaguuccuagccacc

SEQ ID NO: 3356384 - RNA, 18 nt, Human
cugaguuccuagccaccg

SEQ ID NO: 3356385 - RNA, 13 nt, Human
cugauuguauuua

SEQ ID NO: 3356386 - RNA, 14 nt, Human
cucugcccgggagc

SEQ ID NO: 3356387 - RNA, 20 nt, Human
cucugcccgggagcucagga

SEQ ID NO: 3356388 - RNA, 20 nt, Human
cucugcaggucccuaauaaa

SEQ ID NO: 3356389 - RNA, 19 nt, Human
cucugcaggucccuaauaa

SEQ ID NO: 3356390 - RNA, 18 nt, Human
cucugcaggucccuaaua

SEQ ID NO: 3356391 - RNA, 21 nt, Human
cucugcaggucccuaauaaag

SEQ ID NO: 3356392 - RNA, 20 nt, Human
cucuggauuauauuaugaag

SEQ ID NO: 3356393 - RNA, 19 nt, Human
cucuggauuauauuaugaa

SEQ ID NO: 3356394 - RNA, 12 nt, Human
cugagcaggugu

SEQ ID NO: 3356395 - RNA, 16 nt, Human
gagucccugccuggac

SEQ ID NO: 3356396 - RNA, 14 nt, Human
gagucccugccugg

SEQ ID NO: 3356397 - RNA, 15 nt, Human
gagucccugccugga

SEQ ID NO: 3356398 - RNA, 14 nt, Human
gagucccugccauc

SEQ ID NO: 3356399 - RNA, 18 nt, Human
gaguauuuuugacagaau

SEQ ID NO: 3356400 - RNA, 14 nt, Human
gaguauuuuugaca

SEQ ID NO: 3356401 - RNA, 16 nt, Human
gaguauuuuugacaga

SEQ ID NO: 3356402 - RNA, 17 nt, Human
gaguauuuuugacagaa

SEQ ID NO: 3356403 - RNA, 22 nt, Human
gagguuuguuuagaagaagugu

SEQ ID NO: 3356404 - RNA, 13 nt, Human
gaguuccuagcca

SEQ ID NO: 3356405 - RNA, 21 nt, Human
gaguugaaaaucuuauaauuu

SEQ ID NO: 3356406 - RNA, 21 nt, Human
gauaaucagugugucuaaauu

SEQ ID NO: 3356407 - RNA, 17 nt, Human
gauauaaguguguguuu

SEQ ID NO: 3356408 - RNA, 21 nt, Human
gauauaaguguguguuuuuca

SEQ ID NO: 3356409 - RNA, 21 nt, Human
gaugccuggcgggguggggug

SEQ ID NO: 3356410 - RNA, 20 nt, Human
gauggcaaagaaggagagca

SEQ ID NO: 3356411 - RNA, 14 nt, Human
gaugacuauggaaa

SEQ ID NO: 3356412 - RNA, 13 nt, Human
gaugcauggagau

SEQ ID NO: 3356413 - RNA, 20 nt, Human
gaugcauggagauagcccca

SEQ ID NO: 3356414 - RNA, 17 nt, Human
gaugcaauguagagggg

SEQ ID NO: 3356415 - RNA, 13 nt, Human
gaucgcaguuugc

SEQ ID NO: 3356416 - RNA, 16 nt, Human
gaucuucaucugacua

SEQ ID NO: 3356417 - RNA, 18 nt, Human
gaucgcaguuugccuggu

SEQ ID NO: 3356418 - RNA, 23 nt, Human
gaucuucaucugacuaugacaua

SEQ ID NO: 3356419 - RNA, 21 nt, Human
gauguguccugauaagcugag

SEQ ID NO: 3356420 - RNA, 21 nt, Human
gauguggaaaagccaagaggc

SEQ ID NO: 3356421 - RNA, 23 nt, Human
gauguggaaaagccaagaggcug

SEQ ID NO: 3356422 - RNA, 22 nt, Human
gauuaagaucucagugguuaag

SEQ ID NO: 3356423 - RNA, 23 nt, Human
gagcucaggaaccgaggcaggga

SEQ ID NO: 3356424 - RNA, 22 nt, Human
gagcucaggaaccgaggcaggg

SEQ ID NO: 3356425 - RNA, 14 nt, Human
gagcuacaaaugca

SEQ ID NO: 3356426 - RNA, 12 nt, Human
gagcuacaaaug

SEQ ID NO: 3356427 - RNA, 13 nt, Human
gagcuacaaaugc

SEQ ID NO: 3356428 - RNA, 12 nt, Human
gagccugcagag

SEQ ID NO: 3356429 - RNA, 15 nt, Human
gagccugcagagcug

SEQ ID NO: 3356430 - RNA, 13 nt, Human
gaggagggcaggc

SEQ ID NO: 3356431 - RNA, 14 nt, Human
gaggagggcaggca

SEQ ID NO: 3356432 - RNA, 15 nt, Human
gaggagggcaggcau

SEQ ID NO: 3356433 - RNA, 15 nt, Human
gaggaugucugggcc

SEQ ID NO: 3356434 - RNA, 16 nt, Human
gccaccugaauaaaga

SEQ ID NO: 3356435 - RNA, 19 nt, Human
gccaccgccuccuacagcc

SEQ ID NO: 3356436 - RNA, 15 nt, Human
gccacgauugcagga

SEQ ID NO: 3356437 - RNA, 20 nt, Human
gccaaugugaacagcggcug

SEQ ID NO: 3356438 - RNA, 21 nt, Human
gcccaaaccaccagaagccca

SEQ ID NO: 3356439 - RNA, 22 nt, Human
gcccaaaccaccagaagcccag

SEQ ID NO: 3356440 - RNA, 23 nt, Human
gcccaaaccaccagaagcccaga

SEQ ID NO: 3356441 - RNA, 13 nt, Human
gccaggcuggguc

SEQ ID NO: 3356442 - RNA, 23 nt, Human
gcaggcaucggggagccgggagc

SEQ ID NO: 3356443 - RNA, 21 nt, Human
gcaggcaucggggagccggga

SEQ ID NO: 3356444 - RNA, 22 nt, Human
gcaggcaucggggagccgggag

SEQ ID NO: 3356445 - RNA, 15 nt, Human
gcaggucccuaauaa

SEQ ID NO: 3356446 - RNA, 14 nt, Human
gcaggucccuaaua

SEQ ID NO: 3356447 - RNA, 16 nt, Human
gcagugggccuggcca

SEQ ID NO: 3356448 - RNA, 15 nt, Human
gcagugggccuggcc

SEQ ID NO: 3356449 - RNA, 17 nt, Human
gcagugggccuggccag

SEQ ID NO: 3356450 - RNA, 19 nt, Human
gcaggucccuaauaaagcu

SEQ ID NO: 3356451 - RNA, 18 nt, Human
gcaggucccuaauaaagc

SEQ ID NO: 3356452 - RNA, 17 nt, Human
gcaggucccuaauaaag

SEQ ID NO: 3356453 - RNA, 16 nt, Human
gcaggucccuaauaaa

SEQ ID NO: 3356454 - RNA, 21 nt, Human
gcaggucccuaauaaagcugu

SEQ ID NO: 3356455 - RNA, 20 nt, Human
gcaggucccuaauaaagcug

SEQ ID NO: 3356456 - RNA, 23 nt, Human
gcaggucccuaauaaagcugugu

SEQ ID NO: 3356457 - RNA, 13 nt, Human
gcaggucccuaau

SEQ ID NO: 3356458 - RNA, 20 nt, Human
gcaucuagcaugucgucaaa

SEQ ID NO: 3356459 - RNA, 22 nt, Human
gcagauggaaugcuguguuaaa

SEQ ID NO: 3356460 - RNA, 18 nt, Human
gcaggaaauggcugugga

SEQ ID NO: 3356461 - RNA, 15 nt, Human
gcaccacacucagcc

SEQ ID NO: 3356462 - RNA, 17 nt, Human
gcaccacacucagcccu

SEQ ID NO: 3356463 - RNA, 19 nt, Human
gcuguggccuaaccugccg

SEQ ID NO: 3356464 - RNA, 20 nt, Human
gcuguggccuaaccugccga

SEQ ID NO: 3356465 - RNA, 16 nt, Human
gcugugugcucuccaa

SEQ ID NO: 3356466 - RNA, 16 nt, Human
gcuguguggcagucug

SEQ ID NO: 3356467 - RNA, 18 nt, Human
gcuguguuaaauaaaccu

SEQ ID NO: 3356468 - RNA, 21 nt, Human
gcugggaggagggcaggcauc

SEQ ID NO: 3356469 - RNA, 19 nt, Human
gcugggaggagggcaggca

SEQ ID NO: 3356470 - RNA, 22 nt, Human
gcugggcuuggcagcccggguc

SEQ ID NO: 3356471 - RNA, 14 nt, Human
gcuggggaugucuc

SEQ ID NO: 3356472 - RNA, 10 nt, Human
gcuucauaca

SEQ ID NO: 3356473 - RNA, 12 nt, Human
gcuuguguuaag

SEQ ID NO: 3356474 - RNA, 15 nt, Human
gcuuuuaugugaaac

SEQ ID NO: 3356475 - RNA, 13 nt, Human
gcuuuuaugugaa

SEQ ID NO: 3356476 - RNA, 14 nt, Human
gcuuuccaaagcca

SEQ ID NO: 3356477 - RNA, 14 nt, Human
gcugauuguauuua

SEQ ID NO: 3356478 - RNA, 15 nt, Human
gcucuccaagcccag

SEQ ID NO: 3356479 - RNA, 19 nt, Human
gcucuugaugccuggcggg

SEQ ID NO: 3356480 - RNA, 17 nt, Human
gcucuugaugccuggcg

SEQ ID NO: 3356481 - RNA, 15 nt, Human
gcuccuuaaggcucu

SEQ ID NO: 3356482 - RNA, 17 nt, Human
gcuccuuaaggcucuuu

SEQ ID NO: 3356483 - RNA, 21 nt, Human
gcuccuuaaggcucuuuugua

SEQ ID NO: 3356484 - RNA, 20 nt, Human
gcuccauuuuuagugaaaua

SEQ ID NO: 3356485 - RNA, 18 nt, Human
gcuccaggccagggggcc

SEQ ID NO: 3356486 - RNA, 17 nt, Human
gcuccaggccagggggc

SEQ ID NO: 3356487 - RNA, 17 nt, Human
gcuaucguaaaauuaag

SEQ ID NO: 3356488 - RNA, 16 nt, Human
gcuaucguaaaauuaa

SEQ ID NO: 3356489 - RNA, 15 nt, Human
gcuaucguaaaauua

SEQ ID NO: 3356490 - RNA, 18 nt, Human
gcucauggacuucugcca

SEQ ID NO: 3356491 - RNA, 17 nt, Human
gcgaagcguuguccuca

SEQ ID NO: 3356492 - RNA, 15 nt, Human
gcgaauuuuaaaaga

SEQ ID NO: 3356493 - RNA, 16 nt, Human
gcgaauuuuaaaagau

SEQ ID NO: 3356494 - RNA, 14 nt, Human
gcgaauuuuaaaag

SEQ ID NO: 3356495 - RNA, 15 nt, Human
gccuugucacgccag

SEQ ID NO: 3356496 - RNA, 16 nt, Human
gccuugucacgccaga

SEQ ID NO: 3356497 - RNA, 17 nt, Human
gccuugucacgccagac

SEQ ID NO: 3356498 - RNA, 16 nt, Human
gccugggcaggaggga

SEQ ID NO: 3356499 - RNA, 14 nt, Human
gccuggucagccca

SEQ ID NO: 3356500 - RNA, 15 nt, Human
gccuggucagcccaa

SEQ ID NO: 3356501 - RNA, 13 nt, Human
gccuggucagccc

SEQ ID NO: 3356502 - RNA, 17 nt, Human
gccuggaccagccucuc

SEQ ID NO: 3356503 - RNA, 16 nt, Human
gccuggaccagccucu

SEQ ID NO: 3356504 - RNA, 22 nt, Human
gccugcuuuuuauggccuguga

SEQ ID NO: 3356505 - RNA, 15 nt, Human
ggccuaaccugccga

SEQ ID NO: 3356506 - RNA, 16 nt, Human
ggccuaaccugccgag

SEQ ID NO: 3356507 - RNA, 20 nt, Human
ggccucucauuccagaggaa

SEQ ID NO: 3356508 - RNA, 15 nt, Human
ggccugggcaggagg

SEQ ID NO: 3356509 - RNA, 17 nt, Human
ggccugggcaggaggga

SEQ ID NO: 3356510 - RNA, 19 nt, Human
ggccugggcaggagggagg

SEQ ID NO: 3356511 - RNA, 16 nt, Human
ggccugacucucagca

SEQ ID NO: 3356512 - RNA, 16 nt, Human
ggcucuggagcccacu

SEQ ID NO: 3356513 - RNA, 19 nt, Human
ggcucuggagcccacugua

SEQ ID NO: 3356514 - RNA, 17 nt, Human
ggcucuggagcccacug

SEQ ID NO: 3356515 - RNA, 20 nt, Human
ggcugggaggagggcaggca

SEQ ID NO: 3356516 - RNA, 21 nt, Human
ggcugggaggagggcaggcau

SEQ ID NO: 3356517 - RNA, 13 nt, Human
ggcugggaggagg

SEQ ID NO: 3356518 - RNA, 23 nt, Human
ggcucuggagcccacuguacuug

SEQ ID NO: 3356519 - RNA, 13 nt, Human
ggcuggacuugga

SEQ ID NO: 3356520 - RNA, 18 nt, Human
ggcuggacuuggagguag

SEQ ID NO: 3356521 - RNA, 21 nt, Human
ggcuguggcauccagaguccc

SEQ ID NO: 3356522 - RNA, 23 nt, Human
ggcuguggcauccagagucccug

SEQ ID NO: 3356523 - RNA, 13 nt, Human
gggagccgggagc

SEQ ID NO: 3356524 - RNA, 12 nt, Human
gggagcucagga

SEQ ID NO: 3356525 - RNA, 22 nt, Human
gggagcucaggaaccgaggcag

SEQ ID NO: 3356526 - RNA, 23 nt, Human
gggagcucaggaaccgaggcagg

SEQ ID NO: 3356527 - RNA, 12 nt, Human
gggaggagggca

SEQ ID NO: 3356528 - RNA, 16 nt, Human
gggaggagggcaggca

SEQ ID NO: 3356529 - RNA, 20 nt, Human
gggacaccaagccuuggcuc

SEQ ID NO: 3356530 - RNA, 15 nt, Human
gggacugagaaauuu

SEQ ID NO: 3356531 - RNA, 21 nt, Human
ggagcucaggaaccgaggcag

SEQ ID NO: 3356532 - RNA, 17 nt, Human
ggagccugcagagcugc

SEQ ID NO: 3356533 - RNA, 16 nt, Human
ggagccuacccacccc

SEQ ID NO: 3356534 - RNA, 13 nt, Human
ggagcccugggag

SEQ ID NO: 3356535 - RNA, 20 nt, Human
ggagcccugggaggcucugg

SEQ ID NO: 3356536 - RNA, 19 nt, Human
ggagcccugggaggcucug

SEQ ID NO: 3356537 - RNA, 16 nt, Human
ggagcccugggaggcu

SEQ ID NO: 3356538 - RNA, 14 nt, Human
ggagggcaggcauc

SEQ ID NO: 3356539 - RNA, 17 nt, Human
ggaggcaggaguuucgu

SEQ ID NO: 3356540 - RNA, 12 nt, Human
ggaccagccucu

SEQ ID NO: 3356541 - RNA, 21 nt, Human
gcuuuuaugugaaacauguuu

SEQ ID NO: 3356542 - RNA, 20 nt, Human
gcuuuuaugugaaacauguu

SEQ ID NO: 3356543 - RNA, 19 nt, Human
gcuuuuaugugaaacaugu

SEQ ID NO: 3356544 - RNA, 19 nt, Human
ggagacagguuagcugcuc

SEQ ID NO: 3356545 - RNA, 18 nt, Human
ggacugagaaauuuauaa

SEQ ID NO: 3356546 - RNA, 14 nt, Human
ggacugagaaauuu

SEQ ID NO: 3356547 - RNA, 12 nt, Human
ggauuauauuau

SEQ ID NO: 3356548 - RNA, 16 nt, Human
ggauucugagagcugu

SEQ ID NO: 3356549 - RNA, 18 nt, Human
ggaugaugacuauggaaa

SEQ ID NO: 3356550 - RNA, 14 nt, Human
caccggggccuggg

SEQ ID NO: 3356551 - RNA, 21 nt, Human
caccggggccugggcaggagg

SEQ ID NO: 3356552 - RNA, 22 nt, Human
caccggggccugggcaggaggg

SEQ ID NO: 3356553 - RNA, 17 nt, Human
caccgccuccuacagcc

SEQ ID NO: 3356554 - RNA, 20 nt, Human
cacggcuccucgagauccca

SEQ ID NO: 3356555 - RNA, 22 nt, Human
cacggcuccucgagaucccaac

SEQ ID NO: 3356556 - RNA, 19 nt, Human
cacguguggccuguucuuc

SEQ ID NO: 3356557 - RNA, 13 nt, Human
cacuaaacaaaga

SEQ ID NO: 3356558 - RNA, 16 nt, Human
cacguaaugaaacuug

SEQ ID NO: 3356559 - RNA, 19 nt, Human
cacguaaugaaacuuggau

SEQ ID NO: 3356560 - RNA, 16 nt, Human
cacucaugugacucuu

SEQ ID NO: 3356561 - RNA, 22 nt, Human
cacucaugugacucuuuccaac

SEQ ID NO: 3356562 - RNA, 18 nt, Human
cacuccuccuagccaccc

SEQ ID NO: 3356563 - RNA, 13 nt, Human
cacuccuccuagc

SEQ ID NO: 3356564 - RNA, 16 nt, Human
cacuaacaugauuugg

SEQ ID NO: 3356565 - RNA, 14 nt, Human
cacuaugaagaugu

SEQ ID NO: 3356566 - RNA, 21 nt, Human
cacuaugaagauguuucaaaa

SEQ ID NO: 3356567 - RNA, 19 nt, Human
cacuguucugaaagugacu

SEQ ID NO: 3356568 - RNA, 18 nt, Human
cacuguacuugcucuuga

SEQ ID NO: 3356569 - RNA, 15 nt, Human
cacuguacuugcucu

SEQ ID NO: 3356570 - RNA, 19 nt, Human
cacuguacuugcucuugau

SEQ ID NO: 3356571 - RNA, 17 nt, Human
cacuggccccugagauc

SEQ ID NO: 3356572 - RNA, 18 nt, Human
cacugcuaagaauauuug

SEQ ID NO: 3356573 - RNA, 13 nt, Human
cacugacagauuu

SEQ ID NO: 3356574 - RNA, 11 nt, Human
cacugacagau

SEQ ID NO: 3356575 - RNA, 17 nt, Human
cacugacagauuuccau

SEQ ID NO: 3356576 - RNA, 22 nt, Human
cacugacagauuuccauccuag

SEQ ID NO: 3356577 - RNA, 14 nt, Human
cacugauccagccc

SEQ ID NO: 3356578 - RNA, 15 nt, Human
cacugauccagcccu

SEQ ID NO: 3356579 - RNA, 16 nt, Human
cacugauccagcccug

SEQ ID NO: 3356580 - RNA, 12 nt, Human
cagacuucccac

SEQ ID NO: 3356581 - RNA, 22 nt, Human
cagacuucccacggcuccucga

SEQ ID NO: 3356582 - RNA, 17 nt, Human
cagagaaaaagggaggg

SEQ ID NO: 3356583 - RNA, 18 nt, Human
cagagaaaaagggagggg

SEQ ID NO: 3356584 - RNA, 12 nt, Human
cagagaaaaagg

SEQ ID NO: 3356585 - RNA, 15 nt, Human
cagacccccuggaga

SEQ ID NO: 3356586 - RNA, 14 nt, Human
cagaaugaggcugc

SEQ ID NO: 3356587 - RNA, 15 nt, Human
cagaaugaggcugcu

SEQ ID NO: 3356588 - RNA, 19 nt, Human
cagaaaauauuauguguuu

SEQ ID NO: 3356589 - RNA, 12 nt, Human
cacuuugcauaa

SEQ ID NO: 3356590 - RNA, 12 nt, Human
cagaagcccaga

SEQ ID NO: 3356591 - RNA, 14 nt, Human
cagaagcccagaau

SEQ ID NO: 3356592 - RNA, 11 nt, Human
cagaagcccag

SEQ ID NO: 3356593 - RNA, 23 nt, Human
cagaaccccuggcuccaggccag

SEQ ID NO: 3356594 - RNA, 17 nt, Human
cagaaggaucuucaucu

SEQ ID NO: 3356595 - RNA, 14 nt, Human
cagagucccugccu

SEQ ID NO: 3356596 - RNA, 18 nt, Human
cagagucccugccuggac

SEQ ID NO: 3356597 - RNA, 23 nt, Human
cagaggcgcaugaauuugugaag

SEQ ID NO: 3356598 - RNA, 22 nt, Human
cagauaaagguucaugcaaacu

SEQ ID NO: 3356599 - RNA, 14 nt, Human
cagauaaucagugu

SEQ ID NO: 3356600 - RNA, 22 nt, Human
cagaggacaguauuugugggga

SEQ ID NO: 3356601 - RNA, 15 nt, Human
cagagcagugggccu

SEQ ID NO: 3356602 - RNA, 17 nt, Human
cagagcagugggccugg

SEQ ID NO: 3356603 - RNA, 20 nt, Human
cagagcagugggccuggcca

SEQ ID NO: 3356604 - RNA, 21 nt, Human
cagagcagugggccuggccag

SEQ ID NO: 3356605 - RNA, 22 nt, Human
cagagcagugggccuggccagc

SEQ ID NO: 3356606 - RNA, 15 nt, Human
cagcauuucccuucc

SEQ ID NO: 3356607 - RNA, 18 nt, Human
cagccaacuauggccugu

SEQ ID NO: 3356608 - RNA, 16 nt, Human
cagcccaccuggcuuu

SEQ ID NO: 3356609 - RNA, 20 nt, Human
cagcccaaaccaccagaagc

SEQ ID NO: 3356610 - RNA, 21 nt, Human
cagcccaaaccaccagaagcc

SEQ ID NO: 3356611 - RNA, 23 nt, Human
cagcccaaaccaccagaagccca

SEQ ID NO: 3356612 - RNA, 16 nt, Human
cagcccaaaccaccag

SEQ ID NO: 3356613 - RNA, 19 nt, Human
cagcccaaaccaccagaag

SEQ ID NO: 3356614 - RNA, 21 nt, Human
cagauggaaugcuguguuaaa

SEQ ID NO: 3356615 - RNA, 19 nt, Human
cagauggaaugcuguguua

SEQ ID NO: 3356616 - RNA, 17 nt, Human
cagauggaaugcugugu

SEQ ID NO: 3356617 - RNA, 16 nt, Human
cagauggaaugcugug

SEQ ID NO: 3356618 - RNA, 15 nt, Human
caggaaccgaggcag

SEQ ID NO: 3356619 - RNA, 17 nt, Human
caggaaccgaggcaggg

SEQ ID NO: 3356620 - RNA, 18 nt, Human
caggaaccgaggcaggga

SEQ ID NO: 3356621 - RNA, 22 nt, Human
cagcuggggccaggcugggucg

SEQ ID NO: 3356622 - RNA, 21 nt, Human
cagcuggggccaggcuggguc

SEQ ID NO: 3356623 - RNA, 20 nt, Human
cagcuggggccaggcugggu

SEQ ID NO: 3356624 - RNA, 19 nt, Human
cagcuggggccaggcuggg

SEQ ID NO: 3356625 - RNA, 18 nt, Human
cagcuggggccaggcugg

SEQ ID NO: 3356626 - RNA, 18 nt, Human
cagccuccauccuacccc

SEQ ID NO: 3356627 - RNA, 21 nt, Human
cagccuccauccuacccccug

SEQ ID NO: 3356628 - RNA, 18 nt, Human
cagcccugaguuccuagc

SEQ ID NO: 3356629 - RNA, 19 nt, Human
cagcccugaguuccuagcc

SEQ ID NO: 3356630 - RNA, 21 nt, Human
cagcccugaguuccuagccac

SEQ ID NO: 3356631 - RNA, 18 nt, Human
cagcccucauuggcucuu

SEQ ID NO: 3356632 - RNA, 23 nt, Human
cagccuggcuguggccuaaccug

SEQ ID NO: 3356633 - RNA, 23 nt, Human
cagccucuccacucaugugacuc

SEQ ID NO: 3356634 - RNA, 15 nt, Human
caggcucagagggug

SEQ ID NO: 3356635 - RNA, 11 nt, Human
caggcucagag

SEQ ID NO: 3356636 - RNA, 21 nt, Human
caggcugggucgcccuggacu

SEQ ID NO: 3356637 - RNA, 23 nt, Human
caggcugggucgcccuggacugu

SEQ ID NO: 3356638 - RNA, 23 nt, Human
caggcuuuuuuaucaugugaaau

SEQ ID NO: 3356639 - RNA, 13 nt, Human
cagggaaggaucc

SEQ ID NO: 3356640 - RNA, 18 nt, Human
cagggaaggaucccauga

SEQ ID NO: 3356641 - RNA, 14 nt, Human
caggggcaggagga

SEQ ID NO: 3356642 - RNA, 22 nt, Human
cagggggccagucccugaggca

SEQ ID NO: 3356643 - RNA, 20 nt, Human
caggcaucggggagccggga

SEQ ID NO: 3356644 - RNA, 21 nt, Human
caggcaucggggagccgggag

SEQ ID NO: 3356645 - RNA, 22 nt, Human
caggaugaugacuauggaaaga

SEQ ID NO: 3356646 - RNA, 20 nt, Human
caggaugaugacuauggaaa

SEQ ID NO: 3356647 - RNA, 18 nt, Human
caggaugaugacuaugga

SEQ ID NO: 3356648 - RNA, 21 nt, Human
caggcccccagaaccccuggc

SEQ ID NO: 3356649 - RNA, 21 nt, Human
caggccagggggccagucccu

SEQ ID NO: 3356650 - RNA, 23 nt, Human
caggagacagguuagcugcuccc

SEQ ID NO: 3356651 - RNA, 12 nt, Human
caggagaguaga

SEQ ID NO: 3356652 - RNA, 15 nt, Human
caggagucccugcca

SEQ ID NO: 3356653 - RNA, 21 nt, Human
caggagucccugccaucaugu

SEQ ID NO: 3356654 - RNA, 14 nt, Human
caggagucccugcc

SEQ ID NO: 3356655 - RNA, 21 nt, Human
caggagcccugggaggcucug

SEQ ID NO: 3356656 - RNA, 11 nt, Human
caggagcccug

SEQ ID NO: 3356657 - RNA, 19 nt, Human
caggagcccugggaggcuc

SEQ ID NO: 3356658 - RNA, 18 nt, Human
caggagcccugggaggcu

SEQ ID NO: 3356659 - RNA, 16 nt, Human
caggagcccugggagg

SEQ ID NO: 3356660 - RNA, 14 nt, Human
caggagcccuggga

SEQ ID NO: 3356661 - RNA, 19 nt, Human
caggaguuucguuuucaaa

SEQ ID NO: 3356662 - RNA, 12 nt, Human
cagguguucuuc

SEQ ID NO: 3356663 - RNA, 21 nt, Human
caggucauauuaauauauuuc

SEQ ID NO: 3356664 - RNA, 20 nt, Human
caggucauauuaauauauuu

SEQ ID NO: 3356665 - RNA, 13 nt, Human
cagguccccagac

SEQ ID NO: 3356666 - RNA, 18 nt, Human
cagguccccagcuuuggc

SEQ ID NO: 3356667 - RNA, 12 nt, Human
cagguccccaga

SEQ ID NO: 3356668 - RNA, 18 nt, Human
caggucccuaauaaagcu

SEQ ID NO: 3356669 - RNA, 17 nt, Human
caggucccuaauaaagc

SEQ ID NO: 3356670 - RNA, 16 nt, Human
caggucccuaauaaag

SEQ ID NO: 3356671 - RNA, 15 nt, Human
caggucccuaauaaa

SEQ ID NO: 3356672 - RNA, 14 nt, Human
caggucccuaauaa

SEQ ID NO: 3356673 - RNA, 13 nt, Human
caggucccuaaua

SEQ ID NO: 3356674 - RNA, 12 nt, Human
caggucccuaau

SEQ ID NO: 3356675 - RNA, 11 nt, Human
caggucccuaa

SEQ ID NO: 3356676 - RNA, 22 nt, Human
caggucccuaauaaagcugugu

SEQ ID NO: 3356677 - RNA, 21 nt, Human
caggucccuaauaaagcugug

SEQ ID NO: 3356678 - RNA, 20 nt, Human
caggucccuaauaaagcugu

SEQ ID NO: 3356679 - RNA, 19 nt, Human
caggucccuaauaaagcug

SEQ ID NO: 3356680 - RNA, 22 nt, Human
caguaguagccuccagguuucc

SEQ ID NO: 3356681 - RNA, 12 nt, Human
caguauguggaa

SEQ ID NO: 3356682 - RNA, 20 nt, Human
cagucccugaggcagguccc

SEQ ID NO: 3356683 - RNA, 23 nt, Human
cagucccugaggcagguccccag

SEQ ID NO: 3356684 - RNA, 14 nt, Human
cagucccugaggca

SEQ ID NO: 3356685 - RNA, 12 nt, Human
cagugaauucuu

SEQ ID NO: 3356686 - RNA, 22 nt, Human
cagucuuuaaucugagaggcca

SEQ ID NO: 3356687 - RNA, 16 nt, Human
cagugaaagaaaauaa

SEQ ID NO: 3356688 - RNA, 20 nt, Human
cagugaaagaaaauaacaau

SEQ ID NO: 3356689 - RNA, 11 nt, Human
gaaaugaaaaa

SEQ ID NO: 3356690 - RNA, 20 nt, Human
gaaaucuaugauuccaggug

SEQ ID NO: 3356691 - RNA, 18 nt, Human
gaaaucuaugauuccagg

SEQ ID NO: 3356692 - RNA, 18 nt, Human
gaaaacuuguauuaugug

SEQ ID NO: 3356693 - RNA, 22 nt, Human
gaaaacuuguauuauguguguu

SEQ ID NO: 3356694 - RNA, 19 nt, Human
gaaaacuuguauuaugugu

SEQ ID NO: 3356695 - RNA, 20 nt, Human
gaaaauuauuuuguucauac

SEQ ID NO: 3356696 - RNA, 21 nt, Human
gaaaauuauuuuguucauaca

SEQ ID NO: 3356697 - RNA, 22 nt, Human
gaaaauuauuuuguucauacau

SEQ ID NO: 3356698 - RNA, 22 nt, Human
gaaaagaaaucuaugauuccag

SEQ ID NO: 3356699 - RNA, 23 nt, Human
gaaaauuauuuuguucauacaua

SEQ ID NO: 3356700 - RNA, 18 nt, Human
gaaccccuggcuccaggc

SEQ ID NO: 3356701 - RNA, 22 nt, Human
gaaccccuggcuccaggccagg

SEQ ID NO: 3356702 - RNA, 15 nt, Human
gaacugagcuuggaa

SEQ ID NO: 3356703 - RNA, 16 nt, Human
gaacugagcuuggaag

SEQ ID NO: 3356704 - RNA, 21 nt, Human
gaacugagcuuggaagcuucu

SEQ ID NO: 3356705 - RNA, 22 nt, Human
gaacugagcuuggaagcuucug

SEQ ID NO: 3356706 - RNA, 14 nt, Human
gaacugagcuugga

SEQ ID NO: 3356707 - RNA, 13 nt, Human
cuuuguaaugaaa

SEQ ID NO: 3356708 - RNA, 16 nt, Human
cuuuguaaugaaaacc

SEQ ID NO: 3356709 - RNA, 15 nt, Human
cuuuguaaugaaaac

SEQ ID NO: 3356710 - RNA, 14 nt, Human
cuuuguaaugaaaa

SEQ ID NO: 3356711 - RNA, 14 nt, Human
cuuugaccuguugg

SEQ ID NO: 3356712 - RNA, 20 nt, Human
cuugauuaagaucucagugg

SEQ ID NO: 3356713 - RNA, 19 nt, Human
cuuccucuccugucucccu

SEQ ID NO: 3356714 - RNA, 17 nt, Human
cuucuaguucugccagg

SEQ ID NO: 3356715 - RNA, 18 nt, Human
cuucuaguucugccagga

SEQ ID NO: 3356716 - RNA, 16 nt, Human
cuucuaguucugccag

SEQ ID NO: 3356717 - RNA, 19 nt, Human
cuucuaguucugccaggag

SEQ ID NO: 3356718 - RNA, 13 nt, Human
cuucucacauuua

SEQ ID NO: 3356719 - RNA, 20 nt, Human
cuucucacauuuauauuuuu

SEQ ID NO: 3356720 - RNA, 16 nt, Human
cuggggaugucucuca

SEQ ID NO: 3356721 - RNA, 15 nt, Human
cuggggccaggcugg

SEQ ID NO: 3356722 - RNA, 18 nt, Human
cuggccccugagaucucu

SEQ ID NO: 3356723 - RNA, 22 nt, Human
cuggccccugagaucucugcag

SEQ ID NO: 3356724 - RNA, 23 nt, Human
cuggccccugagaucucugcagg

SEQ ID NO: 3356725 - RNA, 18 nt, Human
cugggaauaagugccagg

SEQ ID NO: 3356726 - RNA, 13 nt, Human
cuggacuuggagg

SEQ ID NO: 3356727 - RNA, 17 nt, Human
cugccugguccucacac

SEQ ID NO: 3356728 - RNA, 19 nt, Human
cugccugguccucacacuc

SEQ ID NO: 3356729 - RNA, 23 nt, Human
cugccugguccucacacucaccc

SEQ ID NO: 3356730 - RNA, 16 nt, Human
cugccugguccucaca

SEQ ID NO: 3356731 - RNA, 14 nt, Human
cuguuuaagagaca

SEQ ID NO: 3356732 - RNA, 12 nt, Human
cuguuuaagaga

SEQ ID NO: 3356733 - RNA, 15 nt, Human
cuuaggccagcacca

SEQ ID NO: 3356734 - RNA, 20 nt, Human
cugugccuugucacgccaga

SEQ ID NO: 3356735 - RNA, 16 nt, Human
cugugccuuuugccau

SEQ ID NO: 3356736 - RNA, 14 nt, Human
gaugaugacuaugg

SEQ ID NO: 3356737 - RNA, 17 nt, Human
gccaagaggcugcagcc

SEQ ID NO: 3356738 - RNA, 18 nt, Human
gcauuucccuuccuuccu

SEQ ID NO: 3356739 - RNA, 13 nt, Human
gccaagaggcugc

SEQ ID NO: 3356740 - RNA, 14 nt, Human
gccaagaggcugca

SEQ ID NO: 3356741 - RNA, 12 nt, Human
gccaagaggcug

SEQ ID NO: 3356742 - RNA, 19 nt, Human
gccaacuauggccugugga

SEQ ID NO: 3356743 - RNA, 15 nt, Human
gccaacuauggccug

SEQ ID NO: 3356744 - RNA, 14 nt, Human
gccaacuauggccu

SEQ ID NO: 3356745 - RNA, 18 nt, Human
gcauggcauauuuuucac

SEQ ID NO: 3356746 - RNA, 15 nt, Human
gagcagugggccugg

SEQ ID NO: 3356747 - RNA, 17 nt, Human
gagcagugggccuggcc

SEQ ID NO: 3356748 - RNA, 18 nt, Human
gagcagugggccuggcca

SEQ ID NO: 3356749 - RNA, 21 nt, Human
gagcgagacuugguuucaaaa

SEQ ID NO: 3356750 - RNA, 20 nt, Human
gagcugugcaucagcuagaa

SEQ ID NO: 3356751 - RNA, 19 nt, Human
gaggcucuggagcccacug

SEQ ID NO: 3356752 - RNA, 14 nt, Human
gaggcucuggagcc

SEQ ID NO: 3356753 - RNA, 19 nt, Human
gaggcugcagccaggccac

SEQ ID NO: 3356754 - RNA, 18 nt, Human
gagguggaauuauuuuaa

SEQ ID NO: 3356755 - RNA, 18 nt, Human
gacaggggcaggaggaag

SEQ ID NO: 3356756 - RNA, 20 nt, Human
gacaggggcaggaggaaggg

SEQ ID NO: 3356757 - RNA, 22 nt, Human
gacagguuugggaccccuggug

SEQ ID NO: 3356758 - RNA, 19 nt, Human
gacagguuugggaccccug

SEQ ID NO: 3356759 - RNA, 15 nt, Human
gacccucaucuuucu

SEQ ID NO: 3356760 - RNA, 19 nt, Human
gacccucaucuuucuucca

SEQ ID NO: 3356761 - RNA, 13 nt, Human
gacuaugacauaa

SEQ ID NO: 3356762 - RNA, 15 nt, Human
gacuauggagcugag

SEQ ID NO: 3356763 - RNA, 20 nt, Human
gacugugugcucaggagccc

SEQ ID NO: 3356764 - RNA, 17 nt, Human
gacugugugcucaggag

SEQ ID NO: 3356765 - RNA, 16 nt, Human
gacugugugcucagga

SEQ ID NO: 3356766 - RNA, 14 nt, Human
gacugugugcucag

SEQ ID NO: 3356767 - RNA, 21 nt, Human
ggccccugccucucugcaggu

SEQ ID NO: 3356768 - RNA, 17 nt, Human
ggccagucccugaggca

SEQ ID NO: 3356769 - RNA, 23 nt, Human
ggccagucccugaggcagguccc

SEQ ID NO: 3356770 - RNA, 15 nt, Human
ggcagggcugaggcc

SEQ ID NO: 3356771 - RNA, 15 nt, Human
ggcacuggggcaggg

SEQ ID NO: 3356772 - RNA, 20 nt, Human
ggcucagaggguguccugca

SEQ ID NO: 3356773 - RNA, 14 nt, Human
ggcucagagugggg

SEQ ID NO: 3356774 - RNA, 22 nt, Human
gggacaccuaggcuaggguggg

SEQ ID NO: 3356775 - RNA, 14 nt, Human
gggacaccuaggcu

SEQ ID NO: 3356776 - RNA, 17 nt, Human
gggacaggggcaggagg

SEQ ID NO: 3356777 - RNA, 18 nt, Human
gggacaggggcaggagga

SEQ ID NO: 3356778 - RNA, 14 nt, Human
aaaaauaacaauga

SEQ ID NO: 3356779 - RNA, 14 nt, Human
ggcugggucgcccu

SEQ ID NO: 3356780 - RNA, 20 nt, Human
ggcugggucgcccuggacug

SEQ ID NO: 3356781 - RNA, 17 nt, Human
ggcugggucgcccugga

SEQ ID NO: 3356782 - RNA, 12 nt, Human
ggcuucauacac

SEQ ID NO: 3356783 - RNA, 9 nt, Human
ggcuucaua

SEQ ID NO: 3356784 - RNA, 11 nt, Human
ggcuucauaca

SEQ ID NO: 3356785 - RNA, 21 nt, Human
aaaagauuuucagaaaauauu

SEQ ID NO: 3356786 - RNA, 18 nt, Human
aaaagccaagaggcugca

SEQ ID NO: 3356787 - RNA, 21 nt, Human
ggugcuucuaguucugccagg

SEQ ID NO: 3356788 - RNA, 22 nt, Human
ggugcuucuaguucugccagga

SEQ ID NO: 3356789 - RNA, 15 nt, Human
gguggaauuauuuua

SEQ ID NO: 3356790 - RNA, 21 nt, Human
ggugcauauuuauaaaaauaa

SEQ ID NO: 3356791 - RNA, 16 nt, Human
ggugcugggccccugc

SEQ ID NO: 3356792 - RNA, 15 nt, Human
ggugcugggccccug

SEQ ID NO: 3356793 - RNA, 13 nt, Human
ggugcugggcccc

SEQ ID NO: 3356794 - RNA, 11 nt, Human
ggugcugggcc

SEQ ID NO: 3356795 - RNA, 13 nt, Human
ggugaaaauuauu

SEQ ID NO: 3356796 - RNA, 14 nt, Human
ggugaaaauuauuu

SEQ ID NO: 3356797 - RNA, 22 nt, Human
ggugaaaauuauuuuguucaua

SEQ ID NO: 3356798 - RNA, 14 nt, Human
ggucgcccuggacu

SEQ ID NO: 3356799 - RNA, 20 nt, Human
aaagggacugagaaauuuau

SEQ ID NO: 3356800 - RNA, 14 nt, Human
aaagguaaaucaga

SEQ ID NO: 3356801 - RNA, 17 nt, Human
aaagggugaaaauuauu

SEQ ID NO: 3356802 - RNA, 13 nt, Human
ggguggggagaga

SEQ ID NO: 3356803 - RNA, 14 nt, Human
ggguggggagagac

SEQ ID NO: 3356804 - RNA, 18 nt, Human
ggguggggagagacgggc

SEQ ID NO: 3356805 - RNA, 17 nt, Human
ggguggggggcuucaua

SEQ ID NO: 3356806 - RNA, 19 nt, Human
ggguggggggcuucauaca

SEQ ID NO: 3356807 - RNA, 19 nt, Human
aaacuuguaaauaaaggaa

SEQ ID NO: 3356808 - RNA, 16 nt, Human
aaacuuguauuaugug

SEQ ID NO: 3356809 - RNA, 13 nt, Human
aaagacagugaaa

SEQ ID NO: 3356810 - RNA, 22 nt, Human
aaagaccuuuggagcaaagcug

SEQ ID NO: 3356811 - RNA, 19 nt, Human
aaagagaugaugaaaauau

SEQ ID NO: 3356812 - RNA, 20 nt, Human
aaagagaugaugaaaauauu

SEQ ID NO: 3356813 - RNA, 22 nt, Human
aaagagaugaugaaaauauuua

SEQ ID NO: 3356814 - RNA, 18 nt, Human
gggggcgcggcugggagg

SEQ ID NO: 3356815 - RNA, 22 nt, Human
gggggcuucauacacaugagau

SEQ ID NO: 3356816 - RNA, 19 nt, Human
gggggugcugggccccugc

SEQ ID NO: 3356817 - RNA, 15 nt, Human
gggucgcccuggacu

SEQ ID NO: 3356818 - RNA, 13 nt, Human
gggucgcccugga

SEQ ID NO: 3356819 - RNA, 22 nt, Human
aaaccucaaaaugucuaagaua

SEQ ID NO: 3356820 - RNA, 18 nt, Human
aaaccuuuuauauuuagu

SEQ ID NO: 3356821 - RNA, 18 nt, Human
aaaccuuuguuugcaucu

SEQ ID NO: 3356822 - RNA, 18 nt, Human
aaacuaggugcauauuua

SEQ ID NO: 3356823 - RNA, 22 nt, Human
aaacuaggugcauauuuauaaa

SEQ ID NO: 3356824 - RNA, 17 nt, Human
ggggccgggggcagucu

SEQ ID NO: 3356825 - RNA, 14 nt, Human
aaauaaaaauauug

SEQ ID NO: 3356826 - RNA, 16 nt, Human
aaaguugguaaaccuu

SEQ ID NO: 3356827 - RNA, 17 nt, Human
aaaguugguaaaccuuu

SEQ ID NO: 3356828 - RNA, 23 nt, Human
guaauuuaaaauugugauguguc

SEQ ID NO: 3356829 - RNA, 19 nt, Human
guaauuuaaaauugugaug

SEQ ID NO: 3356830 - RNA, 20 nt, Human
guaauuuaaaauugugaugu

SEQ ID NO: 3356831 - RNA, 21 nt, Human
guaauccaagcaaaugugaau

SEQ ID NO: 3356832 - RNA, 22 nt, Human
guaauaacugugaaguuuacau

SEQ ID NO: 3356833 - RNA, 16 nt, Human
guaauaacugugaagu

SEQ ID NO: 3356834 - RNA, 15 nt, Human
guaauaacugugaag

SEQ ID NO: 3356835 - RNA, 20 nt, Human
guaauaggcguaacuaauuu

SEQ ID NO: 3356836 - RNA, 19 nt, Human
guaauagagcaaaauugau

SEQ ID NO: 3356837 - RNA, 15 nt, Human
guagagccagagguc

SEQ ID NO: 3356838 - RNA, 14 nt, Human
guacuuaacuauuc

SEQ ID NO: 3356839 - RNA, 14 nt, Human
aaauauuauguguu

SEQ ID NO: 3356840 - RNA, 15 nt, Human
aaauauuauguguuu

SEQ ID NO: 3356841 - RNA, 21 nt, Human
aaaucagacuaugaaguuuuu

SEQ ID NO: 3356842 - RNA, 14 nt, Human
aaaucagacuauga

SEQ ID NO: 3356843 - RNA, 15 nt, Human
aaauccacuuuaucu

SEQ ID NO: 3356844 - RNA, 15 nt, Human
guacauuuggagaca

SEQ ID NO: 3356845 - RNA, 23 nt, Human
guaccaagacuacuagggaaaug

SEQ ID NO: 3356846 - RNA, 20 nt, Human
guaccaagacuacuagggaa

SEQ ID NO: 3356847 - RNA, 17 nt, Human
gcucccccuccaccugc

SEQ ID NO: 3356848 - RNA, 20 nt, Human
gcucaggaaccgaggcaggg

SEQ ID NO: 3356849 - RNA, 21 nt, Human
gcucaggaaccgaggcaggga

SEQ ID NO: 3356850 - RNA, 16 nt, Human
gcucaggaaccgaggc

SEQ ID NO: 3356851 - RNA, 19 nt, Human
gcucaggaaccgaggcagg

SEQ ID NO: 3356852 - RNA, 17 nt, Human
gcuaugagcuggggaug

SEQ ID NO: 3356853 - RNA, 14 nt, Human
gcuaugagggccuu

SEQ ID NO: 3356854 - RNA, 22 nt, Human
gcuaauucuuugaccuguuggg

SEQ ID NO: 3356855 - RNA, 23 nt, Human
gccuccauccuacccccugugcc

SEQ ID NO: 3356856 - RNA, 19 nt, Human
gccuggcgacagagcgaga

SEQ ID NO: 3356857 - RNA, 23 nt, Human
gccccugccucucugcagguccc

SEQ ID NO: 3356858 - RNA, 20 nt, Human
gccccugccucucugcaggu

SEQ ID NO: 3356859 - RNA, 11 nt, Human
gccccugccag

SEQ ID NO: 3356860 - RNA, 16 nt, Human
gccccugccagacccc

SEQ ID NO: 3356861 - RNA, 15 nt, Human
ggaacugcugggcuu

SEQ ID NO: 3356862 - RNA, 20 nt, Human
ggaacugcugggcuuggcag

SEQ ID NO: 3356863 - RNA, 21 nt, Human
ggaagugugggucugugugug

SEQ ID NO: 3356864 - RNA, 22 nt, Human
ggaagugugggucugugugugu

SEQ ID NO: 3356865 - RNA, 12 nt, Human
ggaagugugggu

SEQ ID NO: 3356866 - RNA, 23 nt, Human
gcugggccccugccucucugcag

SEQ ID NO: 3356867 - RNA, 22 nt, Human
gcugggccccugccucucugca

SEQ ID NO: 3356868 - RNA, 21 nt, Human
gcugggccccugccucucugc

SEQ ID NO: 3356869 - RNA, 20 nt, Human
gcugggccccugccucucug

SEQ ID NO: 3356870 - RNA, 16 nt, Human
gcuucuaguucugcca

SEQ ID NO: 3356871 - RNA, 17 nt, Human
cagucugagagaggcca

SEQ ID NO: 3356872 - RNA, 18 nt, Human
cagucugagagaggccau

SEQ ID NO: 3356873 - RNA, 15 nt, Human
cagguuugggacccc

SEQ ID NO: 3356874 - RNA, 18 nt, Human
cagguuugggaccccugg

SEQ ID NO: 3356875 - RNA, 15 nt, Human
caggccugacucuca

SEQ ID NO: 3356876 - RNA, 15 nt, Human
caggagguggucugg

SEQ ID NO: 3356877 - RNA, 13 nt, Human
caggaggaagggg

SEQ ID NO: 3356878 - RNA, 12 nt, Human
caggaccccuga

SEQ ID NO: 3356879 - RNA, 14 nt, Human
caggaccccugagu

SEQ ID NO: 3356880 - RNA, 21 nt, Human
cagcagguccccagcuuuggc

SEQ ID NO: 3356881 - RNA, 19 nt, Human
cauccauggggcugauugu

SEQ ID NO: 3356882 - RNA, 20 nt, Human
cauaauuuauacaggucaua

SEQ ID NO: 3356883 - RNA, 13 nt, Human
cauaauuuauaca

SEQ ID NO: 3356884 - RNA, 21 nt, Human
cauauuauuuuauguugcaua

SEQ ID NO: 3356885 - RNA, 12 nt, Human
caugcacaaauu

SEQ ID NO: 3356886 - RNA, 21 nt, Human
cauuuggagacacaacuauuu

SEQ ID NO: 3356887 - RNA, 19 nt, Human
cauuguaaauaguauuuga

SEQ ID NO: 3356888 - RNA, 17 nt, Human
ccaccgccuccuacagc

SEQ ID NO: 3356889 - RNA, 19 nt, Human
cagaaaucuagaagacugu

SEQ ID NO: 3356890 - RNA, 11 nt, Human
cagaaaguuau

SEQ ID NO: 3356891 - RNA, 16 nt, Human
cagaaaguuauugaua

SEQ ID NO: 3356892 - RNA, 22 nt, Human
cacuguuuugaaucucauaauu

SEQ ID NO: 3356893 - RNA, 19 nt, Human
cacugggagaaaugaaaaa

SEQ ID NO: 3356894 - RNA, 18 nt, Human
cacugggagaaaugaaaa

SEQ ID NO: 3356895 - RNA, 13 nt, Human
caagaugguucua

SEQ ID NO: 3356896 - RNA, 16 nt, Human
caagaugguucuagca

SEQ ID NO: 3356897 - RNA, 18 nt, Human
caaagggugaaaauuauu

SEQ ID NO: 3356898 - RNA, 14 nt, Human
caaagguaaaucag

SEQ ID NO: 3356899 - RNA, 16 nt, Human
caaagucaagccacau

SEQ ID NO: 3356900 - RNA, 12 nt, Human
auuuuauaucuu

SEQ ID NO: 3356901 - RNA, 14 nt, Human
auuuuauaucuugu

SEQ ID NO: 3356902 - RNA, 16 nt, Human
auuuuauaucuuguag

SEQ ID NO: 3356903 - RNA, 14 nt, Human
caaaccaaauaaaa

SEQ ID NO: 3356904 - RNA, 15 nt, Human
caaaccaaauaaaaa

SEQ ID NO: 3356905 - RNA, 22 nt, Human
auuuaugcauauuauuuuaugu

SEQ ID NO: 3356906 - RNA, 16 nt, Human
auuuaugcauauuauu

SEQ ID NO: 3356907 - RNA, 16 nt, Human
auuucauaugcuguau

SEQ ID NO: 3356908 - RNA, 17 nt, Human
auuguguugugaauguu

SEQ ID NO: 3356909 - RNA, 14 nt, Human
auuguguugugaau

SEQ ID NO: 3356910 - RNA, 20 nt, Human
auuaguacuccccuccuuga

SEQ ID NO: 3356911 - RNA, 21 nt, Human
ccugucucccuccucugcccg

SEQ ID NO: 3356912 - RNA, 21 nt, Human
ccuggugguggcucgggaggc

SEQ ID NO: 3356913 - RNA, 12 nt, Human
ccuggugguuca

SEQ ID NO: 3356914 - RNA, 13 nt, Human
ccuggugguucac

SEQ ID NO: 3356915 - RNA, 22 nt, Human
ccuggugguucacucuuggagc

SEQ ID NO: 3356916 - RNA, 18 nt, Human
ccuggugguggcucggga

SEQ ID NO: 3356917 - RNA, 19 nt, Human
ccugacccucaucuuucuu

SEQ ID NO: 3356918 - RNA, 17 nt, Human
ccugagaucucugcagg

SEQ ID NO: 3356919 - RNA, 18 nt, Human
ccugagaucucugcagga

SEQ ID NO: 3356920 - RNA, 18 nt, Human
ccugacccucaucuuucu

SEQ ID NO: 3356921 - RNA, 19 nt, Human
ccugaguuccuagccaccg

SEQ ID NO: 3356922 - RNA, 18 nt, Human
ccugaguuccuagccacc

SEQ ID NO: 3356923 - RNA, 20 nt, Human
ccugaguuccuagccaccgc

SEQ ID NO: 3356924 - RNA, 21 nt, Human
ccugaguuccuagccaccgcc

SEQ ID NO: 3356925 - RNA, 18 nt, Human
ccugccaucauguuuaca

SEQ ID NO: 3356926 - RNA, 20 nt, Human
ccugccaucauguuuacaga

SEQ ID NO: 3356927 - RNA, 15 nt, Human
ccugccucucugcag

SEQ ID NO: 3356928 - RNA, 14 nt, Human
ccugccucucugca

SEQ ID NO: 3356929 - RNA, 13 nt, Human
ccugccucucugc

SEQ ID NO: 3356930 - RNA, 15 nt, Human
ccuccuagccaccca

SEQ ID NO: 3356931 - RNA, 16 nt, Human
ccuagccacccaccac

SEQ ID NO: 3356932 - RNA, 12 nt, Human
ccuagccaccca

SEQ ID NO: 3356933 - RNA, 12 nt, Human
ccuaauaaagcu

SEQ ID NO: 3356934 - RNA, 14 nt, Human
ccauucuuucccaa

SEQ ID NO: 3356935 - RNA, 20 nt, Human
ccauucuuucccaacaccuc

SEQ ID NO: 3356936 - RNA, 12 nt, Human
ccauucuuuccc

SEQ ID NO: 3356937 - RNA, 15 nt, Human
ccagucccugaggca

SEQ ID NO: 3356938 - RNA, 22 nt, Human
ccagggggccagucccugaggc

SEQ ID NO: 3356939 - RNA, 23 nt, Human
ccagggggccagucccugaggca

SEQ ID NO: 3356940 - RNA, 10 nt, Human
ccccugccag

SEQ ID NO: 3356941 - RNA, 15 nt, Human
cuaggcuaggguggg

SEQ ID NO: 3356942 - RNA, 13 nt, Human
cuaguucugccag

SEQ ID NO: 3356943 - RNA, 14 nt, Human
cuaguucugccagg

SEQ ID NO: 3356944 - RNA, 15 nt, Human
cuaguucugccagga

SEQ ID NO: 3356945 - RNA, 16 nt, Human
cuaguucugccaggag

SEQ ID NO: 3356946 - RNA, 20 nt, Human
cuacuagggaaaugccuuug

SEQ ID NO: 3356947 - RNA, 12 nt, Human
cucagaauauug

SEQ ID NO: 3356948 - RNA, 21 nt, Human
cucacuuaucccaagagaaug

SEQ ID NO: 3356949 - RNA, 23 nt, Human
cucaaagugacuauucaguuuuc

SEQ ID NO: 3356950 - RNA, 18 nt, Human
cugacccucaucuuucuu

SEQ ID NO: 3356951 - RNA, 18 nt, Human
cugaggaagagggacugu

SEQ ID NO: 3356952 - RNA, 23 nt, Human
cugaggaagagggacuguucuuu

SEQ ID NO: 3356953 - RNA, 14 nt, Human
cugagcuuggaagc

SEQ ID NO: 3356954 - RNA, 20 nt, Human
cugagcuuggaagcuucugg

SEQ ID NO: 3356955 - RNA, 21 nt, Human
cugagcuuggaagcuucuggu

SEQ ID NO: 3356956 - RNA, 12 nt, Human
cugagcuuggaa

SEQ ID NO: 3356957 - RNA, 21 nt, Human
cugaggugggagauguggaaa

SEQ ID NO: 3356958 - RNA, 21 nt, Human
cugaguaaaaaagcugugugc

SEQ ID NO: 3356959 - RNA, 16 nt, Human
cuccuagccacccacc

SEQ ID NO: 3356960 - RNA, 20 nt, Human
cucucuugauuaagaucuca

SEQ ID NO: 3356961 - RNA, 12 nt, Human
augugacucuuu

SEQ ID NO: 3356962 - RNA, 16 nt, Human
augugacucuuuccaa

SEQ ID NO: 3356963 - RNA, 21 nt, Human
augugacucuuuccaaccggc

SEQ ID NO: 3356964 - RNA, 20 nt, Human
uuugugaagguggaaauaaa

SEQ ID NO: 3356965 - RNA, 14 nt, Human
uuuguaaugaaaac

SEQ ID NO: 3356966 - RNA, 13 nt, Human
uuuguaaugaaaa

SEQ ID NO: 3356967 - RNA, 16 nt, Human
augucaguauguggaa

SEQ ID NO: 3356968 - RNA, 15 nt, Human
auguaugcuucauac

SEQ ID NO: 3356969 - RNA, 14 nt, Human
auguaugcuucaua

SEQ ID NO: 3356970 - RNA, 21 nt, Human
uuugacagaauauguuucaaa

SEQ ID NO: 3356971 - RNA, 22 nt, Human
uuugacagaauauguuucaaac

SEQ ID NO: 3356972 - RNA, 19 nt, Human
auguagccccucuccugga

SEQ ID NO: 3356973 - RNA, 19 nt, Human
auguagaggggaaaagaga

SEQ ID NO: 3356974 - RNA, 23 nt, Human
uuuggcaaacucuccaccacacg

SEQ ID NO: 3356975 - RNA, 20 nt, Human
auggggauagauguguggac

SEQ ID NO: 3356976 - RNA, 16 nt, Human
augguucucaggccug

SEQ ID NO: 3356977 - RNA, 13 nt, Human
augguuguacaua

SEQ ID NO: 3356978 - RNA, 17 nt, Human
auguacauguacugauu

SEQ ID NO: 3356979 - RNA, 19 nt, Human
augguguucaaaaaacuug

SEQ ID NO: 3356980 - RNA, 22 nt, Human
uuucaaaauuguuacaaauugu

SEQ ID NO: 3356981 - RNA, 16 nt, Human
uuuauuuuguguuuag

SEQ ID NO: 3356982 - RNA, 20 nt, Human
uuuauuuuguguuuaggaac

SEQ ID NO: 3356983 - RNA, 18 nt, Human
augcuagguuaauuccaa

SEQ ID NO: 3356984 - RNA, 21 nt, Human
uuuaucaaagggugaaaauua

SEQ ID NO: 3356985 - RNA, 18 nt, Human
uuuaucaugugaaaucau

SEQ ID NO: 3356986 - RNA, 17 nt, Human
uuuaucaugugaaauca

SEQ ID NO: 3356987 - RNA, 20 nt, Human
auggcauauuuuucacauau

SEQ ID NO: 3356988 - RNA, 21 nt, Human
auggcauauuuuucacauauc

SEQ ID NO: 3356989 - RNA, 22 nt, Human
auggcauauuuuucacauaucu

SEQ ID NO: 3356990 - RNA, 23 nt, Human
auggcauauuuuucacauaucua

SEQ ID NO: 3356991 - RNA, 18 nt, Human
auggcauauuuuucacau

SEQ ID NO: 3356992 - RNA, 14 nt, Human
uuucaaacuuugga

SEQ ID NO: 3356993 - RNA, 22 nt, Human
augcagauuuugcccuugacaa

SEQ ID NO: 3356994 - RNA, 21 nt, Human
augauacuugaaaauuaacau

SEQ ID NO: 3356995 - RNA, 17 nt, Human
augauacuugaaaauua

SEQ ID NO: 3356996 - RNA, 20 nt, Human
uuguguuaaguauguguaaa

SEQ ID NO: 3356997 - RNA, 17 nt, Human
augauaaguaaaugcua

SEQ ID NO: 3356998 - RNA, 14 nt, Human
auccuacccccugu

SEQ ID NO: 3356999 - RNA, 16 nt, Human
auccuacccccugugc

SEQ ID NO: 3357000 - RNA, 17 nt, Human
uugaaauuguauuacaa

SEQ ID NO: 3357001 - RNA, 23 nt, Human
uucuuaaccagaucauugugaaa

SEQ ID NO: 3357002 - RNA, 15 nt, Human
uucuuuguaaugaaa

SEQ ID NO: 3357003 - RNA, 13 nt, Human
uucugccaggaga

SEQ ID NO: 3357004 - RNA, 12 nt, Human
uucugccaggag

SEQ ID NO: 3357005 - RNA, 19 nt, Human
auccauagcaccuccacau

SEQ ID NO: 3357006 - RNA, 20 nt, Human
aucauuuuaccuuugacaaa

SEQ ID NO: 3357007 - RNA, 18 nt, Human
auccaagcaaaugugaau

SEQ ID NO: 3357008 - RNA, 13 nt, Human
auauuuuucacau

SEQ ID NO: 3357009 - RNA, 14 nt, Human
auauuuuucacaua

SEQ ID NO: 3357010 - RNA, 15 nt, Human
auauuuuucacauau

SEQ ID NO: 3357011 - RNA, 12 nt, Human
auauuuuucaca

SEQ ID NO: 3357012 - RNA, 19 nt, Human
uuccguagguuauuuucag

SEQ ID NO: 3357013 - RNA, 22 nt, Human
uucuagcauggcauauuuuuca

SEQ ID NO: 3357014 - RNA, 17 nt, Human
uucuagcuaauguaaua

SEQ ID NO: 3357015 - RNA, 15 nt, Human
uucuagcauggcaua

SEQ ID NO: 3357016 - RNA, 18 nt, Human
uucuagcauggcauauuu

SEQ ID NO: 3357017 - RNA, 20 nt, Human
uucuagcauggcauauuuuu

SEQ ID NO: 3357018 - RNA, 21 nt, Human
uucuagcauggcauauuuuuc

SEQ ID NO: 3357019 - RNA, 14 nt, Human
uucuagcauggcau

SEQ ID NO: 3357020 - RNA, 14 nt, Human
uucuaaauuuuaua

SEQ ID NO: 3357021 - RNA, 13 nt, Human
aucaggccauugu

SEQ ID NO: 3357022 - RNA, 16 nt, Human
aucaggccauuguccc

SEQ ID NO: 3357023 - RNA, 20 nt, Human
uugacagaauauguuucaaa

SEQ ID NO: 3357024 - RNA, 16 nt, Human
uugagauguguucaca

SEQ ID NO: 3357025 - RNA, 17 nt, Human
uugacagaauauguuuc

SEQ ID NO: 3357026 - RNA, 22 nt, Human
uugauuaagaucucagugguua

SEQ ID NO: 3357027 - RNA, 12 nt, Human
aucuagaagacu

SEQ ID NO: 3357028 - RNA, 23 nt, Human
uuggggacaggggcaggaggaag

SEQ ID NO: 3357029 - RNA, 21 nt, Human
augaauauuuaguguucauaa

SEQ ID NO: 3357030 - RNA, 21 nt, Human
augaaauuauauaaguauucu

SEQ ID NO: 3357031 - RNA, 19 nt, Human
augaaauuauauaaguauu

SEQ ID NO: 3357032 - RNA, 16 nt, Human
augaauauuuaguguu

SEQ ID NO: 3357033 - RNA, 20 nt, Human
uuggagacacaacuauuuuu

SEQ ID NO: 3357034 - RNA, 18 nt, Human
uuggagacacaacuauuu

SEQ ID NO: 3357035 - RNA, 18 nt, Human
aucuuguagcuuuaucaa

SEQ ID NO: 3357036 - RNA, 12 nt, Human
aucuguuuacag

SEQ ID NO: 3357037 - RNA, 15 nt, Human
aucuguuuacagugu

SEQ ID NO: 3357038 - RNA, 17 nt, Human
aucuguuuacaguguuc

SEQ ID NO: 3357039 - RNA, 20 nt, Human
uugcuaugagcuggggaugu

SEQ ID NO: 3357040 - RNA, 19 nt, Human
aucuuguagcuuuaucaaa

SEQ ID NO: 3357041 - RNA, 20 nt, Human
aucuuguagcuuuaucaaag

SEQ ID NO: 3357042 - RNA, 16 nt, Human
auuucccuuccuuccu

SEQ ID NO: 3357043 - RNA, 17 nt, Human
auuucccugaaggaacc

SEQ ID NO: 3357044 - RNA, 23 nt, Human
auuucccugaaggaaccaaagcg

SEQ ID NO: 3357045 - RNA, 18 nt, Human
auuugaaacacuuugcau

SEQ ID NO: 3357046 - RNA, 21 nt, Human
auuugugaagguggaaauaaa

SEQ ID NO: 3357047 - RNA, 18 nt, Human
auuugugaagguggaaau

SEQ ID NO: 3357048 - RNA, 20 nt, Human
auuuuaaaagauaaauauua

SEQ ID NO: 3357049 - RNA, 20 nt, Human
auuuuaaaagaugcaaugua

SEQ ID NO: 3357050 - RNA, 19 nt, Human
auuuguaaauuuaugugau

SEQ ID NO: 3357051 - RNA, 18 nt, Human
auuuguaaauuuauguga

SEQ ID NO: 3357052 - RNA, 19 nt, Human
auuggacaguaaaauccac

SEQ ID NO: 3357053 - RNA, 14 nt, Human
auugcuuuggucau

SEQ ID NO: 3357054 - RNA, 18 nt, Human
auugcuuuggucauauga

SEQ ID NO: 3357055 - RNA, 23 nt, Human
auuggguggggggcuucauacac

SEQ ID NO: 3357056 - RNA, 22 nt, Human
auuggguggggggcuucauaca

SEQ ID NO: 3357057 - RNA, 19 nt, Human
auuggauucugagagcugu

SEQ ID NO: 3357058 - RNA, 22 nt, Human
auuggauucugagagcugugca

SEQ ID NO: 3357059 - RNA, 16 nt, Human
auuguacgaagaguau

SEQ ID NO: 3357060 - RNA, 20 nt, Human
auuuuuguagcacugacaga

SEQ ID NO: 3357061 - RNA, 21 nt, Human
auuuuuguagcacugacagau

SEQ ID NO: 3357062 - RNA, 22 nt, Human
auuuuugugauuuugugauuga

SEQ ID NO: 3357063 - RNA, 12 nt, Human
auuuuucucaug

SEQ ID NO: 3357064 - RNA, 15 nt, Human
auuuuuccaaaauaa

SEQ ID NO: 3357065 - RNA, 18 nt, Human
auuuuucacauaucuagu

SEQ ID NO: 3357066 - RNA, 21 nt, Human
auuuuucacauaucuaguaug

SEQ ID NO: 3357067 - RNA, 15 nt, Human
auuuuucacauaucu

SEQ ID NO: 3357068 - RNA, 12 nt, Human
auuuuugacaga

SEQ ID NO: 3357069 - RNA, 13 nt, Human
auuuuugacagaa

SEQ ID NO: 3357070 - RNA, 14 nt, Human
auuuuugacagaau

SEQ ID NO: 3357071 - RNA, 15 nt, Human
auuuuugacagaaua

SEQ ID NO: 3357072 - RNA, 22 nt, Human
auuuuugacagaauauguuuca

SEQ ID NO: 3357073 - RNA, 14 nt, Human
auuuuguucauaca

SEQ ID NO: 3357074 - RNA, 15 nt, Human
auuuuguucauacau

SEQ ID NO: 3357075 - RNA, 16 nt, Human
auuuuguucauacaua

SEQ ID NO: 3357076 - RNA, 18 nt, Human
auuuuguucauacauauu

SEQ ID NO: 3357077 - RNA, 12 nt, Human
auuuuguucaua

SEQ ID NO: 3357078 - RNA, 17 nt, Human
auuuuguguuuaggaac

SEQ ID NO: 3357079 - RNA, 14 nt, Human
auuuucuauaauuu

SEQ ID NO: 3357080 - RNA, 15 nt, Human
auuuucuauaauuua

SEQ ID NO: 3357081 - RNA, 17 nt, Human
auuuuaauaaacacucu

SEQ ID NO: 3357082 - RNA, 16 nt, Human
auuuuaauaaacacuc

SEQ ID NO: 3357083 - RNA, 15 nt, Human
auuuuaauaaacacu

SEQ ID NO: 3357084 - RNA, 15 nt, Human
auuuugcccuugaca

SEQ ID NO: 3357085 - RNA, 23 nt, Human
auuuugcccuugacaaagucaag

SEQ ID NO: 3357086 - RNA, 18 nt, Human
auucuagcuaauguaaua

SEQ ID NO: 3357087 - RNA, 15 nt, Human
auucuagcuaaugua

SEQ ID NO: 3357088 - RNA, 24 nt, Human
auucagaaggaucuucaucugacu

SEQ ID NO: 3357089 - RNA, 18 nt, Human
auucagaaggaucuucau

SEQ ID NO: 3357090 - RNA, 20 nt, Human
auucacauuguauucagagu

SEQ ID NO: 3357091 - RNA, 13 nt, Human
auucacauuguau

SEQ ID NO: 3357092 - RNA, 12 nt, Human
auuccagaggaa

SEQ ID NO: 3357093 - RNA, 14 nt, Human
auucuaaauuuuau

SEQ ID NO: 3357094 - RNA, 15 nt, Human
auuauuauuuggccc

SEQ ID NO: 3357095 - RNA, 15 nt, Human
auuauuuuguucaua

SEQ ID NO: 3357096 - RNA, 16 nt, Human
auuauuuuguucauac

SEQ ID NO: 3357097 - RNA, 17 nt, Human
auuauuuuguucauaca

SEQ ID NO: 3357098 - RNA, 18 nt, Human
auuauuuuguucauacau

SEQ ID NO: 3357099 - RNA, 19 nt, Human
auuauuuuguucauacaua

SEQ ID NO: 3357100 - RNA, 17 nt, Human
auuauauuuacaaaugg

SEQ ID NO: 3357101 - RNA, 14 nt, Human
auuauauuaugaag

SEQ ID NO: 3357102 - RNA, 19 nt, Human
agccugacccucaucuuuc

SEQ ID NO: 3357103 - RNA, 18 nt, Human
agccugacccucaucuuu

SEQ ID NO: 3357104 - RNA, 17 nt, Human
ugcaggucccuaauaaa

SEQ ID NO: 3357105 - RNA, 20 nt, Human
ugcaggucccuaauaaagcu

SEQ ID NO: 3357106 - RNA, 19 nt, Human
ugcaggucccuaauaaagc

SEQ ID NO: 3357107 - RNA, 18 nt, Human
ugcaggucccuaauaaag

SEQ ID NO: 3357108 - RNA, 15 nt, Human
ugcauaauggucaga

SEQ ID NO: 3357109 - RNA, 18 nt, Human
agccugccacucaggccc

SEQ ID NO: 3357110 - RNA, 21 nt, Human
agccugcaauuucauaugcug

SEQ ID NO: 3357111 - RNA, 12 nt, Human
agccugcagagc

SEQ ID NO: 3357112 - RNA, 13 nt, Human
agccugcagagcu

SEQ ID NO: 3357113 - RNA, 14 nt, Human
agccugcagagcug

SEQ ID NO: 3357114 - RNA, 15 nt, Human
agccugcagagcugc

SEQ ID NO: 3357115 - RNA, 19 nt, Human
agccugcaauuucauaugc

SEQ ID NO: 3357116 - RNA, 19 nt, Human
agcuacuaauuuuaaaaug

SEQ ID NO: 3357117 - RNA, 20 nt, Human
agcggcuggaauuggguggg

SEQ ID NO: 3357118 - RNA, 17 nt, Human
ugccuugucacgccaga

SEQ ID NO: 3357119 - RNA, 19 nt, Human
ugccuugugaaggaauuau

SEQ ID NO: 3357120 - RNA, 15 nt, Human
agcuggggaugucuc

SEQ ID NO: 3357121 - RNA, 20 nt, Human
agcuggggccaggcuggguc

SEQ ID NO: 3357122 - RNA, 17 nt, Human
agcuggggccaggcugg

SEQ ID NO: 3357123 - RNA, 9 nt, Human
ugccucucu

SEQ ID NO: 3357124 - RNA, 20 nt, Human
ugccucucugcaggucccua

SEQ ID NO: 3357125 - RNA, 19 nt, Human
ugccucucugcaggucccu

SEQ ID NO: 3357126 - RNA, 15 nt, Human
ugccucucugcaggu

SEQ ID NO: 3357127 - RNA, 18 nt, Human
ugccucucugcagguccc

SEQ ID NO: 3357128 - RNA, 16 nt, Human
ugccucucugcagguc

SEQ ID NO: 3357129 - RNA, 20 nt, Human
aggaauuuuauuuuuuucug

SEQ ID NO: 3357130 - RNA, 22 nt, Human
aggaauuuuauuuuuuucugaa

SEQ ID NO: 3357131 - RNA, 19 nt, Human
ugcucugugcccacccucc

SEQ ID NO: 3357132 - RNA, 23 nt, Human
aggaaaccaguuaggucucaaua

SEQ ID NO: 3357133 - RNA, 18 nt, Human
aggcgaagcguuguccuc

SEQ ID NO: 3357134 - RNA, 18 nt, Human
aggcucagaggguguccu

SEQ ID NO: 3357135 - RNA, 19 nt, Human
aggcucagaggguguccug

SEQ ID NO: 3357136 - RNA, 20 nt, Human
aggcucagaggguguccugc

SEQ ID NO: 3357137 - RNA, 22 nt, Human
uggcacagccuggcuguggccu

SEQ ID NO: 3357138 - RNA, 14 nt, Human
aggccauucuuucc

SEQ ID NO: 3357139 - RNA, 21 nt, Human
uggcauccagagucccugccu

SEQ ID NO: 3357140 - RNA, 22 nt, Human
uggcauccagagucccugccug

SEQ ID NO: 3357141 - RNA, 20 nt, Human
uggcauccagagucccugcc

SEQ ID NO: 3357142 - RNA, 16 nt, Human
aggccugacucucagc

SEQ ID NO: 3357143 - RNA, 13 nt, Human
uggaagugugggu

SEQ ID NO: 3357144 - RNA, 14 nt, Human
uggaaguguggguc

SEQ ID NO: 3357145 - RNA, 14 nt, Human
uggaagugcuaauu

SEQ ID NO: 3357146 - RNA, 19 nt, Human
aggaguuucguuuucaaaa

SEQ ID NO: 3357147 - RNA, 21 nt, Human
uggaacaagaugguucuagca

SEQ ID NO: 3357148 - RNA, 14 nt, Human
uggaauuugaaaca

SEQ ID NO: 3357149 - RNA, 16 nt, Human
uggagccugcagagcu

SEQ ID NO: 3357150 - RNA, 11 nt, Human
uggagccugca

SEQ ID NO: 3357151 - RNA, 23 nt, Human
uggagcccacuguacuugcucuu

SEQ ID NO: 3357152 - RNA, 19 nt, Human
uggagcccacuguacuugc

SEQ ID NO: 3357153 - RNA, 16 nt, Human
uggagcccacuguacu

SEQ ID NO: 3357154 - RNA, 16 nt, Human
aggcagguccccagac

SEQ ID NO: 3357155 - RNA, 12 nt, Human
aggcaggucccc

SEQ ID NO: 3357156 - RNA, 13 nt, Human
aggcaggucccca

SEQ ID NO: 3357157 - RNA, 14 nt, Human
aggcagguccccag

SEQ ID NO: 3357158 - RNA, 15 nt, Human
aggcagguccccaga

SEQ ID NO: 3357159 - RNA, 11 nt, Human
aggcagguccc

SEQ ID NO: 3357160 - RNA, 20 nt, Human
aggcaggaguuucguuuuca

SEQ ID NO: 3357161 - RNA, 17 nt, Human
uggcuguggcauccaga

SEQ ID NO: 3357162 - RNA, 20 nt, Human
uggcuguggccuaaccugcc

SEQ ID NO: 3357163 - RNA, 16 nt, Human
uggcuguggagugugg

SEQ ID NO: 3357164 - RNA, 15 nt, Human
uggcugcagagcagu

SEQ ID NO: 3357165 - RNA, 18 nt, Human
uggcugcagagcaguggg

SEQ ID NO: 3357166 - RNA, 22 nt, Human
uggcugcagagcagugggccug

SEQ ID NO: 3357167 - RNA, 18 nt, Human
ugggaaacaaaaggauaa

SEQ ID NO: 3357168 - RNA, 22 nt, Human
uggcucuugaacugagcuugga

SEQ ID NO: 3357169 - RNA, 21 nt, Human
aggcuuuuuuaucaugugaaa

SEQ ID NO: 3357170 - RNA, 18 nt, Human
aggcuuuuuuaucaugug

SEQ ID NO: 3357171 - RNA, 15 nt, Human
aggcuuuuuuaucau

SEQ ID NO: 3357172 - RNA, 21 nt, Human
aggcugggucgcccuggacug

SEQ ID NO: 3357173 - RNA, 20 nt, Human
aggcugggucgcccuggacu

SEQ ID NO: 3357174 - RNA, 10 nt, Human
aggcuggguc

SEQ ID NO: 3357175 - RNA, 18 nt, Human
aggcugggucgcccugga

SEQ ID NO: 3357176 - RNA, 15 nt, Human
aggcugggucgcccu

SEQ ID NO: 3357177 - RNA, 16 nt, Human
ugggagaaaugaaaaa

SEQ ID NO: 3357178 - RNA, 23 nt, Human
ugggaggcucuggagcccacugu

SEQ ID NO: 3357179 - RNA, 17 nt, Human
ugggaggcucuggagcc

SEQ ID NO: 3357180 - RNA, 14 nt, Human
ugggaggcucugga

SEQ ID NO: 3357181 - RNA, 16 nt, Human
ugggauuuggucaaca

SEQ ID NO: 3357182 - RNA, 15 nt, Human
ugggagaaaugaaaa

SEQ ID NO: 3357183 - RNA, 16 nt, Human
agugauuuuuaugcca

SEQ ID NO: 3357184 - RNA, 20 nt, Human
agugauuuuuaugccaccug

SEQ ID NO: 3357185 - RNA, 21 nt, Human
agugauuuuuaugccaccuga

SEQ ID NO: 3357186 - RNA, 14 nt, Human
agugaggaugucug

SEQ ID NO: 3357187 - RNA, 18 nt, Human
agugccaggauggaauga

SEQ ID NO: 3357188 - RNA, 19 nt, Human
ugugcucuccaagcccagu

SEQ ID NO: 3357189 - RNA, 14 nt, Human
ugugcucuccaagc

SEQ ID NO: 3357190 - RNA, 21 nt, Human
ugugcucaggagcccugggag

SEQ ID NO: 3357191 - RNA, 20 nt, Human
ugugcucaggagcccuggga

SEQ ID NO: 3357192 - RNA, 21 nt, Human
uguggaucaaauccagccugc

SEQ ID NO: 3357193 - RNA, 16 nt, Human
agucuuucacauuuaa

SEQ ID NO: 3357194 - RNA, 15 nt, Human
uguugcauagaauaa

SEQ ID NO: 3357195 - RNA, 21 nt, Human
aguguuccgugguuaaacucg

SEQ ID NO: 3357196 - RNA, 21 nt, Human
aguguucauaaauaaaguuug

SEQ ID NO: 3357197 - RNA, 18 nt, Human
aguguguguuuuucauaa

SEQ ID NO: 3357198 - RNA, 9 nt, Human
aguguguaa

SEQ ID NO: 3357199 - RNA, 16 nt, Human
aguguggcaguuuggc

SEQ ID NO: 3357200 - RNA, 17 nt, Human
aguguggcaguuuggca

SEQ ID NO: 3357201 - RNA, 22 nt, Human
ugugucuaaauuugaauguuaa

SEQ ID NO: 3357202 - RNA, 19 nt, Human
ugugucuaaauuugaaugu

SEQ ID NO: 3357203 - RNA, 18 nt, Human
uguguguuguguguggga

SEQ ID NO: 3357204 - RNA, 14 nt, Human
uguguaaaauguga

SEQ ID NO: 3357205 - RNA, 16 nt, Human
agugggguagguuggg

SEQ ID NO: 3357206 - RNA, 22 nt, Human
uguguuaaguauguguaaaaug

SEQ ID NO: 3357207 - RNA, 23 nt, Human
uguuaagcagauggaaugcugug

SEQ ID NO: 3357208 - RNA, 18 nt, Human
uguuacaaauuguagaag

SEQ ID NO: 3357209 - RNA, 17 nt, Human
uguuacaaauuguagaa

SEQ ID NO: 3357210 - RNA, 14 nt, Human
uguuacaaauugua

SEQ ID NO: 3357211 - RNA, 20 nt, Human
uguagugauuuuuaugccac

SEQ ID NO: 3357212 - RNA, 16 nt, Human
aguacauuuggagaca

SEQ ID NO: 3357213 - RNA, 18 nt, Human
uguauauccuuucuaaca

SEQ ID NO: 3357214 - RNA, 19 nt, Human
aguacauuuggagacacaa

SEQ ID NO: 3357215 - RNA, 19 nt, Human
aguaauucaagaaaacaac

SEQ ID NO: 3357216 - RNA, 15 nt, Human
aguaauucaagaaaa

SEQ ID NO: 3357217 - RNA, 23 nt, Human
aguaaaaacaaagaaauuaugug

SEQ ID NO: 3357218 - RNA, 16 nt, Human
aguaaaaacaaagaaa

SEQ ID NO: 3357219 - RNA, 14 nt, Human
aggugugcaagaga

SEQ ID NO: 3357220 - RNA, 16 nt, Human
aguccaucagccucca

SEQ ID NO: 3357221 - RNA, 14 nt, Human
aguauuugugggga

SEQ ID NO: 3357222 - RNA, 17 nt, Human
auaauucagaaggaucu

SEQ ID NO: 3357223 - RNA, 21 nt, Human
auaauuuauacaggucauauu

SEQ ID NO: 3357224 - RNA, 19 nt, Human
auaauuuauacaggucaua

SEQ ID NO: 3357225 - RNA, 23 nt, Human
auaauucacauuguauucagagu

SEQ ID NO: 3357226 - RNA, 14 nt, Human
auaauuuuaaaugu

SEQ ID NO: 3357227 - RNA, 13 nt, Human
auaauuuuaaaug

SEQ ID NO: 3357228 - RNA, 12 nt, Human
auaauuuuaaau

SEQ ID NO: 3357229 - RNA, 14 nt, Human
uuaguaaucauauu

SEQ ID NO: 3357230 - RNA, 13 nt, Human
uuaguaaucauau

SEQ ID NO: 3357231 - RNA, 22 nt, Human
uuauaaaaauaaaaaacacugg

SEQ ID NO: 3357232 - RNA, 21 nt, Human
uuauaaaaauaaaaaacacug

SEQ ID NO: 3357233 - RNA, 15 nt, Human
uuauaaaaauaaaaa

SEQ ID NO: 3357234 - RNA, 19 nt, Human
uuaguacuccccuccuuga

SEQ ID NO: 3357235 - RNA, 23 nt, Human
uuacuguacagacagaaaaaacu

SEQ ID NO: 3357236 - RNA, 13 nt, Human
uuacaguguuccg

SEQ ID NO: 3357237 - RNA, 20 nt, Human
auaaaagccuguuuaagaga

SEQ ID NO: 3357238 - RNA, 19 nt, Human
auaaaagccuguuuaagag

SEQ ID NO: 3357239 - RNA, 19 nt, Human
uuaagacgaaacauuuguu

SEQ ID NO: 3357240 - RNA, 15 nt, Human
aguuuuuuuuauaca

SEQ ID NO: 3357241 - RNA, 22 nt, Human
uuaagacgaaacauuuguucua

SEQ ID NO: 3357242 - RNA, 17 nt, Human
uuaaucuuuaauuuuac

SEQ ID NO: 3357243 - RNA, 13 nt, Human
uuaaucuuuaauu

SEQ ID NO: 3357244 - RNA, 20 nt, Human
uuaaauuuugaguucuacau

SEQ ID NO: 3357245 - RNA, 15 nt, Human
uuaaauuuugaguuc

SEQ ID NO: 3357246 - RNA, 15 nt, Human
aguuuguugaaacac

SEQ ID NO: 3357247 - RNA, 19 nt, Human
uuaaaaugagaaaucuaaa

SEQ ID NO: 3357248 - RNA, 12 nt, Human
uuaaaaugagaa

SEQ ID NO: 3357249 - RNA, 17 nt, Human
aguuuaaauuguaauag

SEQ ID NO: 3357250 - RNA, 20 nt, Human
aguuuaaauuguaauaggcg

SEQ ID NO: 3357251 - RNA, 13 nt, Human
aguuuacauugua

SEQ ID NO: 3357252 - RNA, 17 nt, Human
aguuuacauuguaaaua

SEQ ID NO: 3357253 - RNA, 15 nt, Human
aguuuacauuguaaa

SEQ ID NO: 3357254 - RNA, 12 nt, Human
uuaugugugugu

SEQ ID NO: 3357255 - RNA, 14 nt, Human
uuaugugugugugu

SEQ ID NO: 3357256 - RNA, 10 nt, Human
uuaugugugu

SEQ ID NO: 3357257 - RNA, 22 nt, Human
uuaugugccagauuuaugcaua

SEQ ID NO: 3357258 - RNA, 15 nt, Human
uuaugugaaacaugu

SEQ ID NO: 3357259 - RNA, 13 nt, Human
uuaugugaaacau

SEQ ID NO: 3357260 - RNA, 20 nt, Human
uuaugauacuugaaaauuaa

SEQ ID NO: 3357261 - RNA, 20 nt, Human
uuaugaagcuuuuaugugaa

SEQ ID NO: 3357262 - RNA, 23 nt, Human
auacgcaacauaauuaaauuuug

SEQ ID NO: 3357263 - RNA, 21 nt, Human
auacaggaugaugacuaugga

SEQ ID NO: 3357264 - RNA, 16 nt, Human
uuauaaacuuuuuucu

SEQ ID NO: 3357265 - RNA, 12 nt, Human
uuauaaacuuuu

SEQ ID NO: 3357266 - RNA, 22 nt, Human
uuauaaacuuuuuucuuacugu

SEQ ID NO: 3357267 - RNA, 15 nt, Human
uuauuauauuuacaa

SEQ ID NO: 3357268 - RNA, 14 nt, Human
uuauuauauuuaca

SEQ ID NO: 3357269 - RNA, 12 nt, Human
uuauucauaauu

SEQ ID NO: 3357270 - RNA, 19 nt, Human
auagaauaaaauuuuuaau

SEQ ID NO: 3357271 - RNA, 14 nt, Human
auagaauaaaauuu

SEQ ID NO: 3357272 - RNA, 22 nt, Human
auagaauaaaauuuuuaaucuu

SEQ ID NO: 3357273 - RNA, 19 nt, Human
auagaaggcuauggggaua

SEQ ID NO: 3357274 - RNA, 13 nt, Human
auagaaguaaaaa

SEQ ID NO: 3357275 - RNA, 22 nt, Human
auagagcaaaauugauguguuu

SEQ ID NO: 3357276 - RNA, 21 nt, Human
auagagcaaaauugauguguu

SEQ ID NO: 3357277 - RNA, 17 nt, Human
auagagcaaaauugaug

SEQ ID NO: 3357278 - RNA, 15 nt, Human
auagagcaaaauuga

SEQ ID NO: 3357279 - RNA, 18 nt, Human
auagauaggucagugcaa

SEQ ID NO: 3357280 - RNA, 19 nt, Human
auagaguguacuuaacuau

SEQ ID NO: 3357281 - RNA, 14 nt, Human
auagaguguacuua

SEQ ID NO: 3357282 - RNA, 21 nt, Human
auagaguguacuuaacuauuc

SEQ ID NO: 3357283 - RNA, 14 nt, Human
auagauguguggac

SEQ ID NO: 3357284 - RNA, 12 nt, Human
auagaugugugg

SEQ ID NO: 3357285 - RNA, 13 nt, Human
auagaugugugga

SEQ ID NO: 3357286 - RNA, 11 nt, Human
auagaugugug

SEQ ID NO: 3357287 - RNA, 18 nt, Human
accugaauaaagaaugaa

SEQ ID NO: 3357288 - RNA, 23 nt, Human
uccaaagucucuggaauuugaaa

SEQ ID NO: 3357289 - RNA, 22 nt, Human
uccaccaagccuggucagccca

SEQ ID NO: 3357290 - RNA, 23 nt, Human
uccaccaagccuggucagcccaa

SEQ ID NO: 3357291 - RNA, 18 nt, Human
uccaccaagccuggucag

SEQ ID NO: 3357292 - RNA, 18 nt, Human
accuuuggagcaaagcug

SEQ ID NO: 3357293 - RNA, 17 nt, Human
accuuccaagagccuga

SEQ ID NO: 3357294 - RNA, 22 nt, Human
ucaugauagaaggcuaugggga

SEQ ID NO: 3357295 - RNA, 14 nt, Human
ucaugugaaaucau

SEQ ID NO: 3357296 - RNA, 21 nt, Human
ucauuggauucugagagcugu

SEQ ID NO: 3357297 - RNA, 22 nt, Human
accugaagcuaucguaaaauua

SEQ ID NO: 3357298 - RNA, 19 nt, Human
ucauauuaauauauuucca

SEQ ID NO: 3357299 - RNA, 16 nt, Human
accgccuccuacagcc

SEQ ID NO: 3357300 - RNA, 20 nt, Human
accagagaaaaagggagggg

SEQ ID NO: 3357301 - RNA, 18 nt, Human
accagagaaaaagggagg

SEQ ID NO: 3357302 - RNA, 19 nt, Human
acccacuugcuuuuaaaau

SEQ ID NO: 3357303 - RNA, 16 nt, Human
ucagccccgcguggaa

SEQ ID NO: 3357304 - RNA, 22 nt, Human
acccagcuaugguucucucgca

SEQ ID NO: 3357305 - RNA, 22 nt, Human
ucagauuugccuuauuggcagc

SEQ ID NO: 3357306 - RNA, 16 nt, Human
acccccaggaccccug

SEQ ID NO: 3357307 - RNA, 19 nt, Human
ucagccuggcuucaaauug

SEQ ID NO: 3357308 - RNA, 19 nt, Human
accccuggcuccaggccag

SEQ ID NO: 3357309 - RNA, 20 nt, Human
accccuggcuccaggccagg

SEQ ID NO: 3357310 - RNA, 22 nt, Human
accccuggcuccaggccagggg

SEQ ID NO: 3357311 - RNA, 17 nt, Human
ucaggaaccgaggcagg

SEQ ID NO: 3357312 - RNA, 18 nt, Human
ucaggaaccgaggcaggg

SEQ ID NO: 3357313 - RNA, 14 nt, Human
ucaggcccaaagcc

SEQ ID NO: 3357314 - RNA, 15 nt, Human
acccuccacucuccu

SEQ ID NO: 3357315 - RNA, 23 nt, Human
acccucccucuacugggagccua

SEQ ID NO: 3357316 - RNA, 15 nt, Human
acucaugugacucuu

SEQ ID NO: 3357317 - RNA, 16 nt, Human
acucaugugacucuuu

SEQ ID NO: 3357318 - RNA, 17 nt, Human
acucaugugacucuuuc

SEQ ID NO: 3357319 - RNA, 18 nt, Human
acucaucuagguaaauua

SEQ ID NO: 3357320 - RNA, 16 nt, Human
acucaucuagguaaau

SEQ ID NO: 3357321 - RNA, 11 nt, Human
uccucagcccc

SEQ ID NO: 3357322 - RNA, 12 nt, Human
acuaaaagaucg

SEQ ID NO: 3357323 - RNA, 15 nt, Human
ucccagugaauucuu

SEQ ID NO: 3357324 - RNA, 22 nt, Human
acuaugaaguuuuuuuuauaca

SEQ ID NO: 3357325 - RNA, 22 nt, Human
ucgagaucccaacacugccagc

SEQ ID NO: 3357326 - RNA, 23 nt, Human
ucgagaucccaacacugccagca

SEQ ID NO: 3357327 - RNA, 12 nt, Human
ucgacacagagu

SEQ ID NO: 3357328 - RNA, 14 nt, Human
acuggggcaggggc

SEQ ID NO: 3357329 - RNA, 16 nt, Human
acuguaaggcaaucau

SEQ ID NO: 3357330 - RNA, 17 nt, Human
acugggagaaaugaaaa

SEQ ID NO: 3357331 - RNA, 12 nt, Human
acugggagccua

SEQ ID NO: 3357332 - RNA, 23 nt, Human
acugggagccuacccacccccag

SEQ ID NO: 3357333 - RNA, 20 nt, Human
acuguacagacagaaaaaac

SEQ ID NO: 3357334 - RNA, 20 nt, Human
uccugcaccggggccugggc

SEQ ID NO: 3357335 - RNA, 19 nt, Human
uccugcaccggggccuggg

SEQ ID NO: 3357336 - RNA, 21 nt, Human
uccugcaccggggccugggca

SEQ ID NO: 3357337 - RNA, 13 nt, Human
acugagcuuggaa

SEQ ID NO: 3357338 - RNA, 16 nt, Human
acugagcuuggaagcu

SEQ ID NO: 3357339 - RNA, 12 nt, Human
acugagcuugga

SEQ ID NO: 3357340 - RNA, 17 nt, Human
acugagcuuggaagcuu

SEQ ID NO: 3357341 - RNA, 14 nt, Human
acugaggaucagag

SEQ ID NO: 3357342 - RNA, 16 nt, Human
agaaaacagaaaacaa

SEQ ID NO: 3357343 - RNA, 12 nt, Human
agaaaacagaaa

SEQ ID NO: 3357344 - RNA, 14 nt, Human
acuuuuggcauuuu

SEQ ID NO: 3357345 - RNA, 22 nt, Human
acuuuuuuuuuuuaagaguaaa

SEQ ID NO: 3357346 - RNA, 11 nt, Human
ucuggcccuau

SEQ ID NO: 3357347 - RNA, 18 nt, Human
ucuggauuauauuaugaa

SEQ ID NO: 3357348 - RNA, 12 nt, Human
ucuggauuauau

SEQ ID NO: 3357349 - RNA, 14 nt, Human
agacuuaucaacau

SEQ ID NO: 3357350 - RNA, 22 nt, Human
agagaaugaaauugcugaaaga

SEQ ID NO: 3357351 - RNA, 15 nt, Human
ucuuggagccugcag

SEQ ID NO: 3357352 - RNA, 18 nt, Human
ucuuggagccugcagagc

SEQ ID NO: 3357353 - RNA, 19 nt, Human
ucuuggagccugcagagcu

SEQ ID NO: 3357354 - RNA, 14 nt, Human
ucuugaugccuggc

SEQ ID NO: 3357355 - RNA, 20 nt, Human
ucuugaugccuggcggggug

SEQ ID NO: 3357356 - RNA, 13 nt, Human
ucuuggagccugc

SEQ ID NO: 3357357 - RNA, 14 nt, Human
ucuuggagccugca

SEQ ID NO: 3357358 - RNA, 12 nt, Human
ucuuggagccug

SEQ ID NO: 3357359 - RNA, 20 nt, Human
agaauugucuuucugucucu

SEQ ID NO: 3357360 - RNA, 18 nt, Human
ugaagguggaaauaaacu

SEQ ID NO: 3357361 - RNA, 19 nt, Human
agauaaucagugugucuaa

SEQ ID NO: 3357362 - RNA, 15 nt, Human
agaucaagagaucaa

SEQ ID NO: 3357363 - RNA, 24 nt, Human
agaggcaccacuaaaagaucgcag

SEQ ID NO: 3357364 - RNA, 21 nt, Human
agaggcgcaugaauuugugaa

SEQ ID NO: 3357365 - RNA, 22 nt, Human
ugaacuuguaaaggaauuuaaa

SEQ ID NO: 3357366 - RNA, 15 nt, Human
ucuuuguaaugaaaa

SEQ ID NO: 3357367 - RNA, 13 nt, Human
ucuuuguaaugaa

SEQ ID NO: 3357368 - RNA, 12 nt, Human
ucuuuguaauga

SEQ ID NO: 3357369 - RNA, 14 nt, Human
agauuuaugcauau

SEQ ID NO: 3357370 - RNA, 12 nt, Human
agauuuucagaa

SEQ ID NO: 3357371 - RNA, 17 nt, Human
agauuuucagaaaauau

SEQ ID NO: 3357372 - RNA, 18 nt, Human
ugacucacuuaucccaag

SEQ ID NO: 3357373 - RNA, 18 nt, Human
agauguguucacaaugga

SEQ ID NO: 3357374 - RNA, 15 nt, Human
agauguguucacaau

SEQ ID NO: 3357375 - RNA, 15 nt, Human
agaucgcaguuugcc

SEQ ID NO: 3357376 - RNA, 14 nt, Human
agaucgcaguuugc

SEQ ID NO: 3357377 - RNA, 21 nt, Human
agaucauugugaaauuauuca

SEQ ID NO: 3357378 - RNA, 12 nt, Human
agaucauuguga

SEQ ID NO: 3357379 - RNA, 17 nt, Human
ugacagguuugggaccc

SEQ ID NO: 3357380 - RNA, 15 nt, Human
agcagaaaucuagaa

SEQ ID NO: 3357381 - RNA, 17 nt, Human
ugaggaagagggacugu

SEQ ID NO: 3357382 - RNA, 13 nt, Human
ugagcuacaaaug

SEQ ID NO: 3357383 - RNA, 14 nt, Human
ugagcuacaaaugc

SEQ ID NO: 3357384 - RNA, 16 nt, Human
ugagcuacaaaugcau

SEQ ID NO: 3357385 - RNA, 14 nt, Human
ugagcuaggaauug

SEQ ID NO: 3357386 - RNA, 22 nt, Human
ugagggugacuauggagcugag

SEQ ID NO: 3357387 - RNA, 21 nt, Human
agcagauggaaugcuguguua

SEQ ID NO: 3357388 - RNA, 15 nt, Human
guccugcaccggggc

SEQ ID NO: 3357389 - RNA, 19 nt, Human
guccugcaccggggccugg

SEQ ID NO: 3357390 - RNA, 20 nt, Human
guccugcaccggggccuggg

SEQ ID NO: 3357391 - RNA, 14 nt, Human
gucgcccuggacug

SEQ ID NO: 3357392 - RNA, 22 nt, Human
aacauuuguucuauagcuuuuc

SEQ ID NO: 3357393 - RNA, 12 nt, Human
aacauaauuaaa

SEQ ID NO: 3357394 - RNA, 16 nt, Human
gugaagugaaugaaac

SEQ ID NO: 3357395 - RNA, 21 nt, Human
gugagguggaauuauuuuaaa

SEQ ID NO: 3357396 - RNA, 17 nt, Human
guggcacuggggcaggg

SEQ ID NO: 3357397 - RNA, 14 nt, Human
guggcacuggggca

SEQ ID NO: 3357398 - RNA, 18 nt, Human
guggcacuggggcagggg

SEQ ID NO: 3357399 - RNA, 11 nt, Human
aagaauauuug

SEQ ID NO: 3357400 - RNA, 15 nt, Human
aagaauauuugaaug

SEQ ID NO: 3357401 - RNA, 19 nt, Human
guggaauuauuuuaaaaga

SEQ ID NO: 3357402 - RNA, 17 nt, Human
guggaagagggcugcaa

SEQ ID NO: 3357403 - RNA, 14 nt, Human
guggaagagggcug

SEQ ID NO: 3357404 - RNA, 20 nt, Human
guggaauuauuuuaaaagau

SEQ ID NO: 3357405 - RNA, 16 nt, Human
gugcugggccccugcc

SEQ ID NO: 3357406 - RNA, 19 nt, Human
gugcugggccccugccucu

SEQ ID NO: 3357407 - RNA, 23 nt, Human
guggggggggggcgcggcuggga

SEQ ID NO: 3357408 - RNA, 18 nt, Human
guggggggggugcugggc

SEQ ID NO: 3357409 - RNA, 15 nt, Human
gugggggucugugug

SEQ ID NO: 3357410 - RNA, 16 nt, Human
gugggggucugugugu

SEQ ID NO: 3357411 - RNA, 14 nt, Human
gugggggucugugu

SEQ ID NO: 3357412 - RNA, 20 nt, Human
guggguagaucacgagauca

SEQ ID NO: 3357413 - RNA, 20 nt, Human
aagagaugaugaaaauauuu

SEQ ID NO: 3357414 - RNA, 20 nt, Human
gugguucacucuuggagccu

SEQ ID NO: 3357415 - RNA, 15 nt, Human
aagaugcaauguaga

SEQ ID NO: 3357416 - RNA, 13 nt, Human
aagcaaaugugaa

SEQ ID NO: 3357417 - RNA, 14 nt, Human
aagcaaaugugaau

SEQ ID NO: 3357418 - RNA, 13 nt, Human
guguguguaugug

SEQ ID NO: 3357419 - RNA, 16 nt, Human
gugugugggagugugu

SEQ ID NO: 3357420 - RNA, 17 nt, Human
guguguguugugugugg

SEQ ID NO: 3357421 - RNA, 14 nt, Human
guguguguaugugg

SEQ ID NO: 3357422 - RNA, 15 nt, Human
guguuguguguggga

SEQ ID NO: 3357423 - RNA, 13 nt, Human
guguucugugaua

SEQ ID NO: 3357424 - RNA, 19 nt, Human
aaguuauugauaaguucau

SEQ ID NO: 3357425 - RNA, 20 nt, Human
aaguuauugauaaguucaua

SEQ ID NO: 3357426 - RNA, 17 nt, Human
guuuuuuuuuaaagacu

SEQ ID NO: 3357427 - RNA, 19 nt, Human
aaguuuacauuguaaauag

SEQ ID NO: 3357428 - RNA, 18 nt, Human
aaguuuacauuguaaaua

SEQ ID NO: 3357429 - RNA, 22 nt, Human
aaguuauugauaaguucauaca

SEQ ID NO: 3357430 - RNA, 23 nt, Human
aaguuauugauaaguucauacau

SEQ ID NO: 3357431 - RNA, 12 nt, Human
aaguucauacau

SEQ ID NO: 3357432 - RNA, 13 nt, Human
aaguucauacauu

SEQ ID NO: 3357433 - RNA, 15 nt, Human
aaguucauacauugu

SEQ ID NO: 3357434 - RNA, 19 nt, Human
uaaaauuuuuaaucuuuaa

SEQ ID NO: 3357435 - RNA, 17 nt, Human
uaaaauuuuuaaucuuu

SEQ ID NO: 3357436 - RNA, 19 nt, Human
uaaaccucaaaaugucuaa

SEQ ID NO: 3357437 - RNA, 18 nt, Human
uaaaccucaaaaugucua

SEQ ID NO: 3357438 - RNA, 16 nt, Human
uaaagacuuuuaugau

SEQ ID NO: 3357439 - RNA, 20 nt, Human
uaaauguuuuuuuuuaaaga

SEQ ID NO: 3357440 - RNA, 14 nt, Human
uaaauuuuauaucu

SEQ ID NO: 3357441 - RNA, 16 nt, Human
uaaauuuugaguucua

SEQ ID NO: 3357442 - RNA, 23 nt, Human
uaacaaaaaaauauauuuaauga

SEQ ID NO: 3357443 - RNA, 20 nt, Human
uaacaaaaaaauauauuuaa

SEQ ID NO: 3357444 - RNA, 18 nt, Human
uaaauaguauuugagagu

SEQ ID NO: 3357445 - RNA, 15 nt, Human
aauaacgauaaaaga

SEQ ID NO: 3357446 - RNA, 15 nt, Human
aauaacaauaaaaga

SEQ ID NO: 3357447 - RNA, 12 nt, Human
aauaaaaauaau

SEQ ID NO: 3357448 - RNA, 22 nt, Human
aauaaaaauauuguguugugaa

SEQ ID NO: 3357449 - RNA, 16 nt, Human
guguuuaugugugugu

SEQ ID NO: 3357450 - RNA, 12 nt, Human
guguuuaugugu

SEQ ID NO: 3357451 - RNA, 18 nt, Human
aagcuguguggcagucug

SEQ ID NO: 3357452 - RNA, 16 nt, Human
aaggaaaaaauaacaa

SEQ ID NO: 3357453 - RNA, 14 nt, Human
guugggagaauguc

SEQ ID NO: 3357454 - RNA, 21 nt, Human
guugggagaaugucaguaugu

SEQ ID NO: 3357455 - RNA, 12 nt, Human
aaggaaaaugau

SEQ ID NO: 3357456 - RNA, 14 nt, Human
aaggaaaaugauac

SEQ ID NO: 3357457 - RNA, 22 nt, Human
aaggagcaagucagaauagaaa

SEQ ID NO: 3357458 - RNA, 14 nt, Human
aaggaucuucaucu

SEQ ID NO: 3357459 - RNA, 11 nt, Human
aaggauaaagu

SEQ ID NO: 3357460 - RNA, 23 nt, Human
aaggauaaaguugguaaaccuuu

SEQ ID NO: 3357461 - RNA, 21 nt, Human
aaggauaaaguugguaaaccu

SEQ ID NO: 3357462 - RNA, 22 nt, Human
aaguaaaaacaaagaaauuaug

SEQ ID NO: 3357463 - RNA, 15 nt, Human
aaguauucuaaauuu

SEQ ID NO: 3357464 - RNA, 13 nt, Human
aaguauucuaaau

SEQ ID NO: 3357465 - RNA, 15 nt, Human
guuuuuuuuuaaaga

SEQ ID NO: 3357466 - RNA, 13 nt, Human
uaguucugccagg

SEQ ID NO: 3357467 - RNA, 14 nt, Human
uaguucugccagga

SEQ ID NO: 3357468 - RNA, 17 nt, Human
uauaaaagccuguuuaa

SEQ ID NO: 3357469 - RNA, 14 nt, Human
uauaaaagccuguu

SEQ ID NO: 3357470 - RNA, 12 nt, Human
uauaaaagccug

SEQ ID NO: 3357471 - RNA, 23 nt, Human
acaccuaggcuaggguggggaga

SEQ ID NO: 3357472 - RNA, 20 nt, Human
acaccuaggcuagggugggg

SEQ ID NO: 3357473 - RNA, 21 nt, Human
uauacaggucauauuaauaua

SEQ ID NO: 3357474 - RNA, 16 nt, Human
uauauccuuucuaaca

SEQ ID NO: 3357475 - RNA, 13 nt, Human
uauauaucaaaua

SEQ ID NO: 3357476 - RNA, 12 nt, Human
acagccuggcug

SEQ ID NO: 3357477 - RNA, 17 nt, Human
uauggggauagaugugu

SEQ ID NO: 3357478 - RNA, 18 nt, Human
uauggggauagaugugug

SEQ ID NO: 3357479 - RNA, 14 nt, Human
uauggccuguggau

SEQ ID NO: 3357480 - RNA, 22 nt, Human
uauggccugugagcuaggaauu

SEQ ID NO: 3357481 - RNA, 21 nt, Human
uaugagcuuccuucugugaaa

SEQ ID NO: 3357482 - RNA, 15 nt, Human
uaucuugaauaaugu

SEQ ID NO: 3357483 - RNA, 18 nt, Human
uaugagcuuccuucugug

SEQ ID NO: 3357484 - RNA, 13 nt, Human
acagcccaccugg

SEQ ID NO: 3357485 - RNA, 21 nt, Human
acagacacucccacuuggcau

SEQ ID NO: 3357486 - RNA, 16 nt, Human
uauauugauccagaaa

SEQ ID NO: 3357487 - RNA, 15 nt, Human
uauauuuacaaaugg

SEQ ID NO: 3357488 - RNA, 14 nt, Human
uauauuuacaaaug

SEQ ID NO: 3357489 - RNA, 16 nt, Human
uaucuaguaugaaauu

SEQ ID NO: 3357490 - RNA, 17 nt, Human
uaucuaguaugaaauua

SEQ ID NO: 3357491 - RNA, 14 nt, Human
uaucuaguaugaaa

SEQ ID NO: 3357492 - RNA, 22 nt, Human
acagaguggacuguucccugag

SEQ ID NO: 3357493 - RNA, 11 nt, Human
acaguguuccg

SEQ ID NO: 3357494 - RNA, 20 nt, Human
acagugaaagaaaauaacaa

SEQ ID NO: 3357495 - RNA, 16 nt, Human
uauucaggagaguaga

SEQ ID NO: 3357496 - RNA, 14 nt, Human
uauucauaauuauu

SEQ ID NO: 3357497 - RNA, 14 nt, Human
uauguguguguguu

SEQ ID NO: 3357498 - RNA, 22 nt, Human
uauguguguguguugugugugg

SEQ ID NO: 3357499 - RNA, 11 nt, Human
uaugugugugu

SEQ ID NO: 3357500 - RNA, 23 nt, Human
acaguucggugagcuacaaaugc

SEQ ID NO: 3357501 - RNA, 19 nt, Human
acaguucggugagcuacaa

SEQ ID NO: 3357502 - RNA, 22 nt, Human
acaguucggugagcuacaaaug

SEQ ID NO: 3357503 - RNA, 14 nt, Human
uauuuaauucaugu

SEQ ID NO: 3357504 - RNA, 19 nt, Human
uauuuaaugauaaguaaau

SEQ ID NO: 3357505 - RNA, 19 nt, Human
uauuuaguguucauaaaua

SEQ ID NO: 3357506 - RNA, 20 nt, Human
aaugaauacuuuauaaagga

SEQ ID NO: 3357507 - RNA, 17 nt, Human
uaauguaauaacuguga

SEQ ID NO: 3357508 - RNA, 15 nt, Human
uaauguaagacaaau

SEQ ID NO: 3357509 - RNA, 18 nt, Human
uaaucagugugucuaaau

SEQ ID NO: 3357510 - RNA, 17 nt, Human
uaaucagugugucuaaa

SEQ ID NO: 3357511 - RNA, 22 nt, Human
uaauccaagcaaaugugaauca

SEQ ID NO: 3357512 - RNA, 17 nt, Human
uaaucuuuaauuuuaca

SEQ ID NO: 3357513 - RNA, 18 nt, Human
uaauacuugcuuuggaaa

SEQ ID NO: 3357514 - RNA, 13 nt, Human
uaauucauguugc

SEQ ID NO: 3357515 - RNA, 13 nt, Human
aauguaagacaaa

SEQ ID NO: 3357516 - RNA, 17 nt, Human
uacauaaguaauucaag

SEQ ID NO: 3357517 - RNA, 16 nt, Human
uacauaaguaauucaa

SEQ ID NO: 3357518 - RNA, 15 nt, Human
uacauaaguaauuca

SEQ ID NO: 3357519 - RNA, 19 nt, Human
uacauaaguaauucaagaa

SEQ ID NO: 3357520 - RNA, 12 nt, Human
aauguagagggg

SEQ ID NO: 3357521 - RNA, 15 nt, Human
aauguaugcuucaua

SEQ ID NO: 3357522 - RNA, 16 nt, Human
aauguaugcuucauac

SEQ ID NO: 3357523 - RNA, 17 nt, Human
uacauguacugauuacu

SEQ ID NO: 3357524 - RNA, 20 nt, Human
uacauuguacgaagaguauu

SEQ ID NO: 3357525 - RNA, 22 nt, Human
uacauuguacgaagaguauuuu

SEQ ID NO: 3357526 - RNA, 23 nt, Human
uacauuguacgaagaguauuuuu

SEQ ID NO: 3357527 - RNA, 19 nt, Human
uacauuguacgaagaguau

SEQ ID NO: 3357528 - RNA, 22 nt, Human
aauuaaauuuugaguucuacau

SEQ ID NO: 3357529 - RNA, 19 nt, Human
aauuaacaugaauauuuag

SEQ ID NO: 3357530 - RNA, 19 nt, Human
aaugugaacagcggcugga

SEQ ID NO: 3357531 - RNA, 17 nt, Human
acaaaaaaauauauuua

SEQ ID NO: 3357532 - RNA, 13 nt, Human
acaaaaaaauaua

SEQ ID NO: 3357533 - RNA, 20 nt, Human
acaaaaaaauauauuuaaug

SEQ ID NO: 3357534 - RNA, 18 nt, Human
acaagcacuaaacaaaga

SEQ ID NO: 3357535 - RNA, 21 nt, Human
uagcaugucgucaaagcugaa

SEQ ID NO: 3357536 - RNA, 18 nt, Human
uagcaugucgucaaagcu

SEQ ID NO: 3357537 - RNA, 17 nt, Human
uagaucacgagaucaag

SEQ ID NO: 3357538 - RNA, 16 nt, Human
uagaucacgagaucaa

SEQ ID NO: 3357539 - RNA, 18 nt, Human
aauucuuugaccuguugg

SEQ ID NO: 3357540 - RNA, 22 nt, Human
aauucuuugaccuguugggagu

SEQ ID NO: 3357541 - RNA, 21 nt, Human
aauucuugccaaauauaaaua

SEQ ID NO: 3357542 - RNA, 21 nt, Human
aauucuugaaggaaaaugaua

SEQ ID NO: 3357543 - RNA, 16 nt, Human
aauucuugaaggaaaa

SEQ ID NO: 3357544 - RNA, 15 nt, Human
aauucuugaaggaaa

SEQ ID NO: 3357545 - RNA, 15 nt, Human
aauuugaaacacuuu

SEQ ID NO: 3357546 - RNA, 20 nt, Human
aauuugaaacacuuugcaua

SEQ ID NO: 3357547 - RNA, 16 nt, Human
accugccgagagucca

SEQ ID NO: 3357548 - RNA, 23 nt, Human
accugccgagaguccaucagccu

SEQ ID NO: 3357549 - RNA, 22 nt, Human
acuauucaggagaguagaacag

SEQ ID NO: 3357550 - RNA, 21 nt, Human
acucauaaaaagccugcaauu

SEQ ID NO: 3357551 - RNA, 21 nt, Human
acucagcccucauuggcucuu

SEQ ID NO: 3357552 - RNA, 17 nt, Human
acucagcccucauuggc

SEQ ID NO: 3357553 - RNA, 12 nt, Human
acugccagcauu

SEQ ID NO: 3357554 - RNA, 22 nt, Human
acugugaaguuuacauuguaaa

SEQ ID NO: 3357555 - RNA, 18 nt, Human
acugguaggaaacuaggu

SEQ ID NO: 3357556 - RNA, 14 nt, Human
agaaaauaacaaua

SEQ ID NO: 3357557 - RNA, 23 nt, Human
acuuuuaugauacuugaaaauua

SEQ ID NO: 3357558 - RNA, 22 nt, Human
acuuuauuuucuauaauuuaaa

SEQ ID NO: 3357559 - RNA, 22 nt, Human
acuuuaucuugaauaauguaag

SEQ ID NO: 3357560 - RNA, 16 nt, Human
acuuuuaugauacuug

SEQ ID NO: 3357561 - RNA, 12 nt, Human
acuuuuaugaua

SEQ ID NO: 3357562 - RNA, 20 nt, Human
acuuuauacccagaaaguua

SEQ ID NO: 3357563 - RNA, 22 nt, Human
acuuuauacccagaaaguuauu

SEQ ID NO: 3357564 - RNA, 19 nt, Human
acuuuauacccagaaaguu

SEQ ID NO: 3357565 - RNA, 16 nt, Human
agaaaggauaaaguug

SEQ ID NO: 3357566 - RNA, 23 nt, Human
agaaaguuauugauaaguucaua

SEQ ID NO: 3357567 - RNA, 11 nt, Human
agaaaguuauu

SEQ ID NO: 3357568 - RNA, 13 nt, Human
acccccugugccu

SEQ ID NO: 3357569 - RNA, 19 nt, Human
acauuuguucuauagcuuu

SEQ ID NO: 3357570 - RNA, 13 nt, Human
accagaucauugu

SEQ ID NO: 3357571 - RNA, 22 nt, Human
acauguuucuuuguaaugaaaa

SEQ ID NO: 3357572 - RNA, 19 nt, Human
acauguuucuuuguaauga

SEQ ID NO: 3357573 - RNA, 17 nt, Human
acagccaacuauggccu

SEQ ID NO: 3357574 - RNA, 19 nt, Human
acagccaacuauggccugu

SEQ ID NO: 3357575 - RNA, 21 nt, Human
acaggaugaugacuauggaaa

SEQ ID NO: 3357576 - RNA, 17 nt, Human
aaaaucaguuguacagu

SEQ ID NO: 3357577 - RNA, 14 nt, Human
aaaauugauguguu

SEQ ID NO: 3357578 - RNA, 12 nt, Human
aaaauugaugug

SEQ ID NO: 3357579 - RNA, 21 nt, Human
aaaauugaugggauuugguca

SEQ ID NO: 3357580 - RNA, 21 nt, Human
aaaauugauguguuuauuuau

SEQ ID NO: 3357581 - RNA, 22 nt, Human
aaacacugggagaaaugaaaaa

SEQ ID NO: 3357582 - RNA, 24 nt, Human
aaacacucaguuguucaauaauaa

SEQ ID NO: 3357583 - RNA, 21 nt, Human
aaacacugggagaaaugaaaa

SEQ ID NO: 3357584 - RNA, 17 nt, Human
aaagaaauauaccuaaa

SEQ ID NO: 3357585 - RNA, 15 nt, Human
aaagaaauauaccua

SEQ ID NO: 3357586 - RNA, 15 nt, Human
aaagccaaugugaac

SEQ ID NO: 3357587 - RNA, 17 nt, Human
aaagccaaugugaacag

SEQ ID NO: 3357588 - RNA, 22 nt, Human
aacuuuauacccagaaaguuau

SEQ ID NO: 3357589 - RNA, 23 nt, Human
aacuuuauacccagaaaguuauu

SEQ ID NO: 3357590 - RNA, 17 nt, Human
aaaucuuauaauuuaaa

SEQ ID NO: 3357591 - RNA, 15 nt, Human
aaaugccuuuguacu

SEQ ID NO: 3357592 - RNA, 22 nt, Human
aaccacuggaaaguuuaugguu

SEQ ID NO: 3357593 - RNA, 18 nt, Human
aaccaccagaagcccaga

SEQ ID NO: 3357594 - RNA, 19 nt, Human
aaccaccagaagcccagaa

SEQ ID NO: 3357595 - RNA, 21 nt, Human
aaugcuagguuaauuccaauu

SEQ ID NO: 3357596 - RNA, 13 nt, Human
aaugucaguaugu

SEQ ID NO: 3357597 - RNA, 15 nt, Human
aaugucaguaugugg

SEQ ID NO: 3357598 - RNA, 19 nt, Human
aaugcuagguuaauuccaa

SEQ ID NO: 3357599 - RNA, 18 nt, Human
aaugcuagguuaauucca

SEQ ID NO: 3357600 - RNA, 22 nt, Human
aauguuuuuuuuuaaagacuuu

SEQ ID NO: 3357601 - RNA, 20 nt, Human
aauguuuuuuuuuaaagacu

SEQ ID NO: 3357602 - RNA, 15 nt, Human
aauguuuuuuuuuaa

SEQ ID NO: 3357603 - RNA, 16 nt, Human
aauauguuucaaacuu

SEQ ID NO: 3357604 - RNA, 17 nt, Human
aauauguuucaaacuuu

SEQ ID NO: 3357605 - RNA, 13 nt, Human
aauauguuucaaa

SEQ ID NO: 3357606 - RNA, 15 nt, Human
aauauguuucaaacu

SEQ ID NO: 3357607 - RNA, 16 nt, Human
aauauauaucaaauau

SEQ ID NO: 3357608 - RNA, 15 nt, Human
aaucaccaaaggcuc

SEQ ID NO: 3357609 - RNA, 13 nt, Human
aauccagccugcu

SEQ ID NO: 3357610 - RNA, 18 nt, Human
aauccaagcaaaugugaa

SEQ ID NO: 3357611 - RNA, 17 nt, Human
aauccaagcaaauguga

SEQ ID NO: 3357612 - RNA, 20 nt, Human
aaggugaggagcuugaaacc

SEQ ID NO: 3357613 - RNA, 17 nt, Human
aaguaguguaucacagu

SEQ ID NO: 3357614 - RNA, 14 nt, Human
aagucuccaaaguc

SEQ ID NO: 3357615 - RNA, 15 nt, Human
aagucuccaaagucu

SEQ ID NO: 3357616 - RNA, 21 nt, Human
aagcugugugcucuccaagcc

SEQ ID NO: 3357617 - RNA, 19 nt, Human
aagcagauggaaugcugug

SEQ ID NO: 3357618 - RNA, 17 nt, Human
aagcagauggaaugcug

SEQ ID NO: 3357619 - RNA, 20 nt, Human
aagcagauggaaugcugugu

SEQ ID NO: 3357620 - RNA, 14 nt, Human
agccgggagccuga

SEQ ID NO: 3357621 - RNA, 13 nt, Human
agcacugacagau

SEQ ID NO: 3357622 - RNA, 14 nt, Human
agcacugacagauu

SEQ ID NO: 3357623 - RNA, 18 nt, Human
agcacugacagauuucca

SEQ ID NO: 3357624 - RNA, 14 nt, Human
agcagugggccugg

SEQ ID NO: 3357625 - RNA, 18 nt, Human
agcagugggccuggccag

SEQ ID NO: 3357626 - RNA, 20 nt, Human
agaggacaguauuugugggg

SEQ ID NO: 3357627 - RNA, 17 nt, Human
agagggaugcauggaga

SEQ ID NO: 3357628 - RNA, 14 nt, Human
agcugcuccccacg

SEQ ID NO: 3357629 - RNA, 17 nt, Human
agcugcuccccacguca

SEQ ID NO: 3357630 - RNA, 21 nt, Human
agcuucuggugaccuuccaag

SEQ ID NO: 3357631 - RNA, 22 nt, Human
agcuucuggugaccuuccaaga

SEQ ID NO: 3357632 - RNA, 18 nt, Human
agcuccuuaaggcucuuu

SEQ ID NO: 3357633 - RNA, 22 nt, Human
agcuccuuaaggcucuuuugua

SEQ ID NO: 3357634 - RNA, 21 nt, Human
aggagucccugccaucauguu

SEQ ID NO: 3357635 - RNA, 21 nt, Human
agcuuuucccuuuuuuuaagu

SEQ ID NO: 3357636 - RNA, 17 nt, Human
aggggccgggggcaguc

SEQ ID NO: 3357637 - RNA, 18 nt, Human
agguaaaucagacuauga

SEQ ID NO: 3357638 - RNA, 20 nt, Human
agguaaaagcaucacaugaa

SEQ ID NO: 3357639 - RNA, 11 nt, Human
aggucccuaau

SEQ ID NO: 3357640 - RNA, 12 nt, Human
aggucccuaaua

SEQ ID NO: 3357641 - RNA, 23 nt, Human
agguaaaucagacuaugaaguuu

SEQ ID NO: 3357642 - RNA, 15 nt, Human
aggucccuaauaaag

SEQ ID NO: 3357643 - RNA, 13 nt, Human
aggucccuaauaa

SEQ ID NO: 3357644 - RNA, 17 nt, Human
agguggaauuauuuuaa

SEQ ID NO: 3357645 - RNA, 21 nt, Human
agguggaauuauuuuaaaaga

SEQ ID NO: 3357646 - RNA, 23 nt, Human
aggcuacuguaaggcaaucaugg

SEQ ID NO: 3357647 - RNA, 19 nt, Human
augagcuccuuaaggcucu

SEQ ID NO: 3357648 - RNA, 21 nt, Human
augaagcuuuuaugugaaaca

SEQ ID NO: 3357649 - RNA, 23 nt, Human
augaaaaaauauauaucaaauau

SEQ ID NO: 3357650 - RNA, 19 nt, Human
augaaguuuuuuuuauaca

SEQ ID NO: 3357651 - RNA, 22 nt, Human
augaagcuuuuaugugaaacau

SEQ ID NO: 3357652 - RNA, 18 nt, Human
aucuugaauaauguaaga

SEQ ID NO: 3357653 - RNA, 14 nt, Human
aucagccugugcca

SEQ ID NO: 3357654 - RNA, 15 nt, Human
aucaugugaaaucau

SEQ ID NO: 3357655 - RNA, 14 nt, Human
aucaugugaaauca

SEQ ID NO: 3357656 - RNA, 16 nt, Human
aucaugugaaaucauu

SEQ ID NO: 3357657 - RNA, 16 nt, Human
auccagaaagaaaacu

SEQ ID NO: 3357658 - RNA, 18 nt, Human
auccagaaagaaaacuug

SEQ ID NO: 3357659 - RNA, 14 nt, Human
auguuucaaacuuu

SEQ ID NO: 3357660 - RNA, 17 nt, Human
auguuucaaacuuugga

SEQ ID NO: 3357661 - RNA, 12 nt, Human
auguuucaaacu

SEQ ID NO: 3357662 - RNA, 13 nt, Human
auguuucaaacuu

SEQ ID NO: 3357663 - RNA, 19 nt, Human
auguauucuagcuaaugua

SEQ ID NO: 3357664 - RNA, 20 nt, Human
auguauucuagcuaauguaa

SEQ ID NO: 3357665 - RNA, 15 nt, Human
augugaaacauguuu

SEQ ID NO: 3357666 - RNA, 21 nt, Human
augcauagguuuagcaguaua

SEQ ID NO: 3357667 - RNA, 17 nt, Human
augcauagguuuagcag

SEQ ID NO: 3357668 - RNA, 16 nt, Human
augcauauuauuuuau

SEQ ID NO: 3357669 - RNA, 16 nt, Human
auggcuguggagugug

SEQ ID NO: 3357670 - RNA, 23 nt, Human
auaguauuugagaguucuaaauu

SEQ ID NO: 3357671 - RNA, 21 nt, Human
auaguauuugagaguucuaaa

SEQ ID NO: 3357672 - RNA, 20 nt, Human
auaguauuugagaguucuaa

SEQ ID NO: 3357673 - RNA, 15 nt, Human
auagguuuaauaauu

SEQ ID NO: 3357674 - RNA, 23 nt, Human
auauuaugaagcuuuuaugugaa

SEQ ID NO: 3357675 - RNA, 16 nt, Human
auaucaaauauauuca

SEQ ID NO: 3357676 - RNA, 20 nt, Human
auaauuaaauuuugaguucu

SEQ ID NO: 3357677 - RNA, 14 nt, Human
auaaaaauauugug

SEQ ID NO: 3357678 - RNA, 20 nt, Human
auaaacuuuuuucuuacugu

SEQ ID NO: 3357679 - RNA, 15 nt, Human
auaaagcaggcagaa

SEQ ID NO: 3357680 - RNA, 18 nt, Human
auaaagcuguguggcagu

SEQ ID NO: 3357681 - RNA, 18 nt, Human
auaaaggauuaaugucaa

SEQ ID NO: 3357682 - RNA, 18 nt, Human
aguucauaaauuuauggu

SEQ ID NO: 3357683 - RNA, 10 nt, Human
aguucauaca

SEQ ID NO: 3357684 - RNA, 11 nt, Human
aguucauacau

SEQ ID NO: 3357685 - RNA, 15 nt, Human
aguucauacauugua

SEQ ID NO: 3357686 - RNA, 22 nt, Human
aguugaaaaucuuauaauuuaa

SEQ ID NO: 3357687 - RNA, 23 nt, Human
aguugaaaaucuuauaauuuaaa

SEQ ID NO: 3357688 - RNA, 16 nt, Human
aguggcuggaucugug

SEQ ID NO: 3357689 - RNA, 14 nt, Human
aguaugaaauuaua

SEQ ID NO: 3357690 - RNA, 16 nt, Human
aguaucuuuuuauuca

SEQ ID NO: 3357691 - RNA, 16 nt, Human
aguaugaaauuauaua

SEQ ID NO: 3357692 - RNA, 12 nt, Human
aguccuguaaug

SEQ ID NO: 3357693 - RNA, 16 nt, Human
caccccgacuuuuguu

SEQ ID NO: 3357694 - RNA, 16 nt, Human
caccagaagcccagaa

SEQ ID NO: 3357695 - RNA, 17 nt, Human
caccagaagcccagaau

SEQ ID NO: 3357696 - RNA, 13 nt, Human
caccagaagccca

SEQ ID NO: 3357697 - RNA, 14 nt, Human
caccagaagcccag

SEQ ID NO: 3357698 - RNA, 15 nt, Human
caccagaagcccaga

SEQ ID NO: 3357699 - RNA, 21 nt, Human
cacaaauucugucucuggauu

SEQ ID NO: 3357700 - RNA, 19 nt, Human
cacaacuauuuuuccaaaa

SEQ ID NO: 3357701 - RNA, 14 nt, Human
cacaacuauuuuuc

SEQ ID NO: 3357702 - RNA, 23 nt, Human
cacauaucuaguaugaaauuaua

SEQ ID NO: 3357703 - RNA, 20 nt, Human
caccaagccuggucagccca

SEQ ID NO: 3357704 - RNA, 21 nt, Human
caccaagccuggucagcccaa

SEQ ID NO: 3357705 - RNA, 19 nt, Human
caccaagccuggucagccc

SEQ ID NO: 3357706 - RNA, 18 nt, Human
cacauuggagauguuuag

SEQ ID NO: 3357707 - RNA, 22 nt, Human
caccaagccuggucagcccaaa

SEQ ID NO: 3357708 - RNA, 22 nt, Human
cacauggugacuuuugaaaaga

SEQ ID NO: 3357709 - RNA, 15 nt, Human
caaauucugucucug

SEQ ID NO: 3357710 - RNA, 18 nt, Human
caagaaaacaacuucaau

SEQ ID NO: 3357711 - RNA, 11 nt, Human
caacuuuguau

SEQ ID NO: 3357712 - RNA, 12 nt, Human
caacuuuauacc

SEQ ID NO: 3357713 - RNA, 17 nt, Human
caagcacuaaacaaaga

SEQ ID NO: 3357714 - RNA, 20 nt, Human
caaggaaaaaauaacaauga

SEQ ID NO: 3357715 - RNA, 12 nt, Human
caaauauauuca

SEQ ID NO: 3357716 - RNA, 23 nt, Human
caaaaaaauauauuuaaugauaa

SEQ ID NO: 3357717 - RNA, 18 nt, Human
caaaaaaauauauuuaau

SEQ ID NO: 3357718 - RNA, 14 nt, Human
uuuaugccaccuga

SEQ ID NO: 3357719 - RNA, 14 nt, Human
uuuaugcauauuau

SEQ ID NO: 3357720 - RNA, 15 nt, Human
uuucacauaucuagu

SEQ ID NO: 3357721 - RNA, 18 nt, Human
uuuccacuccuccuagcc

SEQ ID NO: 3357722 - RNA, 19 nt, Human
uuuccacuccuccuagcca

SEQ ID NO: 3357723 - RNA, 20 nt, Human
uuuccuaaauauauuuuaag

SEQ ID NO: 3357724 - RNA, 22 nt, Human
uuucuaaaguaaaaacaaagaa

SEQ ID NO: 3357725 - RNA, 17 nt, Human
uuucuaaaguaaaaaca

SEQ ID NO: 3357726 - RNA, 14 nt, Human
uuucuaaaguaaaa

SEQ ID NO: 3357727 - RNA, 16 nt, Human
uuugagaguucuaaau

SEQ ID NO: 3357728 - RNA, 14 nt, Human
uuugagaguucuaa

SEQ ID NO: 3357729 - RNA, 13 nt, Human
uuugaguucuaca

SEQ ID NO: 3357730 - RNA, 12 nt, Human
uuugaguucuac

SEQ ID NO: 3357731 - RNA, 18 nt, Human
uuucuuaaccagaucauu

SEQ ID NO: 3357732 - RNA, 21 nt, Human
uuugaaauuguauuacaaauc

SEQ ID NO: 3357733 - RNA, 16 nt, Human
uuuaaaauugugaugu

SEQ ID NO: 3357734 - RNA, 12 nt, Human
uuuaaaaugucu

SEQ ID NO: 3357735 - RNA, 16 nt, Human
uuuaaaaugagaaauc

SEQ ID NO: 3357736 - RNA, 20 nt, Human
uuuaaaagauaaauauuaua

SEQ ID NO: 3357737 - RNA, 18 nt, Human
uuuaaaagaugcaaugua

SEQ ID NO: 3357738 - RNA, 15 nt, Human
uuguuuagaagaagu

SEQ ID NO: 3357739 - RNA, 18 nt, Human
uuguuuagaagaagugug

SEQ ID NO: 3357740 - RNA, 15 nt, Human
uuuaauaaacacucu

SEQ ID NO: 3357741 - RNA, 14 nt, Human
uuuaauaaacacuc

SEQ ID NO: 3357742 - RNA, 22 nt, Human
uuuaauaaacacucuugaaaaa

SEQ ID NO: 3357743 - RNA, 20 nt, Human
uuuacagaggacaguauuug

SEQ ID NO: 3357744 - RNA, 15 nt, Human
uuuauacaggucaua

SEQ ID NO: 3357745 - RNA, 18 nt, Human
uuuaguugcaacuuugua

SEQ ID NO: 3357746 - RNA, 17 nt, Human
uuuaguugcaacuuugu

SEQ ID NO: 3357747 - RNA, 16 nt, Human
uuguacgaagaguauu

SEQ ID NO: 3357748 - RNA, 14 nt, Human
uuguagcacugaca

SEQ ID NO: 3357749 - RNA, 16 nt, Human
uuguagcacugacaga

SEQ ID NO: 3357750 - RNA, 17 nt, Human
uuguagcacugacagau

SEQ ID NO: 3357751 - RNA, 18 nt, Human
uuguagcacugacagauu

SEQ ID NO: 3357752 - RNA, 22 nt, Human
uuguagcacugacagauuucca

SEQ ID NO: 3357753 - RNA, 18 nt, Human
uuguacuuuagggaagua

SEQ ID NO: 3357754 - RNA, 14 nt, Human
uugggaccccuggu

SEQ ID NO: 3357755 - RNA, 15 nt, Human
uugggaccccuggug

SEQ ID NO: 3357756 - RNA, 16 nt, Human
uugggaccccuggugg

SEQ ID NO: 3357757 - RNA, 20 nt, Human
uugggaccccuggugguuca

SEQ ID NO: 3357758 - RNA, 16 nt, Human
uuggcagcucuacucu

SEQ ID NO: 3357759 - RNA, 17 nt, Human
uugaauguuaagcagau

SEQ ID NO: 3357760 - RNA, 14 nt, Human
uugaauguuaagca

SEQ ID NO: 3357761 - RNA, 21 nt, Human
uugaaaaucuuauaauuuaaa

SEQ ID NO: 3357762 - RNA, 18 nt, Human
uugaaaauuaacaugaau

SEQ ID NO: 3357763 - RNA, 17 nt, Human
uugauccagaaagaaaa

SEQ ID NO: 3357764 - RNA, 20 nt, Human
uugcaguguggugagaucau

SEQ ID NO: 3357765 - RNA, 16 nt, Human
uugcauaacguauaaa

SEQ ID NO: 3357766 - RNA, 13 nt, Human
uuaugccaccuga

SEQ ID NO: 3357767 - RNA, 16 nt, Human
uuaugccaccugaaua

SEQ ID NO: 3357768 - RNA, 20 nt, Human
uuaucuugaauaauguaaga

SEQ ID NO: 3357769 - RNA, 13 nt, Human
uuaguugcaacuu

SEQ ID NO: 3357770 - RNA, 20 nt, Human
uuaguugcaacuuuguauaa

SEQ ID NO: 3357771 - RNA, 15 nt, Human
uuauugauaaguuca

SEQ ID NO: 3357772 - RNA, 19 nt, Human
uuauugauaaguucauaca

SEQ ID NO: 3357773 - RNA, 20 nt, Human
uuauugauaaguucauacau

SEQ ID NO: 3357774 - RNA, 22 nt, Human
uucagaguugaugguuguacau

SEQ ID NO: 3357775 - RNA, 21 nt, Human
uucagaguugaugguuguaca

SEQ ID NO: 3357776 - RNA, 20 nt, Human
uuauuuuauguugcauagaa

SEQ ID NO: 3357777 - RNA, 20 nt, Human
uuccuucugugaaaguacau

SEQ ID NO: 3357778 - RNA, 12 nt, Human
uucccugaggug

SEQ ID NO: 3357779 - RNA, 16 nt, Human
uucccugaaggaacca

SEQ ID NO: 3357780 - RNA, 12 nt, Human
uuccaaaauaau

SEQ ID NO: 3357781 - RNA, 19 nt, Human
uucaugcauagguuuagca

SEQ ID NO: 3357782 - RNA, 17 nt, Human
uucaugcaaacuuuauu

SEQ ID NO: 3357783 - RNA, 21 nt, Human
uuccaaaauaauuuuaagaaa

SEQ ID NO: 3357784 - RNA, 13 nt, Human
uuccaaaauaauu

SEQ ID NO: 3357785 - RNA, 16 nt, Human
uuccacuccuccuagc

SEQ ID NO: 3357786 - RNA, 18 nt, Human
uuccacuccuccuagcca

SEQ ID NO: 3357787 - RNA, 21 nt, Human
uuccacuccuccuagccaccc

SEQ ID NO: 3357788 - RNA, 14 nt, Human
uuaguguucauaaa

SEQ ID NO: 3357789 - RNA, 21 nt, Human
uuacuaggugcccagaaugag

SEQ ID NO: 3357790 - RNA, 19 nt, Human
uuacugucuuuuuucuaaa

SEQ ID NO: 3357791 - RNA, 17 nt, Human
uuacugucuuuuuucua

SEQ ID NO: 3357792 - RNA, 21 nt, Human
uuaagcagauggaaugcugug

SEQ ID NO: 3357793 - RNA, 12 nt, Human
uuaacucagucu

SEQ ID NO: 3357794 - RNA, 23 nt, Human
uuaaauguuuuuuuuuaaagacu

SEQ ID NO: 3357795 - RNA, 21 nt, Human
uuaaauguuuuuuuuuaaaga

SEQ ID NO: 3357796 - RNA, 17 nt, Human
uuaaugauaaguaaaug

SEQ ID NO: 3357797 - RNA, 21 nt, Human
uuaaugauaaguaaaugcuag

SEQ ID NO: 3357798 - RNA, 13 nt, Human
uuaauauauuucc

SEQ ID NO: 3357799 - RNA, 14 nt, Human
uuaauauauuucca

SEQ ID NO: 3357800 - RNA, 19 nt, Human
uguuuagaagaaguguguc

SEQ ID NO: 3357801 - RNA, 16 nt, Human
uguuuagaagaagugu

SEQ ID NO: 3357802 - RNA, 21 nt, Human
uuaaaagaugcaauguagagg

SEQ ID NO: 3357803 - RNA, 18 nt, Human
uuaaaagauaaauauuau

SEQ ID NO: 3357804 - RNA, 18 nt, Human
uguuuuuuuuuaaagacu

SEQ ID NO: 3357805 - RNA, 11 nt, Human
uuuguggggag

SEQ ID NO: 3357806 - RNA, 15 nt, Human
uaggcuagggugggg

SEQ ID NO: 3357807 - RNA, 16 nt, Human
uaggcuagggugggga

SEQ ID NO: 3357808 - RNA, 16 nt, Human
uaggucagugcaaaua

SEQ ID NO: 3357809 - RNA, 16 nt, Human
uagguaaauuacaguu

SEQ ID NO: 3357810 - RNA, 16 nt, Human
uaggaauuguguuuau

SEQ ID NO: 3357811 - RNA, 15 nt, Human
uaguaugaaauuaua

SEQ ID NO: 3357812 - RNA, 23 nt, Human
uaguaugaaauuauauaaguauu

SEQ ID NO: 3357813 - RNA, 13 nt, Human
uaguaugaaauua

SEQ ID NO: 3357814 - RNA, 20 nt, Human
uaguugcaacuuuguauaaa

SEQ ID NO: 3357815 - RNA, 15 nt, Human
uauaauucacauugu

SEQ ID NO: 3357816 - RNA, 18 nt, Human
uaucguaaaauuaagaaa

SEQ ID NO: 3357817 - RNA, 15 nt, Human
uaucguaaaauuaag

SEQ ID NO: 3357818 - RNA, 17 nt, Human
uauccuuucuaacaaaa

SEQ ID NO: 3357819 - RNA, 19 nt, Human
uaugacauaaaaacaacuu

SEQ ID NO: 3357820 - RNA, 22 nt, Human
uaugacauaaaaacaacuuuau

SEQ ID NO: 3357821 - RNA, 23 nt, Human
uaugacauaaaaacaacuuuaua

SEQ ID NO: 3357822 - RNA, 20 nt, Human
uaugaaguuuuuuuuauaca

SEQ ID NO: 3357823 - RNA, 17 nt, Human
uaucuguuuacaguguu

SEQ ID NO: 3357824 - RNA, 16 nt, Human
uaucuguuuacagugu

SEQ ID NO: 3357825 - RNA, 23 nt, Human
uaugagcuggggaugucucucau

SEQ ID NO: 3357826 - RNA, 12 nt, Human
uaugcuucauac

SEQ ID NO: 3357827 - RNA, 13 nt, Human
uaugcuucauaca

SEQ ID NO: 3357828 - RNA, 14 nt, Human
uaugcuucauacag

SEQ ID NO: 3357829 - RNA, 16 nt, Human
uaugcuucauacaggg

SEQ ID NO: 3357830 - RNA, 20 nt, Human
uaugcauauuauuuuauguu

SEQ ID NO: 3357831 - RNA, 17 nt, Human
uaugcuucauacaggga

SEQ ID NO: 3357832 - RNA, 12 nt, Human
ucacauuuaaau

SEQ ID NO: 3357833 - RNA, 22 nt, Human
ucacauuguauucagaguugau

SEQ ID NO: 3357834 - RNA, 15 nt, Human
ucaaagagagaaaau

SEQ ID NO: 3357835 - RNA, 20 nt, Human
ucaaagagagaaaauaaaga

SEQ ID NO: 3357836 - RNA, 22 nt, Human
uauuugaauguaugcuucauac

SEQ ID NO: 3357837 - RNA, 23 nt, Human
uauuugaauguaugcuucauaca

SEQ ID NO: 3357838 - RNA, 23 nt, Human
uauguguguguguuguguguggg

SEQ ID NO: 3357839 - RNA, 13 nt, Human
uauguguguuuua

SEQ ID NO: 3357840 - RNA, 14 nt, Human
uauggaggcaggag

SEQ ID NO: 3357841 - RNA, 17 nt, Human
uauuauauuuacaaaug

SEQ ID NO: 3357842 - RNA, 20 nt, Human
uauuauggaggcaggaguuu

SEQ ID NO: 3357843 - RNA, 12 nt, Human
uauuauguguuu

SEQ ID NO: 3357844 - RNA, 21 nt, Human
uauuugaauguaugcuucaua

SEQ ID NO: 3357845 - RNA, 23 nt, Human
uauugauaaguucauacauugua

SEQ ID NO: 3357846 - RNA, 14 nt, Human
uauugauaaguuca

SEQ ID NO: 3357847 - RNA, 16 nt, Human
uauugauaaguucaua

SEQ ID NO: 3357848 - RNA, 13 nt, Human
uccuacccccugu

SEQ ID NO: 3357849 - RNA, 15 nt, Human
uccuacccccugugc

SEQ ID NO: 3357850 - RNA, 16 nt, Human
uccuacccccugugcc

SEQ ID NO: 3357851 - RNA, 17 nt, Human
uccuacccccugugccu

SEQ ID NO: 3357852 - RNA, 15 nt, Human
uccugucucccuccu

SEQ ID NO: 3357853 - RNA, 23 nt, Human
uccugucucccuccucugcccgg

SEQ ID NO: 3357854 - RNA, 23 nt, Human
ucucauaauuuauacaggucaua

SEQ ID NO: 3357855 - RNA, 16 nt, Human
ucuacugggagccuac

SEQ ID NO: 3357856 - RNA, 19 nt, Human
ucuacugggagccuaccca

SEQ ID NO: 3357857 - RNA, 14 nt, Human
uccaaacaggcuca

SEQ ID NO: 3357858 - RNA, 16 nt, Human
uccaaaccaaauaaaa

SEQ ID NO: 3357859 - RNA, 20 nt, Human
uccaaaaagauuuucagaaa

SEQ ID NO: 3357860 - RNA, 22 nt, Human
uccaaaaagauuuucagaaaau

SEQ ID NO: 3357861 - RNA, 14 nt, Human
ucauggugcucaga

SEQ ID NO: 3357862 - RNA, 16 nt, Human
ucaucuccccaucauu

SEQ ID NO: 3357863 - RNA, 22 nt, Human
ucagucuuuaaucugagaggcc

SEQ ID NO: 3357864 - RNA, 15 nt, Human
ucaggccgaaggagg

SEQ ID NO: 3357865 - RNA, 15 nt, Human
ucaggagcccuggga

SEQ ID NO: 3357866 - RNA, 14 nt, Human
ucaggagcccuggg

SEQ ID NO: 3357867 - RNA, 12 nt, Human
ucaggagcccug

SEQ ID NO: 3357868 - RNA, 11 nt, Human
ucaggagcccu

SEQ ID NO: 3357869 - RNA, 19 nt, Human
uccagagucccugccugga

SEQ ID NO: 3357870 - RNA, 20 nt, Human
uccagagucccugccuggac

SEQ ID NO: 3357871 - RNA, 21 nt, Human
uccagagucccugccuggacc

SEQ ID NO: 3357872 - RNA, 15 nt, Human
uccagagucccugcc

SEQ ID NO: 3357873 - RNA, 18 nt, Human
uccagagucccugccugg

SEQ ID NO: 3357874 - RNA, 23 nt, Human
uccagaaagaaaacuuguauuau

SEQ ID NO: 3357875 - RNA, 14 nt, Human
uccagcaccacacu

SEQ ID NO: 3357876 - RNA, 19 nt, Human
ugagcuccuuaaggcucuu

SEQ ID NO: 3357877 - RNA, 21 nt, Human
ugagcuccuuaaggcucuuuu

SEQ ID NO: 3357878 - RNA, 23 nt, Human
ugagacguuuuuggaagaguagu

SEQ ID NO: 3357879 - RNA, 17 nt, Human
ugagaaauuuauaaacu

SEQ ID NO: 3357880 - RNA, 14 nt, Human
ugaggugggagaug

SEQ ID NO: 3357881 - RNA, 20 nt, Human
ugagcuggggaugucucuca

SEQ ID NO: 3357882 - RNA, 14 nt, Human
ugaggcaggucccc

SEQ ID NO: 3357883 - RNA, 16 nt, Human
ugaggcagguccccag

SEQ ID NO: 3357884 - RNA, 17 nt, Human
ugaggcagguccccaga

SEQ ID NO: 3357885 - RNA, 13 nt, Human
ugaggcagguccc

SEQ ID NO: 3357886 - RNA, 16 nt, Human
ugaggagcuugaaacc

SEQ ID NO: 3357887 - RNA, 22 nt, Human
ugaguucuacauaaguaauuca

SEQ ID NO: 3357888 - RNA, 13 nt, Human
ugauuauauguca

SEQ ID NO: 3357889 - RNA, 18 nt, Human
ugauguguuuauuuauag

SEQ ID NO: 3357890 - RNA, 14 nt, Human
ugauguguuuauuu

SEQ ID NO: 3357891 - RNA, 21 nt, Human
ugauguauucuagcuaaugua

SEQ ID NO: 3357892 - RNA, 14 nt, Human
ugaugguuguacau

SEQ ID NO: 3357893 - RNA, 13 nt, Human
ugaugguuguaca

SEQ ID NO: 3357894 - RNA, 20 nt, Human
ugaugcuacaggauuugaaa

SEQ ID NO: 3357895 - RNA, 11 nt, Human
ugaugccuggc

SEQ ID NO: 3357896 - RNA, 21 nt, Human
ugaacagcggcuggacuugga

SEQ ID NO: 3357897 - RNA, 22 nt, Human
ugaacagcggcuggacuuggag

SEQ ID NO: 3357898 - RNA, 15 nt, Human
ugaacagcggcugga

SEQ ID NO: 3357899 - RNA, 19 nt, Human
ugaaauggacuuuuguaca

SEQ ID NO: 3357900 - RNA, 12 nt, Human
ugaaauuauuca

SEQ ID NO: 3357901 - RNA, 17 nt, Human
ucuuucacauuuaaaua

SEQ ID NO: 3357902 - RNA, 12 nt, Human
ucuuugccaagu

SEQ ID NO: 3357903 - RNA, 21 nt, Human
ucuuuccacuccuccuagcca

SEQ ID NO: 3357904 - RNA, 22 nt, Human
ucuuuccacuccuccuagccac

SEQ ID NO: 3357905 - RNA, 16 nt, Human
ugaaggaaccaaagcg

SEQ ID NO: 3357906 - RNA, 23 nt, Human
ugaaucauuuuaccuuugacaaa

SEQ ID NO: 3357907 - RNA, 22 nt, Human
ugaaucauuuuaccuuugacaa

SEQ ID NO: 3357908 - RNA, 16 nt, Human
ugaauuauuuucucuc

SEQ ID NO: 3357909 - RNA, 17 nt, Human
ugacauacauccaacau

SEQ ID NO: 3357910 - RNA, 23 nt, Human
ugacauaaguauuuaauucaugu

SEQ ID NO: 3357911 - RNA, 16 nt, Human
ugacagaauauguuuc

SEQ ID NO: 3357912 - RNA, 22 nt, Human
ugacaacuucccagugaauucu

SEQ ID NO: 3357913 - RNA, 13 nt, Human
ugggcaggaggga

SEQ ID NO: 3357914 - RNA, 15 nt, Human
ugggcaggagggagg

SEQ ID NO: 3357915 - RNA, 16 nt, Human
ugggcaggagggaggu

SEQ ID NO: 3357916 - RNA, 18 nt, Human
ugggcaggagggaggugc

SEQ ID NO: 3357917 - RNA, 23 nt, Human
ugggccccugccucucugcaggu

SEQ ID NO: 3357918 - RNA, 21 nt, Human
ugggccccugccucucugcag

SEQ ID NO: 3357919 - RNA, 20 nt, Human
ugggccccugccucucugca

SEQ ID NO: 3357920 - RNA, 11 nt, Human
ugggagugugu

SEQ ID NO: 3357921 - RNA, 22 nt, Human
ugggagugaggaugucugggcc

SEQ ID NO: 3357922 - RNA, 20 nt, Human
uggggaguuuaggguggggg

SEQ ID NO: 3357923 - RNA, 16 nt, Human
uggggauagaugugug

SEQ ID NO: 3357924 - RNA, 17 nt, Human
uggggauagaugugugg

SEQ ID NO: 3357925 - RNA, 18 nt, Human
uggggauagaugugugga

SEQ ID NO: 3357926 - RNA, 20 nt, Human
uggggauagauguguggaca

SEQ ID NO: 3357927 - RNA, 20 nt, Human
uggggccaggcugggucgcc

SEQ ID NO: 3357928 - RNA, 22 nt, Human
uggggccaggcugggucgcccu

SEQ ID NO: 3357929 - RNA, 21 nt, Human
uggggccaggcugggucgccc

SEQ ID NO: 3357930 - RNA, 13 nt, Human
uggggggggugcu

SEQ ID NO: 3357931 - RNA, 14 nt, Human
ugggggucugugug

SEQ ID NO: 3357932 - RNA, 14 nt, Human
ugguccucacacuc

SEQ ID NO: 3357933 - RNA, 21 nt, Human
uggugaccuuccaagagccug

SEQ ID NO: 3357934 - RNA, 22 nt, Human
uggugaccuuccaagagccuga

SEQ ID NO: 3357935 - RNA, 15 nt, Human
uggaccagccucucc

SEQ ID NO: 3357936 - RNA, 15 nt, Human
uggaucugugagggg

SEQ ID NO: 3357937 - RNA, 19 nt, Human
uggaucugugaggggcucu

SEQ ID NO: 3357938 - RNA, 19 nt, Human
uggcaaacucuccaccaca

SEQ ID NO: 3357939 - RNA, 20 nt, Human
uggcuccauugguguugaca

SEQ ID NO: 3357940 - RNA, 15 nt, Human
uggcgggguggggug

SEQ ID NO: 3357941 - RNA, 18 nt, Human
ugcuguguuaaauaaacc

SEQ ID NO: 3357942 - RNA, 11 nt, Human
ugcuguguuaa

SEQ ID NO: 3357943 - RNA, 16 nt, Human
ugcuguuaucccugcc

SEQ ID NO: 3357944 - RNA, 13 nt, Human
ugcugguuuuagu

SEQ ID NO: 3357945 - RNA, 17 nt, Human
ugcugccugcuuuuuau

SEQ ID NO: 3357946 - RNA, 15 nt, Human
ugcugccugcuuuuu

SEQ ID NO: 3357947 - RNA, 14 nt, Human
ugcugggccccugc

SEQ ID NO: 3357948 - RNA, 24 nt, Human
ugcugggccccugccucucugcag

SEQ ID NO: 3357949 - RNA, 23 nt, Human
ugcugggccccugccucucugca

SEQ ID NO: 3357950 - RNA, 22 nt, Human
ugcugggccccugccucucugc

SEQ ID NO: 3357951 - RNA, 21 nt, Human
ugcugggccccugccucucug

SEQ ID NO: 3357952 - RNA, 19 nt, Human
ugcugggccccugccucuc

SEQ ID NO: 3357953 - RNA, 18 nt, Human
ugcugggccccugccucu

SEQ ID NO: 3357954 - RNA, 17 nt, Human
ugcugggccccugccuc

SEQ ID NO: 3357955 - RNA, 16 nt, Human
ugcugggccccugccu

SEQ ID NO: 3357956 - RNA, 15 nt, Human
ugcucaggagcccug

SEQ ID NO: 3357957 - RNA, 19 nt, Human
ugcucagugucuggcugca

SEQ ID NO: 3357958 - RNA, 20 nt, Human
ugcucaggagcccugggagg

SEQ ID NO: 3357959 - RNA, 19 nt, Human
ugcucaggagcccugggag

SEQ ID NO: 3357960 - RNA, 18 nt, Human
ugcucaggagcccuggga

SEQ ID NO: 3357961 - RNA, 17 nt, Human
ugcucuugaugccuggc

SEQ ID NO: 3357962 - RNA, 17 nt, Human
ugcuaagaauauuugaa

SEQ ID NO: 3357963 - RNA, 21 nt, Human
ugcuaagaauauuugaaugua

SEQ ID NO: 3357964 - RNA, 22 nt, Human
ugcuaagaauauuugaauguau

SEQ ID NO: 3357965 - RNA, 20 nt, Human
ugccuugcauaauggucaga

SEQ ID NO: 3357966 - RNA, 16 nt, Human
ugcauagguuuagcag

SEQ ID NO: 3357967 - RNA, 18 nt, Human
ugcauauuauuuuauguu

SEQ ID NO: 3357968 - RNA, 19 nt, Human
ugcccagaaugaggcugcu

SEQ ID NO: 3357969 - RNA, 16 nt, Human
guggcucgggaggcga

SEQ ID NO: 3357970 - RNA, 18 nt, Human
guggcucgggaggcgaag

SEQ ID NO: 3357971 - RNA, 14 nt, Human
guggcauccagagu

SEQ ID NO: 3357972 - RNA, 15 nt, Human
guggcaguuuggcaa

SEQ ID NO: 3357973 - RNA, 11 nt, Human
guggcagucug

SEQ ID NO: 3357974 - RNA, 21 nt, Human
gugcuucuaguucugccagga

SEQ ID NO: 3357975 - RNA, 22 nt, Human
gugcuucuaguucugccaggag

SEQ ID NO: 3357976 - RNA, 20 nt, Human
gugcuucuaguucugccagg

SEQ ID NO: 3357977 - RNA, 23 nt, Human
guggaaaagccaagaggcugcag

SEQ ID NO: 3357978 - RNA, 19 nt, Human
gugccuugucacgccagac

SEQ ID NO: 3357979 - RNA, 12 nt, Human
gugacucuuucc

SEQ ID NO: 3357980 - RNA, 19 nt, Human
gugaccuuccaagagccug

SEQ ID NO: 3357981 - RNA, 14 nt, Human
gugagcuacaaaug

SEQ ID NO: 3357982 - RNA, 17 nt, Human
gugaaaguacauuugga

SEQ ID NO: 3357983 - RNA, 13 nt, Human
gugaaaucauuca

SEQ ID NO: 3357984 - RNA, 20 nt, Human
gugaaauuauucauaauuau

SEQ ID NO: 3357985 - RNA, 18 nt, Human
gugaaauuauucauaauu

SEQ ID NO: 3357986 - RNA, 19 nt, Human
gugaaagaaaauaacaaua

SEQ ID NO: 3357987 - RNA, 12 nt, Human
gugaaaauuauu

SEQ ID NO: 3357988 - RNA, 15 nt, Human
gugaaaauuauuuug

SEQ ID NO: 3357989 - RNA, 17 nt, Human
gugauuuuuaugccacc

SEQ ID NO: 3357990 - RNA, 19 nt, Human
gugauuuuuaugccaccug

SEQ ID NO: 3357991 - RNA, 20 nt, Human
gugauuuuuaugccaccuga

SEQ ID NO: 3357992 - RNA, 16 nt, Human
gugauuuuuaugccac

SEQ ID NO: 3357993 - RNA, 15 nt, Human
gugaggaugucuggg

SEQ ID NO: 3357994 - RNA, 12 nt, Human
guccucagcccc

SEQ ID NO: 3357995 - RNA, 13 nt, Human
guccucacacuca

SEQ ID NO: 3357996 - RNA, 20 nt, Human
gucccugccuggaccagccu

SEQ ID NO: 3357997 - RNA, 21 nt, Human
gucccugccuggaccagccuc

SEQ ID NO: 3357998 - RNA, 14 nt, Human
gucccugccuggac

SEQ ID NO: 3357999 - RNA, 22 nt, Human
gucccugccuggaccagccucu

SEQ ID NO: 3358000 - RNA, 23 nt, Human
gucccugccuggaccagccucuc

SEQ ID NO: 3358001 - RNA, 23 nt, Human
gucuaagauaguaacaaugaaga

SEQ ID NO: 3358002 - RNA, 14 nt, Human
gucacgccagacuu

SEQ ID NO: 3358003 - RNA, 23 nt, Human
gucagcccaaaccaccagaagcc

SEQ ID NO: 3358004 - RNA, 22 nt, Human
gucagcccaaaccaccagaagc

SEQ ID NO: 3358005 - RNA, 20 nt, Human
gucccagaaugccuccugca

SEQ ID NO: 3358006 - RNA, 15 nt, Human
guauuauguguguuu

SEQ ID NO: 3358007 - RNA, 21 nt, Human
guauuugagaguucuaaauuu

SEQ ID NO: 3358008 - RNA, 19 nt, Human
guauuugagaguucuaaau

SEQ ID NO: 3358009 - RNA, 14 nt, Human
gggcgcggcuggga

SEQ ID NO: 3358010 - RNA, 18 nt, Human
ggggaguuuagggugggg

SEQ ID NO: 3358011 - RNA, 13 nt, Human
ggggauagaugug

SEQ ID NO: 3358012 - RNA, 19 nt, Human
gggcuucauacacaugaga

SEQ ID NO: 3358013 - RNA, 13 nt, Human
gggcuucauacac

SEQ ID NO: 3358014 - RNA, 23 nt, Human
ggggucuguguguuuaugugugu

SEQ ID NO: 3358015 - RNA, 20 nt, Human
ggugcccagaaugaggcugc

SEQ ID NO: 3358016 - RNA, 18 nt, Human
ggucccuaauaaagcugu

SEQ ID NO: 3358017 - RNA, 17 nt, Human
ggucccuaauaaagcug

SEQ ID NO: 3358018 - RNA, 16 nt, Human
ggucccuaauaaagcu

SEQ ID NO: 3358019 - RNA, 13 nt, Human
ggucccuaauaaa

SEQ ID NO: 3358020 - RNA, 12 nt, Human
ggucccuaauaa

SEQ ID NO: 3358021 - RNA, 19 nt, Human
gggugcugggccccugccu

SEQ ID NO: 3358022 - RNA, 18 nt, Human
gggugcugggccccugcc

SEQ ID NO: 3358023 - RNA, 19 nt, Human
ggguuccagcaccacacuc

SEQ ID NO: 3358024 - RNA, 23 nt, Human
ggucagcccaaaccaccagaagc

SEQ ID NO: 3358025 - RNA, 15 nt, Human
guacgaagaguauuu

SEQ ID NO: 3358026 - RNA, 23 nt, Human
guacuuuauuuucuauaauuuaa

SEQ ID NO: 3358027 - RNA, 22 nt, Human
guacuugcucuugaugccuggc

SEQ ID NO: 3358028 - RNA, 19 nt, Human
guacuugcucuugaugccu

SEQ ID NO: 3358029 - RNA, 18 nt, Human
guacuugcucuugaugcc

SEQ ID NO: 3358030 - RNA, 16 nt, Human
guacuugcucuugaug

SEQ ID NO: 3358031 - RNA, 15 nt, Human
guacuugcucuugau

SEQ ID NO: 3358032 - RNA, 14 nt, Human
guacuugcucuuga

SEQ ID NO: 3358033 - RNA, 14 nt, Human
guaauucaagaaaa

SEQ ID NO: 3358034 - RNA, 13 nt, Human
guaauucaagaaa

SEQ ID NO: 3358035 - RNA, 15 nt, Human
guaaugaaacuugga

SEQ ID NO: 3358036 - RNA, 16 nt, Human
guaaugaaacuuggau

SEQ ID NO: 3358037 - RNA, 13 nt, Human
guaaugaaaacca

SEQ ID NO: 3358038 - RNA, 11 nt, Human
guaaugaaaac

SEQ ID NO: 3358039 - RNA, 15 nt, Human
guacagacagaaaaa

SEQ ID NO: 3358040 - RNA, 19 nt, Human
gguugggagaaugucagua

SEQ ID NO: 3358041 - RNA, 20 nt, Human
guaaaaacaaagaaauuaug

SEQ ID NO: 3358042 - RNA, 18 nt, Human
guaaaaacaaagaaauua

SEQ ID NO: 3358043 - RNA, 17 nt, Human
guaaauaguauuugaga

SEQ ID NO: 3358044 - RNA, 16 nt, Human
guaaauaguauuugag

SEQ ID NO: 3358045 - RNA, 15 nt, Human
guaaauaguauuuga

SEQ ID NO: 3358046 - RNA, 16 nt, Human
guaaauaaaggaacca

SEQ ID NO: 3358047 - RNA, 22 nt, Human
gcuuuguggcacuggggcaggg

SEQ ID NO: 3358048 - RNA, 14 nt, Human
gcuuuguggcacug

SEQ ID NO: 3358049 - RNA, 20 nt, Human
ggaaaagccaagaggcugca

SEQ ID NO: 3358050 - RNA, 21 nt, Human
ggaaccaaagcgaauuuuaaa

SEQ ID NO: 3358051 - RNA, 22 nt, Human
ggaaccaaagcgaauuuuaaaa

SEQ ID NO: 3358052 - RNA, 11 nt, Human
gcuucauacag

SEQ ID NO: 3358053 - RNA, 11 nt, Human
gcuucauacac

SEQ ID NO: 3358054 - RNA, 22 nt, Human
gcuucauacagggaugguguuc

SEQ ID NO: 3358055 - RNA, 22 nt, Human
ggaaggaucccaugagcuccuu

SEQ ID NO: 3358056 - RNA, 23 nt, Human
ggaagggacaccaagccuuggcu

SEQ ID NO: 3358057 - RNA, 18 nt, Human
ggaagugcuaauuuugaa

SEQ ID NO: 3358058 - RNA, 14 nt, Human
ggaaugcuguguua

SEQ ID NO: 3358059 - RNA, 14 nt, Human
ggaauuauuuuaaa

SEQ ID NO: 3358060 - RNA, 15 nt, Human
ggaauuauuuuaaaa

SEQ ID NO: 3358061 - RNA, 16 nt, Human
ggaauuauuuuaaaag

SEQ ID NO: 3358062 - RNA, 17 nt, Human
ggaauuauuuuaaaaga

SEQ ID NO: 3358063 - RNA, 19 nt, Human
ggaauuuucaucuaggauu

SEQ ID NO: 3358064 - RNA, 23 nt, Human
ggaauuggguggggggcuucaua

SEQ ID NO: 3358065 - RNA, 12 nt, Human
ggaauuguguuu

SEQ ID NO: 3358066 - RNA, 22 nt, Human
ggagaaugucaguauguggaag

SEQ ID NO: 3358067 - RNA, 20 nt, Human
ggagauagccccacaggagg

SEQ ID NO: 3358068 - RNA, 21 nt, Human
ggagauagccccacaggaggu

SEQ ID NO: 3358069 - RNA, 20 nt, Human
ggccauucuuucccaacacc

SEQ ID NO: 3358070 - RNA, 12 nt, Human
ggcagcucagcu

SEQ ID NO: 3358071 - RNA, 17 nt, Human
ggauggaaugauggguc

SEQ ID NO: 3358072 - RNA, 16 nt, Human
ggaugcauggagauag

SEQ ID NO: 3358073 - RNA, 18 nt, Human
ggauugggccccugccag

SEQ ID NO: 3358074 - RNA, 17 nt, Human
ggauugggccccugcca

SEQ ID NO: 3358075 - RNA, 19 nt, Human
ggcaaucauggugcucaga

SEQ ID NO: 3358076 - RNA, 21 nt, Human
ggccuaaccugccgagagucc

SEQ ID NO: 3358077 - RNA, 22 nt, Human
ggccuaaccugccgagagucca

SEQ ID NO: 3358078 - RNA, 12 nt, Human
ggcccugugccu

SEQ ID NO: 3358079 - RNA, 16 nt, Human
ggcgcggcugggagga

SEQ ID NO: 3358080 - RNA, 14 nt, Human
ggccugggcaggag

SEQ ID NO: 3358081 - RNA, 11 nt, Human
ggccugugagc

SEQ ID NO: 3358082 - RNA, 13 nt, Human
ggccugggcagga

SEQ ID NO: 3358083 - RNA, 16 nt, Human
ggcuaggguggggaga

SEQ ID NO: 3358084 - RNA, 21 nt, Human
ggcuauggggauagaugugug

SEQ ID NO: 3358085 - RNA, 18 nt, Human
ggcuccaggccagggggc

SEQ ID NO: 3358086 - RNA, 14 nt, Human
ggcuccaggccagg

SEQ ID NO: 3358087 - RNA, 16 nt, Human
ggcuccaggccagggg

SEQ ID NO: 3358088 - RNA, 21 nt, Human
gcucagaggguguccugcacc

SEQ ID NO: 3358089 - RNA, 22 nt, Human
gcucagugucuggcugcagagc

SEQ ID NO: 3358090 - RNA, 23 nt, Human
gccugugagcuaggaauuguguu

SEQ ID NO: 3358091 - RNA, 14 nt, Human
gcucuugaugccug

SEQ ID NO: 3358092 - RNA, 16 nt, Human
gcucuugaugccuggc

SEQ ID NO: 3358093 - RNA, 15 nt, Human
gcucuugaugccugg

SEQ ID NO: 3358094 - RNA, 23 nt, Human
gcccuggugguggcucgggaggc

SEQ ID NO: 3358095 - RNA, 16 nt, Human
gcccugggaggcucug

SEQ ID NO: 3358096 - RNA, 15 nt, Human
gcccugggaggcucu

SEQ ID NO: 3358097 - RNA, 14 nt, Human
gcccugggaggcuc

SEQ ID NO: 3358098 - RNA, 13 nt, Human
gcccugggaggcu

SEQ ID NO: 3358099 - RNA, 23 nt, Human
gcccugggaggcucuggagccca

SEQ ID NO: 3358100 - RNA, 21 nt, Human
gcccugggaggcucuggagcc

SEQ ID NO: 3358101 - RNA, 19 nt, Human
gcccugggaggcucuggag

SEQ ID NO: 3358102 - RNA, 18 nt, Human
gcccugggaggcucugga

SEQ ID NO: 3358103 - RNA, 17 nt, Human
gcccugggaggcucugg

SEQ ID NO: 3358104 - RNA, 12 nt, Human
gcccuggacugu

SEQ ID NO: 3358105 - RNA, 22 nt, Human
gcccuggacugugugcucagga

SEQ ID NO: 3358106 - RNA, 16 nt, Human
gcccuggacugugugc

SEQ ID NO: 3358107 - RNA, 16 nt, Human
gcccugaguuccuagc

SEQ ID NO: 3358108 - RNA, 18 nt, Human
gcccugaguuccuagcca

SEQ ID NO: 3358109 - RNA, 19 nt, Human
gccucucugcaggucccua

SEQ ID NO: 3358110 - RNA, 12 nt, Human
gccugcagagcu

SEQ ID NO: 3358111 - RNA, 15 nt, Human
gccugcaauuucaua

SEQ ID NO: 3358112 - RNA, 19 nt, Human
gccugcuuuuuauggccug

SEQ ID NO: 3358113 - RNA, 18 nt, Human
gccugcuuuuuauggccu

SEQ ID NO: 3358114 - RNA, 18 nt, Human
gccucucugcaggucccu

SEQ ID NO: 3358115 - RNA, 21 nt, Human
gccucucugcaggucccuaau

SEQ ID NO: 3358116 - RNA, 20 nt, Human
gccucucugcaggucccuaa

SEQ ID NO: 3358117 - RNA, 23 nt, Human
gccuggccagcagguccccagcu

SEQ ID NO: 3358118 - RNA, 18 nt, Human
gagaucccaacacugcca

SEQ ID NO: 3358119 - RNA, 19 nt, Human
gagaucccaacacugccag

SEQ ID NO: 3358120 - RNA, 20 nt, Human
gagaucccaacacugccagc

SEQ ID NO: 3358121 - RNA, 13 nt, Human
gagcaaagcugau

SEQ ID NO: 3358122 - RNA, 18 nt, Human
gagaugaugaaaauauuu

SEQ ID NO: 3358123 - RNA, 23 nt, Human
gagcccacuguacuugcucuuga

SEQ ID NO: 3358124 - RNA, 13 nt, Human
gagagacgggccc

SEQ ID NO: 3358125 - RNA, 15 nt, Human
gagaguagaacagau

SEQ ID NO: 3358126 - RNA, 17 nt, Human
gagaaugucaguaugug

SEQ ID NO: 3358127 - RNA, 21 nt, Human
gagaaaugaaaaaauauauau

SEQ ID NO: 3358128 - RNA, 12 nt, Human
gagaaaugaaaa

SEQ ID NO: 3358129 - RNA, 19 nt, Human
gacucuaccucauaucagu

SEQ ID NO: 3358130 - RNA, 23 nt, Human
gacucuaccucauaucaguuugc

SEQ ID NO: 3358131 - RNA, 14 nt, Human
gaccagccucucca

SEQ ID NO: 3358132 - RNA, 18 nt, Human
gaauucuugaaggaaaau

SEQ ID NO: 3358133 - RNA, 15 nt, Human
gaauguuaagcagau

SEQ ID NO: 3358134 - RNA, 16 nt, Human
gaaugucaguaugugg

SEQ ID NO: 3358135 - RNA, 18 nt, Human
gaaugucaguauguggaa

SEQ ID NO: 3358136 - RNA, 13 nt, Human
gaaugucaguaug

SEQ ID NO: 3358137 - RNA, 19 nt, Human
gaaugucaguauguggaag

SEQ ID NO: 3358138 - RNA, 14 nt, Human
gaauguuaagcaga

SEQ ID NO: 3358139 - RNA, 18 nt, Human
gaaucucauaauuuauac

SEQ ID NO: 3358140 - RNA, 19 nt, Human
gaaucucauaauuuauaca

SEQ ID NO: 3358141 - RNA, 16 nt, Human
gaaugaaauugcugaa

SEQ ID NO: 3358142 - RNA, 13 nt, Human
gaaugcuguguua

SEQ ID NO: 3358143 - RNA, 14 nt, Human
gaaugcuguguuaa

SEQ ID NO: 3358144 - RNA, 13 nt, Human
gacacaacuauuu

SEQ ID NO: 3358145 - RNA, 16 nt, Human
gacaaggaaaaaauaa

SEQ ID NO: 3358146 - RNA, 22 nt, Human
gaauuggguggggggcuucaua

SEQ ID NO: 3358147 - RNA, 23 nt, Human
gaauuggguggggggcuucauac

SEQ ID NO: 3358148 - RNA, 20 nt, Human
gaauuggguggggggcuuca

SEQ ID NO: 3358149 - RNA, 21 nt, Human
gagucccugccuggaccagcc

SEQ ID NO: 3358150 - RNA, 23 nt, Human
gagucccugccuggaccagccuc

SEQ ID NO: 3358151 - RNA, 19 nt, Human
gagucccugccuggaccag

SEQ ID NO: 3358152 - RNA, 22 nt, Human
gaguaauccaagcaaaugugaa

SEQ ID NO: 3358153 - RNA, 13 nt, Human
gagguugcagugu

SEQ ID NO: 3358154 - RNA, 14 nt, Human
gauagaugugugga

SEQ ID NO: 3358155 - RNA, 22 nt, Human
gauagauguguggacacauugg

SEQ ID NO: 3358156 - RNA, 13 nt, Human
gauagaugugugg

SEQ ID NO: 3358157 - RNA, 15 nt, Human
gauauaagugugugu

SEQ ID NO: 3358158 - RNA, 13 nt, Human
gaguguguaauuu

SEQ ID NO: 3358159 - RNA, 18 nt, Human
gaguguacuuaacuauuc

SEQ ID NO: 3358160 - RNA, 14 nt, Human
gagggggagagggc

SEQ ID NO: 3358161 - RNA, 13 nt, Human
gaggguguccugc

SEQ ID NO: 3358162 - RNA, 21 nt, Human
gagguagcuuugagguggaag

SEQ ID NO: 3358163 - RNA, 23 nt, Human
gagggucuugguuccagccugcc

SEQ ID NO: 3358164 - RNA, 14 nt, Human
gaggcagggaagga

SEQ ID NO: 3358165 - RNA, 21 nt, Human
gaggcgaagcguuguccucag

SEQ ID NO: 3358166 - RNA, 21 nt, Human
gaggcgcaugaauuugugaag

SEQ ID NO: 3358167 - RNA, 20 nt, Human
gaggcgaagcguuguccuca

SEQ ID NO: 3358168 - RNA, 22 nt, Human
gaggccucucauuccagaggaa

SEQ ID NO: 3358169 - RNA, 15 nt, Human
gcacuggggcagggg

SEQ ID NO: 3358170 - RNA, 18 nt, Human
gcacuggggcaggggccg

SEQ ID NO: 3358171 - RNA, 23 nt, Human
gcacuggggcaggggccgggggc

SEQ ID NO: 3358172 - RNA, 22 nt, Human
gcaccccagcuggggccaggcu

SEQ ID NO: 3358173 - RNA, 14 nt, Human
gcaauuucauaugc

SEQ ID NO: 3358174 - RNA, 22 nt, Human
gcaauguagaggggaaaagaga

SEQ ID NO: 3358175 - RNA, 23 nt, Human
gcacaaauucugucucuggauua

SEQ ID NO: 3358176 - RNA, 16 nt, Human
gauguuuaguaaucau

SEQ ID NO: 3358177 - RNA, 24 nt, Human
gaugguguucaaaaaacuuguaaa

SEQ ID NO: 3358178 - RNA, 15 nt, Human
gaugggucaguugua

SEQ ID NO: 3358179 - RNA, 21 nt, Human
gaugggucaguuguaucagca

SEQ ID NO: 3358180 - RNA, 17 nt, Human
gauugggccccugccag

SEQ ID NO: 3358181 - RNA, 15 nt, Human
gauugggccccugcc

SEQ ID NO: 3358182 - RNA, 23 nt, Human
gauugcaggagucccugccauca

SEQ ID NO: 3358183 - RNA, 21 nt, Human
gcaaagcugaugacaacuucc

SEQ ID NO: 3358184 - RNA, 23 nt, Human
gcaaaugugaaucauuuuaccuu

SEQ ID NO: 3358185 - RNA, 16 nt, Human
cuugucacgccagacu

SEQ ID NO: 3358186 - RNA, 13 nt, Human
cuugucacgccag

SEQ ID NO: 3358187 - RNA, 19 nt, Human
cuugaguuuaaauuguaau

SEQ ID NO: 3358188 - RNA, 21 nt, Human
cuuuaucaaagggugaaaauu

SEQ ID NO: 3358189 - RNA, 22 nt, Human
cuuuaucaaagggugaaaauua

SEQ ID NO: 3358190 - RNA, 23 nt, Human
cuuuaucuugaauaauguaagac

SEQ ID NO: 3358191 - RNA, 21 nt, Human
cuuuaucuugaauaauguaag

SEQ ID NO: 3358192 - RNA, 18 nt, Human
cuuuaucuugaauaaugu

SEQ ID NO: 3358193 - RNA, 22 nt, Human
cuuucuuccaaacaggcucaga

SEQ ID NO: 3358194 - RNA, 16 nt, Human
cuuucugcuuguguua

SEQ ID NO: 3358195 - RNA, 19 nt, Human
cuuuggcuaugagggccuu

SEQ ID NO: 3358196 - RNA, 14 nt, Human
cuuuguggcacugg

SEQ ID NO: 3358197 - RNA, 17 nt, Human
cuuuuuauggccuguga

SEQ ID NO: 3358198 - RNA, 20 nt, Human
gaaaaucuuauaauuuaaaa

SEQ ID NO: 3358199 - RNA, 21 nt, Human
gaaaauauuauguguuuccau

SEQ ID NO: 3358200 - RNA, 17 nt, Human
gaaaauauuauguguuu

SEQ ID NO: 3358201 - RNA, 13 nt, Human
gaaaauauuuaaa

SEQ ID NO: 3358202 - RNA, 21 nt, Human
gaaagaguacucuuguuuccu

SEQ ID NO: 3358203 - RNA, 20 nt, Human
gaaaaugauacgcaacauaa

SEQ ID NO: 3358204 - RNA, 14 nt, Human
cuucugugaaagua

SEQ ID NO: 3358205 - RNA, 18 nt, Human
cuugaaaaaugcauguug

SEQ ID NO: 3358206 - RNA, 12 nt, Human
cuugaaaaaugc

SEQ ID NO: 3358207 - RNA, 13 nt, Human
cuugaaaauuaac

SEQ ID NO: 3358208 - RNA, 12 nt, Human
cuugaaaauuaa

SEQ ID NO: 3358209 - RNA, 18 nt, Human
cuugaaaauuaacaugaa

SEQ ID NO: 3358210 - RNA, 18 nt, Human
cuucuggugaccuuccaa

SEQ ID NO: 3358211 - RNA, 20 nt, Human
cuucuggugaccuuccaaga

SEQ ID NO: 3358212 - RNA, 21 nt, Human
cuucuggugaccuuccaagag

SEQ ID NO: 3358213 - RNA, 13 nt, Human
cuuauauuaugga

SEQ ID NO: 3358214 - RNA, 21 nt, Human
cugucucccuccucugcccgg

SEQ ID NO: 3358215 - RNA, 19 nt, Human
cugugaggggcucucucau

SEQ ID NO: 3358216 - RNA, 21 nt, Human
cuguguguguguauguggggg

SEQ ID NO: 3358217 - RNA, 16 nt, Human
cuguguguuuaugugu

SEQ ID NO: 3358218 - RNA, 17 nt, Human
cuguguguuuaugugug

SEQ ID NO: 3358219 - RNA, 21 nt, Human
cugugugcucaggagcccugg

SEQ ID NO: 3358220 - RNA, 20 nt, Human
cugugugcucaggagcccug

SEQ ID NO: 3358221 - RNA, 16 nt, Human
cugugugcucaggagc

SEQ ID NO: 3358222 - RNA, 19 nt, Human
cugugugcucaggagcccu

SEQ ID NO: 3358223 - RNA, 23 nt, Human
cugugugcucaggagcccuggga

SEQ ID NO: 3358224 - RNA, 15 nt, Human
cuguguggcagucug

SEQ ID NO: 3358225 - RNA, 23 nt, Human
cugccgagaguccaucagccucc

SEQ ID NO: 3358226 - RNA, 22 nt, Human
cugccgagaguccaucagccuc

SEQ ID NO: 3358227 - RNA, 22 nt, Human
cugccucucugcaggucccuaa

SEQ ID NO: 3358228 - RNA, 21 nt, Human
cugccucucugcaggucccua

SEQ ID NO: 3358229 - RNA, 20 nt, Human
cugccucucugcaggucccu

SEQ ID NO: 3358230 - RNA, 19 nt, Human
cugccucucugcagguccc

SEQ ID NO: 3358231 - RNA, 11 nt, Human
cugcugggcuu

SEQ ID NO: 3358232 - RNA, 14 nt, Human
cuggaccagccucu

SEQ ID NO: 3358233 - RNA, 18 nt, Human
cuggaccagccucuccac

SEQ ID NO: 3358234 - RNA, 13 nt, Human
cuggaauuugaaa

SEQ ID NO: 3358235 - RNA, 12 nt, Human
cuggagguuugu

SEQ ID NO: 3358236 - RNA, 17 nt, Human
cuggagguuuguuuaga

SEQ ID NO: 3358237 - RNA, 23 nt, Human
cuggcugcagagcagugggccug

SEQ ID NO: 3358238 - RNA, 21 nt, Human
cuggccaguggcuggaucugu

SEQ ID NO: 3358239 - RNA, 23 nt, Human
ccguggcuguggcauccagaguc

SEQ ID NO: 3358240 - RNA, 12 nt, Human
ccuaaccugccg

SEQ ID NO: 3358241 - RNA, 13 nt, Human
ccuaaccugccga

SEQ ID NO: 3358242 - RNA, 20 nt, Human
ccgagaguccaucagccucc

SEQ ID NO: 3358243 - RNA, 21 nt, Human
ccgagaguccaucagccucca

SEQ ID NO: 3358244 - RNA, 21 nt, Human
ccgggggcagucugagagagg

SEQ ID NO: 3358245 - RNA, 20 nt, Human
ccggggccugggcaggaggg

SEQ ID NO: 3358246 - RNA, 19 nt, Human
ccggggccugggcaggagg

SEQ ID NO: 3358247 - RNA, 17 nt, Human
ccgccuccuacagccca

SEQ ID NO: 3358248 - RNA, 21 nt, Human
cccugaggcagguccccagac

SEQ ID NO: 3358249 - RNA, 18 nt, Human
cccugaggcaggucccca

SEQ ID NO: 3358250 - RNA, 20 nt, Human
cccugaggcagguccccaga

SEQ ID NO: 3358251 - RNA, 17 nt, Human
cccugaggcaggucccc

SEQ ID NO: 3358252 - RNA, 14 nt, Human
cccugccucucugc

SEQ ID NO: 3358253 - RNA, 13 nt, Human
cccugccucucug

SEQ ID NO: 3358254 - RNA, 15 nt, Human
cccugccucucugca

SEQ ID NO: 3358255 - RNA, 14 nt, Human
cccaugagcuccuu

SEQ ID NO: 3358256 - RNA, 15 nt, Human
cccaugagcuccuua

SEQ ID NO: 3358257 - RNA, 22 nt, Human
cccaugagcuccuuaaggcucu

SEQ ID NO: 3358258 - RNA, 13 nt, Human
cccaugagcuccu

SEQ ID NO: 3358259 - RNA, 17 nt, Human
cccagaaugaggcugcu

SEQ ID NO: 3358260 - RNA, 14 nt, Human
ccccugugccuugu

SEQ ID NO: 3358261 - RNA, 20 nt, Human
ccccuggcuccaggccaggg

SEQ ID NO: 3358262 - RNA, 12 nt, Human
ccccuggugguu

SEQ ID NO: 3358263 - RNA, 19 nt, Human
ccccugccucucugcaggu

SEQ ID NO: 3358264 - RNA, 17 nt, Human
ccccugccucucugcag

SEQ ID NO: 3358265 - RNA, 16 nt, Human
ccccugccucucugca

SEQ ID NO: 3358266 - RNA, 15 nt, Human
ccccugccucucugc

SEQ ID NO: 3358267 - RNA, 14 nt, Human
ccccugccucucug

SEQ ID NO: 3358268 - RNA, 13 nt, Human
ccccuccaccugc

SEQ ID NO: 3358269 - RNA, 17 nt, Human
ccccaucauugguaccc

SEQ ID NO: 3358270 - RNA, 15 nt, Human
cccaacacugccagc

SEQ ID NO: 3358271 - RNA, 16 nt, Human
cccaacacugccagca

SEQ ID NO: 3358272 - RNA, 14 nt, Human
cccaacacugccag

SEQ ID NO: 3358273 - RNA, 15 nt, Human
cccacgucagcuggg

SEQ ID NO: 3358274 - RNA, 15 nt, Human
cccacggcuccucga

SEQ ID NO: 3358275 - RNA, 24 nt, Human
cccagaauaaacuggcagcucagc

SEQ ID NO: 3358276 - RNA, 22 nt, Human
cccagaauaaacuggcagcuca

SEQ ID NO: 3358277 - RNA, 16 nt, Human
cccagaaugaggcugc

SEQ ID NO: 3358278 - RNA, 23 nt, Human
ccagugaauucuugaaggaaaau

SEQ ID NO: 3358279 - RNA, 23 nt, Human
ccaggccacuggccccugagauc

SEQ ID NO: 3358280 - RNA, 16 nt, Human
ccaggccacuggcccc

SEQ ID NO: 3358281 - RNA, 16 nt, Human
ccaggcugggucgccc

SEQ ID NO: 3358282 - RNA, 12 nt, Human
ccaggcuggguc

SEQ ID NO: 3358283 - RNA, 24 nt, Human
ccaggcugggucgcccuggacugu

SEQ ID NO: 3358284 - RNA, 23 nt, Human
ccaggcugggucgcccuggacug

SEQ ID NO: 3358285 - RNA, 22 nt, Human
ccaggcugggucgcccuggacu

SEQ ID NO: 3358286 - RNA, 21 nt, Human
ccaggcugggucgcccuggac

SEQ ID NO: 3358287 - RNA, 22 nt, Human
ccagaauaaacuggcagcucag

SEQ ID NO: 3358288 - RNA, 15 nt, Human
ccagaaugaggcugc

SEQ ID NO: 3358289 - RNA, 15 nt, Human
ccagaagcccagaau

SEQ ID NO: 3358290 - RNA, 18 nt, Human
ccagaaaccuuuguuugc

SEQ ID NO: 3358291 - RNA, 16 nt, Human
ccacccccaggacccc

SEQ ID NO: 3358292 - RNA, 18 nt, Human
ccacccccaggaccccug

SEQ ID NO: 3358293 - RNA, 19 nt, Human
ccacccccaggaccccuga

SEQ ID NO: 3358294 - RNA, 10 nt, Human
ccagccugcc

SEQ ID NO: 3358295 - RNA, 14 nt, Human
ccagcccugaguuc

SEQ ID NO: 3358296 - RNA, 18 nt, Human
ccagcccugaguuccuag

SEQ ID NO: 3358297 - RNA, 11 nt, Human
cgcggcuggga

SEQ ID NO: 3358298 - RNA, 12 nt, Human
cgcggcugggag

SEQ ID NO: 3358299 - RNA, 16 nt, Human
cgcggcugggaggagg

SEQ ID NO: 3358300 - RNA, 18 nt, Human
cgggacaccuaggcuagg

SEQ ID NO: 3358301 - RNA, 19 nt, Human
cgggacaccuaggcuaggg

SEQ ID NO: 3358302 - RNA, 20 nt, Human
cgggaauuuucaucuaggau

SEQ ID NO: 3358303 - RNA, 18 nt, Human
cgggaauuuucaucuagg

SEQ ID NO: 3358304 - RNA, 15 nt, Human
cgaagcguuguccuc

SEQ ID NO: 3358305 - RNA, 16 nt, Human
cgaagcguuguccuca

SEQ ID NO: 3358306 - RNA, 17 nt, Human
cgaagcguuguccucag

SEQ ID NO: 3358307 - RNA, 21 nt, Human
cgaagcguuguccucagcccc

SEQ ID NO: 3358308 - RNA, 23 nt, Human
cgaagaguauuuuugacagaaua

SEQ ID NO: 3358309 - RNA, 18 nt, Human
cgagacuugguuucaaaa

SEQ ID NO: 3358310 - RNA, 14 nt, Human
ccuuugucccagaa

SEQ ID NO: 3358311 - RNA, 17 nt, Human
ccugugccuuuugccau

SEQ ID NO: 3358312 - RNA, 18 nt, Human
ccuguggaucaaauccag

SEQ ID NO: 3358313 - RNA, 17 nt, Human
ccugcaccggggccugg

SEQ ID NO: 3358314 - RNA, 15 nt, Human
ccugcaccggggccu

SEQ ID NO: 3358315 - RNA, 19 nt, Human
ccugaagagaagggcaggg

SEQ ID NO: 3358316 - RNA, 22 nt, Human
ccuaucuguuuacaguguuccg

SEQ ID NO: 3358317 - RNA, 15 nt, Human
ccucuuccaggcccc

SEQ ID NO: 3358318 - RNA, 22 nt, Human
ccugccgagaguccaucagccu

SEQ ID NO: 3358319 - RNA, 23 nt, Human
ccugccgagaguccaucagccuc

SEQ ID NO: 3358320 - RNA, 14 nt, Human
ccugccgagagucc

SEQ ID NO: 3358321 - RNA, 20 nt, Human
ccugguccucacacucaccc

SEQ ID NO: 3358322 - RNA, 17 nt, Human
cucagccccgcguggaa

SEQ ID NO: 3358323 - RNA, 16 nt, Human
cucagaggguguccug

SEQ ID NO: 3358324 - RNA, 20 nt, Human
cucacugcuaagaauauuug

SEQ ID NO: 3358325 - RNA, 21 nt, Human
cucacugcuaagaauauuuga

SEQ ID NO: 3358326 - RNA, 22 nt, Human
cucacugcuaagaauauuugaa

SEQ ID NO: 3358327 - RNA, 23 nt, Human
cucacugcuaagaauauuugaau

SEQ ID NO: 3358328 - RNA, 18 nt, Human
cucaggaaccgaggcagg

SEQ ID NO: 3358329 - RNA, 19 nt, Human
cucaggaaccgaggcaggg

SEQ ID NO: 3358330 - RNA, 17 nt, Human
cucaggaaccgaggcag

SEQ ID NO: 3358331 - RNA, 13 nt, Human
cucaggagcccug

SEQ ID NO: 3358332 - RNA, 12 nt, Human
cucaggagcccu

SEQ ID NO: 3358333 - RNA, 23 nt, Human
cucaggagcccugggaggcucug

SEQ ID NO: 3358334 - RNA, 22 nt, Human
cucaggagcccugggaggcucu

SEQ ID NO: 3358335 - RNA, 21 nt, Human
cucaggagcccugggaggcuc

SEQ ID NO: 3358336 - RNA, 20 nt, Human
cucaggagcccugggaggcu

SEQ ID NO: 3358337 - RNA, 17 nt, Human
cucaggagcccugggag

SEQ ID NO: 3358338 - RNA, 16 nt, Human
cucaggagcccuggga

SEQ ID NO: 3358339 - RNA, 15 nt, Human
cucaggagcccuggg

SEQ ID NO: 3358340 - RNA, 14 nt, Human
cucaggagcccugg

SEQ ID NO: 3358341 - RNA, 24 nt, Human
cucaggagcccugggaggcucugg

SEQ ID NO: 3358342 - RNA, 20 nt, Human
cuccccacgucagcugggac

SEQ ID NO: 3358343 - RNA, 22 nt, Human
cuccacucaugugacucuuucc

SEQ ID NO: 3358344 - RNA, 16 nt, Human
cuccacucaugugacu

SEQ ID NO: 3358345 - RNA, 14 nt, Human
cuccacucuccucu

SEQ ID NO: 3358346 - RNA, 16 nt, Human
cucaguucucuucacu

SEQ ID NO: 3358347 - RNA, 17 nt, Human
cucaguucucuucacuc

SEQ ID NO: 3358348 - RNA, 21 nt, Human
cuauucaggagaguagaacag

SEQ ID NO: 3358349 - RNA, 19 nt, Human
cuauggggauagaugugug

SEQ ID NO: 3358350 - RNA, 20 nt, Human
cuauggggauagaugugugg

SEQ ID NO: 3358351 - RNA, 21 nt, Human
cuauggggauagaugugugga

SEQ ID NO: 3358352 - RNA, 22 nt, Human
cuaugaaguuuuuuuuauacag

SEQ ID NO: 3358353 - RNA, 12 nt, Human
cuauaauuuaaa

SEQ ID NO: 3358354 - RNA, 13 nt, Human
cucacacucaccc

SEQ ID NO: 3358355 - RNA, 22 nt, Human
cuacucuggagguuuguuuaga

SEQ ID NO: 3358356 - RNA, 18 nt, Human
cuacugggagccuaccca

SEQ ID NO: 3358357 - RNA, 14 nt, Human
cuacugggagccua

SEQ ID NO: 3358358 - RNA, 15 nt, Human
cuacugggagccuac

SEQ ID NO: 3358359 - RNA, 22 nt, Human
cuagcuaauguaauaacuguga

SEQ ID NO: 3358360 - RNA, 20 nt, Human
cuaaauuuuauaucuuguag

SEQ ID NO: 3358361 - RNA, 15 nt, Human
cuaaauuuuauaucu

SEQ ID NO: 3358362 - RNA, 16 nt, Human
cuaaauuuuauaucuu

SEQ ID NO: 3358363 - RNA, 13 nt, Human
cuaaauuuuauau

SEQ ID NO: 3358364 - RNA, 16 nt, Human
cuaagauaguaacaau

SEQ ID NO: 3358365 - RNA, 22 nt, Human
cgggaggcagagguugcagugu

SEQ ID NO: 3358366 - RNA, 20 nt, Human
cgggaggcagagguugcagu

SEQ ID NO: 3358367 - RNA, 21 nt, Human
cuaagcuucacuguaaaauaa

SEQ ID NO: 3358368 - RNA, 14 nt, Human
cuaauaaagcugug

SEQ ID NO: 3358369 - RNA, 18 nt, Human
cuaauaaucauuggauuc

SEQ ID NO: 3358370 - RNA, 23 nt, Human
cuacacgagauacagaauuuuau

SEQ ID NO: 3358371 - RNA, 19 nt, Human
accggggccugggcaggag

SEQ ID NO: 3358372 - RNA, 22 nt, Human
acuaggugcccagaaugaggcu

SEQ ID NO: 3358373 - RNA, 15 nt, Human
acuuuauuuuguguu

SEQ ID NO: 3358374 - RNA, 14 nt, Human
acugauuacugccu

SEQ ID NO: 3358375 - RNA, 12 nt, Human
acaaagaaauua

SEQ ID NO: 3358376 - RNA, 16 nt, Human
acaaagaaauuaugug

SEQ ID NO: 3358377 - RNA, 14 nt, Human
acaaagaaauuaug

SEQ ID NO: 3358378 - RNA, 18 nt, Human
aauuuucaucuaggauuu

SEQ ID NO: 3358379 - RNA, 14 nt, Human
aauugugauguguc

SEQ ID NO: 3358380 - RNA, 15 nt, Human
aauugugaugugucc

SEQ ID NO: 3358381 - RNA, 11 nt, Human
aauugugaugu

SEQ ID NO: 3358382 - RNA, 21 nt, Human
aauuggguggggggcuucaua

SEQ ID NO: 3358383 - RNA, 22 nt, Human
aauuggguggggggcuucauac

SEQ ID NO: 3358384 - RNA, 23 nt, Human
aauuggguggggggcuucauaca

SEQ ID NO: 3358385 - RNA, 23 nt, Human
acagaggacaguauuugugggga

SEQ ID NO: 3358386 - RNA, 20 nt, Human
acacugggagaaaugaaaaa

SEQ ID NO: 3358387 - RNA, 20 nt, Human
acacguaaugaaacuuggau

SEQ ID NO: 3358388 - RNA, 19 nt, Human
acauaauuaaauuuugagu

SEQ ID NO: 3358389 - RNA, 15 nt, Human
acauaaguaauucaa

SEQ ID NO: 3358390 - RNA, 17 nt, Human
acauuuccuaaauauau

SEQ ID NO: 3358391 - RNA, 16 nt, Human
acauuuccuaaauaua

SEQ ID NO: 3358392 - RNA, 14 nt, Human
accaucucuuuacc

SEQ ID NO: 3358393 - RNA, 13 nt, Human
aagggagggggag

SEQ ID NO: 3358394 - RNA, 17 nt, Human
aagggacugagaaauuu

SEQ ID NO: 3358395 - RNA, 15 nt, Human
aagggacugagaaau

SEQ ID NO: 3358396 - RNA, 12 nt, Human
aaggaauuuuau

SEQ ID NO: 3358397 - RNA, 13 nt, Human
aagauuuucagaa

SEQ ID NO: 3358398 - RNA, 15 nt, Human
aagacuuuuaugaua

SEQ ID NO: 3358399 - RNA, 18 nt, Human
aagagaagggcagggcug

SEQ ID NO: 3358400 - RNA, 21 nt, Human
aagacauucuuccaaaaagau

SEQ ID NO: 3358401 - RNA, 23 nt, Human
aagacagugaaagaaaauaacaa

SEQ ID NO: 3358402 - RNA, 17 nt, Human
aauaaaccucaaaaugu

SEQ ID NO: 3358403 - RNA, 12 nt, Human
aauaaaauuuuu

SEQ ID NO: 3358404 - RNA, 20 nt, Human
aauaaaccucaaaaugucua

SEQ ID NO: 3358405 - RNA, 19 nt, Human
aauaaagcuguguggcagu

SEQ ID NO: 3358406 - RNA, 11 nt, Human
aauaaagcugu

SEQ ID NO: 3358407 - RNA, 14 nt, Human
aauaauaaauauuu

SEQ ID NO: 3358408 - RNA, 15 nt, Human
aauccaaugaaauga

SEQ ID NO: 3358409 - RNA, 15 nt, Human
aaagccaagaggcug

SEQ ID NO: 3358410 - RNA, 19 nt, Human
aaauaaaccucaaaauguc

SEQ ID NO: 3358411 - RNA, 20 nt, Human
aaauaaaaauauuguguugu

SEQ ID NO: 3358412 - RNA, 17 nt, Human
aaaccucaaaaugucua

SEQ ID NO: 3358413 - RNA, 16 nt, Human
aaagauaaauauuaua

SEQ ID NO: 3358414 - RNA, 14 nt, Human
aaagauaaauauua

SEQ ID NO: 3358415 - RNA, 15 nt, Human
aaagauaaauauuau

SEQ ID NO: 3358416 - RNA, 13 nt, Human
aaagauaaauauu

SEQ ID NO: 3358417 - RNA, 13 nt, Human
aaagaggugugca

SEQ ID NO: 3358418 - RNA, 12 nt, Human
aaaauuaagaaa

SEQ ID NO: 3358419 - RNA, 22 nt, Human
aaaauuaacaugaauauuuagu

SEQ ID NO: 3358420 - RNA, 20 nt, Human
aaaauuaagaaaggauaaag

SEQ ID NO: 3358421 - RNA, 13 nt, Human
aaaauuaagaaag

SEQ ID NO: 3358422 - RNA, 21 nt, Human
aaaauccacuuuaucuugaau

SEQ ID NO: 3358423 - RNA, 15 nt, Human
aaaauaaaaaacacu

SEQ ID NO: 3358424 - RNA, 16 nt, Human
aaaauuauuuuguuca

SEQ ID NO: 3358425 - RNA, 18 nt, Human
aaaauuauuuuguucaua

SEQ ID NO: 3358426 - RNA, 20 nt, Human
aaaauuauuuuguucauaca

SEQ ID NO: 3358427 - RNA, 22 nt, Human
aaauguuuuuuuuuaaagacuu

SEQ ID NO: 3358428 - RNA, 14 nt, Human
aaauugauguguuu

SEQ ID NO: 3358429 - RNA, 18 nt, Human
aaauugaugggauuuggu

SEQ ID NO: 3358430 - RNA, 17 nt, Human
aacacuaacaugauuug

SEQ ID NO: 3358431 - RNA, 21 nt, Human
aaauguuuuuuuuuaaagacu

SEQ ID NO: 3358432 - RNA, 18 nt, Human
aaauguuuuuuuuuaaag

SEQ ID NO: 3358433 - RNA, 17 nt, Human
aaaucugaccaaaacaa

SEQ ID NO: 3358434 - RNA, 20 nt, Human
aaaugcuagguuaauuccaa

SEQ ID NO: 3358435 - RNA, 15 nt, Human
aacguauaaaagccu

SEQ ID NO: 3358436 - RNA, 13 nt, Human
aacugagcuugga

SEQ ID NO: 3358437 - RNA, 17 nt, Human
aacugagcuuggaagcu

SEQ ID NO: 3358438 - RNA, 21 nt, Human
aacugagcuuggaagcuucug

SEQ ID NO: 3358439 - RNA, 20 nt, Human
aacagcggcuggacuuggag

SEQ ID NO: 3358440 - RNA, 15 nt, Human
aacaucccuccuggg

SEQ ID NO: 3358441 - RNA, 10 nt, Human
agagggcugc

SEQ ID NO: 3358442 - RNA, 23 nt, Human
agagaggccauucuuucccaaca

SEQ ID NO: 3358443 - RNA, 15 nt, Human
agagccugagaguga

SEQ ID NO: 3358444 - RNA, 20 nt, Human
agaaugaaauugcugaaaga

SEQ ID NO: 3358445 - RNA, 22 nt, Human
agacagccaacuauggccugug

SEQ ID NO: 3358446 - RNA, 18 nt, Human
agaugaugaaaauauuua

SEQ ID NO: 3358447 - RNA, 14 nt, Human
agaugguucuagca

SEQ ID NO: 3358448 - RNA, 23 nt, Human
agaugaugaaaauauuuaaaggc

SEQ ID NO: 3358449 - RNA, 21 nt, Human
agcaaagcugaugacaacuuc

SEQ ID NO: 3358450 - RNA, 23 nt, Human
agcaaagcugaugacaacuuccc

SEQ ID NO: 3358451 - RNA, 15 nt, Human
agccaagaggcugca

SEQ ID NO: 3358452 - RNA, 16 nt, Human
agcuccuuaaggcucu

SEQ ID NO: 3358453 - RNA, 17 nt, Human
agcuccuuaaggcucuu

SEQ ID NO: 3358454 - RNA, 14 nt, Human
agcugagcaggugu

SEQ ID NO: 3358455 - RNA, 15 nt, Human
agcugcgggcugggu

SEQ ID NO: 3358456 - RNA, 18 nt, Human
agccuggcuucaaauugu

SEQ ID NO: 3358457 - RNA, 17 nt, Human
agccuggcuucaaauug

SEQ ID NO: 3358458 - RNA, 19 nt, Human
agcuaauucuuugaccugu

SEQ ID NO: 3358459 - RNA, 23 nt, Human
agcuaauguaauaacugugaagu

SEQ ID NO: 3358460 - RNA, 16 nt, Human
aggaaccgaggcaggg

SEQ ID NO: 3358461 - RNA, 16 nt, Human
aggaacugcugggcuu

SEQ ID NO: 3358462 - RNA, 22 nt, Human
aggaacugcugggcuuggcagc

SEQ ID NO: 3358463 - RNA, 13 nt, Human
aggaaccaaagcg

SEQ ID NO: 3358464 - RNA, 15 nt, Human
aggaaccaaagcgaa

SEQ ID NO: 3358465 - RNA, 16 nt, Human
aggaaccauaaucaau

SEQ ID NO: 3358466 - RNA, 15 nt, Human
agcuuuuaugugaaa

SEQ ID NO: 3358467 - RNA, 17 nt, Human
agggacugagaaauuua

SEQ ID NO: 3358468 - RNA, 22 nt, Human
agggauuuggggcucagagugg

SEQ ID NO: 3358469 - RNA, 14 nt, Human
agggaugguguuca

SEQ ID NO: 3358470 - RNA, 16 nt, Human
agggaugguguucaaa

SEQ ID NO: 3358471 - RNA, 12 nt, Human
aggggcaggagg

SEQ ID NO: 3358472 - RNA, 13 nt, Human
aggggcaggagga

SEQ ID NO: 3358473 - RNA, 18 nt, Human
aggggcaggaggaagggg

SEQ ID NO: 3358474 - RNA, 23 nt, Human
aggucccuaauaaagcugugugg

SEQ ID NO: 3358475 - RNA, 23 nt, Human
agucugagagaggccauucuuuc

SEQ ID NO: 3358476 - RNA, 16 nt, Human
agucugagagaggcca

SEQ ID NO: 3358477 - RNA, 20 nt, Human
agugaauucuugaaggaaaa

SEQ ID NO: 3358478 - RNA, 13 nt, Human
aguauuuuugaca

SEQ ID NO: 3358479 - RNA, 16 nt, Human
aguauuuuugacagaa

SEQ ID NO: 3358480 - RNA, 17 nt, Human
aguauuuuugacagaau

SEQ ID NO: 3358481 - RNA, 18 nt, Human
aguauuuuugacagaaua

SEQ ID NO: 3358482 - RNA, 19 nt, Human
aguaacaaugaagauaaaa

SEQ ID NO: 3358483 - RNA, 22 nt, Human
aguaaaugcuagguuaauucca

SEQ ID NO: 3358484 - RNA, 11 nt, Human
aguaaaugcua

SEQ ID NO: 3358485 - RNA, 23 nt, Human
aguaaaugcuagguuaauuccaa

SEQ ID NO: 3358486 - RNA, 12 nt, Human
agugucuggcug

SEQ ID NO: 3358487 - RNA, 13 nt, Human
agugucuggcugc

SEQ ID NO: 3358488 - RNA, 14 nt, Human
agugucuggcugca

SEQ ID NO: 3358489 - RNA, 15 nt, Human
agugcuaauuuugaa

SEQ ID NO: 3358490 - RNA, 18 nt, Human
agugcuaauuuugaaaaa

SEQ ID NO: 3358491 - RNA, 13 nt, Human
aguucagcuuggg

SEQ ID NO: 3358492 - RNA, 14 nt, Human
aguucagcuugggg

SEQ ID NO: 3358493 - RNA, 13 nt, Human
auaauggucagag

SEQ ID NO: 3358494 - RNA, 17 nt, Human
auacccagaaaguuauu

SEQ ID NO: 3358495 - RNA, 20 nt, Human
auaaaaagccugcaauuuca

SEQ ID NO: 3358496 - RNA, 18 nt, Human
aguuuggcaaacucucca

SEQ ID NO: 3358497 - RNA, 16 nt, Human
aguuuggcaaacucuc

SEQ ID NO: 3358498 - RNA, 22 nt, Human
auaaaaagccugcaauuucaua

SEQ ID NO: 3358499 - RNA, 14 nt, Human
auaacaaugaaagu

SEQ ID NO: 3358500 - RNA, 15 nt, Human
auauaaguguguguu

SEQ ID NO: 3358501 - RNA, 17 nt, Human
auauuauguguuuccau

SEQ ID NO: 3358502 - RNA, 13 nt, Human
auauuauguguuu

SEQ ID NO: 3358503 - RNA, 17 nt, Human
auaugcagauuuugccc

SEQ ID NO: 3358504 - RNA, 13 nt, Human
auaucaguuugcu

SEQ ID NO: 3358505 - RNA, 14 nt, Human
auauuauuuuaugu

SEQ ID NO: 3358506 - RNA, 22 nt, Human
auauuauuuuauguugcauaga

SEQ ID NO: 3358507 - RNA, 15 nt, Human
auauuauuuuauguu

SEQ ID NO: 3358508 - RNA, 19 nt, Human
auauuucccugaaggaacc

SEQ ID NO: 3358509 - RNA, 20 nt, Human
auccagagucccugccugga

SEQ ID NO: 3358510 - RNA, 21 nt, Human
auccagagucccugccuggac

SEQ ID NO: 3358511 - RNA, 19 nt, Human
auccagagucccugccugg

SEQ ID NO: 3358512 - RNA, 19 nt, Human
auccucaguuuuugugaaa

SEQ ID NO: 3358513 - RNA, 12 nt, Human
aucaugugaaau

SEQ ID NO: 3358514 - RNA, 22 nt, Human
aucaaauauauucagccuggcu

SEQ ID NO: 3358515 - RNA, 21 nt, Human
auauuucccugaaggaaccaa

SEQ ID NO: 3358516 - RNA, 14 nt, Human
aucaaauauauuca

SEQ ID NO: 3358517 - RNA, 13 nt, Human
augagggucuugg

SEQ ID NO: 3358518 - RNA, 12 nt, Human
augaaaauauuu

SEQ ID NO: 3358519 - RNA, 13 nt, Human
augaaaauauuua

SEQ ID NO: 3358520 - RNA, 14 nt, Human
augaaaauauuuaa

SEQ ID NO: 3358521 - RNA, 16 nt, Human
augaaaauauuuaaag

SEQ ID NO: 3358522 - RNA, 14 nt, Human
aucuaguaugaaau

SEQ ID NO: 3358523 - RNA, 15 nt, Human
aucuaguaugaaauu

SEQ ID NO: 3358524 - RNA, 16 nt, Human
aucuaguaugaaauua

SEQ ID NO: 3358525 - RNA, 17 nt, Human
aucuaguaugaaauuau

SEQ ID NO: 3358526 - RNA, 18 nt, Human
aucuaguaugaaauuaua

SEQ ID NO: 3358527 - RNA, 19 nt, Human
aucuaguaugaaauuauau

SEQ ID NO: 3358528 - RNA, 18 nt, Human
aucugggggccucuucug

SEQ ID NO: 3358529 - RNA, 22 nt, Human
aucucugcaggaaauggcugug

SEQ ID NO: 3358530 - RNA, 16 nt, Human
augaugggucaguugu

SEQ ID NO: 3358531 - RNA, 23 nt, Human
augcacaaauucugucucuggau

SEQ ID NO: 3358532 - RNA, 22 nt, Human
augcacaaauucugucucugga

SEQ ID NO: 3358533 - RNA, 15 nt, Human
augcacaaauucugu

SEQ ID NO: 3358534 - RNA, 19 nt, Human
augaugaaaauauuuaaag

SEQ ID NO: 3358535 - RNA, 13 nt, Human
augaugaaaauau

SEQ ID NO: 3358536 - RNA, 15 nt, Human
augaugaaaauauuu

SEQ ID NO: 3358537 - RNA, 18 nt, Human
auggauaggcacaggaaa

SEQ ID NO: 3358538 - RNA, 17 nt, Human
auggauaggcacaggaa

SEQ ID NO: 3358539 - RNA, 14 nt, Human
augugaaacauguu

SEQ ID NO: 3358540 - RNA, 14 nt, Human
augugaaaucauuc

SEQ ID NO: 3358541 - RNA, 16 nt, Human
augugaacagcggcug

SEQ ID NO: 3358542 - RNA, 18 nt, Human
augugaaaucauucauuu

SEQ ID NO: 3358543 - RNA, 17 nt, Human
augugaaaucauucauu

SEQ ID NO: 3358544 - RNA, 15 nt, Human
auguguaaaauguga

SEQ ID NO: 3358545 - RNA, 17 nt, Human
cugcuuuuuauggccug

SEQ ID NO: 3358546 - RNA, 18 nt, Human
cugcuuuuuauggccugu

SEQ ID NO: 3358547 - RNA, 13 nt, Human
cuggacugugugc

SEQ ID NO: 3358548 - RNA, 23 nt, Human
cugccaucauguuuacagaggac

SEQ ID NO: 3358549 - RNA, 17 nt, Human
cugccaucauguuuaca

SEQ ID NO: 3358550 - RNA, 22 nt, Human
cugccaucauguuuacagagga

SEQ ID NO: 3358551 - RNA, 23 nt, Human
cuguacuugcucuugaugccugg

SEQ ID NO: 3358552 - RNA, 22 nt, Human
cuguacuugcucuugaugccug

SEQ ID NO: 3358553 - RNA, 21 nt, Human
cuguacuugcucuugaugccu

SEQ ID NO: 3358554 - RNA, 18 nt, Human
cuggggccaggcuggguc

SEQ ID NO: 3358555 - RNA, 17 nt, Human
cuggggaugucucucau

SEQ ID NO: 3358556 - RNA, 22 nt, Human
cuggggaugucucucaugacca

SEQ ID NO: 3358557 - RNA, 18 nt, Human
cuggggauugggccccug

SEQ ID NO: 3358558 - RNA, 22 nt, Human
cuggggauugggccccugccag

SEQ ID NO: 3358559 - RNA, 16 nt, Human
cuggggauugggcccc

SEQ ID NO: 3358560 - RNA, 16 nt, Human
cuggcuccaggccagg

SEQ ID NO: 3358561 - RNA, 17 nt, Human
cuggagacuaaccccac

SEQ ID NO: 3358562 - RNA, 16 nt, Human
cuggacugugugcuca

SEQ ID NO: 3358563 - RNA, 18 nt, Human
cuuauuggcagcucuacu

SEQ ID NO: 3358564 - RNA, 20 nt, Human
cuucaugcauagguuuagca

SEQ ID NO: 3358565 - RNA, 19 nt, Human
cuucaucugacuaugacau

SEQ ID NO: 3358566 - RNA, 12 nt, Human
cuucauacaggg

SEQ ID NO: 3358567 - RNA, 13 nt, Human
cuucauacaggga

SEQ ID NO: 3358568 - RNA, 22 nt, Human
cuucauacagggaugguguuca

SEQ ID NO: 3358569 - RNA, 21 nt, Human
cuucaucugacuaugacauaa

SEQ ID NO: 3358570 - RNA, 15 nt, Human
cuucacuguaaaaua

SEQ ID NO: 3358571 - RNA, 9 nt, Human
cuucauaca

SEQ ID NO: 3358572 - RNA, 10 nt, Human
cuucauacac

SEQ ID NO: 3358573 - RNA, 16 nt, Human
cuugacaaagucaagc

SEQ ID NO: 3358574 - RNA, 19 nt, Human
cuugacaaagucaagccac

SEQ ID NO: 3358575 - RNA, 12 nt, Human
cuugaugccugg

SEQ ID NO: 3358576 - RNA, 14 nt, Human
cuuuuaugugaaac

SEQ ID NO: 3358577 - RNA, 15 nt, Human
cuuuuggcauuuuac

SEQ ID NO: 3358578 - RNA, 22 nt, Human
gcauaacguauaaaagccuguu

SEQ ID NO: 3358579 - RNA, 21 nt, Human
gcaguuugccuggugcagugg

SEQ ID NO: 3358580 - RNA, 12 nt, Human
gcacugacagau

SEQ ID NO: 3358581 - RNA, 17 nt, Human
gcacugacagauuucca

SEQ ID NO: 3358582 - RNA, 14 nt, Human
gcagaaaucuagaa

SEQ ID NO: 3358583 - RNA, 15 nt, Human
gcagaaaucuagaag

SEQ ID NO: 3358584 - RNA, 21 nt, Human
gcagagcagugggccuggcca

SEQ ID NO: 3358585 - RNA, 13 nt, Human
gauucugagagcu

SEQ ID NO: 3358586 - RNA, 20 nt, Human
gcaauaaccucaaagugacu

SEQ ID NO: 3358587 - RNA, 20 nt, Human
gcaccggggccugggcagga

SEQ ID NO: 3358588 - RNA, 19 nt, Human
gcaccggggccugggcagg

SEQ ID NO: 3358589 - RNA, 12 nt, Human
gaucccaacacu

SEQ ID NO: 3358590 - RNA, 23 nt, Human
gaucucagugguuaagauuccua

SEQ ID NO: 3358591 - RNA, 18 nt, Human
gauuacugccuauuuuaa

SEQ ID NO: 3358592 - RNA, 14 nt, Human
gaguuuaggguggg

SEQ ID NO: 3358593 - RNA, 15 nt, Human
gaguuuagggugggg

SEQ ID NO: 3358594 - RNA, 16 nt, Human
gaguuuaaauuguaau

SEQ ID NO: 3358595 - RNA, 13 nt, Human
gaguuggcuggga

SEQ ID NO: 3358596 - RNA, 13 nt, Human
gaguccaucagcc

SEQ ID NO: 3358597 - RNA, 14 nt, Human
gaguccaucagccu

SEQ ID NO: 3358598 - RNA, 15 nt, Human
gaguccaucagccuc

SEQ ID NO: 3358599 - RNA, 18 nt, Human
gagugaggaugucugggc

SEQ ID NO: 3358600 - RNA, 16 nt, Human
gauacuugaaaauuaa

SEQ ID NO: 3358601 - RNA, 19 nt, Human
gagcuggggaugucucuca

SEQ ID NO: 3358602 - RNA, 14 nt, Human
gagauguagccccu

SEQ ID NO: 3358603 - RNA, 20 nt, Human
gagaugaugaaaauauuuaa

SEQ ID NO: 3358604 - RNA, 19 nt, Human
gagaugaugaaaauauuua

SEQ ID NO: 3358605 - RNA, 14 nt, Human
gacuauucaguuuu

SEQ ID NO: 3358606 - RNA, 18 nt, Human
gacuuuugaaaagaggug

SEQ ID NO: 3358607 - RNA, 22 nt, Human
gagacguuuuuggaagaguagu

SEQ ID NO: 3358608 - RNA, 23 nt, Human
gagacuaaccccaccacacccuc

SEQ ID NO: 3358609 - RNA, 12 nt, Human
gaauuuuaaaag

SEQ ID NO: 3358610 - RNA, 15 nt, Human
gaauuuuaaaagaug

SEQ ID NO: 3358611 - RNA, 21 nt, Human
gaauuuuaaaagaugcaaugu

SEQ ID NO: 3358612 - RNA, 23 nt, Human
gaauuuuaaaagaugcaauguag

SEQ ID NO: 3358613 - RNA, 20 nt, Human
gaauuugugaagguggaaau

SEQ ID NO: 3358614 - RNA, 16 nt, Human
gacagguuagcugcuc

SEQ ID NO: 3358615 - RNA, 15 nt, Human
gacaguauuuguggg

SEQ ID NO: 3358616 - RNA, 16 nt, Human
gacagaauauguuuca

SEQ ID NO: 3358617 - RNA, 17 nt, Human
gaagugugggucugugu

SEQ ID NO: 3358618 - RNA, 18 nt, Human
gaagugugggucugugug

SEQ ID NO: 3358619 - RNA, 15 nt, Human
gaaggcuauggggau

SEQ ID NO: 3358620 - RNA, 19 nt, Human
gaagggcagggcugaggcc

SEQ ID NO: 3358621 - RNA, 22 nt, Human
ggcgaagcguuguccucagccc

SEQ ID NO: 3358622 - RNA, 16 nt, Human
ggccuugaguccccca

SEQ ID NO: 3358623 - RNA, 20 nt, Human
ggccuguggaucaaauccag

SEQ ID NO: 3358624 - RNA, 17 nt, Human
ggcccugugccuuggug

SEQ ID NO: 3358625 - RNA, 22 nt, Human
ggcauccagagucccugccugg

SEQ ID NO: 3358626 - RNA, 18 nt, Human
ggcauuuuacuguacaga

SEQ ID NO: 3358627 - RNA, 18 nt, Human
ggcauccagagucccugc

SEQ ID NO: 3358628 - RNA, 15 nt, Human
ggcauauuuuucaca

SEQ ID NO: 3358629 - RNA, 17 nt, Human
ggcauauuuuucacaua

SEQ ID NO: 3358630 - RNA, 18 nt, Human
ggccagcaccaucucuuu

SEQ ID NO: 3358631 - RNA, 19 nt, Human
ggccaguggcuggaucugu

SEQ ID NO: 3358632 - RNA, 21 nt, Human
ggagguagcuuugagguggaa

SEQ ID NO: 3358633 - RNA, 22 nt, Human
ggagcccacuguacuugcucuu

SEQ ID NO: 3358634 - RNA, 12 nt, Human
ggcacagccugg

SEQ ID NO: 3358635 - RNA, 13 nt, Human
ggcacagccuggc

SEQ ID NO: 3358636 - RNA, 23 nt, Human
ggguguccugcaccggggccugg

SEQ ID NO: 3358637 - RNA, 18 nt, Human
ggguggggggggugcugg

SEQ ID NO: 3358638 - RNA, 15 nt, Human
ggguggggggggugc

SEQ ID NO: 3358639 - RNA, 21 nt, Human
ggguguccugcaccggggccu

SEQ ID NO: 3358640 - RNA, 17 nt, Human
gguagcuuugaggugga

SEQ ID NO: 3358641 - RNA, 20 nt, Human
ggucuguguguguguaugug

SEQ ID NO: 3358642 - RNA, 21 nt, Human
ggucuguguguguguaugugg

SEQ ID NO: 3358643 - RNA, 19 nt, Human
ggugcugggccccugccuc

SEQ ID NO: 3358644 - RNA, 20 nt, Human
ggugcugggccccugccucu

SEQ ID NO: 3358645 - RNA, 17 nt, Human
aaagcaggcagaacuca

SEQ ID NO: 3358646 - RNA, 19 nt, Human
aaagcaggcagaacucauc

SEQ ID NO: 3358647 - RNA, 11 nt, Human
ggucugugugu

SEQ ID NO: 3358648 - RNA, 17 nt, Human
ggucuguguguguguau

SEQ ID NO: 3358649 - RNA, 20 nt, Human
ggucgcccuggacugugugc

SEQ ID NO: 3358650 - RNA, 13 nt, Human
aaagauuuucaga

SEQ ID NO: 3358651 - RNA, 21 nt, Human
gguggggagagacgggcccug

SEQ ID NO: 3358652 - RNA, 18 nt, Human
aaagccuguuuaagagac

SEQ ID NO: 3358653 - RNA, 16 nt, Human
aaagccuguuuaagag

SEQ ID NO: 3358654 - RNA, 17 nt, Human
gguggggggggugcugg

SEQ ID NO: 3358655 - RNA, 16 nt, Human
guaaauuuaugugaug

SEQ ID NO: 3358656 - RNA, 17 nt, Human
guaaauuuaugugaugg

SEQ ID NO: 3358657 - RNA, 17 nt, Human
guaacaaugaagauaaa

SEQ ID NO: 3358658 - RNA, 16 nt, Human
guaaagacuguagaag

SEQ ID NO: 3358659 - RNA, 22 nt, Human
guaaaaugugaagugaaugaaa

SEQ ID NO: 3358660 - RNA, 20 nt, Human
guaaaaugugaagugaauga

SEQ ID NO: 3358661 - RNA, 19 nt, Human
guaaaaugugaagugaaug

SEQ ID NO: 3358662 - RNA, 12 nt, Human
guaaaaugugaa

SEQ ID NO: 3358663 - RNA, 23 nt, Human
aaaguuauugauaaguucauaca

SEQ ID NO: 3358664 - RNA, 20 nt, Human
aaaguuauugauaaguucau

SEQ ID NO: 3358665 - RNA, 16 nt, Human
aaaguuuguugaaaca

SEQ ID NO: 3358666 - RNA, 22 nt, Human
gggcccuggugguggcucggga

SEQ ID NO: 3358667 - RNA, 13 nt, Human
gggccaggcuggg

SEQ ID NO: 3358668 - RNA, 21 nt, Human
gggccagucccugaggcaggu

SEQ ID NO: 3358669 - RNA, 18 nt, Human
gggccagucccugaggca

SEQ ID NO: 3358670 - RNA, 15 nt, Human
gggccaggcuggguc

SEQ ID NO: 3358671 - RNA, 14 nt, Human
gggccaggcugggu

SEQ ID NO: 3358672 - RNA, 21 nt, Human
gggccaggcugggucgcccug

SEQ ID NO: 3358673 - RNA, 12 nt, Human
aaaaugugaagu

SEQ ID NO: 3358674 - RNA, 18 nt, Human
gggcucagagugggguag

SEQ ID NO: 3358675 - RNA, 17 nt, Human
aaacaccggguuccagc

SEQ ID NO: 3358676 - RNA, 14 nt, Human
aaaagggaggggga

SEQ ID NO: 3358677 - RNA, 19 nt, Human
aaaagggacugagaaauuu

SEQ ID NO: 3358678 - RNA, 15 nt, Human
gggauugggccccug

SEQ ID NO: 3358679 - RNA, 14 nt, Human
gggaugucucucau

SEQ ID NO: 3358680 - RNA, 16 nt, Human
gggaugguguucaaaa

SEQ ID NO: 3358681 - RNA, 22 nt, Human
gggaggcucuggagcccacugu

SEQ ID NO: 3358682 - RNA, 22 nt, Human
gggagaaugucaguauguggaa

SEQ ID NO: 3358683 - RNA, 19 nt, Human
gggagaaugucaguaugug

SEQ ID NO: 3358684 - RNA, 15 nt, Human
aaaagaugcaaugua

SEQ ID NO: 3358685 - RNA, 19 nt, Human
aaaaauauauuuaaugaua

SEQ ID NO: 3358686 - RNA, 15 nt, Human
aaaaauauauuuaau

SEQ ID NO: 3358687 - RNA, 13 nt, Human
aaaaauauauuua

SEQ ID NO: 3358688 - RNA, 15 nt, Human
aaaacccagauaaag

SEQ ID NO: 3358689 - RNA, 16 nt, Human
gcuucaaauuguaagc

SEQ ID NO: 3358690 - RNA, 20 nt, Human
gcuguagacauuugcuauga

SEQ ID NO: 3358691 - RNA, 19 nt, Human
gcuugaaacccguggcgcu

SEQ ID NO: 3358692 - RNA, 19 nt, Human
gcuuuccucaucaggccau

SEQ ID NO: 3358693 - RNA, 19 nt, Human
gcuuugagguggaagaggg

SEQ ID NO: 3358694 - RNA, 22 nt, Human
gcuuugagguggaagagggcug

SEQ ID NO: 3358695 - RNA, 15 nt, Human
gcuuuuuuaucaugu

SEQ ID NO: 3358696 - RNA, 20 nt, Human
gcuuuuuuaucaugugaaau

SEQ ID NO: 3358697 - RNA, 18 nt, Human
gcuuuuuuaucaugugaa

SEQ ID NO: 3358698 - RNA, 14 nt, Human
ggaacugcugggcu

SEQ ID NO: 3358699 - RNA, 13 nt, Human
gcugcuccccacg

SEQ ID NO: 3358700 - RNA, 22 nt, Human
gcugcuccccacgucagcuggg

SEQ ID NO: 3358701 - RNA, 21 nt, Human
gcugcagagcagugggccugg

SEQ ID NO: 3358702 - RNA, 20 nt, Human
gcugcagagcagugggccug

SEQ ID NO: 3358703 - RNA, 18 nt, Human
gcuccucgagaucccaac

SEQ ID NO: 3358704 - RNA, 16 nt, Human
gcucuggagcccacug

SEQ ID NO: 3358705 - RNA, 15 nt, Human
gcucuggagcccacu

SEQ ID NO: 3358706 - RNA, 14 nt, Human
gcugaggccucuca

SEQ ID NO: 3358707 - RNA, 17 nt, Human
gcucugugcccacccuc

SEQ ID NO: 3358708 - RNA, 14 nt, Human
gccaggauggaaug

SEQ ID NO: 3358709 - RNA, 14 nt, Human
gccaguggcuggau

SEQ ID NO: 3358710 - RNA, 23 nt, Human
gccaguggcuggaucugugaggg

SEQ ID NO: 3358711 - RNA, 11 nt, Human
gcccuaucugu

SEQ ID NO: 3358712 - RNA, 16 nt, Human
gccccugccucucugc

SEQ ID NO: 3358713 - RNA, 15 nt, Human
gccccugccucucug

SEQ ID NO: 3358714 - RNA, 18 nt, Human
gccccugccucucugcag

SEQ ID NO: 3358715 - RNA, 17 nt, Human
gccccugccucucugca

SEQ ID NO: 3358716 - RNA, 17 nt, Human
gccucgacacagagugg

SEQ ID NO: 3358717 - RNA, 17 nt, Human
gcggcugggaggagggc

SEQ ID NO: 3358718 - RNA, 18 nt, Human
gcggcugggaggagggca

SEQ ID NO: 3358719 - RNA, 19 nt, Human
gcggcugggaggagggcag

SEQ ID NO: 3358720 - RNA, 22 nt, Human
gcggcugggaggagggcaggca

SEQ ID NO: 3358721 - RNA, 13 nt, Human
gcggcugggagga

SEQ ID NO: 3358722 - RNA, 14 nt, Human
gcggcugggaggag

SEQ ID NO: 3358723 - RNA, 19 nt, Human
gcuacuguaaggcaaucau

SEQ ID NO: 3358724 - RNA, 18 nt, Human
gcuacuguaaggcaauca

SEQ ID NO: 3358725 - RNA, 18 nt, Human
gcuaauuuugaaaaacug

SEQ ID NO: 3358726 - RNA, 19 nt, Human
cacuggggcaggggccggg

SEQ ID NO: 3358727 - RNA, 18 nt, Human
cacugccagcauuucccu

SEQ ID NO: 3358728 - RNA, 22 nt, Human
cacugccagcauuucccuuccu

SEQ ID NO: 3358729 - RNA, 21 nt, Human
cacucuuggagccugcagagc

SEQ ID NO: 3358730 - RNA, 22 nt, Human
cacucuuggagccugcagagcu

SEQ ID NO: 3358731 - RNA, 23 nt, Human
cacucuuggagccugcagagcug

SEQ ID NO: 3358732 - RNA, 15 nt, Human
caauucuugccaaau

SEQ ID NO: 3358733 - RNA, 13 nt, Human
auucuuucccaac

SEQ ID NO: 3358734 - RNA, 16 nt, Human
auucuuucccaacacc

SEQ ID NO: 3358735 - RNA, 19 nt, Human
auucuuucccaacaccucu

SEQ ID NO: 3358736 - RNA, 18 nt, Human
auucuugaaggaaaauga

SEQ ID NO: 3358737 - RNA, 15 nt, Human
auucuugaaggaaaa

SEQ ID NO: 3358738 - RNA, 22 nt, Human
auugauaaguucauacauugua

SEQ ID NO: 3358739 - RNA, 21 nt, Human
auugauaaguucauacauugu

SEQ ID NO: 3358740 - RNA, 23 nt, Human
auuguaauaggcguaacuaauuu

SEQ ID NO: 3358741 - RNA, 21 nt, Human
auucauaauuauuauuuggcc

SEQ ID NO: 3358742 - RNA, 14 nt, Human
caaacaggcucaga

SEQ ID NO: 3358743 - RNA, 15 nt, Human
caaacaggcucagag

SEQ ID NO: 3358744 - RNA, 21 nt, Human
caaaaggauaaugaauacuuu

SEQ ID NO: 3358745 - RNA, 17 nt, Human
caacaaucccaaggccc

SEQ ID NO: 3358746 - RNA, 14 nt, Human
caacacuaacauga

SEQ ID NO: 3358747 - RNA, 21 nt, Human
caaagucucuggaauuugaaa

SEQ ID NO: 3358748 - RNA, 22 nt, Human
caaagguaaaucagacuaugaa

SEQ ID NO: 3358749 - RNA, 22 nt, Human
auuuguggggagggauuugggg

SEQ ID NO: 3358750 - RNA, 19 nt, Human
auuuuauagcuacuaauuu

SEQ ID NO: 3358751 - RNA, 17 nt, Human
auuuuauagcuacuaau

SEQ ID NO: 3358752 - RNA, 16 nt, Human
auuugcuaugagcugg

SEQ ID NO: 3358753 - RNA, 20 nt, Human
auuugcuaugagcuggggau

SEQ ID NO: 3358754 - RNA, 24 nt, Human
cagccccgcguggaacucgugucu

SEQ ID NO: 3358755 - RNA, 24 nt, Human
cagccucuccacucaugugacucu

SEQ ID NO: 3358756 - RNA, 11 nt, Human
cagccugccac

SEQ ID NO: 3358757 - RNA, 12 nt, Human
cagccugccacu

SEQ ID NO: 3358758 - RNA, 16 nt, Human
cagccugccacucagg

SEQ ID NO: 3358759 - RNA, 17 nt, Human
cagccugccacucaggc

SEQ ID NO: 3358760 - RNA, 17 nt, Human
cagcggcuggaauuggg

SEQ ID NO: 3358761 - RNA, 16 nt, Human
cagcggcuggacuugg

SEQ ID NO: 3358762 - RNA, 18 nt, Human
cagcggcuggacuuggag

SEQ ID NO: 3358763 - RNA, 23 nt, Human
cagaucauuaucagccugugcca

SEQ ID NO: 3358764 - RNA, 22 nt, Human
cagaucauugugaaauuauuca

SEQ ID NO: 3358765 - RNA, 16 nt, Human
cagaucauugugaaau

SEQ ID NO: 3358766 - RNA, 16 nt, Human
cagagcugcgggcugg

SEQ ID NO: 3358767 - RNA, 15 nt, Human
caguauuugugggga

SEQ ID NO: 3358768 - RNA, 18 nt, Human
ccaaaacaaacaaacaga

SEQ ID NO: 3358769 - RNA, 19 nt, Human
ccaaaaagauuuucagaaa

SEQ ID NO: 3358770 - RNA, 12 nt, Human
ccaaaacaaaca

SEQ ID NO: 3358771 - RNA, 20 nt, Human
ccaaaaaauucuacaacaca

SEQ ID NO: 3358772 - RNA, 22 nt, Human
ccaaaaaauucuacaacacaca

SEQ ID NO: 3358773 - RNA, 22 nt, Human
cauuggcucuugaacugagcuu

SEQ ID NO: 3358774 - RNA, 20 nt, Human
cauuggauucugagagcugu

SEQ ID NO: 3358775 - RNA, 22 nt, Human
ccaaaugagggucuugguucca

SEQ ID NO: 3358776 - RNA, 19 nt, Human
ccaaugugaacagcggcug

SEQ ID NO: 3358777 - RNA, 14 nt, Human
ccaccagaagccca

SEQ ID NO: 3358778 - RNA, 15 nt, Human
ccaccagaagcccag

SEQ ID NO: 3358779 - RNA, 16 nt, Human
ccaccagaagcccaga

SEQ ID NO: 3358780 - RNA, 18 nt, Human
ccaccagaagcccagaau

SEQ ID NO: 3358781 - RNA, 11 nt, Human
ccaccagaagc

SEQ ID NO: 3358782 - RNA, 12 nt, Human
ccaccagaagcc

SEQ ID NO: 3358783 - RNA, 13 nt, Human
ccaccagaagccc

SEQ ID NO: 3358784 - RNA, 17 nt, Human
caguuuggcaaacucuc

SEQ ID NO: 3358785 - RNA, 14 nt, Human
caugaauuugugaa

SEQ ID NO: 3358786 - RNA, 17 nt, Human
ccagagucccugccugg

SEQ ID NO: 3358787 - RNA, 18 nt, Human
ccagagucccugccugga

SEQ ID NO: 3358788 - RNA, 19 nt, Human
ccagagucccugccuggac

SEQ ID NO: 3358789 - RNA, 22 nt, Human
ccagagucccugccuggaccag

SEQ ID NO: 3358790 - RNA, 16 nt, Human
ccagagucccugccug

SEQ ID NO: 3358791 - RNA, 15 nt, Human
ccaguucagcuuggg

SEQ ID NO: 3358792 - RNA, 14 nt, Human
ccccgacuuuuguu

SEQ ID NO: 3358793 - RNA, 21 nt, Human
ccccagacuccaccaagccug

SEQ ID NO: 3358794 - RNA, 20 nt, Human
ccccagacuccaccaagccu

SEQ ID NO: 3358795 - RNA, 14 nt, Human
cccgggagcucagg

SEQ ID NO: 3358796 - RNA, 23 nt, Human
cccgggaggcagagguugcagug

SEQ ID NO: 3358797 - RNA, 20 nt, Human
cccugugccuugucacgcca

SEQ ID NO: 3358798 - RNA, 22 nt, Human
cccugugccuugucacgccaga

SEQ ID NO: 3358799 - RNA, 15 nt, Human
cccugugccuuguca

SEQ ID NO: 3358800 - RNA, 24 nt, Human
cccugugccuuggugugcuguauc

SEQ ID NO: 3358801 - RNA, 13 nt, Human
cccuggcuccagg

SEQ ID NO: 3358802 - RNA, 16 nt, Human
cccuggcuccaggcca

SEQ ID NO: 3358803 - RNA, 14 nt, Human
ccuaauaaagcugu

SEQ ID NO: 3358804 - RNA, 13 nt, Human
ccuaauaaagcug

SEQ ID NO: 3358805 - RNA, 23 nt, Human
ccuaauaaagcuguguggcaguc

SEQ ID NO: 3358806 - RNA, 16 nt, Human
ccguagguuauuuuca

SEQ ID NO: 3358807 - RNA, 15 nt, Human
ccuauuuuaauaaac

SEQ ID NO: 3358808 - RNA, 22 nt, Human
ccugacccucaucuuucuucca

SEQ ID NO: 3358809 - RNA, 14 nt, Human
ccugacucucagca

SEQ ID NO: 3358810 - RNA, 22 nt, Human
ccugaguaaaaaagcugugugc

SEQ ID NO: 3358811 - RNA, 23 nt, Human
ccucucugcaggucccuaauaaa

SEQ ID NO: 3358812 - RNA, 22 nt, Human
ccucucugcaggucccuaauaa

SEQ ID NO: 3358813 - RNA, 21 nt, Human
ccucucugcaggucccuaaua

SEQ ID NO: 3358814 - RNA, 13 nt, Human
ccucucugcaggu

SEQ ID NO: 3358815 - RNA, 20 nt, Human
ccucucugcaggucccuaau

SEQ ID NO: 3358816 - RNA, 14 nt, Human
cgugucuggcacag

SEQ ID NO: 3358817 - RNA, 13 nt, Human
cgugucuggcaca

SEQ ID NO: 3358818 - RNA, 21 nt, Human
cgugucuggcacagccuggcu

SEQ ID NO: 3358819 - RNA, 19 nt, Human
cuaaccugccgagagucca

SEQ ID NO: 3358820 - RNA, 21 nt, Human
cuaaccugccgagaguccauc

SEQ ID NO: 3358821 - RNA, 12 nt, Human
cuaaccugccga

SEQ ID NO: 3358822 - RNA, 23 nt, Human
cuacauaaguaauucaagaaaac

SEQ ID NO: 3358823 - RNA, 22 nt, Human
cuacauaaguaauucaagaaaa

SEQ ID NO: 3358824 - RNA, 18 nt, Human
cuagccaccgccuccuac

SEQ ID NO: 3358825 - RNA, 23 nt, Human
cggcuccucgagaucccaacacu

SEQ ID NO: 3358826 - RNA, 16 nt, Human
cucaucuuucuuccaa

SEQ ID NO: 3358827 - RNA, 16 nt, Human
cuccaaagucucugga

SEQ ID NO: 3358828 - RNA, 16 nt, Human
cucaggcccaaagccu

SEQ ID NO: 3358829 - RNA, 14 nt, Human
cucccuccucugcc

SEQ ID NO: 3358830 - RNA, 13 nt, Human
cucccuccucugc

SEQ ID NO: 3358831 - RNA, 14 nt, Human
cucuuggagccugc

SEQ ID NO: 3358832 - RNA, 15 nt, Human
uucuaguucugccag

SEQ ID NO: 3358833 - RNA, 13 nt, Human
uucuauaauuuaa

SEQ ID NO: 3358834 - RNA, 19 nt, Human
aucagacuaugaaguuuuu

SEQ ID NO: 3358835 - RNA, 20 nt, Human
uucuaacaaaaaaauauauu

SEQ ID NO: 3358836 - RNA, 19 nt, Human
uucuaacaaaaaaauauau

SEQ ID NO: 3358837 - RNA, 13 nt, Human
uucuaaaguaaaa

SEQ ID NO: 3358838 - RNA, 15 nt, Human
uucuaaaguaaaaac

SEQ ID NO: 3358839 - RNA, 14 nt, Human
auauuuuaagacga

SEQ ID NO: 3358840 - RNA, 20 nt, Human
auccuagucacuaccuucau

SEQ ID NO: 3358841 - RNA, 16 nt, Human
uucuuuguaaugaaaa

SEQ ID NO: 3358842 - RNA, 21 nt, Human
aucauuggauucugagagcug

SEQ ID NO: 3358843 - RNA, 22 nt, Human
aucauuggauucugagagcugu

SEQ ID NO: 3358844 - RNA, 22 nt, Human
auagcuuuucccuuuuuuuaag

SEQ ID NO: 3358845 - RNA, 17 nt, Human
auaggcguaacuaauuu

SEQ ID NO: 3358846 - RNA, 21 nt, Human
uuauuuuguucauacauauuu

SEQ ID NO: 3358847 - RNA, 16 nt, Human
uuauuuuguucauaca

SEQ ID NO: 3358848 - RNA, 17 nt, Human
uuauuuuguucauacau

SEQ ID NO: 3358849 - RNA, 17 nt, Human
uuauuuuuuucugaauu

SEQ ID NO: 3358850 - RNA, 13 nt, Human
uuauuuuuuucug

SEQ ID NO: 3358851 - RNA, 16 nt, Human
uucaaaauuguuacaa

SEQ ID NO: 3358852 - RNA, 21 nt, Human
uucaaaauuguuacaaauugu

SEQ ID NO: 3358853 - RNA, 13 nt, Human
auagucuuucagu

SEQ ID NO: 3358854 - RNA, 15 nt, Human
auauauauauauauu

SEQ ID NO: 3358855 - RNA, 13 nt, Human
auaucuuguagcu

SEQ ID NO: 3358856 - RNA, 14 nt, Human
auaucuaguaugaa

SEQ ID NO: 3358857 - RNA, 15 nt, Human
auaucuaguaugaaa

SEQ ID NO: 3358858 - RNA, 17 nt, Human
auaucuaguaugaaauu

SEQ ID NO: 3358859 - RNA, 14 nt, Human
auauauuuuaagac

SEQ ID NO: 3358860 - RNA, 13 nt, Human
auauauuuaauga

SEQ ID NO: 3358861 - RNA, 13 nt, Human
auauauuuuaaga

SEQ ID NO: 3358862 - RNA, 12 nt, Human
auauauuuuaag

SEQ ID NO: 3358863 - RNA, 12 nt, Human
uucauacauauu

SEQ ID NO: 3358864 - RNA, 23 nt, Human
uucauacauauuuuuguagcacu

SEQ ID NO: 3358865 - RNA, 21 nt, Human
uucauacagggaugguguuca

SEQ ID NO: 3358866 - RNA, 19 nt, Human
uucauaauuauuauuuggc

SEQ ID NO: 3358867 - RNA, 13 nt, Human
uucauacauugua

SEQ ID NO: 3358868 - RNA, 19 nt, Human
uucauacauuguacgaaga

SEQ ID NO: 3358869 - RNA, 13 nt, Human
uucauaugcugua

SEQ ID NO: 3358870 - RNA, 16 nt, Human
uuccagccugccacuc

SEQ ID NO: 3358871 - RNA, 14 nt, Human
uuccaagagccuga

SEQ ID NO: 3358872 - RNA, 22 nt, Human
uuccaagagccugagagugagg

SEQ ID NO: 3358873 - RNA, 13 nt, Human
uuccaagagccug

SEQ ID NO: 3358874 - RNA, 14 nt, Human
uuuaaauguuuuuu

SEQ ID NO: 3358875 - RNA, 12 nt, Human
uuuaauuuuaca

SEQ ID NO: 3358876 - RNA, 15 nt, Human
augauuccagguggc

SEQ ID NO: 3358877 - RNA, 16 nt, Human
augauuccagguggca

SEQ ID NO: 3358878 - RNA, 13 nt, Human
augcuucauacag

SEQ ID NO: 3358879 - RNA, 15 nt, Human
augcuucauacaggg

SEQ ID NO: 3358880 - RNA, 16 nt, Human
augcuucauacaggga

SEQ ID NO: 3358881 - RNA, 19 nt, Human
augcuucauacagggaugg

SEQ ID NO: 3358882 - RNA, 11 nt, Human
augcuucauac

SEQ ID NO: 3358883 - RNA, 12 nt, Human
augcuucauaca

SEQ ID NO: 3358884 - RNA, 10 nt, Human
augcuucaua

SEQ ID NO: 3358885 - RNA, 23 nt, Human
augcuucauacagggaugguguu

SEQ ID NO: 3358886 - RNA, 15 nt, Human
uuuaugugaaacaug

SEQ ID NO: 3358887 - RNA, 11 nt, Human
uuuaugugugu

SEQ ID NO: 3358888 - RNA, 13 nt, Human
uuuaugugugugu

SEQ ID NO: 3358889 - RNA, 12 nt, Human
uuuaugugaugg

SEQ ID NO: 3358890 - RNA, 16 nt, Human
uuuaguaucuuuuuau

SEQ ID NO: 3358891 - RNA, 16 nt, Human
auggccugggggaugu

SEQ ID NO: 3358892 - RNA, 21 nt, Human
auggaaugaugggucaguugu

SEQ ID NO: 3358893 - RNA, 16 nt, Human
auggaaugcuguguua

SEQ ID NO: 3358894 - RNA, 15 nt, Human
uuucauaugcuguau

SEQ ID NO: 3358895 - RNA, 22 nt, Human
aucuuuaauuuuacauuuccua

SEQ ID NO: 3358896 - RNA, 21 nt, Human
aucuuuaauuuuacauuuccu

SEQ ID NO: 3358897 - RNA, 16 nt, Human
aucuuuaauuuuacau

SEQ ID NO: 3358898 - RNA, 13 nt, Human
aucuuuuuauuca

SEQ ID NO: 3358899 - RNA, 18 nt, Human
augagaaaucuaaaaaac

SEQ ID NO: 3358900 - RNA, 15 nt, Human
augagaaaucuaaaa

SEQ ID NO: 3358901 - RNA, 23 nt, Human
augagaaaucuaaaaaacgaaaa

SEQ ID NO: 3358902 - RNA, 16 nt, Human
aucuguaccucugccu

SEQ ID NO: 3358903 - RNA, 20 nt, Human
aucugagaggccacagugca

SEQ ID NO: 3358904 - RNA, 11 nt, Human
uugauguguuu

SEQ ID NO: 3358905 - RNA, 15 nt, Human
uugaugggauuuggu

SEQ ID NO: 3358906 - RNA, 12 nt, Human
uugaugccuggc

SEQ ID NO: 3358907 - RNA, 14 nt, Human
uugcaucugaaaau

SEQ ID NO: 3358908 - RNA, 16 nt, Human
aucuccccaucauugg

SEQ ID NO: 3358909 - RNA, 17 nt, Human
aucucauaauuuauaca

SEQ ID NO: 3358910 - RNA, 23 nt, Human
aucucagugguuaagauuccuaa

SEQ ID NO: 3358911 - RNA, 18 nt, Human
aucucauaauuuauacag

SEQ ID NO: 3358912 - RNA, 14 nt, Human
auucagcucaugga

SEQ ID NO: 3358913 - RNA, 15 nt, Human
auucagccuggcuuc

SEQ ID NO: 3358914 - RNA, 16 nt, Human
auuauauuuacaaaug

SEQ ID NO: 3358915 - RNA, 13 nt, Human
auuauuuuaaaag

SEQ ID NO: 3358916 - RNA, 14 nt, Human
auuauuuuaaaaga

SEQ ID NO: 3358917 - RNA, 16 nt, Human
auuauuuuauguugca

SEQ ID NO: 3358918 - RNA, 18 nt, Human
auuauuuuauguugcaua

SEQ ID NO: 3358919 - RNA, 15 nt, Human
auuauauuuacaaau

SEQ ID NO: 3358920 - RNA, 16 nt, Human
auuaagaucucagugg

SEQ ID NO: 3358921 - RNA, 15 nt, Human
auuaauauauuucca

SEQ ID NO: 3358922 - RNA, 17 nt, Human
uuuguaaauuuauguga

SEQ ID NO: 3358923 - RNA, 17 nt, Human
uuuguagcacugacaga

SEQ ID NO: 3358924 - RNA, 19 nt, Human
uuuguagcacugacagauu

SEQ ID NO: 3358925 - RNA, 11 nt, Human
uuuuaagaaau

SEQ ID NO: 3358926 - RNA, 16 nt, Human
uuuuaaguaaggaauu

SEQ ID NO: 3358927 - RNA, 13 nt, Human
augucaguaugug

SEQ ID NO: 3358928 - RNA, 17 nt, Human
auguaugcuucauacag

SEQ ID NO: 3358929 - RNA, 16 nt, Human
auguaugcuucauaca

SEQ ID NO: 3358930 - RNA, 20 nt, Human
auguaugcuucauacaggga

SEQ ID NO: 3358931 - RNA, 14 nt, Human
augucaguaugugg

SEQ ID NO: 3358932 - RNA, 19 nt, Human
uuugcuaugagcuggggau

SEQ ID NO: 3358933 - RNA, 23 nt, Human
uuugcucagugucuggcugcaga

SEQ ID NO: 3358934 - RNA, 19 nt, Human
uuuuaguugcaacuuugua

SEQ ID NO: 3358935 - RNA, 18 nt, Human
uuuuaugugaaacauguu

SEQ ID NO: 3358936 - RNA, 19 nt, Human
uuuuaugugaaacauguuu

SEQ ID NO: 3358937 - RNA, 16 nt, Human
uuuucuauaauuuaaa

SEQ ID NO: 3358938 - RNA, 21 nt, Human
uuuuauucagcucauggacuu

SEQ ID NO: 3358939 - RNA, 15 nt, Human
auguuuacagaggac

SEQ ID NO: 3358940 - RNA, 17 nt, Human
auguuuacagaggacag

SEQ ID NO: 3358941 - RNA, 19 nt, Human
auguuuacagaggacagua

SEQ ID NO: 3358942 - RNA, 15 nt, Human
auguugugauguauu

SEQ ID NO: 3358943 - RNA, 20 nt, Human
auuaaaaaaucaguuguaca

SEQ ID NO: 3358944 - RNA, 21 nt, Human
auuaacaugaauauuuagugu

SEQ ID NO: 3358945 - RNA, 21 nt, Human
auugcuaaucaccaaaggcuc

SEQ ID NO: 3358946 - RNA, 21 nt, Human
auuggcucuugaacugagcuu

SEQ ID NO: 3358947 - RNA, 15 nt, Human
auugugaaauuauuc

SEQ ID NO: 3358948 - RNA, 14 nt, Human
auuguauuacaaau

SEQ ID NO: 3358949 - RNA, 18 nt, Human
auuuaaaggcccuaucug

SEQ ID NO: 3358950 - RNA, 20 nt, Human
auuuaaaggcccuaucuguu

SEQ ID NO: 3358951 - RNA, 21 nt, Human
auuuaaaggcccuaucuguuu

SEQ ID NO: 3358952 - RNA, 19 nt, Human
auuuaaaauugugaugugu

SEQ ID NO: 3358953 - RNA, 20 nt, Human
auuuaaaauugugauguguc

SEQ ID NO: 3358954 - RNA, 16 nt, Human
auuuacaaaugggaaa

SEQ ID NO: 3358955 - RNA, 23 nt, Human
auugcaggagucccugccaucau

SEQ ID NO: 3358956 - RNA, 14 nt, Human
auuuuauguugcau

SEQ ID NO: 3358957 - RNA, 21 nt, Human
auuuuauguugcauagaauaa

SEQ ID NO: 3358958 - RNA, 18 nt, Human
auuuuauguugcauagaa

SEQ ID NO: 3358959 - RNA, 22 nt, Human
auuuuacuguacagacagaaaa

SEQ ID NO: 3358960 - RNA, 17 nt, Human
auuuuaccuuugacaaa

SEQ ID NO: 3358961 - RNA, 20 nt, Human
auuuuacuguacagacagaa

SEQ ID NO: 3358962 - RNA, 20 nt, Human
auuuggagacacaacuauuu

SEQ ID NO: 3358963 - RNA, 20 nt, Human
auuugaauguaugcuucaua

SEQ ID NO: 3358964 - RNA, 21 nt, Human
auuugaauguaugcuucauac

SEQ ID NO: 3358965 - RNA, 17 nt, Human
auuugaauguaugcuuc

SEQ ID NO: 3358966 - RNA, 18 nt, Human
auuugaauguaugcuuca

SEQ ID NO: 3358967 - RNA, 17 nt, Human
agcauuucccuuccuuc

SEQ ID NO: 3358968 - RNA, 18 nt, Human
agcauggcauauuuuuca

SEQ ID NO: 3358969 - RNA, 19 nt, Human
agcauggcauauuuuucac

SEQ ID NO: 3358970 - RNA, 21 nt, Human
agcauggcauauuuuucacau

SEQ ID NO: 3358971 - RNA, 22 nt, Human
agcauggcauauuuuucacaua

SEQ ID NO: 3358972 - RNA, 17 nt, Human
agcaugucgucaaagcu

SEQ ID NO: 3358973 - RNA, 20 nt, Human
agcaugucgucaaagcugaa

SEQ ID NO: 3358974 - RNA, 21 nt, Human
ugauagaaggcuauggggaua

SEQ ID NO: 3358975 - RNA, 18 nt, Human
ugaguucauaaauuuaug

SEQ ID NO: 3358976 - RNA, 24 nt, Human
ugaguuacuugcugcccugugcuc

SEQ ID NO: 3358977 - RNA, 24 nt, Human
ugauaagcagucauccucagauca

SEQ ID NO: 3358978 - RNA, 19 nt, Human
ugauacgcaacauaauuaa

SEQ ID NO: 3358979 - RNA, 23 nt, Human
ugauacacuaugaagauguuuca

SEQ ID NO: 3358980 - RNA, 21 nt, Human
agcauaauacuugcuuuggaa

SEQ ID NO: 3358981 - RNA, 22 nt, Human
ugaguaacugauuuguaacaag

SEQ ID NO: 3358982 - RNA, 15 nt, Human
ugauccagcccugag

SEQ ID NO: 3358983 - RNA, 17 nt, Human
ugauccagcccugaguu

SEQ ID NO: 3358984 - RNA, 18 nt, Human
ugauccagcccugaguuc

SEQ ID NO: 3358985 - RNA, 15 nt, Human
agccaggccacuggc

SEQ ID NO: 3358986 - RNA, 21 nt, Human
agcucaggaaccgaggcaggg

SEQ ID NO: 3358987 - RNA, 22 nt, Human
agcucaggaaccgaggcaggga

SEQ ID NO: 3358988 - RNA, 20 nt, Human
agcucaggaaccgaggcagg

SEQ ID NO: 3358989 - RNA, 18 nt, Human
agcuaggaauuguguuua

SEQ ID NO: 3358990 - RNA, 17 nt, Human
ugccagacccccuggag

SEQ ID NO: 3358991 - RNA, 20 nt, Human
agccuggucagcccaaacca

SEQ ID NO: 3358992 - RNA, 13 nt, Human
agccuguuuaaga

SEQ ID NO: 3358993 - RNA, 15 nt, Human
agccuggucagccca

SEQ ID NO: 3358994 - RNA, 16 nt, Human
agccuggucagcccaa

SEQ ID NO: 3358995 - RNA, 18 nt, Human
agcccaguucagcuuggg

SEQ ID NO: 3358996 - RNA, 11 nt, Human
ugcaggucccu

SEQ ID NO: 3358997 - RNA, 23 nt, Human
ugcauaacguauaaaagccuguu

SEQ ID NO: 3358998 - RNA, 22 nt, Human
ugcauaacguauaaaagccugu

SEQ ID NO: 3358999 - RNA, 16 nt, Human
ugcaggucccuaauaa

SEQ ID NO: 3359000 - RNA, 15 nt, Human
ugcaggucccuaaua

SEQ ID NO: 3359001 - RNA, 14 nt, Human
ugcaggucccuaau

SEQ ID NO: 3359002 - RNA, 12 nt, Human
ugcaggucccua

SEQ ID NO: 3359003 - RNA, 19 nt, Human
aggaucccaugagcuccuu

SEQ ID NO: 3359004 - RNA, 20 nt, Human
uggaagcuucuggugaccuu

SEQ ID NO: 3359005 - RNA, 12 nt, Human
aggacaguauuu

SEQ ID NO: 3359006 - RNA, 19 nt, Human
aggacaguauuugugggga

SEQ ID NO: 3359007 - RNA, 15 nt, Human
uggacugugugcuca

SEQ ID NO: 3359008 - RNA, 13 nt, Human
aggcaaucauggu

SEQ ID NO: 3359009 - RNA, 20 nt, Human
uggaauuauuuuaaaagaua

SEQ ID NO: 3359010 - RNA, 19 nt, Human
uggaauuauuuuaaaagau

SEQ ID NO: 3359011 - RNA, 21 nt, Human
uggccuguucuucuauggguu

SEQ ID NO: 3359012 - RNA, 23 nt, Human
uggccaguggcuggaucugugag

SEQ ID NO: 3359013 - RNA, 16 nt, Human
uggcauauuuuucaca

SEQ ID NO: 3359014 - RNA, 17 nt, Human
uggcauauuuuucacau

SEQ ID NO: 3359015 - RNA, 17 nt, Human
uggauuauauuaugaag

SEQ ID NO: 3359016 - RNA, 21 nt, Human
agcugggacaccccgacuuuu

SEQ ID NO: 3359017 - RNA, 18 nt, Human
agcugugugcucuccaag

SEQ ID NO: 3359018 - RNA, 16 nt, Human
agcuguguggcagucu

SEQ ID NO: 3359019 - RNA, 14 nt, Human
agcuguguggcagu

SEQ ID NO: 3359020 - RNA, 20 nt, Human
agcugugugcucuccaagcc

SEQ ID NO: 3359021 - RNA, 15 nt, Human
ugccugcccuauucu

SEQ ID NO: 3359022 - RNA, 23 nt, Human
agcuuggggacaggggcaggagg

SEQ ID NO: 3359023 - RNA, 15 nt, Human
ugcuguagacauuug

SEQ ID NO: 3359024 - RNA, 23 nt, Human
ugcuguauccauccauggggcug

SEQ ID NO: 3359025 - RNA, 14 nt, Human
ugcuucaucccuuu

SEQ ID NO: 3359026 - RNA, 23 nt, Human
agcuuuaucaaagggugaaaauu

SEQ ID NO: 3359027 - RNA, 15 nt, Human
agggggagagggcug

SEQ ID NO: 3359028 - RNA, 16 nt, Human
agggggagagggcugc

SEQ ID NO: 3359029 - RNA, 12 nt, Human
ugggucugugug

SEQ ID NO: 3359030 - RNA, 21 nt, Human
ugggucgcccuggacugugug

SEQ ID NO: 3359031 - RNA, 13 nt, Human
ugguaggaacugc

SEQ ID NO: 3359032 - RNA, 20 nt, Human
ugguaggaacugcugggcuu

SEQ ID NO: 3359033 - RNA, 16 nt, Human
uggguggggggcuuca

SEQ ID NO: 3359034 - RNA, 16 nt, Human
aggucauauuaauaua

SEQ ID NO: 3359035 - RNA, 18 nt, Human
aggucauauuaauauauu

SEQ ID NO: 3359036 - RNA, 19 nt, Human
aggucauauuaauauauuu

SEQ ID NO: 3359037 - RNA, 23 nt, Human
agguauaauucacauuguauuca

SEQ ID NO: 3359038 - RNA, 11 nt, Human
uggucagccca

SEQ ID NO: 3359039 - RNA, 12 nt, Human
uggucagcccaa

SEQ ID NO: 3359040 - RNA, 10 nt, Human
uggucagccc

SEQ ID NO: 3359041 - RNA, 14 nt, Human
uggucuccacuggg

SEQ ID NO: 3359042 - RNA, 18 nt, Human
uggggaguuuaggguggg

SEQ ID NO: 3359043 - RNA, 19 nt, Human
uggggaguuuagggugggg

SEQ ID NO: 3359044 - RNA, 14 nt, Human
uggggcugauugua

SEQ ID NO: 3359045 - RNA, 21 nt, Human
ugggguagguugggagaaugu

SEQ ID NO: 3359046 - RNA, 15 nt, Human
ugggguagguuggga

SEQ ID NO: 3359047 - RNA, 20 nt, Human
uggggacaggggcaggagga

SEQ ID NO: 3359048 - RNA, 22 nt, Human
uggggacaggggcaggaggaag

SEQ ID NO: 3359049 - RNA, 13 nt, Human
agucccugccugg

SEQ ID NO: 3359050 - RNA, 22 nt, Human
agucccugaggcagguccccag

SEQ ID NO: 3359051 - RNA, 23 nt, Human
agucccugaggcagguccccaga

SEQ ID NO: 3359052 - RNA, 15 nt, Human
agucccugccuggac

SEQ ID NO: 3359053 - RNA, 21 nt, Human
agucccugccuggaccagccu

SEQ ID NO: 3359054 - RNA, 14 nt, Human
agucccugccugga

SEQ ID NO: 3359055 - RNA, 22 nt, Human
agucccugccuggaccagccuc

SEQ ID NO: 3359056 - RNA, 23 nt, Human
agucccugccuggaccagccucu

SEQ ID NO: 3359057 - RNA, 19 nt, Human
agucccugaggcagguccc

SEQ ID NO: 3359058 - RNA, 20 nt, Human
agucccugaggcaggucccc

SEQ ID NO: 3359059 - RNA, 15 nt, Human
aguauguggaagugu

SEQ ID NO: 3359060 - RNA, 17 nt, Human
aguauguggaagugugg

SEQ ID NO: 3359061 - RNA, 19 nt, Human
aguauguggaagugugggu

SEQ ID NO: 3359062 - RNA, 16 nt, Human
aguauuugagaguucu

SEQ ID NO: 3359063 - RNA, 19 nt, Human
ugucaguauguggaagugu

SEQ ID NO: 3359064 - RNA, 20 nt, Human
ugucaguauguggaagugug

SEQ ID NO: 3359065 - RNA, 18 nt, Human
ugucaguauguggaagug

SEQ ID NO: 3359066 - RNA, 22 nt, Human
ugucaguauguggaaguguggg

SEQ ID NO: 3359067 - RNA, 11 nt, Human
uguauuaugug

SEQ ID NO: 3359068 - RNA, 23 nt, Human
agguugggagaaugucaguaugu

SEQ ID NO: 3359069 - RNA, 17 nt, Human
uguaauuuaaaauugug

SEQ ID NO: 3359070 - RNA, 18 nt, Human
uguaauuuaaaauuguga

SEQ ID NO: 3359071 - RNA, 20 nt, Human
uguaauuuaaaauugugaug

SEQ ID NO: 3359072 - RNA, 18 nt, Human
agguccccagcuuuggcu

SEQ ID NO: 3359073 - RNA, 11 nt, Human
agguccccaga

SEQ ID NO: 3359074 - RNA, 17 nt, Human
agguccccagcuuuggc

SEQ ID NO: 3359075 - RNA, 10 nt, Human
aggucccuaa

SEQ ID NO: 3359076 - RNA, 21 nt, Human
uguaauuuaaaauugugaugu

SEQ ID NO: 3359077 - RNA, 22 nt, Human
uguaauuuaaaauugugaugug

SEQ ID NO: 3359078 - RNA, 23 nt, Human
aguaaggaauuuuauuuuuuucu

SEQ ID NO: 3359079 - RNA, 19 nt, Human
aguagaacagauaaucagu

SEQ ID NO: 3359080 - RNA, 13 nt, Human
aguagaacagaua

SEQ ID NO: 3359081 - RNA, 19 nt, Human
aguacuuuuggcauuuuac

SEQ ID NO: 3359082 - RNA, 15 nt, Human
aguaauccaagcaaa

SEQ ID NO: 3359083 - RNA, 21 nt, Human
aguaauccaagcaaaugugaa

SEQ ID NO: 3359084 - RNA, 19 nt, Human
uguggcacuggggcagggg

SEQ ID NO: 3359085 - RNA, 13 nt, Human
uguggucuccacu

SEQ ID NO: 3359086 - RNA, 16 nt, Human
uguguguguguaugug

SEQ ID NO: 3359087 - RNA, 13 nt, Human
uguguguguguau

SEQ ID NO: 3359088 - RNA, 16 nt, Human
agugugggucugugug

SEQ ID NO: 3359089 - RNA, 17 nt, Human
agugugggucugugugu

SEQ ID NO: 3359090 - RNA, 15 nt, Human
agugugggucugugu

SEQ ID NO: 3359091 - RNA, 21 nt, Human
aguggacuguucccugaggug

SEQ ID NO: 3359092 - RNA, 19 nt, Human
agugugggucugugugugu

SEQ ID NO: 3359093 - RNA, 23 nt, Human
agugugggucuguguguguguau

SEQ ID NO: 3359094 - RNA, 19 nt, Human
aguguguguuuuucauaaa

SEQ ID NO: 3359095 - RNA, 14 nt, Human
uguuguguguggga

SEQ ID NO: 3359096 - RNA, 15 nt, Human
uguugugugugggag

SEQ ID NO: 3359097 - RNA, 16 nt, Human
uguugugugugggagu

SEQ ID NO: 3359098 - RNA, 20 nt, Human
uguugugauguauucuagcu

SEQ ID NO: 3359099 - RNA, 14 nt, Human
uguugugauguauu

SEQ ID NO: 3359100 - RNA, 13 nt, Human
uguugugaauguu

SEQ ID NO: 3359101 - RNA, 12 nt, Human
uguugugaaugu

SEQ ID NO: 3359102 - RNA, 13 nt, Human
uguuuaguaauca

SEQ ID NO: 3359103 - RNA, 17 nt, Human
uguuuaguaaucauauu

SEQ ID NO: 3359104 - RNA, 14 nt, Human
uguuuaguaaucau

SEQ ID NO: 3359105 - RNA, 17 nt, Human
aguuccuagccaccgcc

SEQ ID NO: 3359106 - RNA, 15 nt, Human
aguucuacauaagua

SEQ ID NO: 3359107 - RNA, 19 nt, Human
aguucggugagcuacaaau

SEQ ID NO: 3359108 - RNA, 22 nt, Human
auaacgauaaaagacagugaaa

SEQ ID NO: 3359109 - RNA, 14 nt, Human
auaacguauaaaag

SEQ ID NO: 3359110 - RNA, 13 nt, Human
auaacugugaagu

SEQ ID NO: 3359111 - RNA, 18 nt, Human
auaaauauuuuugccaua

SEQ ID NO: 3359112 - RNA, 13 nt, Human
auaaauaaaaaua

SEQ ID NO: 3359113 - RNA, 17 nt, Human
auaaagguucaugcaaa

SEQ ID NO: 3359114 - RNA, 15 nt, Human
auaaagguucaugca

SEQ ID NO: 3359115 - RNA, 20 nt, Human
uuaccuuugacaaagguaaa

SEQ ID NO: 3359116 - RNA, 13 nt, Human
uuaccuuugacaa

SEQ ID NO: 3359117 - RNA, 16 nt, Human
uuagccuuugucccag

SEQ ID NO: 3359118 - RNA, 18 nt, Human
auaauccuaaacauauga

SEQ ID NO: 3359119 - RNA, 19 nt, Human
auaauacuugcuuuggaaa

SEQ ID NO: 3359120 - RNA, 14 nt, Human
aguuuaaauuguaa

SEQ ID NO: 3359121 - RNA, 14 nt, Human
uuaaguauguguaa

SEQ ID NO: 3359122 - RNA, 18 nt, Human
auaaaagccuguuuaaga

SEQ ID NO: 3359123 - RNA, 13 nt, Human
auaaaagccuguu

SEQ ID NO: 3359124 - RNA, 22 nt, Human
acucgugucuggcacagccugg

SEQ ID NO: 3359125 - RNA, 23 nt, Human
acucgugucuggcacagccuggc

SEQ ID NO: 3359126 - RNA, 13 nt, Human
acucuugaaaaau

SEQ ID NO: 3359127 - RNA, 20 nt, Human
uccuagccacccaccacacu

SEQ ID NO: 3359128 - RNA, 21 nt, Human
uccuagccaccgccuccuaca

SEQ ID NO: 3359129 - RNA, 13 nt, Human
uccucuccugucu

SEQ ID NO: 3359130 - RNA, 19 nt, Human
acucuugaaaaaugcaugu

SEQ ID NO: 3359131 - RNA, 14 nt, Human
acucuugaaaaaug

SEQ ID NO: 3359132 - RNA, 16 nt, Human
uccucugcccgggagc

SEQ ID NO: 3359133 - RNA, 22 nt, Human
uccucugcccgggagcucagga

SEQ ID NO: 3359134 - RNA, 13 nt, Human
acugaaacuuccc

SEQ ID NO: 3359135 - RNA, 14 nt, Human
acucagaauauugc

SEQ ID NO: 3359136 - RNA, 14 nt, Human
acuccaccaagccu

SEQ ID NO: 3359137 - RNA, 21 nt, Human
acucaucuagguaaauuacag

SEQ ID NO: 3359138 - RNA, 23 nt, Human
acucaucuagguaaauuacaguu

SEQ ID NO: 3359139 - RNA, 22 nt, Human
acuaugacauaaaaacaacuuu

SEQ ID NO: 3359140 - RNA, 16 nt, Human
uccauccuacccccug

SEQ ID NO: 3359141 - RNA, 20 nt, Human
uccauccuacccccugugcc

SEQ ID NO: 3359142 - RNA, 20 nt, Human
uccaucucuuguuuaaauuc

SEQ ID NO: 3359143 - RNA, 22 nt, Human
acgaagaguauuuuugacagaa

SEQ ID NO: 3359144 - RNA, 20 nt, Human
acgaagaguauuuuugacag

SEQ ID NO: 3359145 - RNA, 16 nt, Human
ucauaauaaguugcau

SEQ ID NO: 3359146 - RNA, 19 nt, Human
uccaaaaagauuuucagaa

SEQ ID NO: 3359147 - RNA, 20 nt, Human
accuggcuuuucuuucuacc

SEQ ID NO: 3359148 - RNA, 15 nt, Human
accuuccaagagccu

SEQ ID NO: 3359149 - RNA, 16 nt, Human
accuuccaagagccug

SEQ ID NO: 3359150 - RNA, 21 nt, Human
acccagauaaagguucaugca

SEQ ID NO: 3359151 - RNA, 14 nt, Human
ucacucuuggagcc

SEQ ID NO: 3359152 - RNA, 16 nt, Human
ucacucuuggagccug

SEQ ID NO: 3359153 - RNA, 17 nt, Human
ucacucuuggagccugc

SEQ ID NO: 3359154 - RNA, 18 nt, Human
ucacucuuggagccugca

SEQ ID NO: 3359155 - RNA, 19 nt, Human
ucacuuaucccaagagaau

SEQ ID NO: 3359156 - RNA, 19 nt, Human
accccagcuggggccaggc

SEQ ID NO: 3359157 - RNA, 16 nt, Human
ucagaauagaaauuag

SEQ ID NO: 3359158 - RNA, 16 nt, Human
ucaguauguggaagug

SEQ ID NO: 3359159 - RNA, 19 nt, Human
ucaguuugcuagcagaaau

SEQ ID NO: 3359160 - RNA, 18 nt, Human
ucauaaauaaaguuuguu

SEQ ID NO: 3359161 - RNA, 24 nt, Human
ucauaaagcaggcagaacucaucu

SEQ ID NO: 3359162 - RNA, 18 nt, Human
accaaauaaaaauauugu

SEQ ID NO: 3359163 - RNA, 16 nt, Human
accaaauaaaaauauu

SEQ ID NO: 3359164 - RNA, 21 nt, Human
acauuguaaauaguauuugag

SEQ ID NO: 3359165 - RNA, 19 nt, Human
acauuguaaauaguauuug

SEQ ID NO: 3359166 - RNA, 17 nt, Human
acauuguaaauaguauu

SEQ ID NO: 3359167 - RNA, 14 nt, Human
uauguguaaaaugu

SEQ ID NO: 3359168 - RNA, 18 nt, Human
uaugugggggucugugug

SEQ ID NO: 3359169 - RNA, 19 nt, Human
uaugugggggucugugugu

SEQ ID NO: 3359170 - RNA, 20 nt, Human
uaugugggggucuguguguu

SEQ ID NO: 3359171 - RNA, 19 nt, Human
uaugugccagauuuaugca

SEQ ID NO: 3359172 - RNA, 14 nt, Human
uaugugccagauuu

SEQ ID NO: 3359173 - RNA, 21 nt, Human
uauuuuaaaagauaaauauua

SEQ ID NO: 3359174 - RNA, 22 nt, Human
uauuuuaagacgaaacauuugu

SEQ ID NO: 3359175 - RNA, 14 nt, Human
uauuuuaagacgaa

SEQ ID NO: 3359176 - RNA, 13 nt, Human
uauuuuuguagca

SEQ ID NO: 3359177 - RNA, 12 nt, Human
uauuuuucacau

SEQ ID NO: 3359178 - RNA, 13 nt, Human
uauuuuucacaua

SEQ ID NO: 3359179 - RNA, 15 nt, Human
uauuuuguucauaca

SEQ ID NO: 3359180 - RNA, 16 nt, Human
uauuuuguucauacau

SEQ ID NO: 3359181 - RNA, 20 nt, Human
uauuuuguguuuaggaacua

SEQ ID NO: 3359182 - RNA, 17 nt, Human
uauuuuguguuuaggaa

SEQ ID NO: 3359183 - RNA, 17 nt, Human
uauuuuaauaaacacuc

SEQ ID NO: 3359184 - RNA, 14 nt, Human
uauuuuaauaaaca

SEQ ID NO: 3359185 - RNA, 15 nt, Human
uauuuuuguagcacu

SEQ ID NO: 3359186 - RNA, 13 nt, Human
ucaaauauauuca

SEQ ID NO: 3359187 - RNA, 20 nt, Human
ucggggagccgggagccuga

SEQ ID NO: 3359188 - RNA, 21 nt, Human
ucuaagauaguaacaaugaag

SEQ ID NO: 3359189 - RNA, 16 nt, Human
acuggggcaggggccg

SEQ ID NO: 3359190 - RNA, 18 nt, Human
ucgcccuggacugugugc

SEQ ID NO: 3359191 - RNA, 18 nt, Human
acuguacagacagaaaaa

SEQ ID NO: 3359192 - RNA, 23 nt, Human
acuguacuugcucuugaugccug

SEQ ID NO: 3359193 - RNA, 15 nt, Human
acuguacuugcucuu

SEQ ID NO: 3359194 - RNA, 23 nt, Human
acuugucccgggacaccuaggcu

SEQ ID NO: 3359195 - RNA, 14 nt, Human
acuuguauuaugug

SEQ ID NO: 3359196 - RNA, 13 nt, Human
acuuguauuaugu

SEQ ID NO: 3359197 - RNA, 18 nt, Human
acuugaaaauuaacauga

SEQ ID NO: 3359198 - RNA, 16 nt, Human
acuugaaaauuaacau

SEQ ID NO: 3359199 - RNA, 17 nt, Human
acuugaaaauuaacaug

SEQ ID NO: 3359200 - RNA, 22 nt, Human
acuucccuuucugcuuguguua

SEQ ID NO: 3359201 - RNA, 14 nt, Human
acuucccuuucugc

SEQ ID NO: 3359202 - RNA, 15 nt, Human
ucuaccucuuggcug

SEQ ID NO: 3359203 - RNA, 13 nt, Human
ucuauaauuuaaa

SEQ ID NO: 3359204 - RNA, 17 nt, Human
acuucccagugaauucu

SEQ ID NO: 3359205 - RNA, 17 nt, Human
ucuagcauggcauauuu

SEQ ID NO: 3359206 - RNA, 22 nt, Human
ucuggcacagccuggcuguggc

SEQ ID NO: 3359207 - RNA, 16 nt, Human
agaaggaucuucaucu

SEQ ID NO: 3359208 - RNA, 13 nt, Human
agaauaaacuggc

SEQ ID NO: 3359209 - RNA, 23 nt, Human
ucugcaggucccuaauaaagcug

SEQ ID NO: 3359210 - RNA, 22 nt, Human
ucugcaggucccuaauaaagcu

SEQ ID NO: 3359211 - RNA, 19 nt, Human
ucugcaggucccuaauaaa

SEQ ID NO: 3359212 - RNA, 21 nt, Human
ucugcaggucccuaauaaagc

SEQ ID NO: 3359213 - RNA, 14 nt, Human
agaaaucuagaaga

SEQ ID NO: 3359214 - RNA, 12 nt, Human
agaaaugaaaaa

SEQ ID NO: 3359215 - RNA, 13 nt, Human
agaaaugaaaaaa

SEQ ID NO: 3359216 - RNA, 15 nt, Human
agaaaucuaaaaaac

SEQ ID NO: 3359217 - RNA, 18 nt, Human
ucucugcaggucccuaau

SEQ ID NO: 3359218 - RNA, 20 nt, Human
agaaaacaaaaaaaccucua

SEQ ID NO: 3359219 - RNA, 22 nt, Human
ucucugcaggucccuaauaaag

SEQ ID NO: 3359220 - RNA, 21 nt, Human
ucucugcaggucccuaauaaa

SEQ ID NO: 3359221 - RNA, 20 nt, Human
ucucugcaggucccuaauaa

SEQ ID NO: 3359222 - RNA, 19 nt, Human
ucucugcaggucccuaaua

SEQ ID NO: 3359223 - RNA, 19 nt, Human
acuuuguauaaaagggacu

SEQ ID NO: 3359224 - RNA, 22 nt, Human
ucuuggggaguuuagggugggg

SEQ ID NO: 3359225 - RNA, 23 nt, Human
ucuuggggaguuuaggguggggg

SEQ ID NO: 3359226 - RNA, 15 nt, Human
ucuuuaacucauaaa

SEQ ID NO: 3359227 - RNA, 21 nt, Human
ucuugaugccuggcggggugg

SEQ ID NO: 3359228 - RNA, 19 nt, Human
agacauucuuccaaaaaga

SEQ ID NO: 3359229 - RNA, 13 nt, Human
agacccccuggag

SEQ ID NO: 3359230 - RNA, 14 nt, Human
agacccccuggaga

SEQ ID NO: 3359231 - RNA, 15 nt, Human
agacccccuggagac

SEQ ID NO: 3359232 - RNA, 19 nt, Human
agacccccuggagacuaac

SEQ ID NO: 3359233 - RNA, 17 nt, Human
agagacgggcccuggug

SEQ ID NO: 3359234 - RNA, 20 nt, Human
agagcaaaauugauguguuu

SEQ ID NO: 3359235 - RNA, 14 nt, Human
agagagaaaauaaa

SEQ ID NO: 3359236 - RNA, 20 nt, Human
ugaaaagcuccauuuuuagu

SEQ ID NO: 3359237 - RNA, 13 nt, Human
ugaaaauauuuaa

SEQ ID NO: 3359238 - RNA, 14 nt, Human
ugaaaauauuuaaa

SEQ ID NO: 3359239 - RNA, 11 nt, Human
ugaaaauauuu

SEQ ID NO: 3359240 - RNA, 12 nt, Human
ugaaaauauuua

SEQ ID NO: 3359241 - RNA, 12 nt, Human
ugaaacuuggau

SEQ ID NO: 3359242 - RNA, 22 nt, Human
ugaaaaagaccuuuggagcaaa

SEQ ID NO: 3359243 - RNA, 23 nt, Human
ugaaaaaauauauaucaaauaua

SEQ ID NO: 3359244 - RNA, 15 nt, Human
agauggaaugcugug

SEQ ID NO: 3359245 - RNA, 13 nt, Human
agauggaaugcug

SEQ ID NO: 3359246 - RNA, 18 nt, Human
agauggaaugcuguguua

SEQ ID NO: 3359247 - RNA, 18 nt, Human
ugaccuuccaagagccug

SEQ ID NO: 3359248 - RNA, 19 nt, Human
ugaccuuccaagagccuga

SEQ ID NO: 3359249 - RNA, 20 nt, Human
ugaccuuccaagagccugag

SEQ ID NO: 3359250 - RNA, 22 nt, Human
agagggacuguucuuuuguccc

SEQ ID NO: 3359251 - RNA, 14 nt, Human
ugaaaguacauuug

SEQ ID NO: 3359252 - RNA, 23 nt, Human
ugaaaguacauuuggagacacaa

SEQ ID NO: 3359253 - RNA, 22 nt, Human
agaggugugcaagagagggaug

SEQ ID NO: 3359254 - RNA, 23 nt, Human
agaggugugcaagagagggaugc

SEQ ID NO: 3359255 - RNA, 14 nt, Human
agaguauuuuugac

SEQ ID NO: 3359256 - RNA, 20 nt, Human
ugaagcuaucguaaaauuaa

SEQ ID NO: 3359257 - RNA, 15 nt, Human
ugaauacuuuauaaa

SEQ ID NO: 3359258 - RNA, 17 nt, Human
agaguauuuuugacaga

SEQ ID NO: 3359259 - RNA, 18 nt, Human
agaguauuuuugacagaa

SEQ ID NO: 3359260 - RNA, 14 nt, Human
ugaauguaugcuuc

SEQ ID NO: 3359261 - RNA, 19 nt, Human
ugaauguaugcuucauaca

SEQ ID NO: 3359262 - RNA, 20 nt, Human
ugaauguaugcuucauacag

SEQ ID NO: 3359263 - RNA, 23 nt, Human
ugaauguaugcuucauacaggga

SEQ ID NO: 3359264 - RNA, 20 nt, Human
agaguauuuuugacagaaua

SEQ ID NO: 3359265 - RNA, 15 nt, Human
agaguauuuuugaca

SEQ ID NO: 3359266 - RNA, 21 nt, Human
ugaauuugugaagguggaaau

SEQ ID NO: 3359267 - RNA, 13 nt, Human
ugaauuugugaag

SEQ ID NO: 3359268 - RNA, 23 nt, Human
ugaauuugugaagguggaaauaa

SEQ ID NO: 3359269 - RNA, 19 nt, Human
gucucccuccucugcccgg

SEQ ID NO: 3359270 - RNA, 20 nt, Human
aaccacauuggagauguuua

SEQ ID NO: 3359271 - RNA, 14 nt, Human
aaccaccagaagcc

SEQ ID NO: 3359272 - RNA, 17 nt, Human
aaccaccagaagcccag

SEQ ID NO: 3359273 - RNA, 22 nt, Human
aacccaagguggguagaucacg

SEQ ID NO: 3359274 - RNA, 14 nt, Human
aacccagauaaagg

SEQ ID NO: 3359275 - RNA, 17 nt, Human
aaccccccauuucuucc

SEQ ID NO: 3359276 - RNA, 20 nt, Human
aaccccuggcuccaggccag

SEQ ID NO: 3359277 - RNA, 17 nt, Human
gucuggcacagccuggc

SEQ ID NO: 3359278 - RNA, 19 nt, Human
gucuggcacagccuggcug

SEQ ID NO: 3359279 - RNA, 16 nt, Human
gucuuucacauuuaaa

SEQ ID NO: 3359280 - RNA, 22 nt, Human
aacucaucuagguaaauuacag

SEQ ID NO: 3359281 - RNA, 18 nt, Human
aacuucccagugaauucu

SEQ ID NO: 3359282 - RNA, 12 nt, Human
gugcaagagagg

SEQ ID NO: 3359283 - RNA, 18 nt, Human
guauaaaagggacugaga

SEQ ID NO: 3359284 - RNA, 21 nt, Human
guaugcuucauacagggaugg

SEQ ID NO: 3359285 - RNA, 12 nt, Human
guaugcuucaua

SEQ ID NO: 3359286 - RNA, 13 nt, Human
guaugcuucauac

SEQ ID NO: 3359287 - RNA, 14 nt, Human
guaugcuucauaca

SEQ ID NO: 3359288 - RNA, 15 nt, Human
guaugcuucauacag

SEQ ID NO: 3359289 - RNA, 19 nt, Human
guauaaaagggacugagaa

SEQ ID NO: 3359290 - RNA, 12 nt, Human
guauuuuugaca

SEQ ID NO: 3359291 - RNA, 15 nt, Human
guauuuuugacagaa

SEQ ID NO: 3359292 - RNA, 17 nt, Human
gucaacacuaacaugau

SEQ ID NO: 3359293 - RNA, 15 nt, Human
aaauugugauguguc

SEQ ID NO: 3359294 - RNA, 12 nt, Human
aaauugugaugu

SEQ ID NO: 3359295 - RNA, 12 nt, Human
aaauuuauguga

SEQ ID NO: 3359296 - RNA, 15 nt, Human
aaauuuaugugaugg

SEQ ID NO: 3359297 - RNA, 20 nt, Human
aaauuguaagcaugcacaaa

SEQ ID NO: 3359298 - RNA, 18 nt, Human
aaauucugucucuggauu

SEQ ID NO: 3359299 - RNA, 19 nt, Human
aaauuguaagcaugcacaa

SEQ ID NO: 3359300 - RNA, 16 nt, Human
aaauucugucucugga

SEQ ID NO: 3359301 - RNA, 14 nt, Human
aaauuaagaaagga

SEQ ID NO: 3359302 - RNA, 13 nt, Human
aacagauaaucag

SEQ ID NO: 3359303 - RNA, 13 nt, Human
gucaguuguauca

SEQ ID NO: 3359304 - RNA, 21 nt, Human
gucaguauguggaaguguggg

SEQ ID NO: 3359305 - RNA, 17 nt, Human
gucaguauguggaagug

SEQ ID NO: 3359306 - RNA, 13 nt, Human
gucagaauagaaa

SEQ ID NO: 3359307 - RNA, 17 nt, Human
gucagaauagaaauuag

SEQ ID NO: 3359308 - RNA, 19 nt, Human
aacaagaugguucuagcau

SEQ ID NO: 3359309 - RNA, 12 nt, Human
aacaauaaaaga

SEQ ID NO: 3359310 - RNA, 14 nt, Human
aaggcucuuuugua

SEQ ID NO: 3359311 - RNA, 16 nt, Human
aagggugaaaauuauu

SEQ ID NO: 3359312 - RNA, 15 nt, Human
aagggugaaaauuau

SEQ ID NO: 3359313 - RNA, 16 nt, Human
aaguaaggaauuuuau

SEQ ID NO: 3359314 - RNA, 12 nt, Human
guuucaaacuuu

SEQ ID NO: 3359315 - RNA, 13 nt, Human
guuuacaguguuc

SEQ ID NO: 3359316 - RNA, 15 nt, Human
guuuacaguguuccg

SEQ ID NO: 3359317 - RNA, 13 nt, Human
aaggauaaugaau

SEQ ID NO: 3359318 - RNA, 22 nt, Human
aaggcccuaucuguuuacagug

SEQ ID NO: 3359319 - RNA, 22 nt, Human
aaggaaccaaagcgaauuuuaa

SEQ ID NO: 3359320 - RNA, 23 nt, Human
aaggaaccaaagcgaauuuuaaa

SEQ ID NO: 3359321 - RNA, 20 nt, Human
uaaaagacagugaaagaaaa

SEQ ID NO: 3359322 - RNA, 22 nt, Human
uaaaaauauuguguugugaaug

SEQ ID NO: 3359323 - RNA, 21 nt, Human
uaaaaauaaaaaacacuggga

SEQ ID NO: 3359324 - RNA, 19 nt, Human
uaaaaauaaaaaacacugg

SEQ ID NO: 3359325 - RNA, 18 nt, Human
uaaaaauaaaaaacacug

SEQ ID NO: 3359326 - RNA, 12 nt, Human
uaaaagaauugu

SEQ ID NO: 3359327 - RNA, 15 nt, Human
guuuuucauaaagca

SEQ ID NO: 3359328 - RNA, 16 nt, Human
aagucuuucacauuua

SEQ ID NO: 3359329 - RNA, 22 nt, Human
aagucuuauauauuguagauaa

SEQ ID NO: 3359330 - RNA, 21 nt, Human
guggccuaaccugccgagagu

SEQ ID NO: 3359331 - RNA, 22 nt, Human
guggccuaaccugccgagaguc

SEQ ID NO: 3359332 - RNA, 21 nt, Human
aagaccuuuggagcaaagcug

SEQ ID NO: 3359333 - RNA, 23 nt, Human
aagaccuugcuuaugauugcaga

SEQ ID NO: 3359334 - RNA, 19 nt, Human
gugggguagguugggagaa

SEQ ID NO: 3359335 - RNA, 14 nt, Human
aagaggcugcagcc

SEQ ID NO: 3359336 - RNA, 18 nt, Human
aagaucucagugguuaag

SEQ ID NO: 3359337 - RNA, 12 nt, Human
guguguaugugg

SEQ ID NO: 3359338 - RNA, 14 nt, Human
gugugggucugugu

SEQ ID NO: 3359339 - RNA, 20 nt, Human
gugugucacccuuaggccag

SEQ ID NO: 3359340 - RNA, 13 nt, Human
guguguauguggg

SEQ ID NO: 3359341 - RNA, 15 nt, Human
guguguauguggggg

SEQ ID NO: 3359342 - RNA, 18 nt, Human
aagccaagaggcugcagc

SEQ ID NO: 3359343 - RNA, 22 nt, Human
aagccaagaggcugcagccagg

SEQ ID NO: 3359344 - RNA, 18 nt, Human
aagcccaguucagcuugg

SEQ ID NO: 3359345 - RNA, 19 nt, Human
aagcccaguucagcuuggg

SEQ ID NO: 3359346 - RNA, 22 nt, Human
aagccugcaauuucauaugcug

SEQ ID NO: 3359347 - RNA, 17 nt, Human
aagccugcaauuucaua

SEQ ID NO: 3359348 - RNA, 20 nt, Human
guuauuauauuuacaaaugg

SEQ ID NO: 3359349 - RNA, 14 nt, Human
guuaagauuccuaa

SEQ ID NO: 3359350 - RNA, 15 nt, Human
uacccccugugccuu

SEQ ID NO: 3359351 - RNA, 13 nt, Human
uaccucuuggcug

SEQ ID NO: 3359352 - RNA, 23 nt, Human
uaccugaagcuaucguaaaauua

SEQ ID NO: 3359353 - RNA, 21 nt, Human
aauucagaaggaucuucaucu

SEQ ID NO: 3359354 - RNA, 15 nt, Human
aauucagaaggaucu

SEQ ID NO: 3359355 - RNA, 12 nt, Human
aauuauuuuaaa

SEQ ID NO: 3359356 - RNA, 20 nt, Human
aauucaagaaaacaacuuca

SEQ ID NO: 3359357 - RNA, 12 nt, Human
aauucaagaaaa

SEQ ID NO: 3359358 - RNA, 15 nt, Human
aauuauuuuaaaaga

SEQ ID NO: 3359359 - RNA, 22 nt, Human
aauuaugugccagauuuaugca

SEQ ID NO: 3359360 - RNA, 19 nt, Human
uaccagagaaaaagggagg

SEQ ID NO: 3359361 - RNA, 13 nt, Human
uacauuuccuaaa

SEQ ID NO: 3359362 - RNA, 17 nt, Human
uacagggaugguguuca

SEQ ID NO: 3359363 - RNA, 13 nt, Human
uacagaauuuuau

SEQ ID NO: 3359364 - RNA, 19 nt, Human
uaauuuaaaauugugaugu

SEQ ID NO: 3359365 - RNA, 20 nt, Human
uaauuuaaaauugugaugug

SEQ ID NO: 3359366 - RNA, 16 nt, Human
uaauuuaaaauuguga

SEQ ID NO: 3359367 - RNA, 22 nt, Human
uaauuccguagguuauuuucag

SEQ ID NO: 3359368 - RNA, 22 nt, Human
aaugagaaaucuaaaaaacgaa

SEQ ID NO: 3359369 - RNA, 12 nt, Human
aaugagaaaucu

SEQ ID NO: 3359370 - RNA, 17 nt, Human
uaacguauaaaagccug

SEQ ID NO: 3359371 - RNA, 13 nt, Human
uaacguauaaaag

SEQ ID NO: 3359372 - RNA, 20 nt, Human
uaacgauaaaagacagugaa

SEQ ID NO: 3359373 - RNA, 14 nt, Human
uaacaugaauauuu

SEQ ID NO: 3359374 - RNA, 21 nt, Human
uaacaugaauauuuaguguuc

SEQ ID NO: 3359375 - RNA, 20 nt, Human
uaacaugaauauuuaguguu

SEQ ID NO: 3359376 - RNA, 19 nt, Human
uaacaugaauauuuagugu

SEQ ID NO: 3359377 - RNA, 18 nt, Human
aauauauuuuaagacgaa

SEQ ID NO: 3359378 - RNA, 14 nt, Human
aauauauuuaauga

SEQ ID NO: 3359379 - RNA, 21 nt, Human
aauauauuuuaagacgaaaca

SEQ ID NO: 3359380 - RNA, 21 nt, Human
aauauauucagccuggcuuca

SEQ ID NO: 3359381 - RNA, 20 nt, Human
aauagagcaaaauugaugug

SEQ ID NO: 3359382 - RNA, 22 nt, Human
aauagagcaaaauugauguguu

SEQ ID NO: 3359383 - RNA, 17 nt, Human
uaacaaugaagauaaaa

SEQ ID NO: 3359384 - RNA, 22 nt, Human
uaagcagauggaaugcuguguu

SEQ ID NO: 3359385 - RNA, 22 nt, Human
uaaggaauuuuauuuuuuucug

SEQ ID NO: 3359386 - RNA, 17 nt, Human
uaaguguguguuuuuca

SEQ ID NO: 3359387 - RNA, 16 nt, Human
uaaguaauucaagaaa

SEQ ID NO: 3359388 - RNA, 22 nt, Human
aaucagugugucuaaauuugaa

SEQ ID NO: 3359389 - RNA, 18 nt, Human
aaucagugugucuaaauu

SEQ ID NO: 3359390 - RNA, 17 nt, Human
aaucagugugucuaaau

SEQ ID NO: 3359391 - RNA, 14 nt, Human
aaucagugugucua

SEQ ID NO: 3359392 - RNA, 20 nt, Human
aauccucaguuuuugugaaa

SEQ ID NO: 3359393 - RNA, 15 nt, Human
aaucuaugauuccag

SEQ ID NO: 3359394 - RNA, 18 nt, Human
aaucuaugauuccaggug

SEQ ID NO: 3359395 - RNA, 20 nt, Human
uaugccaccugaauaaagaa

SEQ ID NO: 3359396 - RNA, 17 nt, Human
uaugauacuugaaaauu

SEQ ID NO: 3359397 - RNA, 21 nt, Human
uaugguaggaacugcugggcu

SEQ ID NO: 3359398 - RNA, 18 nt, Human
acagcggcuggacuugga

SEQ ID NO: 3359399 - RNA, 23 nt, Human
uaugaagcuuuuaugugaaacau

SEQ ID NO: 3359400 - RNA, 22 nt, Human
uaugaagcuuuuaugugaaaca

SEQ ID NO: 3359401 - RNA, 20 nt, Human
uaugaagcuuuuaugugaaa

SEQ ID NO: 3359402 - RNA, 16 nt, Human
acacucaguuguucaa

SEQ ID NO: 3359403 - RNA, 20 nt, Human
uauauccuuucuaacaaaaa

SEQ ID NO: 3359404 - RNA, 17 nt, Human
uauauccuuucuaacaa

SEQ ID NO: 3359405 - RNA, 11 nt, Human
uauauauuucc

SEQ ID NO: 3359406 - RNA, 15 nt, Human
uauacaggucauauu

SEQ ID NO: 3359407 - RNA, 16 nt, Human
uauacaggucauauua

SEQ ID NO: 3359408 - RNA, 19 nt, Human
uauaagugauugcugguuu

SEQ ID NO: 3359409 - RNA, 14 nt, Human
uaucagcacgugug

SEQ ID NO: 3359410 - RNA, 18 nt, Human
uaucaaagggugaaaauu

SEQ ID NO: 3359411 - RNA, 19 nt, Human
uaucaaagggugaaaauua

SEQ ID NO: 3359412 - RNA, 22 nt, Human
uaucaaagggugaaaauuauuu

SEQ ID NO: 3359413 - RNA, 12 nt, Human
uaguaaucauau

SEQ ID NO: 3359414 - RNA, 21 nt, Human
uagacauuugcuaugagcugg

SEQ ID NO: 3359415 - RNA, 16 nt, Human
aauuuggauugcuaau

SEQ ID NO: 3359416 - RNA, 14 nt, Human
uagaagaagugugu

SEQ ID NO: 3359417 - RNA, 16 nt, Human
aauuccacacccucac

SEQ ID NO: 3359418 - RNA, 17 nt, Human
aauuccaauuauaugag

SEQ ID NO: 3359419 - RNA, 12 nt, Human
aauuuuacauuu

SEQ ID NO: 3359420 - RNA, 18 nt, Human
acaaaaggauaaugaaua

SEQ ID NO: 3359421 - RNA, 19 nt, Human
acaaaaauucucaguucuc

SEQ ID NO: 3359422 - RNA, 24 nt, Human
uagaggggaaaagagaugaugaaa

SEQ ID NO: 3359423 - RNA, 14 nt, Human
uagcacugacagau

SEQ ID NO: 3359424 - RNA, 19 nt, Human
uagcacugacagauuucca

SEQ ID NO: 3359425 - RNA, 18 nt, Human
uagccacccaccacacug

SEQ ID NO: 3359426 - RNA, 18 nt, Human
uagccaccgccuccuaca

SEQ ID NO: 3359427 - RNA, 19 nt, Human
uagccaccgccuccuacag

SEQ ID NO: 3359428 - RNA, 23 nt, Human
caaauauauucagccuggcuuca

SEQ ID NO: 3359429 - RNA, 19 nt, Human
caaagagagaaaauaaaga

SEQ ID NO: 3359430 - RNA, 16 nt, Human
caaagagagaaaauaa

SEQ ID NO: 3359431 - RNA, 15 nt, Human
caaagaaauuaugug

SEQ ID NO: 3359432 - RNA, 15 nt, Human
caaauaaaaauauug

SEQ ID NO: 3359433 - RNA, 18 nt, Human
caaauaaaaauauugugu

SEQ ID NO: 3359434 - RNA, 16 nt, Human
caaauaaaaauauugu

SEQ ID NO: 3359435 - RNA, 22 nt, Human
caaaauaauuuuaagaaaucaa

SEQ ID NO: 3359436 - RNA, 18 nt, Human
caaaauaauuuuaagaaa

SEQ ID NO: 3359437 - RNA, 17 nt, Human
caagccuuggcucuacc

SEQ ID NO: 3359438 - RNA, 12 nt, Human
caagccugguca

SEQ ID NO: 3359439 - RNA, 15 nt, Human
caagccuggucagcc

SEQ ID NO: 3359440 - RNA, 16 nt, Human
caagccuggucagccc

SEQ ID NO: 3359441 - RNA, 17 nt, Human
caagccuggucagccca

SEQ ID NO: 3359442 - RNA, 18 nt, Human
caagccuggucagcccaa

SEQ ID NO: 3359443 - RNA, 18 nt, Human
caaggaaaaaauaacaau

SEQ ID NO: 3359444 - RNA, 19 nt, Human
caauaauaaauauuuuugc

SEQ ID NO: 3359445 - RNA, 13 nt, Human
cacaggaaaccag

SEQ ID NO: 3359446 - RNA, 19 nt, Human
ugacucuuuccaaccggcu

SEQ ID NO: 3359447 - RNA, 13 nt, Human
ugacucuuuccaa

SEQ ID NO: 3359448 - RNA, 14 nt, Human
ugacucuuuccaac

SEQ ID NO: 3359449 - RNA, 16 nt, Human
ugacucuuuccaaccg

SEQ ID NO: 3359450 - RNA, 19 nt, Human
ugaggaucagaguaaucca

SEQ ID NO: 3359451 - RNA, 17 nt, Human
ugaggaucagaguaauc

SEQ ID NO: 3359452 - RNA, 13 nt, Human
ugaggaucagagu

SEQ ID NO: 3359453 - RNA, 23 nt, Human
ugacagaauauguuucaaacuuu

SEQ ID NO: 3359454 - RNA, 18 nt, Human
ugacagaauauguuucaa

SEQ ID NO: 3359455 - RNA, 21 nt, Human
ugacagaauauguuucaaacu

SEQ ID NO: 3359456 - RNA, 22 nt, Human
ugacagaauauguuucaaacuu

SEQ ID NO: 3359457 - RNA, 20 nt, Human
ugacaaagguaaaucagacu

SEQ ID NO: 3359458 - RNA, 13 nt, Human
ugaaucucauaau

SEQ ID NO: 3359459 - RNA, 20 nt, Human
ugaaucucauaauuuauaca

SEQ ID NO: 3359460 - RNA, 14 nt, Human
ugaaguuuacauug

SEQ ID NO: 3359461 - RNA, 20 nt, Human
ugaaguuuacauuguaaaua

SEQ ID NO: 3359462 - RNA, 16 nt, Human
ugaaguuuacauugua

SEQ ID NO: 3359463 - RNA, 15 nt, Human
ugaaggaaaaugaua

SEQ ID NO: 3359464 - RNA, 16 nt, Human
ugaagcuuuuauguga

SEQ ID NO: 3359465 - RNA, 21 nt, Human
ugaagcuuuuaugugaaacau

SEQ ID NO: 3359466 - RNA, 20 nt, Human
ugaagagaagggcagggcug

SEQ ID NO: 3359467 - RNA, 22 nt, Human
ugaagagaagggcagggcugag

SEQ ID NO: 3359468 - RNA, 13 nt, Human
ugaaacauguuuc

SEQ ID NO: 3359469 - RNA, 16 nt, Human
ugaaacacuuugcaua

SEQ ID NO: 3359470 - RNA, 19 nt, Human
ucuuuccaaccggcuuugu

SEQ ID NO: 3359471 - RNA, 22 nt, Human
ugaaaauuauuuuguucauaca

SEQ ID NO: 3359472 - RNA, 23 nt, Human
ugaaaauuauuuuguucauacau

SEQ ID NO: 3359473 - RNA, 23 nt, Human
ugaaacacucaguuguucaauaa

SEQ ID NO: 3359474 - RNA, 15 nt, Human
ugaaacacuuugcau

SEQ ID NO: 3359475 - RNA, 14 nt, Human
ugaaaauuaacaug

SEQ ID NO: 3359476 - RNA, 19 nt, Human
ugaaaauuauuuuguucau

SEQ ID NO: 3359477 - RNA, 18 nt, Human
ugaaaaccacauuggaga

SEQ ID NO: 3359478 - RNA, 17 nt, Human
ucuugaacugagcuugg

SEQ ID NO: 3359479 - RNA, 15 nt, Human
ucuugaacugagcuu

SEQ ID NO: 3359480 - RNA, 18 nt, Human
ucuugaacugagcuugga

SEQ ID NO: 3359481 - RNA, 18 nt, Human
ucuuguagcuuuaucaaa

SEQ ID NO: 3359482 - RNA, 19 nt, Human
ucuugccaaauauaaauaa

SEQ ID NO: 3359483 - RNA, 22 nt, Human
ucuucauuaccucagugagaag

SEQ ID NO: 3359484 - RNA, 11 nt, Human
ucugugugugu

SEQ ID NO: 3359485 - RNA, 13 nt, Human
ucuuauaauuuaa

SEQ ID NO: 3359486 - RNA, 14 nt, Human
ucuuauaauuuaaa

SEQ ID NO: 3359487 - RNA, 18 nt, Human
ucuggugaccuuccaaga

SEQ ID NO: 3359488 - RNA, 23 nt, Human
ucuggugaccuuccaagagccug

SEQ ID NO: 3359489 - RNA, 16 nt, Human
ucuggugaccuuccaa

SEQ ID NO: 3359490 - RNA, 15 nt, Human
ucuggcugcagagca

SEQ ID NO: 3359491 - RNA, 14 nt, Human
ucuggcugcagagc

SEQ ID NO: 3359492 - RNA, 22 nt, Human
ucuggagcccacuguacuugcu

SEQ ID NO: 3359493 - RNA, 16 nt, Human
ucuggagcccacugua

SEQ ID NO: 3359494 - RNA, 12 nt, Human
ucuggagcccac

SEQ ID NO: 3359495 - RNA, 14 nt, Human
ucuggaauuugaaa

SEQ ID NO: 3359496 - RNA, 12 nt, Human
ucugagagcugu

SEQ ID NO: 3359497 - RNA, 14 nt, Human
ucccaacacugcca

SEQ ID NO: 3359498 - RNA, 15 nt, Human
ucccaacacugccag

SEQ ID NO: 3359499 - RNA, 16 nt, Human
ucccaacacugccagc

SEQ ID NO: 3359500 - RNA, 17 nt, Human
uccaagcaaaugugaau

SEQ ID NO: 3359501 - RNA, 15 nt, Human
uccaagcaaauguga

SEQ ID NO: 3359502 - RNA, 14 nt, Human
uccaagagccugag

SEQ ID NO: 3359503 - RNA, 13 nt, Human
uccaagagccuga

SEQ ID NO: 3359504 - RNA, 22 nt, Human
uccaagcccaguucagcuuggg

SEQ ID NO: 3359505 - RNA, 17 nt, Human
uccacuuuaucuugaau

SEQ ID NO: 3359506 - RNA, 15 nt, Human
uccacuuuaucuuga

SEQ ID NO: 3359507 - RNA, 12 nt, Human
ucaucuuucuuc

SEQ ID NO: 3359508 - RNA, 14 nt, Human
ucaucuuucuucca

SEQ ID NO: 3359509 - RNA, 17 nt, Human
ucaucuuucuuccaaac

SEQ ID NO: 3359510 - RNA, 24 nt, Human
ucauggacuucugccagcauaaua

SEQ ID NO: 3359511 - RNA, 17 nt, Human
ucaguucucuucacuca

SEQ ID NO: 3359512 - RNA, 14 nt, Human
ucaguucucuucac

SEQ ID NO: 3359513 - RNA, 19 nt, Human
ucagugugucuaaauuuga

SEQ ID NO: 3359514 - RNA, 23 nt, Human
ucagccuccauccuacccccugu

SEQ ID NO: 3359515 - RNA, 22 nt, Human
ucaggagaguagaacagauaau

SEQ ID NO: 3359516 - RNA, 20 nt, Human
ucagaucauuaucagccugu

SEQ ID NO: 3359517 - RNA, 23 nt, Human
ucccaugagcuccuuaaggcucu

SEQ ID NO: 3359518 - RNA, 18 nt, Human
ucccucuacugggagccu

SEQ ID NO: 3359519 - RNA, 22 nt, Human
ucccucuacugggagccuaccc

SEQ ID NO: 3359520 - RNA, 17 nt, Human
ucccucuacugggagcc

SEQ ID NO: 3359521 - RNA, 23 nt, Human
ucccucuacugggagccuaccca

SEQ ID NO: 3359522 - RNA, 16 nt, Human
uccucgagaucccaac

SEQ ID NO: 3359523 - RNA, 23 nt, Human
uccucgagaucccaacacugcca

SEQ ID NO: 3359524 - RNA, 15 nt, Human
ucuagguaaauuaca

SEQ ID NO: 3359525 - RNA, 19 nt, Human
ucuacuccuuguaaagacu

SEQ ID NO: 3359526 - RNA, 16 nt, Human
ucucauaauuuauaca

SEQ ID NO: 3359527 - RNA, 22 nt, Human
ucucauaauuuauacaggucau

SEQ ID NO: 3359528 - RNA, 19 nt, Human
uccugucccucauccauag

SEQ ID NO: 3359529 - RNA, 18 nt, Human
uggaacucgugucuggca

SEQ ID NO: 3359530 - RNA, 22 nt, Human
uggaauaauccuaaacauauga

SEQ ID NO: 3359531 - RNA, 20 nt, Human
uggaaugaugggucaguugu

SEQ ID NO: 3359532 - RNA, 16 nt, Human
uggaaugcuguguuaa

SEQ ID NO: 3359533 - RNA, 14 nt, Human
uggaaagaguacuc

SEQ ID NO: 3359534 - RNA, 21 nt, Human
ugggacaccccgacuuuuguu

SEQ ID NO: 3359535 - RNA, 14 nt, Human
ugggagauguggaa

SEQ ID NO: 3359536 - RNA, 21 nt, Human
ugggagugaggaugucugggc

SEQ ID NO: 3359537 - RNA, 14 nt, Human
ugggaguacaaaag

SEQ ID NO: 3359538 - RNA, 18 nt, Human
ugggggucuguguguuua

SEQ ID NO: 3359539 - RNA, 15 nt, Human
ugggggucugugugu

SEQ ID NO: 3359540 - RNA, 11 nt, Human
ugggggaugua

SEQ ID NO: 3359541 - RNA, 20 nt, Human
uggggauugggccccugcca

SEQ ID NO: 3359542 - RNA, 20 nt, Human
uggguggggggcuucauaca

SEQ ID NO: 3359543 - RNA, 21 nt, Human
uggguggggggcuucauacac

SEQ ID NO: 3359544 - RNA, 18 nt, Human
uggguggggggcuucaua

SEQ ID NO: 3359545 - RNA, 16 nt, Human
ugcaccggggccuggg

SEQ ID NO: 3359546 - RNA, 22 nt, Human
ugcaccggggccugggcaggag

SEQ ID NO: 3359547 - RNA, 12 nt, Human
ugcaccggggcc

SEQ ID NO: 3359548 - RNA, 11 nt, Human
ugcagagcugc

SEQ ID NO: 3359549 - RNA, 22 nt, Human
ugcagagcagugggccuggcca

SEQ ID NO: 3359550 - RNA, 18 nt, Human
ugccaggauggaaugaug

SEQ ID NO: 3359551 - RNA, 19 nt, Human
ugccaaauauaaauaaaaa

SEQ ID NO: 3359552 - RNA, 22 nt, Human
ugccaaauauaaauaaaaauaa

SEQ ID NO: 3359553 - RNA, 17 nt, Human
ugccaaauauaaauaaa

SEQ ID NO: 3359554 - RNA, 18 nt, Human
ugccaaauauaaauaaaa

SEQ ID NO: 3359555 - RNA, 20 nt, Human
ugcauauuuauaaaaauaaa

SEQ ID NO: 3359556 - RNA, 21 nt, Human
ugcauauuuauaaaaauaaaa

SEQ ID NO: 3359557 - RNA, 17 nt, Human
ugcccacccuccacucu

SEQ ID NO: 3359558 - RNA, 17 nt, Human
ugccugguccucacacu

SEQ ID NO: 3359559 - RNA, 15 nt, Human
ugccuggcggggugg

SEQ ID NO: 3359560 - RNA, 17 nt, Human
ugcucagagcaguguuu

SEQ ID NO: 3359561 - RNA, 17 nt, Human
ugcucuccaagcccagu

SEQ ID NO: 3359562 - RNA, 21 nt, Human
uguccucagccccgcguggaa

SEQ ID NO: 3359563 - RNA, 22 nt, Human
ugucacccuuaggccagcacca

SEQ ID NO: 3359564 - RNA, 22 nt, Human
uguauaaaagggacugagaaau

SEQ ID NO: 3359565 - RNA, 22 nt, Human
uguacgaagaguauuuuugaca

SEQ ID NO: 3359566 - RNA, 14 nt, Human
uguaccucugccuc

SEQ ID NO: 3359567 - RNA, 14 nt, Human
uguacgaagaguau

SEQ ID NO: 3359568 - RNA, 17 nt, Human
uguagauaauacaguuc

SEQ ID NO: 3359569 - RNA, 18 nt, Human
uguagccccucuccugga

SEQ ID NO: 3359570 - RNA, 17 nt, Human
ugucuggcacagccugg

SEQ ID NO: 3359571 - RNA, 21 nt, Human
ugucuuuccacuccuccuagc

SEQ ID NO: 3359572 - RNA, 18 nt, Human
ugugaagugaaugaaaca

SEQ ID NO: 3359573 - RNA, 21 nt, Human
ugugaauguugugauguauuc

SEQ ID NO: 3359574 - RNA, 16 nt, Human
ugugauauaagugugu

SEQ ID NO: 3359575 - RNA, 13 nt, Human
ugugauauaagug

SEQ ID NO: 3359576 - RNA, 19 nt, Human
ugugccuugucacgccaga

SEQ ID NO: 3359577 - RNA, 20 nt, Human
ugugccuugucacgccagac

SEQ ID NO: 3359578 - RNA, 17 nt, Human
ugugccuugucacgcca

SEQ ID NO: 3359579 - RNA, 17 nt, Human
ugugccuuggugugcug

SEQ ID NO: 3359580 - RNA, 16 nt, Human
ugugccuuuugccauc

SEQ ID NO: 3359581 - RNA, 17 nt, Human
ugugcucaggagcccug

SEQ ID NO: 3359582 - RNA, 16 nt, Human
ugugcucaggagcccu

SEQ ID NO: 3359583 - RNA, 15 nt, Human
ugugcucaggagccc

SEQ ID NO: 3359584 - RNA, 15 nt, Human
uguggccuaaccugc

SEQ ID NO: 3359585 - RNA, 15 nt, Human
uguggaagugugggu

SEQ ID NO: 3359586 - RNA, 14 nt, Human
ugugggagugugua

SEQ ID NO: 3359587 - RNA, 15 nt, Human
ugugggaguguguaa

SEQ ID NO: 3359588 - RNA, 19 nt, Human
uguguaauuuaaaauugug

SEQ ID NO: 3359589 - RNA, 22 nt, Human
uguguaauuuaaaauugugaug

SEQ ID NO: 3359590 - RNA, 23 nt, Human
uguguaauuuaaaauugugaugu

SEQ ID NO: 3359591 - RNA, 11 nt, Human
uguguaauuua

SEQ ID NO: 3359592 - RNA, 18 nt, Human
uguguaauuuaaaauugu

SEQ ID NO: 3359593 - RNA, 19 nt, Human
uguuuccauauuuuauagg

SEQ ID NO: 3359594 - RNA, 16 nt, Human
uuaaugauaaguaaau

SEQ ID NO: 3359595 - RNA, 13 nt, Human
uuacauuguaaau

SEQ ID NO: 3359596 - RNA, 12 nt, Human
uuacauuguaaa

SEQ ID NO: 3359597 - RNA, 12 nt, Human
uuaagaguaaaa

SEQ ID NO: 3359598 - RNA, 13 nt, Human
ugugugcucucca

SEQ ID NO: 3359599 - RNA, 14 nt, Human
ugugugggagugug

SEQ ID NO: 3359600 - RNA, 15 nt, Human
ugugugggagugugu

SEQ ID NO: 3359601 - RNA, 11 nt, Human
uguguaugugg

SEQ ID NO: 3359602 - RNA, 12 nt, Human
uguguauguggg

SEQ ID NO: 3359603 - RNA, 16 nt, Human
ugugugggagugugua

SEQ ID NO: 3359604 - RNA, 15 nt, Human
uguguuuuucauaaa

SEQ ID NO: 3359605 - RNA, 18 nt, Human
uguguuuuucauaaagca

SEQ ID NO: 3359606 - RNA, 12 nt, Human
uguucauacaua

SEQ ID NO: 3359607 - RNA, 17 nt, Human
uguucauaaauaaaguu

SEQ ID NO: 3359608 - RNA, 14 nt, Human
uguucauacauauu

SEQ ID NO: 3359609 - RNA, 23 nt, Human
uguucauacauauuuuuguagca

SEQ ID NO: 3359610 - RNA, 13 nt, Human
uguucauaaauaa

SEQ ID NO: 3359611 - RNA, 16 nt, Human
uguucuuuugucccag

SEQ ID NO: 3359612 - RNA, 12 nt, Human
uguuuaagagac

SEQ ID NO: 3359613 - RNA, 12 nt, Human
uguuuacagugu

SEQ ID NO: 3359614 - RNA, 18 nt, Human
uguuggcacaugccugua

SEQ ID NO: 3359615 - RNA, 17 nt, Human
guuguccucagccccgc

SEQ ID NO: 3359616 - RNA, 23 nt, Human
guuguccucagccccgcguggaa

SEQ ID NO: 3359617 - RNA, 12 nt, Human
guuguguguggg

SEQ ID NO: 3359618 - RNA, 13 nt, Human
guuguguguggga

SEQ ID NO: 3359619 - RNA, 14 nt, Human
guugugugugggag

SEQ ID NO: 3359620 - RNA, 16 nt, Human
guugugugugggagug

SEQ ID NO: 3359621 - RNA, 22 nt, Human
guugugugugggaguguguaau

SEQ ID NO: 3359622 - RNA, 14 nt, Human
guugugaauguugu

SEQ ID NO: 3359623 - RNA, 16 nt, Human
guuuagaagaagugug

SEQ ID NO: 3359624 - RNA, 19 nt, Human
guuuaggaacuacugagga

SEQ ID NO: 3359625 - RNA, 19 nt, Human
guuucuuuguaaugaaaac

SEQ ID NO: 3359626 - RNA, 18 nt, Human
guuucuuuguaaugaaaa

SEQ ID NO: 3359627 - RNA, 20 nt, Human
guuuucaaaauuguuacaaa

SEQ ID NO: 3359628 - RNA, 16 nt, Human
guuuuaaaaugagaaa

SEQ ID NO: 3359629 - RNA, 15 nt, Human
guuuuaaaaugagaa

SEQ ID NO: 3359630 - RNA, 22 nt, Human
uaaaacaagcacuaaacaaaga

SEQ ID NO: 3359631 - RNA, 21 nt, Human
uaaaaagacauucuuccaaaa

SEQ ID NO: 3359632 - RNA, 18 nt, Human
uaaaaacaacuuuauacc

SEQ ID NO: 3359633 - RNA, 19 nt, Human
uaaaaacaacuuuauaccc

SEQ ID NO: 3359634 - RNA, 13 nt, Human
uaaaaacaacuuu

SEQ ID NO: 3359635 - RNA, 17 nt, Human
uaaaaacaaagaaauua

SEQ ID NO: 3359636 - RNA, 21 nt, Human
uaaaaacaaagaaauuaugug

SEQ ID NO: 3359637 - RNA, 21 nt, Human
uaaaagggacugagaaauuua

SEQ ID NO: 3359638 - RNA, 17 nt, Human
uaaaagauaaauauuau

SEQ ID NO: 3359639 - RNA, 14 nt, Human
uaaaguguuugaaa

SEQ ID NO: 3359640 - RNA, 21 nt, Human
uaaaggcccuaucuguuuaca

SEQ ID NO: 3359641 - RNA, 18 nt, Human
uaaagcaggcagaacuca

SEQ ID NO: 3359642 - RNA, 18 nt, Human
uaaacacucuugaaaaau

SEQ ID NO: 3359643 - RNA, 17 nt, Human
uaaacacucuugaaaaa

SEQ ID NO: 3359644 - RNA, 15 nt, Human
uaaacacucuugaaa

SEQ ID NO: 3359645 - RNA, 13 nt, Human
uaaauuuauguga

SEQ ID NO: 3359646 - RNA, 22 nt, Human
uaaauuugaauguuaagcagau

SEQ ID NO: 3359647 - RNA, 14 nt, Human
uaaauuugaauguu

SEQ ID NO: 3359648 - RNA, 17 nt, Human
uaaaguugguaaaccuu

SEQ ID NO: 3359649 - RNA, 16 nt, Human
uaaaguugguaaaccu

SEQ ID NO: 3359650 - RNA, 19 nt, Human
uaagaaaucaaagagagaa

SEQ ID NO: 3359651 - RNA, 18 nt, Human
uaacugugaaguuuacau

SEQ ID NO: 3359652 - RNA, 17 nt, Human
uaacugugaaguuuaca

SEQ ID NO: 3359653 - RNA, 13 nt, Human
uaacugugaaguu

SEQ ID NO: 3359654 - RNA, 13 nt, Human
uaaccagaucauu

SEQ ID NO: 3359655 - RNA, 22 nt, Human
uaagugccaggauggaaugaug

SEQ ID NO: 3359656 - RNA, 22 nt, Human
uaagugauugcugguuuuaguu

SEQ ID NO: 3359657 - RNA, 15 nt, Human
uaauaacugugaagu

SEQ ID NO: 3359658 - RNA, 21 nt, Human
uaauaacugugaaguuuacau

SEQ ID NO: 3359659 - RNA, 12 nt, Human
uaauaaagcugu

SEQ ID NO: 3359660 - RNA, 11 nt, Human
uaauaaagcug

SEQ ID NO: 3359661 - RNA, 22 nt, Human
uaaucuacuccuuguaaagacu

SEQ ID NO: 3359662 - RNA, 23 nt, Human
uaauaaucauuggauucugagag

SEQ ID NO: 3359663 - RNA, 14 nt, Human
uacccagaaaguua

SEQ ID NO: 3359664 - RNA, 19 nt, Human
uacuugcucuugaugccug

SEQ ID NO: 3359665 - RNA, 18 nt, Human
uacuugcucuugaugccu

SEQ ID NO: 3359666 - RNA, 14 nt, Human
uacuugcucuugau

SEQ ID NO: 3359667 - RNA, 13 nt, Human
uacuugcucuuga

SEQ ID NO: 3359668 - RNA, 13 nt, Human
uacuuaacuauuc

SEQ ID NO: 3359669 - RNA, 15 nt, Human
uacuccccuccuuga

SEQ ID NO: 3359670 - RNA, 21 nt, Human
uacugccuauuuuaauaaaca

SEQ ID NO: 3359671 - RNA, 14 nt, Human
uacugccuauuuua

SEQ ID NO: 3359672 - RNA, 23 nt, Human
uacaguucggugagcuacaaaug

SEQ ID NO: 3359673 - RNA, 20 nt, Human
uacaggaugaugacuaugga

SEQ ID NO: 3359674 - RNA, 18 nt, Human
uacaguuccuagguauaa

SEQ ID NO: 3359675 - RNA, 16 nt, Human
uagccccucuccugga

SEQ ID NO: 3359676 - RNA, 17 nt, Human
uagcauggcauauuuuu

SEQ ID NO: 3359677 - RNA, 18 nt, Human
uagcauggcauauuuuuc

SEQ ID NO: 3359678 - RNA, 15 nt, Human
uagcauggcauauuu

SEQ ID NO: 3359679 - RNA, 22 nt, Human
uauaaacaugcuugcauuauau

SEQ ID NO: 3359680 - RNA, 22 nt, Human
uagguuaauuccaauuauauga

SEQ ID NO: 3359681 - RNA, 15 nt, Human
uaggucucaauaccu

SEQ ID NO: 3359682 - RNA, 14 nt, Human
uauaucuuguagcu

SEQ ID NO: 3359683 - RNA, 23 nt, Human
uaucaguuugcuagcagaaaucu

SEQ ID NO: 3359684 - RNA, 20 nt, Human
uauauuuguaaauuuaugug

SEQ ID NO: 3359685 - RNA, 21 nt, Human
guggggagagacgggcccugg

SEQ ID NO: 3359686 - RNA, 13 nt, Human
gugggccuggcca

SEQ ID NO: 3359687 - RNA, 17 nt, Human
guggcuggaucugugag

SEQ ID NO: 3359688 - RNA, 15 nt, Human
gugcuaauuuugaaa

SEQ ID NO: 3359689 - RNA, 13 nt, Human
gugcuaauuuuga

SEQ ID NO: 3359690 - RNA, 22 nt, Human
guguaauuuaaaauugugaugu

SEQ ID NO: 3359691 - RNA, 23 nt, Human
guguaauuuaaaauugugaugug

SEQ ID NO: 3359692 - RNA, 20 nt, Human
guguaauuuaaaauugugau

SEQ ID NO: 3359693 - RNA, 15 nt, Human
guguacuuaacuauu

SEQ ID NO: 3359694 - RNA, 13 nt, Human
guggugagaucau

SEQ ID NO: 3359695 - RNA, 18 nt, Human
guggucuccacuggggau

SEQ ID NO: 3359696 - RNA, 21 nt, Human
guguccugcaccggggccugg

SEQ ID NO: 3359697 - RNA, 17 nt, Human
gugucuggcacagccug

SEQ ID NO: 3359698 - RNA, 14 nt, Human
gugucuggcugcag

SEQ ID NO: 3359699 - RNA, 17 nt, Human
gugugggaguguguaau

SEQ ID NO: 3359700 - RNA, 16 nt, Human
guguguuuaugugugu

SEQ ID NO: 3359701 - RNA, 12 nt, Human
guguguuuuaaa

SEQ ID NO: 3359702 - RNA, 14 nt, Human
guguguuuaugugu

SEQ ID NO: 3359703 - RNA, 15 nt, Human
guguguuuaugugug

SEQ ID NO: 3359704 - RNA, 12 nt, Human
guguguugugug

SEQ ID NO: 3359705 - RNA, 14 nt, Human
guguguugugugug

SEQ ID NO: 3359706 - RNA, 17 nt, Human
guguguuguguguggga

SEQ ID NO: 3359707 - RNA, 19 nt, Human
gugugcucaggagcccugg

SEQ ID NO: 3359708 - RNA, 18 nt, Human
gugugcucaggagcccug

SEQ ID NO: 3359709 - RNA, 17 nt, Human
gugugcucaggagcccu

SEQ ID NO: 3359710 - RNA, 16 nt, Human
gugugcucaggagccc

SEQ ID NO: 3359711 - RNA, 17 nt, Human
guuaaacucgcucacug

SEQ ID NO: 3359712 - RNA, 19 nt, Human
guguguuuuaaaaugagaa

SEQ ID NO: 3359713 - RNA, 16 nt, Human
guguguuuuaaaauga

SEQ ID NO: 3359714 - RNA, 13 nt, Human
guguguuuuaaaa

SEQ ID NO: 3359715 - RNA, 14 nt, Human
guguguuuuucaua

SEQ ID NO: 3359716 - RNA, 18 nt, Human
guguuuuucauaaagcag

SEQ ID NO: 3359717 - RNA, 13 nt, Human
guucugccaggag

SEQ ID NO: 3359718 - RNA, 14 nt, Human
guucugccaggaga

SEQ ID NO: 3359719 - RNA, 12 nt, Human
guucugccagga

SEQ ID NO: 3359720 - RNA, 14 nt, Human
guugcaacuuugua

SEQ ID NO: 3359721 - RNA, 16 nt, Human
guugcaacuuuguaua

SEQ ID NO: 3359722 - RNA, 20 nt, Human
guucacucuuggagccugca

SEQ ID NO: 3359723 - RNA, 24 nt, Human
guucacucuuggagccugcagagc

SEQ ID NO: 3359724 - RNA, 17 nt, Human
guucacucuuggagccu

SEQ ID NO: 3359725 - RNA, 18 nt, Human
guucacucuuggagccug

SEQ ID NO: 3359726 - RNA, 19 nt, Human
guucacucuuggagccugc

SEQ ID NO: 3359727 - RNA, 16 nt, Human
guuccuagccaccgcc

SEQ ID NO: 3359728 - RNA, 15 nt, Human
guuccagccugccac

SEQ ID NO: 3359729 - RNA, 13 nt, Human
guuccagccugcc

SEQ ID NO: 3359730 - RNA, 14 nt, Human
guuccagccugcca

SEQ ID NO: 3359731 - RNA, 14 nt, Human
guuccagcaccaca

SEQ ID NO: 3359732 - RNA, 18 nt, Human
guucaauaauaaauauuu

SEQ ID NO: 3359733 - RNA, 13 nt, Human
gucccugccugga

SEQ ID NO: 3359734 - RNA, 13 nt, Human
gucuaaauuugaa

SEQ ID NO: 3359735 - RNA, 21 nt, Human
gucuaagauaguaacaaugaa

SEQ ID NO: 3359736 - RNA, 18 nt, Human
gucgucaaagcugaaaug

SEQ ID NO: 3359737 - RNA, 21 nt, Human
gucucuggauuauauuaugaa

SEQ ID NO: 3359738 - RNA, 17 nt, Human
gucucuggaauuugaaa

SEQ ID NO: 3359739 - RNA, 13 nt, Human
gucugagagaggc

SEQ ID NO: 3359740 - RNA, 14 nt, Human
gucugagagaggcc

SEQ ID NO: 3359741 - RNA, 15 nt, Human
gucugagagaggcca

SEQ ID NO: 3359742 - RNA, 18 nt, Human
gucugagagaggccauuc

SEQ ID NO: 3359743 - RNA, 11 nt, Human
gucugugugug

SEQ ID NO: 3359744 - RNA, 12 nt, Human
gucugugugugu

SEQ ID NO: 3359745 - RNA, 16 nt, Human
gucuguguguguguau

SEQ ID NO: 3359746 - RNA, 20 nt, Human
gucuguguguguguaugugg

SEQ ID NO: 3359747 - RNA, 11 nt, Human
gucuguguguu

SEQ ID NO: 3359748 - RNA, 21 nt, Human
gucuguguguuuaugugugug

SEQ ID NO: 3359749 - RNA, 22 nt, Human
gucuguguguuuaugugugugu

SEQ ID NO: 3359750 - RNA, 17 nt, Human
gucuugguuccagccug

SEQ ID NO: 3359751 - RNA, 19 nt, Human
gucuugguuccagccugcc

SEQ ID NO: 3359752 - RNA, 16 nt, Human
gucuugguuccagccu

SEQ ID NO: 3359753 - RNA, 21 nt, Human
gugauuuuuaugccaccugaa

SEQ ID NO: 3359754 - RNA, 14 nt, Human
gugccuuuugccau

SEQ ID NO: 3359755 - RNA, 21 nt, Human
gugccaggauggaaugauggg

SEQ ID NO: 3359756 - RNA, 18 nt, Human
gugaauucuugaaggaaa

SEQ ID NO: 3359757 - RNA, 22 nt, Human
gugaauucuugaaggaaaauga

SEQ ID NO: 3359758 - RNA, 20 nt, Human
gugaccuuccaagagccuga

SEQ ID NO: 3359759 - RNA, 21 nt, Human
gugaccuuccaagagccugag

SEQ ID NO: 3359760 - RNA, 22 nt, Human
gugaccuuccaagagccugaga

SEQ ID NO: 3359761 - RNA, 21 nt, Human
gugacuauggagcugagcagg

SEQ ID NO: 3359762 - RNA, 18 nt, Human
gugaggagcuugaaaccc

SEQ ID NO: 3359763 - RNA, 19 nt, Human
gugauauaaguguguguuu

SEQ ID NO: 3359764 - RNA, 19 nt, Human
guagugauuuuuaugccac

SEQ ID NO: 3359765 - RNA, 17 nt, Human
guauaauucacauugua

SEQ ID NO: 3359766 - RNA, 14 nt, Human
guagguugggagaa

SEQ ID NO: 3359767 - RNA, 14 nt, Human
guagcacugacaga

SEQ ID NO: 3359768 - RNA, 15 nt, Human
guagcacugacagau

SEQ ID NO: 3359769 - RNA, 13 nt, Human
guaugaaauuaua

SEQ ID NO: 3359770 - RNA, 23 nt, Human
guaugaaauuauauaaguauucu

SEQ ID NO: 3359771 - RNA, 22 nt, Human
gucagcugggacaccccgacuu

SEQ ID NO: 3359772 - RNA, 22 nt, Human
gucccugaggcagguccccaga

SEQ ID NO: 3359773 - RNA, 16 nt, Human
gucccugaagagaagg

SEQ ID NO: 3359774 - RNA, 18 nt, Human
gucccugaggcagguccc

SEQ ID NO: 3359775 - RNA, 20 nt, Human
gucccuaauaaagcugugug

SEQ ID NO: 3359776 - RNA, 18 nt, Human
gucccuaauaaagcugug

SEQ ID NO: 3359777 - RNA, 15 nt, Human
gucccuaauaaagcu

SEQ ID NO: 3359778 - RNA, 17 nt, Human
gucccuaauaaagcugu

SEQ ID NO: 3359779 - RNA, 16 nt, Human
gucccuaauaaagcug

SEQ ID NO: 3359780 - RNA, 12 nt, Human
uuucuaaaguaa

SEQ ID NO: 3359781 - RNA, 18 nt, Human
uuugaaucaucaagucuu

SEQ ID NO: 3359782 - RNA, 16 nt, Human
uuugaaucucauaauu

SEQ ID NO: 3359783 - RNA, 19 nt, Human
uuugaaucucauaauuuau

SEQ ID NO: 3359784 - RNA, 20 nt, Human
uuugaaucucauaauuuaua

SEQ ID NO: 3359785 - RNA, 21 nt, Human
uuugaaucucauaauuuauac

SEQ ID NO: 3359786 - RNA, 22 nt, Human
uuugaaucucauaauuuauaca

SEQ ID NO: 3359787 - RNA, 15 nt, Human
uuugcaucugaaaau

SEQ ID NO: 3359788 - RNA, 17 nt, Human
uuugaauguaugcuuca

SEQ ID NO: 3359789 - RNA, 22 nt, Human
uuugaauguaugcuucauacag

SEQ ID NO: 3359790 - RNA, 18 nt, Human
uuuuaaagacuuuuauga

SEQ ID NO: 3359791 - RNA, 20 nt, Human
uuuuaaaagaugcaauguag

SEQ ID NO: 3359792 - RNA, 12 nt, Human
uuuguauaaaag

SEQ ID NO: 3359793 - RNA, 20 nt, Human
uuuugaaucucauaauuuau

SEQ ID NO: 3359794 - RNA, 18 nt, Human
uuuucuaaaguaaaaaca

SEQ ID NO: 3359795 - RNA, 18 nt, Human
uuuuguagcacugacaga

SEQ ID NO: 3359796 - RNA, 19 nt, Human
uuuuguagcacugacagau

SEQ ID NO: 3359797 - RNA, 18 nt, Human
uuuuuaaagacuuuuaug

SEQ ID NO: 3359798 - RNA, 13 nt, Human
uuuuuaaagacuu

SEQ ID NO: 3359799 - RNA, 12 nt, Human
uuuuuaaagacu

SEQ ID NO: 3359800 - RNA, 13 nt, Human
cuacccccugugc

SEQ ID NO: 3359801 - RNA, 14 nt, Human
cuacccccugugcc

SEQ ID NO: 3359802 - RNA, 19 nt, Human
cuaauguaauaacugugaa

SEQ ID NO: 3359803 - RNA, 13 nt, Human
cuaauaaagcugu

SEQ ID NO: 3359804 - RNA, 12 nt, Human
cuaauaaagcug

SEQ ID NO: 3359805 - RNA, 21 nt, Human
cuacuguaaggcaaucauggu

SEQ ID NO: 3359806 - RNA, 15 nt, Human
cuacuugagaggcug

SEQ ID NO: 3359807 - RNA, 16 nt, Human
cuaguaugaaauuaua

SEQ ID NO: 3359808 - RNA, 17 nt, Human
cuagcagaaaucuagaa

SEQ ID NO: 3359809 - RNA, 20 nt, Human
cuaucuguuuacaguguucc

SEQ ID NO: 3359810 - RNA, 17 nt, Human
cuaucuguuuacagugu

SEQ ID NO: 3359811 - RNA, 21 nt, Human
cuaucuguuuacaguguuccg

SEQ ID NO: 3359812 - RNA, 18 nt, Human
cuaugacauaaaaacaac

SEQ ID NO: 3359813 - RNA, 21 nt, Human
cuaugacauaaaaacaacuuu

SEQ ID NO: 3359814 - RNA, 22 nt, Human
cuauuuuaauaaacacucuuga

SEQ ID NO: 3359815 - RNA, 18 nt, Human
cuauuuuaauaaacacuc

SEQ ID NO: 3359816 - RNA, 23 nt, Human
cguggcuguggcauccagagucc

SEQ ID NO: 3359817 - RNA, 16 nt, Human
cguuguccucagcccc

SEQ ID NO: 3359818 - RNA, 15 nt, Human
cuaacaugauuuggg

SEQ ID NO: 3359819 - RNA, 23 nt, Human
cuaaauuugaauguuaagcagau

SEQ ID NO: 3359820 - RNA, 17 nt, Human
cuaaauauauuuuaaga

SEQ ID NO: 3359821 - RNA, 20 nt, Human
cuaaauauauuuuaagacga

SEQ ID NO: 3359822 - RNA, 18 nt, Human
cuaaauauauuuuaagac

SEQ ID NO: 3359823 - RNA, 17 nt, Human
cgggagccugacccuca

SEQ ID NO: 3359824 - RNA, 12 nt, Human
cggcugggagga

SEQ ID NO: 3359825 - RNA, 18 nt, Human
cgggggcagucugagaga

SEQ ID NO: 3359826 - RNA, 21 nt, Human
cgggggcagucugagagaggc

SEQ ID NO: 3359827 - RNA, 17 nt, Human
cgggggcagucugagag

SEQ ID NO: 3359828 - RNA, 19 nt, Human
cggggccugggcaggaggg

SEQ ID NO: 3359829 - RNA, 17 nt, Human
cggggccugggcaggag

SEQ ID NO: 3359830 - RNA, 22 nt, Human
cgggucaucuguaccucugccu

SEQ ID NO: 3359831 - RNA, 15 nt, Human
cgggucaucuguacc

SEQ ID NO: 3359832 - RNA, 17 nt, Human
cggugagcuacaaaugc

SEQ ID NO: 3359833 - RNA, 15 nt, Human
cggcuggacuuggag

SEQ ID NO: 3359834 - RNA, 16 nt, Human
cgcccuggacugugug

SEQ ID NO: 3359835 - RNA, 21 nt, Human
cucuuggggaguuuagggugg

SEQ ID NO: 3359836 - RNA, 23 nt, Human
cucuuggggaguuuagggugggg

SEQ ID NO: 3359837 - RNA, 19 nt, Human
cucuggagcccacuguacu

SEQ ID NO: 3359838 - RNA, 22 nt, Human
cucugugcccacccuccacucu

SEQ ID NO: 3359839 - RNA, 14 nt, Human
cugaggcagguccc

SEQ ID NO: 3359840 - RNA, 17 nt, Human
cugaggcagguccccag

SEQ ID NO: 3359841 - RNA, 18 nt, Human
cugaggcagguccccaga

SEQ ID NO: 3359842 - RNA, 19 nt, Human
cugaggcagguccccagac

SEQ ID NO: 3359843 - RNA, 19 nt, Human
cugaggaucagaguaaucc

SEQ ID NO: 3359844 - RNA, 16 nt, Human
cugaggcaagagaauu

SEQ ID NO: 3359845 - RNA, 17 nt, Human
cugaggaucagaguaau

SEQ ID NO: 3359846 - RNA, 11 nt, Human
cugacagauuu

SEQ ID NO: 3359847 - RNA, 15 nt, Human
cugacagauuuccau

SEQ ID NO: 3359848 - RNA, 15 nt, Human
cugacuaugacauaa

SEQ ID NO: 3359849 - RNA, 14 nt, Human
cugagaaauuuaua

SEQ ID NO: 3359850 - RNA, 11 nt, Human
cugagaaauuu

SEQ ID NO: 3359851 - RNA, 21 nt, Human
cucuccacucaugugacucuu

SEQ ID NO: 3359852 - RNA, 19 nt, Human
cucuccacucaugugacuc

SEQ ID NO: 3359853 - RNA, 22 nt, Human
cucuccacucaugugacucuuu

SEQ ID NO: 3359854 - RNA, 15 nt, Human
cucuccugucucccu

SEQ ID NO: 3359855 - RNA, 17 nt, Human
cucuccugucucccucc

SEQ ID NO: 3359856 - RNA, 18 nt, Human
cucuccugucucccuccu

SEQ ID NO: 3359857 - RNA, 21 nt, Human
cucuccugauagucuuucagu

SEQ ID NO: 3359858 - RNA, 20 nt, Human
cucuaccucauaucaguuug

SEQ ID NO: 3359859 - RNA, 18 nt, Human
cucuacugggagccuacc

SEQ ID NO: 3359860 - RNA, 21 nt, Human
cucuacugggagccuacccac

SEQ ID NO: 3359861 - RNA, 21 nt, Human
cuccucgagaucccaacacug

SEQ ID NO: 3359862 - RNA, 24 nt, Human
cuccucgagaucccaacacugcca

SEQ ID NO: 3359863 - RNA, 17 nt, Human
cuccucgagaucccaac

SEQ ID NO: 3359864 - RNA, 20 nt, Human
cuccauccuacccccugugc

SEQ ID NO: 3359865 - RNA, 22 nt, Human
cuccauccuacccccugugccu

SEQ ID NO: 3359866 - RNA, 23 nt, Human
cuccauccuacccccugugccuu

SEQ ID NO: 3359867 - RNA, 18 nt, Human
cuccauccuacccccugu

SEQ ID NO: 3359868 - RNA, 19 nt, Human
cugccagacccccuggaga

SEQ ID NO: 3359869 - RNA, 17 nt, Human
cugccagacccccugga

SEQ ID NO: 3359870 - RNA, 19 nt, Human
cugcccgggagcucaggaa

SEQ ID NO: 3359871 - RNA, 18 nt, Human
cugcccgggagcucagga

SEQ ID NO: 3359872 - RNA, 23 nt, Human
cugcagagcugcgggcugggugu

SEQ ID NO: 3359873 - RNA, 22 nt, Human
cugcaggucccuaauaaagcug

SEQ ID NO: 3359874 - RNA, 21 nt, Human
cugcaggucccuaauaaagcu

SEQ ID NO: 3359875 - RNA, 20 nt, Human
cugcaggucccuaauaaagc

SEQ ID NO: 3359876 - RNA, 19 nt, Human
cugcaggucccuaauaaag

SEQ ID NO: 3359877 - RNA, 23 nt, Human
cugcaggucccuaauaaagcugu

SEQ ID NO: 3359878 - RNA, 18 nt, Human
cugcaggucccuaauaaa

SEQ ID NO: 3359879 - RNA, 17 nt, Human
cugcaggucccuaauaa

SEQ ID NO: 3359880 - RNA, 16 nt, Human
cugcaggucccuaaua

SEQ ID NO: 3359881 - RNA, 15 nt, Human
cugcaggucccuaau

SEQ ID NO: 3359882 - RNA, 14 nt, Human
cugcaggucccuaa

SEQ ID NO: 3359883 - RNA, 13 nt, Human
cugcaggucccua

SEQ ID NO: 3359884 - RNA, 12 nt, Human
cugcaggucccu

SEQ ID NO: 3359885 - RNA, 11 nt, Human
cugcagguccc

SEQ ID NO: 3359886 - RNA, 15 nt, Human
cugcucugugcccac

SEQ ID NO: 3359887 - RNA, 23 nt, Human
cugcugccugcuuuuuauggccu

SEQ ID NO: 3359888 - RNA, 14 nt, Human
cugcugccugcuuu

SEQ ID NO: 3359889 - RNA, 22 nt, Human
cugcgggcuggguguggucucc

SEQ ID NO: 3359890 - RNA, 22 nt, Human
cugccugcuuuuuauggccugu

SEQ ID NO: 3359891 - RNA, 19 nt, Human
cugggaggagggcaggcau

SEQ ID NO: 3359892 - RNA, 19 nt, Human
cugggagccuacccacccc

SEQ ID NO: 3359893 - RNA, 22 nt, Human
cugggagccuacccacccccag

SEQ ID NO: 3359894 - RNA, 16 nt, Human
cugggagccuacccac

SEQ ID NO: 3359895 - RNA, 17 nt, Human
cugggaggcucuggagc

SEQ ID NO: 3359896 - RNA, 21 nt, Human
cugggaggcucuggagcccac

SEQ ID NO: 3359897 - RNA, 20 nt, Human
cugggaggcucuggagccca

SEQ ID NO: 3359898 - RNA, 18 nt, Human
cugggaggcucuggagcc

SEQ ID NO: 3359899 - RNA, 18 nt, Human
cuggcuguggccuaaccu

SEQ ID NO: 3359900 - RNA, 16 nt, Human
cuggcacagccuggcu

SEQ ID NO: 3359901 - RNA, 21 nt, Human
cuggcacagccuggcuguggc

SEQ ID NO: 3359902 - RNA, 15 nt, Human
cuggcacagccuggc

SEQ ID NO: 3359903 - RNA, 23 nt, Human
cuggcacagccuggcuguggccu

SEQ ID NO: 3359904 - RNA, 20 nt, Human
cuggaagugcuaauuuugaa

SEQ ID NO: 3359905 - RNA, 14 nt, Human
cuguaccucugccu

SEQ ID NO: 3359906 - RNA, 18 nt, Human
cuguaaggcaaucauggu

SEQ ID NO: 3359907 - RNA, 18 nt, Human
cugggucgcccuggacug

SEQ ID NO: 3359908 - RNA, 17 nt, Human
cugggucgcccuggacu

SEQ ID NO: 3359909 - RNA, 22 nt, Human
cugggucgcccuggacugugug

SEQ ID NO: 3359910 - RNA, 16 nt, Human
cugggucgcccuggac

SEQ ID NO: 3359911 - RNA, 12 nt, Human
cuggucagccca

SEQ ID NO: 3359912 - RNA, 13 nt, Human
cuggucagcccaa

SEQ ID NO: 3359913 - RNA, 21 nt, Human
gaaggaucccaugagcuccuu

SEQ ID NO: 3359914 - RNA, 21 nt, Human
gaaggugaggagcuugaaacc

SEQ ID NO: 3359915 - RNA, 23 nt, Human
gaaggaaccaaagcgaauuuuaa

SEQ ID NO: 3359916 - RNA, 22 nt, Human
gaacuuguaaaggaauuuaaaa

SEQ ID NO: 3359917 - RNA, 13 nt, Human
gaagaaguguguc

SEQ ID NO: 3359918 - RNA, 20 nt, Human
gaagaguauuuuugacagaa

SEQ ID NO: 3359919 - RNA, 22 nt, Human
gaagauugagauguguucacaa

SEQ ID NO: 3359920 - RNA, 17 nt, Human
gaagauugagauguguu

SEQ ID NO: 3359921 - RNA, 23 nt, Human
gaaaguuauugauaaguucauac

SEQ ID NO: 3359922 - RNA, 19 nt, Human
gaaacuaggugcauauuua

SEQ ID NO: 3359923 - RNA, 20 nt, Human
gaaacuaggugcauauuuau

SEQ ID NO: 3359924 - RNA, 17 nt, Human
gaaauuauauaaguauu

SEQ ID NO: 3359925 - RNA, 23 nt, Human
gaaauuauauaaguauucuaaau

SEQ ID NO: 3359926 - RNA, 23 nt, Human
gaaauuaguacuccccuccuuga

SEQ ID NO: 3359927 - RNA, 14 nt, Human
gaacaucccuccug

SEQ ID NO: 3359928 - RNA, 20 nt, Human
gaaccaaagcgaauuuuaaa

SEQ ID NO: 3359929 - RNA, 23 nt, Human
gaaccaaagcgaauuuuaaaaga

SEQ ID NO: 3359930 - RNA, 11 nt, Human
gaaccaaagcg

SEQ ID NO: 3359931 - RNA, 12 nt, Human
cuuuggacuugu

SEQ ID NO: 3359932 - RNA, 16 nt, Human
cuuuggaacaagaugg

SEQ ID NO: 3359933 - RNA, 19 nt, Human
cuuuuuuaucaugugaaau

SEQ ID NO: 3359934 - RNA, 16 nt, Human
cuuuucuuucuaccaa

SEQ ID NO: 3359935 - RNA, 19 nt, Human
cuuucuuccaaacaggcuc

SEQ ID NO: 3359936 - RNA, 13 nt, Human
cuuucuuccaaac

SEQ ID NO: 3359937 - RNA, 21 nt, Human
cuuuccacuccuccuagccac

SEQ ID NO: 3359938 - RNA, 18 nt, Human
cuuuccacuccuccuagc

SEQ ID NO: 3359939 - RNA, 23 nt, Human
cuuuccaaagccaaugugaacag

SEQ ID NO: 3359940 - RNA, 20 nt, Human
cuuuccaaagccaaugugaa

SEQ ID NO: 3359941 - RNA, 21 nt, Human
cuuuauuuucuauaauuuaaa

SEQ ID NO: 3359942 - RNA, 19 nt, Human
cuuuauuuuguguuuagga

SEQ ID NO: 3359943 - RNA, 20 nt, Human
cuuggggaguuuaggguggg

SEQ ID NO: 3359944 - RNA, 21 nt, Human
cuuggggaguuuagggugggg

SEQ ID NO: 3359945 - RNA, 18 nt, Human
cuuguaaagacuguagaa

SEQ ID NO: 3359946 - RNA, 23 nt, Human
cuugucacgccagacuucccacg

SEQ ID NO: 3359947 - RNA, 18 nt, Human
cuugucacgccagacuuc

SEQ ID NO: 3359948 - RNA, 18 nt, Human
cuuguauuauguguguuu

SEQ ID NO: 3359949 - RNA, 13 nt, Human
cuuguauuaugug

SEQ ID NO: 3359950 - RNA, 15 nt, Human
cuugcuuuuaaaauc

SEQ ID NO: 3359951 - RNA, 20 nt, Human
cuugcugcccugugcuccuc

SEQ ID NO: 3359952 - RNA, 19 nt, Human
cuuggagccugcagagcug

SEQ ID NO: 3359953 - RNA, 20 nt, Human
cuuggagccugcagagcugc

SEQ ID NO: 3359954 - RNA, 15 nt, Human
cuuggagccugcaga

SEQ ID NO: 3359955 - RNA, 16 nt, Human
cuuggagccugcagag

SEQ ID NO: 3359956 - RNA, 17 nt, Human
cuuggagccugcagagc

SEQ ID NO: 3359957 - RNA, 18 nt, Human
cuuggagccugcagagcu

SEQ ID NO: 3359958 - RNA, 13 nt, Human
cuuggagccugca

SEQ ID NO: 3359959 - RNA, 17 nt, Human
cuugaacugagcuugga

SEQ ID NO: 3359960 - RNA, 19 nt, Human
cuugaacugagcuuggaag

SEQ ID NO: 3359961 - RNA, 15 nt, Human
gacaccuaggcuagg

SEQ ID NO: 3359962 - RNA, 16 nt, Human
gacaccuaggcuaggg

SEQ ID NO: 3359963 - RNA, 20 nt, Human
gacaccuaggcuaggguggg

SEQ ID NO: 3359964 - RNA, 22 nt, Human
gacagccaacuauggccugugg

SEQ ID NO: 3359965 - RNA, 19 nt, Human
gacagccaacuauggccug

SEQ ID NO: 3359966 - RNA, 23 nt, Human
gaccugauuucugagcauuuaau

SEQ ID NO: 3359967 - RNA, 17 nt, Human
gaccuuuccugaggaag

SEQ ID NO: 3359968 - RNA, 21 nt, Human
gagccugacccucaucuuucu

SEQ ID NO: 3359969 - RNA, 15 nt, Human
gagccuacccacccc

SEQ ID NO: 3359970 - RNA, 17 nt, Human
gagccuacccaccccca

SEQ ID NO: 3359971 - RNA, 21 nt, Human
gagcccacuguacuugcucuu

SEQ ID NO: 3359972 - RNA, 18 nt, Human
gagcccacuguacuugcu

SEQ ID NO: 3359973 - RNA, 21 nt, Human
gagcucaggaaccgaggcagg

SEQ ID NO: 3359974 - RNA, 20 nt, Human
gagcucaggaaccgaggcag

SEQ ID NO: 3359975 - RNA, 20 nt, Human
gagcuccuuaaggcucuuuu

SEQ ID NO: 3359976 - RNA, 22 nt, Human
gagcuugaaacccguggcgcuu

SEQ ID NO: 3359977 - RNA, 13 nt, Human
gagagaggccauu

SEQ ID NO: 3359978 - RNA, 21 nt, Human
gagagaggccauucuuuccca

SEQ ID NO: 3359979 - RNA, 15 nt, Human
gagagugagguggaa

SEQ ID NO: 3359980 - RNA, 17 nt, Human
gagauacagaauuuuau

SEQ ID NO: 3359981 - RNA, 18 nt, Human
gacuugucccgggacacc

SEQ ID NO: 3359982 - RNA, 14 nt, Human
gagaaauuuauaaa

SEQ ID NO: 3359983 - RNA, 22 nt, Human
gagaagccagcuuuccucauca

SEQ ID NO: 3359984 - RNA, 16 nt, Human
gagacagccaacuaug

SEQ ID NO: 3359985 - RNA, 15 nt, Human
gaucccaugagcucc

SEQ ID NO: 3359986 - RNA, 17 nt, Human
gaucccaugagcuccuu

SEQ ID NO: 3359987 - RNA, 14 nt, Human
gaucauuaucagcc

SEQ ID NO: 3359988 - RNA, 14 nt, Human
gaucauugugaaau

SEQ ID NO: 3359989 - RNA, 20 nt, Human
gaucauugugaaauuauuca

SEQ ID NO: 3359990 - RNA, 22 nt, Human
gauagucuuucaguuaaggaga

SEQ ID NO: 3359991 - RNA, 15 nt, Human
gauaguaacaaugaa

SEQ ID NO: 3359992 - RNA, 14 nt, Human
gauagucuuucagu

SEQ ID NO: 3359993 - RNA, 19 nt, Human
gauaaaguugguaaaccuu

SEQ ID NO: 3359994 - RNA, 22 nt, Human
gauaaauauuauauuauauaua

SEQ ID NO: 3359995 - RNA, 15 nt, Human
gauaaauauuauauu

SEQ ID NO: 3359996 - RNA, 14 nt, Human
gauaaguucauaca

SEQ ID NO: 3359997 - RNA, 12 nt, Human
gauaaguucaua

SEQ ID NO: 3359998 - RNA, 17 nt, Human
gauaggucagugcaaau

SEQ ID NO: 3359999 - RNA, 23 nt, Human
gauagauaggucagugcaaauac

SEQ ID NO: 3360000 - RNA, 17 nt, Human
gaugacaacuucccagu

SEQ ID NO: 3360001 - RNA, 21 nt, Human
gaucugugaggggcucucuca

SEQ ID NO: 3360002 - RNA, 17 nt, Human
gaugaaaauauuuaaag

SEQ ID NO: 3360003 - RNA, 15 nt, Human
gaugaaaauauuuaa

SEQ ID NO: 3360004 - RNA, 16 nt, Human
gaugaaaauauuuaaa

SEQ ID NO: 3360005 - RNA, 14 nt, Human
gaugaaaauauuua

SEQ ID NO: 3360006 - RNA, 20 nt, Human
gauuuggggcucagaguggg

SEQ ID NO: 3360007 - RNA, 23 nt, Human
gauuugcucagugucuggcugca

SEQ ID NO: 3360008 - RNA, 22 nt, Human
gauuuggucaacacuaacauga

SEQ ID NO: 3360009 - RNA, 17 nt, Human
gauuccagguggcauca

SEQ ID NO: 3360010 - RNA, 20 nt, Human
gcaaauccuugugggaaaag

SEQ ID NO: 3360011 - RNA, 17 nt, Human
gcaaaauugauguguuu

SEQ ID NO: 3360012 - RNA, 22 nt, Human
gcaaauccuugugggaaaagaa

SEQ ID NO: 3360013 - RNA, 19 nt, Human
gcaggggccgggggcaguc

SEQ ID NO: 3360014 - RNA, 20 nt, Human
gcaggggccgggggcagucu

SEQ ID NO: 3360015 - RNA, 13 nt, Human
gcagguccccaga

SEQ ID NO: 3360016 - RNA, 13 nt, Human
gcauagaaguaaa

SEQ ID NO: 3360017 - RNA, 14 nt, Human
gcauauuuuucaca

SEQ ID NO: 3360018 - RNA, 15 nt, Human
gcauauuuuucacau

SEQ ID NO: 3360019 - RNA, 16 nt, Human
gcauauuuuucacaua

SEQ ID NO: 3360020 - RNA, 19 nt, Human
gcauauuuuucacauaucu

SEQ ID NO: 3360021 - RNA, 20 nt, Human
gcauauuuuucacauaucua

SEQ ID NO: 3360022 - RNA, 19 nt, Human
gcauauuuauaaaaauaaa

SEQ ID NO: 3360023 - RNA, 17 nt, Human
gcauagguuuaauaauu

SEQ ID NO: 3360024 - RNA, 18 nt, Human
gcauuauauuuguaaauu

SEQ ID NO: 3360025 - RNA, 18 nt, Human
gcauggagauagccccac

SEQ ID NO: 3360026 - RNA, 16 nt, Human
gcaucugaaaauugau

SEQ ID NO: 3360027 - RNA, 18 nt, Human
gccuuuggacuugucccg

SEQ ID NO: 3360028 - RNA, 12 nt, Human
gccuguuuaaga

SEQ ID NO: 3360029 - RNA, 13 nt, Human
gccuguuuaagag

SEQ ID NO: 3360030 - RNA, 15 nt, Human
gccugccacucaggc

SEQ ID NO: 3360031 - RNA, 23 nt, Human
gccugccacucaggcccaaagcc

SEQ ID NO: 3360032 - RNA, 13 nt, Human
gccuggugcagug

SEQ ID NO: 3360033 - RNA, 17 nt, Human
gccugguccucacacuc

SEQ ID NO: 3360034 - RNA, 18 nt, Human
gcgcggcugggaggaggg

SEQ ID NO: 3360035 - RNA, 12 nt, Human
gcgcggcuggga

SEQ ID NO: 3360036 - RNA, 17 nt, Human
gcuaagaauauuugaau

SEQ ID NO: 3360037 - RNA, 16 nt, Human
gcuaagaauauuugaa

SEQ ID NO: 3360038 - RNA, 17 nt, Human
gccugacccucaucuuu

SEQ ID NO: 3360039 - RNA, 24 nt, Human
gccucuccacucaugugacucuuu

SEQ ID NO: 3360040 - RNA, 21 nt, Human
gccucuccacucaugugacuc

SEQ ID NO: 3360041 - RNA, 20 nt, Human
gccucucauuccagaggaag

SEQ ID NO: 3360042 - RNA, 19 nt, Human
gccucucauuccagaggaa

SEQ ID NO: 3360043 - RNA, 20 nt, Human
gccuccuacagcccaccugg

SEQ ID NO: 3360044 - RNA, 17 nt, Human
gcccgggagcucaggaa

SEQ ID NO: 3360045 - RNA, 19 nt, Human
gcccgggagcucaggaacc

SEQ ID NO: 3360046 - RNA, 15 nt, Human
gcccgggagcucagg

SEQ ID NO: 3360047 - RNA, 16 nt, Human
gccccugagaucucug

SEQ ID NO: 3360048 - RNA, 17 nt, Human
gccaucauguuuacaga

SEQ ID NO: 3360049 - RNA, 21 nt, Human
gccaucauguuuacagaggac

SEQ ID NO: 3360050 - RNA, 16 nt, Human
gccagucccugaggca

SEQ ID NO: 3360051 - RNA, 22 nt, Human
gccagucccugaggcagguccc

SEQ ID NO: 3360052 - RNA, 23 nt, Human
gccaggcugggucgcccuggacu

SEQ ID NO: 3360053 - RNA, 17 nt, Human
gccaggcugggucgccc

SEQ ID NO: 3360054 - RNA, 17 nt, Human
gcccagaaugaggcugc

SEQ ID NO: 3360055 - RNA, 16 nt, Human
gcccagaaugaggcug

SEQ ID NO: 3360056 - RNA, 21 nt, Human
cauccagagucccugccugga

SEQ ID NO: 3360057 - RNA, 19 nt, Human
cauccuacccccugugccu

SEQ ID NO: 3360058 - RNA, 12 nt, Human
caucuaggauuu

SEQ ID NO: 3360059 - RNA, 18 nt, Human
caucuagguaaauuacag

SEQ ID NO: 3360060 - RNA, 17 nt, Human
caucuagguaaauuaca

SEQ ID NO: 3360061 - RNA, 22 nt, Human
caucaagucuuucacauuuaaa

SEQ ID NO: 3360062 - RNA, 14 nt, Human
cauauuuuucacau

SEQ ID NO: 3360063 - RNA, 21 nt, Human
cauauuuuucacauaucuagu

SEQ ID NO: 3360064 - RNA, 18 nt, Human
cauauuuuucacauaucu

SEQ ID NO: 3360065 - RNA, 12 nt, Human
cauauuuauaaa

SEQ ID NO: 3360066 - RNA, 17 nt, Human
cauauuuauaaaaauaa

SEQ ID NO: 3360067 - RNA, 17 nt, Human
cauaugauguacaugua

SEQ ID NO: 3360068 - RNA, 15 nt, Human
cauaugauguacaug

SEQ ID NO: 3360069 - RNA, 21 nt, Human
cauaugauguacauguacuga

SEQ ID NO: 3360070 - RNA, 20 nt, Human
cauagaauaaaauuuuuaau

SEQ ID NO: 3360071 - RNA, 14 nt, Human
cauagaauaaaauu

SEQ ID NO: 3360072 - RNA, 15 nt, Human
cauaccuggcccugu

SEQ ID NO: 3360073 - RNA, 18 nt, Human
cauaaucacaacccuuca

SEQ ID NO: 3360074 - RNA, 11 nt, Human
cauacauauuu

SEQ ID NO: 3360075 - RNA, 15 nt, Human
cauaauacuugcuuu

SEQ ID NO: 3360076 - RNA, 12 nt, Human
cauacauauuuu

SEQ ID NO: 3360077 - RNA, 19 nt, Human
cauacauauuuuuguagca

SEQ ID NO: 3360078 - RNA, 15 nt, Human
cauacauuguacgaa

SEQ ID NO: 3360079 - RNA, 22 nt, Human
cauaaguaauucaagaaaacaa

SEQ ID NO: 3360080 - RNA, 18 nt, Human
cauaaguaauucaagaaa

SEQ ID NO: 3360081 - RNA, 17 nt, Human
cauaaguaauucaagaa

SEQ ID NO: 3360082 - RNA, 16 nt, Human
cauaaguaauucaaga

SEQ ID NO: 3360083 - RNA, 17 nt, Human
cauaaaaacaacuuuau

SEQ ID NO: 3360084 - RNA, 20 nt, Human
cauaaaaacaacuuuauacc

SEQ ID NO: 3360085 - RNA, 21 nt, Human
cauaaaaacaacuuuauaccc

SEQ ID NO: 3360086 - RNA, 23 nt, Human
cauaaaaacaacuuuauacccag

SEQ ID NO: 3360087 - RNA, 23 nt, Human
cauaaaaagccugcaauuucaua

SEQ ID NO: 3360088 - RNA, 16 nt, Human
cauaaagcaggcagaa

SEQ ID NO: 3360089 - RNA, 14 nt, Human
cauaaagcaggcag

SEQ ID NO: 3360090 - RNA, 15 nt, Human
cauaaaaacaacuuu

SEQ ID NO: 3360091 - RNA, 17 nt, Human
cagugucuggcugcaga

SEQ ID NO: 3360092 - RNA, 19 nt, Human
cagugucuggcugcagagc

SEQ ID NO: 3360093 - RNA, 23 nt, Human
cagugugucuaaauuugaauguu

SEQ ID NO: 3360094 - RNA, 14 nt, Human
cagugugucuaaau

SEQ ID NO: 3360095 - RNA, 11 nt, Human
cagugguuaag

SEQ ID NO: 3360096 - RNA, 18 nt, Human
caguggcuggaucuguga

SEQ ID NO: 3360097 - RNA, 20 nt, Human
caguggcuggaucugugagg

SEQ ID NO: 3360098 - RNA, 16 nt, Human
caguggcuggaucugu

SEQ ID NO: 3360099 - RNA, 18 nt, Human
caguguuccgugguuaaa

SEQ ID NO: 3360100 - RNA, 22 nt, Human
caguucggugagcuacaaaugc

SEQ ID NO: 3360101 - RNA, 16 nt, Human
caguucucuucacuca

SEQ ID NO: 3360102 - RNA, 12 nt, Human
ccaagaggcugc

SEQ ID NO: 3360103 - RNA, 13 nt, Human
ccaagaggcugca

SEQ ID NO: 3360104 - RNA, 16 nt, Human
ccaagagccugagagu

SEQ ID NO: 3360105 - RNA, 20 nt, Human
ccaagguggguagaucacga

SEQ ID NO: 3360106 - RNA, 12 nt, Human
ccaagagccuga

SEQ ID NO: 3360107 - RNA, 21 nt, Human
cauuaccucagugagaagcca

SEQ ID NO: 3360108 - RNA, 22 nt, Human
cauuaccucagugagaagccag

SEQ ID NO: 3360109 - RNA, 22 nt, Human
cauguuucuuuguaaugaaaac

SEQ ID NO: 3360110 - RNA, 21 nt, Human
cauguuucuuuguaaugaaaa

SEQ ID NO: 3360111 - RNA, 20 nt, Human
cauguuucuuuguaaugaaa

SEQ ID NO: 3360112 - RNA, 20 nt, Human
cauggugacuuuugaaaaga

SEQ ID NO: 3360113 - RNA, 17 nt, Human
caugugaaaucauucau

SEQ ID NO: 3360114 - RNA, 16 nt, Human
caugugaaaucauuca

SEQ ID NO: 3360115 - RNA, 15 nt, Human
caugugaaaucauuc

SEQ ID NO: 3360116 - RNA, 19 nt, Human
cauggggcugauuguauuu

SEQ ID NO: 3360117 - RNA, 21 nt, Human
cauggagauagccccacagga

SEQ ID NO: 3360118 - RNA, 22 nt, Human
cauggacuucugccagcauaau

SEQ ID NO: 3360119 - RNA, 19 nt, Human
caugccacuacacuccagc

SEQ ID NO: 3360120 - RNA, 14 nt, Human
cccucaucuuucuu

SEQ ID NO: 3360121 - RNA, 19 nt, Human
cccucauuggcucuugaac

SEQ ID NO: 3360122 - RNA, 23 nt, Human
cccucccucuacugggagccuac

SEQ ID NO: 3360123 - RNA, 18 nt, Human
cccuaauaaagcugugug

SEQ ID NO: 3360124 - RNA, 15 nt, Human
cccuaauaaagcugu

SEQ ID NO: 3360125 - RNA, 14 nt, Human
cccuaauaaagcug

SEQ ID NO: 3360126 - RNA, 13 nt, Human
cccuaauaaagcu

SEQ ID NO: 3360127 - RNA, 12 nt, Human
cccuaauaaagc

SEQ ID NO: 3360128 - RNA, 22 nt, Human
ccccagcuggggccaggcuggg

SEQ ID NO: 3360129 - RNA, 21 nt, Human
ccccagcuggggccaggcugg

SEQ ID NO: 3360130 - RNA, 23 nt, Human
ccccacaggagguggucugggac

SEQ ID NO: 3360131 - RNA, 23 nt, Human
ccccuggugguucacucuuggag

SEQ ID NO: 3360132 - RNA, 12 nt, Human
cccugccuggac

SEQ ID NO: 3360133 - RNA, 13 nt, Human
cccugccuggacc

SEQ ID NO: 3360134 - RNA, 18 nt, Human
cccugccuggaccagccu

SEQ ID NO: 3360135 - RNA, 16 nt, Human
cccugccucucugcag

SEQ ID NO: 3360136 - RNA, 22 nt, Human
cccugccucucugcaggucccu

SEQ ID NO: 3360137 - RNA, 21 nt, Human
cccugccucucugcagguccc

SEQ ID NO: 3360138 - RNA, 21 nt, Human
cccuggacugugugcucagga

SEQ ID NO: 3360139 - RNA, 18 nt, Human
cccugggaggcucuggag

SEQ ID NO: 3360140 - RNA, 17 nt, Human
cccugggaggcucugga

SEQ ID NO: 3360141 - RNA, 16 nt, Human
cccugggaggcucugg

SEQ ID NO: 3360142 - RNA, 15 nt, Human
cccugggaggcucug

SEQ ID NO: 3360143 - RNA, 20 nt, Human
cccugccaucauguuuacag

SEQ ID NO: 3360144 - RNA, 18 nt, Human
cccugccucucugcaggu

SEQ ID NO: 3360145 - RNA, 11 nt, Human
cccugccucuc

SEQ ID NO: 3360146 - RNA, 17 nt, Human
cccucuacugggagccu

SEQ ID NO: 3360147 - RNA, 20 nt, Human
cccucuacugggagccuacc

SEQ ID NO: 3360148 - RNA, 18 nt, Human
ccucagccccgcguggaa

SEQ ID NO: 3360149 - RNA, 14 nt, Human
ccucacacucaccc

SEQ ID NO: 3360150 - RNA, 15 nt, Human
ccggggccugggcag

SEQ ID NO: 3360151 - RNA, 13 nt, Human
ccgggagcucagg

SEQ ID NO: 3360152 - RNA, 15 nt, Human
ccgggagcucaggaa

SEQ ID NO: 3360153 - RNA, 17 nt, Human
ccggcuuuguggcacug

SEQ ID NO: 3360154 - RNA, 19 nt, Human
ccggcuuuguggcacuggg

SEQ ID NO: 3360155 - RNA, 16 nt, Human
ccggcuuuguggcacu

SEQ ID NO: 3360156 - RNA, 13 nt, Human
cccuggugguuca

SEQ ID NO: 3360157 - RNA, 13 nt, Human
ccuaaacauauga

SEQ ID NO: 3360158 - RNA, 15 nt, Human
ccuacagcccaccug

SEQ ID NO: 3360159 - RNA, 22 nt, Human
ccuagguauaauucacauugua

SEQ ID NO: 3360160 - RNA, 17 nt, Human
ccuccauccuacccccu

SEQ ID NO: 3360161 - RNA, 22 nt, Human
ccuccauccuacccccugugcc

SEQ ID NO: 3360162 - RNA, 23 nt, Human
ccuccauccuacccccugugccu

SEQ ID NO: 3360163 - RNA, 13 nt, Human
ccuccacucuccu

SEQ ID NO: 3360164 - RNA, 14 nt, Human
ccucuacugggagc

SEQ ID NO: 3360165 - RNA, 21 nt, Human
cccagcuaugguucucucgca

SEQ ID NO: 3360166 - RNA, 16 nt, Human
cccaggaccccugagu

SEQ ID NO: 3360167 - RNA, 18 nt, Human
cccagaaugccuccugca

SEQ ID NO: 3360168 - RNA, 20 nt, Human
ccaucauguuuacagaggac

SEQ ID NO: 3360169 - RNA, 22 nt, Human
ccaucauguuuacagaggacag

SEQ ID NO: 3360170 - RNA, 16 nt, Human
gccuacccacccccag

SEQ ID NO: 3360171 - RNA, 17 nt, Human
gccuacccacccccagg

SEQ ID NO: 3360172 - RNA, 21 nt, Human
gccacuguuuugaaucucaua

SEQ ID NO: 3360173 - RNA, 16 nt, Human
gccaccgccuccuaca

SEQ ID NO: 3360174 - RNA, 16 nt, Human
gccauaugaaaaggcu

SEQ ID NO: 3360175 - RNA, 19 nt, Human
gccaggccacuggccccug

SEQ ID NO: 3360176 - RNA, 17 nt, Human
gccagacccccuggaga

SEQ ID NO: 3360177 - RNA, 22 nt, Human
gcuuccuucugugaaaguacau

SEQ ID NO: 3360178 - RNA, 19 nt, Human
gcugggucgcccuggacug

SEQ ID NO: 3360179 - RNA, 18 nt, Human
gcugggucgcccuggacu

SEQ ID NO: 3360180 - RNA, 17 nt, Human
gcugggucgcccuggac

SEQ ID NO: 3360181 - RNA, 16 nt, Human
gcugggucgcccugga

SEQ ID NO: 3360182 - RNA, 12 nt, Human
gcugggucgccc

SEQ ID NO: 3360183 - RNA, 18 nt, Human
gcucccccuccaccugcu

SEQ ID NO: 3360184 - RNA, 17 nt, Human
gcucuggagcccacugu

SEQ ID NO: 3360185 - RNA, 23 nt, Human
gcucuggagcccacuguacuugc

SEQ ID NO: 3360186 - RNA, 21 nt, Human
gcuauggggauagaugugugg

SEQ ID NO: 3360187 - RNA, 19 nt, Human
gcuauggggauagaugugu

SEQ ID NO: 3360188 - RNA, 18 nt, Human
gcucaggagcccugggag

SEQ ID NO: 3360189 - RNA, 15 nt, Human
gcucaggagcccugg

SEQ ID NO: 3360190 - RNA, 14 nt, Human
gcucaggagcccug

SEQ ID NO: 3360191 - RNA, 23 nt, Human
ggcaggcaucggggagccgggag

SEQ ID NO: 3360192 - RNA, 13 nt, Human
ggaugucugggcc

SEQ ID NO: 3360193 - RNA, 15 nt, Human
ggaugguguucaaaa

SEQ ID NO: 3360194 - RNA, 15 nt, Human
ggaggcucuggagcc

SEQ ID NO: 3360195 - RNA, 21 nt, Human
ggaggcucuggagcccacugu

SEQ ID NO: 3360196 - RNA, 20 nt, Human
ggaggcucuggagcccacug

SEQ ID NO: 3360197 - RNA, 17 nt, Human
ggaggcucuggagccca

SEQ ID NO: 3360198 - RNA, 18 nt, Human
ggagcccacuguacuugc

SEQ ID NO: 3360199 - RNA, 15 nt, Human
ggagcccacuguacu

SEQ ID NO: 3360200 - RNA, 18 nt, Human
ggaccccuggugguucac

SEQ ID NO: 3360201 - RNA, 15 nt, Human
ggagagacgggcccu

SEQ ID NO: 3360202 - RNA, 17 nt, Human
ggagagacgggcccugg

SEQ ID NO: 3360203 - RNA, 22 nt, Human
ggacugugugcucaggagcccu

SEQ ID NO: 3360204 - RNA, 23 nt, Human
ggacugugugcucaggagcccug

SEQ ID NO: 3360205 - RNA, 17 nt, Human
ggacugugugcucagga

SEQ ID NO: 3360206 - RNA, 18 nt, Human
ggagaaaugaaaaaauau

SEQ ID NO: 3360207 - RNA, 16 nt, Human
ggacuuggagguagcu

SEQ ID NO: 3360208 - RNA, 12 nt, Human
ggggccugggca

SEQ ID NO: 3360209 - RNA, 15 nt, Human
ggggccugggcagga

SEQ ID NO: 3360210 - RNA, 19 nt, Human
aaacauguuucuuuguaau

SEQ ID NO: 3360211 - RNA, 23 nt, Human
aaacauguuucuuuguaaugaaa

SEQ ID NO: 3360212 - RNA, 22 nt, Human
aaacauguuucuuuguaaugaa

SEQ ID NO: 3360213 - RNA, 21 nt, Human
aaaccacauuggagauguuua

SEQ ID NO: 3360214 - RNA, 13 nt, Human
aaacaaagaaauu

SEQ ID NO: 3360215 - RNA, 19 nt, Human
aaacaacuucaauauccaa

SEQ ID NO: 3360216 - RNA, 20 nt, Human
aaacaagcacuaaacaaaga

SEQ ID NO: 3360217 - RNA, 16 nt, Human
aaaauugugauguguc

SEQ ID NO: 3360218 - RNA, 15 nt, Human
aaaauuuuuaaucuu

SEQ ID NO: 3360219 - RNA, 16 nt, Human
aaaauuuuuaaucuuu

SEQ ID NO: 3360220 - RNA, 19 nt, Human
aaaauuuuuaaucuuuaau

SEQ ID NO: 3360221 - RNA, 21 nt, Human
aaaauauuauguguuuccaua

SEQ ID NO: 3360222 - RNA, 15 nt, Human
aaaauauuauguguu

SEQ ID NO: 3360223 - RNA, 14 nt, Human
aaaauauuaugugu

SEQ ID NO: 3360224 - RNA, 16 nt, Human
ggggccaggcuggguc

SEQ ID NO: 3360225 - RNA, 14 nt, Human
ggggccaggcuggg

SEQ ID NO: 3360226 - RNA, 13 nt, Human
ggggccaggcugg

SEQ ID NO: 3360227 - RNA, 21 nt, Human
aaagauuuucagaaaauauua

SEQ ID NO: 3360228 - RNA, 20 nt, Human
ggucuugguuccagccugcc

SEQ ID NO: 3360229 - RNA, 21 nt, Human
ggucuugguuccagccugcca

SEQ ID NO: 3360230 - RNA, 13 nt, Human
aaaggaauuuaaa

SEQ ID NO: 3360231 - RNA, 14 nt, Human
aaagcgaauuuuaa

SEQ ID NO: 3360232 - RNA, 21 nt, Human
ggucauauuaauauauuucca

SEQ ID NO: 3360233 - RNA, 18 nt, Human
ggucauauuaauauauuu

SEQ ID NO: 3360234 - RNA, 15 nt, Human
aaagauuuucagaaa

SEQ ID NO: 3360235 - RNA, 14 nt, Human
aaagauuuucagaa

SEQ ID NO: 3360236 - RNA, 14 nt, Human
aaagaugcaaugua

SEQ ID NO: 3360237 - RNA, 14 nt, Human
gggagggggagagg

SEQ ID NO: 3360238 - RNA, 16 nt, Human
aaaagggacugagaaa

SEQ ID NO: 3360239 - RNA, 18 nt, Human
aaaauauauaucaaauau

SEQ ID NO: 3360240 - RNA, 14 nt, Human
aaaauauauuuaau

SEQ ID NO: 3360241 - RNA, 20 nt, Human
gggaggcagagguugcagug

SEQ ID NO: 3360242 - RNA, 19 nt, Human
aaaagccugcaauuucaua

SEQ ID NO: 3360243 - RNA, 18 nt, Human
aaaagccuguuuaagaga

SEQ ID NO: 3360244 - RNA, 16 nt, Human
aaaagccuguuuaaga

SEQ ID NO: 3360245 - RNA, 22 nt, Human
aaaagcuccauuuuuagugaaa

SEQ ID NO: 3360246 - RNA, 22 nt, Human
aaaaaucugaccaaaacaaaca

SEQ ID NO: 3360247 - RNA, 19 nt, Human
aaaacugcucauaugaugu

SEQ ID NO: 3360248 - RNA, 20 nt, Human
ggcuccucgagaucccaaca

SEQ ID NO: 3360249 - RNA, 17 nt, Human
ggcuggaucugugaggg

SEQ ID NO: 3360250 - RNA, 15 nt, Human
aaaaagggaggggga

SEQ ID NO: 3360251 - RNA, 20 nt, Human
aaaaagccugcaauuucaua

SEQ ID NO: 3360252 - RNA, 23 nt, Human
gacucacuuaucccaagagaaug

SEQ ID NO: 3360253 - RNA, 22 nt, Human
gacugugugcucaggagcccug

SEQ ID NO: 3360254 - RNA, 14 nt, Human
gacagugaaagaaa

SEQ ID NO: 3360255 - RNA, 20 nt, Human
gaagcuaucguaaaauuaag

SEQ ID NO: 3360256 - RNA, 22 nt, Human
gaauauugcuuuggucauauga

SEQ ID NO: 3360257 - RNA, 20 nt, Human
gaauauguuucaaacuuugg

SEQ ID NO: 3360258 - RNA, 14 nt, Human
gaauauguuucaaa

SEQ ID NO: 3360259 - RNA, 15 nt, Human
gaauauguuucaaac

SEQ ID NO: 3360260 - RNA, 19 nt, Human
gaagugugggucugugugu

SEQ ID NO: 3360261 - RNA, 21 nt, Human
gaagugugggucugugugugu

SEQ ID NO: 3360262 - RNA, 24 nt, Human
gaagugugggucugugugugugua

SEQ ID NO: 3360263 - RNA, 12 nt, Human
gaaccgaggcag

SEQ ID NO: 3360264 - RNA, 15 nt, Human
gaaccgaggcaggga

SEQ ID NO: 3360265 - RNA, 17 nt, Human
gaacugcugggcuuggc

SEQ ID NO: 3360266 - RNA, 20 nt, Human
gaacugcugggcuuggcagc

SEQ ID NO: 3360267 - RNA, 20 nt, Human
gaagcaaugcuucaucccuu

SEQ ID NO: 3360268 - RNA, 13 nt, Human
gaggcaggucccc

SEQ ID NO: 3360269 - RNA, 16 nt, Human
gaggcagguccccaga

SEQ ID NO: 3360270 - RNA, 12 nt, Human
gaggcagguccc

SEQ ID NO: 3360271 - RNA, 18 nt, Human
gaggcuacuguaaggcaa

SEQ ID NO: 3360272 - RNA, 9 nt, Human
gagggcugc

SEQ ID NO: 3360273 - RNA, 16 nt, Human
gagggcugccuuugga

SEQ ID NO: 3360274 - RNA, 18 nt, Human
gaggcugcagccaggcca

SEQ ID NO: 3360275 - RNA, 22 nt, Human
gaggugcuucuaguucugccag

SEQ ID NO: 3360276 - RNA, 23 nt, Human
gaggugcuucuaguucugccagg

SEQ ID NO: 3360277 - RNA, 17 nt, Human
gagguggaagagggcug

SEQ ID NO: 3360278 - RNA, 20 nt, Human
gagguggaagagggcugcaa

SEQ ID NO: 3360279 - RNA, 16 nt, Human
gaguccaucagccucc

SEQ ID NO: 3360280 - RNA, 17 nt, Human
gaguccaucagccucca

SEQ ID NO: 3360281 - RNA, 18 nt, Human
gagucagggagagcugaa

SEQ ID NO: 3360282 - RNA, 19 nt, Human
gaguggacuguucccugag

SEQ ID NO: 3360283 - RNA, 14 nt, Human
gauucugagagcug

SEQ ID NO: 3360284 - RNA, 14 nt, Human
gauuauauuaugaa

SEQ ID NO: 3360285 - RNA, 14 nt, Human
gaugguucuagcau

SEQ ID NO: 3360286 - RNA, 16 nt, Human
gcaccggggccugggc

SEQ ID NO: 3360287 - RNA, 14 nt, Human
gcaccggggccugg

SEQ ID NO: 3360288 - RNA, 18 nt, Human
gcaagucagaauagaaau

SEQ ID NO: 3360289 - RNA, 22 nt, Human
cuugacaaagucaagccacaug

SEQ ID NO: 3360290 - RNA, 16 nt, Human
cuuugagguggaagag

SEQ ID NO: 3360291 - RNA, 17 nt, Human
cuuugagguggaagagg

SEQ ID NO: 3360292 - RNA, 14 nt, Human
cuuugagguggaag

SEQ ID NO: 3360293 - RNA, 22 nt, Human
cuuugagguggaagagggcugc

SEQ ID NO: 3360294 - RNA, 12 nt, Human
cuucaucugacu

SEQ ID NO: 3360295 - RNA, 18 nt, Human
cuucaucugacuaugaca

SEQ ID NO: 3360296 - RNA, 14 nt, Human
cuggaucugugagg

SEQ ID NO: 3360297 - RNA, 22 nt, Human
cuggacugugugcucaggagcc

SEQ ID NO: 3360298 - RNA, 19 nt, Human
cuggacugugugcucagga

SEQ ID NO: 3360299 - RNA, 23 nt, Human
cuggacugugugcucaggagccc

SEQ ID NO: 3360300 - RNA, 13 nt, Human
cugggcaggaggg

SEQ ID NO: 3360301 - RNA, 12 nt, Human
cuggugcagugg

SEQ ID NO: 3360302 - RNA, 13 nt, Human
cuggcccugugcc

SEQ ID NO: 3360303 - RNA, 16 nt, Human
cugggagaaaugaaaa

SEQ ID NO: 3360304 - RNA, 17 nt, Human
cugggagaaaugaaaaa

SEQ ID NO: 3360305 - RNA, 18 nt, Human
cugcaccggggccugggc

SEQ ID NO: 3360306 - RNA, 19 nt, Human
cugcaccggggccugggca

SEQ ID NO: 3360307 - RNA, 14 nt, Human
cugcaccggggccu

SEQ ID NO: 3360308 - RNA, 16 nt, Human
cugcaccggggccugg

SEQ ID NO: 3360309 - RNA, 16 nt, Human
cugcaaauccuugugg

SEQ ID NO: 3360310 - RNA, 19 nt, Human
cugcaaauccuugugggaa

SEQ ID NO: 3360311 - RNA, 17 nt, Human
cugcaggaaauggcugu

SEQ ID NO: 3360312 - RNA, 18 nt, Human
caccuaggcuaggguggg

SEQ ID NO: 3360313 - RNA, 19 nt, Human
caccuaggcuagggugggg

SEQ ID NO: 3360314 - RNA, 17 nt, Human
caccuaggcuagggugg

SEQ ID NO: 3360315 - RNA, 15 nt, Human
caacuauuuuuccaa

SEQ ID NO: 3360316 - RNA, 14 nt, Human
caacuauggccugu

SEQ ID NO: 3360317 - RNA, 13 nt, Human
caacuauggccug

SEQ ID NO: 3360318 - RNA, 19 nt, Human
caagcaaaugugaaucauu

SEQ ID NO: 3360319 - RNA, 17 nt, Human
caagcaaaugugaauca

SEQ ID NO: 3360320 - RNA, 15 nt, Human
caagcaaaugugaau

SEQ ID NO: 3360321 - RNA, 17 nt, Human
auuuuuaugccaccuga

SEQ ID NO: 3360322 - RNA, 15 nt, Human
auuuuuuucugaauu

SEQ ID NO: 3360323 - RNA, 19 nt, Human
auuuguucuauagcuuuuc

SEQ ID NO: 3360324 - RNA, 17 nt, Human
auuuucuauaauuuaaa

SEQ ID NO: 3360325 - RNA, 18 nt, Human
auuuucuauaauuuaaau

SEQ ID NO: 3360326 - RNA, 19 nt, Human
auuuucuauaauuuaaaua

SEQ ID NO: 3360327 - RNA, 15 nt, Human
auuuugaaaaacugc

SEQ ID NO: 3360328 - RNA, 13 nt, Human
auuuugaaaaacu

SEQ ID NO: 3360329 - RNA, 16 nt, Human
auuucagcagcugcag

SEQ ID NO: 3360330 - RNA, 16 nt, Human
auugauaaguucauac

SEQ ID NO: 3360331 - RNA, 17 nt, Human
auugauaaguucauaca

SEQ ID NO: 3360332 - RNA, 18 nt, Human
auugauaaguucauacau

SEQ ID NO: 3360333 - RNA, 19 nt, Human
auugauaaguucauacauu

SEQ ID NO: 3360334 - RNA, 12 nt, Human
auugauaaguuc

SEQ ID NO: 3360335 - RNA, 15 nt, Human
auugauaaguucaua

SEQ ID NO: 3360336 - RNA, 17 nt, Human
auucauggccuggggga

SEQ ID NO: 3360337 - RNA, 21 nt, Human
auuaugugccagauuuaugca

SEQ ID NO: 3360338 - RNA, 13 nt, Human
auuaugugccaga

SEQ ID NO: 3360339 - RNA, 20 nt, Human
auuaaauuuugaguucuaca

SEQ ID NO: 3360340 - RNA, 17 nt, Human
cagcacguguggccugu

SEQ ID NO: 3360341 - RNA, 18 nt, Human
cagccaggccacuggccc

SEQ ID NO: 3360342 - RNA, 13 nt, Human
cagauuuaugcau

SEQ ID NO: 3360343 - RNA, 15 nt, Human
cauuggauucugaga

SEQ ID NO: 3360344 - RNA, 16 nt, Human
cauuggagauguuuag

SEQ ID NO: 3360345 - RNA, 22 nt, Human
ccaauuauaugagacguuuuug

SEQ ID NO: 3360346 - RNA, 19 nt, Human
ccaauucgaacuuuuucca

SEQ ID NO: 3360347 - RNA, 16 nt, Human
ccaacuauggccugug

SEQ ID NO: 3360348 - RNA, 15 nt, Human
ccaacuauggccugu

SEQ ID NO: 3360349 - RNA, 14 nt, Human
ccaacuauggccug

SEQ ID NO: 3360350 - RNA, 16 nt, Human
caugaauuugugaagg

SEQ ID NO: 3360351 - RNA, 21 nt, Human
caugaauauuuaguguucaua

SEQ ID NO: 3360352 - RNA, 17 nt, Human
caguuauuauauuuaca

SEQ ID NO: 3360353 - RNA, 21 nt, Human
caguuauuauauuuacaaaug

SEQ ID NO: 3360354 - RNA, 22 nt, Human
caguuauuauauuuacaaaugg

SEQ ID NO: 3360355 - RNA, 14 nt, Human
caguucagcuuggg

SEQ ID NO: 3360356 - RNA, 15 nt, Human
caguucagcuugggg

SEQ ID NO: 3360357 - RNA, 19 nt, Human
cauacagggaugguguuca

SEQ ID NO: 3360358 - RNA, 16 nt, Human
cauacagggauggugu

SEQ ID NO: 3360359 - RNA, 18 nt, Human
cauaauuauuauuuggcc

SEQ ID NO: 3360360 - RNA, 23 nt, Human
caguuguucaauaauaaauauuu

SEQ ID NO: 3360361 - RNA, 17 nt, Human
caucuguaccucugccu

SEQ ID NO: 3360362 - RNA, 23 nt, Human
ccagacuucccacggcuccucga

SEQ ID NO: 3360363 - RNA, 18 nt, Human
ccagagaaaaagggaggg

SEQ ID NO: 3360364 - RNA, 14 nt, Human
ccagacuccaccaa

SEQ ID NO: 3360365 - RNA, 18 nt, Human
ccagacuccaccaagccu

SEQ ID NO: 3360366 - RNA, 21 nt, Human
ccccgcguggaacucgugucu

SEQ ID NO: 3360367 - RNA, 22 nt, Human
cccccugugccuugucacgcca

SEQ ID NO: 3360368 - RNA, 20 nt, Human
cccagcuggggccaggcugg

SEQ ID NO: 3360369 - RNA, 23 nt, Human
cccagcuggggccaggcuggguc

SEQ ID NO: 3360370 - RNA, 22 nt, Human
cccagcuggggccaggcugggu

SEQ ID NO: 3360371 - RNA, 21 nt, Human
ccaugagcuccuuaaggcucu

SEQ ID NO: 3360372 - RNA, 12 nt, Human
ccaugagcuccu

SEQ ID NO: 3360373 - RNA, 13 nt, Human
ccauugguguuga

SEQ ID NO: 3360374 - RNA, 19 nt, Human
cccacuguacuugcucuug

SEQ ID NO: 3360375 - RNA, 18 nt, Human
cccacuguacuugcucuu

SEQ ID NO: 3360376 - RNA, 23 nt, Human
cccacuguacuugcucuugaugc

SEQ ID NO: 3360377 - RNA, 21 nt, Human
ccucugcccgggagcucagga

SEQ ID NO: 3360378 - RNA, 22 nt, Human
ccucugcccgggagcucaggaa

SEQ ID NO: 3360379 - RNA, 15 nt, Human
ccucucugcaggucc

SEQ ID NO: 3360380 - RNA, 19 nt, Human
ccucucugcaggucccuaa

SEQ ID NO: 3360381 - RNA, 18 nt, Human
ccucucugcaggucccua

SEQ ID NO: 3360382 - RNA, 17 nt, Human
ccucucugcaggucccu

SEQ ID NO: 3360383 - RNA, 16 nt, Human
ccucucugcagguccc

SEQ ID NO: 3360384 - RNA, 19 nt, Human
ccugccuggaccagccucu

SEQ ID NO: 3360385 - RNA, 12 nt, Human
ccugccuggacc

SEQ ID NO: 3360386 - RNA, 21 nt, Human
ccugccucucugcaggucccu

SEQ ID NO: 3360387 - RNA, 20 nt, Human
ccugccucucugcagguccc

SEQ ID NO: 3360388 - RNA, 17 nt, Human
ccugccucucugcaggu

SEQ ID NO: 3360389 - RNA, 22 nt, Human
ccucuuggggaguuuagggugg

SEQ ID NO: 3360390 - RNA, 15 nt, Human
ccucuuggcugccuu

SEQ ID NO: 3360391 - RNA, 23 nt, Human
ccucuuggggaguuuaggguggg

SEQ ID NO: 3360392 - RNA, 12 nt, Human
ccugcagagcug

SEQ ID NO: 3360393 - RNA, 13 nt, Human
ccugcagagcugc

SEQ ID NO: 3360394 - RNA, 14 nt, Human
ccugcagagcugcg

SEQ ID NO: 3360395 - RNA, 17 nt, Human
ccugcagagcugcgggc

SEQ ID NO: 3360396 - RNA, 14 nt, Human
ccugaguuccuagc

SEQ ID NO: 3360397 - RNA, 23 nt, Human
ccgaaggugaggagcuugaaacc

SEQ ID NO: 3360398 - RNA, 18 nt, Human
cccugagaucucugcagg

SEQ ID NO: 3360399 - RNA, 14 nt, Human
cccugaaggaacca

SEQ ID NO: 3360400 - RNA, 16 nt, Human
cuccugucucccuccu

SEQ ID NO: 3360401 - RNA, 16 nt, Human
cuccuuguaaagacug

SEQ ID NO: 3360402 - RNA, 14 nt, Human
cuccucuuccaggc

SEQ ID NO: 3360403 - RNA, 22 nt, Human
cuccucugcccgggagcucagg

SEQ ID NO: 3360404 - RNA, 24 nt, Human
cuccucugcccgggagcucaggaa

SEQ ID NO: 3360405 - RNA, 20 nt, Human
cucccucuacugggagccua

SEQ ID NO: 3360406 - RNA, 13 nt, Human
cucccucuacugg

SEQ ID NO: 3360407 - RNA, 19 nt, Human
cucccucuacugggagccu

SEQ ID NO: 3360408 - RNA, 20 nt, Human
cucugcaggaaauggcugug

SEQ ID NO: 3360409 - RNA, 20 nt, Human
cucaggccugacucucagca

SEQ ID NO: 3360410 - RNA, 23 nt, Human
cucaggccgaaggaggagucagg

SEQ ID NO: 3360411 - RNA, 23 nt, Human
cucaugauagaaggcuaugggga

SEQ ID NO: 3360412 - RNA, 14 nt, Human
ccuugcauaauggu

SEQ ID NO: 3360413 - RNA, 23 nt, Human
cuaaaguaaaaacaaagaaauua

SEQ ID NO: 3360414 - RNA, 16 nt, Human
uuggacuugucccggg

SEQ ID NO: 3360415 - RNA, 15 nt, Human
uuggagccugcagag

SEQ ID NO: 3360416 - RNA, 11 nt, Human
uuggagccugc

SEQ ID NO: 3360417 - RNA, 17 nt, Human
uugcucuugaugccugg

SEQ ID NO: 3360418 - RNA, 14 nt, Human
uugcucuugaugcc

SEQ ID NO: 3360419 - RNA, 18 nt, Human
uugcucuugaugccuggc

SEQ ID NO: 3360420 - RNA, 21 nt, Human
aucugugaggggcucucucau

SEQ ID NO: 3360421 - RNA, 22 nt, Human
aucugugaggggcucucucaug

SEQ ID NO: 3360422 - RNA, 14 nt, Human
aucuuauaauuuaa

SEQ ID NO: 3360423 - RNA, 15 nt, Human
aucuuauaauuuaaa

SEQ ID NO: 3360424 - RNA, 19 nt, Human
uuguaaauuuaugugaugg

SEQ ID NO: 3360425 - RNA, 15 nt, Human
augaagcaaugcuuc

SEQ ID NO: 3360426 - RNA, 18 nt, Human
augaacuuguaaaggaau

SEQ ID NO: 3360427 - RNA, 22 nt, Human
augaagauguuucaaaaaaucu

SEQ ID NO: 3360428 - RNA, 14 nt, Human
augaagcaaugcuu

SEQ ID NO: 3360429 - RNA, 18 nt, Human
uuggagccugcagagcug

SEQ ID NO: 3360430 - RNA, 14 nt, Human
aucugacuaugaca

SEQ ID NO: 3360431 - RNA, 17 nt, Human
aucugacuaugacauaa

SEQ ID NO: 3360432 - RNA, 20 nt, Human
uugauguguuuauuuauaga

SEQ ID NO: 3360433 - RNA, 17 nt, Human
uugcaacuuuguauaaa

SEQ ID NO: 3360434 - RNA, 16 nt, Human
uugcaacuuuguauaa

SEQ ID NO: 3360435 - RNA, 18 nt, Human
uugcaacuuuguauaaaa

SEQ ID NO: 3360436 - RNA, 16 nt, Human
aucucuuguuuaaauu

SEQ ID NO: 3360437 - RNA, 16 nt, Human
uuguucauacauauuu

SEQ ID NO: 3360438 - RNA, 18 nt, Human
uuguucauacauauuuuu

SEQ ID NO: 3360439 - RNA, 18 nt, Human
uuuaaaaaaauuccaagu

SEQ ID NO: 3360440 - RNA, 20 nt, Human
uuuaagacgaaacauuuguu

SEQ ID NO: 3360441 - RNA, 21 nt, Human
uuuaaauauaugcuaagucuu

SEQ ID NO: 3360442 - RNA, 18 nt, Human
uuuaaauauaugcuaagu

SEQ ID NO: 3360443 - RNA, 14 nt, Human
uuuaagagacagcc

SEQ ID NO: 3360444 - RNA, 20 nt, Human
augagggucuugguuccagc

SEQ ID NO: 3360445 - RNA, 16 nt, Human
uuguagcuuuaucaaa

SEQ ID NO: 3360446 - RNA, 17 nt, Human
uuguagcuuuaucaaag

SEQ ID NO: 3360447 - RNA, 18 nt, Human
augaguuggcugggaaua

SEQ ID NO: 3360448 - RNA, 12 nt, Human
uugugauguguc

SEQ ID NO: 3360449 - RNA, 13 nt, Human
uuguucauacaua

SEQ ID NO: 3360450 - RNA, 19 nt, Human
uuguucaauaauaaauauu

SEQ ID NO: 3360451 - RNA, 22 nt, Human
uuguucaauaauaaauauuuuu

SEQ ID NO: 3360452 - RNA, 20 nt, Human
uuguucaauaauaaauauuu

SEQ ID NO: 3360453 - RNA, 18 nt, Human
augcuacaggauuugaaa

SEQ ID NO: 3360454 - RNA, 21 nt, Human
uuucacauaucuaguaugaaa

SEQ ID NO: 3360455 - RNA, 22 nt, Human
uuucacauaucuaguaugaaau

SEQ ID NO: 3360456 - RNA, 17 nt, Human
auggaaugcuguguuaa

SEQ ID NO: 3360457 - RNA, 21 nt, Human
auggaaugcuguguuaaauaa

SEQ ID NO: 3360458 - RNA, 13 nt, Human
uucucuucacuca

SEQ ID NO: 3360459 - RNA, 11 nt, Human
aucccaacacu

SEQ ID NO: 3360460 - RNA, 15 nt, Human
aucccaacacugcca

SEQ ID NO: 3360461 - RNA, 16 nt, Human
aucccaacacugccag

SEQ ID NO: 3360462 - RNA, 17 nt, Human
aucccaacacugccagc

SEQ ID NO: 3360463 - RNA, 16 nt, Human
uucuaguucugccagg

SEQ ID NO: 3360464 - RNA, 17 nt, Human
uucuaguucugccagga

SEQ ID NO: 3360465 - RNA, 14 nt, Human
aucauucauuuucu

SEQ ID NO: 3360466 - RNA, 20 nt, Human
aucauuaucagccugugcca

SEQ ID NO: 3360467 - RNA, 18 nt, Human
aucauguuuacagaggac

SEQ ID NO: 3360468 - RNA, 23 nt, Human
aucauguuuacagaggacaguau

SEQ ID NO: 3360469 - RNA, 19 nt, Human
aucagugugucuaaauuug

SEQ ID NO: 3360470 - RNA, 16 nt, Human
aucagugucuuuccac

SEQ ID NO: 3360471 - RNA, 17 nt, Human
auauuguguugugaaug

SEQ ID NO: 3360472 - RNA, 18 nt, Human
auauuguguugugaaugu

SEQ ID NO: 3360473 - RNA, 20 nt, Human
auauuuguaaauuuauguga

SEQ ID NO: 3360474 - RNA, 17 nt, Human
auauguuucaaacuuug

SEQ ID NO: 3360475 - RNA, 22 nt, Human
auauugauccagaaagaaaacu

SEQ ID NO: 3360476 - RNA, 15 nt, Human
auauugauccagaaa

SEQ ID NO: 3360477 - RNA, 17 nt, Human
auaggcacaggaaacca

SEQ ID NO: 3360478 - RNA, 20 nt, Human
uucacauaucuaguaugaaa

SEQ ID NO: 3360479 - RNA, 21 nt, Human
uucacauaucuaguaugaaau

SEQ ID NO: 3360480 - RNA, 19 nt, Human
uucacauuguauucagagu

SEQ ID NO: 3360481 - RNA, 22 nt, Human
uucaagaaaacaacuucaauau

SEQ ID NO: 3360482 - RNA, 16 nt, Human
uucaaaaaacuuguaa

SEQ ID NO: 3360483 - RNA, 16 nt, Human
uucaaacuuuggaaca

SEQ ID NO: 3360484 - RNA, 18 nt, Human
auagcuacuaauuuuaaa

SEQ ID NO: 3360485 - RNA, 14 nt, Human
auagcuacuaauuu

SEQ ID NO: 3360486 - RNA, 17 nt, Human
auagcuacuaauuuuaa

SEQ ID NO: 3360487 - RNA, 16 nt, Human
auauccuuucuaacaa

SEQ ID NO: 3360488 - RNA, 18 nt, Human
auauauucagccuggcuu

SEQ ID NO: 3360489 - RNA, 20 nt, Human
uucagaaaauauuauguguu

SEQ ID NO: 3360490 - RNA, 14 nt, Human
uucagaaaauauua

SEQ ID NO: 3360491 - RNA, 13 nt, Human
uucagaaaauauu

SEQ ID NO: 3360492 - RNA, 21 nt, Human
uucagaaaauauuauguguuu

SEQ ID NO: 3360493 - RNA, 17 nt, Human
auauaaguauucuaaau

SEQ ID NO: 3360494 - RNA, 18 nt, Human
uuuguaagguuuuuguag

SEQ ID NO: 3360495 - RNA, 22 nt, Human
uuuguagugauuuuuaugccac

SEQ ID NO: 3360496 - RNA, 15 nt, Human
uuuguagugauuuuu

SEQ ID NO: 3360497 - RNA, 23 nt, Human
augucgucaaagcugaaauggac

SEQ ID NO: 3360498 - RNA, 19 nt, Human
uuucccuuccuuccucucc

SEQ ID NO: 3360499 - RNA, 18 nt, Human
uuugacagaauauguuuc

SEQ ID NO: 3360500 - RNA, 19 nt, Human
uuugacagaauauguuuca

SEQ ID NO: 3360501 - RNA, 20 nt, Human
uuugacagaauauguuucaa

SEQ ID NO: 3360502 - RNA, 18 nt, Human
uuugacaaagguaaauca

SEQ ID NO: 3360503 - RNA, 23 nt, Human
uuugaccuguugggagugaggau

SEQ ID NO: 3360504 - RNA, 13 nt, Human
uuugagaguucua

SEQ ID NO: 3360505 - RNA, 17 nt, Human
auguauauaaacaugcu

SEQ ID NO: 3360506 - RNA, 18 nt, Human
uuuggcaaacucuccacc

SEQ ID NO: 3360507 - RNA, 18 nt, Human
auguguguguguugugug

SEQ ID NO: 3360508 - RNA, 22 nt, Human
auguguguguguuguguguggg

SEQ ID NO: 3360509 - RNA, 23 nt, Human
auguguguguguuguguguggga

SEQ ID NO: 3360510 - RNA, 23 nt, Human
auguggaaaagccaagaggcugc

SEQ ID NO: 3360511 - RNA, 12 nt, Human
auguguuuccau

SEQ ID NO: 3360512 - RNA, 12 nt, Human
auguuaagcaga

SEQ ID NO: 3360513 - RNA, 22 nt, Human
uuuuauguugcauagaauaaaa

SEQ ID NO: 3360514 - RNA, 15 nt, Human
uuuuccaaaauaauu

SEQ ID NO: 3360515 - RNA, 15 nt, Human
auguuuuuuuuuaaa

SEQ ID NO: 3360516 - RNA, 17 nt, Human
auuccaagugauugaaa

SEQ ID NO: 3360517 - RNA, 22 nt, Human
auucaggagaguagaacagaua

SEQ ID NO: 3360518 - RNA, 21 nt, Human
auucaggagaguagaacagau

SEQ ID NO: 3360519 - RNA, 14 nt, Human
auucagccuggcuu

SEQ ID NO: 3360520 - RNA, 20 nt, Human
auuauauggcuugaguuuaa

SEQ ID NO: 3360521 - RNA, 21 nt, Human
auuauuuuguucauacauauu

SEQ ID NO: 3360522 - RNA, 17 nt, Human
uuuuuguagcacugaca

SEQ ID NO: 3360523 - RNA, 19 nt, Human
uuuuuguagcacugacaga

SEQ ID NO: 3360524 - RNA, 20 nt, Human
uuuuuguagcacugacagau

SEQ ID NO: 3360525 - RNA, 21 nt, Human
uuuuuguagcacugacagauu

SEQ ID NO: 3360526 - RNA, 12 nt, Human
uuuuugacagaa

SEQ ID NO: 3360527 - RNA, 13 nt, Human
uuuuugacagaau

SEQ ID NO: 3360528 - RNA, 15 nt, Human
uuuuugaagcuguau

SEQ ID NO: 3360529 - RNA, 17 nt, Human
auuguagagccagaggu

SEQ ID NO: 3360530 - RNA, 18 nt, Human
auuguagagccagagguc

SEQ ID NO: 3360531 - RNA, 16 nt, Human
auuguaguccuguaau

SEQ ID NO: 3360532 - RNA, 15 nt, Human
auuuaaaauugugau

SEQ ID NO: 3360533 - RNA, 16 nt, Human
auuuaguguucauaaa

SEQ ID NO: 3360534 - RNA, 23 nt, Human
auuuauaaaaauaaaaaacacug

SEQ ID NO: 3360535 - RNA, 17 nt, Human
auuuaguguucauaaau

SEQ ID NO: 3360536 - RNA, 13 nt, Human
auuuaguguucau

SEQ ID NO: 3360537 - RNA, 15 nt, Human
auuuauaaacuuuuu

SEQ ID NO: 3360538 - RNA, 14 nt, Human
auuuccuaaauaua

SEQ ID NO: 3360539 - RNA, 21 nt, Human
auuuccuaaauauauuuuaag

SEQ ID NO: 3360540 - RNA, 21 nt, Human
auuuggagacacaacuauuuu

SEQ ID NO: 3360541 - RNA, 19 nt, Human
auuugaauguuaagcagau

SEQ ID NO: 3360542 - RNA, 22 nt, Human
auuugaauguaugcuucauaca

SEQ ID NO: 3360543 - RNA, 20 nt, Human
auuucuugagguaaaagcau

SEQ ID NO: 3360544 - RNA, 18 nt, Human
auuugaauguuaagcaga

SEQ ID NO: 3360545 - RNA, 13 nt, Human
auuugaauguuaa

SEQ ID NO: 3360546 - RNA, 23 nt, Human
auuugaauguaugcuucauacag

SEQ ID NO: 3360547 - RNA, 17 nt, Human
auuguacgaagaguauu

SEQ ID NO: 3360548 - RNA, 12 nt, Human
auugauguguuu

SEQ ID NO: 3360549 - RNA, 18 nt, Human
auugaugggauuugguca

SEQ ID NO: 3360550 - RNA, 19 nt, Human
auugauguguuuauuuaua

SEQ ID NO: 3360551 - RNA, 16 nt, Human
agccucuccacucaug

SEQ ID NO: 3360552 - RNA, 17 nt, Human
agccucgacacagagug

SEQ ID NO: 3360553 - RNA, 18 nt, Human
agccucgacacagagugg

SEQ ID NO: 3360554 - RNA, 22 nt, Human
ugcaggucccuaauaaagcugu

SEQ ID NO: 3360555 - RNA, 21 nt, Human
ugcaggucccuaauaaagcug

SEQ ID NO: 3360556 - RNA, 17 nt, Human
ugcauagaauaaaauuu

SEQ ID NO: 3360557 - RNA, 15 nt, Human
agccuguuuaagaga

SEQ ID NO: 3360558 - RNA, 23 nt, Human
agccccgcguggaacucgugucu

SEQ ID NO: 3360559 - RNA, 18 nt, Human
agcccugaguuccuagcc

SEQ ID NO: 3360560 - RNA, 20 nt, Human
agcccugaguuccuagccac

SEQ ID NO: 3360561 - RNA, 23 nt, Human
agcccugaguuccuagccaccgc

SEQ ID NO: 3360562 - RNA, 14 nt, Human
agcccugaguuccu

SEQ ID NO: 3360563 - RNA, 17 nt, Human
agcccugggaggcucug

SEQ ID NO: 3360564 - RNA, 20 nt, Human
agcccugggaggcucuggag

SEQ ID NO: 3360565 - RNA, 18 nt, Human
agcccugggaggcucugg

SEQ ID NO: 3360566 - RNA, 15 nt, Human
ugaugggucaguugu

SEQ ID NO: 3360567 - RNA, 15 nt, Human
ugaugaaaauauuua

SEQ ID NO: 3360568 - RNA, 18 nt, Human
ugaugaaaauauuuaaag

SEQ ID NO: 3360569 - RNA, 23 nt, Human
ugauccagaaagaaaacuuguau

SEQ ID NO: 3360570 - RNA, 13 nt, Human
ugauccagaaaga

SEQ ID NO: 3360571 - RNA, 20 nt, Human
agcaucacaugaacuuguaa

SEQ ID NO: 3360572 - RNA, 21 nt, Human
agcagguccccagcuuuggcu

SEQ ID NO: 3360573 - RNA, 20 nt, Human
agcagguccccagcuuuggc

SEQ ID NO: 3360574 - RNA, 13 nt, Human
ugauaaguucaua

SEQ ID NO: 3360575 - RNA, 15 nt, Human
ugauaaguucauaca

SEQ ID NO: 3360576 - RNA, 17 nt, Human
ugauaaguucauacauu

SEQ ID NO: 3360577 - RNA, 19 nt, Human
ugauaaguucauacauugu

SEQ ID NO: 3360578 - RNA, 12 nt, Human
ugauaaguaaau

SEQ ID NO: 3360579 - RNA, 16 nt, Human
ugauaaguaaaugcua

SEQ ID NO: 3360580 - RNA, 20 nt, Human
ugaguucuacauaaguaauu

SEQ ID NO: 3360581 - RNA, 15 nt, Human
ugaguucuacauaag

SEQ ID NO: 3360582 - RNA, 14 nt, Human
ugaguuccuagcca

SEQ ID NO: 3360583 - RNA, 18 nt, Human
ugaguuccuagccaccgc

SEQ ID NO: 3360584 - RNA, 22 nt, Human
ugccgagaguccaucagccucc

SEQ ID NO: 3360585 - RNA, 22 nt, Human
ugccugcuuuuuauggccugug

SEQ ID NO: 3360586 - RNA, 21 nt, Human
ugccugcuuuuuauggccugu

SEQ ID NO: 3360587 - RNA, 20 nt, Human
ugccugcuuuuuauggccug

SEQ ID NO: 3360588 - RNA, 15 nt, Human
ugccuugucacgcca

SEQ ID NO: 3360589 - RNA, 16 nt, Human
ugccuuggugugcugu

SEQ ID NO: 3360590 - RNA, 20 nt, Human
ugcuaauuuugaaaaacugc

SEQ ID NO: 3360591 - RNA, 19 nt, Human
ugcuaauuuugaaaaacug

SEQ ID NO: 3360592 - RNA, 18 nt, Human
ugcuaauuuugaaaaacu

SEQ ID NO: 3360593 - RNA, 16 nt, Human
ugcuaauuuugaaaaa

SEQ ID NO: 3360594 - RNA, 21 nt, Human
agcuuuggcuaugagggccuu

SEQ ID NO: 3360595 - RNA, 20 nt, Human
agcuuuggcuaugagggccu

SEQ ID NO: 3360596 - RNA, 22 nt, Human
agcuuugagguggaagagggcu

SEQ ID NO: 3360597 - RNA, 22 nt, Human
ugcuaugagcuggggaugucuc

SEQ ID NO: 3360598 - RNA, 19 nt, Human
ugcuaugagcuggggaugu

SEQ ID NO: 3360599 - RNA, 20 nt, Human
ugcuaugagcuggggauguc

SEQ ID NO: 3360600 - RNA, 16 nt, Human
ugcuaugagcugggga

SEQ ID NO: 3360601 - RNA, 17 nt, Human
uggacuguucccugagg

SEQ ID NO: 3360602 - RNA, 16 nt, Human
uggacuguucccugag

SEQ ID NO: 3360603 - RNA, 15 nt, Human
uggagcaaagcugau

SEQ ID NO: 3360604 - RNA, 14 nt, Human
uggaguugaaaauc

SEQ ID NO: 3360605 - RNA, 16 nt, Human
uggauucugagagcug

SEQ ID NO: 3360606 - RNA, 17 nt, Human
uggauucugagagcugu

SEQ ID NO: 3360607 - RNA, 17 nt, Human
aggagaguagaacagau

SEQ ID NO: 3360608 - RNA, 23 nt, Human
aggagcccugggaggcucuggag

SEQ ID NO: 3360609 - RNA, 15 nt, Human
uggaagagggcugca

SEQ ID NO: 3360610 - RNA, 16 nt, Human
ugcuuuuuauggccug

SEQ ID NO: 3360611 - RNA, 21 nt, Human
uguagugauuuuuaugccacc

SEQ ID NO: 3360612 - RNA, 19 nt, Human
agguuuuuguagugauuuu

SEQ ID NO: 3360613 - RNA, 13 nt, Human
aguaaaauccaca

SEQ ID NO: 3360614 - RNA, 14 nt, Human
aguaauagagcaaa

SEQ ID NO: 3360615 - RNA, 13 nt, Human
aguaauagagcaa

SEQ ID NO: 3360616 - RNA, 23 nt, Human
agguuuguuuagaagaagugugu

SEQ ID NO: 3360617 - RNA, 23 nt, Human
uguacuugcucuugaugccuggc

SEQ ID NO: 3360618 - RNA, 22 nt, Human
uguacuugcucuugaugccugg

SEQ ID NO: 3360619 - RNA, 19 nt, Human
uguacuugcucuugaugcc

SEQ ID NO: 3360620 - RNA, 12 nt, Human
uguauguggggg

SEQ ID NO: 3360621 - RNA, 22 nt, Human
uguauucuagcuaauguaauaa

SEQ ID NO: 3360622 - RNA, 20 nt, Human
uguauucuagcuaauguaau

SEQ ID NO: 3360623 - RNA, 13 nt, Human
uguauuacaaauc

SEQ ID NO: 3360624 - RNA, 16 nt, Human
aguaguaauagagcaa

SEQ ID NO: 3360625 - RNA, 16 nt, Human
uguaaauaguauuuga

SEQ ID NO: 3360626 - RNA, 17 nt, Human
uguaaauaaaggaacca

SEQ ID NO: 3360627 - RNA, 16 nt, Human
uguaaaggaauuuaaa

SEQ ID NO: 3360628 - RNA, 20 nt, Human
aggugcauauuuauaaaaau

SEQ ID NO: 3360629 - RNA, 18 nt, Human
aggugcccagaaugaggc

SEQ ID NO: 3360630 - RNA, 22 nt, Human
aggugcccagaaugaggcugcu

SEQ ID NO: 3360631 - RNA, 21 nt, Human
aggguggggggggggcgcggc

SEQ ID NO: 3360632 - RNA, 18 nt, Human
ugggucgcccuggacugu

SEQ ID NO: 3360633 - RNA, 16 nt, Human
ugggucgcccuggacu

SEQ ID NO: 3360634 - RNA, 13 nt, Human
uggggagagacgg

SEQ ID NO: 3360635 - RNA, 14 nt, Human
uggggagggauuug

SEQ ID NO: 3360636 - RNA, 15 nt, Human
uggggcucagagugg

SEQ ID NO: 3360637 - RNA, 22 nt, Human
uggggagggauuuggggcucag

SEQ ID NO: 3360638 - RNA, 23 nt, Human
agggaaggaucccaugagcuccu

SEQ ID NO: 3360639 - RNA, 15 nt, Human
agggaaggaucccau

SEQ ID NO: 3360640 - RNA, 22 nt, Human
agggaaggaucccaugagcucc

SEQ ID NO: 3360641 - RNA, 13 nt, Human
agggaaauuucag

SEQ ID NO: 3360642 - RNA, 22 nt, Human
aggcccuaucuguuuacagugu

SEQ ID NO: 3360643 - RNA, 19 nt, Human
ugggagaaugucaguaugu

SEQ ID NO: 3360644 - RNA, 20 nt, Human
ugggagaaugucaguaugug

SEQ ID NO: 3360645 - RNA, 22 nt, Human
ugggagaaugucaguaugugga

SEQ ID NO: 3360646 - RNA, 15 nt, Human
ugggccccugccaga

SEQ ID NO: 3360647 - RNA, 19 nt, Human
ugggccccugccucucugc

SEQ ID NO: 3360648 - RNA, 15 nt, Human
ugggccccugccucu

SEQ ID NO: 3360649 - RNA, 12 nt, Human
aguucugccagg

SEQ ID NO: 3360650 - RNA, 13 nt, Human
aguucugccagga

SEQ ID NO: 3360651 - RNA, 14 nt, Human
aguucugccaggag

SEQ ID NO: 3360652 - RNA, 20 nt, Human
aguucugccaggagacaggu

SEQ ID NO: 3360653 - RNA, 19 nt, Human
uguuuugaaucucauaauu

SEQ ID NO: 3360654 - RNA, 16 nt, Human
uguuuaugugugugug

SEQ ID NO: 3360655 - RNA, 13 nt, Human
uguuuaugugugu

SEQ ID NO: 3360656 - RNA, 19 nt, Human
uguugccuugcauaauggu

SEQ ID NO: 3360657 - RNA, 24 nt, Human
uguuuauuuauagaguguacuuaa

SEQ ID NO: 3360658 - RNA, 14 nt, Human
uguuuauuuauaga

SEQ ID NO: 3360659 - RNA, 19 nt, Human
uguuucuuuguaaugaaaa

SEQ ID NO: 3360660 - RNA, 18 nt, Human
uguuucuuuguaaugaaa

SEQ ID NO: 3360661 - RNA, 12 nt, Human
aguuuagggugg

SEQ ID NO: 3360662 - RNA, 13 nt, Human
aguuuaggguggg

SEQ ID NO: 3360663 - RNA, 14 nt, Human
aguuuagggugggg

SEQ ID NO: 3360664 - RNA, 13 nt, Human
uuaaaauugugau

SEQ ID NO: 3360665 - RNA, 18 nt, Human
uuaaaauugugauguguc

SEQ ID NO: 3360666 - RNA, 16 nt, Human
uuagaagaaguguguc

SEQ ID NO: 3360667 - RNA, 14 nt, Human
uuagaagaagugug

SEQ ID NO: 3360668 - RNA, 15 nt, Human
uuagaagaagugugu

SEQ ID NO: 3360669 - RNA, 22 nt, Human
auaaauauuauauuauauauau

SEQ ID NO: 3360670 - RNA, 12 nt, Human
auaaauauuaua

SEQ ID NO: 3360671 - RNA, 17 nt, Human
uuaauuccaauuauaug

SEQ ID NO: 3360672 - RNA, 13 nt, Human
uuaauaaacacuc

SEQ ID NO: 3360673 - RNA, 17 nt, Human
uuaauaaacacucuuga

SEQ ID NO: 3360674 - RNA, 22 nt, Human
auaaaauucuauuacaguaugu

SEQ ID NO: 3360675 - RNA, 20 nt, Human
auaaaauuuuuaaucuuuaa

SEQ ID NO: 3360676 - RNA, 18 nt, Human
uuaaguaaggaauuuuau

SEQ ID NO: 3360677 - RNA, 22 nt, Human
auaaaagggacugagaaauuua

SEQ ID NO: 3360678 - RNA, 12 nt, Human
ugugacucuuuc

SEQ ID NO: 3360679 - RNA, 14 nt, Human
ugugacucuuucca

SEQ ID NO: 3360680 - RNA, 15 nt, Human
ugugaacagcggcug

SEQ ID NO: 3360681 - RNA, 12 nt, Human
ugugaaauuauu

SEQ ID NO: 3360682 - RNA, 18 nt, Human
agucacuaccuucaugca

SEQ ID NO: 3360683 - RNA, 15 nt, Human
ugugacucuuuccaa

SEQ ID NO: 3360684 - RNA, 17 nt, Human
ugugacucuuuccaacc

SEQ ID NO: 3360685 - RNA, 18 nt, Human
agucuuucacauuuaaau

SEQ ID NO: 3360686 - RNA, 19 nt, Human
uguggcauccagagucccu

SEQ ID NO: 3360687 - RNA, 21 nt, Human
uguggcauccagagucccugc

SEQ ID NO: 3360688 - RNA, 16 nt, Human
uguggcauccagaguc

SEQ ID NO: 3360689 - RNA, 23 nt, Human
uguggcaguuuggcaaacucucc

SEQ ID NO: 3360690 - RNA, 14 nt, Human
ugugauguauucua

SEQ ID NO: 3360691 - RNA, 15 nt, Human
agugaaagaaaauaa

SEQ ID NO: 3360692 - RNA, 18 nt, Human
ugugccagauuuaugcau

SEQ ID NO: 3360693 - RNA, 20 nt, Human
ugugccagauuuaugcauau

SEQ ID NO: 3360694 - RNA, 14 nt, Human
ugugcccacccucc

SEQ ID NO: 3360695 - RNA, 23 nt, Human
ugugcccacccuccacucuccuc

SEQ ID NO: 3360696 - RNA, 20 nt, Human
ugugggucugugugugugua

SEQ ID NO: 3360697 - RNA, 12 nt, Human
ugugugugggag

SEQ ID NO: 3360698 - RNA, 20 nt, Human
ugugugugggaguguguaau

SEQ ID NO: 3360699 - RNA, 14 nt, Human
uguguguguaugug

SEQ ID NO: 3360700 - RNA, 19 nt, Human
uguguuaaguauguguaaa

SEQ ID NO: 3360701 - RNA, 16 nt, Human
uguuaaguauguguaa

SEQ ID NO: 3360702 - RNA, 15 nt, Human
uguuaaguaugugua

SEQ ID NO: 3360703 - RNA, 17 nt, Human
aguguacuuaacuauuc

SEQ ID NO: 3360704 - RNA, 14 nt, Human
agugugucuaaauu

SEQ ID NO: 3360705 - RNA, 21 nt, Human
uguuccgugguuaaacucgcu

SEQ ID NO: 3360706 - RNA, 18 nt, Human
uguucugugauauaagug

SEQ ID NO: 3360707 - RNA, 15 nt, Human
uguucugugauauaa

SEQ ID NO: 3360708 - RNA, 21 nt, Human
uccaaccggcuuuguggcacu

SEQ ID NO: 3360709 - RNA, 14 nt, Human
uccacucaugugac

SEQ ID NO: 3360710 - RNA, 21 nt, Human
uccacucaugugacucuuucc

SEQ ID NO: 3360711 - RNA, 15 nt, Human
uccacuccuccuagc

SEQ ID NO: 3360712 - RNA, 18 nt, Human
uccacuccuccuagccac

SEQ ID NO: 3360713 - RNA, 18 nt, Human
uccacuggggauugggcc

SEQ ID NO: 3360714 - RNA, 14 nt, Human
acgagaaaacaaua

SEQ ID NO: 3360715 - RNA, 19 nt, Human
acgagaucaagagaucaag

SEQ ID NO: 3360716 - RNA, 18 nt, Human
uccaggccagggggccag

SEQ ID NO: 3360717 - RNA, 16 nt, Human
uccaggccagggggcc

SEQ ID NO: 3360718 - RNA, 19 nt, Human
accucaaaaugucuaagau

SEQ ID NO: 3360719 - RNA, 16 nt, Human
accucaaaaugucuaa

SEQ ID NO: 3360720 - RNA, 14 nt, Human
ucaucuaggauuuu

SEQ ID NO: 3360721 - RNA, 18 nt, Human
ucaucuagguaaauuaca

SEQ ID NO: 3360722 - RNA, 18 nt, Human
acucaugugacucuuucc

SEQ ID NO: 3360723 - RNA, 19 nt, Human
acucaugugacucuuucca

SEQ ID NO: 3360724 - RNA, 14 nt, Human
acuccuccuagcca

SEQ ID NO: 3360725 - RNA, 13 nt, Human
acuccuccuagcc

SEQ ID NO: 3360726 - RNA, 15 nt, Human
acuccuccuagccac

SEQ ID NO: 3360727 - RNA, 16 nt, Human
acuccuccuagccacc

SEQ ID NO: 3360728 - RNA, 18 nt, Human
acuccuccuagccaccca

SEQ ID NO: 3360729 - RNA, 19 nt, Human
acuccagccuggcgacaga

SEQ ID NO: 3360730 - RNA, 19 nt, Human
ucccuuucugcuuguguua

SEQ ID NO: 3360731 - RNA, 19 nt, Human
uccuaaauauauuuuaaga

SEQ ID NO: 3360732 - RNA, 20 nt, Human
ucccugaggcagguccccag

SEQ ID NO: 3360733 - RNA, 21 nt, Human
ucccugaggcagguccccaga

SEQ ID NO: 3360734 - RNA, 22 nt, Human
ucccugaggcagguccccagac

SEQ ID NO: 3360735 - RNA, 11 nt, Human
ucccugaggca

SEQ ID NO: 3360736 - RNA, 20 nt, Human
ucccugaaggaaccaaagcg

SEQ ID NO: 3360737 - RNA, 14 nt, Human
acuacuagggaaau

SEQ ID NO: 3360738 - RNA, 21 nt, Human
acuacuagggaaaugccuuug

SEQ ID NO: 3360739 - RNA, 22 nt, Human
acguauaaaagccuguuuaaga

SEQ ID NO: 3360740 - RNA, 20 nt, Human
acauaucuaguaugaaauua

SEQ ID NO: 3360741 - RNA, 22 nt, Human
acauaucuaguaugaaauuaua

SEQ ID NO: 3360742 - RNA, 23 nt, Human
acauaucuaguaugaaauuauau

SEQ ID NO: 3360743 - RNA, 17 nt, Human
acauaucuaguaugaaa

SEQ ID NO: 3360744 - RNA, 22 nt, Human
uauuucccugaaggaaccaaag

SEQ ID NO: 3360745 - RNA, 21 nt, Human
uauuuccauuaaaaaaucagu

SEQ ID NO: 3360746 - RNA, 16 nt, Human
acauaaaaacaacuuu

SEQ ID NO: 3360747 - RNA, 19 nt, Human
acauaaaaacaacuuuaua

SEQ ID NO: 3360748 - RNA, 21 nt, Human
acauaaaaacaacuuuauacc

SEQ ID NO: 3360749 - RNA, 17 nt, Human
ucaaagggugaaaauua

SEQ ID NO: 3360750 - RNA, 14 nt, Human
ucaaagcugaaaug

SEQ ID NO: 3360751 - RNA, 19 nt, Human
uauuuuugacagaauaugu

SEQ ID NO: 3360752 - RNA, 23 nt, Human
uauuuuugacagaauauguuuca

SEQ ID NO: 3360753 - RNA, 14 nt, Human
uauuuuugacagaa

SEQ ID NO: 3360754 - RNA, 15 nt, Human
uauuuuugacagaau

SEQ ID NO: 3360755 - RNA, 13 nt, Human
uauuuuugacaga

SEQ ID NO: 3360756 - RNA, 17 nt, Human
uauuuguaaauuuaugu

SEQ ID NO: 3360757 - RNA, 22 nt, Human
uauuuguaaauuuaugugaugg

SEQ ID NO: 3360758 - RNA, 16 nt, Human
uauuuguaaauuuaug

SEQ ID NO: 3360759 - RNA, 14 nt, Human
ucaaaaugucuaag

SEQ ID NO: 3360760 - RNA, 19 nt, Human
ucaaaauuguuacaaauug

SEQ ID NO: 3360761 - RNA, 16 nt, Human
ucaaaauuguuacaaa

SEQ ID NO: 3360762 - RNA, 17 nt, Human
ucaagaaaacaacuuca

SEQ ID NO: 3360763 - RNA, 23 nt, Human
accauuucuugagguaaaagcau

SEQ ID NO: 3360764 - RNA, 13 nt, Human
ucacucuuggagc

SEQ ID NO: 3360765 - RNA, 21 nt, Human
ucagcccaaaccaccagaagc

SEQ ID NO: 3360766 - RNA, 22 nt, Human
ucagcccaaaccaccagaagcc

SEQ ID NO: 3360767 - RNA, 22 nt, Human
accccagcuggggccaggcugg

SEQ ID NO: 3360768 - RNA, 23 nt, Human
accccagcuggggccaggcuggg

SEQ ID NO: 3360769 - RNA, 17 nt, Human
ucacauaucuaguauga

SEQ ID NO: 3360770 - RNA, 21 nt, Human
ucacauaucuaguaugaaauu

SEQ ID NO: 3360771 - RNA, 22 nt, Human
ucacauaucuaguaugaaauua

SEQ ID NO: 3360772 - RNA, 14 nt, Human
ucacauaucuagua

SEQ ID NO: 3360773 - RNA, 19 nt, Human
ucacaccuguaaucccaac

SEQ ID NO: 3360774 - RNA, 15 nt, Human
ucaauucuugccaaa

SEQ ID NO: 3360775 - RNA, 22 nt, Human
accacacguaaugaaacuugga

SEQ ID NO: 3360776 - RNA, 17 nt, Human
ucacuaccuucaugcau

SEQ ID NO: 3360777 - RNA, 14 nt, Human
accagaagcccaga

SEQ ID NO: 3360778 - RNA, 16 nt, Human
accagaagcccagaau

SEQ ID NO: 3360779 - RNA, 13 nt, Human
accagaagcccag

SEQ ID NO: 3360780 - RNA, 14 nt, Human
ucugagagaggcca

SEQ ID NO: 3360781 - RNA, 20 nt, Human
ucugagagaggccauucuuu

SEQ ID NO: 3360782 - RNA, 16 nt, Human
ucugacuaugacauaa

SEQ ID NO: 3360783 - RNA, 14 nt, Human
ucugacuaugacau

SEQ ID NO: 3360784 - RNA, 15 nt, Human
ucugcaggucccuaa

SEQ ID NO: 3360785 - RNA, 17 nt, Human
ucugcaggucccuaaua

SEQ ID NO: 3360786 - RNA, 16 nt, Human
ucugcaggucccuaau

SEQ ID NO: 3360787 - RNA, 21 nt, Human
agaaauuaugugccagauuua

SEQ ID NO: 3360788 - RNA, 13 nt, Human
agaaauuaugugc

SEQ ID NO: 3360789 - RNA, 18 nt, Human
ucugcaggucccuaauaa

SEQ ID NO: 3360790 - RNA, 14 nt, Human
ucugcaggucccua

SEQ ID NO: 3360791 - RNA, 12 nt, Human
agaaauuaugug

SEQ ID NO: 3360792 - RNA, 17 nt, Human
agaaauuuauaaacuuu

SEQ ID NO: 3360793 - RNA, 16 nt, Human
agaaauuuauaaacuu

SEQ ID NO: 3360794 - RNA, 22 nt, Human
agaaauuaugugccagauuuau

SEQ ID NO: 3360795 - RNA, 17 nt, Human
agaaaucaaagagagaa

SEQ ID NO: 3360796 - RNA, 12 nt, Human
agaaaucuaaaa

SEQ ID NO: 3360797 - RNA, 17 nt, Human
agaaaugaaaaaauaua

SEQ ID NO: 3360798 - RNA, 16 nt, Human
agaaaugaaaaaauau

SEQ ID NO: 3360799 - RNA, 23 nt, Human
agaaaugaaaaaauauauaucaa

SEQ ID NO: 3360800 - RNA, 18 nt, Human
agaaaugaaaaaauauau

SEQ ID NO: 3360801 - RNA, 19 nt, Human
ucucuggaauuugaaacac

SEQ ID NO: 3360802 - RNA, 15 nt, Human
ucucuggaauuugaa

SEQ ID NO: 3360803 - RNA, 20 nt, Human
agaaaaagcaauaaccucaa

SEQ ID NO: 3360804 - RNA, 19 nt, Human
agaaaacuuguauuaugug

SEQ ID NO: 3360805 - RNA, 21 nt, Human
agaaaacuuguauuaugugug

SEQ ID NO: 3360806 - RNA, 16 nt, Human
ucucauuccagaggaa

SEQ ID NO: 3360807 - RNA, 18 nt, Human
ucgagaucccaacacugc

SEQ ID NO: 3360808 - RNA, 21 nt, Human
ucgagaucccaacacugccag

SEQ ID NO: 3360809 - RNA, 17 nt, Human
ucgagaucccaacacug

SEQ ID NO: 3360810 - RNA, 22 nt, Human
uccuuucuaacaaaaaaauaua

SEQ ID NO: 3360811 - RNA, 23 nt, Human
acuggccaguggcuggaucugug

SEQ ID NO: 3360812 - RNA, 21 nt, Human
acugccuauuuuaauaaacac

SEQ ID NO: 3360813 - RNA, 16 nt, Human
acugccuauuuuaaua

SEQ ID NO: 3360814 - RNA, 16 nt, Human
acugcuaagaauauuu

SEQ ID NO: 3360815 - RNA, 18 nt, Human
acugcuaagaauauuuga

SEQ ID NO: 3360816 - RNA, 22 nt, Human
ucguuuucaaaauuguuacaaa

SEQ ID NO: 3360817 - RNA, 16 nt, Human
ucguaaaauuaagaaa

SEQ ID NO: 3360818 - RNA, 13 nt, Human
ucguaaaauuaag

SEQ ID NO: 3360819 - RNA, 16 nt, Human
acugggagaaaugaaa

SEQ ID NO: 3360820 - RNA, 12 nt, Human
acugugugcuca

SEQ ID NO: 3360821 - RNA, 21 nt, Human
acugugugcucaggagcccug

SEQ ID NO: 3360822 - RNA, 20 nt, Human
acugugugcucaggagcccu

SEQ ID NO: 3360823 - RNA, 19 nt, Human
acugugugcucaggagccc

SEQ ID NO: 3360824 - RNA, 15 nt, Human
acugugugcucagga

SEQ ID NO: 3360825 - RNA, 20 nt, Human
ucuaaagccauuguaguccu

SEQ ID NO: 3360826 - RNA, 20 nt, Human
ucuacauaaguaauucaaga

SEQ ID NO: 3360827 - RNA, 17 nt, Human
ucuacauaaguaauuca

SEQ ID NO: 3360828 - RNA, 16 nt, Human
acuguucccugaggug

SEQ ID NO: 3360829 - RNA, 19 nt, Human
acuguucccugagguggga

SEQ ID NO: 3360830 - RNA, 22 nt, Human
ucuacauaaguaauucaagaaa

SEQ ID NO: 3360831 - RNA, 21 nt, Human
agaggccauucuuucccaaca

SEQ ID NO: 3360832 - RNA, 22 nt, Human
agaguaauccaagcaaauguga

SEQ ID NO: 3360833 - RNA, 21 nt, Human
ugaacuaggauuguaguccca

SEQ ID NO: 3360834 - RNA, 14 nt, Human
agagcugcgggcug

SEQ ID NO: 3360835 - RNA, 11 nt, Human
ugaaagugacu

SEQ ID NO: 3360836 - RNA, 15 nt, Human
ugaaauuguauuaca

SEQ ID NO: 3360837 - RNA, 14 nt, Human
agagcaaaauugau

SEQ ID NO: 3360838 - RNA, 16 nt, Human
agagcagugggccugg

SEQ ID NO: 3360839 - RNA, 23 nt, Human
agaguccaucagccuccauccua

SEQ ID NO: 3360840 - RNA, 14 nt, Human
agagucccugccug

SEQ ID NO: 3360841 - RNA, 17 nt, Human
agagucccugccuggac

SEQ ID NO: 3360842 - RNA, 20 nt, Human
agaguugaugguuguacaua

SEQ ID NO: 3360843 - RNA, 14 nt, Human
agauaaauauuaua

SEQ ID NO: 3360844 - RNA, 12 nt, Human
agauaaauauua

SEQ ID NO: 3360845 - RNA, 17 nt, Human
agauaaagguucaugca

SEQ ID NO: 3360846 - RNA, 18 nt, Human
agaucccaacacugccag

SEQ ID NO: 3360847 - RNA, 19 nt, Human
agaucccaacacugccagc

SEQ ID NO: 3360848 - RNA, 20 nt, Human
agaucccaacacugccagca

SEQ ID NO: 3360849 - RNA, 22 nt, Human
agauguggaaaagccaagaggc

SEQ ID NO: 3360850 - RNA, 17 nt, Human
agauguggaaaagccaa

SEQ ID NO: 3360851 - RNA, 18 nt, Human
ugacauaaaaacaacuuu

SEQ ID NO: 3360852 - RNA, 20 nt, Human
ugacauaaaaacaacuuuau

SEQ ID NO: 3360853 - RNA, 17 nt, Human
ugacauaaaaacaacuu

SEQ ID NO: 3360854 - RNA, 13 nt, Human
ucuuucuuccaaa

SEQ ID NO: 3360855 - RNA, 17 nt, Human
ucuugguuccagccugc

SEQ ID NO: 3360856 - RNA, 18 nt, Human
ucuugguuccagccugcc

SEQ ID NO: 3360857 - RNA, 19 nt, Human
ucuugguuccagccugcca

SEQ ID NO: 3360858 - RNA, 13 nt, Human
ucuugguuccagc

SEQ ID NO: 3360859 - RNA, 14 nt, Human
ucuuuaauuuuaca

SEQ ID NO: 3360860 - RNA, 19 nt, Human
agacuucccacggcuccuc

SEQ ID NO: 3360861 - RNA, 21 nt, Human
agacugucagcuuccaaacau

SEQ ID NO: 3360862 - RNA, 19 nt, Human
agagaauuguuugaacccg

SEQ ID NO: 3360863 - RNA, 21 nt, Human
agacauuugcuaugagcuggg

SEQ ID NO: 3360864 - RNA, 15 nt, Human
agaaugucaguaugu

SEQ ID NO: 3360865 - RNA, 16 nt, Human
agaaugucaguaugug

SEQ ID NO: 3360866 - RNA, 13 nt, Human
agaaugucaguau

SEQ ID NO: 3360867 - RNA, 22 nt, Human
agaaccccuggcuccaggccag

SEQ ID NO: 3360868 - RNA, 17 nt, Human
agaaugucaguaugugg

SEQ ID NO: 3360869 - RNA, 19 nt, Human
agaaugucaguauguggaa

SEQ ID NO: 3360870 - RNA, 20 nt, Human
agacacaacuauuuuuccaa

SEQ ID NO: 3360871 - RNA, 19 nt, Human
agacacaacuauuuuucca

SEQ ID NO: 3360872 - RNA, 12 nt, Human
agacagaaaaaa

SEQ ID NO: 3360873 - RNA, 19 nt, Human
ucuuacugucuuuuuucua

SEQ ID NO: 3360874 - RNA, 12 nt, Human
aacacugccagc

SEQ ID NO: 3360875 - RNA, 22 nt, Human
aacacugccagcauuucccuuc

SEQ ID NO: 3360876 - RNA, 14 nt, Human
aacaaugaagauaa

SEQ ID NO: 3360877 - RNA, 18 nt, Human
aacaaugaagauaaaaag

SEQ ID NO: 3360878 - RNA, 21 nt, Human
aacaagccuccuuuuaaagua

SEQ ID NO: 3360879 - RNA, 23 nt, Human
aaauuuuuaaucuuuaauuuuac

SEQ ID NO: 3360880 - RNA, 20 nt, Human
aacauuuguucuauagcuuu

SEQ ID NO: 3360881 - RNA, 12 nt, Human
gucucccuccuc

SEQ ID NO: 3360882 - RNA, 16 nt, Human
gucucccuccucugcc

SEQ ID NO: 3360883 - RNA, 19 nt, Human
aaccaaagcgaauuuuaaa

SEQ ID NO: 3360884 - RNA, 17 nt, Human
aaccucaaaaugucuaa

SEQ ID NO: 3360885 - RNA, 15 nt, Human
aaccucaaagugacu

SEQ ID NO: 3360886 - RNA, 19 nt, Human
aacucgugucuggcacagc

SEQ ID NO: 3360887 - RNA, 12 nt, Human
gucuggcugcag

SEQ ID NO: 3360888 - RNA, 13 nt, Human
gucuggcugcaga

SEQ ID NO: 3360889 - RNA, 14 nt, Human
gucuggcugcagag

SEQ ID NO: 3360890 - RNA, 9 nt, Human
aaaugaggg

SEQ ID NO: 3360891 - RNA, 14 nt, Human
aaaugagaaaucua

SEQ ID NO: 3360892 - RNA, 13 nt, Human
aaaugagaaaucu

SEQ ID NO: 3360893 - RNA, 16 nt, Human
aaaugagaaaucuaaa

SEQ ID NO: 3360894 - RNA, 11 nt, Human
aaaugagaaau

SEQ ID NO: 3360895 - RNA, 14 nt, Human
aaaugcauuucuaa

SEQ ID NO: 3360896 - RNA, 13 nt, Human
aaaugcauguugc

SEQ ID NO: 3360897 - RNA, 14 nt, Human
aaaugaaaaaauau

SEQ ID NO: 3360898 - RNA, 14 nt, Human
aaaucuaugauucc

SEQ ID NO: 3360899 - RNA, 16 nt, Human
aaaucuaugauuccag

SEQ ID NO: 3360900 - RNA, 16 nt, Human
guaggaacugcugggc

SEQ ID NO: 3360901 - RNA, 13 nt, Human
guaggauuacuag

SEQ ID NO: 3360902 - RNA, 18 nt, Human
guauguggaagugugggu

SEQ ID NO: 3360903 - RNA, 21 nt, Human
guauguggaagugugggucug

SEQ ID NO: 3360904 - RNA, 19 nt, Human
guaugugggggucugugug

SEQ ID NO: 3360905 - RNA, 20 nt, Human
guaugugggggucugugugu

SEQ ID NO: 3360906 - RNA, 16 nt, Human
guauguggaagugugg

SEQ ID NO: 3360907 - RNA, 17 nt, Human
guauguggaaguguggg

SEQ ID NO: 3360908 - RNA, 15 nt, Human
guauguggaagugug

SEQ ID NO: 3360909 - RNA, 17 nt, Human
guauaaaagccuguuua

SEQ ID NO: 3360910 - RNA, 22 nt, Human
guauauugauccagaaagaaaa

SEQ ID NO: 3360911 - RNA, 21 nt, Human
guauaaaagccuguuuaagag

SEQ ID NO: 3360912 - RNA, 18 nt, Human
guauaaaagccuguuuaa

SEQ ID NO: 3360913 - RNA, 20 nt, Human
aaauuauuuuguucauacau

SEQ ID NO: 3360914 - RNA, 21 nt, Human
aaauuauuuuguucauacaua

SEQ ID NO: 3360915 - RNA, 22 nt, Human
aaauuauuuuguucauacauau

SEQ ID NO: 3360916 - RNA, 16 nt, Human
aaauuauauaaguauu

SEQ ID NO: 3360917 - RNA, 18 nt, Human
aaauuauauaaguauucu

SEQ ID NO: 3360918 - RNA, 17 nt, Human
aaauuauuuuguucaua

SEQ ID NO: 3360919 - RNA, 19 nt, Human
aaauuauuuuguucauaca

SEQ ID NO: 3360920 - RNA, 22 nt, Human
aaauuauauaaguauucuaaau

SEQ ID NO: 3360921 - RNA, 16 nt, Human
guauuuaauucauguu

SEQ ID NO: 3360922 - RNA, 20 nt, Human
guauuuuugacagaauaugu

SEQ ID NO: 3360923 - RNA, 16 nt, Human
guauuuuugacagaau

SEQ ID NO: 3360924 - RNA, 17 nt, Human
aaauuucagcagcugca

SEQ ID NO: 3360925 - RNA, 18 nt, Human
aaauuucagcagcugcag

SEQ ID NO: 3360926 - RNA, 14 nt, Human
gugguggcucggga

SEQ ID NO: 3360927 - RNA, 13 nt, Human
gugggucugugug

SEQ ID NO: 3360928 - RNA, 16 nt, Human
gugggucugugugugu

SEQ ID NO: 3360929 - RNA, 16 nt, Human
guggggggcuucauac

SEQ ID NO: 3360930 - RNA, 15 nt, Human
guggggggcuucaua

SEQ ID NO: 3360931 - RNA, 13 nt, Human
gugggagugugua

SEQ ID NO: 3360932 - RNA, 14 nt, Human
gugggaguguguaa

SEQ ID NO: 3360933 - RNA, 14 nt, Human
guguguaauuuaaa

SEQ ID NO: 3360934 - RNA, 17 nt, Human
gugucuuuccacuccuc

SEQ ID NO: 3360935 - RNA, 18 nt, Human
guguuuccauauuuuaua

SEQ ID NO: 3360936 - RNA, 13 nt, Human
guguuuauuuaua

SEQ ID NO: 3360937 - RNA, 20 nt, Human
aagaauugucuuucugucuc

SEQ ID NO: 3360938 - RNA, 23 nt, Human
gugcuauuguagagccagagguc

SEQ ID NO: 3360939 - RNA, 15 nt, Human
gugcucaggagcccu

SEQ ID NO: 3360940 - RNA, 14 nt, Human
guggaagugugggu

SEQ ID NO: 3360941 - RNA, 15 nt, Human
guggaaguguggguc

SEQ ID NO: 3360942 - RNA, 19 nt, Human
guggaagugugggucugug

SEQ ID NO: 3360943 - RNA, 20 nt, Human
guggaagugugggucugugu

SEQ ID NO: 3360944 - RNA, 21 nt, Human
guggaagugugggucugugug

SEQ ID NO: 3360945 - RNA, 22 nt, Human
guggaagugugggucugugugu

SEQ ID NO: 3360946 - RNA, 16 nt, Human
guggaauuauuuuaaa

SEQ ID NO: 3360947 - RNA, 18 nt, Human
guggaauuauuuuaaaag

SEQ ID NO: 3360948 - RNA, 15 nt, Human
guggaauuauuuuaa

SEQ ID NO: 3360949 - RNA, 13 nt, Human
aagaaauauaccu

SEQ ID NO: 3360950 - RNA, 15 nt, Human
aacuuguauuaugug

SEQ ID NO: 3360951 - RNA, 16 nt, Human
aacuuguauuaugugu

SEQ ID NO: 3360952 - RNA, 16 nt, Human
guuuucuuaacuuaaa

SEQ ID NO: 3360953 - RNA, 20 nt, Human
guuuucuuaaccagaucauu

SEQ ID NO: 3360954 - RNA, 22 nt, Human
guuugggaccccuggugguuca

SEQ ID NO: 3360955 - RNA, 16 nt, Human
guuugggaccccuggu

SEQ ID NO: 3360956 - RNA, 19 nt, Human
guuugcaucugaaaauuga

SEQ ID NO: 3360957 - RNA, 21 nt, Human
aagggguaggauuacuaggug

SEQ ID NO: 3360958 - RNA, 20 nt, Human
aaguaaaaacaaagaaauua

SEQ ID NO: 3360959 - RNA, 13 nt, Human
aaguaaaaacaaa

SEQ ID NO: 3360960 - RNA, 23 nt, Human
aaggcuauggggauagaugugug

SEQ ID NO: 3360961 - RNA, 18 nt, Human
guuguaucagcacgugug

SEQ ID NO: 3360962 - RNA, 13 nt, Human
guuuaugugugug

SEQ ID NO: 3360963 - RNA, 16 nt, Human
guuuaugugugugugu

SEQ ID NO: 3360964 - RNA, 14 nt, Human
guuaaguaugugua

SEQ ID NO: 3360965 - RNA, 18 nt, Human
guguuuuaaaaugagaaa

SEQ ID NO: 3360966 - RNA, 11 nt, Human
guucauacauu

SEQ ID NO: 3360967 - RNA, 14 nt, Human
guucauacauugua

SEQ ID NO: 3360968 - RNA, 15 nt, Human
aagccucgacacaga

SEQ ID NO: 3360969 - RNA, 15 nt, Human
aagccuggucagccc

SEQ ID NO: 3360970 - RNA, 10 nt, Human
guucauacau

SEQ ID NO: 3360971 - RNA, 13 nt, Human
guucauacauauu

SEQ ID NO: 3360972 - RNA, 14 nt, Human
guucauacauauuu

SEQ ID NO: 3360973 - RNA, 23 nt, Human
guucauacauauuuuuguagcac

SEQ ID NO: 3360974 - RNA, 9 nt, Human
guucauaca

SEQ ID NO: 3360975 - RNA, 18 nt, Human
guucuagcauggcauauu

SEQ ID NO: 3360976 - RNA, 17 nt, Human
aagcuaucguaaaauua

SEQ ID NO: 3360977 - RNA, 17 nt, Human
acaccccgacuuuuguu

SEQ ID NO: 3360978 - RNA, 21 nt, Human
uauaaaaauaaaaaacacugg

SEQ ID NO: 3360979 - RNA, 20 nt, Human
uauaaaaauaaaaaacacug

SEQ ID NO: 3360980 - RNA, 20 nt, Human
uaguaauagagcaaaauuga

SEQ ID NO: 3360981 - RNA, 13 nt, Human
uaguguucauaaa

SEQ ID NO: 3360982 - RNA, 14 nt, Human
uaguaauagagcaa

SEQ ID NO: 3360983 - RNA, 18 nt, Human
acacaacuauuuuuccaa

SEQ ID NO: 3360984 - RNA, 16 nt, Human
acacucacccaacaau

SEQ ID NO: 3360985 - RNA, 16 nt, Human
uauaaguauucuaaau

SEQ ID NO: 3360986 - RNA, 14 nt, Human
acacuguucugaaa

SEQ ID NO: 3360987 - RNA, 20 nt, Human
acacuguucugaaagugacu

SEQ ID NO: 3360988 - RNA, 12 nt, Human
uauauuuacaaa

SEQ ID NO: 3360989 - RNA, 15 nt, Human
uauauuuaaugauaa

SEQ ID NO: 3360990 - RNA, 14 nt, Human
acagauaaucagug

SEQ ID NO: 3360991 - RNA, 16 nt, Human
uaucuuguagcuuuau

SEQ ID NO: 3360992 - RNA, 18 nt, Human
acaaauucugucucugga

SEQ ID NO: 3360993 - RNA, 21 nt, Human
acaaauucugucucuggauua

SEQ ID NO: 3360994 - RNA, 17 nt, Human
acaagaugguucuagca

SEQ ID NO: 3360995 - RNA, 18 nt, Human
acaaugaagauaaaaaga

SEQ ID NO: 3360996 - RNA, 16 nt, Human
uagcuacuaauuuuaa

SEQ ID NO: 3360997 - RNA, 22 nt, Human
uagauaggucagugcaaauacu

SEQ ID NO: 3360998 - RNA, 22 nt, Human
aauuuuuaaucuuuaauuuuac

SEQ ID NO: 3360999 - RNA, 18 nt, Human
uacuagggaaaugccuuu

SEQ ID NO: 3361000 - RNA, 16 nt, Human
uacugggagccuaccc

SEQ ID NO: 3361001 - RNA, 19 nt, Human
uacuguacagacagaaaaa

SEQ ID NO: 3361002 - RNA, 23 nt, Human
uacuguacagacagaaaaaacug

SEQ ID NO: 3361003 - RNA, 14 nt, Human
aauuuaugugaugg

SEQ ID NO: 3361004 - RNA, 16 nt, Human
aauuuauacaggucau

SEQ ID NO: 3361005 - RNA, 17 nt, Human
aauuuauacaggucaua

SEQ ID NO: 3361006 - RNA, 22 nt, Human
aauuuauaaacuuuuuucuuac

SEQ ID NO: 3361007 - RNA, 15 nt, Human
uacuugaaaauuaac

SEQ ID NO: 3361008 - RNA, 15 nt, Human
uaagaauauuugaau

SEQ ID NO: 3361009 - RNA, 18 nt, Human
uaagaauauuugaaugua

SEQ ID NO: 3361010 - RNA, 18 nt, Human
aauauuguguugugaaug

SEQ ID NO: 3361011 - RNA, 20 nt, Human
aauauugcuuuggucauaug

SEQ ID NO: 3361012 - RNA, 14 nt, Human
uaacaugauuuggg

SEQ ID NO: 3361013 - RNA, 19 nt, Human
uaaauuuugaguucuacau

SEQ ID NO: 3361014 - RNA, 18 nt, Human
uaaauuuugaguucuaca

SEQ ID NO: 3361015 - RNA, 20 nt, Human
uaaauuuugucuuuaacuca

SEQ ID NO: 3361016 - RNA, 18 nt, Human
aauaggcguaacuaauuu

SEQ ID NO: 3361017 - RNA, 17 nt, Human
uaaauuuugaguucuac

SEQ ID NO: 3361018 - RNA, 24 nt, Human
uaaauguuuuuuuuuaaagacuuu

SEQ ID NO: 3361019 - RNA, 23 nt, Human
uaaauguuuuuuuuuaaagacuu

SEQ ID NO: 3361020 - RNA, 21 nt, Human
uaaauaaaguuuguugaaaca

SEQ ID NO: 3361021 - RNA, 12 nt, Human
uaaauaaaguuu

SEQ ID NO: 3361022 - RNA, 16 nt, Human
aauaacugugaaguuu

SEQ ID NO: 3361023 - RNA, 14 nt, Human
aauaacugugaagu

SEQ ID NO: 3361024 - RNA, 20 nt, Human
aauaacugugaaguuuacau

SEQ ID NO: 3361025 - RNA, 21 nt, Human
aauaauuuuaagaaaucaaag

SEQ ID NO: 3361026 - RNA, 13 nt, Human
aauaacugugaag

SEQ ID NO: 3361027 - RNA, 18 nt, Human
aauaaccucaaagugacu

SEQ ID NO: 3361028 - RNA, 21 nt, Human
aauaacaaugaaaguugauaa

SEQ ID NO: 3361029 - RNA, 22 nt, Human
uaaaguaaaaacaaagaaauua

SEQ ID NO: 3361030 - RNA, 21 nt, Human
uaaaguaaaaacaaagaaauu

SEQ ID NO: 3361031 - RNA, 19 nt, Human
uaaaguaaaaacaaagaaa

SEQ ID NO: 3361032 - RNA, 22 nt, Human
uaaagguucaugcaaacuuuau

SEQ ID NO: 3361033 - RNA, 21 nt, Human
aauguaugcuucauacaggga

SEQ ID NO: 3361034 - RNA, 18 nt, Human
aauguaugcuucauacag

SEQ ID NO: 3361035 - RNA, 17 nt, Human
aauguaugcuucauaca

SEQ ID NO: 3361036 - RNA, 17 nt, Human
uacauauuuuuguagca

SEQ ID NO: 3361037 - RNA, 18 nt, Human
uacauauuuuuguagcac

SEQ ID NO: 3361038 - RNA, 19 nt, Human
uacauauaagugauugcug

SEQ ID NO: 3361039 - RNA, 14 nt, Human
uacagaggacagua

SEQ ID NO: 3361040 - RNA, 18 nt, Human
uacagaggacaguauuug

SEQ ID NO: 3361041 - RNA, 19 nt, Human
aauggacuuuuguacauag

SEQ ID NO: 3361042 - RNA, 13 nt, Human
uaauucaagaaaa

SEQ ID NO: 3361043 - RNA, 15 nt, Human
uaauuuaaaauugug

SEQ ID NO: 3361044 - RNA, 16 nt, Human
uaauuuauacagguca

SEQ ID NO: 3361045 - RNA, 17 nt, Human
uaauuuauacaggucau

SEQ ID NO: 3361046 - RNA, 23 nt, Human
uaaucagugugucuaaauuugaa

SEQ ID NO: 3361047 - RNA, 15 nt, Human
uaaugaaacuuggau

SEQ ID NO: 3361048 - RNA, 14 nt, Human
uaaugaaacuugga

SEQ ID NO: 3361049 - RNA, 14 nt, Human
uaaugguguuuuaa

SEQ ID NO: 3361050 - RNA, 20 nt, Human
aaugacucagaauauugcuu

SEQ ID NO: 3361051 - RNA, 22 nt, Human
aaugacagguuugggaccccug

SEQ ID NO: 3361052 - RNA, 15 nt, Human
aaugaaaaccacauu

SEQ ID NO: 3361053 - RNA, 14 nt, Human
aaucuuauaauuua

SEQ ID NO: 3361054 - RNA, 12 nt, Human
uaaguucauaca

SEQ ID NO: 3361055 - RNA, 13 nt, Human
uaaguucauacau

SEQ ID NO: 3361056 - RNA, 20 nt, Human
uaaguauguguaaaauguga

SEQ ID NO: 3361057 - RNA, 17 nt, Human
aaucagacuaugaaguu

SEQ ID NO: 3361058 - RNA, 14 nt, Human
aaucagacuaugaa

SEQ ID NO: 3361059 - RNA, 17 nt, Human
aaucauggugcucagag

SEQ ID NO: 3361060 - RNA, 15 nt, Human
aaucaucaagucuuu

SEQ ID NO: 3361061 - RNA, 14 nt, Human
aacaggcucagagg

SEQ ID NO: 3361062 - RNA, 18 nt, Human
aaccuuuguuugcaucug

SEQ ID NO: 3361063 - RNA, 23 nt, Human
aaaucucaaauuuggauugcuaa

SEQ ID NO: 3361064 - RNA, 13 nt, Human
aaagccugcaauu

SEQ ID NO: 3361065 - RNA, 18 nt, Human
aaagccugcaauuucaua

SEQ ID NO: 3361066 - RNA, 20 nt, Human
aaaagacaaggaaaaaauaa

SEQ ID NO: 3361067 - RNA, 16 nt, Human
aaaagagaugaugaaa

SEQ ID NO: 3361068 - RNA, 19 nt, Human
aaaagagaugaugaaaaua

SEQ ID NO: 3361069 - RNA, 14 nt, Human
aaaagauaaauauu

SEQ ID NO: 3361070 - RNA, 17 nt, Human
aaaagauaaauauuaua

SEQ ID NO: 3361071 - RNA, 13 nt, Human
aaaagaucgcagu

SEQ ID NO: 3361072 - RNA, 14 nt, Human
aaugaagcaaugcu

SEQ ID NO: 3361073 - RNA, 16 nt, Human
aauaaacacucuugaa

SEQ ID NO: 3361074 - RNA, 11 nt, Human
aauaaacacuc

SEQ ID NO: 3361075 - RNA, 19 nt, Human
aauaaacacucuugaaaaa

SEQ ID NO: 3361076 - RNA, 16 nt, Human
aagaguaguaauagag

SEQ ID NO: 3361077 - RNA, 19 nt, Human
aagaguauuuuugacagaa

SEQ ID NO: 3361078 - RNA, 14 nt, Human
aagagagaaaauaa

SEQ ID NO: 3361079 - RNA, 21 nt, Human
aagacaaggaaaaaauaacaa

SEQ ID NO: 3361080 - RNA, 13 nt, Human
accggggccuggg

SEQ ID NO: 3361081 - RNA, 16 nt, Human
acccucaucuuucuuc

SEQ ID NO: 3361082 - RNA, 19 nt, Human
acccucaucuuucuuccaa

SEQ ID NO: 3361083 - RNA, 13 nt, Human
acccucaucuuuc

SEQ ID NO: 3361084 - RNA, 14 nt, Human
acccucaucuuucu

SEQ ID NO: 3361085 - RNA, 16 nt, Human
acugauccagcccuga

SEQ ID NO: 3361086 - RNA, 17 nt, Human
acugauccagcccugag

SEQ ID NO: 3361087 - RNA, 16 nt, Human
acugacagauuuccau

SEQ ID NO: 3361088 - RNA, 12 nt, Human
acuugaaaauua

SEQ ID NO: 3361089 - RNA, 14 nt, Human
acuugaaaauuaac

SEQ ID NO: 3361090 - RNA, 15 nt, Human
acugccuauuuuaau

SEQ ID NO: 3361091 - RNA, 17 nt, Human
acuguaaaauaauaacu

SEQ ID NO: 3361092 - RNA, 23 nt, Human
acugucuuuuuucuaaaguaaaa

SEQ ID NO: 3361093 - RNA, 22 nt, Human
acugucuuuuuucuaaaguaaa

SEQ ID NO: 3361094 - RNA, 16 nt, Human
acugucuuuuuucuaa

SEQ ID NO: 3361095 - RNA, 21 nt, Human
acauaaguaauucaagaaaac

SEQ ID NO: 3361096 - RNA, 20 nt, Human
acauaaguauuuaauucaug

SEQ ID NO: 3361097 - RNA, 20 nt, Human
acauaaguaauucaagaaaa

SEQ ID NO: 3361098 - RNA, 23 nt, Human
acauguuucuuuguaaugaaaac

SEQ ID NO: 3361099 - RNA, 13 nt, Human
accaccagaagcc

SEQ ID NO: 3361100 - RNA, 15 nt, Human
accaccagaagccca

SEQ ID NO: 3361101 - RNA, 16 nt, Human
accaccagaagcccag

SEQ ID NO: 3361102 - RNA, 17 nt, Human
accaccagaagcccaga

SEQ ID NO: 3361103 - RNA, 15 nt, Human
aauuauauaaguauu

SEQ ID NO: 3361104 - RNA, 16 nt, Human
aauuauauaaguauuc

SEQ ID NO: 3361105 - RNA, 17 nt, Human
aauuauauaaguauucu

SEQ ID NO: 3361106 - RNA, 18 nt, Human
aauuucauaugcuguaua

SEQ ID NO: 3361107 - RNA, 16 nt, Human
aauuucauaugcugua

SEQ ID NO: 3361108 - RNA, 11 nt, Human
aauuguaauag

SEQ ID NO: 3361109 - RNA, 12 nt, Human
agagaggccauu

SEQ ID NO: 3361110 - RNA, 22 nt, Human
agagaggccauucuuucccaac

SEQ ID NO: 3361111 - RNA, 19 nt, Human
agacaaggaaaaaauaaca

SEQ ID NO: 3361112 - RNA, 18 nt, Human
agacgaaacauuuguucu

SEQ ID NO: 3361113 - RNA, 17 nt, Human
agaacaucccuccuggg

SEQ ID NO: 3361114 - RNA, 13 nt, Human
agaacaucccucc

SEQ ID NO: 3361115 - RNA, 19 nt, Human
agaacagauaaucagugug

SEQ ID NO: 3361116 - RNA, 12 nt, Human
agaaugaggcug

SEQ ID NO: 3361117 - RNA, 13 nt, Human
agaaugaggcugc

SEQ ID NO: 3361118 - RNA, 14 nt, Human
agaaugaggcugcu

SEQ ID NO: 3361119 - RNA, 20 nt, Human
agaaugaggcugcuuuccaa

SEQ ID NO: 3361120 - RNA, 19 nt, Human
agagugggguagguuggga

SEQ ID NO: 3361121 - RNA, 19 nt, Human
agauagccccacaggaggu

SEQ ID NO: 3361122 - RNA, 20 nt, Human
agauagauaggucagugcaa

SEQ ID NO: 3361123 - RNA, 23 nt, Human
agcaaaauugauguguuuauuua

SEQ ID NO: 3361124 - RNA, 19 nt, Human
agcaaaauugauguguuua

SEQ ID NO: 3361125 - RNA, 13 nt, Human
agcaaaauugaug

SEQ ID NO: 3361126 - RNA, 17 nt, Human
agauugagauguguuca

SEQ ID NO: 3361127 - RNA, 14 nt, Human
agccaagaggcugc

SEQ ID NO: 3361128 - RNA, 13 nt, Human
agcaucucccagu

SEQ ID NO: 3361129 - RNA, 17 nt, Human
agccaacuauggccugu

SEQ ID NO: 3361130 - RNA, 17 nt, Human
agcccaaaccaccagaa

SEQ ID NO: 3361131 - RNA, 19 nt, Human
agcccaaaccaccagaagc

SEQ ID NO: 3361132 - RNA, 20 nt, Human
agcccaaaccaccagaagcc

SEQ ID NO: 3361133 - RNA, 22 nt, Human
agcccaaaccaccagaagccca

SEQ ID NO: 3361134 - RNA, 14 nt, Human
aggcuagggugggg

SEQ ID NO: 3361135 - RNA, 15 nt, Human
aggcuagggugggga

SEQ ID NO: 3361136 - RNA, 16 nt, Human
aggcuaggguggggag

SEQ ID NO: 3361137 - RNA, 19 nt, Human
aggcuaggguggggagaga

SEQ ID NO: 3361138 - RNA, 22 nt, Human
aggcucuggagcccacuguacu

SEQ ID NO: 3361139 - RNA, 19 nt, Human
aggcucuggagcccacugu

SEQ ID NO: 3361140 - RNA, 15 nt, Human
agggaugcauggaga

SEQ ID NO: 3361141 - RNA, 14 nt, Human
agggacugagaaau

SEQ ID NO: 3361142 - RNA, 13 nt, Human
agggacugagaaa

SEQ ID NO: 3361143 - RNA, 15 nt, Human
agggacugagaaauu

SEQ ID NO: 3361144 - RNA, 19 nt, Human
aggcaucggggagccggga

SEQ ID NO: 3361145 - RNA, 19 nt, Human
aggccagggggccaguccc

SEQ ID NO: 3361146 - RNA, 23 nt, Human
aggccagggggccagucccugag

SEQ ID NO: 3361147 - RNA, 22 nt, Human
aggcagaacucaucuagguaaa

SEQ ID NO: 3361148 - RNA, 20 nt, Human
aggagacagguuagcugcuc

SEQ ID NO: 3361149 - RNA, 15 nt, Human
aggagggaggugcuu

SEQ ID NO: 3361150 - RNA, 13 nt, Human
aggagggcaggca

SEQ ID NO: 3361151 - RNA, 15 nt, Human
aggagggcaggcauc

SEQ ID NO: 3361152 - RNA, 18 nt, Human
aggaguuucguuuucaaa

SEQ ID NO: 3361153 - RNA, 13 nt, Human
aggaugucugggc

SEQ ID NO: 3361154 - RNA, 15 nt, Human
agcgaauuuuaaaag

SEQ ID NO: 3361155 - RNA, 16 nt, Human
agcgaauuuuaaaaga

SEQ ID NO: 3361156 - RNA, 13 nt, Human
agcgaauuuuaaa

SEQ ID NO: 3361157 - RNA, 12 nt, Human
agcuacaaaugc

SEQ ID NO: 3361158 - RNA, 13 nt, Human
agcuacaaaugca

SEQ ID NO: 3361159 - RNA, 17 nt, Human
agccugcugccugcuuu

SEQ ID NO: 3361160 - RNA, 18 nt, Human
aggaaaaaauaacaauga

SEQ ID NO: 3361161 - RNA, 20 nt, Human
aucaaagggugaaaauuauu

SEQ ID NO: 3361162 - RNA, 18 nt, Human
aucaaagagagaaaauaa

SEQ ID NO: 3361163 - RNA, 23 nt, Human
auccacuuuaucuugaauaaugu

SEQ ID NO: 3361164 - RNA, 21 nt, Human
auccagcccugaguuccuagc

SEQ ID NO: 3361165 - RNA, 23 nt, Human
auggagauagccccacaggaggu

SEQ ID NO: 3361166 - RNA, 24 nt, Human
augcauauuauuuuauguugcaua

SEQ ID NO: 3361167 - RNA, 20 nt, Human
augcauauuauuuuauguug

SEQ ID NO: 3361168 - RNA, 11 nt, Human
aucuaggauuu

SEQ ID NO: 3361169 - RNA, 19 nt, Human
aucuaggauuuuaagggaa

SEQ ID NO: 3361170 - RNA, 13 nt, Human
augaaacuuggau

SEQ ID NO: 3361171 - RNA, 23 nt, Human
augaaguuuuuuuuauacaggau

SEQ ID NO: 3361172 - RNA, 22 nt, Human
augaggcugcuuuccaaagcca

SEQ ID NO: 3361173 - RNA, 22 nt, Human
aguauauugauccagaaagaaa

SEQ ID NO: 3361174 - RNA, 20 nt, Human
agugcuaauuuugaaaaacu

SEQ ID NO: 3361175 - RNA, 13 nt, Human
agugaaugaaaca

SEQ ID NO: 3361176 - RNA, 17 nt, Human
auaaguaauucaagaaa

SEQ ID NO: 3361177 - RNA, 15 nt, Human
auaaguaaaugcuag

SEQ ID NO: 3361178 - RNA, 21 nt, Human
auacacuaugaagauguuuca

SEQ ID NO: 3361179 - RNA, 19 nt, Human
auacuugaaaauuaacaug

SEQ ID NO: 3361180 - RNA, 14 nt, Human
auaaaaacaacuuu

SEQ ID NO: 3361181 - RNA, 20 nt, Human
auaaaaagacauucuuccaa

SEQ ID NO: 3361182 - RNA, 23 nt, Human
aguuugcuagcagaaaucuagaa

SEQ ID NO: 3361183 - RNA, 16 nt, Human
auaaaagacagugaaa

SEQ ID NO: 3361184 - RNA, 15 nt, Human
auaaaagacagugaa

SEQ ID NO: 3361185 - RNA, 23 nt, Human
auaaaaauauuguguugugaaug

SEQ ID NO: 3361186 - RNA, 22 nt, Human
auaaaaauauuguguugugaau

SEQ ID NO: 3361187 - RNA, 20 nt, Human
aguuguucaauaauaaauau

SEQ ID NO: 3361188 - RNA, 19 nt, Human
cacacguaaugaaacuugg

SEQ ID NO: 3361189 - RNA, 20 nt, Human
cacacguaaugaaacuugga

SEQ ID NO: 3361190 - RNA, 15 nt, Human
cacaugagauaauau

SEQ ID NO: 3361191 - RNA, 16 nt, Human
cacaugagauaauaug

SEQ ID NO: 3361192 - RNA, 14 nt, Human
caccacacucagcc

SEQ ID NO: 3361193 - RNA, 15 nt, Human
caccacacucagccc

SEQ ID NO: 3361194 - RNA, 19 nt, Human
caccacacugauccagccc

SEQ ID NO: 3361195 - RNA, 11 nt, Human
caagagccuga

SEQ ID NO: 3361196 - RNA, 13 nt, Human
caagagccugaga

SEQ ID NO: 3361197 - RNA, 23 nt, Human
caagagccugagagugaggugga

SEQ ID NO: 3361198 - RNA, 20 nt, Human
caagcccaguucagcuuggg

SEQ ID NO: 3361199 - RNA, 12 nt, Human
caaagaaauuau

SEQ ID NO: 3361200 - RNA, 13 nt, Human
caaagaaauuaug

SEQ ID NO: 3361201 - RNA, 18 nt, Human
caaauucugucucuggau

SEQ ID NO: 3361202 - RNA, 18 nt, Human
ucacgccagacuucccac

SEQ ID NO: 3361203 - RNA, 22 nt, Human
ucagaguugaugguuguacaua

SEQ ID NO: 3361204 - RNA, 20 nt, Human
ucagaaaauauuauguguuu

SEQ ID NO: 3361205 - RNA, 19 nt, Human
ucagaaaauauuauguguu

SEQ ID NO: 3361206 - RNA, 17 nt, Human
ucagaaaauauuaugug

SEQ ID NO: 3361207 - RNA, 19 nt, Human
uauuuuuguagcacugaca

SEQ ID NO: 3361208 - RNA, 16 nt, Human
uauuuuauguugcaua

SEQ ID NO: 3361209 - RNA, 15 nt, Human
uauuuuauguugcau

SEQ ID NO: 3361210 - RNA, 19 nt, Human
uauuugagaguucuaaauu

SEQ ID NO: 3361211 - RNA, 18 nt, Human
uauuugagaguucuaaau

SEQ ID NO: 3361212 - RNA, 16 nt, Human
uauuugagaguucuaa

SEQ ID NO: 3361213 - RNA, 15 nt, Human
uauuugagaguucua

SEQ ID NO: 3361214 - RNA, 17 nt, Human
uccaaagccaaugugaa

SEQ ID NO: 3361215 - RNA, 13 nt, Human
uccaagcaaaugu

SEQ ID NO: 3361216 - RNA, 13 nt, Human
ucaguuguacagu

SEQ ID NO: 3361217 - RNA, 16 nt, Human
ucauacauuguacgaa

SEQ ID NO: 3361218 - RNA, 13 nt, Human
ucauacauuguac

SEQ ID NO: 3361219 - RNA, 15 nt, Human
ucauacauuguacga

SEQ ID NO: 3361220 - RNA, 15 nt, Human
ucauaauuuauacag

SEQ ID NO: 3361221 - RNA, 15 nt, Human
ucauaauuauuauuu

SEQ ID NO: 3361222 - RNA, 20 nt, Human
uccaugggccauaugaaaag

SEQ ID NO: 3361223 - RNA, 22 nt, Human
uccccagacuccaccaagccug

SEQ ID NO: 3361224 - RNA, 13 nt, Human
ucccuaauaaagc

SEQ ID NO: 3361225 - RNA, 12 nt, Human
ucccuaauaaag

SEQ ID NO: 3361226 - RNA, 11 nt, Human
ucccuaauaaa

SEQ ID NO: 3361227 - RNA, 16 nt, Human
ucccccuccaccugcu

SEQ ID NO: 3361228 - RNA, 19 nt, Human
uccuuaaggcucuuuugua

SEQ ID NO: 3361229 - RNA, 16 nt, Human
uccuuaaggcucuuuu

SEQ ID NO: 3361230 - RNA, 20 nt, Human
uccuucugugaaaguacauu

SEQ ID NO: 3361231 - RNA, 21 nt, Human
ucuagaagacugucagcuucc

SEQ ID NO: 3361232 - RNA, 20 nt, Human
ucuagaagacugucagcuuc

SEQ ID NO: 3361233 - RNA, 17 nt, Human
ucuaaauuugaauguua

SEQ ID NO: 3361234 - RNA, 13 nt, Human
ucuaaauuugaau

SEQ ID NO: 3361235 - RNA, 18 nt, Human
ucuaaauuuuauaucuug

SEQ ID NO: 3361236 - RNA, 23 nt, Human
ucuaaauuuuauaucuuguagcu

SEQ ID NO: 3361237 - RNA, 23 nt, Human
ucuaaauuugaauguuaagcaga

SEQ ID NO: 3361238 - RNA, 22 nt, Human
ucuaaauuugaauguuaagcag

SEQ ID NO: 3361239 - RNA, 19 nt, Human
ucuaacaaaaaaauauauu

SEQ ID NO: 3361240 - RNA, 21 nt, Human
ucucaaauuuggauugcuaau

SEQ ID NO: 3361241 - RNA, 15 nt, Human
ucuaguaugaaauua

SEQ ID NO: 3361242 - RNA, 17 nt, Human
ucuaguaugaaauuaua

SEQ ID NO: 3361243 - RNA, 18 nt, Human
ucucccuccucugcccgg

SEQ ID NO: 3361244 - RNA, 22 nt, Human
ucucagugguuaagauuccuaa

SEQ ID NO: 3361245 - RNA, 15 nt, Human
ucucucgugaguaua

SEQ ID NO: 3361246 - RNA, 11 nt, Human
ucucugcaggu

SEQ ID NO: 3361247 - RNA, 19 nt, Human
ucuuuuguaagguuuuugu

SEQ ID NO: 3361248 - RNA, 22 nt, Human
ugaaaagaggugugcaagagag

SEQ ID NO: 3361249 - RNA, 13 nt, Human
ugaaaagaggugu

SEQ ID NO: 3361250 - RNA, 15 nt, Human
ugaaaucauucauuu

SEQ ID NO: 3361251 - RNA, 16 nt, Human
ugaacugagcuuggaa

SEQ ID NO: 3361252 - RNA, 12 nt, Human
ugaacugagcuu

SEQ ID NO: 3361253 - RNA, 15 nt, Human
ugaacugagcuugga

SEQ ID NO: 3361254 - RNA, 23 nt, Human
ucuggagcccacuguacuugcuc

SEQ ID NO: 3361255 - RNA, 15 nt, Human
ucuguguguguguau

SEQ ID NO: 3361256 - RNA, 18 nt, Human
ucuguguguguguaugug

SEQ ID NO: 3361257 - RNA, 19 nt, Human
ucuguguguguguaugugg

SEQ ID NO: 3361258 - RNA, 21 nt, Human
ucuguguguguguaugugggg

SEQ ID NO: 3361259 - RNA, 13 nt, Human
ucugugugugugu

SEQ ID NO: 3361260 - RNA, 15 nt, Human
ucuguguguuuaugu

SEQ ID NO: 3361261 - RNA, 16 nt, Human
ucuguguguuuaugug

SEQ ID NO: 3361262 - RNA, 22 nt, Human
ucuguguguguguauguggggg

SEQ ID NO: 3361263 - RNA, 19 nt, Human
ucuguguguuuaugugugu

SEQ ID NO: 3361264 - RNA, 20 nt, Human
ucuguguguuuaugugugug

SEQ ID NO: 3361265 - RNA, 22 nt, Human
uagugauuuuuaugccaccuga

SEQ ID NO: 3361266 - RNA, 20 nt, Human
uagugauuuuuaugccaccu

SEQ ID NO: 3361267 - RNA, 21 nt, Human
uagugauuuuuaugccaccug

SEQ ID NO: 3361268 - RNA, 13 nt, Human
uaggcuagggugg

SEQ ID NO: 3361269 - RNA, 21 nt, Human
uauaauucagaaggaucuuca

SEQ ID NO: 3361270 - RNA, 20 nt, Human
uauaauucacauuguauuca

SEQ ID NO: 3361271 - RNA, 16 nt, Human
uauacccagaaaguua

SEQ ID NO: 3361272 - RNA, 18 nt, Human
uauauaaguauucuaaau

SEQ ID NO: 3361273 - RNA, 13 nt, Human
uauauuuuaagac

SEQ ID NO: 3361274 - RNA, 14 nt, Human
uauauuuuaagacg

SEQ ID NO: 3361275 - RNA, 21 nt, Human
uauauuucccugaaggaacca

SEQ ID NO: 3361276 - RNA, 15 nt, Human
uaucagcacgugugg

SEQ ID NO: 3361277 - RNA, 22 nt, Human
uaucaugugaaaucauucauuu

SEQ ID NO: 3361278 - RNA, 17 nt, Human
uaucaugugaaaucauu

SEQ ID NO: 3361279 - RNA, 11 nt, Human
uagaugugugg

SEQ ID NO: 3361280 - RNA, 14 nt, Human
uaggaauuguguuu

SEQ ID NO: 3361281 - RNA, 15 nt, Human
uaggaacugcugggc

SEQ ID NO: 3361282 - RNA, 18 nt, Human
uaggaacugcugggcuug

SEQ ID NO: 3361283 - RNA, 16 nt, Human
uagccccacaggaggu

SEQ ID NO: 3361284 - RNA, 20 nt, Human
uacgaagaguauuuuugaca

SEQ ID NO: 3361285 - RNA, 22 nt, Human
uacgaagaguauuuuugacaga

SEQ ID NO: 3361286 - RNA, 23 nt, Human
uacgaagaguauuuuugacagaa

SEQ ID NO: 3361287 - RNA, 19 nt, Human
uaccuuugacaaagguaaa

SEQ ID NO: 3361288 - RNA, 17 nt, Human
uagaacagauaaucagu

SEQ ID NO: 3361289 - RNA, 21 nt, Human
uacuugcucuugaugccuggc

SEQ ID NO: 3361290 - RNA, 20 nt, Human
uacuugcucuugaugccugg

SEQ ID NO: 3361291 - RNA, 23 nt, Human
uacauuuggagacacaacuauuu

SEQ ID NO: 3361292 - RNA, 14 nt, Human
uacaggauuugaaa

SEQ ID NO: 3361293 - RNA, 17 nt, Human
uacagcccaccuggcuu

SEQ ID NO: 3361294 - RNA, 17 nt, Human
uaauuuugaaaaacugc

SEQ ID NO: 3361295 - RNA, 13 nt, Human
uaauuuugaaaaa

SEQ ID NO: 3361296 - RNA, 13 nt, Human
guuuagcaguaua

SEQ ID NO: 3361297 - RNA, 16 nt, Human
guuuaguaaucauauu

SEQ ID NO: 3361298 - RNA, 16 nt, Human
guuuccuuauauuaug

SEQ ID NO: 3361299 - RNA, 14 nt, Human
guuucuuuguaaug

SEQ ID NO: 3361300 - RNA, 17 nt, Human
guuucuuuguaaugaaa

SEQ ID NO: 3361301 - RNA, 12 nt, Human
uaaaaaacacug

SEQ ID NO: 3361302 - RNA, 15 nt, Human
uaaaaaagcugugug

SEQ ID NO: 3361303 - RNA, 11 nt, Human
uaaaaaacacu

SEQ ID NO: 3361304 - RNA, 14 nt, Human
uaaaguuuguugaa

SEQ ID NO: 3361305 - RNA, 17 nt, Human
uaaauaaaaauaauccu

SEQ ID NO: 3361306 - RNA, 14 nt, Human
uaaaggaauuuaaa

SEQ ID NO: 3361307 - RNA, 20 nt, Human
uaaacuuuuuucuuacuguc

SEQ ID NO: 3361308 - RNA, 20 nt, Human
uaaaucagacuaugaaguuu

SEQ ID NO: 3361309 - RNA, 18 nt, Human
uaaauauaugcuaagucu

SEQ ID NO: 3361310 - RNA, 22 nt, Human
uaaauauauuuuaagacgaaac

SEQ ID NO: 3361311 - RNA, 16 nt, Human
uaaauauauuuuaaga

SEQ ID NO: 3361312 - RNA, 22 nt, Human
uaaauaaaccucaaaaugucua

SEQ ID NO: 3361313 - RNA, 21 nt, Human
uaaacacucuugaaaaaugca

SEQ ID NO: 3361314 - RNA, 16 nt, Human
uaaaaugagaaaucua

SEQ ID NO: 3361315 - RNA, 15 nt, Human
uaaaaugagaaaucu

SEQ ID NO: 3361316 - RNA, 13 nt, Human
uaaaaugagaaau

SEQ ID NO: 3361317 - RNA, 16 nt, Human
uaaaagaugcaaugua

SEQ ID NO: 3361318 - RNA, 13 nt, Human
uaaaagaucgcag

SEQ ID NO: 3361319 - RNA, 20 nt, Human
uaaaagggacugagaaauuu

SEQ ID NO: 3361320 - RNA, 19 nt, Human
uaaaagggacugagaaauu

SEQ ID NO: 3361321 - RNA, 17 nt, Human
uaaaagggacugagaaa

SEQ ID NO: 3361322 - RNA, 14 nt, Human
uaaggcaaucaugg

SEQ ID NO: 3361323 - RNA, 15 nt, Human
uaaggcaaucauggu

SEQ ID NO: 3361324 - RNA, 15 nt, Human
uaagcaugcacaaau

SEQ ID NO: 3361325 - RNA, 13 nt, Human
uaagaucucagug

SEQ ID NO: 3361326 - RNA, 19 nt, Human
uaagaucucagugguuaag

SEQ ID NO: 3361327 - RNA, 19 nt, Human
uaaugauaaguaaaugcua

SEQ ID NO: 3361328 - RNA, 14 nt, Human
uaauauauuuccau

SEQ ID NO: 3361329 - RNA, 19 nt, Human
uaauaaauauuuuugccau

SEQ ID NO: 3361330 - RNA, 19 nt, Human
uaauucuuugaccuguugg

SEQ ID NO: 3361331 - RNA, 23 nt, Human
uaauuaaauuuugaguucuacau

SEQ ID NO: 3361332 - RNA, 13 nt, Human
uaauuuuaagaaa

SEQ ID NO: 3361333 - RNA, 18 nt, Human
uggggcaggggccggggg

SEQ ID NO: 3361334 - RNA, 16 nt, Human
uggggcaggggccggg

SEQ ID NO: 3361335 - RNA, 19 nt, Human
ugggguggggggggugcug

SEQ ID NO: 3361336 - RNA, 22 nt, Human
ugggguggggggggugcugggc

SEQ ID NO: 3361337 - RNA, 21 nt, Human
ugggguggggggggugcuggg

SEQ ID NO: 3361338 - RNA, 18 nt, Human
ugcuucuaguucugccag

SEQ ID NO: 3361339 - RNA, 19 nt, Human
ugcuucuaguucugccagg

SEQ ID NO: 3361340 - RNA, 20 nt, Human
ugcuucuaguucugccagga

SEQ ID NO: 3361341 - RNA, 14 nt, Human
ugcuuuccaaagcc

SEQ ID NO: 3361342 - RNA, 21 nt, Human
uggaagugugggucugugugu

SEQ ID NO: 3361343 - RNA, 20 nt, Human
uggaagugugggucugugug

SEQ ID NO: 3361344 - RNA, 23 nt, Human
uggaagugugggucugugugugu

SEQ ID NO: 3361345 - RNA, 15 nt, Human
uggaauuauuuuaaa

SEQ ID NO: 3361346 - RNA, 17 nt, Human
uggaauuauuuuaaaag

SEQ ID NO: 3361347 - RNA, 13 nt, Human
uggagauguuuag

SEQ ID NO: 3361348 - RNA, 23 nt, Human
ugcuagguuaauuccaauuauau

SEQ ID NO: 3361349 - RNA, 16 nt, Human
ugcuagguuaauucca

SEQ ID NO: 3361350 - RNA, 14 nt, Human
ugcucaggagcccu

SEQ ID NO: 3361351 - RNA, 17 nt, Human
ugcaggaaauggcugug

SEQ ID NO: 3361352 - RNA, 14 nt, Human
ugucacgccagacu

SEQ ID NO: 3361353 - RNA, 17 nt, Human
uguagcacugacagauu

SEQ ID NO: 3361354 - RNA, 22 nt, Human
uguagcacugacagauuuccau

SEQ ID NO: 3361355 - RNA, 16 nt, Human
uguagcacugacagau

SEQ ID NO: 3361356 - RNA, 20 nt, Human
uguaaaaugugaagugaaug

SEQ ID NO: 3361357 - RNA, 15 nt, Human
uguaaauuuauguga

SEQ ID NO: 3361358 - RNA, 16 nt, Human
uguaaauuuaugugau

SEQ ID NO: 3361359 - RNA, 16 nt, Human
ugugggggucugugug

SEQ ID NO: 3361360 - RNA, 14 nt, Human
ugugggucugugug

SEQ ID NO: 3361361 - RNA, 16 nt, Human
ugugggucugugugug

SEQ ID NO: 3361362 - RNA, 21 nt, Human
uguggaaaagccaagaggcug

SEQ ID NO: 3361363 - RNA, 23 nt, Human
uguggaaaagccaagaggcugca

SEQ ID NO: 3361364 - RNA, 19 nt, Human
uguggaaaagccaagaggc

SEQ ID NO: 3361365 - RNA, 14 nt, Human
ugugaaguuuacau

SEQ ID NO: 3361366 - RNA, 20 nt, Human
ugugaaguuuacauuguaaa

SEQ ID NO: 3361367 - RNA, 13 nt, Human
ugugaaacauguu

SEQ ID NO: 3361368 - RNA, 14 nt, Human
ugucuuuuuucuaa

SEQ ID NO: 3361369 - RNA, 16 nt, Human
ugucuggcugcagagc

SEQ ID NO: 3361370 - RNA, 17 nt, Human
ugucuggcugcagagca

SEQ ID NO: 3361371 - RNA, 14 nt, Human
ugucuggcugcaga

SEQ ID NO: 3361372 - RNA, 16 nt, Human
ugugaaucauuuuacc

SEQ ID NO: 3361373 - RNA, 18 nt, Human
ugugaggggcucucucau

SEQ ID NO: 3361374 - RNA, 14 nt, Human
ugugcaagagaggg

SEQ ID NO: 3361375 - RNA, 23 nt, Human
uguguaugugggggucugugugu

SEQ ID NO: 3361376 - RNA, 14 nt, Human
uguguauguggggg

SEQ ID NO: 3361377 - RNA, 13 nt, Human
uguguaugugggg

SEQ ID NO: 3361378 - RNA, 11 nt, Human
uguguguaugu

SEQ ID NO: 3361379 - RNA, 15 nt, Human
uguguuuaugugugu

SEQ ID NO: 3361380 - RNA, 13 nt, Human
uguguuuaugugu

SEQ ID NO: 3361381 - RNA, 22 nt, Human
uguguuuaggaacuacugagga

SEQ ID NO: 3361382 - RNA, 14 nt, Human
uguguugugugugg

SEQ ID NO: 3361383 - RNA, 23 nt, Human
uguguugugugugggagugugua

SEQ ID NO: 3361384 - RNA, 13 nt, Human
uguguugugaaug

SEQ ID NO: 3361385 - RNA, 14 nt, Human
uguuuacagaggac

SEQ ID NO: 3361386 - RNA, 21 nt, Human
uguuuacagaggacaguauuu

SEQ ID NO: 3361387 - RNA, 12 nt, Human
uguucuauagcu

SEQ ID NO: 3361388 - RNA, 15 nt, Human
uuacagaggacagua

SEQ ID NO: 3361389 - RNA, 14 nt, Human
uuacauuuccuaaa

SEQ ID NO: 3361390 - RNA, 22 nt, Human
uuaaugucaauucuugccaaau

SEQ ID NO: 3361391 - RNA, 14 nt, Human
uuaaagacuuuuau

SEQ ID NO: 3361392 - RNA, 12 nt, Human
uguuuuaaaaaa

SEQ ID NO: 3361393 - RNA, 18 nt, Human
uguuuuaaaaugagaaau

SEQ ID NO: 3361394 - RNA, 23 nt, Human
uguuuuaaaaugagaaaucuaaa

SEQ ID NO: 3361395 - RNA, 17 nt, Human
uuggguggggggcuuca

SEQ ID NO: 3361396 - RNA, 19 nt, Human
uuggguggggggcuucaua

SEQ ID NO: 3361397 - RNA, 20 nt, Human
uuggguggggggcuucauac

SEQ ID NO: 3361398 - RNA, 21 nt, Human
uuggguggggggcuucauaca

SEQ ID NO: 3361399 - RNA, 22 nt, Human
uuggguggggggcuucauacac

SEQ ID NO: 3361400 - RNA, 14 nt, Human
uugguaaaccuuuu

SEQ ID NO: 3361401 - RNA, 12 nt, Human
uugguaaaccuu

SEQ ID NO: 3361402 - RNA, 23 nt, Human
uuggcaaacucuccaccacacgu

SEQ ID NO: 3361403 - RNA, 16 nt, Human
uuguaaaggaauuuaa

SEQ ID NO: 3361404 - RNA, 18 nt, Human
uuguaaauaaaggaacca

SEQ ID NO: 3361405 - RNA, 14 nt, Human
uuguauucagaguu

SEQ ID NO: 3361406 - RNA, 14 nt, Human
uuguauuacaaauc

SEQ ID NO: 3361407 - RNA, 16 nt, Human
uuggcaaacucuccac

SEQ ID NO: 3361408 - RNA, 20 nt, Human
uuggcaaacucuccaccaca

SEQ ID NO: 3361409 - RNA, 15 nt, Human
uuggauucugagagc

SEQ ID NO: 3361410 - RNA, 17 nt, Human
uuggauucugagagcug

SEQ ID NO: 3361411 - RNA, 21 nt, Human
uugaaucucauaauuuauaca

SEQ ID NO: 3361412 - RNA, 15 nt, Human
uugaaucucauaauu

SEQ ID NO: 3361413 - RNA, 15 nt, Human
uugaacugagcuugg

SEQ ID NO: 3361414 - RNA, 16 nt, Human
uugaacugagcuugga

SEQ ID NO: 3361415 - RNA, 15 nt, Human
uugaaaaaugcaugu

SEQ ID NO: 3361416 - RNA, 14 nt, Human
uucugagcauuuaa

SEQ ID NO: 3361417 - RNA, 18 nt, Human
uugaauguaugcuucaua

SEQ ID NO: 3361418 - RNA, 14 nt, Human
uugcauagaauaaa

SEQ ID NO: 3361419 - RNA, 21 nt, Human
uuccauccuagucacuaccuu

SEQ ID NO: 3361420 - RNA, 12 nt, Human
uuccagccugcc

SEQ ID NO: 3361421 - RNA, 14 nt, Human
uuccagccugccac

SEQ ID NO: 3361422 - RNA, 17 nt, Human
uucaucugacuaugaca

SEQ ID NO: 3361423 - RNA, 15 nt, Human
uucaucuaggauuuu

SEQ ID NO: 3361424 - RNA, 18 nt, Human
uucacucuuggagccugc

SEQ ID NO: 3361425 - RNA, 19 nt, Human
uucacucuuggagccugca

SEQ ID NO: 3361426 - RNA, 14 nt, Human
uucacucuuggagc

SEQ ID NO: 3361427 - RNA, 23 nt, Human
uucaaauuguaagcaugcacaaa

SEQ ID NO: 3361428 - RNA, 17 nt, Human
uuccuucugugaaagua

SEQ ID NO: 3361429 - RNA, 15 nt, Human
uuccuagccaccgcc

SEQ ID NO: 3361430 - RNA, 21 nt, Human
uuccuagccaccgccuccuac

SEQ ID NO: 3361431 - RNA, 14 nt, Human
uuccuagccaccgc

SEQ ID NO: 3361432 - RNA, 22 nt, Human
uuccuagccaccgccuccuaca

SEQ ID NO: 3361433 - RNA, 20 nt, Human
uuccuagguauaauucacau

SEQ ID NO: 3361434 - RNA, 20 nt, Human
uuuuaugauacuugaaaauu

SEQ ID NO: 3361435 - RNA, 16 nt, Human
uuuuaugauacuugaa

SEQ ID NO: 3361436 - RNA, 14 nt, Human
uuuuacuguacaga

SEQ ID NO: 3361437 - RNA, 15 nt, Human
uuuuaaaaugagaaa

SEQ ID NO: 3361438 - RNA, 22 nt, Human
uuuuaaaaugagaaaucuaaaa

SEQ ID NO: 3361439 - RNA, 15 nt, Human
uuuucagaaaauauu

SEQ ID NO: 3361440 - RNA, 13 nt, Human
uuuucacauaucu

SEQ ID NO: 3361441 - RNA, 16 nt, Human
uuuucagaaaauauua

SEQ ID NO: 3361442 - RNA, 23 nt, Human
uuuggaacaagaugguucuagca

SEQ ID NO: 3361443 - RNA, 23 nt, Human
uuugcauaacguauaaaagccug

SEQ ID NO: 3361444 - RNA, 19 nt, Human
uuugcauaacguauaaaag

SEQ ID NO: 3361445 - RNA, 22 nt, Human
uuucuuacugucuuuuuucuaa

SEQ ID NO: 3361446 - RNA, 16 nt, Human
uuugagguggaagagg

SEQ ID NO: 3361447 - RNA, 13 nt, Human
uuuguucauacau

SEQ ID NO: 3361448 - RNA, 16 nt, Human
uuuguucauacauauu

SEQ ID NO: 3361449 - RNA, 15 nt, Human
uuuacauuguaaaua

SEQ ID NO: 3361450 - RNA, 13 nt, Human
uuuacauuguaaa

SEQ ID NO: 3361451 - RNA, 19 nt, Human
uuuagaagaagugugucac

SEQ ID NO: 3361452 - RNA, 17 nt, Human
uuuagaagaaguguguc

SEQ ID NO: 3361453 - RNA, 22 nt, Human
uuuaugauacuugaaaauuaac

SEQ ID NO: 3361454 - RNA, 21 nt, Human
uuucuaacaaaaaaauauauu

SEQ ID NO: 3361455 - RNA, 14 nt, Human
uuuccaaaauaauu

SEQ ID NO: 3361456 - RNA, 15 nt, Human
uuucagcagcugcag

SEQ ID NO: 3361457 - RNA, 20 nt, Human
uuuuuuauacaggaugauga

SEQ ID NO: 3361458 - RNA, 13 nt, Human
uuuugaaaaacug

SEQ ID NO: 3361459 - RNA, 13 nt, Human
cccaacaccucuu

SEQ ID NO: 3361460 - RNA, 13 nt, Human
ccaucagccucca

SEQ ID NO: 3361461 - RNA, 22 nt, Human
cccaaaccaccagaagcccaga

SEQ ID NO: 3361462 - RNA, 17 nt, Human
cccaaaccaccagaagc

SEQ ID NO: 3361463 - RNA, 18 nt, Human
cccaaaccaccagaagcc

SEQ ID NO: 3361464 - RNA, 20 nt, Human
ccagugaauucuugaaggaa

SEQ ID NO: 3361465 - RNA, 16 nt, Human
ccagugaauucuugaa

SEQ ID NO: 3361466 - RNA, 19 nt, Human
ccaggcuuuuuuaucaugu

SEQ ID NO: 3361467 - RNA, 23 nt, Human
ccagcuggggccaggcugggucg

SEQ ID NO: 3361468 - RNA, 22 nt, Human
ccagcuggggccaggcuggguc

SEQ ID NO: 3361469 - RNA, 21 nt, Human
ccagcuggggccaggcugggu

SEQ ID NO: 3361470 - RNA, 20 nt, Human
ccagcuggggccaggcuggg

SEQ ID NO: 3361471 - RNA, 19 nt, Human
ccagcuggggccaggcugg

SEQ ID NO: 3361472 - RNA, 18 nt, Human
ccagcuggggccaggcug

SEQ ID NO: 3361473 - RNA, 17 nt, Human
ccagcuggggccaggcu

SEQ ID NO: 3361474 - RNA, 21 nt, Human
ccacgucagcugggacacccc

SEQ ID NO: 3361475 - RNA, 14 nt, Human
ccacgguguucugu

SEQ ID NO: 3361476 - RNA, 14 nt, Human
ccagaagcccagaa

SEQ ID NO: 3361477 - RNA, 12 nt, Human
ccagaagcccag

SEQ ID NO: 3361478 - RNA, 13 nt, Human
ccagaagcccaga

SEQ ID NO: 3361479 - RNA, 16 nt, Human
ccacacccucacugcu

SEQ ID NO: 3361480 - RNA, 20 nt, Human
ccacacagacuugggcaggg

SEQ ID NO: 3361481 - RNA, 22 nt, Human
ccacacguaaugaaacuuggau

SEQ ID NO: 3361482 - RNA, 14 nt, Human
ccaacacugccagc

SEQ ID NO: 3361483 - RNA, 15 nt, Human
ccaacacugccagca

SEQ ID NO: 3361484 - RNA, 16 nt, Human
ccaacacugccagcau

SEQ ID NO: 3361485 - RNA, 13 nt, Human
ccaacacugccag

SEQ ID NO: 3361486 - RNA, 16 nt, Human
ccaaaggcucucuccu

SEQ ID NO: 3361487 - RNA, 17 nt, Human
ccaaagcgaauuuuaaa

SEQ ID NO: 3361488 - RNA, 14 nt, Human
ccaaagccaaugug

SEQ ID NO: 3361489 - RNA, 16 nt, Human
ccaagaggcugcagcc

SEQ ID NO: 3361490 - RNA, 14 nt, Human
ccaagaggcugcag

SEQ ID NO: 3361491 - RNA, 15 nt, Human
ccaagaggcugcagc

SEQ ID NO: 3361492 - RNA, 19 nt, Human
ccaagccuuggcucuaccc

SEQ ID NO: 3361493 - RNA, 19 nt, Human
ccaagccuggucagcccaa

SEQ ID NO: 3361494 - RNA, 20 nt, Human
ccaagccuggucagcccaaa

SEQ ID NO: 3361495 - RNA, 16 nt, Human
ccaaacaggcucagag

SEQ ID NO: 3361496 - RNA, 15 nt, Human
cauuuccuaaauaua

SEQ ID NO: 3361497 - RNA, 19 nt, Human
cauugucccugaagagaag

SEQ ID NO: 3361498 - RNA, 23 nt, Human
cauuguauucagaguugaugguu

SEQ ID NO: 3361499 - RNA, 20 nt, Human
cauuguacgaagaguauuuu

SEQ ID NO: 3361500 - RNA, 22 nt, Human
ccgacuuuuguuuaccagagaa

SEQ ID NO: 3361501 - RNA, 23 nt, Human
ccucuccacucaugugacucuuu

SEQ ID NO: 3361502 - RNA, 14 nt, Human
ccuccucugcccgg

SEQ ID NO: 3361503 - RNA, 15 nt, Human
ccuccucugcccggg

SEQ ID NO: 3361504 - RNA, 17 nt, Human
ccuccugggaaugaagc

SEQ ID NO: 3361505 - RNA, 23 nt, Human
ccugaagcuaucguaaaauuaag

SEQ ID NO: 3361506 - RNA, 22 nt, Human
ccugaagcuaucguaaaauuaa

SEQ ID NO: 3361507 - RNA, 20 nt, Human
ccugaagcuaucguaaaauu

SEQ ID NO: 3361508 - RNA, 19 nt, Human
ccugaggcagguccccaga

SEQ ID NO: 3361509 - RNA, 18 nt, Human
ccugaggcagguccccag

SEQ ID NO: 3361510 - RNA, 15 nt, Human
ccugaggcagguccc

SEQ ID NO: 3361511 - RNA, 19 nt, Human
cgucagcugggacaccccg

SEQ ID NO: 3361512 - RNA, 22 nt, Human
cguauaaaagccuguuuaagag

SEQ ID NO: 3361513 - RNA, 21 nt, Human
cguauaaaagccuguuuaaga

SEQ ID NO: 3361514 - RNA, 17 nt, Human
cguauaaaagccuguuu

SEQ ID NO: 3361515 - RNA, 16 nt, Human
cguauaaaagccuguu

SEQ ID NO: 3361516 - RNA, 13 nt, Human
cguuuucaaaauu

SEQ ID NO: 3361517 - RNA, 22 nt, Human
cggcugggaggagggcaggcau

SEQ ID NO: 3361518 - RNA, 18 nt, Human
cggcugggaggagggcag

SEQ ID NO: 3361519 - RNA, 23 nt, Human
cggcugggaggagggcaggcauc

SEQ ID NO: 3361520 - RNA, 16 nt, Human
cgggagcucaggaacc

SEQ ID NO: 3361521 - RNA, 21 nt, Human
cgauugcaggagucccugcca

SEQ ID NO: 3361522 - RNA, 23 nt, Human
cgauugcaggagucccugccauc

SEQ ID NO: 3361523 - RNA, 14 nt, Human
ccuuugacaaaggu

SEQ ID NO: 3361524 - RNA, 15 nt, Human
ccuggaccagccucu

SEQ ID NO: 3361525 - RNA, 16 nt, Human
ccuggaccagccucuc

SEQ ID NO: 3361526 - RNA, 14 nt, Human
ccuggaccagccuc

SEQ ID NO: 3361527 - RNA, 20 nt, Human
ccuggacugugugcucagga

SEQ ID NO: 3361528 - RNA, 17 nt, Human
ccuggacugugugcuca

SEQ ID NO: 3361529 - RNA, 21 nt, Human
ccugggaggcucuggagccca

SEQ ID NO: 3361530 - RNA, 13 nt, Human
ccugggaggcucu

SEQ ID NO: 3361531 - RNA, 12 nt, Human
ccuggcggggug

SEQ ID NO: 3361532 - RNA, 20 nt, Human
ccugcuuuuuauggccugug

SEQ ID NO: 3361533 - RNA, 22 nt, Human
ccugugagcuaggaauuguguu

SEQ ID NO: 3361534 - RNA, 23 nt, Human
ccuugacaaagucaagccacaug

SEQ ID NO: 3361535 - RNA, 21 nt, Human
ccuugacaaagucaagccaca

SEQ ID NO: 3361536 - RNA, 16 nt, Human
cugccaggagacaggu

SEQ ID NO: 3361537 - RNA, 11 nt, Human
cugccaggaga

SEQ ID NO: 3361538 - RNA, 20 nt, Human
cugccagcauuucccuuccu

SEQ ID NO: 3361539 - RNA, 13 nt, Human
cugccuauuuuaa

SEQ ID NO: 3361540 - RNA, 14 nt, Human
cugccucucugcag

SEQ ID NO: 3361541 - RNA, 13 nt, Human
cugccucucugca

SEQ ID NO: 3361542 - RNA, 12 nt, Human
cugccucucugc

SEQ ID NO: 3361543 - RNA, 12 nt, Human
cugcagagcugc

SEQ ID NO: 3361544 - RNA, 21 nt, Human
cugcagagcugcgggcugggu

SEQ ID NO: 3361545 - RNA, 21 nt, Human
cugcagagcagugggccuggc

SEQ ID NO: 3361546 - RNA, 23 nt, Human
cugcagagcagugggccuggcca

SEQ ID NO: 3361547 - RNA, 18 nt, Human
cugcagagcagugggccu

SEQ ID NO: 3361548 - RNA, 16 nt, Human
cugcagccaggccacu

SEQ ID NO: 3361549 - RNA, 17 nt, Human
cugcagccaggccacug

SEQ ID NO: 3361550 - RNA, 22 nt, Human
cugcagccaggccacuggcccc

SEQ ID NO: 3361551 - RNA, 23 nt, Human
cugcagccaggccacuggccccu

SEQ ID NO: 3361552 - RNA, 15 nt, Human
cugcagccaggccac

SEQ ID NO: 3361553 - RNA, 18 nt, Human
cugcaauuucauaugcug

SEQ ID NO: 3361554 - RNA, 20 nt, Human
cugcaauuucauaugcugua

SEQ ID NO: 3361555 - RNA, 20 nt, Human
cugauccagcccugaguucc

SEQ ID NO: 3361556 - RNA, 12 nt, Human
cuggaccagccu

SEQ ID NO: 3361557 - RNA, 21 nt, Human
cuggagcccacuguacuugcu

SEQ ID NO: 3361558 - RNA, 20 nt, Human
cuggagcccacuguacuugc

SEQ ID NO: 3361559 - RNA, 17 nt, Human
cuggagcccacuguacu

SEQ ID NO: 3361560 - RNA, 16 nt, Human
cuggagcccacuguac

SEQ ID NO: 3361561 - RNA, 15 nt, Human
cuggagcccacugua

SEQ ID NO: 3361562 - RNA, 13 nt, Human
cuggagcccacug

SEQ ID NO: 3361563 - RNA, 23 nt, Human
cuggaauaauccuaaacauauga

SEQ ID NO: 3361564 - RNA, 21 nt, Human
cuggaagugcuaauuuugaaa

SEQ ID NO: 3361565 - RNA, 15 nt, Human
cugcuuuccaaagcc

SEQ ID NO: 3361566 - RNA, 17 nt, Human
cugcuuuccaaagccaa

SEQ ID NO: 3361567 - RNA, 14 nt, Human
cuggcacagccugg

SEQ ID NO: 3361568 - RNA, 17 nt, Human
cuggauuauauuaugaa

SEQ ID NO: 3361569 - RNA, 22 nt, Human
cugggaggcucuggagcccacu

SEQ ID NO: 3361570 - RNA, 16 nt, Human
cugggaggcucuggag

SEQ ID NO: 3361571 - RNA, 15 nt, Human
cugggaggcucugga

SEQ ID NO: 3361572 - RNA, 10 nt, Human
cugggccccu

SEQ ID NO: 3361573 - RNA, 12 nt, Human
cugggccccugc

SEQ ID NO: 3361574 - RNA, 17 nt, Human
cugggccccugccucuc

SEQ ID NO: 3361575 - RNA, 16 nt, Human
cugggccccugccucu

SEQ ID NO: 3361576 - RNA, 22 nt, Human
cuccuuaaggcucuuuuguaag

SEQ ID NO: 3361577 - RNA, 13 nt, Human
cuccuuaaggcuc

SEQ ID NO: 3361578 - RNA, 17 nt, Human
cucaucuccccaucauu

SEQ ID NO: 3361579 - RNA, 21 nt, Human
cucaucuagguaaauuacagu

SEQ ID NO: 3361580 - RNA, 17 nt, Human
cucauuccagaggaagg

SEQ ID NO: 3361581 - RNA, 15 nt, Human
cucauuccagaggaa

SEQ ID NO: 3361582 - RNA, 20 nt, Human
cucagugucuggcugcagag

SEQ ID NO: 3361583 - RNA, 21 nt, Human
cucauaaaaagccugcaauuu

SEQ ID NO: 3361584 - RNA, 21 nt, Human
cucagugucuggcugcagagc

SEQ ID NO: 3361585 - RNA, 22 nt, Human
cucagugucuggcugcagagca

SEQ ID NO: 3361586 - RNA, 22 nt, Human
cucauaauuuauacaggucaua

SEQ ID NO: 3361587 - RNA, 13 nt, Human
cucauaauuuaua

SEQ ID NO: 3361588 - RNA, 15 nt, Human
cucauaauuuauaca

SEQ ID NO: 3361589 - RNA, 17 nt, Human
cuccauugguguugaca

SEQ ID NO: 3361590 - RNA, 21 nt, Human
cuccacucuccucuuccaggc

SEQ ID NO: 3361591 - RNA, 23 nt, Human
cucugcaggucccuaauaaagcu

SEQ ID NO: 3361592 - RNA, 22 nt, Human
cucugcaggucccuaauaaagc

SEQ ID NO: 3361593 - RNA, 14 nt, Human
cucuggaauuugaa

SEQ ID NO: 3361594 - RNA, 12 nt, Human
cucuggagccca

SEQ ID NO: 3361595 - RNA, 22 nt, Human
cucucugcaggucccuaauaaa

SEQ ID NO: 3361596 - RNA, 19 nt, Human
cucucugcaggucccuaau

SEQ ID NO: 3361597 - RNA, 17 nt, Human
cucucugcaggucccua

SEQ ID NO: 3361598 - RNA, 16 nt, Human
cucucugcaggucccu

SEQ ID NO: 3361599 - RNA, 14 nt, Human
cucucugcaggucc

SEQ ID NO: 3361600 - RNA, 13 nt, Human
cucucugcagguc

SEQ ID NO: 3361601 - RNA, 12 nt, Human
cucucugcaggu

SEQ ID NO: 3361602 - RNA, 21 nt, Human
cugaagagaagggcagggcug

SEQ ID NO: 3361603 - RNA, 12 nt, Human
cugaauuauuuu

SEQ ID NO: 3361604 - RNA, 15 nt, Human
cucuggagcccacug

SEQ ID NO: 3361605 - RNA, 15 nt, Human
cucuuggagccugca

SEQ ID NO: 3361606 - RNA, 22 nt, Human
cucuuggagccugcagagcugc

SEQ ID NO: 3361607 - RNA, 19 nt, Human
cucuugaacugagcuugga

SEQ ID NO: 3361608 - RNA, 16 nt, Human
cucuugaacugagcuu

SEQ ID NO: 3361609 - RNA, 17 nt, Human
cucuugaacugagcuug

SEQ ID NO: 3361610 - RNA, 14 nt, Human
cuuccuuccucucc

SEQ ID NO: 3361611 - RNA, 15 nt, Human
cuuccaagagccuga

SEQ ID NO: 3361612 - RNA, 14 nt, Human
cuuccaagagccug

SEQ ID NO: 3361613 - RNA, 13 nt, Human
cuucccuuucugc

SEQ ID NO: 3361614 - RNA, 14 nt, Human
cuuauaauuuaaaa

SEQ ID NO: 3361615 - RNA, 13 nt, Human
cuuauaauuuaaa

SEQ ID NO: 3361616 - RNA, 15 nt, Human
cuuaugauugcagau

SEQ ID NO: 3361617 - RNA, 11 nt, Human
cuuaacuauuc

SEQ ID NO: 3361618 - RNA, 18 nt, Human
cuguuuugaaucucauaa

SEQ ID NO: 3361619 - RNA, 13 nt, Human
cuguuuacagugu

SEQ ID NO: 3361620 - RNA, 15 nt, Human
cuguuuacaguguuc

SEQ ID NO: 3361621 - RNA, 17 nt, Human
cuugccaaauauaaaua

SEQ ID NO: 3361622 - RNA, 20 nt, Human
cuugcuugauuguauggugg

SEQ ID NO: 3361623 - RNA, 18 nt, Human
cuugcucuugaugccugg

SEQ ID NO: 3361624 - RNA, 17 nt, Human
cuugcucuugaugccug

SEQ ID NO: 3361625 - RNA, 19 nt, Human
cuugcucuugaugccuggc

SEQ ID NO: 3361626 - RNA, 17 nt, Human
cuuguacuuuauuuucu

SEQ ID NO: 3361627 - RNA, 15 nt, Human
cuuggaagcuucugg

SEQ ID NO: 3361628 - RNA, 17 nt, Human
cuuugacaaagguaaau

SEQ ID NO: 3361629 - RNA, 14 nt, Human
cuuucugucucucu

SEQ ID NO: 3361630 - RNA, 19 nt, Human
cuuugacaaagguaaauca

SEQ ID NO: 3361631 - RNA, 22 nt, Human
cuuugcauaacguauaaaagcc

SEQ ID NO: 3361632 - RNA, 13 nt, Human
gaagcguuguccu

SEQ ID NO: 3361633 - RNA, 19 nt, Human
gaagcguuguccucagccc

SEQ ID NO: 3361634 - RNA, 20 nt, Human
gaagcguuguccucagcccc

SEQ ID NO: 3361635 - RNA, 17 nt, Human
gaauauuugaauguaug

SEQ ID NO: 3361636 - RNA, 23 nt, Human
gaauucuugaaggaaaaugauac

SEQ ID NO: 3361637 - RNA, 23 nt, Human
gaauuguguuuauaauuuuaaau

SEQ ID NO: 3361638 - RNA, 15 nt, Human
gaauuguguuuauaa

SEQ ID NO: 3361639 - RNA, 21 nt, Human
gaauguaugcuucauacaggg

SEQ ID NO: 3361640 - RNA, 16 nt, Human
gaauguaugcuucaua

SEQ ID NO: 3361641 - RNA, 18 nt, Human
gaauguaugcuucauaca

SEQ ID NO: 3361642 - RNA, 18 nt, Human
gaacagauaaucagugug

SEQ ID NO: 3361643 - RNA, 21 nt, Human
gaacagcggcuggacuuggag

SEQ ID NO: 3361644 - RNA, 17 nt, Human
gaaauuuauaaacuuuu

SEQ ID NO: 3361645 - RNA, 16 nt, Human
gaaauuuauaaacuuu

SEQ ID NO: 3361646 - RNA, 16 nt, Human
gaaauuguauuacaaa

SEQ ID NO: 3361647 - RNA, 14 nt, Human
gaacuacugaggau

SEQ ID NO: 3361648 - RNA, 12 nt, Human
gaagagggcugc

SEQ ID NO: 3361649 - RNA, 15 nt, Human
gaagauguuucaaaa

SEQ ID NO: 3361650 - RNA, 17 nt, Human
gaagagaagggcagggc

SEQ ID NO: 3361651 - RNA, 20 nt, Human
gaagacugucagcuuccaaa

SEQ ID NO: 3361652 - RNA, 21 nt, Human
gaacucaucuagguaaauuac

SEQ ID NO: 3361653 - RNA, 20 nt, Human
gaacucaucuagguaaauua

SEQ ID NO: 3361654 - RNA, 12 nt, Human
gacccccuggag

SEQ ID NO: 3361655 - RNA, 17 nt, Human
gacauaaaaacaacuuu

SEQ ID NO: 3361656 - RNA, 11 nt, Human
gacugagaaau

SEQ ID NO: 3361657 - RNA, 13 nt, Human
gacugagaaauuu

SEQ ID NO: 3361658 - RNA, 18 nt, Human
gacuaaccccaccacacc

SEQ ID NO: 3361659 - RNA, 16 nt, Human
gaccuuccaagagccu

SEQ ID NO: 3361660 - RNA, 17 nt, Human
gaccuuccaagagccug

SEQ ID NO: 3361661 - RNA, 18 nt, Human
gaccuuccaagagccuga

SEQ ID NO: 3361662 - RNA, 18 nt, Human
gacuucccacggcuccuc

SEQ ID NO: 3361663 - RNA, 21 nt, Human
gaguguguaauuuaaaauugu

SEQ ID NO: 3361664 - RNA, 22 nt, Human
gaguguguaauuuaaaauugug

SEQ ID NO: 3361665 - RNA, 11 nt, Human
gaguucuacau

SEQ ID NO: 3361666 - RNA, 16 nt, Human
gauaaguucauacauu

SEQ ID NO: 3361667 - RNA, 16 nt, Human
gauugggaauccgccc

SEQ ID NO: 3361668 - RNA, 22 nt, Human
gcaacuuuguauaaaagggacu

SEQ ID NO: 3361669 - RNA, 12 nt, Human
gcaaaugugaau

SEQ ID NO: 3361670 - RNA, 20 nt, Human
gcaaacuuuauuuuguguuu

SEQ ID NO: 3361671 - RNA, 18 nt, Human
gcaaacuuuauuuugugu

SEQ ID NO: 3361672 - RNA, 15 nt, Human
gcaggagggaggugc

SEQ ID NO: 3361673 - RNA, 11 nt, Human
gcaggaggaag

SEQ ID NO: 3361674 - RNA, 21 nt, Human
gcaggaguuucguuuucaaaa

SEQ ID NO: 3361675 - RNA, 20 nt, Human
gcaggaguuucguuuucaaa

SEQ ID NO: 3361676 - RNA, 18 nt, Human
gcagauggaaugcugugu

SEQ ID NO: 3361677 - RNA, 19 nt, Human
gcagauuuugcccuugaca

SEQ ID NO: 3361678 - RNA, 12 nt, Human
gcacagccuggc

SEQ ID NO: 3361679 - RNA, 19 nt, Human
gcacagccuggcuguggcc

SEQ ID NO: 3361680 - RNA, 19 nt, Human
gcacaugccuguaguccca

SEQ ID NO: 3361681 - RNA, 23 nt, Human
gcauauuauuuuauguugcauag

SEQ ID NO: 3361682 - RNA, 18 nt, Human
gcauauuauuuuauguug

SEQ ID NO: 3361683 - RNA, 23 nt, Human
gcagguccccagacuccaccaag

SEQ ID NO: 3361684 - RNA, 12 nt, Human
gcaggucccuaa

SEQ ID NO: 3361685 - RNA, 14 nt, Human
gcagguccccagac

SEQ ID NO: 3361686 - RNA, 11 nt, Human
gcaggucccua

SEQ ID NO: 3361687 - RNA, 10 nt, Human
gcaggucccu

SEQ ID NO: 3361688 - RNA, 17 nt, Human
gcauuuuacuguacaga

SEQ ID NO: 3361689 - RNA, 16 nt, Human
gcauuuuacuguacag

SEQ ID NO: 3361690 - RNA, 17 nt, Human
gcaugaauuugugaagg

SEQ ID NO: 3361691 - RNA, 15 nt, Human
gcaugaauuugugaa

SEQ ID NO: 3361692 - RNA, 17 nt, Human
gccuaaccugccgagag

SEQ ID NO: 3361693 - RNA, 17 nt, Human
gccuauuuuaauaaaca

SEQ ID NO: 3361694 - RNA, 19 nt, Human
gccgggagccugacccuca

SEQ ID NO: 3361695 - RNA, 13 nt, Human
gccgggagccuga

SEQ ID NO: 3361696 - RNA, 14 nt, Human
gccgggagccugac

SEQ ID NO: 3361697 - RNA, 21 nt, Human
gccgagaguccaucagccucc

SEQ ID NO: 3361698 - RNA, 14 nt, Human
gccucucugcaggu

SEQ ID NO: 3361699 - RNA, 10 nt, Human
gccucucugc

SEQ ID NO: 3361700 - RNA, 17 nt, Human
gccucucugcagguccc

SEQ ID NO: 3361701 - RNA, 16 nt, Human
gccucucugcaggucc

SEQ ID NO: 3361702 - RNA, 23 nt, Human
gccucucugcaggucccuaauaa

SEQ ID NO: 3361703 - RNA, 20 nt, Human
gccugcagagcugcgggcug

SEQ ID NO: 3361704 - RNA, 15 nt, Human
gccugcagagcugcg

SEQ ID NO: 3361705 - RNA, 14 nt, Human
gcuaagaauauuug

SEQ ID NO: 3361706 - RNA, 21 nt, Human
gccagacuucccacggcuccu

SEQ ID NO: 3361707 - RNA, 22 nt, Human
gccacucaggcccaaagccucg

SEQ ID NO: 3361708 - RNA, 14 nt, Human
gccacucaggccca

SEQ ID NO: 3361709 - RNA, 13 nt, Human
gccccgcguggaa

SEQ ID NO: 3361710 - RNA, 20 nt, Human
gccccugagaucucugcagg

SEQ ID NO: 3361711 - RNA, 22 nt, Human
gcccaucugggggccucuucug

SEQ ID NO: 3361712 - RNA, 17 nt, Human
ggaacucgugucuggca

SEQ ID NO: 3361713 - RNA, 15 nt, Human
ggaaccgaggcaggg

SEQ ID NO: 3361714 - RNA, 16 nt, Human
ggaaccgaggcaggga

SEQ ID NO: 3361715 - RNA, 20 nt, Human
ggaaccgaggcagggaagga

SEQ ID NO: 3361716 - RNA, 19 nt, Human
gcuucuaguucugccagga

SEQ ID NO: 3361717 - RNA, 20 nt, Human
gcuucuaguucugccaggag

SEQ ID NO: 3361718 - RNA, 21 nt, Human
gcuucuaguucugccaggaga

SEQ ID NO: 3361719 - RNA, 17 nt, Human
gcuucuaguucugccag

SEQ ID NO: 3361720 - RNA, 18 nt, Human
gcuucuaguucugccagg

SEQ ID NO: 3361721 - RNA, 19 nt, Human
gcuucuggugaccuuccaa

SEQ ID NO: 3361722 - RNA, 16 nt, Human
ggaaaaaauaacaaug

SEQ ID NO: 3361723 - RNA, 20 nt, Human
ggaaaaaauaacaaugaaag

SEQ ID NO: 3361724 - RNA, 14 nt, Human
gcuuuaucaaaggg

SEQ ID NO: 3361725 - RNA, 17 nt, Human
gcugggaggagggcagg

SEQ ID NO: 3361726 - RNA, 19 nt, Human
gcuggggccaggcuggguc

SEQ ID NO: 3361727 - RNA, 16 nt, Human
gcuggggccaggcugg

SEQ ID NO: 3361728 - RNA, 15 nt, Human
gcugccuuuggacuu

SEQ ID NO: 3361729 - RNA, 20 nt, Human
gcugccuuuggacuuguccc

SEQ ID NO: 3361730 - RNA, 23 nt, Human
gcuagcagaaaucuagaagacug

SEQ ID NO: 3361731 - RNA, 23 nt, Human
gcugggacaccccgacuuuuguu

SEQ ID NO: 3361732 - RNA, 13 nt, Human
gcuggaucuguga

SEQ ID NO: 3361733 - RNA, 17 nt, Human
ggaucccaugagcuccu

SEQ ID NO: 3361734 - RNA, 20 nt, Human
ggaucccaugagcuccuuaa

SEQ ID NO: 3361735 - RNA, 14 nt, Human
ggcagguccccaga

SEQ ID NO: 3361736 - RNA, 19 nt, Human
ggcagguccccagacucca

SEQ ID NO: 3361737 - RNA, 20 nt, Human
ggcagucugagagaggccau

SEQ ID NO: 3361738 - RNA, 22 nt, Human
ggccaggcugggucgcccugga

SEQ ID NO: 3361739 - RNA, 18 nt, Human
ggccaggcugggucgccc

SEQ ID NO: 3361740 - RNA, 17 nt, Human
ggccccugccagacccc

SEQ ID NO: 3361741 - RNA, 19 nt, Human
ggccccugccagacccccu

SEQ ID NO: 3361742 - RNA, 17 nt, Human
ggccccugagaucucug

SEQ ID NO: 3361743 - RNA, 21 nt, Human
ggccccugagaucucugcagg

SEQ ID NO: 3361744 - RNA, 17 nt, Human
ggaaggaucccaugagc

SEQ ID NO: 3361745 - RNA, 12 nt, Human
ggagcccuggga

SEQ ID NO: 3361746 - RNA, 14 nt, Human
ggaggagggcaggc

SEQ ID NO: 3361747 - RNA, 15 nt, Human
ggaggagggcaggca

SEQ ID NO: 3361748 - RNA, 20 nt, Human
ggaggagggcaggcaucggg

SEQ ID NO: 3361749 - RNA, 16 nt, Human
ggagccgggagccuga

SEQ ID NO: 3361750 - RNA, 13 nt, Human
ggagggcaggcau

SEQ ID NO: 3361751 - RNA, 12 nt, Human
ggagggauuugg

SEQ ID NO: 3361752 - RNA, 13 nt, Human
ggauagaugugug

SEQ ID NO: 3361753 - RNA, 14 nt, Human
ggauagaugugugg

SEQ ID NO: 3361754 - RNA, 15 nt, Human
ggauagaugugugga

SEQ ID NO: 3361755 - RNA, 15 nt, Human
gggggagagggcugc

SEQ ID NO: 3361756 - RNA, 18 nt, Human
ggggugcugggccccugc

SEQ ID NO: 3361757 - RNA, 20 nt, Human
gggguggggggggugcuggg

SEQ ID NO: 3361758 - RNA, 16 nt, Human
gggccugggcaggagg

SEQ ID NO: 3361759 - RNA, 17 nt, Human
gggccugggcaggaggg

SEQ ID NO: 3361760 - RNA, 15 nt, Human
ggggaaaagagauga

SEQ ID NO: 3361761 - RNA, 15 nt, Human
ggggcgcggcuggga

SEQ ID NO: 3361762 - RNA, 16 nt, Human
ggggcgcggcugggag

SEQ ID NO: 3361763 - RNA, 19 nt, Human
ggggcagucugagagaggc

SEQ ID NO: 3361764 - RNA, 18 nt, Human
ggggcagucugagagagg

SEQ ID NO: 3361765 - RNA, 15 nt, Human
ggggcagucugagag

SEQ ID NO: 3361766 - RNA, 18 nt, Human
gguagaucacgagaucaa

SEQ ID NO: 3361767 - RNA, 17 nt, Human
gggugcugggccccugc

SEQ ID NO: 3361768 - RNA, 20 nt, Human
gggucuugguuccagccugc

SEQ ID NO: 3361769 - RNA, 15 nt, Human
ggugguggcucggga

SEQ ID NO: 3361770 - RNA, 22 nt, Human
ggugguucacucuuggagccug

SEQ ID NO: 3361771 - RNA, 23 nt, Human
ggugguucacucuuggagccugc

SEQ ID NO: 3361772 - RNA, 21 nt, Human
gguguccugcaccggggccug

SEQ ID NO: 3361773 - RNA, 17 nt, Human
gguguuuuaaaaaaucu

SEQ ID NO: 3361774 - RNA, 19 nt, Human
gguucacucuuggagccug

SEQ ID NO: 3361775 - RNA, 20 nt, Human
gguucacucuuggagccugc

SEQ ID NO: 3361776 - RNA, 21 nt, Human
gguucacucuuggagccugca

SEQ ID NO: 3361777 - RNA, 23 nt, Human
gguucacucuuggagccugcaga

SEQ ID NO: 3361778 - RNA, 19 nt, Human
ggugaccuuccaagagccu

SEQ ID NO: 3361779 - RNA, 20 nt, Human
ggugaccuuccaagagccug

SEQ ID NO: 3361780 - RNA, 21 nt, Human
ggugaccuuccaagagccuga

SEQ ID NO: 3361781 - RNA, 15 nt, Human
gggaaggaucccaug

SEQ ID NO: 3361782 - RNA, 20 nt, Human
gggaccccuggugguucacu

SEQ ID NO: 3361783 - RNA, 22 nt, Human
ggcuugaguuuaaauuguaaua

SEQ ID NO: 3361784 - RNA, 20 nt, Human
ggccccugccagacccccug

SEQ ID NO: 3361785 - RNA, 14 nt, Human
ggcucuggagccca

SEQ ID NO: 3361786 - RNA, 13 nt, Human
ggcucuggagccc

SEQ ID NO: 3361787 - RNA, 22 nt, Human
ggcugcagccaggccacuggcc

SEQ ID NO: 3361788 - RNA, 16 nt, Human
ggcugcagccaggcca

SEQ ID NO: 3361789 - RNA, 15 nt, Human
ggcugcuuuccaaag

SEQ ID NO: 3361790 - RNA, 20 nt, Human
gggcagucugagagaggcca

SEQ ID NO: 3361791 - RNA, 21 nt, Human
gggcagucugagagaggccau

SEQ ID NO: 3361792 - RNA, 13 nt, Human
gggccugggcagg

SEQ ID NO: 3361793 - RNA, 15 nt, Human
gggccugggcaggag

SEQ ID NO: 3361794 - RNA, 12 nt, Human
gggccugggcag

SEQ ID NO: 3361795 - RNA, 22 nt, Human
gggccccugccucucugcaggu

SEQ ID NO: 3361796 - RNA, 13 nt, Human
gggccccugccag

SEQ ID NO: 3361797 - RNA, 15 nt, Human
gggccccugccucuc

SEQ ID NO: 3361798 - RNA, 13 nt, Human
gggccccugccuc

SEQ ID NO: 3361799 - RNA, 21 nt, Human
gggccccugccucucugcagg

SEQ ID NO: 3361800 - RNA, 19 nt, Human
gggccccugccucucugca

SEQ ID NO: 3361801 - RNA, 18 nt, Human
gggccccugccucucugc

SEQ ID NO: 3361802 - RNA, 17 nt, Human
gggccccugccucucug

SEQ ID NO: 3361803 - RNA, 18 nt, Human
gggcagucugagagaggc

SEQ ID NO: 3361804 - RNA, 19 nt, Human
gggcagucugagagaggcc

SEQ ID NO: 3361805 - RNA, 17 nt, Human
gggcagucugagagagg

SEQ ID NO: 3361806 - RNA, 23 nt, Human
gggaggugcuucuaguucugcca

SEQ ID NO: 3361807 - RNA, 13 nt, Human
gggacugagaaau

SEQ ID NO: 3361808 - RNA, 16 nt, Human
gggaguuuaggguggg

SEQ ID NO: 3361809 - RNA, 11 nt, Human
gggagugugua

SEQ ID NO: 3361810 - RNA, 13 nt, Human
gggauagaugugu

SEQ ID NO: 3361811 - RNA, 14 nt, Human
gggauagaugugug

SEQ ID NO: 3361812 - RNA, 13 nt, Human
uuuuuucuuacug

SEQ ID NO: 3361813 - RNA, 14 nt, Zaire Ebola virus [ZEBOV]
uucgggccagcagc

SEQ ID NO: 3361814 - RNA, 22 nt, Zaire Ebola virus [ZEBOV]
ccggagaagagagugccagcag

SEQ ID NO: 3361815 - RNA, 16 nt, Zaire Ebola virus [ZEBOV]
ucaaacaagagauucc

SEQ ID NO: 3361816 - RNA, 21 nt, Zaire Ebola virus [ZEBOV]
aacuugacaucucugaggcaa

SEQ ID NO: 3361817 - RNA, 17 nt, Zaire Ebola virus [ZEBOV]
uaguauccugauacuug

SEQ ID NO: 3361818 - RNA, 16 nt, Zaire Ebola virus [ZEBOV]
acccuuccggaccagg

SEQ ID NO: 3361819 - RNA, 18 nt, Zaire Ebola virus [ZEBOV]
aaugauaaacuugaugaa

SEQ ID NO: 3361820 - RNA, 13 nt, Zaire Ebola virus [ZEBOV]
agauuauucauga

SEQ ID NO: 3361821 - RNA, 14 nt, Zaire Ebola virus [ZEBOV]
auuugagucuuaau

SEQ ID NO: 3361822 - RNA, 15 nt, Zaire Ebola virus [ZEBOV]
aaugguuaauuguaa

SEQ ID NO: 3361823 - RNA, 16 nt, Zaire Ebola virus [ZEBOV]
cacugacuuccuggac

SEQ ID NO: 3361824 - RNA, 22 nt, Zaire Ebola virus [ZEBOV]
auccugauacuugcaaagguug

SEQ ID NO: 3361825 - RNA, 13 nt, Zaire Ebola virus [ZEBOV]
aaggauugauuga

SEQ ID NO: 3361826 - RNA, 14 nt, Zaire Ebola virus [ZEBOV]
auauauuacuaacu

SEQ ID NO: 3361827 - RNA, 15 nt, Zaire Ebola virus [ZEBOV]
gaucucuuaaaauau

SEQ ID NO: 3361828 - RNA, 16 nt, Zaire Ebola virus [ZEBOV]
cuggcaacaacaacac

SEQ ID NO: 3361829 - RNA, 21 nt, Zaire Ebola virus [ZEBOV]
aguauuucaugacuuacuaau

SEQ ID NO: 3361830 - RNA, 14 nt, Zaire Ebola virus [ZEBOV]
aaugauaaacuuga

SEQ ID NO: 3361831 - RNA, 13 nt, Zaire Ebola virus [ZEBOV]
uuucaauccucaa

SEQ ID NO: 3361832 - RNA, 24 nt, Zaire Ebola virus [ZEBOV]
uaauacacccguguauaaacuuga

SEQ ID NO: 3361833 - RNA, 14 nt, Zaire Ebola virus [ZEBOV]
cgagcaagagcacu

SEQ ID NO: 3361834 - RNA, 19 nt, Zaire Ebola virus [ZEBOV]
aacugaagaccacaaaauc

SEQ ID NO: 3361835 - RNA, 14 nt, Zaire Ebola virus [ZEBOV]
uaaaacccuuccgg

SEQ ID NO: 3361836 - RNA, 24 nt, Zaire Ebola virus [ZEBOV]
gaugauucaaccgacaaauagcua

SEQ ID NO: 3361837 - RNA, 13 nt, Zaire Ebola virus [ZEBOV]
ugacuaaaacacu

SEQ ID NO: 3361838 - RNA, 22 nt, Zaire Ebola virus [ZEBOV]
aauacucauauuucuugauaau

SEQ ID NO: 3361839 - RNA, 22 nt, Zaire Ebola virus [ZEBOV]
ucaaggaagggaagcugcagug

SEQ ID NO: 3361840 - RNA, 17 nt, Zaire Ebola virus [ZEBOV]
ucacaguuaaucauaaa

SEQ ID NO: 3361841 - RNA, 15 nt, Zaire Ebola virus [ZEBOV]
aacaucauagaauug

SEQ ID NO: 3361842 - RNA, 22 nt, Zaire Ebola virus [ZEBOV]
acucuacaggagguagcaacga

SEQ ID NO: 3361843 - RNA, 13 nt, Zaire Ebola virus [ZEBOV]
cuuuuugcccuua

SEQ ID NO: 3361844 - RNA, 14 nt, Zaire Ebola virus [ZEBOV]
acccuaacagugau

SEQ ID NO: 3361845 - RNA, 16 nt, Zaire Ebola virus [ZEBOV]
auuuuugaugucuaag

SEQ ID NO: 3361846 - RNA, 19 nt, Zaire Ebola virus [ZEBOV]
auaaacuugaugaagauua

SEQ ID NO: 3361847 - RNA, 15 nt, Zaire Ebola virus [ZEBOV]
aucaaugaaaccagg

SEQ ID NO: 3361848 - RNA, 19 nt, Zaire Ebola virus [ZEBOV]
caauccaaguacagacauu

SEQ ID NO: 3361849 - RNA, 15 nt, Zaire Ebola virus [ZEBOV]
auuaacauacagauu

SEQ ID NO: 3361850 - RNA, 17 nt, Zaire Ebola virus [ZEBOV]
gcaggacugaucacagg

SEQ ID NO: 3361851 - RNA, 16 nt, Zaire Ebola virus [ZEBOV]
uuuucaaaguucaauu

SEQ ID NO: 3361852 - RNA, 15 nt, Zaire Ebola virus [ZEBOV]
cggacaacagcaccc

SEQ ID NO: 3361853 - RNA, 15 nt, Zaire Ebola virus [ZEBOV]
aguacuauaaucacu

SEQ ID NO: 3361854 - RNA, 18 nt, Zaire Ebola virus [ZEBOV]
ccauauuucgggccagca

SEQ ID NO: 3361855 - RNA, 20 nt, Zaire Ebola virus [ZEBOV]
caaauaauguuuuacucuac

SEQ ID NO: 3361856 - RNA, 18 nt, Zaire Ebola virus [ZEBOV]
uugagacagcuggccaac

SEQ ID NO: 3361857 - RNA, 20 nt, Zaire Ebola virus [ZEBOV]
agcuaggcuuaauuaccaau

SEQ ID NO: 3361858 - RNA, 22 nt, Zaire Ebola virus [ZEBOV]
gcgagaccgcuggcaacaacaa

SEQ ID NO: 3361859 - RNA, 23 nt, Zaire Ebola virus [ZEBOV]
cauaaacaagguuugacaucaau

SEQ ID NO: 3361860 - RNA, 21 nt, Zaire Ebola virus [ZEBOV]
aaacuuauucaguacuauaau

SEQ ID NO: 3361861 - RNA, 23 nt, Zaire Ebola virus [ZEBOV]
aaaaucgggacccauuucuaggu

SEQ ID NO: 3361862 - RNA, 18 nt, Zaire Ebola virus [ZEBOV]
cuucauggaaaagcucag

SEQ ID NO: 3361863 - RNA, 12 nt, Zaire Ebola virus [ZEBOV]
gucaaugcucaa

SEQ ID NO: 3361864 - RNA, 22 nt, Zaire Ebola virus [ZEBOV]
gcugcagcgauggggcggcaca

SEQ ID NO: 3361865 - RNA, 14 nt, Zaire Ebola virus [ZEBOV]
agauauauaagcau

SEQ ID NO: 3361866 - RNA, 21 nt, Zaire Ebola virus [ZEBOV]
cccaaaagcagagaacaccaa

SEQ ID NO: 3361867 - RNA, 14 nt, Zaire Ebola virus [ZEBOV]
ucaaaucaaugaaa

SEQ ID NO: 3361868 - RNA, 19 nt, Zaire Ebola virus [ZEBOV]
aguucaauuugagucuuaa

SEQ ID NO: 3361869 - RNA, 21 nt, Zaire Ebola virus [ZEBOV]
gaccaagauaaaauuguucau

SEQ ID NO: 3361870 - RNA, 17 nt, Zaire Ebola virus [ZEBOV]
cagacaacgacagcaca

SEQ ID NO: 3361871 - RNA, 23 nt, Zaire Ebola virus [ZEBOV]
ccggagaagagagugccagcagc

SEQ ID NO: 3361872 - RNA, 13 nt, Zaire Ebola virus [ZEBOV]
agacagcuggcca

SEQ ID NO: 3361873 - RNA, 18 nt, Zaire Ebola virus [ZEBOV]
agagcacugacuuccugg

SEQ ID NO: 3361874 - RNA, 16 nt, Zaire Ebola virus [ZEBOV]
aucgaaccacaugauu

SEQ ID NO: 3361875 - RNA, 19 nt, Zaire Ebola virus [ZEBOV]
cucuucaacuguuccugag

SEQ ID NO: 3361876 - RNA, 12 nt, Zaire Ebola virus [ZEBOV]
aagguugguuau

SEQ ID NO: 3361877 - RNA, 17 nt, Zaire Ebola virus [ZEBOV]
caaaagugaugaagauu

SEQ ID NO: 3361878 - RNA, 16 nt, Zaire Ebola virus [ZEBOV]
cgacagcacagccucc

SEQ ID NO: 3361879 - RNA, 21 nt, Zaire Ebola virus [ZEBOV]
acaacagcacccauaauacac

SEQ ID NO: 3361880 - RNA, 12 nt, Zaire Ebola virus [ZEBOV]
guuaaucuuucu

SEQ ID NO: 3361881 - RNA, 20 nt, Zaire Ebola virus [ZEBOV]
cacgagcaagagcacugacu

SEQ ID NO: 3361882 - RNA, 18 nt, Zaire Ebola virus [ZEBOV]
caacccuugccacaaucu

SEQ ID NO: 3361883 - RNA, 17 nt, Zaire Ebola virus [ZEBOV]
gauaccggagaagagag

SEQ ID NO: 3361884 - RNA, 15 nt, Zaire Ebola virus [ZEBOV]
acgacagcacagccu

SEQ ID NO: 3361885 - RNA, 18 nt, Zaire Ebola virus [ZEBOV]
acaaguccccaaaaccac

SEQ ID NO: 3361886 - RNA, 16 nt, Zaire Ebola virus [ZEBOV]
gaccagggggacaaug

SEQ ID NO: 3361887 - RNA, 23 nt, Zaire Ebola virus [ZEBOV]
acaacccuaacagugaucaaaga

SEQ ID NO: 3361888 - RNA, 18 nt, Zaire Ebola virus [ZEBOV]
aagagagugccagcagcg

SEQ ID NO: 3361889 - RNA, 19 nt, Zaire Ebola virus [ZEBOV]
agucaaggaagggaagcug

SEQ ID NO: 3361890 - RNA, 15 nt, Zaire Ebola virus [ZEBOV]
cagacaacgacagca

SEQ ID NO: 3361891 - RNA, 21 nt, Zaire Ebola virus [ZEBOV]
cguccauuagaggagacacuu

SEQ ID NO: 3361892 - RNA, 16 nt, Zaire Ebola virus [ZEBOV]
ccccgccaccacaaca

SEQ ID NO: 3361893 - RNA, 18 nt, Zaire Ebola virus [ZEBOV]
cacaaccaaaccaggucc

SEQ ID NO: 3361894 - RNA, 20 nt, Zaire Ebola virus [ZEBOV]
gcaugauugcccuaauauau

SEQ ID NO: 3361895 - RNA, 16 nt, Zaire Ebola virus [ZEBOV]
ucacaaccaaaccagg

SEQ ID NO: 3361896 - RNA, 20 nt, Zaire Ebola virus [ZEBOV]
gguccggacaacagcaccca

SEQ ID NO: 3361897 - RNA, 14 nt, Zaire Ebola virus [ZEBOV]
cauuaaugauacac

SEQ ID NO: 3361898 - RNA, 20 nt, Zaire Ebola virus [ZEBOV]
aaauguaauaggagcuauau

SEQ ID NO: 3361899 - RNA, 22 nt, Zaire Ebola virus [ZEBOV]
aaugauaauauaauacacugga

SEQ ID NO: 3361900 - RNA, 19 nt, Zaire Ebola virus [ZEBOV]
guccccaaucccucacaac

SEQ ID NO: 3361901 - RNA, 11 nt, Zaire Ebola virus [ZEBOV]
aaaaccaggac

SEQ ID NO: 3361902 - RNA, 15 nt, Zaire Ebola virus [ZEBOV]
auuuuaucaccagaa

SEQ ID NO: 3361903 - RNA, 20 nt, Zaire Ebola virus [ZEBOV]
gacacccuuacaaaaaccag

SEQ ID NO: 3361904 - RNA, 22 nt, Zaire Ebola virus [ZEBOV]
aaaaaccaggacucagaauccc

SEQ ID NO: 3361905 - RNA, 16 nt, Zaire Ebola virus [ZEBOV]
gaagagguaugauaca

SEQ ID NO: 3361906 - RNA, 19 nt, Zaire Ebola virus [ZEBOV]
gauucuuguacacaaauaa

SEQ ID NO: 3361907 - RNA, 16 nt, Zaire Ebola virus [ZEBOV]
uugagucuuaaugcaa

SEQ ID NO: 3361908 - RNA, 22 nt, Zaire Ebola virus [ZEBOV]
cauuacuggacuacucaggaug

SEQ ID NO: 3361909 - RNA, 11 nt, Zaire Ebola virus [ZEBOV]
uauaauacacu

SEQ ID NO: 3361910 - RNA, 21 nt, Zaire Ebola virus [ZEBOV]
gaggcgaauaauagcagaggc

SEQ ID NO: 3361911 - RNA, 19 nt, Zaire Ebola virus [ZEBOV]
ggacccccaaaagcagaga

SEQ ID NO: 3361912 - RNA, 12 nt, Zaire Ebola virus [ZEBOV]
auaaaacccuuc

SEQ ID NO: 3361913 - RNA, 16 nt, Zaire Ebola virus [ZEBOV]
aagugauucuuguaca

SEQ ID NO: 3361914 - RNA, 20 nt, Zaire Ebola virus [ZEBOV]
acugaagaccacaaaaucau

SEQ ID NO: 3361915 - RNA, 20 nt, Zaire Ebola virus [ZEBOV]
uuuaaccacagauaaauccu

SEQ ID NO: 3361916 - RNA, 14 nt, Zaire Ebola virus [ZEBOV]
uuacaccauugucu

SEQ ID NO: 3361917 - RNA, 21 nt, Zaire Ebola virus [ZEBOV]
cagcuggccaacgagacgacu

SEQ ID NO: 3361918 - RNA, 19 nt, Zaire Ebola virus [ZEBOV]
acaaaagacucauaauaua

SEQ ID NO: 3361919 - RNA, 20 nt, Zaire Ebola virus [ZEBOV]
accccgccaccacaacaagu

SEQ ID NO: 3361920 - RNA, 16 nt, Zaire Ebola virus [ZEBOV]
uaacagacaaaauuga

SEQ ID NO: 3361921 - RNA, 18 nt, Zaire Ebola virus [ZEBOV]
guacagacauugcccuuc

SEQ ID NO: 3361922 - RNA, 14 nt, Zaire Ebola virus [ZEBOV]
cuguauaugcaaau

SEQ ID NO: 3361923 - RNA, 15 nt, Zaire Ebola virus [ZEBOV]
cacccauaauacacc

SEQ ID NO: 3361924 - RNA, 21 nt, Zaire Ebola virus [ZEBOV]
uuguaacucaauauucuaacu

SEQ ID NO: 3361925 - RNA, 14 nt, Zaire Ebola virus [ZEBOV]
auaauauaauacac

SEQ ID NO: 3361926 - RNA, 18 nt, Zaire Ebola virus [ZEBOV]
aucauagaauugcuuuau

SEQ ID NO: 3361927 - RNA, 17 nt, Zaire Ebola virus [ZEBOV]
cacaaccaaaccagguc

SEQ ID NO: 3361928 - RNA, 22 nt, Zaire Ebola virus [ZEBOV]
agaauugcuuuauuauaugaau

SEQ ID NO: 3361929 - RNA, 20 nt, Zaire Ebola virus [ZEBOV]
caggaugaaggugcugcaau

SEQ ID NO: 3361930 - RNA, 14 nt, Zaire Ebola virus [ZEBOV]
acagcacagccucc

SEQ ID NO: 3361931 - RNA, 16 nt, Zaire Ebola virus [ZEBOV]
gacaaaugauaauaua

SEQ ID NO: 3361932 - RNA, 16 nt, Zaire Ebola virus [ZEBOV]
aagagguaugauacaa

SEQ ID NO: 3361933 - RNA, 15 nt, Zaire Ebola virus [ZEBOV]
cacaugccacauucu

SEQ ID NO: 3361934 - RNA, 22 nt, Zaire Ebola virus [ZEBOV]
acuaaaggugcuuuacaccauu

SEQ ID NO: 3361935 - RNA, 21 nt, Zaire Ebola virus [ZEBOV]
gcucagccucaaaucaaugaa

SEQ ID NO: 3361936 - RNA, 14 nt, Zaire Ebola virus [ZEBOV]
ccucugccacgacc

SEQ ID NO: 3361937 - RNA, 20 nt, Zaire Ebola virus [ZEBOV]
ugguuauuaacauacagauu

SEQ ID NO: 3361938 - RNA, 16 nt, Zaire Ebola virus [ZEBOV]
cucaaaucaaugaaac

SEQ ID NO: 3361939 - RNA, 20 nt, Zaire Ebola virus [ZEBOV]
gaaaauuccucugcaauggu

SEQ ID NO: 3361940 - RNA, 21 nt, Zaire Ebola virus [ZEBOV]
gaauugcuuuauuauaugaau

SEQ ID NO: 3361941 - RNA, 17 nt, Zaire Ebola virus [ZEBOV]
ccagggaccaacacaac

SEQ ID NO: 3361942 - RNA, 23 nt, Zaire Ebola virus [ZEBOV]
caaacggagccaaaaacaucagu

SEQ ID NO: 3361943 - RNA, 14 nt, Zaire Ebola virus [ZEBOV]
agcgauuuaucuaa

SEQ ID NO: 3361944 - RNA, 14 nt, Zaire Ebola virus [ZEBOV]
ucaaccgacaaaua

SEQ ID NO: 3361945 - RNA, 14 nt, Zaire Ebola virus [ZEBOV]
auaaacuugacauc

SEQ ID NO: 3361946 - RNA, 13 nt, Zaire Ebola virus [ZEBOV]
aaagguugguuau

SEQ ID NO: 3361947 - RNA, 21 nt, Zaire Ebola virus [ZEBOV]
uauaugcugacucaauaguua

SEQ ID NO: 3361948 - RNA, 18 nt, Zaire Ebola virus [ZEBOV]
aaucuuucucauugcaca

SEQ ID NO: 3361949 - RNA, 19 nt, Zaire Ebola virus [ZEBOV]
gcgaauaauagcagaggcu

SEQ ID NO: 3361950 - RNA, 22 nt, Zaire Ebola virus [ZEBOV]
uauuaaguaacccaaaccaaaa

SEQ ID NO: 3361951 - RNA, 15 nt, Zaire Ebola virus [ZEBOV]
cauacagauuauaaa

SEQ ID NO: 3361952 - RNA, 16 nt, Zaire Ebola virus [ZEBOV]
auuauaugaauaagca

SEQ ID NO: 3361953 - RNA, 17 nt, Zaire Ebola virus [ZEBOV]
uuauccucaaauugccu

SEQ ID NO: 3361954 - RNA, 16 nt, Zaire Ebola virus [ZEBOV]
aaagguugguuauuaa

SEQ ID NO: 3361955 - RNA, 15 nt, Zaire Ebola virus [ZEBOV]
uuuaucaccagaaau

SEQ ID NO: 3361956 - RNA, 19 nt, Zaire Ebola virus [ZEBOV]
gaccagggggacaaugaca

SEQ ID NO: 3361957 - RNA, 23 nt, Zaire Ebola virus [ZEBOV]
uugcuggagucgcaggacugauc

SEQ ID NO: 3361958 - RNA, 13 nt, Zaire Ebola virus [ZEBOV]
cggagccaaaaac

SEQ ID NO: 3361959 - RNA, 18 nt, Zaire Ebola virus [ZEBOV]
ucuucaacuguuccugag

SEQ ID NO: 3361960 - RNA, 19 nt, Zaire Ebola virus [ZEBOV]
ccauauuucgggccagcag

SEQ ID NO: 3361961 - RNA, 15 nt, Zaire Ebola virus [ZEBOV]
aucuaacaacccuug

SEQ ID NO: 3361962 - RNA, 12 nt, Zaire Ebola virus [ZEBOV]
agcucagccuca

SEQ ID NO: 3361963 - RNA, 14 nt, Zaire Ebola virus [ZEBOV]
aucuauuuaguaau

SEQ ID NO: 3361964 - RNA, 19 nt, Zaire Ebola virus [ZEBOV]
ggacuacucaggaugaagg

SEQ ID NO: 3361965 - RNA, 23 nt, Zaire Ebola virus [ZEBOV]
acaauugguggacaggauggaga

SEQ ID NO: 3361966 - RNA, 15 nt, Zaire Ebola virus [ZEBOV]
auucuguauaugcaa

SEQ ID NO: 3361967 - RNA, 15 nt, Zaire Ebola virus [ZEBOV]
gacuacucaggauga

SEQ ID NO: 3361968 - RNA, 15 nt, Zaire Ebola virus [ZEBOV]
acacucccucugcca

SEQ ID NO: 3361969 - RNA, 14 nt, Zaire Ebola virus [ZEBOV]
gggaagcugcagug

SEQ ID NO: 3361970 - RNA, 19 nt, Zaire Ebola virus [ZEBOV]
caggacucagaaucccuca

SEQ ID NO: 3361971 - RNA, 18 nt, Zaire Ebola virus [ZEBOV]
gccagcagccgagggaau

SEQ ID NO: 3361972 - RNA, 22 nt, Zaire Ebola virus [ZEBOV]
ucacaguuaaucauaaacaagg

SEQ ID NO: 3361973 - RNA, 14 nt, Zaire Ebola virus [ZEBOV]
aauccucacuguaa

SEQ ID NO: 3361974 - RNA, 14 nt, Zaire Ebola virus [ZEBOV]
uguuuuuaaaggau

SEQ ID NO: 3361975 - RNA, 18 nt, Zaire Ebola virus [ZEBOV]
gacaggauggagacaaug

SEQ ID NO: 3361976 - RNA, 21 nt, Zaire Ebola virus [ZEBOV]
ccaaaccagguccggacaaca

SEQ ID NO: 3361977 - RNA, 22 nt, Zaire Ebola virus [ZEBOV]
caaagguugguuauuaacauac

SEQ ID NO: 3361978 - RNA, 22 nt, Zaire Ebola virus [ZEBOV]
acaaauaauccuacuauaauca

SEQ ID NO: 3361979 - RNA, 19 nt, Zaire Ebola virus [ZEBOV]
acaauacuccguauaccua

SEQ ID NO: 3361980 - RNA, 22 nt, Zaire Ebola virus [ZEBOV]
cgacccagggaccaacacaaca

SEQ ID NO: 3361981 - RNA, 14 nt, Zaire Ebola virus [ZEBOV]
caaaagugaugaag

SEQ ID NO: 3361982 - RNA, 15 nt, Zaire Ebola virus [ZEBOV]
cuaauuuacauuacu

SEQ ID NO: 3361983 - RNA, 12 nt, Zaire Ebola virus [ZEBOV]
aauuugucuuuu

SEQ ID NO: 3361984 - RNA, 19 nt, Zaire Ebola virus [ZEBOV]
accacaugauuggaccaag

SEQ ID NO: 3361985 - RNA, 16 nt, Zaire Ebola virus [ZEBOV]
acacucaucaccaaga

SEQ ID NO: 3361986 - RNA, 16 nt, Zaire Ebola virus [ZEBOV]
caccacaacaaguccc

SEQ ID NO: 3361987 - RNA, 20 nt, Zaire Ebola virus [ZEBOV]
gcuuuauucuguauaugcaa

SEQ ID NO: 3361988 - RNA, 21 nt, Zaire Ebola virus [ZEBOV]
agcauaauaaauaaauacuca

SEQ ID NO: 3361989 - RNA, 18 nt, Zaire Ebola virus [ZEBOV]
aacucauauaugcugacu

SEQ ID NO: 3361990 - RNA, 17 nt, Zaire Ebola virus [ZEBOV]
ugcuuacaucugaggau

SEQ ID NO: 3361991 - RNA, 22 nt, Zaire Ebola virus [ZEBOV]
caaugguucaagugcacaguca

SEQ ID NO: 3361992 - RNA, 13 nt, Zaire Ebola virus [ZEBOV]
auaaacuugacau

SEQ ID NO: 3361993 - RNA, 13 nt, Zaire Ebola virus [ZEBOV]
gcuaaugcacaau

SEQ ID NO: 3361994 - RNA, 20 nt, Zaire Ebola virus [ZEBOV]
aacauuagauaaguagauua

SEQ ID NO: 3361995 - RNA, 14 nt, Zaire Ebola virus [ZEBOV]
aaucaagaugguuu

SEQ ID NO: 3361996 - RNA, 20 nt, Zaire Ebola virus [ZEBOV]
aacgaaaacaggaagaauuu

SEQ ID NO: 3361997 - RNA, 22 nt, Zaire Ebola virus [ZEBOV]
cacaaaaucauggcuucagaaa

SEQ ID NO: 3361998 - RNA, 12 nt, Zaire Ebola virus [ZEBOV]
acuugcaaaggu

SEQ ID NO: 3361999 - RNA, 21 nt, Zaire Ebola virus [ZEBOV]
ucacauguguuagguuucaca

SEQ ID NO: 3362000 - RNA, 14 nt, Zaire Ebola virus [ZEBOV]
acagauaaauccuc

SEQ ID NO: 3362001 - RNA, 13 nt, Zaire Ebola virus [ZEBOV]
agcaagagcacug

SEQ ID NO: 3362002 - RNA, 19 nt, Zaire Ebola virus [ZEBOV]
ugccagcagcgggaagcua

SEQ ID NO: 3362003 - RNA, 15 nt, Zaire Ebola virus [ZEBOV]
gaaagaucauaacua

SEQ ID NO: 3362004 - RNA, 15 nt, Zaire Ebola virus [ZEBOV]
gaaugauaaacuuga

SEQ ID NO: 3362005 - RNA, 13 nt, Zaire Ebola virus [ZEBOV]
ucaaugaaaccag

SEQ ID NO: 3362006 - RNA, 23 nt, Zaire Ebola virus [ZEBOV]
aaaauaaguauuucaugacuuac

SEQ ID NO: 3362007 - RNA, 19 nt, Zaire Ebola virus [ZEBOV]
cucacaguuaaucauaaac

SEQ ID NO: 3362008 - RNA, 21 nt, Zaire Ebola virus [ZEBOV]
cuguggguugagacagcuggc

SEQ ID NO: 3362009 - RNA, 17 nt, Zaire Ebola virus [ZEBOV]
uucauaaucagauauau

SEQ ID NO: 3362010 - RNA, 22 nt, Zaire Ebola virus [ZEBOV]
acacaacaacugaagaccacaa

SEQ ID NO: 3362011 - RNA, 12 nt, Zaire Ebola virus [ZEBOV]
aaucuaagauua

SEQ ID NO: 3362012 - RNA, 16 nt, Zaire Ebola virus [ZEBOV]
aaacaagguuugacau

SEQ ID NO: 3362013 - RNA, 20 nt, Zaire Ebola virus [ZEBOV]
acaauccaaguacagacauu

SEQ ID NO: 3362014 - RNA, 19 nt, Zaire Ebola virus [ZEBOV]
ccgacccagggaccaacac

SEQ ID NO: 3362015 - RNA, 13 nt, Zaire Ebola virus [ZEBOV]
cagacauugcccu

SEQ ID NO: 3362016 - RNA, 23 nt, Zaire Ebola virus [ZEBOV]
aauauaugaagagguaugauaca

SEQ ID NO: 3362017 - RNA, 15 nt, Zaire Ebola virus [ZEBOV]
acaaguccccaaaac

SEQ ID NO: 3362018 - RNA, 14 nt, Zaire Ebola virus [ZEBOV]
aaaaucauggcuuc

SEQ ID NO: 3362019 - RNA, 20 nt, Zaire Ebola virus [ZEBOV]
acucaauaguuaucuugaca

SEQ ID NO: 3362020 - RNA, 23 nt, Zaire Ebola virus [ZEBOV]
augauucaaccgacaaauagcua

SEQ ID NO: 3362021 - RNA, 15 nt, Zaire Ebola virus [ZEBOV]
gagucgcaggacuga

SEQ ID NO: 3362022 - RNA, 18 nt, Zaire Ebola virus [ZEBOV]
aaucaauacggugauuca

SEQ ID NO: 3362023 - RNA, 14 nt, Zaire Ebola virus [ZEBOV]
cuuccggaccaggg

SEQ ID NO: 3362024 - RNA, 15 nt, Zaire Ebola virus [ZEBOV]
acaaaauugaucaga

SEQ ID NO: 3362025 - RNA, 22 nt, Zaire Ebola virus [ZEBOV]
aacuuaacaaaagacucauaau

SEQ ID NO: 3362026 - RNA, 18 nt, Zaire Ebola virus [ZEBOV]
gaagggaagcugcagugu

SEQ ID NO: 3362027 - RNA, 21 nt, Zaire Ebola virus [ZEBOV]
caggcguuauaauugcaguua

SEQ ID NO: 3362028 - RNA, 18 nt, Zaire Ebola virus [ZEBOV]
ucaaaucaaugaaaccag

SEQ ID NO: 3362029 - RNA, 23 nt, Zaire Ebola virus [ZEBOV]
cuucauggaaaagcucagccuca

SEQ ID NO: 3362030 - RNA, 18 nt, Zaire Ebola virus [ZEBOV]
auacucguaauuaacauu

SEQ ID NO: 3362031 - RNA, 15 nt, Zaire Ebola virus [ZEBOV]
uuucaaaguucaauu

SEQ ID NO: 3362032 - RNA, 15 nt, Zaire Ebola virus [ZEBOV]
acgcaccuuuucaau

SEQ ID NO: 3362033 - RNA, 15 nt, Zaire Ebola virus [ZEBOV]
uaguauccugauacu

SEQ ID NO: 3362034 - RNA, 21 nt, Zaire Ebola virus [ZEBOV]
auccaguuuuauagaaucuuc

SEQ ID NO: 3362035 - RNA, 19 nt, Zaire Ebola virus [ZEBOV]
auaaacaagguuugacauc

SEQ ID NO: 3362036 - RNA, 18 nt, Zaire Ebola virus [ZEBOV]
auggaaaagcucagccuc

SEQ ID NO: 3362037 - RNA, 21 nt, Zaire Ebola virus [ZEBOV]
aagguugguuauuaacauaca

SEQ ID NO: 3362038 - RNA, 13 nt, Zaire Ebola virus [ZEBOV]
uugcacaaaguga

SEQ ID NO: 3362039 - RNA, 18 nt, Zaire Ebola virus [ZEBOV]
aauugcaguuaucgcuuu

SEQ ID NO: 3362040 - RNA, 21 nt, Zaire Ebola virus [ZEBOV]
acucaauaguuaucuugacau

SEQ ID NO: 3362041 - RNA, 19 nt, Zaire Ebola virus [ZEBOV]
agcacagccuccgacacuc

SEQ ID NO: 3362042 - RNA, 16 nt, Zaire Ebola virus [ZEBOV]
uauuaacauacagauu

SEQ ID NO: 3362043 - RNA, 18 nt, Zaire Ebola virus [ZEBOV]
gacauugcccuucuaauu

SEQ ID NO: 3362044 - RNA, 14 nt, Zaire Ebola virus [ZEBOV]
ucuuaaugcaaaua

SEQ ID NO: 3362045 - RNA, 18 nt, Zaire Ebola virus [ZEBOV]
auagugauaacaucuauu

SEQ ID NO: 3362046 - RNA, 21 nt, Zaire Ebola virus [ZEBOV]
aggcugacuaaaacacuauau

SEQ ID NO: 3362047 - RNA, 16 nt, Zaire Ebola virus [ZEBOV]
ugcccuucuaauuaag

SEQ ID NO: 3362048 - RNA, 14 nt, Zaire Ebola virus [ZEBOV]
ucaaugaaaccagg

SEQ ID NO: 3362049 - RNA, 15 nt, Zaire Ebola virus [ZEBOV]
cauagaauugcuuua

SEQ ID NO: 3362050 - RNA, 16 nt, Zaire Ebola virus [ZEBOV]
ccccaaaaccacagcg

SEQ ID NO: 3362051 - RNA, 21 nt, Zaire Ebola virus [ZEBOV]
cacaaagugauucuuguacac

SEQ ID NO: 3362052 - RNA, 18 nt, Zaire Ebola virus [ZEBOV]
guuuaaccacagauaaau

SEQ ID NO: 3362053 - RNA, 14 nt, Zaire Ebola virus [ZEBOV]
agauugcuucaugg

SEQ ID NO: 3362054 - RNA, 18 nt, Zaire Ebola virus [ZEBOV]
ugcugacucaauaguuau

SEQ ID NO: 3362055 - RNA, 17 nt, Zaire Ebola virus [ZEBOV]
uucugggaccggacugc

SEQ ID NO: 3362056 - RNA, 20 nt, Zaire Ebola virus [ZEBOV]
cauaguauccugauacuugc

SEQ ID NO: 3362057 - RNA, 17 nt, Zaire Ebola virus [ZEBOV]
acaacgacagcacagcc

SEQ ID NO: 3362058 - RNA, 20 nt, Zaire Ebola virus [ZEBOV]
ugauacaacccuaacaguga

SEQ ID NO: 3362059 - RNA, 21 nt, Zaire Ebola virus [ZEBOV]
gcgaacuucuuccgacccagg

SEQ ID NO: 3362060 - RNA, 16 nt, Zaire Ebola virus [ZEBOV]
acaacaucaccgcaga

SEQ ID NO: 3362061 - RNA, 21 nt, Zaire Ebola virus [ZEBOV]
ucuuccgacccagggaccaac

SEQ ID NO: 3362062 - RNA, 20 nt, Zaire Ebola virus [ZEBOV]
cacaacaacugaagaccaca

SEQ ID NO: 3362063 - RNA, 17 nt, Zaire Ebola virus [ZEBOV]
auucuaacuagcgauuu

SEQ ID NO: 3362064 - RNA, 13 nt, Zaire Ebola virus [ZEBOV]
agaguugucuuuc

SEQ ID NO: 3362065 - RNA, 13 nt, Zaire Ebola virus [ZEBOV]
auaauuguaacuc

SEQ ID NO: 3362066 - RNA, 18 nt, Zaire Ebola virus [ZEBOV]
auaaacaagguuugacau

SEQ ID NO: 3362067 - RNA, 17 nt, Zaire Ebola virus [ZEBOV]
cucuugcacaaagugau

SEQ ID NO: 3362068 - RNA, 15 nt, Zaire Ebola virus [ZEBOV]
caacugaagaccaca

SEQ ID NO: 3362069 - RNA, 22 nt, Zaire Ebola virus [ZEBOV]
uuuacacgaucguuuuauaauu

SEQ ID NO: 3362070 - RNA, 14 nt, Zaire Ebola virus [ZEBOV]
ucauaacuaauaac

SEQ ID NO: 3362071 - RNA, 20 nt, Zaire Ebola virus [ZEBOV]
ucaaacggagccaaaaacau

SEQ ID NO: 3362072 - RNA, 15 nt, Zaire Ebola virus [ZEBOV]
augcuuuuauaacuu

SEQ ID NO: 3362073 - RNA, 22 nt, Zaire Ebola virus [ZEBOV]
cuucagaaaauuccucugcaau

SEQ ID NO: 3362074 - RNA, 14 nt, Zaire Ebola virus [ZEBOV]
acgagacgacucaa

SEQ ID NO: 3362075 - RNA, 16 nt, Zaire Ebola virus [ZEBOV]
aaaauugaucagauua

SEQ ID NO: 3362076 - RNA, 20 nt, Zaire Ebola virus [ZEBOV]
acauuaugcuuuuauaacuu

SEQ ID NO: 3362077 - RNA, 21 nt, Zaire Ebola virus [ZEBOV]
cucagggauagugauaacauc

SEQ ID NO: 3362078 - RNA, 16 nt, Zaire Ebola virus [ZEBOV]
agacaaaauugaucag

SEQ ID NO: 3362079 - RNA, 22 nt, Zaire Ebola virus [ZEBOV]
uuuaucuaaauuaaauuacauu

SEQ ID NO: 3362080 - RNA, 12 nt, Zaire Ebola virus [ZEBOV]
aucucugcuuuc

SEQ ID NO: 3362081 - RNA, 15 nt, Zaire Ebola virus [ZEBOV]
caaaaccacagcgag

SEQ ID NO: 3362082 - RNA, 19 nt, Zaire Ebola virus [ZEBOV]
aauuugagucuuaaugcaa

SEQ ID NO: 3362083 - RNA, 19 nt, Zaire Ebola virus [ZEBOV]
uuauuaacauacagauuau

SEQ ID NO: 3362084 - RNA, 13 nt, Zaire Ebola virus [ZEBOV]
auacuugcaaagg

SEQ ID NO: 3362085 - RNA, 13 nt, Zaire Ebola virus [ZEBOV]
gaagcugcagugu

SEQ ID NO: 3362086 - RNA, 17 nt, Zaire Ebola virus [ZEBOV]
aagagagugccagcagc

SEQ ID NO: 3362087 - RNA, 20 nt, Zaire Ebola virus [ZEBOV]
uaguauccugauacuugcaa

SEQ ID NO: 3362088 - RNA, 14 nt, Zaire Ebola virus [ZEBOV]
uccugagagccaca

SEQ ID NO: 3362089 - RNA, 21 nt, Zaire Ebola virus [ZEBOV]
cagacaacgacagcacagccu

SEQ ID NO: 3362090 - RNA, 16 nt, Zaire Ebola virus [ZEBOV]
ugcauaguauccugau

SEQ ID NO: 3362091 - RNA, 17 nt, Zaire Ebola virus [ZEBOV]
uuguucacaauccaagu

SEQ ID NO: 3362092 - RNA, 16 nt, Zaire Ebola virus [ZEBOV]
aacugcugaacuauag

SEQ ID NO: 3362093 - RNA, 18 nt, Zaire Ebola virus [ZEBOV]
agaacaccaacacgagca

SEQ ID NO: 3362094 - RNA, 22 nt, Zaire Ebola virus [ZEBOV]
auaguauccugauacuugcaaa

SEQ ID NO: 3362095 - RNA, 17 nt, Zaire Ebola virus [ZEBOV]
gacaacgacagcacagc

SEQ ID NO: 3362096 - RNA, 14 nt, Zaire Ebola virus [ZEBOV]
cucaauaguuaucu

SEQ ID NO: 3362097 - RNA, 14 nt, Zaire Ebola virus [ZEBOV]
aaauguagaacuua

SEQ ID NO: 3362098 - RNA, 16 nt, Zaire Ebola virus [ZEBOV]
cauaacagacaaaauu

SEQ ID NO: 3362099 - RNA, 23 nt, Zaire Ebola virus [ZEBOV]
cuucuuccgacccagggaccaac

SEQ ID NO: 3362100 - RNA, 16 nt, Zaire Ebola virus [ZEBOV]
ucaaguugaacaacau

SEQ ID NO: 3362101 - RNA, 14 nt, Zaire Ebola virus [ZEBOV]
acaacgacagcaca

SEQ ID NO: 3362102 - RNA, 20 nt, Zaire Ebola virus [ZEBOV]
uaaccacagauaaauccuca

SEQ ID NO: 3362103 - RNA, 14 nt, Zaire Ebola virus [ZEBOV]
uagccaaugugauu

SEQ ID NO: 3362104 - RNA, 20 nt, Zaire Ebola virus [ZEBOV]
aaucucguaucgcucguaau

SEQ ID NO: 3362105 - RNA, 17 nt, Zaire Ebola virus [ZEBOV]
ugcauaguauccugaua

SEQ ID NO: 3362106 - RNA, 19 nt, Zaire Ebola virus [ZEBOV]
acguuacauuaaugauaca

SEQ ID NO: 3362107 - RNA, 21 nt, Zaire Ebola virus [ZEBOV]
accauauuucgggccagcagc

SEQ ID NO: 3362108 - RNA, 21 nt, Zaire Ebola virus [ZEBOV]
ucagaaaauuccucugcaaug

SEQ ID NO: 3362109 - RNA, 21 nt, Zaire Ebola virus [ZEBOV]
uuaacauacagauuauaaaaa

SEQ ID NO: 3362110 - RNA, 17 nt, Zaire Ebola virus [ZEBOV]
aucucugcuuucauaau

SEQ ID NO: 3362111 - RNA, 22 nt, Zaire Ebola virus [ZEBOV]
aucauaaacaagguuugacauc

SEQ ID NO: 3362112 - RNA, 19 nt, Zaire Ebola virus [ZEBOV]
augcaacccuaauuuacau

SEQ ID NO: 3362113 - RNA, 13 nt, Zaire Ebola virus [ZEBOV]
agauauauaagca

SEQ ID NO: 3362114 - RNA, 17 nt, Zaire Ebola virus [ZEBOV]
cacaaucuccacgaguc

SEQ ID NO: 3362115 - RNA, 14 nt, Zaire Ebola virus [ZEBOV]
auagaaucuucuca

SEQ ID NO: 3362116 - RNA, 13 nt, Zaire Ebola virus [ZEBOV]
gaacaacaucacc

SEQ ID NO: 3362117 - RNA, 17 nt, Zaire Ebola virus [ZEBOV]
auuagaggagacacuuu

SEQ ID NO: 3362118 - RNA, 19 nt, Zaire Ebola virus [ZEBOV]
gacaaaauugaucagauua

SEQ ID NO: 3362119 - RNA, 15 nt, Zaire Ebola virus [ZEBOV]
gagcaagagcacuga

SEQ ID NO: 3362120 - RNA, 15 nt, Zaire Ebola virus [ZEBOV]
gccagcagcgggaag

SEQ ID NO: 3362121 - RNA, 17 nt, Zaire Ebola virus [ZEBOV]
accgcagccggaccccc

SEQ ID NO: 3362122 - RNA, 22 nt, Zaire Ebola virus [ZEBOV]
gacaucucugaggcaacucaag

SEQ ID NO: 3362123 - RNA, 18 nt, Zaire Ebola virus [ZEBOV]
uucacagauucuauauau

SEQ ID NO: 3362124 - RNA, 22 nt, Zaire Ebola virus [ZEBOV]
caacacgagcaagagcacugac

SEQ ID NO: 3362125 - RNA, 15 nt, Zaire Ebola virus [ZEBOV]
caaauaauguuuuac

SEQ ID NO: 3362126 - RNA, 12 nt, Zaire Ebola virus [ZEBOV]
uccuggaccccg

SEQ ID NO: 3362127 - RNA, 23 nt, Zaire Ebola virus [ZEBOV]
ccucugccacgaccgcagccgga

SEQ ID NO: 3362128 - RNA, 21 nt, Zaire Ebola virus [ZEBOV]
aucaaacggagccaaaaacau

SEQ ID NO: 3362129 - RNA, 14 nt, Zaire Ebola virus [ZEBOV]
aagagauuccaaga

SEQ ID NO: 3362130 - RNA, 12 nt, Zaire Ebola virus [ZEBOV]
aauagcagaggc

SEQ ID NO: 3362131 - RNA, 18 nt, Zaire Ebola virus [ZEBOV]
ccaagaacauaacagaca

SEQ ID NO: 3362132 - RNA, 19 nt, Zaire Ebola virus [ZEBOV]
agcuuaaaauauaaaugua

SEQ ID NO: 3362133 - RNA, 14 nt, Zaire Ebola virus [ZEBOV]
aguuaucuugacau

SEQ ID NO: 3362134 - RNA, 12 nt, Zaire Ebola virus [ZEBOV]
caaugaaaccag

SEQ ID NO: 3362135 - RNA, 18 nt, Zaire Ebola virus [ZEBOV]
ugcugcaaucggacuggc

SEQ ID NO: 3362136 - RNA, 17 nt, Zaire Ebola virus [ZEBOV]
ugagucuuaaugcaaau

SEQ ID NO: 3362137 - RNA, 21 nt, Zaire Ebola virus [ZEBOV]
aacaucaccgcagaacagaca

SEQ ID NO: 3362138 - RNA, 18 nt, Zaire Ebola virus [ZEBOV]
caaucggacuggccugga

SEQ ID NO: 3362139 - RNA, 17 nt, Zaire Ebola virus [ZEBOV]
aacucuauacucguaau

SEQ ID NO: 3362140 - RNA, 23 nt, Zaire Ebola virus [ZEBOV]
cuugcaaagguugguuauuaaca

SEQ ID NO: 3362141 - RNA, 14 nt, Zaire Ebola virus [ZEBOV]
ucacuguaagccag

SEQ ID NO: 3362142 - RNA, 16 nt, Zaire Ebola virus [ZEBOV]
caaucccucacaacca

SEQ ID NO: 3362143 - RNA, 15 nt, Zaire Ebola virus [ZEBOV]
gaacucgaagagaag

SEQ ID NO: 3362144 - RNA, 23 nt, Zaire Ebola virus [ZEBOV]
aucgcuuuauucuguauaugcaa

SEQ ID NO: 3362145 - RNA, 17 nt, Zaire Ebola virus [ZEBOV]
uccugauacuugcaaag

SEQ ID NO: 3362146 - RNA, 17 nt, Zaire Ebola virus [ZEBOV]
cuaacucauauaugcug

SEQ ID NO: 3362147 - RNA, 21 nt, Zaire Ebola virus [ZEBOV]
agguuucacagauucuauaua

SEQ ID NO: 3362148 - RNA, 10 nt, Zaire Ebola virus [ZEBOV]
cuucagauug

SEQ ID NO: 3362149 - RNA, 18 nt, Zaire Ebola virus [ZEBOV]
ucauaacuaauaacauua

SEQ ID NO: 3362150 - RNA, 15 nt, Zaire Ebola virus [ZEBOV]
cugauacuugcaaag

SEQ ID NO: 3362151 - RNA, 23 nt, Zaire Ebola virus [ZEBOV]
caaaaacaucaguggucagaguc

SEQ ID NO: 3362152 - RNA, 19 nt, Zaire Ebola virus [ZEBOV]
uauaacuuaccuacuagcc

SEQ ID NO: 3362153 - RNA, 19 nt, Zaire Ebola virus [ZEBOV]
cauauuucgggccagcagc

SEQ ID NO: 3362154 - RNA, 18 nt, Zaire Ebola virus [ZEBOV]
acccaaaccaaaagugau

SEQ ID NO: 3362155 - RNA, 15 nt, Zaire Ebola virus [ZEBOV]
aacuuauucaguacu

SEQ ID NO: 3362156 - RNA, 22 nt, Zaire Ebola virus [ZEBOV]
aaaugcaacccuaauuuacauu

SEQ ID NO: 3362157 - RNA, 23 nt, Zaire Ebola virus [ZEBOV]
ucucugcuuucauaaucagauau

SEQ ID NO: 3362158 - RNA, 16 nt, Zaire Ebola virus [ZEBOV]
gguuauuaacauacag

SEQ ID NO: 3362159 - RNA, 16 nt, Zaire Ebola virus [ZEBOV]
auccugauacuugcaa

SEQ ID NO: 3362160 - RNA, 21 nt, Zaire Ebola virus [ZEBOV]
cgcaucuaacaacccuugcca

SEQ ID NO: 3362161 - RNA, 18 nt, Zaire Ebola virus [ZEBOV]
aacaaugggaugauucaa

SEQ ID NO: 3362162 - RNA, 14 nt, Zaire Ebola virus [ZEBOV]
acaaccaaaccagg

SEQ ID NO: 3362163 - RNA, 14 nt, Zaire Ebola virus [ZEBOV]
ccggacaacagcac

SEQ ID NO: 3362164 - RNA, 18 nt, Zaire Ebola virus [ZEBOV]
guugguuauuaacauaca

SEQ ID NO: 3362165 - RNA, 15 nt, Zaire Ebola virus [ZEBOV]
ucacaaccaaaccag

SEQ ID NO: 3362166 - RNA, 17 nt, Zaire Ebola virus [ZEBOV]
aauuaauaagaugugca

SEQ ID NO: 3362167 - RNA, 16 nt, Zaire Ebola virus [ZEBOV]
guauaaacuugacauc

SEQ ID NO: 3362168 - RNA, 16 nt, Zaire Ebola virus [ZEBOV]
acaugauuggaccaag

SEQ ID NO: 3362169 - RNA, 17 nt, Zaire Ebola virus [ZEBOV]
auucuuauuuuugaauu

SEQ ID NO: 3362170 - RNA, 19 nt, Zaire Ebola virus [ZEBOV]
agauuacuugacaaaugau

SEQ ID NO: 3362171 - RNA, 18 nt, Zaire Ebola virus [ZEBOV]
agcauaauaaauaaauac

SEQ ID NO: 3362172 - RNA, 13 nt, Zaire Ebola virus [ZEBOV]
caacgacagcaca

SEQ ID NO: 3362173 - RNA, 12 nt, Zaire Ebola virus [ZEBOV]
uuauuacuagcc

SEQ ID NO: 3362174 - RNA, 21 nt, Zaire Ebola virus [ZEBOV]
uaagauuacuugacaaaugau

SEQ ID NO: 3362175 - RNA, 16 nt, Zaire Ebola virus [ZEBOV]
auugucuuuuuucucu

SEQ ID NO: 3362176 - RNA, 22 nt, Zaire Ebola virus [ZEBOV]
accauauuucgggccagcagcc

SEQ ID NO: 3362177 - RNA, 13 nt, Zaire Ebola virus [ZEBOV]
ugauuggaccaag

SEQ ID NO: 3362178 - RNA, 14 nt, Zaire Ebola virus [ZEBOV]
ugaauuuaaagcua

SEQ ID NO: 3362179 - RNA, 15 nt, Zaire Ebola virus [ZEBOV]
auaauuguaacucaa

SEQ ID NO: 3362180 - RNA, 17 nt, Zaire Ebola virus [ZEBOV]
agccauaauuguaacuc

SEQ ID NO: 3362181 - RNA, 20 nt, Zaire Ebola virus [ZEBOV]
caagauaccggagaagagag

SEQ ID NO: 3362182 - RNA, 17 nt, Zaire Ebola virus [ZEBOV]
ucuccuaaauguagaac

SEQ ID NO: 3362183 - RNA, 15 nt, Zaire Ebola virus [ZEBOV]
ucagccucaaaucaa

SEQ ID NO: 3362184 - RNA, 17 nt, Zaire Ebola virus [ZEBOV]
guccccaaaaccacagc

SEQ ID NO: 3362185 - RNA, 15 nt, Zaire Ebola virus [ZEBOV]
gaacagacaacgaca

SEQ ID NO: 3362186 - RNA, 22 nt, Zaire Ebola virus [ZEBOV]
uuggauuggaaauguggagaaa

SEQ ID NO: 3362187 - RNA, 16 nt, Zaire Ebola virus [ZEBOV]
aagaacauaacagaca

SEQ ID NO: 3362188 - RNA, 21 nt, Zaire Ebola virus [ZEBOV]
guauccugauacuugcaaagg

SEQ ID NO: 3362189 - RNA, 14 nt, Zaire Ebola virus [ZEBOV]
cuuccgacccaggg

SEQ ID NO: 3362190 - RNA, 16 nt, Zaire Ebola virus [ZEBOV]
cuuaauuaccaauacu

SEQ ID NO: 3362191 - RNA, 16 nt, Zaire Ebola virus [ZEBOV]
uuucauaaucagauau

SEQ ID NO: 3362192 - RNA, 17 nt, Zaire Ebola virus [ZEBOV]
ucuauuuaguaauccgu

SEQ ID NO: 3362193 - RNA, 19 nt, Zaire Ebola virus [ZEBOV]
gcuucauggaaaagcucag

SEQ ID NO: 3362194 - RNA, 19 nt, Zaire Ebola virus [ZEBOV]
auacucauauuucuugaua

SEQ ID NO: 3362195 - RNA, 22 nt, Zaire Ebola virus [ZEBOV]
cacauucugggaccggacugcu

SEQ ID NO: 3362196 - RNA, 14 nt, Zaire Ebola virus [ZEBOV]
aguuauagccauaa

SEQ ID NO: 3362197 - RNA, 13 nt, Zaire Ebola virus [ZEBOV]
cucagccucaaau

SEQ ID NO: 3362198 - RNA, 15 nt, Zaire Ebola virus [ZEBOV]
cacagcgagaccgcu

SEQ ID NO: 3362199 - RNA, 13 nt, Zaire Ebola virus [ZEBOV]
agcucagccucaa

SEQ ID NO: 3362200 - RNA, 15 nt, Zaire Ebola virus [ZEBOV]
gucaaggaagggaag

SEQ ID NO: 3362201 - RNA, 17 nt, Zaire Ebola virus [ZEBOV]
aggcguuauaauugcag

SEQ ID NO: 3362202 - RNA, 21 nt, Zaire Ebola virus [ZEBOV]
auuuuaucaccagaaauccua

SEQ ID NO: 3362203 - RNA, 15 nt, Zaire Ebola virus [ZEBOV]
acucaagcucuucaa

SEQ ID NO: 3362204 - RNA, 15 nt, Zaire Ebola virus [ZEBOV]
acaucucugcuuuca

SEQ ID NO: 3362205 - RNA, 13 nt, Zaire Ebola virus [ZEBOV]
cacaaucaagaug

SEQ ID NO: 3362206 - RNA, 23 nt, Zaire Ebola virus [ZEBOV]
auauaaccugccaagcauaccuc

SEQ ID NO: 3362207 - RNA, 19 nt, Zaire Ebola virus [ZEBOV]
aggauuuaauuauauggau

SEQ ID NO: 3362208 - RNA, 21 nt, Zaire Ebola virus [ZEBOV]
guccccaaucccucacaacca

SEQ ID NO: 3362209 - RNA, 20 nt, Zaire Ebola virus [ZEBOV]
ugauucuuauuuuugaauuu

SEQ ID NO: 3362210 - RNA, 15 nt, Zaire Ebola virus [ZEBOV]
cgcagccggaccccc

SEQ ID NO: 3362211 - RNA, 18 nt, Zaire Ebola virus [ZEBOV]
cagccggacccccaaaag

SEQ ID NO: 3362212 - RNA, 16 nt, Zaire Ebola virus [ZEBOV]
cacgagcaagagcacu

SEQ ID NO: 3362213 - RNA, 15 nt, Zaire Ebola virus [ZEBOV]
uggagacaauggaua

SEQ ID NO: 3362214 - RNA, 12 nt, Zaire Ebola virus [ZEBOV]
acagacaaaauu

SEQ ID NO: 3362215 - RNA, 13 nt, Zaire Ebola virus [ZEBOV]
agugccagcagcg

SEQ ID NO: 3362216 - RNA, 22 nt, Zaire Ebola virus [ZEBOV]
agacaacgacagcacagccucc

SEQ ID NO: 3362217 - RNA, 21 nt, Zaire Ebola virus [ZEBOV]
gcuuuacaccauugucuuuuu

SEQ ID NO: 3362218 - RNA, 16 nt, Zaire Ebola virus [ZEBOV]
acaugccacauucugg

SEQ ID NO: 3362219 - RNA, 18 nt, Zaire Ebola virus [ZEBOV]
uuuaucaccagaaauccu

SEQ ID NO: 3362220 - RNA, 13 nt, Zaire Ebola virus [ZEBOV]
uuauucaugauuu

SEQ ID NO: 3362221 - RNA, 15 nt, Zaire Ebola virus [ZEBOV]
gcacagucaaggaag

SEQ ID NO: 3362222 - RNA, 20 nt, Zaire Ebola virus [ZEBOV]
ccucugccacgaccgcagcc

SEQ ID NO: 3362223 - RNA, 20 nt, Zaire Ebola virus [ZEBOV]
uguaucgaaccacaugauug

SEQ ID NO: 3362224 - RNA, 15 nt, Zaire Ebola virus [ZEBOV]
gaauuauuaucacaa

SEQ ID NO: 3362225 - RNA, 20 nt, Zaire Ebola virus [ZEBOV]
gacaucucugcuuucauaau

SEQ ID NO: 3362226 - RNA, 22 nt, Zaire Ebola virus [ZEBOV]
agugaagaguugucuuucacag

SEQ ID NO: 3362227 - RNA, 19 nt, Zaire Ebola virus [ZEBOV]
acauuaaugauacacuugu

SEQ ID NO: 3362228 - RNA, 22 nt, Zaire Ebola virus [ZEBOV]
cacaacaaguccccaaaaccac

SEQ ID NO: 3362229 - RNA, 21 nt, Zaire Ebola virus [ZEBOV]
caacaaguccccaaaaccaca

SEQ ID NO: 3362230 - RNA, 19 nt, Zaire Ebola virus [ZEBOV]
caauacuccguauaccuau

SEQ ID NO: 3362231 - RNA, 23 nt, Zaire Ebola virus [ZEBOV]
ggagucgcaggacugaucacagg

SEQ ID NO: 3362232 - RNA, 21 nt, Zaire Ebola virus [ZEBOV]
agcauuuuaucaccagaaauc

SEQ ID NO: 3362233 - RNA, 18 nt, Zaire Ebola virus [ZEBOV]
guaagccagcuuccaagu

SEQ ID NO: 3362234 - RNA, 19 nt, Zaire Ebola virus [ZEBOV]
agcucuucaacuguuccug

SEQ ID NO: 3362235 - RNA, 22 nt, Barmah Forest virus
aaaacuaaauaaaaauuuagaa

SEQ ID NO: 3362236 - RNA, 14 nt, Barmah Forest virus
aaaagucaagauga

SEQ ID NO: 3362237 - RNA, 14 nt, Barmah Forest virus
aaaccaaaaaagac

SEQ ID NO: 3362238 - RNA, 16 nt, Barmah Forest virus
aacauaccgaucagua

SEQ ID NO: 3362239 - RNA, 17 nt, Barmah Forest virus
aacauggaggucaagau

SEQ ID NO: 3362240 - RNA, 19 nt, Barmah Forest virus
aacguaugcguaacugcau

SEQ ID NO: 3362241 - RNA, 16 nt, Barmah Forest virus
aagaaaccaacccaaa

SEQ ID NO: 3362242 - RNA, 15 nt, Barmah Forest virus
aagcaccgauccaaa

SEQ ID NO: 3362243 - RNA, 23 nt, Barmah Forest virus
aagguacugcuacgaacaaaauc

SEQ ID NO: 3362244 - RNA, 22 nt, Barmah Forest virus
aaguauuaugaauuacuugacu

SEQ ID NO: 3362245 - RNA, 19 nt, Barmah Forest virus
aaucagacgcauccaaguu

SEQ ID NO: 3362246 - RNA, 22 nt, Barmah Forest virus
aauucaugcaccaaaguuggau

SEQ ID NO: 3362247 - RNA, 12 nt, Barmah Forest virus
aauugacauuca

SEQ ID NO: 3362248 - RNA, 12 nt, Barmah Forest virus
acaaaagagaaa

SEQ ID NO: 3362249 - RNA, 13 nt, Barmah Forest virus
acaacagcaccau

SEQ ID NO: 3362250 - RNA, 13 nt, Barmah Forest virus
acacaaaaaugaa

SEQ ID NO: 3362251 - RNA, 19 nt, Barmah Forest virus
acacagaugagagaacuac

SEQ ID NO: 3362252 - RNA, 11 nt, Barmah Forest virus
acagcaccaug

SEQ ID NO: 3362253 - RNA, 19 nt, Barmah Forest virus
accaacccaaaagaagaag

SEQ ID NO: 3362254 - RNA, 23 nt, Barmah Forest virus
accaugcuguuacgaaaaagacc

SEQ ID NO: 3362255 - RNA, 15 nt, Barmah Forest virus
accccaaguauuaug

SEQ ID NO: 3362256 - RNA, 13 nt, Barmah Forest virus
accuggagacagu

SEQ ID NO: 3362257 - RNA, 13 nt, Barmah Forest virus
accuuacaaaaug

SEQ ID NO: 3362258 - RNA, 22 nt, Barmah Forest virus
acgaugaaggauucugugcagg

SEQ ID NO: 3362259 - RNA, 14 nt, Barmah Forest virus
acgauggagaccag

SEQ ID NO: 3362260 - RNA, 16 nt, Barmah Forest virus
acgcagccaaacacaa

SEQ ID NO: 3362261 - RNA, 23 nt, Barmah Forest virus
acggcguacugaagauccaagug

SEQ ID NO: 3362262 - RNA, 23 nt, Barmah Forest virus
acgggcucuggcaaaccuggaga

SEQ ID NO: 3362263 - RNA, 19 nt, Barmah Forest virus
agaaaucuagcaaguauga

SEQ ID NO: 3362264 - RNA, 16 nt, Barmah Forest virus
agaagcccaagaagac

SEQ ID NO: 3362265 - RNA, 21 nt, Barmah Forest virus
agacgauggagaccagcacca

SEQ ID NO: 3362266 - RNA, 13 nt, Barmah Forest virus
agagagaccaaag

SEQ ID NO: 3362267 - RNA, 18 nt, Barmah Forest virus
agagcacagaagaagccc

SEQ ID NO: 3362268 - RNA, 14 nt, Barmah Forest virus
agauagaugugcca

SEQ ID NO: 3362269 - RNA, 15 nt, Barmah Forest virus
agaugacaacauaau

SEQ ID NO: 3362270 - RNA, 22 nt, Barmah Forest virus
agaugacaacauaauccauggu

SEQ ID NO: 3362271 - RNA, 20 nt, Barmah Forest virus
agauuacaaugcauguaccg

SEQ ID NO: 3362272 - RNA, 16 nt, Barmah Forest virus
agcaccaguccagaga

SEQ ID NO: 3362273 - RNA, 12 nt, Barmah Forest virus
agcaccauguga

SEQ ID NO: 3362274 - RNA, 14 nt, Barmah Forest virus
agcucuacaaccca

SEQ ID NO: 3362275 - RNA, 23 nt, Barmah Forest virus
agcugucuggacagauccuccuu

SEQ ID NO: 3362276 - RNA, 15 nt, Barmah Forest virus
aggacauuacaacug

SEQ ID NO: 3362277 - RNA, 23 nt, Barmah Forest virus
agguacugcuacgaacaaaauca

SEQ ID NO: 3362278 - RNA, 21 nt, Barmah Forest virus
aguaacaaaaaucaaaaacua

SEQ ID NO: 3362279 - RNA, 20 nt, Barmah Forest virus
agucacuucauauaaaauua

SEQ ID NO: 3362280 - RNA, 13 nt, Barmah Forest virus
aguccccagcacc

SEQ ID NO: 3362281 - RNA, 14 nt, Barmah Forest virus
aguccccagcaccc

SEQ ID NO: 3362282 - RNA, 21 nt, Barmah Forest virus
aguguauuacauaugcagugg

SEQ ID NO: 3362283 - RNA, 13 nt, Barmah Forest virus
aguucaaagggcc

SEQ ID NO: 3362284 - RNA, 22 nt, Barmah Forest virus
auaaccaccgaaaaugucacca

SEQ ID NO: 3362285 - RNA, 12 nt, Barmah Forest virus
auacggccaccu

SEQ ID NO: 3362286 - RNA, 20 nt, Barmah Forest virus
auagccucuuuugacaaaag

SEQ ID NO: 3362287 - RNA, 22 nt, Barmah Forest virus
auaguauuacaggaauuaguau

SEQ ID NO: 3362288 - RNA, 17 nt, Barmah Forest virus
auauaaccccugaauag

SEQ ID NO: 3362289 - RNA, 17 nt, Barmah Forest virus
auaugaaagcagagauc

SEQ ID NO: 3362290 - RNA, 16 nt, Barmah Forest virus
auaugaagagagaugu

SEQ ID NO: 3362291 - RNA, 17 nt, Barmah Forest virus
auccguuuuacaaaauu

SEQ ID NO: 3362292 - RNA, 18 nt, Barmah Forest virus
auccuauugcuguagaaa

SEQ ID NO: 3362293 - RNA, 21 nt, Barmah Forest virus
aucuacgaaccggcaaaacua

SEQ ID NO: 3362294 - RNA, 14 nt, Barmah Forest virus
aucucaacuccaac

SEQ ID NO: 3362295 - RNA, 17 nt, Barmah Forest virus
augacaacauaauccau

SEQ ID NO: 3362296 - RNA, 24 nt, Barmah Forest virus
augagagaacuaccaacauaugau

SEQ ID NO: 3362297 - RNA, 22 nt, Barmah Forest virus
augccguacaccauucucccac

SEQ ID NO: 3362298 - RNA, 23 nt, Barmah Forest virus
augguauaauaucagacaaauug

SEQ ID NO: 3362299 - RNA, 20 nt, Barmah Forest virus
augucacacagaugagagaa

SEQ ID NO: 3362300 - RNA, 12 nt, Barmah Forest virus
augucuggggaa

SEQ ID NO: 3362301 - RNA, 14 nt, Barmah Forest virus
auuaguauagucau

SEQ ID NO: 3362302 - RNA, 17 nt, Barmah Forest virus
auucccugcaaaacuua

SEQ ID NO: 3362303 - RNA, 23 nt, Barmah Forest virus
caaaaccaaaaaagacccagaag

SEQ ID NO: 3362304 - RNA, 14 nt, Barmah Forest virus
caaaccuggagaca

SEQ ID NO: 3362305 - RNA, 21 nt, Barmah Forest virus
caaauuuggagcuaugaugaa

SEQ ID NO: 3362306 - RNA, 15 nt, Barmah Forest virus
caaccaccagcgccu

SEQ ID NO: 3362307 - RNA, 20 nt, Barmah Forest virus
caagaugauuccauggcacu

SEQ ID NO: 3362308 - RNA, 24 nt, Barmah Forest virus
caagcuagguaagccauugccacu

SEQ ID NO: 3362309 - RNA, 14 nt, Barmah Forest virus
caaguugaaaggac

SEQ ID NO: 3362310 - RNA, 19 nt, Barmah Forest virus
cacccaugagcaagacaau

SEQ ID NO: 3362311 - RNA, 21 nt, Barmah Forest virus
cacccuauguaccccacccuc

SEQ ID NO: 3362312 - RNA, 16 nt, Barmah Forest virus
cacgccguaggagagg

SEQ ID NO: 3362313 - RNA, 22 nt, Barmah Forest virus
cacucauacuuggacccacaga

SEQ ID NO: 3362314 - RNA, 16 nt, Barmah Forest virus
cacucaucagaacuag

SEQ ID NO: 3362315 - RNA, 12 nt, Barmah Forest virus
cacugcccacaa

SEQ ID NO: 3362316 - RNA, 14 nt, Barmah Forest virus
cacuugcccacagg

SEQ ID NO: 3362317 - RNA, 19 nt, Barmah Forest virus
cagacaaauugauggcaga

SEQ ID NO: 3362318 - RNA, 23 nt, Barmah Forest virus
cagggccacucaccauacuugug

SEQ ID NO: 3362319 - RNA, 13 nt, Barmah Forest virus
caguccagagaua

SEQ ID NO: 3362320 - RNA, 23 nt, Barmah Forest virus
cauaccccaaccccaaccaccag

SEQ ID NO: 3362321 - RNA, 17 nt, Barmah Forest virus
cauagucucacauuacu

SEQ ID NO: 3362322 - RNA, 17 nt, Barmah Forest virus
cauaguuaguguagaaa

SEQ ID NO: 3362323 - RNA, 12 nt, Barmah Forest virus
cauaugcagugg

SEQ ID NO: 3362324 - RNA, 16 nt, Barmah Forest virus
cauauuaccccugaau

SEQ ID NO: 3362325 - RNA, 21 nt, Barmah Forest virus
cauccaaguucacccaugaga

SEQ ID NO: 3362326 - RNA, 20 nt, Barmah Forest virus
caugcgaggcugaccaugcc

SEQ ID NO: 3362327 - RNA, 15 nt, Barmah Forest virus
caugugcaccaugcu

SEQ ID NO: 3362328 - RNA, 15 nt, Barmah Forest virus
cauuacaugaugaag

SEQ ID NO: 3362329 - RNA, 19 nt, Barmah Forest virus
cauucaagaaaucuagcaa

SEQ ID NO: 3362330 - RNA, 21 nt, Barmah Forest virus
ccaaaagaaacuguaauguca

SEQ ID NO: 3362331 - RNA, 20 nt, Barmah Forest virus
ccaaaguuggauaaaaccaa

SEQ ID NO: 3362332 - RNA, 19 nt, Barmah Forest virus
ccaagaugaagacagaaga

SEQ ID NO: 3362333 - RNA, 17 nt, Barmah Forest virus
ccaagggcuagugucca

SEQ ID NO: 3362334 - RNA, 18 nt, Barmah Forest virus
ccaaguucacccaugaga

SEQ ID NO: 3362335 - RNA, 21 nt, Barmah Forest virus
ccaaguucacccaugagaaac

SEQ ID NO: 3362336 - RNA, 15 nt, Barmah Forest virus
ccauauuaccccuga

SEQ ID NO: 3362337 - RNA, 17 nt, Barmah Forest virus
ccccaaccccaaccacc

SEQ ID NO: 3362338 - RNA, 15 nt, Barmah Forest virus
ccgaagagagaccaa

SEQ ID NO: 3362339 - RNA, 18 nt, Barmah Forest virus
ccuaagauugcugucuga

SEQ ID NO: 3362340 - RNA, 17 nt, Barmah Forest virus
ccucagaggucugucua

SEQ ID NO: 3362341 - RNA, 16 nt, Barmah Forest virus
ccugggaguagaccaa

SEQ ID NO: 3362342 - RNA, 19 nt, Barmah Forest virus
ccuucagaaacauaagagg

SEQ ID NO: 3362343 - RNA, 23 nt, Barmah Forest virus
cgaaguuacggaggugaaaggaa

SEQ ID NO: 3362344 - RNA, 13 nt, Barmah Forest virus
cgacaauccagaa

SEQ ID NO: 3362345 - RNA, 14 nt, Barmah Forest virus
cgaccaugggccau

SEQ ID NO: 3362346 - RNA, 15 nt, Barmah Forest virus
cgauggagaccagca

SEQ ID NO: 3362347 - RNA, 22 nt, Barmah Forest virus
cggaggugaaaggaaagaucca

SEQ ID NO: 3362348 - RNA, 22 nt, Barmah Forest virus
cgguaccgucaccauuccaaaa

SEQ ID NO: 3362349 - RNA, 14 nt, Barmah Forest virus
cuacagcagagauc

SEQ ID NO: 3362350 - RNA, 15 nt, Barmah Forest virus
cuauuuuugacaaua

SEQ ID NO: 3362351 - RNA, 13 nt, Barmah Forest virus
cucccaucagaca

SEQ ID NO: 3362352 - RNA, 12 nt, Barmah Forest virus
cucggaaaggau

SEQ ID NO: 3362353 - RNA, 13 nt, Barmah Forest virus
cucuuuugacaaa

SEQ ID NO: 3362354 - RNA, 22 nt, Barmah Forest virus
cuuccacccuauguaccccacc

SEQ ID NO: 3362355 - RNA, 16 nt, Barmah Forest virus
gaaaauaugaaagcag

SEQ ID NO: 3362356 - RNA, 15 nt, Barmah Forest virus
gaaaccaacccaaaa

SEQ ID NO: 3362357 - RNA, 17 nt, Barmah Forest virus
gaaacuguaaugucaca

SEQ ID NO: 3362358 - RNA, 21 nt, Barmah Forest virus
gaacucuacggagauguagga

SEQ ID NO: 3362359 - RNA, 20 nt, Barmah Forest virus
gaagaccguuaugccgucca

SEQ ID NO: 3362360 - RNA, 23 nt, Barmah Forest virus
gaagacgugcauuacaugaugaa

SEQ ID NO: 3362361 - RNA, 14 nt, Barmah Forest virus
gaagauccaagugu

SEQ ID NO: 3362362 - RNA, 23 nt, Barmah Forest virus
gaagauccaaguguccaugcaga

SEQ ID NO: 3362363 - RNA, 14 nt, Barmah Forest virus
gaagccuaagaaac

SEQ ID NO: 3362364 - RNA, 16 nt, Barmah Forest virus
gacaauccagaacuag

SEQ ID NO: 3362365 - RNA, 20 nt, Barmah Forest virus
gacagacuuaacgagagaag

SEQ ID NO: 3362366 - RNA, 13 nt, Barmah Forest virus
gacccagaagccu

SEQ ID NO: 3362367 - RNA, 23 nt, Barmah Forest virus
gacccgcauaacaccugaagaau

SEQ ID NO: 3362368 - RNA, 21 nt, Barmah Forest virus
gacgauggccaagaugaagac

SEQ ID NO: 3362369 - RNA, 13 nt, Barmah Forest virus
gagcacagaagaa

SEQ ID NO: 3362370 - RNA, 23 nt, Barmah Forest virus
gagcuaugaugaagucuggaaug

SEQ ID NO: 3362371 - RNA, 13 nt, Barmah Forest virus
gaggaccugggag

SEQ ID NO: 3362372 - RNA, 23 nt, Barmah Forest virus
gauaucuuaaggagcaaguacca

SEQ ID NO: 3362373 - RNA, 12 nt, Barmah Forest virus
gauaugaagaga

SEQ ID NO: 3362374 - RNA, 13 nt, Barmah Forest virus
gauucugcagugc

SEQ ID NO: 3362375 - RNA, 14 nt, Barmah Forest virus
gcaaacaaaagcag

SEQ ID NO: 3362376 - RNA, 16 nt, Barmah Forest virus
gcaagugacauacaga

SEQ ID NO: 3362377 - RNA, 22 nt, Barmah Forest virus
gcaaugaaaaguccccagcacc

SEQ ID NO: 3362378 - RNA, 17 nt, Barmah Forest virus
gcacagaagaagcccaa

SEQ ID NO: 3362379 - RNA, 15 nt, Barmah Forest virus
gcacgucuggaguga

SEQ ID NO: 3362380 - RNA, 15 nt, Barmah Forest virus
gcacgugugcaguca

SEQ ID NO: 3362381 - RNA, 22 nt, Barmah Forest virus
gcacuauguguccuccagaacu

SEQ ID NO: 3362382 - RNA, 17 nt, Barmah Forest virus
gcagacccacugaagag

SEQ ID NO: 3362383 - RNA, 18 nt, Barmah Forest virus
gccagacguaugggauga

SEQ ID NO: 3362384 - RNA, 18 nt, Barmah Forest virus
ggagacaguccagccaga

SEQ ID NO: 3362385 - RNA, 13 nt, Barmah Forest virus
ggcacaagacccg

SEQ ID NO: 3362386 - RNA, 19 nt, Barmah Forest virus
ggcaccauggggcagugca

SEQ ID NO: 3362387 - RNA, 19 nt, Barmah Forest virus
ggccaagaugaagacagaa

SEQ ID NO: 3362388 - RNA, 18 nt, Barmah Forest virus
ggccaccaaaagaaacug

SEQ ID NO: 3362389 - RNA, 22 nt, Barmah Forest virus
ggcgcacuagcucuacaaccca

SEQ ID NO: 3362390 - RNA, 14 nt, Barmah Forest virus
ggcguacugaagau

SEQ ID NO: 3362391 - RNA, 16 nt, Barmah Forest virus
gggaaacaacaacccg

SEQ ID NO: 3362392 - RNA, 13 nt, Barmah Forest virus
ggugcaaaugaag

SEQ ID NO: 3362393 - RNA, 13 nt, Barmah Forest virus
guaaaagaaggua

SEQ ID NO: 3362394 - RNA, 13 nt, Barmah Forest virus
guacaacucccaa

SEQ ID NO: 3362395 - RNA, 19 nt, Barmah Forest virus
guagccauagugcugggag

SEQ ID NO: 3362396 - RNA, 22 nt, Barmah Forest virus
gucauaguuaguguagaaauag

SEQ ID NO: 3362397 - RNA, 19 nt, Barmah Forest virus
guccacucaucagaacuag

SEQ ID NO: 3362398 - RNA, 16 nt, Barmah Forest virus
gugugaagccaucgaa

SEQ ID NO: 3362399 - RNA, 23 nt, Barmah Forest virus
guuaugccguccacucaucagaa

SEQ ID NO: 3362400 - RNA, 18 nt, Barmah Forest virus
guucacacaaaaaugaag

SEQ ID NO: 3362401 - RNA, 21 nt, Barmah Forest virus
guucccgugugaugcaccacc

SEQ ID NO: 3362402 - RNA, 14 nt, Barmah Forest virus
uaacugcaugaaga

SEQ ID NO: 3362403 - RNA, 15 nt, Barmah Forest virus
uaaguauguaguauu

SEQ ID NO: 3362404 - RNA, 15 nt, Barmah Forest virus
uacaacuggcaccau

SEQ ID NO: 3362405 - RNA, 17 nt, Barmah Forest virus
uaccaaucuagaaaagu

SEQ ID NO: 3362406 - RNA, 17 nt, Barmah Forest virus
uacggaggugaaaggaa

SEQ ID NO: 3362407 - RNA, 17 nt, Barmah Forest virus
uagccgaacucuacgga

SEQ ID NO: 3362408 - RNA, 20 nt, Barmah Forest virus
uagucucacauuacuaugac

SEQ ID NO: 3362409 - RNA, 19 nt, Barmah Forest virus
uauaaccccugaauaguaa

SEQ ID NO: 3362410 - RNA, 22 nt, Barmah Forest virus
uaugcaguggauaacacagugu

SEQ ID NO: 3362411 - RNA, 14 nt, Barmah Forest virus
uauggugacccgca

SEQ ID NO: 3362412 - RNA, 10 nt, Barmah Forest virus
ucagggccac

SEQ ID NO: 3362413 - RNA, 19 nt, Barmah Forest virus
ucauacuuggacccacaga

SEQ ID NO: 3362414 - RNA, 18 nt, Barmah Forest virus
ucauaguuaguguagaaa

SEQ ID NO: 3362415 - RNA, 23 nt, Barmah Forest virus
uccacgccguaggagaggaccau

SEQ ID NO: 3362416 - RNA, 17 nt, Barmah Forest virus
ucccaucagacagacuu

SEQ ID NO: 3362417 - RNA, 18 nt, Barmah Forest virus
ucccaucagacagacuua

SEQ ID NO: 3362418 - RNA, 12 nt, Barmah Forest virus
uccccagcaccc

SEQ ID NO: 3362419 - RNA, 21 nt, Barmah Forest virus
ucuacgaaccggcaaaacuag

SEQ ID NO: 3362420 - RNA, 20 nt, Barmah Forest virus
ucugaagcaaacaaaagcag

SEQ ID NO: 3362421 - RNA, 18 nt, Barmah Forest virus
ucugaccacuacuaccac

SEQ ID NO: 3362422 - RNA, 21 nt, Barmah Forest virus
ugaacuguagccgaacucuac

SEQ ID NO: 3362423 - RNA, 18 nt, Barmah Forest virus
ugagagaacuaccaacau

SEQ ID NO: 3362424 - RNA, 17 nt, Barmah Forest virus
ugaugucuaugccaaca

SEQ ID NO: 3362425 - RNA, 20 nt, Barmah Forest virus
ugcuuucauaggagaugaca

SEQ ID NO: 3362426 - RNA, 22 nt, Barmah Forest virus
uggcagauagaugugccaccug

SEQ ID NO: 3362427 - RNA, 17 nt, Barmah Forest virus
  misc_feature (3)..(3): n is a, c, g, or u
ugnauauaacagcacua

SEQ ID NO: 3362428 - RNA, 14 nt, Barmah Forest virus
uguuaacagcacug

SEQ ID NO: 3362429 - RNA, 13 nt, Barmah Forest virus
uuacgaaaaagac

SEQ ID NO: 3362430 - RNA, 19 nt, Barmah Forest virus
uuauaagauuaguuuguua

SEQ ID NO: 3362431 - RNA, 17 nt, Barmah Forest virus
uucacacaaaaaugaag

SEQ ID NO: 3362432 - RNA, 23 nt, Barmah Forest virus
uucacgguagauaugaagagaga

SEQ ID NO: 3362433 - RNA, 20 nt, Barmah Forest virus
uucugcagugcuaaauguag

SEQ ID NO: 3362434 - RNA, 21 nt, Barmah Forest virus
uugccacgcaggccuacgagc

SEQ ID NO: 3362435 - RNA, 13 nt, Barmah Forest virus
uuguuguaguauc

SEQ ID NO: 3362436 - RNA, 18 nt, Barmah Forest virus
uuuuaaauugaacuguag

SEQ ID NO: 3362437 - RNA, 14 nt, Barmah Forest virus
aaagauccaugugc

SEQ ID NO: 3362438 - RNA, 15 nt, Barmah Forest virus
aaagucaauccagua

SEQ ID NO: 3362439 - RNA, 14 nt, Barmah Forest virus
aaaguucauacuug

SEQ ID NO: 3362440 - RNA, 21 nt, Barmah Forest virus
aaauuuagaaaaacuuaauau

SEQ ID NO: 3362441 - RNA, 19 nt, Barmah Forest virus
gaaaccaacccaaaagaag

SEQ ID NO: 3362442 - RNA, 16 nt, Barmah Forest virus
gaaagcagagaucgua

SEQ ID NO: 3362443 - RNA, 22 nt, Barmah Forest virus
gaaccaagcacaccgaagagag

SEQ ID NO: 3362444 - RNA, 22 nt, Barmah Forest virus
gaacuucgugguccaagugugu

SEQ ID NO: 3362445 - RNA, 22 nt, Barmah Forest virus
gaagcccaagaagacaccacca

SEQ ID NO: 3362446 - RNA, 18 nt, Barmah Forest virus
gacaaaagucaagaugau

SEQ ID NO: 3362447 - RNA, 17 nt, Barmah Forest virus
gacaaauugauggcaga

SEQ ID NO: 3362448 - RNA, 23 nt, Barmah Forest virus
gacgcauaccuagauaugguaga

SEQ ID NO: 3362449 - RNA, 12 nt, Barmah Forest virus
gagagaagagau

SEQ ID NO: 3362450 - RNA, 20 nt, Barmah Forest virus
gaguggucggcggccgcacu

SEQ ID NO: 3362451 - RNA, 20 nt, Barmah Forest virus
gauacauaccccaaccccaa

SEQ ID NO: 3362452 - RNA, 18 nt, Barmah Forest virus
gaucgacaauccagaacu

SEQ ID NO: 3362453 - RNA, 18 nt, Barmah Forest virus
gaugagguguacaaugaa

SEQ ID NO: 3362454 - RNA, 15 nt, Barmah Forest virus
gcacagaagaagccc

SEQ ID NO: 3362455 - RNA, 14 nt, Barmah Forest virus
gcagacccacugaa

SEQ ID NO: 3362456 - RNA, 21 nt, Barmah Forest virus
gcagagccacuagccacugcc

SEQ ID NO: 3362457 - RNA, 21 nt, Barmah Forest virus
gcagucagcguagcaccugaa

SEQ ID NO: 3362458 - RNA, 14 nt, Barmah Forest virus
gcauaacaccugaa

SEQ ID NO: 3362459 - RNA, 22 nt, Barmah Forest virus
gcauccaaguucacccaugaga

SEQ ID NO: 3362460 - RNA, 17 nt, Barmah Forest virus
gcccaagaagacaccac

SEQ ID NO: 3362461 - RNA, 18 nt, Barmah Forest virus
gcccaagaagacaccacc

SEQ ID NO: 3362462 - RNA, 20 nt, Barmah Forest virus
gcccagguuuauuggcaaug

SEQ ID NO: 3362463 - RNA, 22 nt, Barmah Forest virus
gccgaacucuacggagauguag

SEQ ID NO: 3362464 - RNA, 22 nt, Barmah Forest virus
  misc_feature (10)..(10): n is a, c, g, or u
gccgcacugnauauaacagcac

SEQ ID NO: 3362465 - RNA, 14 nt, Barmah Forest virus
gccgguaugcauga

SEQ ID NO: 3362466 - RNA, 19 nt, Barmah Forest virus
gccucggaaaggauccgag

SEQ ID NO: 3362467 - RNA, 10 nt, Barmah Forest virus
gcggaggcgc

SEQ ID NO: 3362468 - RNA, 16 nt, Barmah Forest virus
gcggaggcgcugagug

SEQ ID NO: 3362469 - RNA, 18 nt, Barmah Forest virus
gcguacugaagauccaag

SEQ ID NO: 3362470 - RNA, 16 nt, Barmah Forest virus
gcuaguguccaauaca

SEQ ID NO: 3362471 - RNA, 23 nt, Barmah Forest virus
ggaggcugaacgcucuacccuaa

SEQ ID NO: 3362472 - RNA, 16 nt, Barmah Forest virus
ggauguccccauccaa

SEQ ID NO: 3362473 - RNA, 23 nt, Barmah Forest virus
ggcagguucggagacauccaaag

SEQ ID NO: 3362474 - RNA, 16 nt, Barmah Forest virus
ggcauccgaacucuac

SEQ ID NO: 3362475 - RNA, 20 nt, Barmah Forest virus
ggccauauuaccccugaaua

SEQ ID NO: 3362476 - RNA, 20 nt, Barmah Forest virus
gguaagugugccauccacag

SEQ ID NO: 3362477 - RNA, 23 nt, Barmah Forest virus
gguagacgauggagaccagcacc

SEQ ID NO: 3362478 - RNA, 14 nt, Barmah Forest virus
gguagauaugaaga

SEQ ID NO: 3362479 - RNA, 14 nt, Barmah Forest virus
ggucaccuggaaua

SEQ ID NO: 3362480 - RNA, 20 nt, Barmah Forest virus
guaagccauugccacuugac

SEQ ID NO: 3362481 - RNA, 18 nt, Barmah Forest virus
guaagugugccauccaca

SEQ ID NO: 3362482 - RNA, 22 nt, Barmah Forest virus
guacccuuacuggaccaucaca

SEQ ID NO: 3362483 - RNA, 18 nt, Barmah Forest virus
guauccacaacagcacca

SEQ ID NO: 3362484 - RNA, 18 nt, Barmah Forest virus
guaugcguaacugcauga

SEQ ID NO: 3362485 - RNA, 20 nt, Barmah Forest virus
guauuggcagcggccaccaa

SEQ ID NO: 3362486 - RNA, 16 nt, Barmah Forest virus
gugccaccuggaugaa

SEQ ID NO: 3362487 - RNA, 22 nt, Barmah Forest virus
gugcucgguguucacaggcgug

SEQ ID NO: 3362488 - RNA, 19 nt, Barmah Forest virus
guggcaguacaacucccaa

SEQ ID NO: 3362489 - RNA, 21 nt, Barmah Forest virus
guguuugucaacggagacagu

SEQ ID NO: 3362490 - RNA, 19 nt, Barmah Forest virus
guuggaauacggccaccuu

SEQ ID NO: 3362491 - RNA, 15 nt, Barmah Forest virus
uaacagguacagccu

SEQ ID NO: 3362492 - RNA, 16 nt, Barmah Forest virus
uaacugcaugaagauc

SEQ ID NO: 3362493 - RNA, 22 nt, Barmah Forest virus
uaacugcaugaagaucgagaau

SEQ ID NO: 3362494 - RNA, 16 nt, Barmah Forest virus
uaagaaaccaacccaa

SEQ ID NO: 3362495 - RNA, 12 nt, Barmah Forest virus
uaccaaaugaaa

SEQ ID NO: 3362496 - RNA, 17 nt, Barmah Forest virus
uacgacuaugggcacag

SEQ ID NO: 3362497 - RNA, 14 nt, Barmah Forest virus
uacucccaucagac

SEQ ID NO: 3362498 - RNA, 15 nt, Barmah Forest virus
uagaaaaacuuaaua

SEQ ID NO: 3362499 - RNA, 18 nt, Barmah Forest virus
uaguucaaagggccauau

SEQ ID NO: 3362500 - RNA, 19 nt, Barmah Forest virus
uauaguauuacaggaauua

SEQ ID NO: 3362501 - RNA, 14 nt, Barmah Forest virus
uaugaaagcagaga

SEQ ID NO: 3362502 - RNA, 16 nt, Barmah Forest virus
uauguaugauaguaua

SEQ ID NO: 3362503 - RNA, 15 nt, Barmah Forest virus
ucacuaagcaccgau

SEQ ID NO: 3362504 - RNA, 19 nt, Barmah Forest virus
ucauaggagaugacaacau

SEQ ID NO: 3362505 - RNA, 14 nt, Barmah Forest virus
ucauaguuagugua

SEQ ID NO: 3362506 - RNA, 15 nt, Barmah Forest virus
ucauauaaaauuacu

SEQ ID NO: 3362507 - RNA, 17 nt, Barmah Forest virus
uccccucauuaguucag

SEQ ID NO: 3362508 - RNA, 14 nt, Barmah Forest virus
uccuaccuguggac

SEQ ID NO: 3362509 - RNA, 19 nt, Barmah Forest virus
uccuauggacaaauucacg

SEQ ID NO: 3362510 - RNA, 15 nt, Barmah Forest virus
ucgcagacccacuga

SEQ ID NO: 3362511 - RNA, 18 nt, Barmah Forest virus
ucgccaaguugaaaggac

SEQ ID NO: 3362512 - RNA, 21 nt, Barmah Forest virus
ucugcagugcuaaauguagag

SEQ ID NO: 3362513 - RNA, 19 nt, Barmah Forest virus
ugcagucagcguagcaccu

SEQ ID NO: 3362514 - RNA, 13 nt, Barmah Forest virus
ugccauccacagc

SEQ ID NO: 3362515 - RNA, 17 nt, Barmah Forest virus
ugcguagcuuuccaaaa

SEQ ID NO: 3362516 - RNA, 15 nt, Barmah Forest virus
ugcuacgaacaaaau

SEQ ID NO: 3362517 - RNA, 23 nt, Barmah Forest virus
ugcuuagugggggauaaagucau

SEQ ID NO: 3362518 - RNA, 22 nt, Barmah Forest virus
uggauauugcggacgcgcacuu

SEQ ID NO: 3362519 - RNA, 13 nt, Barmah Forest virus
uggaucagagagc

SEQ ID NO: 3362520 - RNA, 18 nt, Barmah Forest virus
uggcaccauggggcagug

SEQ ID NO: 3362521 - RNA, 14 nt, Barmah Forest virus
uggggaaacaacaa

SEQ ID NO: 3362522 - RNA, 15 nt, Barmah Forest virus
uguaaguauguagua

SEQ ID NO: 3362523 - RNA, 15 nt, Barmah Forest virus
uguaguaguaaguau

SEQ ID NO: 3362524 - RNA, 13 nt, Barmah Forest virus
uguccgcagagga

SEQ ID NO: 3362525 - RNA, 13 nt, Barmah Forest virus
uuaccccugaaua

SEQ ID NO: 3362526 - RNA, 13 nt, Barmah Forest virus
uucaaagggccau

SEQ ID NO: 3362527 - RNA, 22 nt, Barmah Forest virus
uuccauccaucucuacuacagc

SEQ ID NO: 3362528 - RNA, 20 nt, Barmah Forest virus
uuuguuauguaaguauguag

SEQ ID NO: 3362529 - RNA, 13 nt, Barmah Forest virus
aaagagcacagaa

SEQ ID NO: 3362530 - RNA, 18 nt, Barmah Forest virus
aaaucuagcaaguaugau

SEQ ID NO: 3362531 - RNA, 17 nt, Barmah Forest virus
aacaacccgguacgacu

SEQ ID NO: 3362532 - RNA, 14 nt, Barmah Forest virus
aaccaaaaaagacc

SEQ ID NO: 3362533 - RNA, 12 nt, Barmah Forest virus
aagacaauccaa

SEQ ID NO: 3362534 - RNA, 15 nt, Barmah Forest virus
aagagagaccaaagg

SEQ ID NO: 3362535 - RNA, 18 nt, Barmah Forest virus
aaggagcaaguaccaaau

SEQ ID NO: 3362536 - RNA, 12 nt, Barmah Forest virus
aagggccauaua

SEQ ID NO: 3362537 - RNA, 22 nt, Barmah Forest virus
aagguacugcuacgaacaaaau

SEQ ID NO: 3362538 - RNA, 16 nt, Barmah Forest virus
aagucaugaaaccagc

SEQ ID NO: 3362539 - RNA, 19 nt, Barmah Forest virus
aauaaaaauuuagaaaaac

SEQ ID NO: 3362540 - RNA, 18 nt, Barmah Forest virus
aauaucagacaaauugau

SEQ ID NO: 3362541 - RNA, 14 nt, Barmah Forest virus
aaugugcucaagug

SEQ ID NO: 3362542 - RNA, 20 nt, Barmah Forest virus
aauuuuuaaauugaacugua

SEQ ID NO: 3362543 - RNA, 22 nt, Barmah Forest virus
acaaaauugcacggcagaaugu

SEQ ID NO: 3362544 - RNA, 21 nt, Barmah Forest virus
acacagagugugugaagccau

SEQ ID NO: 3362545 - RNA, 21 nt, Barmah Forest virus
acaccauucucccacaagccc

SEQ ID NO: 3362546 - RNA, 14 nt, Barmah Forest virus
acagcaccauguga

SEQ ID NO: 3362547 - RNA, 21 nt, Barmah Forest virus
acauaugcaguggauaacaca

SEQ ID NO: 3362548 - RNA, 20 nt, Barmah Forest virus
acauuacaacuggcaccaug

SEQ ID NO: 3362549 - RNA, 19 nt, Barmah Forest virus
acccugcagggacccuaag

SEQ ID NO: 3362550 - RNA, 16 nt, Barmah Forest virus
accgaagagagaccaa

SEQ ID NO: 3362551 - RNA, 20 nt, Barmah Forest virus
acguaugggaugaguacagg

SEQ ID NO: 3362552 - RNA, 16 nt, Barmah Forest virus
acgucgccaaguugaa

SEQ ID NO: 3362553 - RNA, 12 nt, Barmah Forest virus
acucccaucaga

SEQ ID NO: 3362554 - RNA, 16 nt, Barmah Forest virus
acuggaaaaaagagaa

SEQ ID NO: 3362555 - RNA, 21 nt, Barmah Forest virus
acuguaaaagaagguacugcu

SEQ ID NO: 3362556 - RNA, 13 nt, Barmah Forest virus
agaccagcaccag

SEQ ID NO: 3362557 - RNA, 19 nt, Barmah Forest virus
agaccaucaaguacaaaug

SEQ ID NO: 3362558 - RNA, 12 nt, Barmah Forest virus
agacccugcagg

SEQ ID NO: 3362559 - RNA, 20 nt, Barmah Forest virus
agacgauggagaccagcacc

SEQ ID NO: 3362560 - RNA, 16 nt, Barmah Forest virus
agagcuugcaaugcau

SEQ ID NO: 3362561 - RNA, 13 nt, Barmah Forest virus
agauccaugugcc

SEQ ID NO: 3362562 - RNA, 23 nt, Barmah Forest virus
agaucgguauagcuaaaagcaau

SEQ ID NO: 3362563 - RNA, 14 nt, Barmah Forest virus
agauuacaaugcau

SEQ ID NO: 3362564 - RNA, 14 nt, Barmah Forest virus
aggauguccaggaa

SEQ ID NO: 3362565 - RNA, 20 nt, Barmah Forest virus
agggauaauccgauuugcau

SEQ ID NO: 3362566 - RNA, 20 nt, Barmah Forest virus
agggccauauaaccccugaa

SEQ ID NO: 3362567 - RNA, 20 nt, Barmah Forest virus
agggccauauuaccccugaa

SEQ ID NO: 3362568 - RNA, 23 nt, Barmah Forest virus
aguaccauugaaucgaaacgccc

SEQ ID NO: 3362569 - RNA, 15 nt, Barmah Forest virus
aguucaaagggccau

SEQ ID NO: 3362570 - RNA, 22 nt, Barmah Forest virus
auaaccugauaccacuacacca

SEQ ID NO: 3362571 - RNA, 13 nt, Barmah Forest virus
auaguaguucaaa

SEQ ID NO: 3362572 - RNA, 18 nt, Barmah Forest virus
auaguuggaauacggcca

SEQ ID NO: 3362573 - RNA, 17 nt, Barmah Forest virus
aucacuaagcaccgauc

SEQ ID NO: 3362574 - RNA, 19 nt, Barmah Forest virus
augcuguuacgaaaaagac

SEQ ID NO: 3362575 - RNA, 13 nt, Barmah Forest virus
augguaaguguga

SEQ ID NO: 3362576 - RNA, 17 nt, Barmah Forest virus
auugauggcagauagau

SEQ ID NO: 3362577 - RNA, 14 nt, Barmah Forest virus
auuuagaaaaacuu

SEQ ID NO: 3362578 - RNA, 18 nt, Barmah Forest virus
auuugaagcuuaaaagac

SEQ ID NO: 3362579 - RNA, 16 nt, Barmah Forest virus
auuugauagaggcugc

SEQ ID NO: 3362580 - RNA, 18 nt, Barmah Forest virus
caaagacgaagaccauca

SEQ ID NO: 3362581 - RNA, 22 nt, Barmah Forest virus
caaauuuggagcuaugaugaag

SEQ ID NO: 3362582 - RNA, 21 nt, Barmah Forest virus
caacauaugauucugcagugc

SEQ ID NO: 3362583 - RNA, 17 nt, Barmah Forest virus
caagcacaccgaagaga

SEQ ID NO: 3362584 - RNA, 16 nt, Barmah Forest virus
caaguacaaaugcacu

SEQ ID NO: 3362585 - RNA, 13 nt, Barmah Forest virus
caaguugaaagga

SEQ ID NO: 3362586 - RNA, 22 nt, Barmah Forest virus
cacaaaaaugaagcggacuaua

SEQ ID NO: 3362587 - RNA, 18 nt, Barmah Forest virus
cacagaagaagcccaaga

SEQ ID NO: 3362588 - RNA, 22 nt, Barmah Forest virus
cagaacuaguuuuauuggcacu

SEQ ID NO: 3362589 - RNA, 18 nt, Barmah Forest virus
cagacugggggaagugga

SEQ ID NO: 3362590 - RNA, 21 nt, Barmah Forest virus
cagacuuaacgagagaagaga

SEQ ID NO: 3362591 - RNA, 17 nt, Barmah Forest virus
cagaggucugucuagug

SEQ ID NO: 3362592 - RNA, 14 nt, Barmah Forest virus
cagagugugugaag

SEQ ID NO: 3362593 - RNA, 23 nt, Barmah Forest virus
cagcaucgcuuaaggcacaagua

SEQ ID NO: 3362594 - RNA, 12 nt, Barmah Forest virus
cagcggccacca

SEQ ID NO: 3362595 - RNA, 15 nt, Barmah Forest virus
cagucagaugaguga

SEQ ID NO: 3362596 - RNA, 20 nt, Barmah Forest virus
cagugcaauuuagcaauggu

SEQ ID NO: 3362597 - RNA, 14 nt, Barmah Forest virus
caugagaaaccaga

SEQ ID NO: 3362598 - RNA, 14 nt, Barmah Forest virus
cauuccaaaacacc

SEQ ID NO: 3362599 - RNA, 19 nt, Barmah Forest virus
ccaaaagaagaaguccaaa

SEQ ID NO: 3362600 - RNA, 19 nt, Barmah Forest virus
ccaaaguguauuacauaug

SEQ ID NO: 3362601 - RNA, 17 nt, Barmah Forest virus
ccaagaagacaccacca

SEQ ID NO: 3362602 - RNA, 14 nt, Barmah Forest virus
ccaagaugaagaca

SEQ ID NO: 3362603 - RNA, 21 nt, Barmah Forest virus
ccagcaccaguccagagauac

SEQ ID NO: 3362604 - RNA, 16 nt, Barmah Forest virus
ccaucaaguacaaaug

SEQ ID NO: 3362605 - RNA, 20 nt, Barmah Forest virus
ccaugguauaauaucagaca

SEQ ID NO: 3362606 - RNA, 21 nt, Barmah Forest virus
ccgaacucuacggagauguag

SEQ ID NO: 3362607 - RNA, 20 nt, Barmah Forest virus
ccgucugaagcaaacaaaag

SEQ ID NO: 3362608 - RNA, 20 nt, Barmah Forest virus
ccugaagaaucaguggagug

SEQ ID NO: 3362609 - RNA, 22 nt, Barmah Forest virus
ccugcaaaacuuacucccauca

SEQ ID NO: 3362610 - RNA, 19 nt, Barmah Forest virus
cgagagaagagauuacaau

SEQ ID NO: 3362611 - RNA, 19 nt, Barmah Forest virus
cgagcauuuccuacacauc

SEQ ID NO: 3362612 - RNA, 23 nt, Barmah Forest virus
cgagucuaggcuugcuaauagug

SEQ ID NO: 3362613 - RNA, 19 nt, Barmah Forest virus
cgauggagaccagcaccag

SEQ ID NO: 3362614 - RNA, 14 nt, Barmah Forest virus
cguaacugcaugaa

SEQ ID NO: 3362615 - RNA, 23 nt, Barmah Forest virus
cgucugaagcaaacaaaagcagg

SEQ ID NO: 3362616 - RNA, 18 nt, Barmah Forest virus
cgugugaugcaccaccau

SEQ ID NO: 3362617 - RNA, 15 nt, Barmah Forest virus
cuaagaacuugaagu

SEQ ID NO: 3362618 - RNA, 12 nt, Barmah Forest virus
cuacagcagaga

SEQ ID NO: 3362619 - RNA, 16 nt, Barmah Forest virus
cuaugccguacaccau

SEQ ID NO: 3362620 - RNA, 15 nt, Barmah Forest virus
cucuacggagaugua

SEQ ID NO: 3362621 - RNA, 11 nt, Barmah Forest virus
cugaagaucca

SEQ ID NO: 3362622 - RNA, 22 nt, Barmah Forest virus
cuggaccaucacaguacuagcg

SEQ ID NO: 3362623 - RNA, 14 nt, Barmah Forest virus
cugggcaccgagca

SEQ ID NO: 3362624 - RNA, 20 nt, Barmah Forest virus
cuuaaggagcaaguaccaaa

SEQ ID NO: 3362625 - RNA, 12 nt, Barmah Forest virus
cuuggacccaca

SEQ ID NO: 3362626 - RNA, 23 nt, Barmah Forest virus
cuuggcccgcugccgacccggca

SEQ ID NO: 3362627 - RNA, 13 nt, Barmah Forest virus
cuuguuugcaaaa

SEQ ID NO: 3362628 - RNA, 18 nt, Barmah Forest virus
cuuguuugcaaaaacaca

SEQ ID NO: 3362629 - RNA, 15 nt, Barmah Forest virus
cuuuccaaaaacaca

SEQ ID NO: 3362630 - RNA, 18 nt, Barmah Forest virus
gaacucuacggagaugua

SEQ ID NO: 3362631 - RNA, 19 nt, Barmah Forest virus
gaacuguagccgaacucua

SEQ ID NO: 3362632 - RNA, 13 nt, Barmah Forest virus
gaagagagauguc

SEQ ID NO: 3362633 - RNA, 16 nt, Barmah Forest virus
gaaggauucugugcag

SEQ ID NO: 3362634 - RNA, 20 nt, Barmah Forest virus
gaaggcgugugaagugcagu

SEQ ID NO: 3362635 - RNA, 23 nt, Barmah Forest virus
gaauaguaacaaaagagaaaaac

SEQ ID NO: 3362636 - RNA, 15 nt, Barmah Forest virus
gacauucaagaaauc

SEQ ID NO: 3362637 - RNA, 20 nt, Barmah Forest virus
gaccagguuacgcaggccuc

SEQ ID NO: 3362638 - RNA, 21 nt, Barmah Forest virus
gacgugcauuacaugaugaag

SEQ ID NO: 3362639 - RNA, 16 nt, Barmah Forest virus
gagacuguaaaagaag

SEQ ID NO: 3362640 - RNA, 16 nt, Barmah Forest virus
gagcacgucuggagug

SEQ ID NO: 3362641 - RNA, 17 nt, Barmah Forest virus
gagcacgucuggaguga

SEQ ID NO: 3362642 - RNA, 14 nt, Barmah Forest virus
gagcuaugaugaag

SEQ ID NO: 3362643 - RNA, 12 nt, Barmah Forest virus
gaggugaaagga

SEQ ID NO: 3362644 - RNA, 17 nt, Barmah Forest virus
cugucuggacagauccu

SEQ ID NO: 3362645 - RNA, 13 nt, Barmah Forest virus
gaaaaaagagaag

SEQ ID NO: 3362646 - RNA, 20 nt, Barmah Forest virus
gaaaacagucagaugaguga

SEQ ID NO: 3362647 - RNA, 12 nt, Barmah Forest virus
gaaaaugucacc

SEQ ID NO: 3362648 - RNA, 17 nt, Barmah Forest virus
gaugcaccaccaugugc

SEQ ID NO: 3362649 - RNA, 13 nt, Barmah Forest virus
gaugugccaccug

SEQ ID NO: 3362650 - RNA, 14 nt, Barmah Forest virus
gcacaccgaagaga

SEQ ID NO: 3362651 - RNA, 14 nt, Barmah Forest virus
gcaccgagcaucca

SEQ ID NO: 3362652 - RNA, 21 nt, Barmah Forest virus
gcaccugaaccgcaagugaca

SEQ ID NO: 3362653 - RNA, 17 nt, Barmah Forest virus
gcaggccuacgagcacu

SEQ ID NO: 3362654 - RNA, 13 nt, Barmah Forest virus
gcaguccugcacu

SEQ ID NO: 3362655 - RNA, 21 nt, Barmah Forest virus
gcaugaaaucagacgcaucca

SEQ ID NO: 3362656 - RNA, 15 nt, Barmah Forest virus
gcauuacaugaugaa

SEQ ID NO: 3362657 - RNA, 14 nt, Barmah Forest virus
gccaaguugaaagg

SEQ ID NO: 3362658 - RNA, 14 nt, Barmah Forest virus
gccacgcaggccua

SEQ ID NO: 3362659 - RNA, 13 nt, Barmah Forest virus
gcccaagaagaca

SEQ ID NO: 3362660 - RNA, 12 nt, Barmah Forest virus
gcccggacagcc

SEQ ID NO: 3362661 - RNA, 12 nt, Barmah Forest virus
gccgaaccccag

SEQ ID NO: 3362662 - RNA, 21 nt, Barmah Forest virus
gccgaacucuacggagaugua

SEQ ID NO: 3362663 - RNA, 23 nt, Barmah Forest virus
gcggaucacuugccaugguaagu

SEQ ID NO: 3362664 - RNA, 11 nt, Barmah Forest virus
gcuaaauguag

SEQ ID NO: 3362665 - RNA, 14 nt, Barmah Forest virus
gcucuacaacccaa

SEQ ID NO: 3362666 - RNA, 12 nt, Barmah Forest virus
ggagacauccaa

SEQ ID NO: 3362667 - RNA, 15 nt, Barmah Forest virus
ggcauccgaacucua

SEQ ID NO: 3362668 - RNA, 21 nt, Barmah Forest virus
gguacgacuaugggcacagaa

SEQ ID NO: 3362669 - RNA, 16 nt, Barmah Forest virus
guaacugcaugaagau

SEQ ID NO: 3362670 - RNA, 13 nt, Barmah Forest virus
guacaaaugcacu

SEQ ID NO: 3362671 - RNA, 15 nt, Barmah Forest virus
guagauaugaagaga

SEQ ID NO: 3362672 - RNA, 19 nt, Barmah Forest virus
guagggcugcgacacagag

SEQ ID NO: 3362673 - RNA, 22 nt, Barmah Forest virus
gucaacggagacaguccagcca

SEQ ID NO: 3362674 - RNA, 15 nt, Barmah Forest virus
gugccaaaacagcug

SEQ ID NO: 3362675 - RNA, 23 nt, Barmah Forest virus
gugcgguaccgucaccauuccaa

SEQ ID NO: 3362676 - RNA, 14 nt, Barmah Forest virus
guucaaagggccau

SEQ ID NO: 3362677 - RNA, 23 nt, Barmah Forest virus
guuggggcagaaggcguggagua

SEQ ID NO: 3362678 - RNA, 15 nt, Barmah Forest virus
uaacaccugaagaau

SEQ ID NO: 3362679 - RNA, 13 nt, Barmah Forest virus
uaaccccugaaua

SEQ ID NO: 3362680 - RNA, 20 nt, Barmah Forest virus
uaagauuaguuuguuaugua

SEQ ID NO: 3362681 - RNA, 13 nt, Barmah Forest virus
uaaguauguagua

SEQ ID NO: 3362682 - RNA, 16 nt, Barmah Forest virus
uaccccugaauaguaa

SEQ ID NO: 3362683 - RNA, 19 nt, Barmah Forest virus
uaccgucaccauuccaaaa

SEQ ID NO: 3362684 - RNA, 14 nt, Barmah Forest virus
uagaaaaaauucau

SEQ ID NO: 3362685 - RNA, 21 nt, Barmah Forest virus
uaggcauccgaacucuacgga

SEQ ID NO: 3362686 - RNA, 16 nt, Barmah Forest virus
uauaaccccugaauag

SEQ ID NO: 3362687 - RNA, 19 nt, Barmah Forest virus
uauaguauuauaggaauua

SEQ ID NO: 3362688 - RNA, 15 nt, Barmah Forest virus
uaucagaucccaaaa

SEQ ID NO: 3362689 - RNA, 17 nt, Barmah Forest virus
ucaaguacaaaugcacu

SEQ ID NO: 3362690 - RNA, 22 nt, Barmah Forest virus
ucaagugccgguaugcaugaaa

SEQ ID NO: 3362691 - RNA, 22 nt, Barmah Forest virus
ucagggccacucaccauacuug

SEQ ID NO: 3362692 - RNA, 14 nt, Barmah Forest virus
ucaugcgaggcuga

SEQ ID NO: 3362693 - RNA, 15 nt, Barmah Forest virus
ugaagccaucgaaga

SEQ ID NO: 3362694 - RNA, 15 nt, Barmah Forest virus
ugaagcuuaaaagac

SEQ ID NO: 3362695 - RNA, 19 nt, Barmah Forest virus
ugacauacagacuggggga

SEQ ID NO: 3362696 - RNA, 13 nt, Barmah Forest virus
ugaugcaccacca

SEQ ID NO: 3362697 - RNA, 12 nt, Barmah Forest virus
ugauuaagucag

SEQ ID NO: 3362698 - RNA, 18 nt, Barmah Forest virus
ugcaaaacuuacucccau

SEQ ID NO: 3362699 - RNA, 20 nt, Barmah Forest virus
ugcaccaccaugugcaccau

SEQ ID NO: 3362700 - RNA, 21 nt, Barmah Forest virus
ugcugggaggugcaaaugaag

SEQ ID NO: 3362701 - RNA, 11 nt, Barmah Forest virus
ugguccaagug

SEQ ID NO: 3362702 - RNA, 15 nt, Barmah Forest virus
uguaguauuaaguau

SEQ ID NO: 3362703 - RNA, 13 nt, Barmah Forest virus
uuaguauagucau

SEQ ID NO: 3362704 - RNA, 21 nt, Barmah Forest virus
gacacggguccaggccaccua

SEQ ID NO: 3362705 - RNA, 19 nt, Barmah Forest virus
gacagcacgugugcaguca

SEQ ID NO: 3362706 - RNA, 18 nt, Barmah Forest virus
gaccacuacuaccacccc

SEQ ID NO: 3362707 - RNA, 15 nt, Barmah Forest virus
gacccaaagacgaag

SEQ ID NO: 3362708 - RNA, 15 nt, Barmah Forest virus
gacccacugaagaga

SEQ ID NO: 3362709 - RNA, 23 nt, Barmah Forest virus
gacgauggccaagaugaagacag

SEQ ID NO: 3362710 - RNA, 13 nt, Barmah Forest virus
gagaccagcacca

SEQ ID NO: 3362711 - RNA, 14 nt, Barmah Forest virus
gagagaagagauua

SEQ ID NO: 3362712 - RNA, 14 nt, Barmah Forest virus
gaugagagaacuac

SEQ ID NO: 3362713 - RNA, 14 nt, Barmah Forest virus
gcaaaccuggagac

SEQ ID NO: 3362714 - RNA, 23 nt, Barmah Forest virus
gcaaugaaaaguccccagcaccc

SEQ ID NO: 3362715 - RNA, 17 nt, Barmah Forest virus
gcacccaccgggcacaa

SEQ ID NO: 3362716 - RNA, 15 nt, Barmah Forest virus
gcacugcccacaagg

SEQ ID NO: 3362717 - RNA, 20 nt, Barmah Forest virus
gcagaucgguauagcuaaaa

SEQ ID NO: 3362718 - RNA, 12 nt, Barmah Forest virus
gccaccaaaaga

SEQ ID NO: 3362719 - RNA, 15 nt, Barmah Forest virus
gccaccaaaagaaac

SEQ ID NO: 3362720 - RNA, 13 nt, Barmah Forest virus
gcccacaaggaag

SEQ ID NO: 3362721 - RNA, 22 nt, Barmah Forest virus
gcccagguuuauuggcaaugaa

SEQ ID NO: 3362722 - RNA, 19 nt, Barmah Forest virus
gccuaagaaaccaacccaa

SEQ ID NO: 3362723 - RNA, 22 nt, Barmah Forest virus
gccuaagaaaccaacccaaaag

SEQ ID NO: 3362724 - RNA, 19 nt, Barmah Forest virus
gcucuggcaaaccuggaga

SEQ ID NO: 3362725 - RNA, 21 nt, Barmah Forest virus
ggagaccagcaccaguccaga

SEQ ID NO: 3362726 - RNA, 18 nt, Barmah Forest virus
ggccaccuacagcagaga

SEQ ID NO: 3362727 - RNA, 18 nt, Barmah Forest virus
ggccauauaaccccugaa

SEQ ID NO: 3362728 - RNA, 20 nt, Barmah Forest virus
ggccauauaaccccugaaua

SEQ ID NO: 3362729 - RNA, 18 nt, Barmah Forest virus
ggccauauuaccccugaa

SEQ ID NO: 3362730 - RNA, 17 nt, Barmah Forest virus
gggaugaguacagggau

SEQ ID NO: 3362731 - RNA, 13 nt, Barmah Forest virus
gggcccggacagc

SEQ ID NO: 3362732 - RNA, 15 nt, Barmah Forest virus
guaacugcaugaaga

SEQ ID NO: 3362733 - RNA, 23 nt, Barmah Forest virus
guccaggccaccuacagcagaga

SEQ ID NO: 3362734 - RNA, 17 nt, Barmah Forest virus
gucuaauuuguuuuuua

SEQ ID NO: 3362735 - RNA, 18 nt, Barmah Forest virus
gugacaccgccccaaagu

SEQ ID NO: 3362736 - RNA, 15 nt, Barmah Forest virus
guguccuccagaacu

SEQ ID NO: 3362737 - RNA, 17 nt, Barmah Forest virus
guuacgaaaaagacccu

SEQ ID NO: 3362738 - RNA, 14 nt, Barmah Forest virus
uaacaccugaagaa

SEQ ID NO: 3362739 - RNA, 23 nt, Barmah Forest virus
uaaugucacacagaugagagaac

SEQ ID NO: 3362740 - RNA, 23 nt, Barmah Forest virus
uacacccuaucaauuagcaccag

SEQ ID NO: 3362741 - RNA, 19 nt, Barmah Forest virus
uaccucugcggaauucacc

SEQ ID NO: 3362742 - RNA, 12 nt, Barmah Forest virus
uacggccaccuu

SEQ ID NO: 3362743 - RNA, 22 nt, Barmah Forest virus
uagacccaaagacgaagaccau

SEQ ID NO: 3362744 - RNA, 22 nt, Barmah Forest virus
uagcaaguaugaucuagaaugu

SEQ ID NO: 3362745 - RNA, 15 nt, Barmah Forest virus
uauaaccccugaaua

SEQ ID NO: 3362746 - RNA, 16 nt, Barmah Forest virus
uauuaccccugaauag

SEQ ID NO: 3362747 - RNA, 19 nt, Barmah Forest virus
uauuaccccugaauaguaa

SEQ ID NO: 3362748 - RNA, 21 nt, Barmah Forest virus
ucaaaguucauacuugggccg

SEQ ID NO: 3362749 - RNA, 17 nt, Barmah Forest virus
ucaacuccaacagcuug

SEQ ID NO: 3362750 - RNA, 16 nt, Barmah Forest virus
ucauuagacccaaaga

SEQ ID NO: 3362751 - RNA, 19 nt, Barmah Forest virus
uccaauacagguaagucgu

SEQ ID NO: 3362752 - RNA, 15 nt, Barmah Forest virus
uccacaacagcacca

SEQ ID NO: 3362753 - RNA, 13 nt, Barmah Forest virus
uccaggccaccua

SEQ ID NO: 3362754 - RNA, 21 nt, Barmah Forest virus
ucccucugaccgacagcacgu

SEQ ID NO: 3362755 - RNA, 15 nt, Barmah Forest virus
uccguuuuacaaaau

SEQ ID NO: 3362756 - RNA, 16 nt, Barmah Forest virus
ucuagugccaaaacag

SEQ ID NO: 3362757 - RNA, 17 nt, Barmah Forest virus
ucugucuagugccaaaa

SEQ ID NO: 3362758 - RNA, 15 nt, Barmah Forest virus
ugaagacagaagacg

SEQ ID NO: 3362759 - RNA, 12 nt, Barmah Forest virus
ugaagugaaaac

SEQ ID NO: 3362760 - RNA, 14 nt, Barmah Forest virus
ugacauucaagaaa

SEQ ID NO: 3362761 - RNA, 22 nt, Barmah Forest virus
ugacgauggccaagaugaagac

SEQ ID NO: 3362762 - RNA, 16 nt, Barmah Forest virus
ugagcaagacaaucca

SEQ ID NO: 3362763 - RNA, 13 nt, Barmah Forest virus
ugcaaaaacacau

SEQ ID NO: 3362764 - RNA, 23 nt, Barmah Forest virus
ugcaugaaaucagacgcauccaa

SEQ ID NO: 3362765 - RNA, 17 nt, Barmah Forest virus
ugccaaaacagcuguua

SEQ ID NO: 3362766 - RNA, 12 nt, Barmah Forest virus
uggaaaaaagag

SEQ ID NO: 3362767 - RNA, 16 nt, Barmah Forest virus
uggacggacuggggga

SEQ ID NO: 3362768 - RNA, 18 nt, Barmah Forest virus
uggaguacaggaggcuga

SEQ ID NO: 3362769 - RNA, 16 nt, Barmah Forest virus
ugucacacagaugaga

SEQ ID NO: 3362770 - RNA, 24 nt, Barmah Forest virus
uuguuauguaaguauguaguagua

SEQ ID NO: 3362771 - RNA, 14 nt, Barmah Forest virus
uuuuaaauugaacu

SEQ ID NO: 3362772 - RNA, 16 nt, Barmah Forest virus
aacaaaagagaaaaac

SEQ ID NO: 3362773 - RNA, 20 nt, Barmah Forest virus
aaccgcaagugacauacaga

SEQ ID NO: 3362774 - RNA, 17 nt, Barmah Forest virus
aaccuaaugaauuugau

SEQ ID NO: 3362775 - RNA, 16 nt, Barmah Forest virus
aagcuagguaagccau

SEQ ID NO: 3362776 - RNA, 17 nt, Barmah Forest virus
aaggauucugugcagga

SEQ ID NO: 3362777 - RNA, 13 nt, Barmah Forest virus
aagggccauauua

SEQ ID NO: 3362778 - RNA, 23 nt, Barmah Forest virus
aaguguauccacaacagcaccau

SEQ ID NO: 3362779 - RNA, 22 nt, Barmah Forest virus
aaguguauuacauaugcagugg

SEQ ID NO: 3362780 - RNA, 12 nt, Barmah Forest virus
aauaguaacaaa

SEQ ID NO: 3362781 - RNA, 14 nt, Barmah Forest virus
acacagaugagaga

SEQ ID NO: 3362782 - RNA, 18 nt, Barmah Forest virus
acaccauucucccacaag

SEQ ID NO: 3362783 - RNA, 12 nt, Barmah Forest virus
acagucaagaau

SEQ ID NO: 3362784 - RNA, 16 nt, Barmah Forest virus
acagucagaugaguga

SEQ ID NO: 3362785 - RNA, 21 nt, Barmah Forest virus
accaaaguuggauaaaaccaa

SEQ ID NO: 3362786 - RNA, 15 nt, Barmah Forest virus
accaugugcaccaug

SEQ ID NO: 3362787 - RNA, 21 nt, Barmah Forest virus
accgacagcacgugugcaguc

SEQ ID NO: 3362788 - RNA, 20 nt, Barmah Forest virus
acgaaccggcaaaacuagaa

SEQ ID NO: 3362789 - RNA, 20 nt, Barmah Forest virus
acucauacuuggacccacag

SEQ ID NO: 3362790 - RNA, 19 nt, Barmah Forest virus
acuuccacccuauguaccc

SEQ ID NO: 3362791 - RNA, 15 nt, Barmah Forest virus
acuucuguggaggau

SEQ ID NO: 3362792 - RNA, 15 nt, Barmah Forest virus
agaaacaaaaaagag

SEQ ID NO: 3362793 - RNA, 14 nt, Barmah Forest virus
agaaauaguucaaa

SEQ ID NO: 3362794 - RNA, 18 nt, Barmah Forest virus
agaacuaccaacauauga

SEQ ID NO: 3362795 - RNA, 13 nt, Barmah Forest virus
agaaugacugcau

SEQ ID NO: 3362796 - RNA, 17 nt, Barmah Forest virus
agacccacugaagagau

SEQ ID NO: 3362797 - RNA, 19 nt, Barmah Forest virus
agacccgaauucccugcaa

SEQ ID NO: 3362798 - RNA, 21 nt, Barmah Forest virus
agagaacuaccaacauaugau

SEQ ID NO: 3362799 - RNA, 16 nt, Barmah Forest virus
agagauuacaaugcau

SEQ ID NO: 3362800 - RNA, 15 nt, Barmah Forest virus
agagcacagaagaag

SEQ ID NO: 3362801 - RNA, 17 nt, Barmah Forest virus
agagcucaucgagcagc

SEQ ID NO: 3362802 - RNA, 22 nt, Barmah Forest virus
agcaccaguccagagauacaua

SEQ ID NO: 3362803 - RNA, 13 nt, Barmah Forest virus
aggauucugugca

SEQ ID NO: 3362804 - RNA, 15 nt, Barmah Forest virus
agggccacucaccau

SEQ ID NO: 3362805 - RNA, 18 nt, Barmah Forest virus
agggccauauaaccccug

SEQ ID NO: 3362806 - RNA, 18 nt, Barmah Forest virus
aggggcccggacagcccu

SEQ ID NO: 3362807 - RNA, 21 nt, Barmah Forest virus
aguagaacuguuaacagcacu

SEQ ID NO: 3362808 - RNA, 12 nt, Barmah Forest virus
aguagaccaaaa

SEQ ID NO: 3362809 - RNA, 14 nt, Barmah Forest virus
aguauaguauuaua

SEQ ID NO: 3362810 - RNA, 22 nt, Barmah Forest virus
agugacauacagacugggggaa

SEQ ID NO: 3362811 - RNA, 18 nt, Barmah Forest virus
auaaaauuacugaugaau

SEQ ID NO: 3362812 - RNA, 19 nt, Barmah Forest virus
auaagguagguaagugugc

SEQ ID NO: 3362813 - RNA, 18 nt, Barmah Forest virus
auaauaucagacaaauug

SEQ ID NO: 3362814 - RNA, 19 nt, Barmah Forest virus
auacgacgcauaccuagau

SEQ ID NO: 3362815 - RNA, 16 nt, Barmah Forest virus
auauaaaauuacugau

SEQ ID NO: 3362816 - RNA, 12 nt, Barmah Forest virus
auccaaagcugc

SEQ ID NO: 3362817 - RNA, 19 nt, Barmah Forest virus
auccaaguguccaugcaga

SEQ ID NO: 3362818 - RNA, 22 nt, Barmah Forest virus
aucgacaauccagaacuagcca

SEQ ID NO: 3362819 - RNA, 13 nt, Barmah Forest virus
augaugaagugaa

SEQ ID NO: 3362820 - RNA, 17 nt, Barmah Forest virus
augcaccaccaugugca

SEQ ID NO: 3362821 - RNA, 12 nt, Barmah Forest virus
auuacaaugcau

SEQ ID NO: 3362822 - RNA, 15 nt, Barmah Forest virus
auuauauuaccugca

SEQ ID NO: 3362823 - RNA, 15 nt, Barmah Forest virus
auucaugcaccaaag

SEQ ID NO: 3362824 - RNA, 22 nt, Barmah Forest virus
auuguucaagcuagguaagcca

SEQ ID NO: 3362825 - RNA, 12 nt, Barmah Forest virus
caaaauugcacg

SEQ ID NO: 3362826 - RNA, 23 nt, Barmah Forest virus
caaauuuggagcuaugaugaagu

SEQ ID NO: 3362827 - RNA, 13 nt, Barmah Forest virus
caagugacauaca

SEQ ID NO: 3362828 - RNA, 23 nt, Barmah Forest virus
caauccaaguuggggcagaaggc

SEQ ID NO: 3362829 - RNA, 22 nt, Barmah Forest virus
caaugaaaaguccccagcaccc

SEQ ID NO: 3362830 - RNA, 23 nt, Barmah Forest virus
cacacagaugagagaacuaccaa

SEQ ID NO: 3362831 - RNA, 11 nt, Barmah Forest virus
cacagaagaag

SEQ ID NO: 3362832 - RNA, 23 nt, Barmah Forest virus
cacagagugugugaagccaucga

SEQ ID NO: 3362833 - RNA, 17 nt, Barmah Forest virus
caccaccucagggccac

SEQ ID NO: 3362834 - RNA, 22 nt, Barmah Forest virus
cacccaugagaaaccagaagga

SEQ ID NO: 3362835 - RNA, 13 nt, Barmah Forest virus
caccuuacaaaau

SEQ ID NO: 3362836 - RNA, 23 nt, Barmah Forest virus
cacgaucgacaauccagaacuag

SEQ ID NO: 3362837 - RNA, 21 nt, Barmah Forest virus
cacgguagauaugaagagaga

SEQ ID NO: 3362838 - RNA, 15 nt, Barmah Forest virus
cacucaccauacuug

SEQ ID NO: 3362839 - RNA, 15 nt, Barmah Forest virus
cacugcccacaagga

SEQ ID NO: 3362840 - RNA, 20 nt, Barmah Forest virus
cagaacuagccaaauugaca

SEQ ID NO: 3362841 - RNA, 15 nt, Barmah Forest virus
cagcucaugugaagg

SEQ ID NO: 3362842 - RNA, 18 nt, Barmah Forest virus
cagucagcguagcaccug

SEQ ID NO: 3362843 - RNA, 20 nt, Barmah Forest virus
cauagucucacauuacuaug

SEQ ID NO: 3362844 - RNA, 14 nt, Barmah Forest virus
cauauaaccccuga

SEQ ID NO: 3362845 - RNA, 17 nt, Barmah Forest virus
caucacaguacuagcga

SEQ ID NO: 3362846 - RNA, 22 nt, Barmah Forest virus
cauccaucucuacuacagcuug

SEQ ID NO: 3362847 - RNA, 17 nt, Barmah Forest virus
ccaaaagaagaagucca

SEQ ID NO: 3362848 - RNA, 17 nt, Barmah Forest virus
ccaaguguccaugcaga

SEQ ID NO: 3362849 - RNA, 15 nt, Barmah Forest virus
ccaauggaguacagg

SEQ ID NO: 3362850 - RNA, 13 nt, Barmah Forest virus
ccaccaaaaccaa

SEQ ID NO: 3362851 - RNA, 23 nt, Barmah Forest virus
ccaccaaaaccaaaaaagaccca

SEQ ID NO: 3362852 - RNA, 15 nt, Barmah Forest virus
ccagaacuagccaaa

SEQ ID NO: 3362853 - RNA, 17 nt, Barmah Forest virus
ccauauuaccccugaau

SEQ ID NO: 3362854 - RNA, 14 nt, Barmah Forest virus
cccaaaagaagaag

SEQ ID NO: 3362855 - RNA, 17 nt, Barmah Forest virus
ccccugaauaguaacaa

SEQ ID NO: 3362856 - RNA, 14 nt, Barmah Forest virus
ccccugugagcauc

SEQ ID NO: 3362857 - RNA, 18 nt, Barmah Forest virus
cccucugaccgacagcac

SEQ ID NO: 3362858 - RNA, 17 nt, Barmah Forest virus
ccggcuucaggcaaugu

SEQ ID NO: 3362859 - RNA, 20 nt, Barmah Forest virus
ccguuuauguggggaggcgc

SEQ ID NO: 3362860 - RNA, 13 nt, Barmah Forest virus
ccguuuuacaaaa

SEQ ID NO: 3362861 - RNA, 13 nt, Barmah Forest virus
ccucggaaaggau

SEQ ID NO: 3362862 - RNA, 19 nt, Barmah Forest virus
cgaaaacagucagaugagu

SEQ ID NO: 3362863 - RNA, 18 nt, Barmah Forest virus
cgaacucuacggagaugu

SEQ ID NO: 3362864 - RNA, 10 nt, Barmah Forest virus
cgaagagaga

SEQ ID NO: 3362865 - RNA, 14 nt, Barmah Forest virus
cggaggugaaagga

SEQ ID NO: 3362866 - RNA, 14 nt, Barmah Forest virus
cgguagauaugaag

SEQ ID NO: 3362867 - RNA, 19 nt, Barmah Forest virus
cgguagauaugaagagaga

SEQ ID NO: 3362868 - RNA, 15 nt, Barmah Forest virus
cguagcuuuccaaaa

SEQ ID NO: 3362869 - RNA, 15 nt, Barmah Forest virus
cguccacucaucaga

SEQ ID NO: 3362870 - RNA, 17 nt, Barmah Forest virus
cuaucaauuagcaccag

SEQ ID NO: 3362871 - RNA, 21 nt, Barmah Forest virus
cuaugguagacgauggagacc

SEQ ID NO: 3362872 - RNA, 22 nt, Barmah Forest virus
cucaagugccgguaugcaugaa

SEQ ID NO: 3362873 - RNA, 19 nt, Barmah Forest virus
cuccuuuugaucacaaggu

SEQ ID NO: 3362874 - RNA, 19 nt, Barmah Forest virus
cugaagauccaagugucca

SEQ ID NO: 3362875 - RNA, 21 nt, Barmah Forest virus
cugaauaguaacaaaagagaa

SEQ ID NO: 3362876 - RNA, 17 nt, Barmah Forest virus
cugggggaaguggaguu

SEQ ID NO: 3362877 - RNA, 21 nt, Barmah Forest virus
cuguuagagcuugcaaugcau

SEQ ID NO: 3362878 - RNA, 17 nt, Barmah Forest virus
cuugacucgacgaugca

SEQ ID NO: 3362879 - RNA, 16 nt, Barmah Forest virus
gaaacauaagagggaa

SEQ ID NO: 3362880 - RNA, 21 nt, Barmah Forest virus
gaaaccaacccaaaagaagaa

SEQ ID NO: 3362881 - RNA, 13 nt, Barmah Forest virus
gaaaccagaagga

SEQ ID NO: 3362882 - RNA, 21 nt, Barmah Forest virus
gaagccuaagaaaccaaccca

SEQ ID NO: 3362883 - RNA, 18 nt, Barmah Forest virus
gaaggauucugugcagga

SEQ ID NO: 3362884 - RNA, 16 nt, Barmah Forest virus
gacaccaccaccaaaa

SEQ ID NO: 3362885 - RNA, 13 nt, Barmah Forest virus
aaacaaaaaagag

SEQ ID NO: 3362886 - RNA, 23 nt, Barmah Forest virus
aaacuguaaugucacacagauga

SEQ ID NO: 3362887 - RNA, 17 nt, Barmah Forest virus
cgguagauaugaagaga

SEQ ID NO: 3362888 - RNA, 17 nt, Barmah Forest virus
cuacaacccaagcagaa

SEQ ID NO: 3362889 - RNA, 14 nt, Barmah Forest virus
aaaauuacugauga

SEQ ID NO: 3362890 - RNA, 18 nt, Barmah Forest virus
aaacaccuuacaaaaugu

SEQ ID NO: 3362891 - RNA, 22 nt, Barmah Forest virus
aaacuaaauaaaaauuuagaaa

SEQ ID NO: 3362892 - RNA, 18 nt, Barmah Forest virus
aaaggaaagauccaugug

SEQ ID NO: 3362893 - RNA, 23 nt, Barmah Forest virus
aacuaguuuuauuggcacugacu

SEQ ID NO: 3362894 - RNA, 15 nt, Barmah Forest virus
aagacaauccaaguu

SEQ ID NO: 3362895 - RNA, 23 nt, Barmah Forest virus
aagacaccaccaccaaaaccaaa

SEQ ID NO: 3362896 - RNA, 17 nt, Barmah Forest virus
aagagauuacaaugcau

SEQ ID NO: 3362897 - RNA, 19 nt, Barmah Forest virus
aagcacggugaccaugugu

SEQ ID NO: 3362898 - RNA, 12 nt, Barmah Forest virus
aaggacauuaca

SEQ ID NO: 3362899 - RNA, 20 nt, Barmah Forest virus
aaggcgugugaagugcaguc

SEQ ID NO: 3362900 - RNA, 16 nt, Barmah Forest virus
aaguaugaucuagaau

SEQ ID NO: 3362901 - RNA, 14 nt, Barmah Forest virus
aagugaaaaccugg

SEQ ID NO: 3362902 - RNA, 12 nt, Barmah Forest virus
aaguugaaagga

SEQ ID NO: 3362903 - RNA, 17 nt, Barmah Forest virus
aauuuagaaaaacuuaa

SEQ ID NO: 3362904 - RNA, 19 nt, Barmah Forest virus
acaccugaagaaucagugg

SEQ ID NO: 3362905 - RNA, 18 nt, Barmah Forest virus
acagcacgugugcaguca

SEQ ID NO: 3362906 - RNA, 22 nt, Barmah Forest virus
acagcacuauguguccuccaga

SEQ ID NO: 3362907 - RNA, 18 nt, Barmah Forest virus
accaaaaccaaaaaagac

SEQ ID NO: 3362908 - RNA, 15 nt, Barmah Forest virus
accaacccaaaagaa

SEQ ID NO: 3362909 - RNA, 14 nt, Barmah Forest virus
accauggggcagug

SEQ ID NO: 3362910 - RNA, 17 nt, Barmah Forest virus
acccuuacuggaccauc

SEQ ID NO: 3362911 - RNA, 21 nt, Barmah Forest virus
accugaagaaucaguggagug

SEQ ID NO: 3362912 - RNA, 17 nt, Barmah Forest virus
acgaucgacaauccaga

SEQ ID NO: 3362913 - RNA, 21 nt, Barmah Forest virus
acuccaacagcuuguggcugc

SEQ ID NO: 3362914 - RNA, 17 nt, Barmah Forest virus
acucccaauacgugccc

SEQ ID NO: 3362915 - RNA, 21 nt, Barmah Forest virus
acucuacggagauguaggcau

SEQ ID NO: 3362916 - RNA, 23 nt, Barmah Forest virus
acugcaugaagaucgagaaugac

SEQ ID NO: 3362917 - RNA, 20 nt, Barmah Forest virus
acugcuacgaacaaaaucac

SEQ ID NO: 3362918 - RNA, 17 nt, Barmah Forest virus
acuucauauaaaauuac

SEQ ID NO: 3362919 - RNA, 13 nt, Barmah Forest virus
acuugcccacagg

SEQ ID NO: 3362920 - RNA, 20 nt, Barmah Forest virus
agaaaccaacccaaaagaag

SEQ ID NO: 3362921 - RNA, 15 nt, Barmah Forest virus
agaagcccaagaaga

SEQ ID NO: 3362922 - RNA, 21 nt, Barmah Forest virus
agauccaaguguccaugcaga

SEQ ID NO: 3362923 - RNA, 15 nt, Barmah Forest virus
agcuaaaagcaauac

SEQ ID NO: 3362924 - RNA, 18 nt, Barmah Forest virus
agcuaauuuuccaucagu

SEQ ID NO: 3362925 - RNA, 22 nt, Barmah Forest virus
agcucaugugaagggcacgauc

SEQ ID NO: 3362926 - RNA, 14 nt, Barmah Forest virus
agcuugcaaugcau

SEQ ID NO: 3362927 - RNA, 13 nt, Barmah Forest virus
aggaaauaugcgu

SEQ ID NO: 3362928 - RNA, 18 nt, Barmah Forest virus
aggugcaaaugaaggggc

SEQ ID NO: 3362929 - RNA, 21 nt, Barmah Forest virus
aguaacaaaagagaaaaacac

SEQ ID NO: 3362930 - RNA, 14 nt, Barmah Forest virus
aguacaacucccaa

SEQ ID NO: 3362931 - RNA, 15 nt, Barmah Forest virus
aguacaggaggcuga

SEQ ID NO: 3362932 - RNA, 18 nt, Barmah Forest virus
aguauccauuguaguaug

SEQ ID NO: 3362933 - RNA, 12 nt, Barmah Forest virus
agucaaguugaa

SEQ ID NO: 3362934 - RNA, 23 nt, Barmah Forest virus
agucacgcccggaaccaagcaca

SEQ ID NO: 3362935 - RNA, 18 nt, Barmah Forest virus
agucaugaaaccagcuca

SEQ ID NO: 3362936 - RNA, 18 nt, Barmah Forest virus
aguguauuacauaugcag

SEQ ID NO: 3362937 - RNA, 12 nt, Barmah Forest virus
aguguuggagga

SEQ ID NO: 3362938 - RNA, 14 nt, Barmah Forest virus
aguucaaagggcca

SEQ ID NO: 3362939 - RNA, 22 nt, Barmah Forest virus
aguugaaaggaccgaaagcugc

SEQ ID NO: 3362940 - RNA, 17 nt, Barmah Forest virus
auaaccaccgaaaaugu

SEQ ID NO: 3362941 - RNA, 13 nt, Barmah Forest virus
auaaccccugaau

SEQ ID NO: 3362942 - RNA, 13 nt, Barmah Forest virus
auaugaaagcaga

SEQ ID NO: 3362943 - RNA, 17 nt, Barmah Forest virus
auauuaccccugaauag

SEQ ID NO: 3362944 - RNA, 18 nt, Barmah Forest virus
auccguuuuacaaaauug

SEQ ID NO: 3362945 - RNA, 12 nt, Barmah Forest virus
augcaccaaagu

SEQ ID NO: 3362946 - RNA, 23 nt, Barmah Forest virus
auuaccccugaauaguaacaaaa

SEQ ID NO: 3362947 - RNA, 23 nt, Barmah Forest virus
auuccaaaacaccuuacaaaaug

SEQ ID NO: 3362948 - RNA, 20 nt, Barmah Forest virus
caaaauugcacggcagaaug

SEQ ID NO: 3362949 - RNA, 11 nt, Barmah Forest virus
caaagggccau

SEQ ID NO: 3362950 - RNA, 22 nt, Barmah Forest virus
caaaugaaaccgucugaagcaa

SEQ ID NO: 3362951 - RNA, 12 nt, Barmah Forest virus
caacagcaccau

SEQ ID NO: 3362952 - RNA, 17 nt, Barmah Forest virus
caacuagugaccucaga

SEQ ID NO: 3362953 - RNA, 17 nt, Barmah Forest virus
caagaagacaccaccac

SEQ ID NO: 3362954 - RNA, 23 nt, Barmah Forest virus
caagacaauccaaguuggggcag

SEQ ID NO: 3362955 - RNA, 19 nt, Barmah Forest virus
caauccagaacuagccaaa

SEQ ID NO: 3362956 - RNA, 18 nt, Barmah Forest virus
caauggaguacaggaggc

SEQ ID NO: 3362957 - RNA, 22 nt, Barmah Forest virus
caaugguuggcacacaccaccu

SEQ ID NO: 3362958 - RNA, 13 nt, Barmah Forest virus
cacaacagcacca

SEQ ID NO: 3362959 - RNA, 15 nt, Barmah Forest virus
cacacagaugagaga

SEQ ID NO: 3362960 - RNA, 17 nt, Barmah Forest virus
cacagagugugugaagc

SEQ ID NO: 3362961 - RNA, 20 nt, Barmah Forest virus
cacaguacuagcgagucuag

SEQ ID NO: 3362962 - RNA, 19 nt, Barmah Forest virus
cacaguguggcaguacaac

SEQ ID NO: 3362963 - RNA, 13 nt, Barmah Forest virus
caccgaagagaga

SEQ ID NO: 3362964 - RNA, 20 nt, Barmah Forest virus
caccgaagagagaccaaagg

SEQ ID NO: 3362965 - RNA, 22 nt, Barmah Forest virus
cagacacggguccaggccaccu

SEQ ID NO: 3362966 - RNA, 17 nt, Barmah Forest virus
cagacccacugaagaga

SEQ ID NO: 3362967 - RNA, 22 nt, Barmah Forest virus
cagaugagagaacuaccaacau

SEQ ID NO: 3362968 - RNA, 21 nt, Barmah Forest virus
cagcacccaccgggcacaaga

SEQ ID NO: 3362969 - RNA, 17 nt, Barmah Forest virus
cagcacgugugcaguca

SEQ ID NO: 3362970 - RNA, 21 nt, Barmah Forest virus
cagcccuauccguggucaccu

SEQ ID NO: 3362971 - RNA, 15 nt, Barmah Forest virus
cagcuuggcaauggu

SEQ ID NO: 3362972 - RNA, 18 nt, Barmah Forest virus
caggaaauaugcgugcaa

SEQ ID NO: 3362973 - RNA, 17 nt, Barmah Forest virus
cagucagcguagcaccu

SEQ ID NO: 3362974 - RNA, 21 nt, Barmah Forest virus
cauaagagggaaaccaauaca

SEQ ID NO: 3362975 - RNA, 13 nt, Barmah Forest virus
caucaaguacaaa

SEQ ID NO: 3362976 - RNA, 17 nt, Barmah Forest virus
caugagaaaccagaagg

SEQ ID NO: 3362977 - RNA, 13 nt, Barmah Forest virus
caugagcaagaca

SEQ ID NO: 3362978 - RNA, 21 nt, Barmah Forest virus
ccaagcacaccgaagagagac

SEQ ID NO: 3362979 - RNA, 17 nt, Barmah Forest virus
ccaagcagaaacaaaaa

SEQ ID NO: 3362980 - RNA, 20 nt, Barmah Forest virus
ccacaaggaaggagaccuaa

SEQ ID NO: 3362981 - RNA, 17 nt, Barmah Forest virus
ccagcaccaguccagag

SEQ ID NO: 3362982 - RNA, 17 nt, Barmah Forest virus
ccauauaaccccugaau

SEQ ID NO: 3362983 - RNA, 13 nt, Barmah Forest virus
cccacugaagaga

SEQ ID NO: 3362984 - RNA, 11 nt, Barmah Forest virus
cccagaagccu

SEQ ID NO: 3362985 - RNA, 15 nt, Barmah Forest virus
cccagcacccaccgg

SEQ ID NO: 3362986 - RNA, 14 nt, Barmah Forest virus
cccaucagacagac

SEQ ID NO: 3362987 - RNA, 17 nt, Barmah Forest virus
cccaugagcaagacaau

SEQ ID NO: 3362988 - RNA, 13 nt, Barmah Forest virus
ccccagcacccac

SEQ ID NO: 3362989 - RNA, 12 nt, Barmah Forest virus
ccgaaaauguca

SEQ ID NO: 3362990 - RNA, 22 nt, Barmah Forest virus
ccgaaguuacggaggugaaagg

SEQ ID NO: 3362991 - RNA, 15 nt, Barmah Forest virus
ccuuacaaaauguau

SEQ ID NO: 3362992 - RNA, 22 nt, Barmah Forest virus
ccuucagaaacauaagagggaa

SEQ ID NO: 3362993 - RNA, 20 nt, Barmah Forest virus
cgaagaccaucaaguacaaa

SEQ ID NO: 3362994 - RNA, 14 nt, Barmah Forest virus
cgaucgacaaucca

SEQ ID NO: 3362995 - RNA, 18 nt, Barmah Forest virus
cgauggagaccagcacca

SEQ ID NO: 3362996 - RNA, 15 nt, Barmah Forest virus
cgcacuucacaagga

SEQ ID NO: 3362997 - RNA, 15 nt, Barmah Forest virus
cguaacugcaugaag

SEQ ID NO: 3362998 - RNA, 13 nt, Barmah Forest virus
cuacucugucuaa

SEQ ID NO: 3362999 - RNA, 15 nt, Barmah Forest virus
cuauugcuguagaaa

SEQ ID NO: 3363000 - RNA, 14 nt, Barmah Forest virus
cugaagcaaacaaa

SEQ ID NO: 3363001 - RNA, 15 nt, Barmah Forest virus
cugcauucggggaaa

SEQ ID NO: 3363002 - RNA, 22 nt, Colorado tick fever virus
acugcuugcuuaaaggugugaa

SEQ ID NO: 3363003 - RNA, 14 nt, Colorado tick fever virus
agcaucauucuccc

SEQ ID NO: 3363004 - RNA, 19 nt, Colorado tick fever virus
agcuucagcggcugcggcu

SEQ ID NO: 3363005 - RNA, 14 nt, Colorado tick fever virus
aggaccucgccggc

SEQ ID NO: 3363006 - RNA, 15 nt, Colorado tick fever virus
aggaugcugaucucc

SEQ ID NO: 3363007 - RNA, 19 nt, Colorado tick fever virus
aggaugcugaucucccuug

SEQ ID NO: 3363008 - RNA, 23 nt, Colorado tick fever virus
aggaugcugaucucccuugcagu

SEQ ID NO: 3363009 - RNA, 17 nt, Colorado tick fever virus
aggguagucgcugagga

SEQ ID NO: 3363010 - RNA, 19 nt, Colorado tick fever virus
aggguagucgcugaggacc

SEQ ID NO: 3363011 - RNA, 14 nt, Colorado tick fever virus
agggugcauucuug

SEQ ID NO: 3363012 - RNA, 14 nt, Colorado tick fever virus
aguccaaacuccaa

SEQ ID NO: 3363013 - RNA, 22 nt, Colorado tick fever virus
cugacgcagggguucagucugu

SEQ ID NO: 3363014 - RNA, 19 nt, Colorado tick fever virus
cugaggaccucgccggcuu

SEQ ID NO: 3363015 - RNA, 15 nt, Colorado tick fever virus
cugaucucccuugca

SEQ ID NO: 3363016 - RNA, 18 nt, Colorado tick fever virus
cugcauaguauccacaug

SEQ ID NO: 3363017 - RNA, 20 nt, Colorado tick fever virus
cugcggcuuaccaggcgggc

SEQ ID NO: 3363018 - RNA, 22 nt, Colorado tick fever virus
cugugcacacgauugagcacaa

SEQ ID NO: 3363019 - RNA, 19 nt, Colorado tick fever virus
cuguguucggaugcaugca

SEQ ID NO: 3363020 - RNA, 15 nt, Colorado tick fever virus
cuugaugugaagaca

SEQ ID NO: 3363021 - RNA, 21 nt, Colorado tick fever virus
cuugaugugaagacaaugcag

SEQ ID NO: 3363022 - RNA, 16 nt, Colorado tick fever virus
gaacgacgcgagugag

SEQ ID NO: 3363023 - RNA, 20 nt, Colorado tick fever virus
gaacggggcuaaggccugga

SEQ ID NO: 3363024 - RNA, 14 nt, Colorado tick fever virus
gaaguaugauugag

SEQ ID NO: 3363025 - RNA, 13 nt, Colorado tick fever virus
gaauccuugcagu

SEQ ID NO: 3363026 - RNA, 14 nt, Colorado tick fever virus
gaauccuugcaguc

SEQ ID NO: 3363027 - RNA, 14 nt, Colorado tick fever virus
gacgcagggguuca

SEQ ID NO: 3363028 - RNA, 12 nt, Colorado tick fever virus
gacgggcagggu

SEQ ID NO: 3363029 - RNA, 18 nt, Colorado tick fever virus
gacugcuugcuuaaaggu

SEQ ID NO: 3363030 - RNA, 15 nt, Colorado tick fever virus
gagagugcaggcuuu

SEQ ID NO: 3363031 - RNA, 13 nt, Colorado tick fever virus
gagguacuggcag

SEQ ID NO: 3363032 - RNA, 17 nt, Colorado tick fever virus
gagguacuggcagaugg

SEQ ID NO: 3363033 - RNA, 18 nt, Colorado tick fever virus
gaugcugaucucccuugc

SEQ ID NO: 3363034 - RNA, 20 nt, Colorado tick fever virus
gauuggugaccggugcagga

SEQ ID NO: 3363035 - RNA, 13 nt, Colorado tick fever virus
gcacggggaauuu

SEQ ID NO: 3363036 - RNA, 20 nt, Colorado tick fever virus
gcaggaugcugaucucccuu

SEQ ID NO: 3363037 - RNA, 13 nt, Colorado tick fever virus
gcagggguucagu

SEQ ID NO: 3363038 - RNA, 20 nt, Colorado tick fever virus
gcagggguucagucuguguu

SEQ ID NO: 3363039 - RNA, 22 nt, Colorado tick fever virus
gcaggguagucgcugaggaccu

SEQ ID NO: 3363040 - RNA, 12 nt, Colorado tick fever virus
gcgaguugcagu

SEQ ID NO: 3363041 - RNA, 16 nt, Colorado tick fever virus
gcgcacggggaauuug

SEQ ID NO: 3363042 - RNA, 16 nt, Colorado tick fever virus
gcgggcuuuuugcgug

SEQ ID NO: 3363043 - RNA, 21 nt, Colorado tick fever virus
gcugaccagacguaugaggcu

SEQ ID NO: 3363044 - RNA, 19 nt, Colorado tick fever virus
gcugaucucccuugcaguc

SEQ ID NO: 3363045 - RNA, 15 nt, Colorado tick fever virus
ggaauccuugcaguc

SEQ ID NO: 3363046 - RNA, 13 nt, Colorado tick fever virus
ggaauuugcaguc

SEQ ID NO: 3363047 - RNA, 21 nt, Colorado tick fever virus
ggauauuuucuaagacugcuu

SEQ ID NO: 3363048 - RNA, 15 nt, Colorado tick fever virus
ggcgcgugagcaggu

SEQ ID NO: 3363049 - RNA, 15 nt, Colorado tick fever virus
gggcugcgcagugug

SEQ ID NO: 3363050 - RNA, 21 nt, Colorado tick fever virus
ggugcauucuugaugugaaga

SEQ ID NO: 3363051 - RNA, 15 nt, Colorado tick fever virus
gguggaggcugcuca

SEQ ID NO: 3363052 - RNA, 13 nt, Colorado tick fever virus
gguggcugugcac

SEQ ID NO: 3363053 - RNA, 14 nt, Colorado tick fever virus
gguuguugcaggcu

SEQ ID NO: 3363054 - RNA, 20 nt, Colorado tick fever virus
guagugaaugggcuggagaa

SEQ ID NO: 3363055 - RNA, 13 nt, Colorado tick fever virus
guaugaggcucuu

SEQ ID NO: 3363056 - RNA, 19 nt, Colorado tick fever virus
gugaggagggcagauggca

SEQ ID NO: 3363057 - RNA, 19 nt, Colorado tick fever virus
gugcacacgauugagcaca

SEQ ID NO: 3363058 - RNA, 20 nt, Colorado tick fever virus
gugcaggcuuucgugaagga

SEQ ID NO: 3363059 - RNA, 20 nt, Colorado tick fever virus
gugcuuuuuaugggugucug

SEQ ID NO: 3363060 - RNA, 22 nt, Colorado tick fever virus
guggaugaguggggcugcgcag

SEQ ID NO: 3363061 - RNA, 21 nt, Colorado tick fever virus
gugggagugcucaagugauug

SEQ ID NO: 3363062 - RNA, 19 nt, Colorado tick fever virus
uaaggccuggauacaaaug

SEQ ID NO: 3363063 - RNA, 14 nt, Colorado tick fever virus
uacacaauugcagu

SEQ ID NO: 3363064 - RNA, 15 nt, Colorado tick fever virus
uagaacgguugcagu

SEQ ID NO: 3363065 - RNA, 13 nt, Colorado tick fever virus
uagucgcugagga

SEQ ID NO: 3363066 - RNA, 14 nt, Colorado tick fever virus
uagucgcugaggac

SEQ ID NO: 3363067 - RNA, 17 nt, Colorado tick fever virus
uaugugccagaggaggu

SEQ ID NO: 3363068 - RNA, 19 nt, Colorado tick fever virus
ucaauugucgguguaaucu

SEQ ID NO: 3363069 - RNA, 15 nt, Colorado tick fever virus
ucagucuguguucgg

SEQ ID NO: 3363070 - RNA, 20 nt, Colorado tick fever virus
ucauucccagggugcauucu

SEQ ID NO: 3363071 - RNA, 21 nt, Colorado tick fever virus
uccuagcaucauucucccggg

SEQ ID NO: 3363072 - RNA, 14 nt, Colorado tick fever virus
ucgagagugcaggc

SEQ ID NO: 3363073 - RNA, 17 nt, Colorado tick fever virus
ucgagagugcaggcuuu

SEQ ID NO: 3363074 - RNA, 17 nt, Colorado tick fever virus
ucuccaucgcuuugcag

SEQ ID NO: 3363075 - RNA, 17 nt, Colorado tick fever virus
ucuccgcgaguugcagu

SEQ ID NO: 3363076 - RNA, 19 nt, Colorado tick fever virus
ucugacgcagggguucagu

SEQ ID NO: 3363077 - RNA, 12 nt, Colorado tick fever virus
ucuucaauuugu

SEQ ID NO: 3363078 - RNA, 17 nt, Colorado tick fever virus
ugaccggugcaggaugc

SEQ ID NO: 3363079 - RNA, 20 nt, Colorado tick fever virus
ugaugugaagacaaugcagu

SEQ ID NO: 3363080 - RNA, 13 nt, Colorado tick fever virus
ugaugugacacac

SEQ ID NO: 3363081 - RNA, 17 nt, Colorado tick fever virus
uggagaaccaucccuac

SEQ ID NO: 3363082 - RNA, 18 nt, Colorado tick fever virus
uggggcugcgcagugugu

SEQ ID NO: 3363083 - RNA, 20 nt, Colorado tick fever virus
uggguagaacgguugcaguc

SEQ ID NO: 3363084 - RNA, 17 nt, Colorado tick fever virus
uggugaccggugcagga

SEQ ID NO: 3363085 - RNA, 11 nt, Colorado tick fever virus
ugucugaauac

SEQ ID NO: 3363086 - RNA, 17 nt, Colorado tick fever virus
ugugaagacaaugcagu

SEQ ID NO: 3363087 - RNA, 18 nt, Colorado tick fever virus
uguucggaugcaugcagu

SEQ ID NO: 3363088 - RNA, 21 nt, Colorado tick fever virus
uguuggcgugcgcgacgcauc

SEQ ID NO: 3363089 - RNA, 11 nt, Colorado tick fever virus
uucagcagcag

SEQ ID NO: 3363090 - RNA, 14 nt, Colorado tick fever virus
uucccagggugcau

SEQ ID NO: 3363091 - RNA, 17 nt, Colorado tick fever virus
uucggaugcaugcaguc

SEQ ID NO: 3363092 - RNA, 23 nt, Colorado tick fever virus
uucuaagacugcuugcuuaaagg

SEQ ID NO: 3363093 - RNA, 18 nt, Colorado tick fever virus
uucuugaugugaagacaa

SEQ ID NO: 3363094 - RNA, 22 nt, Colorado tick fever virus
uugacacagucugucaaagacg

SEQ ID NO: 3363095 - RNA, 20 nt, Colorado tick fever virus
uugggucacuauggggcuga

SEQ ID NO: 3363096 - RNA, 15 nt, Colorado tick fever virus
uuguuaacaaugagu

SEQ ID NO: 3363097 - RNA, 14 nt, Colorado tick fever virus
uuguugcaggcuuu

SEQ ID NO: 3363098 - RNA, 23 nt, Colorado tick fever virus
auugagagcggagccuuuaaggu

SEQ ID NO: 3363099 - RNA, 22 nt, Colorado tick fever virus
auuggauauuuucuaagacugc

SEQ ID NO: 3363100 - RNA, 11 nt, Colorado tick fever virus
caauugcaguc

SEQ ID NO: 3363101 - RNA, 21 nt, Colorado tick fever virus
cacgccauacacaauugcagu

SEQ ID NO: 3363102 - RNA, 19 nt, Colorado tick fever virus
cagaggagguuguugcagg

SEQ ID NO: 3363103 - RNA, 23 nt, Colorado tick fever virus
caggaugcugaucucccuugcag

SEQ ID NO: 3363104 - RNA, 22 nt, Colorado tick fever virus
caggguagucgcugaggaccuc

SEQ ID NO: 3363105 - RNA, 13 nt, Colorado tick fever virus
cauccgugcucgu

SEQ ID NO: 3363106 - RNA, 15 nt, Colorado tick fever virus
caucgcuuugcaguc

SEQ ID NO: 3363107 - RNA, 14 nt, Colorado tick fever virus
cauucccagggugc

SEQ ID NO: 3363108 - RNA, 11 nt, Colorado tick fever virus
ccaaacuccaa

SEQ ID NO: 3363109 - RNA, 13 nt, Colorado tick fever virus
cccaauggugucu

SEQ ID NO: 3363110 - RNA, 12 nt, Colorado tick fever virus
ccgcgaguugca

SEQ ID NO: 3363111 - RNA, 16 nt, Colorado tick fever virus
ccgggacggguaauug

SEQ ID NO: 3363112 - RNA, 15 nt, Colorado tick fever virus
ccggugcaggaugcu

SEQ ID NO: 3363113 - RNA, 17 nt, Colorado tick fever virus
cgccggcuuacggaaug

SEQ ID NO: 3363114 - RNA, 13 nt, Colorado tick fever virus
cggagggugaggu

SEQ ID NO: 3363115 - RNA, 16 nt, Colorado tick fever virus
cggggaauuugcaguc

SEQ ID NO: 3363116 - RNA, 22 nt, Colorado tick fever virus
cguagucuccgcgaguugcagu

SEQ ID NO: 3363117 - RNA, 14 nt, Colorado tick fever virus
cgugacgggcaggg

SEQ ID NO: 3363118 - RNA, 18 nt, Colorado tick fever virus
cguugacacagucuguca

SEQ ID NO: 3363119 - RNA, 19 nt, Colorado tick fever virus
cuagcaucauucucccggg

SEQ ID NO: 3363120 - RNA, 16 nt, Colorado tick fever virus
cucaguuaggcggugc

SEQ ID NO: 3363121 - RNA, 18 nt, Colorado tick fever virus
cucauauagggaauccuu

SEQ ID NO: 3363122 - RNA, 18 nt, Colorado tick fever virus
cuccaucgcuuugcaguc

SEQ ID NO: 3363123 - RNA, 13 nt, Colorado tick fever virus
cucccuugcaguc

SEQ ID NO: 3363124 - RNA, 17 nt, Colorado tick fever virus
cuccgcgaguugcaguc

SEQ ID NO: 3363125 - RNA, 23 nt, Colorado tick fever virus
cugagcucuccaucgcuuugcag

SEQ ID NO: 3363126 - RNA, 18 nt, Colorado tick fever virus
cugaucucccuugcaguc

SEQ ID NO: 3363127 - RNA, 21 nt, Colorado tick fever virus
cugucaaagacggcugcuggc

SEQ ID NO: 3363128 - RNA, 17 nt, Colorado tick fever virus
cuguguucggaugcaug

SEQ ID NO: 3363129 - RNA, 13 nt, Colorado tick fever virus
cuugaugugaaga

SEQ ID NO: 3363130 - RNA, 14 nt, Colorado tick fever virus
cuuuggugaaggau

SEQ ID NO: 3363131 - RNA, 17 nt, Colorado tick fever virus
gaacgacgcgagugagg

SEQ ID NO: 3363132 - RNA, 17 nt, Colorado tick fever virus
gaccagacguaugaggc

SEQ ID NO: 3363133 - RNA, 18 nt, Colorado tick fever virus
gaccuaagauaugcucag

SEQ ID NO: 3363134 - RNA, 19 nt, Colorado tick fever virus
gacugcuugcuuaaaggug

SEQ ID NO: 3363135 - RNA, 11 nt, Colorado tick fever virus
gagagugcagg

SEQ ID NO: 3363136 - RNA, 16 nt, Colorado tick fever virus
gaguggggcugcgcag

SEQ ID NO: 3363137 - RNA, 20 nt, Colorado tick fever virus
gaguggggcugcgcagugug

SEQ ID NO: 3363138 - RNA, 11 nt, Colorado tick fever virus
gauaugcucag

SEQ ID NO: 3363139 - RNA, 24 nt, Colorado tick fever virus
gauauuuucuaagacugcuugcuu

SEQ ID NO: 3363140 - RNA, 19 nt, Colorado tick fever virus
gcaccacgccauacacaau

SEQ ID NO: 3363141 - RNA, 23 nt, Colorado tick fever virus
gcaggaugcugaucucccuugca

SEQ ID NO: 3363142 - RNA, 21 nt, Colorado tick fever virus
gcaggcuuuaagcgagugcgg

SEQ ID NO: 3363143 - RNA, 21 nt, Colorado tick fever virus
gcaggcuuucgugaaggagcu

SEQ ID NO: 3363144 - RNA, 18 nt, Colorado tick fever virus
gcaggguagucgcugagg

SEQ ID NO: 3363145 - RNA, 21 nt, Colorado tick fever virus
gcaucuccguuaacugagagc

SEQ ID NO: 3363146 - RNA, 23 nt, Colorado tick fever virus
gcccugucgggaaaaaucggugg

SEQ ID NO: 3363147 - RNA, 21 nt, Colorado tick fever virus
gccggcuuacggaaugaugac

SEQ ID NO: 3363148 - RNA, 18 nt, Colorado tick fever virus
gcucaagugauuguugug

SEQ ID NO: 3363149 - RNA, 20 nt, Colorado tick fever virus
gcugaccagacguaugaggc

SEQ ID NO: 3363150 - RNA, 13 nt, Colorado tick fever virus
gcuuaaaggugug

SEQ ID NO: 3363151 - RNA, 19 nt, Colorado tick fever virus
gcuuuuuaugggugucuga

SEQ ID NO: 3363152 - RNA, 17 nt, Colorado tick fever virus
ggacggguaauugcagu

SEQ ID NO: 3363153 - RNA, 13 nt, Colorado tick fever virus
ggagggcagaugg

SEQ ID NO: 3363154 - RNA, 13 nt, Colorado tick fever virus
ggaugcaugcagu

SEQ ID NO: 3363155 - RNA, 23 nt, Colorado tick fever virus
ggaugcugaucucccuugcaguc

SEQ ID NO: 3363156 - RNA, 21 nt, Colorado tick fever virus
ggauuggugaccggugcagga

SEQ ID NO: 3363157 - RNA, 22 nt, Colorado tick fever virus
ggcaggguagucgcugaggacc

SEQ ID NO: 3363158 - RNA, 17 nt, Colorado tick fever virus
ggcgggcuuuuugcgug

SEQ ID NO: 3363159 - RNA, 14 nt, Colorado tick fever virus
gggaauuugcaguc

SEQ ID NO: 3363160 - RNA, 19 nt, Colorado tick fever virus
gggacggguaauugcaguc

SEQ ID NO: 3363161 - RNA, 15 nt, Colorado tick fever virus
ggggaauuugcaguc

SEQ ID NO: 3363162 - RNA, 22 nt, Colorado tick fever virus
ggggguauugauguuggcgugc

SEQ ID NO: 3363163 - RNA, 20 nt, Colorado tick fever virus
gggguauugauguuggcgug

SEQ ID NO: 3363164 - RNA, 17 nt, Colorado tick fever virus
gggguucagucuguguu

SEQ ID NO: 3363165 - RNA, 16 nt, Colorado tick fever virus
gggucacuauggggcu

SEQ ID NO: 3363166 - RNA, 16 nt, Colorado tick fever virus
gggugagguacuggca

SEQ ID NO: 3363167 - RNA, 17 nt, Colorado tick fever virus
ggugaccggugcaggau

SEQ ID NO: 3363168 - RNA, 23 nt, Colorado tick fever virus
ggugcaggaugcugaucucccuu

SEQ ID NO: 3363169 - RNA, 14 nt, Colorado tick fever virus
gguggaggcugcuc

SEQ ID NO: 3363170 - RNA, 15 nt, Colorado tick fever virus
gguucagucuguguu

SEQ ID NO: 3363171 - RNA, 22 nt, Colorado tick fever virus
guaugugacauucauucccagg

SEQ ID NO: 3363172 - RNA, 16 nt, Colorado tick fever virus
gucuuuggaugauggg

SEQ ID NO: 3363173 - RNA, 18 nt, Colorado tick fever virus
gugacauucauucccagg

SEQ ID NO: 3363174 - RNA, 15 nt, Colorado tick fever virus
gugaccggugcagga

SEQ ID NO: 3363175 - RNA, 20 nt, Colorado tick fever virus
gugcaccacgccauacacaa

SEQ ID NO: 3363176 - RNA, 14 nt, Colorado tick fever virus
gugcaggaugcuga

SEQ ID NO: 3363177 - RNA, 22 nt, Colorado tick fever virus
gugggauuggugaccggugcag

SEQ ID NO: 3363178 - RNA, 16 nt, Colorado tick fever virus
guggggcugcgcagug

SEQ ID NO: 3363179 - RNA, 15 nt, Colorado tick fever virus
uacacaauugcaguc

SEQ ID NO: 3363180 - RNA, 23 nt, Colorado tick fever virus
ucagcggcugcggcuuaccaggc

SEQ ID NO: 3363181 - RNA, 15 nt, Colorado tick fever virus
uccuagcaucauucu

SEQ ID NO: 3363182 - RNA, 13 nt, Colorado tick fever virus
ucggagggugagg

SEQ ID NO: 3363183 - RNA, 14 nt, Colorado tick fever virus
ucggaugcaugcag

SEQ ID NO: 3363184 - RNA, 22 nt, Colorado tick fever virus
ucugacgcagggguucagucug

SEQ ID NO: 3363185 - RNA, 15 nt, Colorado tick fever virus
ucuguuuggauguca

SEQ ID NO: 3363186 - RNA, 20 nt, Colorado tick fever virus
ugaaaauggcguaguaguga

SEQ ID NO: 3363187 - RNA, 16 nt, Colorado tick fever virus
ugaaugggcuggagaa

SEQ ID NO: 3363188 - RNA, 13 nt, Colorado tick fever virus
ugacgagugggua

SEQ ID NO: 3363189 - RNA, 18 nt, Colorado tick fever virus
ugaggagggcagauggca

SEQ ID NO: 3363190 - RNA, 19 nt, Colorado tick fever virus
ugaguggggcugcgcagug

SEQ ID NO: 3363191 - RNA, 20 nt, Colorado tick fever virus
agugacccuggagccgugcc

SEQ ID NO: 3363192 - RNA, 20 nt, Colorado tick fever virus
aguggggcugcgcagugugu

SEQ ID NO: 3363193 - RNA, 18 nt, Colorado tick fever virus
auauagggaauccuugca

SEQ ID NO: 3363194 - RNA, 19 nt, Colorado tick fever virus
auauagggaauccuugcag

SEQ ID NO: 3363195 - RNA, 21 nt, Colorado tick fever virus
auauagggaauccuugcaguc

SEQ ID NO: 3363196 - RNA, 22 nt, Colorado tick fever virus
auauuuucuaagacugcuugcu

SEQ ID NO: 3363197 - RNA, 11 nt, Colorado tick fever virus
aucuucaauuu

SEQ ID NO: 3363198 - RNA, 18 nt, Colorado tick fever virus
augacguccuagcaucau

SEQ ID NO: 3363199 - RNA, 21 nt, Colorado tick fever virus
augaugacguccuagcaucau

SEQ ID NO: 3363200 - RNA, 22 nt, Colorado tick fever virus
augcaaguggucgaccacgagu

SEQ ID NO: 3363201 - RNA, 13 nt, Colorado tick fever virus
auggggcugacca

SEQ ID NO: 3363202 - RNA, 23 nt, Colorado tick fever virus
auggguugagguggcugugcaca

SEQ ID NO: 3363203 - RNA, 17 nt, Colorado tick fever virus
augugaagacaaugcag

SEQ ID NO: 3363204 - RNA, 18 nt, Colorado tick fever virus
augugacauucauuccca

SEQ ID NO: 3363205 - RNA, 22 nt, Colorado tick fever virus
augugacauucauucccagggu

SEQ ID NO: 3363206 - RNA, 23 nt, Colorado tick fever virus
auguucauccgugcucgugaagu

SEQ ID NO: 3363207 - RNA, 23 nt, Colorado tick fever virus
auuggugaccggugcaggaugcu

SEQ ID NO: 3363208 - RNA, 14 nt, Colorado tick fever virus
auuuucuaagacug

SEQ ID NO: 3363209 - RNA, 18 nt, Colorado tick fever virus
caauugucgguguaaucu

SEQ ID NO: 3363210 - RNA, 21 nt, Colorado tick fever virus
caccacgccauacacaauugc

SEQ ID NO: 3363211 - RNA, 19 nt, Colorado tick fever virus
cagguggaggcugcucagu

SEQ ID NO: 3363212 - RNA, 16 nt, Colorado tick fever virus
cauauagggaauccuu

SEQ ID NO: 3363213 - RNA, 22 nt, Colorado tick fever virus
cauauagggaauccuugcaguc

SEQ ID NO: 3363214 - RNA, 17 nt, Colorado tick fever virus
caucguuguugaugcug

SEQ ID NO: 3363215 - RNA, 14 nt, Colorado tick fever virus
cauucauucccagg

SEQ ID NO: 3363216 - RNA, 12 nt, Colorado tick fever virus
cccagggugcau

SEQ ID NO: 3363217 - RNA, 14 nt, Colorado tick fever virus
cccgggacggguaa

SEQ ID NO: 3363218 - RNA, 18 nt, Colorado tick fever virus
ccggcuuacggaaugaug

SEQ ID NO: 3363219 - RNA, 19 nt, Colorado tick fever virus
cgauugagagcggagccuu

SEQ ID NO: 3363220 - RNA, 21 nt, Colorado tick fever virus
cgcagggguucagucuguguu

SEQ ID NO: 3363221 - RNA, 20 nt, Colorado tick fever virus
cgccuuuggugaaggaugca

SEQ ID NO: 3363222 - RNA, 22 nt, Colorado tick fever virus
cgcgcacggggaauuugcaguc

SEQ ID NO: 3363223 - RNA, 24 nt, Colorado tick fever virus
cgcguagucuccgcgaguugcagu

SEQ ID NO: 3363224 - RNA, 14 nt, Colorado tick fever virus
cggaugcaugcagu

SEQ ID NO: 3363225 - RNA, 23 nt, Colorado tick fever virus
cguagucuccgcgaguugcaguc

SEQ ID NO: 3363226 - RNA, 17 nt, Colorado tick fever virus
cuaagacugcuugcuua

SEQ ID NO: 3363227 - RNA, 16 nt, Colorado tick fever virus
cuaagauaugcucagu

SEQ ID NO: 3363228 - RNA, 13 nt, Colorado tick fever virus
cuaaggccuggau

SEQ ID NO: 3363229 - RNA, 19 nt, Colorado tick fever virus
cuacccccaauggugucua

SEQ ID NO: 3363230 - RNA, 21 nt, Colorado tick fever virus
cucaaugcucguaauccucag

SEQ ID NO: 3363231 - RNA, 23 nt, Colorado tick fever virus
cucccgggacggguaauugcagu

SEQ ID NO: 3363232 - RNA, 13 nt, Colorado tick fever virus
cucguaauccuca

SEQ ID NO: 3363233 - RNA, 20 nt, Colorado tick fever virus
cucuucgcgucaguuccaug

SEQ ID NO: 3363234 - RNA, 20 nt, Colorado tick fever virus
cuugaugugaagacaaugca

SEQ ID NO: 3363235 - RNA, 18 nt, Colorado tick fever virus
cuugcuuaaaggugugaa

SEQ ID NO: 3363236 - RNA, 23 nt, Colorado tick fever virus
gaaguaugauugagucuaugggg

SEQ ID NO: 3363237 - RNA, 19 nt, Colorado tick fever virus
gacauucauucccagggug

SEQ ID NO: 3363238 - RNA, 23 nt, Colorado tick fever virus
gaccucgccggcuuacggaauga

SEQ ID NO: 3363239 - RNA, 12 nt, Colorado tick fever virus
gacggcugcugg

SEQ ID NO: 3363240 - RNA, 17 nt, Colorado tick fever virus
gacggguaauugcaguc

SEQ ID NO: 3363241 - RNA, 22 nt, Colorado tick fever virus
gacguccuagcaucauucuccc

SEQ ID NO: 3363242 - RNA, 17 nt, Colorado tick fever virus
gaggagguuguugcagg

SEQ ID NO: 3363243 - RNA, 21 nt, Colorado tick fever virus
gaggagguuguugcaggcuuu

SEQ ID NO: 3363244 - RNA, 23 nt, Colorado tick fever virus
gauauuuucuaagacugcuugcu

SEQ ID NO: 3363245 - RNA, 19 nt, Colorado tick fever virus
gcacgcuugauuaccaggg

SEQ ID NO: 3363246 - RNA, 20 nt, Colorado tick fever virus
gcacgcuugauuaccagggu

SEQ ID NO: 3363247 - RNA, 19 nt, Colorado tick fever virus
gcagugugugacgaguggg

SEQ ID NO: 3363248 - RNA, 14 nt, Colorado tick fever virus
gcaucauucucccg

SEQ ID NO: 3363249 - RNA, 16 nt, Colorado tick fever virus
gcaucauucucccggg

SEQ ID NO: 3363250 - RNA, 19 nt, Colorado tick fever virus
gccauacacaauugcaguc

SEQ ID NO: 3363251 - RNA, 20 nt, Colorado tick fever virus
gccuggauacaaaugcagug

SEQ ID NO: 3363252 - RNA, 13 nt, Colorado tick fever virus
gcgaguugcaguc

SEQ ID NO: 3363253 - RNA, 21 nt, Colorado tick fever virus
gcgcacggggaauuugcaguc

SEQ ID NO: 3363254 - RNA, 22 nt, Colorado tick fever virus
gcggagccuuuaagguguagug

SEQ ID NO: 3363255 - RNA, 14 nt, Colorado tick fever virus
gcugaucucccuug

SEQ ID NO: 3363256 - RNA, 16 nt, Colorado tick fever virus
gcugcgcaguguguga

SEQ ID NO: 3363257 - RNA, 17 nt, Colorado tick fever virus
gcuuacggaaugaugac

SEQ ID NO: 3363258 - RNA, 20 nt, Colorado tick fever virus
gcuugcuuaaaggugugaaa

SEQ ID NO: 3363259 - RNA, 15 nt, Colorado tick fever virus
ggagguuguugcagg

SEQ ID NO: 3363260 - RNA, 17 nt, Colorado tick fever virus
ggauauuuucuaagacu

SEQ ID NO: 3363261 - RNA, 18 nt, Colorado tick fever virus
ggccuggauacaaaugca

SEQ ID NO: 3363262 - RNA, 14 nt, Colorado tick fever virus
ggcuauggugucuu

SEQ ID NO: 3363263 - RNA, 13 nt, Colorado tick fever virus
ggcugcgcagugu

SEQ ID NO: 3363264 - RNA, 20 nt, Colorado tick fever virus
gggaaaaaucggugggagug

SEQ ID NO: 3363265 - RNA, 16 nt, Colorado tick fever virus
gggaauccuugcaguc

SEQ ID NO: 3363266 - RNA, 22 nt, Colorado tick fever virus
gggauuggugaccggugcagga

SEQ ID NO: 3363267 - RNA, 16 nt, Colorado tick fever virus
ggggcugcgcagugug

SEQ ID NO: 3363268 - RNA, 12 nt, Colorado tick fever virus
ggguaauugcag

SEQ ID NO: 3363269 - RNA, 19 nt, Colorado tick fever virus
ggguagaacgguugcaguc

SEQ ID NO: 3363270 - RNA, 18 nt, Colorado tick fever virus
gguagaacgguugcaguc

SEQ ID NO: 3363271 - RNA, 19 nt, Colorado tick fever virus
ggugaccggugcaggaugc

SEQ ID NO: 3363272 - RNA, 15 nt, Colorado tick fever virus
ggugcaggaugcuga

SEQ ID NO: 3363273 - RNA, 14 nt, Colorado tick fever virus
guacuggcagaugg

SEQ ID NO: 3363274 - RNA, 17 nt, Colorado tick fever virus
guagucgcugaggaccu

SEQ ID NO: 3363275 - RNA, 19 nt, Colorado tick fever virus
gucaaagacggcugcuggc

SEQ ID NO: 3363276 - RNA, 16 nt, Colorado tick fever virus
gucgcugaggaccucg

SEQ ID NO: 3363277 - RNA, 18 nt, Colorado tick fever virus
gucuccgcgaguugcagu

SEQ ID NO: 3363278 - RNA, 16 nt, Colorado tick fever virus
gugaccggugcaggau

SEQ ID NO: 3363279 - RNA, 17 nt, Colorado tick fever virus
gugaccggugcaggaug

SEQ ID NO: 3363280 - RNA, 20 nt, Colorado tick fever virus
gugcauucuugaugugaaga

SEQ ID NO: 3363281 - RNA, 15 nt, Colorado tick fever virus
cgggcuuuuugcgug

SEQ ID NO: 3363282 - RNA, 15 nt, Colorado tick fever virus
cggggcuaaggccug

SEQ ID NO: 3363283 - RNA, 15 nt, Colorado tick fever virus
cggguaauugcaguc

SEQ ID NO: 3363284 - RNA, 18 nt, Colorado tick fever virus
cggugggagugcucaagu

SEQ ID NO: 3363285 - RNA, 23 nt, Colorado tick fever virus
cguggaugaguggggcugcgcag

SEQ ID NO: 3363286 - RNA, 11 nt, Colorado tick fever virus
cuaagacugcu

SEQ ID NO: 3363287 - RNA, 13 nt, Colorado tick fever virus
cuagcaucauucu

SEQ ID NO: 3363288 - RNA, 18 nt, Colorado tick fever virus
cucggagggugagguacu

SEQ ID NO: 3363289 - RNA, 22 nt, Colorado tick fever virus
cucgugaagucggcuggcgcaa

SEQ ID NO: 3363290 - RNA, 21 nt, Colorado tick fever virus
cugagagcgggguuguuuauc

SEQ ID NO: 3363291 - RNA, 17 nt, Colorado tick fever virus
cugcuugcuuaaaggug

SEQ ID NO: 3363292 - RNA, 14 nt, Colorado tick fever virus
gaagacaaugcagu

SEQ ID NO: 3363293 - RNA, 23 nt, Colorado tick fever virus
gaccuacccccaauggugucuau

SEQ ID NO: 3363294 - RNA, 14 nt, Colorado tick fever virus
gacggguaauugca

SEQ ID NO: 3363295 - RNA, 16 nt, Colorado tick fever virus
gacguccuagcaucau

SEQ ID NO: 3363296 - RNA, 23 nt, Colorado tick fever virus
gagcucuccaucgcuuugcaguc

SEQ ID NO: 3363297 - RNA, 14 nt, Colorado tick fever virus
gaggagggcagaug

SEQ ID NO: 3363298 - RNA, 16 nt, Colorado tick fever virus
gagguacuggcagaug

SEQ ID NO: 3363299 - RNA, 16 nt, Colorado tick fever virus
gaucucccuugcaguc

SEQ ID NO: 3363300 - RNA, 15 nt, Colorado tick fever virus
gcaggaugcugaucu

SEQ ID NO: 3363301 - RNA, 19 nt, Colorado tick fever virus
gcaucuucaauuuguuaac

SEQ ID NO: 3363302 - RNA, 15 nt, Colorado tick fever virus
gcgagugcgggagcu

SEQ ID NO: 3363303 - RNA, 16 nt, Colorado tick fever virus
gcugaggaccucgccg

SEQ ID NO: 3363304 - RNA, 17 nt, Colorado tick fever virus
gcugaucucccuugcag

SEQ ID NO: 3363305 - RNA, 21 nt, Colorado tick fever virus
gcugugcacacgauugagcac

SEQ ID NO: 3363306 - RNA, 16 nt, Colorado tick fever virus
gcuugcuuaaaggugu

SEQ ID NO: 3363307 - RNA, 17 nt, Colorado tick fever virus
ggacaucguuguugaug

SEQ ID NO: 3363308 - RNA, 21 nt, Colorado tick fever virus
ggagcuucagcggcugcggcu

SEQ ID NO: 3363309 - RNA, 14 nt, Colorado tick fever virus
ggaugcaugcaguc

SEQ ID NO: 3363310 - RNA, 16 nt, Colorado tick fever virus
ggaugcugaucucccu

SEQ ID NO: 3363311 - RNA, 18 nt, Colorado tick fever virus
gggauuggugaccggugc

SEQ ID NO: 3363312 - RNA, 18 nt, Colorado tick fever virus
gggcgaaacuacuccauu

SEQ ID NO: 3363313 - RNA, 14 nt, Colorado tick fever virus
ggguaauugcaguc

SEQ ID NO: 3363314 - RNA, 17 nt, Colorado tick fever virus
ggguugagguggcugug

SEQ ID NO: 3363315 - RNA, 17 nt, Colorado tick fever virus
ggugggauuggugaccg

SEQ ID NO: 3363316 - RNA, 18 nt, Colorado tick fever virus
gguugagguggcugugca

SEQ ID NO: 3363317 - RNA, 12 nt, Colorado tick fever virus
guacuggcagau

SEQ ID NO: 3363318 - RNA, 22 nt, Colorado tick fever virus
guagucuccgcgaguugcaguc

SEQ ID NO: 3363319 - RNA, 12 nt, Colorado tick fever virus
gucacuaugggg

SEQ ID NO: 3363320 - RNA, 19 nt, Colorado tick fever virus
gucgcugaggaccucgccg

SEQ ID NO: 3363321 - RNA, 22 nt, Colorado tick fever virus
gugaaaaucaauugucggugua

SEQ ID NO: 3363322 - RNA, 21 nt, Colorado tick fever virus
gugacauucauucccagggug

SEQ ID NO: 3363323 - RNA, 14 nt, Colorado tick fever virus
gugaccggugcagg

SEQ ID NO: 3363324 - RNA, 15 nt, Colorado tick fever virus
gugacgggcagggua

SEQ ID NO: 3363325 - RNA, 21 nt, Colorado tick fever virus
gugacgggcaggguagucgcu

SEQ ID NO: 3363326 - RNA, 14 nt, Colorado tick fever virus
gugcauucuugaug

SEQ ID NO: 3363327 - RNA, 20 nt, Colorado tick fever virus
guggaugaguggggcugcgc

SEQ ID NO: 3363328 - RNA, 18 nt, Colorado tick fever virus
gugucuuaugugccagag

SEQ ID NO: 3363329 - RNA, 16 nt, Colorado tick fever virus
guguucggaugcaugc

SEQ ID NO: 3363330 - RNA, 23 nt, Colorado tick fever virus
guguuggccuggugagcuguacc

SEQ ID NO: 3363331 - RNA, 17 nt, Colorado tick fever virus
guuggccuggugagcug

SEQ ID NO: 3363332 - RNA, 16 nt, Colorado tick fever virus
uaagacugcuugcuua

SEQ ID NO: 3363333 - RNA, 14 nt, Colorado tick fever virus
uaaucugacgcagg

SEQ ID NO: 3363334 - RNA, 14 nt, Colorado tick fever virus
uagaaguaugauug

SEQ ID NO: 3363335 - RNA, 15 nt, Colorado tick fever virus
uauccacaugaugug

SEQ ID NO: 3363336 - RNA, 17 nt, Colorado tick fever virus
ucaaagacggcugcugg

SEQ ID NO: 3363337 - RNA, 21 nt, Colorado tick fever virus
ucaaagacggcugcuggcugu

SEQ ID NO: 3363338 - RNA, 17 nt, Colorado tick fever virus
ucaauugucgguguaau

SEQ ID NO: 3363339 - RNA, 22 nt, Colorado tick fever virus
ucauucccagggugcauucuug

SEQ ID NO: 3363340 - RNA, 15 nt, Colorado tick fever virus
uccaucgcuuugcag

SEQ ID NO: 3363341 - RNA, 22 nt, Colorado tick fever virus
ucccgggacggguaauugcagu

SEQ ID NO: 3363342 - RNA, 23 nt, Colorado tick fever virus
ucccgggacggguaauugcaguc

SEQ ID NO: 3363343 - RNA, 18 nt, Colorado tick fever virus
uccgccuuuggugaagga

SEQ ID NO: 3363344 - RNA, 11 nt, Colorado tick fever virus
uccuugcaguc

SEQ ID NO: 3363345 - RNA, 19 nt, Colorado tick fever virus
ucuaagacugcuugcuuaa

SEQ ID NO: 3363346 - RNA, 20 nt, Colorado tick fever virus
ugaacggggcuaaggccugg

SEQ ID NO: 3363347 - RNA, 23 nt, Colorado tick fever virus
ugacacacccucauauagggaau

SEQ ID NO: 3363348 - RNA, 16 nt, Colorado tick fever virus
ugacauucauucccag

SEQ ID NO: 3363349 - RNA, 17 nt, Colorado tick fever virus
ugacauucauucccagg

SEQ ID NO: 3363350 - RNA, 13 nt, Colorado tick fever virus
ugagaguugcagu

SEQ ID NO: 3363351 - RNA, 21 nt, Colorado tick fever virus
ugcauucuugaugugaagaca

SEQ ID NO: 3363352 - RNA, 20 nt, Colorado tick fever virus
ugcugaucucccuugcaguc

SEQ ID NO: 3363353 - RNA, 16 nt, Colorado tick fever virus
uggauacaaaugcagu

SEQ ID NO: 3363354 - RNA, 16 nt, Colorado tick fever virus
uggugaccggugcagg

SEQ ID NO: 3363355 - RNA, 15 nt, Colorado tick fever virus
uguguaucauuuuga

SEQ ID NO: 3363356 - RNA, 22 nt, Colorado tick fever virus
uguguaucauuuugauccuacc

SEQ ID NO: 3363357 - RNA, 20 nt, Colorado tick fever virus
uguguucggaugcaugcagu

SEQ ID NO: 3363358 - RNA, 18 nt, Colorado tick fever virus
uuaaaggugugaaaauca

SEQ ID NO: 3363359 - RNA, 20 nt, Colorado tick fever virus
uucauucccagggugcauuc

SEQ ID NO: 3363360 - RNA, 17 nt, Colorado tick fever virus
uucccagggugcauucu

SEQ ID NO: 3363361 - RNA, 14 nt, Colorado tick fever virus
uucggaugcaugca

SEQ ID NO: 3363362 - RNA, 16 nt, Colorado tick fever virus
uucuugaugugaagac

SEQ ID NO: 3363363 - RNA, 21 nt, Colorado tick fever virus
uugaugugaagacaaugcagu

SEQ ID NO: 3363364 - RNA, 22 nt, Colorado tick fever virus
ucuugaugugaagacaaugcag

SEQ ID NO: 3363365 - RNA, 23 nt, Colorado tick fever virus
ucuugaugugaagacaaugcagu

SEQ ID NO: 3363366 - RNA, 22 nt, Colorado tick fever virus
ugaccggugcaggaugcugauc

SEQ ID NO: 3363367 - RNA, 23 nt, Colorado tick fever virus
ugacgggcaggguagucgcugag

SEQ ID NO: 3363368 - RNA, 13 nt, Colorado tick fever virus
ugaggaccucgcc

SEQ ID NO: 3363369 - RNA, 14 nt, Colorado tick fever virus
ugaguggggcugcg

SEQ ID NO: 3363370 - RNA, 16 nt, Colorado tick fever virus
ugaguugaaggucggg

SEQ ID NO: 3363371 - RNA, 14 nt, Colorado tick fever virus
ugaucucccuugca

SEQ ID NO: 3363372 - RNA, 16 nt, Colorado tick fever virus
ugaucucccuugcagu

SEQ ID NO: 3363373 - RNA, 16 nt, Colorado tick fever virus
ugaugacguccuagca

SEQ ID NO: 3363374 - RNA, 12 nt, Colorado tick fever virus
ugaugugaagac

SEQ ID NO: 3363375 - RNA, 23 nt, Colorado tick fever virus
ugcaaguggucgaccacgaguga

SEQ ID NO: 3363376 - RNA, 21 nt, Colorado tick fever virus
ugccagaggagguuguugcag

SEQ ID NO: 3363377 - RNA, 13 nt, Colorado tick fever virus
ugccgcaucuuca

SEQ ID NO: 3363378 - RNA, 15 nt, Colorado tick fever virus
ugcuuaaagguguga

SEQ ID NO: 3363379 - RNA, 22 nt, Colorado tick fever virus
uggaugaguggggcugcgcagu

SEQ ID NO: 3363380 - RNA, 22 nt, Colorado tick fever virus
ugggauuggugaccggugcagg

SEQ ID NO: 3363381 - RNA, 19 nt, Colorado tick fever virus
uggugaccggugcaggaug

SEQ ID NO: 3363382 - RNA, 19 nt, Colorado tick fever virus
uuaaaggugugaaaaucaa

SEQ ID NO: 3363383 - RNA, 16 nt, Colorado tick fever virus
uucggaugcaugcagu

SEQ ID NO: 3363384 - RNA, 17 nt, Colorado tick fever virus
uugcuuaaaggugugaa

SEQ ID NO: 3363385 - RNA, 18 nt, Colorado tick fever virus
uugcuuaaaggugugaaa

SEQ ID NO: 3363386 - RNA, 12 nt, Colorado tick fever virus
aaggagcuucag

SEQ ID NO: 3363387 - RNA, 23 nt, Colorado tick fever virus
acacgauugagcacaaaauccau

SEQ ID NO: 3363388 - RNA, 12 nt, Colorado tick fever virus
acauucauuccc

SEQ ID NO: 3363389 - RNA, 20 nt, Colorado tick fever virus
accggugcaggaugcugauc

SEQ ID NO: 3363390 - RNA, 18 nt, Colorado tick fever virus
acgcagggguucagucug

SEQ ID NO: 3363391 - RNA, 16 nt, Colorado tick fever virus
acggggaauuugcagu

SEQ ID NO: 3363392 - RNA, 15 nt, Colorado tick fever virus
agaacgguugcaguc

SEQ ID NO: 3363393 - RNA, 18 nt, Colorado tick fever virus
agcaucauucucccggga

SEQ ID NO: 3363394 - RNA, 20 nt, Colorado tick fever virus
agcgagugcgggagcuugag

SEQ ID NO: 3363395 - RNA, 16 nt, Colorado tick fever virus
aggagguuguugcagg

SEQ ID NO: 3363396 - RNA, 15 nt, Colorado tick fever virus
agggaauccuugcag

SEQ ID NO: 3363397 - RNA, 18 nt, Colorado tick fever virus
agggugagguacuggcag

SEQ ID NO: 3363398 - RNA, 24 nt, Colorado tick fever virus
auaguauccacaugaugugacaca

SEQ ID NO: 3363399 - RNA, 16 nt, Colorado tick fever virus
aucagguggaggcugc

SEQ ID NO: 3363400 - RNA, 14 nt, Colorado tick fever virus
aucucccuugcagu

SEQ ID NO: 3363401 - RNA, 14 nt, Colorado tick fever virus
augacguccuagca

SEQ ID NO: 3363402 - RNA, 19 nt, Colorado tick fever virus
augcgugacgggcagggua

SEQ ID NO: 3363403 - RNA, 14 nt, Colorado tick fever virus
augggcuggagaac

SEQ ID NO: 3363404 - RNA, 13 nt, Colorado tick fever virus
augugaagacaau

SEQ ID NO: 3363405 - RNA, 14 nt, Colorado tick fever virus
auucauucccaggg

SEQ ID NO: 3363406 - RNA, 18 nt, Colorado tick fever virus
auucauucccagggugca

SEQ ID NO: 3363407 - RNA, 17 nt, Colorado tick fever virus
auucccagggugcauuc

SEQ ID NO: 3363408 - RNA, 15 nt, Colorado tick fever virus
auucuugaugugaag

SEQ ID NO: 3363409 - RNA, 22 nt, Colorado tick fever virus
auuggugaccggugcaggaugc

SEQ ID NO: 3363410 - RNA, 19 nt, Colorado tick fever virus
auuuucuaagacugcuugc

SEQ ID NO: 3363411 - RNA, 15 nt, Colorado tick fever virus
cacgagugacugaug

SEQ ID NO: 3363412 - RNA, 15 nt, Colorado tick fever virus
cacggggaauuugca

SEQ ID NO: 3363413 - RNA, 20 nt, Colorado tick fever virus
cagcagaggcgcgugagcag

SEQ ID NO: 3363414 - RNA, 12 nt, Colorado tick fever virus
cagggguucagu

SEQ ID NO: 3363415 - RNA, 15 nt, Colorado tick fever virus
caggguagucgcuga

SEQ ID NO: 3363416 - RNA, 15 nt, Colorado tick fever virus
cagggugcauucuug

SEQ ID NO: 3363417 - RNA, 14 nt, Colorado tick fever virus
cagguggaggcugc

SEQ ID NO: 3363418 - RNA, 22 nt, Colorado tick fever virus
caguauuacguugacacagucu

SEQ ID NO: 3363419 - RNA, 18 nt, Colorado tick fever virus
cauucccagggugcauuc

SEQ ID NO: 3363420 - RNA, 17 nt, Colorado tick fever virus
ccacaugaugugacaca

SEQ ID NO: 3363421 - RNA, 13 nt, Colorado tick fever virus
ccacgccauacac

SEQ ID NO: 3363422 - RNA, 18 nt, Colorado tick fever virus
auagggaauccuugcagu

SEQ ID NO: 3363423 - RNA, 13 nt, Colorado tick fever virus
aucgcuuugcagu

SEQ ID NO: 3363424 - RNA, 20 nt, Colorado tick fever virus
aucggugggagugcucaagu

SEQ ID NO: 3363425 - RNA, 18 nt, Colorado tick fever virus
aucugacgcagggguuca

SEQ ID NO: 3363426 - RNA, 13 nt, Colorado tick fever virus
augacguccuagc

SEQ ID NO: 3363427 - RNA, 17 nt, Colorado tick fever virus
augaugacguccuagca

SEQ ID NO: 3363428 - RNA, 20 nt, Colorado tick fever virus
augaugacguccuagcauca

SEQ ID NO: 3363429 - RNA, 13 nt, Colorado tick fever virus
gugccagaggagg

SEQ ID NO: 3363430 - RNA, 13 nt, Colorado tick fever virus
gugggagugcuca

SEQ ID NO: 3363431 - RNA, 16 nt, Colorado tick fever virus
uagaacgguugcaguc

SEQ ID NO: 3363432 - RNA, 18 nt, Colorado tick fever virus
ucaauuuguuaacaauga

SEQ ID NO: 3363433 - RNA, 15 nt, Colorado tick fever virus
ucagcagcagaggcg

SEQ ID NO: 3363434 - RNA, 15 nt, Colorado tick fever virus
ucagguggaggcugc

SEQ ID NO: 3363435 - RNA, 18 nt, Colorado tick fever virus
ucagguggaggcugcuca

SEQ ID NO: 3363436 - RNA, 15 nt, Colorado tick fever virus
ucauucccagggugc

SEQ ID NO: 3363437 - RNA, 13 nt, Colorado tick fever virus
ucauucucccggg

SEQ ID NO: 3363438 - RNA, 18 nt, Colorado tick fever virus
ucauucucccgggacggg

SEQ ID NO: 3363439 - RNA, 13 nt, Colorado tick fever virus
uccauuggcgcaa

SEQ ID NO: 3363440 - RNA, 14 nt, Colorado tick fever virus
uccgcgaguugcag

SEQ ID NO: 3363441 - RNA, 14 nt, Colorado tick fever virus
ucuaagacugcuug

SEQ ID NO: 3363442 - RNA, 16 nt, Colorado tick fever virus
ucuccgcgaguugcag

SEQ ID NO: 3363443 - RNA, 23 nt, Colorado tick fever virus
ucucgcgcacggggaauuugcag

SEQ ID NO: 3363444 - RNA, 18 nt, Colorado tick fever virus
ucuuaugugccagaggag

SEQ ID NO: 3363445 - RNA, 21 nt, Colorado tick fever virus
aagcgagugcgggagcuugag

SEQ ID NO: 3363446 - RNA, 15 nt, Colorado tick fever virus
aaguaugauugaguc

SEQ ID NO: 3363447 - RNA, 20 nt, Colorado tick fever virus
aaugaugacguccuagcauc

SEQ ID NO: 3363448 - RNA, 14 nt, Colorado tick fever virus
acacaauugcaguc

SEQ ID NO: 3363449 - RNA, 10 nt, Colorado tick fever virus
accggugcag

SEQ ID NO: 3363450 - RNA, 11 nt, Colorado tick fever virus
accggugcagg

SEQ ID NO: 3363451 - RNA, 15 nt, Colorado tick fever virus
accggugcaggaugc

SEQ ID NO: 3363452 - RNA, 11 nt, Colorado tick fever virus
acgggcagggu

SEQ ID NO: 3363453 - RNA, 16 nt, Colorado tick fever virus
acggguaauugcaguc

SEQ ID NO: 3363454 - RNA, 15 nt, Colorado tick fever virus
acugagagcgggguu

SEQ ID NO: 3363455 - RNA, 18 nt, Colorado tick fever virus
acugcuugcuuaaaggug

SEQ ID NO: 3363456 - RNA, 14 nt, Colorado tick fever virus
agaacgguugcagu

SEQ ID NO: 3363457 - RNA, 13 nt, Colorado tick fever virus
agaggcgcgugag

SEQ ID NO: 3363458 - RNA, 21 nt, Colorado tick fever virus
agcggcugcggcuuaccaggc

SEQ ID NO: 3363459 - RNA, 20 nt, Colorado tick fever virus
agcgggguuguuuaucaggu

SEQ ID NO: 3363460 - RNA, 14 nt, Colorado tick fever virus
aggcgcgugagcag

SEQ ID NO: 3363461 - RNA, 22 nt, Colorado tick fever virus
aggcuuuaagcgagugcgggag

SEQ ID NO: 3363462 - RNA, 17 nt, Colorado tick fever virus
aggcuuucgugaaggag

SEQ ID NO: 3363463 - RNA, 17 nt, Colorado tick fever virus
agggaauccuugcaguc

SEQ ID NO: 3363464 - RNA, 23 nt, Colorado tick fever virus
agggugcauucuugaugugaaga

SEQ ID NO: 3363465 - RNA, 19 nt, Colorado tick fever virus
agucuguguucggaugcau

SEQ ID NO: 3363466 - RNA, 14 nt, Colorado tick fever virus
augagaguugcagu

SEQ ID NO: 3363467 - RNA, 19 nt, Colorado tick fever virus
augcugaucucccuugcag

SEQ ID NO: 3363468 - RNA, 18 nt, Colorado tick fever virus
auucagcagcagaggcgc

SEQ ID NO: 3363469 - RNA, 17 nt, Colorado tick fever virus
auugagagcggagccuu

SEQ ID NO: 3363470 - RNA, 21 nt, Colorado tick fever virus
auuggugaccggugcaggaug

SEQ ID NO: 3363471 - RNA, 17 nt, Colorado tick fever virus
auuuguuaacaaugagu

SEQ ID NO: 3363472 - RNA, 23 nt, Colorado tick fever virus
auuuucuaagacugcuugcuuaa

SEQ ID NO: 3363473 - RNA, 18 nt, Colorado tick fever virus
caaagacggcugcuggcu

SEQ ID NO: 3363474 - RNA, 14 nt, Colorado tick fever virus
cacgauugagcaca

SEQ ID NO: 3363475 - RNA, 22 nt, Colorado tick fever virus
cacgauugagcacaaaauccau

SEQ ID NO: 3363476 - RNA, 19 nt, Colorado tick fever virus
caggaugcugaucucccuu

SEQ ID NO: 3363477 - RNA, 19 nt, Colorado tick fever virus
caggcgggcuuuuugcgug

SEQ ID NO: 3363478 - RNA, 14 nt, Colorado tick fever virus
cagggugcauucuu

SEQ ID NO: 3363479 - RNA, 15 nt, Colorado tick fever virus
cauacacaauugcag

SEQ ID NO: 3363480 - RNA, 17 nt, Colorado tick fever virus
cauacacaauugcaguc

SEQ ID NO: 3363481 - RNA, 16 nt, Colorado tick fever virus
caucauucucccggga

SEQ ID NO: 3363482 - RNA, 23 nt, Colorado tick fever virus
ccaaacuccaaagguugcugccu

SEQ ID NO: 3363483 - RNA, 21 nt, Colorado tick fever virus
ccaauggugucuaugguuaua

SEQ ID NO: 3363484 - RNA, 18 nt, Colorado tick fever virus
ccagacguaugaggcucu

SEQ ID NO: 3363485 - RNA, 14 nt, Colorado tick fever virus
ccagaggagguugu

SEQ ID NO: 3363486 - RNA, 13 nt, Colorado tick fever virus
ccagggugcauuc

SEQ ID NO: 3363487 - RNA, 17 nt, Colorado tick fever virus
cccgggacggguaauug

SEQ ID NO: 3363488 - RNA, 16 nt, Colorado tick fever virus
ccggcuuacggaauga

SEQ ID NO: 3363489 - RNA, 20 nt, Colorado tick fever virus
ccggugcaggaugcugaucu

SEQ ID NO: 3363490 - RNA, 21 nt, Colorado tick fever virus
ccucgccggcuuacggaauga

SEQ ID NO: 3363491 - RNA, 18 nt, Colorado tick fever virus
ccuggauacaaaugcagu

SEQ ID NO: 3363492 - RNA, 12 nt, Colorado tick fever virus
cgaguugcaguc

SEQ ID NO: 3363493 - RNA, 14 nt, Colorado tick fever virus
cgcagggguucagu

SEQ ID NO: 3363494 - RNA, 18 nt, Colorado tick fever virus
cgcagggguucagucugu

SEQ ID NO: 3363495 - RNA, 21 nt, Colorado tick fever virus
cgcagugugugacgagugggu

SEQ ID NO: 3363496 - RNA, 22 nt, Colorado tick fever virus
ccacgccauacacaauugcagu

SEQ ID NO: 3363497 - RNA, 24 nt, Colorado tick fever virus
cccucauauagggaauccuugcag

SEQ ID NO: 3363498 - RNA, 12 nt, Colorado tick fever virus
cgcaucuucaau

SEQ ID NO: 3363499 - RNA, 19 nt, Colorado tick fever virus
cgccauacacaauugcagu

SEQ ID NO: 3363500 - RNA, 18 nt, Colorado tick fever virus
cgccggcuuacggaauga

SEQ ID NO: 3363501 - RNA, 13 nt, Colorado tick fever virus
cgcugaggaccuc

SEQ ID NO: 3363502 - RNA, 12 nt, Colorado tick fever virus
cggaugcaugca

SEQ ID NO: 3363503 - RNA, 16 nt, Colorado tick fever virus
cggcugcuggcugucc

SEQ ID NO: 3363504 - RNA, 23 nt, Colorado tick fever virus
cgggcaggguagucgcugaggac

SEQ ID NO: 3363505 - RNA, 15 nt, Colorado tick fever virus
aaaggugugaaaauc

SEQ ID NO: 3363506 - RNA, 19 nt, Colorado tick fever virus
aaaggugugaaaaucaauu

SEQ ID NO: 3363507 - RNA, 19 nt, Colorado tick fever virus
aaggugugaaaaucaauug

SEQ ID NO: 3363508 - RNA, 18 nt, Colorado tick fever virus
aaguaugauugagucuau

SEQ ID NO: 3363509 - RNA, 12 nt, Colorado tick fever virus
aauggugucuau

SEQ ID NO: 3363510 - RNA, 17 nt, Colorado tick fever virus
aauuuguuaacaaugag

SEQ ID NO: 3363511 - RNA, 12 nt, Colorado tick fever virus
acaauugcaguc

SEQ ID NO: 3363512 - RNA, 15 nt, Colorado tick fever virus
acacagucugucaaa

SEQ ID NO: 3363513 - RNA, 18 nt, Colorado tick fever virus
acaucgagagugcaggcu

SEQ ID NO: 3363514 - RNA, 16 nt, Colorado tick fever virus
acauucauucccaggg

SEQ ID NO: 3363515 - RNA, 13 nt, Colorado tick fever virus
accaggcgggcuu

SEQ ID NO: 3363516 - RNA, 19 nt, Colorado tick fever virus
acgcagggguucagucugu

SEQ ID NO: 3363517 - RNA, 21 nt, Colorado tick fever virus
acgccauacacaauugcaguc

SEQ ID NO: 3363518 - RNA, 13 nt, Colorado tick fever virus
acggguaauugca

SEQ ID NO: 3363519 - RNA, 15 nt, Colorado tick fever virus
acggguaauugcagu

SEQ ID NO: 3363520 - RNA, 12 nt, Colorado tick fever virus
aagacugcuugc

SEQ ID NO: 3363521 - RNA, 18 nt, Colorado tick fever virus
aaugaugacguccuagca

SEQ ID NO: 3363522 - RNA, 16 nt, Colorado tick fever virus
accggugcaggaugcu

SEQ ID NO: 3363523 - RNA, 13 nt, Colorado tick fever virus
acggaaugaugac

SEQ ID NO: 3363524 - RNA, 17 nt, Colorado tick fever virus
acggggaauuugcaguc

SEQ ID NO: 3363525 - RNA, 14 nt, Colorado tick fever virus
acugcuugcuuaaa

SEQ ID NO: 3363526 - RNA, 13 nt, Colorado tick fever virus
agacggcugcugg

SEQ ID NO: 3363527 - RNA, 19 nt, Colorado tick fever virus
agacugcuugcuuaaaggu

SEQ ID NO: 3363528 - RNA, 24 nt, Colorado tick fever virus
agagcgggguuguuuaucaggugg

SEQ ID NO: 3363529 - RNA, 20 nt, Colorado tick fever virus
agcagaggcgcgugagcagg

SEQ ID NO: 3363530 - RNA, 16 nt, Colorado tick fever virus
agcucuccaucgcuuu

SEQ ID NO: 3363531 - RNA, 18 nt, Colorado tick fever virus
aggcgggcuuuuugcgug

SEQ ID NO: 3363532 - RNA, 22 nt, Colorado tick fever virus
agggugcauucuugaugugaag

SEQ ID NO: 3363533 - RNA, 16 nt, Colorado tick fever virus
agguggaggcugcuca

SEQ ID NO: 3363534 - RNA, 17 nt, Colorado tick fever virus
agguggaggcugcucag

SEQ ID NO: 3363535 - RNA, 17 nt, Colorado tick fever virus
aggugugaaaaucaauu

SEQ ID NO: 3363536 - RNA, 11 nt, Colorado tick fever virus
agugaggaggg

SEQ ID NO: 3363537 - RNA, 20 nt, Colorado tick fever virus
agugcaggcuuucgugaagg

SEQ ID NO: 3363538 - RNA, 22 nt, Colorado tick fever virus
aguuaggcggugcuuuuacgau

SEQ ID NO: 3363539 - RNA, 12 nt, Colorado tick fever virus
cggaaugaugac

SEQ ID NO: 3363540 - RNA, 19 nt, Colorado tick fever virus
cgggacggguaauugcagu

SEQ ID NO: 3363541 - RNA, 20 nt, Colorado tick fever virus
cgggacggguaauugcaguc

SEQ ID NO: 3363542 - RNA, 15 nt, Colorado tick fever virus
cggggaauuugcagu

SEQ ID NO: 3363543 - RNA, 18 nt, Colorado tick fever virus
cgguguaaucugacgcag

SEQ ID NO: 3363544 - RNA, 20 nt, Colorado tick fever virus
cuagcaucauucucccggga

SEQ ID NO: 3363545 - RNA, 14 nt, Colorado tick fever virus
ugaugaaaauggcg

SEQ ID NO: 3363546 - RNA, 11 nt, Colorado tick fever virus
ugaugugaaga

SEQ ID NO: 3363547 - RNA, 19 nt, Colorado tick fever virus
ugaugugaagacaaugcag

SEQ ID NO: 3363548 - RNA, 23 nt, Colorado tick fever virus
ugcaggaugcugaucucccuugc

SEQ ID NO: 3363549 - RNA, 15 nt, Colorado tick fever virus
ugcucguaauccuca

SEQ ID NO: 3363550 - RNA, 14 nt, Colorado tick fever virus
ugcugccugaauug

SEQ ID NO: 3363551 - RNA, 17 nt, Colorado tick fever virus
uggaugaguggggcugc

SEQ ID NO: 3363552 - RNA, 20 nt, Colorado tick fever virus
uggauucggaaaaacauauu

SEQ ID NO: 3363553 - RNA, 15 nt, Colorado tick fever virus
ugggcuggagaacca

SEQ ID NO: 3363554 - RNA, 17 nt, Colorado tick fever virus
uggggcugcgcagugug

SEQ ID NO: 3363555 - RNA, 17 nt, Colorado tick fever virus
uggugaaggaugcaagu

SEQ ID NO: 3363556 - RNA, 21 nt, Colorado tick fever virus
ugucgguguaaucugacgcag

SEQ ID NO: 3363557 - RNA, 18 nt, Colorado tick fever virus
ugugaaaaucaauugucg

SEQ ID NO: 3363558 - RNA, 15 nt, Colorado tick fever virus
uucuaagacugcuug

SEQ ID NO: 3363559 - RNA, 14 nt, Colorado tick fever virus
uugaugugaagaca

SEQ ID NO: 3363560 - RNA, 22 nt, Colorado tick fever virus
uugaugugaagacaaugcaguc

SEQ ID NO: 3363561 - RNA, 23 nt, Colorado tick fever virus
uugcuuaaaggugugaaaaucaa

SEQ ID NO: 3363562 - RNA, 17 nt, Dobrava virus
aaauaacuccuucauua

SEQ ID NO: 3363563 - RNA, 15 nt, Dobrava virus
acaacuacuaccuca

SEQ ID NO: 3363564 - RNA, 13 nt, Dobrava virus
acuacuaccucau

SEQ ID NO: 3363565 - RNA, 23 nt, Dobrava virus
auauauggauguagauuucauuu

SEQ ID NO: 3363566 - RNA, 17 nt, Dobrava virus
auauuuauuuucauuuu

SEQ ID NO: 3363567 - RNA, 19 nt, Dobrava virus
auuuucauuuuccggagca

SEQ ID NO: 3363568 - RNA, 14 nt, Dobrava virus
cauugauuugcuuc

SEQ ID NO: 3363569 - RNA, 12 nt, Dobrava virus
cauuuuccggag

SEQ ID NO: 3363570 - RNA, 14 nt, Dobrava virus
cuaccucaacaacu

SEQ ID NO: 3363571 - RNA, 12 nt, Dobrava virus
cuacuaccucau

SEQ ID NO: 3363572 - RNA, 18 nt, Dobrava virus
cuacugauuggugaaugu

SEQ ID NO: 3363573 - RNA, 22 nt, Dobrava virus
cuuaagugacuuuuuucuguau

SEQ ID NO: 3363574 - RNA, 23 nt, Dobrava virus
guuuauauuuauuuucauuuucc

SEQ ID NO: 3363575 - RNA, 22 nt, Dobrava virus
uacuacugauuggugaauguau

SEQ ID NO: 3363576 - RNA, 21 nt, Dobrava virus
ucauuugaucuguacuaacau

SEQ ID NO: 3363577 - RNA, 18 nt, Dobrava virus
uuucauuugaucuguacu

SEQ ID NO: 3363578 - RNA, 17 nt, Dobrava virus
uuuguugcauuauccca

SEQ ID NO: 3363579 - RNA, 21 nt, Dobrava virus
uuucuguauauauggauguag

SEQ ID NO: 3363580 - RNA, 16 nt, Dobrava virus
uuuucauuuuccggag

SEQ ID NO: 3363581 - RNA, 19 nt, Dobrava virus
cauuaucccaugcuuuaug

SEQ ID NO: 3363582 - RNA, 19 nt, Dobrava virus
cauuugaucuguacuaaca

SEQ ID NO: 3363583 - RNA, 13 nt, Dobrava virus
cuaccuaccucaa

SEQ ID NO: 3363584 - RNA, 22 nt, Dobrava virus
cuaccucaacaacuacuaccuc

SEQ ID NO: 3363585 - RNA, 17 nt, Dobrava virus
cugauuggugaauguau

SEQ ID NO: 3363586 - RNA, 20 nt, Dobrava virus
cuggaauuauuauacuacug

SEQ ID NO: 3363587 - RNA, 18 nt, Dobrava virus
cuuauuuccuucuuuucc

SEQ ID NO: 3363588 - RNA, 15 nt, Dobrava virus
cuuucuuuacuaaca

SEQ ID NO: 3363589 - RNA, 21 nt, Dobrava virus
cuuucuuuacuaacaacaacu

SEQ ID NO: 3363590 - RNA, 16 nt, Dobrava virus
gaauguauuugcacua

SEQ ID NO: 3363591 - RNA, 20 nt, Dobrava virus
guuaucuaaaaaaaauaacu

SEQ ID NO: 3363592 - RNA, 21 nt, Dobrava virus
uacugauuggugaauguauuu

SEQ ID NO: 3363593 - RNA, 12 nt, Dobrava virus
uccggagcauac

SEQ ID NO: 3363594 - RNA, 20 nt, Dobrava virus
ucuugcggagcauacuacua

SEQ ID NO: 3363595 - RNA, 20 nt, Dobrava virus
ucuuuagggagucuacuacu

SEQ ID NO: 3363596 - RNA, 21 nt, Dobrava virus
ucuuuagggagucuacuacua

SEQ ID NO: 3363597 - RNA, 20 nt, Dobrava virus
aacuacuaccucauugauuu

SEQ ID NO: 3363598 - RNA, 12 nt, Dobrava virus
acuauaaaccuu

SEQ ID NO: 3363599 - RNA, 23 nt, Dobrava virus
agcuuguccuuguauauagcuuu

SEQ ID NO: 3363600 - RNA, 20 nt, Dobrava virus
auaucaguuuaaacuucugu

SEQ ID NO: 3363601 - RNA, 21 nt, Dobrava virus
aucuaaaaaaaauaacuccuu

SEQ ID NO: 3363602 - RNA, 18 nt, Dobrava virus
auuaacuuuuuacauuua

SEQ ID NO: 3363603 - RNA, 16 nt, Dobrava virus
caguuuaaacuucugu

SEQ ID NO: 3363604 - RNA, 17 nt, Dobrava virus
cauugauuugcuuccug

SEQ ID NO: 3363605 - RNA, 18 nt, Dobrava virus
cauuuaucaaccuaguua

SEQ ID NO: 3363606 - RNA, 11 nt, Dobrava virus
cggagcauacu

SEQ ID NO: 3363607 - RNA, 13 nt, Dobrava virus
cuaacaucuuauu

SEQ ID NO: 3363608 - RNA, 17 nt, Dobrava virus
cuaacaucuuauuuccu

SEQ ID NO: 3363609 - RNA, 12 nt, Dobrava virus
accuaccucaaa

SEQ ID NO: 3363610 - RNA, 11 nt, Dobrava virus
acuaccucaac

SEQ ID NO: 3363611 - RNA, 13 nt, Dobrava virus
acuaccucaacaa

SEQ ID NO: 3363612 - RNA, 15 nt, Dobrava virus
auauaucaguuuaaa

SEQ ID NO: 3363613 - RNA, 18 nt, Dobrava virus
aucccaugcuuuauguaa

SEQ ID NO: 3363614 - RNA, 21 nt, Dobrava virus
aucuguacuaacaucuuauuu

SEQ ID NO: 3363615 - RNA, 14 nt, Dobrava virus
caacuaccuaccuc

SEQ ID NO: 3363616 - RNA, 15 nt, Dobrava virus
caucuuauuuccuuc

SEQ ID NO: 3363617 - RNA, 18 nt, Dobrava virus
cuuaagugacuuuuuucu

SEQ ID NO: 3363618 - RNA, 18 nt, Dobrava virus
gaauuauuauacuacuga

SEQ ID NO: 3363619 - RNA, 22 nt, Dobrava virus
ggaauuauuauacuacugauug

SEQ ID NO: 3363620 - RNA, 18 nt, Dobrava virus
guuuauauuuauuuucau

SEQ ID NO: 3363621 - RNA, 21 nt, Dobrava virus
uagcuuucaacaaugcaauuu

SEQ ID NO: 3363622 - RNA, 23 nt, Dobrava virus
ucauugauuugcuuccugaaugu

SEQ ID NO: 3363623 - RNA, 19 nt, Dobrava virus
uuaaacuucuguacuuauu

SEQ ID NO: 3363624 - RNA, 23 nt, Dobrava virus
uuuacauuuaucaaccuaguuau

SEQ ID NO: 3363625 - RNA, 16 nt, Dobrava virus
aacaucuuauuuccuu

SEQ ID NO: 3363626 - RNA, 16 nt, Dobrava virus
acaacuaccuaccuca

SEQ ID NO: 3363627 - RNA, 19 nt, Dobrava virus
acaacuaccuaccucaaaa

SEQ ID NO: 3363628 - RNA, 14 nt, Dobrava virus
acuaccuaccucaa

SEQ ID NO: 3363629 - RNA, 16 nt, Dobrava virus
auauuuauuuucauuu

SEQ ID NO: 3363630 - RNA, 17 nt, Dobrava virus
auuacuauaaaccuuag

SEQ ID NO: 3363631 - RNA, 14 nt, Dobrava virus
auuuucauuuuccg

SEQ ID NO: 3363632 - RNA, 22 nt, Dobrava virus
cugauuggugaauguauuugca

SEQ ID NO: 3363633 - RNA, 12 nt, Dobrava virus
cuuucaacaaug

SEQ ID NO: 3363634 - RNA, 22 nt, Dobrava virus
gcugcauuaacugcuuggacug

SEQ ID NO: 3363635 - RNA, 14 nt, Dobrava virus
guacuuauuaacuu

SEQ ID NO: 3363636 - RNA, 14 nt, Dobrava virus
guauauagcuuuca

SEQ ID NO: 3363637 - RNA, 16 nt, Dobrava virus
uauagcuuucaacaau

SEQ ID NO: 3363638 - RNA, 23 nt, Dobrava virus
uauagcuuucaacaaugcaauuu

SEQ ID NO: 3363639 - RNA, 15 nt, Dobrava virus
uauuucuauaucuug

SEQ ID NO: 3363640 - RNA, 22 nt, Dobrava virus
ucauuuuccggagcauacuacu

SEQ ID NO: 3363641 - RNA, 16 nt, Dobrava virus
ugacuuuuuucuguau

SEQ ID NO: 3363642 - RNA, 21 nt, Dobrava virus
ugauuugcuuccugaaugucu

SEQ ID NO: 3363643 - RNA, 21 nt, Dobrava virus
uucauuuuccggagcauacua

SEQ ID NO: 3363644 - RNA, 14 nt, Dobrava virus
uuuauguaauccca

SEQ ID NO: 3363645 - RNA, 19 nt, Dobrava virus
uuuccggagcauacuacua

SEQ ID NO: 3363646 - RNA, 15 nt, Dobrava virus
uuuccuuucuuuacu

SEQ ID NO: 3363647 - RNA, 12 nt, Eastern equine encephalitis virus
ccuuucacccag

SEQ ID NO: 3363648 - RNA, 13 nt, Eastern equine encephalitis virus
cgaaggauccagg

SEQ ID NO: 3363649 - RNA, 13 nt, Eastern equine encephalitis virus
cgaccuugcugac

SEQ ID NO: 3363650 - RNA, 21 nt, Eastern equine encephalitis virus
cgagccuaugaucagcugcuc

SEQ ID NO: 3363651 - RNA, 13 nt, Eastern equine encephalitis virus
cgauaacaaggug

SEQ ID NO: 3363652 - RNA, 18 nt, Eastern equine encephalitis virus
cgcauccagacaucagcu

SEQ ID NO: 3363653 - RNA, 22 nt, Eastern equine encephalitis virus
cgccaagccuaagccugcgcag

SEQ ID NO: 3363654 - RNA, 23 nt, Eastern equine encephalitis virus
cgccacgugguugaacauggaag

SEQ ID NO: 3363655 - RNA, 22 nt, Eastern equine encephalitis virus
cgccuccuauaaacacuacagg

SEQ ID NO: 3363656 - RNA, 13 nt, Eastern equine encephalitis virus
cggaagagugcuc

SEQ ID NO: 3363657 - RNA, 23 nt, Eastern equine encephalitis virus
cggcucuaucaguggugacaugg

SEQ ID NO: 3363658 - RNA, 16 nt, Eastern equine encephalitis virus
cgugcagaccaaggac

SEQ ID NO: 3363659 - RNA, 12 nt, Eastern equine encephalitis virus
cuaaacacuaaa

SEQ ID NO: 3363660 - RNA, 12 nt, Eastern equine encephalitis virus
cuaacccuccag

SEQ ID NO: 3363661 - RNA, 16 nt, Eastern equine encephalitis virus
cuacaacgaccccagg

SEQ ID NO: 3363662 - RNA, 20 nt, Eastern equine encephalitis virus
cucaucauagguccacuguc

SEQ ID NO: 3363663 - RNA, 13 nt, Eastern equine encephalitis virus
cuccacugcaaac

SEQ ID NO: 3363664 - RNA, 18 nt, Eastern equine encephalitis virus
cuccaguacaccagugac

SEQ ID NO: 3363665 - RNA, 19 nt, Eastern equine encephalitis virus
cuccaguacaccagugaca

SEQ ID NO: 3363666 - RNA, 24 nt, Eastern equine encephalitis virus
cuccaguacaccagugacaagccu

SEQ ID NO: 3363667 - RNA, 19 nt, Eastern equine encephalitis virus
cucuccuuagcauccacag

SEQ ID NO: 3363668 - RNA, 22 nt, Eastern equine encephalitis virus
cucuccuuagcauccacagugc

SEQ ID NO: 3363669 - RNA, 16 nt, Eastern equine encephalitis virus
cucuggaagacugccu

SEQ ID NO: 3363670 - RNA, 16 nt, Eastern equine encephalitis virus
cugaagaaagaccaaa

SEQ ID NO: 3363671 - RNA, 15 nt, Eastern equine encephalitis virus
cugacuaucaguguc

SEQ ID NO: 3363672 - RNA, 23 nt, Eastern equine encephalitis virus
cugagauacgaucagcagugcca

SEQ ID NO: 3363673 - RNA, 17 nt, Eastern equine encephalitis virus
cugauugacaacaaaaa

SEQ ID NO: 3363674 - RNA, 22 nt, Eastern equine encephalitis virus
cugcauuaagccgacgagggca

SEQ ID NO: 3363675 - RNA, 23 nt, Eastern equine encephalitis virus
cugcuguuuagauacugccaccu

SEQ ID NO: 3363676 - RNA, 16 nt, Eastern equine encephalitis virus
cuggagaucugcagau

SEQ ID NO: 3363677 - RNA, 22 nt, Eastern equine encephalitis virus
cuggagcguuccguccaugaga

SEQ ID NO: 3363678 - RNA, 22 nt, Eastern equine encephalitis virus
cuggaguacaucaccugcaagu

SEQ ID NO: 3363679 - RNA, 13 nt, Eastern equine encephalitis virus
cuggcaccagagc

SEQ ID NO: 3363680 - RNA, 15 nt, Eastern equine encephalitis virus
cuguguggcuaucau

SEQ ID NO: 3363681 - RNA, 23 nt, Eastern equine encephalitis virus
cuguucaggcaauggugaacaua

SEQ ID NO: 3363682 - RNA, 14 nt, Eastern equine encephalitis virus
cuuaccaacaggca

SEQ ID NO: 3363683 - RNA, 17 nt, Eastern equine encephalitis virus
cuuaccugauugacaac

SEQ ID NO: 3363684 - RNA, 20 nt, Eastern equine encephalitis virus
cuuccacuggacgaugacca

SEQ ID NO: 3363685 - RNA, 13 nt, Eastern equine encephalitis virus
cuucuccacugca

SEQ ID NO: 3363686 - RNA, 11 nt, Eastern equine encephalitis virus
cuugccacugu

SEQ ID NO: 3363687 - RNA, 17 nt, Eastern equine encephalitis virus
cuuuccaaagaagcaca

SEQ ID NO: 3363688 - RNA, 19 nt, Eastern equine encephalitis virus
gaaaagggacaaaggggca

SEQ ID NO: 3363689 - RNA, 17 nt, Eastern equine encephalitis virus
gaaccaaaaagggguua

SEQ ID NO: 3363690 - RNA, 14 nt, Eastern equine encephalitis virus
gaacggacagguga

SEQ ID NO: 3363691 - RNA, 19 nt, Eastern equine encephalitis virus
gaaggcagaauagacaaug

SEQ ID NO: 3363692 - RNA, 18 nt, Eastern equine encephalitis virus
gaaggccagcauauauga

SEQ ID NO: 3363693 - RNA, 12 nt, Eastern equine encephalitis virus
gaaugguuacgc

SEQ ID NO: 3363694 - RNA, 16 nt, Eastern equine encephalitis virus
gacaagggcaccugca

SEQ ID NO: 3363695 - RNA, 14 nt, Eastern equine encephalitis virus
gacaugucugcaga

SEQ ID NO: 3363696 - RNA, 16 nt, Eastern equine encephalitis virus
gaccaccaccaccugc

SEQ ID NO: 3363697 - RNA, 19 nt, Eastern equine encephalitis virus
gacgaguguucaaaccgcu

SEQ ID NO: 3363698 - RNA, 23 nt, Eastern equine encephalitis virus
gacggcucuaucaguggugacau

SEQ ID NO: 3363699 - RNA, 23 nt, Eastern equine encephalitis virus
gacuauacaaccaccugcacgga

SEQ ID NO: 3363700 - RNA, 16 nt, Eastern equine encephalitis virus
gaguacaucaccugca

SEQ ID NO: 3363701 - RNA, 18 nt, Eastern equine encephalitis virus
gauacaccagagggguca

SEQ ID NO: 3363702 - RNA, 13 nt, Eastern equine encephalitis virus
gaucgacaaccug

SEQ ID NO: 3363703 - RNA, 14 nt, Eastern equine encephalitis virus
gaucgacaaccugc

SEQ ID NO: 3363704 - RNA, 19 nt, Eastern equine encephalitis virus
gaugugccacaaugcauga

SEQ ID NO: 3363705 - RNA, 23 nt, Eastern equine encephalitis virus
gcaagaagccugcgccaagccua

SEQ ID NO: 3363706 - RNA, 20 nt, Eastern equine encephalitis virus
gcacacaccuuucacccagg

SEQ ID NO: 3363707 - RNA, 19 nt, Eastern equine encephalitis virus
gcagaaaauugugcagugg

SEQ ID NO: 3363708 - RNA, 17 nt, Eastern equine encephalitis virus
gcagaaccgcaaccagu

SEQ ID NO: 3363709 - RNA, 21 nt, Eastern equine encephalitis virus
gcagaaccgcaaccaguugaa

SEQ ID NO: 3363710 - RNA, 22 nt, Eastern equine encephalitis virus
gcaggagucauccgcauccaga

SEQ ID NO: 3363711 - RNA, 21 nt, Eastern equine encephalitis virus
gcagugaugccgaacaaggug

SEQ ID NO: 3363712 - RNA, 18 nt, Eastern equine encephalitis virus
gcagugcauaaggcugcu

SEQ ID NO: 3363713 - RNA, 17 nt, Eastern equine encephalitis virus
gcaguguauaaggcugu

SEQ ID NO: 3363714 - RNA, 19 nt, Eastern equine encephalitis virus
gcauaaugcugucuuuuau

SEQ ID NO: 3363715 - RNA, 22 nt, Eastern equine encephalitis virus
gcaucgccacgcuggcaccaga

SEQ ID NO: 3363716 - RNA, 17 nt, Eastern equine encephalitis virus
gccaagccuaagccugc

SEQ ID NO: 3363717 - RNA, 21 nt, Eastern equine encephalitis virus
gccagcuauaacauaacggau

SEQ ID NO: 3363718 - RNA, 18 nt, Eastern equine encephalitis virus
gccgacgagggcagauga

SEQ ID NO: 3363719 - RNA, 23 nt, Eastern equine encephalitis virus
gccgcuccgugcagaaaauugug

SEQ ID NO: 3363720 - RNA, 16 nt, Eastern equine encephalitis virus
gccuaucuugacaugg

SEQ ID NO: 3363721 - RNA, 17 nt, Eastern equine encephalitis virus
gccuugggcgccgcagc

SEQ ID NO: 3363722 - RNA, 15 nt, Eastern equine encephalitis virus
gcgucuacugcaggg

SEQ ID NO: 3363723 - RNA, 15 nt, Eastern equine encephalitis virus
gcuauuacauccugg

SEQ ID NO: 3363724 - RNA, 11 nt, Eastern equine encephalitis virus
gcucugcauga

SEQ ID NO: 3363725 - RNA, 21 nt, Eastern equine encephalitis virus
gcugcuuauuuugcugugggc

SEQ ID NO: 3363726 - RNA, 15 nt, Eastern equine encephalitis virus
gcuggcaccagagcc

SEQ ID NO: 3363727 - RNA, 23 nt, Eastern equine encephalitis virus
gcuguuaugaaaagaauccacac

SEQ ID NO: 3363728 - RNA, 20 nt, Eastern equine encephalitis virus
ggacaaaacauacugaagaa

SEQ ID NO: 3363729 - RNA, 21 nt, Eastern equine encephalitis virus
ggacaaaacauacugaagaaa

SEQ ID NO: 3363730 - RNA, 20 nt, Eastern equine encephalitis virus
ggacccaaagcagcugcccu

SEQ ID NO: 3363731 - RNA, 19 nt, Eastern equine encephalitis virus
ggaccgcccgccaaacgca

SEQ ID NO: 3363732 - RNA, 14 nt, Eastern equine encephalitis virus
ggaguauaccuggg

SEQ ID NO: 3363733 - RNA, 16 nt, Eastern equine encephalitis virus
ggauggccgcacgaag

SEQ ID NO: 3363734 - RNA, 15 nt, Eastern equine encephalitis virus
ggcaccggcaaagca

SEQ ID NO: 3363735 - RNA, 14 nt, Eastern equine encephalitis virus
ggccaccacuugca

SEQ ID NO: 3363736 - RNA, 22 nt, Eastern equine encephalitis virus
ggccgccaucaagcugaagaag

SEQ ID NO: 3363737 - RNA, 20 nt, Eastern equine encephalitis virus
ggcgcagagcucugcaugau

SEQ ID NO: 3363738 - RNA, 16 nt, Eastern equine encephalitis virus
gggaacauaacaucug

SEQ ID NO: 3363739 - RNA, 12 nt, Eastern equine encephalitis virus
gggaauccacau

SEQ ID NO: 3363740 - RNA, 14 nt, Eastern equine encephalitis virus
gggacaagggcacc

SEQ ID NO: 3363741 - RNA, 14 nt, Eastern equine encephalitis virus
gggcagugcauaau

SEQ ID NO: 3363742 - RNA, 17 nt, Eastern equine encephalitis virus
aucuugucaaccacaua

SEQ ID NO: 3363743 - RNA, 16 nt, Eastern equine encephalitis virus
augaacggcaaaacgc

SEQ ID NO: 3363744 - RNA, 19 nt, Eastern equine encephalitis virus
augaucagcugcucgaugc

SEQ ID NO: 3363745 - RNA, 14 nt, Eastern equine encephalitis virus
augcaugaaaucag

SEQ ID NO: 3363746 - RNA, 14 nt, Eastern equine encephalitis virus
augccgaacaaggu

SEQ ID NO: 3363747 - RNA, 22 nt, Eastern equine encephalitis virus
augcuaucauugcagaacacuu

SEQ ID NO: 3363748 - RNA, 17 nt, Eastern equine encephalitis virus
auguauucaaguacugc

SEQ ID NO: 3363749 - RNA, 12 nt, Eastern equine encephalitis virus
auuacauccugg

SEQ ID NO: 3363750 - RNA, 13 nt, Eastern equine encephalitis virus
auucaaguacugc

SEQ ID NO: 3363751 - RNA, 19 nt, Eastern equine encephalitis virus
auuccacuucuccacugca

SEQ ID NO: 3363752 - RNA, 16 nt, Eastern equine encephalitis virus
auuuaauacacacuuu

SEQ ID NO: 3363753 - RNA, 16 nt, Eastern equine encephalitis virus
caaacaccaacuugaa

SEQ ID NO: 3363754 - RNA, 18 nt, Eastern equine encephalitis virus
caacaaaaaaugggugua

SEQ ID NO: 3363755 - RNA, 16 nt, Eastern equine encephalitis virus
caaccuaguacugcaa

SEQ ID NO: 3363756 - RNA, 12 nt, Eastern equine encephalitis virus
caaccugcaugu

SEQ ID NO: 3363757 - RNA, 18 nt, Eastern equine encephalitis virus
caacgaccccaggcuggu

SEQ ID NO: 3363758 - RNA, 15 nt, Eastern equine encephalitis virus
caagagucaggagaa

SEQ ID NO: 3363759 - RNA, 20 nt, Eastern equine encephalitis virus
caagauguacuagcagcagc

SEQ ID NO: 3363760 - RNA, 14 nt, Eastern equine encephalitis virus
caagccuaagccug

SEQ ID NO: 3363761 - RNA, 14 nt, Eastern equine encephalitis virus
caagggcaccugca

SEQ ID NO: 3363762 - RNA, 20 nt, Eastern equine encephalitis virus
caagucccaauacuccuggc

SEQ ID NO: 3363763 - RNA, 22 nt, Eastern equine encephalitis virus
caagugcugaauuaccugugga

SEQ ID NO: 3363764 - RNA, 12 nt, Eastern equine encephalitis virus
caaucuuugcau

SEQ ID NO: 3363765 - RNA, 13 nt, Eastern equine encephalitis virus
uuacaggaacugc

SEQ ID NO: 3363766 - RNA, 12 nt, Eastern equine encephalitis virus
uuacgacagccg

SEQ ID NO: 3363767 - RNA, 12 nt, Eastern equine encephalitis virus
uuacuaaacacu

SEQ ID NO: 3363768 - RNA, 23 nt, Eastern equine encephalitis virus
uuacuaaacacuaaauucacccu

SEQ ID NO: 3363769 - RNA, 22 nt, Eastern equine encephalitis virus
uuccaaucauguugaacggaca

SEQ ID NO: 3363770 - RNA, 16 nt, Eastern equine encephalitis virus
uuccaucaacuaaccu

SEQ ID NO: 3363771 - RNA, 15 nt, Eastern equine encephalitis virus
uuccaucgcuaaccu

SEQ ID NO: 3363772 - RNA, 17 nt, Eastern equine encephalitis virus
uugcaaccuaguacugc

SEQ ID NO: 3363773 - RNA, 21 nt, Eastern equine encephalitis virus
uuggacacucauuucacccag

SEQ ID NO: 3363774 - RNA, 22 nt, Eastern equine encephalitis virus
uugucaaccacauaacacuaua

SEQ ID NO: 3363775 - RNA, 16 nt, Eastern equine encephalitis virus
aaaacgcagaaaucaa

SEQ ID NO: 3363776 - RNA, 15 nt, Eastern equine encephalitis virus
aaaagggguuacagu

SEQ ID NO: 3363777 - RNA, 22 nt, Eastern equine encephalitis virus
aaaguuugcaaccuaguacugc

SEQ ID NO: 3363778 - RNA, 12 nt, Eastern equine encephalitis virus
aacaucugugca

SEQ ID NO: 3363779 - RNA, 17 nt, Eastern equine encephalitis virus
aacauggaguugaauua

SEQ ID NO: 3363780 - RNA, 15 nt, Eastern equine encephalitis virus
aacgaugaguacugg

SEQ ID NO: 3363781 - RNA, 21 nt, Eastern equine encephalitis virus
aacuguccaauucauucucca

SEQ ID NO: 3363782 - RNA, 13 nt, Eastern equine encephalitis virus
aagcgaccaccac

SEQ ID NO: 3363783 - RNA, 14 nt, Eastern equine encephalitis virus
aagcugcaggucug

SEQ ID NO: 3363784 - RNA, 15 nt, Eastern equine encephalitis virus
aagcuguugcagaag

SEQ ID NO: 3363785 - RNA, 22 nt, Eastern equine encephalitis virus
aaggcugucuuacuaaacacua

SEQ ID NO: 3363786 - RNA, 16 nt, Eastern equine encephalitis virus
aaugagggaacuucca

SEQ ID NO: 3363787 - RNA, 19 nt, Eastern equine encephalitis virus
aaugauucuugaagaccua

SEQ ID NO: 3363788 - RNA, 14 nt, Eastern equine encephalitis virus
aaugcuaggagaac

SEQ ID NO: 3363789 - RNA, 18 nt, Eastern equine encephalitis virus
acaccuuucacccaggcg

SEQ ID NO: 3363790 - RNA, 17 nt, Eastern equine encephalitis virus
acacuacguugagaugc

SEQ ID NO: 3363791 - RNA, 16 nt, Eastern equine encephalitis virus
acagauacccauuaac

SEQ ID NO: 3363792 - RNA, 18 nt, Eastern equine encephalitis virus
acagcgaauguguaugaa

SEQ ID NO: 3363793 - RNA, 14 nt, Eastern equine encephalitis virus
acauaacacuauag

SEQ ID NO: 3363794 - RNA, 14 nt, Eastern equine encephalitis virus
acauacugaagaaa

SEQ ID NO: 3363795 - RNA, 14 nt, Eastern equine encephalitis virus
accagagccucuag

SEQ ID NO: 3363796 - RNA, 16 nt, Eastern equine encephalitis virus
acccaaagcagcugcc

SEQ ID NO: 3363797 - RNA, 19 nt, Eastern equine encephalitis virus
acccuccaguacaccagug

SEQ ID NO: 3363798 - RNA, 15 nt, Eastern equine encephalitis virus
acccugcaugccaug

SEQ ID NO: 3363799 - RNA, 13 nt, Eastern equine encephalitis virus
accugcaugugcg

SEQ ID NO: 3363800 - RNA, 17 nt, Eastern equine encephalitis virus
accuggaguacaucacc

SEQ ID NO: 3363801 - RNA, 16 nt, Eastern equine encephalitis virus
acgaucagcagugcca

SEQ ID NO: 3363802 - RNA, 16 nt, Eastern equine encephalitis virus
acgcuuaucccacuug

SEQ ID NO: 3363803 - RNA, 18 nt, Eastern equine encephalitis virus
acgggccuaaccgccaua

SEQ ID NO: 3363804 - RNA, 17 nt, Eastern equine encephalitis virus
acuaucagugucaggug

SEQ ID NO: 3363805 - RNA, 16 nt, Eastern equine encephalitis virus
acugaaaacacccaga

SEQ ID NO: 3363806 - RNA, 18 nt, Eastern equine encephalitis virus
agaaauaccgucacccac

SEQ ID NO: 3363807 - RNA, 18 nt, Eastern equine encephalitis virus
agaagcuguugcagaaga

SEQ ID NO: 3363808 - RNA, 20 nt, Eastern equine encephalitis virus
agaauuggcaucacugaaga

SEQ ID NO: 3363809 - RNA, 20 nt, Eastern equine encephalitis virus
agagcuggugaaagcaguug

SEQ ID NO: 3363810 - RNA, 22 nt, Eastern equine encephalitis virus
agagugcucuauugaccacgca

SEQ ID NO: 3363811 - RNA, 16 nt, Eastern equine encephalitis virus
agccuaugaucagcug

SEQ ID NO: 3363812 - RNA, 22 nt, Eastern equine encephalitis virus
agccugcgcaggaaaaagaagc

SEQ ID NO: 3363813 - RNA, 14 nt, Eastern equine encephalitis virus
agcgaccaccacca

SEQ ID NO: 3363814 - RNA, 20 nt, Eastern equine encephalitis virus
agcgaccaccaccaccugcc

SEQ ID NO: 3363815 - RNA, 14 nt, Eastern equine encephalitis virus
agcggaucauuuac

SEQ ID NO: 3363816 - RNA, 16 nt, Eastern equine encephalitis virus
agcgugcagaccaagg

SEQ ID NO: 3363817 - RNA, 20 nt, Eastern equine encephalitis virus
agcguugaccacauuagcau

SEQ ID NO: 3363818 - RNA, 12 nt, Eastern equine encephalitis virus
agcucugcauga

SEQ ID NO: 3363819 - RNA, 15 nt, Eastern equine encephalitis virus
agcucugcaugauga

SEQ ID NO: 3363820 - RNA, 20 nt, Eastern equine encephalitis virus
cuauguucggucugaagacg

SEQ ID NO: 3363821 - RNA, 17 nt, Eastern equine encephalitis virus
cuccuuagcauccacag

SEQ ID NO: 3363822 - RNA, 14 nt, Eastern equine encephalitis virus
cugacuuugaaaca

SEQ ID NO: 3363823 - RNA, 21 nt, Eastern equine encephalitis virus
cugagauacgaucagcagugc

SEQ ID NO: 3363824 - RNA, 14 nt, Eastern equine encephalitis virus
cugauugacaacaa

SEQ ID NO: 3363825 - RNA, 15 nt, Eastern equine encephalitis virus
cuggcaccagagccu

SEQ ID NO: 3363826 - RNA, 13 nt, Eastern equine encephalitis virus
cuggguggaguca

SEQ ID NO: 3363827 - RNA, 18 nt, Eastern equine encephalitis virus
cuguacaguaugagaaca

SEQ ID NO: 3363828 - RNA, 18 nt, Eastern equine encephalitis virus
cugucaauuucacaguca

SEQ ID NO: 3363829 - RNA, 18 nt, Eastern equine encephalitis virus
cugucuuacuaaacacua

SEQ ID NO: 3363830 - RNA, 20 nt, Eastern equine encephalitis virus
cuuacagccauugcaugaga

SEQ ID NO: 3363831 - RNA, 21 nt, Eastern equine encephalitis virus
cuucaacguagaguguuucaa

SEQ ID NO: 3363832 - RNA, 24 nt, Eastern equine encephalitis virus
cuugcugagagcggaucauuuaca

SEQ ID NO: 3363833 - RNA, 15 nt, Eastern equine encephalitis virus
cuuuccaaagaagca

SEQ ID NO: 3363834 - RNA, 20 nt, Eastern equine encephalitis virus
gaaaacgcauaacuuacagc

SEQ ID NO: 3363835 - RNA, 16 nt, Eastern equine encephalitis virus
auggaaccaaaaaggg

SEQ ID NO: 3363836 - RNA, 23 nt, Eastern equine encephalitis virus
auggaaccaaaaagggguuacag

SEQ ID NO: 3363837 - RNA, 17 nt, Eastern equine encephalitis virus
augggagcgucagcugg

SEQ ID NO: 3363838 - RNA, 16 nt, Eastern equine encephalitis virus
auguacuagcagcagc

SEQ ID NO: 3363839 - RNA, 19 nt, Eastern equine encephalitis virus
auuaccacauuauaacacu

SEQ ID NO: 3363840 - RNA, 15 nt, Eastern equine encephalitis virus
auucgauaacaaggu

SEQ ID NO: 3363841 - RNA, 17 nt, Eastern equine encephalitis virus
auucgauaacaaggugg

SEQ ID NO: 3363842 - RNA, 15 nt, Eastern equine encephalitis virus
auucuccaucaggug

SEQ ID NO: 3363843 - RNA, 14 nt, Eastern equine encephalitis virus
auuuacaaaaucau

SEQ ID NO: 3363844 - RNA, 17 nt, Eastern equine encephalitis virus
caaacgcaagaagccug

SEQ ID NO: 3363845 - RNA, 13 nt, Eastern equine encephalitis virus
caacaacugucaa

SEQ ID NO: 3363846 - RNA, 12 nt, Eastern equine encephalitis virus
caaccaccugca

SEQ ID NO: 3363847 - RNA, 17 nt, Eastern equine encephalitis virus
caacgaccccaggcugg

SEQ ID NO: 3363848 - RNA, 21 nt, Eastern equine encephalitis virus
ugcacggaugucaaacaaugc

SEQ ID NO: 3363849 - RNA, 12 nt, Eastern equine encephalitis virus
ugcagcucaaau

SEQ ID NO: 3363850 - RNA, 16 nt, Eastern equine encephalitis virus
ugcaucgccacgcugg

SEQ ID NO: 3363851 - RNA, 22 nt, Eastern equine encephalitis virus
ugccuguuaaggccaagugcau

SEQ ID NO: 3363852 - RNA, 22 nt, Eastern equine encephalitis virus
uggaacagaauuacgacagccg

SEQ ID NO: 3363853 - RNA, 19 nt, Eastern equine encephalitis virus
uggagccgcuccgugcaga

SEQ ID NO: 3363854 - RNA, 18 nt, Eastern equine encephalitis virus
uggaguacaucaccugca

SEQ ID NO: 3363855 - RNA, 16 nt, Eastern equine encephalitis virus
uggugacauggaacca

SEQ ID NO: 3363856 - RNA, 15 nt, Eastern equine encephalitis virus
ugguugcccuaguuc

SEQ ID NO: 3363857 - RNA, 17 nt, Eastern equine encephalitis virus
uguacuagcagcagcca

SEQ ID NO: 3363858 - RNA, 19 nt, Eastern equine encephalitis virus
ugucugcggcgccuugggc

SEQ ID NO: 3363859 - RNA, 15 nt, Eastern equine encephalitis virus
uguuacucaaaugag

SEQ ID NO: 3363860 - RNA, 16 nt, Eastern equine encephalitis virus
uuaucccacuugcagc

SEQ ID NO: 3363861 - RNA, 12 nt, Eastern equine encephalitis virus
uucaaguacugc

SEQ ID NO: 3363862 - RNA, 19 nt, Eastern equine encephalitis virus
uucccaccguagccagcua

SEQ ID NO: 3363863 - RNA, 16 nt, Eastern equine encephalitis virus
uuuaauacacacuuua

SEQ ID NO: 3363864 - RNA, 17 nt, Eastern equine encephalitis virus
ggugacgguggugcaua

SEQ ID NO: 3363865 - RNA, 14 nt, Eastern equine encephalitis virus
gguggacggagcau

SEQ ID NO: 3363866 - RNA, 16 nt, Eastern equine encephalitis virus
guacaacucuggaaga

SEQ ID NO: 3363867 - RNA, 12 nt, Eastern equine encephalitis virus
guacgagaggga

SEQ ID NO: 3363868 - RNA, 16 nt, Eastern equine encephalitis virus
guacuagcagcagcca

SEQ ID NO: 3363869 - RNA, 19 nt, Eastern equine encephalitis virus
gucaaagauacaccagagg

SEQ ID NO: 3363870 - RNA, 22 nt, Eastern equine encephalitis virus
gucggcgauauccgccacugcg

SEQ ID NO: 3363871 - RNA, 20 nt, Eastern equine encephalitis virus
gugcacuuaccaacaggcac

SEQ ID NO: 3363872 - RNA, 17 nt, Eastern equine encephalitis virus
gugcuagagacagacau

SEQ ID NO: 3363873 - RNA, 18 nt, Eastern equine encephalitis virus
guucgauugcccuggagc

SEQ ID NO: 3363874 - RNA, 19 nt, Eastern equine encephalitis virus
guuggaguauaccugggga

SEQ ID NO: 3363875 - RNA, 17 nt, Eastern equine encephalitis virus
uaaauucacccuaguuc

SEQ ID NO: 3363876 - RNA, 15 nt, Eastern equine encephalitis virus
uaauuuuucuuuuau

SEQ ID NO: 3363877 - RNA, 21 nt, Eastern equine encephalitis virus
uacagucaaagauacaccaga

SEQ ID NO: 3363878 - RNA, 16 nt, Eastern equine encephalitis virus
uaccgucacccaccug

SEQ ID NO: 3363879 - RNA, 17 nt, Eastern equine encephalitis virus
uaccgucacccaccuga

SEQ ID NO: 3363880 - RNA, 21 nt, Eastern equine encephalitis virus
uaccuauccugcucccaugua

SEQ ID NO: 3363881 - RNA, 20 nt, Eastern equine encephalitis virus
uaccuccaaaccccauccug

SEQ ID NO: 3363882 - RNA, 14 nt, Eastern equine encephalitis virus
uagagaacaugaag

SEQ ID NO: 3363883 - RNA, 23 nt, Eastern equine encephalitis virus
uagagagaaauaccgucacccac

SEQ ID NO: 3363884 - RNA, 23 nt, Eastern equine encephalitis virus
uagauacugccaccuuuugccca

SEQ ID NO: 3363885 - RNA, 22 nt, Eastern equine encephalitis virus
uagcuauagaagaagucagagg

SEQ ID NO: 3363886 - RNA, 12 nt, Eastern equine encephalitis virus
aaagcagcugcc

SEQ ID NO: 3363887 - RNA, 14 nt, Eastern equine encephalitis virus
aacacacagcagug

SEQ ID NO: 3363888 - RNA, 13 nt, Eastern equine encephalitis virus
aacauacugaaga

SEQ ID NO: 3363889 - RNA, 14 nt, Eastern equine encephalitis virus
aacgaccccaggcu

SEQ ID NO: 3363890 - RNA, 13 nt, Eastern equine encephalitis virus
aacuucaugugcc

SEQ ID NO: 3363891 - RNA, 12 nt, Eastern equine encephalitis virus
aagcugaagaag

SEQ ID NO: 3363892 - RNA, 21 nt, Eastern equine encephalitis virus
aaggagcuuuccaaagaagca

SEQ ID NO: 3363893 - RNA, 20 nt, Eastern equine encephalitis virus
aaguaauuuaauacacacuu

SEQ ID NO: 3363894 - RNA, 22 nt, Eastern equine encephalitis virus
aaucacgcacaucaaccagcaa

SEQ ID NO: 3363895 - RNA, 21 nt, Eastern equine encephalitis virus
aaucagauacccuccaguaca

SEQ ID NO: 3363896 - RNA, 18 nt, Eastern equine encephalitis virus
aauccaguaaagcaggaa

SEQ ID NO: 3363897 - RNA, 22 nt, Eastern equine encephalitis virus
aauuguccuggguggagucaac

SEQ ID NO: 3363898 - RNA, 13 nt, Eastern equine encephalitis virus
aauuuuucuuuua

SEQ ID NO: 3363899 - RNA, 21 nt, Eastern equine encephalitis virus
acaccaacuugaagcuacaac

SEQ ID NO: 3363900 - RNA, 20 nt, Eastern equine encephalitis virus
acaccagaggggucagagcc

SEQ ID NO: 3363901 - RNA, 16 nt, Eastern equine encephalitis virus
acaccuuucacccagg

SEQ ID NO: 3363902 - RNA, 14 nt, Eastern equine encephalitis virus
acaucaaccagcaa

SEQ ID NO: 3363903 - RNA, 13 nt, Eastern equine encephalitis virus
acauccauccugc

SEQ ID NO: 3363904 - RNA, 14 nt, Eastern equine encephalitis virus
accaccaccaccug

SEQ ID NO: 3363905 - RNA, 12 nt, Eastern equine encephalitis virus
accacccugcau

SEQ ID NO: 3363906 - RNA, 16 nt, Eastern equine encephalitis virus
accacccugcaugcca

SEQ ID NO: 3363907 - RNA, 19 nt, Eastern equine encephalitis virus
accauggagcuguacagua

SEQ ID NO: 3363908 - RNA, 20 nt, Eastern equine encephalitis virus
accauguuggaacagaauua

SEQ ID NO: 3363909 - RNA, 23 nt, Eastern equine encephalitis virus
accgauucaaaacacgcuccaag

SEQ ID NO: 3363910 - RNA, 13 nt, Eastern equine encephalitis virus
accuaacccucca

SEQ ID NO: 3363911 - RNA, 16 nt, Eastern equine encephalitis virus
accuccaaaccccauc

SEQ ID NO: 3363912 - RNA, 14 nt, Eastern equine encephalitis virus
accuuucacccagg

SEQ ID NO: 3363913 - RNA, 16 nt, Eastern equine encephalitis virus
acgaaggauccaggac

SEQ ID NO: 3363914 - RNA, 14 nt, Eastern equine encephalitis virus
acgagggcagauga

SEQ ID NO: 3363915 - RNA, 19 nt, Eastern equine encephalitis virus
acgcaagaagccugcgcca

SEQ ID NO: 3363916 - RNA, 14 nt, Eastern equine encephalitis virus
acgcuggcaccaga

SEQ ID NO: 3363917 - RNA, 17 nt, Eastern equine encephalitis virus
acgucacucuugcugag

SEQ ID NO: 3363918 - RNA, 15 nt, Eastern equine encephalitis virus
acuaagggcagugca

SEQ ID NO: 3363919 - RNA, 15 nt, Eastern equine encephalitis virus
acuacaggcagcgca

SEQ ID NO: 3363920 - RNA, 16 nt, Eastern equine encephalitis virus
acucgcaaucuuugca

SEQ ID NO: 3363921 - RNA, 20 nt, Eastern equine encephalitis virus
acugcaaacauccauccugc

SEQ ID NO: 3363922 - RNA, 18 nt, Eastern equine encephalitis virus
acuggacgaugaccaaga

SEQ ID NO: 3363923 - RNA, 14 nt, Eastern equine encephalitis virus
acuuugcugcauua

SEQ ID NO: 3363924 - RNA, 12 nt, Eastern equine encephalitis virus
agaacaugaagg

SEQ ID NO: 3363925 - RNA, 15 nt, Eastern equine encephalitis virus
agaagcgaccaccac

SEQ ID NO: 3363926 - RNA, 14 nt, Eastern equine encephalitis virus
agaaugacgucacu

SEQ ID NO: 3363927 - RNA, 14 nt, Eastern equine encephalitis virus
agacaaacccgaua

SEQ ID NO: 3363928 - RNA, 15 nt, Eastern equine encephalitis virus
agaccuaggaguuga

SEQ ID NO: 3363929 - RNA, 23 nt, Eastern equine encephalitis virus
agcaggcucuuuuggagaccugc

SEQ ID NO: 3363930 - RNA, 16 nt, Eastern equine encephalitis virus
agcauccacagugcca

SEQ ID NO: 3363931 - RNA, 23 nt, Eastern equine encephalitis virus
agccgcuuccacuggacgaugac

SEQ ID NO: 3363932 - RNA, 20 nt, Eastern equine encephalitis virus
agcgacuauacaaccaccug

SEQ ID NO: 3363933 - RNA, 17 nt, Eastern equine encephalitis virus
agcgcucggaagagugc

SEQ ID NO: 3363934 - RNA, 23 nt, Eastern equine encephalitis virus
agcgcuuauuguaugcaugcgca

SEQ ID NO: 3363935 - RNA, 14 nt, Eastern equine encephalitis virus
agcggcgcccaagu

SEQ ID NO: 3363936 - RNA, 20 nt, Eastern equine encephalitis virus
agcgucagcuggagaucugc

SEQ ID NO: 3363937 - RNA, 18 nt, Eastern equine encephalitis virus
agcguuccguccaugaga

SEQ ID NO: 3363938 - RNA, 12 nt, Eastern equine encephalitis virus
agcuauggugac

SEQ ID NO: 3363939 - RNA, 14 nt, Eastern equine encephalitis virus
aggaccgcccgcca

SEQ ID NO: 3363940 - RNA, 14 nt, Eastern equine encephalitis virus
aggagaaccaggag

SEQ ID NO: 3363941 - RNA, 19 nt, Eastern equine encephalitis virus
aggcacuguucaggcaaug

SEQ ID NO: 3363942 - RNA, 22 nt, Eastern equine encephalitis virus
aggcucuuuuggagaccugcaa

SEQ ID NO: 3363943 - RNA, 16 nt, Eastern equine encephalitis virus
agggaacuuccagugu

SEQ ID NO: 3363944 - RNA, 19 nt, Eastern equine encephalitis virus
agggacccaaagcagcugc

SEQ ID NO: 3363945 - RNA, 24 nt, Eastern equine encephalitis virus
agggcagaugacaccuugcaagug

SEQ ID NO: 3363946 - RNA, 19 nt, Eastern equine encephalitis virus
agguagaauucaggccagu

SEQ ID NO: 3363947 - RNA, 16 nt, Eastern equine encephalitis virus
aggugauacaggcagc

SEQ ID NO: 3363948 - RNA, 13 nt, Eastern equine encephalitis virus
agguguugcaguu

SEQ ID NO: 3363949 - RNA, 19 nt, Eastern equine encephalitis virus
aguguuggauucagcugcc

SEQ ID NO: 3363950 - RNA, 19 nt, Eastern equine encephalitis virus
aguucggggcaaugaugaa

SEQ ID NO: 3363951 - RNA, 14 nt, Eastern equine encephalitis virus
aguugaucaggcau

SEQ ID NO: 3363952 - RNA, 18 nt, Eastern equine encephalitis virus
auaacacuauaggcagug

SEQ ID NO: 3363953 - RNA, 23 nt, Eastern equine encephalitis virus
auaacgccgccgaugcagugcau

SEQ ID NO: 3363954 - RNA, 14 nt, Eastern equine encephalitis virus
auaagguagaauuc

SEQ ID NO: 3363955 - RNA, 23 nt, Eastern equine encephalitis virus
auacagcugguuaauaccaggau

SEQ ID NO: 3363956 - RNA, 18 nt, Eastern equine encephalitis virus
auagacaaugagcaacug

SEQ ID NO: 3363957 - RNA, 20 nt, Eastern equine encephalitis virus
auauacaauuacacuacagg

SEQ ID NO: 3363958 - RNA, 15 nt, Eastern equine encephalitis virus
auccgcauccagaca

SEQ ID NO: 3363959 - RNA, 19 nt, Eastern equine encephalitis virus
gagccauggucgcuugcca

SEQ ID NO: 3363960 - RNA, 17 nt, Eastern equine encephalitis virus
gagccuaugaucagcug

SEQ ID NO: 3363961 - RNA, 18 nt, Eastern equine encephalitis virus
gagcucugcaugaugaag

SEQ ID NO: 3363962 - RNA, 14 nt, Eastern equine encephalitis virus
gaguacaucaccug

SEQ ID NO: 3363963 - RNA, 15 nt, Eastern equine encephalitis virus
gaguaugaugccuau

SEQ ID NO: 3363964 - RNA, 20 nt, Eastern equine encephalitis virus
gagucaacgaaggauccagg

SEQ ID NO: 3363965 - RNA, 16 nt, Eastern equine encephalitis virus
gagucauccgcaucca

SEQ ID NO: 3363966 - RNA, 16 nt, Eastern equine encephalitis virus
gauauccgccacugcg

SEQ ID NO: 3363967 - RNA, 22 nt, Eastern equine encephalitis virus
gaucaaccacccugcaugccau

SEQ ID NO: 3363968 - RNA, 19 nt, Eastern equine encephalitis virus
gaucgcuagccgcgugcuc

SEQ ID NO: 3363969 - RNA, 18 nt, Eastern equine encephalitis virus
gaugucaaacaaugcagg

SEQ ID NO: 3363970 - RNA, 18 nt, Eastern equine encephalitis virus
gcaaccguuacacccaca

SEQ ID NO: 3363971 - RNA, 16 nt, Eastern equine encephalitis virus
gcaaucuuugcauaac

SEQ ID NO: 3363972 - RNA, 15 nt, Eastern equine encephalitis virus
gcaccuguguggcua

SEQ ID NO: 3363973 - RNA, 23 nt, Eastern equine encephalitis virus
gcaggucugcacuagugcaguua

SEQ ID NO: 3363974 - RNA, 13 nt, Eastern equine encephalitis virus
gcaguguauaagg

SEQ ID NO: 3363975 - RNA, 19 nt, Eastern equine encephalitis virus
gcauagucggugcgacagc

SEQ ID NO: 3363976 - RNA, 15 nt, Eastern equine encephalitis virus
gcaucacugaagagc

SEQ ID NO: 3363977 - RNA, 12 nt, Eastern equine encephalitis virus
gcaugccaugcu

SEQ ID NO: 3363978 - RNA, 16 nt, Eastern equine encephalitis virus
gccacaaugcaugaaa

SEQ ID NO: 3363979 - RNA, 19 nt, Eastern equine encephalitis virus
gccacaaugcaugaaauca

SEQ ID NO: 3363980 - RNA, 17 nt, Eastern equine encephalitis virus
gccgacccccugaagag

SEQ ID NO: 3363981 - RNA, 18 nt, Eastern equine encephalitis virus
gccgagccuaugaucagc

SEQ ID NO: 3363982 - RNA, 23 nt, Eastern equine encephalitis virus
gccucgaucucgagcgugagaag

SEQ ID NO: 3363983 - RNA, 19 nt, Eastern equine encephalitis virus
gccuucuccaguagugaaa

SEQ ID NO: 3363984 - RNA, 17 nt, Eastern equine encephalitis virus
gcgaaaauaggagaugc

SEQ ID NO: 3363985 - RNA, 15 nt, Eastern equine encephalitis virus
gcgaccaccaccacc

SEQ ID NO: 3363986 - RNA, 20 nt, Eastern equine encephalitis virus
gcgacuauacaaccaccugc

SEQ ID NO: 3363987 - RNA, 17 nt, Eastern equine encephalitis virus
gcuacaacgaccccagg

SEQ ID NO: 3363988 - RNA, 19 nt, Eastern equine encephalitis virus
gcuacgaggugaacuacgu

SEQ ID NO: 3363989 - RNA, 13 nt, Eastern equine encephalitis virus
gcucuaucagugg

SEQ ID NO: 3363990 - RNA, 18 nt, Eastern equine encephalitis virus
gcugaagaaggccagcau

SEQ ID NO: 3363991 - RNA, 13 nt, Eastern equine encephalitis virus
gcuuuuaagcugc

SEQ ID NO: 3363992 - RNA, 18 nt, Eastern equine encephalitis virus
ggaaagggugacagcggg

SEQ ID NO: 3363993 - RNA, 17 nt, Eastern equine encephalitis virus
ggacaagggcaccugca

SEQ ID NO: 3363994 - RNA, 14 nt, Eastern equine encephalitis virus
ggacacgguuacag

SEQ ID NO: 3363995 - RNA, 21 nt, Eastern equine encephalitis virus
ggacggcucuaucagugguga

SEQ ID NO: 3363996 - RNA, 18 nt, Eastern equine encephalitis virus
ggaguacaucaccugcaa

SEQ ID NO: 3363997 - RNA, 19 nt, Eastern equine encephalitis virus
ggcaucacugaagagcugg

SEQ ID NO: 3363998 - RNA, 19 nt, Eastern equine encephalitis virus
ggcggcccuuuaggccacc

SEQ ID NO: 3363999 - RNA, 20 nt, Eastern equine encephalitis virus
ggcuaguugccgaccacucu

SEQ ID NO: 3364000 - RNA, 20 nt, Eastern equine encephalitis virus
ggcucaagagucaggagaag

SEQ ID NO: 3364001 - RNA, 18 nt, Eastern equine encephalitis virus
gggaaaccauccaccaaa

SEQ ID NO: 3364002 - RNA, 12 nt, Eastern equine encephalitis virus
gggacaaaacau

SEQ ID NO: 3364003 - RNA, 18 nt, Eastern equine encephalitis virus
gggaugcgcacgcaggag

SEQ ID NO: 3364004 - RNA, 17 nt, Eastern equine encephalitis virus
gggaugucaaggucaca

SEQ ID NO: 3364005 - RNA, 12 nt, Eastern equine encephalitis virus
gggcaccugcaa

SEQ ID NO: 3364006 - RNA, 14 nt, Eastern equine encephalitis virus
gggccuaaccgcca

SEQ ID NO: 3364007 - RNA, 16 nt, Eastern equine encephalitis virus
ggugauacaggcagcu

SEQ ID NO: 3364008 - RNA, 14 nt, Eastern equine encephalitis virus
guacaucaccugca

SEQ ID NO: 3364009 - RNA, 14 nt, Eastern equine encephalitis virus
guacuagcagcagc

SEQ ID NO: 3364010 - RNA, 19 nt, Eastern equine encephalitis virus
guauucaaguacugcaagc

SEQ ID NO: 3364011 - RNA, 17 nt, Eastern equine encephalitis virus
gucaauaucaugaucgc

SEQ ID NO: 3364012 - RNA, 18 nt, Eastern equine encephalitis virus
gucacauccguguggcuc

SEQ ID NO: 3364013 - RNA, 15 nt, Eastern equine encephalitis virus
gucagauaaaacguu

SEQ ID NO: 3364014 - RNA, 12 nt, Eastern equine encephalitis virus
gucagcuggaga

SEQ ID NO: 3364015 - RNA, 21 nt, Eastern equine encephalitis virus
gugcagaaaauugugcagugg

SEQ ID NO: 3364016 - RNA, 14 nt, Eastern equine encephalitis virus
gugcaguuaccugc

SEQ ID NO: 3364017 - RNA, 15 nt, Eastern equine encephalitis virus
gugcauaaugcugcu

SEQ ID NO: 3364018 - RNA, 15 nt, Eastern equine encephalitis virus
gugcgcagguugaac

SEQ ID NO: 3364019 - RNA, 12 nt, Eastern equine encephalitis virus
gugcguccuggc

SEQ ID NO: 3364020 - RNA, 23 nt, Eastern equine encephalitis virus
guggacgaguguucaaaccgcug

SEQ ID NO: 3364021 - RNA, 17 nt, Eastern equine encephalitis virus
guggcuccuuugcagga

SEQ ID NO: 3364022 - RNA, 19 nt, Eastern equine encephalitis virus
guguggcuccuuugcagga

SEQ ID NO: 3364023 - RNA, 22 nt, Eastern equine encephalitis virus
guuaaggccaagugcaucgcca

SEQ ID NO: 3364024 - RNA, 16 nt, Eastern equine encephalitis virus
guugccuacaaaucca

SEQ ID NO: 3364025 - RNA, 17 nt, Eastern equine encephalitis virus
uaaugauucuugaagac

SEQ ID NO: 3364026 - RNA, 20 nt, Eastern equine encephalitis virus
uaaugcuaggagaaccagga

SEQ ID NO: 3364027 - RNA, 12 nt, Eastern equine encephalitis virus
uacaauuacacu

SEQ ID NO: 3364028 - RNA, 21 nt, Eastern equine encephalitis virus
gcagugguugcccuaguucug

SEQ ID NO: 3364029 - RNA, 13 nt, Eastern equine encephalitis virus
gcauaaggcugcu

SEQ ID NO: 3364030 - RNA, 15 nt, Eastern equine encephalitis virus
gcauccacagugcca

SEQ ID NO: 3364031 - RNA, 13 nt, Eastern equine encephalitis virus
gcaucgccacgcu

SEQ ID NO: 3364032 - RNA, 23 nt, Eastern equine encephalitis virus
gcaugaaaucagauacccuccag

SEQ ID NO: 3364033 - RNA, 19 nt, Eastern equine encephalitis virus
gccaagaaacaaaaacgua

SEQ ID NO: 3364034 - RNA, 22 nt, Eastern equine encephalitis virus
gccgagccuaugaucagcugcu

SEQ ID NO: 3364035 - RNA, 15 nt, Eastern equine encephalitis virus
gccgaugcagugcau

SEQ ID NO: 3364036 - RNA, 17 nt, Eastern equine encephalitis virus
gccgccgaugcagugca

SEQ ID NO: 3364037 - RNA, 12 nt, Eastern equine encephalitis virus
gccgcugugaaa

SEQ ID NO: 3364038 - RNA, 15 nt, Eastern equine encephalitis virus
gccuacaaauccagu

SEQ ID NO: 3364039 - RNA, 22 nt, Eastern equine encephalitis virus
gcgaccaacaacugucaauuuc

SEQ ID NO: 3364040 - RNA, 21 nt, Eastern equine encephalitis virus
gcggugcuagagacagacaua

SEQ ID NO: 3364041 - RNA, 21 nt, Eastern equine encephalitis virus
gcucaaauugaggaccugaga

SEQ ID NO: 3364042 - RNA, 21 nt, Eastern equine encephalitis virus
gcugcacguagaaggcagaau

SEQ ID NO: 3364043 - RNA, 17 nt, Eastern equine encephalitis virus
ggacccaaagcagcugc

SEQ ID NO: 3364044 - RNA, 14 nt, Eastern equine encephalitis virus
ggagcgucagcugg

SEQ ID NO: 3364045 - RNA, 21 nt, Eastern equine encephalitis virus
ggagcuguacaguaugagaac

SEQ ID NO: 3364046 - RNA, 14 nt, Eastern equine encephalitis virus
ggaguugaucaggc

SEQ ID NO: 3364047 - RNA, 16 nt, Eastern equine encephalitis virus
ggaugcgcacgcagga

SEQ ID NO: 3364048 - RNA, 21 nt, Eastern equine encephalitis virus
ggcaguguauaaggcugucuu

SEQ ID NO: 3364049 - RNA, 15 nt, Eastern equine encephalitis virus
ggcaucacugaagag

SEQ ID NO: 3364050 - RNA, 19 nt, Eastern equine encephalitis virus
ggcgauauccgccacugcg

SEQ ID NO: 3364051 - RNA, 17 nt, Eastern equine encephalitis virus
ggcuauuacauccuggc

SEQ ID NO: 3364052 - RNA, 20 nt, Eastern equine encephalitis virus
ggcugcuauauuaccacauu

SEQ ID NO: 3364053 - RNA, 20 nt, Eastern equine encephalitis virus
guaugcaugcgcaugcugcg

SEQ ID NO: 3364054 - RNA, 22 nt, Eastern equine encephalitis virus
guauguagagcgcucggaagag

SEQ ID NO: 3364055 - RNA, 13 nt, Eastern equine encephalitis virus
gucaccggagaag

SEQ ID NO: 3364056 - RNA, 20 nt, Eastern equine encephalitis virus
gucgccgacccccugaagag

SEQ ID NO: 3364057 - RNA, 12 nt, Eastern equine encephalitis virus
gugacaagccuc

SEQ ID NO: 3364058 - RNA, 17 nt, Eastern equine encephalitis virus
gugauacaggcagcuga

SEQ ID NO: 3364059 - RNA, 23 nt, Eastern equine encephalitis virus
gugcacacaccuuucacccaggc

SEQ ID NO: 3364060 - RNA, 16 nt, Eastern equine encephalitis virus
gugcaguuaccugcaa

SEQ ID NO: 3364061 - RNA, 22 nt, Eastern equine encephalitis virus
gugccuguuaaggccaagugca

SEQ ID NO: 3364062 - RNA, 19 nt, Eastern equine encephalitis virus
gugcgcagguugaacgcug

SEQ ID NO: 3364063 - RNA, 18 nt, Eastern equine encephalitis virus
gugguauacaucgagagc

SEQ ID NO: 3364064 - RNA, 18 nt, Eastern equine encephalitis virus
guuacacccacaagcgug

SEQ ID NO: 3364065 - RNA, 23 nt, Eastern equine encephalitis virus
guuacaucugacgcacugauggc

SEQ ID NO: 3364066 - RNA, 15 nt, Eastern equine encephalitis virus
guucggucugaagac

SEQ ID NO: 3364067 - RNA, 20 nt, Eastern equine encephalitis virus
uaaacacauaagaggucacc

SEQ ID NO: 3364068 - RNA, 23 nt, Eastern equine encephalitis virus
uaaagggacccaaagcagcugcc

SEQ ID NO: 3364069 - RNA, 20 nt, Eastern equine encephalitis virus
uaaaguagagaacaugaagg

SEQ ID NO: 3364070 - RNA, 14 nt, Eastern equine encephalitis virus
uacaaccaccugca

SEQ ID NO: 3364071 - RNA, 22 nt, Eastern equine encephalitis virus
uacacacuuuauaaucaggcau

SEQ ID NO: 3364072 - RNA, 14 nt, Eastern equine encephalitis virus
uacaggcagcgcau

SEQ ID NO: 3364073 - RNA, 13 nt, Eastern equine encephalitis virus
uacaucaccugca

SEQ ID NO: 3364074 - RNA, 18 nt, Eastern equine encephalitis virus
uacauuccacuucuccac

SEQ ID NO: 3364075 - RNA, 15 nt, Eastern equine encephalitis virus
uacgcggcaaugcaa

SEQ ID NO: 3364076 - RNA, 23 nt, Eastern equine encephalitis virus
uacugcaagagaauuuucccacc

SEQ ID NO: 3364077 - RNA, 15 nt, Eastern equine encephalitis virus
uauacaaccaccugc

SEQ ID NO: 3364078 - RNA, 20 nt, Eastern equine encephalitis virus
ucaaauugaggaccugagac

SEQ ID NO: 3364079 - RNA, 16 nt, Eastern equine encephalitis virus
ucaaccacccugcaug

SEQ ID NO: 3364080 - RNA, 20 nt, Eastern equine encephalitis virus
ucaagcugaagaaggccagc

SEQ ID NO: 3364081 - RNA, 17 nt, Eastern equine encephalitis virus
ucacagucaccggagaa

SEQ ID NO: 3364082 - RNA, 20 nt, Eastern equine encephalitis virus
ucacccuaguucgauguacu

SEQ ID NO: 3364083 - RNA, 18 nt, Eastern equine encephalitis virus
ucacgacgggccuaaccg

SEQ ID NO: 3364084 - RNA, 15 nt, Eastern equine encephalitis virus
ucauucuccaucagg

SEQ ID NO: 3364085 - RNA, 12 nt, Eastern equine encephalitis virus
ucauuucaccca

SEQ ID NO: 3364086 - RNA, 17 nt, Eastern equine encephalitis virus
uccaaaccccauccuga

SEQ ID NO: 3364087 - RNA, 23 nt, Eastern equine encephalitis virus
uccaagauguacuagcagcagcc

SEQ ID NO: 3364088 - RNA, 15 nt, Eastern equine encephalitis virus
uccaaucauguugaa

SEQ ID NO: 3364089 - RNA, 14 nt, Eastern equine encephalitis virus
uccaguacaccagu

SEQ ID NO: 3364090 - RNA, 21 nt, Eastern equine encephalitis virus
uccuggcucaaugcccaccag

SEQ ID NO: 3364091 - RNA, 18 nt, Eastern equine encephalitis virus
ugaaagcaguugaaucac

SEQ ID NO: 3364092 - RNA, 21 nt, Eastern equine encephalitis virus
ugaagcuacaacgaccccagg

SEQ ID NO: 3364093 - RNA, 15 nt, Eastern equine encephalitis virus
ugacgaccaggucac

SEQ ID NO: 3364094 - RNA, 19 nt, Eastern equine encephalitis virus
ugagaacaauagguucacc

SEQ ID NO: 3364095 - RNA, 18 nt, Eastern equine encephalitis virus
ugaugugccacaaugcau

SEQ ID NO: 3364096 - RNA, 20 nt, Eastern equine encephalitis virus
ugauugcccuaacugugggc

SEQ ID NO: 3364097 - RNA, 18 nt, Eastern equine encephalitis virus
ugcacccguucaccuaca

SEQ ID NO: 3364098 - RNA, 14 nt, Eastern equine encephalitis virus
ugcaggggauaggc

SEQ ID NO: 3364099 - RNA, 17 nt, Eastern equine encephalitis virus
ugcaguuaccugcaaag

SEQ ID NO: 3364100 - RNA, 14 nt, Eastern equine encephalitis virus
ugccacucaaugua

SEQ ID NO: 3364101 - RNA, 21 nt, Eastern equine encephalitis virus
ugccaucaccgauucaaaaca

SEQ ID NO: 3364102 - RNA, 15 nt, Eastern equine encephalitis virus
ugcugacgaccaggu

SEQ ID NO: 3364103 - RNA, 13 nt, Eastern equine encephalitis virus
uggaagacugccu

SEQ ID NO: 3364104 - RNA, 20 nt, Eastern equine encephalitis virus
uggaguugaauuaccaugca

SEQ ID NO: 3364105 - RNA, 20 nt, Eastern equine encephalitis virus
uggcggcccuuuaggccacc

SEQ ID NO: 3364106 - RNA, 12 nt, Eastern equine encephalitis virus
uuaauaccagga

SEQ ID NO: 3364107 - RNA, 20 nt, Eastern equine encephalitis virus
aaaaagggguuacagucaaa

SEQ ID NO: 3364108 - RNA, 17 nt, Eastern equine encephalitis virus
aaaagugccuucuccag

SEQ ID NO: 3364109 - RNA, 14 nt, Eastern equine encephalitis virus
aaaccccauccuga

SEQ ID NO: 3364110 - RNA, 23 nt, Eastern equine encephalitis virus
aaacuguccaauucauucuccau

SEQ ID NO: 3364111 - RNA, 17 nt, Eastern equine encephalitis virus
gaaauacuacugcaagu

SEQ ID NO: 3364112 - RNA, 14 nt, Eastern equine encephalitis virus
gaacaugaaggcaa

SEQ ID NO: 3364113 - RNA, 17 nt, Eastern equine encephalitis virus
gaagaagucagagggga

SEQ ID NO: 3364114 - RNA, 18 nt, Eastern equine encephalitis virus
gaagacggauggaguuga

SEQ ID NO: 3364115 - RNA, 13 nt, Eastern equine encephalitis virus
gaagagcugguga

SEQ ID NO: 3364116 - RNA, 21 nt, Eastern equine encephalitis virus
gaagcuguugcagaagaaacu

SEQ ID NO: 3364117 - RNA, 13 nt, Eastern equine encephalitis virus
gaagucagagggg

SEQ ID NO: 3364118 - RNA, 21 nt, Eastern equine encephalitis virus
gaauuggcaucacugaagagc

SEQ ID NO: 3364119 - RNA, 20 nt, Eastern equine encephalitis virus
gacaacaaagguagagucgu

SEQ ID NO: 3364120 - RNA, 22 nt, Eastern equine encephalitis virus
gacaacaucgugaaagggguua

SEQ ID NO: 3364121 - RNA, 14 nt, Eastern equine encephalitis virus
gacacgguuacagu

SEQ ID NO: 3364122 - RNA, 23 nt, Eastern equine encephalitis virus
gacacgguuacaguuggguuuca

SEQ ID NO: 3364123 - RNA, 19 nt, Eastern equine encephalitis virus
gacagucucagaccuggaa

SEQ ID NO: 3364124 - RNA, 14 nt, Eastern equine encephalitis virus
gacccaaagcagcu

SEQ ID NO: 3364125 - RNA, 20 nt, Eastern equine encephalitis virus
gacgcacugauggcagagcg

SEQ ID NO: 3364126 - RNA, 19 nt, Eastern equine encephalitis virus
gacuauacaaccaccugca

SEQ ID NO: 3364127 - RNA, 18 nt, Eastern equine encephalitis virus
gacugccucgaggagagg

SEQ ID NO: 3364128 - RNA, 12 nt, Eastern equine encephalitis virus
gagcgugagaag

SEQ ID NO: 3364129 - RNA, 18 nt, Eastern equine encephalitis virus
gagggaacuaccagcagc

SEQ ID NO: 3364130 - RNA, 22 nt, Eastern equine encephalitis virus
gagucgccgacccccugaagag

SEQ ID NO: 3364131 - RNA, 12 nt, Eastern equine encephalitis virus
gauacagcuggu

SEQ ID NO: 3364132 - RNA, 22 nt, Eastern equine encephalitis virus
gauacagcugguuaauaccagg

SEQ ID NO: 3364133 - RNA, 14 nt, Eastern equine encephalitis virus
gaucagcagugcca

SEQ ID NO: 3364134 - RNA, 16 nt, Eastern equine encephalitis virus
gaucgacaaccugcau

SEQ ID NO: 3364135 - RNA, 13 nt, Eastern equine encephalitis virus
gaugcagugcaua

SEQ ID NO: 3364136 - RNA, 18 nt, Eastern equine encephalitis virus
gaugccuaucuugacaug

SEQ ID NO: 3364137 - RNA, 22 nt, Eastern equine encephalitis virus
gcaacuuuaaacacauaagagg

SEQ ID NO: 3364138 - RNA, 21 nt, Eastern equine encephalitis virus
gcaccauggagcuguacagua

SEQ ID NO: 3364139 - RNA, 16 nt, Eastern equine encephalitis virus
gcaccuaacccuccag

SEQ ID NO: 3364140 - RNA, 18 nt, Eastern equine encephalitis virus
gcacgaagugguagucua

SEQ ID NO: 3364141 - RNA, 23 nt, Eastern equine encephalitis virus
gcacugauggcagagcggugcgc

SEQ ID NO: 3364142 - RNA, 21 nt, Eastern equine encephalitis virus
gcagcgacuauacaaccaccu

SEQ ID NO: 3364143 - RNA, 23 nt, Eastern equine encephalitis virus
gcagcucaaauugaggaccugag

SEQ ID NO: 3364144 - RNA, 15 nt, Eastern equine encephalitis virus
gcauccagacaucag

SEQ ID NO: 3364145 - RNA, 16 nt, Eastern equine encephalitis virus
gcaugcugcgcugcuu

SEQ ID NO: 3364146 - RNA, 17 nt, Eastern equine encephalitis virus
gccaaacgcaagaagcc

SEQ ID NO: 3364147 - RNA, 20 nt, Eastern equine encephalitis virus
gccaaacgcaagaagccugc

SEQ ID NO: 3364148 - RNA, 15 nt, Eastern equine encephalitis virus
gccaccacuugcagc

SEQ ID NO: 3364149 - RNA, 18 nt, Eastern equine encephalitis virus
gccaccacuugcagcuca

SEQ ID NO: 3364150 - RNA, 18 nt, Eastern equine encephalitis virus
gccaccuuuugcccagcu

SEQ ID NO: 3364151 - RNA, 19 nt, Eastern equine encephalitis virus
gccacgcuggcaccagagc

SEQ ID NO: 3364152 - RNA, 15 nt, Eastern equine encephalitis virus
gccacgugguugaac

SEQ ID NO: 3364153 - RNA, 16 nt, Eastern equine encephalitis virus
gccacugucaugugcg

SEQ ID NO: 3364154 - RNA, 16 nt, Eastern equine encephalitis virus
gccaucaagcugaaga

SEQ ID NO: 3364155 - RNA, 18 nt, Eastern equine encephalitis virus
gccaucaagcugaagaag

SEQ ID NO: 3364156 - RNA, 21 nt, Eastern equine encephalitis virus
gccauggucgcuugccacugu

SEQ ID NO: 3364157 - RNA, 13 nt, Eastern equine encephalitis virus
gcccaagugaaau

SEQ ID NO: 3364158 - RNA, 15 nt, Eastern equine encephalitis virus
gcccuaacugugggc

SEQ ID NO: 3364159 - RNA, 16 nt, Eastern equine encephalitis virus
gccgccgaugcagugc

SEQ ID NO: 3364160 - RNA, 19 nt, Eastern equine encephalitis virus
gccuauggcgccgauuaac

SEQ ID NO: 3364161 - RNA, 17 nt, Eastern equine encephalitis virus
gccuccgauuucggugg

SEQ ID NO: 3364162 - RNA, 17 nt, Eastern equine encephalitis virus
gccuccuauaaacacua

SEQ ID NO: 3364163 - RNA, 18 nt, Eastern equine encephalitis virus
gccugagauacgaucagc

SEQ ID NO: 3364164 - RNA, 14 nt, Eastern equine encephalitis virus
gccugcgcaggaaa

SEQ ID NO: 3364165 - RNA, 23 nt, Eastern equine encephalitis virus
gccuucuccaguagugaaaugcu

SEQ ID NO: 3364166 - RNA, 19 nt, Eastern equine encephalitis virus
gcgaccaccaccaccugcc

SEQ ID NO: 3364167 - RNA, 22 nt, Eastern equine encephalitis virus
gcgacuauacaaccaccugcac

SEQ ID NO: 3364168 - RNA, 22 nt, Eastern equine encephalitis virus
gcggugcuagagacagacauag

SEQ ID NO: 3364169 - RNA, 21 nt, Eastern equine encephalitis virus
gcguuacuuugcugcauuaag

SEQ ID NO: 3364170 - RNA, 21 nt, Eastern equine encephalitis virus
gcuaggagaaccaggagagau

SEQ ID NO: 3364171 - RNA, 19 nt, Eastern equine encephalitis virus
gcucaagagucaggagaag

SEQ ID NO: 3364172 - RNA, 20 nt, Eastern equine encephalitis virus
gcucuuuuggagaccugcaa

SEQ ID NO: 3364173 - RNA, 14 nt, Eastern equine encephalitis virus
gcuggagaucugca

SEQ ID NO: 3364174 - RNA, 18 nt, Eastern equine encephalitis virus
gcuuaucccacuugcagc

SEQ ID NO: 3364175 - RNA, 19 nt, Eastern equine encephalitis virus
ggacacucauuucacccag

SEQ ID NO: 3364176 - RNA, 14 nt, Eastern equine encephalitis virus
ggagaaccaggaga

SEQ ID NO: 3364177 - RNA, 16 nt, Eastern equine encephalitis virus
ggaggagccuacugcu

SEQ ID NO: 3364178 - RNA, 23 nt, Eastern equine encephalitis virus
ggagucauccgcauccagacauc

SEQ ID NO: 3364179 - RNA, 20 nt, Eastern equine encephalitis virus
ggaguugaauuaccaugcaa

SEQ ID NO: 3364180 - RNA, 23 nt, Eastern equine encephalitis virus
ggaguugauuuggccuacaugag

SEQ ID NO: 3364181 - RNA, 16 nt, Eastern equine encephalitis virus
ggcaaagcaggcucuu

SEQ ID NO: 3364182 - RNA, 19 nt, Eastern equine encephalitis virus
ggcagaugacaccuugcaa

SEQ ID NO: 3364183 - RNA, 22 nt, Eastern equine encephalitis virus
ggcauagucggugcgacagccc

SEQ ID NO: 3364184 - RNA, 15 nt, Eastern equine encephalitis virus
ggcgcagagcucugc

SEQ ID NO: 3364185 - RNA, 23 nt, Eastern equine encephalitis virus
ggggcuuauugcuacagcagugg

SEQ ID NO: 3364186 - RNA, 17 nt, Eastern equine encephalitis virus
gguucaugggcaugaag

SEQ ID NO: 3364187 - RNA, 17 nt, Eastern equine encephalitis virus
guacaucaccugcaagu

SEQ ID NO: 3364188 - RNA, 14 nt, Eastern equine encephalitis virus
guagaaggcagaau

SEQ ID NO: 3364189 - RNA, 13 nt, Eastern equine encephalitis virus
caagccuccuggc

SEQ ID NO: 3364190 - RNA, 15 nt, Eastern equine encephalitis virus
caagccuccuggcuu

SEQ ID NO: 3364191 - RNA, 12 nt, Eastern equine encephalitis virus
caagcgugcaga

SEQ ID NO: 3364192 - RNA, 19 nt, Eastern equine encephalitis virus
caaguauaagacaaaagug

SEQ ID NO: 3364193 - RNA, 18 nt, Eastern equine encephalitis virus
caauuacacuacagguaa

SEQ ID NO: 3364194 - RNA, 13 nt, Eastern equine encephalitis virus
cacaaugcaugaa

SEQ ID NO: 3364195 - RNA, 13 nt, Eastern equine encephalitis virus
caccaccaccugc

SEQ ID NO: 3364196 - RNA, 17 nt, Eastern equine encephalitis virus
caccacuugcagcucaa

SEQ ID NO: 3364197 - RNA, 13 nt, Eastern equine encephalitis virus
cacccugcaugcc

SEQ ID NO: 3364198 - RNA, 18 nt, Eastern equine encephalitis virus
caccggcaaagcaggcuc

SEQ ID NO: 3364199 - RNA, 21 nt, Eastern equine encephalitis virus
caccugccaagaaacaaaaac

SEQ ID NO: 3364200 - RNA, 18 nt, Eastern equine encephalitis virus
caccuuucacccaggcgc

SEQ ID NO: 3364201 - RNA, 24 nt, Eastern equine encephalitis virus
cacggcuauuacauccuggcucaa

SEQ ID NO: 3364202 - RNA, 23 nt, Eastern equine encephalitis virus
cacgugguugaacauggaaguga

SEQ ID NO: 3364203 - RNA, 20 nt, Eastern equine encephalitis virus
cacuaaauucacccuaguuc

SEQ ID NO: 3364204 - RNA, 20 nt, Eastern equine encephalitis virus
cacuagugcaguuaccugca

SEQ ID NO: 3364205 - RNA, 17 nt, Eastern equine encephalitis virus
cacugaaaacacccaga

SEQ ID NO: 3364206 - RNA, 19 nt, Eastern equine encephalitis virus
cagaaaauugugcaguggg

SEQ ID NO: 3364207 - RNA, 15 nt, Eastern equine encephalitis virus
cagagcggugcgcca

SEQ ID NO: 3364208 - RNA, 17 nt, Eastern equine encephalitis virus
cagaggggucagagcca

SEQ ID NO: 3364209 - RNA, 19 nt, Eastern equine encephalitis virus
cagaggggucagagccaug

SEQ ID NO: 3364210 - RNA, 15 nt, Eastern equine encephalitis virus
cagauacccuccagu

SEQ ID NO: 3364211 - RNA, 20 nt, Eastern equine encephalitis virus
cagaugacaccuugcaagug

SEQ ID NO: 3364212 - RNA, 23 nt, Eastern equine encephalitis virus
cagcagcgacuauacaaccaccu

SEQ ID NO: 3364213 - RNA, 20 nt, Eastern equine encephalitis virus
caggagaagggaauccacau

SEQ ID NO: 3364214 - RNA, 15 nt, Eastern equine encephalitis virus
caggcacuguucagg

SEQ ID NO: 3364215 - RNA, 22 nt, Eastern equine encephalitis virus
caggcagcugauccacuugcaa

SEQ ID NO: 3364216 - RNA, 23 nt, Eastern equine encephalitis virus
caggcucuuuuggagaccugcaa

SEQ ID NO: 3364217 - RNA, 15 nt, Eastern equine encephalitis virus
cagguguugcaguua

SEQ ID NO: 3364218 - RNA, 16 nt, Eastern equine encephalitis virus
cagugcauaaggcugc

SEQ ID NO: 3364219 - RNA, 18 nt, Eastern equine encephalitis virus
cagugcauaaugcugcuc

SEQ ID NO: 3364220 - RNA, 19 nt, Eastern equine encephalitis virus
caguggugacauggaacca

SEQ ID NO: 3364221 - RNA, 19 nt, Eastern equine encephalitis virus
cauaacacuauaggcagug

SEQ ID NO: 3364222 - RNA, 19 nt, Eastern equine encephalitis virus
cauaacgccgccgaugcag

SEQ ID NO: 3364223 - RNA, 22 nt, Eastern equine encephalitis virus
cauaacgccgccgaugcagugc

SEQ ID NO: 3364224 - RNA, 21 nt, Eastern equine encephalitis virus
cauaaugcugcuccuaaguaa

SEQ ID NO: 3364225 - RNA, 15 nt, Eastern equine encephalitis virus
caucaagcugaagaa

SEQ ID NO: 3364226 - RNA, 15 nt, Eastern equine encephalitis virus
caucagguguugcag

SEQ ID NO: 3364227 - RNA, 14 nt, Eastern equine encephalitis virus
cauccacagugcca

SEQ ID NO: 3364228 - RNA, 15 nt, Eastern equine encephalitis virus
cauccagacaucagc

SEQ ID NO: 3364229 - RNA, 14 nt, Eastern equine encephalitis virus
caugucugcagaag

SEQ ID NO: 3364230 - RNA, 15 nt, Eastern equine encephalitis virus
caugucugcagaaga

SEQ ID NO: 3364231 - RNA, 15 nt, Eastern equine encephalitis virus
ccaaagaagcacagu

SEQ ID NO: 3364232 - RNA, 16 nt, Eastern equine encephalitis virus
ccaagccuaagccugc

SEQ ID NO: 3364233 - RNA, 21 nt, Eastern equine encephalitis virus
ccacaagcgugcagaccaagg

SEQ ID NO: 3364234 - RNA, 16 nt, Eastern equine encephalitis virus
ccacacuuuguuugac

SEQ ID NO: 3364235 - RNA, 12 nt, Eastern equine encephalitis virus
ccaccaccugcc

SEQ ID NO: 3364236 - RNA, 18 nt, Eastern equine encephalitis virus
ccaccacuugcagcucaa

SEQ ID NO: 3364237 - RNA, 20 nt, Eastern equine encephalitis virus
ccacgcuggcaccagagccu

SEQ ID NO: 3364238 - RNA, 18 nt, Eastern equine encephalitis virus
ccagaggggucagagcca

SEQ ID NO: 3364239 - RNA, 22 nt, Eastern equine encephalitis virus
ccaggacggcucuaucaguggu

SEQ ID NO: 3364240 - RNA, 20 nt, Eastern equine encephalitis virus
ccaggggacacgguuacagu

SEQ ID NO: 3364241 - RNA, 21 nt, Eastern equine encephalitis virus
ccaguguuggauucagcugcc

SEQ ID NO: 3364242 - RNA, 20 nt, Eastern equine encephalitis virus
ccaugugaucaaccacccug

SEQ ID NO: 3364243 - RNA, 20 nt, Eastern equine encephalitis virus
ccauucgauaacaagguggu

SEQ ID NO: 3364244 - RNA, 14 nt, Eastern equine encephalitis virus
cccauucauguggg

SEQ ID NO: 3364245 - RNA, 15 nt, Eastern equine encephalitis virus
ccguauauugcugau

SEQ ID NO: 3364246 - RNA, 19 nt, Eastern equine encephalitis virus
ccuauggcgccgauuaacc

SEQ ID NO: 3364247 - RNA, 14 nt, Eastern equine encephalitis virus
ccuccagcaggacc

SEQ ID NO: 3364248 - RNA, 13 nt, Eastern equine encephalitis virus
ccugcaacaaaaa

SEQ ID NO: 3364249 - RNA, 20 nt, Eastern equine encephalitis virus
ccuggaguacaucaccugca

SEQ ID NO: 3364250 - RNA, 13 nt, Eastern equine encephalitis virus
cgacaaccugcau

SEQ ID NO: 3364251 - RNA, 17 nt, Eastern equine encephalitis virus
cgagacgggacaagggc

SEQ ID NO: 3364252 - RNA, 19 nt, Eastern equine encephalitis virus
cgagccuaugaucagcugc

SEQ ID NO: 3364253 - RNA, 15 nt, Eastern equine encephalitis virus
cgaucagcagugcca

SEQ ID NO: 3364254 - RNA, 23 nt, Eastern equine encephalitis virus
cgauuucggugguauagccaccg

SEQ ID NO: 3364255 - RNA, 15 nt, Eastern equine encephalitis virus
cgcaccucagccccu

SEQ ID NO: 3364256 - RNA, 14 nt, Eastern equine encephalitis virus
cgcacugauggcag

SEQ ID NO: 3364257 - RNA, 23 nt, Eastern equine encephalitis virus
cgcauauacaauuacacuacagg

SEQ ID NO: 3364258 - RNA, 15 nt, Eastern equine encephalitis virus
cgccgaugcagugca

SEQ ID NO: 3364259 - RNA, 19 nt, Eastern equine encephalitis virus
cgggacaagggcaccugca

SEQ ID NO: 3364260 - RNA, 17 nt, Eastern equine encephalitis virus
cgugcagaccaaggaca

SEQ ID NO: 3364261 - RNA, 14 nt, Eastern equine encephalitis virus
cuaaauaucagaga

SEQ ID NO: 3364262 - RNA, 13 nt, Eastern equine encephalitis virus
cuacaagacaaac

SEQ ID NO: 3364263 - RNA, 13 nt, Eastern equine encephalitis virus
cuacagcaguggu

SEQ ID NO: 3364264 - RNA, 22 nt, Eastern equine encephalitis virus
cuaccagcagcgacuauacaac

SEQ ID NO: 3364265 - RNA, 16 nt, Eastern equine encephalitis virus
cuauaaacacuacagg

SEQ ID NO: 3364266 - RNA, 21 nt, Eastern equine encephalitis virus
cuauagaagaagucagagggg

SEQ ID NO: 3364267 - RNA, 14 nt, Eastern equine encephalitis virus
cuaucaucaugguc

SEQ ID NO: 3364268 - RNA, 16 nt, Eastern equine encephalitis virus
cuaucauugcagaaca

SEQ ID NO: 3364269 - RNA, 16 nt, Eastern equine encephalitis virus
cuaugaucagcugcuc

SEQ ID NO: 3364270 - RNA, 14 nt, Eastern equine encephalitis virus
agcuggagaucugc

SEQ ID NO: 3364271 - RNA, 20 nt, Eastern equine encephalitis virus
aggaaaacuucaugugcccu

SEQ ID NO: 3364272 - RNA, 20 nt, Eastern equine encephalitis virus
aggagucauccgcauccaga

SEQ ID NO: 3364273 - RNA, 17 nt, Eastern equine encephalitis virus
aggcguauguagagcgc

SEQ ID NO: 3364274 - RNA, 21 nt, Eastern equine encephalitis virus
aggcugcuauauuaccacauu

SEQ ID NO: 3364275 - RNA, 21 nt, Eastern equine encephalitis virus
aggggaugcgcacgcaggagu

SEQ ID NO: 3364276 - RNA, 14 nt, Eastern equine encephalitis virus
agguguugcaguua

SEQ ID NO: 3364277 - RNA, 15 nt, Eastern equine encephalitis virus
agguguuuacccauu

SEQ ID NO: 3364278 - RNA, 16 nt, Eastern equine encephalitis virus
aguacaucaccugcaa

SEQ ID NO: 3364279 - RNA, 17 nt, Eastern equine encephalitis virus
aguagagaacaugaagg

SEQ ID NO: 3364280 - RNA, 23 nt, Eastern equine encephalitis virus
aguauaccuggggaaaccaucca

SEQ ID NO: 3364281 - RNA, 21 nt, Eastern equine encephalitis virus
aguaugggcucaagagucagg

SEQ ID NO: 3364282 - RNA, 21 nt, Eastern equine encephalitis virus
agucucguaaaguagagaaca

SEQ ID NO: 3364283 - RNA, 13 nt, Eastern equine encephalitis virus
agugaaaugcugc

SEQ ID NO: 3364284 - RNA, 17 nt, Eastern equine encephalitis virus
agugcauaaugcugcuc

SEQ ID NO: 3364285 - RNA, 18 nt, Eastern equine encephalitis virus
agugcaucgccacgcugg

SEQ ID NO: 3364286 - RNA, 21 nt, Eastern equine encephalitis virus
aguugagcacaaacaccgcac

SEQ ID NO: 3364287 - RNA, 20 nt, Eastern equine encephalitis virus
aguugauuuggccuacauga

SEQ ID NO: 3364288 - RNA, 16 nt, Eastern equine encephalitis virus
auacgaucagcagugc

SEQ ID NO: 3364289 - RNA, 18 nt, Eastern equine encephalitis virus
cacacaggcacuguucag

SEQ ID NO: 3364290 - RNA, 15 nt, Eastern equine encephalitis virus
cacagcagugaugcc

SEQ ID NO: 3364291 - RNA, 21 nt, Eastern equine encephalitis virus
cacaggcacuguucaggcaau

SEQ ID NO: 3364292 - RNA, 13 nt, Eastern equine encephalitis virus
cacagugccaagg

SEQ ID NO: 3364293 - RNA, 11 nt, Eastern equine encephalitis virus
caccaccugcc

SEQ ID NO: 3364294 - RNA, 13 nt, Eastern equine encephalitis virus
caccaccugccaa

SEQ ID NO: 3364295 - RNA, 20 nt, Eastern equine encephalitis virus
caccagaggggucagagcca

SEQ ID NO: 3364296 - RNA, 21 nt, Eastern equine encephalitis virus
cacccacaagcgugcagacca

SEQ ID NO: 3364297 - RNA, 17 nt, Eastern equine encephalitis virus
cacccaccugaacaugg

SEQ ID NO: 3364298 - RNA, 13 nt, Eastern equine encephalitis virus
cacgcaaaagcuu

SEQ ID NO: 3364299 - RNA, 22 nt, Eastern equine encephalitis virus
cacuaaauucacccuaguucga

SEQ ID NO: 3364300 - RNA, 16 nt, Eastern equine encephalitis virus
cagagcucugcaugau

SEQ ID NO: 3364301 - RNA, 15 nt, Eastern equine encephalitis virus
cagccauugcaugag

SEQ ID NO: 3364302 - RNA, 17 nt, Eastern equine encephalitis virus
cagcgaauguguaugaa

SEQ ID NO: 3364303 - RNA, 19 nt, Eastern equine encephalitis virus
cagcuggagaucugcagau

SEQ ID NO: 3364304 - RNA, 13 nt, Eastern equine encephalitis virus
caggccagugggu

SEQ ID NO: 3364305 - RNA, 22 nt, Eastern equine encephalitis virus
caggccaguggguagagagaaa

SEQ ID NO: 3364306 - RNA, 20 nt, Eastern equine encephalitis virus
caggcucuuuuggagaccug

SEQ ID NO: 3364307 - RNA, 19 nt, Eastern equine encephalitis virus
caggcugguaucgugcaca

SEQ ID NO: 3364308 - RNA, 17 nt, Eastern equine encephalitis virus
caguguauaaggcuguc

SEQ ID NO: 3364309 - RNA, 18 nt, Eastern equine encephalitis virus
cauaagaggucaccccau

SEQ ID NO: 3364310 - RNA, 24 nt, Eastern equine encephalitis virus
cauaaugcugucuuuuauaucaau

SEQ ID NO: 3364311 - RNA, 21 nt, Eastern equine encephalitis virus
cauaauugccgcauauacaau

SEQ ID NO: 3364312 - RNA, 18 nt, Eastern equine encephalitis virus
cauaucucucugcagaac

SEQ ID NO: 3364313 - RNA, 18 nt, Eastern equine encephalitis virus
caucagguguugcaguua

SEQ ID NO: 3364314 - RNA, 14 nt, Eastern equine encephalitis virus
ccaaagaagcacag

SEQ ID NO: 3364315 - RNA, 14 nt, Eastern equine encephalitis virus
ccaagaaacaaaaa

SEQ ID NO: 3364316 - RNA, 14 nt, Eastern equine encephalitis virus
ccacaagcgugcag

SEQ ID NO: 3364317 - RNA, 18 nt, Eastern equine encephalitis virus
ccacaagcgugcagacca

SEQ ID NO: 3364318 - RNA, 14 nt, Eastern equine encephalitis virus
ccaccaccaccugc

SEQ ID NO: 3364319 - RNA, 15 nt, Eastern equine encephalitis virus
ccaccguagccagcu

SEQ ID NO: 3364320 - RNA, 22 nt, Eastern equine encephalitis virus
ccauaagguagaauucaggcca

SEQ ID NO: 3364321 - RNA, 21 nt, Eastern equine encephalitis virus
ccauggucgcuugccacuguc

SEQ ID NO: 3364322 - RNA, 16 nt, Eastern equine encephalitis virus
ccauguuggaacagaa

SEQ ID NO: 3364323 - RNA, 23 nt, Eastern equine encephalitis virus
cccauguauucaaguacugcaag

SEQ ID NO: 3364324 - RNA, 23 nt, Eastern equine encephalitis virus
cccgccaaacgcaagaagccugc

SEQ ID NO: 3364325 - RNA, 20 nt, Eastern equine encephalitis virus
cccguauauugcugauugcc

SEQ ID NO: 3364326 - RNA, 19 nt, Eastern equine encephalitis virus
ccgaccuugcugacgacca

SEQ ID NO: 3364327 - RNA, 12 nt, Eastern equine encephalitis virus
ccggcaaagcag

SEQ ID NO: 3364328 - RNA, 11 nt, Eastern equine encephalitis virus
ccgucacccac

SEQ ID NO: 3364329 - RNA, 17 nt, Eastern equine encephalitis virus
ccuauaaacacuacagg

SEQ ID NO: 3364330 - RNA, 14 nt, Eastern equine encephalitis virus
ccucgugucgcacc

SEQ ID NO: 3364331 - RNA, 14 nt, Eastern equine encephalitis virus
ccugcuguuuagau

SEQ ID NO: 3364332 - RNA, 16 nt, Eastern equine encephalitis virus
ccuggguggagucaac

SEQ ID NO: 3364333 - RNA, 15 nt, Eastern equine encephalitis virus
ccuuagcauccacag

SEQ ID NO: 3364334 - RNA, 20 nt, Eastern equine encephalitis virus
cgacuauacaaccaccugca

SEQ ID NO: 3364335 - RNA, 21 nt, Eastern equine encephalitis virus
cgacuauacaaccaccugcac

SEQ ID NO: 3364336 - RNA, 17 nt, Eastern equine encephalitis virus
cgauugcccuggagccg

SEQ ID NO: 3364337 - RNA, 20 nt, Eastern equine encephalitis virus
cgauugcccuggagccgcuc

SEQ ID NO: 3364338 - RNA, 16 nt, Eastern equine encephalitis virus
cgcaaucuuugcauaa

SEQ ID NO: 3364339 - RNA, 14 nt, Eastern equine encephalitis virus
cgcccaagugaaau

SEQ ID NO: 3364340 - RNA, 20 nt, Eastern equine encephalitis virus
cgcggugcuagagacagaca

SEQ ID NO: 3364341 - RNA, 21 nt, Eastern equine encephalitis virus
cgcugcuuauuuugcuguggg

SEQ ID NO: 3364342 - RNA, 19 nt, Eastern equine encephalitis virus
cgcuuauuguaugcaugcg

SEQ ID NO: 3364343 - RNA, 16 nt, Eastern equine encephalitis virus
cgucacucuugcugag

SEQ ID NO: 3364344 - RNA, 18 nt, Eastern equine encephalitis virus
cguguggcuccuuugcag

SEQ ID NO: 3364345 - RNA, 12 nt, Eastern equine encephalitis virus
cuaaccuggagu

SEQ ID NO: 3364346 - RNA, 20 nt, Eastern equine encephalitis virus
cuaaccuggaguacaucacc

SEQ ID NO: 3364347 - RNA, 16 nt, Eastern equine encephalitis virus
cuacugcaagugccca

SEQ ID NO: 3364348 - RNA, 15 nt, Eastern equine encephalitis virus
cuagcagcagccacg

SEQ ID NO: 3364349 - RNA, 21 nt, Eastern equine encephalitis virus
cuauaaacacuacaggcagcg

SEQ ID NO: 3364350 - RNA, 14 nt, Eastern equine encephalitis virus
cuauucuugacaac

SEQ ID NO: 3364351 - RNA, 15 nt, Eastern equine encephalitis virus
cucaccauguuggaa

SEQ ID NO: 3364352 - RNA, 22 nt, Eastern equine encephalitis virus
cuccuaaguaauuuaauacaca

SEQ ID NO: 3364353 - RNA, 14 nt, Eastern equine encephalitis virus
cuccuauaaacacu

SEQ ID NO: 3364354 - RNA, 11 nt, Eastern equine encephalitis virus
cucugcaugau

SEQ ID NO: 3364355 - RNA, 20 nt, Eastern equine encephalitis virus
cugaagguaaucggagcagg

SEQ ID NO: 3364356 - RNA, 21 nt, Eastern equine encephalitis virus
cugacgcacugauggcagagc

SEQ ID NO: 3364357 - RNA, 16 nt, Eastern equine encephalitis virus
cugcaaguauaagaca

SEQ ID NO: 3364358 - RNA, 19 nt, Eastern equine encephalitis virus
cugcacuagugcaguuacc

SEQ ID NO: 3364359 - RNA, 20 nt, Eastern equine encephalitis virus
cugcuaccgaauauccacac

SEQ ID NO: 3364360 - RNA, 17 nt, Eastern equine encephalitis virus
cgcagagcucugcauga

SEQ ID NO: 3364361 - RNA, 20 nt, Eastern equine encephalitis virus
cgcagagcucugcaugauga

SEQ ID NO: 3364362 - RNA, 21 nt, Eastern equine encephalitis virus
cgcuggcaccagagccucuag

SEQ ID NO: 3364363 - RNA, 17 nt, Eastern equine encephalitis virus
cggcucuaucaguggug

SEQ ID NO: 3364364 - RNA, 18 nt, Eastern equine encephalitis virus
cgggacaagggcaccugc

SEQ ID NO: 3364365 - RNA, 14 nt, Eastern equine encephalitis virus
cggugcgacagccc

SEQ ID NO: 3364366 - RNA, 14 nt, Eastern equine encephalitis virus
cguauauugcugau

SEQ ID NO: 3364367 - RNA, 22 nt, Eastern equine encephalitis virus
cgucacccaccugaacauggag

SEQ ID NO: 3364368 - RNA, 21 nt, Eastern equine encephalitis virus
cgugagaagcuguugcagaag

SEQ ID NO: 3364369 - RNA, 15 nt, Eastern equine encephalitis virus
cgugcagaccaagga

SEQ ID NO: 3364370 - RNA, 13 nt, Eastern equine encephalitis virus
cuaagggcagugc

SEQ ID NO: 3364371 - RNA, 15 nt, Eastern equine encephalitis virus
cuagagucagauaaa

SEQ ID NO: 3364372 - RNA, 16 nt, Eastern equine encephalitis virus
cuaggagaaccaggag

SEQ ID NO: 3364373 - RNA, 17 nt, Eastern equine encephalitis virus
cuauacaaccaccugca

SEQ ID NO: 3364374 - RNA, 15 nt, Eastern equine encephalitis virus
cuaucauugcagaac

SEQ ID NO: 3364375 - RNA, 16 nt, Eastern equine encephalitis virus
cuauucuugacaacaa

SEQ ID NO: 3364376 - RNA, 16 nt, Eastern equine encephalitis virus
cucaaugcccaccagg

SEQ ID NO: 3364377 - RNA, 19 nt, Eastern equine encephalitis virus
cucaaugcccaccagggga

SEQ ID NO: 3364378 - RNA, 13 nt, Eastern equine encephalitis virus
cucagaccuggaa

SEQ ID NO: 3364379 - RNA, 15 nt, Eastern equine encephalitis virus
cuccaguagugaaau

SEQ ID NO: 3364380 - RNA, 23 nt, Eastern equine encephalitis virus
cucgacaauggauugagcgacca

SEQ ID NO: 3364381 - RNA, 20 nt, Eastern equine encephalitis virus
cucuggaagacugccucgag

SEQ ID NO: 3364382 - RNA, 20 nt, Eastern equine encephalitis virus
cugaaaacacccagaugagc

SEQ ID NO: 3364383 - RNA, 12 nt, Eastern equine encephalitis virus
cugcaaguauaa

SEQ ID NO: 3364384 - RNA, 14 nt, Eastern equine encephalitis virus
cuggcaccauggag

SEQ ID NO: 3364385 - RNA, 12 nt, Eastern equine encephalitis virus
cuggggaaacca

SEQ ID NO: 3364386 - RNA, 19 nt, Eastern equine encephalitis virus
cugucaugugcguccuggc

SEQ ID NO: 3364387 - RNA, 20 nt, Eastern equine encephalitis virus
cuucugcgacacugaaaaca

SEQ ID NO: 3364388 - RNA, 13 nt, Eastern equine encephalitis virus
cuugccacuguca

SEQ ID NO: 3364389 - RNA, 21 nt, Eastern equine encephalitis virus
cuuuuggagaccugcaaucac

SEQ ID NO: 3364390 - RNA, 15 nt, Eastern equine encephalitis virus
gaaagggguuacauc

SEQ ID NO: 3364391 - RNA, 16 nt, Eastern equine encephalitis virus
gaauuacgacagccga

SEQ ID NO: 3364392 - RNA, 17 nt, Eastern equine encephalitis virus
gaauucaggccaguggg

SEQ ID NO: 3364393 - RNA, 17 nt, Eastern equine encephalitis virus
gacaacaucgugaaagg

SEQ ID NO: 3364394 - RNA, 16 nt, Eastern equine encephalitis virus
gacaaugagcaacugg

SEQ ID NO: 3364395 - RNA, 19 nt, Eastern equine encephalitis virus
gacacugaaaacacccaga

SEQ ID NO: 3364396 - RNA, 15 nt, Eastern equine encephalitis virus
gacaggcgcagagcu

SEQ ID NO: 3364397 - RNA, 12 nt, Eastern equine encephalitis virus
gacgcggugcua

SEQ ID NO: 3364398 - RNA, 20 nt, Eastern equine encephalitis virus
gagaaauaccgucacccacc

SEQ ID NO: 3364399 - RNA, 14 nt, Eastern equine encephalitis virus
gaggggucagagcc

SEQ ID NO: 3364400 - RNA, 21 nt, Eastern equine encephalitis virus
gaucaaccacccugcaugcca

SEQ ID NO: 3364401 - RNA, 20 nt, Eastern equine encephalitis virus
gauccuaauccgccuaggcg

SEQ ID NO: 3364402 - RNA, 17 nt, Eastern equine encephalitis virus
gcaaaacgcagaaauca

SEQ ID NO: 3364403 - RNA, 15 nt, Eastern equine encephalitis virus
gcacguagaaggcag

SEQ ID NO: 3364404 - RNA, 17 nt, Eastern equine encephalitis virus
aaacacauaagagguca

SEQ ID NO: 3364405 - RNA, 22 nt, Eastern equine encephalitis virus
aaacaccgacagucucagaccu

SEQ ID NO: 3364406 - RNA, 18 nt, Eastern equine encephalitis virus
aaacacuaaauucacccu

SEQ ID NO: 3364407 - RNA, 17 nt, Eastern equine encephalitis virus
aaacacuacaggcagcg

SEQ ID NO: 3364408 - RNA, 18 nt, Eastern equine encephalitis virus
aaacguuuccaaucaugu

SEQ ID NO: 3364409 - RNA, 15 nt, Eastern equine encephalitis virus
aaaguacacacaggc

SEQ ID NO: 3364410 - RNA, 20 nt, Eastern equine encephalitis virus
aaaguucaggugauacaggc

SEQ ID NO: 3364411 - RNA, 15 nt, Eastern equine encephalitis virus
aacauacugaagaaa

SEQ ID NO: 3364412 - RNA, 14 nt, Eastern equine encephalitis virus
aaccacauaacacu

SEQ ID NO: 3364413 - RNA, 12 nt, Eastern equine encephalitis virus
aacccuccagca

SEQ ID NO: 3364414 - RNA, 15 nt, Eastern equine encephalitis virus
aaccuaaaccaggca

SEQ ID NO: 3364415 - RNA, 13 nt, Eastern equine encephalitis virus
aacggacagguga

SEQ ID NO: 3364416 - RNA, 13 nt, Eastern equine encephalitis virus
aagaaacaaaaac

SEQ ID NO: 3364417 - RNA, 19 nt, Eastern equine encephalitis virus
aagaauccacacgaaacac

SEQ ID NO: 3364418 - RNA, 20 nt, Eastern equine encephalitis virus
aagaucgacaaccugcaugu

SEQ ID NO: 3364419 - RNA, 13 nt, Eastern equine encephalitis virus
aagggcaccugca

SEQ ID NO: 3364420 - RNA, 19 nt, Eastern equine encephalitis virus
aauaucacguuuccaugug

SEQ ID NO: 3364421 - RNA, 19 nt, Eastern equine encephalitis virus
aaugagggaacuuccagug

SEQ ID NO: 3364422 - RNA, 19 nt, Eastern equine encephalitis virus
aaugcuaggagaaccagga

SEQ ID NO: 3364423 - RNA, 22 nt, Eastern equine encephalitis virus
aauugccgcauauacaauuaca

SEQ ID NO: 3364424 - RNA, 21 nt, Eastern equine encephalitis virus
acaagcgugcagaccaaggac

SEQ ID NO: 3364425 - RNA, 13 nt, Eastern equine encephalitis virus
acaaugcaugaaa

SEQ ID NO: 3364426 - RNA, 16 nt, Eastern equine encephalitis virus
acaauuacacuacagg

SEQ ID NO: 3364427 - RNA, 21 nt, Eastern equine encephalitis virus
acacgaaacacucaccauguu

SEQ ID NO: 3364428 - RNA, 14 nt, Eastern equine encephalitis virus
acacuacguugaga

SEQ ID NO: 3364429 - RNA, 21 nt, Eastern equine encephalitis virus
acaggcgcagagcucugcaug

SEQ ID NO: 3364430 - RNA, 17 nt, Eastern equine encephalitis virus
accaccaccaccugcca

SEQ ID NO: 3364431 - RNA, 16 nt, Eastern equine encephalitis virus
aacacgcuccaagaug

SEQ ID NO: 3364432 - RNA, 14 nt, Eastern equine encephalitis virus
aacauaacaucugu

SEQ ID NO: 3364433 - RNA, 23 nt, Eastern equine encephalitis virus
aacucaucauagguccacuguca

SEQ ID NO: 3364434 - RNA, 13 nt, Eastern equine encephalitis virus
aagagucaggaga

SEQ ID NO: 3364435 - RNA, 23 nt, Eastern equine encephalitis virus
aagcaucccuauaucuauagaua

SEQ ID NO: 3364436 - RNA, 16 nt, Eastern equine encephalitis virus
aagcugaagaaggcca

SEQ ID NO: 3364437 - RNA, 16 nt, Eastern equine encephalitis virus
aauacuacugcaagug

SEQ ID NO: 3364438 - RNA, 16 nt, Eastern equine encephalitis virus
aaugcugucuuuuaua

SEQ ID NO: 3364439 - RNA, 13 nt, Eastern equine encephalitis virus
acaaccugcaugu

SEQ ID NO: 3364440 - RNA, 18 nt, Eastern equine encephalitis virus
acaacgagcaccuaaccc

SEQ ID NO: 3364441 - RNA, 19 nt, Eastern equine encephalitis virus
acaagcgugcagaccaagg

SEQ ID NO: 3364442 - RNA, 23 nt, Eastern equine encephalitis virus
acaccagugacaagccuccuggc

SEQ ID NO: 3364443 - RNA, 17 nt, Eastern equine encephalitis virus
acacgaaacacucacca

SEQ ID NO: 3364444 - RNA, 17 nt, Eastern equine encephalitis virus
acacuaagggcagugca

SEQ ID NO: 3364445 - RNA, 20 nt, Eastern equine encephalitis virus
acacucuuuaucaauacugu

SEQ ID NO: 3364446 - RNA, 21 nt, Eastern equine encephalitis virus
acagcugguuaauaccaggau

SEQ ID NO: 3364447 - RNA, 22 nt, Eastern equine encephalitis virus
acaggcagcgcauaaugcuguc

SEQ ID NO: 3364448 - RNA, 22 nt, Eastern equine encephalitis virus
acaggcgcagagcucugcauga

SEQ ID NO: 3364449 - RNA, 21 nt, Eastern equine encephalitis virus
acauuccacuucuccacugca

SEQ ID NO: 3364450 - RNA, 16 nt, Eastern equine encephalitis virus
accacauuauaacacu

SEQ ID NO: 3364451 - RNA, 20 nt, Eastern equine encephalitis virus
accacggcuauuacauccug

SEQ ID NO: 3364452 - RNA, 22 nt, Eastern equine encephalitis virus
accagaggggucagagccaugg

SEQ ID NO: 3364453 - RNA, 16 nt, Eastern equine encephalitis virus
acccgaccuugcugac

SEQ ID NO: 3364454 - RNA, 16 nt, Eastern equine encephalitis virus
accgaaagaccacauc

SEQ ID NO: 3364455 - RNA, 16 nt, Eastern equine encephalitis virus
accuaguacugcaaga

SEQ ID NO: 3364456 - RNA, 16 nt, Eastern equine encephalitis virus
acuauacaaccaccug

SEQ ID NO: 3364457 - RNA, 16 nt, Eastern equine encephalitis virus
acugcaagcaacagcu

SEQ ID NO: 3364458 - RNA, 20 nt, Eastern equine encephalitis virus
acuguucaggcaauggugaa

SEQ ID NO: 3364459 - RNA, 21 nt, Eastern equine encephalitis virus
acuuacagccauugcaugaga

SEQ ID NO: 3364460 - RNA, 16 nt, Eastern equine encephalitis virus
agaccuauucuugaca

SEQ ID NO: 3364461 - RNA, 23 nt, Eastern equine encephalitis virus
agacgcuuaucccacuugcagcg

SEQ ID NO: 3364462 - RNA, 23 nt, Eastern equine encephalitis virus
agagauuuggacacucauuucac

SEQ ID NO: 3364463 - RNA, 13 nt, Eastern equine encephalitis virus
agaggggaugcgc

SEQ ID NO: 3364464 - RNA, 16 nt, Eastern equine encephalitis virus
agauacgaucagcagu

SEQ ID NO: 3364465 - RNA, 17 nt, Eastern equine encephalitis virus
agauacgaucagcagug

SEQ ID NO: 3364466 - RNA, 13 nt, Eastern equine encephalitis virus
agcaacgaucugu

SEQ ID NO: 3364467 - RNA, 17 nt, Eastern equine encephalitis virus
agcaacuggccgccauc

SEQ ID NO: 3364468 - RNA, 17 nt, Eastern equine encephalitis virus
agcgcauaaugcugucu

SEQ ID NO: 3364469 - RNA, 20 nt, Eastern equine encephalitis virus
agcuauguucggucugaaga

SEQ ID NO: 3364470 - RNA, 17 nt, Eastern equine encephalitis virus
agcuguacaguaugaga

SEQ ID NO: 3364471 - RNA, 17 nt, Eastern equine encephalitis virus
aggcagcgcauaaugcu

SEQ ID NO: 3364472 - RNA, 18 nt, Eastern equine encephalitis virus
aggccaagugcaucgcca

SEQ ID NO: 3364473 - RNA, 19 nt, Eastern equine encephalitis virus
aggcucuuuuggagaccug

SEQ ID NO: 3364474 - RNA, 18 nt, Eastern equine encephalitis virus
agggacccaaagcagcug

SEQ ID NO: 3364475 - RNA, 12 nt, Eastern equine encephalitis virus
agggcagugcau

SEQ ID NO: 3364476 - RNA, 18 nt, Eastern equine encephalitis virus
agggcagugcauaaugcu

SEQ ID NO: 3364477 - RNA, 17 nt, Eastern equine encephalitis virus
agguugugcauuaguau

SEQ ID NO: 3364478 - RNA, 16 nt, Eastern equine encephalitis virus
agugacaagccuccug

SEQ ID NO: 3364479 - RNA, 12 nt, Eastern equine encephalitis virus
agugcauaaggc

SEQ ID NO: 3364480 - RNA, 15 nt, Eastern equine encephalitis virus
agugcauaaggcugc

SEQ ID NO: 3364481 - RNA, 23 nt, Eastern equine encephalitis virus
aguggccgucaaaguuugcaacc

SEQ ID NO: 3364482 - RNA, 17 nt, Eastern equine encephalitis virus
aguguauaaggcugucu

SEQ ID NO: 3364483 - RNA, 22 nt, Eastern equine encephalitis virus
aguugauuuggccuacaugagu

SEQ ID NO: 3364484 - RNA, 16 nt, Eastern equine encephalitis virus
auaacauaacggauga

SEQ ID NO: 3364485 - RNA, 22 nt, Eastern equine encephalitis virus
auaacuggcaccauggagcugu

SEQ ID NO: 3364486 - RNA, 21 nt, Eastern equine encephalitis virus
auacaccagaggggucagagc

SEQ ID NO: 3364487 - RNA, 14 nt, Eastern equine encephalitis virus
auacaggcagcuga

SEQ ID NO: 3364488 - RNA, 12 nt, Eastern equine encephalitis virus
auagacauuaac

SEQ ID NO: 3364489 - RNA, 23 nt, Eastern equine encephalitis virus
aucaaaacuuuuucuggaugcag

SEQ ID NO: 3364490 - RNA, 13 nt, Eastern equine encephalitis virus
aucaucgaugcag

SEQ ID NO: 3364491 - RNA, 22 nt, Eastern equine encephalitis virus
auccauccugcuuuuaagcugc

SEQ ID NO: 3364492 - RNA, 14 nt, Eastern equine encephalitis virus
augaaggcaaucac

SEQ ID NO: 3364493 - RNA, 13 nt, Eastern equine encephalitis virus
augaucagcugcu

SEQ ID NO: 3364494 - RNA, 16 nt, Eastern equine encephalitis virus
augauucuugaagacc

SEQ ID NO: 3364495 - RNA, 19 nt, Eastern equine encephalitis virus
augcaaccguuacacccac

SEQ ID NO: 3364496 - RNA, 16 nt, Eastern equine encephalitis virus
augccgaacaaggugg

SEQ ID NO: 3364497 - RNA, 16 nt, Eastern equine encephalitis virus
augcuguuaugaaaag

SEQ ID NO: 3364498 - RNA, 17 nt, Eastern equine encephalitis virus
guagagaacaugaaggc

SEQ ID NO: 3364499 - RNA, 17 nt, Eastern equine encephalitis virus
guagagcgcucggaaga

SEQ ID NO: 3364500 - RNA, 14 nt, Eastern equine encephalitis virus
guaugaugccuauc

SEQ ID NO: 3364501 - RNA, 13 nt, Eastern equine encephalitis virus
gucaauggugaaa

SEQ ID NO: 3364502 - RNA, 13 nt, Eastern equine encephalitis virus
gucacccaccuga

SEQ ID NO: 3364503 - RNA, 15 nt, Eastern equine encephalitis virus
gucacuaaucaucac

SEQ ID NO: 3364504 - RNA, 16 nt, Eastern equine encephalitis virus
gucgcaauuguccugg

SEQ ID NO: 3364505 - RNA, 20 nt, Eastern equine encephalitis virus
gucucguaaaguagagaaca

SEQ ID NO: 3364506 - RNA, 13 nt, Eastern equine encephalitis virus
gugaaaugcugcg

SEQ ID NO: 3364507 - RNA, 23 nt, Eastern equine encephalitis virus
gugcugcuaccgaauauccacac

SEQ ID NO: 3364508 - RNA, 16 nt, Eastern equine encephalitis virus
guguucaaaccgcugc

SEQ ID NO: 3364509 - RNA, 20 nt, Eastern equine encephalitis virus
guugaccacuucccccugcg

SEQ ID NO: 3364510 - RNA, 16 nt, Eastern equine encephalitis virus
guugucaauaucauga

SEQ ID NO: 3364511 - RNA, 21 nt, Eastern equine encephalitis virus
guuuccaugugaucaaccacc

SEQ ID NO: 3364512 - RNA, 12 nt, Eastern equine encephalitis virus
uaaaccuaaacc

SEQ ID NO: 3364513 - RNA, 19 nt, Eastern equine encephalitis virus
uacaacucuggaagacugc

SEQ ID NO: 3364514 - RNA, 21 nt, Eastern equine encephalitis virus
uacaauuacacuacagguaau

SEQ ID NO: 3364515 - RNA, 17 nt, Eastern equine encephalitis virus
uaccacauuauaacacu

SEQ ID NO: 3364516 - RNA, 22 nt, Eastern equine encephalitis virus
uaccagaauaucugaaacaccg

SEQ ID NO: 3364517 - RNA, 17 nt, Eastern equine encephalitis virus
uacgacuuuccugagua

SEQ ID NO: 3364518 - RNA, 22 nt, Eastern equine encephalitis virus
uacuaaacacuaaauucacccu

SEQ ID NO: 3364519 - RNA, 22 nt, Eastern equine encephalitis virus
uagagagaaauaccgucaccca

SEQ ID NO: 3364520 - RNA, 23 nt, Eastern equine encephalitis virus
uagguccacugucaucugcgugg

SEQ ID NO: 3364521 - RNA, 17 nt, Eastern equine encephalitis virus
uaucagagauguuccca

SEQ ID NO: 3364522 - RNA, 22 nt, Eastern equine encephalitis virus
uauggugaugugccacaaugca

SEQ ID NO: 3364523 - RNA, 13 nt, Eastern equine encephalitis virus
uauuacuacaaca

SEQ ID NO: 3364524 - RNA, 14 nt, Eastern equine encephalitis virus
ucaagcugaagaag

SEQ ID NO: 3364525 - RNA, 19 nt, Eastern equine encephalitis virus
ucaauaaagaucgacaacc

SEQ ID NO: 3364526 - RNA, 22 nt, Eastern equine encephalitis virus
ucagcuauguucggucugaaga

SEQ ID NO: 3364527 - RNA, 16 nt, Eastern equine encephalitis virus
ucaucagcagaagugg

SEQ ID NO: 3364528 - RNA, 19 nt, Eastern equine encephalitis virus
ucccgcgaaaauaggagau

SEQ ID NO: 3364529 - RNA, 15 nt, Eastern equine encephalitis virus
uccgccacugcgugg

SEQ ID NO: 3364530 - RNA, 14 nt, Eastern equine encephalitis virus
uccuauaaacacua

SEQ ID NO: 3364531 - RNA, 17 nt, Eastern equine encephalitis virus
uccugcucccauguauu

SEQ ID NO: 3364532 - RNA, 15 nt, Eastern equine encephalitis virus
uccuuagcauccaca

SEQ ID NO: 3364533 - RNA, 22 nt, Eastern equine encephalitis virus
ucgaggagagggcgacacuuuu

SEQ ID NO: 3364534 - RNA, 12 nt, Eastern equine encephalitis virus
ucgcuugccacu

SEQ ID NO: 3364535 - RNA, 20 nt, Eastern equine encephalitis virus
ugaacauggaagugaagauc

SEQ ID NO: 3364536 - RNA, 15 nt, Eastern equine encephalitis virus
ugcaagcaacagcuu

SEQ ID NO: 3364537 - RNA, 19 nt, Eastern equine encephalitis virus
ugcacacaccuuucaccca

SEQ ID NO: 3364538 - RNA, 22 nt, Eastern equine encephalitis virus
ugcaggucugcacuagugcagu

SEQ ID NO: 3364539 - RNA, 14 nt, Eastern equine encephalitis virus
ugcaguuaccugca

SEQ ID NO: 3364540 - RNA, 14 nt, Eastern equine encephalitis virus
ugcauaaugcugcu

SEQ ID NO: 3364541 - RNA, 15 nt, Eastern equine encephalitis virus
ugcaugugcgcaccu

SEQ ID NO: 3364542 - RNA, 16 nt, Eastern equine encephalitis virus
ugccacaaugcaugaa

SEQ ID NO: 3364543 - RNA, 13 nt, Eastern equine encephalitis virus
ugcgcaugcugcg

SEQ ID NO: 3364544 - RNA, 16 nt, Eastern equine encephalitis virus
ugcuaggagaaccagg

SEQ ID NO: 3364545 - RNA, 15 nt, Eastern equine encephalitis virus
uggaaagggugacag

SEQ ID NO: 3364546 - RNA, 17 nt, Eastern equine encephalitis virus
uggcaucacugaagagc

SEQ ID NO: 3364547 - RNA, 20 nt, Eastern equine encephalitis virus
ugugccuguuaaggccaagu

SEQ ID NO: 3364548 - RNA, 23 nt, Eastern equine encephalitis virus
uuauaacacuaagggcagugcau

SEQ ID NO: 3364549 - RNA, 24 nt, Eastern equine encephalitis virus
uuaucaauacuguugucaauauca

SEQ ID NO: 3364550 - RNA, 16 nt, Eastern equine encephalitis virus
uuauuuugcugugggc

SEQ ID NO: 3364551 - RNA, 15 nt, Eastern equine encephalitis virus
uucacccaguauaag

SEQ ID NO: 3364552 - RNA, 16 nt, Eastern equine encephalitis virus
uucaugugcccuuugu

SEQ ID NO: 3364553 - RNA, 14 nt, Eastern equine encephalitis virus
uucgauaacaaggu

SEQ ID NO: 3364554 - RNA, 18 nt, Eastern equine encephalitis virus
uugaaacaacgagcaccu

SEQ ID NO: 3364555 - RNA, 24 nt, Eastern equine encephalitis virus
uugacaugguggacggagcauccu

SEQ ID NO: 3364556 - RNA, 22 nt, Eastern equine encephalitis virus
uugcagcucaaauugaggaccu

SEQ ID NO: 3364557 - RNA, 19 nt, Eastern equine encephalitis virus
uugcauaaccccguauaaa

SEQ ID NO: 3364558 - RNA, 23 nt, Eastern equine encephalitis virus
uuuaauacacacuuuauaaucag

SEQ ID NO: 3364559 - RNA, 21 nt, Eastern equine encephalitis virus
uuuggacacucauuucaccca

SEQ ID NO: 3364560 - RNA, 14 nt, Eastern equine encephalitis virus
uacaguaugagaac

SEQ ID NO: 3364561 - RNA, 22 nt, Eastern equine encephalitis virus
uaccagcagcgacuauacaacc

SEQ ID NO: 3364562 - RNA, 21 nt, Eastern equine encephalitis virus
uaccaggauaauuccaucaac

SEQ ID NO: 3364563 - RNA, 14 nt, Eastern equine encephalitis virus
uaccgucacccacc

SEQ ID NO: 3364564 - RNA, 11 nt, Eastern equine encephalitis virus
uaccugcaaag

SEQ ID NO: 3364565 - RNA, 16 nt, Eastern equine encephalitis virus
uaccugcaaaggagau

SEQ ID NO: 3364566 - RNA, 13 nt, Eastern equine encephalitis virus
uagagagaaauac

SEQ ID NO: 3364567 - RNA, 14 nt, Eastern equine encephalitis virus
uaguaucuaaccua

SEQ ID NO: 3364568 - RNA, 16 nt, Eastern equine encephalitis virus
uauaaucaggcauaau

SEQ ID NO: 3364569 - RNA, 16 nt, Eastern equine encephalitis virus
uauacaaccaccugca

SEQ ID NO: 3364570 - RNA, 21 nt, Eastern equine encephalitis virus
uauaccgccuccuauaaacac

SEQ ID NO: 3364571 - RNA, 21 nt, Eastern equine encephalitis virus
uauaccuggggaaaccaucca

SEQ ID NO: 3364572 - RNA, 21 nt, Eastern equine encephalitis virus
uauuacauccuggcucaaugc

SEQ ID NO: 3364573 - RNA, 13 nt, Eastern equine encephalitis virus
ucaagcugaagaa

SEQ ID NO: 3364574 - RNA, 20 nt, Eastern equine encephalitis virus
ucauuucacccaguauaagc

SEQ ID NO: 3364575 - RNA, 12 nt, Eastern equine encephalitis virus
uccacacuuugu

SEQ ID NO: 3364576 - RNA, 14 nt, Eastern equine encephalitis virus
uccaguagugaaau

SEQ ID NO: 3364577 - RNA, 15 nt, Eastern equine encephalitis virus
uccaucgcuaaccug

SEQ ID NO: 3364578 - RNA, 12 nt, Eastern equine encephalitis virus
uccgcauccaga

SEQ ID NO: 3364579 - RNA, 16 nt, Eastern equine encephalitis virus
ucgacaaccugcaugu

SEQ ID NO: 3364580 - RNA, 15 nt, Eastern equine encephalitis virus
ugaaagggguuacau

SEQ ID NO: 3364581 - RNA, 12 nt, Eastern equine encephalitis virus
ugaaaugcugcg

SEQ ID NO: 3364582 - RNA, 20 nt, Eastern equine encephalitis virus
ugaccaagacgucgacaggc

SEQ ID NO: 3364583 - RNA, 19 nt, Eastern equine encephalitis virus
ugagaagcuguugcagaag

SEQ ID NO: 3364584 - RNA, 20 nt, Eastern equine encephalitis virus
ugaugcuaucauugcagaac

SEQ ID NO: 3364585 - RNA, 18 nt, Eastern equine encephalitis virus
ugcaaccguuacacccac

SEQ ID NO: 3364586 - RNA, 21 nt, Eastern equine encephalitis virus
ugcacacaccuuucacccagg

SEQ ID NO: 3364587 - RNA, 19 nt, Eastern equine encephalitis virus
auaucacguuuccauguga

SEQ ID NO: 3364588 - RNA, 21 nt, Eastern equine encephalitis virus
aucaacuaaccuggaguacau

SEQ ID NO: 3364589 - RNA, 21 nt, Eastern equine encephalitis virus
aucacgcacaucaaccagcaa

SEQ ID NO: 3364590 - RNA, 13 nt, Eastern equine encephalitis virus
aucagcauuuauc

SEQ ID NO: 3364591 - RNA, 20 nt, Eastern equine encephalitis virus
aucgucgauuauccagcaca

SEQ ID NO: 3364592 - RNA, 12 nt, Eastern equine encephalitis virus
augagcaacugg

SEQ ID NO: 3364593 - RNA, 20 nt, Eastern equine encephalitis virus
augcuaggagaaccaggaga

SEQ ID NO: 3364594 - RNA, 22 nt, Eastern equine encephalitis virus
auggaccuuaaacgggauguca

SEQ ID NO: 3364595 - RNA, 12 nt, Eastern equine encephalitis virus
auugugcagugg

SEQ ID NO: 3364596 - RNA, 17 nt, Eastern equine encephalitis virus
caaagauacaccagagg

SEQ ID NO: 3364597 - RNA, 13 nt, Eastern equine encephalitis virus
caaccaccugcac

SEQ ID NO: 3364598 - RNA, 21 nt, Eastern equine encephalitis virus
caacgaucuguacgcaaacac

SEQ ID NO: 3364599 - RNA, 16 nt, Eastern equine encephalitis virus
caacucuggaagacug

SEQ ID NO: 3364600 - RNA, 20 nt, Eastern equine encephalitis virus
caagcugaagaaggccagca

SEQ ID NO: 3364601 - RNA, 20 nt, Eastern equine encephalitis virus
cacaagcgugcagaccaagg

SEQ ID NO: 3364602 - RNA, 18 nt, Eastern equine encephalitis virus
cacacagcagugaugccg

SEQ ID NO: 3364603 - RNA, 19 nt, Eastern equine encephalitis virus
cacacuuuguuugacaugu

SEQ ID NO: 3364604 - RNA, 18 nt, Eastern equine encephalitis virus
cacagugccaaggugaaa

SEQ ID NO: 3364605 - RNA, 17 nt, Eastern equine encephalitis virus
cacauuagcaucuucag

SEQ ID NO: 3364606 - RNA, 15 nt, Eastern equine encephalitis virus
caccaccaccugcca

SEQ ID NO: 3364607 - RNA, 14 nt, Eastern equine encephalitis virus
caccagagggguca

SEQ ID NO: 3364608 - RNA, 12 nt, Eastern equine encephalitis virus
caccucagcccc

SEQ ID NO: 3364609 - RNA, 16 nt, Eastern equine encephalitis virus
caccugcaacaaaaau

SEQ ID NO: 3364610 - RNA, 17 nt, Eastern equine encephalitis virus
caccugcaaguauaaga

SEQ ID NO: 3364611 - RNA, 16 nt, Eastern equine encephalitis virus
cacguagaaggcagaa

SEQ ID NO: 3364612 - RNA, 14 nt, Eastern equine encephalitis virus
cacuagugcaguua

SEQ ID NO: 3364613 - RNA, 14 nt, Eastern equine encephalitis virus
cacucaauguaccu

SEQ ID NO: 3364614 - RNA, 17 nt, Eastern equine encephalitis virus
cacucaauguaccucca

SEQ ID NO: 3364615 - RNA, 15 nt, Eastern equine encephalitis virus
cacuucuccacugca

SEQ ID NO: 3364616 - RNA, 18 nt, Eastern equine encephalitis virus
cacuuggaagugaugcaa

SEQ ID NO: 3364617 - RNA, 21 nt, Eastern equine encephalitis virus
cagacgcuuaucccacuugca

SEQ ID NO: 3364618 - RNA, 19 nt, Eastern equine encephalitis virus
cagcugguuaauaccagga

SEQ ID NO: 3364619 - RNA, 21 nt, Eastern equine encephalitis virus
cagcuucucaucagcagaagu

SEQ ID NO: 3364620 - RNA, 19 nt, Eastern equine encephalitis virus
caggaaaaagaagcgacca

SEQ ID NO: 3364621 - RNA, 15 nt, Eastern equine encephalitis virus
caggcaauggugaac

SEQ ID NO: 3364622 - RNA, 12 nt, Eastern equine encephalitis virus
caggcgcagagc

SEQ ID NO: 3364623 - RNA, 21 nt, Eastern equine encephalitis virus
caggucugcacuagugcaguu

SEQ ID NO: 3364624 - RNA, 16 nt, Eastern equine encephalitis virus
caguagugaaaugcug

SEQ ID NO: 3364625 - RNA, 23 nt, Eastern equine encephalitis virus
cagucaaagauacaccagagggg

SEQ ID NO: 3364626 - RNA, 14 nt, Eastern equine encephalitis virus
cagucucagaccug

SEQ ID NO: 3364627 - RNA, 18 nt, Eastern equine encephalitis virus
cagucucagaccuggaau

SEQ ID NO: 3364628 - RNA, 18 nt, Eastern equine encephalitis virus
cagugcauaaggcugcua

SEQ ID NO: 3364629 - RNA, 14 nt, Eastern equine encephalitis virus
caucaacuaaccug

SEQ ID NO: 3364630 - RNA, 11 nt, Eastern equine encephalitis virus
caucaccugca

SEQ ID NO: 3364631 - RNA, 16 nt, Eastern equine encephalitis virus
cauccgagacgggaca

SEQ ID NO: 3364632 - RNA, 20 nt, Eastern equine encephalitis virus
cauccugacuaucaguguca

SEQ ID NO: 3364633 - RNA, 20 nt, Eastern equine encephalitis virus
cauccuggcucaaugcccac

SEQ ID NO: 3364634 - RNA, 17 nt, Eastern equine encephalitis virus
caucuugucaaccacau

SEQ ID NO: 3364635 - RNA, 21 nt, Eastern equine encephalitis virus
caugaaaucagauacccucca

SEQ ID NO: 3364636 - RNA, 18 nt, Eastern equine encephalitis virus
caugugaucaaccacccu

SEQ ID NO: 3364637 - RNA, 15 nt, Eastern equine encephalitis virus
cauuauaacacuaag

SEQ ID NO: 3364638 - RNA, 11 nt, Eastern equine encephalitis virus
cauugcagaac

SEQ ID NO: 3364639 - RNA, 22 nt, Eastern equine encephalitis virus
ccaaaaagggguuacagucaaa

SEQ ID NO: 3364640 - RNA, 14 nt, Eastern equine encephalitis virus
ccaacaacugucaa

SEQ ID NO: 3364641 - RNA, 23 nt, Eastern equine encephalitis virus
ccaagauguacuagcagcagcca

SEQ ID NO: 3364642 - RNA, 23 nt, Eastern equine encephalitis virus
ccacauaacacuauaggcagugu

SEQ ID NO: 3364643 - RNA, 15 nt, Eastern equine encephalitis virus
ccaccugccaagaaa

SEQ ID NO: 3364644 - RNA, 20 nt, Eastern equine encephalitis virus
ccacggcuauuacauccugg

SEQ ID NO: 3364645 - RNA, 12 nt, Eastern equine encephalitis virus
ccacugcguggu

SEQ ID NO: 3364646 - RNA, 17 nt, Eastern equine encephalitis virus
ccaguauaagcuggcac

SEQ ID NO: 3364647 - RNA, 20 nt, Eastern equine encephalitis virus
ccaguguuggauucagcugc

SEQ ID NO: 3364648 - RNA, 14 nt, Eastern equine encephalitis virus
ccauccaccaaaaa

SEQ ID NO: 3364649 - RNA, 23 nt, Eastern equine encephalitis virus
cccaagugaaauacuacugcaag

SEQ ID NO: 3364650 - RNA, 14 nt, Eastern equine encephalitis virus
cccgaacgcucaag

SEQ ID NO: 3364651 - RNA, 15 nt, Eastern equine encephalitis virus
cccugcaugccaugc

SEQ ID NO: 3364652 - RNA, 22 nt, Eastern equine encephalitis virus
cccuggagccgcuccgugcaga

SEQ ID NO: 3364653 - RNA, 20 nt, Eastern equine encephalitis virus
ccgagccuaugaucagcugc

SEQ ID NO: 3364654 - RNA, 17 nt, Eastern equine encephalitis virus
ccuacagauacagcugg

SEQ ID NO: 3364655 - RNA, 23 nt, Eastern equine encephalitis virus
ccuaugaucagcugcucgaugcc

SEQ ID NO: 3364656 - RNA, 21 nt, Eastern equine encephalitis virus
ccucuaguugagcacaaacac

SEQ ID NO: 3364657 - RNA, 18 nt, Eastern equine encephalitis virus
ccugaagagacuguuuaa

SEQ ID NO: 3364658 - RNA, 16 nt, Eastern equine encephalitis virus
ccugcaugugcgcacc

SEQ ID NO: 3364659 - RNA, 19 nt, Eastern equine encephalitis virus
ccuuagcauccacagugcc

SEQ ID NO: 3364660 - RNA, 20 nt, Eastern equine encephalitis virus
ccuuagcauccacagugcca

SEQ ID NO: 3364661 - RNA, 19 nt, Eastern equine encephalitis virus
cuggaagacugccucgagg

SEQ ID NO: 3364662 - RNA, 20 nt, Eastern equine encephalitis virus
cuggaguacaucaccugcaa

SEQ ID NO: 3364663 - RNA, 12 nt, Eastern equine encephalitis virus
cuggcucaaugc

SEQ ID NO: 3364664 - RNA, 22 nt, Eastern equine encephalitis virus
cuguuaugaaaagaauccacac

SEQ ID NO: 3364665 - RNA, 19 nt, Eastern equine encephalitis virus
cuuacagccauugcaugag

SEQ ID NO: 3364666 - RNA, 23 nt, Eastern equine encephalitis virus
cuuaccugauugacaacaaaaaa

SEQ ID NO: 3364667 - RNA, 18 nt, Eastern equine encephalitis virus
cuugucaaccacauaaca

SEQ ID NO: 3364668 - RNA, 21 nt, Eastern equine encephalitis virus
cuugucaaccacauaacacua

SEQ ID NO: 3364669 - RNA, 16 nt, Eastern equine encephalitis virus
gaaaauugugcagugg

SEQ ID NO: 3364670 - RNA, 13 nt, Eastern equine encephalitis virus
gaaagggugacag

SEQ ID NO: 3364671 - RNA, 14 nt, Eastern equine encephalitis virus
gaaagggugacagc

SEQ ID NO: 3364672 - RNA, 17 nt, Eastern equine encephalitis virus
gaagcuagagucagaua

SEQ ID NO: 3364673 - RNA, 20 nt, Eastern equine encephalitis virus
gacaaaacauacugaagaaa

SEQ ID NO: 3364674 - RNA, 14 nt, Eastern equine encephalitis virus
gacaaccugcaugu

SEQ ID NO: 3364675 - RNA, 19 nt, Eastern equine encephalitis virus
gacacuacguugagaugca

SEQ ID NO: 3364676 - RNA, 19 nt, Eastern equine encephalitis virus
gacacucauuucacccagu

SEQ ID NO: 3364677 - RNA, 15 nt, Eastern equine encephalitis virus
gacagccgagccuau

SEQ ID NO: 3364678 - RNA, 17 nt, Eastern equine encephalitis virus
gaccaccaccaccugcc

SEQ ID NO: 3364679 - RNA, 17 nt, Eastern equine encephalitis virus
gacccaaagcagcugcc

SEQ ID NO: 3364680 - RNA, 16 nt, Eastern equine encephalitis virus
gaccugagacguucca

SEQ ID NO: 3364681 - RNA, 19 nt, Eastern equine encephalitis virus
gaccuugcugacgaccagg

SEQ ID NO: 3364682 - RNA, 17 nt, Eastern equine encephalitis virus
gacggcucuaucagugg

SEQ ID NO: 3364683 - RNA, 22 nt, Eastern equine encephalitis virus
gacggcucuaucaguggugaca

SEQ ID NO: 3364684 - RNA, 22 nt, Eastern equine encephalitis virus
gacuauacaaccaccugcacgg

SEQ ID NO: 3364685 - RNA, 15 nt, Eastern equine encephalitis virus
gagaaccaggagaga

SEQ ID NO: 3364686 - RNA, 19 nt, Eastern equine encephalitis virus
uauaagacaaaagugccuu

SEQ ID NO: 3364687 - RNA, 13 nt, Eastern equine encephalitis virus
uauccgccacugc

SEQ ID NO: 3364688 - RNA, 14 nt, Eastern equine encephalitis virus
uaugaucagcugcu

SEQ ID NO: 3364689 - RNA, 16 nt, Eastern equine encephalitis virus
ucaaagauacaccaga

SEQ ID NO: 3364690 - RNA, 16 nt, Eastern equine encephalitis virus
ucaaccacauaacacu

SEQ ID NO: 3364691 - RNA, 17 nt, Eastern equine encephalitis virus
ucaaccacccugcaugc

SEQ ID NO: 3364692 - RNA, 12 nt, Eastern equine encephalitis virus
ucaagcugaaga

SEQ ID NO: 3364693 - RNA, 19 nt, Eastern equine encephalitis virus
ucagcauuuaucguucugg

SEQ ID NO: 3364694 - RNA, 14 nt, Eastern equine encephalitis virus
ucagcuauguucgg

SEQ ID NO: 3364695 - RNA, 22 nt, Eastern equine encephalitis virus
uccaguguuggauucagcugcc

SEQ ID NO: 3364696 - RNA, 21 nt, Eastern equine encephalitis virus
ucgacaaccugcaugugcgca

SEQ ID NO: 3364697 - RNA, 17 nt, Eastern equine encephalitis virus
ucgagagcuugugcgca

SEQ ID NO: 3364698 - RNA, 19 nt, Eastern equine encephalitis virus
ucugaaacaccgacagucu

SEQ ID NO: 3364699 - RNA, 18 nt, Eastern equine encephalitis virus
ucugcgacacugaaaaca

SEQ ID NO: 3364700 - RNA, 22 nt, Eastern equine encephalitis virus
ucuugucaaccacauaacacua

SEQ ID NO: 3364701 - RNA, 13 nt, Eastern equine encephalitis virus
ugaaaacacccag

SEQ ID NO: 3364702 - RNA, 14 nt, Eastern equine encephalitis virus
ugaaaacacccaga

SEQ ID NO: 3364703 - RNA, 17 nt, Eastern equine encephalitis virus
ugaaacaccgacagucu

SEQ ID NO: 3364704 - RNA, 23 nt, Eastern equine encephalitis virus
ugagcaacuggccgccaucaagc

SEQ ID NO: 3364705 - RNA, 16 nt, Eastern equine encephalitis virus
ugaugccgaacaaggu

SEQ ID NO: 3364706 - RNA, 22 nt, Eastern equine encephalitis virus
ugaugugccacaaugcaugaaa

SEQ ID NO: 3364707 - RNA, 17 nt, Eastern equine encephalitis virus
ugcaaccguuacaccca

SEQ ID NO: 3364708 - RNA, 13 nt, Eastern equine encephalitis virus
ugcaaguauaaga

SEQ ID NO: 3364709 - RNA, 14 nt, Eastern equine encephalitis virus
ugcacaguugccca

SEQ ID NO: 3364710 - RNA, 18 nt, Eastern equine encephalitis virus
ugcauaaccccguauaaa

SEQ ID NO: 3364711 - RNA, 14 nt, Eastern equine encephalitis virus
ugcaugccaugcug

SEQ ID NO: 3364712 - RNA, 20 nt, Eastern equine encephalitis virus
ugccacaaugcaugaaauca

SEQ ID NO: 3364713 - RNA, 21 nt, Eastern equine encephalitis virus
uggacacucauuucacccagu

SEQ ID NO: 3364714 - RNA, 20 nt, Eastern equine encephalitis virus
uggagcuguacaguaugaga

SEQ ID NO: 3364715 - RNA, 19 nt, Eastern equine encephalitis virus
uggcaucacugaagagcug

SEQ ID NO: 3364716 - RNA, 19 nt, Eastern equine encephalitis virus
uggcucaaugcccaccagg

SEQ ID NO: 3364717 - RNA, 12 nt, Eastern equine encephalitis virus
uguaagccaccg

SEQ ID NO: 3364718 - RNA, 19 nt, Eastern equine encephalitis virus
uguaaugcuaggagaacca

SEQ ID NO: 3364719 - RNA, 17 nt, Eastern equine encephalitis virus
uucaggugauacaggca

SEQ ID NO: 3364720 - RNA, 23 nt, Eastern equine encephalitis virus
uuccaguguuggauucagcugcc

SEQ ID NO: 3364721 - RNA, 13 nt, Eastern equine encephalitis virus
uugacaacaaagg

SEQ ID NO: 3364722 - RNA, 20 nt, Eastern equine encephalitis virus
uugcaauguuacucaaauga

SEQ ID NO: 3364723 - RNA, 17 nt, Eastern equine encephalitis virus
caaaaagggguuacagu

SEQ ID NO: 3364724 - RNA, 19 nt, Eastern equine encephalitis virus
caaagauacaccagagggg

SEQ ID NO: 3364725 - RNA, 16 nt, Eastern equine encephalitis virus
caaauccaacucgaca

SEQ ID NO: 3364726 - RNA, 21 nt, Eastern equine encephalitis virus
caaccaccugcacggauguca

SEQ ID NO: 3364727 - RNA, 15 nt, Eastern equine encephalitis virus
caacuaaccuggagu

SEQ ID NO: 3364728 - RNA, 22 nt, Eastern equine encephalitis virus
caauaaagaucgacaaccugca

SEQ ID NO: 3364729 - RNA, 21 nt, Eastern equine encephalitis virus
caauguaccuccaaaccccau

SEQ ID NO: 3364730 - RNA, 18 nt, Eastern equine encephalitis virus
caauucauucuccaucag

SEQ ID NO: 3364731 - RNA, 12 nt, Eastern equine encephalitis virus
cacaaugcauga

SEQ ID NO: 3364732 - RNA, 17 nt, Eastern equine encephalitis virus
cacagcguugaccacau

SEQ ID NO: 3364733 - RNA, 14 nt, Eastern equine encephalitis virus
cacaguugcccaua

SEQ ID NO: 3364734 - RNA, 15 nt, Eastern equine encephalitis virus
caccgcacccugauu

SEQ ID NO: 3364735 - RNA, 15 nt, Eastern equine encephalitis virus
cacguuggaacagaa

SEQ ID NO: 3364736 - RNA, 17 nt, Eastern equine encephalitis virus
cacuaagggcagugcau

SEQ ID NO: 3364737 - RNA, 21 nt, Eastern equine encephalitis virus
cacuacguugagaugcaucaa

SEQ ID NO: 3364738 - RNA, 15 nt, Eastern equine encephalitis virus
cacucuugcugagag

SEQ ID NO: 3364739 - RNA, 15 nt, Eastern equine encephalitis virus
cacuguucaggcaau

SEQ ID NO: 3364740 - RNA, 20 nt, Eastern equine encephalitis virus
cagaaaauugugcaguggga

SEQ ID NO: 3364741 - RNA, 19 nt, Eastern equine encephalitis virus
cagaaguggccgucaaagu

SEQ ID NO: 3364742 - RNA, 16 nt, Eastern equine encephalitis virus
cagaauuacgacagcc

SEQ ID NO: 3364743 - RNA, 14 nt, Eastern equine encephalitis virus
cagcacaacauacu

SEQ ID NO: 3364744 - RNA, 20 nt, Eastern equine encephalitis virus
cagcugguuaauaccaggau

SEQ ID NO: 3364745 - RNA, 20 nt, Eastern equine encephalitis virus
cagggcuuaccugauugaca

SEQ ID NO: 3364746 - RNA, 20 nt, Eastern equine encephalitis virus
caggucugcacuagugcagu

SEQ ID NO: 3364747 - RNA, 14 nt, Eastern equine encephalitis virus
cagguguugcaguu

SEQ ID NO: 3364748 - RNA, 15 nt, Eastern equine encephalitis virus
caguaaagcaggaaa

SEQ ID NO: 3364749 - RNA, 18 nt, Eastern equine encephalitis virus
cagugguugcccuaguuc

SEQ ID NO: 3364750 - RNA, 13 nt, Eastern equine encephalitis virus
caguuaccugcaa

SEQ ID NO: 3364751 - RNA, 21 nt, Eastern equine encephalitis virus
cauaagguagaauucaggcca

SEQ ID NO: 3364752 - RNA, 21 nt, Eastern equine encephalitis virus
cauagucggugcgacagcccu

SEQ ID NO: 3364753 - RNA, 19 nt, Eastern equine encephalitis virus
caucauagguccacuguca

SEQ ID NO: 3364754 - RNA, 22 nt, Eastern equine encephalitis virus
cauccugcuuuuaagcugcagg

SEQ ID NO: 3364755 - RNA, 21 nt, Eastern equine encephalitis virus
caucugacgcacugauggcag

SEQ ID NO: 3364756 - RNA, 22 nt, Eastern equine encephalitis virus
cauggaguugaauuaccaugca

SEQ ID NO: 3364757 - RNA, 23 nt, Eastern equine encephalitis virus
cauggucgcuugccacugucaug

SEQ ID NO: 3364758 - RNA, 21 nt, Eastern equine encephalitis virus
caugugaucaaccacccugca

SEQ ID NO: 3364759 - RNA, 20 nt, Eastern equine encephalitis virus
cauuccacuucuccacugca

SEQ ID NO: 3364760 - RNA, 22 nt, Eastern equine encephalitis virus
ccacaucgucgauuauccagca

SEQ ID NO: 3364761 - RNA, 14 nt, Eastern equine encephalitis virus
ccaccaccugccaa

SEQ ID NO: 3364762 - RNA, 13 nt, Eastern equine encephalitis virus
ccaccacuugcag

SEQ ID NO: 3364763 - RNA, 13 nt, Eastern equine encephalitis virus
ccacccugcaugc

SEQ ID NO: 3364764 - RNA, 19 nt, Eastern equine encephalitis virus
ccacugucaucugcguggu

SEQ ID NO: 3364765 - RNA, 15 nt, Eastern equine encephalitis virus
ccaggucacuuggaa

SEQ ID NO: 3364766 - RNA, 19 nt, Eastern equine encephalitis virus
ccaggucacuuggaaguga

SEQ ID NO: 3364767 - RNA, 17 nt, Eastern equine encephalitis virus
ccauggagcuguacagu

SEQ ID NO: 3364768 - RNA, 10 nt, Eastern equine encephalitis virus
cccugcaugc

SEQ ID NO: 3364769 - RNA, 15 nt, Eastern equine encephalitis virus
ccuaugaucagcugc

SEQ ID NO: 3364770 - RNA, 19 nt, Eastern equine encephalitis virus
ccuccaguacaccagugac

SEQ ID NO: 3364771 - RNA, 15 nt, Eastern equine encephalitis virus
ccugcacggauguca

SEQ ID NO: 3364772 - RNA, 12 nt, Eastern equine encephalitis virus
cgacgacaacau

SEQ ID NO: 3364773 - RNA, 17 nt, Eastern equine encephalitis virus
cgaucagcagugccauc

SEQ ID NO: 3364774 - RNA, 21 nt, Eastern equine encephalitis virus
cgaucucgagcgugagaagcu

SEQ ID NO: 3364775 - RNA, 13 nt, Eastern equine encephalitis virus
accaccaccugcc

SEQ ID NO: 3364776 - RNA, 14 nt, Eastern equine encephalitis virus
accacccugcaugc

SEQ ID NO: 3364777 - RNA, 17 nt, Eastern equine encephalitis virus
acccacaagcgugcaga

SEQ ID NO: 3364778 - RNA, 22 nt, Eastern equine encephalitis virus
acccaccugaacauggaguuga

SEQ ID NO: 3364779 - RNA, 19 nt, Eastern equine encephalitis virus
acccguucaccuacagaua

SEQ ID NO: 3364780 - RNA, 14 nt, Eastern equine encephalitis virus
acccuccagcagga

SEQ ID NO: 3364781 - RNA, 14 nt, Eastern equine encephalitis virus
acccugauuuuaca

SEQ ID NO: 3364782 - RNA, 13 nt, Eastern equine encephalitis virus
acccugcaugcca

SEQ ID NO: 3364783 - RNA, 21 nt, Eastern equine encephalitis virus
accgauucaaaacacgcucca

SEQ ID NO: 3364784 - RNA, 15 nt, Eastern equine encephalitis virus
accuaguacugcaag

SEQ ID NO: 3364785 - RNA, 20 nt, Eastern equine encephalitis virus
accuccaaaccccauccuga

SEQ ID NO: 3364786 - RNA, 17 nt, Eastern equine encephalitis virus
accuugaguauggugau

SEQ ID NO: 3364787 - RNA, 14 nt, Eastern equine encephalitis virus
acgaugaguacugg

SEQ ID NO: 3364788 - RNA, 19 nt, Eastern equine encephalitis virus
acgccgccgaugcagugca

SEQ ID NO: 3364789 - RNA, 21 nt, Eastern equine encephalitis virus
acguuggaacagaauuggcau

SEQ ID NO: 3364790 - RNA, 23 nt, Eastern equine encephalitis virus
acuaaacacuaaauucacccuag

SEQ ID NO: 3364791 - RNA, 17 nt, Eastern equine encephalitis virus
acuaagggcagugcaua

SEQ ID NO: 3364792 - RNA, 23 nt, Eastern equine encephalitis virus
acuaucagugucagguguuuaca

SEQ ID NO: 3364793 - RNA, 16 nt, Eastern equine encephalitis virus
acucauuucacccagu

SEQ ID NO: 3364794 - RNA, 19 nt, Eastern equine encephalitis virus
acuuacagccauugcauga

SEQ ID NO: 3364795 - RNA, 15 nt, Eastern equine encephalitis virus
acuuuguuugacaug

SEQ ID NO: 3364796 - RNA, 23 nt, Eastern equine encephalitis virus
agaagcgaccaccaccaccugcc

SEQ ID NO: 3364797 - RNA, 14 nt, Eastern equine encephalitis virus
agacaucagcuaug

SEQ ID NO: 3364798 - RNA, 16 nt, Eastern equine encephalitis virus
agacggauggaguuga

SEQ ID NO: 3364799 - RNA, 14 nt, Eastern equine encephalitis virus
agagcucugcauga

SEQ ID NO: 3364800 - RNA, 18 nt, Eastern equine encephalitis virus
agagggaacuaccagcag

SEQ ID NO: 3364801 - RNA, 22 nt, Eastern equine encephalitis virus
agagucgccgacccccugaaga

SEQ ID NO: 3364802 - RNA, 13 nt, Eastern equine encephalitis virus
agaucaucgaugc

SEQ ID NO: 3364803 - RNA, 22 nt, Eastern equine encephalitis virus
agauguuuacgucaauggugaa

SEQ ID NO: 3364804 - RNA, 21 nt, Eastern equine encephalitis virus
agcaacuuuaaacacauaaga

SEQ ID NO: 3364805 - RNA, 16 nt, Eastern equine encephalitis virus
agcaccuaacccucca

SEQ ID NO: 3364806 - RNA, 12 nt, Eastern equine encephalitis virus
agcauauaugac

SEQ ID NO: 3364807 - RNA, 18 nt, Eastern equine encephalitis virus
agccauggucgcuugcca

SEQ ID NO: 3364808 - RNA, 15 nt, Eastern equine encephalitis virus
agccauugcaugaga

SEQ ID NO: 3364809 - RNA, 18 nt, Eastern equine encephalitis virus
agccuaugaucagcugcu

SEQ ID NO: 3364810 - RNA, 13 nt, Eastern equine encephalitis virus
agcgaccaacaac

SEQ ID NO: 3364811 - RNA, 16 nt, Eastern equine encephalitis virus
agcucugcaugaugaa

SEQ ID NO: 3364812 - RNA, 20 nt, Eastern equine encephalitis virus
agcugguuaauaccaggaua

SEQ ID NO: 3364813 - RNA, 14 nt, Eastern equine encephalitis virus
aggaaaaagaagcg

SEQ ID NO: 3364814 - RNA, 16 nt, Eastern equine encephalitis virus
aggagucauccgcauc

SEQ ID NO: 3364815 - RNA, 17 nt, Eastern equine encephalitis virus
aggaguugaucaggcau

SEQ ID NO: 3364816 - RNA, 19 nt, Eastern equine encephalitis virus
aggcaaacgacagcgaaug

SEQ ID NO: 3364817 - RNA, 12 nt, Eastern equine encephalitis virus
aggcacccgauu

SEQ ID NO: 3364818 - RNA, 20 nt, Eastern equine encephalitis virus
aggcagaauagacaaugagc

SEQ ID NO: 3364819 - RNA, 13 nt, Eastern equine encephalitis virus
aggcgcagagcuc

SEQ ID NO: 3364820 - RNA, 18 nt, Eastern equine encephalitis virus
agggaacuaccagcagcg

SEQ ID NO: 3364821 - RNA, 14 nt, Eastern equine encephalitis virus
aggggucagagcca

SEQ ID NO: 3364822 - RNA, 23 nt, Eastern equine encephalitis virus
agguagaauucaggccagugggu

SEQ ID NO: 3364823 - RNA, 15 nt, Eastern equine encephalitis virus
aggugauacaggcag

SEQ ID NO: 3364824 - RNA, 19 nt, Eastern equine encephalitis virus
agucauccgcauccagaca

SEQ ID NO: 3364825 - RNA, 17 nt, Eastern equine encephalitis virus
agugcaguuaccugcaa

SEQ ID NO: 3364826 - RNA, 15 nt, Eastern equine encephalitis virus
agugcauaaugcugc

SEQ ID NO: 3364827 - RNA, 19 nt, Eastern equine encephalitis virus
agugcauaaugcugcuccu

SEQ ID NO: 3364828 - RNA, 20 nt, Eastern equine encephalitis virus
aguuugcaaccuaguacugc

SEQ ID NO: 3364829 - RNA, 15 nt, Eastern equine encephalitis virus
auacccuccaguaca

SEQ ID NO: 3364830 - RNA, 18 nt, Eastern equine encephalitis virus
auaggcaguguauaaggc

SEQ ID NO: 3364831 - RNA, 14 nt, Eastern equine encephalitis virus
auagguccacuguc

SEQ ID NO: 3364832 - RNA, 23 nt, Eastern equine encephalitis virus
auauaccgccuccuauaaacacu

SEQ ID NO: 3364833 - RNA, 18 nt, Eastern equine encephalitis virus
aucaccgauucaaaacac

SEQ ID NO: 3364834 - RNA, 13 nt, Eastern equine encephalitis virus
aucucucugcaga

SEQ ID NO: 3364835 - RNA, 18 nt, Eastern equine encephalitis virus
aucugcgugguccccauu

SEQ ID NO: 3364836 - RNA, 18 nt, Eastern equine encephalitis virus
augcacccguucaccuac

SEQ ID NO: 3364837 - RNA, 21 nt, Eastern equine encephalitis virus
auggcgccgauuaacccgaug

SEQ ID NO: 3364838 - RNA, 16 nt, Eastern equine encephalitis virus
augucaaacaaugcag

SEQ ID NO: 3364839 - RNA, 20 nt, Eastern equine encephalitis virus
augucaaacaaugcagggcu

SEQ ID NO: 3364840 - RNA, 13 nt, Eastern equine encephalitis virus
auuguaugcaugc

SEQ ID NO: 3364841 - RNA, 21 nt, Eastern equine encephalitis virus
auuucacccaguauaagcugg

SEQ ID NO: 3364842 - RNA, 13 nt, Hepatitis A virus
aaacaaauuuucu

SEQ ID NO: 3364843 - RNA, 13 nt, Hepatitis A virus
aauuucugagguu

SEQ ID NO: 3364844 - RNA, 14 nt, Hepatitis A virus
acaaauuuucuuaa

SEQ ID NO: 3364845 - RNA, 21 nt, Hepatitis A virus
uaaacaaauuuucuuaaaauu

SEQ ID NO: 3364846 - RNA, 17 nt, Hepatitis A virus
uauuucuuuuaucagua

SEQ ID NO: 3364847 - RNA, 13 nt, Hepatitis A virus
ucuuaaaauuucu

SEQ ID NO: 3364848 - RNA, 13 nt, Hepatitis A virus
uuuuaucaguaaa

SEQ ID NO: 3364849 - RNA, 21 nt, Hepatitis A virus
aauuucugagguuuguuuauu

SEQ ID NO: 3364850 - RNA, 21 nt, Hepatitis A virus
auuuucuuaaaauuucugagg

SEQ ID NO: 3364851 - RNA, 15 nt, Hepatitis A virus
cuuaaaauuucugag

SEQ ID NO: 3364852 - RNA, 23 nt, Hepatitis A virus
guuuauuucuuuuaucaguaaau

SEQ ID NO: 3364853 - RNA, 18 nt, Hepatitis A virus
uucugagguuuguuuauu

SEQ ID NO: 3364854 - RNA, 12 nt, Hepatitis A virus
uuuucuuaaaau

SEQ ID NO: 3364855 - RNA, 20 nt, Hepatitis A virus
aauuuucuuaaaauuucuga

SEQ ID NO: 3364856 - RNA, 22 nt, Hepatitis A virus
acaaauuuucuuaaaauuucug

SEQ ID NO: 3364857 - RNA, 18 nt, Hepatitis A virus
auuucuuuuaucaguaaa

SEQ ID NO: 3364858 - RNA, 23 nt, Hepatitis A virus
caaauuuucuuaaaauuucugag

SEQ ID NO: 3364859 - RNA, 16 nt, Hepatitis A virus
cugagguuuguuuauu

SEQ ID NO: 3364860 - RNA, 19 nt, Hepatitis A virus
cuuaaaauuucugagguuu

SEQ ID NO: 3364861 - RNA, 14 nt, Hepatitis A virus
cuuuuaucaguaaa

SEQ ID NO: 3364862 - RNA, 15 nt, Hepatitis A virus
cuuuuaucaguaaau

SEQ ID NO: 3364863 - RNA, 15 nt, Hepatitis A virus
guuuauuucuuuuau

SEQ ID NO: 3364864 - RNA, 15 nt, Hepatitis A virus
uguuuauuucuuuua

SEQ ID NO: 3364865 - RNA, 13 nt, Hepatitis A virus
uuaaaauuucuga

SEQ ID NO: 3364866 - RNA, 17 nt, Hepatitis A virus
uucuuaaaauuucugag

SEQ ID NO: 3364867 - RNA, 15 nt, Hepatitis A virus
ucuuaaaauuucuga

SEQ ID NO: 3364868 - RNA, 20 nt, Hepatitis A virus
uguuuaaacaaauuuucuua

SEQ ID NO: 3364869 - RNA, 22 nt, Hepatitis A virus
uguuuaaacaaauuuucuuaaa

SEQ ID NO: 3364870 - RNA, 24 nt, Hepatitis A virus
uguuuaaacaaauuuucuuaaaau

SEQ ID NO: 3364871 - RNA, 20 nt, Hepatitis A virus
uuuaaacaaauuuucuuaaa

SEQ ID NO: 3364872 - RNA, 21 nt, Hepatitis A virus
uuuucuuaaaauuucugaggu

SEQ ID NO: 3364873 - RNA, 14 nt, Hepatitis B virus
aaccguauuauccu

SEQ ID NO: 3364874 - RNA, 18 nt, Hepatitis B virus
aacuaggcauuauuuaca

SEQ ID NO: 3364875 - RNA, 19 nt, Hepatitis B virus
aagaauuuggagcuucugu

SEQ ID NO: 3364876 - RNA, 14 nt, Hepatitis B virus
aauccucugggauu

SEQ ID NO: 3364877 - RNA, 13 nt, Hepatitis B virus
acaaggccuuucu

SEQ ID NO: 3364878 - RNA, 18 nt, Hepatitis B virus
acaccgccucugcucugu

SEQ ID NO: 3364879 - RNA, 11 nt, Hepatitis B virus
acauucauuua

SEQ ID NO: 3364880 - RNA, 17 nt, Hepatitis B virus
accaaacguuggggcua

SEQ ID NO: 3364881 - RNA, 17 nt, Hepatitis B virus
accauauucuugggaac

SEQ ID NO: 3364882 - RNA, 19 nt, Hepatitis B virus
accccaccacacggaggcc

SEQ ID NO: 3364883 - RNA, 16 nt, Hepatitis B virus
acccugcguucggagc

SEQ ID NO: 3364884 - RNA, 23 nt, Hepatitis B virus
accucuaagagacagucauccuc

SEQ ID NO: 3364885 - RNA, 17 nt, Hepatitis B virus
acucucuuuuuugccuu

SEQ ID NO: 3364886 - RNA, 14 nt, Hepatitis B virus
acuucaaaacuagg

SEQ ID NO: 3364887 - RNA, 12 nt, Hepatitis B virus
agcaaugucaac

SEQ ID NO: 3364888 - RNA, 11 nt, Hepatitis B virus
agcugugccuu

SEQ ID NO: 3364889 - RNA, 16 nt, Hepatitis B virus
aucacuggccagaggc

SEQ ID NO: 3364890 - RNA, 22 nt, Hepatitis B virus
auccugauuggaaaacucccuc

SEQ ID NO: 3364891 - RNA, 23 nt, Hepatitis B virus
aucuaagcaggcuuucacuuucu

SEQ ID NO: 3364892 - RNA, 23 nt, Hepatitis B virus
aucuccucgacaccgccucugcu

SEQ ID NO: 3364893 - RNA, 18 nt, Hepatitis B virus
auuggaaaguaugucaaa

SEQ ID NO: 3364894 - RNA, 17 nt, Hepatitis B virus
auugugggucuuuuggg

SEQ ID NO: 3364895 - RNA, 13 nt, Hepatitis B virus
caacacugccagc

SEQ ID NO: 3364896 - RNA, 16 nt, Hepatitis B virus
caacucaguuguccuc

SEQ ID NO: 3364897 - RNA, 17 nt, Hepatitis B virus
aaaacucccuccuuucc

SEQ ID NO: 3364898 - RNA, 14 nt, Hepatitis B virus
aaccgacaacucag

SEQ ID NO: 3364899 - RNA, 13 nt, Hepatitis B virus
aacguuggggcua

SEQ ID NO: 3364900 - RNA, 23 nt, Hepatitis B virus
aaucuuucuguucccaauccucu

SEQ ID NO: 3364901 - RNA, 15 nt, Hepatitis B virus
aauuggucuguucac

SEQ ID NO: 3364902 - RNA, 16 nt, Hepatitis B virus
acaauaucuaaaccuu

SEQ ID NO: 3364903 - RNA, 12 nt, Hepatitis B virus
acaauguggcua

SEQ ID NO: 3364904 - RNA, 13 nt, Hepatitis B virus
accaaucggcagu

SEQ ID NO: 3364905 - RNA, 21 nt, Hepatitis B virus
accucgacaaggcauggggac

SEQ ID NO: 3364906 - RNA, 17 nt, Hepatitis B virus
acuaggcauuauuuaca

SEQ ID NO: 3364907 - RNA, 15 nt, Hepatitis B virus
acucccuccuuuccu

SEQ ID NO: 3364908 - RNA, 19 nt, Hepatitis B virus
acucucuuuuuugccuucu

SEQ ID NO: 3364909 - RNA, 22 nt, Hepatitis B virus
acuguaccugucuuuaauccug

SEQ ID NO: 3364910 - RNA, 21 nt, Hepatitis B virus
agaggacucuuggacucucag

SEQ ID NO: 3364911 - RNA, 19 nt, Hepatitis B virus
agccuccaagcugugccuu

SEQ ID NO: 3364912 - RNA, 15 nt, Hepatitis B virus
aggccaugcagugga

SEQ ID NO: 3364913 - RNA, 14 nt, Hepatitis B virus
aggcuggcauucua

SEQ ID NO: 3364914 - RNA, 14 nt, Hepatitis B virus
aggcugugcugcca

SEQ ID NO: 3364915 - RNA, 21 nt, Hepatitis B virus
aucuuucuguucccaauccuc

SEQ ID NO: 3364916 - RNA, 20 nt, Hepatitis B virus
auggcugcuaggcugugcug

SEQ ID NO: 3364917 - RNA, 15 nt, Hepatitis B virus
auguccuacuguuca

SEQ ID NO: 3364918 - RNA, 20 nt, Hepatitis B virus
caaaacuaggcauuauuuac

SEQ ID NO: 3364919 - RNA, 12 nt, Hepatitis B virus
caaaucagguag

SEQ ID NO: 3364920 - RNA, 23 nt, Hepatitis B virus
caacaauaugugggcccucugac

SEQ ID NO: 3364921 - RNA, 15 nt, Hepatitis B virus
caaccccaacaagga

SEQ ID NO: 3364922 - RNA, 23 nt, Hepatitis B virus
caacggucaggucucugccaagu

SEQ ID NO: 3364923 - RNA, 16 nt, Hepatitis B virus
caacucaaacaaucca

SEQ ID NO: 3364924 - RNA, 16 nt, Hepatitis B virus
caacuuacaaggccuu

SEQ ID NO: 3364925 - RNA, 15 nt, Hepatitis B virus
caagccuccaagcug

SEQ ID NO: 3364926 - RNA, 20 nt, Hepatitis B virus
caccaaucggcagucaggaa

SEQ ID NO: 3364927 - RNA, 18 nt, Hepatitis B virus
caccagcaccaugcaacu

SEQ ID NO: 3364928 - RNA, 17 nt, Hepatitis B virus
cacggggcgcaccucuc

SEQ ID NO: 3364929 - RNA, 13 nt, Hepatitis B virus
cacuuucucgcca

SEQ ID NO: 3364930 - RNA, 14 nt, Hepatitis B virus
caggaagacagccu

SEQ ID NO: 3364931 - RNA, 17 nt, Hepatitis B virus
caggcaagcuauucugu

SEQ ID NO: 3364932 - RNA, 19 nt, Hepatitis B virus
cauauugacaacacugcca

SEQ ID NO: 3364933 - RNA, 16 nt, Hepatitis B virus
cauuaaaccguauuau

SEQ ID NO: 3364934 - RNA, 18 nt, Hepatitis B virus
ccaaaccucgacaaggca

SEQ ID NO: 3364935 - RNA, 14 nt, Hepatitis B virus
ccaagcugugccuu

SEQ ID NO: 3364936 - RNA, 20 nt, Hepatitis B virus
ccaugcaacuuuuuccccuc

SEQ ID NO: 3364937 - RNA, 13 nt, Hepatitis B virus
cccaauccucugg

SEQ ID NO: 3364938 - RNA, 14 nt, Hepatitis B virus
cccaauccucuggg

SEQ ID NO: 3364939 - RNA, 15 nt, Hepatitis B virus
cccuucuucaucugc

SEQ ID NO: 3364940 - RNA, 21 nt, Hepatitis B virus
ccgucugugccuucucaucug

SEQ ID NO: 3364941 - RNA, 17 nt, Hepatitis B virus
ccucugacaguuaauga

SEQ ID NO: 3364942 - RNA, 20 nt, Hepatitis B virus
ccugaauaugcaguuaauca

SEQ ID NO: 3364943 - RNA, 18 nt, Hepatitis B virus
ccugucuuuaauccugau

SEQ ID NO: 3364944 - RNA, 21 nt, Hepatitis B virus
ccuuggguggcuuuggggcau

SEQ ID NO: 3364945 - RNA, 18 nt, Hepatitis B virus
cgaccacggggcgcaccu

SEQ ID NO: 3364946 - RNA, 22 nt, Hepatitis B virus
cgaccacggggcgcaccucucu

SEQ ID NO: 3364947 - RNA, 14 nt, Hepatitis B virus
cgcuucaccucugc

SEQ ID NO: 3364948 - RNA, 23 nt, Hepatitis B virus
cggcaacggucaggucucugcca

SEQ ID NO: 3364949 - RNA, 19 nt, Hepatitis B virus
cggggccguuugggccucu

SEQ ID NO: 3364950 - RNA, 14 nt, Hepatitis B virus
cguauuauccugaa

SEQ ID NO: 3364951 - RNA, 14 nt, Hepatitis B virus
cgucugugccuucu

SEQ ID NO: 3364952 - RNA, 21 nt, Hepatitis B virus
cuacucccaucucuccaccuc

SEQ ID NO: 3364953 - RNA, 15 nt, Hepatitis B virus
caccuccuccugccu

SEQ ID NO: 3364954 - RNA, 23 nt, Hepatitis B virus
caccuccuuuccauggcugcuag

SEQ ID NO: 3364955 - RNA, 19 nt, Hepatitis B virus
cacuucgcuucaccucugc

SEQ ID NO: 3364956 - RNA, 23 nt, Hepatitis B virus
cagcgccucauuuugugggucac

SEQ ID NO: 3364957 - RNA, 17 nt, Hepatitis B virus
cagucauccucaggcca

SEQ ID NO: 3364958 - RNA, 13 nt, Hepatitis B virus
cauccucaggcca

SEQ ID NO: 3364959 - RNA, 13 nt, Hepatitis B virus
caucucauguuca

SEQ ID NO: 3364960 - RNA, 13 nt, Hepatitis B virus
caucucuccaccu

SEQ ID NO: 3364961 - RNA, 20 nt, Hepatitis B virus
cauuuacaggaggacauuau

SEQ ID NO: 3364962 - RNA, 15 nt, Hepatitis B virus
ccagcaccaugcaac

SEQ ID NO: 3364963 - RNA, 14 nt, Hepatitis B virus
cccgucugugccuu

SEQ ID NO: 3364964 - RNA, 21 nt, Hepatitis B virus
cccugcguucggagccaacuc

SEQ ID NO: 3364965 - RNA, 13 nt, Hepatitis B virus
ccugccuccacca

SEQ ID NO: 3364966 - RNA, 23 nt, Hepatitis B virus
ccugcuagguucuauccuaaccu

SEQ ID NO: 3364967 - RNA, 15 nt, Hepatitis B virus
ccuucuucaucugcc

SEQ ID NO: 3364968 - RNA, 12 nt, Hepatitis B virus
cgcuucaccucu

SEQ ID NO: 3364969 - RNA, 21 nt, Hepatitis B virus
cggucuccccgucugugccuu

SEQ ID NO: 3364970 - RNA, 13 nt, Hepatitis B virus
cuacuguaccugu

SEQ ID NO: 3364971 - RNA, 13 nt, Hepatitis B virus
cuagguucuaucc

SEQ ID NO: 3364972 - RNA, 20 nt, Hepatitis B virus
cuccaccaaucggcagucag

SEQ ID NO: 3364973 - RNA, 19 nt, Hepatitis B virus
cuccccgucugugccuucu

SEQ ID NO: 3364974 - RNA, 21 nt, Hepatitis B virus
cuccggaacauuguucaccuc

SEQ ID NO: 3364975 - RNA, 15 nt, Hepatitis B virus
cucucuuuuuugccu

SEQ ID NO: 3364976 - RNA, 14 nt, Hepatitis B virus
ccaucucuccaccu

SEQ ID NO: 3364977 - RNA, 12 nt, Hepatitis B virus
ccaugcagugga

SEQ ID NO: 3364978 - RNA, 14 nt, Hepatitis B virus
ccccuucuucaucu

SEQ ID NO: 3364979 - RNA, 16 nt, Hepatitis B virus
ccccuucuucaucugc

SEQ ID NO: 3364980 - RNA, 23 nt, Hepatitis B virus
cccgucugugccuucucaucugc

SEQ ID NO: 3364981 - RNA, 20 nt, Hepatitis B virus
ccggaacauuguucaccuca

SEQ ID NO: 3364982 - RNA, 12 nt, Hepatitis B virus
ccuacuguucaa

SEQ ID NO: 3364983 - RNA, 16 nt, Hepatitis B virus
ccuccuuuccucacau

SEQ ID NO: 3364984 - RNA, 17 nt, Hepatitis B virus
ccucgacaaggcauggg

SEQ ID NO: 3364985 - RNA, 16 nt, Hepatitis B virus
ccugaauaugcaguua

SEQ ID NO: 3364986 - RNA, 14 nt, Hepatitis B virus
ccuucucaucugcc

SEQ ID NO: 3364987 - RNA, 15 nt, Hepatitis B virus
cuaaucaucucaugu

SEQ ID NO: 3364988 - RNA, 15 nt, Hepatitis B virus
cucagcaaugucaac

SEQ ID NO: 3364989 - RNA, 18 nt, Hepatitis B virus
cucccaucucuccaccuc

SEQ ID NO: 3364990 - RNA, 16 nt, Hepatitis B virus
cuccccgucugugccu

SEQ ID NO: 3364991 - RNA, 22 nt, Hepatitis B virus
cuccucgacaccgccucugcuc

SEQ ID NO: 3364992 - RNA, 17 nt, Hepatitis B virus
cucuaccguccccuucu

SEQ ID NO: 3364993 - RNA, 13 nt, Hepatitis B virus
cucuccaccucua

SEQ ID NO: 3364994 - RNA, 15 nt, Hepatitis B virus
cugccagcagcaccu

SEQ ID NO: 3364995 - RNA, 18 nt, Hepatitis B virus
cugcguucggagccaacu

SEQ ID NO: 3364996 - RNA, 23 nt, Hepatitis B virus
cuguggaguuacucucuuuuuug

SEQ ID NO: 3364997 - RNA, 16 nt, Hepatitis B virus
cuguucccaauccucu

SEQ ID NO: 3364998 - RNA, 14 nt, Hepatitis B virus
cuucucaucugccg

SEQ ID NO: 3364999 - RNA, 20 nt, Hepatitis B virus
cuugcccaaggucuuacaca

SEQ ID NO: 3365000 - RNA, 19 nt, Hepatitis B virus
cuuugcugccccuuuuaca

SEQ ID NO: 3365001 - RNA, 17 nt, Hepatitis B virus
gaaccuuuguggcuccu

SEQ ID NO: 3365002 - RNA, 13 nt, Hepatitis B virus
gagcccucaggcu

SEQ ID NO: 3365003 - RNA, 14 nt, Hepatitis B virus
gagcuucuguggag

SEQ ID NO: 3365004 - RNA, 21 nt, Hepatitis B virus
gcaacggucaggucucugcca

SEQ ID NO: 3365005 - RNA, 21 nt, Hepatitis B virus
gcaacuuuuuccccucugccu

SEQ ID NO: 3365006 - RNA, 14 nt, Hepatitis B virus
gccaacuggauccu

SEQ ID NO: 3365007 - RNA, 14 nt, Hepatitis B virus
gccuccaagcugug

SEQ ID NO: 3365008 - RNA, 13 nt, Hepatitis B virus
gccucugcucugu

SEQ ID NO: 3365009 - RNA, 13 nt, Hepatitis B virus
cuccaccucuaag

SEQ ID NO: 3365010 - RNA, 13 nt, Hepatitis B virus
cuccuccugccuc

SEQ ID NO: 3365011 - RNA, 20 nt, Hepatitis B virus
cuccucgacaccgccucugc

SEQ ID NO: 3365012 - RNA, 15 nt, Hepatitis B virus
cugggauucuuuccc

SEQ ID NO: 3365013 - RNA, 16 nt, Hepatitis B virus
cuguucaccagcacca

SEQ ID NO: 3365014 - RNA, 20 nt, Hepatitis B virus
cuucuguggaguuacucucu

SEQ ID NO: 3365015 - RNA, 17 nt, Hepatitis B virus
cuuggacaaaggcauua

SEQ ID NO: 3365016 - RNA, 18 nt, Hepatitis B virus
cuuggacaaaggcauuaa

SEQ ID NO: 3365017 - RNA, 18 nt, Hepatitis B virus
cuuucuguucccaauccu

SEQ ID NO: 3365018 - RNA, 20 nt, Hepatitis B virus
cuuuguacuaggaggcugua

SEQ ID NO: 3365019 - RNA, 20 nt, Hepatitis B virus
gaacauuguucaccucacca

SEQ ID NO: 3365020 - RNA, 15 nt, Hepatitis B virus
gacaacacugccagc

SEQ ID NO: 3365021 - RNA, 16 nt, Hepatitis B virus
gagcccucaggcucag

SEQ ID NO: 3365022 - RNA, 16 nt, Hepatitis B virus
gagcuacagcauggga

SEQ ID NO: 3365023 - RNA, 13 nt, Hepatitis B virus
gaucacuggccag

SEQ ID NO: 3365024 - RNA, 22 nt, Hepatitis B virus
gcaccuccuccugccuccacca

SEQ ID NO: 3365025 - RNA, 22 nt, Hepatitis B virus
gcaggcuuucacuuucucgcca

SEQ ID NO: 3365026 - RNA, 15 nt, Hepatitis B virus
gcaugggagguuggu

SEQ ID NO: 3365027 - RNA, 18 nt, Hepatitis B virus
gccagaggcaaaucaggu

SEQ ID NO: 3365028 - RNA, 17 nt, Hepatitis B virus
gcccucaggcucagggc

SEQ ID NO: 3365029 - RNA, 15 nt, Hepatitis B virus
gccuaaucaucucau

SEQ ID NO: 3365030 - RNA, 17 nt, Hepatitis B virus
gccuccaagcugugccu

SEQ ID NO: 3365031 - RNA, 21 nt, Hepatitis B virus
gcggucuccccgucugugccu

SEQ ID NO: 3365032 - RNA, 16 nt, Hepatitis B virus
gcugcuaggcugugcu

SEQ ID NO: 3365033 - RNA, 12 nt, Hepatitis B virus
gcugugcugcca

SEQ ID NO: 3365034 - RNA, 20 nt, Hepatitis B virus
ggcauaaauuggucuguuca

SEQ ID NO: 3365035 - RNA, 14 nt, Hepatitis B virus
ggccaugcagugga

SEQ ID NO: 3365036 - RNA, 16 nt, Hepatitis B virus
ggcugcuaggcugugc

SEQ ID NO: 3365037 - RNA, 14 nt, Hepatitis B virus
ggugggaaacuuua

SEQ ID NO: 3365038 - RNA, 13 nt, Hepatitis B virus
gucugugccuucu

SEQ ID NO: 3365039 - RNA, 18 nt, Hepatitis B virus
guggaaggcuggcauucu

SEQ ID NO: 3365040 - RNA, 15 nt, Hepatitis B virus
guggcuccucugccg

SEQ ID NO: 3365041 - RNA, 14 nt, Hepatitis B virus
guuggucuuccaaa

SEQ ID NO: 3365042 - RNA, 14 nt, Hepatitis B virus
uacaaaaacucaag

SEQ ID NO: 3365043 - RNA, 14 nt, Hepatitis B virus
uacaaggccuuucu

SEQ ID NO: 3365044 - RNA, 22 nt, Hepatitis B virus
uacauacucuguggaaggcugg

SEQ ID NO: 3365045 - RNA, 21 nt, Hepatitis B virus
uacuaggaggcuguaggcaua

SEQ ID NO: 3365046 - RNA, 17 nt, Hepatitis B virus
uacugcggaacuccuag

SEQ ID NO: 3365047 - RNA, 18 nt, Hepatitis B virus
uaugucaaagaauugugg

SEQ ID NO: 3365048 - RNA, 16 nt, Hepatitis B virus
ucaaaacuaggcauua

SEQ ID NO: 3365049 - RNA, 19 nt, Hepatitis B virus
ucaacaauaugugggcccu

SEQ ID NO: 3365050 - RNA, 22 nt, Hepatitis B virus
ucacuggccagaggcaaaucag

SEQ ID NO: 3365051 - RNA, 17 nt, Hepatitis B virus
uccccuucuucaucugc

SEQ ID NO: 3365052 - RNA, 18 nt, Hepatitis B virus
uccucaggccaugcagug

SEQ ID NO: 3365053 - RNA, 19 nt, Hepatitis B virus
ucggggccguuugggccuc

SEQ ID NO: 3365054 - RNA, 17 nt, Hepatitis B virus
ucucuuuuuugccuucu

SEQ ID NO: 3365055 - RNA, 19 nt, Hepatitis B virus
ucucuuuuuugccuucuga

SEQ ID NO: 3365056 - RNA, 22 nt, Hepatitis B virus
ucuuccaaaccucgacaaggca

SEQ ID NO: 3365057 - RNA, 22 nt, Hepatitis B virus
ugccugcuagguucuauccuaa

SEQ ID NO: 3365058 - RNA, 15 nt, Hepatitis B virus
ugccuucucaucugc

SEQ ID NO: 3365059 - RNA, 13 nt, Hepatitis B virus
uggacucucagca

SEQ ID NO: 3365060 - RNA, 17 nt, Hepatitis B virus
uggccagaggcaaauca

SEQ ID NO: 3365061 - RNA, 19 nt, Hepatitis B virus
uguucauguccuacuguuc

SEQ ID NO: 3365062 - RNA, 15 nt, Hepatitis B virus
uuaaucauuacuuca

SEQ ID NO: 3365063 - RNA, 16 nt, Hepatitis B virus
uuacauacucugugga

SEQ ID NO: 3365064 - RNA, 21 nt, Hepatitis B virus
uuacuucaaaacuaggcauua

SEQ ID NO: 3365065 - RNA, 19 nt, Hepatitis B virus
uuauccugaauaugcaguu

SEQ ID NO: 3365066 - RNA, 13 nt, Hepatitis B virus
uuccccucugccu

SEQ ID NO: 3365067 - RNA, 13 nt, Hepatitis B virus
uucgagaucuccu

SEQ ID NO: 3365068 - RNA, 15 nt, Hepatitis B virus
uucgagaucuccucg

SEQ ID NO: 3365069 - RNA, 14 nt, Hepatitis B virus
uuuuccccucugcc

SEQ ID NO: 3365070 - RNA, 21 nt, Hepatitis B virus
caacuuuuuccccucugccua

SEQ ID NO: 3365071 - RNA, 13 nt, Hepatitis B virus
caagagcuacagc

SEQ ID NO: 3365072 - RNA, 14 nt, Hepatitis B virus
caagagcuacagca

SEQ ID NO: 3365073 - RNA, 15 nt, Hepatitis B virus
caagagcuacagcau

SEQ ID NO: 3365074 - RNA, 14 nt, Hepatitis B virus
cacaagaggacucu

SEQ ID NO: 3365075 - RNA, 15 nt, Hepatitis B virus
caccagcaccaugca

SEQ ID NO: 3365076 - RNA, 21 nt, Hepatitis B virus
caccaggucuugcccaagguc

SEQ ID NO: 3365077 - RNA, 19 nt, Hepatitis B virus
cacugccagcagcaccucc

SEQ ID NO: 3365078 - RNA, 18 nt, Hepatitis B virus
caggucuugcccaagguc

SEQ ID NO: 3365079 - RNA, 19 nt, Hepatitis B virus
cauccucaggccaugcagu

SEQ ID NO: 3365080 - RNA, 18 nt, Hepatitis B virus
ccagcagcaccuccuccu

SEQ ID NO: 3365081 - RNA, 15 nt, Hepatitis B virus
cccaucucuccaccu

SEQ ID NO: 3365082 - RNA, 11 nt, Hepatitis B virus
cccucaggcuc

SEQ ID NO: 3365083 - RNA, 12 nt, Hepatitis B virus
cccucaggcuca

SEQ ID NO: 3365084 - RNA, 13 nt, Hepatitis B virus
ccgccucugcucu

SEQ ID NO: 3365085 - RNA, 19 nt, Hepatitis B virus
ccguccccuucuucaucug

SEQ ID NO: 3365086 - RNA, 20 nt, Hepatitis B virus
ccgucucggggccguuuggg

SEQ ID NO: 3365087 - RNA, 12 nt, Hepatitis B virus
ccgucugugccu

SEQ ID NO: 3365088 - RNA, 20 nt, Hepatitis B virus
ccgucugugccuucucaucu

SEQ ID NO: 3365089 - RNA, 17 nt, Hepatitis B virus
ccucaccauacagcacu

SEQ ID NO: 3365090 - RNA, 20 nt, Hepatitis B virus
ccuccaccaaucggcaguca

SEQ ID NO: 3365091 - RNA, 19 nt, Hepatitis B virus
ccuccuuuccauggcugcu

SEQ ID NO: 3365092 - RNA, 14 nt, Hepatitis B virus
ccucugggauucuu

SEQ ID NO: 3365093 - RNA, 19 nt, Hepatitis B virus
ccuuuguggcuccucugcc

SEQ ID NO: 3365094 - RNA, 16 nt, Hepatitis B virus
cuacuguucaagccuc

SEQ ID NO: 3365095 - RNA, 13 nt, Hepatitis B virus
cuaggcugugcug

SEQ ID NO: 3365096 - RNA, 16 nt, Hepatitis B virus
cuaggcugugcugcca

SEQ ID NO: 3365097 - RNA, 19 nt, Hepatitis B virus
cuaggcugugcugccaacu

SEQ ID NO: 3365098 - RNA, 15 nt, Hepatitis B virus
cucacauucauuuac

SEQ ID NO: 3365099 - RNA, 17 nt, Hepatitis B virus
cucaggccaugcagugg

SEQ ID NO: 3365100 - RNA, 15 nt, Hepatitis B virus
cucaggcucagggca

SEQ ID NO: 3365101 - RNA, 15 nt, Hepatitis B virus
cuccaagcugugccu

SEQ ID NO: 3365102 - RNA, 17 nt, Hepatitis B virus
cuccucgacaccgccuc

SEQ ID NO: 3365103 - RNA, 22 nt, Hepatitis B virus
cuccucugccgauccauacugc

SEQ ID NO: 3365104 - RNA, 20 nt, Hepatitis B virus
cucggaaauacaccuccuuu

SEQ ID NO: 3365105 - RNA, 18 nt, Hepatitis B virus
cucucuuuuuugccuucu

SEQ ID NO: 3365106 - RNA, 15 nt, Hepatitis B virus
cucuuggacucucag

SEQ ID NO: 3365107 - RNA, 17 nt, Hepatitis B virus
cucuuggacucucagca

SEQ ID NO: 3365108 - RNA, 16 nt, Hepatitis B virus
cugccccuuuuacaca

SEQ ID NO: 3365109 - RNA, 18 nt, Hepatitis B virus
cugugccuucucaucugc

SEQ ID NO: 3365110 - RNA, 18 nt, Hepatitis B virus
cuguggaguuacucucuu

SEQ ID NO: 3365111 - RNA, 17 nt, Hepatitis B virus
cuucgcuucaccucugc

SEQ ID NO: 3365112 - RNA, 18 nt, Hepatitis B virus
cuugcccaaggucuuaca

SEQ ID NO: 3365113 - RNA, 18 nt, Hepatitis B virus
cuuggccauaggccaucg

SEQ ID NO: 3365114 - RNA, 12 nt, Hepatitis B virus
cuuuaauccuga

SEQ ID NO: 3365115 - RNA, 15 nt, Hepatitis B virus
cuuuacugggcuuua

SEQ ID NO: 3365116 - RNA, 19 nt, Hepatitis B virus
cuuuugggcuuugcugccc

SEQ ID NO: 3365117 - RNA, 16 nt, Hepatitis B virus
gaacauuguucaccuc

SEQ ID NO: 3365118 - RNA, 18 nt, Hepatitis B virus
gaacauuguucaccucac

SEQ ID NO: 3365119 - RNA, 15 nt, Hepatitis B virus
gaaccuuuguggcuc

SEQ ID NO: 3365120 - RNA, 14 nt, Hepatitis B virus
gacaacacugccag

SEQ ID NO: 3365121 - RNA, 18 nt, Hepatitis B virus
gacagucauccucaggcc

SEQ ID NO: 3365122 - RNA, 14 nt, Hepatitis B virus
gagcccucaggcuc

SEQ ID NO: 3365123 - RNA, 13 nt, Hepatitis B virus
gaggcaaaucagg

SEQ ID NO: 3365124 - RNA, 23 nt, Hepatitis B virus
gaggccuuuugggguggagcccu

SEQ ID NO: 3365125 - RNA, 23 nt, Hepatitis B virus
gcacuucgcuucaccucugcacg

SEQ ID NO: 3365126 - RNA, 16 nt, Hepatitis B virus
gccuccaagcugugcc

SEQ ID NO: 3365127 - RNA, 14 nt, Hepatitis B virus
gcuucaccucugca

SEQ ID NO: 3365128 - RNA, 19 nt, Hepatitis B virus
ggacuucaaccccaacaag

SEQ ID NO: 3365129 - RNA, 19 nt, Hepatitis B virus
ggagauuagguuaaagguc

SEQ ID NO: 3365130 - RNA, 11 nt, Hepatitis B virus
ggagcuucugu

SEQ ID NO: 3365131 - RNA, 18 nt, Hepatitis B virus
ggucuccccgucugugcc

SEQ ID NO: 3365132 - RNA, 23 nt, Hepatitis B virus
gguucuauccuaaccuuaccaaa

SEQ ID NO: 3365133 - RNA, 16 nt, Hepatitis B virus
gucauccucaggccau

SEQ ID NO: 3365134 - RNA, 19 nt, Hepatitis B virus
gucuccccgucugugccuu

SEQ ID NO: 3365135 - RNA, 11 nt, Hepatitis B virus
gucugugccuu

SEQ ID NO: 3365136 - RNA, 22 nt, Hepatitis B virus
guucaagccuccaagcugugcc

SEQ ID NO: 3365137 - RNA, 19 nt, Hepatitis B virus
uauaaagaauuuggagcuu

SEQ ID NO: 3365138 - RNA, 22 nt, Hepatitis B virus
ucaacaauaugugggcccucug

SEQ ID NO: 3365139 - RNA, 15 nt, Hepatitis B virus
uccaggguucacccc

SEQ ID NO: 3365140 - RNA, 15 nt, Hepatitis B virus
ucccaauccucuggg

SEQ ID NO: 3365141 - RNA, 19 nt, Hepatitis B virus
uccucgacaccgccucugc

SEQ ID NO: 3365142 - RNA, 18 nt, Hepatitis B virus
ucuccccgucugugccuu

SEQ ID NO: 3365143 - RNA, 19 nt, Hepatitis B virus
ucuguaucgggaggccuua

SEQ ID NO: 3365144 - RNA, 12 nt, Hepatitis B virus
ucuuggacucuc

SEQ ID NO: 3365145 - RNA, 14 nt, Hepatitis B virus
ucuuggacucucag

SEQ ID NO: 3365146 - RNA, 14 nt, Hepatitis B virus
ucuuuaauccugau

SEQ ID NO: 3365147 - RNA, 17 nt, Hepatitis B virus
ucuuuccuucuauucga

SEQ ID NO: 3365148 - RNA, 22 nt, Hepatitis B virus
ugcaacuuuuuccccucugccu

SEQ ID NO: 3365149 - RNA, 18 nt, Hepatitis B virus
ugcuaggcugugcugcca

SEQ ID NO: 3365150 - RNA, 21 nt, Hepatitis B virus
uggaaccuuuguggcuccucu

SEQ ID NO: 3365151 - RNA, 17 nt, Hepatitis B virus
uggcuuuggggcaugga

SEQ ID NO: 3365152 - RNA, 15 nt, Hepatitis B virus
uguggcuccucugcc

SEQ ID NO: 3365153 - RNA, 14 nt, Hepatitis B virus
uuguggcuccucug

SEQ ID NO: 3365154 - RNA, 15 nt, Hepatitis B virus
uuguucaccucacca

SEQ ID NO: 3365155 - RNA, 20 nt, Hepatitis B virus
uuuacaggaggacauuauua

SEQ ID NO: 3365156 - RNA, 16 nt, Hepatitis B virus
cucuuggacucucagc

SEQ ID NO: 3365157 - RNA, 23 nt, Hepatitis B virus
cugccuaaucaucucauguucau

SEQ ID NO: 3365158 - RNA, 12 nt, Hepatitis B virus
cugccuccacca

SEQ ID NO: 3365159 - RNA, 15 nt, Hepatitis B virus
cugccuugaugccuu

SEQ ID NO: 3365160 - RNA, 15 nt, Hepatitis B virus
cugcguucggagcca

SEQ ID NO: 3365161 - RNA, 22 nt, Hepatitis B virus
cugcucuguaucgggaggccuu

SEQ ID NO: 3365162 - RNA, 21 nt, Hepatitis B virus
cugggaggaguugggggagga

SEQ ID NO: 3365163 - RNA, 22 nt, Hepatitis B virus
cuguaccugucuuuaauccuga

SEQ ID NO: 3365164 - RNA, 15 nt, Hepatitis B virus
cuguggaaggcuggc

SEQ ID NO: 3365165 - RNA, 12 nt, Hepatitis B virus
cuucaucugccg

SEQ ID NO: 3365166 - RNA, 22 nt, Hepatitis B virus
cuuggguggcuuuggggcaugg

SEQ ID NO: 3365167 - RNA, 19 nt, Hepatitis B virus
cuuucuguucccaauccuc

SEQ ID NO: 3365168 - RNA, 17 nt, Hepatitis B virus
cuuuugggguggagccc

SEQ ID NO: 3365169 - RNA, 15 nt, Hepatitis B virus
gacaaggcaugggga

SEQ ID NO: 3365170 - RNA, 16 nt, Hepatitis B virus
gaccgaccuugaggca

SEQ ID NO: 3365171 - RNA, 18 nt, Hepatitis B virus
gacucauaaggugggaaa

SEQ ID NO: 3365172 - RNA, 22 nt, Hepatitis B virus
gagacagucauccucaggccau

SEQ ID NO: 3365173 - RNA, 21 nt, Hepatitis B virus
gagccaacucaaacaauccag

SEQ ID NO: 3365174 - RNA, 23 nt, Hepatitis B virus
gcaacccccacggguuggggcuu

SEQ ID NO: 3365175 - RNA, 15 nt, Hepatitis B virus
gcagucaggaagaca

SEQ ID NO: 3365176 - RNA, 13 nt, Hepatitis B virus
gccaacucaaaca

SEQ ID NO: 3365177 - RNA, 13 nt, Hepatitis B virus
gcugugcugccaa

SEQ ID NO: 3365178 - RNA, 18 nt, Hepatitis B virus
ggacucuuggacucucag

SEQ ID NO: 3365179 - RNA, 22 nt, Hepatitis B virus
ggucuuuugggcuuugcugccc

SEQ ID NO: 3365180 - RNA, 15 nt, Hepatitis B virus
gguggcuuuggggca

SEQ ID NO: 3365181 - RNA, 11 nt, Hepatitis B virus
gguuggggcuu

SEQ ID NO: 3365182 - RNA, 18 nt, Hepatitis B virus
gucaaagaauuguggguc

SEQ ID NO: 3365183 - RNA, 13 nt, Hepatitis B virus
gucaacaauaugu

SEQ ID NO: 3365184 - RNA, 13 nt, Hepatitis B virus
gucauccucaggc

SEQ ID NO: 3365185 - RNA, 14 nt, Hepatitis B virus
guccuacuguucaa

SEQ ID NO: 3365186 - RNA, 19 nt, Hepatitis B virus
guccuacuguucaagccuc

SEQ ID NO: 3365187 - RNA, 22 nt, Hepatitis B virus
guucccaauccucugggauucu

SEQ ID NO: 3365188 - RNA, 14 nt, Hepatitis B virus
uagagucuccggaa

SEQ ID NO: 3365189 - RNA, 17 nt, Hepatitis B virus
uauccugaauaugcagu

SEQ ID NO: 3365190 - RNA, 16 nt, Hepatitis B virus
ucaccaguuggacccu

SEQ ID NO: 3365191 - RNA, 15 nt, Hepatitis B virus
ucaggcucagggcau

SEQ ID NO: 3365192 - RNA, 22 nt, Hepatitis B virus
uccaaaccucgacaaggcaugg

SEQ ID NO: 3365193 - RNA, 21 nt, Hepatitis B virus
uccagauugggacuucaaccc

SEQ ID NO: 3365194 - RNA, 17 nt, Hepatitis B virus
ucccaucucuccaccuc

SEQ ID NO: 3365195 - RNA, 12 nt, Hepatitis B virus
uccccucugccu

SEQ ID NO: 3365196 - RNA, 17 nt, Hepatitis B virus
uccucaggccaugcagu

SEQ ID NO: 3365197 - RNA, 14 nt, Hepatitis B virus
uccugccuccacca

SEQ ID NO: 3365198 - RNA, 12 nt, Hepatitis B virus
ucgggaggccuu

SEQ ID NO: 3365199 - RNA, 22 nt, Hepatitis B virus
ucuaagcaggcuuucacuuucu

SEQ ID NO: 3365200 - RNA, 21 nt, Hepatitis B virus
ucucuccaccucuaagagaca

SEQ ID NO: 3365201 - RNA, 13 nt, Hepatitis B virus
ucugacuucuuuc

SEQ ID NO: 3365202 - RNA, 22 nt, Hepatitis B virus
ucuguucaccagcaccaugcaa

SEQ ID NO: 3365203 - RNA, 13 nt, Hepatitis B virus
ucuucaucugccg

SEQ ID NO: 3365204 - RNA, 15 nt, Hepatitis B virus
uggacaaaggcauua

SEQ ID NO: 3365205 - RNA, 22 nt, Hepatitis B virus
uggacccugcguucggagccaa

SEQ ID NO: 3365206 - RNA, 12 nt, Hepatitis B virus
uggagcccucag

SEQ ID NO: 3365207 - RNA, 18 nt, Hepatitis B virus
uggagcccucaggcucag

SEQ ID NO: 3365208 - RNA, 23 nt, Hepatitis B virus
uggagcccucaggcucagggcau

SEQ ID NO: 3365209 - RNA, 13 nt, Hepatitis B virus
ugggguggagccc

SEQ ID NO: 3365210 - RNA, 21 nt, Hepatitis B virus
uguucauguccuacuguucaa

SEQ ID NO: 3365211 - RNA, 17 nt, Hepatitis B virus
uuaaucauuacuucaaa

SEQ ID NO: 3365212 - RNA, 12 nt, Hepatitis B virus
uuccccucugcc

SEQ ID NO: 3365213 - RNA, 17 nt, Hepatitis B virus
uugaggcauacuucaaa

SEQ ID NO: 3365214 - RNA, 14 nt, Hepatitis B virus
uugggacuucaacc

SEQ ID NO: 3365215 - RNA, 12 nt, Hepatitis B virus
uuuccccucugc

SEQ ID NO: 3365216 - RNA, 17 nt, Hepatitis B virus
uuugggcuuugcugccc

SEQ ID NO: 3365217 - RNA, 17 nt, Hepatitis B virus
aaacuaggcauuauuua

SEQ ID NO: 3365218 - RNA, 17 nt, Hepatitis B virus
aaacuuuacugggcuuu

SEQ ID NO: 3365219 - RNA, 20 nt, Hepatitis B virus
aacaagagcuacagcauggg

SEQ ID NO: 3365220 - RNA, 14 nt, Hepatitis B virus
aacggucaggucuc

SEQ ID NO: 3365221 - RNA, 17 nt, Hepatitis B virus
aauauuugcccuuggac

SEQ ID NO: 3365222 - RNA, 19 nt, Hepatitis B virus
acaauccagauugggacuu

SEQ ID NO: 3365223 - RNA, 13 nt, Hepatitis B virus
acauucauuuaca

SEQ ID NO: 3365224 - RNA, 14 nt, Hepatitis B virus
accaaauauuugcc

SEQ ID NO: 3365225 - RNA, 16 nt, Hepatitis B virus
accauacagcacucag

SEQ ID NO: 3365226 - RNA, 12 nt, Hepatitis B virus
accugucuuuaa

SEQ ID NO: 3365227 - RNA, 16 nt, Hepatitis B virus
acgcccaccaggucuu

SEQ ID NO: 3365228 - RNA, 18 nt, Hepatitis B virus
acucauaaggugggaaac

SEQ ID NO: 3365229 - RNA, 12 nt, Hepatitis B virus
acucuguggaag

SEQ ID NO: 3365230 - RNA, 12 nt, Hepatitis B virus
acucuuggacuc

SEQ ID NO: 3365231 - RNA, 15 nt, Hepatitis B virus
acucuuggacucuca

SEQ ID NO: 3365232 - RNA, 21 nt, Hepatitis B virus
acuggccagaggcaaaucagg

SEQ ID NO: 3365233 - RNA, 18 nt, Hepatitis B virus
agcaccuccuccugccuc

SEQ ID NO: 3365234 - RNA, 15 nt, Hepatitis B virus
agcagcaccuccucc

SEQ ID NO: 3365235 - RNA, 15 nt, Hepatitis B virus
agcauuugguccagg

SEQ ID NO: 3365236 - RNA, 18 nt, Hepatitis B virus
agccuccaagcugugccu

SEQ ID NO: 3365237 - RNA, 21 nt, Hepatitis B virus
aggaagacagccuacucccau

SEQ ID NO: 3365238 - RNA, 12 nt, Hepatitis B virus
aggucucugcca

SEQ ID NO: 3365239 - RNA, 23 nt, Hepatitis B virus
aucaccaguuggacccugcguuc

SEQ ID NO: 3365240 - RNA, 15 nt, Hepatitis B virus
auccuaaccuuacca

SEQ ID NO: 3365241 - RNA, 16 nt, Hepatitis B virus
auccugaauaugcagu

SEQ ID NO: 3365242 - RNA, 23 nt, Hepatitis B virus
augcaacuuuuuccccucugccu

SEQ ID NO: 3365243 - RNA, 17 nt, Hepatitis B virus
auguggcuauccugccu

SEQ ID NO: 3365244 - RNA, 16 nt, Hepatitis B virus
auugacaacacugcca

SEQ ID NO: 3365245 - RNA, 19 nt, Hepatitis B virus
auuggaaaacucccuccuu

SEQ ID NO: 3365246 - RNA, 13 nt, Hepatitis B virus
auuuacaggagga

SEQ ID NO: 3365247 - RNA, 22 nt, Hepatitis B virus
caaggaucacuggccagaggca

SEQ ID NO: 3365248 - RNA, 14 nt, Hepatitis B virus
caccauacagcacu

SEQ ID NO: 3365249 - RNA, 16 nt, Hepatitis B virus
caccccaccacacgga

SEQ ID NO: 3365250 - RNA, 13 nt, Hepatitis B virus
caccgccucugcu

SEQ ID NO: 3365251 - RNA, 16 nt, Hepatitis B virus
caccgccucugcucug

SEQ ID NO: 3365252 - RNA, 16 nt, Hepatitis B virus
gcuacagcaugggagg

SEQ ID NO: 3365253 - RNA, 12 nt, Hepatitis B virus
gcuuugcugccc

SEQ ID NO: 3365254 - RNA, 12 nt, Hepatitis B virus
ggacucuuggac

SEQ ID NO: 3365255 - RNA, 21 nt, Hepatitis B virus
ggcauaaauuggucuguucac

SEQ ID NO: 3365256 - RNA, 21 nt, Hepatitis B virus
ggcauauugacaacacugcca

SEQ ID NO: 3365257 - RNA, 14 nt, Hepatitis B virus
ggcccucugacagu

SEQ ID NO: 3365258 - RNA, 21 nt, Hepatitis B virus
ggucuuccaaaccucgacaag

SEQ ID NO: 3365259 - RNA, 16 nt, Hepatitis B virus
guacuaggaggcugua

SEQ ID NO: 3365260 - RNA, 15 nt, Hepatitis B virus
gucaggucucugcca

SEQ ID NO: 3365261 - RNA, 18 nt, Hepatitis B virus
gugccuucucaucugccg

SEQ ID NO: 3365262 - RNA, 16 nt, Hepatitis B virus
uaaccuuaccaaauau

SEQ ID NO: 3365263 - RNA, 21 nt, Hepatitis B virus
uaccaaauauuugcccuugga

SEQ ID NO: 3365264 - RNA, 22 nt, Hepatitis B virus
ucaagccuccaagcugugccuu

SEQ ID NO: 3365265 - RNA, 14 nt, Hepatitis B virus
ucaggucucugcca

SEQ ID NO: 3365266 - RNA, 14 nt, Hepatitis B virus
ucauccucaggcca

SEQ ID NO: 3365267 - RNA, 19 nt, Hepatitis B virus
uccagauugggacuucaac

SEQ ID NO: 3365268 - RNA, 16 nt, Hepatitis B virus
ucccaucucuccaccu

SEQ ID NO: 3365269 - RNA, 20 nt, Hepatitis B virus
uccucgacaccgccucugcu

SEQ ID NO: 3365270 - RNA, 13 nt, Hepatitis B virus
ucgacaaggcaug

SEQ ID NO: 3365271 - RNA, 20 nt, Hepatitis B virus
ucggaaauacaccuccuuuc

SEQ ID NO: 3365272 - RNA, 23 nt, Hepatitis B virus
ucuuggacucucagcaaugucaa

SEQ ID NO: 3365273 - RNA, 23 nt, Hepatitis B virus
ugcacuucgcuucaccucugcac

SEQ ID NO: 3365274 - RNA, 15 nt, Hepatitis B virus
ugccagcagcaccuc

SEQ ID NO: 3365275 - RNA, 17 nt, Hepatitis B virus
ugccuucucaucugccg

SEQ ID NO: 3365276 - RNA, 15 nt, Hepatitis B virus
ugcggaacuccuagc

SEQ ID NO: 3365277 - RNA, 14 nt, Hepatitis B virus
uggacucucagcaa

SEQ ID NO: 3365278 - RNA, 18 nt, Hepatitis B virus
ugggagguuggucuucca

SEQ ID NO: 3365279 - RNA, 12 nt, Hepatitis B virus
uggucuguucac

SEQ ID NO: 3365280 - RNA, 21 nt, Hepatitis B virus
uguaccugucuuuaauccuga

SEQ ID NO: 3365281 - RNA, 15 nt, Hepatitis B virus
uguccuacuguucaa

SEQ ID NO: 3365282 - RNA, 16 nt, Hepatitis B virus
ugugggcccucugaca

SEQ ID NO: 3365283 - RNA, 14 nt, Hepatitis B virus
uucaaagacuguuu

SEQ ID NO: 3365284 - RNA, 13 nt, Hepatitis B virus
uucuuuccuucua

SEQ ID NO: 3365285 - RNA, 15 nt, Hepatitis B virus
uuggacaaaggcauu

SEQ ID NO: 3365286 - RNA, 16 nt, Hepatitis B virus
uuggacaaaggcauua

SEQ ID NO: 3365287 - RNA, 17 nt, Hepatitis B virus
uuguggcuccucugccg

SEQ ID NO: 3365288 - RNA, 17 nt, Hepatitis B virus
aaacuacacgcagcgcc

SEQ ID NO: 3365289 - RNA, 19 nt, Hepatitis B virus
aagaauugugggucuuuug

SEQ ID NO: 3365290 - RNA, 19 nt, Hepatitis B virus
aauaugugggcccucugac

SEQ ID NO: 3365291 - RNA, 17 nt, Hepatitis B virus
acaacacugccagcagc

SEQ ID NO: 3365292 - RNA, 22 nt, Hepatitis B virus
acauacucuguggaaggcuggc

SEQ ID NO: 3365293 - RNA, 23 nt, Hepatitis B virus
accccaacaaggaucacuggcca

SEQ ID NO: 3365294 - RNA, 24 nt, Hepatitis B virus
acccguauaaagaauuuggagcuu

SEQ ID NO: 3365295 - RNA, 18 nt, Hepatitis B virus
acccugcguucggagcca

SEQ ID NO: 3365296 - RNA, 18 nt, Hepatitis B virus
accucgacaaggcauggg

SEQ ID NO: 3365297 - RNA, 13 nt, Hepatitis B virus
accucucuuuacg

SEQ ID NO: 3365298 - RNA, 23 nt, Hepatitis B virus
acgcggucuccccgucugugccu

SEQ ID NO: 3365299 - RNA, 20 nt, Hepatitis B virus
acucaggcaagcuauucugu

SEQ ID NO: 3365300 - RNA, 18 nt, Hepatitis B virus
acucuguggaaggcuggc

SEQ ID NO: 3365301 - RNA, 19 nt, Hepatitis B virus
acuucaaaacuaggcauua

SEQ ID NO: 3365302 - RNA, 16 nt, Hepatitis B virus
agcaugggagguuggu

SEQ ID NO: 3365303 - RNA, 16 nt, Hepatitis B virus
agcccucaggcucagg

SEQ ID NO: 3365304 - RNA, 24 nt, Hepatitis B virus
aggagauuaaaauuaauuaugccu

SEQ ID NO: 3365305 - RNA, 19 nt, Hepatitis B virus
agguuggucuuccaaaccu

SEQ ID NO: 3365306 - RNA, 15 nt, Hepatitis B virus
aguuacucucuuuuu

SEQ ID NO: 3365307 - RNA, 20 nt, Hepatitis B virus
auaugcaguuaaucauuacu

SEQ ID NO: 3365308 - RNA, 17 nt, Hepatitis B virus
aucacuggccagaggca

SEQ ID NO: 3365309 - RNA, 13 nt, Hepatitis B virus
auccucaggccau

SEQ ID NO: 3365310 - RNA, 15 nt, Hepatitis B virus
auuuacauacucugu

SEQ ID NO: 3365311 - RNA, 14 nt, Hepatitis B virus
caacacugccagca

SEQ ID NO: 3365312 - RNA, 13 nt, Hepatitis B virus
caacuuuuucccc

SEQ ID NO: 3365313 - RNA, 16 nt, Hepatitis B virus
caaggaucacuggcca

SEQ ID NO: 3365314 - RNA, 23 nt, Hepatitis B virus
caauaugugggcccucugacagu

SEQ ID NO: 3365315 - RNA, 15 nt, Hepatitis B virus
caccgccucugcucu

SEQ ID NO: 3365316 - RNA, 18 nt, Hepatitis B virus
cacuucgcuucaccucug

SEQ ID NO: 3365317 - RNA, 12 nt, Hepatitis B virus
cauccucaggcc

SEQ ID NO: 3365318 - RNA, 12 nt, Hepatitis B virus
cauggcugcuag

SEQ ID NO: 3365319 - RNA, 18 nt, Hepatitis B virus
cauggcugcuaggcugug

SEQ ID NO: 3365320 - RNA, 21 nt, Hepatitis B virus
cauuguucaccucaccauaca

SEQ ID NO: 3365321 - RNA, 23 nt, Hepatitis B virus
ccaccacacggaggccuuuuggg

SEQ ID NO: 3365322 - RNA, 18 nt, Hepatitis C virus
acugcagagagugcugau

SEQ ID NO: 3365323 - RNA, 17 nt, Hepatitis C virus
agagugcugauacuggc

SEQ ID NO: 3365324 - RNA, 19 nt, Hepatitis C virus
agucacggcuagcugugaa

SEQ ID NO: 3365325 - RNA, 22 nt, Hepatitis C virus
cagagagugcugauacuggccu

SEQ ID NO: 3365326 - RNA, 19 nt, Hepatitis C virus
caugacugcagagagugcu

SEQ ID NO: 3365327 - RNA, 21 nt, Hepatitis C virus
cuucuuuaaugguggcuccau

SEQ ID NO: 3365328 - RNA, 13 nt, Hepatitis C virus
cuuuccuucuuuu

SEQ ID NO: 3365329 - RNA, 18 nt, Hepatitis C virus
cuuucuuuuccuuccuuc

SEQ ID NO: 3365330 - RNA, 21 nt, Hepatitis C virus
gagagugcugauacuggccuc

SEQ ID NO: 3365331 - RNA, 13 nt, Hepatitis C virus
gccucucugcaga

SEQ ID NO: 3365332 - RNA, 20 nt, Hepatitis C virus
gccucuuaggccauuuccug

SEQ ID NO: 3365333 - RNA, 16 nt, Hepatitis C virus
gugcugauacuggccu

SEQ ID NO: 3365334 - RNA, 19 nt, Hepatitis C virus
gugcugauacuggccucuc

SEQ ID NO: 3365335 - RNA, 18 nt, Hepatitis C virus
aacacuccggccucuuag

SEQ ID NO: 3365336 - RNA, 19 nt, Hepatitis C virus
acuggccucucugcagauc

SEQ ID NO: 3365337 - RNA, 19 nt, Hepatitis C virus
agagugcugauacuggccu

SEQ ID NO: 3365338 - RNA, 13 nt, Hepatitis C virus
auacuggccucuc

SEQ ID NO: 3365339 - RNA, 20 nt, Hepatitis C virus
cugcagagagugcugauacu

SEQ ID NO: 3365340 - RNA, 20 nt, Hepatitis C virus
cugugaaagguccgugagcc

SEQ ID NO: 3365341 - RNA, 23 nt, Hepatitis C virus
cugugaaagguccgugagccgca

SEQ ID NO: 3365342 - RNA, 14 nt, Hepatitis C virus
aaacacuccggccu

SEQ ID NO: 3365343 - RNA, 15 nt, Hepatitis C virus
acggcuagcugugaa

SEQ ID NO: 3365344 - RNA, 23 nt, Hepatitis C virus
agccgcaugacugcagagagugc

SEQ ID NO: 3365345 - RNA, 14 nt, Hepatitis C virus
cacuccggccucuu

SEQ ID NO: 3365346 - RNA, 13 nt, Hepatitis C virus
caugacugcagag

SEQ ID NO: 3365347 - RNA, 15 nt, Hepatitis C virus
ccuuccuucuuuaau

SEQ ID NO: 3365348 - RNA, 18 nt, Hepatitis C virus
ccuucuuuaaugguggcu

SEQ ID NO: 3365349 - RNA, 12 nt, Hepatitis C virus
cuuuuccuuccu

SEQ ID NO: 3365350 - RNA, 12 nt, Hepatitis C virus
ggcuagcuguga

SEQ ID NO: 3365351 - RNA, 23 nt, Hepatitis C virus
ugagccgcaugacugcagagagu

SEQ ID NO: 3365352 - RNA, 12 nt, Hepatitis C virus
aggccauuuccu

SEQ ID NO: 3365353 - RNA, 13 nt, Hepatitis C virus
ccucucugcagau

SEQ ID NO: 3365354 - RNA, 13 nt, Hepatitis C virus
ccuuccuucuuua

SEQ ID NO: 3365355 - RNA, 12 nt, Hepatitis C virus
cggcuagcugug

SEQ ID NO: 3365356 - RNA, 16 nt, Hepatitis C virus
cuggccucucugcaga

SEQ ID NO: 3365357 - RNA, 16 nt, Hepatitis C virus
gagccgcaugacugca

SEQ ID NO: 3365358 - RNA, 12 nt, Hepatitis C virus
gccauuuccugu

SEQ ID NO: 3365359 - RNA, 22 nt, Hepatitis C virus
gcugugaaagguccgugagccg

SEQ ID NO: 3365360 - RNA, 22 nt, Hepatitis C virus
uccuucuuuaaugguggcucca

SEQ ID NO: 3365361 - RNA, 16 nt, Hepatitis C virus
ugagccgcaugacugc

SEQ ID NO: 3365362 - RNA, 11 nt, Hepatitis C virus
ugguggcucca

SEQ ID NO: 3365363 - RNA, 20 nt, Hepatitis C virus
uuaggccauuuccuguuuuu

SEQ ID NO: 3365364 - RNA, 22 nt, Hepatitis C virus
gagagugcugauacuggccucu

SEQ ID NO: 3365365 - RNA, 19 nt, Hepatitis C virus
gauacuggccucucugcag

SEQ ID NO: 3365366 - RNA, 23 nt, Hepatitis C virus
gcagagagugcugauacuggccu

SEQ ID NO: 3365367 - RNA, 23 nt, Hepatitis C virus
gcccuagucacggcuagcuguga

SEQ ID NO: 3365368 - RNA, 13 nt, Hepatitis C virus
gccgcaugacugc

SEQ ID NO: 3365369 - RNA, 14 nt, Hepatitis C virus
gcuccaucuuagcc

SEQ ID NO: 3365370 - RNA, 15 nt, Hepatitis C virus
gcuccaucuuagccc

SEQ ID NO: 3365371 - RNA, 22 nt, Hepatitis C virus
gcugauacuggccucucugcag

SEQ ID NO: 3365372 - RNA, 19 nt, Hepatitis C virus
guaaacacuccggccucuu

SEQ ID NO: 3365373 - RNA, 19 nt, Hepatitis C virus
ugaaagguccgugagccgc

SEQ ID NO: 3365374 - RNA, 15 nt, Hepatitis C virus
uuaaugguggcucca

SEQ ID NO: 3365375 - RNA, 15 nt, Hepatitis D virus
accccucucgggcgc

SEQ ID NO: 3365376 - RNA, 13 nt, Hepatitis D virus
acucaccccucuc

SEQ ID NO: 3365377 - RNA, 22 nt, Hepatitis D virus
agccucacucguccccucucgg

SEQ ID NO: 3365378 - RNA, 14 nt, Hepatitis D virus
agggguccucugga

SEQ ID NO: 3365379 - RNA, 21 nt, Hepatitis D virus
aucgcuauggucuacucccuc

SEQ ID NO: 3365380 - RNA, 13 nt, Hepatitis D virus
auuucucuguucu

SEQ ID NO: 3365381 - RNA, 13 nt, Hepatitis D virus
caccuucccucuu

SEQ ID NO: 3365382 - RNA, 20 nt, Hepatitis D virus
cagccgacccucccuccucu

SEQ ID NO: 3365383 - RNA, 17 nt, Hepatitis D virus
cauggcaucuccaccuc

SEQ ID NO: 3365384 - RNA, 20 nt, Hepatitis D virus
cauuccugggcgacccuugg

SEQ ID NO: 3365385 - RNA, 13 nt, Hepatitis D virus
cccaacuccuagc

SEQ ID NO: 3365386 - RNA, 14 nt, Hepatitis D virus
cccagccggcgcca

SEQ ID NO: 3365387 - RNA, 18 nt, Hepatitis D virus
cccgccauuccugggcga

SEQ ID NO: 3365388 - RNA, 21 nt, Hepatitis D virus
cccucucgcgaugcgcucucu

SEQ ID NO: 3365389 - RNA, 21 nt, Hepatitis D virus
ccgacucaccccucucgggcg

SEQ ID NO: 3365390 - RNA, 19 nt, Hepatitis D virus
ccgaggggacgguccccuc

SEQ ID NO: 3365391 - RNA, 15 nt, Hepatitis D virus
ccguguggcuuccuc

SEQ ID NO: 3365392 - RNA, 22 nt, Hepatitis D virus
ccugcuagccccgcugcucucu

SEQ ID NO: 3365393 - RNA, 12 nt, Hepatitis D virus
ccuucucuucca

SEQ ID NO: 3365394 - RNA, 12 nt, Hepatitis D virus
cgaccugggcau

SEQ ID NO: 3365395 - RNA, 16 nt, Hepatitis D virus
cgacucaccccucucg

SEQ ID NO: 3365396 - RNA, 14 nt, Hepatitis D virus
cgaugcgcucucug

SEQ ID NO: 3365397 - RNA, 15 nt, Hepatitis D virus
cgaugcgcucucugu

SEQ ID NO: 3365398 - RNA, 18 nt, Hepatitis D virus
cggaacacccaccugcua

SEQ ID NO: 3365399 - RNA, 16 nt, Hepatitis D virus
cgguccgaccugggca

SEQ ID NO: 3365400 - RNA, 22 nt, Hepatitis D virus
cuacuccguguggcuuccuccc

SEQ ID NO: 3365401 - RNA, 14 nt, Hepatitis D virus
cucaacccuucggg

SEQ ID NO: 3365402 - RNA, 13 nt, Hepatitis D virus
cuccaccuccucg

SEQ ID NO: 3365403 - RNA, 15 nt, Hepatitis D virus
cuccaccuccucgcg

SEQ ID NO: 3365404 - RNA, 21 nt, Hepatitis D virus
cuuccaccuucccucuuuccc

SEQ ID NO: 3365405 - RNA, 14 nt, Hepatitis D virus
cuuccucccucugg

SEQ ID NO: 3365406 - RNA, 18 nt, Hepatitis D virus
cuuggccgccgggccccu

SEQ ID NO: 3365407 - RNA, 14 nt, Hepatitis D virus
gaacacccaccugc

SEQ ID NO: 3365408 - RNA, 15 nt, Hepatitis D virus
gaugcgcucucuguu

SEQ ID NO: 3365409 - RNA, 14 nt, Hepatitis D virus
gcaucuccaccucc

SEQ ID NO: 3365410 - RNA, 15 nt, Hepatitis D virus
gccgccgggccccuc

SEQ ID NO: 3365411 - RNA, 17 nt, Hepatitis D virus
gccgccgggccccucgg

SEQ ID NO: 3365412 - RNA, 20 nt, Hepatitis D virus
gccucacucguccccucucg

SEQ ID NO: 3365413 - RNA, 19 nt, Hepatitis D virus
gccuccuucucuuccaccu

SEQ ID NO: 3365414 - RNA, 23 nt, Hepatitis D virus
gcuaagggagagccacuuuucuc

SEQ ID NO: 3365415 - RNA, 21 nt, Hepatitis D virus
gcugaucuauccuccccgcga

SEQ ID NO: 3365416 - RNA, 21 nt, Hepatitis D virus
gcuucggucucccccaacucc

SEQ ID NO: 3365417 - RNA, 22 nt, Hepatitis D virus
gcuucggucucccccaacuccu

SEQ ID NO: 3365418 - RNA, 13 nt, Hepatitis D virus
gcuucuugcuuuc

SEQ ID NO: 3365419 - RNA, 17 nt, Hepatitis D virus
ggcuuccucccucuggg

SEQ ID NO: 3365420 - RNA, 22 nt, Hepatitis D virus
gggcgacccuuggggggaagga

SEQ ID NO: 3365421 - RNA, 20 nt, Hepatitis D virus
ggggaaauucauccgcuucu

SEQ ID NO: 3365422 - RNA, 14 nt, Hepatitis D virus
ggucuacucccucu

SEQ ID NO: 3365423 - RNA, 12 nt, Hepatitis D virus
gguuuccacucg

SEQ ID NO: 3365424 - RNA, 15 nt, Hepatitis D virus
guccuucuuuccucu

SEQ ID NO: 3365425 - RNA, 16 nt, Hepatitis D virus
guccuucuuuccucuu

SEQ ID NO: 3365426 - RNA, 19 nt, Hepatitis D virus
uacuccguguggcuuccuc

SEQ ID NO: 3365427 - RNA, 23 nt, Hepatitis D virus
ucccagccgacccucccuccucu

SEQ ID NO: 3365428 - RNA, 18 nt, Hepatitis D virus
ucccucuuuccccuuccu

SEQ ID NO: 3365429 - RNA, 20 nt, Hepatitis D virus
ucgcugaagggguccucugg

SEQ ID NO: 3365430 - RNA, 14 nt, Hepatitis D virus
ucguccccucucgg

SEQ ID NO: 3365431 - RNA, 14 nt, Hepatitis D virus
ucuccaccuccucg

SEQ ID NO: 3365432 - RNA, 19 nt, Hepatitis D virus
ucucgcgaugcgcucucug

SEQ ID NO: 3365433 - RNA, 15 nt, Hepatitis D virus
ucucuuccaccuucc

SEQ ID NO: 3365434 - RNA, 15 nt, Hepatitis D virus
uggcuuccucccucu

SEQ ID NO: 3365435 - RNA, 18 nt, Hepatitis D virus
ugggcauccgaaggagga

SEQ ID NO: 3365436 - RNA, 14 nt, Hepatitis D virus
ugggcgacccuugg

SEQ ID NO: 3365437 - RNA, 21 nt, Hepatitis D virus
uguggcuuccucccucugggg

SEQ ID NO: 3365438 - RNA, 21 nt, Hepatitis D virus
uucucucgcuucucucuggga

SEQ ID NO: 3365439 - RNA, 23 nt, Hepatitis D virus
ggagagccacuuuucucucgcuu

SEQ ID NO: 3365440 - RNA, 14 nt, Hepatitis D virus
gugauuucucuguu

SEQ ID NO: 3365441 - RNA, 13 nt, Hepatitis D virus
uccaccuucccuc

SEQ ID NO: 3365442 - RNA, 15 nt, Hepatitis D virus
ucucgcuucucucug

SEQ ID NO: 3365443 - RNA, 18 nt, Hepatitis D virus
ucuuugcuuuccuccucg

SEQ ID NO: 3365444 - RNA, 13 nt, Hepatitis D virus
ugcuuuccuccuc

SEQ ID NO: 3365445 - RNA, 14 nt, Hepatitis D virus
ugcuuuccuccucg

SEQ ID NO: 3365446 - RNA, 17 nt, Hepatitis D virus
uggcuaagggagagcca

SEQ ID NO: 3365447 - RNA, 21 nt, Hepatitis D virus
uucgcugaagggguccucugg

SEQ ID NO: 3365448 - RNA, 17 nt, Hepatitis D virus
uucucucugggaagcua

SEQ ID NO: 3365449 - RNA, 19 nt, Hepatitis D virus
cucucuuugcuuuccuccu

SEQ ID NO: 3365450 - RNA, 17 nt, Hepatitis D virus
cucuuuccccuuccuag

SEQ ID NO: 3365451 - RNA, 23 nt, Hepatitis D virus
cugcucucuuugcuuuccuccuc

SEQ ID NO: 3365452 - RNA, 15 nt, Hepatitis D virus
cuuccucccucuggg

SEQ ID NO: 3365453 - RNA, 13 nt, Hepatitis D virus
cuucuugcuuucu

SEQ ID NO: 3365454 - RNA, 17 nt, Hepatitis D virus
cuuugcuuuccuccucg

SEQ ID NO: 3365455 - RNA, 22 nt, Hepatitis D virus
gccagcgaggaggcugggacca

SEQ ID NO: 3365456 - RNA, 15 nt, Hepatitis D virus
gccgacccucccucc

SEQ ID NO: 3365457 - RNA, 20 nt, Hepatitis D virus
gccgacccucccuccucucc

SEQ ID NO: 3365458 - RNA, 13 nt, Hepatitis D virus
gccuccuucucuu

SEQ ID NO: 3365459 - RNA, 21 nt, Hepatitis D virus
gcuauggucuacucccucucg

SEQ ID NO: 3365460 - RNA, 15 nt, Hepatitis D virus
gcucucuuugcuuuc

SEQ ID NO: 3365461 - RNA, 12 nt, Hepatitis D virus
gguccucuggag

SEQ ID NO: 3365462 - RNA, 19 nt, Hepatitis D virus
ggucggcauggcaucucca

SEQ ID NO: 3365463 - RNA, 16 nt, Hepatitis D virus
guggcuuccucccucu

SEQ ID NO: 3365464 - RNA, 14 nt, Hepatitis D virus
uacucucaacccuu

SEQ ID NO: 3365465 - RNA, 17 nt, Hepatitis D virus
ucacucguccccucucg

SEQ ID NO: 3365466 - RNA, 16 nt, Hepatitis D virus
ucccagccgacccucc

SEQ ID NO: 3365467 - RNA, 15 nt, Hepatitis D virus
ucccauggcuccacu

SEQ ID NO: 3365468 - RNA, 21 nt, Hepatitis D virus
uccccgggauaagccucacuc

SEQ ID NO: 3365469 - RNA, 16 nt, Hepatitis D virus
uccuagcauccccucc

SEQ ID NO: 3365470 - RNA, 12 nt, Hepatitis D virus
uccucuggaggu

SEQ ID NO: 3365471 - RNA, 22 nt, Hepatitis D virus
ucuuuaccgacucaccccucuc

SEQ ID NO: 3365472 - RNA, 13 nt, Hepatitis D virus
ucuuuccccuucc

SEQ ID NO: 3365473 - RNA, 22 nt, Hepatitis D virus
ugcucucuuugcuuuccuccuc

SEQ ID NO: 3365474 - RNA, 14 nt, Hepatitis D virus
uggcaucuccaccu

SEQ ID NO: 3365475 - RNA, 17 nt, Hepatitis D virus
uggcuuccucccucugg

SEQ ID NO: 3365476 - RNA, 19 nt, Hepatitis D virus
uguggcuuccucccucugg

SEQ ID NO: 3365477 - RNA, 15 nt, Hepatitis D virus
aagggguccucugga

SEQ ID NO: 3365478 - RNA, 23 nt, Hepatitis D virus
aauucauccgcuucuugcuuucu

SEQ ID NO: 3365479 - RNA, 14 nt, Hepatitis D virus
acccuucgggccgg

SEQ ID NO: 3365480 - RNA, 17 nt, Hepatitis D virus
acuccguguggcuuccu

SEQ ID NO: 3365481 - RNA, 13 nt, Hepatitis D virus
agcauccccuccu

SEQ ID NO: 3365482 - RNA, 16 nt, Hepatitis D virus
agcggguuuccacucg

SEQ ID NO: 3365483 - RNA, 18 nt, Hepatitis D virus
aggcccgccuccuucucu

SEQ ID NO: 3365484 - RNA, 20 nt, Hepatitis D virus
aggggacgguccccucggaa

SEQ ID NO: 3365485 - RNA, 15 nt, Hepatitis D virus
agggguccucuggag

SEQ ID NO: 3365486 - RNA, 19 nt, Hepatitis D virus
auaaagcggguuuccacuc

SEQ ID NO: 3365487 - RNA, 20 nt, Hepatitis D virus
cccaccugcuagccccgcug

SEQ ID NO: 3365488 - RNA, 19 nt, Hepatitis D virus
cccagccgacccucccucc

SEQ ID NO: 3365489 - RNA, 20 nt, Hepatitis D virus
ccccucucgggcgcugaucu

SEQ ID NO: 3365490 - RNA, 22 nt, Hepatitis D virus
cccuccuaucgcuauggucuac

SEQ ID NO: 3365491 - RNA, 13 nt, Hepatitis D virus
cccucugggguac

SEQ ID NO: 3365492 - RNA, 18 nt, Hepatitis D virus
cccuucgggccggagugu

SEQ ID NO: 3365493 - RNA, 17 nt, Hepatitis D virus
ccgacccucccuccucu

SEQ ID NO: 3365494 - RNA, 16 nt, Hepatitis D virus
ccgccauuccugggcg

SEQ ID NO: 3365495 - RNA, 22 nt, Hepatitis D virus
ccgcugcucucuuugcuuuccu

SEQ ID NO: 3365496 - RNA, 16 nt, Hepatitis D virus
ccuagcauccccuccu

SEQ ID NO: 3365497 - RNA, 12 nt, Hepatitis D virus
ccucccucuggg

SEQ ID NO: 3365498 - RNA, 20 nt, Hepatitis D virus
ccucucgcgaugcgcucucu

SEQ ID NO: 3365499 - RNA, 22 nt, Hepatitis D virus
ccucucgcgaugcgcucucugu

SEQ ID NO: 3365500 - RNA, 23 nt, Hepatitis D virus
cgacccuuggggggaaggagcuu

SEQ ID NO: 3365501 - RNA, 15 nt, Hepatitis D virus
cgcuucggucucccc

SEQ ID NO: 3365502 - RNA, 18 nt, Hepatitis D virus
cggaauguugcccagccg

SEQ ID NO: 3365503 - RNA, 19 nt, Hepatitis D virus
cguccuucuuuccucuucg

SEQ ID NO: 3365504 - RNA, 21 nt, Hepatitis D virus
cgucucgcguccuucuuuccu

SEQ ID NO: 3365505 - RNA, 16 nt, Hepatitis D virus
cguguggcuuccuccc

SEQ ID NO: 3365506 - RNA, 19 nt, Hepatitis D virus
cuauggucuacucccucuc

SEQ ID NO: 3365507 - RNA, 14 nt, Hepatitis D virus
cucaccccucucgg

SEQ ID NO: 3365508 - RNA, 20 nt, Hepatitis D virus
cucucaacccuucgggccgg

SEQ ID NO: 3365509 - RNA, 13 nt, Hepatitis D virus
cucucgcuucucu

SEQ ID NO: 3365510 - RNA, 14 nt, Hepatitis D virus
cucucgcuucucuc

SEQ ID NO: 3365511 - RNA, 20 nt, Hepatitis D virus
cucucuuugcuuuccuccuc

SEQ ID NO: 3365512 - RNA, 23 nt, Hepatitis D virus
cucuucccagccgacccucccuc

SEQ ID NO: 3365513 - RNA, 15 nt, Hepatitis D virus
cugaucuauccuccc

SEQ ID NO: 3365514 - RNA, 23 nt, Hepatitis D virus
cuucgggucggcauggcaucucc

SEQ ID NO: 3365515 - RNA, 15 nt, Hepatitis D virus
cuugcuuucucuuuu

SEQ ID NO: 3365516 - RNA, 19 nt, Hepatitis D virus
aaucgggaggagcauccca

SEQ ID NO: 3365517 - RNA, 17 nt, Hepatitis D virus
accgacucaccccucuc

SEQ ID NO: 3365518 - RNA, 21 nt, Hepatitis D virus
accgaggggacgguccccucg

SEQ ID NO: 3365519 - RNA, 14 nt, Hepatitis D virus
acucaccccucucg

SEQ ID NO: 3365520 - RNA, 15 nt, Hepatitis D virus
acuccuagcaucccc

SEQ ID NO: 3365521 - RNA, 19 nt, Hepatitis D virus
agccgacccucccuccucu

SEQ ID NO: 3365522 - RNA, 21 nt, Hepatitis D virus
agccucacucguccccucucg

SEQ ID NO: 3365523 - RNA, 20 nt, Hepatitis D virus
aggcccgccuccuucucuuc

SEQ ID NO: 3365524 - RNA, 12 nt, Hepatitis D virus
aguguccuccaa

SEQ ID NO: 3365525 - RNA, 23 nt, Hepatitis D virus
auccgcuucuugcuuucucuuuu

SEQ ID NO: 3365526 - RNA, 21 nt, Hepatitis D virus
caccuccucgcgguccgaccu

SEQ ID NO: 3365527 - RNA, 15 nt, Hepatitis D virus
cacucguccccucuc

SEQ ID NO: 3365528 - RNA, 16 nt, Hepatitis D virus
cauggcaucuccaccu

SEQ ID NO: 3365529 - RNA, 19 nt, Hepatitis D virus
ccacuuuucucucgcuucu

SEQ ID NO: 3365530 - RNA, 22 nt, Hepatitis D virus
cccgccuccuucucuuccaccu

SEQ ID NO: 3365531 - RNA, 20 nt, Hepatitis D virus
cccucuuuccccuuccuaga

SEQ ID NO: 3365532 - RNA, 15 nt, Hepatitis D virus
ccgacccucccuccu

SEQ ID NO: 3365533 - RNA, 18 nt, Hepatitis D virus
ccgccuccuucucuucca

SEQ ID NO: 3365534 - RNA, 23 nt, Hepatitis D virus
ccgcugcucucuuugcuuuccuc

SEQ ID NO: 3365535 - RNA, 18 nt, Hepatitis D virus
ccguguggcuuccucccu

SEQ ID NO: 3365536 - RNA, 13 nt, Hepatitis D virus
acccucccuccuc

SEQ ID NO: 3365537 - RNA, 19 nt, Hepatitis D virus
acuccguguggcuuccucc

SEQ ID NO: 3365538 - RNA, 19 nt, Hepatitis D virus
agccucacucguccccucu

SEQ ID NO: 3365539 - RNA, 20 nt, Hepatitis D virus
agccucacucguccccucuc

SEQ ID NO: 3365540 - RNA, 20 nt, Hepatitis D virus
aucgggaggcccgccuccuu

SEQ ID NO: 3365541 - RNA, 15 nt, Hepatitis D virus
aucuccaccuccucg

SEQ ID NO: 3365542 - RNA, 11 nt, Hepatitis D virus
auuccugggcg

SEQ ID NO: 3365543 - RNA, 22 nt, Hepatitis D virus
caacuccuagcauccccuccua

SEQ ID NO: 3365544 - RNA, 13 nt, Hepatitis D virus
cacccaccugcua

SEQ ID NO: 3365545 - RNA, 20 nt, Hepatitis D virus
caccugcuagccccgcugcu

SEQ ID NO: 3365546 - RNA, 21 nt, Hepatitis D virus
cacucggauggcuaagggaga

SEQ ID NO: 3365547 - RNA, 18 nt, Hepatitis D virus
cagaguggggucccgcca

SEQ ID NO: 3365548 - RNA, 14 nt, Hepatitis D virus
cagguaagaaagga

SEQ ID NO: 3365549 - RNA, 14 nt, Hepatitis D virus
cauccgaaggagga

SEQ ID NO: 3365550 - RNA, 18 nt, Hepatitis D virus
cauggcaucuccaccucc

SEQ ID NO: 3365551 - RNA, 20 nt, Hepatitis D virus
ccaauguucaaagucacccc

SEQ ID NO: 3365552 - RNA, 18 nt, Hepatitis D virus
ccagccgacccucccucc

SEQ ID NO: 3365553 - RNA, 22 nt, Hepatitis D virus
cccaacuccuagcauccccucc

SEQ ID NO: 3365554 - RNA, 14 nt, Hepatitis D virus
cccgcugcucucuu

SEQ ID NO: 3365555 - RNA, 13 nt, Hepatitis D virus
cccucuuuccccu

SEQ ID NO: 3365556 - RNA, 23 nt, Hepatitis D virus
ccguguggcuuccucccucuggg

SEQ ID NO: 3365557 - RNA, 22 nt, Hepatitis D virus
ccugcagaguggggucccgcca

SEQ ID NO: 3365558 - RNA, 14 nt, Hepatitis D virus
cgcacguccacucg

SEQ ID NO: 3365559 - RNA, 12 nt, Hepatitis D virus
cgccgggccccu

SEQ ID NO: 3365560 - RNA, 20 nt, Hepatitis D virus
cgcugaagggguccucugga

SEQ ID NO: 3365561 - RNA, 13 nt, Hepatitis D virus
cgcuucucucugg

SEQ ID NO: 3365562 - RNA, 19 nt, Hepatitis D virus
cggaaucgggaggagcauc

SEQ ID NO: 3365563 - RNA, 13 nt, Hepatitis D virus
cgggagucugcua

SEQ ID NO: 3365564 - RNA, 21 nt, Hepatitis D virus
cguguggcuuccucccucugg

SEQ ID NO: 3365565 - RNA, 13 nt, Hepatitis D virus
cuacucccucucg

SEQ ID NO: 3365566 - RNA, 15 nt, Hepatitis D virus
cucaccccucucggg

SEQ ID NO: 3365567 - RNA, 19 nt, Hepatitis D virus
cucacucguccccucucgg

SEQ ID NO: 3365568 - RNA, 20 nt, Hepatitis D virus
cucacucguccccucucggg

SEQ ID NO: 3365569 - RNA, 20 nt, Hepatitis D virus
cuccaaacuuggccgccggg

SEQ ID NO: 3365570 - RNA, 21 nt, Hepatitis D virus
cuccguguggcuuccucccuc

SEQ ID NO: 3365571 - RNA, 23 nt, Hepatitis D virus
cuccguguggcuuccucccucug

SEQ ID NO: 3365572 - RNA, 23 nt, Hepatitis D virus
cuccucgcgguccgaccugggca

SEQ ID NO: 3365573 - RNA, 20 nt, Hepatitis D virus
cucgcgguccgaccugggca

SEQ ID NO: 3365574 - RNA, 11 nt, Hepatitis D virus
cucucuguucg

SEQ ID NO: 3365575 - RNA, 16 nt, Hepatitis D virus
cuuggccgccgggccc

SEQ ID NO: 3365576 - RNA, 11 nt, Hepatitis D virus
cuuugcuuucc

SEQ ID NO: 3365577 - RNA, 15 nt, Hepatitis D virus
cuuugcuuuccuccu

SEQ ID NO: 3365578 - RNA, 13 nt, Hepatitis D virus
gacccucccuccu

SEQ ID NO: 3365579 - RNA, 20 nt, Hepatitis D virus
gagccacuuuucucucgcuu

SEQ ID NO: 3365580 - RNA, 12 nt, Hepatitis D virus
gcccgccuccuu

SEQ ID NO: 3365581 - RNA, 17 nt, Hepatitis D virus
gcgaugcgcucucuguu

SEQ ID NO: 3365582 - RNA, 20 nt, Hepatitis D virus
gcguccuucuuuccucuucg

SEQ ID NO: 3365583 - RNA, 19 nt, Hepatitis D virus
gcuauggucuacucccucu

SEQ ID NO: 3365584 - RNA, 13 nt, Hepatitis D virus
gcugcucucuuug

SEQ ID NO: 3365585 - RNA, 15 nt, Hepatitis D virus
ggaggcccgccuccu

SEQ ID NO: 3365586 - RNA, 22 nt, Hepatitis D virus
gggaggcccgccuccuucucuu

SEQ ID NO: 3365587 - RNA, 12 nt, Hepatitis D virus
uacucccucucg

SEQ ID NO: 3365588 - RNA, 15 nt, Hepatitis D virus
ucgccauuaccgagg

SEQ ID NO: 3365589 - RNA, 15 nt, Hepatitis D virus
ucgggaggagcaucc

SEQ ID NO: 3365590 - RNA, 13 nt, Hepatitis D virus
ucucaacccuucg

SEQ ID NO: 3365591 - RNA, 13 nt, Hepatitis D virus
ucuccaccuccuc

SEQ ID NO: 3365592 - RNA, 15 nt, Hepatitis D virus
ugaagggguccucug

SEQ ID NO: 3365593 - RNA, 22 nt, Hepatitis D virus
ugcccagccggcgccagcgagg

SEQ ID NO: 3365594 - RNA, 22 nt, Hepatitis D virus
uggggacgauaagucgaguucc

SEQ ID NO: 3365595 - RNA, 23 nt, Hepatitis D virus
uuccccgggauaagccucacucg

SEQ ID NO: 3365596 - RNA, 14 nt, Hepatitis D virus
uucucuuccaccuu

SEQ ID NO: 3365597 - RNA, 22 nt, Hepatitis D virus
uuuaccgacucaccccucucgg

SEQ ID NO: 3365598 - RNA, 16 nt, Hepatitis D virus
uuugcuuuccuccucg

SEQ ID NO: 3365599 - RNA, 22 nt, Hepatitis D virus
ccguguggcuuccucccucugg

SEQ ID NO: 3365600 - RNA, 16 nt, Hepatitis D virus
ccucacucguccccuc

SEQ ID NO: 3365601 - RNA, 19 nt, Hepatitis D virus
ccugcagaguggggucccg

SEQ ID NO: 3365602 - RNA, 22 nt, Hepatitis D virus
ccuucucuuccaccuucccucu

SEQ ID NO: 3365603 - RNA, 15 nt, Hepatitis D virus
cgccauuccugggcg

SEQ ID NO: 3365604 - RNA, 17 nt, Hepatitis D virus
cgcguccuucuuuccuc

SEQ ID NO: 3365605 - RNA, 16 nt, Hepatitis D virus
cuagccccgcugcucu

SEQ ID NO: 3365606 - RNA, 21 nt, Hepatitis D virus
cuagccccgcugcucucuuug

SEQ ID NO: 3365607 - RNA, 15 nt, Hepatitis D virus
cucacucguccccuc

SEQ ID NO: 3365608 - RNA, 16 nt, Hepatitis D virus
cuccuagcauccccuc

SEQ ID NO: 3365609 - RNA, 18 nt, Hepatitis D virus
cuccuucucuuccaccuu

SEQ ID NO: 3365610 - RNA, 19 nt, Hepatitis D virus
cucgcgaugcgcucucugu

SEQ ID NO: 3365611 - RNA, 18 nt, Hepatitis D virus
cucgcguccuucuuuccu

SEQ ID NO: 3365612 - RNA, 21 nt, Hepatitis D virus
cucuggaggugauuucucugu

SEQ ID NO: 3365613 - RNA, 18 nt, Hepatitis D virus
cucuuugcuuuccuccuc

SEQ ID NO: 3365614 - RNA, 17 nt, Hepatitis D virus
cucuuuuuuccuucuug

SEQ ID NO: 3365615 - RNA, 18 nt, Hepatitis D virus
cugaagggguccucugga

SEQ ID NO: 3365616 - RNA, 14 nt, Hepatitis D virus
cuucucucugggaa

SEQ ID NO: 3365617 - RNA, 16 nt, Hepatitis D virus
cuuucucuuuuuuccu

SEQ ID NO: 3365618 - RNA, 19 nt, Hepatitis D virus
gaggacgcacguccacucg

SEQ ID NO: 3365619 - RNA, 16 nt, Hepatitis D virus
gccauuccugggcgac

SEQ ID NO: 3365620 - RNA, 18 nt, Hepatitis D virus
gccgccgggccccucgga

SEQ ID NO: 3365621 - RNA, 13 nt, Hepatitis D virus
gccgggccccucg

SEQ ID NO: 3365622 - RNA, 19 nt, Hepatitis D virus
gcugcucucuuugcuuucc

SEQ ID NO: 3365623 - RNA, 15 nt, Hepatitis D virus
gcuuccucccucugg

SEQ ID NO: 3365624 - RNA, 16 nt, Hepatitis D virus
gcuuccucccucuggg

SEQ ID NO: 3365625 - RNA, 20 nt, Hepatitis E virus
cccggucagccgucuggccg

SEQ ID NO: 3365626 - RNA, 14 nt, Hepatitis E virus
cccuucuuucuguu

SEQ ID NO: 3365627 - RNA, 18 nt, Hepatitis E virus
ccgaccacucggcuccgc

SEQ ID NO: 3365628 - RNA, 14 nt, Hepatitis E virus
ccgccgcugccuca

SEQ ID NO: 3365629 - RNA, 13 nt, Hepatitis E virus
ccgcgcucccuga

SEQ ID NO: 3365630 - RNA, 17 nt, Hepatitis E virus
ccggagugccgcccccu

SEQ ID NO: 3365631 - RNA, 20 nt, Hepatitis E virus
ccggcccaugacaccccgcc

SEQ ID NO: 3365632 - RNA, 13 nt, Hepatitis E virus
ccuuccccagccc

SEQ ID NO: 3365633 - RNA, 19 nt, Hepatitis E virus
cgagcuaaugaugugcuuu

SEQ ID NO: 3365634 - RNA, 14 nt, Hepatitis E virus
cgagcucaccacca

SEQ ID NO: 3365635 - RNA, 15 nt, Hepatitis E virus
cgccaccgcccgguc

SEQ ID NO: 3365636 - RNA, 22 nt, Hepatitis E virus
cgcccccuuggccuccagggcu

SEQ ID NO: 3365637 - RNA, 14 nt, Hepatitis E virus
cgccccgccgcugc

SEQ ID NO: 3365638 - RNA, 16 nt, Hepatitis E virus
cgcccggucagccguc

SEQ ID NO: 3365639 - RNA, 20 nt, Hepatitis E virus
cgcccggucagccgucuggc

SEQ ID NO: 3365640 - RNA, 17 nt, Hepatitis E virus
cgccgugggcggcgcag

SEQ ID NO: 3365641 - RNA, 15 nt, Hepatitis E virus
cgcuucuaccccucc

SEQ ID NO: 3365642 - RNA, 15 nt, Hepatitis E virus
gaccaccaccacccc

SEQ ID NO: 3365643 - RNA, 19 nt, Hepatitis E virus
gaccaggcccagcgccccg

SEQ ID NO: 3365644 - RNA, 13 nt, Hepatitis E virus
gacucugugaccu

SEQ ID NO: 3365645 - RNA, 17 nt, Hepatitis E virus
gagcuaaugaugugcuu

SEQ ID NO: 3365646 - RNA, 15 nt, Hepatitis E virus
gaggaggaggccacc

SEQ ID NO: 3365647 - RNA, 18 nt, Hepatitis E virus
gaggcagguacuacuaaa

SEQ ID NO: 3365648 - RNA, 15 nt, Hepatitis E virus
gaguaugaccagucc

SEQ ID NO: 3365649 - RNA, 21 nt, Hepatitis E virus
gcagaugggacugccgagcuc

SEQ ID NO: 3365650 - RNA, 23 nt, Hepatitis E virus
gcccaugacaccccgccagugcc

SEQ ID NO: 3365651 - RNA, 22 nt, Hepatitis E virus
gcccccgaugucaccgcugcgg

SEQ ID NO: 3365652 - RNA, 17 nt, Hepatitis E virus
gccccgucgucucagcc

SEQ ID NO: 3365653 - RNA, 17 nt, Hepatitis E virus
gcccgcgccaccgcccg

SEQ ID NO: 3365654 - RNA, 20 nt, Hepatitis E virus
gcccgcuucuaccccuccag

SEQ ID NO: 3365655 - RNA, 13 nt, Hepatitis E virus
gccuaugcugccc

SEQ ID NO: 3365656 - RNA, 20 nt, Hepatitis E virus
gcggucgcuccggcccauga

SEQ ID NO: 3365657 - RNA, 22 nt, Hepatitis E virus
gcuccgcgguaagcucuccuuu

SEQ ID NO: 3365658 - RNA, 17 nt, Hepatitis E virus
gcucgacuggaccaagg

SEQ ID NO: 3365659 - RNA, 17 nt, Hepatitis E virus
gcugauucucagcccuu

SEQ ID NO: 3365660 - RNA, 19 nt, Hepatitis E virus
gcugccgaguaugaccagu

SEQ ID NO: 3365661 - RNA, 17 nt, Hepatitis E virus
gcuggggccgcgccgcu

SEQ ID NO: 3365662 - RNA, 17 nt, Hepatitis E virus
gcuuauuucucauuucu

SEQ ID NO: 3365663 - RNA, 15 nt, Hepatitis E virus
ggccaccucuggucu

SEQ ID NO: 3365664 - RNA, 20 nt, Hepatitis E virus
ggcccaugacaccccgccag

SEQ ID NO: 3365665 - RNA, 21 nt, Hepatitis E virus
ggccgcgccgcuaaccgcggu

SEQ ID NO: 3365666 - RNA, 19 nt, Hepatitis E virus
ggcgcgcaggccguugccc

SEQ ID NO: 3365667 - RNA, 19 nt, Hepatitis E virus
ggucgcccccuuuccacca

SEQ ID NO: 3365668 - RNA, 21 nt, Hepatitis E virus
ggucgcuccggcccaugacac

SEQ ID NO: 3365669 - RNA, 13 nt, Hepatitis E virus
guccuccgagcua

SEQ ID NO: 3365670 - RNA, 20 nt, Hepatitis E virus
gucgcucgacuggaccaagg

SEQ ID NO: 3365671 - RNA, 19 nt, Hepatitis E virus
gucguagaccuaccacagc

SEQ ID NO: 3365672 - RNA, 19 nt, Hepatitis E virus
caccgcugcggccggggcu

SEQ ID NO: 3365673 - RNA, 18 nt, Hepatitis E virus
cagccccaucgcgccccu

SEQ ID NO: 3365674 - RNA, 20 nt, Hepatitis E virus
cagcggcgguuccggcggug

SEQ ID NO: 3365675 - RNA, 17 nt, Hepatitis E virus
caucggguugcuauuuc

SEQ ID NO: 3365676 - RNA, 19 nt, Hepatitis E virus
caucggguugcuauuucca

SEQ ID NO: 3365677 - RNA, 15 nt, Hepatitis E virus
caugucuucugcugc

SEQ ID NO: 3365678 - RNA, 13 nt, Hepatitis E virus
cauuucugcguuc

SEQ ID NO: 3365679 - RNA, 20 nt, Hepatitis E virus
ccacagaccaccaccacccc

SEQ ID NO: 3365680 - RNA, 13 nt, Hepatitis E virus
ccacuagccuggg

SEQ ID NO: 3365681 - RNA, 17 nt, Hepatitis E virus
ccagucuaugucucuga

SEQ ID NO: 3365682 - RNA, 13 nt, Hepatitis E virus
ccauggacuaccc

SEQ ID NO: 3365683 - RNA, 19 nt, Hepatitis E virus
ccccgguaauaccaacacg

SEQ ID NO: 3365684 - RNA, 17 nt, Hepatitis E virus
ccccuauauucauccaa

SEQ ID NO: 3365685 - RNA, 14 nt, Hepatitis E virus
ccccuucuuucugu

SEQ ID NO: 3365686 - RNA, 15 nt, Hepatitis E virus
ccccuuuccaccacc

SEQ ID NO: 3365687 - RNA, 19 nt, Hepatitis E virus
ccccuuuucuguccuccga

SEQ ID NO: 3365688 - RNA, 22 nt, Hepatitis E virus
cccgaugucaccgcugcggccg

SEQ ID NO: 3365689 - RNA, 14 nt, Hepatitis E virus
cccgcccgaccacu

SEQ ID NO: 3365690 - RNA, 22 nt, Hepatitis E virus
cccgcugguccccaacgcuguu

SEQ ID NO: 3365691 - RNA, 21 nt, Hepatitis E virus
cccgcuucuaccccuccagga

SEQ ID NO: 3365692 - RNA, 16 nt, Hepatitis E virus
cccggcauagccuccg

SEQ ID NO: 3365693 - RNA, 17 nt, Hepatitis E virus
acaucuguagagaaugc

SEQ ID NO: 3365694 - RNA, 19 nt, Hepatitis E virus
accaaccccuucgcccccg

SEQ ID NO: 3365695 - RNA, 22 nt, Hepatitis E virus
accaacugcucguugagaaugc

SEQ ID NO: 3365696 - RNA, 12 nt, Hepatitis E virus
accgcugccgag

SEQ ID NO: 3365697 - RNA, 15 nt, Hepatitis E virus
acgcuguugguggcu

SEQ ID NO: 3365698 - RNA, 17 nt, Hepatitis E virus
acgucguagaccuacca

SEQ ID NO: 3365699 - RNA, 15 nt, Hepatitis E virus
acucugugaccuugg

SEQ ID NO: 3365700 - RNA, 17 nt, Hepatitis E virus
acugcuagugaccaacu

SEQ ID NO: 3365701 - RNA, 12 nt, Hepatitis E virus
acuggaccaagg

SEQ ID NO: 3365702 - RNA, 24 nt, Hepatitis E virus
acuuacaccacuagccugggugcu

SEQ ID NO: 3365703 - RNA, 21 nt, Hepatitis E virus
aguaccggguuguucgugcua

SEQ ID NO: 3365704 - RNA, 17 nt, Hepatitis E virus
aucuccccuuaccucuu

SEQ ID NO: 3365705 - RNA, 20 nt, Hepatitis E virus
aucucguucuggccacagac

SEQ ID NO: 3365706 - RNA, 17 nt, Hepatitis E virus
augcccaguaccggguu

SEQ ID NO: 3365707 - RNA, 21 nt, Hepatitis E virus
augcugcccgcgccaccgccc

SEQ ID NO: 3365708 - RNA, 14 nt, Hepatitis E virus
augggacugccgag

SEQ ID NO: 3365709 - RNA, 12 nt, Hepatitis E virus
auguugacuccc

SEQ ID NO: 3365710 - RNA, 18 nt, Hepatitis E virus
auuucucauuucugcguu

SEQ ID NO: 3365711 - RNA, 14 nt, Hepatitis E virus
caccaccacggcug

SEQ ID NO: 3365712 - RNA, 14 nt, Hepatitis E virus
caccgcccggucag

SEQ ID NO: 3365713 - RNA, 12 nt, Hepatitis E virus
cacucugcgcua

SEQ ID NO: 3365714 - RNA, 20 nt, Hepatitis E virus
cacugcccgucaccgccuuc

SEQ ID NO: 3365715 - RNA, 15 nt, Hepatitis E virus
cagcgccccgccgcu

SEQ ID NO: 3365716 - RNA, 16 nt, Hepatitis E virus
cagcgccccgccgcug

SEQ ID NO: 3365717 - RNA, 23 nt, Hepatitis E virus
gugccccccuucuuucuguugcu

SEQ ID NO: 3365718 - RNA, 16 nt, Hepatitis E virus
uacaaacuugguucuu

SEQ ID NO: 3365719 - RNA, 21 nt, Hepatitis E virus
uacaccacuagccugggugcu

SEQ ID NO: 3365720 - RNA, 17 nt, Hepatitis E virus
uacgccgcuccucuuag

SEQ ID NO: 3365721 - RNA, 19 nt, Hepatitis E virus
uacggcucuucgaccggcc

SEQ ID NO: 3365722 - RNA, 23 nt, Hepatitis E virus
uacggcucuucgaccggcccagu

SEQ ID NO: 3365723 - RNA, 16 nt, Hepatitis E virus
uacuccagcacugccc

SEQ ID NO: 3365724 - RNA, 22 nt, Hepatitis E virus
uagaccuaccacagcuggggcc

SEQ ID NO: 3365725 - RNA, 13 nt, Hepatitis E virus
uagccccccacuc

SEQ ID NO: 3365726 - RNA, 15 nt, Hepatitis E virus
ucaccaccacggcug

SEQ ID NO: 3365727 - RNA, 20 nt, Hepatitis E virus
uccaucucguucuggccaca

SEQ ID NO: 3365728 - RNA, 12 nt, Hepatitis E virus
uccugccgcucc

SEQ ID NO: 3365729 - RNA, 14 nt, Hepatitis E virus
ucgaccggcccagu

SEQ ID NO: 3365730 - RNA, 14 nt, Hepatitis E virus
ucggcuccgcuugg

SEQ ID NO: 3365731 - RNA, 21 nt, Hepatitis E virus
ucguugagaaugccgcugggc

SEQ ID NO: 3365732 - RNA, 17 nt, Hepatitis E virus
ucuaauuaugcccagua

SEQ ID NO: 3365733 - RNA, 16 nt, Hepatitis E virus
ucuacugucgcugagc

SEQ ID NO: 3365734 - RNA, 22 nt, Hepatitis E virus
ucucgccccgucgucucagcca

SEQ ID NO: 3365735 - RNA, 12 nt, Hepatitis E virus
ucugcugcgccc

SEQ ID NO: 3365736 - RNA, 20 nt, Hepatitis E virus
ucuguagagaaugcucagca

SEQ ID NO: 3365737 - RNA, 19 nt, Hepatitis E virus
ucuguugcuuauuucucau

SEQ ID NO: 3365738 - RNA, 14 nt, Hepatitis E virus
ucuuccguggccac

SEQ ID NO: 3365739 - RNA, 12 nt, Hepatitis E virus
ugacaccccgcc

SEQ ID NO: 3365740 - RNA, 14 nt, Hepatitis E virus
ugaccaggcccagc

SEQ ID NO: 3365741 - RNA, 21 nt, Hepatitis E virus
ugaccuugguuaauguagcga

SEQ ID NO: 3365742 - RNA, 18 nt, Hepatitis E virus
ugacucugugaccuuggu

SEQ ID NO: 3365743 - RNA, 16 nt, Hepatitis E virus
ugcccaguaccggguu

SEQ ID NO: 3365744 - RNA, 14 nt, Hepatitis E virus
ugccuaugcugccc

SEQ ID NO: 3365745 - RNA, 17 nt, Hepatitis E virus
ugcuguuuuagcccccc

SEQ ID NO: 3365746 - RNA, 10 nt, Hepatitis E virus
uggcuacaga

SEQ ID NO: 3365747 - RNA, 15 nt, Hepatitis E virus
uggggugaccgggcu

SEQ ID NO: 3365748 - RNA, 23 nt, Hepatitis E virus
uggucgcccccuuuccaccaccc

SEQ ID NO: 3365749 - RNA, 18 nt, Hepatitis E virus
uguagagaaugcucagca

SEQ ID NO: 3365750 - RNA, 14 nt, Hepatitis E virus
uguugguggcuacg

SEQ ID NO: 3365751 - RNA, 12 nt, Hepatitis E virus
uuccccagcccc

SEQ ID NO: 3365752 - RNA, 18 nt, Hepatitis E virus
uucucauuucugcguucc

SEQ ID NO: 3365753 - RNA, 12 nt, Hepatitis E virus
uugcuauuucca

SEQ ID NO: 3365754 - RNA, 16 nt, Hepatitis E virus
uugcuuauuucucauu

SEQ ID NO: 3365755 - RNA, 20 nt, Hepatitis E virus
uuucuguugcuuauuucuca

SEQ ID NO: 3365756 - RNA, 20 nt, Hepatitis E virus
gcgccaccgcccggucagcc

SEQ ID NO: 3365757 - RNA, 21 nt, Hepatitis E virus
gcuaaccgcggucgcuccggc

SEQ ID NO: 3365758 - RNA, 18 nt, Hepatitis E virus
gcuaaugaugugcuuugg

SEQ ID NO: 3365759 - RNA, 16 nt, Hepatitis E virus
gcuacccgcuucauga

SEQ ID NO: 3365760 - RNA, 14 nt, Hepatitis E virus
gcuauuuccacuua

SEQ ID NO: 3365761 - RNA, 19 nt, Hepatitis E virus
gcuccgcuuggcgugacca

SEQ ID NO: 3365762 - RNA, 14 nt, Hepatitis E virus
gcuccggcccauga

SEQ ID NO: 3365763 - RNA, 20 nt, Hepatitis E virus
gcucgacuggaccaagguca

SEQ ID NO: 3365764 - RNA, 15 nt, Hepatitis E virus
gcucguugagaaugc

SEQ ID NO: 3365765 - RNA, 16 nt, Hepatitis E virus
gcugagcuucagcgcc

SEQ ID NO: 3365766 - RNA, 18 nt, Hepatitis E virus
gcuuggcgugaccaggcc

SEQ ID NO: 3365767 - RNA, 15 nt, Hepatitis E virus
gcuugugccccccuu

SEQ ID NO: 3365768 - RNA, 18 nt, Hepatitis E virus
ggacugccgagcucacca

SEQ ID NO: 3365769 - RNA, 20 nt, Hepatitis E virus
ggagugccgcccccuuggcc

SEQ ID NO: 3365770 - RNA, 18 nt, Hepatitis E virus
ggccacagaccaccacca

SEQ ID NO: 3365771 - RNA, 13 nt, Hepatitis E virus
ggcgagccgacug

SEQ ID NO: 3365772 - RNA, 13 nt, Hepatitis E virus
ggcugguggccag

SEQ ID NO: 3365773 - RNA, 16 nt, Hepatitis E virus
guagaccuaccacagc

SEQ ID NO: 3365774 - RNA, 21 nt, Hepatitis E virus
gucucccguuacuccagcacu

SEQ ID NO: 3365775 - RNA, 18 nt, Hepatitis E virus
gugaccaggcccagcgcc

SEQ ID NO: 3365776 - RNA, 19 nt, Hepatitis E virus
guuccgcaaccucaccccc

SEQ ID NO: 3365777 - RNA, 19 nt, Hepatitis E virus
uaaccuaucaacaucuccc

SEQ ID NO: 3365778 - RNA, 15 nt, Hepatitis E virus
uaccccuccaggacg

SEQ ID NO: 3365779 - RNA, 19 nt, Hepatitis E virus
uaccucuuccguggccacc

SEQ ID NO: 3365780 - RNA, 18 nt, Hepatitis E virus
uacgccgcuccucuuagc

SEQ ID NO: 3365781 - RNA, 17 nt, Hepatitis E virus
uagaccuaccacagcug

SEQ ID NO: 3365782 - RNA, 20 nt, Hepatitis E virus
ucagccgucuggccgccgcc

SEQ ID NO: 3365783 - RNA, 14 nt, Hepatitis E virus
uccgcgcucccuga

SEQ ID NO: 3365784 - RNA, 14 nt, Hepatitis E virus
uccucauguuucug

SEQ ID NO: 3365785 - RNA, 21 nt, Hepatitis E virus
ucgcucgacuggaccaagguc

SEQ ID NO: 3365786 - RNA, 15 nt, Hepatitis E virus
ucuaccccuccagga

SEQ ID NO: 3365787 - RNA, 21 nt, Hepatitis E virus
ucuccaucucguucuggccac

SEQ ID NO: 3365788 - RNA, 17 nt, Hepatitis E virus
ucucccguuacuccagc

SEQ ID NO: 3365789 - RNA, 19 nt, Hepatitis E virus
ucucccguuacuccagcac

SEQ ID NO: 3365790 - RNA, 15 nt, Hepatitis E virus
ucucugacucuguga

SEQ ID NO: 3365791 - RNA, 23 nt, Hepatitis E virus
ucugccuaugcugcccgcgccac

SEQ ID NO: 3365792 - RNA, 19 nt, Hepatitis E virus
ucugcugcgcccauggguu

SEQ ID NO: 3365793 - RNA, 19 nt, Hepatitis E virus
ucuggggugaccgggcuga

SEQ ID NO: 3365794 - RNA, 17 nt, Hepatitis E virus
ugaccaggcccagcgcc

SEQ ID NO: 3365795 - RNA, 12 nt, Hepatitis E virus
ugaccuugguua

SEQ ID NO: 3365796 - RNA, 21 nt, Hepatitis E virus
ugccccccuucuuucuguugc

SEQ ID NO: 3365797 - RNA, 23 nt, Hepatitis E virus
ugccgcccccuuggccuccaggg

SEQ ID NO: 3365798 - RNA, 18 nt, Hepatitis E virus
ugcugacacccugcuugg

SEQ ID NO: 3365799 - RNA, 20 nt, Hepatitis E virus
ugcuuauuucucauuucugc

SEQ ID NO: 3365800 - RNA, 17 nt, Hepatitis E virus
ugcuugugccccccuuc

SEQ ID NO: 3365801 - RNA, 15 nt, Hepatitis E virus
uggcgugaccaggcc

SEQ ID NO: 3365802 - RNA, 18 nt, Hepatitis E virus
uuccaccacccagcagua

SEQ ID NO: 3365803 - RNA, 15 nt, Hepatitis E virus
uuccgcgcucccuga

SEQ ID NO: 3365804 - RNA, 16 nt, Hepatitis E virus
uugcuguugcuccuca

SEQ ID NO: 3365805 - RNA, 17 nt, Hepatitis E virus
uuuacgccgcuccucuu

SEQ ID NO: 3365806 - RNA, 17 nt, Hepatitis E virus
cuguugcuuauuucuca

SEQ ID NO: 3365807 - RNA, 16 nt, Hepatitis E virus
cuucuaccccuccagg

SEQ ID NO: 3365808 - RNA, 14 nt, Hepatitis E virus
cuuggcgugaccag

SEQ ID NO: 3365809 - RNA, 16 nt, Hepatitis E virus
gaccaggcccagcgcc

SEQ ID NO: 3365810 - RNA, 14 nt, Hepatitis E virus
gaccaguccacuua

SEQ ID NO: 3365811 - RNA, 13 nt, Hepatitis E virus
gagcucaccacca

SEQ ID NO: 3365812 - RNA, 20 nt, Hepatitis E virus
gaguaugaccaguccacuua

SEQ ID NO: 3365813 - RNA, 14 nt, Hepatitis E virus
gccacagaccacca

SEQ ID NO: 3365814 - RNA, 16 nt, Hepatitis E virus
gccacagaccaccacc

SEQ ID NO: 3365815 - RNA, 12 nt, Hepatitis E virus
gccaccucuggu

SEQ ID NO: 3365816 - RNA, 15 nt, Hepatitis E virus
gcccggagugccgcc

SEQ ID NO: 3365817 - RNA, 16 nt, Hepatitis E virus
gcccucgggcuguugg

SEQ ID NO: 3365818 - RNA, 22 nt, Hepatitis E virus
gccuacacuaucguaaccaagg

SEQ ID NO: 3365819 - RNA, 18 nt, Hepatitis E virus
gcgaccggcgcgcaggcc

SEQ ID NO: 3365820 - RNA, 16 nt, Hepatitis E virus
gcgccccgccgcugcc

SEQ ID NO: 3365821 - RNA, 22 nt, Hepatitis E virus
gcuaaccgcggucgcuccggcc

SEQ ID NO: 3365822 - RNA, 19 nt, Hepatitis E virus
gcucuucgaccggcccagu

SEQ ID NO: 3365823 - RNA, 21 nt, Hepatitis E virus
gcuugugccccccuucuuucu

SEQ ID NO: 3365824 - RNA, 18 nt, Hepatitis E virus
gcuuucucucaccgcugc

SEQ ID NO: 3365825 - RNA, 19 nt, Hepatitis E virus
ggacuacccugcccgcgcc

SEQ ID NO: 3365826 - RNA, 19 nt, Hepatitis E virus
gggcuguuggacuuugccc

SEQ ID NO: 3365827 - RNA, 18 nt, Hepatitis E virus
ggguuguucgugcuacaa

SEQ ID NO: 3365828 - RNA, 23 nt, Hepatitis E virus
gguauugcaaucccgcaugacau

SEQ ID NO: 3365829 - RNA, 17 nt, Hepatitis E virus
gguugcuauuuccacuu

SEQ ID NO: 3365830 - RNA, 16 nt, Hepatitis E virus
gucagccgucuggccg

SEQ ID NO: 3365831 - RNA, 18 nt, Hepatitis E virus
gucagccgucuggccgcc

SEQ ID NO: 3365832 - RNA, 16 nt, Hepatitis E virus
guccugccgcuccgcg

SEQ ID NO: 3365833 - RNA, 17 nt, Hepatitis E virus
gucuuguuaugcuuugc

SEQ ID NO: 3365834 - RNA, 18 nt, Hepatitis E virus
gugccccccuucuuucug

SEQ ID NO: 3365835 - RNA, 14 nt, Hepatitis E virus
guugcuauuuccac

SEQ ID NO: 3365836 - RNA, 14 nt, Hepatitis E virus
uaacaccacugcua

SEQ ID NO: 3365837 - RNA, 17 nt, Hepatitis E virus
uaccauggacuacccug

SEQ ID NO: 3365838 - RNA, 14 nt, Hepatitis E virus
uacuccagcacugc

SEQ ID NO: 3365839 - RNA, 15 nt, Hepatitis E virus
uagcgcuuacccugu

SEQ ID NO: 3365840 - RNA, 12 nt, Hepatitis E virus
uaguccagcccg

SEQ ID NO: 3365841 - RNA, 14 nt, Hepatitis E virus
uauuucucauuucu

SEQ ID NO: 3365842 - RNA, 16 nt, Hepatitis E virus
uccgcgcucccugaaa

SEQ ID NO: 3365843 - RNA, 14 nt, Hepatitis E virus
uccugccgcuccgc

SEQ ID NO: 3365844 - RNA, 11 nt, Hepatitis E virus
ucgcccccuuu

SEQ ID NO: 3365845 - RNA, 20 nt, Hepatitis E virus
ucucccguuacuccagcacu

SEQ ID NO: 3365846 - RNA, 13 nt, Hepatitis E virus
ugauucucagccc

SEQ ID NO: 3365847 - RNA, 14 nt, Hepatitis E virus
ugcgcccauggguu

SEQ ID NO: 3365848 - RNA, 14 nt, Hepatitis E virus
ugcuccucauguuu

SEQ ID NO: 3365849 - RNA, 12 nt, Hepatitis E virus
ugcuugugcccc

SEQ ID NO: 3365850 - RNA, 15 nt, Hepatitis E virus
ugcuugugccccccu

SEQ ID NO: 3365851 - RNA, 17 nt, Hepatitis E virus
ugucgcugagcuucagc

SEQ ID NO: 3365852 - RNA, 15 nt, Hepatitis E virus
uucuuucuguugcuu

SEQ ID NO: 3365853 - RNA, 17 nt, Hepatitis E virus
uuuccaccacccagcag

SEQ ID NO: 3365854 - RNA, 15 nt, Hepatitis E virus
acugucgcugagcuu

SEQ ID NO: 3365855 - RNA, 20 nt, Hepatitis E virus
agaccuucuuuguccugccg

SEQ ID NO: 3365856 - RNA, 15 nt, Hepatitis E virus
agccccccacucugc

SEQ ID NO: 3365857 - RNA, 18 nt, Hepatitis E virus
agcgccccgccgcugccu

SEQ ID NO: 3365858 - RNA, 14 nt, Hepatitis E virus
agcuguucuacucu

SEQ ID NO: 3365859 - RNA, 12 nt, Hepatitis E virus
aggaggccaccu

SEQ ID NO: 3365860 - RNA, 19 nt, Hepatitis E virus
aguauucaaagaccuucuu

SEQ ID NO: 3365861 - RNA, 22 nt, Hepatitis E virus
agugccugauguugacucccgc

SEQ ID NO: 3365862 - RNA, 18 nt, Hepatitis E virus
auaccggugcccucgggc

SEQ ID NO: 3365863 - RNA, 15 nt, Hepatitis E virus
aucuguagagaaugc

SEQ ID NO: 3365864 - RNA, 15 nt, Hepatitis E virus
cacagaccaccacca

SEQ ID NO: 3365865 - RNA, 13 nt, Hepatitis E virus
caccaccacggcu

SEQ ID NO: 3365866 - RNA, 13 nt, Hepatitis E virus
caccacuagccug

SEQ ID NO: 3365867 - RNA, 14 nt, Hepatitis E virus
caccccgccagugc

SEQ ID NO: 3365868 - RNA, 21 nt, Hepatitis E virus
caccuuccccagccccaucgc

SEQ ID NO: 3365869 - RNA, 14 nt, Hepatitis E virus
cacucggcuccgcu

SEQ ID NO: 3365870 - RNA, 15 nt, Hepatitis E virus
cacucggcuccgcuu

SEQ ID NO: 3365871 - RNA, 16 nt, Hepatitis E virus
cacugcuagugaccaa

SEQ ID NO: 3365872 - RNA, 18 nt, Hepatitis E virus
cacuuacaccacuagccu

SEQ ID NO: 3365873 - RNA, 16 nt, Hepatitis E virus
cagaccaccaccaccc

SEQ ID NO: 3365874 - RNA, 14 nt, Hepatitis E virus
cagcacugcccguc

SEQ ID NO: 3365875 - RNA, 14 nt, Hepatitis E virus
cagggcugugcuuu

SEQ ID NO: 3365876 - RNA, 22 nt, Hepatitis E virus
caguauucaaagaccuucuuug

SEQ ID NO: 3365877 - RNA, 23 nt, Hepatitis E virus
ccacagcuggggccgcgccgcua

SEQ ID NO: 3365878 - RNA, 20 nt, Hepatitis E virus
ccacggcugcuacccgcuuc

SEQ ID NO: 3365879 - RNA, 12 nt, Hepatitis E virus
ccacuagccugg

SEQ ID NO: 3365880 - RNA, 19 nt, Hepatitis E virus
ccacucggcuccgcuuggc

SEQ ID NO: 3365881 - RNA, 18 nt, Hepatitis E virus
ccauggguucgcgaccau

SEQ ID NO: 3365882 - RNA, 20 nt, Hepatitis E virus
cccagccccaucgcgccccu

SEQ ID NO: 3365883 - RNA, 21 nt, Hepatitis E virus
cccagcgccccgccgcugccu

SEQ ID NO: 3365884 - RNA, 20 nt, Hepatitis E virus
cccaucgcgccccuuuucug

SEQ ID NO: 3365885 - RNA, 22 nt, Hepatitis E virus
ccccaucgcgccccuuuucugu

SEQ ID NO: 3365886 - RNA, 20 nt, Hepatitis E virus
cccccuuggccuccagggcu

SEQ ID NO: 3365887 - RNA, 15 nt, Hepatitis E virus
cccgucaccgccuuc

SEQ ID NO: 3365888 - RNA, 14 nt, Hepatitis E virus
cccuuggccuccag

SEQ ID NO: 3365889 - RNA, 16 nt, Hepatitis E virus
cccuuggccuccaggg

SEQ ID NO: 3365890 - RNA, 11 nt, Hepatitis E virus
ccgcccccuug

SEQ ID NO: 3365891 - RNA, 13 nt, Hepatitis E virus
ccgcgccaccgcc

SEQ ID NO: 3365892 - RNA, 16 nt, Hepatitis E virus
ccgcggucgcuccggc

SEQ ID NO: 3365893 - RNA, 18 nt, Hepatitis E virus
ccgcggucgcuccggccc

SEQ ID NO: 3365894 - RNA, 14 nt, Hepatitis E virus
ccuaccacagcugg

SEQ ID NO: 3365895 - RNA, 18 nt, Hepatitis E virus
ccuauuuugcuguugcuc

SEQ ID NO: 3365896 - RNA, 10 nt, Hepatitis E virus
ccuucuuucu

SEQ ID NO: 3365897 - RNA, 15 nt, Hepatitis E virus
cgaccaugcgcccuc

SEQ ID NO: 3365898 - RNA, 20 nt, Hepatitis E virus
cgaccaugcgcccucggccu

SEQ ID NO: 3365899 - RNA, 19 nt, Hepatitis E virus
cgcaugacaucgaccucgg

SEQ ID NO: 3365900 - RNA, 12 nt, Hepatitis E virus
cgcccccuuggc

SEQ ID NO: 3365901 - RNA, 22 nt, Hepatitis E virus
cgcugagcuucagcgccuuaag

SEQ ID NO: 3365902 - RNA, 18 nt, Hepatitis E virus
cggcgguuccggcggugg

SEQ ID NO: 3365903 - RNA, 14 nt, Hepatitis E virus
cggucgcucgacug

SEQ ID NO: 3365904 - RNA, 17 nt, Hepatitis E virus
cuaccacagcuggggcc

SEQ ID NO: 3365905 - RNA, 22 nt, Hepatitis E virus
cucauuucugcguuccgcgcuc

SEQ ID NO: 3365906 - RNA, 15 nt, Hepatitis E virus
cuccagggcugugcu

SEQ ID NO: 3365907 - RNA, 20 nt, Hepatitis E virus
cuccagggcugugcuuuuca

SEQ ID NO: 3365908 - RNA, 19 nt, Hepatitis E virus
cuccaucucguucuggcca

SEQ ID NO: 3365909 - RNA, 19 nt, Hepatitis E virus
cuccucuuagcccgcuucu

SEQ ID NO: 3365910 - RNA, 16 nt, Hepatitis E virus
cugccgagcucaccac

SEQ ID NO: 3365911 - RNA, 17 nt, Hepatitis E virus
cuggccacagaccacca

SEQ ID NO: 3365912 - RNA, 23 nt, Hepatitis E virus
cuggccgccgccgugggcggcgc

SEQ ID NO: 3365913 - RNA, 20 nt, Hepatitis E virus
cuucuaauuaugcccaguac

SEQ ID NO: 3365914 - RNA, 22 nt, Hepatitis E virus
cuugaguuccgcaaccucaccc

SEQ ID NO: 3365915 - RNA, 19 nt, Hepatitis E virus
cuugugccccccuucuuuc

SEQ ID NO: 3365916 - RNA, 20 nt, Hepatitis E virus
gaauucaauaaccucgacug

SEQ ID NO: 3365917 - RNA, 17 nt, Hepatitis E virus
gaccaaggucacacuug

SEQ ID NO: 3365918 - RNA, 14 nt, Hepatitis E virus
gaggccaccucugg

SEQ ID NO: 3365919 - RNA, 22 nt, Hepatitis E virus
gaguuauaguuuauuugcuugu

SEQ ID NO: 3365920 - RNA, 22 nt, Hepatitis E virus
gauaaccaacaugagcaggacc

SEQ ID NO: 3365921 - RNA, 13 nt, Hepatitis E virus
gauggucgccccc

SEQ ID NO: 3365922 - RNA, 14 nt, Hepatitis E virus
gccaccucuggucu

SEQ ID NO: 3365923 - RNA, 16 nt, Hepatitis E virus
gccagugccugauguu

SEQ ID NO: 3365924 - RNA, 16 nt, Hepatitis E virus
gcccagcgccccgccg

SEQ ID NO: 3365925 - RNA, 17 nt, Hepatitis E virus
gcccccuuuccaccacc

SEQ ID NO: 3365926 - RNA, 21 nt, Hepatitis E virus
gcccggcauagccuccgagca

SEQ ID NO: 3365927 - RNA, 19 nt, Hepatitis E virus
gccgagcucaccaccacgg

SEQ ID NO: 3365928 - RNA, 20 nt, Hepatitis E virus
gccgcccccuuggccuccag

SEQ ID NO: 3365929 - RNA, 16 nt, Hepatitis E virus
gccgucuggccgccgc

SEQ ID NO: 3365930 - RNA, 15 nt, Hepatitis E virus
gccuauuuugcuguu

SEQ ID NO: 3365931 - RNA, 18 nt, Hepatitis E virus
gccucacgucguagaccu

SEQ ID NO: 3365932 - RNA, 18 nt, Hepatitis E virus
gccuccagggcugugcuu

SEQ ID NO: 3365933 - RNA, 19 nt, Hepatitis E virus
gccugggugcuggccccgu

SEQ ID NO: 3365934 - RNA, 16 nt, Hepatitis E virus
cggcccaugacacccc

SEQ ID NO: 3365935 - RNA, 18 nt, Hepatitis E virus
cgggcugauucucagccc

SEQ ID NO: 3365936 - RNA, 14 nt, Hepatitis E virus
cgucgucucagcca

SEQ ID NO: 3365937 - RNA, 16 nt, Hepatitis E virus
cgucuggccgccgccg

SEQ ID NO: 3365938 - RNA, 15 nt, Hepatitis E virus
cuacagaagcuucua

SEQ ID NO: 3365939 - RNA, 14 nt, Hepatitis E virus
cuagcauugcuuga

SEQ ID NO: 3365940 - RNA, 18 nt, Hepatitis E virus
cuauuuccacuuacacca

SEQ ID NO: 3365941 - RNA, 21 nt, Hepatitis E virus
cuauuuugcuguugcuccuca

SEQ ID NO: 3365942 - RNA, 22 nt, Hepatitis E virus
cucauguuucugccuaugcugc

SEQ ID NO: 3365943 - RNA, 16 nt, Hepatitis E virus
cuccucuuagcccgcu

SEQ ID NO: 3365944 - RNA, 15 nt, Hepatitis E virus
cugccuaugcugccc

SEQ ID NO: 3365945 - RNA, 16 nt, Hepatitis E virus
cuuacaccacuagccu

SEQ ID NO: 3365946 - RNA, 11 nt, Hepatitis E virus
cuugugccccc

SEQ ID NO: 3365947 - RNA, 16 nt, Hepatitis E virus
cuugugccccccuucu

SEQ ID NO: 3365948 - RNA, 14 nt, Hepatitis E virus
cuuuucuguccucc

SEQ ID NO: 3365949 - RNA, 16 nt, Hepatitis E virus
gaaucucguguaguua

SEQ ID NO: 3365950 - RNA, 16 nt, Hepatitis E virus
gaccacucggcuccgc

SEQ ID NO: 3365951 - RNA, 15 nt, Hepatitis E virus
gacucccgcggcgcc

SEQ ID NO: 3365952 - RNA, 14 nt, Hepatitis E virus
gacucugugaccuu

SEQ ID NO: 3365953 - RNA, 19 nt, Hepatitis E virus
gaguaugaccaguccacuu

SEQ ID NO: 3365954 - RNA, 20 nt, Hepatitis E virus
gauggucgcccccuuuccac

SEQ ID NO: 3365955 - RNA, 12 nt, Hepatitis E virus
gauucucagccc

SEQ ID NO: 3365956 - RNA, 19 nt, Hepatitis E virus
gcccccuuuccaccaccca

SEQ ID NO: 3365957 - RNA, 22 nt, Hepatitis E virus
gccccgucucuauuuccgcggu

SEQ ID NO: 3365958 - RNA, 14 nt, Hepatitis E virus
gcccgucaccgccu

SEQ ID NO: 3365959 - RNA, 13 nt, Hepatitis E virus
gccgcuccgcggu

SEQ ID NO: 3365960 - RNA, 22 nt, Hepatitis E virus
gccucacgucguagaccuacca

SEQ ID NO: 3365961 - RNA, 19 nt, Hepatitis E virus
gccuccagggcugugcuuu

SEQ ID NO: 3365962 - RNA, 13 nt, Hepatitis E virus
gccugggugcugg

SEQ ID NO: 3365963 - RNA, 12 nt, Hepatitis E virus
gcgcccucggcc

SEQ ID NO: 3365964 - RNA, 23 nt, Hepatitis E virus
gcgggucucccguuacuccagca

SEQ ID NO: 3365965 - RNA, 17 nt, Hepatitis E virus
gcgugaccaggcccagc

SEQ ID NO: 3365966 - RNA, 19 nt, Hepatitis E virus
gcuacaauucgcuaccgcc

SEQ ID NO: 3365967 - RNA, 18 nt, Hepatitis E virus
gcucaccaccacggcugc

SEQ ID NO: 3365968 - RNA, 21 nt, Hepatitis E virus
gcuccucuuagcccgcuucua

SEQ ID NO: 3365969 - RNA, 18 nt, Hepatitis E virus
gcugcccgcgccaccgcc

SEQ ID NO: 3365970 - RNA, 13 nt, Hepatitis E virus
gcugcgcccaugg

SEQ ID NO: 3365971 - RNA, 16 nt, Hepatitis E virus
ggcccagcgccccgcc

SEQ ID NO: 3365972 - RNA, 17 nt, Hepatitis E virus
ggcccagcgccccgccg

SEQ ID NO: 3365973 - RNA, 19 nt, Hepatitis E virus
ggcccaugacaccccgcca

SEQ ID NO: 3365974 - RNA, 21 nt, Hepatitis E virus
ggcccaugacaccccgccagu

SEQ ID NO: 3365975 - RNA, 21 nt, Hepatitis E virus
ggcgcucuguugagaccuccg

SEQ ID NO: 3365976 - RNA, 18 nt, Hepatitis E virus
ggcggaggaggaggccac

SEQ ID NO: 3365977 - RNA, 19 nt, Hepatitis E virus
ggcggaggaggaggccacc

SEQ ID NO: 3365978 - RNA, 17 nt, Hepatitis E virus
ggcuacagaagcuucua

SEQ ID NO: 3365979 - RNA, 19 nt, Hepatitis E virus
ggguugcuauuuccacuua

SEQ ID NO: 3365980 - RNA, 18 nt, Hepatitis E virus
gguucgcgaccaugcgcc

SEQ ID NO: 3365981 - RNA, 23 nt, Hepatitis E virus
guaaaacucgggaguuauaguuu

SEQ ID NO: 3365982 - RNA, 17 nt, Hepatitis E virus
gucggcugguggccagc

SEQ ID NO: 3365983 - RNA, 18 nt, Hepatitis E virus
gugccgcccccuuggccu

SEQ ID NO: 3365984 - RNA, 18 nt, Hepatitis E virus
uacaccacuagccugggu

SEQ ID NO: 3365985 - RNA, 18 nt, Hepatitis E virus
uaccauggacuacccugc

SEQ ID NO: 3365986 - RNA, 14 nt, Hepatitis E virus
uacgccgcuccucu

SEQ ID NO: 3365987 - RNA, 17 nt, Hepatitis E virus
uaucaacaucuccccuu

SEQ ID NO: 3365988 - RNA, 15 nt, Hepatitis E virus
uaucguaaccaaggu

SEQ ID NO: 3365989 - RNA, 22 nt, Hepatitis E virus
ucacacuugauggucgcccccu

SEQ ID NO: 3365990 - RNA, 23 nt, Hepatitis E virus
ucacacuugauggucgcccccuu

SEQ ID NO: 3365991 - RNA, 10 nt, Hepatitis E virus
uccaccaccc

SEQ ID NO: 3365992 - RNA, 22 nt, Hepatitis E virus
uccagcccggcauagccuccga

SEQ ID NO: 3365993 - RNA, 14 nt, Hepatitis E virus
uccaucucguucug

SEQ ID NO: 3365994 - RNA, 16 nt, Hepatitis E virus
ucgacuggaccaaggu

SEQ ID NO: 3365995 - RNA, 12 nt, Hepatitis E virus
ucgucucagcca

SEQ ID NO: 3365996 - RNA, 17 nt, Hepatitis E virus
ucgucucagccaauggc

SEQ ID NO: 3365997 - RNA, 12 nt, Hepatitis E virus
ucguucuggcca

SEQ ID NO: 3365998 - RNA, 20 nt, Hepatitis E virus
ucugcccggagugccgcccc

SEQ ID NO: 3365999 - RNA, 23 nt, Hepatitis E virus
ucugcccggagugccgcccccuu

SEQ ID NO: 3366000 - RNA, 17 nt, Hepatitis E virus
ucugcguuccgcgcucc

SEQ ID NO: 3366001 - RNA, 18 nt, Hepatitis E virus
ucugcguuccgcgcuccc

SEQ ID NO: 3366002 - RNA, 20 nt, Hepatitis E virus
ugaccgggcugauucucagc

SEQ ID NO: 3366003 - RNA, 20 nt, Hepatitis E virus
ugcccggagugccgcccccu

SEQ ID NO: 3366004 - RNA, 14 nt, Hepatitis E virus
ugccgcccccuugg

SEQ ID NO: 3366005 - RNA, 18 nt, Hepatitis E virus
ugcggccggggcuggacc

SEQ ID NO: 3366006 - RNA, 15 nt, Hepatitis E virus
ugcuguugcuccuca

SEQ ID NO: 3366007 - RNA, 18 nt, Hepatitis E virus
ugcuguuuuagcccccca

SEQ ID NO: 3366008 - RNA, 13 nt, Hepatitis E virus
uggccagcuguuc

SEQ ID NO: 3366009 - RNA, 17 nt, Hepatitis E virus
uggcgagccgacuguua

SEQ ID NO: 3366010 - RNA, 18 nt, Hepatitis E virus
ugugccccccuucuuucu

SEQ ID NO: 3366011 - RNA, 16 nt, Hepatitis E virus
uucgaccggcccaguc

SEQ ID NO: 3366012 - RNA, 15 nt, Hepatitis E virus
uucuguugcuuauuu

SEQ ID NO: 3366013 - RNA, 15 nt, Hepatitis E virus
uugcuuauuucucau

SEQ ID NO: 3366014 - RNA, 22 nt, Hepatitis E virus
uugcuugugccccccuucuuuc

SEQ ID NO: 3366015 - RNA, 22 nt, Hepatitis E virus
uuuauuugcuugugccccccuu

SEQ ID NO: 3366016 - RNA, 18 nt, Hepatitis E virus
uuuccacuuacaccacua

SEQ ID NO: 3366017 - RNA, 12 nt, Hepatitis E virus
aacaccacugcu

SEQ ID NO: 3366018 - RNA, 21 nt, Hepatitis E virus
aauacucauauaauggcuaca

SEQ ID NO: 3366019 - RNA, 14 nt, Hepatitis E virus
acaauucgcuaccg

SEQ ID NO: 3366020 - RNA, 20 nt, Hepatitis E virus
acacccugcuuggcggucua

SEQ ID NO: 3366021 - RNA, 16 nt, Hepatitis E virus
accaccacggcugcua

SEQ ID NO: 3366022 - RNA, 20 nt, Hepatitis E virus
accgccuucgucgcggugca

SEQ ID NO: 3366023 - RNA, 23 nt, Hepatitis E virus
accucuauuuuacuaguacuaau

SEQ ID NO: 3366024 - RNA, 22 nt, Hepatitis E virus
accucuggucuuguuaugcuuu

SEQ ID NO: 3366025 - RNA, 12 nt, Hepatitis E virus
agcauugcuuga

SEQ ID NO: 3366026 - RNA, 13 nt, Hepatitis E virus
aggauaccaugga

SEQ ID NO: 3366027 - RNA, 13 nt, Hepatitis E virus
agugccgcccccu

SEQ ID NO: 3366028 - RNA, 11 nt, Hepatitis E virus
aucgcgccccu

SEQ ID NO: 3366029 - RNA, 14 nt, Hepatitis E virus
augacaccccgcca

SEQ ID NO: 3366030 - RNA, 19 nt, Hepatitis E virus
augacaccccgccagugcc

SEQ ID NO: 3366031 - RNA, 18 nt, Hepatitis E virus
augacaucgaccucgggg

SEQ ID NO: 3366032 - RNA, 13 nt, Hepatitis E virus
auggacuacccug

SEQ ID NO: 3366033 - RNA, 19 nt, Hepatitis E virus
auuucgucggcugguggcc

SEQ ID NO: 3366034 - RNA, 17 nt, Hepatitis E virus
auuuugcuguugcuccu

SEQ ID NO: 3366035 - RNA, 22 nt, Hepatitis E virus
caaccaaccccuucgcccccga

SEQ ID NO: 3366036 - RNA, 14 nt, Hepatitis E virus
caccacugcuagug

SEQ ID NO: 3366037 - RNA, 19 nt, Hepatitis E virus
caccuuccccagccccauc

SEQ ID NO: 3366038 - RNA, 21 nt, Hepatitis E virus
cagcacugcccgucaccgccu

SEQ ID NO: 3366039 - RNA, 19 nt, Hepatitis E virus
cagcccuucgcaauccccu

SEQ ID NO: 3366040 - RNA, 19 nt, Hepatitis E virus
cagccgucuggccgccgcc

SEQ ID NO: 3366041 - RNA, 19 nt, Hepatitis E virus
cagcuggggccgcgccgcu

SEQ ID NO: 3366042 - RNA, 21 nt, Hepatitis E virus
caggaccgaccgacaccuucc

SEQ ID NO: 3366043 - RNA, 23 nt, Hepatitis E virus
cauacuuucgaugacuucugccc

SEQ ID NO: 3366044 - RNA, 20 nt, Hepatitis E virus
caugaaggaccucuauuuua

SEQ ID NO: 3366045 - RNA, 16 nt, Hepatitis E virus
ccaaccaaccccuucg

SEQ ID NO: 3366046 - RNA, 14 nt, Hepatitis E virus
ccaagugagcgccu

SEQ ID NO: 3366047 - RNA, 14 nt, Hepatitis E virus
ccacuuacaccacu

SEQ ID NO: 3366048 - RNA, 22 nt, Hepatitis E virus
ccagcacugcccgucaccgccu

SEQ ID NO: 3366049 - RNA, 17 nt, Hepatitis E virus
cccaugacaccccgcca

SEQ ID NO: 3366050 - RNA, 14 nt, Hepatitis E virus
cccccacucugcgc

SEQ ID NO: 3366051 - RNA, 17 nt, Hepatitis E virus
ccccuucuuucuguugc

SEQ ID NO: 3366052 - RNA, 21 nt, Hepatitis E virus
cccgcaugacaucgaccucgg

SEQ ID NO: 3366053 - RNA, 22 nt, Hepatitis E virus
cccgcggcgccauccugcgccg

SEQ ID NO: 3366054 - RNA, 16 nt, Hepatitis E virus
cccgucgucucagcca

SEQ ID NO: 3366055 - RNA, 17 nt, Hepatitis E virus
cccuucuuucuguugcu

SEQ ID NO: 3366056 - RNA, 12 nt, Hepatitis E virus
cccuuuucuguc

SEQ ID NO: 3366057 - RNA, 17 nt, Hepatitis E virus
ccgcgguaagcucuccu

SEQ ID NO: 3366058 - RNA, 15 nt, Hepatitis E virus
ccgcggucgcuccgg

SEQ ID NO: 3366059 - RNA, 16 nt, Hepatitis E virus
ccggagugccgccccc

SEQ ID NO: 3366060 - RNA, 15 nt, Hepatitis E virus
ccgucgucucagcca

SEQ ID NO: 3366061 - RNA, 16 nt, Hepatitis E virus
ccucauguuucugccu

SEQ ID NO: 3366062 - RNA, 17 nt, Hepatitis E virus
ccucauguuucugccua

SEQ ID NO: 3366063 - RNA, 19 nt, Hepatitis E virus
ccucauguuucugccuaug

SEQ ID NO: 3366064 - RNA, 17 nt, Hepatitis E virus
ccuccagggcugugcuu

SEQ ID NO: 3366065 - RNA, 13 nt, Hepatitis E virus
ccugggugcuggc

SEQ ID NO: 3366066 - RNA, 21 nt, Hepatitis E virus
ccuuauaauuauaacaccacu

SEQ ID NO: 3366067 - RNA, 19 nt, Hepatitis E virus
cgaguaugaccaguccacu

SEQ ID NO: 3366068 - RNA, 15 nt, Hepatitis E virus
cgccaucuccaucuc

SEQ ID NO: 3366069 - RNA, 20 nt, Hepatitis E virus
cgcccccgaugucaccgcug

SEQ ID NO: 3366070 - RNA, 19 nt, Hepatitis E virus
cgcccccuuggccuccagg

SEQ ID NO: 3366071 - RNA, 14 nt, Hepatitis E virus
cgcuccucuuagcc

SEQ ID NO: 3366072 - RNA, 18 nt, Hepatitis E virus
cguauuuuaguccagccc

SEQ ID NO: 3366073 - RNA, 23 nt, Hepatitis E virus
cguucuggccacagaccaccacc

SEQ ID NO: 3366074 - RNA, 11 nt, Hepatitis E virus
cucagcaggau

SEQ ID NO: 3366075 - RNA, 14 nt, Hepatitis E virus
cuccagcacugccc

SEQ ID NO: 3366076 - RNA, 17 nt, Hepatitis E virus
cuccagcacugcccguc

SEQ ID NO: 3366077 - RNA, 22 nt, Hepatitis E virus
cuccagggcugugcuuuucagu

SEQ ID NO: 3366078 - RNA, 16 nt, Hepatitis E virus
cuccaucucguucugg

SEQ ID NO: 3366079 - RNA, 18 nt, Hepatitis E virus
cuccaucucguucuggcc

SEQ ID NO: 3366080 - RNA, 22 nt, Hepatitis E virus
cucggccuauuuugcuguugcu

SEQ ID NO: 3366081 - RNA, 20 nt, Hepatitis E virus
cugacucugugaccuugguu

SEQ ID NO: 3366082 - RNA, 21 nt, Hepatitis E virus
cugauguugacucccgcggcg

SEQ ID NO: 3366083 - RNA, 14 nt, Hepatitis E virus
cugauucucagccc

SEQ ID NO: 3366084 - RNA, 16 nt, Hepatitis E virus
cugcccgcgccaccgc

SEQ ID NO: 3366085 - RNA, 15 nt, Hepatitis E virus
cugcgcccauggguu

SEQ ID NO: 3366086 - RNA, 19 nt, Hepatitis E virus
cugcguuccgcgcucccug

SEQ ID NO: 3366087 - RNA, 15 nt, Hepatitis E virus
cuuagcccgcuucua

SEQ ID NO: 3366088 - RNA, 13 nt, Hepatitis E virus
cuuauuucucauu

SEQ ID NO: 3366089 - RNA, 14 nt, Hepatitis E virus
cuucugcugcgccc

SEQ ID NO: 3366090 - RNA, 16 nt, Hepatitis E virus
cuucuuucuguugcuu

SEQ ID NO: 3366091 - RNA, 16 nt, Hepatitis E virus
cuugauggucgccccc

SEQ ID NO: 3366092 - RNA, 16 nt, Hepatitis E virus
cuugcugacacccugc

SEQ ID NO: 3366093 - RNA, 20 nt, Hepatitis E virus
cuugcugacacccugcuugg

SEQ ID NO: 3366094 - RNA, 16 nt, Hepatitis E virus
cuuucucucaccgcug

SEQ ID NO: 3366095 - RNA, 21 nt, Hepatitis E virus
cuuucuguugcuuauuucuca

SEQ ID NO: 3366096 - RNA, 20 nt, Hepatitis E virus
gacaccuuccccagccccau

SEQ ID NO: 3366097 - RNA, 18 nt, Hepatitis E virus
cagcgccccgccgcugcc

SEQ ID NO: 3366098 - RNA, 16 nt, Hepatitis E virus
cagcuggggccgcgcc

SEQ ID NO: 3366099 - RNA, 20 nt, Hepatitis E virus
cagucuacugucgcugagcu

SEQ ID NO: 3366100 - RNA, 18 nt, Hepatitis E virus
cagucuaugucucugacu

SEQ ID NO: 3366101 - RNA, 18 nt, Hepatitis E virus
caugacaccccgccagug

SEQ ID NO: 3366102 - RNA, 21 nt, Hepatitis E virus
caugacaccccgccagugccu

SEQ ID NO: 3366103 - RNA, 12 nt, Hepatitis E virus
caugagcaggac

SEQ ID NO: 3366104 - RNA, 22 nt, Hepatitis E virus
caugcgcccucggccuauuuug

SEQ ID NO: 3366105 - RNA, 13 nt, Hepatitis E virus
ccaaccaaccccu

SEQ ID NO: 3366106 - RNA, 17 nt, Hepatitis E virus
ccaauggcgagccgacu

SEQ ID NO: 3366107 - RNA, 12 nt, Hepatitis E virus
ccacagaccacc

SEQ ID NO: 3366108 - RNA, 21 nt, Hepatitis E virus
ccaccgcccggucagccgucu

SEQ ID NO: 3366109 - RNA, 13 nt, Hepatitis E virus
ccagcacugcccg

SEQ ID NO: 3366110 - RNA, 13 nt, Hepatitis E virus
cccagcgccccgc

SEQ ID NO: 3366111 - RNA, 18 nt, Hepatitis E virus
cccagucuaugucucuga

SEQ ID NO: 3366112 - RNA, 19 nt, Hepatitis E virus
ccccgaugucaccgcugcg

SEQ ID NO: 3366113 - RNA, 13 nt, Hepatitis E virus
ccccgccgcugcc

SEQ ID NO: 3366114 - RNA, 14 nt, Hepatitis E virus
ccccgccgcugccu

SEQ ID NO: 3366115 - RNA, 17 nt, Hepatitis E virus
ccccuuggccuccaggg

SEQ ID NO: 3366116 - RNA, 17 nt, Hepatitis E virus
ccccuuuucuguccucc

SEQ ID NO: 3366117 - RNA, 13 nt, Hepatitis E virus
cccgccgcugccu

SEQ ID NO: 3366118 - RNA, 15 nt, Hepatitis E virus
cccgcugguccccaa

SEQ ID NO: 3366119 - RNA, 15 nt, Hepatitis E virus
ccgagcucaccacca

SEQ ID NO: 3366120 - RNA, 23 nt, Hepatitis E virus
ccgagcucaccaccacggcugcu

SEQ ID NO: 3366121 - RNA, 20 nt, Hepatitis E virus
ccgaguaugaccaguccacu

SEQ ID NO: 3366122 - RNA, 21 nt, Hepatitis E virus
ccgcuccucuuagcccgcuuc

SEQ ID NO: 3366123 - RNA, 19 nt, Hepatitis E virus
ccgggcugauucucagccc

SEQ ID NO: 3366124 - RNA, 16 nt, Hepatitis E virus
ccgucuggccgccgcc

SEQ ID NO: 3366125 - RNA, 16 nt, Hepatitis E virus
ccguuacuccagcacu

SEQ ID NO: 3366126 - RNA, 21 nt, Hepatitis E virus
ccuaucaacaucuccccuuac

SEQ ID NO: 3366127 - RNA, 18 nt, Hepatitis E virus
ccuaugcugcccgcgcca

SEQ ID NO: 3366128 - RNA, 14 nt, Hepatitis E virus
ccucguguucgcca

SEQ ID NO: 3366129 - RNA, 18 nt, Hepatitis E virus
ccuuuccaccacccagca

SEQ ID NO: 3366130 - RNA, 13 nt, Hepatitis E virus
cgaccaugcgccc

SEQ ID NO: 3366131 - RNA, 15 nt, Hepatitis E virus
cgagcucaccaccac

SEQ ID NO: 3366132 - RNA, 15 nt, Hepatitis E virus
cgaugacuucugccc

SEQ ID NO: 3366133 - RNA, 19 nt, Hepatitis E virus
cgcccccuuuccaccaccc

SEQ ID NO: 3366134 - RNA, 16 nt, Hepatitis E virus
cgcggcgccauccugc

SEQ ID NO: 3366135 - RNA, 12 nt, Hepatitis E virus
cgcucccugaaa

SEQ ID NO: 3366136 - RNA, 19 nt, Hepatitis E virus
cggaggaggaggccaccuc

SEQ ID NO: 3366137 - RNA, 20 nt, Hepatitis E virus
cggccuauuuugcuguugcu

SEQ ID NO: 3366138 - RNA, 17 nt, Hepatitis E virus
cggucagccgucuggcc

SEQ ID NO: 3366139 - RNA, 13 nt, Hepatitis E virus
cguagaccuacca

SEQ ID NO: 3366140 - RNA, 14 nt, Hepatitis E virus
cgucucuauuuccg

SEQ ID NO: 3366141 - RNA, 22 nt, Hepatitis E virus
cgugcuacaauucgcuaccgcc

SEQ ID NO: 3366142 - RNA, 20 nt, Hepatitis E virus
cguugagaaugccgcugggc

SEQ ID NO: 3366143 - RNA, 14 nt, Hepatitis E virus
cuaccccuccagga

SEQ ID NO: 3366144 - RNA, 23 nt, Hepatitis E virus
cuagccugggugcuggccccguc

SEQ ID NO: 3366145 - RNA, 12 nt, Hepatitis E virus
cucaccgcugcc

SEQ ID NO: 3366146 - RNA, 13 nt, Hepatitis E virus
cucucgccccguc

SEQ ID NO: 3366147 - RNA, 13 nt, Hepatitis E virus
cugauucucagcc

SEQ ID NO: 3366148 - RNA, 17 nt, Hepatitis E virus
cugcccggagugccgcc

SEQ ID NO: 3366149 - RNA, 18 nt, Hepatitis E virus
cugcguuccgcgcucccu

SEQ ID NO: 3366150 - RNA, 23 nt, Hepatitis E virus
cuggccacagaccaccaccaccc

SEQ ID NO: 3366151 - RNA, 15 nt, Hepatitis E virus
cugguggccagcugu

SEQ ID NO: 3366152 - RNA, 20 nt, Hepatitis E virus
cuguagagaaugcucagcag

SEQ ID NO: 3366153 - RNA, 14 nt, Hepatitis E virus
cuguccuccgagcu

SEQ ID NO: 3366154 - RNA, 14 nt, Hepatitis E virus
cugugcuuuucagu

SEQ ID NO: 3366155 - RNA, 18 nt, Hepatitis E virus
acaccacuagccugggug

SEQ ID NO: 3366156 - RNA, 18 nt, Hepatitis E virus
acagcuggggccgcgccg

SEQ ID NO: 3366157 - RNA, 15 nt, Hepatitis E virus
accacuagccugggu

SEQ ID NO: 3366158 - RNA, 18 nt, Hepatitis E virus
accaugcgcccucggccu

SEQ ID NO: 3366159 - RNA, 20 nt, Hepatitis E virus
accgcccggucagccgucug

SEQ ID NO: 3366160 - RNA, 19 nt, Hepatitis E virus
accgcugcggccggggcug

SEQ ID NO: 3366161 - RNA, 15 nt, Hepatitis E virus
accucgacugauguu

SEQ ID NO: 3366162 - RNA, 19 nt, Hepatitis E virus
accucuuccguggccaccg

SEQ ID NO: 3366163 - RNA, 13 nt, Hepatitis E virus
accuuccccagcc

SEQ ID NO: 3366164 - RNA, 14 nt, Hepatitis E virus
acucuuauacuaau

SEQ ID NO: 3366165 - RNA, 16 nt, Hepatitis E virus
acuuucgaugacuucu

SEQ ID NO: 3366166 - RNA, 15 nt, Hepatitis E virus
agccuccgagcaugu

SEQ ID NO: 3366167 - RNA, 20 nt, Hepatitis E virus
agcuucuaauuaugcccagu

SEQ ID NO: 3366168 - RNA, 18 nt, Hepatitis E virus
aggcccagcgccccgccg

SEQ ID NO: 3366169 - RNA, 14 nt, Hepatitis E virus
auaacaccacugcu

SEQ ID NO: 3366170 - RNA, 20 nt, Hepatitis E virus
auaccggugcccucgggcug

SEQ ID NO: 3366171 - RNA, 15 nt, Hepatitis E virus
auagcgcuuacccug

SEQ ID NO: 3366172 - RNA, 13 nt, Hepatitis E virus
auggucgcccccu

SEQ ID NO: 3366173 - RNA, 21 nt, Hepatitis E virus
auggucgcccccuuuccacca

SEQ ID NO: 3366174 - RNA, 18 nt, Hepatitis E virus
auuugcuugugccccccu

SEQ ID NO: 3366175 - RNA, 13 nt, Hepatitis E virus
cacagaccaccac

SEQ ID NO: 3366176 - RNA, 16 nt, Hepatitis E virus
caccacuagccugggu

SEQ ID NO: 3366177 - RNA, 10 nt, Hepatitis E virus
caccacugcu

SEQ ID NO: 3366178 - RNA, 22 nt, Hepatitis E virus
caccgccuucgucgcggugcag

SEQ ID NO: 3366179 - RNA, 11 nt, Hepatitis E virus
caccgcugccg

SEQ ID NO: 3366180 - RNA, 19 nt, Hepatitis E virus
aacaugucuucugcugcgc

SEQ ID NO: 3366181 - RNA, 13 nt, Hepatitis E virus
acaaacuugguuc

SEQ ID NO: 3366182 - RNA, 17 nt, Hepatitis E virus
acaccccgccagugccu

SEQ ID NO: 3366183 - RNA, 20 nt, Hepatitis E virus
accgggcugauucucagccc

SEQ ID NO: 3366184 - RNA, 17 nt, Hepatitis E virus
accucuuccguggccac

SEQ ID NO: 3366185 - RNA, 21 nt, Hepatitis E virus
acgucguagaccuaccacagc

SEQ ID NO: 3366186 - RNA, 15 nt, Hepatitis E virus
acuccagcacugccc

SEQ ID NO: 3366187 - RNA, 19 nt, Hepatitis E virus
acugccgagcucaccacca

SEQ ID NO: 3366188 - RNA, 23 nt, Human
agaaaacaggaaaaaaacuuuua

SEQ ID NO: 3366189 - RNA, 15 nt, Human
agaaaacaucacuga

SEQ ID NO: 3366190 - RNA, 12 nt, Human
agaaaacauugu

SEQ ID NO: 3366191 - RNA, 15 nt, Human
agaaaacauuguucc

SEQ ID NO: 3366192 - RNA, 19 nt, Human
agaaaacauuguuccagau

SEQ ID NO: 3366193 - RNA, 13 nt, Human
agaaaacauuuuu

SEQ ID NO: 3366194 - RNA, 13 nt, Human
agaaaacccaccc

SEQ ID NO: 3366195 - RNA, 16 nt, Human
agaaaacccuuuucua

SEQ ID NO: 3366196 - RNA, 21 nt, Human
agaaaacuccuuuagcaggug

SEQ ID NO: 3366197 - RNA, 14 nt, Human
agaaaacuucuuuu

SEQ ID NO: 3366198 - RNA, 19 nt, Human
agaaaacuuuaaaaaauau

SEQ ID NO: 3366199 - RNA, 11 nt, Human
agaaaagaaaa

SEQ ID NO: 3366200 - RNA, 13 nt, Human
agaaaagagagaa

SEQ ID NO: 3366201 - RNA, 17 nt, Human
agaaaagauaaagauga

SEQ ID NO: 3366202 - RNA, 20 nt, Human
agaaaagauacgacuuuauu

SEQ ID NO: 3366203 - RNA, 12 nt, Human
agaaaagaugca

SEQ ID NO: 3366204 - RNA, 15 nt, Human
agaaaagaugcacuu

SEQ ID NO: 3366205 - RNA, 19 nt, Human
agaaaagauguagauuuau

SEQ ID NO: 3366206 - RNA, 20 nt, Human
agaaaagauuuuaaucaagu

SEQ ID NO: 3366207 - RNA, 17 nt, Human
agaaaagcuaagagaag

SEQ ID NO: 3366208 - RNA, 21 nt, Human
agaaaagcuauaaaaugaaua

SEQ ID NO: 3366209 - RNA, 12 nt, Human
agaaaaggaaaa

SEQ ID NO: 3366210 - RNA, 17 nt, Human
agaaaaggaaaagaaaa

SEQ ID NO: 3366211 - RNA, 23 nt, Human
agaaaaguagacaaucauuguuu

SEQ ID NO: 3366212 - RNA, 12 nt, Human
agaaaaguauuu

SEQ ID NO: 3366213 - RNA, 15 nt, Human
agaaaaguauuuuga

SEQ ID NO: 3366214 - RNA, 21 nt, Human
agaaaaguugaauuuuacaug

SEQ ID NO: 3366215 - RNA, 22 nt, Human
agaaaauaaaauuaagaauguu

SEQ ID NO: 3366216 - RNA, 21 nt, Human
agaaaauaaagacaaccauau

SEQ ID NO: 3366217 - RNA, 17 nt, Human
agaaaauacaauaaacu

SEQ ID NO: 3366218 - RNA, 19 nt, Human
agaaaauagagaugagcuu

SEQ ID NO: 3366219 - RNA, 11 nt, Human
agaaaauauaa

SEQ ID NO: 3366220 - RNA, 14 nt, Human
agaaaauauacugu

SEQ ID NO: 3366221 - RNA, 16 nt, Human
agaaaauauacuguaa

SEQ ID NO: 3366222 - RNA, 17 nt, Human
agaaaauauacuguaaa

SEQ ID NO: 3366223 - RNA, 20 nt, Human
agaaaauauacuguaaagaa

SEQ ID NO: 3366224 - RNA, 14 nt, Human
agaaaauauaugua

SEQ ID NO: 3366225 - RNA, 16 nt, Human
agccuccucugucugc

SEQ ID NO: 3366226 - RNA, 18 nt, Human
agccuccucugucugccc

SEQ ID NO: 3366227 - RNA, 16 nt, Human
agccuccugaccugag

SEQ ID NO: 3366228 - RNA, 18 nt, Human
agccuccugaccugaggc

SEQ ID NO: 3366229 - RNA, 22 nt, Human
agccuccugaccugaggcuccu

SEQ ID NO: 3366230 - RNA, 16 nt, Human
agccucgaacuccugg

SEQ ID NO: 3366231 - RNA, 17 nt, Human
agccucgacacagagug

SEQ ID NO: 3366232 - RNA, 18 nt, Human
agccucgacacagagugg

SEQ ID NO: 3366233 - RNA, 19 nt, Human
agccucgcaacccgugcca

SEQ ID NO: 3366234 - RNA, 22 nt, Human
agccucgcaggccucccugcca

SEQ ID NO: 3366235 - RNA, 20 nt, Human
agccucgcccauccccuuga

SEQ ID NO: 3366236 - RNA, 18 nt, Human
agccucgccccuggcaga

SEQ ID NO: 3366237 - RNA, 19 nt, Human
agccucgccccuggcagag

SEQ ID NO: 3366238 - RNA, 20 nt, Human
agccucgccgucugugaauu

SEQ ID NO: 3366239 - RNA, 23 nt, Human
agccucgcucuguuacccagggu

SEQ ID NO: 3366240 - RNA, 17 nt, Human
agccucguuuugaugcc

SEQ ID NO: 3366241 - RNA, 19 nt, Human
agccucuagagcagacuac

SEQ ID NO: 3366242 - RNA, 22 nt, Human
agccucuagagcagacuacagc

SEQ ID NO: 3366243 - RNA, 23 nt, Human
agccucuagagcagacuacagcu

SEQ ID NO: 3366244 - RNA, 18 nt, Human
agccucuagggaccccuc

SEQ ID NO: 3366245 - RNA, 18 nt, Human
agccucucagugcccucc

SEQ ID NO: 3366246 - RNA, 20 nt, Human
agccucucagugcccuccag

SEQ ID NO: 3366247 - RNA, 20 nt, Human
agccucuccggcagaaggga

SEQ ID NO: 3366248 - RNA, 17 nt, Human
agccucucucccagucu

SEQ ID NO: 3366249 - RNA, 20 nt, Human
agccucucuuccuaucccau

SEQ ID NO: 3366250 - RNA, 23 nt, Human
agccucugaaaaccaauguucuc

SEQ ID NO: 3366251 - RNA, 19 nt, Human
agccucugaaguuggacag

SEQ ID NO: 3366252 - RNA, 12 nt, Human
agccucugaccc

SEQ ID NO: 3366253 - RNA, 15 nt, Human
agccucugaccccuc

SEQ ID NO: 3366254 - RNA, 18 nt, Human
agccucugaccccuccuc

SEQ ID NO: 3366255 - RNA, 19 nt, Human
agccucugaccccuccuca

SEQ ID NO: 3366256 - RNA, 22 nt, Human
agccucugcccaggcacugcua

SEQ ID NO: 3366257 - RNA, 18 nt, Human
agccucugcugccauggc

SEQ ID NO: 3366258 - RNA, 23 nt, Human
agccucuggcauuagaauuauuu

SEQ ID NO: 3366259 - RNA, 20 nt, Human
agccucuggcuagaggccag

SEQ ID NO: 3366260 - RNA, 13 nt, Human
agccucugggggg

SEQ ID NO: 3366261 - RNA, 21 nt, Human
agccucugggggguggccagg

SEQ ID NO: 3366262 - RNA, 17 nt, Human
agccucugucuggcaau

SEQ ID NO: 3366263 - RNA, 23 nt, Human
agccucugugucacuggcugccu

SEQ ID NO: 3366264 - RNA, 14 nt, Human
agccucuucugcca

SEQ ID NO: 3366265 - RNA, 12 nt, Human
agccucuuuccc

SEQ ID NO: 3366266 - RNA, 13 nt, Human
agccucuuucccu

SEQ ID NO: 3366267 - RNA, 22 nt, Human
agccugaaagaggaaugaagua

SEQ ID NO: 3366268 - RNA, 21 nt, Human
agccugaauuuuguugcuguu

SEQ ID NO: 3366269 - RNA, 14 nt, Human
agccugacagccag

SEQ ID NO: 3366270 - RNA, 19 nt, Human
agccugacagccagaacuc

SEQ ID NO: 3366271 - RNA, 22 nt, Human
agccugacaucaaaaaaggcag

SEQ ID NO: 3366272 - RNA, 19 nt, Human
agccugacccucaucuuuc

SEQ ID NO: 3366273 - RNA, 19 nt, Human
agccugaccuuccuuccug

SEQ ID NO: 3366274 - RNA, 17 nt, Human
agccugaggcugagacu

SEQ ID NO: 3366275 - RNA, 23 nt, Human
agccugagggaaaggccagcacu

SEQ ID NO: 3366276 - RNA, 19 nt, Human
agccugagucaccugcaga

SEQ ID NO: 3366277 - RNA, 19 nt, Human
agccugagucagggcccag

SEQ ID NO: 3366278 - RNA, 17 nt, Human
agccugaucucuuccug

SEQ ID NO: 3366279 - RNA, 23 nt, Human
agccugcacuugggggcucagca

SEQ ID NO: 3366280 - RNA, 15 nt, Human
agccugcagagcugc

SEQ ID NO: 3366281 - RNA, 20 nt, Human
agccugcaggaccucgugcc

SEQ ID NO: 3366282 - RNA, 14 nt, Human
agccugcaggaucu

SEQ ID NO: 3366283 - RNA, 18 nt, Human
agccugcaggugcugcug

SEQ ID NO: 3366284 - RNA, 12 nt, Human
agccugcccagc

SEQ ID NO: 3366285 - RNA, 14 nt, Human
agccugcccuuguc

SEQ ID NO: 3366286 - RNA, 17 nt, Human
agccugccgagcaaccg

SEQ ID NO: 3366287 - RNA, 14 nt, Human
agccugccuggcag

SEQ ID NO: 3366288 - RNA, 15 nt, Human
agccugccuugccca

SEQ ID NO: 3366289 - RNA, 14 nt, Human
agccugcgccugcu

SEQ ID NO: 3366290 - RNA, 19 nt, Human
agccugcguggcugacccc

SEQ ID NO: 3366291 - RNA, 21 nt, Human
agccugcguggcugacccccc

SEQ ID NO: 3366292 - RNA, 12 nt, Human
agccugcuagcu

SEQ ID NO: 3366293 - RNA, 22 nt, Human
agccugcuccagcuguucagcu

SEQ ID NO: 3366294 - RNA, 17 nt, Human
agccugcucccccaccc

SEQ ID NO: 3366295 - RNA, 19 nt, Human
agccugcucccccaccccc

SEQ ID NO: 3366296 - RNA, 22 nt, Human
agccugcuccuucccaggagug

SEQ ID NO: 3366297 - RNA, 12 nt, Human
agccugcugcau

SEQ ID NO: 3366298 - RNA, 20 nt, Human
agccugcugcccaggcugug

SEQ ID NO: 3366299 - RNA, 10 nt, Human
agccugcugg

SEQ ID NO: 3366300 - RNA, 21 nt, Human
agccugcuggucacagccucc

SEQ ID NO: 3366301 - RNA, 15 nt, Human
agccugcuucccacc

SEQ ID NO: 3366302 - RNA, 23 nt, Human
agccugcuucccaccucccugcc

SEQ ID NO: 3366303 - RNA, 14 nt, Human
agccuggacccugu

SEQ ID NO: 3366304 - RNA, 15 nt, Human
agccuggaccucuga

SEQ ID NO: 3366305 - RNA, 17 nt, Human
agccuggaccucugaca

SEQ ID NO: 3366306 - RNA, 19 nt, Human
agccuggaccucugacagc

SEQ ID NO: 3366307 - RNA, 13 nt, Human
agccuggagaagc

SEQ ID NO: 3366308 - RNA, 24 nt, Human
agccuggagacccaccccaccugc

SEQ ID NO: 3366309 - RNA, 17 nt, Human
agccuggagcccuggag

SEQ ID NO: 3366310 - RNA, 16 nt, Human
agccuggaugccaucc

SEQ ID NO: 3366311 - RNA, 20 nt, Human
agccuggcacagggcagugg

SEQ ID NO: 3366312 - RNA, 14 nt, Human
agccuggccaacau

SEQ ID NO: 3366313 - RNA, 21 nt, Human
agccuggccacgcagccagga

SEQ ID NO: 3366314 - RNA, 23 nt, Human
agccuggccacgcagccaggaca

SEQ ID NO: 3366315 - RNA, 13 nt, Human
agccuggccagac

SEQ ID NO: 3366316 - RNA, 22 nt, Human
agccuggccagacacaggcccu

SEQ ID NO: 3366317 - RNA, 17 nt, Human
agccuggccagccuaca

SEQ ID NO: 3366318 - RNA, 15 nt, Human
agccuggcccagcuc

SEQ ID NO: 3366319 - RNA, 11 nt, Human
agccuggccuc

SEQ ID NO: 3366320 - RNA, 14 nt, Human
agccuggccuccug

SEQ ID NO: 3366321 - RNA, 20 nt, Human
agccuggccuccugccucua

SEQ ID NO: 3366322 - RNA, 13 nt, Human
agccuggcuccaa

SEQ ID NO: 3366323 - RNA, 21 nt, Human
agccuggcuccaaacccucga

SEQ ID NO: 3366324 - RNA, 18 nt, Human
agccuggcucccaggaca

SEQ ID NO: 3366325 - RNA, 15 nt, Human
agccuggcuccccug

SEQ ID NO: 3366326 - RNA, 17 nt, Human
agccuggcuucaaauug

SEQ ID NO: 3366327 - RNA, 20 nt, Human
agccuggcuucuggagcccu

SEQ ID NO: 3366328 - RNA, 21 nt, Human
agccugggacaguuuaucaug

SEQ ID NO: 3366329 - RNA, 15 nt, Human
agccugggcaacaga

SEQ ID NO: 3366330 - RNA, 20 nt, Human
agccugggcaacagagcaag

SEQ ID NO: 3366331 - RNA, 17 nt, Human
agccugggcagcauagc

SEQ ID NO: 3366332 - RNA, 17 nt, Human
acuuuguauacuuuaaa

SEQ ID NO: 3366333 - RNA, 12 nt, Human
acuuuguauagu

SEQ ID NO: 3366334 - RNA, 14 nt, Human
acuuuguauaguua

SEQ ID NO: 3366335 - RNA, 21 nt, Human
acuuuguauaguuauguaaau

SEQ ID NO: 3366336 - RNA, 23 nt, Human
acuuuguauaguuauguaaauaa

SEQ ID NO: 3366337 - RNA, 19 nt, Human
acuuugucuaagaaacauu

SEQ ID NO: 3366338 - RNA, 14 nt, Human
acuuugucugaaaa

SEQ ID NO: 3366339 - RNA, 14 nt, Human
acuuugugaauaga

SEQ ID NO: 3366340 - RNA, 14 nt, Human
acuuugugcuacau

SEQ ID NO: 3366341 - RNA, 22 nt, Human
acuuuguggaccaauuauugau

SEQ ID NO: 3366342 - RNA, 16 nt, Human
acuuuguggaugucuu

SEQ ID NO: 3366343 - RNA, 14 nt, Human
acuuuguuaggcca

SEQ ID NO: 3366344 - RNA, 18 nt, Human
acuuuguuaggccaaaga

SEQ ID NO: 3366345 - RNA, 14 nt, Human
acuuuguucuggcu

SEQ ID NO: 3366346 - RNA, 21 nt, Human
agcccuguugugccacagagu

SEQ ID NO: 3366347 - RNA, 21 nt, Human
agcccuuaugcgguuaauuuu

SEQ ID NO: 3366348 - RNA, 22 nt, Human
agcccuuaugcgguuaauuuug

SEQ ID NO: 3366349 - RNA, 19 nt, Human
agcccuuccaugucgccuc

SEQ ID NO: 3366350 - RNA, 23 nt, Human
agcccuuccaugucgccucugca

SEQ ID NO: 3366351 - RNA, 15 nt, Human
agcccuuccucugcu

SEQ ID NO: 3366352 - RNA, 17 nt, Human
agcccuuccucugcucc

SEQ ID NO: 3366353 - RNA, 22 nt, Human
agcccuucggaggaccagggcu

SEQ ID NO: 3366354 - RNA, 23 nt, Human
agcccuucuccauggcccugcca

SEQ ID NO: 3366355 - RNA, 13 nt, Human
agcccuugaggga

SEQ ID NO: 3366356 - RNA, 14 nt, Human
agcccuugccuccc

SEQ ID NO: 3366357 - RNA, 21 nt, Human
agcccuuuacuugaccuccua

SEQ ID NO: 3366358 - RNA, 16 nt, Human
agcccuuucugugugc

SEQ ID NO: 3366359 - RNA, 17 nt, Human
agcccuuucugugugca

SEQ ID NO: 3366360 - RNA, 21 nt, Human
agcccuuugggaggcugaggc

SEQ ID NO: 3366361 - RNA, 23 nt, Human
agcccuuuuguugagccaggccu

SEQ ID NO: 3366362 - RNA, 14 nt, Human
agccgaagcccagg

SEQ ID NO: 3366363 - RNA, 14 nt, Human
agccgaccucagcc

SEQ ID NO: 3366364 - RNA, 15 nt, Human
agccgaccucagccu

SEQ ID NO: 3366365 - RNA, 17 nt, Human
agccgacuccacuuuca

SEQ ID NO: 3366366 - RNA, 16 nt, Human
agccgacucuggcccu

SEQ ID NO: 3366367 - RNA, 17 nt, Human
agccgacucuggcccug

SEQ ID NO: 3366368 - RNA, 21 nt, Human
agccgacucuggcccuggccc

SEQ ID NO: 3366369 - RNA, 13 nt, Human
agccgagagccug

SEQ ID NO: 3366370 - RNA, 19 nt, Human
agccgagaucacgccacug

SEQ ID NO: 3366371 - RNA, 20 nt, Human
agccgagauugcaccacugc

SEQ ID NO: 3366372 - RNA, 15 nt, Human
agccgagcaggaggc

SEQ ID NO: 3366373 - RNA, 18 nt, Human
agccgagccgggccuggg

SEQ ID NO: 3366374 - RNA, 21 nt, Human
agccgcaucuucuccaucugg

SEQ ID NO: 3366375 - RNA, 20 nt, Human
agccgccauugccaccagga

SEQ ID NO: 3366376 - RNA, 12 nt, Human
agccgcccaagg

SEQ ID NO: 3366377 - RNA, 17 nt, Human
agccgccuuaagcugau

SEQ ID NO: 3366378 - RNA, 17 nt, Human
agccgccuucacagcag

SEQ ID NO: 3366379 - RNA, 22 nt, Human
agccgcggugcccaaccacacu

SEQ ID NO: 3366380 - RNA, 21 nt, Human
agccgcuccugucugccagcc

SEQ ID NO: 3366381 - RNA, 22 nt, Human
agccgcuccugucugccagcca

SEQ ID NO: 3366382 - RNA, 13 nt, Human
agccgcucuccug

SEQ ID NO: 3366383 - RNA, 17 nt, Human
agccgcucuccugccac

SEQ ID NO: 3366384 - RNA, 15 nt, Human
agccgcugagcgagg

SEQ ID NO: 3366385 - RNA, 12 nt, Human
agccgcugcugg

SEQ ID NO: 3366386 - RNA, 22 nt, Human
agccgcuggggccaguuggucc

SEQ ID NO: 3366387 - RNA, 16 nt, Human
agccggcauggcuggg

SEQ ID NO: 3366388 - RNA, 14 nt, Human
agccgggccccugg

SEQ ID NO: 3366389 - RNA, 17 nt, Human
agccgggccccugggcu

SEQ ID NO: 3366390 - RNA, 18 nt, Human
agccgggccccugggcuu

SEQ ID NO: 3366391 - RNA, 14 nt, Human
agccgggccgcaga

SEQ ID NO: 3366392 - RNA, 13 nt, Human
agccgggccuggg

SEQ ID NO: 3366393 - RNA, 21 nt, Human
agccgggcgugguggugagug

SEQ ID NO: 3366394 - RNA, 20 nt, Human
agccggggugggguggcugc

SEQ ID NO: 3366395 - RNA, 24 nt, Human
agccggggugggguggcugcagcc

SEQ ID NO: 3366396 - RNA, 20 nt, Human
agccgggucugccucuucug

SEQ ID NO: 3366397 - RNA, 16 nt, Human
agccguaaaaacugaa

SEQ ID NO: 3366398 - RNA, 20 nt, Human
agccguaaaaacugaaguuc

SEQ ID NO: 3366399 - RNA, 13 nt, Human
agccguccuggcg

SEQ ID NO: 3366400 - RNA, 21 nt, Human
agccguggcuucccgcucagc

SEQ ID NO: 3366401 - RNA, 23 nt, Human
agccguggcuucccgcucagccc

SEQ ID NO: 3366402 - RNA, 23 nt, Human
agccguuuguuccccaagacauu

SEQ ID NO: 3366403 - RNA, 12 nt, Human
agccuaaagauu

SEQ ID NO: 3366404 - RNA, 12 nt, Human
agccuaagggau

SEQ ID NO: 3366405 - RNA, 16 nt, Human
agccuaagggauccug

SEQ ID NO: 3366406 - RNA, 21 nt, Human
agccuaagggauccugccugc

SEQ ID NO: 3366407 - RNA, 16 nt, Human
agccuaccugcucucc

SEQ ID NO: 3366408 - RNA, 13 nt, Human
agccuacucuccu

SEQ ID NO: 3366409 - RNA, 18 nt, Human
agccuagacccuccuccu

SEQ ID NO: 3366410 - RNA, 15 nt, Human
agccuagagugaggg

SEQ ID NO: 3366411 - RNA, 18 nt, Human
agccuagccgaccucagc

SEQ ID NO: 3366412 - RNA, 20 nt, Human
agccuagccgaccucagccu

SEQ ID NO: 3366413 - RNA, 21 nt, Human
agccuagccgaccucagccuu

SEQ ID NO: 3366414 - RNA, 15 nt, Human
agccuaggaccacuc

SEQ ID NO: 3366415 - RNA, 23 nt, Human
agccuaggaccacucagccccua

SEQ ID NO: 3366416 - RNA, 12 nt, Human
agccuaggccag

SEQ ID NO: 3366417 - RNA, 17 nt, Human
agccuaggccuaguccu

SEQ ID NO: 3366418 - RNA, 19 nt, Human
agccuaggccuaguccugc

SEQ ID NO: 3366419 - RNA, 23 nt, Human
agccuaggggucagggaccaagg

SEQ ID NO: 3366420 - RNA, 15 nt, Human
agccuaggugacaga

SEQ ID NO: 3366421 - RNA, 20 nt, Human
agccuagugaaggcuucucu

SEQ ID NO: 3366422 - RNA, 15 nt, Human
agccuaguggcuugu

SEQ ID NO: 3366423 - RNA, 23 nt, Human
agccuaguucauccaauccucac

SEQ ID NO: 3366424 - RNA, 14 nt, Human
agccuauauuuaca

SEQ ID NO: 3366425 - RNA, 18 nt, Human
agccuauauuuacaguga

SEQ ID NO: 3366426 - RNA, 19 nt, Human
agccuauggcagaaaaaau

SEQ ID NO: 3366427 - RNA, 22 nt, Human
agccuauguggauuuuuuccua

SEQ ID NO: 3366428 - RNA, 16 nt, Human
agccuauguugugguc

SEQ ID NO: 3366429 - RNA, 15 nt, Human
agccuauuguaaaua

SEQ ID NO: 3366430 - RNA, 20 nt, Human
agccuauuuaccugcaggcu

SEQ ID NO: 3366431 - RNA, 21 nt, Human
agccuauuuaccugcaggcug

SEQ ID NO: 3366432 - RNA, 20 nt, Human
agccucaaaacaaaggccua

SEQ ID NO: 3366433 - RNA, 21 nt, Human
agccucaaauccaggacccug

SEQ ID NO: 3366434 - RNA, 15 nt, Human
agccucaaccuccug

SEQ ID NO: 3366435 - RNA, 19 nt, Human
agccucaauaagccuuguc

SEQ ID NO: 3366436 - RNA, 15 nt, Human
agccucaauuucuga

SEQ ID NO: 3366437 - RNA, 15 nt, Human
agccucacagaagaa

SEQ ID NO: 3366438 - RNA, 14 nt, Human
agccucacagcagu

SEQ ID NO: 3366439 - RNA, 22 nt, Human
agccucacagcagugagacugg

SEQ ID NO: 3366440 - RNA, 17 nt, Human
agccucacaguccuuac

SEQ ID NO: 3366441 - RNA, 20 nt, Human
agccucacccggugaccucu

SEQ ID NO: 3366442 - RNA, 21 nt, Human
agccucacgcuccuuucugau

SEQ ID NO: 3366443 - RNA, 13 nt, Human
agccucacugaua

SEQ ID NO: 3366444 - RNA, 17 nt, Human
agccucacuugaaugug

SEQ ID NO: 3366445 - RNA, 22 nt, Human
agccucacuugaaugugucacu

SEQ ID NO: 3366446 - RNA, 23 nt, Human
agccucacuuuuaaugaacaaau

SEQ ID NO: 3366447 - RNA, 20 nt, Human
agccucagagacaucagccc

SEQ ID NO: 3366448 - RNA, 17 nt, Human
agccucagauuccuucc

SEQ ID NO: 3366449 - RNA, 13 nt, Human
agccucagcaucc

SEQ ID NO: 3366450 - RNA, 14 nt, Human
agccucagcauccu

SEQ ID NO: 3366451 - RNA, 19 nt, Human
agccucagcauccuggcac

SEQ ID NO: 3366452 - RNA, 20 nt, Human
agccucagcauccuggcacc

SEQ ID NO: 3366453 - RNA, 19 nt, Human
agccucagcgcggcccucc

SEQ ID NO: 3366454 - RNA, 23 nt, Human
agccucagcucucaguugcagcc

SEQ ID NO: 3366455 - RNA, 13 nt, Human
agccucaggacug

SEQ ID NO: 3366456 - RNA, 17 nt, Human
agccucaggacugggag

SEQ ID NO: 3366457 - RNA, 18 nt, Human
agccucaguccuccccuc

SEQ ID NO: 3366458 - RNA, 20 nt, Human
agccucauaguuauuaucca

SEQ ID NO: 3366459 - RNA, 16 nt, Human
agccucauauuuaaag

SEQ ID NO: 3366460 - RNA, 20 nt, Human
agccucauauuuaaagacag

SEQ ID NO: 3366461 - RNA, 17 nt, Human
agccucaucaucagagc

SEQ ID NO: 3366462 - RNA, 20 nt, Human
agccucauccgaggcagggu

SEQ ID NO: 3366463 - RNA, 23 nt, Human
agccuccacuuuggaucaggaaa

SEQ ID NO: 3366464 - RNA, 15 nt, Human
agccuccagccucug

SEQ ID NO: 3366465 - RNA, 17 nt, Human
agccuccagcugccccg

SEQ ID NO: 3366466 - RNA, 17 nt, Human
agccuccaugcugccuc

SEQ ID NO: 3366467 - RNA, 20 nt, Human
agccuccauuuaguucuuug

SEQ ID NO: 3366468 - RNA, 13 nt, Human
agccucccaaagu

SEQ ID NO: 3366469 - RNA, 14 nt, Human
agccucccaaagug

SEQ ID NO: 3366470 - RNA, 17 nt, Human
agccucccaaagugcug

SEQ ID NO: 3366471 - RNA, 19 nt, Human
agccucccaaagugcuggg

SEQ ID NO: 3366472 - RNA, 21 nt, Human
agccucccaaggagaacaaau

SEQ ID NO: 3366473 - RNA, 17 nt, Human
agccucccaaguagcug

SEQ ID NO: 3366474 - RNA, 17 nt, Human
agccuccccugccaggg

SEQ ID NO: 3366475 - RNA, 19 nt, Human
agccuccccugccagggca

SEQ ID NO: 3366476 - RNA, 17 nt, Human
agcuaucgaacuucaca

SEQ ID NO: 3366477 - RNA, 17 nt, Human
agcuaucguaaaauuaa

SEQ ID NO: 3366478 - RNA, 15 nt, Human
agcuaucuaaaguuu

SEQ ID NO: 3366479 - RNA, 16 nt, Human
agcuaucuaaaguuug

SEQ ID NO: 3366480 - RNA, 17 nt, Human
agcuaucucucagugaa

SEQ ID NO: 3366481 - RNA, 24 nt, Human
agcuaucuggucaaccuccuggac

SEQ ID NO: 3366482 - RNA, 17 nt, Human
agcuaucuucauguaaa

SEQ ID NO: 3366483 - RNA, 21 nt, Human
agcuaugaagagcuagagaaa

SEQ ID NO: 3366484 - RNA, 16 nt, Human
agcuaugacuuaacau

SEQ ID NO: 3366485 - RNA, 20 nt, Human
agcuaugcuguaucugugcu

SEQ ID NO: 3366486 - RNA, 17 nt, Human
agcuaugggagccccag

SEQ ID NO: 3366487 - RNA, 20 nt, Human
agcuauguuauauugaaaaa

SEQ ID NO: 3366488 - RNA, 20 nt, Human
agcuauuacugucugguuuu

SEQ ID NO: 3366489 - RNA, 14 nt, Human
agcuauuccuuucc

SEQ ID NO: 3366490 - RNA, 16 nt, Human
agcuauuccuuucccu

SEQ ID NO: 3366491 - RNA, 18 nt, Human
agcuauuccuuucccuuc

SEQ ID NO: 3366492 - RNA, 15 nt, Human
agcuauuuaaagcau

SEQ ID NO: 3366493 - RNA, 15 nt, Human
agcuauuuaugggcc

SEQ ID NO: 3366494 - RNA, 22 nt, Human
agcuauuuaugggccccuggca

SEQ ID NO: 3366495 - RNA, 13 nt, Human
agcuauuucaucu

SEQ ID NO: 3366496 - RNA, 17 nt, Human
agcuauuucaucuauuu

SEQ ID NO: 3366497 - RNA, 20 nt, Human
agcuauuugauguaauacuu

SEQ ID NO: 3366498 - RNA, 12 nt, Human
agcuauuuucca

SEQ ID NO: 3366499 - RNA, 19 nt, Human
agcacuggcucucuccagg

SEQ ID NO: 3366500 - RNA, 20 nt, Human
agcacuggcucucuccagga

SEQ ID NO: 3366501 - RNA, 20 nt, Human
agcacugggaucacaggugu

SEQ ID NO: 3366502 - RNA, 17 nt, Human
agcacuggguugacuuu

SEQ ID NO: 3366503 - RNA, 13 nt, Human
agcacugucccuu

SEQ ID NO: 3366504 - RNA, 14 nt, Human
agcacugucucagu

SEQ ID NO: 3366505 - RNA, 14 nt, Human
agcacugugcuaau

SEQ ID NO: 3366506 - RNA, 14 nt, Human
agcacugugcucag

SEQ ID NO: 3366507 - RNA, 16 nt, Human
agcacuguuccagccu

SEQ ID NO: 3366508 - RNA, 21 nt, Human
agcacuguugauguaucugag

SEQ ID NO: 3366509 - RNA, 13 nt, Human
agcacuuaagaga

SEQ ID NO: 3366510 - RNA, 15 nt, Human
agcacuuaagagaau

SEQ ID NO: 3366511 - RNA, 18 nt, Human
agcacuuaagagaauauu

SEQ ID NO: 3366512 - RNA, 16 nt, Human
agcacuuccaaaauuc

SEQ ID NO: 3366513 - RNA, 19 nt, Human
agcacuuccuugccagucu

SEQ ID NO: 3366514 - RNA, 13 nt, Human
agcacuugcugua

SEQ ID NO: 3366515 - RNA, 18 nt, Human
agcacuuggacucuugcu

SEQ ID NO: 3366516 - RNA, 20 nt, Human
agcacuuggacucuugcucu

SEQ ID NO: 3366517 - RNA, 15 nt, Human
agcacuuggcccuuc

SEQ ID NO: 3366518 - RNA, 22 nt, Human
agcacuugucucauuuuaaugu

SEQ ID NO: 3366519 - RNA, 14 nt, Human
agcacuuuagaaua

SEQ ID NO: 3366520 - RNA, 22 nt, Human
agcacuuucauugccagugucu

SEQ ID NO: 3366521 - RNA, 22 nt, Human
agcacuuucuacaaugugaacu

SEQ ID NO: 3366522 - RNA, 12 nt, Human
agcacuuuggga

SEQ ID NO: 3366523 - RNA, 14 nt, Human
agcacuuugggagg

SEQ ID NO: 3366524 - RNA, 15 nt, Human
agcacuuugggaggc

SEQ ID NO: 3366525 - RNA, 19 nt, Human
agcacuuugggaggccaag

SEQ ID NO: 3366526 - RNA, 21 nt, Human
agcacuuugggaggccaaggu

SEQ ID NO: 3366527 - RNA, 16 nt, Human
agcacuuugggaggcu

SEQ ID NO: 3366528 - RNA, 22 nt, Human
agcacuuugggaggcugaggcg

SEQ ID NO: 3366529 - RNA, 22 nt, Human
agcacuuugggaggcugaggug

SEQ ID NO: 3366530 - RNA, 15 nt, Human
agcagaaaacccuug

SEQ ID NO: 3366531 - RNA, 15 nt, Human
agcagaaagugccuu

SEQ ID NO: 3366532 - RNA, 20 nt, Human
agcagaaagugccuuucagg

SEQ ID NO: 3366533 - RNA, 21 nt, Human
agcagaaagugccuuucagga

SEQ ID NO: 3366534 - RNA, 23 nt, Human
agcagaaagugccuuucaggauc

SEQ ID NO: 3366535 - RNA, 12 nt, Human
agcagaaaugcc

SEQ ID NO: 3366536 - RNA, 13 nt, Human
agcagaaaugccu

SEQ ID NO: 3366537 - RNA, 16 nt, Human
agcagaaauucuguuu

SEQ ID NO: 3366538 - RNA, 20 nt, Human
agcagaaauucuguuuuuaa

SEQ ID NO: 3366539 - RNA, 21 nt, Human
agcagaaauucuguuuuuaaa

SEQ ID NO: 3366540 - RNA, 20 nt, Human
agcagaacagaucuuuuacu

SEQ ID NO: 3366541 - RNA, 21 nt, Human
agcagaacggagccccaggcc

SEQ ID NO: 3366542 - RNA, 18 nt, Human
agcagaaggauuuuuuaa

SEQ ID NO: 3366543 - RNA, 23 nt, Human
agcagaaggggagauggacgaca

SEQ ID NO: 3366544 - RNA, 11 nt, Human
agcagaauaaa

SEQ ID NO: 3366545 - RNA, 13 nt, Human
agcagaauaaagc

SEQ ID NO: 3366546 - RNA, 17 nt, Human
agcagaauaaagcaauu

SEQ ID NO: 3366547 - RNA, 18 nt, Human
agcagaauaaagcaauuu

SEQ ID NO: 3366548 - RNA, 21 nt, Human
agcagaauaaagcaauuuucc

SEQ ID NO: 3366549 - RNA, 19 nt, Human
agcagaaucaaaaugaccu

SEQ ID NO: 3366550 - RNA, 21 nt, Human
agcagaauggugaucacucca

SEQ ID NO: 3366551 - RNA, 16 nt, Human
agcagaauucauucau

SEQ ID NO: 3366552 - RNA, 13 nt, Human
agcagaauuggaa

SEQ ID NO: 3366553 - RNA, 14 nt, Human
agcagaauuggaaa

SEQ ID NO: 3366554 - RNA, 14 nt, Human
agcagacagagcca

SEQ ID NO: 3366555 - RNA, 12 nt, Human
agcagacauugu

SEQ ID NO: 3366556 - RNA, 11 nt, Human
agcagacauuu

SEQ ID NO: 3366557 - RNA, 13 nt, Human
agcagacuacagc

SEQ ID NO: 3366558 - RNA, 17 nt, Human
agcagacuacagcuggg

SEQ ID NO: 3366559 - RNA, 22 nt, Human
agcagacuacagcuggggugca

SEQ ID NO: 3366560 - RNA, 16 nt, Human
agcagacugaucagga

SEQ ID NO: 3366561 - RNA, 15 nt, Human
agcagagaccauccc

SEQ ID NO: 3366562 - RNA, 16 nt, Human
agcagagaccaucccu

SEQ ID NO: 3366563 - RNA, 20 nt, Human
agcagagcaagucugcaggu

SEQ ID NO: 3366564 - RNA, 18 nt, Human
agcagagcuagguggaaa

SEQ ID NO: 3366565 - RNA, 19 nt, Human
agcagagcugauggagaag

SEQ ID NO: 3366566 - RNA, 21 nt, Human
agcagagcugauggagaagga

SEQ ID NO: 3366567 - RNA, 16 nt, Human
agcagagcuuccucag

SEQ ID NO: 3366568 - RNA, 17 nt, Human
agcagaggaaggagagg

SEQ ID NO: 3366569 - RNA, 18 nt, Human
agcagaggaccagggccu

SEQ ID NO: 3366570 - RNA, 19 nt, Human
agcagaggaggggccgcug

SEQ ID NO: 3366571 - RNA, 21 nt, Human
agcagaggaggggccgcugcc

SEQ ID NO: 3366572 - RNA, 22 nt, Human
agcagaggaggggccgcugcca

SEQ ID NO: 3366573 - RNA, 18 nt, Human
agcagagggacuuuguau

SEQ ID NO: 3366574 - RNA, 10 nt, Human
agcagagugc

SEQ ID NO: 3366575 - RNA, 17 nt, Human
agcagagugcacagcug

SEQ ID NO: 3366576 - RNA, 13 nt, Human
agcagagugcuuu

SEQ ID NO: 3366577 - RNA, 15 nt, Human
agcagaguuuucauu

SEQ ID NO: 3366578 - RNA, 22 nt, Human
agcagauacauaugagugugga

SEQ ID NO: 3366579 - RNA, 18 nt, Human
agcagauaccucacccug

SEQ ID NO: 3366580 - RNA, 17 nt, Human
agcagaugaccccuccc

SEQ ID NO: 3366581 - RNA, 18 nt, Human
agcagaugcagagagcca

SEQ ID NO: 3366582 - RNA, 21 nt, Human
agcagauggaaugcuguguua

SEQ ID NO: 3366583 - RNA, 19 nt, Human
agcagaugguuuccacauu

SEQ ID NO: 3366584 - RNA, 19 nt, Human
agcagauuauucacugauu

SEQ ID NO: 3366585 - RNA, 24 nt, Human
agcagauucagaaaugaggccaug

SEQ ID NO: 3366586 - RNA, 18 nt, Human
agcagauuggaaggagac

SEQ ID NO: 3366587 - RNA, 23 nt, Human
agcagauuggaaggagacacaga

SEQ ID NO: 3366588 - RNA, 22 nt, Human
agcagauuguuuccucuuccaa

SEQ ID NO: 3366589 - RNA, 15 nt, Human
agcagcaaaaauaua

SEQ ID NO: 3366590 - RNA, 16 nt, Human
agcagcaaaaauauaa

SEQ ID NO: 3366591 - RNA, 15 nt, Human
agcagcaaauuuuca

SEQ ID NO: 3366592 - RNA, 20 nt, Human
agcagcaagaaaaaaaaaug

SEQ ID NO: 3366593 - RNA, 21 nt, Human
agcagcaagaaaaaaaaaugc

SEQ ID NO: 3366594 - RNA, 14 nt, Human
agcagcaaggucuu

SEQ ID NO: 3366595 - RNA, 13 nt, Human
agcagcaccuccu

SEQ ID NO: 3366596 - RNA, 17 nt, Human
agcagcaccuccucagc

SEQ ID NO: 3366597 - RNA, 16 nt, Human
agcagcaccugcccua

SEQ ID NO: 3366598 - RNA, 15 nt, Human
agcagcacuuauaaa

SEQ ID NO: 3366599 - RNA, 18 nt, Human
agcagcacuuauaaauca

SEQ ID NO: 3366600 - RNA, 12 nt, Human
agcagcagcccu

SEQ ID NO: 3366601 - RNA, 19 nt, Human
agcagcagccuuuaaugca

SEQ ID NO: 3366602 - RNA, 18 nt, Human
agcagcaggaggggggag

SEQ ID NO: 3366603 - RNA, 21 nt, Human
agcagcaggaggggggaggga

SEQ ID NO: 3366604 - RNA, 16 nt, Human
agcagcagggagggcu

SEQ ID NO: 3366605 - RNA, 20 nt, Human
agcagcagguagccugcugg

SEQ ID NO: 3366606 - RNA, 12 nt, Human
agcagcagguga

SEQ ID NO: 3366607 - RNA, 16 nt, Human
agcagcagugaaaaca

SEQ ID NO: 3366608 - RNA, 11 nt, Human
agcagcaucuc

SEQ ID NO: 3366609 - RNA, 19 nt, Human
agcagcaucucuaccuucu

SEQ ID NO: 3366610 - RNA, 18 nt, Human
agcagcaucugcuaauaa

SEQ ID NO: 3366611 - RNA, 21 nt, Human
agcagccaagcuccuugggag

SEQ ID NO: 3366612 - RNA, 11 nt, Human
agcagccacau

SEQ ID NO: 3366613 - RNA, 12 nt, Human
agcagccagcca

SEQ ID NO: 3366614 - RNA, 13 nt, Human
agcagccagcccu

SEQ ID NO: 3366615 - RNA, 16 nt, Human
agcagccagcccugcc

SEQ ID NO: 3366616 - RNA, 17 nt, Human
agcagccagcccugccu

SEQ ID NO: 3366617 - RNA, 21 nt, Human
agcagccagcccugccuggag

SEQ ID NO: 3366618 - RNA, 23 nt, Human
agcagccagcccugccuggagga

SEQ ID NO: 3366619 - RNA, 19 nt, Human
acuuaccuaaacagauaua

SEQ ID NO: 3366620 - RNA, 15 nt, Human
acuuaccuagugaaa

SEQ ID NO: 3366621 - RNA, 20 nt, Human
acuuaccugaguugaagagg

SEQ ID NO: 3366622 - RNA, 19 nt, Human
acuuaccuucaauaaagua

SEQ ID NO: 3366623 - RNA, 14 nt, Human
acuuacucuaagau

SEQ ID NO: 3366624 - RNA, 22 nt, Human
acuuacuguacaugaaaacaca

SEQ ID NO: 3366625 - RNA, 22 nt, Human
acuuacuuacccucaccuguca

SEQ ID NO: 3366626 - RNA, 13 nt, Human
acuuacuugcuua

SEQ ID NO: 3366627 - RNA, 16 nt, Human
acuuacuugcuuauuu

SEQ ID NO: 3366628 - RNA, 21 nt, Human
acuuagaaaaccagcucagca

SEQ ID NO: 3366629 - RNA, 17 nt, Human
acuuagaauaaaauugu

SEQ ID NO: 3366630 - RNA, 22 nt, Human
acuuagaauaaaauuguaaaau

SEQ ID NO: 3366631 - RNA, 21 nt, Human
acuuagaaucccuguguuaau

SEQ ID NO: 3366632 - RNA, 22 nt, Human
acuuagaaucccuguguuaauu

SEQ ID NO: 3366633 - RNA, 12 nt, Human
acuuagaggaaa

SEQ ID NO: 3366634 - RNA, 21 nt, Human
acuuagaggaaauaagaaaaa

SEQ ID NO: 3366635 - RNA, 21 nt, Human
acuuagaguuucuguuugauu

SEQ ID NO: 3366636 - RNA, 22 nt, Human
acuuagaguuucuguuugauuc

SEQ ID NO: 3366637 - RNA, 15 nt, Human
acuuagauuuuacau

SEQ ID NO: 3366638 - RNA, 18 nt, Human
acuuagauuuuacaugaa

SEQ ID NO: 3366639 - RNA, 21 nt, Human
acuuagauuuuacaugaagua

SEQ ID NO: 3366640 - RNA, 17 nt, Human
acuuagcaaaaaguggg

SEQ ID NO: 3366641 - RNA, 19 nt, Human
acuuagcaucuaauuucaa

SEQ ID NO: 3366642 - RNA, 17 nt, Human
acuuagcaugcacaaag

SEQ ID NO: 3366643 - RNA, 22 nt, Human
acuuagcauuuucugcaucucc

SEQ ID NO: 3366644 - RNA, 17 nt, Human
acuuagcgaacccuuua

SEQ ID NO: 3366645 - RNA, 19 nt, Human
acuuagcuggagaugucuc

SEQ ID NO: 3366646 - RNA, 16 nt, Human
acuuagcuuaucaauu

SEQ ID NO: 3366647 - RNA, 21 nt, Human
acuuagcuugaaggaucuguu

SEQ ID NO: 3366648 - RNA, 23 nt, Human
acuuaggaagguggccuuccugc

SEQ ID NO: 3366649 - RNA, 18 nt, Human
acuuaggcaugcacagcu

SEQ ID NO: 3366650 - RNA, 21 nt, Human
acuuaggcaugcacagcugua

SEQ ID NO: 3366651 - RNA, 23 nt, Human
acuuagggcaccagggguuucuc

SEQ ID NO: 3366652 - RNA, 16 nt, Human
acuuaguacaaaguuu

SEQ ID NO: 3366653 - RNA, 19 nt, Human
acuuaguauugcaaaguca

SEQ ID NO: 3366654 - RNA, 13 nt, Human
acuuaguuuugca

SEQ ID NO: 3366655 - RNA, 22 nt, Human
acuuauaagguguuuucugugu

SEQ ID NO: 3366656 - RNA, 15 nt, Human
acuuauagauugaaa

SEQ ID NO: 3366657 - RNA, 21 nt, Human
acuuauagccucugucuggca

SEQ ID NO: 3366658 - RNA, 17 nt, Human
acuuauaguacaugaua

SEQ ID NO: 3366659 - RNA, 13 nt, Human
acuuauauugaag

SEQ ID NO: 3366660 - RNA, 17 nt, Human
acuuauauuguaagaaa

SEQ ID NO: 3366661 - RNA, 23 nt, Human
acuuauauuuucguaugaaaaug

SEQ ID NO: 3366662 - RNA, 19 nt, Human
acuuauauuuuuaauaaaa

SEQ ID NO: 3366663 - RNA, 16 nt, Human
acuuaucucucugugc

SEQ ID NO: 3366664 - RNA, 17 nt, Human
acuuaucuuacaaagug

SEQ ID NO: 3366665 - RNA, 13 nt, Human
acuuaugauuuca

SEQ ID NO: 3366666 - RNA, 19 nt, Human
acuuauguagauauuuggc

SEQ ID NO: 3366667 - RNA, 20 nt, Human
acuuauguagauauuuggcu

SEQ ID NO: 3366668 - RNA, 21 nt, Human
acuuauguagauauuuggcuu

SEQ ID NO: 3366669 - RNA, 21 nt, Human
acuuauuaacaauuaggcaga

SEQ ID NO: 3366670 - RNA, 13 nt, Human
acuuauucaaaga

SEQ ID NO: 3366671 - RNA, 16 nt, Human
acuuauucucaagaag

SEQ ID NO: 3366672 - RNA, 19 nt, Human
acuuauugcugauuuuaau

SEQ ID NO: 3366673 - RNA, 14 nt, Human
acuuauugcuuuga

SEQ ID NO: 3366674 - RNA, 16 nt, Human
acuuauugcuuugaaa

SEQ ID NO: 3366675 - RNA, 20 nt, Human
acuuauuggaacucugcuug

SEQ ID NO: 3366676 - RNA, 21 nt, Human
acuuauuguggauaacaaaga

SEQ ID NO: 3366677 - RNA, 15 nt, Human
acuuauuuaaacucu

SEQ ID NO: 3366678 - RNA, 16 nt, Human
acuuauuucacuuuag

SEQ ID NO: 3366679 - RNA, 15 nt, Human
acuuauuucuucaaa

SEQ ID NO: 3366680 - RNA, 11 nt, Human
acuuauuugag

SEQ ID NO: 3366681 - RNA, 15 nt, Human
acuuauuuucucugu

SEQ ID NO: 3366682 - RNA, 17 nt, Human
acuuauuuuuuucugau

SEQ ID NO: 3366683 - RNA, 16 nt, Human
acuucaaaaacuguca

SEQ ID NO: 3366684 - RNA, 18 nt, Human
acuucaaauccuugaaga

SEQ ID NO: 3366685 - RNA, 19 nt, Human
acuucaagcauggcuauuu

SEQ ID NO: 3366686 - RNA, 23 nt, Human
acuucaaggugacagaaggacca

SEQ ID NO: 3366687 - RNA, 22 nt, Human
acuucaagugcaugcucucugc

SEQ ID NO: 3366688 - RNA, 19 nt, Human
acuucaauaauuguccaug

SEQ ID NO: 3366689 - RNA, 22 nt, Human
acuucaaugggcucuuccaaca

SEQ ID NO: 3366690 - RNA, 14 nt, Human
acuucacacugcaa

SEQ ID NO: 3366691 - RNA, 15 nt, Human
acuucacacugcaag

SEQ ID NO: 3366692 - RNA, 19 nt, Human
acuucacacugcaagagcc

SEQ ID NO: 3366693 - RNA, 20 nt, Human
acuucacagagugugcugga

SEQ ID NO: 3366694 - RNA, 22 nt, Human
acuucacagagugugcuggagg

SEQ ID NO: 3366695 - RNA, 15 nt, Human
acuucacugaaagac

SEQ ID NO: 3366696 - RNA, 23 nt, Human
acuucacugucaggaagaaauca

SEQ ID NO: 3366697 - RNA, 19 nt, Human
acuucacugugcuguuguu

SEQ ID NO: 3366698 - RNA, 22 nt, Human
acuucacugugcuguuguuaug

SEQ ID NO: 3366699 - RNA, 12 nt, Human
acuucagaaaga

SEQ ID NO: 3366700 - RNA, 16 nt, Human
acuucagaaagacuug

SEQ ID NO: 3366701 - RNA, 12 nt, Human
acuucagacaua

SEQ ID NO: 3366702 - RNA, 18 nt, Human
acuucagaugggaggaaa

SEQ ID NO: 3366703 - RNA, 19 nt, Human
acuucagcaagagagaacc

SEQ ID NO: 3366704 - RNA, 21 nt, Human
acuucagcaagagagaaccua

SEQ ID NO: 3366705 - RNA, 11 nt, Human
acuucagcacc

SEQ ID NO: 3366706 - RNA, 19 nt, Human
acuucagcgguuuauauaa

SEQ ID NO: 3366707 - RNA, 17 nt, Human
acuucaggccaacaagg

SEQ ID NO: 3366708 - RNA, 18 nt, Human
acuucaggcucuucuccu

SEQ ID NO: 3366709 - RNA, 18 nt, Human
acuucaggcuugauaaua

SEQ ID NO: 3366710 - RNA, 18 nt, Human
acuucagggcagauuuua

SEQ ID NO: 3366711 - RNA, 19 nt, Human
acuucagggcagauuuuag

SEQ ID NO: 3366712 - RNA, 19 nt, Human
acuucagggcagggcucug

SEQ ID NO: 3366713 - RNA, 20 nt, Human
acuucagggcagggcucuga

SEQ ID NO: 3366714 - RNA, 21 nt, Human
acuucagggcagggcucugau

SEQ ID NO: 3366715 - RNA, 22 nt, Human
acuucaggguucuccucucccc

SEQ ID NO: 3366716 - RNA, 16 nt, Human
acuucaguccugggag

SEQ ID NO: 3366717 - RNA, 18 nt, Human
acuucauauaugaggacu

SEQ ID NO: 3366718 - RNA, 14 nt, Human
acuucauauugcug

SEQ ID NO: 3366719 - RNA, 24 nt, Human
acuucauauugcugagagaaauau

SEQ ID NO: 3366720 - RNA, 16 nt, Human
acuucaucccucuggg

SEQ ID NO: 3366721 - RNA, 16 nt, Human
acuucaucuggcugcc

SEQ ID NO: 3366722 - RNA, 20 nt, Human
acuucaucuuccccaagugc

SEQ ID NO: 3366723 - RNA, 15 nt, Human
acuucaucuucucag

SEQ ID NO: 3366724 - RNA, 16 nt, Human
acuucaucuucucagc

SEQ ID NO: 3366725 - RNA, 20 nt, Human
acuucauggaauggacaucc

SEQ ID NO: 3366726 - RNA, 14 nt, Human
acuucauucuugaa

SEQ ID NO: 3366727 - RNA, 14 nt, Human
acuucauugaaaau

SEQ ID NO: 3366728 - RNA, 13 nt, Human
acuucauuucaga

SEQ ID NO: 3366729 - RNA, 11 nt, Human
agagucuagau

SEQ ID NO: 3366730 - RNA, 17 nt, Human
agagucuagauucaaag

SEQ ID NO: 3366731 - RNA, 21 nt, Human
agagucuagauucaaagguuc

SEQ ID NO: 3366732 - RNA, 17 nt, Human
agagucuagcacucauu

SEQ ID NO: 3366733 - RNA, 18 nt, Human
agagucuauuuacggaac

SEQ ID NO: 3366734 - RNA, 17 nt, Human
agagucucccagggagc

SEQ ID NO: 3366735 - RNA, 13 nt, Human
agagucugaacag

SEQ ID NO: 3366736 - RNA, 13 nt, Human
agagucuggcccu

SEQ ID NO: 3366737 - RNA, 21 nt, Human
agagucuggggaccagcuugg

SEQ ID NO: 3366738 - RNA, 12 nt, Human
agagucugucuc

SEQ ID NO: 3366739 - RNA, 22 nt, Human
agagucuuuguaaguaaacugc

SEQ ID NO: 3366740 - RNA, 16 nt, Human
agagugaaaauugucu

SEQ ID NO: 3366741 - RNA, 22 nt, Human
agagugaacaaauuuacagaga

SEQ ID NO: 3366742 - RNA, 16 nt, Human
agagugaauucccuca

SEQ ID NO: 3366743 - RNA, 18 nt, Human
agagugacuccaagaaca

SEQ ID NO: 3366744 - RNA, 16 nt, Human
agagugacucuccagg

SEQ ID NO: 3366745 - RNA, 13 nt, Human
agagugagagaca

SEQ ID NO: 3366746 - RNA, 20 nt, Human
agagugauagucuuuugcuu

SEQ ID NO: 3366747 - RNA, 15 nt, Human
agagugauugcagcu

SEQ ID NO: 3366748 - RNA, 22 nt, Human
agagugcaacaguagcauagga

SEQ ID NO: 3366749 - RNA, 14 nt, Human
agagugcacagcug

SEQ ID NO: 3366750 - RNA, 16 nt, Human
agagugcacagcuguc

SEQ ID NO: 3366751 - RNA, 13 nt, Human
agagugccccacc

SEQ ID NO: 3366752 - RNA, 16 nt, Human
agagugccccaccugc

SEQ ID NO: 3366753 - RNA, 16 nt, Human
agaguggaauaagaca

SEQ ID NO: 3366754 - RNA, 19 nt, Human
agaguggccccaccuggcc

SEQ ID NO: 3366755 - RNA, 22 nt, Human
agaguggccuggccaggagcuc

SEQ ID NO: 3366756 - RNA, 12 nt, Human
agaguggcuccu

SEQ ID NO: 3366757 - RNA, 19 nt, Human
agaguggcuccucccggug

SEQ ID NO: 3366758 - RNA, 23 nt, Human
agaguggcuccucccggugccca

SEQ ID NO: 3366759 - RNA, 22 nt, Human
agagugggggagagcaggcugg

SEQ ID NO: 3366760 - RNA, 14 nt, Human
agaguguagaagca

SEQ ID NO: 3366761 - RNA, 18 nt, Human
agaguguagaucagagca

SEQ ID NO: 3366762 - RNA, 20 nt, Human
agaguguaguuuacagaaaa

SEQ ID NO: 3366763 - RNA, 14 nt, Human
agagugugaccaaa

SEQ ID NO: 3366764 - RNA, 15 nt, Human
agaguguggaggcug

SEQ ID NO: 3366765 - RNA, 19 nt, Human
agagugugggaagggagag

SEQ ID NO: 3366766 - RNA, 20 nt, Human
agagugugggaagggagagc

SEQ ID NO: 3366767 - RNA, 16 nt, Human
agaguuaagaagaaaa

SEQ ID NO: 3366768 - RNA, 14 nt, Human
agaguuaagaagcu

SEQ ID NO: 3366769 - RNA, 18 nt, Human
agaguuaagaagcuguug

SEQ ID NO: 3366770 - RNA, 12 nt, Human
agaguuaagaau

SEQ ID NO: 3366771 - RNA, 14 nt, Human
agaguuaagaaugu

SEQ ID NO: 3366772 - RNA, 20 nt, Human
agaguuaauauauagaaggg

SEQ ID NO: 3366773 - RNA, 11 nt, Human
agaguuacagu

SEQ ID NO: 3366774 - RNA, 15 nt, Human
agaguuacaguucug

SEQ ID NO: 3366775 - RNA, 22 nt, Human
agaguuacaguucugugguuuc

SEQ ID NO: 3366776 - RNA, 13 nt, Human
agaguuacuugau

SEQ ID NO: 3366777 - RNA, 14 nt, Human
agaguuacuugaua

SEQ ID NO: 3366778 - RNA, 17 nt, Human
agaguuacuugauaagg

SEQ ID NO: 3366779 - RNA, 12 nt, Human
agaguuagacug

SEQ ID NO: 3366780 - RNA, 15 nt, Human
agaguuagacuguug

SEQ ID NO: 3366781 - RNA, 16 nt, Human
agaguuagguuuaaca

SEQ ID NO: 3366782 - RNA, 15 nt, Human
agaguucaagaaaua

SEQ ID NO: 3366783 - RNA, 17 nt, Human
agaguucaauggcugcu

SEQ ID NO: 3366784 - RNA, 16 nt, Human
agaguucacuauaaau

SEQ ID NO: 3366785 - RNA, 16 nt, Human
agaguucagggaagau

SEQ ID NO: 3366786 - RNA, 19 nt, Human
agaguuccccaugcagaca

SEQ ID NO: 3366787 - RNA, 22 nt, Human
agaguuccugcggagugaagag

SEQ ID NO: 3366788 - RNA, 14 nt, Human
agaguucugcucua

SEQ ID NO: 3366789 - RNA, 22 nt, Human
agaguucuuuuugaaguauuua

SEQ ID NO: 3366790 - RNA, 13 nt, Human
agaguugaagaca

SEQ ID NO: 3366791 - RNA, 20 nt, Human
agaguugauacuacaguuug

SEQ ID NO: 3366792 - RNA, 22 nt, Human
agaguugauacuacaguuuguu

SEQ ID NO: 3366793 - RNA, 18 nt, Human
agaguugccccgucucug

SEQ ID NO: 3366794 - RNA, 21 nt, Human
agaguugcugagagggcucga

SEQ ID NO: 3366795 - RNA, 17 nt, Human
agaguuggcaugacucu

SEQ ID NO: 3366796 - RNA, 19 nt, Human
agaguugggugucuccuua

SEQ ID NO: 3366797 - RNA, 22 nt, Human
agaguugggugucuccuuaagc

SEQ ID NO: 3366798 - RNA, 15 nt, Human
agaguuguaaauaua

SEQ ID NO: 3366799 - RNA, 16 nt, Human
agaguuguaaauauau

SEQ ID NO: 3366800 - RNA, 20 nt, Human
agaguuguaaauauauaaau

SEQ ID NO: 3366801 - RNA, 22 nt, Human
agaguuguaaauauauaaauau

SEQ ID NO: 3366802 - RNA, 20 nt, Human
agaguugugacaacuuccug

SEQ ID NO: 3366803 - RNA, 16 nt, Human
agaguugugcacgcag

SEQ ID NO: 3366804 - RNA, 14 nt, Human
agaguuguguuguu

SEQ ID NO: 3366805 - RNA, 17 nt, Human
agaguuguguuguucuu

SEQ ID NO: 3366806 - RNA, 18 nt, Human
agaguuguguuguucuuu

SEQ ID NO: 3366807 - RNA, 21 nt, Human
agaguuguguuguucuuuucc

SEQ ID NO: 3366808 - RNA, 14 nt, Human
agaguuuaaaauca

SEQ ID NO: 3366809 - RNA, 17 nt, Human
agaguuuagcuggaaaa

SEQ ID NO: 3366810 - RNA, 16 nt, Human
agaguuuaguuguagc

SEQ ID NO: 3366811 - RNA, 17 nt, Human
agaguuucuuuacauug

SEQ ID NO: 3366812 - RNA, 20 nt, Human
agaguuugaugaggcccucc

SEQ ID NO: 3366813 - RNA, 16 nt, Human
agaguuuguguguugu

SEQ ID NO: 3366814 - RNA, 18 nt, Human
agaguuuguguguugucu

SEQ ID NO: 3366815 - RNA, 23 nt, Human
agaguuuuauagccuggacugcu

SEQ ID NO: 3366816 - RNA, 13 nt, Human
agaguuuugucuu

SEQ ID NO: 3366817 - RNA, 12 nt, Human
agauaaaaagau

SEQ ID NO: 3366818 - RNA, 19 nt, Human
agauaaaccuagauaaaga

SEQ ID NO: 3366819 - RNA, 20 nt, Human
agauaaacguggauguuacu

SEQ ID NO: 3366820 - RNA, 21 nt, Human
acuccagaccccuggcuuuuc

SEQ ID NO: 3366821 - RNA, 17 nt, Human
acuccagacucucugug

SEQ ID NO: 3366822 - RNA, 20 nt, Human
acuccagcaacuucuucucc

SEQ ID NO: 3366823 - RNA, 14 nt, Human
acuccagccagcgc

SEQ ID NO: 3366824 - RNA, 15 nt, Human
acuccagccagcgcc

SEQ ID NO: 3366825 - RNA, 18 nt, Human
acuccagccagcgccucc

SEQ ID NO: 3366826 - RNA, 20 nt, Human
acuccagccagcgccucccu

SEQ ID NO: 3366827 - RNA, 14 nt, Human
acuccagccugagc

SEQ ID NO: 3366828 - RNA, 19 nt, Human
acuccagccugagcaacag

SEQ ID NO: 3366829 - RNA, 14 nt, Human
acuccagccugggc

SEQ ID NO: 3366830 - RNA, 18 nt, Human
acuccagccugggcgaca

SEQ ID NO: 3366831 - RNA, 20 nt, Human
acuccagccugggugacaga

SEQ ID NO: 3366832 - RNA, 19 nt, Human
acuccaggaaggggcugga

SEQ ID NO: 3366833 - RNA, 22 nt, Human
acuccaggcagcagacacaugc

SEQ ID NO: 3366834 - RNA, 16 nt, Human
acuccaggcccaaggc

SEQ ID NO: 3366835 - RNA, 17 nt, Human
acuccaggcccaaggcu

SEQ ID NO: 3366836 - RNA, 21 nt, Human
acuccaggcccaaggcucccg

SEQ ID NO: 3366837 - RNA, 19 nt, Human
acuccagggacacacagcc

SEQ ID NO: 3366838 - RNA, 15 nt, Human
acuccaguacuggag

SEQ ID NO: 3366839 - RNA, 18 nt, Human
acuccaguggugaagaaa

SEQ ID NO: 3366840 - RNA, 19 nt, Human
acuccaucaguuagagcug

SEQ ID NO: 3366841 - RNA, 11 nt, Human
acuccaucucu

SEQ ID NO: 3366842 - RNA, 16 nt, Human
acuccaucucucaucc

SEQ ID NO: 3366843 - RNA, 20 nt, Human
acuccauguuggcuagccuc

SEQ ID NO: 3366844 - RNA, 12 nt, Human
acuccauuccca

SEQ ID NO: 3366845 - RNA, 12 nt, Human
acuccauugucg

SEQ ID NO: 3366846 - RNA, 19 nt, Human
acucccaaagagcugccua

SEQ ID NO: 3366847 - RNA, 13 nt, Human
acucccaagaaca

SEQ ID NO: 3366848 - RNA, 15 nt, Human
acucccaagcuggac

SEQ ID NO: 3366849 - RNA, 17 nt, Human
acucccacuucccugac

SEQ ID NO: 3366850 - RNA, 17 nt, Human
acucccagacacccacc

SEQ ID NO: 3366851 - RNA, 22 nt, Human
acucccaucugugaaaggaaag

SEQ ID NO: 3366852 - RNA, 14 nt, Human
acucccaugaagcc

SEQ ID NO: 3366853 - RNA, 22 nt, Human
acucccaugaagccuuuugaaa

SEQ ID NO: 3366854 - RNA, 22 nt, Human
acucccaugagggagaugccau

SEQ ID NO: 3366855 - RNA, 13 nt, Human
acucccauuccug

SEQ ID NO: 3366856 - RNA, 20 nt, Human
acucccauuccugaagaacc

SEQ ID NO: 3366857 - RNA, 16 nt, Human
acuccccaacccccaa

SEQ ID NO: 3366858 - RNA, 19 nt, Human
acuccccaaggaagagcca

SEQ ID NO: 3366859 - RNA, 20 nt, Human
acuccccacaucccaucguc

SEQ ID NO: 3366860 - RNA, 17 nt, Human
acuccccagccagccug

SEQ ID NO: 3366861 - RNA, 17 nt, Human
acuccccagccugggcc

SEQ ID NO: 3366862 - RNA, 13 nt, Human
acuccccaggcca

SEQ ID NO: 3366863 - RNA, 14 nt, Human
acucccccaggugg

SEQ ID NO: 3366864 - RNA, 12 nt, Human
acuccccugcac

SEQ ID NO: 3366865 - RNA, 17 nt, Human
acuccccuugagcugag

SEQ ID NO: 3366866 - RNA, 21 nt, Human
acucccgagacggcacugaga

SEQ ID NO: 3366867 - RNA, 15 nt, Human
acucccuccagcaca

SEQ ID NO: 3366868 - RNA, 15 nt, Human
acucccuccucaccu

SEQ ID NO: 3366869 - RNA, 19 nt, Human
acucccuccucaccucugg

SEQ ID NO: 3366870 - RNA, 15 nt, Human
acucccuucccauaa

SEQ ID NO: 3366871 - RNA, 23 nt, Human
acucccuucccaugacccaggcu

SEQ ID NO: 3366872 - RNA, 19 nt, Human
acucccuugcuggccccag

SEQ ID NO: 3366873 - RNA, 19 nt, Human
acucccuugguggcaagag

SEQ ID NO: 3366874 - RNA, 19 nt, Human
agauaccagguugaaagac

SEQ ID NO: 3366875 - RNA, 16 nt, Human
agauaccauacucauu

SEQ ID NO: 3366876 - RNA, 14 nt, Human
agauaccaucagca

SEQ ID NO: 3366877 - RNA, 22 nt, Human
agauacccuacgcuguccagaa

SEQ ID NO: 3366878 - RNA, 22 nt, Human
agauaccuaaaagagauuucaa

SEQ ID NO: 3366879 - RNA, 19 nt, Human
agauaccuuaucuuacaau

SEQ ID NO: 3366880 - RNA, 14 nt, Human
agauacgacuuuau

SEQ ID NO: 3366881 - RNA, 18 nt, Human
agauacucuuauuuuacu

SEQ ID NO: 3366882 - RNA, 13 nt, Human
agauacugaaaua

SEQ ID NO: 3366883 - RNA, 23 nt, Human
agauacugcuacuguaauuuuau

SEQ ID NO: 3366884 - RNA, 14 nt, Human
agauacugcugugu

SEQ ID NO: 3366885 - RNA, 13 nt, Human
agauacuggugga

SEQ ID NO: 3366886 - RNA, 15 nt, Human
agauacuguaucaug

SEQ ID NO: 3366887 - RNA, 12 nt, Human
agauacuuugua

SEQ ID NO: 3366888 - RNA, 13 nt, Human
agauacuuuguau

SEQ ID NO: 3366889 - RNA, 15 nt, Human
agauacuuuguauug

SEQ ID NO: 3366890 - RNA, 20 nt, Human
agauacuuuguauuguccua

SEQ ID NO: 3366891 - RNA, 20 nt, Human
agauacuuuuucuuuuguaa

SEQ ID NO: 3366892 - RNA, 22 nt, Human
agauacuuuuucuuuuguaagu

SEQ ID NO: 3366893 - RNA, 15 nt, Human
agauagaaagcauua

SEQ ID NO: 3366894 - RNA, 15 nt, Human
agauagaaauaaaua

SEQ ID NO: 3366895 - RNA, 14 nt, Human
agauagaagaaaaa

SEQ ID NO: 3366896 - RNA, 15 nt, Human
agauagaagaacugc

SEQ ID NO: 3366897 - RNA, 13 nt, Human
agauagaauuucc

SEQ ID NO: 3366898 - RNA, 16 nt, Human
agauagaauuuccaau

SEQ ID NO: 3366899 - RNA, 13 nt, Human
agauagaguaaaa

SEQ ID NO: 3366900 - RNA, 14 nt, Human
agauagauuuggaa

SEQ ID NO: 3366901 - RNA, 16 nt, Human
agauagcagccuggcu

SEQ ID NO: 3366902 - RNA, 23 nt, Human
agauagcagccuggcuccccugg

SEQ ID NO: 3366903 - RNA, 16 nt, Human
agauagcauugugaac

SEQ ID NO: 3366904 - RNA, 19 nt, Human
agauagcauugugaacuga

SEQ ID NO: 3366905 - RNA, 22 nt, Human
agauagcauugugaacugacag

SEQ ID NO: 3366906 - RNA, 17 nt, Human
agauagccuguggcccu

SEQ ID NO: 3366907 - RNA, 12 nt, Human
agauaggaccuu

SEQ ID NO: 3366908 - RNA, 17 nt, Human
agauaggaccuugggcc

SEQ ID NO: 3366909 - RNA, 18 nt, Human
agauaggaccuugggcca

SEQ ID NO: 3366910 - RNA, 18 nt, Human
agauaggccuucuuguga

SEQ ID NO: 3366911 - RNA, 13 nt, Human
agauaggcucugc

SEQ ID NO: 3366912 - RNA, 12 nt, Human
agauagggaaaa

SEQ ID NO: 3366913 - RNA, 22 nt, Human
agauagggaaaaggggcuccuu

SEQ ID NO: 3366914 - RNA, 22 nt, Human
agauagggcugggcaaggaaaa

SEQ ID NO: 3366915 - RNA, 21 nt, Human
agauaggucagugcaaauacu

SEQ ID NO: 3366916 - RNA, 14 nt, Human
agauaguaacugua

SEQ ID NO: 3366917 - RNA, 17 nt, Human
agauaguagcauacauu

SEQ ID NO: 3366918 - RNA, 20 nt, Human
agauaguccauaauguucug

SEQ ID NO: 3366919 - RNA, 23 nt, Human
agauaguccauaauguucugcua

SEQ ID NO: 3366920 - RNA, 19 nt, Human
agauaguguaacuugcuua

SEQ ID NO: 3366921 - RNA, 15 nt, Human
agauaguuacuauau

SEQ ID NO: 3366922 - RNA, 17 nt, Human
agauaguuuucauccau

SEQ ID NO: 3366923 - RNA, 15 nt, Human
agauauaaauggcug

SEQ ID NO: 3366924 - RNA, 20 nt, Human
agauauaacuauugcccagg

SEQ ID NO: 3366925 - RNA, 20 nt, Human
agauauaagugcuguauaaa

SEQ ID NO: 3366926 - RNA, 20 nt, Human
agauauacuuguuuuuguaa

SEQ ID NO: 3366927 - RNA, 21 nt, Human
agauauacuuguuuuuguaaa

SEQ ID NO: 3366928 - RNA, 15 nt, Human
agauauacuuugugg

SEQ ID NO: 3366929 - RNA, 15 nt, Human
agauauaucugaaaa

SEQ ID NO: 3366930 - RNA, 19 nt, Human
agauauaugcucugcaugu

SEQ ID NO: 3366931 - RNA, 20 nt, Human
agauauauuaaaaauauaaa

SEQ ID NO: 3366932 - RNA, 21 nt, Human
agauauauuaaaaauauaaaa

SEQ ID NO: 3366933 - RNA, 16 nt, Human
agauauauuuuucaca

SEQ ID NO: 3366934 - RNA, 17 nt, Human
agauauccacuuaccug

SEQ ID NO: 3366935 - RNA, 19 nt, Human
agauauccucugcuuaaaa

SEQ ID NO: 3366936 - RNA, 16 nt, Human
agauaucgacuuguuu

SEQ ID NO: 3366937 - RNA, 21 nt, Human
agauaucugagggaggaggcc

SEQ ID NO: 3366938 - RNA, 19 nt, Human
agauaucuuggacaaauca

SEQ ID NO: 3366939 - RNA, 21 nt, Human
agauaucuuggacaaaucaca

SEQ ID NO: 3366940 - RNA, 22 nt, Human
agauaucuuggacaaaucacau

SEQ ID NO: 3366941 - RNA, 13 nt, Human
agauaucuuuucu

SEQ ID NO: 3366942 - RNA, 17 nt, Human
agauaucuuuucuuuag

SEQ ID NO: 3366943 - RNA, 23 nt, Human
agauaucuuuucuuuagagaacu

SEQ ID NO: 3366944 - RNA, 15 nt, Human
agauaugaaagcuga

SEQ ID NO: 3366945 - RNA, 18 nt, Human
agauaugaacauauuguu

SEQ ID NO: 3366946 - RNA, 15 nt, Human
agauaugaguuguuu

SEQ ID NO: 3366947 - RNA, 16 nt, Human
agauaugauauguaaa

SEQ ID NO: 3366948 - RNA, 17 nt, Human
agauaugauauguaaac

SEQ ID NO: 3366949 - RNA, 17 nt, Human
agauaugggacauuuuu

SEQ ID NO: 3366950 - RNA, 18 nt, Human
agauauuaaugcccagac

SEQ ID NO: 3366951 - RNA, 15 nt, Human
agauauuaccaguuu

SEQ ID NO: 3366952 - RNA, 22 nt, Human
agauauuacuuuaucacuuuuu

SEQ ID NO: 3366953 - RNA, 20 nt, Human
agauauuauucaccauguaa

SEQ ID NO: 3366954 - RNA, 21 nt, Human
agauauuauucaccauguaaa

SEQ ID NO: 3366955 - RNA, 12 nt, Human
agauauucaagu

SEQ ID NO: 3366956 - RNA, 22 nt, Human
agauauugaggccaagaauauu

SEQ ID NO: 3366957 - RNA, 14 nt, Human
agauauuggacaaa

SEQ ID NO: 3366958 - RNA, 23 nt, Human
agauauuguucaaacaauaucau

SEQ ID NO: 3366959 - RNA, 14 nt, Human
agauauuuauauau

SEQ ID NO: 3366960 - RNA, 18 nt, Human
agauauuugcaguuuuuc

SEQ ID NO: 3366961 - RNA, 15 nt, Human
agauauuuuaaaaug

SEQ ID NO: 3366962 - RNA, 18 nt, Human
agauauuuuaaaaugaga

SEQ ID NO: 3366963 - RNA, 21 nt, Human
agauauuuucacaaugucagu

SEQ ID NO: 3366964 - RNA, 22 nt, Human
agauauuuugcuuugugauuuu

SEQ ID NO: 3366965 - RNA, 20 nt, Human
agauauuuuuaucuuuauau

SEQ ID NO: 3366966 - RNA, 12 nt, Human
agauauuuuuca

SEQ ID NO: 3366967 - RNA, 16 nt, Human
agauauuuuucaugau

SEQ ID NO: 3366968 - RNA, 14 nt, Human
agaucaaaauaaaa

SEQ ID NO: 3366969 - RNA, 16 nt, Human
agaucaaaauaaaaag

SEQ ID NO: 3366970 - RNA, 14 nt, Human
agaucaaauacuuu

SEQ ID NO: 3366971 - RNA, 14 nt, Human
agaucaaauaguug

SEQ ID NO: 3366972 - RNA, 19 nt, Human
agaucaaauaguugcauag

SEQ ID NO: 3366973 - RNA, 21 nt, Human
agaucaaccccuucgcuccug

SEQ ID NO: 3366974 - RNA, 17 nt, Human
agaucaacgccucacug

SEQ ID NO: 3366975 - RNA, 12 nt, Human
agaucaagcugu

SEQ ID NO: 3366976 - RNA, 14 nt, Human
agaucaagcuguga

SEQ ID NO: 3366977 - RNA, 16 nt, Human
agaucacauaacagaa

SEQ ID NO: 3366978 - RNA, 18 nt, Human
agaucacauaacagaaug

SEQ ID NO: 3366979 - RNA, 19 nt, Human
agaucacauaacagaaugc

SEQ ID NO: 3366980 - RNA, 16 nt, Human
agaucacgccacugca

SEQ ID NO: 3366981 - RNA, 23 nt, Human
acucgugucuggcacagccuggc

SEQ ID NO: 3366982 - RNA, 19 nt, Human
acucguuaauuuguagugu

SEQ ID NO: 3366983 - RNA, 12 nt, Human
acucuaaaaacu

SEQ ID NO: 3366984 - RNA, 14 nt, Human
acucuaaaagaucc

SEQ ID NO: 3366985 - RNA, 18 nt, Human
acucuaaaagguucaggg

SEQ ID NO: 3366986 - RNA, 15 nt, Human
acucuaaagaccaaa

SEQ ID NO: 3366987 - RNA, 16 nt, Human
acucuaaagaccaaac

SEQ ID NO: 3366988 - RNA, 14 nt, Human
acucuaaagcaaau

SEQ ID NO: 3366989 - RNA, 18 nt, Human
acucuaaagcaaauuuau

SEQ ID NO: 3366990 - RNA, 14 nt, Human
acucuaaagucugu

SEQ ID NO: 3366991 - RNA, 23 nt, Human
acucuaaauucuuuauuucuguc

SEQ ID NO: 3366992 - RNA, 14 nt, Human
acucuaacuguaua

SEQ ID NO: 3366993 - RNA, 15 nt, Human
acucuaacuguauau

SEQ ID NO: 3366994 - RNA, 15 nt, Human
acucuaagaaagaac

SEQ ID NO: 3366995 - RNA, 18 nt, Human
acucuaagucauguaugu

SEQ ID NO: 3366996 - RNA, 23 nt, Human
acucuaagucauguauguuucuc

SEQ ID NO: 3366997 - RNA, 16 nt, Human
acucuaaguguuugcu

SEQ ID NO: 3366998 - RNA, 23 nt, Human
acucuaaguuuuaggguacaugu

SEQ ID NO: 3366999 - RNA, 22 nt, Human
acucuaauucccauuuugcaaa

SEQ ID NO: 3367000 - RNA, 15 nt, Human
acucuacagaggcca

SEQ ID NO: 3367001 - RNA, 19 nt, Human
acucuacauaauuuagagu

SEQ ID NO: 3367002 - RNA, 13 nt, Human
acucuacccuccc

SEQ ID NO: 3367003 - RNA, 19 nt, Human
acucuacccucccaccccc

SEQ ID NO: 3367004 - RNA, 13 nt, Human
acucuacccucuu

SEQ ID NO: 3367005 - RNA, 21 nt, Human
acucuacccucuuagaaaaac

SEQ ID NO: 3367006 - RNA, 16 nt, Human
acucuaccugcacacu

SEQ ID NO: 3367007 - RNA, 19 nt, Human
acucuacuuaauccaaugg

SEQ ID NO: 3367008 - RNA, 21 nt, Human
acucuacuuaauccaaugggu

SEQ ID NO: 3367009 - RNA, 21 nt, Human
acucuacuuagcaugucccua

SEQ ID NO: 3367010 - RNA, 19 nt, Human
acucuagaaaacgcgaccu

SEQ ID NO: 3367011 - RNA, 23 nt, Human
acucuagaaaacgcgaccuuggc

SEQ ID NO: 3367012 - RNA, 17 nt, Human
acucuagacaagauauu

SEQ ID NO: 3367013 - RNA, 20 nt, Human
acucuagauuuuguuuugcu

SEQ ID NO: 3367014 - RNA, 18 nt, Human
acucuaggauguauauuu

SEQ ID NO: 3367015 - RNA, 16 nt, Human
acucuaguacugugaa

SEQ ID NO: 3367016 - RNA, 17 nt, Human
acucuaguacugugaau

SEQ ID NO: 3367017 - RNA, 17 nt, Human
acucuagucaaugacau

SEQ ID NO: 3367018 - RNA, 21 nt, Human
agcaagaggccguggcugcug

SEQ ID NO: 3367019 - RNA, 16 nt, Human
agcaagauaaacauua

SEQ ID NO: 3367020 - RNA, 17 nt, Human
agcaagauaaacauuau

SEQ ID NO: 3367021 - RNA, 16 nt, Human
agcaagcaacacagag

SEQ ID NO: 3367022 - RNA, 18 nt, Human
agcaagcaguagcauuug

SEQ ID NO: 3367023 - RNA, 21 nt, Human
agcaagcauucagaagaaaaa

SEQ ID NO: 3367024 - RNA, 22 nt, Human
agcaagcauucagaagaaaaag

SEQ ID NO: 3367025 - RNA, 20 nt, Human
agcaagcauuuauguuuauu

SEQ ID NO: 3367026 - RNA, 19 nt, Human
agcaagcccuacagagcug

SEQ ID NO: 3367027 - RNA, 15 nt, Human
agcaagcucccaagg

SEQ ID NO: 3367028 - RNA, 14 nt, Human
agcaagcuggccuc

SEQ ID NO: 3367029 - RNA, 15 nt, Human
agcaagcuggccucu

SEQ ID NO: 3367030 - RNA, 16 nt, Human
agcaagcuggccucua

SEQ ID NO: 3367031 - RNA, 22 nt, Human
acugaccugucaugccccccuc

SEQ ID NO: 3367032 - RNA, 20 nt, Human
acugaccuuguaaaagacag

SEQ ID NO: 3367033 - RNA, 16 nt, Human
acugacggacucauga

SEQ ID NO: 3367034 - RNA, 21 nt, Human
acugacuaucauaaaaucaaa

SEQ ID NO: 3367035 - RNA, 23 nt, Human
acugacuauucuugauguaaaau

SEQ ID NO: 3367036 - RNA, 21 nt, Human
acugacucuggaaaaggcaua

SEQ ID NO: 3367037 - RNA, 14 nt, Human
acugacucuuaaga

SEQ ID NO: 3367038 - RNA, 16 nt, Human
acugacucuuaagaag

SEQ ID NO: 3367039 - RNA, 12 nt, Human
acugacugaggc

SEQ ID NO: 3367040 - RNA, 15 nt, Human
acugacugaggcagu

SEQ ID NO: 3367041 - RNA, 21 nt, Human
acugacugaggcaguuugagg

SEQ ID NO: 3367042 - RNA, 21 nt, Human
acugacuggauucauucucau

SEQ ID NO: 3367043 - RNA, 13 nt, Human
acugacuucuaag

SEQ ID NO: 3367044 - RNA, 15 nt, Human
acugacuucuaagua

SEQ ID NO: 3367045 - RNA, 24 nt, Human
acugacuuguuugucuuccauucc

SEQ ID NO: 3367046 - RNA, 14 nt, Human
acugacuuuauccu

SEQ ID NO: 3367047 - RNA, 16 nt, Human
acugacuuugcuugcu

SEQ ID NO: 3367048 - RNA, 17 nt, Human
acugacuuugcuugcuu

SEQ ID NO: 3367049 - RNA, 23 nt, Human
acugacuuugcuugcuuugaagu

SEQ ID NO: 3367050 - RNA, 23 nt, Human
acugagaaaacgaaacugcucua

SEQ ID NO: 3367051 - RNA, 20 nt, Human
acugagaauguaagaacuac

SEQ ID NO: 3367052 - RNA, 18 nt, Human
acugagacagcccgggcu

SEQ ID NO: 3367053 - RNA, 15 nt, Human
acugagaccaaagaa

SEQ ID NO: 3367054 - RNA, 23 nt, Human
acugagaccaaggcuuucucuac

SEQ ID NO: 3367055 - RNA, 18 nt, Human
acugagagccuuuuugaa

SEQ ID NO: 3367056 - RNA, 17 nt, Human
acugagauuuugguauu

SEQ ID NO: 3367057 - RNA, 23 nt, Human
acugagcacuguuuucuagugua

SEQ ID NO: 3367058 - RNA, 14 nt, Human
acugagcagagucu

SEQ ID NO: 3367059 - RNA, 18 nt, Human
acugagcauagugguggg

SEQ ID NO: 3367060 - RNA, 20 nt, Human
acugagccagucccaggggc

SEQ ID NO: 3367061 - RNA, 13 nt, Human
acugagccccccc

SEQ ID NO: 3367062 - RNA, 18 nt, Human
acugagccccgcagaccu

SEQ ID NO: 3367063 - RNA, 16 nt, Human
acugagcuccaugugc

SEQ ID NO: 3367064 - RNA, 16 nt, Human
acugagcuccucuggg

SEQ ID NO: 3367065 - RNA, 21 nt, Human
acugagcuccucugggcagga

SEQ ID NO: 3367066 - RNA, 16 nt, Human
acugagcuucucugug

SEQ ID NO: 3367067 - RNA, 18 nt, Human
acugagcuucucugugaa

SEQ ID NO: 3367068 - RNA, 12 nt, Human
acugagcuugga

SEQ ID NO: 3367069 - RNA, 13 nt, Human
acugaggaagaac

SEQ ID NO: 3367070 - RNA, 15 nt, Human
acugaggaccagcca

SEQ ID NO: 3367071 - RNA, 14 nt, Human
acugaggaucagag

SEQ ID NO: 3367072 - RNA, 19 nt, Human
acugaggcagacagcagcu

SEQ ID NO: 3367073 - RNA, 14 nt, Human
acugaggcagggaa

SEQ ID NO: 3367074 - RNA, 20 nt, Human
acugaggcaguuugaggauu

SEQ ID NO: 3367075 - RNA, 13 nt, Human
acugaggccugag

SEQ ID NO: 3367076 - RNA, 19 nt, Human
acugaggccugagacccag

SEQ ID NO: 3367077 - RNA, 20 nt, Human
acugagggaccaacugggcc

SEQ ID NO: 3367078 - RNA, 22 nt, Human
acugaggggaggggagcauggg

SEQ ID NO: 3367079 - RNA, 19 nt, Human
acugagggggccuggaugc

SEQ ID NO: 3367080 - RNA, 24 nt, Human
acugagggugaguuggcuuaccug

SEQ ID NO: 3367081 - RNA, 21 nt, Human
acugagguucauggauuuucc

SEQ ID NO: 3367082 - RNA, 22 nt, Human
acugaguacguugugcauuugg

SEQ ID NO: 3367083 - RNA, 23 nt, Human
acugaguacguugugcauuuggu

SEQ ID NO: 3367084 - RNA, 12 nt, Human
acugagugacuc

SEQ ID NO: 3367085 - RNA, 14 nt, Human
acugagugggaagc

SEQ ID NO: 3367086 - RNA, 18 nt, Human
acugaguuacauugucau

SEQ ID NO: 3367087 - RNA, 19 nt, Human
acugaguuagaauguugaa

SEQ ID NO: 3367088 - RNA, 13 nt, Human
acugaguuuucca

SEQ ID NO: 3367089 - RNA, 13 nt, Human
acugauaaagaug

SEQ ID NO: 3367090 - RNA, 21 nt, Human
acugauaaagaugagugagca

SEQ ID NO: 3367091 - RNA, 16 nt, Human
acugauaguguccaaa

SEQ ID NO: 3367092 - RNA, 15 nt, Human
acugauauucagaau

SEQ ID NO: 3367093 - RNA, 16 nt, Human
acugauauucagaauu

SEQ ID NO: 3367094 - RNA, 13 nt, Human
acugaucucucgu

SEQ ID NO: 3367095 - RNA, 18 nt, Human
acugaugcugagauucuu

SEQ ID NO: 3367096 - RNA, 11 nt, Human
acugaugcugc

SEQ ID NO: 3367097 - RNA, 12 nt, Human
acugaugcuuuu

SEQ ID NO: 3367098 - RNA, 18 nt, Human
acugaugcuuuuagcuca

SEQ ID NO: 3367099 - RNA, 21 nt, Human
acugauggaauuuuuuuguac

SEQ ID NO: 3367100 - RNA, 23 nt, Human
acugauggaauuuuuuuguacga

SEQ ID NO: 3367101 - RNA, 23 nt, Human
acugaugggcaacccccagccug

SEQ ID NO: 3367102 - RNA, 12 nt, Human
acugaugugaaa

SEQ ID NO: 3367103 - RNA, 16 nt, Human
acugauguuaggcugg

SEQ ID NO: 3367104 - RNA, 18 nt, Human
acugauuaugucuuuuau

SEQ ID NO: 3367105 - RNA, 15 nt, Human
acugauuauuuucuu

SEQ ID NO: 3367106 - RNA, 14 nt, Human
acugauucaauuug

SEQ ID NO: 3367107 - RNA, 20 nt, Human
acugauucacaucucauuuu

SEQ ID NO: 3367108 - RNA, 13 nt, Human
acugauuguuuca

SEQ ID NO: 3367109 - RNA, 21 nt, Human
acugauuguuuuagagacuau

SEQ ID NO: 3367110 - RNA, 15 nt, Human
acugauuucagagug

SEQ ID NO: 3367111 - RNA, 17 nt, Human
acugauuuccccuuuug

SEQ ID NO: 3367112 - RNA, 21 nt, Human
acugauuuccccuuuugcauu

SEQ ID NO: 3367113 - RNA, 13 nt, Human
acugauuuccuuu

SEQ ID NO: 3367114 - RNA, 22 nt, Human
acugauuuuguuauuuuuauau

SEQ ID NO: 3367115 - RNA, 18 nt, Human
acugauuuuuuuuuccuu

SEQ ID NO: 3367116 - RNA, 20 nt, Human
acugauuuuuuuuuccuuca

SEQ ID NO: 3367117 - RNA, 21 nt, Human
acugauuuuuuuuuccuucag

SEQ ID NO: 3367118 - RNA, 23 nt, Human
acugauuuuuuuuuccuucagug

SEQ ID NO: 3367119 - RNA, 22 nt, Human
acugcaaaucaggcuuuuguuu

SEQ ID NO: 3367120 - RNA, 11 nt, Human
acugcaacagg

SEQ ID NO: 3367121 - RNA, 12 nt, Human
acugcaacagga

SEQ ID NO: 3367122 - RNA, 14 nt, Human
acugcaaccuccac

SEQ ID NO: 3367123 - RNA, 13 nt, Human
acugcaaccuccg

SEQ ID NO: 3367124 - RNA, 14 nt, Human
acugcaaccuccgc

SEQ ID NO: 3367125 - RNA, 16 nt, Human
acugcaaccuccgccu

SEQ ID NO: 3367126 - RNA, 16 nt, Human
acugcaaccucugccu

SEQ ID NO: 3367127 - RNA, 20 nt, Human
acugcaaccuucgccaccug

SEQ ID NO: 3367128 - RNA, 20 nt, Human
acugcaaccuuguuuauuaa

SEQ ID NO: 3367129 - RNA, 16 nt, Human
acugcaacuucugccu

SEQ ID NO: 3367130 - RNA, 20 nt, Human
acugcaacuuguaaaugugg

SEQ ID NO: 3367131 - RNA, 16 nt, Human
acugcaagaaaaugau

SEQ ID NO: 3367132 - RNA, 16 nt, Human
acugcaagagccuugg

SEQ ID NO: 3367133 - RNA, 20 nt, Human
acugcaagucacaaaggaau

SEQ ID NO: 3367134 - RNA, 20 nt, Human
acugcaagugagcaaaccug

SEQ ID NO: 3367135 - RNA, 19 nt, Human
acugcaauagagacuguag

SEQ ID NO: 3367136 - RNA, 15 nt, Human
acugcaaucauaugu

SEQ ID NO: 3367137 - RNA, 17 nt, Human
acugcacaugaagaaau

SEQ ID NO: 3367138 - RNA, 16 nt, Human
acugcacaugauuuca

SEQ ID NO: 3367139 - RNA, 17 nt, Human
acugcacaugauuucac

SEQ ID NO: 3367140 - RNA, 18 nt, Human
acugcacaugauuucaca

SEQ ID NO: 3367141 - RNA, 12 nt, Human
acugcacccagg

SEQ ID NO: 3367142 - RNA, 22 nt, Human
acugcacccccuccugcugcag

SEQ ID NO: 3367143 - RNA, 14 nt, Human
acugcaccgggcca

SEQ ID NO: 3367144 - RNA, 20 nt, Human
acugcacguggcuucugaug

SEQ ID NO: 3367145 - RNA, 14 nt, Human
acugcacguuuuca

SEQ ID NO: 3367146 - RNA, 17 nt, Human
acugcacuccagccugg

SEQ ID NO: 3367147 - RNA, 13 nt, Human
acugcagaagcaa

SEQ ID NO: 3367148 - RNA, 18 nt, Human
acugcagaccuguccucc

SEQ ID NO: 3367149 - RNA, 21 nt, Human
acugcagaccuguccuccugg

SEQ ID NO: 3367150 - RNA, 17 nt, Human
acugcagauugagaccu

SEQ ID NO: 3367151 - RNA, 19 nt, Human
acugcagcaaucuuugaaa

SEQ ID NO: 3367152 - RNA, 21 nt, Human
acugcagcaccuccaggccug

SEQ ID NO: 3367153 - RNA, 21 nt, Human
acugcagccucaaccuccugg

SEQ ID NO: 3367154 - RNA, 23 nt, Human
acugcagccucaaccuccugggc

SEQ ID NO: 3367155 - RNA, 22 nt, Human
acugcagccuccgcuucccugg

SEQ ID NO: 3367156 - RNA, 12 nt, Human
acugcaggcccu

SEQ ID NO: 3367157 - RNA, 14 nt, Human
acugcaggcccugg

SEQ ID NO: 3367158 - RNA, 15 nt, Human
acugcaggcccuggc

SEQ ID NO: 3367159 - RNA, 16 nt, Human
acugcaggcccuggcc

SEQ ID NO: 3367160 - RNA, 22 nt, Human
acugcaggcccuggccuccccu

SEQ ID NO: 3367161 - RNA, 12 nt, Human
acugcagggaca

SEQ ID NO: 3367162 - RNA, 16 nt, Human
agagauucauuuucua

SEQ ID NO: 3367163 - RNA, 18 nt, Human
agagauucauuuucuaga

SEQ ID NO: 3367164 - RNA, 12 nt, Human
agagauucugau

SEQ ID NO: 3367165 - RNA, 20 nt, Human
agagauucugugaucuuuua

SEQ ID NO: 3367166 - RNA, 23 nt, Human
agagauucugugaucuuuuaaag

SEQ ID NO: 3367167 - RNA, 20 nt, Human
agagauuggaaugggcagcu

SEQ ID NO: 3367168 - RNA, 17 nt, Human
agagauuggaucaagua

SEQ ID NO: 3367169 - RNA, 16 nt, Human
agagauugugguuuca

SEQ ID NO: 3367170 - RNA, 13 nt, Human
agagauuucucau

SEQ ID NO: 3367171 - RNA, 21 nt, Human
agagauuuuuuuuuaaagaag

SEQ ID NO: 3367172 - RNA, 20 nt, Human
agagcaaaauugauguguuu

SEQ ID NO: 3367173 - RNA, 17 nt, Human
agagcaaccucucacuc

SEQ ID NO: 3367174 - RNA, 14 nt, Human
agagcaacucugag

SEQ ID NO: 3367175 - RNA, 23 nt, Human
agagcaagacgcugugcugcccu

SEQ ID NO: 3367176 - RNA, 18 nt, Human
agagcaagacucugucua

SEQ ID NO: 3367177 - RNA, 13 nt, Human
agagcaagagagc

SEQ ID NO: 3367178 - RNA, 20 nt, Human
agagcaagagauaagucuuu

SEQ ID NO: 3367179 - RNA, 23 nt, Human
agagcaagauccugucuuuaagg

SEQ ID NO: 3367180 - RNA, 15 nt, Human
agagcaagcuuuuuu

SEQ ID NO: 3367181 - RNA, 21 nt, Human
agagcaaggaagguaaaaagu

SEQ ID NO: 3367182 - RNA, 21 nt, Human
agagcaaugcccguaaugcuu

SEQ ID NO: 3367183 - RNA, 17 nt, Human
agagcaaugguuguauu

SEQ ID NO: 3367184 - RNA, 15 nt, Human
agagcacaaacauuu

SEQ ID NO: 3367185 - RNA, 14 nt, Human
agagcacacuguag

SEQ ID NO: 3367186 - RNA, 11 nt, Human
agagcacagcc

SEQ ID NO: 3367187 - RNA, 13 nt, Human
agagcacagcccu

SEQ ID NO: 3367188 - RNA, 18 nt, Human
agagcaccuaguccagug

SEQ ID NO: 3367189 - RNA, 17 nt, Human
agagcaccugcugucug

SEQ ID NO: 3367190 - RNA, 21 nt, Human
agagcaccuuagacagucccu

SEQ ID NO: 3367191 - RNA, 22 nt, Human
agagcaccuuagacagucccug

SEQ ID NO: 3367192 - RNA, 20 nt, Human
agagcaccuuugcacaggau

SEQ ID NO: 3367193 - RNA, 21 nt, Human
agagcacuagguucaauuccc

SEQ ID NO: 3367194 - RNA, 13 nt, Human
agagcacugccac

SEQ ID NO: 3367195 - RNA, 16 nt, Human
agagcacugcuccagu

SEQ ID NO: 3367196 - RNA, 21 nt, Human
agagcacuggguugcagggga

SEQ ID NO: 3367197 - RNA, 14 nt, Human
agagcagaaauucu

SEQ ID NO: 3367198 - RNA, 15 nt, Human
agagcagaaauucug

SEQ ID NO: 3367199 - RNA, 20 nt, Human
agagcagaaauucuguuuuu

SEQ ID NO: 3367200 - RNA, 20 nt, Human
agagcagaacagaucuuuua

SEQ ID NO: 3367201 - RNA, 23 nt, Human
agagcagaacggagccccaggcc

SEQ ID NO: 3367202 - RNA, 12 nt, Human
agagcagaugca

SEQ ID NO: 3367203 - RNA, 18 nt, Human
agagcagaugcagagagc

SEQ ID NO: 3367204 - RNA, 19 nt, Human
agagcagaugcagagagcc

SEQ ID NO: 3367205 - RNA, 19 nt, Human
agagcagcaaggucuugcu

SEQ ID NO: 3367206 - RNA, 12 nt, Human
agagcagcaccu

SEQ ID NO: 3367207 - RNA, 19 nt, Human
agagcagccuguggcaucu

SEQ ID NO: 3367208 - RNA, 19 nt, Human
agagcagcuccuuccuagc

SEQ ID NO: 3367209 - RNA, 20 nt, Human
agagcagcuucugccacuuc

SEQ ID NO: 3367210 - RNA, 18 nt, Human
agagcagcuuuaaacuca

SEQ ID NO: 3367211 - RNA, 20 nt, Human
agagcaggaagcauucagag

SEQ ID NO: 3367212 - RNA, 23 nt, Human
agagcaggaagcauucagagagc

SEQ ID NO: 3367213 - RNA, 14 nt, Human
agagcaggaauggg

SEQ ID NO: 3367214 - RNA, 20 nt, Human
agagcaggacuccaggccca

SEQ ID NO: 3367215 - RNA, 19 nt, Human
agagcaggacugaugucuc

SEQ ID NO: 3367216 - RNA, 20 nt, Human
agagcaggaggccccuggcc

SEQ ID NO: 3367217 - RNA, 13 nt, Human
agagcaggcacau

SEQ ID NO: 3367218 - RNA, 20 nt, Human
aggagagucccagagcagga

SEQ ID NO: 3367219 - RNA, 21 nt, Human
aggagagucuugcagugauua

SEQ ID NO: 3367220 - RNA, 16 nt, Human
aggagaucagaaaaau

SEQ ID NO: 3367221 - RNA, 20 nt, Human
aggagaucgagaccauccug

SEQ ID NO: 3367222 - RNA, 16 nt, Human
aggagaugcuccuugg

SEQ ID NO: 3367223 - RNA, 17 nt, Human
aggagaugcuccuuggg

SEQ ID NO: 3367224 - RNA, 22 nt, Human
aggagauguaagagcuuuacaa

SEQ ID NO: 3367225 - RNA, 13 nt, Human
aggagauugagaa

SEQ ID NO: 3367226 - RNA, 19 nt, Human
aggagauugagaaggagag

SEQ ID NO: 3367227 - RNA, 14 nt, Human
aggagcaaagccug

SEQ ID NO: 3367228 - RNA, 18 nt, Human
aggagcaaauguuucugc

SEQ ID NO: 3367229 - RNA, 22 nt, Human
aggagcaaauguuucugcagua

SEQ ID NO: 3367230 - RNA, 17 nt, Human
aggagcacaggucccac

SEQ ID NO: 3367231 - RNA, 23 nt, Human
aggagcacggcucuguccccagc

SEQ ID NO: 3367232 - RNA, 15 nt, Human
aggagcacugaaagu

SEQ ID NO: 3367233 - RNA, 20 nt, Human
aggagcagcaggagggggga

SEQ ID NO: 3367234 - RNA, 12 nt, Human
aggagcagccac

SEQ ID NO: 3367235 - RNA, 18 nt, Human
aggagcauauguccuaga

SEQ ID NO: 3367236 - RNA, 14 nt, Human
aggagccaccaguu

SEQ ID NO: 3367237 - RNA, 14 nt, Human
aggagccagacaga

SEQ ID NO: 3367238 - RNA, 13 nt, Human
aggagccaggcaa

SEQ ID NO: 3367239 - RNA, 24 nt, Human
aggagcccacggcuaagaggcugc

SEQ ID NO: 3367240 - RNA, 20 nt, Human
aggagcccagcguccacucu

SEQ ID NO: 3367241 - RNA, 15 nt, Human
aggagcccaggccag

SEQ ID NO: 3367242 - RNA, 16 nt, Human
aggagcccaggccagg

SEQ ID NO: 3367243 - RNA, 17 nt, Human
aggagcccaggccagga

SEQ ID NO: 3367244 - RNA, 20 nt, Human
aggagcccaggccaggacuc

SEQ ID NO: 3367245 - RNA, 22 nt, Human
aggagcccaggccaggacucug

SEQ ID NO: 3367246 - RNA, 20 nt, Human
aggagcccauuuggagggcc

SEQ ID NO: 3367247 - RNA, 14 nt, Human
aggagccccagcua

SEQ ID NO: 3367248 - RNA, 12 nt, Human
aggagcccccac

SEQ ID NO: 3367249 - RNA, 19 nt, Human
aggagcccccacccuguuc

SEQ ID NO: 3367250 - RNA, 14 nt, Human
aggagcccugccuc

SEQ ID NO: 3367251 - RNA, 17 nt, Human
aggagcccugccucucc

SEQ ID NO: 3367252 - RNA, 16 nt, Human
aggagccuaggccagg

SEQ ID NO: 3367253 - RNA, 16 nt, Human
aggagccuccugcccu

SEQ ID NO: 3367254 - RNA, 14 nt, Human
aggagccugcuggu

SEQ ID NO: 3367255 - RNA, 12 nt, Human
aggagccugucc

SEQ ID NO: 3367256 - RNA, 12 nt, Human
aggagccuguga

SEQ ID NO: 3367257 - RNA, 17 nt, Human
aggagccugugaaccca

SEQ ID NO: 3367258 - RNA, 20 nt, Human
aggagccugugaacccagga

SEQ ID NO: 3367259 - RNA, 22 nt, Human
aggagccugugaacccaggaca

SEQ ID NO: 3367260 - RNA, 13 nt, Human
aggagcuaaggcu

SEQ ID NO: 3367261 - RNA, 15 nt, Human
aggagcuaaggcucu

SEQ ID NO: 3367262 - RNA, 17 nt, Human
aggagcuaaggcucuau

SEQ ID NO: 3367263 - RNA, 16 nt, Human
aggagcuaccugugug

SEQ ID NO: 3367264 - RNA, 22 nt, Human
aggagcuccauacacacgcugc

SEQ ID NO: 3367265 - RNA, 23 nt, Human
aggagcucuuaacuacaguggcu

SEQ ID NO: 3367266 - RNA, 14 nt, Human
aggagcugagaaua

SEQ ID NO: 3367267 - RNA, 16 nt, Human
aggagcugagaauaga

SEQ ID NO: 3367268 - RNA, 23 nt, Human
aggagcugagaauagaaggaaac

SEQ ID NO: 3367269 - RNA, 15 nt, Human
aggagcugagguuuc

SEQ ID NO: 3367270 - RNA, 21 nt, Human
aggagcugagguuucacccuu

SEQ ID NO: 3367271 - RNA, 14 nt, Human
aggagcugccugga

SEQ ID NO: 3367272 - RNA, 16 nt, Human
aggagcugccuggacc

SEQ ID NO: 3367273 - RNA, 13 nt, Human
aggagcugcuaua

SEQ ID NO: 3367274 - RNA, 12 nt, Human
aggagcugcugg

SEQ ID NO: 3367275 - RNA, 17 nt, Human
aggagcugggagccggg

SEQ ID NO: 3367276 - RNA, 16 nt, Human
aggagcugggaggaaa

SEQ ID NO: 3367277 - RNA, 20 nt, Human
aggagcugggcagaaggcca

SEQ ID NO: 3367278 - RNA, 21 nt, Human
aggagcuggggaucccucccc

SEQ ID NO: 3367279 - RNA, 19 nt, Human
aggagcugggggcagccug

SEQ ID NO: 3367280 - RNA, 16 nt, Human
aggagcuuccuguccu

SEQ ID NO: 3367281 - RNA, 22 nt, Human
aggagcuucugggguccccagg

SEQ ID NO: 3367282 - RNA, 22 nt, Human
aggagcuucuuguuuccuuguu

SEQ ID NO: 3367283 - RNA, 17 nt, Human
aggagcuuugacucagg

SEQ ID NO: 3367284 - RNA, 14 nt, Human
aggaggaaggcaag

SEQ ID NO: 3367285 - RNA, 17 nt, Human
aggaggaaggcaagagg

SEQ ID NO: 3367286 - RNA, 19 nt, Human
aggaggaaugcuggacugg

SEQ ID NO: 3367287 - RNA, 16 nt, Human
aggaggacccaggaca

SEQ ID NO: 3367288 - RNA, 18 nt, Human
aggaggacccaggacagg

SEQ ID NO: 3367289 - RNA, 15 nt, Human
aggaggagcaggggc

SEQ ID NO: 3367290 - RNA, 14 nt, Human
aggaggagccuguc

SEQ ID NO: 3367291 - RNA, 23 nt, Human
aggaggaggcaauugggauggcg

SEQ ID NO: 3367292 - RNA, 14 nt, Human
aggaggaugggcuc

SEQ ID NO: 3367293 - RNA, 17 nt, Human
aggaggaugucccuggg

SEQ ID NO: 3367294 - RNA, 21 nt, Human
aggaggauugcuugagcccag

SEQ ID NO: 3367295 - RNA, 23 nt, Human
aggaggauugcuugagcccagga

SEQ ID NO: 3367296 - RNA, 14 nt, Human
aggaggcagaaagc

SEQ ID NO: 3367297 - RNA, 22 nt, Human
aggaggcagaauaagaaaacaa

SEQ ID NO: 3367298 - RNA, 20 nt, Human
aggaggcagagguugcagug

SEQ ID NO: 3367299 - RNA, 17 nt, Human
aggaggcagcaggacug

SEQ ID NO: 3367300 - RNA, 14 nt, Human
aggaggccaccucu

SEQ ID NO: 3367301 - RNA, 15 nt, Human
aggaggccaccucuc

SEQ ID NO: 3367302 - RNA, 17 nt, Human
aggaggccaccucucca

SEQ ID NO: 3367303 - RNA, 18 nt, Human
aggaggccaccucuccaa

SEQ ID NO: 3367304 - RNA, 19 nt, Human
aggaggccaccucuccaag

SEQ ID NO: 3367305 - RNA, 22 nt, Human
aggaggccaccucuccaagggc

SEQ ID NO: 3367306 - RNA, 20 nt, Human
aggccgaggccaugugcaua

SEQ ID NO: 3367307 - RNA, 20 nt, Human
aggccgcagcuccauuuucu

SEQ ID NO: 3367308 - RNA, 18 nt, Human
aggccgcagcucuugccc

SEQ ID NO: 3367309 - RNA, 14 nt, Human
aggccgccccagcc

SEQ ID NO: 3367310 - RNA, 18 nt, Human
aggccgcuagaggccuga

SEQ ID NO: 3367311 - RNA, 21 nt, Human
aggccgcuagaggccugagga

SEQ ID NO: 3367312 - RNA, 20 nt, Human
aggccgcuguucacccacag

SEQ ID NO: 3367313 - RNA, 15 nt, Human
aggccggcagcccca

SEQ ID NO: 3367314 - RNA, 14 nt, Human
aggccggccagccu

SEQ ID NO: 3367315 - RNA, 19 nt, Human
aggccggcgagcccugugg

SEQ ID NO: 3367316 - RNA, 20 nt, Human
aggccggcgccuuccccucg

SEQ ID NO: 3367317 - RNA, 18 nt, Human
aggccgggaaaaagccca

SEQ ID NO: 3367318 - RNA, 16 nt, Human
aggccgggcagagcac

SEQ ID NO: 3367319 - RNA, 19 nt, Human
aggccgggcagagcacagc

SEQ ID NO: 3367320 - RNA, 20 nt, Human
aggccgggugcucagggcug

SEQ ID NO: 3367321 - RNA, 13 nt, Human
aggccguccuccc

SEQ ID NO: 3367322 - RNA, 21 nt, Human
aggccguccucccgggcccuc

SEQ ID NO: 3367323 - RNA, 17 nt, Human
aggccgugacgucuggg

SEQ ID NO: 3367324 - RNA, 12 nt, Human
aggccguggcug

SEQ ID NO: 3367325 - RNA, 20 nt, Human
aggccguggcugcccacaca

SEQ ID NO: 3367326 - RNA, 21 nt, Human
aggccguugcugacuuagaau

SEQ ID NO: 3367327 - RNA, 23 nt, Human
aggccguugcugacuuagaaucc

SEQ ID NO: 3367328 - RNA, 19 nt, Human
aggccuaauucuaugccug

SEQ ID NO: 3367329 - RNA, 19 nt, Human
aggccuaccccgcagacac

SEQ ID NO: 3367330 - RNA, 22 nt, Human
aggccuaccccgcagacaccuu

SEQ ID NO: 3367331 - RNA, 14 nt, Human
aggccuacuccugu

SEQ ID NO: 3367332 - RNA, 15 nt, Human
aggccuacuccuguc

SEQ ID NO: 3367333 - RNA, 16 nt, Human
aggccuagacucuguc

SEQ ID NO: 3367334 - RNA, 17 nt, Human
aggccuaggaggguccu

SEQ ID NO: 3367335 - RNA, 16 nt, Human
aggccuaggauucuaa

SEQ ID NO: 3367336 - RNA, 17 nt, Human
aggccuaggauucuaaa

SEQ ID NO: 3367337 - RNA, 16 nt, Human
aggccuauaaugaagc

SEQ ID NO: 3367338 - RNA, 15 nt, Human
aggccucaacuccuc

SEQ ID NO: 3367339 - RNA, 14 nt, Human
aggccucagccaga

SEQ ID NO: 3367340 - RNA, 15 nt, Human
aggccucagccagag

SEQ ID NO: 3367341 - RNA, 15 nt, Human
aggccucaggugcug

SEQ ID NO: 3367342 - RNA, 16 nt, Human
aggccucaguggacuu

SEQ ID NO: 3367343 - RNA, 14 nt, Human
aggccucccaaguu

SEQ ID NO: 3367344 - RNA, 12 nt, Human
aggccucccaca

SEQ ID NO: 3367345 - RNA, 13 nt, Human
aggccucccacag

SEQ ID NO: 3367346 - RNA, 14 nt, Human
aggccucccacagu

SEQ ID NO: 3367347 - RNA, 16 nt, Human
aggccucccucaaccc

SEQ ID NO: 3367348 - RNA, 16 nt, Human
aggccucccugccagu

SEQ ID NO: 3367349 - RNA, 12 nt, Human
aggccucccugu

SEQ ID NO: 3367350 - RNA, 13 nt, Human
aggccucccuguu

SEQ ID NO: 3367351 - RNA, 14 nt, Human
aggccucccuguuu

SEQ ID NO: 3367352 - RNA, 21 nt, Human
aggccuccuguggccugccag

SEQ ID NO: 3367353 - RNA, 13 nt, Human
aggccucgcagga

SEQ ID NO: 3367354 - RNA, 17 nt, Human
aggccucgcaggaagac

SEQ ID NO: 3367355 - RNA, 21 nt, Human
aggccucuccaguuugcaccu

SEQ ID NO: 3367356 - RNA, 23 nt, Human
aggccucuccaguuugcaccugu

SEQ ID NO: 3367357 - RNA, 24 nt, Human
aggccucuccaguuugcaccuguc

SEQ ID NO: 3367358 - RNA, 19 nt, Human
aggccucuccauuugcucu

SEQ ID NO: 3367359 - RNA, 21 nt, Human
aggccucuccauuugcucuuc

SEQ ID NO: 3367360 - RNA, 19 nt, Human
aggccucuggaaagcaaag

SEQ ID NO: 3367361 - RNA, 15 nt, Human
aggccucugugccgc

SEQ ID NO: 3367362 - RNA, 13 nt, Human
aggccucuguguc

SEQ ID NO: 3367363 - RNA, 14 nt, Human
aggccucugugucc

SEQ ID NO: 3367364 - RNA, 20 nt, Human
aggccucuguguccuucccu

SEQ ID NO: 3367365 - RNA, 22 nt, Human
aggccucuguguccuucccugc

SEQ ID NO: 3367366 - RNA, 24 nt, Human
aggccucuuggaccucugcucuga

SEQ ID NO: 3367367 - RNA, 23 nt, Human
aggccugaaagaggcugaggccu

SEQ ID NO: 3367368 - RNA, 22 nt, Human
aggccugaaucaugagccugcu

SEQ ID NO: 3367369 - RNA, 17 nt, Human
aggccugacuucugcug

SEQ ID NO: 3367370 - RNA, 17 nt, Human
aggccugagacccagga

SEQ ID NO: 3367371 - RNA, 19 nt, Human
aggccugagauuucaucug

SEQ ID NO: 3367372 - RNA, 21 nt, Human
aggccugagauuucaucugcu

SEQ ID NO: 3367373 - RNA, 22 nt, Human
aggccugagauuucaucugcuc

SEQ ID NO: 3367374 - RNA, 18 nt, Human
aggccugagcgcuccugc

SEQ ID NO: 3367375 - RNA, 19 nt, Human
aggccugagcgcuccugcc

SEQ ID NO: 3367376 - RNA, 22 nt, Human
aggccugagcgcuccugccgca

SEQ ID NO: 3367377 - RNA, 17 nt, Human
aggccugaggaugagcu

SEQ ID NO: 3367378 - RNA, 18 nt, Human
aggccugaggaugagcug

SEQ ID NO: 3367379 - RNA, 12 nt, Human
aggccugcacac

SEQ ID NO: 3367380 - RNA, 20 nt, Human
aggccugccuccagggcugg

SEQ ID NO: 3367381 - RNA, 21 nt, Human
aggccugcgacccugggggca

SEQ ID NO: 3367382 - RNA, 18 nt, Human
aggccugcucagggacug

SEQ ID NO: 3367383 - RNA, 19 nt, Human
aggccugcuuugucuccuc

SEQ ID NO: 3367384 - RNA, 23 nt, Human
aggccuggcacagugucugggcu

SEQ ID NO: 3367385 - RNA, 21 nt, Human
aggccuggccagaugcaccag

SEQ ID NO: 3367386 - RNA, 22 nt, Human
aggccuggccagaugcaccagc

SEQ ID NO: 3367387 - RNA, 13 nt, Human
aggccuggccagg

SEQ ID NO: 3367388 - RNA, 16 nt, Human
aggccuggccaggcac

SEQ ID NO: 3367389 - RNA, 16 nt, Human
aggccugggcugggaa

SEQ ID NO: 3367390 - RNA, 12 nt, Human
aggccuggggac

SEQ ID NO: 3367391 - RNA, 20 nt, Human
aggccugggggcugggcaga

SEQ ID NO: 3367392 - RNA, 23 nt, Human
aggccugggggcugggcagagga

SEQ ID NO: 3367393 - RNA, 17 nt, Human
aggccugggucuguguc

SEQ ID NO: 3367394 - RNA, 17 nt, Human
aggccugguguuucuug

SEQ ID NO: 3367395 - RNA, 17 nt, Human
aggccugucccuggcca

SEQ ID NO: 3367396 - RNA, 17 nt, Human
aggccugucugugaccu

SEQ ID NO: 3367397 - RNA, 22 nt, Human
aggccuguguagcugugaccug

SEQ ID NO: 3367398 - RNA, 24 nt, Human
aggccuguguagcugugaccugcu

SEQ ID NO: 3367399 - RNA, 21 nt, Human
aggccuguugcuuuuuuaugg

SEQ ID NO: 3367400 - RNA, 15 nt, Human
aggccuuccagcugc

SEQ ID NO: 3367401 - RNA, 16 nt, Human
aggccuuccagcugcu

SEQ ID NO: 3367402 - RNA, 13 nt, Human
aggccuucuccuc

SEQ ID NO: 3367403 - RNA, 22 nt, Human
aggccuucuccuccccacccgc

SEQ ID NO: 3367404 - RNA, 18 nt, Human
aggccuucucugaaggac

SEQ ID NO: 3367405 - RNA, 13 nt, Human
aggccuucuugug

SEQ ID NO: 3367406 - RNA, 19 nt, Human
aggccuugcggcuccucag

SEQ ID NO: 3367407 - RNA, 11 nt, Human
aggccuugcuc

SEQ ID NO: 3367408 - RNA, 14 nt, Human
aggccuugucccag

SEQ ID NO: 3367409 - RNA, 14 nt, Human
aggccuuuaaaauu

SEQ ID NO: 3367410 - RNA, 15 nt, Human
aggccuuucccuaag

SEQ ID NO: 3367411 - RNA, 17 nt, Human
aggccuuuuaacauuuu

SEQ ID NO: 3367412 - RNA, 18 nt, Human
aggccuuuuaacauuuug

SEQ ID NO: 3367413 - RNA, 16 nt, Human
aggccuuuuggaaugu

SEQ ID NO: 3367414 - RNA, 21 nt, Human
aggcgaaagaaaacucuauuu

SEQ ID NO: 3367415 - RNA, 15 nt, Human
aggcgaccaccgccc

SEQ ID NO: 3367416 - RNA, 13 nt, Human
agaguugagcucu

SEQ ID NO: 3367417 - RNA, 23 nt, Human
agaguugccccgucucuguucca

SEQ ID NO: 3367418 - RNA, 16 nt, Human
agaguugcugggagcu

SEQ ID NO: 3367419 - RNA, 13 nt, Human
agaguuggccaua

SEQ ID NO: 3367420 - RNA, 17 nt, Human
agaguuguaaauauaua

SEQ ID NO: 3367421 - RNA, 18 nt, Human
agaguuguaaauauauaa

SEQ ID NO: 3367422 - RNA, 19 nt, Human
agaguuguaaauauauaaa

SEQ ID NO: 3367423 - RNA, 16 nt, Human
agaguuguuacauuuu

SEQ ID NO: 3367424 - RNA, 17 nt, Human
agaguuguuacauuuuu

SEQ ID NO: 3367425 - RNA, 20 nt, Human
agaguuguuacauuuuuaag

SEQ ID NO: 3367426 - RNA, 22 nt, Human
agaguuuagcuguaacaguucu

SEQ ID NO: 3367427 - RNA, 20 nt, Human
agaguuucaguuuguuggaa

SEQ ID NO: 3367428 - RNA, 21 nt, Human
agaguuucaguuuguuggaaa

SEQ ID NO: 3367429 - RNA, 22 nt, Human
agaguuucuguuugauucuuuu

SEQ ID NO: 3367430 - RNA, 20 nt, Human
agaguuugagaccugaauag

SEQ ID NO: 3367431 - RNA, 18 nt, Human
agaguuugaugaggcccu

SEQ ID NO: 3367432 - RNA, 21 nt, Human
agaguuugccuuccuuucucc

SEQ ID NO: 3367433 - RNA, 13 nt, Human
agaguuugugugu

SEQ ID NO: 3367434 - RNA, 22 nt, Human
agaguuuguguguugucuugaa

SEQ ID NO: 3367435 - RNA, 14 nt, Human
agaguuuugucuug

SEQ ID NO: 3367436 - RNA, 16 nt, Human
agaguuuugucuugaa

SEQ ID NO: 3367437 - RNA, 19 nt, Human
agaguuuugucuugaaugu

SEQ ID NO: 3367438 - RNA, 14 nt, Human
agauaaaaagaugg

SEQ ID NO: 3367439 - RNA, 13 nt, Human
agauaaaaagugg

SEQ ID NO: 3367440 - RNA, 21 nt, Human
agauaaaaaguggaauuucuu

SEQ ID NO: 3367441 - RNA, 18 nt, Human
agauaaaagcugaaguua

SEQ ID NO: 3367442 - RNA, 12 nt, Human
agauaaacauua

SEQ ID NO: 3367443 - RNA, 19 nt, Human
agauaaacucagaaauuua

SEQ ID NO: 3367444 - RNA, 18 nt, Human
agauaaagaccagaaauu

SEQ ID NO: 3367445 - RNA, 14 nt, Human
agauaaagauuucu

SEQ ID NO: 3367446 - RNA, 13 nt, Human
agauaaagugguu

SEQ ID NO: 3367447 - RNA, 20 nt, Human
agauaaauauuugacuugca

SEQ ID NO: 3367448 - RNA, 12 nt, Human
agauaaaugugc

SEQ ID NO: 3367449 - RNA, 18 nt, Human
agauaacaagaucuuuca

SEQ ID NO: 3367450 - RNA, 17 nt, Human
aggcugggggagagccg

SEQ ID NO: 3367451 - RNA, 10 nt, Human
aggcuggguc

SEQ ID NO: 3367452 - RNA, 11 nt, Human
aggcugggugc

SEQ ID NO: 3367453 - RNA, 14 nt, Human
aggcuggguucuga

SEQ ID NO: 3367454 - RNA, 18 nt, Human
aggcuggguucugauccu

SEQ ID NO: 3367455 - RNA, 19 nt, Human
aggcugguacaacggaggc

SEQ ID NO: 3367456 - RNA, 17 nt, Human
aggcugguccuauggcc

SEQ ID NO: 3367457 - RNA, 20 nt, Human
aggcugguggagaacucugg

SEQ ID NO: 3367458 - RNA, 13 nt, Human
aggcugguggccc

SEQ ID NO: 3367459 - RNA, 14 nt, Human
aggcugguggccca

SEQ ID NO: 3367460 - RNA, 16 nt, Human
aggcugguggcccagg

SEQ ID NO: 3367461 - RNA, 14 nt, Human
aggcuggugggagg

SEQ ID NO: 3367462 - RNA, 17 nt, Human
aggcuggugggaggggc

SEQ ID NO: 3367463 - RNA, 18 nt, Human
aggcuguaucccaugagc

SEQ ID NO: 3367464 - RNA, 22 nt, Human
aggcuguaucccaugagccuca

SEQ ID NO: 3367465 - RNA, 24 nt, Human
aggcuguaucccaugagccucagc

SEQ ID NO: 3367466 - RNA, 20 nt, Human
aggcugucaguguuuggugc

SEQ ID NO: 3367467 - RNA, 15 nt, Human
aggcuguccuguaca

SEQ ID NO: 3367468 - RNA, 16 nt, Human
aggcuguccuguacau

SEQ ID NO: 3367469 - RNA, 21 nt, Human
aggcuguccuguacauugugg

SEQ ID NO: 3367470 - RNA, 15 nt, Human
aggcuguccuuaccc

SEQ ID NO: 3367471 - RNA, 19 nt, Human
aggcuguccuuacccaucu

SEQ ID NO: 3367472 - RNA, 22 nt, Human
aggcugucucagauaaauuaug

SEQ ID NO: 3367473 - RNA, 21 nt, Human
aggcugucuucucaggcucug

SEQ ID NO: 3367474 - RNA, 22 nt, Human
aggcugucuucucaggcucugc

SEQ ID NO: 3367475 - RNA, 20 nt, Human
aggcugugcucccugguucu

SEQ ID NO: 3367476 - RNA, 15 nt, Human
aggcugugcugcccu

SEQ ID NO: 3367477 - RNA, 21 nt, Human
aggcugugcugcccugaagaa

SEQ ID NO: 3367478 - RNA, 15 nt, Human
aggcuguggcuggug

SEQ ID NO: 3367479 - RNA, 17 nt, Human
aggcuguggcuggugag

SEQ ID NO: 3367480 - RNA, 21 nt, Human
aggcuguucugcacugaaaag

SEQ ID NO: 3367481 - RNA, 14 nt, Human
aggcuuaaacccau

SEQ ID NO: 3367482 - RNA, 14 nt, Human
aggcuuacacccac

SEQ ID NO: 3367483 - RNA, 14 nt, Human
aggcuuagacccuc

SEQ ID NO: 3367484 - RNA, 21 nt, Human
aggcuuagacccucaugcugc

SEQ ID NO: 3367485 - RNA, 19 nt, Human
aggcuuagcuuugcucugc

SEQ ID NO: 3367486 - RNA, 18 nt, Human
aggcuuagugauguaauu

SEQ ID NO: 3367487 - RNA, 14 nt, Human
aggcuuauauuugu

SEQ ID NO: 3367488 - RNA, 23 nt, Human
aggcuuccagagaguccucugga

SEQ ID NO: 3367489 - RNA, 21 nt, Human
aggcuuccugcguccuccuca

SEQ ID NO: 3367490 - RNA, 14 nt, Human
aggcuuccuucauu

SEQ ID NO: 3367491 - RNA, 16 nt, Human
aggcuuccuucauuuc

SEQ ID NO: 3367492 - RNA, 18 nt, Human
aggcuuccuucauuuccu

SEQ ID NO: 3367493 - RNA, 16 nt, Human
aggcuucuccgccagc

SEQ ID NO: 3367494 - RNA, 12 nt, Human
aggcuucucucu

SEQ ID NO: 3367495 - RNA, 13 nt, Human
aggcuucucucuc

SEQ ID NO: 3367496 - RNA, 16 nt, Human
aggcuucucucugugg

SEQ ID NO: 3367497 - RNA, 15 nt, Human
aggcuucugagcagc

SEQ ID NO: 3367498 - RNA, 14 nt, Human
aggcuucugcuggg

SEQ ID NO: 3367499 - RNA, 19 nt, Human
aggcuucugcuggggccug

SEQ ID NO: 3367500 - RNA, 23 nt, Human
aggcuucugguugaugccuguga

SEQ ID NO: 3367501 - RNA, 18 nt, Human
aggcuugcauaauaagcu

SEQ ID NO: 3367502 - RNA, 14 nt, Human
aggcuugcugagag

SEQ ID NO: 3367503 - RNA, 19 nt, Human
aggcuugguuccuucccaa

SEQ ID NO: 3367504 - RNA, 15 nt, Human
aggcuugucagagcu

SEQ ID NO: 3367505 - RNA, 21 nt, Human
aggcuuguuccaaugccacau

SEQ ID NO: 3367506 - RNA, 14 nt, Human
aggcuuguugugcu

SEQ ID NO: 3367507 - RNA, 15 nt, Human
aggcuuguugugcuu

SEQ ID NO: 3367508 - RNA, 22 nt, Human
aggcuuuaugauaauagauucu

SEQ ID NO: 3367509 - RNA, 23 nt, Human
aggcuuuaugauaauagauucuc

SEQ ID NO: 3367510 - RNA, 15 nt, Human
aggcuuucacuauuu

SEQ ID NO: 3367511 - RNA, 20 nt, Human
aggcuuucacuauuuccuuu

SEQ ID NO: 3367512 - RNA, 13 nt, Human
aggcuuucagcuu

SEQ ID NO: 3367513 - RNA, 22 nt, Human
aggcuuucccacuucccacccu

SEQ ID NO: 3367514 - RNA, 13 nt, Human
aggcuuugcccug

SEQ ID NO: 3367515 - RNA, 18 nt, Human
aggcuuugcccugcugcc

SEQ ID NO: 3367516 - RNA, 18 nt, Human
aggcuuugguaacugcgg

SEQ ID NO: 3367517 - RNA, 15 nt, Human
aggcuuuguguugua

SEQ ID NO: 3367518 - RNA, 17 nt, Human
aggcuuuuuuccagacu

SEQ ID NO: 3367519 - RNA, 16 nt, Human
agggaaaagcagcucu

SEQ ID NO: 3367520 - RNA, 18 nt, Human
agggaaaauaggcaggaa

SEQ ID NO: 3367521 - RNA, 11 nt, Human
agggaaaccuu

SEQ ID NO: 3367522 - RNA, 12 nt, Human
agggaaaccuuu

SEQ ID NO: 3367523 - RNA, 15 nt, Human
agggaaacgugcccu

SEQ ID NO: 3367524 - RNA, 15 nt, Human
agggaaacugccagc

SEQ ID NO: 3367525 - RNA, 15 nt, Human
agggaaacuucccgu

SEQ ID NO: 3367526 - RNA, 12 nt, Human
agggaaagaaaa

SEQ ID NO: 3367527 - RNA, 13 nt, Human
agggaaagaaaau

SEQ ID NO: 3367528 - RNA, 18 nt, Human
agggaaaggccagcacuc

SEQ ID NO: 3367529 - RNA, 22 nt, Human
agggaaauagaaaaacccugcc

SEQ ID NO: 3367530 - RNA, 13 nt, Human
agggaacagacag

SEQ ID NO: 3367531 - RNA, 14 nt, Human
agggaacagacagg

SEQ ID NO: 3367532 - RNA, 15 nt, Human
agggaacagacagga

SEQ ID NO: 3367533 - RNA, 17 nt, Human
agggaacagacaggaga

SEQ ID NO: 3367534 - RNA, 21 nt, Human
agggaacagacaggagaaaug

SEQ ID NO: 3367535 - RNA, 14 nt, Human
agggaacaggaaaa

SEQ ID NO: 3367536 - RNA, 14 nt, Human
agggaacagggcgg

SEQ ID NO: 3367537 - RNA, 22 nt, Human
agggaacccagcucuaauacau

SEQ ID NO: 3367538 - RNA, 19 nt, Human
agggaaccguuauuauaau

SEQ ID NO: 3367539 - RNA, 19 nt, Human
agggaacgggguccuucaa

SEQ ID NO: 3367540 - RNA, 16 nt, Human
agggaacuaggaaggc

SEQ ID NO: 3367541 - RNA, 13 nt, Human
agggaagaaacug

SEQ ID NO: 3367542 - RNA, 15 nt, Human
agggaagaaggagga

SEQ ID NO: 3367543 - RNA, 19 nt, Human
agggaagaauaaagagcug

SEQ ID NO: 3367544 - RNA, 13 nt, Human
agggaagagaaac

SEQ ID NO: 3367545 - RNA, 12 nt, Human
agggaagagcag

SEQ ID NO: 3367546 - RNA, 21 nt, Human
agggaagcuacagguuacaac

SEQ ID NO: 3367547 - RNA, 16 nt, Human
agggaagcuggccgag

SEQ ID NO: 3367548 - RNA, 17 nt, Human
agggaagcuggccugag

SEQ ID NO: 3367549 - RNA, 13 nt, Human
agggaaggacaga

SEQ ID NO: 3367550 - RNA, 14 nt, Human
agggaaggacagaa

SEQ ID NO: 3367551 - RNA, 17 nt, Human
agggaaggaggagccug

SEQ ID NO: 3367552 - RNA, 23 nt, Human
agggaaggaucccaugagcuccu

SEQ ID NO: 3367553 - RNA, 15 nt, Human
agggaaggcaggcag

SEQ ID NO: 3367554 - RNA, 16 nt, Human
agggaaggccaccugc

SEQ ID NO: 3367555 - RNA, 13 nt, Human
agggaaggccuga

SEQ ID NO: 3367556 - RNA, 14 nt, Human
agggaaggccugac

SEQ ID NO: 3367557 - RNA, 19 nt, Human
agggaaggcuggacuaggc

SEQ ID NO: 3367558 - RNA, 20 nt, Human
agggaagggagccaagggau

SEQ ID NO: 3367559 - RNA, 16 nt, Human
agggaagggccugcca

SEQ ID NO: 3367560 - RNA, 18 nt, Human
agggaagggccugccaca

SEQ ID NO: 3367561 - RNA, 13 nt, Human
agggaaggggaca

SEQ ID NO: 3367562 - RNA, 20 nt, Human
agggaaggggaggcagccgg

SEQ ID NO: 3367563 - RNA, 21 nt, Human
agggaaggggaggcagccggc

SEQ ID NO: 3367564 - RNA, 12 nt, Human
agggaagggugg

SEQ ID NO: 3367565 - RNA, 17 nt, Human
agggaaguaguuaucau

SEQ ID NO: 3367566 - RNA, 20 nt, Human
agggaaguaguuaucauguu

SEQ ID NO: 3367567 - RNA, 23 nt, Human
agggaaguugcuggaaagagcau

SEQ ID NO: 3367568 - RNA, 13 nt, Human
agggaaguuuugu

SEQ ID NO: 3367569 - RNA, 23 nt, Human
agggaauaaaauccuaagacaca

SEQ ID NO: 3367570 - RNA, 15 nt, Human
agggaauccaagccu

SEQ ID NO: 3367571 - RNA, 15 nt, Human
aaaaaaguuauauag

SEQ ID NO: 3367572 - RNA, 20 nt, Human
aaaaaaguugcagcuguuuu

SEQ ID NO: 3367573 - RNA, 10 nt, Human
aaaaaauaca

SEQ ID NO: 3367574 - RNA, 13 nt, Human
aaaaaauacuauu

SEQ ID NO: 3367575 - RNA, 9 nt, Human
aaaaaauag

SEQ ID NO: 3367576 - RNA, 13 nt, Human
aaaaaauauuuau

SEQ ID NO: 3367577 - RNA, 15 nt, Human
aaaaaauauuuuccu

SEQ ID NO: 3367578 - RNA, 12 nt, Human
aaaaaaucaucu

SEQ ID NO: 3367579 - RNA, 14 nt, Human
aaaaaaucaucuau

SEQ ID NO: 3367580 - RNA, 13 nt, Human
aaaaaaucuaucc

SEQ ID NO: 3367581 - RNA, 11 nt, Human
aaaaaaucuuc

SEQ ID NO: 3367582 - RNA, 19 nt, Human
aaaaaaugaaauguuuuaa

SEQ ID NO: 3367583 - RNA, 14 nt, Human
aaaaaaugcucaca

SEQ ID NO: 3367584 - RNA, 20 nt, Human
aaaaaaugcugaacauugca

SEQ ID NO: 3367585 - RNA, 16 nt, Human
aaaaaauguauaugca

SEQ ID NO: 3367586 - RNA, 11 nt, Human
aaaaaauguug

SEQ ID NO: 3367587 - RNA, 22 nt, Human
aaaaaauuagaaauuggcugga

SEQ ID NO: 3367588 - RNA, 13 nt, Human
aaaaaauuggcau

SEQ ID NO: 3367589 - RNA, 12 nt, Human
aaaaaauuuaag

SEQ ID NO: 3367590 - RNA, 12 nt, Human
aaaaacaaagag

SEQ ID NO: 3367591 - RNA, 21 nt, Human
aaaaacaaagagcguugaagu

SEQ ID NO: 3367592 - RNA, 12 nt, Human
aaaaacaaccaa

SEQ ID NO: 3367593 - RNA, 15 nt, Human
aaaaacaccuagcuu

SEQ ID NO: 3367594 - RNA, 14 nt, Human
aaaaacagaggcca

SEQ ID NO: 3367595 - RNA, 15 nt, Human
aaaaacagcauugcu

SEQ ID NO: 3367596 - RNA, 17 nt, Human
aaaaacagcauugcuuu

SEQ ID NO: 3367597 - RNA, 14 nt, Human
aggcgggcucaagg

SEQ ID NO: 3367598 - RNA, 22 nt, Human
aggcggugcggcagggaagagg

SEQ ID NO: 3367599 - RNA, 20 nt, Human
aggcgguggacuugaacuuu

SEQ ID NO: 3367600 - RNA, 14 nt, Human
aggcggugggcacc

SEQ ID NO: 3367601 - RNA, 19 nt, Human
aggcgucaacgugcauuuu

SEQ ID NO: 3367602 - RNA, 18 nt, Human
aggcgucuguauauuuug

SEQ ID NO: 3367603 - RNA, 15 nt, Human
aggcguugcuuucac

SEQ ID NO: 3367604 - RNA, 12 nt, Human
aggcuaaaaugu

SEQ ID NO: 3367605 - RNA, 14 nt, Human
aggcuaaaauguuu

SEQ ID NO: 3367606 - RNA, 18 nt, Human
aggcuaaagcccagagac

SEQ ID NO: 3367607 - RNA, 21 nt, Human
aggcuaaagcccagagacagc

SEQ ID NO: 3367608 - RNA, 18 nt, Human
aggcuaaggcguggagcu

SEQ ID NO: 3367609 - RNA, 13 nt, Human
aggcuaaguuggg

SEQ ID NO: 3367610 - RNA, 13 nt, Human
aggcuaaugucaa

SEQ ID NO: 3367611 - RNA, 12 nt, Human
aggcuaauuuuu

SEQ ID NO: 3367612 - RNA, 23 nt, Human
aggcuaauuuuuuuguauuuuag

SEQ ID NO: 3367613 - RNA, 22 nt, Human
aggcuacaauuuucucccagga

SEQ ID NO: 3367614 - RNA, 13 nt, Human
aggcuacacugac

SEQ ID NO: 3367615 - RNA, 18 nt, Human
aggcuacacugacacugg

SEQ ID NO: 3367616 - RNA, 14 nt, Human
aggcuacagagaag

SEQ ID NO: 3367617 - RNA, 17 nt, Human
aggcuacagagaagccu

SEQ ID NO: 3367618 - RNA, 23 nt, Human
aggcuaccaacuuguauccaggc

SEQ ID NO: 3367619 - RNA, 13 nt, Human
aggcuaccuuugu

SEQ ID NO: 3367620 - RNA, 18 nt, Human
aggcuacuagaauucugu

SEQ ID NO: 3367621 - RNA, 22 nt, Human
aggcuacuagaauucuguauug

SEQ ID NO: 3367622 - RNA, 23 nt, Human
aggcuacuguaaggcaaucaugg

SEQ ID NO: 3367623 - RNA, 17 nt, Human
aggcuacugucagcucc

SEQ ID NO: 3367624 - RNA, 19 nt, Human
aggcuagaaccuggcaagc

SEQ ID NO: 3367625 - RNA, 15 nt, Human
aggcuagaucaugaa

SEQ ID NO: 3367626 - RNA, 16 nt, Human
aggcuagcuggagccu

SEQ ID NO: 3367627 - RNA, 17 nt, Human
aggcuagcuucugcuuu

SEQ ID NO: 3367628 - RNA, 18 nt, Human
aggcuagcuucugcuuuu

SEQ ID NO: 3367629 - RNA, 22 nt, Human
aggcuaguccggacccaccuca

SEQ ID NO: 3367630 - RNA, 23 nt, Human
aggcuagugugguguuuccuggc

SEQ ID NO: 3367631 - RNA, 22 nt, Human
aggcuauggggauagaugugug

SEQ ID NO: 3367632 - RNA, 16 nt, Human
aggcuauguauaaaau

SEQ ID NO: 3367633 - RNA, 19 nt, Human
aggcuauguauaaaauaca

SEQ ID NO: 3367634 - RNA, 20 nt, Human
aggcuauguauaaaauacau

SEQ ID NO: 3367635 - RNA, 21 nt, Human
aggcuauguauaaaauacaua

SEQ ID NO: 3367636 - RNA, 14 nt, Human
aggcuaugugauua

SEQ ID NO: 3367637 - RNA, 17 nt, Human
aggcuauuuguaaaucu

SEQ ID NO: 3367638 - RNA, 14 nt, Human
aggcuauuuucuaa

SEQ ID NO: 3367639 - RNA, 18 nt, Human
aggcuauuuucuaaagac

SEQ ID NO: 3367640 - RNA, 19 nt, Human
aggcuauuuucuaaagacu

SEQ ID NO: 3367641 - RNA, 15 nt, Human
aggcucaacaauaaa

SEQ ID NO: 3367642 - RNA, 19 nt, Human
aggcucacccccuucucca

SEQ ID NO: 3367643 - RNA, 23 nt, Human
aggcucacccccuucuccaucca

SEQ ID NO: 3367644 - RNA, 13 nt, Human
aggcucacugcca

SEQ ID NO: 3367645 - RNA, 16 nt, Human
aggcucacugccaggc

SEQ ID NO: 3367646 - RNA, 17 nt, Human
aggcucacugccaggcc

SEQ ID NO: 3367647 - RNA, 21 nt, Human
aggcucagagaugugcaccca

SEQ ID NO: 3367648 - RNA, 24 nt, Human
aggcucagagaugugcacccaugg

SEQ ID NO: 3367649 - RNA, 14 nt, Human
aggcucaggcaggg

SEQ ID NO: 3367650 - RNA, 20 nt, Human
aggcucaggcaggggccucc

SEQ ID NO: 3367651 - RNA, 13 nt, Human
aggcucaggccau

SEQ ID NO: 3367652 - RNA, 10 nt, Human
aggcucaggu

SEQ ID NO: 3367653 - RNA, 17 nt, Human
aggcucagucucaggag

SEQ ID NO: 3367654 - RNA, 23 nt, Human
aggcucagucucaggagcauggg

SEQ ID NO: 3367655 - RNA, 22 nt, Human
aggcucauagggaagaccugcu

SEQ ID NO: 3367656 - RNA, 18 nt, Human
aggcuccaggagcagcca

SEQ ID NO: 3367657 - RNA, 15 nt, Human
aggcuccaggcagca

SEQ ID NO: 3367658 - RNA, 22 nt, Human
aggcucccuccccauggggcag

SEQ ID NO: 3367659 - RNA, 14 nt, Human
aggcuccugccacc

SEQ ID NO: 3367660 - RNA, 13 nt, Human
aggcuccugugcu

SEQ ID NO: 3367661 - RNA, 12 nt, Human
aggcuccuguua

SEQ ID NO: 3367662 - RNA, 16 nt, Human
aggcuccuguuuugca

SEQ ID NO: 3367663 - RNA, 22 nt, Human
aggcuccuuaggguuuucucuc

SEQ ID NO: 3367664 - RNA, 20 nt, Human
aggcuccuucaacaaggcuu

SEQ ID NO: 3367665 - RNA, 16 nt, Human
aggcuccuuccugucu

SEQ ID NO: 3367666 - RNA, 23 nt, Human
aggcuccuuccugucuuccugca

SEQ ID NO: 3367667 - RNA, 19 nt, Human
aggcuccuuuagcgcccag

SEQ ID NO: 3367668 - RNA, 22 nt, Human
aggcucgauuuuguaucugcag

SEQ ID NO: 3367669 - RNA, 24 nt, Human
aggcucgccuucccuccugcuuug

SEQ ID NO: 3367670 - RNA, 19 nt, Human
aggcucuaugagucuagau

SEQ ID NO: 3367671 - RNA, 23 nt, Human
aggcucuauuccaauaaacuaug

SEQ ID NO: 3367672 - RNA, 20 nt, Human
aggcucucaacaggggagag

SEQ ID NO: 3367673 - RNA, 14 nt, Human
aggcucucaggcca

SEQ ID NO: 3367674 - RNA, 15 nt, Human
aggcucucaggccag

SEQ ID NO: 3367675 - RNA, 19 nt, Human
aggcucucaggccagcugc

SEQ ID NO: 3367676 - RNA, 15 nt, Human
aggcucucugggcug

SEQ ID NO: 3367677 - RNA, 13 nt, Human
aggcucugagagu

SEQ ID NO: 3367678 - RNA, 16 nt, Human
aggcucugagagucua

SEQ ID NO: 3367679 - RNA, 13 nt, Human
aggcucugcacag

SEQ ID NO: 3367680 - RNA, 17 nt, Human
aggcucugcccugcccu

SEQ ID NO: 3367681 - RNA, 23 nt, Human
aggcucugcccugcccuagcucc

SEQ ID NO: 3367682 - RNA, 13 nt, Human
aggcucuggagcc

SEQ ID NO: 3367683 - RNA, 19 nt, Human
aggcucuggagcccacugu

SEQ ID NO: 3367684 - RNA, 15 nt, Human
aggcucugucuggaa

SEQ ID NO: 3367685 - RNA, 13 nt, Human
aggcucugugcug

SEQ ID NO: 3367686 - RNA, 17 nt, Human
aggcucugugcugaccc

SEQ ID NO: 3367687 - RNA, 18 nt, Human
aggcucugugcugacccu

SEQ ID NO: 3367688 - RNA, 22 nt, Human
aggcucuuagcagcuuccagau

SEQ ID NO: 3367689 - RNA, 18 nt, Human
aggcucuucuccccagag

SEQ ID NO: 3367690 - RNA, 13 nt, Human
aggcucuucuccu

SEQ ID NO: 3367691 - RNA, 20 nt, Human
aggcucuuucugggccaagu

SEQ ID NO: 3367692 - RNA, 17 nt, Human
aggcugaaagaggccaa

SEQ ID NO: 3367693 - RNA, 21 nt, Human
aggcugaacuuguuuucuggg

SEQ ID NO: 3367694 - RNA, 14 nt, Human
aggcugaccaagag

SEQ ID NO: 3367695 - RNA, 18 nt, Human
aggcugaccaagagagaa

SEQ ID NO: 3367696 - RNA, 22 nt, Human
aggcugaccaagagagaaagaa

SEQ ID NO: 3367697 - RNA, 21 nt, Human
aggcugaccacagcacagcca

SEQ ID NO: 3367698 - RNA, 13 nt, Human
aggcugagacagg

SEQ ID NO: 3367699 - RNA, 15 nt, Human
aggcugaggaaaggc

SEQ ID NO: 3367700 - RNA, 19 nt, Human
aggcugaggaaaggccagc

SEQ ID NO: 3367701 - RNA, 13 nt, Human
aggcugaggacuu

SEQ ID NO: 3367702 - RNA, 11 nt, Human
aggcugaggca

SEQ ID NO: 3367703 - RNA, 14 nt, Human
aggcugaggcagga

SEQ ID NO: 3367704 - RNA, 18 nt, Human
aggcugaggcaggagaau

SEQ ID NO: 3367705 - RNA, 13 nt, Human
aggcugaggccug

SEQ ID NO: 3367706 - RNA, 17 nt, Human
aggcugaggcuggcaca

SEQ ID NO: 3367707 - RNA, 22 nt, Human
aggcugaggggaggaucacugg

SEQ ID NO: 3367708 - RNA, 17 nt, Human
aggcugagugcaggccc

SEQ ID NO: 3367709 - RNA, 20 nt, Human
aggcugauaauuccaguggu

SEQ ID NO: 3367710 - RNA, 23 nt, Human
aggcugaugccaaguuguuugag

SEQ ID NO: 3367711 - RNA, 21 nt, Human
aggcugaugucaauuucugug

SEQ ID NO: 3367712 - RNA, 18 nt, Human
aggcugcagccaggccac

SEQ ID NO: 3367713 - RNA, 15 nt, Human
aggcugcagcuggac

SEQ ID NO: 3367714 - RNA, 17 nt, Human
aggcugcagugagccga

SEQ ID NO: 3367715 - RNA, 19 nt, Human
aggcugcagugagccgaga

SEQ ID NO: 3367716 - RNA, 15 nt, Human
aggcugcauagaagg

SEQ ID NO: 3367717 - RNA, 17 nt, Human
aggcugcauagaaggag

SEQ ID NO: 3367718 - RNA, 22 nt, Human
aggcugcauugaaaagagcuga

SEQ ID NO: 3367719 - RNA, 15 nt, Human
aggcugccagugccu

SEQ ID NO: 3367720 - RNA, 15 nt, Human
aggcugcccccggcc

SEQ ID NO: 3367721 - RNA, 22 nt, Human
aggcugcccccggcccccuggu

SEQ ID NO: 3367722 - RNA, 12 nt, Human
aggcugcccucc

SEQ ID NO: 3367723 - RNA, 22 nt, Human
aggcugcccuccugugcucagc

SEQ ID NO: 3367724 - RNA, 13 nt, Human
aggcugccuccca

SEQ ID NO: 3367725 - RNA, 14 nt, Human
aggcugccucccaa

SEQ ID NO: 3367726 - RNA, 12 nt, Human
aggcugccugag

SEQ ID NO: 3367727 - RNA, 22 nt, Human
agggaauccaagccuccacagc

SEQ ID NO: 3367728 - RNA, 16 nt, Human
agggaauccccgaagg

SEQ ID NO: 3367729 - RNA, 18 nt, Human
agggaaugaaccuggagg

SEQ ID NO: 3367730 - RNA, 15 nt, Human
agggaauucucuugg

SEQ ID NO: 3367731 - RNA, 18 nt, Human
agggaauugaggucugcu

SEQ ID NO: 3367732 - RNA, 16 nt, Human
agggaauuucuaucua

SEQ ID NO: 3367733 - RNA, 17 nt, Human
agggacaaaggagccug

SEQ ID NO: 3367734 - RNA, 19 nt, Human
agggacaaaggagccugug

SEQ ID NO: 3367735 - RNA, 20 nt, Human
agggacaccagccaggcucu

SEQ ID NO: 3367736 - RNA, 20 nt, Human
agggacagagacaccugcac

SEQ ID NO: 3367737 - RNA, 22 nt, Human
agggacagaggccccagccucc

SEQ ID NO: 3367738 - RNA, 12 nt, Human
agggacagaggg

SEQ ID NO: 3367739 - RNA, 22 nt, Human
agggacagaggggguggccucc

SEQ ID NO: 3367740 - RNA, 22 nt, Human
agggacagaugaaugccgugga

SEQ ID NO: 3367741 - RNA, 16 nt, Human
agggaggaguggaggu

SEQ ID NO: 3367742 - RNA, 13 nt, Human
agggaggcaagcc

SEQ ID NO: 3367743 - RNA, 14 nt, Human
agggaggcccagcg

SEQ ID NO: 3367744 - RNA, 19 nt, Human
agggagggcagagcuggug

SEQ ID NO: 3367745 - RNA, 17 nt, Human
agggagggcaguuuucu

SEQ ID NO: 3367746 - RNA, 14 nt, Human
agggagggcuccag

SEQ ID NO: 3367747 - RNA, 17 nt, Human
agggagggcuccagaca

SEQ ID NO: 3367748 - RNA, 15 nt, Human
agggagggcucugag

SEQ ID NO: 3367749 - RNA, 15 nt, Human
agggagggcugucau

SEQ ID NO: 3367750 - RNA, 21 nt, Human
agggaggggaaaagcauuuuu

SEQ ID NO: 3367751 - RNA, 17 nt, Human
agggaggggccggcccu

SEQ ID NO: 3367752 - RNA, 21 nt, Human
agggaggucacuggaaagggg

SEQ ID NO: 3367753 - RNA, 16 nt, Human
agggaggucaggcccu

SEQ ID NO: 3367754 - RNA, 22 nt, Human
agggagguguuuaaagagaggu

SEQ ID NO: 3367755 - RNA, 17 nt, Human
agggagguuugugagag

SEQ ID NO: 3367756 - RNA, 23 nt, Human
agggaguccgaaagggacuugga

SEQ ID NO: 3367757 - RNA, 20 nt, Human
agggagugacagaggcagcc

SEQ ID NO: 3367758 - RNA, 16 nt, Human
agggaguguacuccca

SEQ ID NO: 3367759 - RNA, 21 nt, Human
agggaguuaucuaaaagaaau

SEQ ID NO: 3367760 - RNA, 14 nt, Human
agggauacacugaa

SEQ ID NO: 3367761 - RNA, 16 nt, Human
agggauacccagugau

SEQ ID NO: 3367762 - RNA, 19 nt, Human
agggauagucaccuuuuaa

SEQ ID NO: 3367763 - RNA, 21 nt, Human
agggauagucaccuuuuaaau

SEQ ID NO: 3367764 - RNA, 22 nt, Human
agggauagucaccuuuuaaauc

SEQ ID NO: 3367765 - RNA, 22 nt, Human
agggaucaaccagcuaagaaaa

SEQ ID NO: 3367766 - RNA, 17 nt, Human
agggaucacagggcccc

SEQ ID NO: 3367767 - RNA, 16 nt, Human
agggaucccucaucug

SEQ ID NO: 3367768 - RNA, 18 nt, Human
agggaucuauacuugcuu

SEQ ID NO: 3367769 - RNA, 19 nt, Human
agggaucuauacuugcuuu

SEQ ID NO: 3367770 - RNA, 22 nt, Human
agggaucugguccuacccaucc

SEQ ID NO: 3367771 - RNA, 16 nt, Human
agggaugaauuguaaa

SEQ ID NO: 3367772 - RNA, 21 nt, Human
agggucuuuucaucugggaaa

SEQ ID NO: 3367773 - RNA, 15 nt, Human
agggugaaaauuauu

SEQ ID NO: 3367774 - RNA, 12 nt, Human
agggugagccca

SEQ ID NO: 3367775 - RNA, 13 nt, Human
agggugaggaugg

SEQ ID NO: 3367776 - RNA, 18 nt, Human
agggugaguccuccagaa

SEQ ID NO: 3367777 - RNA, 14 nt, Human
agggugaugccagg

SEQ ID NO: 3367778 - RNA, 14 nt, Human
agggugcagcccaa

SEQ ID NO: 3367779 - RNA, 24 nt, Human
agggugccguguccccugacaggg

SEQ ID NO: 3367780 - RNA, 23 nt, Human
agggugcuacguacaugugaggc

SEQ ID NO: 3367781 - RNA, 21 nt, Human
aggguggagacuaagcccugu

SEQ ID NO: 3367782 - RNA, 13 nt, Human
aggguggcagcaa

SEQ ID NO: 3367783 - RNA, 15 nt, Human
aggguggcaucccag

SEQ ID NO: 3367784 - RNA, 22 nt, Human
aggguggccacaccucuauccc

SEQ ID NO: 3367785 - RNA, 21 nt, Human
aggguggcuggguccagggga

SEQ ID NO: 3367786 - RNA, 17 nt, Human
agggugggauggaggag

SEQ ID NO: 3367787 - RNA, 18 nt, Human
agggugggauggaggaga

SEQ ID NO: 3367788 - RNA, 14 nt, Human
agggugggcuucag

SEQ ID NO: 3367789 - RNA, 22 nt, Human
agggugggcuuguggggccugg

SEQ ID NO: 3367790 - RNA, 23 nt, Human
agggugggcuuguggggccuggg

SEQ ID NO: 3367791 - RNA, 18 nt, Human
agggugggggccaccugc

SEQ ID NO: 3367792 - RNA, 19 nt, Human
agggugggggccaccugcc

SEQ ID NO: 3367793 - RNA, 22 nt, Human
agggugggggccaccugccugc

SEQ ID NO: 3367794 - RNA, 21 nt, Human
aggguggggggggggcgcggc

SEQ ID NO: 3367795 - RNA, 18 nt, Human
agggugggugcucagaau

SEQ ID NO: 3367796 - RNA, 14 nt, Human
aggguggugcuggg

SEQ ID NO: 3367797 - RNA, 16 nt, Human
aggguggugcugggac

SEQ ID NO: 3367798 - RNA, 17 nt, Human
aggguggugcugggacu

SEQ ID NO: 3367799 - RNA, 22 nt, Human
aggguguccggucccuguccca

SEQ ID NO: 3367800 - RNA, 21 nt, Human
aggguguugggauacugcagg

SEQ ID NO: 3367801 - RNA, 17 nt, Human
aggguuaagaaaagaga

SEQ ID NO: 3367802 - RNA, 18 nt, Human
aggguuacuaugcacaau

SEQ ID NO: 3367803 - RNA, 16 nt, Human
aggguuagggaggggu

SEQ ID NO: 3367804 - RNA, 13 nt, Human
aggguuauaauaa

SEQ ID NO: 3367805 - RNA, 16 nt, Human
aggguucagagacuca

SEQ ID NO: 3367806 - RNA, 15 nt, Human
aggguucccccagcc

SEQ ID NO: 3367807 - RNA, 18 nt, Human
aggguucccccagcccug

SEQ ID NO: 3367808 - RNA, 16 nt, Human
aggguucugccucucc

SEQ ID NO: 3367809 - RNA, 14 nt, Human
aggguucuggcugc

SEQ ID NO: 3367810 - RNA, 17 nt, Human
aggguugaccccagagg

SEQ ID NO: 3367811 - RNA, 18 nt, Human
aggguugauuaaggcagu

SEQ ID NO: 3367812 - RNA, 13 nt, Human
aggguuggccccu

SEQ ID NO: 3367813 - RNA, 14 nt, Human
aggguuggccccug

SEQ ID NO: 3367814 - RNA, 23 nt, Human
aggguuggccccugcccggcugc

SEQ ID NO: 3367815 - RNA, 18 nt, Human
aggguuggccugaguuag

SEQ ID NO: 3367816 - RNA, 19 nt, Human
aggguugggaaaauccaaa

SEQ ID NO: 3367817 - RNA, 15 nt, Human
aggguugggcccaga

SEQ ID NO: 3367818 - RNA, 13 nt, Human
aggguugggcugg

SEQ ID NO: 3367819 - RNA, 15 nt, Human
aggguuggggagggg

SEQ ID NO: 3367820 - RNA, 23 nt, Human
aggguuggguucaucugagcaag

SEQ ID NO: 3367821 - RNA, 19 nt, Human
aggguugugauuuugucug

SEQ ID NO: 3367822 - RNA, 22 nt, Human
aggguugugauuuugucugcuu

SEQ ID NO: 3367823 - RNA, 21 nt, Human
aggguuguuaauggugcaaau

SEQ ID NO: 3367824 - RNA, 21 nt, Human
aggguuuaauccccaguaaaa

SEQ ID NO: 3367825 - RNA, 15 nt, Human
aggguuucaccaugu

SEQ ID NO: 3367826 - RNA, 15 nt, Human
aggguuucauugucu

SEQ ID NO: 3367827 - RNA, 21 nt, Human
aggguuucccuacugaagccc

SEQ ID NO: 3367828 - RNA, 14 nt, Human
aggguuucucuauu

SEQ ID NO: 3367829 - RNA, 22 nt, Human
aggguuugaauuguuuucuuua

SEQ ID NO: 3367830 - RNA, 23 nt, Human
aggguuugaauuguuuucuuuaa

SEQ ID NO: 3367831 - RNA, 21 nt, Human
aggguuuggcugugucuaaac

SEQ ID NO: 3367832 - RNA, 23 nt, Human
aggguuuggcugugucuaaacug

SEQ ID NO: 3367833 - RNA, 17 nt, Human
aggguuuuaauguagau

SEQ ID NO: 3367834 - RNA, 14 nt, Human
aggguuuuccaaug

SEQ ID NO: 3367835 - RNA, 15 nt, Human
aggguuuuccacccu

SEQ ID NO: 3367836 - RNA, 23 nt, Human
aggguuuugccauguuggccagg

SEQ ID NO: 3367837 - RNA, 14 nt, Human
agguaaaacaaaac

SEQ ID NO: 3367838 - RNA, 22 nt, Human
agguaaaacaaaacaaaacaac

SEQ ID NO: 3367839 - RNA, 20 nt, Human
agguaaaagcaucacaugaa

SEQ ID NO: 3367840 - RNA, 15 nt, Human
agguaaaauguauuu

SEQ ID NO: 3367841 - RNA, 15 nt, Human
agguaaaauucuaaa

SEQ ID NO: 3367842 - RNA, 14 nt, Human
agguaacagaacag

SEQ ID NO: 3367843 - RNA, 18 nt, Human
agguaacagaacagcuuc

SEQ ID NO: 3367844 - RNA, 19 nt, Human
agguaacuaacugcauaca

SEQ ID NO: 3367845 - RNA, 21 nt, Human
agguaagcaggaggaggugcc

SEQ ID NO: 3367846 - RNA, 16 nt, Human
agguaaggugaaggug

SEQ ID NO: 3367847 - RNA, 13 nt, Human
agguaaguuuuuu

SEQ ID NO: 3367848 - RNA, 18 nt, Human
agguaaucaaugaauauu

SEQ ID NO: 3367849 - RNA, 17 nt, Human
agguaaucgaccugccu

SEQ ID NO: 3367850 - RNA, 21 nt, Human
agguaaucgaccugccucggc

SEQ ID NO: 3367851 - RNA, 13 nt, Human
agguaaugaggga

SEQ ID NO: 3367852 - RNA, 14 nt, Human
agguaauggcauga

SEQ ID NO: 3367853 - RNA, 19 nt, Human
agguaauuucuugugccuc

SEQ ID NO: 3367854 - RNA, 23 nt, Human
agguaauuuuuacccuaaugucu

SEQ ID NO: 3367855 - RNA, 16 nt, Human
agguacagagaaggaa

SEQ ID NO: 3367856 - RNA, 23 nt, Human
agguaccagcugcgcuugcuuuu

SEQ ID NO: 3367857 - RNA, 21 nt, Human
agguaccccuuucuggcucuc

SEQ ID NO: 3367858 - RNA, 16 nt, Human
agguaccgucuacauu

SEQ ID NO: 3367859 - RNA, 22 nt, Human
agguacgaaaagaggggaagag

SEQ ID NO: 3367860 - RNA, 19 nt, Human
agguacgaugacaguguuc

SEQ ID NO: 3367861 - RNA, 15 nt, Human
agguacgcacagaca

SEQ ID NO: 3367862 - RNA, 16 nt, Human
agguacgcacagacag

SEQ ID NO: 3367863 - RNA, 15 nt, Human
agguacuaaauaccu

SEQ ID NO: 3367864 - RNA, 16 nt, Human
agguacuagaaugcuu

SEQ ID NO: 3367865 - RNA, 22 nt, Human
agguacuguaugaucaaauguu

SEQ ID NO: 3367866 - RNA, 22 nt, Human
agguacugucaugggcuaggca

SEQ ID NO: 3367867 - RNA, 23 nt, Human
agguacuuucauauuuuaaacag

SEQ ID NO: 3367868 - RNA, 17 nt, Human
agguagaaaaaggguca

SEQ ID NO: 3367869 - RNA, 19 nt, Human
agguagaaauaucugaaaa

SEQ ID NO: 3367870 - RNA, 21 nt, Human
agguagaaugaccuuguaaug

SEQ ID NO: 3367871 - RNA, 19 nt, Human
agguagaauguaaagcuug

SEQ ID NO: 3367872 - RNA, 22 nt, Human
agguagaauuaucuaauuuaua

SEQ ID NO: 3367873 - RNA, 20 nt, Human
agguagacuuuuaugagaac

SEQ ID NO: 3367874 - RNA, 18 nt, Human
agguagagccacaaaaga

SEQ ID NO: 3367875 - RNA, 20 nt, Human
agguagaguuugaaggaggu

SEQ ID NO: 3367876 - RNA, 20 nt, Human
agguagauguucagauugcu

SEQ ID NO: 3367877 - RNA, 19 nt, Human
agguagcugccccuggcuc

SEQ ID NO: 3367878 - RNA, 18 nt, Human
agguagcuuaccugacac

SEQ ID NO: 3367879 - RNA, 19 nt, Human
agguagcuuaccugacaca

SEQ ID NO: 3367880 - RNA, 13 nt, Human
agguagcuucagc

SEQ ID NO: 3367881 - RNA, 23 nt, Human
agguaggccaagguguccuacag

SEQ ID NO: 3367882 - RNA, 12 nt, Human
agguaggguuua

SEQ ID NO: 3367883 - RNA, 15 nt, Human
agguauaauaaaauu

SEQ ID NO: 3367884 - RNA, 21 nt, Human
agcaaccgccucaaaaugugu

SEQ ID NO: 3367885 - RNA, 16 nt, Human
agcaaccguggcccuu

SEQ ID NO: 3367886 - RNA, 20 nt, Human
agcaaccuggguccaaauaa

SEQ ID NO: 3367887 - RNA, 21 nt, Human
agcaaccuggguccaaauaaa

SEQ ID NO: 3367888 - RNA, 20 nt, Human
agcaacgcuauuccagcugu

SEQ ID NO: 3367889 - RNA, 14 nt, Human
agcaacgcuuguag

SEQ ID NO: 3367890 - RNA, 17 nt, Human
agcaacgcuuguagaac

SEQ ID NO: 3367891 - RNA, 11 nt, Human
agcaacuauuc

SEQ ID NO: 3367892 - RNA, 16 nt, Human
agcaacucuugauuau

SEQ ID NO: 3367893 - RNA, 21 nt, Human
agcaacugaauaaauaccucu

SEQ ID NO: 3367894 - RNA, 22 nt, Human
agcaacugaauaaauaccucuu

SEQ ID NO: 3367895 - RNA, 17 nt, Human
agcaacugucuauuucu

SEQ ID NO: 3367896 - RNA, 20 nt, Human
agcaacugucuauuucugcu

SEQ ID NO: 3367897 - RNA, 17 nt, Human
agcaacuguuaugaaau

SEQ ID NO: 3367898 - RNA, 12 nt, Human
agcaacuugaac

SEQ ID NO: 3367899 - RNA, 21 nt, Human
agcaacuuguccuagcacaga

SEQ ID NO: 3367900 - RNA, 17 nt, Human
agcaacuuguucguggg

SEQ ID NO: 3367901 - RNA, 13 nt, Human
agcaacuuucuua

SEQ ID NO: 3367902 - RNA, 15 nt, Human
agcaacuuuugugua

SEQ ID NO: 3367903 - RNA, 20 nt, Human
agcaacuuuuguguaaugaa

SEQ ID NO: 3367904 - RNA, 18 nt, Human
agcaagaaaaaaaaaugc

SEQ ID NO: 3367905 - RNA, 15 nt, Human
agcaagaaagaaacc

SEQ ID NO: 3367906 - RNA, 21 nt, Human
agcaagacccuaaacauccau

SEQ ID NO: 3367907 - RNA, 21 nt, Human
agcaagacgcugugcugcccu

SEQ ID NO: 3367908 - RNA, 23 nt, Human
agcaagacgcugugcugcccugc

SEQ ID NO: 3367909 - RNA, 14 nt, Human
agcaagagagaacc

SEQ ID NO: 3367910 - RNA, 13 nt, Human
agcaagagcuggc

SEQ ID NO: 3367911 - RNA, 15 nt, Human
agcaagauaaacauu

SEQ ID NO: 3367912 - RNA, 15 nt, Human
agcaagcaagaggcc

SEQ ID NO: 3367913 - RNA, 20 nt, Human
agcaagcccuacagagcugu

SEQ ID NO: 3367914 - RNA, 12 nt, Human
agcaagcuggcc

SEQ ID NO: 3367915 - RNA, 13 nt, Human
agcaagcuggccu

SEQ ID NO: 3367916 - RNA, 16 nt, Human
agcaaggaagguaaaa

SEQ ID NO: 3367917 - RNA, 16 nt, Human
agcaaggaggcuggcu

SEQ ID NO: 3367918 - RNA, 22 nt, Human
agcaaggaggcuggcuggggcc

SEQ ID NO: 3367919 - RNA, 15 nt, Human
agcaaggaucuuuca

SEQ ID NO: 3367920 - RNA, 16 nt, Human
agcaaggcaccugcag

SEQ ID NO: 3367921 - RNA, 12 nt, Human
agcaaggccacc

SEQ ID NO: 3367922 - RNA, 14 nt, Human
agcaaggccaccuc

SEQ ID NO: 3367923 - RNA, 12 nt, Human
agcaaggcccga

SEQ ID NO: 3367924 - RNA, 14 nt, Human
agcaaggcccgagc

SEQ ID NO: 3367925 - RNA, 21 nt, Human
agcaaggcccgagcagcugag

SEQ ID NO: 3367926 - RNA, 17 nt, Human
agggaugaggugcuggg

SEQ ID NO: 3367927 - RNA, 16 nt, Human
agggaugaugccacac

SEQ ID NO: 3367928 - RNA, 19 nt, Human
agggaugauucaagccauu

SEQ ID NO: 3367929 - RNA, 19 nt, Human
agggaugcccuggaggugg

SEQ ID NO: 3367930 - RNA, 16 nt, Human
agggaugguguucaaa

SEQ ID NO: 3367931 - RNA, 23 nt, Human
agggaugugaauugccugcagag

SEQ ID NO: 3367932 - RNA, 22 nt, Human
agggauguggguuccacagacg

SEQ ID NO: 3367933 - RNA, 17 nt, Human
agggauuaaccucugca

SEQ ID NO: 3367934 - RNA, 14 nt, Human
agggauucaggcug

SEQ ID NO: 3367935 - RNA, 17 nt, Human
agggauuccccuaaccu

SEQ ID NO: 3367936 - RNA, 19 nt, Human
agggauuuuagucacacgu

SEQ ID NO: 3367937 - RNA, 17 nt, Human
agggauuuucagcccuc

SEQ ID NO: 3367938 - RNA, 23 nt, Human
agggcaaaauauucacugggcca

SEQ ID NO: 3367939 - RNA, 11 nt, Human
agggcaaagcc

SEQ ID NO: 3367940 - RNA, 13 nt, Human
agggcaaaucugc

SEQ ID NO: 3367941 - RNA, 18 nt, Human
agggcaaaugacaugcac

SEQ ID NO: 3367942 - RNA, 20 nt, Human
agggcaacaauaaaauagca

SEQ ID NO: 3367943 - RNA, 17 nt, Human
agggcaagcuccgcagg

SEQ ID NO: 3367944 - RNA, 19 nt, Human
agggcaagcuccgcaggac

SEQ ID NO: 3367945 - RNA, 20 nt, Human
agggcaagcuccgcaggacu

SEQ ID NO: 3367946 - RNA, 16 nt, Human
agggcaagggguuccc

SEQ ID NO: 3367947 - RNA, 20 nt, Human
agggcacaaguccuggaugu

SEQ ID NO: 3367948 - RNA, 21 nt, Human
agggcacaccgggcacucaga

SEQ ID NO: 3367949 - RNA, 19 nt, Human
agggcacagcaucuguagu

SEQ ID NO: 3367950 - RNA, 15 nt, Human
agggcacaggagcua

SEQ ID NO: 3367951 - RNA, 17 nt, Human
agggcacaggccaugga

SEQ ID NO: 3367952 - RNA, 13 nt, Human
agggcacagggcc

SEQ ID NO: 3367953 - RNA, 14 nt, Human
agggcacagggccu

SEQ ID NO: 3367954 - RNA, 15 nt, Human
agggcacagggccug

SEQ ID NO: 3367955 - RNA, 16 nt, Human
agggcacagggccugg

SEQ ID NO: 3367956 - RNA, 17 nt, Human
agggcacagggccuggc

SEQ ID NO: 3367957 - RNA, 18 nt, Human
agggcacagggccuggcc

SEQ ID NO: 3367958 - RNA, 20 nt, Human
agggcacagggccuggccca

SEQ ID NO: 3367959 - RNA, 20 nt, Human
agggcacauuccuugccugc

SEQ ID NO: 3367960 - RNA, 19 nt, Human
agggcaccagggguuucuc

SEQ ID NO: 3367961 - RNA, 21 nt, Human
agggcaccagggguuucucgc

SEQ ID NO: 3367962 - RNA, 13 nt, Human
agggcacugggcu

SEQ ID NO: 3367963 - RNA, 14 nt, Human
agggcacugguggc

SEQ ID NO: 3367964 - RNA, 17 nt, Human
agggcacugguggcccg

SEQ ID NO: 3367965 - RNA, 17 nt, Human
agggcacuucacagagu

SEQ ID NO: 3367966 - RNA, 20 nt, Human
agggcagaaagguucugccc

SEQ ID NO: 3367967 - RNA, 15 nt, Human
agggcagacuggggc

SEQ ID NO: 3367968 - RNA, 13 nt, Human
agggcagagcugg

SEQ ID NO: 3367969 - RNA, 17 nt, Human
agggcagagcuggugcg

SEQ ID NO: 3367970 - RNA, 16 nt, Human
agggcagcacacggcc

SEQ ID NO: 3367971 - RNA, 18 nt, Human
agggcagcagccagcccu

SEQ ID NO: 3367972 - RNA, 13 nt, Human
agggcagccaggg

SEQ ID NO: 3367973 - RNA, 19 nt, Human
agggcagccagggagagcc

SEQ ID NO: 3367974 - RNA, 15 nt, Human
agggcagccugccug

SEQ ID NO: 3367975 - RNA, 14 nt, Human
agggcagcgccagg

SEQ ID NO: 3367976 - RNA, 17 nt, Human
agggcagcgccaggcug

SEQ ID NO: 3367977 - RNA, 23 nt, Human
agggcagcgggagccucccugcc

SEQ ID NO: 3367978 - RNA, 12 nt, Human
agggcagcugcu

SEQ ID NO: 3367979 - RNA, 17 nt, Human
agggcagcuugccccgg

SEQ ID NO: 3367980 - RNA, 23 nt, Human
agggcagcuugccccggccccgg

SEQ ID NO: 3367981 - RNA, 17 nt, Human
agggcagcuuugcucau

SEQ ID NO: 3367982 - RNA, 21 nt, Human
agggcaggaaggagagccugc

SEQ ID NO: 3367983 - RNA, 13 nt, Human
agggcaggaccag

SEQ ID NO: 3367984 - RNA, 14 nt, Human
agggcaggaccagc

SEQ ID NO: 3367985 - RNA, 20 nt, Human
agggcaggcccaaauuauca

SEQ ID NO: 3367986 - RNA, 17 nt, Human
agggcagggcaucuccu

SEQ ID NO: 3367987 - RNA, 12 nt, Human
agggcagggcca

SEQ ID NO: 3367988 - RNA, 15 nt, Human
agggcagggcucuga

SEQ ID NO: 3367989 - RNA, 16 nt, Human
agggcaggugcuucag

SEQ ID NO: 3367990 - RNA, 12 nt, Human
agggcagguggg

SEQ ID NO: 3367991 - RNA, 15 nt, Human
agggcagguggggug

SEQ ID NO: 3367992 - RNA, 19 nt, Human
agggcagguggggugagaa

SEQ ID NO: 3367993 - RNA, 18 nt, Human
agggcaguaccugagggu

SEQ ID NO: 3367994 - RNA, 22 nt, Human
agggcaguaccugagggucugu

SEQ ID NO: 3367995 - RNA, 19 nt, Human
agggcagugcaaggaggga

SEQ ID NO: 3367996 - RNA, 14 nt, Human
agggcaguggaggu

SEQ ID NO: 3367997 - RNA, 15 nt, Human
agggcaguguuuccu

SEQ ID NO: 3367998 - RNA, 14 nt, Human
agggcaguucgcag

SEQ ID NO: 3367999 - RNA, 18 nt, Human
agggcaguucgcagccac

SEQ ID NO: 3368000 - RNA, 19 nt, Human
agggcaguucgcagccacc

SEQ ID NO: 3368001 - RNA, 22 nt, Human
agggcaguucgcagccacccug

SEQ ID NO: 3368002 - RNA, 16 nt, Human
agggcauaaaacagcu

SEQ ID NO: 3368003 - RNA, 13 nt, Human
agggcauaaagua

SEQ ID NO: 3368004 - RNA, 20 nt, Human
agggcauaaaguaaauacau

SEQ ID NO: 3368005 - RNA, 16 nt, Human
agggcauaaauuauug

SEQ ID NO: 3368006 - RNA, 22 nt, Human
agggcauaaugaugaugggaau

SEQ ID NO: 3368007 - RNA, 17 nt, Human
agggcaucaugcaucuu

SEQ ID NO: 3368008 - RNA, 14 nt, Human
agggcauccauacc

SEQ ID NO: 3368009 - RNA, 14 nt, Human
agggcaucuccagg

SEQ ID NO: 3368010 - RNA, 19 nt, Human
agggcaucuccaggaaggc

SEQ ID NO: 3368011 - RNA, 12 nt, Human
agggcaucuccu

SEQ ID NO: 3368012 - RNA, 13 nt, Human
agggcaucuccug

SEQ ID NO: 3368013 - RNA, 14 nt, Human
agggcaucucuggg

SEQ ID NO: 3368014 - RNA, 13 nt, Human
agggcaucuugcu

SEQ ID NO: 3368015 - RNA, 12 nt, Human
agggcaugaaau

SEQ ID NO: 3368016 - RNA, 15 nt, Human
agggcaugccccggc

SEQ ID NO: 3368017 - RNA, 23 nt, Human
agggcaugccccggccaccucug

SEQ ID NO: 3368018 - RNA, 13 nt, Human
agggcaugccuug

SEQ ID NO: 3368019 - RNA, 17 nt, Human
agggcauggccaggugg

SEQ ID NO: 3368020 - RNA, 13 nt, Human
agggcauuggcca

SEQ ID NO: 3368021 - RNA, 23 nt, Human
agggcauuguaucugucuuucca

SEQ ID NO: 3368022 - RNA, 14 nt, Human
agggccaaaagcuu

SEQ ID NO: 3368023 - RNA, 21 nt, Human
agggccaaaagcuucccuccc

SEQ ID NO: 3368024 - RNA, 16 nt, Human
agggccaaagaaccaa

SEQ ID NO: 3368025 - RNA, 24 nt, Human
agggccacacuauuaccaugagaa

SEQ ID NO: 3368026 - RNA, 18 nt, Human
agggccacauagaugcug

SEQ ID NO: 3368027 - RNA, 20 nt, Human
agggccacaugggaggcuca

SEQ ID NO: 3368028 - RNA, 21 nt, Human
agggccacaugggaggcucac

SEQ ID NO: 3368029 - RNA, 15 nt, Human
agggccacgugccag

SEQ ID NO: 3368030 - RNA, 14 nt, Human
agggcugucaucug

SEQ ID NO: 3368031 - RNA, 19 nt, Human
agggcugucaucugugcac

SEQ ID NO: 3368032 - RNA, 21 nt, Human
agggcugugcuugaaggcccu

SEQ ID NO: 3368033 - RNA, 18 nt, Human
agggcuuacggcccuggc

SEQ ID NO: 3368034 - RNA, 20 nt, Human
agggcuuacggcccuggccu

SEQ ID NO: 3368035 - RNA, 13 nt, Human
agggcuucugcac

SEQ ID NO: 3368036 - RNA, 18 nt, Human
agggcuucugcacccucc

SEQ ID NO: 3368037 - RNA, 23 nt, Human
agggcuucugccauuucugagau

SEQ ID NO: 3368038 - RNA, 16 nt, Human
agggcuuguaguucuu

SEQ ID NO: 3368039 - RNA, 16 nt, Human
agggcuuuaaaauucu

SEQ ID NO: 3368040 - RNA, 15 nt, Human
aggggaaaaaaaugu

SEQ ID NO: 3368041 - RNA, 18 nt, Human
aggggaaaaucagccugc

SEQ ID NO: 3368042 - RNA, 13 nt, Human
aggggaaaaugaa

SEQ ID NO: 3368043 - RNA, 17 nt, Human
aggggaacacugcccuc

SEQ ID NO: 3368044 - RNA, 18 nt, Human
aggggaacacugcccucg

SEQ ID NO: 3368045 - RNA, 14 nt, Human
aggggaacagacug

SEQ ID NO: 3368046 - RNA, 22 nt, Human
aggggaagaaacacuuucucuu

SEQ ID NO: 3368047 - RNA, 16 nt, Human
aggggaagaauaauuu

SEQ ID NO: 3368048 - RNA, 14 nt, Human
aggggaagaggccu

SEQ ID NO: 3368049 - RNA, 23 nt, Human
aggggaagggccagucugggcug

SEQ ID NO: 3368050 - RNA, 18 nt, Human
aggggaauaauagaagaa

SEQ ID NO: 3368051 - RNA, 19 nt, Human
aggggaauaauagaagaac

SEQ ID NO: 3368052 - RNA, 16 nt, Human
aggggaauauuuuauu

SEQ ID NO: 3368053 - RNA, 22 nt, Human
aggggaauauuuuauucaaggu

SEQ ID NO: 3368054 - RNA, 16 nt, Human
aggggaaucagaacuc

SEQ ID NO: 3368055 - RNA, 14 nt, Human
aggggaaugagggg

SEQ ID NO: 3368056 - RNA, 19 nt, Human
aggggaaugagggggcuca

SEQ ID NO: 3368057 - RNA, 19 nt, Human
aggggaauguuugccucug

SEQ ID NO: 3368058 - RNA, 21 nt, Human
aggggaauguuugccucugcc

SEQ ID NO: 3368059 - RNA, 17 nt, Human
aggggaccaggaguggg

SEQ ID NO: 3368060 - RNA, 14 nt, Human
aggggacccccgcc

SEQ ID NO: 3368061 - RNA, 14 nt, Human
aggggacgcuggua

SEQ ID NO: 3368062 - RNA, 23 nt, Human
aggggacgcugguagagauggag

SEQ ID NO: 3368063 - RNA, 17 nt, Human
aggggacucagcccuga

SEQ ID NO: 3368064 - RNA, 23 nt, Human
aggggacucugggcuauggacac

SEQ ID NO: 3368065 - RNA, 15 nt, Human
aggggagacagagca

SEQ ID NO: 3368066 - RNA, 13 nt, Human
aggggagacuuug

SEQ ID NO: 3368067 - RNA, 15 nt, Human
aggggagacuuugau

SEQ ID NO: 3368068 - RNA, 10 nt, Human
aggggagagg

SEQ ID NO: 3368069 - RNA, 23 nt, Human
aggggagcaaaaucgaugcagug

SEQ ID NO: 3368070 - RNA, 16 nt, Human
aggggagcagaggggc

SEQ ID NO: 3368071 - RNA, 12 nt, Human
aggggagccagg

SEQ ID NO: 3368072 - RNA, 17 nt, Human
aggggagcccacugucc

SEQ ID NO: 3368073 - RNA, 21 nt, Human
aggggagcccacuguccuggg

SEQ ID NO: 3368074 - RNA, 17 nt, Human
aggggagcucugucugu

SEQ ID NO: 3368075 - RNA, 15 nt, Human
aggggaggccaucug

SEQ ID NO: 3368076 - RNA, 20 nt, Human
aggggaggggcuccuuucca

SEQ ID NO: 3368077 - RNA, 22 nt, Human
aggggagucaccuucccuugcc

SEQ ID NO: 3368078 - RNA, 21 nt, Human
aggggauagagagagaccacu

SEQ ID NO: 3368079 - RNA, 18 nt, Human
aggggauauaggagagga

SEQ ID NO: 3368080 - RNA, 19 nt, Human
aggggaucauaaaguuaga

SEQ ID NO: 3368081 - RNA, 20 nt, Human
aggggaucauaaaguuagaa

SEQ ID NO: 3368082 - RNA, 18 nt, Human
aggggauuaauaugaaaa

SEQ ID NO: 3368083 - RNA, 15 nt, Human
aggggauuacaguuc

SEQ ID NO: 3368084 - RNA, 19 nt, Human
aggggauugaagcccucca

SEQ ID NO: 3368085 - RNA, 18 nt, Human
aggggauuuuuaugucug

SEQ ID NO: 3368086 - RNA, 18 nt, Human
aggggcaacgaagaaaaa

SEQ ID NO: 3368087 - RNA, 17 nt, Human
aggggcagaaaaacucu

SEQ ID NO: 3368088 - RNA, 14 nt, Human
aggggcagaacagc

SEQ ID NO: 3368089 - RNA, 13 nt, Human
aggggcagagcca

SEQ ID NO: 3368090 - RNA, 12 nt, Human
aggggcagcccu

SEQ ID NO: 3368091 - RNA, 15 nt, Human
aggugcauuuuuacu

SEQ ID NO: 3368092 - RNA, 13 nt, Human
aggugccacugga

SEQ ID NO: 3368093 - RNA, 23 nt, Human
aggugccacuuuacccaccuaga

SEQ ID NO: 3368094 - RNA, 18 nt, Human
aggugccagcaaagcccc

SEQ ID NO: 3368095 - RNA, 20 nt, Human
aggugccagcaaagccccau

SEQ ID NO: 3368096 - RNA, 14 nt, Human
aggugccagcaacu

SEQ ID NO: 3368097 - RNA, 18 nt, Human
aggugccagcaacugaau

SEQ ID NO: 3368098 - RNA, 19 nt, Human
aggugccagcaacugaaua

SEQ ID NO: 3368099 - RNA, 20 nt, Human
aggugccagcaacugaauaa

SEQ ID NO: 3368100 - RNA, 21 nt, Human
aggugcccagaauaaguuauu

SEQ ID NO: 3368101 - RNA, 22 nt, Human
aggugcccagaaugaggcugcu

SEQ ID NO: 3368102 - RNA, 17 nt, Human
aggugccccaaaaugca

SEQ ID NO: 3368103 - RNA, 12 nt, Human
aggugccuccag

SEQ ID NO: 3368104 - RNA, 11 nt, Human
aggugccugug

SEQ ID NO: 3368105 - RNA, 22 nt, Human
aggugccugugaggcaggggcg

SEQ ID NO: 3368106 - RNA, 13 nt, Human
aggugccuucuua

SEQ ID NO: 3368107 - RNA, 22 nt, Human
aggugccuucuucagggccugg

SEQ ID NO: 3368108 - RNA, 23 nt, Human
aggugccuucuucagggccuggu

SEQ ID NO: 3368109 - RNA, 21 nt, Human
aggugccuuggagggucccaa

SEQ ID NO: 3368110 - RNA, 23 nt, Human
aggugccuuggagggucccaagc

SEQ ID NO: 3368111 - RNA, 15 nt, Human
aggugccuuucaaau

SEQ ID NO: 3368112 - RNA, 15 nt, Human
aggugcuaaaucugc

SEQ ID NO: 3368113 - RNA, 20 nt, Human
aggugcuaauuuguuuugga

SEQ ID NO: 3368114 - RNA, 23 nt, Human
aggugcuaauuuguuuuggauau

SEQ ID NO: 3368115 - RNA, 23 nt, Human
aggugcuacaaaaacacagcaag

SEQ ID NO: 3368116 - RNA, 23 nt, Human
aggugcuaggaacacuccuucac

SEQ ID NO: 3368117 - RNA, 15 nt, Human
aggugcucauuggcu

SEQ ID NO: 3368118 - RNA, 20 nt, Human
aggugcugacggccagggag

SEQ ID NO: 3368119 - RNA, 21 nt, Human
aggugcuggagcacugggcuc

SEQ ID NO: 3368120 - RNA, 19 nt, Human
aggugcuggaggugggagc

SEQ ID NO: 3368121 - RNA, 23 nt, Human
aggugcuguugucauugcuuuac

SEQ ID NO: 3368122 - RNA, 20 nt, Human
aggugcuuaagcagaagcau

SEQ ID NO: 3368123 - RNA, 21 nt, Human
aggugcuucuaguucugccag

SEQ ID NO: 3368124 - RNA, 15 nt, Human
agguggaagaaggga

SEQ ID NO: 3368125 - RNA, 16 nt, Human
agguggaagaagggag

SEQ ID NO: 3368126 - RNA, 19 nt, Human
agguggaagaagggagaag

SEQ ID NO: 3368127 - RNA, 11 nt, Human
agguggaagcc

SEQ ID NO: 3368128 - RNA, 15 nt, Human
agguggaagcccucc

SEQ ID NO: 3368129 - RNA, 17 nt, Human
agguggaagcccuccuu

SEQ ID NO: 3368130 - RNA, 16 nt, Human
agguggaaggcagaca

SEQ ID NO: 3368131 - RNA, 17 nt, Human
agguggaaggcagacag

SEQ ID NO: 3368132 - RNA, 14 nt, Human
agguggacacacaa

SEQ ID NO: 3368133 - RNA, 23 nt, Human
agguggaccuuuuaaaguguuuc

SEQ ID NO: 3368134 - RNA, 11 nt, Human
agguggagcaa

SEQ ID NO: 3368135 - RNA, 20 nt, Human
agguggaggcugcagugagc

SEQ ID NO: 3368136 - RNA, 23 nt, Human
agguggauggccccagcacagcu

SEQ ID NO: 3368137 - RNA, 23 nt, Human
agguggauuuuguuuaaaaaauc

SEQ ID NO: 3368138 - RNA, 15 nt, Human
agguggcaaggcugu

SEQ ID NO: 3368139 - RNA, 16 nt, Human
agguggcaaggcugug

SEQ ID NO: 3368140 - RNA, 13 nt, Human
agguggcagcccu

SEQ ID NO: 3368141 - RNA, 14 nt, Human
agguggcaggacca

SEQ ID NO: 3368142 - RNA, 17 nt, Human
agguggcaggaccagga

SEQ ID NO: 3368143 - RNA, 19 nt, Human
agguggcaggaccaggacu

SEQ ID NO: 3368144 - RNA, 16 nt, Human
agguggccaaguuccu

SEQ ID NO: 3368145 - RNA, 19 nt, Human
agguggccaaguuccucua

SEQ ID NO: 3368146 - RNA, 14 nt, Human
agguggccacucca

SEQ ID NO: 3368147 - RNA, 23 nt, Human
agguggccucuccuuguggccug

SEQ ID NO: 3368148 - RNA, 15 nt, Human
agguggcucuccagu

SEQ ID NO: 3368149 - RNA, 23 nt, Human
agguggcucuggaaugacaugug

SEQ ID NO: 3368150 - RNA, 14 nt, Human
agguggcugagccc

SEQ ID NO: 3368151 - RNA, 17 nt, Human
agguggcugccuggagc

SEQ ID NO: 3368152 - RNA, 23 nt, Human
aggugggaaaugguaugagcuga

SEQ ID NO: 3368153 - RNA, 16 nt, Human
aggugggagcaggaga

SEQ ID NO: 3368154 - RNA, 20 nt, Human
aggugggagcaggagauuga

SEQ ID NO: 3368155 - RNA, 22 nt, Human
aggugggaggaucucuugagcc

SEQ ID NO: 3368156 - RNA, 22 nt, Human
aggugggauaucacuuccauga

SEQ ID NO: 3368157 - RNA, 20 nt, Human
aggugggauccuccaggugc

SEQ ID NO: 3368158 - RNA, 16 nt, Human
aggugggccagccccu

SEQ ID NO: 3368159 - RNA, 12 nt, Human
aggugggcccag

SEQ ID NO: 3368160 - RNA, 14 nt, Human
aggugggcccagga

SEQ ID NO: 3368161 - RNA, 16 nt, Human
aggugggcgggcagca

SEQ ID NO: 3368162 - RNA, 15 nt, Human
aggugggcuggacuu

SEQ ID NO: 3368163 - RNA, 22 nt, Human
agguggggaggggguuuggggg

SEQ ID NO: 3368164 - RNA, 23 nt, Human
agguggggaggggguuugggggc

SEQ ID NO: 3368165 - RNA, 13 nt, Human
agguggggaguca

SEQ ID NO: 3368166 - RNA, 13 nt, Human
agguggggcagcu

SEQ ID NO: 3368167 - RNA, 14 nt, Human
agguggggcagcuu

SEQ ID NO: 3368168 - RNA, 23 nt, Human
agguggggcagcuugaggguugg

SEQ ID NO: 3368169 - RNA, 17 nt, Human
agguggggcgggaaagc

SEQ ID NO: 3368170 - RNA, 21 nt, Human
agguggggcgggaaagccagu

SEQ ID NO: 3368171 - RNA, 15 nt, Human
agguggggguugcug

SEQ ID NO: 3368172 - RNA, 19 nt, Human
agguggggucacucuggca

SEQ ID NO: 3368173 - RNA, 15 nt, Human
agguggggugagaau

SEQ ID NO: 3368174 - RNA, 18 nt, Human
agguggaagaagggagaa

SEQ ID NO: 3368175 - RNA, 14 nt, Human
agguggaagcccuc

SEQ ID NO: 3368176 - RNA, 16 nt, Human
agguggaagcccuccu

SEQ ID NO: 3368177 - RNA, 16 nt, Human
agguggaccuuuuaaa

SEQ ID NO: 3368178 - RNA, 18 nt, Human
agguggaccuuuuaaagu

SEQ ID NO: 3368179 - RNA, 22 nt, Human
agguggaccuuuuaaaguguuu

SEQ ID NO: 3368180 - RNA, 13 nt, Human
agguggagguggg

SEQ ID NO: 3368181 - RNA, 17 nt, Human
agguggaucaccugagg

SEQ ID NO: 3368182 - RNA, 15 nt, Human
agguggaucuauuuc

SEQ ID NO: 3368183 - RNA, 16 nt, Human
agguggaucuauuuca

SEQ ID NO: 3368184 - RNA, 16 nt, Human
agguggauggccccag

SEQ ID NO: 3368185 - RNA, 14 nt, Human
agguggcaaggcug

SEQ ID NO: 3368186 - RNA, 18 nt, Human
agguggcacuuuuucauu

SEQ ID NO: 3368187 - RNA, 19 nt, Human
agguggcacuuuuucauuu

SEQ ID NO: 3368188 - RNA, 15 nt, Human
agguggcaucucuaa

SEQ ID NO: 3368189 - RNA, 17 nt, Human
agguggccacuccagac

SEQ ID NO: 3368190 - RNA, 21 nt, Human
agguggccacuuuaagagaga

SEQ ID NO: 3368191 - RNA, 18 nt, Human
agguggccaugccucagc

SEQ ID NO: 3368192 - RNA, 14 nt, Human
agguggcccuacug

SEQ ID NO: 3368193 - RNA, 22 nt, Human
agguggcugacccagucccugg

SEQ ID NO: 3368194 - RNA, 19 nt, Human
agguggcugagccccuguc

SEQ ID NO: 3368195 - RNA, 12 nt, Human
agguggcugccu

SEQ ID NO: 3368196 - RNA, 13 nt, Human
aggugggagcagg

SEQ ID NO: 3368197 - RNA, 11 nt, Human
aggugggagga

SEQ ID NO: 3368198 - RNA, 23 nt, Human
aggugggauaucccuaugcugcc

SEQ ID NO: 3368199 - RNA, 15 nt, Human
aggugggauccucca

SEQ ID NO: 3368200 - RNA, 18 nt, Human
aggugggauccuccaggu

SEQ ID NO: 3368201 - RNA, 14 nt, Human
aggugggccagccc

SEQ ID NO: 3368202 - RNA, 15 nt, Human
aggugggccagcccc

SEQ ID NO: 3368203 - RNA, 18 nt, Human
aggugggccagccccucc

SEQ ID NO: 3368204 - RNA, 16 nt, Human
aggugggcccaggacc

SEQ ID NO: 3368205 - RNA, 15 nt, Human
aggugggccuugcua

SEQ ID NO: 3368206 - RNA, 16 nt, Human
aggugggcgggcaggg

SEQ ID NO: 3368207 - RNA, 22 nt, Human
aggugggcguggucacugcugu

SEQ ID NO: 3368208 - RNA, 20 nt, Human
aggugggcugagcccuggca

SEQ ID NO: 3368209 - RNA, 22 nt, Human
aggugggcugggcccucucuuc

SEQ ID NO: 3368210 - RNA, 11 nt, Human
agguggggagg

SEQ ID NO: 3368211 - RNA, 16 nt, Human
agguggggcagcuuga

SEQ ID NO: 3368212 - RNA, 18 nt, Human
agguggggcgaggcaggc

SEQ ID NO: 3368213 - RNA, 18 nt, Human
aggugggggcggggagua

SEQ ID NO: 3368214 - RNA, 18 nt, Human
agguggggguuggcuggg

SEQ ID NO: 3368215 - RNA, 23 nt, Human
agguggggucacucuggcagcuc

SEQ ID NO: 3368216 - RNA, 21 nt, Human
agguggggucuuugugagagu

SEQ ID NO: 3368217 - RNA, 16 nt, Human
aggugggucccggcuc

SEQ ID NO: 3368218 - RNA, 18 nt, Human
agguggguugaaagccaa

SEQ ID NO: 3368219 - RNA, 17 nt, Human
aggugguagauauugag

SEQ ID NO: 3368220 - RNA, 16 nt, Human
aggugguaggaggagg

SEQ ID NO: 3368221 - RNA, 15 nt, Human
agguggucaguaaau

SEQ ID NO: 3368222 - RNA, 18 nt, Human
agguggucugaauguucu

SEQ ID NO: 3368223 - RNA, 20 nt, Human
agguggucugaauguucuga

SEQ ID NO: 3368224 - RNA, 22 nt, Human
agguggucugaauguucugaca

SEQ ID NO: 3368225 - RNA, 20 nt, Human
agguggucugcucgggccca

SEQ ID NO: 3368226 - RNA, 21 nt, Human
agguggucugcucgggcccag

SEQ ID NO: 3368227 - RNA, 22 nt, Human
agguggucugcucgggcccagg

SEQ ID NO: 3368228 - RNA, 21 nt, Human
agguggugagaaauuucugug

SEQ ID NO: 3368229 - RNA, 21 nt, Human
agguggugguagagaagcaag

SEQ ID NO: 3368230 - RNA, 23 nt, Human
agguggugucacugucccuccug

SEQ ID NO: 3368231 - RNA, 18 nt, Human
agguggugucgggcccuu

SEQ ID NO: 3368232 - RNA, 13 nt, Human
aggugguguuucu

SEQ ID NO: 3368233 - RNA, 20 nt, Human
agguguagccacaccaggau

SEQ ID NO: 3368234 - RNA, 20 nt, Human
agguguauggagagaaaaca

SEQ ID NO: 3368235 - RNA, 23 nt, Human
agguguccagcauugcuggacuc

SEQ ID NO: 3368236 - RNA, 16 nt, Human
agguguccccagccca

SEQ ID NO: 3368237 - RNA, 15 nt, Human
agguguccuacagaa

SEQ ID NO: 3368238 - RNA, 19 nt, Human
agguguccuacagaaaaac

SEQ ID NO: 3368239 - RNA, 13 nt, Human
aggugucucaggc

SEQ ID NO: 3368240 - RNA, 19 nt, Human
aggugucucaggcugccug

SEQ ID NO: 3368241 - RNA, 20 nt, Human
aggugucucaggcugccuga

SEQ ID NO: 3368242 - RNA, 22 nt, Human
aggugucucaggcugccugagu

SEQ ID NO: 3368243 - RNA, 17 nt, Human
aggugucugcacccagg

SEQ ID NO: 3368244 - RNA, 21 nt, Human
aggugucugcacccaggggug

SEQ ID NO: 3368245 - RNA, 15 nt, Human
aggugucuuccuccc

SEQ ID NO: 3368246 - RNA, 18 nt, Human
aggugugacugaauuucu

SEQ ID NO: 3368247 - RNA, 20 nt, Human
aggugugacugaauuucuuu

SEQ ID NO: 3368248 - RNA, 14 nt, Human
aggugugagacugg

SEQ ID NO: 3368249 - RNA, 15 nt, Human
aggugugagacuggg

SEQ ID NO: 3368250 - RNA, 17 nt, Human
aggugugaggaggaggc

SEQ ID NO: 3368251 - RNA, 14 nt, Human
aggugugagucacc

SEQ ID NO: 3368252 - RNA, 20 nt, Human
aggugugagucaccaagccc

SEQ ID NO: 3368253 - RNA, 12 nt, Human
aggugugcucug

SEQ ID NO: 3368254 - RNA, 15 nt, Human
aggugugcucugauc

SEQ ID NO: 3368255 - RNA, 20 nt, Human
agguguggagccgaggccua

SEQ ID NO: 3368256 - RNA, 24 nt, Human
agguguggcagaagcuugcagaug

SEQ ID NO: 3368257 - RNA, 17 nt, Human
aggugugggggcugcag

SEQ ID NO: 3368258 - RNA, 15 nt, Human
agguguguugcagug

SEQ ID NO: 3368259 - RNA, 17 nt, Human
agguguuaacauuccaa

SEQ ID NO: 3368260 - RNA, 23 nt, Human
agguguuauuuggaaccuuguuu

SEQ ID NO: 3368261 - RNA, 22 nt, Human
agguguucaagaccagccugac

SEQ ID NO: 3368262 - RNA, 17 nt, Human
agguguucuacacucau

SEQ ID NO: 3368263 - RNA, 20 nt, Human
agguguucuacacucaucuu

SEQ ID NO: 3368264 - RNA, 23 nt, Human
agguguugccaaauauguccugg

SEQ ID NO: 3368265 - RNA, 15 nt, Human
agguguuggugacaa

SEQ ID NO: 3368266 - RNA, 18 nt, Human
agguguugguuuuggggg

SEQ ID NO: 3368267 - RNA, 17 nt, Human
agguguuuaaagagagg

SEQ ID NO: 3368268 - RNA, 23 nt, Human
agguguuuaacggcacuguggcc

SEQ ID NO: 3368269 - RNA, 12 nt, Human
agguguuuauac

SEQ ID NO: 3368270 - RNA, 13 nt, Human
agguguuugaaaa

SEQ ID NO: 3368271 - RNA, 12 nt, Human
agguuaaaaaaa

SEQ ID NO: 3368272 - RNA, 17 nt, Human
agguuaaauguuuugua

SEQ ID NO: 3368273 - RNA, 17 nt, Human
agguuaaggcugaggaa

SEQ ID NO: 3368274 - RNA, 24 nt, Human
agguuaaggcugaggaaaggccag

SEQ ID NO: 3368275 - RNA, 15 nt, Human
agguuaauaaaguaa

SEQ ID NO: 3368276 - RNA, 14 nt, Human
agguuaauguucau

SEQ ID NO: 3368277 - RNA, 22 nt, Human
agguuaauuccaauuauaugag

SEQ ID NO: 3368278 - RNA, 23 nt, Human
agguuacaacagauuugugaacu

SEQ ID NO: 3368279 - RNA, 16 nt, Human
agguuaccaagaagcc

SEQ ID NO: 3368280 - RNA, 20 nt, Human
agguuagaaauaaugucaaa

SEQ ID NO: 3368281 - RNA, 21 nt, Human
agguuaggcaguauaaagaau

SEQ ID NO: 3368282 - RNA, 20 nt, Human
agguuauaauuuuuuuuaaa

SEQ ID NO: 3368283 - RNA, 17 nt, Human
agguuauaggucacucc

SEQ ID NO: 3368284 - RNA, 18 nt, Human
agguuaucgaaauaacaa

SEQ ID NO: 3368285 - RNA, 19 nt, Human
agguuaucgaaauaacaau

SEQ ID NO: 3368286 - RNA, 16 nt, Human
agguuauugcaauaaa

SEQ ID NO: 3368287 - RNA, 20 nt, Human
agguuauuuuaguuucuguu

SEQ ID NO: 3368288 - RNA, 14 nt, Human
agguucaaagauau

SEQ ID NO: 3368289 - RNA, 14 nt, Human
agguucaacuuauu

SEQ ID NO: 3368290 - RNA, 19 nt, Human
agguucaagcaauccuccc

SEQ ID NO: 3368291 - RNA, 19 nt, Human
agguucagccaagguuuua

SEQ ID NO: 3368292 - RNA, 13 nt, Human
agguucagcuugu

SEQ ID NO: 3368293 - RNA, 13 nt, Human
agucaguauuguu

SEQ ID NO: 3368294 - RNA, 14 nt, Human
agucaguauuguuu

SEQ ID NO: 3368295 - RNA, 15 nt, Human
agucagucauucaga

SEQ ID NO: 3368296 - RNA, 16 nt, Human
agucagugcaaauguc

SEQ ID NO: 3368297 - RNA, 23 nt, Human
agucagugcaaaugucagauaca

SEQ ID NO: 3368298 - RNA, 20 nt, Human
agucagugcccaacuguuau

SEQ ID NO: 3368299 - RNA, 22 nt, Human
agucagugggaacgugacugcc

SEQ ID NO: 3368300 - RNA, 15 nt, Human
agucaguuucuacac

SEQ ID NO: 3368301 - RNA, 18 nt, Human
agucauaaaccuuaagua

SEQ ID NO: 3368302 - RNA, 17 nt, Human
agucauaccaacuuuag

SEQ ID NO: 3368303 - RNA, 16 nt, Human
agucauagguuaauau

SEQ ID NO: 3368304 - RNA, 22 nt, Human
agucauagguuaauauuuaaga

SEQ ID NO: 3368305 - RNA, 20 nt, Human
agucauauauaucacccaga

SEQ ID NO: 3368306 - RNA, 15 nt, Human
agucauauuuugauu

SEQ ID NO: 3368307 - RNA, 14 nt, Human
agucaucaucaggg

SEQ ID NO: 3368308 - RNA, 17 nt, Human
agucaucaucagggccu

SEQ ID NO: 3368309 - RNA, 21 nt, Human
agucaucaucagggccugggg

SEQ ID NO: 3368310 - RNA, 13 nt, Human
agucauccaaucu

SEQ ID NO: 3368311 - RNA, 14 nt, Human
agucaucuauaguu

SEQ ID NO: 3368312 - RNA, 22 nt, Human
agucaucuauaguugauauguu

SEQ ID NO: 3368313 - RNA, 20 nt, Human
agucaucuccaucagcugua

SEQ ID NO: 3368314 - RNA, 22 nt, Human
agucaugaacacaucagcuagc

SEQ ID NO: 3368315 - RNA, 16 nt, Human
agucaugagcugagca

SEQ ID NO: 3368316 - RNA, 19 nt, Human
agucaugauguuuuuaaaa

SEQ ID NO: 3368317 - RNA, 21 nt, Human
agucaugauguuuuuaaaauc

SEQ ID NO: 3368318 - RNA, 18 nt, Human
agcauuuucugcaucucc

SEQ ID NO: 3368319 - RNA, 20 nt, Human
agcauuuucugcaucuccac

SEQ ID NO: 3368320 - RNA, 22 nt, Human
agcauuuugcuaaaugugaaug

SEQ ID NO: 3368321 - RNA, 15 nt, Human
agcauuuuguauuug

SEQ ID NO: 3368322 - RNA, 20 nt, Human
agcauuuuucaauauauuga

SEQ ID NO: 3368323 - RNA, 18 nt, Human
agcauuuuugauuuaugc

SEQ ID NO: 3368324 - RNA, 15 nt, Human
agccaaaaauagcua

SEQ ID NO: 3368325 - RNA, 18 nt, Human
agccaaacacacagaagg

SEQ ID NO: 3368326 - RNA, 21 nt, Human
agccaaacauauauauacuau

SEQ ID NO: 3368327 - RNA, 18 nt, Human
agccaaacauccuacaag

SEQ ID NO: 3368328 - RNA, 17 nt, Human
agccaaaccucaccaac

SEQ ID NO: 3368329 - RNA, 16 nt, Human
agccaaaccucuguga

SEQ ID NO: 3368330 - RNA, 12 nt, Human
agccaaagaaaa

SEQ ID NO: 3368331 - RNA, 16 nt, Human
agccaaagaaaugaac

SEQ ID NO: 3368332 - RNA, 18 nt, Human
agccaaagaaaugaacau

SEQ ID NO: 3368333 - RNA, 22 nt, Human
agccaaagaaaugaacauucca

SEQ ID NO: 3368334 - RNA, 15 nt, Human
agccaaagagaaugc

SEQ ID NO: 3368335 - RNA, 19 nt, Human
agccaaagcuaggccuggc

SEQ ID NO: 3368336 - RNA, 20 nt, Human
agccaaagcuaggccuggcc

SEQ ID NO: 3368337 - RNA, 23 nt, Human
agccaaauguggcauuugugauc

SEQ ID NO: 3368338 - RNA, 13 nt, Human
agccaaauuuaaa

SEQ ID NO: 3368339 - RNA, 22 nt, Human
agccaacacgcaccugccucag

SEQ ID NO: 3368340 - RNA, 14 nt, Human
agccaaccccugug

SEQ ID NO: 3368341 - RNA, 16 nt, Human
agccaaccccugugga

SEQ ID NO: 3368342 - RNA, 23 nt, Human
agccaaccuuacuuacagcauaa

SEQ ID NO: 3368343 - RNA, 14 nt, Human
agccaacugcugcu

SEQ ID NO: 3368344 - RNA, 15 nt, Human
agccaacuuguaaau

SEQ ID NO: 3368345 - RNA, 22 nt, Human
agccaagaccucacacacacaa

SEQ ID NO: 3368346 - RNA, 14 nt, Human
agccaagaggcugc

SEQ ID NO: 3368347 - RNA, 15 nt, Human
agccaagaggcugca

SEQ ID NO: 3368348 - RNA, 18 nt, Human
agccaagcacaguggugg

SEQ ID NO: 3368349 - RNA, 13 nt, Human
agccaagcagcca

SEQ ID NO: 3368350 - RNA, 17 nt, Human
agccaagcuccuuggga

SEQ ID NO: 3368351 - RNA, 20 nt, Human
agccaaggagucacugagac

SEQ ID NO: 3368352 - RNA, 17 nt, Human
agccaaggauagaagcu

SEQ ID NO: 3368353 - RNA, 16 nt, Human
agccaagggaaagggg

SEQ ID NO: 3368354 - RNA, 20 nt, Human
agccaagggaaaggggugcu

SEQ ID NO: 3368355 - RNA, 23 nt, Human
agccaagggaaaggggugcuuuu

SEQ ID NO: 3368356 - RNA, 16 nt, Human
agccaagggaaccugu

SEQ ID NO: 3368357 - RNA, 15 nt, Human
agccaagggccucuu

SEQ ID NO: 3368358 - RNA, 19 nt, Human
agccaaggugggcugagcc

SEQ ID NO: 3368359 - RNA, 18 nt, Human
agccaaggugucauuuau

SEQ ID NO: 3368360 - RNA, 22 nt, Human
agccaagguuuuauaaggcuga

SEQ ID NO: 3368361 - RNA, 14 nt, Human
agccaaguagccuc

SEQ ID NO: 3368362 - RNA, 17 nt, Human
agccaaguagccucucc

SEQ ID NO: 3368363 - RNA, 14 nt, Human
agccaauccccucc

SEQ ID NO: 3368364 - RNA, 23 nt, Human
agccaaucccucaccuucugagu

SEQ ID NO: 3368365 - RNA, 19 nt, Human
agccaaucuacaaucucuu

SEQ ID NO: 3368366 - RNA, 22 nt, Human
agccaaucuacaaucucuuuuu

SEQ ID NO: 3368367 - RNA, 15 nt, Human
agccaauuauguuaa

SEQ ID NO: 3368368 - RNA, 18 nt, Human
agccaauucagacaggca

SEQ ID NO: 3368369 - RNA, 14 nt, Human
agccaauuuuucug

SEQ ID NO: 3368370 - RNA, 17 nt, Human
agccaauuuuucugcac

SEQ ID NO: 3368371 - RNA, 19 nt, Human
agccacaagaaauuugauu

SEQ ID NO: 3368372 - RNA, 14 nt, Human
agccacacacacag

SEQ ID NO: 3368373 - RNA, 18 nt, Human
agccacacacacagaaaa

SEQ ID NO: 3368374 - RNA, 14 nt, Human
agccacaccaggau

SEQ ID NO: 3368375 - RNA, 21 nt, Human
agccacacugugggacucuuc

SEQ ID NO: 3368376 - RNA, 23 nt, Human
agccacacuucucaggacacagg

SEQ ID NO: 3368377 - RNA, 17 nt, Human
agccacagaagccagga

SEQ ID NO: 3368378 - RNA, 18 nt, Human
agccacagaagccaggag

SEQ ID NO: 3368379 - RNA, 22 nt, Human
agccacagaagccaggagcaaa

SEQ ID NO: 3368380 - RNA, 13 nt, Human
agccacagcccag

SEQ ID NO: 3368381 - RNA, 18 nt, Human
agccacagcccaggccuc

SEQ ID NO: 3368382 - RNA, 19 nt, Human
agccacagcccaggccucc

SEQ ID NO: 3368383 - RNA, 13 nt, Human
agccacagcuggu

SEQ ID NO: 3368384 - RNA, 13 nt, Human
agccacaggccug

SEQ ID NO: 3368385 - RNA, 16 nt, Human
agccacaggccugaga

SEQ ID NO: 3368386 - RNA, 17 nt, Human
agccacaggccugagau

SEQ ID NO: 3368387 - RNA, 23 nt, Human
agccacaggccugagauuucauc

SEQ ID NO: 3368388 - RNA, 22 nt, Human
agccacagugagggagauccca

SEQ ID NO: 3368389 - RNA, 21 nt, Human
agccacauagagugacuccaa

SEQ ID NO: 3368390 - RNA, 17 nt, Human
agccacauauugagaug

SEQ ID NO: 3368391 - RNA, 21 nt, Human
agccacaugggaaacuuccaa

SEQ ID NO: 3368392 - RNA, 14 nt, Human
agccacauuccuga

SEQ ID NO: 3368393 - RNA, 23 nt, Human
agccacauuuggaauacuuuuug

SEQ ID NO: 3368394 - RNA, 13 nt, Human
agccaccaacucu

SEQ ID NO: 3368395 - RNA, 17 nt, Human
agccaccaacucuugca

SEQ ID NO: 3368396 - RNA, 13 nt, Human
agccaccacgccc

SEQ ID NO: 3368397 - RNA, 22 nt, Human
agccaccagaugugacaguguu

SEQ ID NO: 3368398 - RNA, 12 nt, Human
agccaccaguuc

SEQ ID NO: 3368399 - RNA, 14 nt, Human
agccaccaguucuc

SEQ ID NO: 3368400 - RNA, 13 nt, Human
agccaccaucuuu

SEQ ID NO: 3368401 - RNA, 14 nt, Human
agccacccaaagca

SEQ ID NO: 3368402 - RNA, 18 nt, Human
agccacccaaagcagugg

SEQ ID NO: 3368403 - RNA, 20 nt, Human
agccaccccagaaaugguga

SEQ ID NO: 3368404 - RNA, 16 nt, Human
agccaccccaugcugg

SEQ ID NO: 3368405 - RNA, 21 nt, Human
agccaccccgggcucucugcu

SEQ ID NO: 3368406 - RNA, 14 nt, Human
agccacccugagga

SEQ ID NO: 3368407 - RNA, 15 nt, Human
agccaccgaagccgc

SEQ ID NO: 3368408 - RNA, 21 nt, Human
agccaccgaagccgccugugg

SEQ ID NO: 3368409 - RNA, 21 nt, Human
agccaccuaaacgguucaguu

SEQ ID NO: 3368410 - RNA, 15 nt, Human
agccaccucucccuc

SEQ ID NO: 3368411 - RNA, 18 nt, Human
agccaccucucuuuuuca

SEQ ID NO: 3368412 - RNA, 19 nt, Human
agccaccugaguuccugag

SEQ ID NO: 3368413 - RNA, 15 nt, Human
agccaccugucccac

SEQ ID NO: 3368414 - RNA, 16 nt, Human
agccaccugucccacc

SEQ ID NO: 3368415 - RNA, 19 nt, Human
agccaccugucccaccuca

SEQ ID NO: 3368416 - RNA, 22 nt, Human
agccaccuuuugggaauguuuu

SEQ ID NO: 3368417 - RNA, 19 nt, Human
agccacggacgcuggcucc

SEQ ID NO: 3368418 - RNA, 14 nt, Human
agccacggccaggc

SEQ ID NO: 3368419 - RNA, 17 nt, Human
agccacggccaggccag

SEQ ID NO: 3368420 - RNA, 18 nt, Human
agccacggccaggccaga

SEQ ID NO: 3368421 - RNA, 22 nt, Human
agccacuaaccuugccugguac

SEQ ID NO: 3368422 - RNA, 14 nt, Human
agccacuagacucu

SEQ ID NO: 3368423 - RNA, 22 nt, Human
agccacuagacucuucacuguu

SEQ ID NO: 3368424 - RNA, 22 nt, Human
agccacucaggaggcugaggca

SEQ ID NO: 3368425 - RNA, 14 nt, Human
agccacuccccucc

SEQ ID NO: 3368426 - RNA, 15 nt, Human
agccacuccccucca

SEQ ID NO: 3368427 - RNA, 12 nt, Human
agccacuccucu

SEQ ID NO: 3368428 - RNA, 13 nt, Human
agccacuccucug

SEQ ID NO: 3368429 - RNA, 14 nt, Human
agccacuccucuga

SEQ ID NO: 3368430 - RNA, 15 nt, Human
agccacucgggaggc

SEQ ID NO: 3368431 - RNA, 19 nt, Human
agccacucgggaggcugag

SEQ ID NO: 3368432 - RNA, 22 nt, Human
agccacucuaccagugcaggcu

SEQ ID NO: 3368433 - RNA, 19 nt, Human
agccacucucuucccuuuc

SEQ ID NO: 3368434 - RNA, 15 nt, Human
agccacugagcaaug

SEQ ID NO: 3368435 - RNA, 21 nt, Human
agccacugcaccgggccacag

SEQ ID NO: 3368436 - RNA, 22 nt, Human
agccacugcaccgggccacaga

SEQ ID NO: 3368437 - RNA, 12 nt, Human
agccacugccau

SEQ ID NO: 3368438 - RNA, 18 nt, Human
agccacugugcugaauuc

SEQ ID NO: 3368439 - RNA, 17 nt, Human
agccacuuaaaauguuc

SEQ ID NO: 3368440 - RNA, 17 nt, Human
agccacuucggccaggu

SEQ ID NO: 3368441 - RNA, 15 nt, Human
agccacuugccugug

SEQ ID NO: 3368442 - RNA, 20 nt, Human
agccacuuucaaucuucaau

SEQ ID NO: 3368443 - RNA, 23 nt, Human
agccagaaauaaaguuggugaca

SEQ ID NO: 3368444 - RNA, 20 nt, Human
agccagaacguggcucugcu

SEQ ID NO: 3368445 - RNA, 16 nt, Human
agccagaacucugugu

SEQ ID NO: 3368446 - RNA, 15 nt, Human
agccagaagcugagc

SEQ ID NO: 3368447 - RNA, 20 nt, Human
agguucaguauuauguaguu

SEQ ID NO: 3368448 - RNA, 17 nt, Human
agguucaugcaaacuuu

SEQ ID NO: 3368449 - RNA, 15 nt, Human
agguucccaagcuca

SEQ ID NO: 3368450 - RNA, 22 nt, Human
agguucccugccuuguuuggau

SEQ ID NO: 3368451 - RNA, 11 nt, Human
agguucccugu

SEQ ID NO: 3368452 - RNA, 19 nt, Human
agguucccuguucuuccuc

SEQ ID NO: 3368453 - RNA, 11 nt, Human
agguucuaaaa

SEQ ID NO: 3368454 - RNA, 18 nt, Human
agguucuaaaguucuaag

SEQ ID NO: 3368455 - RNA, 15 nt, Human
agguucuaaggccua

SEQ ID NO: 3368456 - RNA, 22 nt, Human
agguucuccaacaucacagccc

SEQ ID NO: 3368457 - RNA, 14 nt, Human
agguucucuccucc

SEQ ID NO: 3368458 - RNA, 22 nt, Human
agguucucuccuccccaaggag

SEQ ID NO: 3368459 - RNA, 12 nt, Human
agguucucucua

SEQ ID NO: 3368460 - RNA, 17 nt, Human
agguucugccugcuuug

SEQ ID NO: 3368461 - RNA, 20 nt, Human
agguucugguuagcucagcc

SEQ ID NO: 3368462 - RNA, 15 nt, Human
agccagaccagcagg

SEQ ID NO: 3368463 - RNA, 13 nt, Human
agccagacucugc

SEQ ID NO: 3368464 - RNA, 14 nt, Human
agccagacucuggu

SEQ ID NO: 3368465 - RNA, 14 nt, Human
agccagacuggcac

SEQ ID NO: 3368466 - RNA, 18 nt, Human
agccagagaagugacagg

SEQ ID NO: 3368467 - RNA, 10 nt, Human
agccagagga

SEQ ID NO: 3368468 - RNA, 18 nt, Human
agccagaggcuggguuca

SEQ ID NO: 3368469 - RNA, 22 nt, Human
agccagauggacuccagccugc

SEQ ID NO: 3368470 - RNA, 17 nt, Human
agccagauuucacucuc

SEQ ID NO: 3368471 - RNA, 19 nt, Human
agccagauuuuccugaaaa

SEQ ID NO: 3368472 - RNA, 23 nt, Human
agccagcaaugauguccagaaga

SEQ ID NO: 3368473 - RNA, 24 nt, Human
agccagcaaugauguccagaagaa

SEQ ID NO: 3368474 - RNA, 13 nt, Human
agccagcacacag

SEQ ID NO: 3368475 - RNA, 17 nt, Human
agccagcacacagggca

SEQ ID NO: 3368476 - RNA, 18 nt, Human
agccagcacacagggcag

SEQ ID NO: 3368477 - RNA, 19 nt, Human
agccagcacacagggcagu

SEQ ID NO: 3368478 - RNA, 14 nt, Human
agccagcaccuggc

SEQ ID NO: 3368479 - RNA, 15 nt, Human
agccagcaccuggca

SEQ ID NO: 3368480 - RNA, 15 nt, Human
agccagcacuuguau

SEQ ID NO: 3368481 - RNA, 16 nt, Human
agccagcagcagccca

SEQ ID NO: 3368482 - RNA, 21 nt, Human
agccagcagcagcccaagcuu

SEQ ID NO: 3368483 - RNA, 13 nt, Human
agccagcagccag

SEQ ID NO: 3368484 - RNA, 16 nt, Human
agccagcagccagcuc

SEQ ID NO: 3368485 - RNA, 18 nt, Human
agccagcaggcucucagg

SEQ ID NO: 3368486 - RNA, 20 nt, Human
agccagcaggcucucaggcc

SEQ ID NO: 3368487 - RNA, 23 nt, Human
agccagcaggcucucaggccagc

SEQ ID NO: 3368488 - RNA, 20 nt, Human
agccagcaguucagagcugc

SEQ ID NO: 3368489 - RNA, 12 nt, Human
agccagcaucug

SEQ ID NO: 3368490 - RNA, 16 nt, Human
agccagcaucugggcc

SEQ ID NO: 3368491 - RNA, 22 nt, Human
agccagccaaacacacagaagg

SEQ ID NO: 3368492 - RNA, 21 nt, Human
agccagccacucuaccagugc

SEQ ID NO: 3368493 - RNA, 12 nt, Human
agccagcccagc

SEQ ID NO: 3368494 - RNA, 16 nt, Human
agccagcccucccugu

SEQ ID NO: 3368495 - RNA, 18 nt, Human
agccagcccucccugucc

SEQ ID NO: 3368496 - RNA, 21 nt, Human
agccagccgagcaggaggccu

SEQ ID NO: 3368497 - RNA, 18 nt, Human
agccagccugaccuuccu

SEQ ID NO: 3368498 - RNA, 17 nt, Human
agccagccuggcuggga

SEQ ID NO: 3368499 - RNA, 22 nt, Human
agccagccuggcugggacuggg

SEQ ID NO: 3368500 - RNA, 21 nt, Human
agccagcgccucccuccaccc

SEQ ID NO: 3368501 - RNA, 16 nt, Human
agccagcguccuccuc

SEQ ID NO: 3368502 - RNA, 19 nt, Human
agccagcguccuccucugu

SEQ ID NO: 3368503 - RNA, 21 nt, Human
agccagcguccuccucuguga

SEQ ID NO: 3368504 - RNA, 23 nt, Human
agccagcguccuccucugugacc

SEQ ID NO: 3368505 - RNA, 20 nt, Human
agccagcgucggucugugcc

SEQ ID NO: 3368506 - RNA, 22 nt, Human
agccagcgucggucugugcccc

SEQ ID NO: 3368507 - RNA, 23 nt, Human
agccagcuaagggguggggcugc

SEQ ID NO: 3368508 - RNA, 17 nt, Human
agccagcucccucuauu

SEQ ID NO: 3368509 - RNA, 22 nt, Human
agccagcucccucuauuuaugu

SEQ ID NO: 3368510 - RNA, 15 nt, Human
agccagcucucagcc

SEQ ID NO: 3368511 - RNA, 18 nt, Human
agccagcugcaggaauca

SEQ ID NO: 3368512 - RNA, 13 nt, Human
agccagcugcccc

SEQ ID NO: 3368513 - RNA, 19 nt, Human
agccagcugcccccagagc

SEQ ID NO: 3368514 - RNA, 20 nt, Human
agccagcugccgaccagagc

SEQ ID NO: 3368515 - RNA, 12 nt, Human
agccagcuuggg

SEQ ID NO: 3368516 - RNA, 19 nt, Human
agccagcuuguuuacaugc

SEQ ID NO: 3368517 - RNA, 21 nt, Human
agccagcuuguuuacaugcuu

SEQ ID NO: 3368518 - RNA, 16 nt, Human
agccagcuuucccugc

SEQ ID NO: 3368519 - RNA, 22 nt, Human
agccagcuuucccugccucuca

SEQ ID NO: 3368520 - RNA, 20 nt, Human
agccaggaaguacuuccacc

SEQ ID NO: 3368521 - RNA, 21 nt, Human
agccaggaauuucccaggacc

SEQ ID NO: 3368522 - RNA, 23 nt, Human
agccaggaauuucccaggacccu

SEQ ID NO: 3368523 - RNA, 13 nt, Human
agccaggagaagc

SEQ ID NO: 3368524 - RNA, 23 nt, Human
agccaggagagcuuagggucuca

SEQ ID NO: 3368525 - RNA, 13 nt, Human
agccaggagcaaa

SEQ ID NO: 3368526 - RNA, 23 nt, Human
agccaggagcaaauguuucugca

SEQ ID NO: 3368527 - RNA, 14 nt, Human
agccaggaggccug

SEQ ID NO: 3368528 - RNA, 12 nt, Human
agccaggcacac

SEQ ID NO: 3368529 - RNA, 21 nt, Human
agccaggcagguagccagggg

SEQ ID NO: 3368530 - RNA, 12 nt, Human
agccaggccaca

SEQ ID NO: 3368531 - RNA, 14 nt, Human
agccaggccacaag

SEQ ID NO: 3368532 - RNA, 22 nt, Human
agccaggccacaagacccuugu

SEQ ID NO: 3368533 - RNA, 15 nt, Human
agccaggccacuggc

SEQ ID NO: 3368534 - RNA, 22 nt, Human
agccaggcccuugucggcccca

SEQ ID NO: 3368535 - RNA, 13 nt, Human
agccaggcgggcu

SEQ ID NO: 3368536 - RNA, 14 nt, Human
agccaggcucugug

SEQ ID NO: 3368537 - RNA, 21 nt, Human
agccaggcugccaaggccaga

SEQ ID NO: 3368538 - RNA, 21 nt, Human
agccagggaaagacuggcaag

SEQ ID NO: 3368539 - RNA, 15 nt, Human
agccagggagagccc

SEQ ID NO: 3368540 - RNA, 18 nt, Human
agccagggagagcccagg

SEQ ID NO: 3368541 - RNA, 20 nt, Human
agccagggagagcccaggag

SEQ ID NO: 3368542 - RNA, 22 nt, Human
agccagggauggggccacagcc

SEQ ID NO: 3368543 - RNA, 23 nt, Human
agccagggauggggccacagcca

SEQ ID NO: 3368544 - RNA, 13 nt, Human
agccagggccagg

SEQ ID NO: 3368545 - RNA, 14 nt, Human
agccagggccaggg

SEQ ID NO: 3368546 - RNA, 17 nt, Human
agccagggccagggguc

SEQ ID NO: 3368547 - RNA, 21 nt, Human
agccagggcccgggaagcaaa

SEQ ID NO: 3368548 - RNA, 15 nt, Human
agccagggccugcga

SEQ ID NO: 3368549 - RNA, 22 nt, Human
agccagggcuaugggagcagcu

SEQ ID NO: 3368550 - RNA, 12 nt, Human
agccagggcugg

SEQ ID NO: 3368551 - RNA, 13 nt, Human
agccagggcugga

SEQ ID NO: 3368552 - RNA, 15 nt, Human
agccagggcuggaga

SEQ ID NO: 3368553 - RNA, 23 nt, Human
agccaggggagcagaggggcaga

SEQ ID NO: 3368554 - RNA, 21 nt, Human
agccagggggacuagccccug

SEQ ID NO: 3368555 - RNA, 19 nt, Human
agccagggggagcugggcc

SEQ ID NO: 3368556 - RNA, 20 nt, Human
agccagggggaugccacucc

SEQ ID NO: 3368557 - RNA, 18 nt, Human
agccagggucucucccuc

SEQ ID NO: 3368558 - RNA, 23 nt, Human
agccagguaaugagggacuggaa

SEQ ID NO: 3368559 - RNA, 17 nt, Human
agccagguauggcucug

SEQ ID NO: 3368560 - RNA, 19 nt, Human
agccaggucccccugcagc

SEQ ID NO: 3368561 - RNA, 20 nt, Human
agccaggucccccugcagcu

SEQ ID NO: 3368562 - RNA, 13 nt, Human
agccaggugccuu

SEQ ID NO: 3368563 - RNA, 17 nt, Human
agccaggugccuuggag

SEQ ID NO: 3368564 - RNA, 18 nt, Human
agccaggugccuuggagg

SEQ ID NO: 3368565 - RNA, 13 nt, Human
agccaguaaaugg

SEQ ID NO: 3368566 - RNA, 22 nt, Human
agccaguaaaugggggugcauu

SEQ ID NO: 3368567 - RNA, 23 nt, Human
agccaguaaaugggggugcauuu

SEQ ID NO: 3368568 - RNA, 13 nt, Human
agccaguaauccu

SEQ ID NO: 3368569 - RNA, 12 nt, Human
agccagucuuaa

SEQ ID NO: 3368570 - RNA, 23 nt, Human
agccagugaacauaauucuuauu

SEQ ID NO: 3368571 - RNA, 17 nt, Human
agccagugaccugagga

SEQ ID NO: 3368572 - RNA, 13 nt, Human
agccagugagaug

SEQ ID NO: 3368573 - RNA, 16 nt, Human
agccagugcccugagc

SEQ ID NO: 3368574 - RNA, 23 nt, Human
agccaguuuggguaaaauacuuu

SEQ ID NO: 3368575 - RNA, 22 nt, Human
agccauacauaaaagaaauaaa

SEQ ID NO: 3368576 - RNA, 22 nt, Human
agccauacuuaucucucugugc

SEQ ID NO: 3368577 - RNA, 10 nt, Human
agccauagug

SEQ ID NO: 3368578 - RNA, 14 nt, Human
agccaucaaaaugc

SEQ ID NO: 3368579 - RNA, 15 nt, Human
agccaucaaaaugcu

SEQ ID NO: 3368580 - RNA, 18 nt, Human
agccaucaaaaugcuuuu

SEQ ID NO: 3368581 - RNA, 18 nt, Human
agccaucaacaagaguug

SEQ ID NO: 3368582 - RNA, 17 nt, Human
agccaucaagagacuga

SEQ ID NO: 3368583 - RNA, 18 nt, Human
agccaucaccucagaugg

SEQ ID NO: 3368584 - RNA, 14 nt, Human
agccaucaccuuag

SEQ ID NO: 3368585 - RNA, 18 nt, Human
agccaucauaggaaggga

SEQ ID NO: 3368586 - RNA, 17 nt, Human
agccaucccagccuugg

SEQ ID NO: 3368587 - RNA, 19 nt, Human
agccaucccaugaacacac

SEQ ID NO: 3368588 - RNA, 23 nt, Human
agccaucuaaaguaaaaagggaa

SEQ ID NO: 3368589 - RNA, 22 nt, Human
agccaucucucuacuccuaccu

SEQ ID NO: 3368590 - RNA, 18 nt, Human
agccaucugcccaggggu

SEQ ID NO: 3368591 - RNA, 18 nt, Human
agccaugaccuuacauuu

SEQ ID NO: 3368592 - RNA, 21 nt, Human
agccaugagaugauacaucca

SEQ ID NO: 3368593 - RNA, 23 nt, Human
agccaugauguggaguggggcag

SEQ ID NO: 3368594 - RNA, 16 nt, Human
agccaugccagcuggc

SEQ ID NO: 3368595 - RNA, 15 nt, Human
agccaugcccgcauu

SEQ ID NO: 3368596 - RNA, 16 nt, Human
agccaugcgcccccuc

SEQ ID NO: 3368597 - RNA, 18 nt, Human
agccaugcuggaaaauaa

SEQ ID NO: 3368598 - RNA, 19 nt, Human
agccaugcugggaagacgc

SEQ ID NO: 3368599 - RNA, 19 nt, Human
agccauggagauucucaua

SEQ ID NO: 3368600 - RNA, 17 nt, Human
agccaugggaccaaacc

SEQ ID NO: 3368601 - RNA, 14 nt, Human
agccauguacagac

SEQ ID NO: 3368602 - RNA, 22 nt, Human
agccauguagaagcugcaucuu

SEQ ID NO: 3368603 - RNA, 16 nt, Human
agccauguauaaaugu

SEQ ID NO: 3368604 - RNA, 16 nt, Human
agccauguuuaagauu

SEQ ID NO: 3368605 - RNA, 12 nt, Human
agccgggcgugg

SEQ ID NO: 3368606 - RNA, 23 nt, Human
agccggggaagagauccaaagac

SEQ ID NO: 3368607 - RNA, 20 nt, Human
agccggggaguuucuuuccu

SEQ ID NO: 3368608 - RNA, 18 nt, Human
agccggggccugccuagc

SEQ ID NO: 3368609 - RNA, 23 nt, Human
agccggggccuuaucgggcucca

SEQ ID NO: 3368610 - RNA, 19 nt, Human
agccggggugggguggcug

SEQ ID NO: 3368611 - RNA, 16 nt, Human
agccggguguccccaa

SEQ ID NO: 3368612 - RNA, 17 nt, Human
agccgguaacuguccug

SEQ ID NO: 3368613 - RNA, 17 nt, Human
agccguaaaaacugaag

SEQ ID NO: 3368614 - RNA, 23 nt, Human
agccguccuggcgccuggcaguc

SEQ ID NO: 3368615 - RNA, 14 nt, Human
agccgugagugcag

SEQ ID NO: 3368616 - RNA, 17 nt, Human
agccgugaugcucaggc

SEQ ID NO: 3368617 - RNA, 19 nt, Human
agccgugaugcucaggcuu

SEQ ID NO: 3368618 - RNA, 15 nt, Human
agccgugccuucagc

SEQ ID NO: 3368619 - RNA, 13 nt, Human
agccguggcuucc

SEQ ID NO: 3368620 - RNA, 19 nt, Human
agccguuuguuccccaaga

SEQ ID NO: 3368621 - RNA, 17 nt, Human
agccuaaaaauaaagca

SEQ ID NO: 3368622 - RNA, 23 nt, Human
agccuaaaaauaaagcacaaacc

SEQ ID NO: 3368623 - RNA, 20 nt, Human
agccuaaagauuuugaucuc

SEQ ID NO: 3368624 - RNA, 18 nt, Human
agccuaagauauacuugu

SEQ ID NO: 3368625 - RNA, 21 nt, Human
agccuaagauauacuuguuuu

SEQ ID NO: 3368626 - RNA, 22 nt, Human
agccuaaucccugggcauugcu

SEQ ID NO: 3368627 - RNA, 23 nt, Human
agccuaaucccugggcauugcuu

SEQ ID NO: 3368628 - RNA, 22 nt, Human
agccuaccggcaauuuccggcc

SEQ ID NO: 3368629 - RNA, 19 nt, Human
agccuacuagggaccuggg

SEQ ID NO: 3368630 - RNA, 22 nt, Human
agccuacuagggaccuggggaa

SEQ ID NO: 3368631 - RNA, 14 nt, Human
agccuagaagcugg

SEQ ID NO: 3368632 - RNA, 15 nt, Human
agccuagacccuccu

SEQ ID NO: 3368633 - RNA, 13 nt, Human
agccuaggccagg

SEQ ID NO: 3368634 - RNA, 14 nt, Human
agccuaggggucag

SEQ ID NO: 3368635 - RNA, 16 nt, Human
agccuaugagcauccu

SEQ ID NO: 3368636 - RNA, 18 nt, Human
agccuaugagcauccuga

SEQ ID NO: 3368637 - RNA, 19 nt, Human
agccuaugagcauccugag

SEQ ID NO: 3368638 - RNA, 21 nt, Human
agccuaugagcauccugagcc

SEQ ID NO: 3368639 - RNA, 23 nt, Human
agccuaugagcauccugagcccc

SEQ ID NO: 3368640 - RNA, 16 nt, Human
agccuauggcagaaaa

SEQ ID NO: 3368641 - RNA, 13 nt, Human
agccuauguugug

SEQ ID NO: 3368642 - RNA, 13 nt, Human
agccuauuccuga

SEQ ID NO: 3368643 - RNA, 16 nt, Human
agccuauuuaccugca

SEQ ID NO: 3368644 - RNA, 17 nt, Human
agccuauuuuuuuagau

SEQ ID NO: 3368645 - RNA, 16 nt, Human
agccucaaauccagga

SEQ ID NO: 3368646 - RNA, 17 nt, Human
agccucaaccuccuggg

SEQ ID NO: 3368647 - RNA, 21 nt, Human
agccucaagucuuauuuccuc

SEQ ID NO: 3368648 - RNA, 20 nt, Human
agccucaauaagccuugucg

SEQ ID NO: 3368649 - RNA, 18 nt, Human
agccucacaguccuuacc

SEQ ID NO: 3368650 - RNA, 14 nt, Human
agccucacccuugc

SEQ ID NO: 3368651 - RNA, 21 nt, Human
agccucacuucuaggguaugg

SEQ ID NO: 3368652 - RNA, 20 nt, Human
agccucacuuggucugccag

SEQ ID NO: 3368653 - RNA, 21 nt, Human
agccucacuuggucugccagg

SEQ ID NO: 3368654 - RNA, 14 nt, Human
agccucagauuccu

SEQ ID NO: 3368655 - RNA, 16 nt, Human
agccucagcauccugg

SEQ ID NO: 3368656 - RNA, 17 nt, Human
agccucagcauccuggc

SEQ ID NO: 3368657 - RNA, 21 nt, Human
agccucagcauccuggcaccc

SEQ ID NO: 3368658 - RNA, 22 nt, Human
agccucagcauccuggcacccg

SEQ ID NO: 3368659 - RNA, 23 nt, Human
agccucagcauccuggcacccgg

SEQ ID NO: 3368660 - RNA, 12 nt, Human
agccucagccau

SEQ ID NO: 3368661 - RNA, 15 nt, Human
agccucagccauuca

SEQ ID NO: 3368662 - RNA, 15 nt, Human
aguccucacucccag

SEQ ID NO: 3368663 - RNA, 17 nt, Human
aguccucacucccaguc

SEQ ID NO: 3368664 - RNA, 12 nt, Human
aguccuccagaa

SEQ ID NO: 3368665 - RNA, 21 nt, Human
aguccuccagaacucuuccuc

SEQ ID NO: 3368666 - RNA, 14 nt, Human
aguccucccaucuc

SEQ ID NO: 3368667 - RNA, 16 nt, Human
aguccucccaucucac

SEQ ID NO: 3368668 - RNA, 14 nt, Human
aguccuccccucac

SEQ ID NO: 3368669 - RNA, 18 nt, Human
aguccuccccucacagcc

SEQ ID NO: 3368670 - RNA, 20 nt, Human
aguccuccccucacagccuc

SEQ ID NO: 3368671 - RNA, 17 nt, Human
aguccucccugacuuuu

SEQ ID NO: 3368672 - RNA, 19 nt, Human
aguccucccugacuuuucu

SEQ ID NO: 3368673 - RNA, 15 nt, Human
aguccucguagccau

SEQ ID NO: 3368674 - RNA, 17 nt, Human
aguccucguagccaucu

SEQ ID NO: 3368675 - RNA, 21 nt, Human
aguccucguagccaucucucu

SEQ ID NO: 3368676 - RNA, 12 nt, Human
aguccucugaau

SEQ ID NO: 3368677 - RNA, 12 nt, Human
aguccugaagag

SEQ ID NO: 3368678 - RNA, 14 nt, Human
aguccugaagaggc

SEQ ID NO: 3368679 - RNA, 14 nt, Human
aguccugaaggaca

SEQ ID NO: 3368680 - RNA, 20 nt, Human
aguccugaucagagccgugg

SEQ ID NO: 3368681 - RNA, 23 nt, Human
aguccugcacaguuuucuggcug

SEQ ID NO: 3368682 - RNA, 16 nt, Human
aguccugccucagccu

SEQ ID NO: 3368683 - RNA, 13 nt, Human
aguccugccuggc

SEQ ID NO: 3368684 - RNA, 15 nt, Human
aguccugccuggcca

SEQ ID NO: 3368685 - RNA, 19 nt, Human
aguccugcuaccucccuug

SEQ ID NO: 3368686 - RNA, 21 nt, Human
aguccugcuaccucccuugcc

SEQ ID NO: 3368687 - RNA, 13 nt, Human
aguccugcuccag

SEQ ID NO: 3368688 - RNA, 14 nt, Human
aguccugcuccaga

SEQ ID NO: 3368689 - RNA, 23 nt, Human
aguccugcuccagaauuuggaaa

SEQ ID NO: 3368690 - RNA, 14 nt, Human
aguccuggaagcca

SEQ ID NO: 3368691 - RNA, 22 nt, Human
aguccuggaagccagcuuuccc

SEQ ID NO: 3368692 - RNA, 17 nt, Human
aguccuggauguugugu

SEQ ID NO: 3368693 - RNA, 13 nt, Human
aguccuggccugg

SEQ ID NO: 3368694 - RNA, 16 nt, Human
aguccugggagaccca

SEQ ID NO: 3368695 - RNA, 19 nt, Human
aguccuguaugucugucau

SEQ ID NO: 3368696 - RNA, 21 nt, Human
aguccuguaugucugucauug

SEQ ID NO: 3368697 - RNA, 19 nt, Human
aguccugugaaugccacug

SEQ ID NO: 3368698 - RNA, 17 nt, Human
aguccuuaaacagggca

SEQ ID NO: 3368699 - RNA, 18 nt, Human
aguccuuaaacagggcau

SEQ ID NO: 3368700 - RNA, 20 nt, Human
aguccuuaccagcagagcac

SEQ ID NO: 3368701 - RNA, 15 nt, Human
aguccuuaccucuuc

SEQ ID NO: 3368702 - RNA, 17 nt, Human
aguccuuaccucuuccg

SEQ ID NO: 3368703 - RNA, 18 nt, Human
aguccuuaucuagcugca

SEQ ID NO: 3368704 - RNA, 14 nt, Human
aguccuugaaaaua

SEQ ID NO: 3368705 - RNA, 16 nt, Human
aguccuugaaaauauu

SEQ ID NO: 3368706 - RNA, 22 nt, Human
aguccuugaaaauauuuuuuau

SEQ ID NO: 3368707 - RNA, 14 nt, Human
aguccuuuaugugg

SEQ ID NO: 3368708 - RNA, 17 nt, Human
aguccuuugagcuccug

SEQ ID NO: 3368709 - RNA, 12 nt, Human
aguccuuuucuu

SEQ ID NO: 3368710 - RNA, 15 nt, Human
agucgaugaacuauu

SEQ ID NO: 3368711 - RNA, 22 nt, Human
agucgccuuucagcaggcagcc

SEQ ID NO: 3368712 - RNA, 15 nt, Human
agucgcugaggaaaa

SEQ ID NO: 3368713 - RNA, 16 nt, Human
agucggcacagccugg

SEQ ID NO: 3368714 - RNA, 16 nt, Human
agucgggggcuggccu

SEQ ID NO: 3368715 - RNA, 22 nt, Human
agucgucaucacuuuucaguga

SEQ ID NO: 3368716 - RNA, 21 nt, Human
agucgugaccugcuaggccag

SEQ ID NO: 3368717 - RNA, 12 nt, Human
agucgugccugu

SEQ ID NO: 3368718 - RNA, 13 nt, Human
agucgugccugug

SEQ ID NO: 3368719 - RNA, 19 nt, Human
agucguggagaugucuucg

SEQ ID NO: 3368720 - RNA, 21 nt, Human
agucguggagaugucuucgua

SEQ ID NO: 3368721 - RNA, 14 nt, Human
agucguugugaggg

SEQ ID NO: 3368722 - RNA, 13 nt, Human
agucguuuuccaa

SEQ ID NO: 3368723 - RNA, 12 nt, Human
agucuaaaguuu

SEQ ID NO: 3368724 - RNA, 20 nt, Human
agucuaaaguuuacaguaaa

SEQ ID NO: 3368725 - RNA, 23 nt, Human
agucuaaaguuuacaguaaauaa

SEQ ID NO: 3368726 - RNA, 23 nt, Human
agucuaaauauucagaaucuuug

SEQ ID NO: 3368727 - RNA, 17 nt, Human
agucuaaauauuuccuu

SEQ ID NO: 3368728 - RNA, 23 nt, Human
agucuaaauauuuccuuaaacug

SEQ ID NO: 3368729 - RNA, 23 nt, Human
agucuaacaacugcccaguuucc

SEQ ID NO: 3368730 - RNA, 12 nt, Human
agucuaaccaaa

SEQ ID NO: 3368731 - RNA, 16 nt, Human
agucuaaccaaaugca

SEQ ID NO: 3368732 - RNA, 17 nt, Human
agucuaaccaaaugcau

SEQ ID NO: 3368733 - RNA, 20 nt, Human
agucuaaccaaaugcaucaa

SEQ ID NO: 3368734 - RNA, 20 nt, Human
agucuaauuuuuauucauaa

SEQ ID NO: 3368735 - RNA, 11 nt, Human
agucuaccaau

SEQ ID NO: 3368736 - RNA, 13 nt, Human
agucuacccagag

SEQ ID NO: 3368737 - RNA, 18 nt, Human
agucuacccgacauaagu

SEQ ID NO: 3368738 - RNA, 17 nt, Human
agucuacgcucuccuuu

SEQ ID NO: 3368739 - RNA, 20 nt, Human
agucuacgcucuccuuucuu

SEQ ID NO: 3368740 - RNA, 18 nt, Human
agucuacucuuaagccau

SEQ ID NO: 3368741 - RNA, 14 nt, Human
agucuagaaguugu

SEQ ID NO: 3368742 - RNA, 17 nt, Human
agucuagauggcuccuc

SEQ ID NO: 3368743 - RNA, 20 nt, Human
agucuagauggcuccucuca

SEQ ID NO: 3368744 - RNA, 23 nt, Human
agucuagauguuuauucuucuag

SEQ ID NO: 3368745 - RNA, 21 nt, Human
agucuagauucaaagguucua

SEQ ID NO: 3368746 - RNA, 22 nt, Human
agucuagauucaaagguucuag

SEQ ID NO: 3368747 - RNA, 20 nt, Human
agucuagauucucuggcugu

SEQ ID NO: 3368748 - RNA, 18 nt, Human
agucuaggagcugggagg

SEQ ID NO: 3368749 - RNA, 22 nt, Human
agccucugggggguggccaggc

SEQ ID NO: 3368750 - RNA, 22 nt, Human
agccucugggucagugguccac

SEQ ID NO: 3368751 - RNA, 14 nt, Human
agccucugucacug

SEQ ID NO: 3368752 - RNA, 21 nt, Human
agccucugucacugcaggcac

SEQ ID NO: 3368753 - RNA, 11 nt, Human
agccucugugu

SEQ ID NO: 3368754 - RNA, 15 nt, Human
agccucugugucacu

SEQ ID NO: 3368755 - RNA, 21 nt, Human
agccucugugucacuggcugc

SEQ ID NO: 3368756 - RNA, 14 nt, Human
agccucuguuuuga

SEQ ID NO: 3368757 - RNA, 20 nt, Human
agccucuuaaagcugccugu

SEQ ID NO: 3368758 - RNA, 23 nt, Human
agccucuuaaagcugccuguagu

SEQ ID NO: 3368759 - RNA, 20 nt, Human
agccucuuucccuuccaguu

SEQ ID NO: 3368760 - RNA, 18 nt, Human
agccucuuucugucccuu

SEQ ID NO: 3368761 - RNA, 21 nt, Human
agccucuuucugucccuucug

SEQ ID NO: 3368762 - RNA, 16 nt, Human
agccucuuuuugauac

SEQ ID NO: 3368763 - RNA, 20 nt, Human
agccugaaauagugguucuu

SEQ ID NO: 3368764 - RNA, 16 nt, Human
agccugaacagaagcu

SEQ ID NO: 3368765 - RNA, 19 nt, Human
agccugaaccccagggcug

SEQ ID NO: 3368766 - RNA, 22 nt, Human
agccugaaggggcgucuguucc

SEQ ID NO: 3368767 - RNA, 15 nt, Human
agccugacagccaga

SEQ ID NO: 3368768 - RNA, 13 nt, Human
agccugagagucu

SEQ ID NO: 3368769 - RNA, 21 nt, Human
agccugagcaacucuugauua

SEQ ID NO: 3368770 - RNA, 16 nt, Human
agccugaggcagccac

SEQ ID NO: 3368771 - RNA, 21 nt, Human
agccugaggcagccacuucgg

SEQ ID NO: 3368772 - RNA, 13 nt, Human
agccugaguagaa

SEQ ID NO: 3368773 - RNA, 17 nt, Human
agccugaguagaaaggc

SEQ ID NO: 3368774 - RNA, 22 nt, Human
agccugaguagaaaggccuuua

SEQ ID NO: 3368775 - RNA, 16 nt, Human
agccugagucaccugc

SEQ ID NO: 3368776 - RNA, 18 nt, Human
agccugagucagggccca

SEQ ID NO: 3368777 - RNA, 18 nt, Human
agccugagucuccugugc

SEQ ID NO: 3368778 - RNA, 16 nt, Human
agccugauauugauau

SEQ ID NO: 3368779 - RNA, 18 nt, Human
agccugcaaacucacugc

SEQ ID NO: 3368780 - RNA, 19 nt, Human
agccugcaaacucacugcu

SEQ ID NO: 3368781 - RNA, 19 nt, Human
agccugcaauuucauaugc

SEQ ID NO: 3368782 - RNA, 21 nt, Human
agccugcaauuucauaugcug

SEQ ID NO: 3368783 - RNA, 12 nt, Human
agccugcagagc

SEQ ID NO: 3368784 - RNA, 13 nt, Human
agccugcagagcu

SEQ ID NO: 3368785 - RNA, 14 nt, Human
agccugcagagcug

SEQ ID NO: 3368786 - RNA, 22 nt, Human
agccugcaggaucucaccaggc

SEQ ID NO: 3368787 - RNA, 18 nt, Human
agccugcaggguggugcu

SEQ ID NO: 3368788 - RNA, 21 nt, Human
agccugcaggguggugcuggg

SEQ ID NO: 3368789 - RNA, 23 nt, Human
agccugcauugagcuugcaugcu

SEQ ID NO: 3368790 - RNA, 18 nt, Human
agccugccacucaggccc

SEQ ID NO: 3368791 - RNA, 23 nt, Human
agccugcccagcccccuggucuu

SEQ ID NO: 3368792 - RNA, 17 nt, Human
agccugcccuugucuga

SEQ ID NO: 3368793 - RNA, 16 nt, Human
agccugccucuucucu

SEQ ID NO: 3368794 - RNA, 19 nt, Human
agccugccucuucucuacu

SEQ ID NO: 3368795 - RNA, 13 nt, Human
agccugccuggag

SEQ ID NO: 3368796 - RNA, 15 nt, Human
agccugcgccugcug

SEQ ID NO: 3368797 - RNA, 18 nt, Human
agccugcggccugcugga

SEQ ID NO: 3368798 - RNA, 15 nt, Human
agccugcguggcuga

SEQ ID NO: 3368799 - RNA, 16 nt, Human
agccugcguggcugac

SEQ ID NO: 3368800 - RNA, 17 nt, Human
agccugcguggcugacc

SEQ ID NO: 3368801 - RNA, 23 nt, Human
agccugcguggcugaccccccuc

SEQ ID NO: 3368802 - RNA, 17 nt, Human
agccugcuagcuagcuc

SEQ ID NO: 3368803 - RNA, 10 nt, Human
agccugcuca

SEQ ID NO: 3368804 - RNA, 11 nt, Human
agccugcuccu

SEQ ID NO: 3368805 - RNA, 14 nt, Human
agccugcuccuucc

SEQ ID NO: 3368806 - RNA, 15 nt, Human
agccugcuccuuccc

SEQ ID NO: 3368807 - RNA, 20 nt, Human
agccugcuccuucccaggag

SEQ ID NO: 3368808 - RNA, 16 nt, Human
agccugcuccuucccu

SEQ ID NO: 3368809 - RNA, 17 nt, Human
agccugcuccuucccuu

SEQ ID NO: 3368810 - RNA, 11 nt, Human
agccugcugca

SEQ ID NO: 3368811 - RNA, 17 nt, Human
agccugcugcccaggcu

SEQ ID NO: 3368812 - RNA, 17 nt, Human
agccugcugccugcuuu

SEQ ID NO: 3368813 - RNA, 11 nt, Human
agccugcugga

SEQ ID NO: 3368814 - RNA, 18 nt, Human
agccugcuggcacccacc

SEQ ID NO: 3368815 - RNA, 20 nt, Human
agccugcuggucacagccuc

SEQ ID NO: 3368816 - RNA, 22 nt, Human
agccugcuggucacagccuccu

SEQ ID NO: 3368817 - RNA, 14 nt, Human
agccugcuucccac

SEQ ID NO: 3368818 - RNA, 18 nt, Human
agccuggaaaccugucug

SEQ ID NO: 3368819 - RNA, 10 nt, Human
agccuggacc

SEQ ID NO: 3368820 - RNA, 18 nt, Human
agccuggacccccagcuu

SEQ ID NO: 3368821 - RNA, 16 nt, Human
agccuggaccucugac

SEQ ID NO: 3368822 - RNA, 18 nt, Human
agccuggaccucugacag

SEQ ID NO: 3368823 - RNA, 18 nt, Human
aguuaggcuauucacaac

SEQ ID NO: 3368824 - RNA, 17 nt, Human
aguuagggaauggcaca

SEQ ID NO: 3368825 - RNA, 15 nt, Human
aguuaguagcauguu

SEQ ID NO: 3368826 - RNA, 16 nt, Human
aguuaguagcauguug

SEQ ID NO: 3368827 - RNA, 17 nt, Human
aguuaguagcauguuga

SEQ ID NO: 3368828 - RNA, 20 nt, Human
aguuaguaucuuuugauaug

SEQ ID NO: 3368829 - RNA, 17 nt, Human
aguuaguggaaaucuga

SEQ ID NO: 3368830 - RNA, 23 nt, Human
aguuaguucucucguaacugguu

SEQ ID NO: 3368831 - RNA, 14 nt, Human
aguuauaaaauuaa

SEQ ID NO: 3368832 - RNA, 20 nt, Human
aguuauaaaauuaaaaguuu

SEQ ID NO: 3368833 - RNA, 12 nt, Human
aguuauaagaag

SEQ ID NO: 3368834 - RNA, 21 nt, Human
aguuauaaguagcaggccaag

SEQ ID NO: 3368835 - RNA, 19 nt, Human
aguuauaguauaucuggac

SEQ ID NO: 3368836 - RNA, 15 nt, Human
aguuauagugaauac

SEQ ID NO: 3368837 - RNA, 19 nt, Human
aguuauauaaagagaaaau

SEQ ID NO: 3368838 - RNA, 21 nt, Human
aguuauauaaagagaaaauug

SEQ ID NO: 3368839 - RNA, 22 nt, Human
aguuauauagguuuuguuugcu

SEQ ID NO: 3368840 - RNA, 19 nt, Human
aguuauauuucagauguaa

SEQ ID NO: 3368841 - RNA, 22 nt, Human
aguuauauuucagauguaaugu

SEQ ID NO: 3368842 - RNA, 23 nt, Human
aguuaucagacacucuggcuggu

SEQ ID NO: 3368843 - RNA, 15 nt, Human
aguuaucaugaauuu

SEQ ID NO: 3368844 - RNA, 12 nt, Human
aguuaucauguu

SEQ ID NO: 3368845 - RNA, 17 nt, Human
aguuaucauguuaguaa

SEQ ID NO: 3368846 - RNA, 22 nt, Human
aguuaucauguuaguaauaccu

SEQ ID NO: 3368847 - RNA, 21 nt, Human
aguuauccagaggguugugau

SEQ ID NO: 3368848 - RNA, 17 nt, Human
aguuaucuaagaauaca

SEQ ID NO: 3368849 - RNA, 21 nt, Human
aguuaucuguucuuuugacuu

SEQ ID NO: 3368850 - RNA, 14 nt, Human
aguuaugaaauauu

SEQ ID NO: 3368851 - RNA, 12 nt, Human
aguuaugaauca

SEQ ID NO: 3368852 - RNA, 18 nt, Human
aguuauguaaauaauucu

SEQ ID NO: 3368853 - RNA, 20 nt, Human
aguuauguaaauaauucuuu

SEQ ID NO: 3368854 - RNA, 14 nt, Human
aguuaugugaauga

SEQ ID NO: 3368855 - RNA, 14 nt, Human
aguuauguguaugu

SEQ ID NO: 3368856 - RNA, 14 nt, Human
aguuauguuaaaau

SEQ ID NO: 3368857 - RNA, 14 nt, Human
aguuauuaacuuua

SEQ ID NO: 3368858 - RNA, 18 nt, Human
aguuauuaaguucuuuaa

SEQ ID NO: 3368859 - RNA, 22 nt, Human
aguuauuaauuuuuaaggaugu

SEQ ID NO: 3368860 - RNA, 20 nt, Human
aguuauuacauguaauuuga

SEQ ID NO: 3368861 - RNA, 14 nt, Human
aguuauugaagcag

SEQ ID NO: 3368862 - RNA, 16 nt, Human
aguuauugaagcagag

SEQ ID NO: 3368863 - RNA, 18 nt, Human
aguuauugaagcagagug

SEQ ID NO: 3368864 - RNA, 19 nt, Human
aguuauugaagcagagugg

SEQ ID NO: 3368865 - RNA, 18 nt, Human
aguuauugacaaacucuc

SEQ ID NO: 3368866 - RNA, 21 nt, Human
aguuauugauaaguucauaca

SEQ ID NO: 3368867 - RNA, 22 nt, Human
aguuauugcaguuuaucauuca

SEQ ID NO: 3368868 - RNA, 12 nt, Human
aguuauuggugg

SEQ ID NO: 3368869 - RNA, 19 nt, Human
aguuauuguacagcuguuu

SEQ ID NO: 3368870 - RNA, 21 nt, Human
aguuauuguacagcuguuuaa

SEQ ID NO: 3368871 - RNA, 17 nt, Human
aguuauuuuuguacaug

SEQ ID NO: 3368872 - RNA, 12 nt, Human
aguucaaaaaca

SEQ ID NO: 3368873 - RNA, 20 nt, Human
aguucaaaauucuaaaugua

SEQ ID NO: 3368874 - RNA, 20 nt, Human
aguucaaagucaugauguuu

SEQ ID NO: 3368875 - RNA, 13 nt, Human
aguucaacauguu

SEQ ID NO: 3368876 - RNA, 13 nt, Human
aguucaagaaaug

SEQ ID NO: 3368877 - RNA, 14 nt, Human
aguucaagaaauga

SEQ ID NO: 3368878 - RNA, 23 nt, Human
aguucaauaaacuuaacuuuaac

SEQ ID NO: 3368879 - RNA, 18 nt, Human
aguucaauaaaugucugu

SEQ ID NO: 3368880 - RNA, 19 nt, Human
aguucaauaaaugucuguu

SEQ ID NO: 3368881 - RNA, 13 nt, Human
aguucaaugaucu

SEQ ID NO: 3368882 - RNA, 14 nt, Human
aguucacacccugc

SEQ ID NO: 3368883 - RNA, 17 nt, Human
aguucacacccugcaag

SEQ ID NO: 3368884 - RNA, 22 nt, Human
aguucaccuauuucaaaaauuu

SEQ ID NO: 3368885 - RNA, 16 nt, Human
aguucacuauaaaugg

SEQ ID NO: 3368886 - RNA, 21 nt, Human
aguucacuauaaaugguguuu

SEQ ID NO: 3368887 - RNA, 24 nt, Human
aguucacucuccauuuaauaauua

SEQ ID NO: 3368888 - RNA, 14 nt, Human
aguucagagcugcc

SEQ ID NO: 3368889 - RNA, 15 nt, Human
aguucagagcugccc

SEQ ID NO: 3368890 - RNA, 16 nt, Human
aguucagaguuuucug

SEQ ID NO: 3368891 - RNA, 11 nt, Human
aguucagaucu

SEQ ID NO: 3368892 - RNA, 20 nt, Human
aguucagguagcugccccug

SEQ ID NO: 3368893 - RNA, 15 nt, Human
aguucaguaccugga

SEQ ID NO: 3368894 - RNA, 20 nt, Human
agugucaaguugugcuuguu

SEQ ID NO: 3368895 - RNA, 16 nt, Human
agugucaccuuuucuu

SEQ ID NO: 3368896 - RNA, 14 nt, Human
agugucaggaggaa

SEQ ID NO: 3368897 - RNA, 14 nt, Human
agugucaggcacug

SEQ ID NO: 3368898 - RNA, 15 nt, Human
agugucaggcacugg

SEQ ID NO: 3368899 - RNA, 20 nt, Human
agugucaucagaagauaacu

SEQ ID NO: 3368900 - RNA, 13 nt, Human
aguguccauuuug

SEQ ID NO: 3368901 - RNA, 17 nt, Human
aguguccauuuugugaa

SEQ ID NO: 3368902 - RNA, 20 nt, Human
aguguccauuuugugaagcc

SEQ ID NO: 3368903 - RNA, 14 nt, Human
aguguccccuccac

SEQ ID NO: 3368904 - RNA, 15 nt, Human
aguguccccuccacu

SEQ ID NO: 3368905 - RNA, 21 nt, Human
aguguccccuccacugucaca

SEQ ID NO: 3368906 - RNA, 13 nt, Human
aguguccugagcu

SEQ ID NO: 3368907 - RNA, 21 nt, Human
aguguccugagcucagcgugg

SEQ ID NO: 3368908 - RNA, 14 nt, Human
aguguccuuagaac

SEQ ID NO: 3368909 - RNA, 17 nt, Human
aguguccuucuugcucc

SEQ ID NO: 3368910 - RNA, 20 nt, Human
agugucuggaucaguaaaau

SEQ ID NO: 3368911 - RNA, 23 nt, Human
agugucuggaucaguaaaauuau

SEQ ID NO: 3368912 - RNA, 14 nt, Human
agugucuggcugca

SEQ ID NO: 3368913 - RNA, 22 nt, Human
agugucugugugcaagugugug

SEQ ID NO: 3368914 - RNA, 22 nt, Human
agugucuguguuuugaaagaau

SEQ ID NO: 3368915 - RNA, 15 nt, Human
agugucuuaauuaaa

SEQ ID NO: 3368916 - RNA, 17 nt, Human
agugucuuaauuaaaag

SEQ ID NO: 3368917 - RNA, 13 nt, Human
agugucuuccaua

SEQ ID NO: 3368918 - RNA, 15 nt, Human
agugucuuucuuugg

SEQ ID NO: 3368919 - RNA, 16 nt, Human
agugucuuuuuuugua

SEQ ID NO: 3368920 - RNA, 13 nt, Human
agugugaacaaaa

SEQ ID NO: 3368921 - RNA, 22 nt, Human
agugugaacuggacccuguugc

SEQ ID NO: 3368922 - RNA, 16 nt, Human
agugugaaguacaaua

SEQ ID NO: 3368923 - RNA, 15 nt, Human
agugugaaguuagaa

SEQ ID NO: 3368924 - RNA, 16 nt, Human
agugugaauacugcuu

SEQ ID NO: 3368925 - RNA, 19 nt, Human
agugugaccaaaaguuaca

SEQ ID NO: 3368926 - RNA, 20 nt, Human
agugugacugaucucucgug

SEQ ID NO: 3368927 - RNA, 15 nt, Human
agugugaggccaggg

SEQ ID NO: 3368928 - RNA, 19 nt, Human
agugugaggguccugcagc

SEQ ID NO: 3368929 - RNA, 18 nt, Human
agugugaguaagagcugg

SEQ ID NO: 3368930 - RNA, 19 nt, Human
agugugauugggaauaaau

SEQ ID NO: 3368931 - RNA, 17 nt, Human
agugugcauauuguaca

SEQ ID NO: 3368932 - RNA, 18 nt, Human
agugugcauauuguacac

SEQ ID NO: 3368933 - RNA, 19 nt, Human
agugugcauauuguacacu

SEQ ID NO: 3368934 - RNA, 13 nt, Human
agugugcccccca

SEQ ID NO: 3368935 - RNA, 19 nt, Human
agugugccccccauccugg

SEQ ID NO: 3368936 - RNA, 17 nt, Human
agugugcggcugugugu

SEQ ID NO: 3368937 - RNA, 19 nt, Human
agugugcugcuguaagaaa

SEQ ID NO: 3368938 - RNA, 12 nt, Human
agugugcuggag

SEQ ID NO: 3368939 - RNA, 12 nt, Human
agugugcuuuau

SEQ ID NO: 3368940 - RNA, 21 nt, Human
agugugcuuuaugcugaaaca

SEQ ID NO: 3368941 - RNA, 20 nt, Human
aguguggaagccggagggug

SEQ ID NO: 3368942 - RNA, 15 nt, Human
aguguggaggccacu

SEQ ID NO: 3368943 - RNA, 20 nt, Human
aguguggagucauucucauu

SEQ ID NO: 3368944 - RNA, 12 nt, Human
aguguggagugg

SEQ ID NO: 3368945 - RNA, 18 nt, Human
aguguggccucuucugag

SEQ ID NO: 3368946 - RNA, 20 nt, Human
aguguggcugaggaggccuc

SEQ ID NO: 3368947 - RNA, 15 nt, Human
agugugggaagggag

SEQ ID NO: 3368948 - RNA, 18 nt, Human
agugugggaggcuccugu

SEQ ID NO: 3368949 - RNA, 16 nt, Human
agugugggcuugacca

SEQ ID NO: 3368950 - RNA, 15 nt, Human
agugugggggguccu

SEQ ID NO: 3368951 - RNA, 23 nt, Human
agugugggucuguguguguguau

SEQ ID NO: 3368952 - RNA, 13 nt, Human
agugugguuucuu

SEQ ID NO: 3368953 - RNA, 14 nt, Human
agugugguuucuuu

SEQ ID NO: 3368954 - RNA, 22 nt, Human
agugugguuucuuuuugaaucu

SEQ ID NO: 3368955 - RNA, 16 nt, Human
agugugguuuucuguu

SEQ ID NO: 3368956 - RNA, 18 nt, Human
aguguguauauauuuugu

SEQ ID NO: 3368957 - RNA, 16 nt, Human
aguguguaugugcgug

SEQ ID NO: 3368958 - RNA, 14 nt, Human
aguguguauuaaaa

SEQ ID NO: 3368959 - RNA, 19 nt, Human
aguguguauuaaaaaaaac

SEQ ID NO: 3368960 - RNA, 20 nt, Human
agugugugcacaugugugcg

SEQ ID NO: 3368961 - RNA, 17 nt, Human
agugugugcaugugugu

SEQ ID NO: 3368962 - RNA, 14 nt, Human
agugugugggucua

SEQ ID NO: 3368963 - RNA, 11 nt, Human
agugugugucu

SEQ ID NO: 3368964 - RNA, 12 nt, Human
agugugugucuu

SEQ ID NO: 3368965 - RNA, 14 nt, Human
agugugugugugca

SEQ ID NO: 3368966 - RNA, 19 nt, Human
aguguguguuuuucauaaa

SEQ ID NO: 3368967 - RNA, 19 nt, Human
aguguguuuccuucagugc

SEQ ID NO: 3368968 - RNA, 20 nt, Human
aguguguuuccuucagugca

SEQ ID NO: 3368969 - RNA, 19 nt, Human
aguguuaauacuaguugug

SEQ ID NO: 3368970 - RNA, 22 nt, Human
aguguuacuacagccuuaauau

SEQ ID NO: 3368971 - RNA, 17 nt, Human
aguguuacuuuuuguaa

SEQ ID NO: 3368972 - RNA, 20 nt, Human
aguguuaggccuggcacagu

SEQ ID NO: 3368973 - RNA, 23 nt, Human
aguguuagggaagggccugccac

SEQ ID NO: 3368974 - RNA, 13 nt, Human
aguguuauaugaa

SEQ ID NO: 3368975 - RNA, 13 nt, Human
aguguuauguauu

SEQ ID NO: 3368976 - RNA, 15 nt, Human
aguguuauguauuuc

SEQ ID NO: 3368977 - RNA, 20 nt, Human
aguguuauugagagagaugu

SEQ ID NO: 3368978 - RNA, 17 nt, Human
aguguuauuuucauuca

SEQ ID NO: 3368979 - RNA, 20 nt, Human
aguguuauuuuucaaggaag

SEQ ID NO: 3368980 - RNA, 21 nt, Human
aguguuauuuuucaaggaagg

SEQ ID NO: 3368981 - RNA, 23 nt, Human
aguguucacaaccuggaagugcu

SEQ ID NO: 3368982 - RNA, 21 nt, Human
aguguuccccuuccacugagg

SEQ ID NO: 3368983 - RNA, 15 nt, Human
aguguucccuaucca

SEQ ID NO: 3368984 - RNA, 22 nt, Human
aguguucccuauccaaucaauc

SEQ ID NO: 3368985 - RNA, 23 nt, Human
aguguucccuauccaaucaaucu

SEQ ID NO: 3368986 - RNA, 21 nt, Human
aguguuccgugguuaaacucg

SEQ ID NO: 3368987 - RNA, 20 nt, Human
aguguuccuauuuggggcuu

SEQ ID NO: 3368988 - RNA, 15 nt, Human
aguguucgcuuggcu

SEQ ID NO: 3368989 - RNA, 17 nt, Human
aguguucugcaaaaaua

SEQ ID NO: 3368990 - RNA, 16 nt, Human
aguguucuguuacaaa

SEQ ID NO: 3368991 - RNA, 17 nt, Human
aguguucuguuacaaaa

SEQ ID NO: 3368992 - RNA, 21 nt, Human
aguguucuguuacaaaaugua

SEQ ID NO: 3368993 - RNA, 22 nt, Human
aguguucuguuacaaaauguaa

SEQ ID NO: 3368994 - RNA, 23 nt, Human
aguguucuguuacaaaauguaac

SEQ ID NO: 3368995 - RNA, 15 nt, Human
aguguucuguuuaau

SEQ ID NO: 3368996 - RNA, 22 nt, Human
aguguucuguuuguuauuguuu

SEQ ID NO: 3368997 - RNA, 19 nt, Human
aguguugaagggagguggc

SEQ ID NO: 3368998 - RNA, 17 nt, Human
aguguugagccuuuucc

SEQ ID NO: 3368999 - RNA, 16 nt, Human
aguguugcauggaugu

SEQ ID NO: 3369000 - RNA, 14 nt, Human
aguguugccuaagu

SEQ ID NO: 3369001 - RNA, 23 nt, Human
aguguugccuaaguauuaaaaca

SEQ ID NO: 3369002 - RNA, 18 nt, Human
aguguuggagaagaacug

SEQ ID NO: 3369003 - RNA, 22 nt, Human
aguguugggguuugguuuuguu

SEQ ID NO: 3369004 - RNA, 13 nt, Human
aguguuguuugua

SEQ ID NO: 3369005 - RNA, 14 nt, Human
aguguuguuuguaa

SEQ ID NO: 3369006 - RNA, 19 nt, Human
aguguuguuuguaaauaag

SEQ ID NO: 3369007 - RNA, 15 nt, Human
aguguuuaaaacuuc

SEQ ID NO: 3369008 - RNA, 17 nt, Human
aguguuuaacuugucaa

SEQ ID NO: 3369009 - RNA, 22 nt, Human
aguguuuauuuuucauauugug

SEQ ID NO: 3369010 - RNA, 18 nt, Human
aguguuucagcuaaggga

SEQ ID NO: 3369011 - RNA, 21 nt, Human
aguguuucgcggguaacuggg

SEQ ID NO: 3369012 - RNA, 13 nt, Human
aguguuucuauga

SEQ ID NO: 3369013 - RNA, 12 nt, Human
aguguuuggggg

SEQ ID NO: 3369014 - RNA, 23 nt, Human
aguguuugggggacguuucucau

SEQ ID NO: 3369015 - RNA, 21 nt, Human
aguguuuggguauauucauuu

SEQ ID NO: 3369016 - RNA, 17 nt, Human
aguguuuuaaauucuga

SEQ ID NO: 3369017 - RNA, 17 nt, Human
aguguuuuaagaaaugu

SEQ ID NO: 3369018 - RNA, 20 nt, Human
aguguuuuaagauaaauuau

SEQ ID NO: 3369019 - RNA, 18 nt, Human
aguguuuucaauuuuaaa

SEQ ID NO: 3369020 - RNA, 12 nt, Human
aguguuuucaga

SEQ ID NO: 3369021 - RNA, 18 nt, Human
aguguuuuggaauaaaau

SEQ ID NO: 3369022 - RNA, 14 nt, Human
aguguuuuggacuc

SEQ ID NO: 3369023 - RNA, 21 nt, Human
aguguuuuggacuccaucucu

SEQ ID NO: 3369024 - RNA, 14 nt, Human
aguguuuuguacca

SEQ ID NO: 3369025 - RNA, 16 nt, Human
aguguuuuuaccucug

SEQ ID NO: 3369026 - RNA, 15 nt, Human
aguguuuuuguaaag

SEQ ID NO: 3369027 - RNA, 18 nt, Human
aguguuuuuguaaagugu

SEQ ID NO: 3369028 - RNA, 20 nt, Human
auaaaaggucggaccagcuu

SEQ ID NO: 3369029 - RNA, 16 nt, Human
auaaaaggucuaugcu

SEQ ID NO: 3369030 - RNA, 15 nt, Human
auaaaaguacauguu

SEQ ID NO: 3369031 - RNA, 14 nt, Human
auaaaagugauugu

SEQ ID NO: 3369032 - RNA, 18 nt, Human
auaaaagugauuguuggc

SEQ ID NO: 3369033 - RNA, 16 nt, Human
auaaaagugcacaccu

SEQ ID NO: 3369034 - RNA, 13 nt, Human
auaaaauaaauau

SEQ ID NO: 3369035 - RNA, 16 nt, Human
auaaaauaaauauaua

SEQ ID NO: 3369036 - RNA, 17 nt, Human
auaaaauaacuaaaaug

SEQ ID NO: 3369037 - RNA, 17 nt, Human
auaaaauaauucuaaag

SEQ ID NO: 3369038 - RNA, 15 nt, Human
auaaaauaauuuuua

SEQ ID NO: 3369039 - RNA, 23 nt, Human
aguucagagcugcccucuccugg

SEQ ID NO: 3369040 - RNA, 12 nt, Human
aguucagaguuu

SEQ ID NO: 3369041 - RNA, 15 nt, Human
aguucagaguuuucu

SEQ ID NO: 3369042 - RNA, 13 nt, Human
aguucagaucuua

SEQ ID NO: 3369043 - RNA, 22 nt, Human
aguucagaucuuaauauaaauu

SEQ ID NO: 3369044 - RNA, 18 nt, Human
auaaauaccucuuagcug

SEQ ID NO: 3369045 - RNA, 23 nt, Human
auaaauaccucuuagcugagugg

SEQ ID NO: 3369046 - RNA, 18 nt, Human
auaaauacugcaaaucag

SEQ ID NO: 3369047 - RNA, 14 nt, Human
auaaauagaaugua

SEQ ID NO: 3369048 - RNA, 16 nt, Human
auaaauagaauguaaa

SEQ ID NO: 3369049 - RNA, 19 nt, Human
auaaauagaauguaaaugu

SEQ ID NO: 3369050 - RNA, 13 nt, Human
auaaauagagcaa

SEQ ID NO: 3369051 - RNA, 22 nt, Human
auaaauagcuagacuggugacu

SEQ ID NO: 3369052 - RNA, 14 nt, Human
auaaauagcuauau

SEQ ID NO: 3369053 - RNA, 16 nt, Human
auaaauaggagaggau

SEQ ID NO: 3369054 - RNA, 15 nt, Human
auaaauaguguuauu

SEQ ID NO: 3369055 - RNA, 15 nt, Human
auaaauaguuuauga

SEQ ID NO: 3369056 - RNA, 23 nt, Human
auaaauauauaaaaagaaaagau

SEQ ID NO: 3369057 - RNA, 15 nt, Human
auaaauauauacauu

SEQ ID NO: 3369058 - RNA, 12 nt, Human
auaaauauauau

SEQ ID NO: 3369059 - RNA, 16 nt, Human
auaaauauauauaaag

SEQ ID NO: 3369060 - RNA, 19 nt, Human
auaaauauauauaaagaau

SEQ ID NO: 3369061 - RNA, 21 nt, Human
auaaauauauauaaagaauau

SEQ ID NO: 3369062 - RNA, 22 nt, Human
auaaauauauauauauauaaaa

SEQ ID NO: 3369063 - RNA, 21 nt, Human
auaaauauccuuuaauugauc

SEQ ID NO: 3369064 - RNA, 15 nt, Human
auaaauaugagugcc

SEQ ID NO: 3369065 - RNA, 22 nt, Human
auaaauauuauauuauauauau

SEQ ID NO: 3369066 - RNA, 14 nt, Human
auaaaucaauguca

SEQ ID NO: 3369067 - RNA, 15 nt, Human
auaaaucaaugucac

SEQ ID NO: 3369068 - RNA, 21 nt, Human
auaaaucagugggauuuggua

SEQ ID NO: 3369069 - RNA, 15 nt, Human
auaaaucauauugau

SEQ ID NO: 3369070 - RNA, 21 nt, Human
auaaaucauucuuacuaaaaa

SEQ ID NO: 3369071 - RNA, 15 nt, Human
auaaaucauuuuaug

SEQ ID NO: 3369072 - RNA, 16 nt, Human
auaaaucauuuuaugu

SEQ ID NO: 3369073 - RNA, 14 nt, Human
auaaauccagugac

SEQ ID NO: 3369074 - RNA, 15 nt, Human
auaaaucugugaacu

SEQ ID NO: 3369075 - RNA, 14 nt, Human
auaaaucuuaaaaa

SEQ ID NO: 3369076 - RNA, 11 nt, Human
auaaaugaagc

SEQ ID NO: 3369077 - RNA, 17 nt, Human
auaaaugaagcagcuuu

SEQ ID NO: 3369078 - RNA, 21 nt, Human
auaaaugaaguuuauacagua

SEQ ID NO: 3369079 - RNA, 11 nt, Human
auaaaugaaug

SEQ ID NO: 3369080 - RNA, 17 nt, Human
auaaaugagcuauguau

SEQ ID NO: 3369081 - RNA, 15 nt, Human
auaaaugauucaaaa

SEQ ID NO: 3369082 - RNA, 13 nt, Human
auaaaugcaaaua

SEQ ID NO: 3369083 - RNA, 23 nt, Human
auaaaugcaauauuaaugccuuu

SEQ ID NO: 3369084 - RNA, 15 nt, Human
auaaaugcagcccau

SEQ ID NO: 3369085 - RNA, 18 nt, Human
auaaaugcagcccauuuc

SEQ ID NO: 3369086 - RNA, 17 nt, Human
auaaaugccaucaauaa

SEQ ID NO: 3369087 - RNA, 19 nt, Human
auaaaugcuauuuuuuauu

SEQ ID NO: 3369088 - RNA, 13 nt, Human
auaaaugggaaca

SEQ ID NO: 3369089 - RNA, 19 nt, Human
auaaaugggaacauuuauu

SEQ ID NO: 3369090 - RNA, 22 nt, Human
auaaaugguuaaaagagguuuu

SEQ ID NO: 3369091 - RNA, 21 nt, Human
auaaaugguuuggugcuuuuu

SEQ ID NO: 3369092 - RNA, 19 nt, Human
auaaauguaaaaauaauaa

SEQ ID NO: 3369093 - RNA, 18 nt, Human
auaaauguaccagagaga

SEQ ID NO: 3369094 - RNA, 19 nt, Human
auaaauguauaaauauaca

SEQ ID NO: 3369095 - RNA, 20 nt, Human
auaaauguauaaauauacag

SEQ ID NO: 3369096 - RNA, 20 nt, Human
auaaauguauauacacauau

SEQ ID NO: 3369097 - RNA, 15 nt, Human
auaaauguaucuuau

SEQ ID NO: 3369098 - RNA, 12 nt, Human
auaaaugucacu

SEQ ID NO: 3369099 - RNA, 19 nt, Human
auaaaugucacuuuuugag

SEQ ID NO: 3369100 - RNA, 23 nt, Human
auaaaugucacuuuuugaggcaa

SEQ ID NO: 3369101 - RNA, 21 nt, Human
auaaaugucauuaaaauaaau

SEQ ID NO: 3369102 - RNA, 15 nt, Human
auaaaugucuguuga

SEQ ID NO: 3369103 - RNA, 12 nt, Human
auaaaugucuuu

SEQ ID NO: 3369104 - RNA, 19 nt, Human
auaaaugugccuucauuuu

SEQ ID NO: 3369105 - RNA, 14 nt, Human
auaaauguguguau

SEQ ID NO: 3369106 - RNA, 14 nt, Human
auaaauguguuggg

SEQ ID NO: 3369107 - RNA, 16 nt, Human
auaaauguuaagaaaa

SEQ ID NO: 3369108 - RNA, 15 nt, Human
auaaauuauacaaau

SEQ ID NO: 3369109 - RNA, 14 nt, Human
auaaauuauauucc

SEQ ID NO: 3369110 - RNA, 13 nt, Human
auaaauuauggua

SEQ ID NO: 3369111 - RNA, 21 nt, Human
auaaauuaugguaaaauuuug

SEQ ID NO: 3369112 - RNA, 19 nt, Human
auaaauuauuguuuuucuu

SEQ ID NO: 3369113 - RNA, 14 nt, Human
auaaauuauuuauu

SEQ ID NO: 3369114 - RNA, 15 nt, Human
auaaauucaacuuug

SEQ ID NO: 3369115 - RNA, 15 nt, Human
auaaauucaccuagu

SEQ ID NO: 3369116 - RNA, 14 nt, Human
auaaauucacuuuc

SEQ ID NO: 3369117 - RNA, 15 nt, Human
auaaauucacuuuca

SEQ ID NO: 3369118 - RNA, 22 nt, Human
auaaauucccuggccuuucaua

SEQ ID NO: 3369119 - RNA, 22 nt, Human
auaaauugaaauauaaugcaaa

SEQ ID NO: 3369120 - RNA, 13 nt, Human
auaaauugcucaa

SEQ ID NO: 3369121 - RNA, 16 nt, Human
auaaauugcuccuuga

SEQ ID NO: 3369122 - RNA, 17 nt, Human
auaaauuguacagccgg

SEQ ID NO: 3369123 - RNA, 14 nt, Human
auaaauuguauauu

SEQ ID NO: 3369124 - RNA, 16 nt, Human
auaaauuguauauuca

SEQ ID NO: 3369125 - RNA, 15 nt, Human
auaaauuguuugacc

SEQ ID NO: 3369126 - RNA, 15 nt, Human
auaaauuuauaugaa

SEQ ID NO: 3369127 - RNA, 15 nt, Human
auaaauuuauuuacu

SEQ ID NO: 3369128 - RNA, 20 nt, Human
auaaauuugguucuaauaga

SEQ ID NO: 3369129 - RNA, 15 nt, Human
auaaauuuugaaaag

SEQ ID NO: 3369130 - RNA, 21 nt, Human
auaaauuuugaaaaguaauau

SEQ ID NO: 3369131 - RNA, 19 nt, Human
auaaauuuuuuuuguuuca

SEQ ID NO: 3369132 - RNA, 22 nt, Human
auaaauuuuuuuuguuucauau

SEQ ID NO: 3369133 - RNA, 23 nt, Human
auaacaaagauaucuuuucuuua

SEQ ID NO: 3369134 - RNA, 17 nt, Human
auaacaaaugccaaauu

SEQ ID NO: 3369135 - RNA, 20 nt, Human
auaacaaaugccaaauuaaa

SEQ ID NO: 3369136 - RNA, 13 nt, Human
auaacaaauucug

SEQ ID NO: 3369137 - RNA, 12 nt, Human
auaacaagaaaa

SEQ ID NO: 3369138 - RNA, 22 nt, Human
auaacaagacuuugacuugggg

SEQ ID NO: 3369139 - RNA, 14 nt, Human
auaacaagaucuuu

SEQ ID NO: 3369140 - RNA, 17 nt, Human
auaacaagguccaagau

SEQ ID NO: 3369141 - RNA, 17 nt, Human
auaacaaugcuguauuu

SEQ ID NO: 3369142 - RNA, 20 nt, Human
auaacaaugcuguauuuuaa

SEQ ID NO: 3369143 - RNA, 13 nt, Human
auaacaauguuaa

SEQ ID NO: 3369144 - RNA, 16 nt, Human
auaacaauguuaagga

SEQ ID NO: 3369145 - RNA, 13 nt, Human
auaacacagagag

SEQ ID NO: 3369146 - RNA, 14 nt, Human
auaacacagagaga

SEQ ID NO: 3369147 - RNA, 18 nt, Human
auaacaccaccauucaca

SEQ ID NO: 3369148 - RNA, 17 nt, Human
auaacacccuuccuucu

SEQ ID NO: 3369149 - RNA, 21 nt, Human
auaacacccuuccuucuguaa

SEQ ID NO: 3369150 - RNA, 23 nt, Human
auaacacucuaggauguauauuu

SEQ ID NO: 3369151 - RNA, 21 nt, Human
auaacagaagaaaauagaauu

SEQ ID NO: 3369152 - RNA, 16 nt, Human
auaacagauacauuuc

SEQ ID NO: 3369153 - RNA, 20 nt, Human
auaacagcuaccaugacaac

SEQ ID NO: 3369154 - RNA, 19 nt, Human
auaacagcugcaauucccu

SEQ ID NO: 3369155 - RNA, 21 nt, Human
auaacagcugcaauucccugg

SEQ ID NO: 3369156 - RNA, 19 nt, Human
auaacagggauugauuuua

SEQ ID NO: 3369157 - RNA, 20 nt, Human
auaacaggguaaauuauuca

SEQ ID NO: 3369158 - RNA, 22 nt, Human
auaacaggguaaauuauucagu

SEQ ID NO: 3369159 - RNA, 13 nt, Human
auaacagguuauu

SEQ ID NO: 3369160 - RNA, 14 nt, Human
auaacagguuauuu

SEQ ID NO: 3369161 - RNA, 22 nt, Human
auaacagguuauuuuaguuucu

SEQ ID NO: 3369162 - RNA, 19 nt, Human
auaacauaaaucugugaac

SEQ ID NO: 3369163 - RNA, 16 nt, Human
auaacauaaauuuuuu

SEQ ID NO: 3369164 - RNA, 12 nt, Human
auaacauagaau

SEQ ID NO: 3369165 - RNA, 14 nt, Human
auaacaucuuuauu

SEQ ID NO: 3369166 - RNA, 20 nt, Human
auaacauguaauuaaguacu

SEQ ID NO: 3369167 - RNA, 19 nt, Human
auaacaugugaaaagaaua

SEQ ID NO: 3369168 - RNA, 14 nt, Human
auaaccaauguuua

SEQ ID NO: 3369169 - RNA, 14 nt, Human
auaaccacugaagg

SEQ ID NO: 3369170 - RNA, 13 nt, Human
auaaccacuuaaa

SEQ ID NO: 3369171 - RNA, 16 nt, Human
auaaccagacacaaac

SEQ ID NO: 3369172 - RNA, 18 nt, Human
auaaccccauucuuugcu

SEQ ID NO: 3369173 - RNA, 13 nt, Human
auaacccuguuac

SEQ ID NO: 3369174 - RNA, 13 nt, Human
auaacccuucaac

SEQ ID NO: 3369175 - RNA, 19 nt, Human
auaaccuaguuaaagaaag

SEQ ID NO: 3369176 - RNA, 23 nt, Human
auaaccucaagucacaugagaau

SEQ ID NO: 3369177 - RNA, 14 nt, Human
auaacgaaguuggg

SEQ ID NO: 3369178 - RNA, 13 nt, Human
auaacgccccaga

SEQ ID NO: 3369179 - RNA, 21 nt, Human
auaacgccccagauaccagcc

SEQ ID NO: 3369180 - RNA, 16 nt, Human
auaacgcuuaaaggaa

SEQ ID NO: 3369181 - RNA, 20 nt, Human
auaacguuuaagccaaaaca

SEQ ID NO: 3369182 - RNA, 22 nt, Human
auaacguuuaagccaaaacaau

SEQ ID NO: 3369183 - RNA, 13 nt, Human
auaacguuuuucc

SEQ ID NO: 3369184 - RNA, 15 nt, Human
agcuucagccaggag

SEQ ID NO: 3369185 - RNA, 19 nt, Human
agcuucagccaggagcugg

SEQ ID NO: 3369186 - RNA, 13 nt, Human
agcuucaggaggg

SEQ ID NO: 3369187 - RNA, 16 nt, Human
agcuucaguugcuugu

SEQ ID NO: 3369188 - RNA, 23 nt, Human
agcuucaguugcuugucuucugg

SEQ ID NO: 3369189 - RNA, 17 nt, Human
agcuucaugccuuugua

SEQ ID NO: 3369190 - RNA, 20 nt, Human
agcuucauguggcuucccuu

SEQ ID NO: 3369191 - RNA, 16 nt, Human
agcuucauucuccuug

SEQ ID NO: 3369192 - RNA, 17 nt, Human
agcuucauuugugucaa

SEQ ID NO: 3369193 - RNA, 22 nt, Human
agcuuccaggaaaaaggacagg

SEQ ID NO: 3369194 - RNA, 17 nt, Human
agcuuccaguccaaucu

SEQ ID NO: 3369195 - RNA, 18 nt, Human
agcuuccauagcugcugc

SEQ ID NO: 3369196 - RNA, 19 nt, Human
agcuuccauagcugcugcc

SEQ ID NO: 3369197 - RNA, 21 nt, Human
agcuuccauagcugcugcccu

SEQ ID NO: 3369198 - RNA, 15 nt, Human
agcuuccauuuuaau

SEQ ID NO: 3369199 - RNA, 17 nt, Human
agcuuccccucucuccu

SEQ ID NO: 3369200 - RNA, 21 nt, Human
agcuucccuccccucuaguuu

SEQ ID NO: 3369201 - RNA, 23 nt, Human
agcuucccucccguguguucucc

SEQ ID NO: 3369202 - RNA, 22 nt, Human
agcuuccuacccacaccucugc

SEQ ID NO: 3369203 - RNA, 16 nt, Human
agcuuccuucagagag

SEQ ID NO: 3369204 - RNA, 23 nt, Human
agcuuccuucagagagcagugcu

SEQ ID NO: 3369205 - RNA, 17 nt, Human
agcuucuaauaaauuau

SEQ ID NO: 3369206 - RNA, 17 nt, Human
agcuucuaccaugaaca

SEQ ID NO: 3369207 - RNA, 23 nt, Human
agcuucuauuauagccacauccc

SEQ ID NO: 3369208 - RNA, 15 nt, Human
agcuucuccaggcuc

SEQ ID NO: 3369209 - RNA, 23 nt, Human
agcuucuccaggcucuuuggggu

SEQ ID NO: 3369210 - RNA, 16 nt, Human
agcuucucuuuaacuc

SEQ ID NO: 3369211 - RNA, 23 nt, Human
agcuucucuuuaacucaggacuc

SEQ ID NO: 3369212 - RNA, 17 nt, Human
agcuucugaccucagca

SEQ ID NO: 3369213 - RNA, 13 nt, Human
agcuucugagacg

SEQ ID NO: 3369214 - RNA, 19 nt, Human
agcuucugagacgucauga

SEQ ID NO: 3369215 - RNA, 17 nt, Human
agcuucugcccccugca

SEQ ID NO: 3369216 - RNA, 15 nt, Human
agcuucugcugggcu

SEQ ID NO: 3369217 - RNA, 12 nt, Human
agcuucugcuuu

SEQ ID NO: 3369218 - RNA, 21 nt, Human
agcuucugcuuuucugcccug

SEQ ID NO: 3369219 - RNA, 22 nt, Human
agcuucugcuuuucugcccugg

SEQ ID NO: 3369220 - RNA, 22 nt, Human
agcuucugggagauuuuuuuga

SEQ ID NO: 3369221 - RNA, 18 nt, Human
agcuucugggguccccag

SEQ ID NO: 3369222 - RNA, 19 nt, Human
agcuucugguacucuccua

SEQ ID NO: 3369223 - RNA, 23 nt, Human
agcuucugguacucuccuagaga

SEQ ID NO: 3369224 - RNA, 12 nt, Human
agcuucuguccu

SEQ ID NO: 3369225 - RNA, 20 nt, Human
agcuucuguugcugccucau

SEQ ID NO: 3369226 - RNA, 21 nt, Human
agcuucuguugcugccucaug

SEQ ID NO: 3369227 - RNA, 14 nt, Human
agcuucuuaauuaa

SEQ ID NO: 3369228 - RNA, 21 nt, Human
agcuucuuaauuaauuugauu

SEQ ID NO: 3369229 - RNA, 12 nt, Human
agcuucuuccag

SEQ ID NO: 3369230 - RNA, 13 nt, Human
agcuucuuguuuc

SEQ ID NO: 3369231 - RNA, 19 nt, Human
agcuucuuguuuccuuguu

SEQ ID NO: 3369232 - RNA, 14 nt, Human
agcuucuuugccaa

SEQ ID NO: 3369233 - RNA, 17 nt, Human
agcuugaaacugagaug

SEQ ID NO: 3369234 - RNA, 22 nt, Human
agcuugaagaucguuaguaucu

SEQ ID NO: 3369235 - RNA, 22 nt, Human
agcuugaccgugaggccagaga

SEQ ID NO: 3369236 - RNA, 14 nt, Human
agcuugaccugagg

SEQ ID NO: 3369237 - RNA, 22 nt, Human
agcuugaggguugggcuggugu

SEQ ID NO: 3369238 - RNA, 15 nt, Human
agcuugauuaaauca

SEQ ID NO: 3369239 - RNA, 19 nt, Human
agcuugccagaugcugcag

SEQ ID NO: 3369240 - RNA, 18 nt, Human
agcuugcccuguuaaaag

SEQ ID NO: 3369241 - RNA, 15 nt, Human
agcuugcucacaucu

SEQ ID NO: 3369242 - RNA, 17 nt, Human
agcuugcucccuguguc

SEQ ID NO: 3369243 - RNA, 14 nt, Human
agcuugcucuucag

SEQ ID NO: 3369244 - RNA, 22 nt, Human
agcuugcucuucagugggagaa

SEQ ID NO: 3369245 - RNA, 16 nt, Human
agcuugcugcacccca

SEQ ID NO: 3369246 - RNA, 20 nt, Human
agcuugcugcaccccaaguc

SEQ ID NO: 3369247 - RNA, 12 nt, Human
agcuugcuuuga

SEQ ID NO: 3369248 - RNA, 13 nt, Human
agcuuggcagccg

SEQ ID NO: 3369249 - RNA, 16 nt, Human
agcuuggcucaggcug

SEQ ID NO: 3369250 - RNA, 16 nt, Human
agcuuggcuguagaag

SEQ ID NO: 3369251 - RNA, 16 nt, Human
agcuugggacaaauca

SEQ ID NO: 3369252 - RNA, 16 nt, Human
auaaaauuauuugcag

SEQ ID NO: 3369253 - RNA, 17 nt, Human
auaaaauucccuaaagc

SEQ ID NO: 3369254 - RNA, 11 nt, Human
auaaaauugua

SEQ ID NO: 3369255 - RNA, 23 nt, Human
auaaaauuguaaaauuguauaga

SEQ ID NO: 3369256 - RNA, 12 nt, Human
auaaaauuuaaa

SEQ ID NO: 3369257 - RNA, 20 nt, Human
auaaaauuuaaaaaauaaau

SEQ ID NO: 3369258 - RNA, 16 nt, Human
auaaaauuuguugcau

SEQ ID NO: 3369259 - RNA, 15 nt, Human
auaaacaaaguuacu

SEQ ID NO: 3369260 - RNA, 16 nt, Human
auaaacaacuuaaugu

SEQ ID NO: 3369261 - RNA, 16 nt, Human
auaaacaagaaaaaua

SEQ ID NO: 3369262 - RNA, 19 nt, Human
auaaacaagaaaaauaaag

SEQ ID NO: 3369263 - RNA, 21 nt, Human
auaaacaagaaaaauaaagaa

SEQ ID NO: 3369264 - RNA, 14 nt, Human
auaaacaagaauga

SEQ ID NO: 3369265 - RNA, 15 nt, Human
auaaacaagaaugaa

SEQ ID NO: 3369266 - RNA, 22 nt, Human
auaaacaagaccacguuucuaa

SEQ ID NO: 3369267 - RNA, 17 nt, Human
auaaacacccaugaauc

SEQ ID NO: 3369268 - RNA, 12 nt, Human
auaaacacugug

SEQ ID NO: 3369269 - RNA, 12 nt, Human
auaaacacuguu

SEQ ID NO: 3369270 - RNA, 19 nt, Human
auaaacagacaauauguga

SEQ ID NO: 3369271 - RNA, 15 nt, Human
auaaacagaugaaua

SEQ ID NO: 3369272 - RNA, 22 nt, Human
auaaacagcuucaugccuuugu

SEQ ID NO: 3369273 - RNA, 16 nt, Human
auaaacaucacacaca

SEQ ID NO: 3369274 - RNA, 21 nt, Human
auaaacauccuucaagaacuc

SEQ ID NO: 3369275 - RNA, 13 nt, Human
auaaaccaaagga

SEQ ID NO: 3369276 - RNA, 17 nt, Human
auaaaccaaugaacgaa

SEQ ID NO: 3369277 - RNA, 21 nt, Human
auaaacccaguugccaucugc

SEQ ID NO: 3369278 - RNA, 18 nt, Human
auaaaccucuaauuuauu

SEQ ID NO: 3369279 - RNA, 18 nt, Human
auaaacgauuuaauucuc

SEQ ID NO: 3369280 - RNA, 15 nt, Human
auaaacgcaagcuga

SEQ ID NO: 3369281 - RNA, 20 nt, Human
auaaacgcgggaaaaaagau

SEQ ID NO: 3369282 - RNA, 15 nt, Human
auaaacgucuuaaau

SEQ ID NO: 3369283 - RNA, 16 nt, Human
auaaacgucuuaaaua

SEQ ID NO: 3369284 - RNA, 17 nt, Human
auaaacguggauguuac

SEQ ID NO: 3369285 - RNA, 17 nt, Human
auaaacuaaagaaaaau

SEQ ID NO: 3369286 - RNA, 19 nt, Human
auaaacuacucuuugauuu

SEQ ID NO: 3369287 - RNA, 17 nt, Human
auaaacuagauuacauu

SEQ ID NO: 3369288 - RNA, 14 nt, Human
auaaacuaucaguu

SEQ ID NO: 3369289 - RNA, 13 nt, Human
auaaacucuuuua

SEQ ID NO: 3369290 - RNA, 15 nt, Human
auaaacugacuuuau

SEQ ID NO: 3369291 - RNA, 18 nt, Human
auaaacugacuuuauccu

SEQ ID NO: 3369292 - RNA, 23 nt, Human
auaaacuuagugcggacaaguuu

SEQ ID NO: 3369293 - RNA, 11 nt, Human
auaaacuucag

SEQ ID NO: 3369294 - RNA, 12 nt, Human
auaaacuucagc

SEQ ID NO: 3369295 - RNA, 16 nt, Human
auaaacuuuaauauaa

SEQ ID NO: 3369296 - RNA, 13 nt, Human
auaaacuuuaccu

SEQ ID NO: 3369297 - RNA, 16 nt, Human
auaaacuuuaccuuuu

SEQ ID NO: 3369298 - RNA, 24 nt, Human
auaaacuuuaccuuuuuuauacau

SEQ ID NO: 3369299 - RNA, 14 nt, Human
auaaacuuuuagaa

SEQ ID NO: 3369300 - RNA, 20 nt, Human
auaaacuuuuuucuuacugu

SEQ ID NO: 3369301 - RNA, 19 nt, Human
auaaagaaaacuuccauag

SEQ ID NO: 3369302 - RNA, 17 nt, Human
auaaagaaaagaugcac

SEQ ID NO: 3369303 - RNA, 13 nt, Human
auaaagaaaauga

SEQ ID NO: 3369304 - RNA, 17 nt, Human
auaaagaaauugcaaua

SEQ ID NO: 3369305 - RNA, 15 nt, Human
auaaagaacaaggua

SEQ ID NO: 3369306 - RNA, 23 nt, Human
auaaagaagcaauaaagaagagu

SEQ ID NO: 3369307 - RNA, 16 nt, Human
auaaagaauacuugaa

SEQ ID NO: 3369308 - RNA, 15 nt, Human
auaaagaauaggacu

SEQ ID NO: 3369309 - RNA, 19 nt, Human
auaaagaauaggacuuguu

SEQ ID NO: 3369310 - RNA, 19 nt, Human
auaaagacaaccauauuua

SEQ ID NO: 3369311 - RNA, 11 nt, Human
auaaagacagg

SEQ ID NO: 3369312 - RNA, 17 nt, Human
auaaagaccagaaauuc

SEQ ID NO: 3369313 - RNA, 16 nt, Human
auaaagacguuuuaua

SEQ ID NO: 3369314 - RNA, 16 nt, Human
auaaagagaaaauuga

SEQ ID NO: 3369315 - RNA, 21 nt, Human
auaaagagagaaaaacaaauu

SEQ ID NO: 3369316 - RNA, 20 nt, Human
auaaagagagaacaggacua

SEQ ID NO: 3369317 - RNA, 13 nt, Human
auaaagaguuaga

SEQ ID NO: 3369318 - RNA, 18 nt, Human
auaaagaucgcccccacc

SEQ ID NO: 3369319 - RNA, 15 nt, Human
auaaagaugcucuuu

SEQ ID NO: 3369320 - RNA, 18 nt, Human
auaaagauuauauaaaga

SEQ ID NO: 3369321 - RNA, 20 nt, Human
auaaagauuucuugaguuuu

SEQ ID NO: 3369322 - RNA, 18 nt, Human
auaaagauuuuuuaauaa

SEQ ID NO: 3369323 - RNA, 21 nt, Human
auaaagauuuuuuaauaauuu

SEQ ID NO: 3369324 - RNA, 12 nt, Human
auaaagcaaaua

SEQ ID NO: 3369325 - RNA, 10 nt, Human
auaaagcaau

SEQ ID NO: 3369326 - RNA, 14 nt, Human
auaaagcaauaaga

SEQ ID NO: 3369327 - RNA, 13 nt, Human
auaaagcaauuuu

SEQ ID NO: 3369328 - RNA, 18 nt, Human
auaaagcaauuuuccuug

SEQ ID NO: 3369329 - RNA, 16 nt, Human
agcuuugcuaccaaag

SEQ ID NO: 3369330 - RNA, 10 nt, Human
agcuuugcuc

SEQ ID NO: 3369331 - RNA, 20 nt, Human
agcuuugcucauauuuccca

SEQ ID NO: 3369332 - RNA, 21 nt, Human
agcuuugcucuuugguagaaa

SEQ ID NO: 3369333 - RNA, 16 nt, Human
agcuuuggaaacagga

SEQ ID NO: 3369334 - RNA, 18 nt, Human
agcuuuggaaguuuagcu

SEQ ID NO: 3369335 - RNA, 20 nt, Human
agcuuuggacacacacagcu

SEQ ID NO: 3369336 - RNA, 19 nt, Human
agcuuuggaccuaauccaa

SEQ ID NO: 3369337 - RNA, 20 nt, Human
agcuuuggacgcacacagcu

SEQ ID NO: 3369338 - RNA, 18 nt, Human
agcuuuguccccugcuuc

SEQ ID NO: 3369339 - RNA, 17 nt, Human
agcuuuguguuugguuu

SEQ ID NO: 3369340 - RNA, 16 nt, Human
agcuuuguuuguucuu

SEQ ID NO: 3369341 - RNA, 17 nt, Human
agcuuuguuuguucuug

SEQ ID NO: 3369342 - RNA, 23 nt, Human
agcuuuguuuguugucagcugaa

SEQ ID NO: 3369343 - RNA, 16 nt, Human
agcuuuuaaacccuau

SEQ ID NO: 3369344 - RNA, 16 nt, Human
agcuuuuacucccuga

SEQ ID NO: 3369345 - RNA, 23 nt, Human
agcuuuuaguacccaccugagcu

SEQ ID NO: 3369346 - RNA, 22 nt, Human
agcuuuucaccuuuacuuuaga

SEQ ID NO: 3369347 - RNA, 15 nt, Human
agcuuuucccuuuuu

SEQ ID NO: 3369348 - RNA, 21 nt, Human
agcuuuucccuuuuuuuaagu

SEQ ID NO: 3369349 - RNA, 21 nt, Human
agcuuuugugggggacuguaa

SEQ ID NO: 3369350 - RNA, 12 nt, Human
agcuuuuuaauu

SEQ ID NO: 3369351 - RNA, 17 nt, Human
agcuuuuugucuuuucu

SEQ ID NO: 3369352 - RNA, 18 nt, Human
agcuuuuuuacacaaaug

SEQ ID NO: 3369353 - RNA, 21 nt, Human
agcuuuuuuccuuaauccagc

SEQ ID NO: 3369354 - RNA, 24 nt, Human
aggaaaaaaacuauuaaggaugua

SEQ ID NO: 3369355 - RNA, 15 nt, Human
aggaaaaaaacuuuu

SEQ ID NO: 3369356 - RNA, 17 nt, Human
aggaaaaaaacuuuuau

SEQ ID NO: 3369357 - RNA, 15 nt, Human
aggaaaaaaagcaug

SEQ ID NO: 3369358 - RNA, 14 nt, Human
aggaaaaaaaugac

SEQ ID NO: 3369359 - RNA, 15 nt, Human
aggaaaaaaaugacu

SEQ ID NO: 3369360 - RNA, 18 nt, Human
aggaaaaaauaacaauga

SEQ ID NO: 3369361 - RNA, 16 nt, Human
aggaaaaaauugcuuu

SEQ ID NO: 3369362 - RNA, 12 nt, Human
aggaaaaagaac

SEQ ID NO: 3369363 - RNA, 17 nt, Human
aggaaaaagcacaagaa

SEQ ID NO: 3369364 - RNA, 20 nt, Human
aggaaaaaggacaggcagaa

SEQ ID NO: 3369365 - RNA, 23 nt, Human
aggaaaaaguaucauggaaauau

SEQ ID NO: 3369366 - RNA, 13 nt, Human
aggaaaaauaugu

SEQ ID NO: 3369367 - RNA, 13 nt, Human
aggaaaaaugugu

SEQ ID NO: 3369368 - RNA, 15 nt, Human
aggaaaaauguguaa

SEQ ID NO: 3369369 - RNA, 12 nt, Human
aggaaaaauuca

SEQ ID NO: 3369370 - RNA, 23 nt, Human
aggaaaaccaagccguggcuucc

SEQ ID NO: 3369371 - RNA, 24 nt, Human
aggaaaacugcauggagacgcauu

SEQ ID NO: 3369372 - RNA, 13 nt, Human
aggaaaagaaaag

SEQ ID NO: 3369373 - RNA, 14 nt, Human
aggaaaagaaaucu

SEQ ID NO: 3369374 - RNA, 17 nt, Human
aggaaaagaaaucuaua

SEQ ID NO: 3369375 - RNA, 15 nt, Human
aggaaaagccucugu

SEQ ID NO: 3369376 - RNA, 19 nt, Human
aggaaaagccucuguguca

SEQ ID NO: 3369377 - RNA, 14 nt, Human
aggaaaagcugcug

SEQ ID NO: 3369378 - RNA, 18 nt, Human
aggaaaaggugauaucca

SEQ ID NO: 3369379 - RNA, 19 nt, Human
aggaaaaguacauuuaaua

SEQ ID NO: 3369380 - RNA, 22 nt, Human
aggaaaaguacauuuaauacag

SEQ ID NO: 3369381 - RNA, 15 nt, Human
aggaaaauauuuuga

SEQ ID NO: 3369382 - RNA, 20 nt, Human
aggaaaaugucuguaauaau

SEQ ID NO: 3369383 - RNA, 16 nt, Human
aggaaaauucuuaaaa

SEQ ID NO: 3369384 - RNA, 16 nt, Human
aggaaaauugaaugca

SEQ ID NO: 3369385 - RNA, 12 nt, Human
aggaaaauugga

SEQ ID NO: 3369386 - RNA, 14 nt, Human
aggaaacaacagcu

SEQ ID NO: 3369387 - RNA, 13 nt, Human
aggaaacaaguga

SEQ ID NO: 3369388 - RNA, 17 nt, Human
aggaaacaguugcaugu

SEQ ID NO: 3369389 - RNA, 22 nt, Human
aggaaacaguugcauguaguaa

SEQ ID NO: 3369390 - RNA, 20 nt, Human
aggaaacccagcucuggucc

SEQ ID NO: 3369391 - RNA, 20 nt, Human
aggaaaccgccuaguuuacu

SEQ ID NO: 3369392 - RNA, 21 nt, Human
aggaaaccgccuaguuuacug

SEQ ID NO: 3369393 - RNA, 15 nt, Human
aggaaacgagacuuu

SEQ ID NO: 3369394 - RNA, 21 nt, Human
aggaaacucaccugcuggccc

SEQ ID NO: 3369395 - RNA, 22 nt, Human
aggaaacucaccugcuggcccc

SEQ ID NO: 3369396 - RNA, 20 nt, Human
aggaaacuccugacagucuu

SEQ ID NO: 3369397 - RNA, 22 nt, Human
aggaaacuccugugaccacaac

SEQ ID NO: 3369398 - RNA, 12 nt, Human
aggaaacucuua

SEQ ID NO: 3369399 - RNA, 19 nt, Human
aggaaacuggguuccugca

SEQ ID NO: 3369400 - RNA, 12 nt, Human
aggaaagaaaac

SEQ ID NO: 3369401 - RNA, 17 nt, Human
aggaaagaaagaaggaa

SEQ ID NO: 3369402 - RNA, 20 nt, Human
aggaaagaaugaaagaguaa

SEQ ID NO: 3369403 - RNA, 15 nt, Human
aggaaagacaacaca

SEQ ID NO: 3369404 - RNA, 12 nt, Human
aggaaagaggcu

SEQ ID NO: 3369405 - RNA, 16 nt, Human
aggaaagaggcucugg

SEQ ID NO: 3369406 - RNA, 19 nt, Human
aggaaagcaauaaaugaau

SEQ ID NO: 3369407 - RNA, 22 nt, Human
aggaaagcaauaaaugaauggg

SEQ ID NO: 3369408 - RNA, 16 nt, Human
aggaaagccucacuga

SEQ ID NO: 3369409 - RNA, 20 nt, Human
aggaaaggagaguacuuugg

SEQ ID NO: 3369410 - RNA, 13 nt, Human
aggaaaggccagc

SEQ ID NO: 3369411 - RNA, 14 nt, Human
aggaaaggccagcu

SEQ ID NO: 3369412 - RNA, 18 nt, Human
aggaaaggccagcuggca

SEQ ID NO: 3369413 - RNA, 21 nt, Human
aggaaaggccagcuggcagca

SEQ ID NO: 3369414 - RNA, 24 nt, Human
aggaaaggccagcuggcagcagag

SEQ ID NO: 3369415 - RNA, 22 nt, Human
aggaaaggcuccaggagcagcc

SEQ ID NO: 3369416 - RNA, 14 nt, Human
aggaaaguacauuu

SEQ ID NO: 3369417 - RNA, 19 nt, Human
auagauuaauggcacugau

SEQ ID NO: 3369418 - RNA, 21 nt, Human
auagauuauaacuugucuaaa

SEQ ID NO: 3369419 - RNA, 21 nt, Human
auagauucaccuguaaaacuu

SEQ ID NO: 3369420 - RNA, 22 nt, Human
auagauucaccuguaaaacuuu

SEQ ID NO: 3369421 - RNA, 12 nt, Human
auagauucuaaa

SEQ ID NO: 3369422 - RNA, 16 nt, Human
auagauucuaaagauu

SEQ ID NO: 3369423 - RNA, 19 nt, Human
auagauucucuuguauaag

SEQ ID NO: 3369424 - RNA, 23 nt, Human
auagauuggagccaccaugccca

SEQ ID NO: 3369425 - RNA, 21 nt, Human
auagauuguccuuuugcaaag

SEQ ID NO: 3369426 - RNA, 13 nt, Human
auagauuugaccu

SEQ ID NO: 3369427 - RNA, 15 nt, Human
auagauuugaccucc

SEQ ID NO: 3369428 - RNA, 13 nt, Human
auagauuuggaau

SEQ ID NO: 3369429 - RNA, 16 nt, Human
auagcaaaagaagaag

SEQ ID NO: 3369430 - RNA, 14 nt, Human
auagcaaagaauug

SEQ ID NO: 3369431 - RNA, 14 nt, Human
auagcaaaguagua

SEQ ID NO: 3369432 - RNA, 14 nt, Human
auagcaaauucaaa

SEQ ID NO: 3369433 - RNA, 19 nt, Human
auagcaagacacaucccua

SEQ ID NO: 3369434 - RNA, 19 nt, Human
auagcaagugaauuuuucu

SEQ ID NO: 3369435 - RNA, 18 nt, Human
auagcaccccuacucaca

SEQ ID NO: 3369436 - RNA, 16 nt, Human
auagcaccuccacaua

SEQ ID NO: 3369437 - RNA, 15 nt, Human
auagcacuuugaaau

SEQ ID NO: 3369438 - RNA, 21 nt, Human
auagcagaaaaaccaacaucu

SEQ ID NO: 3369439 - RNA, 17 nt, Human
auagcagccaguucaaa

SEQ ID NO: 3369440 - RNA, 21 nt, Human
auagcagcccucaauugugaa

SEQ ID NO: 3369441 - RNA, 22 nt, Human
auagcagcccucaauugugaaa

SEQ ID NO: 3369442 - RNA, 15 nt, Human
auagcagccuggcuc

SEQ ID NO: 3369443 - RNA, 21 nt, Human
auagcagccuggcuccccugg

SEQ ID NO: 3369444 - RNA, 21 nt, Human
auagcaguaaaaaaugguguu

SEQ ID NO: 3369445 - RNA, 17 nt, Human
auagcauaugacaaaug

SEQ ID NO: 3369446 - RNA, 18 nt, Human
auagcauaugacaaaugu

SEQ ID NO: 3369447 - RNA, 19 nt, Human
auagcauaugacaaauguu

SEQ ID NO: 3369448 - RNA, 20 nt, Human
auagcauaugacaaauguuu

SEQ ID NO: 3369449 - RNA, 16 nt, Human
auagcaucacuuaaaa

SEQ ID NO: 3369450 - RNA, 14 nt, Human
auagcaucuguaca

SEQ ID NO: 3369451 - RNA, 19 nt, Human
auagcaucuguacaaaggg

SEQ ID NO: 3369452 - RNA, 22 nt, Human
auagcaucuuguggcuuugcaa

SEQ ID NO: 3369453 - RNA, 19 nt, Human
auagcaugacauuucuuug

SEQ ID NO: 3369454 - RNA, 13 nt, Human
auagcaugcaucu

SEQ ID NO: 3369455 - RNA, 13 nt, Human
auagcauguaaug

SEQ ID NO: 3369456 - RNA, 14 nt, Human
auagcauguauugu

SEQ ID NO: 3369457 - RNA, 16 nt, Human
auagcauguauugugu

SEQ ID NO: 3369458 - RNA, 18 nt, Human
auagcauguauugugucu

SEQ ID NO: 3369459 - RNA, 16 nt, Human
auagcauguccuaaug

SEQ ID NO: 3369460 - RNA, 19 nt, Human
auagcauguccuaaugcuu

SEQ ID NO: 3369461 - RNA, 21 nt, Human
auagcauuaacuaaucuauug

SEQ ID NO: 3369462 - RNA, 13 nt, Human
auagcauucauaa

SEQ ID NO: 3369463 - RNA, 17 nt, Human
auagcauugucuauuuu

SEQ ID NO: 3369464 - RNA, 16 nt, Human
auagccaaaaauagcu

SEQ ID NO: 3369465 - RNA, 18 nt, Human
auagccaaaaauagcuaa

SEQ ID NO: 3369466 - RNA, 22 nt, Human
auagccacaucccuuugaaaca

SEQ ID NO: 3369467 - RNA, 13 nt, Human
auagccacauuug

SEQ ID NO: 3369468 - RNA, 16 nt, Human
auagccaccccagaaa

SEQ ID NO: 3369469 - RNA, 20 nt, Human
auagccacuaaccuugccug

SEQ ID NO: 3369470 - RNA, 12 nt, Human
auagccauauuu

SEQ ID NO: 3369471 - RNA, 16 nt, Human
auagccauauuuguaa

SEQ ID NO: 3369472 - RNA, 19 nt, Human
auagcccacuuacauuuac

SEQ ID NO: 3369473 - RNA, 20 nt, Human
acauuuuuugaaaugcugaa

SEQ ID NO: 3369474 - RNA, 20 nt, Human
acauuuuuuucuaccuauaa

SEQ ID NO: 3369475 - RNA, 18 nt, Human
acauuuuuuuuuuaaauc

SEQ ID NO: 3369476 - RNA, 18 nt, Human
acauuuuuuuuuuuaauu

SEQ ID NO: 3369477 - RNA, 20 nt, Human
acauuuuuuuuuuuaauuuu

SEQ ID NO: 3369478 - RNA, 15 nt, Human
accaaaaaaguuaca

SEQ ID NO: 3369479 - RNA, 13 nt, Human
accaaaaaccagu

SEQ ID NO: 3369480 - RNA, 19 nt, Human
accaaaaacugaaagugaa

SEQ ID NO: 3369481 - RNA, 17 nt, Human
accaaaaagaccagacu

SEQ ID NO: 3369482 - RNA, 16 nt, Human
accaaaacaguuaauc

SEQ ID NO: 3369483 - RNA, 12 nt, Human
accaaaacugug

SEQ ID NO: 3369484 - RNA, 17 nt, Human
accaaaacugugcagag

SEQ ID NO: 3369485 - RNA, 17 nt, Human
accaaaagaauuugcac

SEQ ID NO: 3369486 - RNA, 21 nt, Human
accaaaagcuuaccaagggga

SEQ ID NO: 3369487 - RNA, 16 nt, Human
accaaaaguuauuaaa

SEQ ID NO: 3369488 - RNA, 16 nt, Human
accaaaauaagaaaag

SEQ ID NO: 3369489 - RNA, 18 nt, Human
accaaaauaagaaaagau

SEQ ID NO: 3369490 - RNA, 12 nt, Human
accaaaaugaca

SEQ ID NO: 3369491 - RNA, 13 nt, Human
accaaacaauuau

SEQ ID NO: 3369492 - RNA, 19 nt, Human
accaaacccacccuuucua

SEQ ID NO: 3369493 - RNA, 22 nt, Human
accaaacccacccuuucuacuu

SEQ ID NO: 3369494 - RNA, 14 nt, Human
accaaaccuagccc

SEQ ID NO: 3369495 - RNA, 12 nt, Human
accaaagaagaa

SEQ ID NO: 3369496 - RNA, 13 nt, Human
accaaagaagaaa

SEQ ID NO: 3369497 - RNA, 15 nt, Human
accaaagaagaaagu

SEQ ID NO: 3369498 - RNA, 17 nt, Human
accaaagagacuggagc

SEQ ID NO: 3369499 - RNA, 21 nt, Human
accaaagagacuggagcaucu

SEQ ID NO: 3369500 - RNA, 22 nt, Human
accaaagagacuggagcaucug

SEQ ID NO: 3369501 - RNA, 18 nt, Human
accaaagaugaaugaagc

SEQ ID NO: 3369502 - RNA, 14 nt, Human
accaaagccaccag

SEQ ID NO: 3369503 - RNA, 16 nt, Human
accaaagcgaauuuua

SEQ ID NO: 3369504 - RNA, 11 nt, Human
accaaagcuga

SEQ ID NO: 3369505 - RNA, 14 nt, Human
accaaagcugccca

SEQ ID NO: 3369506 - RNA, 19 nt, Human
accaaagcugcccacuguu

SEQ ID NO: 3369507 - RNA, 17 nt, Human
accaaaggacauuaugu

SEQ ID NO: 3369508 - RNA, 20 nt, Human
accaaaggacauuaugugug

SEQ ID NO: 3369509 - RNA, 17 nt, Human
accaaaggugaaggaau

SEQ ID NO: 3369510 - RNA, 19 nt, Human
accaaaggugaaggaauau

SEQ ID NO: 3369511 - RNA, 15 nt, Human
accaaaguauuuuuu

SEQ ID NO: 3369512 - RNA, 18 nt, Human
accaaaguauuuuuuuau

SEQ ID NO: 3369513 - RNA, 11 nt, Human
accaaaguucu

SEQ ID NO: 3369514 - RNA, 15 nt, Human
accaaaguucuaaua

SEQ ID NO: 3369515 - RNA, 15 nt, Human
accaaaucaaaaucu

SEQ ID NO: 3369516 - RNA, 22 nt, Human
accaaaucaaaaucucuccacu

SEQ ID NO: 3369517 - RNA, 23 nt, Human
accaaaucaaaaucucuccacuu

SEQ ID NO: 3369518 - RNA, 20 nt, Human
accaaaugugcuuugagaag

SEQ ID NO: 3369519 - RNA, 18 nt, Human
accaaauguuuauuuucu

SEQ ID NO: 3369520 - RNA, 16 nt, Human
accaaauuaucuugau

SEQ ID NO: 3369521 - RNA, 14 nt, Human
accaaauuuuaauu

SEQ ID NO: 3369522 - RNA, 11 nt, Human
accaacaccau

SEQ ID NO: 3369523 - RNA, 22 nt, Human
accaacaccaucacagcuuguu

SEQ ID NO: 3369524 - RNA, 15 nt, Human
accaacauaaaaaug

SEQ ID NO: 3369525 - RNA, 21 nt, Human
accaacauacucccaucugug

SEQ ID NO: 3369526 - RNA, 22 nt, Human
accaacauacucccaucuguga

SEQ ID NO: 3369527 - RNA, 21 nt, Human
accaacaucccauugcccugg

SEQ ID NO: 3369528 - RNA, 24 nt, Human
accaacauggagaaacccugucuc

SEQ ID NO: 3369529 - RNA, 19 nt, Human
accaacccagccgcugccc

SEQ ID NO: 3369530 - RNA, 15 nt, Human
accaacccucagagc

SEQ ID NO: 3369531 - RNA, 15 nt, Human
accaacccucagggc

SEQ ID NO: 3369532 - RNA, 16 nt, Human
accaacccucagggca

SEQ ID NO: 3369533 - RNA, 14 nt, Human
accaacccuguuuc

SEQ ID NO: 3369534 - RNA, 15 nt, Human
acuggggcauccugu

SEQ ID NO: 3369535 - RNA, 13 nt, Human
acuggggccucca

SEQ ID NO: 3369536 - RNA, 21 nt, Human
acuggggcuggggaaggaagc

SEQ ID NO: 3369537 - RNA, 15 nt, Human
acugggggaaaagau

SEQ ID NO: 3369538 - RNA, 15 nt, Human
acugggggcagacau

SEQ ID NO: 3369539 - RNA, 17 nt, Human
acuggggugggaggucu

SEQ ID NO: 3369540 - RNA, 19 nt, Human
acuggguacuuguggacac

SEQ ID NO: 3369541 - RNA, 20 nt, Human
acuggguacuuguggacaca

SEQ ID NO: 3369542 - RNA, 23 nt, Human
acuggguacuuguggacacagcu

SEQ ID NO: 3369543 - RNA, 20 nt, Human
acuggguggggugaggacca

SEQ ID NO: 3369544 - RNA, 16 nt, Human
acuggguguaaacaca

SEQ ID NO: 3369545 - RNA, 20 nt, Human
acugggugucauuucauucc

SEQ ID NO: 3369546 - RNA, 15 nt, Human
acuggguuucuagcc

SEQ ID NO: 3369547 - RNA, 21 nt, Human
acuggguuuggaccccagcug

SEQ ID NO: 3369548 - RNA, 22 nt, Human
acuggguuuggaccccagcugg

SEQ ID NO: 3369549 - RNA, 23 nt, Human
acuggguuuggaccccagcuggg

SEQ ID NO: 3369550 - RNA, 16 nt, Human
acugguaagauuguua

SEQ ID NO: 3369551 - RNA, 18 nt, Human
acugguaagauuguuauu

SEQ ID NO: 3369552 - RNA, 16 nt, Human
acugguacuuagaguu

SEQ ID NO: 3369553 - RNA, 20 nt, Human
acugguccugugugcaguga

SEQ ID NO: 3369554 - RNA, 12 nt, Human
acuggucucucu

SEQ ID NO: 3369555 - RNA, 14 nt, Human
acuggugacugauu

SEQ ID NO: 3369556 - RNA, 19 nt, Human
acuggugacugauucuuca

SEQ ID NO: 3369557 - RNA, 20 nt, Human
acuggugacugauucuucag

SEQ ID NO: 3369558 - RNA, 21 nt, Human
acuggugacugcgaucuucag

SEQ ID NO: 3369559 - RNA, 14 nt, Human
acuggugagcagac

SEQ ID NO: 3369560 - RNA, 16 nt, Human
acuggugcacuuugua

SEQ ID NO: 3369561 - RNA, 21 nt, Human
acuggugcacuuuguaaauuc

SEQ ID NO: 3369562 - RNA, 22 nt, Human
acugguggggauaggccagccg

SEQ ID NO: 3369563 - RNA, 22 nt, Human
acugguguuaucaccgugggcu

SEQ ID NO: 3369564 - RNA, 14 nt, Human
acugguugcaugga

SEQ ID NO: 3369565 - RNA, 19 nt, Human
acugguugcauggaaauca

SEQ ID NO: 3369566 - RNA, 19 nt, Human
acugguugguuuugccauu

SEQ ID NO: 3369567 - RNA, 22 nt, Human
acugguuuacaggcccugcucc

SEQ ID NO: 3369568 - RNA, 20 nt, Human
acugguuuauccacccacaa

SEQ ID NO: 3369569 - RNA, 22 nt, Human
acugguuuauccacccacaaca

SEQ ID NO: 3369570 - RNA, 22 nt, Human
acugguuuguugcagccaaaga

SEQ ID NO: 3369571 - RNA, 18 nt, Human
acuguaaaaaaugugugu

SEQ ID NO: 3369572 - RNA, 12 nt, Human
acuguaaaaugc

SEQ ID NO: 3369573 - RNA, 13 nt, Human
acuguaaacacag

SEQ ID NO: 3369574 - RNA, 14 nt, Human
acuguaaacacaga

SEQ ID NO: 3369575 - RNA, 17 nt, Human
acuguaaagagaccuac

SEQ ID NO: 3369576 - RNA, 23 nt, Human
acuguaaagagaccuaccucagg

SEQ ID NO: 3369577 - RNA, 18 nt, Human
acuguaaauaaaaagaaa

SEQ ID NO: 3369578 - RNA, 22 nt, Human
acuguaaauauuuauuuaugug

SEQ ID NO: 3369579 - RNA, 12 nt, Human
acuguaaaucau

SEQ ID NO: 3369580 - RNA, 10 nt, Human
acuguaacac

SEQ ID NO: 3369581 - RNA, 13 nt, Human
acuguaacacuuu

SEQ ID NO: 3369582 - RNA, 16 nt, Human
acuguaacugauuaca

SEQ ID NO: 3369583 - RNA, 22 nt, Human
acuguaacuuccaaauaaauaa

SEQ ID NO: 3369584 - RNA, 22 nt, Human
acuguaagaaaauaucacuugu

SEQ ID NO: 3369585 - RNA, 23 nt, Human
acuguaagaauaauuuauaguaa

SEQ ID NO: 3369586 - RNA, 16 nt, Human
acuguaaguugggcuu

SEQ ID NO: 3369587 - RNA, 13 nt, Human
acuguaauaauac

SEQ ID NO: 3369588 - RNA, 23 nt, Human
acuguaauaauaccucaauguuu

SEQ ID NO: 3369589 - RNA, 19 nt, Human
acuguaaucuuauuuagga

SEQ ID NO: 3369590 - RNA, 22 nt, Human
acuguaaucuuauuuaggaagu

SEQ ID NO: 3369591 - RNA, 17 nt, Human
acuguaauuauuugaau

SEQ ID NO: 3369592 - RNA, 18 nt, Human
acuguaauuauuugaaug

SEQ ID NO: 3369593 - RNA, 20 nt, Human
acuguaauuauuugaaugac

SEQ ID NO: 3369594 - RNA, 22 nt, Human
acuguacaaaaaaaucuuccaa

SEQ ID NO: 3369595 - RNA, 14 nt, Human
acuguacaaaguag

SEQ ID NO: 3369596 - RNA, 16 nt, Human
acuguacaaaguagaa

SEQ ID NO: 3369597 - RNA, 22 nt, Human
acuguacaaaguagaagucuua

SEQ ID NO: 3369598 - RNA, 22 nt, Human
acuguacaaugacuuuauugca

SEQ ID NO: 3369599 - RNA, 13 nt, Human
acuguacacacuu

SEQ ID NO: 3369600 - RNA, 23 nt, Human
acuguacacacuuuauuuacuuc

SEQ ID NO: 3369601 - RNA, 21 nt, Human
acuguacaugaaaacacauuu

SEQ ID NO: 3369602 - RNA, 19 nt, Human
acuguaccauauagcaaaa

SEQ ID NO: 3369603 - RNA, 17 nt, Human
acuguacccaaauggaa

SEQ ID NO: 3369604 - RNA, 14 nt, Human
acuguacuaauucu

SEQ ID NO: 3369605 - RNA, 15 nt, Human
acuguacuccuccca

SEQ ID NO: 3369606 - RNA, 20 nt, Human
acuguacuccucccaggcgc

SEQ ID NO: 3369607 - RNA, 17 nt, Human
acuguacuuaauaaauu

SEQ ID NO: 3369608 - RNA, 16 nt, Human
acuguacuucacuguc

SEQ ID NO: 3369609 - RNA, 13 nt, Human
acuguacuuugau

SEQ ID NO: 3369610 - RNA, 20 nt, Human
acuguacuuugauucacaug

SEQ ID NO: 3369611 - RNA, 22 nt, Human
acuguacuuugauucacauguu

SEQ ID NO: 3369612 - RNA, 19 nt, Human
acuguagaaugauuucaug

SEQ ID NO: 3369613 - RNA, 15 nt, Human
acuguagauauguau

SEQ ID NO: 3369614 - RNA, 16 nt, Human
acuguagauugcuucu

SEQ ID NO: 3369615 - RNA, 22 nt, Human
acuguagccucgccgucuguga

SEQ ID NO: 3369616 - RNA, 14 nt, Human
acuguagcucuaaa

SEQ ID NO: 3369617 - RNA, 22 nt, Human
acugaggccaaaagaggccuga

SEQ ID NO: 3369618 - RNA, 14 nt, Human
acugaggccugagc

SEQ ID NO: 3369619 - RNA, 17 nt, Human
acugagggacucugaag

SEQ ID NO: 3369620 - RNA, 18 nt, Human
acugagggacucugaagc

SEQ ID NO: 3369621 - RNA, 18 nt, Human
acugaguacguugugcau

SEQ ID NO: 3369622 - RNA, 19 nt, Human
acugaguauuaauaucuga

SEQ ID NO: 3369623 - RNA, 16 nt, Human
acugaguccuuaaaca

SEQ ID NO: 3369624 - RNA, 16 nt, Human
acugagugccuuuugg

SEQ ID NO: 3369625 - RNA, 13 nt, Human
acugagugggaag

SEQ ID NO: 3369626 - RNA, 21 nt, Human
acugaguuaaauuauacugga

SEQ ID NO: 3369627 - RNA, 22 nt, Human
acugauauaucaugagugaaua

SEQ ID NO: 3369628 - RNA, 19 nt, Human
acugauauauuuaaaaaca

SEQ ID NO: 3369629 - RNA, 14 nt, Human
acugauauauuuuc

SEQ ID NO: 3369630 - RNA, 18 nt, Human
acugaucaugcauuguug

SEQ ID NO: 3369631 - RNA, 20 nt, Human
acugaucuuuguauauuaca

SEQ ID NO: 3369632 - RNA, 14 nt, Human
acugaugcugcccc

SEQ ID NO: 3369633 - RNA, 15 nt, Human
acugaugcugccccu

SEQ ID NO: 3369634 - RNA, 15 nt, Human
acugaugcuuagaug

SEQ ID NO: 3369635 - RNA, 14 nt, Human
acugauggaaacaa

SEQ ID NO: 3369636 - RNA, 19 nt, Human
acugauggaaacaaagugg

SEQ ID NO: 3369637 - RNA, 22 nt, Human
acugaugggcaacccccagccu

SEQ ID NO: 3369638 - RNA, 13 nt, Human
acugaugucuccu

SEQ ID NO: 3369639 - RNA, 19 nt, Human
acugauguguugugccuua

SEQ ID NO: 3369640 - RNA, 22 nt, Human
acugauguuacaucacaguguu

SEQ ID NO: 3369641 - RNA, 22 nt, Human
acugauguuaggcugggcccag

SEQ ID NO: 3369642 - RNA, 15 nt, Human
acugauucuucagca

SEQ ID NO: 3369643 - RNA, 15 nt, Human
acugauugagaaguu

SEQ ID NO: 3369644 - RNA, 20 nt, Human
acugauuucacaacagauca

SEQ ID NO: 3369645 - RNA, 20 nt, Human
acugauuuccccuuuugcau

SEQ ID NO: 3369646 - RNA, 20 nt, Human
acugauuuuguacauaaaca

SEQ ID NO: 3369647 - RNA, 15 nt, Human
acugauuuuuguaag

SEQ ID NO: 3369648 - RNA, 19 nt, Human
acugauuuuuguaagacaa

SEQ ID NO: 3369649 - RNA, 17 nt, Human
acugauuuuuuuuuccu

SEQ ID NO: 3369650 - RNA, 19 nt, Human
acugauuuuuuuuuccuuc

SEQ ID NO: 3369651 - RNA, 22 nt, Human
acugauuuuuuuuuccuucagu

SEQ ID NO: 3369652 - RNA, 15 nt, Human
acugcaacaggaacu

SEQ ID NO: 3369653 - RNA, 16 nt, Human
acugcaaccuccaccu

SEQ ID NO: 3369654 - RNA, 18 nt, Human
acugcaaccuccaccucc

SEQ ID NO: 3369655 - RNA, 20 nt, Human
acugcaaccuccaccucgca

SEQ ID NO: 3369656 - RNA, 15 nt, Human
acugcaaccucugcc

SEQ ID NO: 3369657 - RNA, 17 nt, Human
acugcaaccuuguuuau

SEQ ID NO: 3369658 - RNA, 14 nt, Human
acugcaacuucugc

SEQ ID NO: 3369659 - RNA, 15 nt, Human
acugcaagagccuug

SEQ ID NO: 3369660 - RNA, 18 nt, Human
acugcaagagccuuggug

SEQ ID NO: 3369661 - RNA, 18 nt, Human
acugcaagaggcuccugu

SEQ ID NO: 3369662 - RNA, 19 nt, Human
acugcaagucacaaaggaa

SEQ ID NO: 3369663 - RNA, 21 nt, Human
acugcaagucacaaaggaaug

SEQ ID NO: 3369664 - RNA, 22 nt, Human
acugcaaguccuuuuguaaagu

SEQ ID NO: 3369665 - RNA, 20 nt, Human
acugcaauaacuucugaccu

SEQ ID NO: 3369666 - RNA, 16 nt, Human
acugcaauagagacug

SEQ ID NO: 3369667 - RNA, 18 nt, Human
acugcaauagagacugua

SEQ ID NO: 3369668 - RNA, 21 nt, Human
acugcaauagagacuguagau

SEQ ID NO: 3369669 - RNA, 17 nt, Human
acugcaaucauauguga

SEQ ID NO: 3369670 - RNA, 21 nt, Human
acugcacaauaacuccuccca

SEQ ID NO: 3369671 - RNA, 15 nt, Human
acugcacagagcucu

SEQ ID NO: 3369672 - RNA, 16 nt, Human
acugcacagagcucuc

SEQ ID NO: 3369673 - RNA, 16 nt, Human
acugcacagcguccug

SEQ ID NO: 3369674 - RNA, 18 nt, Human
acugcacagugcaucuca

SEQ ID NO: 3369675 - RNA, 23 nt, Human
acugcacagugcaucucagccca

SEQ ID NO: 3369676 - RNA, 15 nt, Human
acugcacaugauuuc

SEQ ID NO: 3369677 - RNA, 22 nt, Human
acugcacaugauuucacaaaua

SEQ ID NO: 3369678 - RNA, 19 nt, Human
acugcaccaguugcugcuu

SEQ ID NO: 3369679 - RNA, 18 nt, Human
acugcaccauuuaaaaac

SEQ ID NO: 3369680 - RNA, 13 nt, Human
acugcacccagga

SEQ ID NO: 3369681 - RNA, 18 nt, Human
acugcacccccuccugcu

SEQ ID NO: 3369682 - RNA, 16 nt, Human
acugcacguggcuucu

SEQ ID NO: 3369683 - RNA, 20 nt, Human
acugcacuauagccuaggug

SEQ ID NO: 3369684 - RNA, 16 nt, Human
acugcacuccagccug

SEQ ID NO: 3369685 - RNA, 20 nt, Human
acugcacuccagccugggcg

SEQ ID NO: 3369686 - RNA, 20 nt, Human
acugcacuccagccuggggg

SEQ ID NO: 3369687 - RNA, 19 nt, Human
acugcacuccagccugggu

SEQ ID NO: 3369688 - RNA, 18 nt, Human
acugcacucuagccggag

SEQ ID NO: 3369689 - RNA, 19 nt, Human
acugcagaaacccugagca

SEQ ID NO: 3369690 - RNA, 20 nt, Human
acugcagaccuguccuccug

SEQ ID NO: 3369691 - RNA, 23 nt, Human
acugcagaccuguccuccuggug

SEQ ID NO: 3369692 - RNA, 16 nt, Human
acugcagcaccuccag

SEQ ID NO: 3369693 - RNA, 18 nt, Human
acugcagcaccuccaggc

SEQ ID NO: 3369694 - RNA, 21 nt, Human
acugcagccucgaacuccugg

SEQ ID NO: 3369695 - RNA, 23 nt, Human
acugcagccucgaacuccugggc

SEQ ID NO: 3369696 - RNA, 15 nt, Human
acugcagcuuuacau

SEQ ID NO: 3369697 - RNA, 15 nt, Human
acugcaggccccgcu

SEQ ID NO: 3369698 - RNA, 21 nt, Human
acugcaggccccgcuugucca

SEQ ID NO: 3369699 - RNA, 21 nt, Human
acuuaaaaaugguuuaaaugg

SEQ ID NO: 3369700 - RNA, 17 nt, Human
acuuaaaaauguaaaua

SEQ ID NO: 3369701 - RNA, 23 nt, Human
acuuaaaaauguaaauauucuau

SEQ ID NO: 3369702 - RNA, 22 nt, Human
acuuaaaauauuccugcauuug

SEQ ID NO: 3369703 - RNA, 13 nt, Human
acuuaaaauauuu

SEQ ID NO: 3369704 - RNA, 22 nt, Human
acuuaaagaaguauuuuuagaa

SEQ ID NO: 3369705 - RNA, 15 nt, Human
acuuaaagauuuauc

SEQ ID NO: 3369706 - RNA, 14 nt, Human
acuuaaauaaugug

SEQ ID NO: 3369707 - RNA, 13 nt, Human
acuuaaaugaaag

SEQ ID NO: 3369708 - RNA, 19 nt, Human
acuuaaauggaaaaaauga

SEQ ID NO: 3369709 - RNA, 14 nt, Human
acuuaaauguuaug

SEQ ID NO: 3369710 - RNA, 16 nt, Human
acuuaaauguuaugua

SEQ ID NO: 3369711 - RNA, 15 nt, Human
acuuaacaagcuccc

SEQ ID NO: 3369712 - RNA, 23 nt, Human
acuuaacccugacaaauuuuaau

SEQ ID NO: 3369713 - RNA, 22 nt, Human
acuuaacuaucaucuuauucag

SEQ ID NO: 3369714 - RNA, 22 nt, Human
acuuaacugaaaugccugcuuu

SEQ ID NO: 3369715 - RNA, 16 nt, Human
acuuaacuguuucaaa

SEQ ID NO: 3369716 - RNA, 16 nt, Human
acuuaacuuuaacuga

SEQ ID NO: 3369717 - RNA, 12 nt, Human
acuuaagagaaa

SEQ ID NO: 3369718 - RNA, 17 nt, Human
acuuaagagaaauggca

SEQ ID NO: 3369719 - RNA, 20 nt, Human
acuuaagcaaaagaaaaaga

SEQ ID NO: 3369720 - RNA, 13 nt, Human
acuuaagcacacu

SEQ ID NO: 3369721 - RNA, 17 nt, Human
acuuaagggagaaaaaa

SEQ ID NO: 3369722 - RNA, 15 nt, Human
acuuaaguuaaacau

SEQ ID NO: 3369723 - RNA, 13 nt, Human
acuuaauaaucaa

SEQ ID NO: 3369724 - RNA, 22 nt, Human
acuuaauaaucaagagccuuaa

SEQ ID NO: 3369725 - RNA, 18 nt, Human
acuuaauacuaccuugaa

SEQ ID NO: 3369726 - RNA, 16 nt, Human
acuuaaucaaaacuca

SEQ ID NO: 3369727 - RNA, 18 nt, Human
acuuaaucaauuaauuuu

SEQ ID NO: 3369728 - RNA, 15 nt, Human
acuuaaucuaaaugg

SEQ ID NO: 3369729 - RNA, 16 nt, Human
acuuaaucuaaaugga

SEQ ID NO: 3369730 - RNA, 22 nt, Human
acuuaauuucuuuauguaaucu

SEQ ID NO: 3369731 - RNA, 18 nt, Human
acuuacacaucuuccaca

SEQ ID NO: 3369732 - RNA, 23 nt, Human
acuuacagauaggccuucuugug

SEQ ID NO: 3369733 - RNA, 19 nt, Human
acuuacauauuuauuuuua

SEQ ID NO: 3369734 - RNA, 12 nt, Human
acuuacaugauu

SEQ ID NO: 3369735 - RNA, 18 nt, Human
acuuacaugauucauuuu

SEQ ID NO: 3369736 - RNA, 14 nt, Human
acuuacauuuacaa

SEQ ID NO: 3369737 - RNA, 16 nt, Human
acuuaccauaugugcu

SEQ ID NO: 3369738 - RNA, 14 nt, Human
acuuaccauuugcu

SEQ ID NO: 3369739 - RNA, 21 nt, Human
acuuaccgugagcgacaaaga

SEQ ID NO: 3369740 - RNA, 17 nt, Human
acuuaccuagauuuaca

SEQ ID NO: 3369741 - RNA, 16 nt, Human
acuuaccuucaauaaa

SEQ ID NO: 3369742 - RNA, 13 nt, Human
acuuacucuaaga

SEQ ID NO: 3369743 - RNA, 16 nt, Human
acuuacucuaagaucu

SEQ ID NO: 3369744 - RNA, 14 nt, Human
acuuacuguacaug

SEQ ID NO: 3369745 - RNA, 13 nt, Human
acuuacuguuucu

SEQ ID NO: 3369746 - RNA, 20 nt, Human
acuuacuguuucugucagga

SEQ ID NO: 3369747 - RNA, 21 nt, Human
acuuacuguuucugucaggag

SEQ ID NO: 3369748 - RNA, 14 nt, Human
acuuacuugcuuau

SEQ ID NO: 3369749 - RNA, 20 nt, Human
acuuagaaaaccagcucagc

SEQ ID NO: 3369750 - RNA, 16 nt, Human
acuuagaauaaaauug

SEQ ID NO: 3369751 - RNA, 18 nt, Human
acuuagaauaaaauugua

SEQ ID NO: 3369752 - RNA, 19 nt, Human
acuuagaaucccuguguua

SEQ ID NO: 3369753 - RNA, 22 nt, Human
acuuagagcuuuuuuuuuuuaa

SEQ ID NO: 3369754 - RNA, 17 nt, Human
acuuagaguuucuguuu

SEQ ID NO: 3369755 - RNA, 17 nt, Human
acuuagauuuuacauga

SEQ ID NO: 3369756 - RNA, 22 nt, Human
acuuagcacuucagggcagauu

SEQ ID NO: 3369757 - RNA, 18 nt, Human
acuuagcauccuaagaaa

SEQ ID NO: 3369758 - RNA, 22 nt, Human
acuuagccauuuuucaaagcaa

SEQ ID NO: 3369759 - RNA, 16 nt, Human
acuuagcuaguuuuau

SEQ ID NO: 3369760 - RNA, 14 nt, Human
acuuagcugggaga

SEQ ID NO: 3369761 - RNA, 13 nt, Human
acugugcuuucua

SEQ ID NO: 3369762 - RNA, 22 nt, Human
acugugcuuucuauuguacaga

SEQ ID NO: 3369763 - RNA, 12 nt, Human
acuguggaggaa

SEQ ID NO: 3369764 - RNA, 22 nt, Human
acuguggaggaaggauuguaaa

SEQ ID NO: 3369765 - RNA, 15 nt, Human
acuguggauauuguu

SEQ ID NO: 3369766 - RNA, 15 nt, Human
acuguggcacacgcc

SEQ ID NO: 3369767 - RNA, 21 nt, Human
acuguggccaugguccccaag

SEQ ID NO: 3369768 - RNA, 17 nt, Human
acuguggccguuaucug

SEQ ID NO: 3369769 - RNA, 20 nt, Human
acugugggaaggccagcugc

SEQ ID NO: 3369770 - RNA, 15 nt, Human
acugugggcaauuua

SEQ ID NO: 3369771 - RNA, 21 nt, Human
acuguggguuuguggggggag

SEQ ID NO: 3369772 - RNA, 18 nt, Human
acugugguaaaugccaca

SEQ ID NO: 3369773 - RNA, 14 nt, Human
acugugguccuaug

SEQ ID NO: 3369774 - RNA, 18 nt, Human
acuguggugacuuuggau

SEQ ID NO: 3369775 - RNA, 14 nt, Human
acuguguaaacuca

SEQ ID NO: 3369776 - RNA, 14 nt, Human
acuguguaacugcc

SEQ ID NO: 3369777 - RNA, 19 nt, Human
acuguguaagggccagaaa

SEQ ID NO: 3369778 - RNA, 18 nt, Human
acuguguacauaacugaa

SEQ ID NO: 3369779 - RNA, 22 nt, Human
acuguguacuguauagacaguu

SEQ ID NO: 3369780 - RNA, 14 nt, Human
acuguguacuguuc

SEQ ID NO: 3369781 - RNA, 19 nt, Human
acugugucccucucucugg

SEQ ID NO: 3369782 - RNA, 21 nt, Human
acuguguccuggugcucucug

SEQ ID NO: 3369783 - RNA, 19 nt, Human
acugugugcucaggagccc

SEQ ID NO: 3369784 - RNA, 18 nt, Human
acuguguggacugugaug

SEQ ID NO: 3369785 - RNA, 10 nt, Human
acugugugug

SEQ ID NO: 3369786 - RNA, 19 nt, Human
acugugugugcccucuggg

SEQ ID NO: 3369787 - RNA, 20 nt, Human
acuguguguggaggagucca

SEQ ID NO: 3369788 - RNA, 15 nt, Human
acugugugugugaau

SEQ ID NO: 3369789 - RNA, 16 nt, Human
acugugugugugaaug

SEQ ID NO: 3369790 - RNA, 14 nt, Human
acuguguuccuucc

SEQ ID NO: 3369791 - RNA, 14 nt, Human
acuguguugccaca

SEQ ID NO: 3369792 - RNA, 14 nt, Human
acuguguuguauua

SEQ ID NO: 3369793 - RNA, 16 nt, Human
acuguuaaaggaaaaa

SEQ ID NO: 3369794 - RNA, 21 nt, Human
acuguuaauaguucagguaac

SEQ ID NO: 3369795 - RNA, 21 nt, Human
acuguuaccauuggaaauuuc

SEQ ID NO: 3369796 - RNA, 15 nt, Human
acuguuacugggccc

SEQ ID NO: 3369797 - RNA, 18 nt, Human
acuguuacugggcccuga

SEQ ID NO: 3369798 - RNA, 14 nt, Human
acuguuacuugaua

SEQ ID NO: 3369799 - RNA, 23 nt, Human
acuguuaugaaauaaagaaauug

SEQ ID NO: 3369800 - RNA, 17 nt, Human
acuguuauuuucagcau

SEQ ID NO: 3369801 - RNA, 14 nt, Human
acuguuccagccug

SEQ ID NO: 3369802 - RNA, 15 nt, Human
acuguucccucugcu

SEQ ID NO: 3369803 - RNA, 18 nt, Human
acuguucccucugcuccu

SEQ ID NO: 3369804 - RNA, 22 nt, Human
acuguucccucugcuccuggag

SEQ ID NO: 3369805 - RNA, 16 nt, Human
acuguucccugaggug

SEQ ID NO: 3369806 - RNA, 14 nt, Human
acuguucuaaagcu

SEQ ID NO: 3369807 - RNA, 16 nt, Human
acuguucuaaagcucu

SEQ ID NO: 3369808 - RNA, 21 nt, Human
acuguucucuauuagacuuua

SEQ ID NO: 3369809 - RNA, 15 nt, Human
acuguucucugcccu

SEQ ID NO: 3369810 - RNA, 19 nt, Human
acuguucucugcccuccaa

SEQ ID NO: 3369811 - RNA, 17 nt, Human
acuguucugugucuuuc

SEQ ID NO: 3369812 - RNA, 20 nt, Human
acuguucuuagcucaaugag

SEQ ID NO: 3369813 - RNA, 11 nt, Human
acuguucuugc

SEQ ID NO: 3369814 - RNA, 12 nt, Human
acuguucuugcu

SEQ ID NO: 3369815 - RNA, 13 nt, Human
acuguucuugcug

SEQ ID NO: 3369816 - RNA, 15 nt, Human
acuguucuugcugcu

SEQ ID NO: 3369817 - RNA, 18 nt, Human
acuguucuugcugcuaga

SEQ ID NO: 3369818 - RNA, 19 nt, Human
acuguucuugcugcuagaa

SEQ ID NO: 3369819 - RNA, 22 nt, Human
acuguucuugcugcuagaacuu

SEQ ID NO: 3369820 - RNA, 15 nt, Human
acuguucuuuccagg

SEQ ID NO: 3369821 - RNA, 22 nt, Human
acuguugauaauucuuauuuug

SEQ ID NO: 3369822 - RNA, 23 nt, Human
acuguugauaauucuuauuuugu

SEQ ID NO: 3369823 - RNA, 15 nt, Human
acuguugcacgugug

SEQ ID NO: 3369824 - RNA, 18 nt, Human
acuguugcacguguguuu

SEQ ID NO: 3369825 - RNA, 18 nt, Human
acuguugccagagaugga

SEQ ID NO: 3369826 - RNA, 17 nt, Human
acuguugcccaggcugg

SEQ ID NO: 3369827 - RNA, 21 nt, Human
acuguuggaauggauuuuucu

SEQ ID NO: 3369828 - RNA, 18 nt, Human
acuguugggguggguaua

SEQ ID NO: 3369829 - RNA, 22 nt, Human
acuguugggguggguauaaaag

SEQ ID NO: 3369830 - RNA, 13 nt, Human
acuguuguauaaa

SEQ ID NO: 3369831 - RNA, 19 nt, Human
acuguugugaccugaaguu

SEQ ID NO: 3369832 - RNA, 20 nt, Human
acuguuuacaagaaaaaaug

SEQ ID NO: 3369833 - RNA, 13 nt, Human
acuguuuagauuu

SEQ ID NO: 3369834 - RNA, 18 nt, Human
acuguuuauacacugugu

SEQ ID NO: 3369835 - RNA, 20 nt, Human
acuguuuauugaaagaauua

SEQ ID NO: 3369836 - RNA, 22 nt, Human
acuguuuauuucuguuucucau

SEQ ID NO: 3369837 - RNA, 11 nt, Human
acuguuucaaa

SEQ ID NO: 3369838 - RNA, 13 nt, Human
acuguuucaaacu

SEQ ID NO: 3369839 - RNA, 16 nt, Human
acuguuucaucuaagu

SEQ ID NO: 3369840 - RNA, 14 nt, Human
acuguuuccacauu

SEQ ID NO: 3369841 - RNA, 13 nt, Human
acuguuuccuggg

SEQ ID NO: 3369842 - RNA, 13 nt, Human
acuguuucucugc

SEQ ID NO: 3369843 - RNA, 14 nt, Human
acuguuucucugcu

SEQ ID NO: 3369844 - RNA, 17 nt, Human
acuguuucucuugagcu

SEQ ID NO: 3369845 - RNA, 18 nt, Human
acuguuucucuugagcug

SEQ ID NO: 3369846 - RNA, 14 nt, Human
acuguuucugucag

SEQ ID NO: 3369847 - RNA, 15 nt, Human
acuguuucugucagg

SEQ ID NO: 3369848 - RNA, 14 nt, Human
acuguuucuugcuu

SEQ ID NO: 3369849 - RNA, 22 nt, Human
acuguuugccuucuacuuuuaa

SEQ ID NO: 3369850 - RNA, 18 nt, Human
acuguuugucuucucccc

SEQ ID NO: 3369851 - RNA, 19 nt, Human
acuguuugucuucucccca

SEQ ID NO: 3369852 - RNA, 20 nt, Human
acuguuugucuucuccccag

SEQ ID NO: 3369853 - RNA, 19 nt, Human
acuguuuguuuacaaaauc

SEQ ID NO: 3369854 - RNA, 13 nt, Human
acuguuuucuagu

SEQ ID NO: 3369855 - RNA, 19 nt, Human
acuguuuucuaguguauca

SEQ ID NO: 3369856 - RNA, 21 nt, Human
acuguuuucuaguguaucaaa

SEQ ID NO: 3369857 - RNA, 15 nt, Human
acuguuuuuacccau

SEQ ID NO: 3369858 - RNA, 16 nt, Human
acuguuuuuacccaua

SEQ ID NO: 3369859 - RNA, 23 nt, Human
acuguuuuucagggagguggcug

SEQ ID NO: 3369860 - RNA, 18 nt, Human
acuguuuuucggacaguu

SEQ ID NO: 3369861 - RNA, 15 nt, Human
acuguuuuuuaaguc

SEQ ID NO: 3369862 - RNA, 14 nt, Human
acuguuuuuuccug

SEQ ID NO: 3369863 - RNA, 22 nt, Human
acuuaaaaaaaaaaaaaagcuu

SEQ ID NO: 3369864 - RNA, 17 nt, Human
acuuaaaaaaaugacag

SEQ ID NO: 3369865 - RNA, 22 nt, Human
acuuaaaaaaaugacagauguu

SEQ ID NO: 3369866 - RNA, 16 nt, Human
acuuaaaaauguaaau

SEQ ID NO: 3369867 - RNA, 16 nt, Human
acuuaaaaauuuauua

SEQ ID NO: 3369868 - RNA, 22 nt, Human
acuuaaaauaggggauauuuaa

SEQ ID NO: 3369869 - RNA, 23 nt, Human
acuuaaaauaggggauauuuaag

SEQ ID NO: 3369870 - RNA, 20 nt, Human
acuuaaaauauuccugcauu

SEQ ID NO: 3369871 - RNA, 19 nt, Human
acuuaaacuugcaucacuu

SEQ ID NO: 3369872 - RNA, 11 nt, Human
acuuaaagauu

SEQ ID NO: 3369873 - RNA, 13 nt, Human
acuuaaagauuua

SEQ ID NO: 3369874 - RNA, 22 nt, Human
acuuaaagcccgccugacagaa

SEQ ID NO: 3369875 - RNA, 16 nt, Human
acuuaaagcuuucaga

SEQ ID NO: 3369876 - RNA, 22 nt, Human
acuuaaagcuuucagaauaugu

SEQ ID NO: 3369877 - RNA, 14 nt, Human
acuuaaauguuacc

SEQ ID NO: 3369878 - RNA, 22 nt, Human
acuuaaauguuauguauauggu

SEQ ID NO: 3369879 - RNA, 18 nt, Human
acuuaaauguuauuaucu

SEQ ID NO: 3369880 - RNA, 13 nt, Human
acuuaaauuuuag

SEQ ID NO: 3369881 - RNA, 21 nt, Human
acuuaacagaugcaaugugcu

SEQ ID NO: 3369882 - RNA, 14 nt, Human
acuuaacauauuua

SEQ ID NO: 3369883 - RNA, 15 nt, Human
acuuaacaugcugug

SEQ ID NO: 3369884 - RNA, 18 nt, Human
acuuaacaugcuguguaa

SEQ ID NO: 3369885 - RNA, 16 nt, Human
acuuaaccgcaucaga

SEQ ID NO: 3369886 - RNA, 17 nt, Human
acuuaaccgcaucagaa

SEQ ID NO: 3369887 - RNA, 17 nt, Human
acuuaacggcuccagga

SEQ ID NO: 3369888 - RNA, 19 nt, Human
acuuaacggcuccaggauu

SEQ ID NO: 3369889 - RNA, 13 nt, Human
acuuaacugaaau

SEQ ID NO: 3369890 - RNA, 21 nt, Human
acuuaacuguccguaagcagu

SEQ ID NO: 3369891 - RNA, 19 nt, Human
acuuaacuuuaacugaaca

SEQ ID NO: 3369892 - RNA, 16 nt, Human
acuuaagaaacacuga

SEQ ID NO: 3369893 - RNA, 13 nt, Human
acuuaagagaaau

SEQ ID NO: 3369894 - RNA, 15 nt, Human
acuuaagagaaaugg

SEQ ID NO: 3369895 - RNA, 13 nt, Human
acuuaagcaaaag

SEQ ID NO: 3369896 - RNA, 19 nt, Human
acuuaagcaaaagaaaaag

SEQ ID NO: 3369897 - RNA, 17 nt, Human
acuuaagcaucuggcuc

SEQ ID NO: 3369898 - RNA, 17 nt, Human
acuuaauaaauucagau

SEQ ID NO: 3369899 - RNA, 13 nt, Human
acuuuguucugcu

SEQ ID NO: 3369900 - RNA, 19 nt, Human
acuuuguucuggcucuucc

SEQ ID NO: 3369901 - RNA, 15 nt, Human
acuuuguugcaagau

SEQ ID NO: 3369902 - RNA, 17 nt, Human
acuuuguugcaagaugu

SEQ ID NO: 3369903 - RNA, 21 nt, Human
acuuuguugcaagaugugaau

SEQ ID NO: 3369904 - RNA, 22 nt, Human
acuuuguugcaagaugugaauu

SEQ ID NO: 3369905 - RNA, 17 nt, Human
acuuuguuuuauuuuca

SEQ ID NO: 3369906 - RNA, 15 nt, Human
acuuccaaagaaagu

SEQ ID NO: 3369907 - RNA, 17 nt, Human
acuuccaaagaaaguuc

SEQ ID NO: 3369908 - RNA, 19 nt, Human
acuuccaaauccccuaagc

SEQ ID NO: 3369909 - RNA, 15 nt, Human
acuuccacugaugga

SEQ ID NO: 3369910 - RNA, 17 nt, Human
acuuccacugccauccu

SEQ ID NO: 3369911 - RNA, 18 nt, Human
acuuccaggggaaccugc

SEQ ID NO: 3369912 - RNA, 14 nt, Human
acuuccaugaauuu

SEQ ID NO: 3369913 - RNA, 17 nt, Human
acuuccauggcccucau

SEQ ID NO: 3369914 - RNA, 17 nt, Human
agaaaaguauuuugaag

SEQ ID NO: 3369915 - RNA, 19 nt, Human
agaaaaguauuuugaaguu

SEQ ID NO: 3369916 - RNA, 23 nt, Human
agaaaaguauuuugaaguuuaca

SEQ ID NO: 3369917 - RNA, 21 nt, Human
agaaaagugcauauuuaucca

SEQ ID NO: 3369918 - RNA, 12 nt, Human
agaaaaguuauu

SEQ ID NO: 3369919 - RNA, 13 nt, Human
agaaaaguuauua

SEQ ID NO: 3369920 - RNA, 22 nt, Human
agaaaaguugacaccugagaaa

SEQ ID NO: 3369921 - RNA, 16 nt, Human
agaaaauaaaaaaaag

SEQ ID NO: 3369922 - RNA, 20 nt, Human
agaaaauaaaaaaaagaaaa

SEQ ID NO: 3369923 - RNA, 13 nt, Human
agaaaauaaaaag

SEQ ID NO: 3369924 - RNA, 17 nt, Human
agaaaauaaaaaguuaa

SEQ ID NO: 3369925 - RNA, 18 nt, Human
agaaaauaaaaaguuaaa

SEQ ID NO: 3369926 - RNA, 19 nt, Human
agaaaauaaaauuaagaau

SEQ ID NO: 3369927 - RNA, 15 nt, Human
agaaaauacaauaaa

SEQ ID NO: 3369928 - RNA, 16 nt, Human
agaaaauacaauaaac

SEQ ID NO: 3369929 - RNA, 12 nt, Human
agaaaauauaag

SEQ ID NO: 3369930 - RNA, 11 nt, Human
agaaaauauac

SEQ ID NO: 3369931 - RNA, 19 nt, Human
agaaaauauacuguaaaga

SEQ ID NO: 3369932 - RNA, 21 nt, Human
agaaaauauacuguaaagaaa

SEQ ID NO: 3369933 - RNA, 23 nt, Human
agaaaauauacuguaaagaaaga

SEQ ID NO: 3369934 - RNA, 19 nt, Human
agaaaauauauucuuucaa

SEQ ID NO: 3369935 - RNA, 14 nt, Human
agaaaauauguauu

SEQ ID NO: 3369936 - RNA, 23 nt, Human
agaaaauauuauguguuuccaua

SEQ ID NO: 3369937 - RNA, 11 nt, Human
agaaaauauuc

SEQ ID NO: 3369938 - RNA, 18 nt, Human
agaaaauauuuugucuaa

SEQ ID NO: 3369939 - RNA, 20 nt, Human
agaaaauauuuugucuaaaa

SEQ ID NO: 3369940 - RNA, 21 nt, Human
agaaaauauuuugucuaaaau

SEQ ID NO: 3369941 - RNA, 13 nt, Human
agaaaaucacuua

SEQ ID NO: 3369942 - RNA, 12 nt, Human
agaaaaucauca

SEQ ID NO: 3369943 - RNA, 13 nt, Human
agaaaaucaucaa

SEQ ID NO: 3369944 - RNA, 23 nt, Human
agaaaaucugaauuggaaugcac

SEQ ID NO: 3369945 - RNA, 23 nt, Human
agaaaaucuucauggaauucaca

SEQ ID NO: 3369946 - RNA, 22 nt, Human
agaaaaugcgguuauaaaaaau

SEQ ID NO: 3369947 - RNA, 23 nt, Human
agaaaauggaagacagcucuuau

SEQ ID NO: 3369948 - RNA, 21 nt, Human
agaaaaugguuuauuuuguau

SEQ ID NO: 3369949 - RNA, 19 nt, Human
agaaaauguaaauaaagga

SEQ ID NO: 3369950 - RNA, 11 nt, Human
agaaaauguga

SEQ ID NO: 3369951 - RNA, 19 nt, Human
agaaaaugugacccuccaa

SEQ ID NO: 3369952 - RNA, 13 nt, Human
agaaaauguuauu

SEQ ID NO: 3369953 - RNA, 16 nt, Human
agaaaauguuauuuaa

SEQ ID NO: 3369954 - RNA, 16 nt, Human
agaaaauguucuucca

SEQ ID NO: 3369955 - RNA, 15 nt, Human
agaaaauuagacugu

SEQ ID NO: 3369956 - RNA, 12 nt, Human
agaaaauucaau

SEQ ID NO: 3369957 - RNA, 14 nt, Human
agaaaauuccuaua

SEQ ID NO: 3369958 - RNA, 16 nt, Human
agaaaauugaauuuaa

SEQ ID NO: 3369959 - RNA, 20 nt, Human
agaaaauugaauuuaacaau

SEQ ID NO: 3369960 - RNA, 22 nt, Human
agaaaauugaauuuaacaaugc

SEQ ID NO: 3369961 - RNA, 21 nt, Human
agaaaauuuaauaacuuuuua

SEQ ID NO: 3369962 - RNA, 16 nt, Human
agaaaauuuuuguagu

SEQ ID NO: 3369963 - RNA, 20 nt, Human
agaaaauuuuuguaguagcg

SEQ ID NO: 3369964 - RNA, 17 nt, Human
agaaaauuuuuguuuau

SEQ ID NO: 3369965 - RNA, 21 nt, Human
agaaacaaacccguuuuauga

SEQ ID NO: 3369966 - RNA, 18 nt, Human
agaaacaacaauuucuac

SEQ ID NO: 3369967 - RNA, 17 nt, Human
agaaacaacucuuugag

SEQ ID NO: 3369968 - RNA, 20 nt, Human
agaaacaacucuuugagaaa

SEQ ID NO: 3369969 - RNA, 14 nt, Human
agaaacaauaaaga

SEQ ID NO: 3369970 - RNA, 14 nt, Human
agaaacacaauauu

SEQ ID NO: 3369971 - RNA, 19 nt, Human
agaaacaccuagaucagaa

SEQ ID NO: 3369972 - RNA, 17 nt, Human
agaaacacugaaaagaa

SEQ ID NO: 3369973 - RNA, 13 nt, Human
agaaacacugccu

SEQ ID NO: 3369974 - RNA, 15 nt, Human
agaaacagagacagg

SEQ ID NO: 3369975 - RNA, 19 nt, Human
agaaacagagacaggccca

SEQ ID NO: 3369976 - RNA, 14 nt, Human
agaaacagauacca

SEQ ID NO: 3369977 - RNA, 21 nt, Human
agaaacagauaccauacucau

SEQ ID NO: 3369978 - RNA, 11 nt, Human
agaaacagauu

SEQ ID NO: 3369979 - RNA, 15 nt, Human
agaaacagccagcaa

SEQ ID NO: 3369980 - RNA, 16 nt, Human
agaaacagcuaugaga

SEQ ID NO: 3369981 - RNA, 17 nt, Human
agaaacagcuuucaagu

SEQ ID NO: 3369982 - RNA, 19 nt, Human
agaaacagcuuucaagugc

SEQ ID NO: 3369983 - RNA, 20 nt, Human
agaaacaguuaacuuucaga

SEQ ID NO: 3369984 - RNA, 19 nt, Human
agaaacaguugguaacuuu

SEQ ID NO: 3369985 - RNA, 15 nt, Human
agaaacauaaauaaa

SEQ ID NO: 3369986 - RNA, 23 nt, Human
agaaacauaaauaaaaugaccag

SEQ ID NO: 3369987 - RNA, 12 nt, Human
agaaacaugaca

SEQ ID NO: 3369988 - RNA, 18 nt, Human
agaaacaugacacugacc

SEQ ID NO: 3369989 - RNA, 18 nt, Human
agaaaccaaucaagauaa

SEQ ID NO: 3369990 - RNA, 19 nt, Human
agaaaccagcuuccuucag

SEQ ID NO: 3369991 - RNA, 13 nt, Human
agaaacccugucu

SEQ ID NO: 3369992 - RNA, 14 nt, Human
agaaacccugucuc

SEQ ID NO: 3369993 - RNA, 16 nt, Human
agaaaccuacugccca

SEQ ID NO: 3369994 - RNA, 12 nt, Human
agaaaccuguau

SEQ ID NO: 3369995 - RNA, 13 nt, Human
agaaaccuguauc

SEQ ID NO: 3369996 - RNA, 15 nt, Human
agaaaccuguaucuu

SEQ ID NO: 3369997 - RNA, 16 nt, Human
agaaaccuguaucuuu

SEQ ID NO: 3369998 - RNA, 17 nt, Human
agaaaccuuaauaugug

SEQ ID NO: 3369999 - RNA, 16 nt, Human
agaaaccuuauuguac

SEQ ID NO: 3370000 - RNA, 18 nt, Human
agaaaccuuauuguaccu

SEQ ID NO: 3370001 - RNA, 20 nt, Human
agaaacgaagccaucuuucu

SEQ ID NO: 3370002 - RNA, 20 nt, Human
agaaacgaucagacagaucu

SEQ ID NO: 3370003 - RNA, 18 nt, Human
agaaacgucuucuaaacu

SEQ ID NO: 3370004 - RNA, 20 nt, Human
agaaacguuuggaacaaucu

SEQ ID NO: 3370005 - RNA, 17 nt, Human
agaaacuaaaacaaaua

SEQ ID NO: 3370006 - RNA, 17 nt, Human
agaaacuaauugacuuu

SEQ ID NO: 3370007 - RNA, 19 nt, Human
agaaacucaaugcacaaca

SEQ ID NO: 3370008 - RNA, 15 nt, Human
agaaacucaccccca

SEQ ID NO: 3370009 - RNA, 15 nt, Human
agaaacuccaugaug

SEQ ID NO: 3370010 - RNA, 16 nt, Human
agaaacucuacauaau

SEQ ID NO: 3370011 - RNA, 15 nt, Human
agaaacugcagggaa

SEQ ID NO: 3370012 - RNA, 15 nt, Human
agaaacuggcaaagc

SEQ ID NO: 3370013 - RNA, 16 nt, Human
agaaacuggcaaagca

SEQ ID NO: 3370014 - RNA, 14 nt, Human
agaaacuguagucu

SEQ ID NO: 3370015 - RNA, 15 nt, Human
agaaacuguucccac

SEQ ID NO: 3370016 - RNA, 22 nt, Human
agaaacuguucccaccugcugg

SEQ ID NO: 3370017 - RNA, 17 nt, Human
agaaacuuaaauguuau

SEQ ID NO: 3370018 - RNA, 20 nt, Human
agaaacuuaaauguuauuau

SEQ ID NO: 3370019 - RNA, 23 nt, Human
agaaacuuaaauguuauuaucug

SEQ ID NO: 3370020 - RNA, 21 nt, Human
agaaacuuaaauuuuaguucu

SEQ ID NO: 3370021 - RNA, 16 nt, Human
agaaacuuaagcaaag

SEQ ID NO: 3370022 - RNA, 23 nt, Human
agaaacuuaagguuaccuuuguu

SEQ ID NO: 3370023 - RNA, 16 nt, Human
agaaacuuaucuuaca

SEQ ID NO: 3370024 - RNA, 18 nt, Human
agaaacuuaucuuacaaa

SEQ ID NO: 3370025 - RNA, 21 nt, Human
agaaacuuauuucucauauca

SEQ ID NO: 3370026 - RNA, 22 nt, Human
agaaacuuauuucucauaucaa

SEQ ID NO: 3370027 - RNA, 14 nt, Human
agaaacuuccaaau

SEQ ID NO: 3370028 - RNA, 19 nt, Human
agaaacuuccaaauccccu

SEQ ID NO: 3370029 - RNA, 13 nt, Human
agaaacuucgccu

SEQ ID NO: 3370030 - RNA, 15 nt, Human
agaaacuuuauacau

SEQ ID NO: 3370031 - RNA, 12 nt, Human
agaaacuuuauu

SEQ ID NO: 3370032 - RNA, 22 nt, Human
agaaacuuuuaucuauucugag

SEQ ID NO: 3370033 - RNA, 16 nt, Human
agaaacuuuuguaaag

SEQ ID NO: 3370034 - RNA, 20 nt, Human
agaaagaacggaagaagaga

SEQ ID NO: 3370035 - RNA, 21 nt, Human
agaaagaauguuacugccuua

SEQ ID NO: 3370036 - RNA, 18 nt, Human
agaaagacaucuuucucu

SEQ ID NO: 3370037 - RNA, 20 nt, Human
agaaagacuaucuaaauguu

SEQ ID NO: 3370038 - RNA, 20 nt, Human
agaaagacuauucaaacagu

SEQ ID NO: 3370039 - RNA, 12 nt, Human
agaaagacugag

SEQ ID NO: 3370040 - RNA, 11 nt, Human
agaaagagaga

SEQ ID NO: 3370041 - RNA, 15 nt, Human
agaaagagagaaaau

SEQ ID NO: 3370042 - RNA, 22 nt, Human
agaaagagcacuuaagagaaua

SEQ ID NO: 3370043 - RNA, 12 nt, Human
agaaagagcuac

SEQ ID NO: 3370044 - RNA, 15 nt, Human
agaaagagcuaccug

SEQ ID NO: 3370045 - RNA, 16 nt, Human
agaaagaggagugcuu

SEQ ID NO: 3370046 - RNA, 18 nt, Human
agaaagaucauugaaauu

SEQ ID NO: 3370047 - RNA, 19 nt, Human
agaaagcaucccucaccca

SEQ ID NO: 3370048 - RNA, 17 nt, Human
agaaagccccacccagg

SEQ ID NO: 3370049 - RNA, 21 nt, Human
agaaagccugggugacauuug

SEQ ID NO: 3370050 - RNA, 18 nt, Human
agaaagccuguuguuuaa

SEQ ID NO: 3370051 - RNA, 18 nt, Human
agaaacuuaagcaaaggg

SEQ ID NO: 3370052 - RNA, 14 nt, Human
agaaacuuguuaga

SEQ ID NO: 3370053 - RNA, 12 nt, Human
agaaacuuuugu

SEQ ID NO: 3370054 - RNA, 13 nt, Human
agaaacuuuugua

SEQ ID NO: 3370055 - RNA, 15 nt, Human
agaaacuuuuguaaa

SEQ ID NO: 3370056 - RNA, 22 nt, Human
agaaagaaacccgacagaggga

SEQ ID NO: 3370057 - RNA, 14 nt, Human
agaaagaacuaucu

SEQ ID NO: 3370058 - RNA, 22 nt, Human
agaaagaagacaaacuuugcau

SEQ ID NO: 3370059 - RNA, 14 nt, Human
agaaagaaggaagu

SEQ ID NO: 3370060 - RNA, 18 nt, Human
agaaagaaggaagugaag

SEQ ID NO: 3370061 - RNA, 22 nt, Human
agaaagaauuuaguauuaucaa

SEQ ID NO: 3370062 - RNA, 18 nt, Human
agaaagacagagcuggga

SEQ ID NO: 3370063 - RNA, 16 nt, Human
agaaagacuauucaaa

SEQ ID NO: 3370064 - RNA, 12 nt, Human
agaaagacuugg

SEQ ID NO: 3370065 - RNA, 10 nt, Human
agaaagagag

SEQ ID NO: 3370066 - RNA, 14 nt, Human
agaaagagagaaaa

SEQ ID NO: 3370067 - RNA, 18 nt, Human
agaaagagagaaaauaaa

SEQ ID NO: 3370068 - RNA, 19 nt, Human
agaaagagcacuuaagaga

SEQ ID NO: 3370069 - RNA, 22 nt, Human
agaaagaggcaccaggaagccg

SEQ ID NO: 3370070 - RNA, 20 nt, Human
agaaagaggugaccccaggg

SEQ ID NO: 3370071 - RNA, 21 nt, Human
agaaagaggugaccccagggc

SEQ ID NO: 3370072 - RNA, 23 nt, Human
agaaagaggugaccccagggcac

SEQ ID NO: 3370073 - RNA, 19 nt, Human
agaaagauggaugugcuuu

SEQ ID NO: 3370074 - RNA, 14 nt, Human
agaaagauguauau

SEQ ID NO: 3370075 - RNA, 20 nt, Human
agaaagauguauauaggugu

SEQ ID NO: 3370076 - RNA, 20 nt, Human
agaaagauuacuuagaggaa

SEQ ID NO: 3370077 - RNA, 17 nt, Human
agaaagcaaaauuaugu

SEQ ID NO: 3370078 - RNA, 17 nt, Human
agaaagcagaacaguga

SEQ ID NO: 3370079 - RNA, 14 nt, Human
agaaagcagagauu

SEQ ID NO: 3370080 - RNA, 14 nt, Human
agaaagcagaggcu

SEQ ID NO: 3370081 - RNA, 12 nt, Human
agaaagcagggg

SEQ ID NO: 3370082 - RNA, 14 nt, Human
agaaagcaggggcu

SEQ ID NO: 3370083 - RNA, 20 nt, Human
agaaagcaggggcuacaaga

SEQ ID NO: 3370084 - RNA, 14 nt, Human
agaaagcauaaaau

SEQ ID NO: 3370085 - RNA, 15 nt, Human
agaaagcauauugac

SEQ ID NO: 3370086 - RNA, 16 nt, Human
agaaagcauauugacu

SEQ ID NO: 3370087 - RNA, 17 nt, Human
agaaagcauauugacuu

SEQ ID NO: 3370088 - RNA, 22 nt, Human
agaaagcaucccucacccaucc

SEQ ID NO: 3370089 - RNA, 13 nt, Human
agaaagcauuuga

SEQ ID NO: 3370090 - RNA, 15 nt, Human
agaaagcauuugaau

SEQ ID NO: 3370091 - RNA, 17 nt, Human
agaaagcauuugaaugc

SEQ ID NO: 3370092 - RNA, 22 nt, Human
agaaagcauuugaaugcauuuu

SEQ ID NO: 3370093 - RNA, 21 nt, Human
agaaagccaaaucaaaauaug

SEQ ID NO: 3370094 - RNA, 20 nt, Human
agaaagcccuuaggaagaau

SEQ ID NO: 3370095 - RNA, 21 nt, Human
agaaagccucagagaauugcu

SEQ ID NO: 3370096 - RNA, 11 nt, Human
agaaagccuga

SEQ ID NO: 3370097 - RNA, 12 nt, Human
agaaagccugag

SEQ ID NO: 3370098 - RNA, 18 nt, Human
agaaagccugggugacau

SEQ ID NO: 3370099 - RNA, 20 nt, Human
agaaagccuguuccccucac

SEQ ID NO: 3370100 - RNA, 20 nt, Human
agaaagccuuucauuuugcu

SEQ ID NO: 3370101 - RNA, 21 nt, Human
agaaagcugacuuggcuggug

SEQ ID NO: 3370102 - RNA, 23 nt, Human
agaaagcugacuuggcuggugug

SEQ ID NO: 3370103 - RNA, 22 nt, Human
agaaagcugugaacaggcuggg

SEQ ID NO: 3370104 - RNA, 20 nt, Human
agaaagcuuuguugaaagaa

SEQ ID NO: 3370105 - RNA, 15 nt, Human
agaaaggaaaccuuu

SEQ ID NO: 3370106 - RNA, 15 nt, Human
agaaaggacucuggg

SEQ ID NO: 3370107 - RNA, 12 nt, Human
agaaaggagagu

SEQ ID NO: 3370108 - RNA, 20 nt, Human
agaaaggaggggauagagag

SEQ ID NO: 3370109 - RNA, 23 nt, Human
agaaaggaggggauagagagaga

SEQ ID NO: 3370110 - RNA, 14 nt, Human
agaaaggauauuua

SEQ ID NO: 3370111 - RNA, 18 nt, Human
agaaaggauauuuaagaa

SEQ ID NO: 3370112 - RNA, 14 nt, Human
agaaaggccuuuaa

SEQ ID NO: 3370113 - RNA, 19 nt, Human
agaaaggccuuuaaaauuu

SEQ ID NO: 3370114 - RNA, 17 nt, Human
agaaaggcucuauucca

SEQ ID NO: 3370115 - RNA, 22 nt, Human
agaaaggcuguuaaauacagga

SEQ ID NO: 3370116 - RNA, 20 nt, Human
agaaagggagggcucugagg

SEQ ID NO: 3370117 - RNA, 16 nt, Human
agaaagggcccugggc

SEQ ID NO: 3370118 - RNA, 20 nt, Human
agaaagggcccugggccugc

SEQ ID NO: 3370119 - RNA, 23 nt, Human
agaaaggggcaggagcucagaug

SEQ ID NO: 3370120 - RNA, 22 nt, Human
agaaaguacuucuccacccugc

SEQ ID NO: 3370121 - RNA, 15 nt, Human
agaaagugaauaaaa

SEQ ID NO: 3370122 - RNA, 16 nt, Human
agaaagugaauaaaaa

SEQ ID NO: 3370123 - RNA, 20 nt, Human
agaaagugaauaaaaauuaa

SEQ ID NO: 3370124 - RNA, 21 nt, Human
agaagggauggauuccaaccc

SEQ ID NO: 3370125 - RNA, 19 nt, Human
agaagggcauaaaacagcu

SEQ ID NO: 3370126 - RNA, 14 nt, Human
agaagggcuagaac

SEQ ID NO: 3370127 - RNA, 24 nt, Human
agaaggggcgggaauauuguuucu

SEQ ID NO: 3370128 - RNA, 13 nt, Human
agaaggggguggu

SEQ ID NO: 3370129 - RNA, 23 nt, Human
agaaggguccuucccucucccca

SEQ ID NO: 3370130 - RNA, 21 nt, Human
agaaggguuuuccacccugga

SEQ ID NO: 3370131 - RNA, 14 nt, Human
agaagguccuuaau

SEQ ID NO: 3370132 - RNA, 15 nt, Human
agaaggugccacuuu

SEQ ID NO: 3370133 - RNA, 21 nt, Human
agaaggugccucaagaauuuc

SEQ ID NO: 3370134 - RNA, 15 nt, Human
agaagguggaccuuu

SEQ ID NO: 3370135 - RNA, 18 nt, Human
agaagguggaccuuuuaa

SEQ ID NO: 3370136 - RNA, 22 nt, Human
agaaggugggaggaugugaauu

SEQ ID NO: 3370137 - RNA, 22 nt, Human
agaagguggguuuucaucaaga

SEQ ID NO: 3370138 - RNA, 18 nt, Human
agaagguuucagaaagaa

SEQ ID NO: 3370139 - RNA, 22 nt, Human
agaaguaaaagcaaaaaagaaa

SEQ ID NO: 3370140 - RNA, 13 nt, Human
agaaguagauuaa

SEQ ID NO: 3370141 - RNA, 17 nt, Human
agaaguaggcaugaggg

SEQ ID NO: 3370142 - RNA, 19 nt, Human
agaaguagggguggcccga

SEQ ID NO: 3370143 - RNA, 15 nt, Human
agaaguauaaagaau

SEQ ID NO: 3370144 - RNA, 20 nt, Human
agaaguauacguuuuucagu

SEQ ID NO: 3370145 - RNA, 21 nt, Human
agaaguauuuuuagaauaaga

SEQ ID NO: 3370146 - RNA, 14 nt, Human
agaagucaaaguaa

SEQ ID NO: 3370147 - RNA, 16 nt, Human
agaagucacagggcag

SEQ ID NO: 3370148 - RNA, 18 nt, Human
agaagucacauuccugaa

SEQ ID NO: 3370149 - RNA, 16 nt, Human
agaagucaucuugcua

SEQ ID NO: 3370150 - RNA, 19 nt, Human
agaaguccuguaugucugu

SEQ ID NO: 3370151 - RNA, 13 nt, Human
agaagucucagcu

SEQ ID NO: 3370152 - RNA, 15 nt, Human
agaagucuuagacuu

SEQ ID NO: 3370153 - RNA, 17 nt, Human
agaagucuuagauguau

SEQ ID NO: 3370154 - RNA, 19 nt, Human
agaagucuucaugaaaugc

SEQ ID NO: 3370155 - RNA, 19 nt, Human
agaagucuuucaagaauga

SEQ ID NO: 3370156 - RNA, 12 nt, Human
agaagugacagg

SEQ ID NO: 3370157 - RNA, 21 nt, Human
agaagugagaauaggcagccc

SEQ ID NO: 3370158 - RNA, 24 nt, Human
agaagugcauuucugaauagaaau

SEQ ID NO: 3370159 - RNA, 14 nt, Human
agaagugccccugc

SEQ ID NO: 3370160 - RNA, 19 nt, Human
agaagugccccugcugccu

SEQ ID NO: 3370161 - RNA, 17 nt, Human
agaagugcccuuccugc

SEQ ID NO: 3370162 - RNA, 19 nt, Human
agaaguggaccaggacagg

SEQ ID NO: 3370163 - RNA, 17 nt, Human
agaagugggccaggaca

SEQ ID NO: 3370164 - RNA, 19 nt, Human
agaagugggccaggacagg

SEQ ID NO: 3370165 - RNA, 15 nt, Human
agaagugucauguuu

SEQ ID NO: 3370166 - RNA, 19 nt, Human
agaaguguccgagaacuaa

SEQ ID NO: 3370167 - RNA, 19 nt, Human
agaaguuaagcaacaucua

SEQ ID NO: 3370168 - RNA, 18 nt, Human
agaaguuaguuuguauau

SEQ ID NO: 3370169 - RNA, 19 nt, Human
agaaguuaguuuguauaua

SEQ ID NO: 3370170 - RNA, 23 nt, Human
agaaguuauuuucuacagugguu

SEQ ID NO: 3370171 - RNA, 17 nt, Human
agaaguucauguccaaa

SEQ ID NO: 3370172 - RNA, 16 nt, Human
agaaguucuaguguuu

SEQ ID NO: 3370173 - RNA, 19 nt, Human
agaaguugauauagaacag

SEQ ID NO: 3370174 - RNA, 22 nt, Human
agaaguuggggacacauguauu

SEQ ID NO: 3370175 - RNA, 20 nt, Human
agaaguuguggauuucaguu

SEQ ID NO: 3370176 - RNA, 21 nt, Human
agaaguuguggauuucaguuu

SEQ ID NO: 3370177 - RNA, 16 nt, Human
agaaguuuaaggaaua

SEQ ID NO: 3370178 - RNA, 23 nt, Human
agaaguuucaucauuuuuuacuu

SEQ ID NO: 3370179 - RNA, 22 nt, Human
agaaguuucugccgcagcccug

SEQ ID NO: 3370180 - RNA, 13 nt, Human
agaaguuugcacu

SEQ ID NO: 3370181 - RNA, 21 nt, Human
agaaguuuggcugcugucaua

SEQ ID NO: 3370182 - RNA, 15 nt, Human
agaaguuugucaagu

SEQ ID NO: 3370183 - RNA, 13 nt, Human
agaaguuugucca

SEQ ID NO: 3370184 - RNA, 17 nt, Human
agaaguuuuaaauuuug

SEQ ID NO: 3370185 - RNA, 15 nt, Human
agaaguuuuuguacu

SEQ ID NO: 3370186 - RNA, 21 nt, Human
agaaguuuuuguacuguaaag

SEQ ID NO: 3370187 - RNA, 15 nt, Human
agaauaaaagguagu

SEQ ID NO: 3370188 - RNA, 14 nt, Human
agaauaaaauguug

SEQ ID NO: 3370189 - RNA, 14 nt, Human
agaauaaaauugua

SEQ ID NO: 3370190 - RNA, 17 nt, Human
agaauaaaauuuuuaau

SEQ ID NO: 3370191 - RNA, 13 nt, Human
agaauaaacauuu

SEQ ID NO: 3370192 - RNA, 11 nt, Human
agaauaaagca

SEQ ID NO: 3370193 - RNA, 15 nt, Human
agaauaaaggcagcu

SEQ ID NO: 3370194 - RNA, 20 nt, Human
agaauaaaggcaguuuucua

SEQ ID NO: 3370195 - RNA, 21 nt, Human
agaauguguuuaaacuugguu

SEQ ID NO: 3370196 - RNA, 22 nt, Human
agaauguguuucaaacuguaaa

SEQ ID NO: 3370197 - RNA, 17 nt, Human
agaauguguuuucugaa

SEQ ID NO: 3370198 - RNA, 21 nt, Human
agaauguuaagacuugacagu

SEQ ID NO: 3370199 - RNA, 18 nt, Human
agaauguuagagcacagu

SEQ ID NO: 3370200 - RNA, 16 nt, Human
agaauguuagaguaau

SEQ ID NO: 3370201 - RNA, 19 nt, Human
agaauguuauagugaauua

SEQ ID NO: 3370202 - RNA, 22 nt, Human
agaauguuauagugaauuaucc

SEQ ID NO: 3370203 - RNA, 23 nt, Human
agaauguugaaacugacuugcug

SEQ ID NO: 3370204 - RNA, 17 nt, Human
agaauguugguuuacuu

SEQ ID NO: 3370205 - RNA, 19 nt, Human
agaauguugguuuacuuuc

SEQ ID NO: 3370206 - RNA, 23 nt, Human
agaauguugguuuacuuucaaau

SEQ ID NO: 3370207 - RNA, 19 nt, Human
agaauguuguauucaguga

SEQ ID NO: 3370208 - RNA, 18 nt, Human
agaauguuuuacugugaa

SEQ ID NO: 3370209 - RNA, 15 nt, Human
agaauguuuucaaau

SEQ ID NO: 3370210 - RNA, 16 nt, Human
agaauguuuuccuucu

SEQ ID NO: 3370211 - RNA, 17 nt, Human
agaauuaaaaaugaaau

SEQ ID NO: 3370212 - RNA, 14 nt, Human
agaauuaaacuuuu

SEQ ID NO: 3370213 - RNA, 15 nt, Human
agaauuaacacauga

SEQ ID NO: 3370214 - RNA, 18 nt, Human
agaauuaccauuuguuaa

SEQ ID NO: 3370215 - RNA, 22 nt, Human
agaauuaccauuuguuaauauc

SEQ ID NO: 3370216 - RNA, 13 nt, Human
agaauuacuguaa

SEQ ID NO: 3370217 - RNA, 11 nt, Human
agaauuagcuu

SEQ ID NO: 3370218 - RNA, 17 nt, Human
agaauuagugccagaau

SEQ ID NO: 3370219 - RNA, 20 nt, Human
agaauuauaauuaguuccuc

SEQ ID NO: 3370220 - RNA, 20 nt, Human
agaauuaucuaauuuauaaa

SEQ ID NO: 3370221 - RNA, 13 nt, Human
agaauuauuuugu

SEQ ID NO: 3370222 - RNA, 14 nt, Human
agaauuauuuuuca

SEQ ID NO: 3370223 - RNA, 12 nt, Human
agaauuccuuca

SEQ ID NO: 3370224 - RNA, 18 nt, Human
agaauuccuucaggguga

SEQ ID NO: 3370225 - RNA, 20 nt, Human
agaauuccuucagggugaug

SEQ ID NO: 3370226 - RNA, 14 nt, Human
agaauucuagugcu

SEQ ID NO: 3370227 - RNA, 19 nt, Human
agaauucuccaaaacaauu

SEQ ID NO: 3370228 - RNA, 17 nt, Human
agaauucucuuauccaa

SEQ ID NO: 3370229 - RNA, 12 nt, Human
agaauucuguau

SEQ ID NO: 3370230 - RNA, 14 nt, Human
agaauucuguauag

SEQ ID NO: 3370231 - RNA, 16 nt, Human
agaauucuuacauguu

SEQ ID NO: 3370232 - RNA, 16 nt, Human
agaauugaaaaguuuu

SEQ ID NO: 3370233 - RNA, 17 nt, Human
agaauugaaaaguuuuu

SEQ ID NO: 3370234 - RNA, 17 nt, Human
agaauugaacccaggag

SEQ ID NO: 3370235 - RNA, 19 nt, Human
agaauugaacccaggaggu

SEQ ID NO: 3370236 - RNA, 12 nt, Human
agaauugaaggu

SEQ ID NO: 3370237 - RNA, 18 nt, Human
agaauugacauugaaauc

SEQ ID NO: 3370238 - RNA, 19 nt, Human
agaauugacauugaaaucu

SEQ ID NO: 3370239 - RNA, 17 nt, Human
agaauugaguaauggug

SEQ ID NO: 3370240 - RNA, 14 nt, Human
agaauugaguguuu

SEQ ID NO: 3370241 - RNA, 24 nt, Human
agaauugauugggcacaucauuuc

SEQ ID NO: 3370242 - RNA, 21 nt, Human
agaauugauuucccuucuucu

SEQ ID NO: 3370243 - RNA, 17 nt, Human
agaauugcaaucuauaa

SEQ ID NO: 3370244 - RNA, 20 nt, Human
agaauugcaaucuauaauau

SEQ ID NO: 3370245 - RNA, 20 nt, Human
agaauugcaauuuuaacaca

SEQ ID NO: 3370246 - RNA, 23 nt, Human
agaauugcugaagggcauucuuu

SEQ ID NO: 3370247 - RNA, 16 nt, Human
agaauuggcucaauaa

SEQ ID NO: 3370248 - RNA, 18 nt, Human
agaauuggcugaacucau

SEQ ID NO: 3370249 - RNA, 13 nt, Human
agaauugggcggc

SEQ ID NO: 3370250 - RNA, 20 nt, Human
agaauugucuuucugucucu

SEQ ID NO: 3370251 - RNA, 12 nt, Human
agaauugugguu

SEQ ID NO: 3370252 - RNA, 23 nt, Human
agaauugugguuuauauauuuaa

SEQ ID NO: 3370253 - RNA, 19 nt, Human
agaauugugucagacuguu

SEQ ID NO: 3370254 - RNA, 20 nt, Human
agaauugugucagacuguuu

SEQ ID NO: 3370255 - RNA, 23 nt, Human
agaauugugucagacuguuuagu

SEQ ID NO: 3370256 - RNA, 16 nt, Human
agaauugugucugcag

SEQ ID NO: 3370257 - RNA, 17 nt, Human
agaauugugucugcagg

SEQ ID NO: 3370258 - RNA, 23 nt, Human
agaauuguuggggguuuuuuugg

SEQ ID NO: 3370259 - RNA, 14 nt, Human
agaauuguuuagau

SEQ ID NO: 3370260 - RNA, 21 nt, Human
agaauuuaaagaaaaaaaugu

SEQ ID NO: 3370261 - RNA, 22 nt, Human
agaauuuagggagaaauguugu

SEQ ID NO: 3370262 - RNA, 21 nt, Human
agaauuuauucaauuccucug

SEQ ID NO: 3370263 - RNA, 20 nt, Human
agaauuucaauuuguucagu

SEQ ID NO: 3370264 - RNA, 20 nt, Human
agaauuucuaccauuucaga

SEQ ID NO: 3370265 - RNA, 19 nt, Human
agaauuugaagacuucaaa

SEQ ID NO: 3370266 - RNA, 21 nt, Human
agaauuugaagacuucaaaau

SEQ ID NO: 3370267 - RNA, 14 nt, Human
agaauuugaauuau

SEQ ID NO: 3370268 - RNA, 17 nt, Human
agaauuugagugcucug

SEQ ID NO: 3370269 - RNA, 19 nt, Human
agaauuugauaugugaaca

SEQ ID NO: 3370270 - RNA, 12 nt, Human
agaauuugcaua

SEQ ID NO: 3370271 - RNA, 16 nt, Human
agaauuugucacagga

SEQ ID NO: 3370272 - RNA, 21 nt, Human
agaauuuguguugaaggaacu

SEQ ID NO: 3370273 - RNA, 19 nt, Human
agaauuuuaaaaaugaauc

SEQ ID NO: 3370274 - RNA, 21 nt, Human
agaauuuuaaaaaugaauccu

SEQ ID NO: 3370275 - RNA, 13 nt, Human
agaauuuuaaauu

SEQ ID NO: 3370276 - RNA, 14 nt, Human
agaauuuuaagccu

SEQ ID NO: 3370277 - RNA, 22 nt, Human
agaauuuuaagccuuuguugaa

SEQ ID NO: 3370278 - RNA, 21 nt, Human
agaauuuuaagugcuuuguaa

SEQ ID NO: 3370279 - RNA, 14 nt, Human
agaauuuuaggaac

SEQ ID NO: 3370280 - RNA, 20 nt, Human
agaauuuuaggaacuucaga

SEQ ID NO: 3370281 - RNA, 20 nt, Human
agaauuuuauacuuucccua

SEQ ID NO: 3370282 - RNA, 15 nt, Human
agaauuuugagcagg

SEQ ID NO: 3370283 - RNA, 21 nt, Human
agaacagggucauguuugcag

SEQ ID NO: 3370284 - RNA, 18 nt, Human
agaacagguuuuuuuguu

SEQ ID NO: 3370285 - RNA, 14 nt, Human
agaacagugauuuu

SEQ ID NO: 3370286 - RNA, 18 nt, Human
agaacaguggaaacuaug

SEQ ID NO: 3370287 - RNA, 21 nt, Human
agaacaguuaagcagccgcca

SEQ ID NO: 3370288 - RNA, 17 nt, Human
agaacaguuuguacaga

SEQ ID NO: 3370289 - RNA, 17 nt, Human
agaacauaaagcaaaua

SEQ ID NO: 3370290 - RNA, 16 nt, Human
agaacaucauuagaac

SEQ ID NO: 3370291 - RNA, 20 nt, Human
agaacaucuguauacccucu

SEQ ID NO: 3370292 - RNA, 14 nt, Human
agaacaugaaucaa

SEQ ID NO: 3370293 - RNA, 17 nt, Human
agaacaugaaucaaaag

SEQ ID NO: 3370294 - RNA, 13 nt, Human
agaacaugcaguu

SEQ ID NO: 3370295 - RNA, 16 nt, Human
agaacauggacuugua

SEQ ID NO: 3370296 - RNA, 19 nt, Human
agaacauguagaaaacaaa

SEQ ID NO: 3370297 - RNA, 18 nt, Human
agaacauugauugcugug

SEQ ID NO: 3370298 - RNA, 17 nt, Human
agaaccaaaaagaggcu

SEQ ID NO: 3370299 - RNA, 18 nt, Human
agaaccaaaaguuuuccu

SEQ ID NO: 3370300 - RNA, 22 nt, Human
agaaccacagggcuauuuuguu

SEQ ID NO: 3370301 - RNA, 17 nt, Human
agaaccaggcaacuugg

SEQ ID NO: 3370302 - RNA, 19 nt, Human
agaaccaguccccccaccc

SEQ ID NO: 3370303 - RNA, 17 nt, Human
agaacccagcccacccc

SEQ ID NO: 3370304 - RNA, 18 nt, Human
agaacccagcccaccccc

SEQ ID NO: 3370305 - RNA, 23 nt, Human
agaaccccaggguccuguagccc

SEQ ID NO: 3370306 - RNA, 17 nt, Human
agaaccccuacaugaaa

SEQ ID NO: 3370307 - RNA, 19 nt, Human
agaaccccuacaugaaaca

SEQ ID NO: 3370308 - RNA, 20 nt, Human
agaacccuggugaggaagcu

SEQ ID NO: 3370309 - RNA, 22 nt, Human
agaacccuggugaggaagcucc

SEQ ID NO: 3370310 - RNA, 15 nt, Human
agaaccgagcaaaga

SEQ ID NO: 3370311 - RNA, 18 nt, Human
agaaccggagagccagcu

SEQ ID NO: 3370312 - RNA, 15 nt, Human
agaaccuaauucaau

SEQ ID NO: 3370313 - RNA, 18 nt, Human
agaaccucacgcaccucc

SEQ ID NO: 3370314 - RNA, 21 nt, Human
agaaccucacgcaccucccau

SEQ ID NO: 3370315 - RNA, 22 nt, Human
agaaccucacgcaccucccauc

SEQ ID NO: 3370316 - RNA, 12 nt, Human
agaaccucaggc

SEQ ID NO: 3370317 - RNA, 21 nt, Human
agaaccucaggcuuccuuggc

SEQ ID NO: 3370318 - RNA, 15 nt, Human
agaaccucuucccca

SEQ ID NO: 3370319 - RNA, 21 nt, Human
agaaccuggaaaaauuccaga

SEQ ID NO: 3370320 - RNA, 20 nt, Human
agaaccuggaacuuggggag

SEQ ID NO: 3370321 - RNA, 17 nt, Human
agaaccuggagagcuag

SEQ ID NO: 3370322 - RNA, 23 nt, Human
agaaccuggagggcuagaacugg

SEQ ID NO: 3370323 - RNA, 18 nt, Human
agaaccuggaguuccuga

SEQ ID NO: 3370324 - RNA, 12 nt, Human
agaaccuguccu

SEQ ID NO: 3370325 - RNA, 18 nt, Human
agaaccuucucuaugggg

SEQ ID NO: 3370326 - RNA, 14 nt, Human
agaaccuugccuga

SEQ ID NO: 3370327 - RNA, 22 nt, Human
agaaccuugccugaacauccuu

SEQ ID NO: 3370328 - RNA, 22 nt, Human
agaaccuugugccuggcucaga

SEQ ID NO: 3370329 - RNA, 19 nt, Human
agaaccuuuugagugccuu

SEQ ID NO: 3370330 - RNA, 18 nt, Human
agaacgaggauuuuaauu

SEQ ID NO: 3370331 - RNA, 13 nt, Human
agaacgcagcccu

SEQ ID NO: 3370332 - RNA, 23 nt, Human
agaacgcagcccuagagccugcc

SEQ ID NO: 3370333 - RNA, 16 nt, Human
agaacgcugauuuaaa

SEQ ID NO: 3370334 - RNA, 21 nt, Human
agaacggggcucuucucauuu

SEQ ID NO: 3370335 - RNA, 23 nt, Human
agaacguauuuuaaaagccacau

SEQ ID NO: 3370336 - RNA, 16 nt, Human
agaacuaaacucauuu

SEQ ID NO: 3370337 - RNA, 22 nt, Human
agaacuaacacuauuuuaugca

SEQ ID NO: 3370338 - RNA, 16 nt, Human
agacuggauaguccgu

SEQ ID NO: 3370339 - RNA, 11 nt, Human
accuuuucagg

SEQ ID NO: 3370340 - RNA, 11 nt, Human
accuuuucucu

SEQ ID NO: 3370341 - RNA, 12 nt, Human
accuuuucuugc

SEQ ID NO: 3370342 - RNA, 14 nt, Human
accuuuucuugccu

SEQ ID NO: 3370343 - RNA, 17 nt, Human
accuuuucuuguaucug

SEQ ID NO: 3370344 - RNA, 19 nt, Human
accuuuugaaguaguuugu

SEQ ID NO: 3370345 - RNA, 14 nt, Human
accuuuugagugcc

SEQ ID NO: 3370346 - RNA, 20 nt, Human
accuuuugagugccuuacac

SEQ ID NO: 3370347 - RNA, 16 nt, Human
accuuuugggaauguu

SEQ ID NO: 3370348 - RNA, 20 nt, Human
accuuuuggucuggagggaa

SEQ ID NO: 3370349 - RNA, 14 nt, Human
accuuuuguuuucu

SEQ ID NO: 3370350 - RNA, 14 nt, Human
accuuuuuaucucc

SEQ ID NO: 3370351 - RNA, 19 nt, Human
accuuuuuauuugcaugug

SEQ ID NO: 3370352 - RNA, 18 nt, Human
accuuuuuucaacaguga

SEQ ID NO: 3370353 - RNA, 23 nt, Human
accuuuuuucaacagugaagaca

SEQ ID NO: 3370354 - RNA, 18 nt, Human
acgaaacuuguuauugug

SEQ ID NO: 3370355 - RNA, 19 nt, Human
acgaaacuuguuauuguga

SEQ ID NO: 3370356 - RNA, 14 nt, Human
acgaaagaaaugua

SEQ ID NO: 3370357 - RNA, 13 nt, Human
acgaaagaaggca

SEQ ID NO: 3370358 - RNA, 17 nt, Human
acgaaauaucaaaguca

SEQ ID NO: 3370359 - RNA, 12 nt, Human
acgaaauguuau

SEQ ID NO: 3370360 - RNA, 18 nt, Human
acgaaccuuggccugggc

SEQ ID NO: 3370361 - RNA, 14 nt, Human
acgaacuuccaugg

SEQ ID NO: 3370362 - RNA, 17 nt, Human
acgaagccaucuuucuu

SEQ ID NO: 3370363 - RNA, 17 nt, Human
acgaagggaaaugucuu

SEQ ID NO: 3370364 - RNA, 18 nt, Human
acgaauauggacauauca

SEQ ID NO: 3370365 - RNA, 18 nt, Human
acgaauauugcugauggu

SEQ ID NO: 3370366 - RNA, 22 nt, Human
acgaauuucugugcccuccuga

SEQ ID NO: 3370367 - RNA, 14 nt, Human
acgacacugcagcc

SEQ ID NO: 3370368 - RNA, 13 nt, Human
acgacgcccucuc

SEQ ID NO: 3370369 - RNA, 16 nt, Human
acgacgcccucucccc

SEQ ID NO: 3370370 - RNA, 23 nt, Human
acgacucuuuuccaaacacaggc

SEQ ID NO: 3370371 - RNA, 14 nt, Human
acgacuucagggca

SEQ ID NO: 3370372 - RNA, 15 nt, Human
acgagaaagaucauu

SEQ ID NO: 3370373 - RNA, 19 nt, Human
acgagacccuacaggagag

SEQ ID NO: 3370374 - RNA, 19 nt, Human
acgagcaccuccagccuga

SEQ ID NO: 3370375 - RNA, 20 nt, Human
acgaggaaucugugggucug

SEQ ID NO: 3370376 - RNA, 20 nt, Human
acgaggcccucgggcccagc

SEQ ID NO: 3370377 - RNA, 21 nt, Human
acgaggcccucgggcccagcc

SEQ ID NO: 3370378 - RNA, 23 nt, Human
acgaggcccucgggcccagcccc

SEQ ID NO: 3370379 - RNA, 11 nt, Human
acgagggcugg

SEQ ID NO: 3370380 - RNA, 20 nt, Human
acgaggggugucuugggcag

SEQ ID NO: 3370381 - RNA, 21 nt, Human
acgaggggugucuugggcaga

SEQ ID NO: 3370382 - RNA, 18 nt, Human
acgaucacaaaugacuuu

SEQ ID NO: 3370383 - RNA, 15 nt, Human
acgauccuucaaagu

SEQ ID NO: 3370384 - RNA, 16 nt, Human
acgauccuucaaaguc

SEQ ID NO: 3370385 - RNA, 14 nt, Human
acgaugacaguguu

SEQ ID NO: 3370386 - RNA, 13 nt, Human
acgaugucuucau

SEQ ID NO: 3370387 - RNA, 21 nt, Human
acgauguggaaaaaugagaga

SEQ ID NO: 3370388 - RNA, 14 nt, Human
acgauguggcccug

SEQ ID NO: 3370389 - RNA, 17 nt, Human
acgauguggcccuggcc

SEQ ID NO: 3370390 - RNA, 22 nt, Human
acgauguggcccuggccugcug

SEQ ID NO: 3370391 - RNA, 23 nt, Human
acgaugugucuguauuucaugug

SEQ ID NO: 3370392 - RNA, 12 nt, Human
acgauuuaaggu

SEQ ID NO: 3370393 - RNA, 17 nt, Human
acgauuuaauucucuug

SEQ ID NO: 3370394 - RNA, 13 nt, Human
acgauuuaauuua

SEQ ID NO: 3370395 - RNA, 12 nt, Human
acgauuucuguu

SEQ ID NO: 3370396 - RNA, 19 nt, Human
acgauuucuguuuagauaa

SEQ ID NO: 3370397 - RNA, 18 nt, Human
acgauuuucuccagcuca

SEQ ID NO: 3370398 - RNA, 18 nt, Human
acgcaaacuuugagccuu

SEQ ID NO: 3370399 - RNA, 15 nt, Human
acgcaaguucccagu

SEQ ID NO: 3370400 - RNA, 13 nt, Human
acgcacacacaca

SEQ ID NO: 3370401 - RNA, 18 nt, Human
acgcacacacacacacag

SEQ ID NO: 3370402 - RNA, 21 nt, Human
acgcacacacacacacaggag

SEQ ID NO: 3370403 - RNA, 22 nt, Human
acgcacacguacuuaaaugaaa

SEQ ID NO: 3370404 - RNA, 13 nt, Human
acgcacagacagg

SEQ ID NO: 3370405 - RNA, 21 nt, Human
acgcacagacagguuuucaca

SEQ ID NO: 3370406 - RNA, 15 nt, Human
acgcaccucccaucc

SEQ ID NO: 3370407 - RNA, 16 nt, Human
acgcaccugccucagg

SEQ ID NO: 3370408 - RNA, 17 nt, Human
acgcaccugccucagga

SEQ ID NO: 3370409 - RNA, 15 nt, Human
acgcacgcacacaca

SEQ ID NO: 3370410 - RNA, 17 nt, Human
acgcacggcagccacag

SEQ ID NO: 3370411 - RNA, 21 nt, Human
acgcacuccaugagcacccca

SEQ ID NO: 3370412 - RNA, 15 nt, Human
acgcagaugauccau

SEQ ID NO: 3370413 - RNA, 21 nt, Human
acgcagcaggaggccaggccg

SEQ ID NO: 3370414 - RNA, 14 nt, Human
acgcagccaggaca

SEQ ID NO: 3370415 - RNA, 18 nt, Human
acgcagcccuagagccug

SEQ ID NO: 3370416 - RNA, 22 nt, Human
acgcagcccugcuuugggcugc

SEQ ID NO: 3370417 - RNA, 17 nt, Human
acgcaggaacucccagc

SEQ ID NO: 3370418 - RNA, 14 nt, Human
acgcauccagcaag

SEQ ID NO: 3370419 - RNA, 21 nt, Human
acgcaugcaguguuggggaug

SEQ ID NO: 3370420 - RNA, 22 nt, Human
acgcauggaguguguauuguuc

SEQ ID NO: 3370421 - RNA, 15 nt, Human
acgccacauccccca

SEQ ID NO: 3370422 - RNA, 12 nt, Human
acgccacccagc

SEQ ID NO: 3370423 - RNA, 12 nt, Human
acgccacucauu

SEQ ID NO: 3370424 - RNA, 22 nt, Human
acgccacugcacuccagccugg

SEQ ID NO: 3370425 - RNA, 23 nt, Human
acgccacugcacuccagccuggg

SEQ ID NO: 3370426 - RNA, 22 nt, Human
acgccagacuucccacggcucc

SEQ ID NO: 3370427 - RNA, 17 nt, Human
acgccagauucuuuccu

SEQ ID NO: 3370428 - RNA, 19 nt, Human
acgccagauucuuuccuga

SEQ ID NO: 3370429 - RNA, 19 nt, Human
acgccaugugauggacacu

SEQ ID NO: 3370430 - RNA, 16 nt, Human
acgcccaacccuuccc

SEQ ID NO: 3370431 - RNA, 13 nt, Human
acgcccacuuccc

SEQ ID NO: 3370432 - RNA, 15 nt, Human
acgcccaggacccca

SEQ ID NO: 3370433 - RNA, 14 nt, Human
acgcccauguguga

SEQ ID NO: 3370434 - RNA, 16 nt, Human
acgcccccccccaccc

SEQ ID NO: 3370435 - RNA, 19 nt, Human
acgcccguccugccugugg

SEQ ID NO: 3370436 - RNA, 12 nt, Human
acgcccuccccu

SEQ ID NO: 3370437 - RNA, 15 nt, Human
acgcccuccccuccc

SEQ ID NO: 3370438 - RNA, 21 nt, Human
acgcccucuaucauggugaaa

SEQ ID NO: 3370439 - RNA, 21 nt, Human
acgcccucuccccaccccuac

SEQ ID NO: 3370440 - RNA, 21 nt, Human
acgccggggacagaggccugc

SEQ ID NO: 3370441 - RNA, 22 nt, Human
acgccucacugaaacauggcug

SEQ ID NO: 3370442 - RNA, 18 nt, Human
acgccucuucugucccug

SEQ ID NO: 3370443 - RNA, 23 nt, Human
acgccucuucugucccuguuaga

SEQ ID NO: 3370444 - RNA, 24 nt, Human
acgccucuugaccaggcugccucc

SEQ ID NO: 3370445 - RNA, 12 nt, Human
acgccugagccc

SEQ ID NO: 3370446 - RNA, 20 nt, Human
acgccugagcccagggaggc

SEQ ID NO: 3370447 - RNA, 20 nt, Human
acgccugcaaacgcugccug

SEQ ID NO: 3370448 - RNA, 21 nt, Human
acgccugcaaacgcugccugc

SEQ ID NO: 3370449 - RNA, 12 nt, Human
acgccugccucc

SEQ ID NO: 3370450 - RNA, 12 nt, Human
acgccugccuuu

SEQ ID NO: 3370451 - RNA, 17 nt, Human
acgccuggcugcugauc

SEQ ID NO: 3370452 - RNA, 18 nt, Human
acgccugggggugccagg

SEQ ID NO: 3370453 - RNA, 19 nt, Human
acgccuguaaucccagcac

SEQ ID NO: 3370454 - RNA, 21 nt, Human
acgccuguaaucccagcacuu

SEQ ID NO: 3370455 - RNA, 13 nt, Human
acgcgcagaugug

SEQ ID NO: 3370456 - RNA, 20 nt, Human
acgcgcagaugugcagcaga

SEQ ID NO: 3370457 - RNA, 15 nt, Human
acgcgccccccuccc

SEQ ID NO: 3370458 - RNA, 16 nt, Human
acgcgcgucgccgcca

SEQ ID NO: 3370459 - RNA, 12 nt, Human
acgcggccgaga

SEQ ID NO: 3370460 - RNA, 24 nt, Human
acgcggcucccggggcagggcagc

SEQ ID NO: 3370461 - RNA, 12 nt, Human
acgcgucuccug

SEQ ID NO: 3370462 - RNA, 18 nt, Human
acgcguugaaauuguaau

SEQ ID NO: 3370463 - RNA, 17 nt, Human
acgcuaaagagcccuug

SEQ ID NO: 3370464 - RNA, 20 nt, Human
acgcuaaagagcccuugccu

SEQ ID NO: 3370465 - RNA, 17 nt, Human
acgcuacccgggaaggg

SEQ ID NO: 3370466 - RNA, 15 nt, Human
acgcuaccucucugu

SEQ ID NO: 3370467 - RNA, 19 nt, Human
acgcuacuauaaagagaag

SEQ ID NO: 3370468 - RNA, 13 nt, Human
acgcucagugggg

SEQ ID NO: 3370469 - RNA, 22 nt, Human
acgcuccccgccuguucccccg

SEQ ID NO: 3370470 - RNA, 13 nt, Human
acgcuccgcugcc

SEQ ID NO: 3370471 - RNA, 23 nt, Human
acgcuccucccucugaggcugua

SEQ ID NO: 3370472 - RNA, 22 nt, Human
acgcucuaaggcaggauguggc

SEQ ID NO: 3370473 - RNA, 22 nt, Human
acgcucuccuuucuuucuaacu

SEQ ID NO: 3370474 - RNA, 15 nt, Human
acgcucucuacucug

SEQ ID NO: 3370475 - RNA, 15 nt, Human
acgcugaccguggag

SEQ ID NO: 3370476 - RNA, 16 nt, Human
acgcugacuacagggc

SEQ ID NO: 3370477 - RNA, 18 nt, Human
acgcugacuacagggccg

SEQ ID NO: 3370478 - RNA, 17 nt, Human
acgcugagccaccugcc

SEQ ID NO: 3370479 - RNA, 13 nt, Human
acgcugccugccc

SEQ ID NO: 3370480 - RNA, 13 nt, Human
acgcugcucugcc

SEQ ID NO: 3370481 - RNA, 20 nt, Human
acgcuggaccuugaacuggg

SEQ ID NO: 3370482 - RNA, 18 nt, Human
acgcuggcuccccaaagg

SEQ ID NO: 3370483 - RNA, 15 nt, Human
acgugggcggcagag

SEQ ID NO: 3370484 - RNA, 17 nt, Human
acgugggcuccccucuu

SEQ ID NO: 3370485 - RNA, 15 nt, Human
acguggggcagcaca

SEQ ID NO: 3370486 - RNA, 18 nt, Human
acgugguuggggcccugc

SEQ ID NO: 3370487 - RNA, 18 nt, Human
acguguacuacaauuuaa

SEQ ID NO: 3370488 - RNA, 13 nt, Human
acgugucuuccac

SEQ ID NO: 3370489 - RNA, 16 nt, Human
acgugugcaugugucu

SEQ ID NO: 3370490 - RNA, 16 nt, Human
acguguggaccccugc

SEQ ID NO: 3370491 - RNA, 11 nt, Human
acgugugugac

SEQ ID NO: 3370492 - RNA, 16 nt, Human
acgugugugacucaga

SEQ ID NO: 3370493 - RNA, 23 nt, Human
acgugugugacucagaugucucu

SEQ ID NO: 3370494 - RNA, 16 nt, Human
acguguguuuuucuau

SEQ ID NO: 3370495 - RNA, 18 nt, Human
acguguguuuuucuauua

SEQ ID NO: 3370496 - RNA, 22 nt, Human
acguguguuuuucuauuaaaag

SEQ ID NO: 3370497 - RNA, 16 nt, Human
acguguuugugcugug

SEQ ID NO: 3370498 - RNA, 15 nt, Human
acguuaccaggcagg

SEQ ID NO: 3370499 - RNA, 23 nt, Human
acguuacucagggcuccucccag

SEQ ID NO: 3370500 - RNA, 16 nt, Human
acguuagucgugagcu

SEQ ID NO: 3370501 - RNA, 22 nt, Human
acguuagucgugagcucuugug

SEQ ID NO: 3370502 - RNA, 13 nt, Human
acguucaccccuc

SEQ ID NO: 3370503 - RNA, 16 nt, Human
agagaauguuccagac

SEQ ID NO: 3370504 - RNA, 23 nt, Human
agagaauuucuaccauuucagag

SEQ ID NO: 3370505 - RNA, 12 nt, Human
agagacaaagcu

SEQ ID NO: 3370506 - RNA, 17 nt, Human
agagacacacugaagaa

SEQ ID NO: 3370507 - RNA, 16 nt, Human
agagacaccugcaccu

SEQ ID NO: 3370508 - RNA, 13 nt, Human
agagacagaagca

SEQ ID NO: 3370509 - RNA, 17 nt, Human
agagacagaagcaggcu

SEQ ID NO: 3370510 - RNA, 23 nt, Human
agagacagaagcaggcuggaggu

SEQ ID NO: 3370511 - RNA, 15 nt, Human
agagacagcccagga

SEQ ID NO: 3370512 - RNA, 18 nt, Human
agagacagcccaggauac

SEQ ID NO: 3370513 - RNA, 13 nt, Human
agagacaggaaaa

SEQ ID NO: 3370514 - RNA, 13 nt, Human
agagacaggcagg

SEQ ID NO: 3370515 - RNA, 15 nt, Human
agagacaggcccaag

SEQ ID NO: 3370516 - RNA, 18 nt, Human
agagacaggcccaagaga

SEQ ID NO: 3370517 - RNA, 20 nt, Human
agagacaggcccaagagaug

SEQ ID NO: 3370518 - RNA, 22 nt, Human
agagacaguugggugagaacaa

SEQ ID NO: 3370519 - RNA, 23 nt, Human
agagacaguugggugagaacaac

SEQ ID NO: 3370520 - RNA, 22 nt, Human
agagacauacuugaagggccag

SEQ ID NO: 3370521 - RNA, 15 nt, Human
agagacaucagcccu

SEQ ID NO: 3370522 - RNA, 18 nt, Human
agagacauuaacucauua

SEQ ID NO: 3370523 - RNA, 22 nt, Human
agagacauuaacucauuagacu

SEQ ID NO: 3370524 - RNA, 13 nt, Human
agagaccagggcu

SEQ ID NO: 3370525 - RNA, 14 nt, Human
agagaccaucccug

SEQ ID NO: 3370526 - RNA, 18 nt, Human
agagaccaucccugaagg

SEQ ID NO: 3370527 - RNA, 12 nt, Human
agagacccaagg

SEQ ID NO: 3370528 - RNA, 16 nt, Human
agagacccaaggagga

SEQ ID NO: 3370529 - RNA, 21 nt, Human
agagacccccggaacaagccu

SEQ ID NO: 3370530 - RNA, 19 nt, Human
agagacccuucaaacuugg

SEQ ID NO: 3370531 - RNA, 17 nt, Human
agagacccuuguuugau

SEQ ID NO: 3370532 - RNA, 16 nt, Human
agagaccuaccucagg

SEQ ID NO: 3370533 - RNA, 18 nt, Human
agagaccuaccucagguu

SEQ ID NO: 3370534 - RNA, 15 nt, Human
agagaccugaagugu

SEQ ID NO: 3370535 - RNA, 15 nt, Human
agagacgguguuuug

SEQ ID NO: 3370536 - RNA, 18 nt, Human
agagacuauggagccugg

SEQ ID NO: 3370537 - RNA, 20 nt, Human
agagacucagggccccagca

SEQ ID NO: 3370538 - RNA, 20 nt, Human
agagacucccaugaagccuu

SEQ ID NO: 3370539 - RNA, 22 nt, Human
agagacucccaugaagccuuuu

SEQ ID NO: 3370540 - RNA, 12 nt, Human
agagacuccugc

SEQ ID NO: 3370541 - RNA, 14 nt, Human
agagacuccugcag

SEQ ID NO: 3370542 - RNA, 18 nt, Human
agagacuccugcaggcag

SEQ ID NO: 3370543 - RNA, 20 nt, Human
agagacuccugcaggcagcc

SEQ ID NO: 3370544 - RNA, 21 nt, Human
agagacuccugcaggcagcca

SEQ ID NO: 3370545 - RNA, 22 nt, Human
agagacuccuugagagaccagg

SEQ ID NO: 3370546 - RNA, 14 nt, Human
agagacugaaauua

SEQ ID NO: 3370547 - RNA, 14 nt, Human
agagacuguagauu

SEQ ID NO: 3370548 - RNA, 12 nt, Human
agagacuuguuu

SEQ ID NO: 3370549 - RNA, 16 nt, Human
agagacuuguuuugga

SEQ ID NO: 3370550 - RNA, 16 nt, Human
agagacuuuuaaucag

SEQ ID NO: 3370551 - RNA, 13 nt, Human
agagagaaaaaaa

SEQ ID NO: 3370552 - RNA, 13 nt, Human
agagagaaaaaca

SEQ ID NO: 3370553 - RNA, 11 nt, Human
agagagaaaau

SEQ ID NO: 3370554 - RNA, 13 nt, Human
agagagaaaauaa

SEQ ID NO: 3370555 - RNA, 17 nt, Human
agagagaaaauaaaaag

SEQ ID NO: 3370556 - RNA, 18 nt, Human
agagagaaaauaaaaagu

SEQ ID NO: 3370557 - RNA, 15 nt, Human
agagagaaagcauau

SEQ ID NO: 3370558 - RNA, 22 nt, Human
agagagaaagccaggcagguag

SEQ ID NO: 3370559 - RNA, 15 nt, Human
agagagaaaggacuc

SEQ ID NO: 3370560 - RNA, 18 nt, Human
agagagaaccuaacugua

SEQ ID NO: 3370561 - RNA, 22 nt, Human
agagagaaccuaacuguaucuu

SEQ ID NO: 3370562 - RNA, 14 nt, Human
agagagaagagccc

SEQ ID NO: 3370563 - RNA, 11 nt, Human
agagagaagcc

SEQ ID NO: 3370564 - RNA, 16 nt, Human
agagagaccacuuuuc

SEQ ID NO: 3370565 - RNA, 13 nt, Human
agagagagaaaga

SEQ ID NO: 3370566 - RNA, 14 nt, Human
agagagagaaagag

SEQ ID NO: 3370567 - RNA, 12 nt, Human
agagagagagaa

SEQ ID NO: 3370568 - RNA, 14 nt, Human
agagagagagaaau

SEQ ID NO: 3370569 - RNA, 23 nt, Human
agagagagggccugcuggagagc

SEQ ID NO: 3370570 - RNA, 14 nt, Human
agagagaguguuug

SEQ ID NO: 3370571 - RNA, 22 nt, Human
agagagauauaucugaaaacug

SEQ ID NO: 3370572 - RNA, 17 nt, Human
agagagaugggagcucc

SEQ ID NO: 3370573 - RNA, 18 nt, Human
agagagaugggagcuccu

SEQ ID NO: 3370574 - RNA, 19 nt, Human
agagagaugggagcuccuc

SEQ ID NO: 3370575 - RNA, 18 nt, Human
agagagauguguaauuuu

SEQ ID NO: 3370576 - RNA, 19 nt, Human
agagagauguguaauuuuu

SEQ ID NO: 3370577 - RNA, 14 nt, Human
agagagauguuuug

SEQ ID NO: 3370578 - RNA, 23 nt, Human
agagagcaagacgcugugcugcc

SEQ ID NO: 3370579 - RNA, 19 nt, Human
agagagcagagaauauaac

SEQ ID NO: 3370580 - RNA, 17 nt, Human
agagagcagcuucugcc

SEQ ID NO: 3370581 - RNA, 16 nt, Human
agagagcagugcuuuu

SEQ ID NO: 3370582 - RNA, 17 nt, Human
agagagcagugcuuuug

SEQ ID NO: 3370583 - RNA, 18 nt, Human
agagagccauuuugugaa

SEQ ID NO: 3370584 - RNA, 13 nt, Human
agagagcccgagg

SEQ ID NO: 3370585 - RNA, 18 nt, Human
agagagcgagcgcuaccc

SEQ ID NO: 3370586 - RNA, 18 nt, Human
agagagcugccaucgcug

SEQ ID NO: 3370587 - RNA, 17 nt, Human
agagagcuuagccugga

SEQ ID NO: 3370588 - RNA, 23 nt, Human
agagaggaaagguuugagaagca

SEQ ID NO: 3370589 - RNA, 17 nt, Human
agagaggaaucagacuu

SEQ ID NO: 3370590 - RNA, 15 nt, Human
agagaggagaggaga

SEQ ID NO: 3370591 - RNA, 13 nt, Human
agagaggaguuca

SEQ ID NO: 3370592 - RNA, 19 nt, Human
agagaggaugugcaagcga

SEQ ID NO: 3370593 - RNA, 15 nt, Human
agagaggcaauggcu

SEQ ID NO: 3370594 - RNA, 16 nt, Human
agagaggcagagagcg

SEQ ID NO: 3370595 - RNA, 23 nt, Human
agagaggccauucuuucccaaca

SEQ ID NO: 3370596 - RNA, 14 nt, Human
agagaggccuuuug

SEQ ID NO: 3370597 - RNA, 17 nt, Human
agagaggcuaaaauguu

SEQ ID NO: 3370598 - RNA, 17 nt, Human
agagagggagguaugga

SEQ ID NO: 3370599 - RNA, 14 nt, Human
agagagggcaggca

SEQ ID NO: 3370600 - RNA, 20 nt, Human
agagagggccaugcaauuca

SEQ ID NO: 3370601 - RNA, 22 nt, Human
agagaggggaauaauagaagaa

SEQ ID NO: 3370602 - RNA, 16 nt, Human
agagagggggccaccu

SEQ ID NO: 3370603 - RNA, 21 nt, Human
agagaggguggugaccucugc

SEQ ID NO: 3370604 - RNA, 22 nt, Human
agagaggucaagcccaggagga

SEQ ID NO: 3370605 - RNA, 20 nt, Human
agagagguuauagaguagaa

SEQ ID NO: 3370606 - RNA, 23 nt, Human
agagagucccacugccucagguu

SEQ ID NO: 3370607 - RNA, 17 nt, Human
agagaguggcuccuccc

SEQ ID NO: 3370608 - RNA, 15 nt, Human
agagaguguugaaac

SEQ ID NO: 3370609 - RNA, 15 nt, Human
agagaguugaaccua

SEQ ID NO: 3370610 - RNA, 18 nt, Human
agagaguuguuguguaca

SEQ ID NO: 3370611 - RNA, 13 nt, Human
agagauacagagg

SEQ ID NO: 3370612 - RNA, 20 nt, Human
agagauaccaagaugccauc

SEQ ID NO: 3370613 - RNA, 20 nt, Human
agagauaggaaggucauuuc

SEQ ID NO: 3370614 - RNA, 22 nt, Human
agagauaggaaggucauuucca

SEQ ID NO: 3370615 - RNA, 19 nt, Human
agagauauaucugaaaacu

SEQ ID NO: 3370616 - RNA, 20 nt, Human
agagauaugcagaaggaagg

SEQ ID NO: 3370617 - RNA, 13 nt, Human
agagauauuuuaa

SEQ ID NO: 3370618 - RNA, 18 nt, Human
agagauauuuuaaaauga

SEQ ID NO: 3370619 - RNA, 15 nt, Human
agagauauuuuguaa

SEQ ID NO: 3370620 - RNA, 16 nt, Human
agagauauuuuguaaa

SEQ ID NO: 3370621 - RNA, 14 nt, Human
agagaucaaagaug

SEQ ID NO: 3370622 - RNA, 21 nt, Human
agagaucauccuuuccagcau

SEQ ID NO: 3370623 - RNA, 15 nt, Human
agagaucaugagaaa

SEQ ID NO: 3370624 - RNA, 16 nt, Human
agagaucaugagaaau

SEQ ID NO: 3370625 - RNA, 16 nt, Human
agagauccaggaagca

SEQ ID NO: 3370626 - RNA, 21 nt, Human
agagaucuauauauguauaaa

SEQ ID NO: 3370627 - RNA, 13 nt, Human
agagaucugcugu

SEQ ID NO: 3370628 - RNA, 18 nt, Human
aauggcugauaauuuuaa

SEQ ID NO: 3370629 - RNA, 22 nt, Human
aauggcuuauccagcuggugag

SEQ ID NO: 3370630 - RNA, 21 nt, Human
aauggcuuuggucucuugcuu

SEQ ID NO: 3370631 - RNA, 16 nt, Human
aauggcuuuguauaga

SEQ ID NO: 3370632 - RNA, 15 nt, Human
aaugggaacauuuau

SEQ ID NO: 3370633 - RNA, 23 nt, Human
aaugggaacauuuauuuuaugag

SEQ ID NO: 3370634 - RNA, 22 nt, Human
aaugggaacugccucuuuccug

SEQ ID NO: 3370635 - RNA, 21 nt, Human
aaugggagcugaggccacacu

SEQ ID NO: 3370636 - RNA, 18 nt, Human
aaugggcaaaacugaauu

SEQ ID NO: 3370637 - RNA, 23 nt, Human
aaugggcacugggaugagccgcu

SEQ ID NO: 3370638 - RNA, 19 nt, Human
aaugggcacuuaaagcuuu

SEQ ID NO: 3370639 - RNA, 15 nt, Human
aaugggcagagcaga

SEQ ID NO: 3370640 - RNA, 18 nt, Human
aaugggcaguuacaugca

SEQ ID NO: 3370641 - RNA, 22 nt, Human
aaguccuuggcuugccauuuuu

SEQ ID NO: 3370642 - RNA, 13 nt, Human
aaguccuuuaugu

SEQ ID NO: 3370643 - RNA, 16 nt, Human
aagucggaacagcaga

SEQ ID NO: 3370644 - RNA, 19 nt, Human
aagucguccuuacuccugu

SEQ ID NO: 3370645 - RNA, 20 nt, Human
aagucguccuuacuccugug

SEQ ID NO: 3370646 - RNA, 24 nt, Human
aagucguccuuacuccugugggag

SEQ ID NO: 3370647 - RNA, 17 nt, Human
aagucguuuuccaaacu

SEQ ID NO: 3370648 - RNA, 11 nt, Human
aagucuaaagu

SEQ ID NO: 3370649 - RNA, 21 nt, Human
aagucuaaaguuuacaguaaa

SEQ ID NO: 3370650 - RNA, 13 nt, Human
aagucuauaaaaa

SEQ ID NO: 3370651 - RNA, 21 nt, Human
aagucucacuggcugucagua

SEQ ID NO: 3370652 - RNA, 17 nt, Human
aagucucuagguucuga

SEQ ID NO: 3370653 - RNA, 13 nt, Human
aagucucuauuua

SEQ ID NO: 3370654 - RNA, 15 nt, Human
aagucucuauuuaaa

SEQ ID NO: 3370655 - RNA, 19 nt, Human
aagucucugaagugaaacu

SEQ ID NO: 3370656 - RNA, 15 nt, Human
aagucucugcuggcc

SEQ ID NO: 3370657 - RNA, 21 nt, Human
aagucucugcuggcccagcca

SEQ ID NO: 3370658 - RNA, 16 nt, Human
aagucugcauuacauu

SEQ ID NO: 3370659 - RNA, 18 nt, Human
aagucuggaucugggacc

SEQ ID NO: 3370660 - RNA, 18 nt, Human
aagucuguccuugaagga

SEQ ID NO: 3370661 - RNA, 21 nt, Human
aagucuguccuugaaggacua

SEQ ID NO: 3370662 - RNA, 16 nt, Human
aagucuguuuacugca

SEQ ID NO: 3370663 - RNA, 18 nt, Human
aagucuguuuuaugacuu

SEQ ID NO: 3370664 - RNA, 23 nt, Human
aagucuguuuuaugacuucauua

SEQ ID NO: 3370665 - RNA, 19 nt, Human
aagucuuaaggacaaagug

SEQ ID NO: 3370666 - RNA, 16 nt, Human
aagucuuacuacagaa

SEQ ID NO: 3370667 - RNA, 21 nt, Human
aagucuuagacuugaaauacu

SEQ ID NO: 3370668 - RNA, 16 nt, Human
aagucuuaucaagcag

SEQ ID NO: 3370669 - RNA, 17 nt, Human
aagucuuaucaagcagc

SEQ ID NO: 3370670 - RNA, 21 nt, Human
aagucuucaagggcugcuuca

SEQ ID NO: 3370671 - RNA, 20 nt, Human
aagucuucacucucugaaga

SEQ ID NO: 3370672 - RNA, 12 nt, Human
aagucuucaggg

SEQ ID NO: 3370673 - RNA, 14 nt, Human
aagucuucaugaaa

SEQ ID NO: 3370674 - RNA, 18 nt, Human
aagucuucaugaaaugcu

SEQ ID NO: 3370675 - RNA, 22 nt, Human
aagucuucaugaaaugcuaugu

SEQ ID NO: 3370676 - RNA, 10 nt, Human
aagucuugua

SEQ ID NO: 3370677 - RNA, 21 nt, Human
aagucuugugacuagugcuga

SEQ ID NO: 3370678 - RNA, 22 nt, Human
aagucuugugacuagugcugaa

SEQ ID NO: 3370679 - RNA, 11 nt, Human
aagucuuugcu

SEQ ID NO: 3370680 - RNA, 19 nt, Human
aagucuuuuaaaaaguauu

SEQ ID NO: 3370681 - RNA, 14 nt, Human
aagucuuuuguucg

SEQ ID NO: 3370682 - RNA, 19 nt, Human
aagugaaauaacaaaaugg

SEQ ID NO: 3370683 - RNA, 14 nt, Human
aagugaaauaaugu

SEQ ID NO: 3370684 - RNA, 16 nt, Human
aagugaaauaaugugu

SEQ ID NO: 3370685 - RNA, 16 nt, Human
aagugaaaucaaaggu

SEQ ID NO: 3370686 - RNA, 17 nt, Human
aagugaagguuuacaau

SEQ ID NO: 3370687 - RNA, 18 nt, Human
aagugaagguuuacaauu

SEQ ID NO: 3370688 - RNA, 22 nt, Human
aagugaagguuuacaauuuaca

SEQ ID NO: 3370689 - RNA, 16 nt, Human
aagugaauaaacuuca

SEQ ID NO: 3370690 - RNA, 17 nt, Human
aagugaauaaacuucag

SEQ ID NO: 3370691 - RNA, 19 nt, Human
aagugaaugaaagauuaaa

SEQ ID NO: 3370692 - RNA, 15 nt, Human
aagugaaugcuggga

SEQ ID NO: 3370693 - RNA, 23 nt, Human
aagugaauuugaaugaaaaauuu

SEQ ID NO: 3370694 - RNA, 17 nt, Human
aagugaauuuuucucua

SEQ ID NO: 3370695 - RNA, 16 nt, Human
aagugacaaggcccca

SEQ ID NO: 3370696 - RNA, 20 nt, Human
aagugacaaggccccagaga

SEQ ID NO: 3370697 - RNA, 12 nt, Human
aagugacaggga

SEQ ID NO: 3370698 - RNA, 23 nt, Human
aagugacagggaagcuacagguu

SEQ ID NO: 3370699 - RNA, 15 nt, Human
aagugaccaaggagg

SEQ ID NO: 3370700 - RNA, 20 nt, Human
aagugaccuauaccuguguu

SEQ ID NO: 3370701 - RNA, 14 nt, Human
aagugacgguuccu

SEQ ID NO: 3370702 - RNA, 17 nt, Human
aagugacuguaucugug

SEQ ID NO: 3370703 - RNA, 18 nt, Human
aagugacuguaucugugu

SEQ ID NO: 3370704 - RNA, 19 nt, Human
aagugacuuagcagaugcu

SEQ ID NO: 3370705 - RNA, 19 nt, Human
aagugacuuuggcugcaug

SEQ ID NO: 3370706 - RNA, 14 nt, Human
aagugagaaaacug

SEQ ID NO: 3370707 - RNA, 18 nt, Human
aagugagaauaggcagcc

SEQ ID NO: 3370708 - RNA, 18 nt, Human
aagugagcuuugcugcua

SEQ ID NO: 3370709 - RNA, 18 nt, Human
aagugaggaaaucaaagu

SEQ ID NO: 3370710 - RNA, 21 nt, Human
aagugaggaaaucaaagugcu

SEQ ID NO: 3370711 - RNA, 22 nt, Human
aagugagggccgagugagagcg

SEQ ID NO: 3370712 - RNA, 21 nt, Human
aagugagggcucacucagcca

SEQ ID NO: 3370713 - RNA, 21 nt, Human
aagugaucaaacuacauauug

SEQ ID NO: 3370714 - RNA, 13 nt, Human
aagugauccuccc

SEQ ID NO: 3370715 - RNA, 19 nt, Human
aagugauccucccaccuca

SEQ ID NO: 3370716 - RNA, 14 nt, Human
aagugaugacauau

SEQ ID NO: 3370717 - RNA, 18 nt, Human
aagugauggagcagagca

SEQ ID NO: 3370718 - RNA, 19 nt, Human
aagugauucucaugccuca

SEQ ID NO: 3370719 - RNA, 17 nt, Human
aagugauucuccugccu

SEQ ID NO: 3370720 - RNA, 18 nt, Human
aagugauucuccugccuc

SEQ ID NO: 3370721 - RNA, 19 nt, Human
aagugauucuccugccuca

SEQ ID NO: 3370722 - RNA, 20 nt, Human
aagugauucuccugccucag

SEQ ID NO: 3370723 - RNA, 14 nt, Human
aagugauugaaaau

SEQ ID NO: 3370724 - RNA, 17 nt, Human
aagugauuuuuuugucc

SEQ ID NO: 3370725 - RNA, 23 nt, Human
aagugcaauaaaucugacccagu

SEQ ID NO: 3370726 - RNA, 17 nt, Human
aagugcagaaugcuccu

SEQ ID NO: 3370727 - RNA, 12 nt, Human
aagugcaggcug

SEQ ID NO: 3370728 - RNA, 17 nt, Human
aagugcaggcuggcacc

SEQ ID NO: 3370729 - RNA, 21 nt, Human
aagugcaucuggagagaacag

SEQ ID NO: 3370730 - RNA, 13 nt, Human
aagugcauuucug

SEQ ID NO: 3370731 - RNA, 15 nt, Human
aagugccaaagaaag

SEQ ID NO: 3370732 - RNA, 16 nt, Human
aagugccaaagaaagu

SEQ ID NO: 3370733 - RNA, 19 nt, Human
aagugccaaagaaaguggu

SEQ ID NO: 3370734 - RNA, 15 nt, Human
aagugccaaaugcuc

SEQ ID NO: 3370735 - RNA, 21 nt, Human
aagugccacugcccgagcugg

SEQ ID NO: 3370736 - RNA, 14 nt, Human
aagugccaguauuu

SEQ ID NO: 3370737 - RNA, 23 nt, Human
aagugccccugcugccuccccaa

SEQ ID NO: 3370738 - RNA, 19 nt, Human
aagugcccucucccacccu

SEQ ID NO: 3370739 - RNA, 15 nt, Human
aagugccgcaaauug

SEQ ID NO: 3370740 - RNA, 19 nt, Human
aagugccucaagaggaaug

SEQ ID NO: 3370741 - RNA, 18 nt, Human
aagugccucacauuuuuu

SEQ ID NO: 3370742 - RNA, 12 nt, Human
aagugccuuaau

SEQ ID NO: 3370743 - RNA, 13 nt, Human
aagugccuuucag

SEQ ID NO: 3370744 - RNA, 14 nt, Human
aagugccuuucagg

SEQ ID NO: 3370745 - RNA, 19 nt, Human
aagugccuuucaggaucua

SEQ ID NO: 3370746 - RNA, 17 nt, Human
aagugccuuucugcagu

SEQ ID NO: 3370747 - RNA, 22 nt, Human
aagugcgggguaggggaagaag

SEQ ID NO: 3370748 - RNA, 20 nt, Human
aagugcgugccgugugagug

SEQ ID NO: 3370749 - RNA, 19 nt, Human
aagugcguguguagaguua

SEQ ID NO: 3370750 - RNA, 21 nt, Human
aagugcguguguagaguuaag

SEQ ID NO: 3370751 - RNA, 16 nt, Human
aagugcuaagguucua

SEQ ID NO: 3370752 - RNA, 18 nt, Human
aagugcuaagguucuaag

SEQ ID NO: 3370753 - RNA, 13 nt, Human
aagugcuauuacg

SEQ ID NO: 3370754 - RNA, 14 nt, Human
aagugcugcauuua

SEQ ID NO: 3370755 - RNA, 13 nt, Human
aagugcugcggag

SEQ ID NO: 3370756 - RNA, 21 nt, Human
aagugcugcggagcaagagga

SEQ ID NO: 3370757 - RNA, 12 nt, Human
aagugcugggau

SEQ ID NO: 3370758 - RNA, 22 nt, Human
aagugcugggauuacaggugug

SEQ ID NO: 3370759 - RNA, 13 nt, Human
aagugcuguauaa

SEQ ID NO: 3370760 - RNA, 16 nt, Human
aagugcuguauaaaau

SEQ ID NO: 3370761 - RNA, 17 nt, Human
aagugcuguauaaaauc

SEQ ID NO: 3370762 - RNA, 19 nt, Human
aagugcuuauuacauuuua

SEQ ID NO: 3370763 - RNA, 13 nt, Human
aagugcuuucuuc

SEQ ID NO: 3370764 - RNA, 14 nt, Human
aaguggaaggaaag

SEQ ID NO: 3370765 - RNA, 16 nt, Human
aaguggaaguauguau

SEQ ID NO: 3370766 - RNA, 19 nt, Human
aaguggaccaggacaggac

SEQ ID NO: 3370767 - RNA, 20 nt, Human
aaguggaccuugagaccaca

SEQ ID NO: 3370768 - RNA, 23 nt, Human
aaguggacucuuugguggcuuug

SEQ ID NO: 3370769 - RNA, 14 nt, Human
aaguggacuggagg

SEQ ID NO: 3370770 - RNA, 13 nt, Human
aaguggcaaagcu

SEQ ID NO: 3370771 - RNA, 19 nt, Human
aaguggcaaagcuguucuu

SEQ ID NO: 3370772 - RNA, 17 nt, Human
aaguugaagcuaagauu

SEQ ID NO: 3370773 - RNA, 18 nt, Human
aaguugaagcuaagauuu

SEQ ID NO: 3370774 - RNA, 23 nt, Human
aaguugaauuuauuggcuuuucu

SEQ ID NO: 3370775 - RNA, 19 nt, Human
aaguugacuuauaguacau

SEQ ID NO: 3370776 - RNA, 19 nt, Human
aaguugagauaguuuucau

SEQ ID NO: 3370777 - RNA, 20 nt, Human
aaguugagcuaugacuuaac

SEQ ID NO: 3370778 - RNA, 18 nt, Human
aaguugaggauuguugaa

SEQ ID NO: 3370779 - RNA, 18 nt, Human
aaguugaguauauuauaa

SEQ ID NO: 3370780 - RNA, 14 nt, Human
aaguugaugcaauc

SEQ ID NO: 3370781 - RNA, 15 nt, Human
aaguugcacggcugc

SEQ ID NO: 3370782 - RNA, 18 nt, Human
aaguugcacggcugcuga

SEQ ID NO: 3370783 - RNA, 15 nt, Human
aaguugcagcuguuu

SEQ ID NO: 3370784 - RNA, 22 nt, Human
aaguugcagugagcugauauca

SEQ ID NO: 3370785 - RNA, 12 nt, Human
aaguugccuaaa

SEQ ID NO: 3370786 - RNA, 15 nt, Human
aaguugccuaaaucc

SEQ ID NO: 3370787 - RNA, 19 nt, Human
aaguugccuaaauccauuu

SEQ ID NO: 3370788 - RNA, 14 nt, Human
aaguugcgacggag

SEQ ID NO: 3370789 - RNA, 23 nt, Human
aaguugcgacggagagaaaaaag

SEQ ID NO: 3370790 - RNA, 14 nt, Human
aaguugcugcuucu

SEQ ID NO: 3370791 - RNA, 21 nt, Human
aaguugcugcuucucccaggc

SEQ ID NO: 3370792 - RNA, 15 nt, Human
aaguuggaaacacua

SEQ ID NO: 3370793 - RNA, 23 nt, Human
aaguuggaaacacuaaauguuaa

SEQ ID NO: 3370794 - RNA, 21 nt, Human
aaguuggcuucuguuucuagu

SEQ ID NO: 3370795 - RNA, 16 nt, Human
aaguugggcaauauaa

SEQ ID NO: 3370796 - RNA, 17 nt, Human
aaguugggcaauauaac

SEQ ID NO: 3370797 - RNA, 20 nt, Human
aaguugggcuugcuauucug

SEQ ID NO: 3370798 - RNA, 21 nt, Human
aaguugggcuugcuauucugu

SEQ ID NO: 3370799 - RNA, 21 nt, Human
aaguugguauuaauaaaaaga

SEQ ID NO: 3370800 - RNA, 23 nt, Human
aaguugguccuuuacacucaggc

SEQ ID NO: 3370801 - RNA, 15 nt, Human
aaguuguacaugaaa

SEQ ID NO: 3370802 - RNA, 21 nt, Human
aaugggcaguuacaugcauac

SEQ ID NO: 3370803 - RNA, 15 nt, Human
aaugggcucuccggg

SEQ ID NO: 3370804 - RNA, 17 nt, Human
aaugggcuuagagcagu

SEQ ID NO: 3370805 - RNA, 22 nt, Human
aauggggccagauccagccugg

SEQ ID NO: 3370806 - RNA, 20 nt, Human
aaugggggccucuucaaauu

SEQ ID NO: 3370807 - RNA, 18 nt, Human
aauggggguagcagcugg

SEQ ID NO: 3370808 - RNA, 15 nt, Human
aaugggggugcauuu

SEQ ID NO: 3370809 - RNA, 16 nt, Human
aauggguuuuucccug

SEQ ID NO: 3370810 - RNA, 15 nt, Human
aaugguaaaauugca

SEQ ID NO: 3370811 - RNA, 15 nt, Human
aaugguaccagauaa

SEQ ID NO: 3370812 - RNA, 18 nt, Human
aaugguacugacuuugcu

SEQ ID NO: 3370813 - RNA, 21 nt, Human
aaugguagcauuuuaaacaaa

SEQ ID NO: 3370814 - RNA, 17 nt, Human
aaugguaggcauuuccu

SEQ ID NO: 3370815 - RNA, 22 nt, Human
aaugguagucuaaccaaaugca

SEQ ID NO: 3370816 - RNA, 12 nt, Human
aaugguaguuuc

SEQ ID NO: 3370817 - RNA, 17 nt, Human
aaugguaguuucugugg

SEQ ID NO: 3370818 - RNA, 18 nt, Human
aaugguaguuucuguggu

SEQ ID NO: 3370819 - RNA, 14 nt, Human
aaugguaguuuuac

SEQ ID NO: 3370820 - RNA, 15 nt, Human
aaugguaugagcuga

SEQ ID NO: 3370821 - RNA, 22 nt, Human
aauggucacguuuggugcuucu

SEQ ID NO: 3370822 - RNA, 14 nt, Human
aauggucagcguug

SEQ ID NO: 3370823 - RNA, 20 nt, Human
aauggucagcguugcauguc

SEQ ID NO: 3370824 - RNA, 20 nt, Human
aaugguccaauuaguuuccu

SEQ ID NO: 3370825 - RNA, 19 nt, Human
aaugguccaggagaaggcc

SEQ ID NO: 3370826 - RNA, 13 nt, Human
aaugguccagggu

SEQ ID NO: 3370827 - RNA, 14 nt, Human
aaugguccaggguu

SEQ ID NO: 3370828 - RNA, 20 nt, Human
aaugguccgugcuaaggacu

SEQ ID NO: 3370829 - RNA, 21 nt, Human
aaugguccgugcuaaggacuu

SEQ ID NO: 3370830 - RNA, 22 nt, Human
aaugguccgugcuaaggacuug

SEQ ID NO: 3370831 - RNA, 22 nt, Human
aauggucuuucuaaugugugaa

SEQ ID NO: 3370832 - RNA, 13 nt, Human
aauggugauuuua

SEQ ID NO: 3370833 - RNA, 15 nt, Human
aauggugauuuuaaa

SEQ ID NO: 3370834 - RNA, 19 nt, Human
aaugguggcuucagcucca

SEQ ID NO: 3370835 - RNA, 23 nt, Human
aaugguggcuucagcuccagccc

SEQ ID NO: 3370836 - RNA, 15 nt, Human
aaugguggcuucuuu

SEQ ID NO: 3370837 - RNA, 22 nt, Human
aaugguggggaacuauaaagaa

SEQ ID NO: 3370838 - RNA, 21 nt, Human
aauggugguuguuucuuccaa

SEQ ID NO: 3370839 - RNA, 13 nt, Human
aaugguguacaua

SEQ ID NO: 3370840 - RNA, 22 nt, Human
aauggugugaacccgggagcgg

SEQ ID NO: 3370841 - RNA, 19 nt, Human
aaugguguuguaugccuuu

SEQ ID NO: 3370842 - RNA, 13 nt, Human
aaugguuaaaaga

SEQ ID NO: 3370843 - RNA, 15 nt, Human
aaugguuauaaaagu

SEQ ID NO: 3370844 - RNA, 19 nt, Human
aaugguuauaaaagugauu

SEQ ID NO: 3370845 - RNA, 14 nt, Human
aaugguuccaugcc

SEQ ID NO: 3370846 - RNA, 22 nt, Human
aaugguuuaacuucugccugug

SEQ ID NO: 3370847 - RNA, 21 nt, Human
aaugguuuauuuuguauugug

SEQ ID NO: 3370848 - RNA, 17 nt, Human
aaugguuuggugcuuuu

SEQ ID NO: 3370849 - RNA, 16 nt, Human
aaugguuuguccugau

SEQ ID NO: 3370850 - RNA, 22 nt, Human
aaugguuuucuuguguguuuau

SEQ ID NO: 3370851 - RNA, 21 nt, Human
aaugguuuuuaaauuuuguaa

SEQ ID NO: 3370852 - RNA, 19 nt, Human
aauguaaaaaagaaaaaca

SEQ ID NO: 3370853 - RNA, 14 nt, Human
aauguaaaaugauu

SEQ ID NO: 3370854 - RNA, 17 nt, Human
aauguaaaauguugaau

SEQ ID NO: 3370855 - RNA, 16 nt, Human
aauguaaacugccaua

SEQ ID NO: 3370856 - RNA, 14 nt, Human
aauguaaacuguuu

SEQ ID NO: 3370857 - RNA, 16 nt, Human
aauguaaacuguuucu

SEQ ID NO: 3370858 - RNA, 17 nt, Human
aauguaaacuguuucuu

SEQ ID NO: 3370859 - RNA, 19 nt, Human
aauguaaagcuugucugau

SEQ ID NO: 3370860 - RNA, 21 nt, Human
aauguaaaggagucaaaacua

SEQ ID NO: 3370861 - RNA, 22 nt, Human
aauguaaauaaaggauuucuag

SEQ ID NO: 3370862 - RNA, 21 nt, Human
aauguaaauauuuuaaagaau

SEQ ID NO: 3370863 - RNA, 14 nt, Human
aauguaaaugucuc

SEQ ID NO: 3370864 - RNA, 16 nt, Human
aauguaaaugucucac

SEQ ID NO: 3370865 - RNA, 12 nt, Human
aauguaaauuug

SEQ ID NO: 3370866 - RNA, 15 nt, Human
aauguaacugcucuu

SEQ ID NO: 3370867 - RNA, 12 nt, Human
aauguaacuguu

SEQ ID NO: 3370868 - RNA, 15 nt, Human
aauguaacuuagaga

SEQ ID NO: 3370869 - RNA, 22 nt, Human
aauguaacuuuuguaagacaaa

SEQ ID NO: 3370870 - RNA, 16 nt, Human
aauguaagauuauaga

SEQ ID NO: 3370871 - RNA, 21 nt, Human
aauguaagauuauagauucua

SEQ ID NO: 3370872 - RNA, 23 nt, Human
aauguaagauuauagauucuaaa

SEQ ID NO: 3370873 - RNA, 13 nt, Human
aauguaagcucua

SEQ ID NO: 3370874 - RNA, 20 nt, Human
aauguaagggaaacugccag

SEQ ID NO: 3370875 - RNA, 17 nt, Human
aauguaagguauaucau

SEQ ID NO: 3370876 - RNA, 23 nt, Human
aauguaagguauaucauucuaaa

SEQ ID NO: 3370877 - RNA, 16 nt, Human
aauguaauagggaaaa

SEQ ID NO: 3370878 - RNA, 15 nt, Human
aauguaaugaucaua

SEQ ID NO: 3370879 - RNA, 22 nt, Human
aauguaauuauuuauguauggu

SEQ ID NO: 3370880 - RNA, 14 nt, Human
aauguaauugaaua

SEQ ID NO: 3370881 - RNA, 16 nt, Human
aauguaauugaauaaa

SEQ ID NO: 3370882 - RNA, 23 nt, Human
aauguaauuguaauuuugaaaug

SEQ ID NO: 3370883 - RNA, 16 nt, Human
aauguaauuuaaauga

SEQ ID NO: 3370884 - RNA, 15 nt, Human
aauguacaaaauaaa

SEQ ID NO: 3370885 - RNA, 21 nt, Human
aauguacagcaaggagauuua

SEQ ID NO: 3370886 - RNA, 17 nt, Human
aauguacaguugaaaua

SEQ ID NO: 3370887 - RNA, 22 nt, Human
aauguacccaccgggccacucc

SEQ ID NO: 3370888 - RNA, 15 nt, Human
aauguaccuucuuuc

SEQ ID NO: 3370889 - RNA, 15 nt, Human
aauguacuaauauuu

SEQ ID NO: 3370890 - RNA, 18 nt, Human
aauguacugcauaugaaa

SEQ ID NO: 3370891 - RNA, 19 nt, Human
aauguacuuguuucucugu

SEQ ID NO: 3370892 - RNA, 14 nt, Human
aauguagauaagug

SEQ ID NO: 3370893 - RNA, 17 nt, Human
aauguagcuucagucau

SEQ ID NO: 3370894 - RNA, 16 nt, Human
aauguagguccucaga

SEQ ID NO: 3370895 - RNA, 22 nt, Human
aauguagugaagggauguauca

SEQ ID NO: 3370896 - RNA, 16 nt, Human
aauguaguugauguau

SEQ ID NO: 3370897 - RNA, 19 nt, Human
aauguaguugauguaucca

SEQ ID NO: 3370898 - RNA, 23 nt, Human
aauguaguuugaggaaauuugca

SEQ ID NO: 3370899 - RNA, 14 nt, Human
aauguauaaauaua

SEQ ID NO: 3370900 - RNA, 16 nt, Human
aauguauaaauauaca

SEQ ID NO: 3370901 - RNA, 13 nt, Human
aauguauaccugu

SEQ ID NO: 3370902 - RNA, 14 nt, Human
aauguauaguauuu

SEQ ID NO: 3370903 - RNA, 15 nt, Human
aauguauaguauuug

SEQ ID NO: 3370904 - RNA, 17 nt, Human
aauguauaguauuugaa

SEQ ID NO: 3370905 - RNA, 18 nt, Human
aauguauauacacauaua

SEQ ID NO: 3370906 - RNA, 19 nt, Human
aauguauauacacauauac

SEQ ID NO: 3370907 - RNA, 20 nt, Human
aauguauaugaacuuaacau

SEQ ID NO: 3370908 - RNA, 14 nt, Human
aauguauaugcacu

SEQ ID NO: 3370909 - RNA, 21 nt, Human
aauguauauguuuugugggaa

SEQ ID NO: 3370910 - RNA, 18 nt, Human
aauguaucaggaaauaua

SEQ ID NO: 3370911 - RNA, 19 nt, Human
aauguaucauagaaaugua

SEQ ID NO: 3370912 - RNA, 22 nt, Human
aauguaucccuucucacagcac

SEQ ID NO: 3370913 - RNA, 14 nt, Human
aauguaucugugaa

SEQ ID NO: 3370914 - RNA, 17 nt, Human
aauguaucugugaagua

SEQ ID NO: 3370915 - RNA, 17 nt, Human
aauguaugcuucauaca

SEQ ID NO: 3370916 - RNA, 14 nt, Human
aauucuuucauuuu

SEQ ID NO: 3370917 - RNA, 13 nt, Human
aauucuuuugcca

SEQ ID NO: 3370918 - RNA, 13 nt, Human
aauucuuuuuuau

SEQ ID NO: 3370919 - RNA, 17 nt, Human
aauucuuuuuuauuaau

SEQ ID NO: 3370920 - RNA, 23 nt, Human
aauucuuuuuuauuaaucacugu

SEQ ID NO: 3370921 - RNA, 15 nt, Human
aauugaaaagaagua

SEQ ID NO: 3370922 - RNA, 14 nt, Human
aauugaaaaguuau

SEQ ID NO: 3370923 - RNA, 12 nt, Human
aauugaaacacu

SEQ ID NO: 3370924 - RNA, 22 nt, Human
aauugaaagugggcaaaagcuu

SEQ ID NO: 3370925 - RNA, 15 nt, Human
aauugaaauguaagg

SEQ ID NO: 3370926 - RNA, 21 nt, Human
aauugaaccuuugugcccuau

SEQ ID NO: 3370927 - RNA, 23 nt, Human
aauugaaccuuugugcccuauca

SEQ ID NO: 3370928 - RNA, 22 nt, Human
aauugaacuuaaauaaauguca

SEQ ID NO: 3370929 - RNA, 17 nt, Human
aauugaagagagauaua

SEQ ID NO: 3370930 - RNA, 12 nt, Human
aauugaaggaaa

SEQ ID NO: 3370931 - RNA, 16 nt, Human
aauugaaggaaagauu

SEQ ID NO: 3370932 - RNA, 16 nt, Human
aauugaagguuuuuga

SEQ ID NO: 3370933 - RNA, 17 nt, Human
aauugaaguaaacuuuu

SEQ ID NO: 3370934 - RNA, 17 nt, Human
aauugaaguguauaaua

SEQ ID NO: 3370935 - RNA, 16 nt, Human
aauugaaguuucaagu

SEQ ID NO: 3370936 - RNA, 21 nt, Human
aauugaauaaugguaccagau

SEQ ID NO: 3370937 - RNA, 19 nt, Human
aauugaauacuuugaaugu

SEQ ID NO: 3370938 - RNA, 21 nt, Human
aauugaauacuuugaaugugu

SEQ ID NO: 3370939 - RNA, 14 nt, Human
aauugaauauuauu

SEQ ID NO: 3370940 - RNA, 22 nt, Human
aauugaaucacugcucacacug

SEQ ID NO: 3370941 - RNA, 18 nt, Human
aauugaaugcaaaccaua

SEQ ID NO: 3370942 - RNA, 13 nt, Human
aauugaauuuaac

SEQ ID NO: 3370943 - RNA, 15 nt, Human
aauugaauuuaacaa

SEQ ID NO: 3370944 - RNA, 18 nt, Human
aauugacagaucaagcug

SEQ ID NO: 3370945 - RNA, 23 nt, Human
aauugacagaucaagcugugaga

SEQ ID NO: 3370946 - RNA, 14 nt, Human
aauugacauugcuu

SEQ ID NO: 3370947 - RNA, 17 nt, Human
aauugaccaucugcuuu

SEQ ID NO: 3370948 - RNA, 18 nt, Human
aauugaccaucugcuuuu

SEQ ID NO: 3370949 - RNA, 19 nt, Human
aauugagaaaaauauauac

SEQ ID NO: 3370950 - RNA, 21 nt, Human
aauugagaagcguauguuuuu

SEQ ID NO: 3370951 - RNA, 12 nt, Human
aauugagacagu

SEQ ID NO: 3370952 - RNA, 12 nt, Human
aauugagcacaa

SEQ ID NO: 3370953 - RNA, 18 nt, Human
aauugagcugcagaaacg

SEQ ID NO: 3370954 - RNA, 22 nt, Human
aauugagcugcuuuuuuugaaa

SEQ ID NO: 3370955 - RNA, 16 nt, Human
aauugaguaauggugu

SEQ ID NO: 3370956 - RNA, 13 nt, Human
aauugauguguuu

SEQ ID NO: 3370957 - RNA, 15 nt, Human
aauugauguugaugc

SEQ ID NO: 3370958 - RNA, 21 nt, Human
aauugauuucuuuucuuccug

SEQ ID NO: 3370959 - RNA, 14 nt, Human
aauugauuuugaac

SEQ ID NO: 3370960 - RNA, 18 nt, Human
aauugcaaaucuugaaau

SEQ ID NO: 3370961 - RNA, 21 nt, Human
aauugcaauuuuaacacacau

SEQ ID NO: 3370962 - RNA, 20 nt, Human
aauugcacagaaguccugua

SEQ ID NO: 3370963 - RNA, 20 nt, Human
aauugcagauaacuuugacu

SEQ ID NO: 3370964 - RNA, 16 nt, Human
aauugcauacuuugua

SEQ ID NO: 3370965 - RNA, 22 nt, Human
aauugcauacuuuguauuuuga

SEQ ID NO: 3370966 - RNA, 18 nt, Human
aauugcaugcugcuuuaa

SEQ ID NO: 3370967 - RNA, 20 nt, Human
aauugcauugacuuucccca

SEQ ID NO: 3370968 - RNA, 16 nt, Human
aauugcauuugcuuuu

SEQ ID NO: 3370969 - RNA, 12 nt, Human
aauugccauauu

SEQ ID NO: 3370970 - RNA, 19 nt, Human
aauugccauauugcacaug

SEQ ID NO: 3370971 - RNA, 23 nt, Human
aauugccauauugcacaugucuu

SEQ ID NO: 3370972 - RNA, 19 nt, Human
aauugccugcagagagaag

SEQ ID NO: 3370973 - RNA, 20 nt, Human
aauugccuuuuuucuguaua

SEQ ID NO: 3370974 - RNA, 23 nt, Human
aauugccuuuuuucuguauaaau

SEQ ID NO: 3370975 - RNA, 16 nt, Human
aauugcguuggucucu

SEQ ID NO: 3370976 - RNA, 14 nt, Human
aauugcuauugugu

SEQ ID NO: 3370977 - RNA, 21 nt, Human
aauugcucaugcauaguccca

SEQ ID NO: 3370978 - RNA, 23 nt, Human
aauugcugaagggcauucuuucc

SEQ ID NO: 3370979 - RNA, 13 nt, Human
aauugcugaggca

SEQ ID NO: 3370980 - RNA, 20 nt, Human
aauugcuguugaaagcaaaa

SEQ ID NO: 3370981 - RNA, 15 nt, Human
aauugcuuacauuuu

SEQ ID NO: 3370982 - RNA, 19 nt, Human
aauugcuuacucauuaaaa

SEQ ID NO: 3370983 - RNA, 22 nt, Human
aauugcuuauuuauuguauucu

SEQ ID NO: 3370984 - RNA, 15 nt, Human
aauugcuugaaagaa

SEQ ID NO: 3370985 - RNA, 23 nt, Human
aauugcuugguuguaauuaaauu

SEQ ID NO: 3370986 - RNA, 19 nt, Human
aauugcuuguuugcuucaa

SEQ ID NO: 3370987 - RNA, 15 nt, Human
aauuggaaaagacua

SEQ ID NO: 3370988 - RNA, 18 nt, Human
aauuggaagucuaagaac

SEQ ID NO: 3370989 - RNA, 22 nt, Human
aauuggaguuggaguagaaugu

SEQ ID NO: 3370990 - RNA, 11 nt, Human
aauuggauuuc

SEQ ID NO: 3370991 - RNA, 11 nt, Human
aauuggcagca

SEQ ID NO: 3370992 - RNA, 14 nt, Human
aauuggcagcagau

SEQ ID NO: 3370993 - RNA, 22 nt, Human
aauuggcagcagauuuuaggaa

SEQ ID NO: 3370994 - RNA, 18 nt, Human
aauuggcauguguauguu

SEQ ID NO: 3370995 - RNA, 21 nt, Human
aauugggagcuugggaaugga

SEQ ID NO: 3370996 - RNA, 21 nt, Human
aauugggaguccaggcacagg

SEQ ID NO: 3370997 - RNA, 15 nt, Human
aauugggcacuauuu

SEQ ID NO: 3370998 - RNA, 19 nt, Human
aauugggccagcuuuucaa

SEQ ID NO: 3370999 - RNA, 20 nt, Human
aauugggccagcuuuucaaa

SEQ ID NO: 3371000 - RNA, 23 nt, Human
aauugguacuuuuaaaaacauaa

SEQ ID NO: 3371001 - RNA, 20 nt, Human
aauugguuaucaugggaaag

SEQ ID NO: 3371002 - RNA, 15 nt, Human
aauugguucuuuauu

SEQ ID NO: 3371003 - RNA, 11 nt, Human
aauuguaaaag

SEQ ID NO: 3371004 - RNA, 14 nt, Human
aauaauguuucaaa

SEQ ID NO: 3371005 - RNA, 19 nt, Human
aauaauguuucaaacauau

SEQ ID NO: 3371006 - RNA, 14 nt, Human
aauaauuauaugcu

SEQ ID NO: 3371007 - RNA, 22 nt, Human
aauaauuauaugcuauuucuau

SEQ ID NO: 3371008 - RNA, 20 nt, Human
aauaauuaugaguuugcuua

SEQ ID NO: 3371009 - RNA, 15 nt, Human
aauaauucauauucu

SEQ ID NO: 3371010 - RNA, 21 nt, Human
aauaauucugaguuuuguguu

SEQ ID NO: 3371011 - RNA, 14 nt, Human
aauaauucuuuuuu

SEQ ID NO: 3371012 - RNA, 23 nt, Human
aauaauucuuuuuuauuaaucac

SEQ ID NO: 3371013 - RNA, 13 nt, Human
aauaauugacagg

SEQ ID NO: 3371014 - RNA, 16 nt, Human
aauaauugcagaacua

SEQ ID NO: 3371015 - RNA, 12 nt, Human
aauaauuguugu

SEQ ID NO: 3371016 - RNA, 18 nt, Human
aauaauuuaacuacccuu

SEQ ID NO: 3371017 - RNA, 21 nt, Human
aauaauuuagacuucaagcau

SEQ ID NO: 3371018 - RNA, 15 nt, Human
aauaauuuauaguaa

SEQ ID NO: 3371019 - RNA, 16 nt, Human
aauaauuuauaguaau

SEQ ID NO: 3371020 - RNA, 13 nt, Human
aauaauuucuaau

SEQ ID NO: 3371021 - RNA, 17 nt, Human
aauaauuuguggugauu

SEQ ID NO: 3371022 - RNA, 18 nt, Human
aauaauuuucauuuugca

SEQ ID NO: 3371023 - RNA, 14 nt, Human
aauaauuuuguaau

SEQ ID NO: 3371024 - RNA, 19 nt, Human
aauaauuuuuauauuuaau

SEQ ID NO: 3371025 - RNA, 19 nt, Human
aauaauuuuuauauuugaa

SEQ ID NO: 3371026 - RNA, 21 nt, Human
aauacaaaaaucagccagaca

SEQ ID NO: 3371027 - RNA, 23 nt, Human
aauacaaaaaucagccagacaug

SEQ ID NO: 3371028 - RNA, 12 nt, Human
aauacaaaacuu

SEQ ID NO: 3371029 - RNA, 17 nt, Human
aauacaaacaccuggac

SEQ ID NO: 3371030 - RNA, 14 nt, Human
aauacaacaaagga

SEQ ID NO: 3371031 - RNA, 13 nt, Human
aauacaagguaua

SEQ ID NO: 3371032 - RNA, 17 nt, Human
aauacaagguauaauaa

SEQ ID NO: 3371033 - RNA, 19 nt, Human
aauacaagguauaauaaaa

SEQ ID NO: 3371034 - RNA, 20 nt, Human
aauacaaguucuauuuaagu

SEQ ID NO: 3371035 - RNA, 23 nt, Human
aauacaaguucuauuuaagugua

SEQ ID NO: 3371036 - RNA, 14 nt, Human
aauacaauaaguua

SEQ ID NO: 3371037 - RNA, 23 nt, Human
aauacaauuuuguuucuguacuu

SEQ ID NO: 3371038 - RNA, 18 nt, Human
aauacaauuuuuauuucu

SEQ ID NO: 3371039 - RNA, 23 nt, Human
aauacacauagcauguaauggua

SEQ ID NO: 3371040 - RNA, 21 nt, Human
aauacaccaccucacuccugu

SEQ ID NO: 3371041 - RNA, 16 nt, Human
aauacacuugcccugc

SEQ ID NO: 3371042 - RNA, 13 nt, Human
aauacagacacua

SEQ ID NO: 3371043 - RNA, 15 nt, Human
aauacagacuggaug

SEQ ID NO: 3371044 - RNA, 13 nt, Human
aauacagauaaau

SEQ ID NO: 3371045 - RNA, 23 nt, Human
aauacagauuuugauagcaaagc

SEQ ID NO: 3371046 - RNA, 18 nt, Human
aauacagcaacaauuuau

SEQ ID NO: 3371047 - RNA, 14 nt, Human
aauacagcagcaag

SEQ ID NO: 3371048 - RNA, 21 nt, Human
aauacagcagcaagaaaaaaa

SEQ ID NO: 3371049 - RNA, 13 nt, Human
aauacagcuuucu

SEQ ID NO: 3371050 - RNA, 19 nt, Human
aauacaggauuauuuugau

SEQ ID NO: 3371051 - RNA, 15 nt, Human
aauacaguacaggca

SEQ ID NO: 3371052 - RNA, 16 nt, Human
aauacaguacaggcag

SEQ ID NO: 3371053 - RNA, 20 nt, Human
aauacaguaucucagggccu

SEQ ID NO: 3371054 - RNA, 19 nt, Human
aauacaguuugucacauga

SEQ ID NO: 3371055 - RNA, 14 nt, Human
aauacauacgguca

SEQ ID NO: 3371056 - RNA, 14 nt, Human
aauacauagugaaa

SEQ ID NO: 3371057 - RNA, 21 nt, Human
aauacauaugauaaauuugac

SEQ ID NO: 3371058 - RNA, 23 nt, Human
aauacaugcuaagagaaguagaa

SEQ ID NO: 3371059 - RNA, 17 nt, Human
aauacauuaaagcaguc

SEQ ID NO: 3371060 - RNA, 16 nt, Human
aauagcuuuaaugaua

SEQ ID NO: 3371061 - RNA, 19 nt, Human
aauaggaaaaacugauuuu

SEQ ID NO: 3371062 - RNA, 11 nt, Human
aauaggaauaa

SEQ ID NO: 3371063 - RNA, 16 nt, Human
aauaggaauugguuuc

SEQ ID NO: 3371064 - RNA, 15 nt, Human
aauaggacuuguuuu

SEQ ID NO: 3371065 - RNA, 23 nt, Human
aauaggagaggaugagagcccag

SEQ ID NO: 3371066 - RNA, 21 nt, Human
aauaggaguggugauuugaaa

SEQ ID NO: 3371067 - RNA, 15 nt, Human
aauaggauuuuuaga

SEQ ID NO: 3371068 - RNA, 15 nt, Human
aauaggcacuuuaaa

SEQ ID NO: 3371069 - RNA, 14 nt, Human
aauaggcaggaagc

SEQ ID NO: 3371070 - RNA, 16 nt, Human
aauaggcauuaacaca

SEQ ID NO: 3371071 - RNA, 18 nt, Human
aauaggcggggcuugccu

SEQ ID NO: 3371072 - RNA, 20 nt, Human
aauaggcuauuaaaaaaguc

SEQ ID NO: 3371073 - RNA, 21 nt, Human
aauaggcuauuaaaaaagucu

SEQ ID NO: 3371074 - RNA, 18 nt, Human
aauagggcuaggaauaua

SEQ ID NO: 3371075 - RNA, 16 nt, Human
aauaggggauauuuaa

SEQ ID NO: 3371076 - RNA, 19 nt, Human
aauaggguauauuuuccua

SEQ ID NO: 3371077 - RNA, 16 nt, Human
aauagguucuucuugu

SEQ ID NO: 3371078 - RNA, 12 nt, Human
aauaguaauaua

SEQ ID NO: 3371079 - RNA, 13 nt, Human
aauaguaauguuu

SEQ ID NO: 3371080 - RNA, 21 nt, Human
aauaguaauuuguaaaguugg

SEQ ID NO: 3371081 - RNA, 14 nt, Human
aauaguauccucca

SEQ ID NO: 3371082 - RNA, 15 nt, Human
aauaguauccuccag

SEQ ID NO: 3371083 - RNA, 17 nt, Human
aauaguauccuccaggu

SEQ ID NO: 3371084 - RNA, 17 nt, Human
aauaguaugaaaaugga

SEQ ID NO: 3371085 - RNA, 18 nt, Human
aauaguauuuaugaaaug

SEQ ID NO: 3371086 - RNA, 15 nt, Human
aauaguauuucccau

SEQ ID NO: 3371087 - RNA, 22 nt, Human
aauaguauuugagaguucuaaa

SEQ ID NO: 3371088 - RNA, 13 nt, Human
aauagucaagaaa

SEQ ID NO: 3371089 - RNA, 20 nt, Human
aauagucuagauggcuccuc

SEQ ID NO: 3371090 - RNA, 14 nt, Human
aauagucuguguga

SEQ ID NO: 3371091 - RNA, 16 nt, Human
aauagucuuugccagu

SEQ ID NO: 3371092 - RNA, 13 nt, Human
aauagugaaauga

SEQ ID NO: 3371093 - RNA, 15 nt, Human
aauagugaaaugaau

SEQ ID NO: 3371094 - RNA, 16 nt, Human
aauaguggugugauuu

SEQ ID NO: 3371095 - RNA, 22 nt, Human
aauaguggugugauuuggggau

SEQ ID NO: 3371096 - RNA, 23 nt, Human
aauagugucauccucacagugaa

SEQ ID NO: 3371097 - RNA, 20 nt, Human
aauaguguccuaugcaauaa

SEQ ID NO: 3371098 - RNA, 21 nt, Human
aauaguguccuaugcaauaaa

SEQ ID NO: 3371099 - RNA, 22 nt, Human
aauaguguccuaugcaauaaaa

SEQ ID NO: 3371100 - RNA, 23 nt, Human
aauaguguccuaugcaauaaaau

SEQ ID NO: 3371101 - RNA, 16 nt, Human
aauagugugaaauaua

SEQ ID NO: 3371102 - RNA, 15 nt, Human
aauaguguguucuga

SEQ ID NO: 3371103 - RNA, 19 nt, Human
aauaguguuaaucaauuua

SEQ ID NO: 3371104 - RNA, 23 nt, Human
aauaguuaagacaugauuuccuu

SEQ ID NO: 3371105 - RNA, 15 nt, Human
aauaguuacuccagu

SEQ ID NO: 3371106 - RNA, 12 nt, Human
aauaguucaagg

SEQ ID NO: 3371107 - RNA, 21 nt, Human
aauaguucagguaacaggcag

SEQ ID NO: 3371108 - RNA, 11 nt, Human
aauaguuccug

SEQ ID NO: 3371109 - RNA, 13 nt, Human
aauaguuccugcu

SEQ ID NO: 3371110 - RNA, 11 nt, Human
aauaguucugu

SEQ ID NO: 3371111 - RNA, 12 nt, Human
aauaguugaauu

SEQ ID NO: 3371112 - RNA, 16 nt, Human
aauaguugagccagca

SEQ ID NO: 3371113 - RNA, 14 nt, Human
aauaguugagcccc

SEQ ID NO: 3371114 - RNA, 19 nt, Human
aauaguuuacauguaguag

SEQ ID NO: 3371115 - RNA, 22 nt, Human
aauaguuuauuuuaaaacaaua

SEQ ID NO: 3371116 - RNA, 16 nt, Human
aauaguuugucuauuu

SEQ ID NO: 3371117 - RNA, 18 nt, Human
aauaguuugucuauuuua

SEQ ID NO: 3371118 - RNA, 19 nt, Human
aauaguuugucuauuuuaa

SEQ ID NO: 3371119 - RNA, 22 nt, Human
aauaguuuuauuaauaaacauu

SEQ ID NO: 3371120 - RNA, 14 nt, Human
aauaguuuuuucuu

SEQ ID NO: 3371121 - RNA, 12 nt, Human
aauauaaaaaau

SEQ ID NO: 3371122 - RNA, 16 nt, Human
aauauaaaaaaucaug

SEQ ID NO: 3371123 - RNA, 22 nt, Human
aauauaaaaggcaaauguguac

SEQ ID NO: 3371124 - RNA, 22 nt, Human
aauauaaaauaguuguccauau

SEQ ID NO: 3371125 - RNA, 23 nt, Human
aauauaaaauaugaagacauaaa

SEQ ID NO: 3371126 - RNA, 15 nt, Human
aauauaaaauuauga

SEQ ID NO: 3371127 - RNA, 12 nt, Human
aauauaaacauc

SEQ ID NO: 3371128 - RNA, 12 nt, Human
aauauaaagacg

SEQ ID NO: 3371129 - RNA, 23 nt, Human
aauauaaagacguuuuauaagca

SEQ ID NO: 3371130 - RNA, 20 nt, Human
aauauaaaugcaaauaacaa

SEQ ID NO: 3371131 - RNA, 12 nt, Human
aauauaaauguu

SEQ ID NO: 3371132 - RNA, 16 nt, Human
aauauaacaugaaaug

SEQ ID NO: 3371133 - RNA, 16 nt, Human
aauauaagaauaaaau

SEQ ID NO: 3371134 - RNA, 13 nt, Human
aauauaagauuuu

SEQ ID NO: 3371135 - RNA, 21 nt, Human
aauauaaggaaagcaauaaau

SEQ ID NO: 3371136 - RNA, 17 nt, Human
aauauaaguaaagugau

SEQ ID NO: 3371137 - RNA, 17 nt, Human
aauauaaguuucuuugc

SEQ ID NO: 3371138 - RNA, 14 nt, Human
aauauaauauuguc

SEQ ID NO: 3371139 - RNA, 11 nt, Human
aauauaauuau

SEQ ID NO: 3371140 - RNA, 14 nt, Human
aauauaauuaucgg

SEQ ID NO: 3371141 - RNA, 13 nt, Human
aauauaauucugu

SEQ ID NO: 3371142 - RNA, 18 nt, Human
aauauacauguuuaugua

SEQ ID NO: 3371143 - RNA, 18 nt, Human
aauauacauucaaacuua

SEQ ID NO: 3371144 - RNA, 15 nt, Human
aauauacuguaaaga

SEQ ID NO: 3371145 - RNA, 18 nt, Human
aauauacuguaaagaaag

SEQ ID NO: 3371146 - RNA, 21 nt, Human
aauauacuguaaagaaagaga

SEQ ID NO: 3371147 - RNA, 17 nt, Human
aauauacuuguggacua

SEQ ID NO: 3371148 - RNA, 22 nt, Human
aauauacuuguggacuaaaaga

SEQ ID NO: 3371149 - RNA, 20 nt, Human
aauauagaauuuuuaauguu

SEQ ID NO: 3371150 - RNA, 21 nt, Human
aauauagaucaguuauaagua

SEQ ID NO: 3371151 - RNA, 13 nt, Human
aauauagcuauuu

SEQ ID NO: 3371152 - RNA, 16 nt, Human
aauauagcuguacaaa

SEQ ID NO: 3371153 - RNA, 16 nt, Human
aauauaggaacuuaaa

SEQ ID NO: 3371154 - RNA, 18 nt, Human
aauauaggaacuuaaaua

SEQ ID NO: 3371155 - RNA, 18 nt, Human
aauauauaaaaagaaaag

SEQ ID NO: 3371156 - RNA, 17 nt, Human
aauauauaaaaauauau

SEQ ID NO: 3371157 - RNA, 19 nt, Human
aauauauaaaaauauauau

SEQ ID NO: 3371158 - RNA, 20 nt, Human
aauauauaaaaauauauaua

SEQ ID NO: 3371159 - RNA, 14 nt, Human
aauauauaaauaua

SEQ ID NO: 3371160 - RNA, 14 nt, Human
aauauauaauuuau

SEQ ID NO: 3371161 - RNA, 19 nt, Human
aauauauacgaacaaaaca

SEQ ID NO: 3371162 - RNA, 10 nt, Human
aauauauaua

SEQ ID NO: 3371163 - RNA, 14 nt, Human
aauauauauaaacc

SEQ ID NO: 3371164 - RNA, 15 nt, Human
aauauauauaaaccu

SEQ ID NO: 3371165 - RNA, 19 nt, Human
aauauauauaaauauauau

SEQ ID NO: 3371166 - RNA, 12 nt, Human
aauauauauaca

SEQ ID NO: 3371167 - RNA, 19 nt, Human
aauauauauauauauaaaa

SEQ ID NO: 3371168 - RNA, 16 nt, Human
aauauauaucaaauau

SEQ ID NO: 3371169 - RNA, 22 nt, Human
aauauauauguugauuucuugu

SEQ ID NO: 3371170 - RNA, 23 nt, Human
aauuucaacgccugccuuuggca

SEQ ID NO: 3371171 - RNA, 23 nt, Human
aauuucagacucccauuccugaa

SEQ ID NO: 3371172 - RNA, 21 nt, Human
aauuucagcuucuauauauug

SEQ ID NO: 3371173 - RNA, 12 nt, Human
aauuucagggug

SEQ ID NO: 3371174 - RNA, 16 nt, Human
aauuucagggugcagc

SEQ ID NO: 3371175 - RNA, 23 nt, Human
aauuucaguccuguaguuuuauu

SEQ ID NO: 3371176 - RNA, 18 nt, Human
aauuucauaugcuguaua

SEQ ID NO: 3371177 - RNA, 21 nt, Human
aauuuccacaaaaucugucca

SEQ ID NO: 3371178 - RNA, 22 nt, Human
aauuuccauuuacuuaagacuu

SEQ ID NO: 3371179 - RNA, 12 nt, Human
aauuucccagga

SEQ ID NO: 3371180 - RNA, 22 nt, Human
aauuucccaggacccugaaggg

SEQ ID NO: 3371181 - RNA, 15 nt, Human
aauuuccccaacagu

SEQ ID NO: 3371182 - RNA, 21 nt, Human
aauuuccccaacagugugaag

SEQ ID NO: 3371183 - RNA, 17 nt, Human
aauuucccuucuugcau

SEQ ID NO: 3371184 - RNA, 13 nt, Human
aauuuccucuauu

SEQ ID NO: 3371185 - RNA, 15 nt, Human
aauuuccugggagcu

SEQ ID NO: 3371186 - RNA, 21 nt, Human
aauuuccugggagcuuuugua

SEQ ID NO: 3371187 - RNA, 21 nt, Human
aauuuccuguuggauuuguuu

SEQ ID NO: 3371188 - RNA, 21 nt, Human
aauuuccuuuauauuuaguga

SEQ ID NO: 3371189 - RNA, 21 nt, Human
aauuucgccguugaagaggaa

SEQ ID NO: 3371190 - RNA, 15 nt, Human
aauuucuaaagauaa

SEQ ID NO: 3371191 - RNA, 16 nt, Human
aauuucuaaagauaau

SEQ ID NO: 3371192 - RNA, 21 nt, Human
aauuucuaaaucuccaaaaua

SEQ ID NO: 3371193 - RNA, 16 nt, Human
aauuucuaccauuuca

SEQ ID NO: 3371194 - RNA, 11 nt, Human
aauuucuacua

SEQ ID NO: 3371195 - RNA, 15 nt, Human
aauuucuacuuugaa

SEQ ID NO: 3371196 - RNA, 17 nt, Human
aauuucuacuuugaagu

SEQ ID NO: 3371197 - RNA, 17 nt, Human
aauuucuaggacugaau

SEQ ID NO: 3371198 - RNA, 20 nt, Human
aauuucucccagucauuuaa

SEQ ID NO: 3371199 - RNA, 14 nt, Human
aauuucuccucccu

SEQ ID NO: 3371200 - RNA, 16 nt, Human
aauuucucuacugucu

SEQ ID NO: 3371201 - RNA, 18 nt, Human
aauuucugucagaaugcu

SEQ ID NO: 3371202 - RNA, 13 nt, Human
aauuucuguccuu

SEQ ID NO: 3371203 - RNA, 21 nt, Human
aauuucuuacuaaacauuuug

SEQ ID NO: 3371204 - RNA, 15 nt, Human
aauuucuuaugugac

SEQ ID NO: 3371205 - RNA, 22 nt, Human
acagcagcaagaaaaaaaaaug

SEQ ID NO: 3371206 - RNA, 15 nt, Human
acagcagccuccaac

SEQ ID NO: 3371207 - RNA, 16 nt, Human
acagcagccucugaag

SEQ ID NO: 3371208 - RNA, 17 nt, Human
acagcagccucugaagu

SEQ ID NO: 3371209 - RNA, 11 nt, Human
acagcagccug

SEQ ID NO: 3371210 - RNA, 15 nt, Human
acagcagcucaggca

SEQ ID NO: 3371211 - RNA, 16 nt, Human
acagcagcucaggcac

SEQ ID NO: 3371212 - RNA, 14 nt, Human
acagcagcugaaca

SEQ ID NO: 3371213 - RNA, 12 nt, Human
acagcagcuuca

SEQ ID NO: 3371214 - RNA, 17 nt, Human
acagcagcuucaccaga

SEQ ID NO: 3371215 - RNA, 18 nt, Human
acagcagcuucaccagag

SEQ ID NO: 3371216 - RNA, 22 nt, Human
acagcaggccagguccagagag

SEQ ID NO: 3371217 - RNA, 15 nt, Human
acagcaggcccaccu

SEQ ID NO: 3371218 - RNA, 20 nt, Human
acagcaggcccaccuaccuu

SEQ ID NO: 3371219 - RNA, 16 nt, Human
acagcaggcugccagu

SEQ ID NO: 3371220 - RNA, 13 nt, Human
acagcaguagaca

SEQ ID NO: 3371221 - RNA, 22 nt, Human
acagcagucuuaugcuuccaga

SEQ ID NO: 3371222 - RNA, 17 nt, Human
acagcagugucaucaga

SEQ ID NO: 3371223 - RNA, 18 nt, Human
acagcaguugaaaagacu

SEQ ID NO: 3371224 - RNA, 23 nt, Human
acagcaguugaaaagacuccaaa

SEQ ID NO: 3371225 - RNA, 16 nt, Human
acagcaguuucaggua

SEQ ID NO: 3371226 - RNA, 17 nt, Human
acaaugaaguugaaaau

SEQ ID NO: 3371227 - RNA, 21 nt, Human
acaaugaaguugaaaaucaua

SEQ ID NO: 3371228 - RNA, 15 nt, Human
acaaugaaugucuuu

SEQ ID NO: 3371229 - RNA, 21 nt, Human
acaaugacauacgcuuuuaau

SEQ ID NO: 3371230 - RNA, 20 nt, Human
acaaugacuaauucuugcau

SEQ ID NO: 3371231 - RNA, 18 nt, Human
acaaugacuuacuguaca

SEQ ID NO: 3371232 - RNA, 13 nt, Human
acaaugacuuuau

SEQ ID NO: 3371233 - RNA, 19 nt, Human
acaaugaugaugauaauga

SEQ ID NO: 3371234 - RNA, 20 nt, Human
acaaugaugcccugcuccag

SEQ ID NO: 3371235 - RNA, 16 nt, Human
acaaugcaaaaccuuu

SEQ ID NO: 3371236 - RNA, 11 nt, Human
acaaugcaaac

SEQ ID NO: 3371237 - RNA, 21 nt, Human
acaaugcaaaccaucauugaa

SEQ ID NO: 3371238 - RNA, 20 nt, Human
acaaugcagaugccagagca

SEQ ID NO: 3371239 - RNA, 16 nt, Human
acaaugccuauuguaa

SEQ ID NO: 3371240 - RNA, 19 nt, Human
acaaugcgaaugguagucu

SEQ ID NO: 3371241 - RNA, 21 nt, Human
acaaugcgaaugguagucuaa

SEQ ID NO: 3371242 - RNA, 14 nt, Human
acaaugcuguauuu

SEQ ID NO: 3371243 - RNA, 22 nt, Human
acaaugcuguauuuuaaaagaa

SEQ ID NO: 3371244 - RNA, 16 nt, Human
acaauggaccggagag

SEQ ID NO: 3371245 - RNA, 23 nt, Human
acaauggaccggagagugggggu

SEQ ID NO: 3371246 - RNA, 15 nt, Human
acaauggaguauucu

SEQ ID NO: 3371247 - RNA, 13 nt, Human
acaauggcagaug

SEQ ID NO: 3371248 - RNA, 17 nt, Human
acaauggggauguugug

SEQ ID NO: 3371249 - RNA, 15 nt, Human
acaaugguuuucuug

SEQ ID NO: 3371250 - RNA, 18 nt, Human
acaaugguuuuuaaauuu

SEQ ID NO: 3371251 - RNA, 12 nt, Human
acaauguaauua

SEQ ID NO: 3371252 - RNA, 13 nt, Human
acaauguaauuau

SEQ ID NO: 3371253 - RNA, 21 nt, Human
acaauguagauaaguguucug

SEQ ID NO: 3371254 - RNA, 14 nt, Human
acaauguauuuauu

SEQ ID NO: 3371255 - RNA, 17 nt, Human
acaauguauuuauuuaa

SEQ ID NO: 3371256 - RNA, 20 nt, Human
acaauguauuuauuuaaaag

SEQ ID NO: 3371257 - RNA, 11 nt, Human
acaaugucuug

SEQ ID NO: 3371258 - RNA, 22 nt, Human
acaaugugaacuuuauuaaaua

SEQ ID NO: 3371259 - RNA, 14 nt, Human
acaauguuaaggaa

SEQ ID NO: 3371260 - RNA, 20 nt, Human
acaauguuaaggaaacucuu

SEQ ID NO: 3371261 - RNA, 22 nt, Human
acaauguuaaggaaacucuuau

SEQ ID NO: 3371262 - RNA, 14 nt, Human
acaauguucuuuau

SEQ ID NO: 3371263 - RNA, 16 nt, Human
acaauguucuuuauau

SEQ ID NO: 3371264 - RNA, 17 nt, Human
acaauguucuuuauaua

SEQ ID NO: 3371265 - RNA, 16 nt, Human
acaauguuuuaacaag

SEQ ID NO: 3371266 - RNA, 14 nt, Human
acaauuagauuucu

SEQ ID NO: 3371267 - RNA, 21 nt, Human
acaauuaggcagacucuuuau

SEQ ID NO: 3371268 - RNA, 23 nt, Human
acaauuauaaacucauuuugcuu

SEQ ID NO: 3371269 - RNA, 18 nt, Human
acaauuauaucaguccuc

SEQ ID NO: 3371270 - RNA, 17 nt, Human
acaauuauuuaaagcaa

SEQ ID NO: 3371271 - RNA, 14 nt, Human
acaauucagcauua

SEQ ID NO: 3371272 - RNA, 14 nt, Human
acaauucaugaacu

SEQ ID NO: 3371273 - RNA, 19 nt, Human
acaauuccuagauaaaaag

SEQ ID NO: 3371274 - RNA, 22 nt, Human
acaauuccuagauaaaaagaug

SEQ ID NO: 3371275 - RNA, 22 nt, Human
acaauuccucuacuaacaauca

SEQ ID NO: 3371276 - RNA, 14 nt, Human
acaauucuaaaaug

SEQ ID NO: 3371277 - RNA, 22 nt, Human
acaauucuguuuuagguuaaaa

SEQ ID NO: 3371278 - RNA, 15 nt, Human
acaauucuguuuuua

SEQ ID NO: 3371279 - RNA, 13 nt, Human
acaauucuuuaua

SEQ ID NO: 3371280 - RNA, 15 nt, Human
acaauucuuuauaca

SEQ ID NO: 3371281 - RNA, 17 nt, Human
acaauugaacuuaaaua

SEQ ID NO: 3371282 - RNA, 12 nt, Human
acaauuguaaua

SEQ ID NO: 3371283 - RNA, 19 nt, Human
acaauugugggcauaaacu

SEQ ID NO: 3371284 - RNA, 16 nt, Human
acaauuguguagccuu

SEQ ID NO: 3371285 - RNA, 18 nt, Human
acaauuguguagccuuuu

SEQ ID NO: 3371286 - RNA, 12 nt, Human
acaauuguuugu

SEQ ID NO: 3371287 - RNA, 16 nt, Human
acaauuguuuuaaucu

SEQ ID NO: 3371288 - RNA, 19 nt, Human
acaauuuacaaagugugua

SEQ ID NO: 3371289 - RNA, 19 nt, Human
acaauuucaaaaaaauaaa

SEQ ID NO: 3371290 - RNA, 23 nt, Human
acaauuuccuuuauauuuaguga

SEQ ID NO: 3371291 - RNA, 11 nt, Human
acaauuucugu

SEQ ID NO: 3371292 - RNA, 13 nt, Human
acaauuucuuuug

SEQ ID NO: 3371293 - RNA, 21 nt, Human
acaauuugagauguauuucaa

SEQ ID NO: 3371294 - RNA, 17 nt, Human
acaauuugauacauaau

SEQ ID NO: 3371295 - RNA, 18 nt, Human
acaauuugauacauaaua

SEQ ID NO: 3371296 - RNA, 20 nt, Human
acaauuugcacuaaaucaga

SEQ ID NO: 3371297 - RNA, 15 nt, Human
acaauuuucagauuu

SEQ ID NO: 3371298 - RNA, 17 nt, Human
acaauuuucagauuugc

SEQ ID NO: 3371299 - RNA, 18 nt, Human
acaauuuucagauuugca

SEQ ID NO: 3371300 - RNA, 20 nt, Human
acaauuuucagauuugcaca

SEQ ID NO: 3371301 - RNA, 15 nt, Human
acaauuuuguacaaa

SEQ ID NO: 3371302 - RNA, 13 nt, Human
acaauuuuuaaug

SEQ ID NO: 3371303 - RNA, 22 nt, Human
acaauuuuuuaucaugcauguc

SEQ ID NO: 3371304 - RNA, 24 nt, Human
acaauuuuuuuuauuaguauuguu

SEQ ID NO: 3371305 - RNA, 21 nt, Human
acacaaaacuccgcccccagc

SEQ ID NO: 3371306 - RNA, 14 nt, Human
acacaaacaaacaa

SEQ ID NO: 3371307 - RNA, 14 nt, Human
acacaaacacacac

SEQ ID NO: 3371308 - RNA, 20 nt, Human
acacaaaccacaacugacac

SEQ ID NO: 3371309 - RNA, 22 nt, Human
acacaaaccacaacugacacag

SEQ ID NO: 3371310 - RNA, 18 nt, Human
acacaaacgggcucagca

SEQ ID NO: 3371311 - RNA, 15 nt, Human
acacaaacguaugua

SEQ ID NO: 3371312 - RNA, 14 nt, Human
acacaaacuguaaa

SEQ ID NO: 3371313 - RNA, 13 nt, Human
acacaaagcuuuu

SEQ ID NO: 3371314 - RNA, 19 nt, Human
acacaaagcuuuugcauau

SEQ ID NO: 3371315 - RNA, 20 nt, Human
acacaaaggaagugcccccu

SEQ ID NO: 3371316 - RNA, 23 nt, Human
acacaaaggggaucauaaaguua

SEQ ID NO: 3371317 - RNA, 14 nt, Human
acacaaaugcaggg

SEQ ID NO: 3371318 - RNA, 13 nt, Human
acacaaaugcaug

SEQ ID NO: 3371319 - RNA, 20 nt, Human
acacaaaugcucaaagaaau

SEQ ID NO: 3371320 - RNA, 22 nt, Human
acacaaaugcucaaagaaaucu

SEQ ID NO: 3371321 - RNA, 12 nt, Human
acacaacaaaaa

SEQ ID NO: 3371322 - RNA, 17 nt, Human
acacaacaaaaauuuga

SEQ ID NO: 3371323 - RNA, 13 nt, Human
acacaacagccaa

SEQ ID NO: 3371324 - RNA, 13 nt, Human
acacaacuauauu

SEQ ID NO: 3371325 - RNA, 14 nt, Human
acacaacuauauug

SEQ ID NO: 3371326 - RNA, 17 nt, Human
acacaacuauauuguuu

SEQ ID NO: 3371327 - RNA, 22 nt, Human
acacaagaagaagggcacccua

SEQ ID NO: 3371328 - RNA, 19 nt, Human
acacaagaccagugcuuag

SEQ ID NO: 3371329 - RNA, 19 nt, Human
acacaagauugguguuuuu

SEQ ID NO: 3371330 - RNA, 21 nt, Human
acacaagauugguguuuuuuu

SEQ ID NO: 3371331 - RNA, 23 nt, Human
acacaagauugguguuuuuuucu

SEQ ID NO: 3371332 - RNA, 23 nt, Human
acacaaggauagaugcuggccca

SEQ ID NO: 3371333 - RNA, 20 nt, Human
acacaaggggcccuuggagc

SEQ ID NO: 3371334 - RNA, 21 nt, Human
acacaaggucauggccacacu

SEQ ID NO: 3371335 - RNA, 23 nt, Human
acacaaggucauggccacacugu

SEQ ID NO: 3371336 - RNA, 12 nt, Human
acacaauacaau

SEQ ID NO: 3371337 - RNA, 23 nt, Human
acacaaugguuuuuaaauuuugu

SEQ ID NO: 3371338 - RNA, 23 nt, Human
acacaaugugucuuucuuuuugg

SEQ ID NO: 3371339 - RNA, 12 nt, Human
acacaauguuau

SEQ ID NO: 3371340 - RNA, 21 nt, Human
acacaauuggaauugucuuua

SEQ ID NO: 3371341 - RNA, 13 nt, Human
acacacaacaaaa

SEQ ID NO: 3371342 - RNA, 14 nt, Human
acacacaacaaaaa

SEQ ID NO: 3371343 - RNA, 14 nt, Human
acacacaacagcca

SEQ ID NO: 3371344 - RNA, 17 nt, Human
acacacaacagccaaca

SEQ ID NO: 3371345 - RNA, 11 nt, Human
acacacacaca

SEQ ID NO: 3371346 - RNA, 15 nt, Human
acacacacacaaacc

SEQ ID NO: 3371347 - RNA, 14 nt, Human
acacacacacacaa

SEQ ID NO: 3371348 - RNA, 15 nt, Human
acacacacacacaag

SEQ ID NO: 3371349 - RNA, 16 nt, Human
acacacacacacagcc

SEQ ID NO: 3371350 - RNA, 14 nt, Human
acaccaaucuuacu

SEQ ID NO: 3371351 - RNA, 18 nt, Human
acaccaaucuuacuuugu

SEQ ID NO: 3371352 - RNA, 22 nt, Human
acaccaaucuuacuuuguaaau

SEQ ID NO: 3371353 - RNA, 11 nt, Human
acaccacacac

SEQ ID NO: 3371354 - RNA, 20 nt, Human
acaccacacacaacagccaa

SEQ ID NO: 3371355 - RNA, 14 nt, Human
acaccacacccagc

SEQ ID NO: 3371356 - RNA, 12 nt, Human
acaccacagaca

SEQ ID NO: 3371357 - RNA, 13 nt, Human
acaccacagacac

SEQ ID NO: 3371358 - RNA, 14 nt, Human
acaccacagacaca

SEQ ID NO: 3371359 - RNA, 17 nt, Human
acaccacagacacacac

SEQ ID NO: 3371360 - RNA, 22 nt, Human
acaccacagacacacacacgca

SEQ ID NO: 3371361 - RNA, 18 nt, Human
acaccaccucacuccugu

SEQ ID NO: 3371362 - RNA, 17 nt, Human
acaccacuacauucugu

SEQ ID NO: 3371363 - RNA, 22 nt, Human
acaccacucuggcagccacacu

SEQ ID NO: 3371364 - RNA, 16 nt, Human
acaccagccaggcucu

SEQ ID NO: 3371365 - RNA, 17 nt, Human
acaccagccaggcucug

SEQ ID NO: 3371366 - RNA, 17 nt, Human
acaccagccccugcccc

SEQ ID NO: 3371367 - RNA, 19 nt, Human
acaccagccucgucuucau

SEQ ID NO: 3371368 - RNA, 15 nt, Human
acaccagcuguucug

SEQ ID NO: 3371369 - RNA, 23 nt, Human
acaccagcuguucugucccuugg

SEQ ID NO: 3371370 - RNA, 21 nt, Human
acaccaggccguccucccggg

SEQ ID NO: 3371371 - RNA, 12 nt, Human
acaccaggcugu

SEQ ID NO: 3371372 - RNA, 18 nt, Human
acaccaggcugugggccu

SEQ ID NO: 3371373 - RNA, 21 nt, Human
acaccaggcuugccugcaggc

SEQ ID NO: 3371374 - RNA, 19 nt, Human
acaccauaagcuacugcca

SEQ ID NO: 3371375 - RNA, 21 nt, Human
acaccauagguagaauguaaa

SEQ ID NO: 3371376 - RNA, 21 nt, Human
acaccaucacagcuuguuuug

SEQ ID NO: 3371377 - RNA, 20 nt, Human
acaccaugauuccuuuaaca

SEQ ID NO: 3371378 - RNA, 20 nt, Human
acaccauuaccaaaauaaua

SEQ ID NO: 3371379 - RNA, 17 nt, Human
acaccauuaugugcgcu

SEQ ID NO: 3371380 - RNA, 17 nt, Human
acaccauugaaggcuua

SEQ ID NO: 3371381 - RNA, 13 nt, Human
aaucuugaaaaug

SEQ ID NO: 3371382 - RNA, 15 nt, Human
aaucuugcuuucuuu

SEQ ID NO: 3371383 - RNA, 18 nt, Human
aaucuugcuuucuuuguu

SEQ ID NO: 3371384 - RNA, 23 nt, Human
aaucuuggaaguacaugaauaca

SEQ ID NO: 3371385 - RNA, 19 nt, Human
aaucuugggggguuuuuac

SEQ ID NO: 3371386 - RNA, 19 nt, Human
aaucuugguugaugccaaa

SEQ ID NO: 3371387 - RNA, 16 nt, Human
aaucuugucaugugua

SEQ ID NO: 3371388 - RNA, 16 nt, Human
aaucuugugcuagaau

SEQ ID NO: 3371389 - RNA, 20 nt, Human
aaucuugugcuagaauacuu

SEQ ID NO: 3371390 - RNA, 19 nt, Human
aaucuuguugguucaccau

SEQ ID NO: 3371391 - RNA, 14 nt, Human
aaucuuguuuccaa

SEQ ID NO: 3371392 - RNA, 17 nt, Human
aaucuuguuucugaaaa

SEQ ID NO: 3371393 - RNA, 17 nt, Human
aaucuuguuuugaaaau

SEQ ID NO: 3371394 - RNA, 19 nt, Human
aaucuuuaaaaaaaaaauu

SEQ ID NO: 3371395 - RNA, 23 nt, Human
aaucuuuaccuguauacagugca

SEQ ID NO: 3371396 - RNA, 15 nt, Human
aaucuuuauugagaa

SEQ ID NO: 3371397 - RNA, 13 nt, Human
aaucuuuccaaau

SEQ ID NO: 3371398 - RNA, 13 nt, Human
aaucuuucugcag

SEQ ID NO: 3371399 - RNA, 19 nt, Human
aaucuuucuuuaccugaga

SEQ ID NO: 3371400 - RNA, 22 nt, Human
aaucuuucuuuaccugagacca

SEQ ID NO: 3371401 - RNA, 14 nt, Human
aaucuuucuuucuu

SEQ ID NO: 3371402 - RNA, 20 nt, Human
aaucuuucuuucuuagaaau

SEQ ID NO: 3371403 - RNA, 21 nt, Human
aaucuuucuuucuuagaaauu

SEQ ID NO: 3371404 - RNA, 22 nt, Human
aaucuuucuuucuuagaaauuu

SEQ ID NO: 3371405 - RNA, 23 nt, Human
aaucuuuguaccaaaauuuuaaa

SEQ ID NO: 3371406 - RNA, 16 nt, Human
aaucuuuuauaggauu

SEQ ID NO: 3371407 - RNA, 17 nt, Human
aaucuuuucacaaauaa

SEQ ID NO: 3371408 - RNA, 18 nt, Human
aaucuuuucacaaauaaa

SEQ ID NO: 3371409 - RNA, 14 nt, Human
aaucuuuucuuauu

SEQ ID NO: 3371410 - RNA, 18 nt, Human
aaucuuuugggggaaacu

SEQ ID NO: 3371411 - RNA, 14 nt, Human
aaugaaaaaaugua

SEQ ID NO: 3371412 - RNA, 12 nt, Human
aaugaaaaauga

SEQ ID NO: 3371413 - RNA, 16 nt, Human
aaugaaaaaugaaaga

SEQ ID NO: 3371414 - RNA, 19 nt, Human
aaugaaaaauuccacucaa

SEQ ID NO: 3371415 - RNA, 21 nt, Human
aaugaaaaauuuaagcauugu

SEQ ID NO: 3371416 - RNA, 22 nt, Human
aaugaaaaauuuaagcauuguu

SEQ ID NO: 3371417 - RNA, 17 nt, Human
aaugaaaacaaugcagu

SEQ ID NO: 3371418 - RNA, 18 nt, Human
aaugaaaacaguguguaa

SEQ ID NO: 3371419 - RNA, 15 nt, Human
aaugaaaaccacauu

SEQ ID NO: 3371420 - RNA, 18 nt, Human
aaugaaaacucuuugcug

SEQ ID NO: 3371421 - RNA, 17 nt, Human
aaugaaaagcugaaucc

SEQ ID NO: 3371422 - RNA, 19 nt, Human
aaugaaaagucguuuucca

SEQ ID NO: 3371423 - RNA, 21 nt, Human
aaugaaaagucguuuuccaaa

SEQ ID NO: 3371424 - RNA, 15 nt, Human
aaugaaaauaaguga

SEQ ID NO: 3371425 - RNA, 21 nt, Human
aaugaaaauaagugaauaaua

SEQ ID NO: 3371426 - RNA, 13 nt, Human
aaugaaaaugaau

SEQ ID NO: 3371427 - RNA, 12 nt, Human
aaugaaaauguc

SEQ ID NO: 3371428 - RNA, 20 nt, Human
aaugaaaaugucagaaacca

SEQ ID NO: 3371429 - RNA, 23 nt, Human
aaugaaaaugucagaaaccaguu

SEQ ID NO: 3371430 - RNA, 15 nt, Human
aaugaaaaugucuug

SEQ ID NO: 3371431 - RNA, 16 nt, Human
aaugaaaaugucuugu

SEQ ID NO: 3371432 - RNA, 14 nt, Human
aaugaaaauuguau

SEQ ID NO: 3371433 - RNA, 20 nt, Human
aaugaaacaaauaaucacau

SEQ ID NO: 3371434 - RNA, 14 nt, Human
aaugaaacccccac

SEQ ID NO: 3371435 - RNA, 19 nt, Human
aaugaaacccccacacaca

SEQ ID NO: 3371436 - RNA, 20 nt, Human
aaugaaacccccacacacac

SEQ ID NO: 3371437 - RNA, 17 nt, Human
aaugaaaccugugucuc

SEQ ID NO: 3371438 - RNA, 19 nt, Human
aaugaaagaaaauugaguu

SEQ ID NO: 3371439 - RNA, 17 nt, Human
aaugaaagacuguacaa

SEQ ID NO: 3371440 - RNA, 18 nt, Human
aaugaaagacuguacaaa

SEQ ID NO: 3371441 - RNA, 16 nt, Human
aaugaaagauuaaaca

SEQ ID NO: 3371442 - RNA, 20 nt, Human
aaugaaagauuaaacagaug

SEQ ID NO: 3371443 - RNA, 17 nt, Human
aaugaaagcaugucuca

SEQ ID NO: 3371444 - RNA, 15 nt, Human
aaugaaagcaugugg

SEQ ID NO: 3371445 - RNA, 22 nt, Human
aaugaaagcauguggcauguuc

SEQ ID NO: 3371446 - RNA, 18 nt, Human
aaugaaagcuacucauag

SEQ ID NO: 3371447 - RNA, 17 nt, Human
aaugaaaguauaacuga

SEQ ID NO: 3371448 - RNA, 23 nt, Human
aaugaaagucuugugacuagugc

SEQ ID NO: 3371449 - RNA, 17 nt, Human
aaugaaagugaugacau

SEQ ID NO: 3371450 - RNA, 14 nt, Human
aaugaaauacacaa

SEQ ID NO: 3371451 - RNA, 23 nt, Human
aaugaaauaggagggaaaccuuu

SEQ ID NO: 3371452 - RNA, 14 nt, Human
aaugaaauaucugu

SEQ ID NO: 3371453 - RNA, 22 nt, Human
aaugaaauaucuguauuuaauu

SEQ ID NO: 3371454 - RNA, 18 nt, Human
aaugaaauauugcuguau

SEQ ID NO: 3371455 - RNA, 21 nt, Human
aaugaaauccugcuucagugu

SEQ ID NO: 3371456 - RNA, 17 nt, Human
aaugaaauccuuuuccu

SEQ ID NO: 3371457 - RNA, 14 nt, Human
aaugaaaugcauau

SEQ ID NO: 3371458 - RNA, 14 nt, Human
aaugaaauguaugc

SEQ ID NO: 3371459 - RNA, 15 nt, Human
aaugaaauguaugug

SEQ ID NO: 3371460 - RNA, 12 nt, Human
aaugaaauguuu

SEQ ID NO: 3371461 - RNA, 12 nt, Human
aaugaaauuuua

SEQ ID NO: 3371462 - RNA, 13 nt, Human
aaugaaauuuuac

SEQ ID NO: 3371463 - RNA, 14 nt, Human
aaugaaauuuuacc

SEQ ID NO: 3371464 - RNA, 16 nt, Human
aaugaaauuuuaccaa

SEQ ID NO: 3371465 - RNA, 14 nt, Human
aaugaacaaaauua

SEQ ID NO: 3371466 - RNA, 12 nt, Human
aaugaacaaaug

SEQ ID NO: 3371467 - RNA, 14 nt, Human
aaugaacaaauuga

SEQ ID NO: 3371468 - RNA, 21 nt, Human
aaugaacaagcauucucucca

SEQ ID NO: 3371469 - RNA, 14 nt, Human
aaugaacacaaauu

SEQ ID NO: 3371470 - RNA, 20 nt, Human
aaugaacacaaauuaugcua

SEQ ID NO: 3371471 - RNA, 21 nt, Human
aaugaacaucccuuuuucaau

SEQ ID NO: 3371472 - RNA, 17 nt, Human
aaugaaccacaucuugc

SEQ ID NO: 3371473 - RNA, 18 nt, Human
aaugaaccgcugaauaug

SEQ ID NO: 3371474 - RNA, 11 nt, Human
aaugaagaaag

SEQ ID NO: 3371475 - RNA, 13 nt, Human
aaugaagaauuua

SEQ ID NO: 3371476 - RNA, 16 nt, Human
aaugaagaauuuaaag

SEQ ID NO: 3371477 - RNA, 17 nt, Human
aaugaagauacugaaau

SEQ ID NO: 3371478 - RNA, 24 nt, Human
aaugaagaucuaaauaaaaugcua

SEQ ID NO: 3371479 - RNA, 22 nt, Human
aaugaagcagcuuuaaacaaau

SEQ ID NO: 3371480 - RNA, 14 nt, Human
aaugaagcaguauu

SEQ ID NO: 3371481 - RNA, 14 nt, Human
aaugaagcuugugu

SEQ ID NO: 3371482 - RNA, 19 nt, Human
aaugaagcuuguguaucca

SEQ ID NO: 3371483 - RNA, 22 nt, Human
aaugaaggcgggccugcaagcc

SEQ ID NO: 3371484 - RNA, 15 nt, Human
aaugaagguuuuugu

SEQ ID NO: 3371485 - RNA, 19 nt, Human
aaugaagguuuuuguaaag

SEQ ID NO: 3371486 - RNA, 22 nt, Human
aaugaagguuuuuguaaagauu

SEQ ID NO: 3371487 - RNA, 19 nt, Human
aaugaaguugaaaaucaua

SEQ ID NO: 3371488 - RNA, 17 nt, Human
aaugaaguuuauacagu

SEQ ID NO: 3371489 - RNA, 12 nt, Human
aaugaaguuuga

SEQ ID NO: 3371490 - RNA, 16 nt, Human
aaugaaguuugaaugu

SEQ ID NO: 3371491 - RNA, 17 nt, Human
aaugaaguuugaauguu

SEQ ID NO: 3371492 - RNA, 19 nt, Human
aaugaaguuugaauguuaa

SEQ ID NO: 3371493 - RNA, 22 nt, Human
aaugaaguuugaauguuaaaua

SEQ ID NO: 3371494 - RNA, 10 nt, Human
aaugaauaau

SEQ ID NO: 3371495 - RNA, 19 nt, Human
acaggguuuugccauguug

SEQ ID NO: 3371496 - RNA, 16 nt, Human
acagguaaaacagggc

SEQ ID NO: 3371497 - RNA, 15 nt, Human
acagguaccaguucu

SEQ ID NO: 3371498 - RNA, 19 nt, Human
acaggucaggggugacaca

SEQ ID NO: 3371499 - RNA, 20 nt, Human
acaggucaggggugacacag

SEQ ID NO: 3371500 - RNA, 13 nt, Human
acaggucccaaau

SEQ ID NO: 3371501 - RNA, 19 nt, Human
acaggucccaccuccagcc

SEQ ID NO: 3371502 - RNA, 20 nt, Human
acaggucccaccuccagccc

SEQ ID NO: 3371503 - RNA, 13 nt, Human
acagguccugauu

SEQ ID NO: 3371504 - RNA, 13 nt, Human
acaggucuagacu

SEQ ID NO: 3371505 - RNA, 16 nt, Human
acaggucucagaaucu

SEQ ID NO: 3371506 - RNA, 16 nt, Human
acaggucugggagagg

SEQ ID NO: 3371507 - RNA, 18 nt, Human
acaggugauuaacuugga

SEQ ID NO: 3371508 - RNA, 13 nt, Human
acaggugcccgcc

SEQ ID NO: 3371509 - RNA, 16 nt, Human
acagguggacacacaa

SEQ ID NO: 3371510 - RNA, 16 nt, Human
acagguggcaggacca

SEQ ID NO: 3371511 - RNA, 20 nt, Human
acagguggcaggaccaggac

SEQ ID NO: 3371512 - RNA, 15 nt, Human
acagguggugucacu

SEQ ID NO: 3371513 - RNA, 23 nt, Human
acagguggugucacugucccucc

SEQ ID NO: 3371514 - RNA, 22 nt, Human
acagguguccccagcccacugg

SEQ ID NO: 3371515 - RNA, 21 nt, Human
acaggugugagccaccacgcc

SEQ ID NO: 3371516 - RNA, 23 nt, Human
acaggugugagucaccaagccca

SEQ ID NO: 3371517 - RNA, 17 nt, Human
acaggugugguguaauu

SEQ ID NO: 3371518 - RNA, 14 nt, Human
acagguguuuauac

SEQ ID NO: 3371519 - RNA, 18 nt, Human
acagguguuuauaucucc

SEQ ID NO: 3371520 - RNA, 21 nt, Human
acagguuacaacagauuugug

SEQ ID NO: 3371521 - RNA, 15 nt, Human
acagguuagcugcuc

SEQ ID NO: 3371522 - RNA, 15 nt, Human
acagguuauaacagu

SEQ ID NO: 3371523 - RNA, 18 nt, Human
acagguuauaacaguguu

SEQ ID NO: 3371524 - RNA, 14 nt, Human
acagguuauuuuag

SEQ ID NO: 3371525 - RNA, 22 nt, Human
acagguuauuuuaguuucuguu

SEQ ID NO: 3371526 - RNA, 11 nt, Human
acagguuggga

SEQ ID NO: 3371527 - RNA, 15 nt, Human
acagguugggauggg

SEQ ID NO: 3371528 - RNA, 18 nt, Human
acagguuugggaccccug

SEQ ID NO: 3371529 - RNA, 13 nt, Human
acaguaaaaauaa

SEQ ID NO: 3371530 - RNA, 16 nt, Human
acaguaaaccacugaa

SEQ ID NO: 3371531 - RNA, 18 nt, Human
acaguaaaccacugaaaa

SEQ ID NO: 3371532 - RNA, 19 nt, Human
acaguaaaccacugaaaaa

SEQ ID NO: 3371533 - RNA, 21 nt, Human
acaguaaaccacugaaaaaau

SEQ ID NO: 3371534 - RNA, 22 nt, Human
acaguaaaccacugaaaaaaua

SEQ ID NO: 3371535 - RNA, 15 nt, Human
acaguaaauaaauug

SEQ ID NO: 3371536 - RNA, 23 nt, Human
acaguaaauaucccaaacuguga

SEQ ID NO: 3371537 - RNA, 17 nt, Human
acaguaacgcaggggaa

SEQ ID NO: 3371538 - RNA, 20 nt, Human
acaguaacuugguuauacau

SEQ ID NO: 3371539 - RNA, 20 nt, Human
acaguaaguuccuacuaggc

SEQ ID NO: 3371540 - RNA, 15 nt, Human
acaguaauuguguuu

SEQ ID NO: 3371541 - RNA, 19 nt, Human
acaguacagcaugugccuu

SEQ ID NO: 3371542 - RNA, 20 nt, Human
acaguacaggcagcacagag

SEQ ID NO: 3371543 - RNA, 19 nt, Human
acaguagaacugucuguga

SEQ ID NO: 3371544 - RNA, 14 nt, Human
acaguagagccagc

SEQ ID NO: 3371545 - RNA, 23 nt, Human
acaguagucuugaugaccaaagu

SEQ ID NO: 3371546 - RNA, 18 nt, Human
acaguagugagaagaaua

SEQ ID NO: 3371547 - RNA, 17 nt, Human
aaugagaacauguuggu

SEQ ID NO: 3371548 - RNA, 14 nt, Human
aaugagaaccaaca

SEQ ID NO: 3371549 - RNA, 22 nt, Human
aaugagaagaaaauggaaccag

SEQ ID NO: 3371550 - RNA, 17 nt, Human
aaugagaaggcagccac

SEQ ID NO: 3371551 - RNA, 15 nt, Human
aaugagaauuuaagc

SEQ ID NO: 3371552 - RNA, 22 nt, Human
aaugagacagcagucuuaugcu

SEQ ID NO: 3371553 - RNA, 14 nt, Human
aaugagacauccag

SEQ ID NO: 3371554 - RNA, 19 nt, Human
aaugagacccucguggccu

SEQ ID NO: 3371555 - RNA, 15 nt, Human
aaugagacuugccuu

SEQ ID NO: 3371556 - RNA, 16 nt, Human
aaugagacuugcucuc

SEQ ID NO: 3371557 - RNA, 16 nt, Human
aaugagacuuuaaaag

SEQ ID NO: 3371558 - RNA, 17 nt, Human
aaugagacuuuaaaagc

SEQ ID NO: 3371559 - RNA, 21 nt, Human
aaugagagacacacugaagaa

SEQ ID NO: 3371560 - RNA, 17 nt, Human
aaugagaggcauuuccc

SEQ ID NO: 3371561 - RNA, 17 nt, Human
aaugagagguuccuaag

SEQ ID NO: 3371562 - RNA, 16 nt, Human
aaugagauaguagcau

SEQ ID NO: 3371563 - RNA, 16 nt, Human
aaugagaucaggcucu

SEQ ID NO: 3371564 - RNA, 17 nt, Human
aaugagauuaauuccuu

SEQ ID NO: 3371565 - RNA, 12 nt, Human
aaugagcauguu

SEQ ID NO: 3371566 - RNA, 19 nt, Human
aaugagcccagagaacagc

SEQ ID NO: 3371567 - RNA, 11 nt, Human
aaugagccugg

SEQ ID NO: 3371568 - RNA, 14 nt, Human
aaugagcucugaaa

SEQ ID NO: 3371569 - RNA, 14 nt, Human
aaugagcuuaagaa

SEQ ID NO: 3371570 - RNA, 19 nt, Human
aaugagcuugauuaaauca

SEQ ID NO: 3371571 - RNA, 23 nt, Human
aaugagcuuucugaacagcuggu

SEQ ID NO: 3371572 - RNA, 19 nt, Human
aaugaggaaaauucuuaaa

SEQ ID NO: 3371573 - RNA, 13 nt, Human
aaugaggaaugua

SEQ ID NO: 3371574 - RNA, 22 nt, Human
aaugaggagagaaaauauaugu

SEQ ID NO: 3371575 - RNA, 14 nt, Human
aaugagggacugga

SEQ ID NO: 3371576 - RNA, 16 nt, Human
aaugagggggcucagu

SEQ ID NO: 3371577 - RNA, 16 nt, Human
aaugaggucagagccu

SEQ ID NO: 3371578 - RNA, 18 nt, Human
aaugaggucagagccugc

SEQ ID NO: 3371579 - RNA, 15 nt, Human
aaugaggucuguuua

SEQ ID NO: 3371580 - RNA, 23 nt, Human
aaugaggugggagguggaagaag

SEQ ID NO: 3371581 - RNA, 17 nt, Human
aaugaguaacauuugcu

SEQ ID NO: 3371582 - RNA, 14 nt, Human
aaugaguuuaaaaa

SEQ ID NO: 3371583 - RNA, 21 nt, Human
aaugaguuuaaaaaucaacuu

SEQ ID NO: 3371584 - RNA, 22 nt, Human
aaugaguuucuuagacuuuucc

SEQ ID NO: 3371585 - RNA, 12 nt, Human
aaugauaaaaca

SEQ ID NO: 3371586 - RNA, 15 nt, Human
aaugauaacuggaaa

SEQ ID NO: 3371587 - RNA, 17 nt, Human
aaugauaacuggaaacu

SEQ ID NO: 3371588 - RNA, 20 nt, Human
aaugauaacuggaaacuuca

SEQ ID NO: 3371589 - RNA, 16 nt, Human
aaugauaguagaguga

SEQ ID NO: 3371590 - RNA, 19 nt, Human
aaugauaguugauuuucaa

SEQ ID NO: 3371591 - RNA, 23 nt, Human
aaugauauacugaucuucauuac

SEQ ID NO: 3371592 - RNA, 17 nt, Human
aaugauaugcuuguaac

SEQ ID NO: 3371593 - RNA, 19 nt, Human
aaugauaugcuuguaacua

SEQ ID NO: 3371594 - RNA, 19 nt, Human
aaugauauuguuauauaca

SEQ ID NO: 3371595 - RNA, 17 nt, Human
aaugaucagcaucugug

SEQ ID NO: 3371596 - RNA, 20 nt, Human
aaugauccccaagugugaac

SEQ ID NO: 3371597 - RNA, 19 nt, Human
aaugauccccagcuguuua

SEQ ID NO: 3371598 - RNA, 20 nt, Human
aaugauccccagcuguuuau

SEQ ID NO: 3371599 - RNA, 19 nt, Human
aaugauccuguauucagac

SEQ ID NO: 3371600 - RNA, 16 nt, Human
aaugaucuagguuuaa

SEQ ID NO: 3371601 - RNA, 17 nt, Human
aaugaucuagguuuaac

SEQ ID NO: 3371602 - RNA, 19 nt, Human
aaugaucuagguuuaacuc

SEQ ID NO: 3371603 - RNA, 16 nt, Human
aaugaucucuucuuuu

SEQ ID NO: 3371604 - RNA, 21 nt, Human
aaugaucugauugaccguguu

SEQ ID NO: 3371605 - RNA, 17 nt, Human
aaugaucuuuucaaguu

SEQ ID NO: 3371606 - RNA, 12 nt, Human
aaugaugauaac

SEQ ID NO: 3371607 - RNA, 23 nt, Human
aaugaugaucaauuauaguuucu

SEQ ID NO: 3371608 - RNA, 21 nt, Human
aaugaugauccuaggcauuug

SEQ ID NO: 3371609 - RNA, 23 nt, Human
aaugaugaugacgacgacaacga

SEQ ID NO: 3371610 - RNA, 13 nt, Human
aaugaugcacauu

SEQ ID NO: 3371611 - RNA, 18 nt, Human
aaugaugcacauuucaug

SEQ ID NO: 3371612 - RNA, 19 nt, Human
aaugaugcuauuugcaauu

SEQ ID NO: 3371613 - RNA, 14 nt, Human
aaugauggcaauuu

SEQ ID NO: 3371614 - RNA, 17 nt, Human
aaugauggcaauuuugu

SEQ ID NO: 3371615 - RNA, 15 nt, Human
aaugauguccagaag

SEQ ID NO: 3371616 - RNA, 18 nt, Human
aaugauuauuuucauuac

SEQ ID NO: 3371617 - RNA, 19 nt, Human
aaugauuauuuucauuaca

SEQ ID NO: 3371618 - RNA, 21 nt, Human
aaugauucaguguuaaaugug

SEQ ID NO: 3371619 - RNA, 22 nt, Human
aaugauucaguguuaaauguga

SEQ ID NO: 3371620 - RNA, 23 nt, Human
aaugauucaguguuaaaugugau

SEQ ID NO: 3371621 - RNA, 14 nt, Human
aaugauuguaaaau

SEQ ID NO: 3371622 - RNA, 20 nt, Human
aaugauuguaaaauagcuug

SEQ ID NO: 3371623 - RNA, 13 nt, Human
aaugauuguuuaa

SEQ ID NO: 3371624 - RNA, 14 nt, Human
aaugauuguuuaaa

SEQ ID NO: 3371625 - RNA, 24 nt, Human
aaugauuucagcucacugcaaccu

SEQ ID NO: 3371626 - RNA, 13 nt, Human
aaugauuucaugc

SEQ ID NO: 3371627 - RNA, 23 nt, Human
aaugauuuccucuguaaucuauu

SEQ ID NO: 3371628 - RNA, 20 nt, Human
aaugauuuuaucugugaauu

SEQ ID NO: 3371629 - RNA, 14 nt, Human
aaugauuuuuagau

SEQ ID NO: 3371630 - RNA, 15 nt, Human
aaugauuuuucuuua

SEQ ID NO: 3371631 - RNA, 12 nt, Human
aaugcaaaaaaa

SEQ ID NO: 3371632 - RNA, 16 nt, Human
aaugcaaaaaaaauua

SEQ ID NO: 3371633 - RNA, 17 nt, Human
aaugcaaaaacucuuug

SEQ ID NO: 3371634 - RNA, 21 nt, Human
aaugcaaaaauuagccgggcg

SEQ ID NO: 3371635 - RNA, 20 nt, Human
aaugcaaaacacaaaacaaa

SEQ ID NO: 3371636 - RNA, 16 nt, Human
aaugcaaaccaucauu

SEQ ID NO: 3371637 - RNA, 22 nt, Human
aaugcaaaccaucauugaaauc

SEQ ID NO: 3371638 - RNA, 17 nt, Human
aaugcaaagaaucccua

SEQ ID NO: 3371639 - RNA, 22 nt, Human
acaggcagcgauggucucagaa

SEQ ID NO: 3371640 - RNA, 21 nt, Human
acaggcagcuggaugagacuu

SEQ ID NO: 3371641 - RNA, 15 nt, Human
acaggcagcuuucua

SEQ ID NO: 3371642 - RNA, 17 nt, Human
acaggcagcuuucuaga

SEQ ID NO: 3371643 - RNA, 12 nt, Human
acaggcagggca

SEQ ID NO: 3371644 - RNA, 13 nt, Human
acaggcagggcag

SEQ ID NO: 3371645 - RNA, 22 nt, Human
acaggcagggcaggaccagccc

SEQ ID NO: 3371646 - RNA, 20 nt, Human
acaggcagucucucucuucc

SEQ ID NO: 3371647 - RNA, 22 nt, Human
acaggcaugaggaaucugggag

SEQ ID NO: 3371648 - RNA, 16 nt, Human
acaggcaugugucacc

SEQ ID NO: 3371649 - RNA, 15 nt, Human
acaggcauguucucu

SEQ ID NO: 3371650 - RNA, 18 nt, Human
acaggcauguucucugag

SEQ ID NO: 3371651 - RNA, 18 nt, Human
acaggcauuuccugggug

SEQ ID NO: 3371652 - RNA, 12 nt, Human
acaggcccagca

SEQ ID NO: 3371653 - RNA, 22 nt, Human
acaggcccagcauugcugguuc

SEQ ID NO: 3371654 - RNA, 22 nt, Human
acaggcccggcuccaggcuccu

SEQ ID NO: 3371655 - RNA, 22 nt, Human
acaggcccuccucccucccagc

SEQ ID NO: 3371656 - RNA, 14 nt, Human
acaggcccugcucc

SEQ ID NO: 3371657 - RNA, 15 nt, Human
acaggcccugcuccu

SEQ ID NO: 3371658 - RNA, 21 nt, Human
acaggcccugcuccugcagca

SEQ ID NO: 3371659 - RNA, 18 nt, Human
acaggcccuuuccucagg

SEQ ID NO: 3371660 - RNA, 20 nt, Human
acaggcccuuuccucaggca

SEQ ID NO: 3371661 - RNA, 21 nt, Human
acaggcccuuuccucaggcaa

SEQ ID NO: 3371662 - RNA, 19 nt, Human
acaggccucaccucuaccc

SEQ ID NO: 3371663 - RNA, 13 nt, Human
acaggccucaggg

SEQ ID NO: 3371664 - RNA, 21 nt, Human
acaggccugagauuucaucug

SEQ ID NO: 3371665 - RNA, 21 nt, Human
acaggcgagagaggagccaga

SEQ ID NO: 3371666 - RNA, 12 nt, Human
acaggcucaggc

SEQ ID NO: 3371667 - RNA, 14 nt, Human
acaggcucaggcag

SEQ ID NO: 3371668 - RNA, 13 nt, Human
acaggcuccugcc

SEQ ID NO: 3371669 - RNA, 15 nt, Human
acaggcugagugcag

SEQ ID NO: 3371670 - RNA, 20 nt, Human
acaggcugagugcaggccca

SEQ ID NO: 3371671 - RNA, 22 nt, Human
acaggcugagugcaggcccacc

SEQ ID NO: 3371672 - RNA, 23 nt, Human
acaggcugagugcaggcccaccc

SEQ ID NO: 3371673 - RNA, 16 nt, Human
acaggcugcggccccu

SEQ ID NO: 3371674 - RNA, 18 nt, Human
acaggcugcggccccucc

SEQ ID NO: 3371675 - RNA, 19 nt, Human
acaggcugcggccccuccc

SEQ ID NO: 3371676 - RNA, 21 nt, Human
acaggcuggaagauagcugug

SEQ ID NO: 3371677 - RNA, 12 nt, Human
acaggcugggcu

SEQ ID NO: 3371678 - RNA, 15 nt, Human
acaggcugggcuggg

SEQ ID NO: 3371679 - RNA, 19 nt, Human
acaggcuguucugcacuga

SEQ ID NO: 3371680 - RNA, 21 nt, Human
acaggcuguucugcacugaaa

SEQ ID NO: 3371681 - RNA, 19 nt, Human
acaggcuuagugauguaau

SEQ ID NO: 3371682 - RNA, 23 nt, Human
acagggaacccugcuugcacuuu

SEQ ID NO: 3371683 - RNA, 22 nt, Human
acagggaacgugauuagugaaa

SEQ ID NO: 3371684 - RNA, 15 nt, Human
acagggaagagcaga

SEQ ID NO: 3371685 - RNA, 16 nt, Human
acagggaagcuacagg

SEQ ID NO: 3371686 - RNA, 13 nt, Human
acagggaaggcag

SEQ ID NO: 3371687 - RNA, 13 nt, Human
acagggacuugaa

SEQ ID NO: 3371688 - RNA, 15 nt, Human
acagggagccuccug

SEQ ID NO: 3371689 - RNA, 16 nt, Human
acagggagccuccugc

SEQ ID NO: 3371690 - RNA, 17 nt, Human
acagggagccuccugcc

SEQ ID NO: 3371691 - RNA, 12 nt, Human
acagggagggga

SEQ ID NO: 3371692 - RNA, 21 nt, Human
acagggaugagcauggagcug

SEQ ID NO: 3371693 - RNA, 20 nt, Human
acagggauuuagacuuacua

SEQ ID NO: 3371694 - RNA, 22 nt, Human
acagggcacaccgggcacucag

SEQ ID NO: 3371695 - RNA, 16 nt, Human
acagggcaugaaauga

SEQ ID NO: 3371696 - RNA, 23 nt, Human
acagggcaugccccggccaccuc

SEQ ID NO: 3371697 - RNA, 24 nt, Human
acagggcaugccccggccaccucu

SEQ ID NO: 3371698 - RNA, 15 nt, Human
acagggccacauaga

SEQ ID NO: 3371699 - RNA, 17 nt, Human
acagggccagugcaguu

SEQ ID NO: 3371700 - RNA, 21 nt, Human
acagggccuuuggcaggugca

SEQ ID NO: 3371701 - RNA, 16 nt, Human
acagggcggggguggc

SEQ ID NO: 3371702 - RNA, 21 nt, Human
acagggcugauaagcuaacac

SEQ ID NO: 3371703 - RNA, 18 nt, Human
acagggcuggcccagccc

SEQ ID NO: 3371704 - RNA, 20 nt, Human
acagggcuggcccagcccug

SEQ ID NO: 3371705 - RNA, 17 nt, Human
acaggggaauauuuuau

SEQ ID NO: 3371706 - RNA, 20 nt, Human
acaggggaauauuuuauuca

SEQ ID NO: 3371707 - RNA, 22 nt, Human
acaggggaggugauagcauugc

SEQ ID NO: 3371708 - RNA, 15 nt, Human
acaggggcaggagga

SEQ ID NO: 3371709 - RNA, 17 nt, Human
acaggggccagaagaug

SEQ ID NO: 3371710 - RNA, 13 nt, Human
acagggggucugg

SEQ ID NO: 3371711 - RNA, 20 nt, Human
acagggggucuggcuggugu

SEQ ID NO: 3371712 - RNA, 23 nt, Human
acagggucugcucuuucucugcc

SEQ ID NO: 3371713 - RNA, 24 nt, Human
acagggucugcucuuucucugcca

SEQ ID NO: 3371714 - RNA, 18 nt, Human
acaggguuuuuaccuguc

SEQ ID NO: 3371715 - RNA, 14 nt, Human
acagguaaaacagg

SEQ ID NO: 3371716 - RNA, 14 nt, Human
acagguacuuuguc

SEQ ID NO: 3371717 - RNA, 22 nt, Human
acagguagaauuaucuaauuua

SEQ ID NO: 3371718 - RNA, 12 nt, Human
acagguauuuug

SEQ ID NO: 3371719 - RNA, 17 nt, Human
acagguauuuuguuucu

SEQ ID NO: 3371720 - RNA, 23 nt, Human
acaggucaauacaguacaggcag

SEQ ID NO: 3371721 - RNA, 21 nt, Human
acaggucaggggugacacaga

SEQ ID NO: 3371722 - RNA, 22 nt, Human
acaggucaggggugacacagac

SEQ ID NO: 3371723 - RNA, 19 nt, Human
acaggucauauuaauauau

SEQ ID NO: 3371724 - RNA, 19 nt, Human
acaggucuccucuuaaaaa

SEQ ID NO: 3371725 - RNA, 19 nt, Human
acaggucugggagaggcag

SEQ ID NO: 3371726 - RNA, 16 nt, Human
acaggucuucaucgaa

SEQ ID NO: 3371727 - RNA, 18 nt, Human
acaggugcuaauuuguuu

SEQ ID NO: 3371728 - RNA, 22 nt, Human
acaggugggcuucccaguggcu

SEQ ID NO: 3371729 - RNA, 18 nt, Human
acagguggugucacuguc

SEQ ID NO: 3371730 - RNA, 20 nt, Human
acagguggugucacuguccc

SEQ ID NO: 3371731 - RNA, 17 nt, Human
acagguguccccagccc

SEQ ID NO: 3371732 - RNA, 13 nt, Human
acaggugugcacc

SEQ ID NO: 3371733 - RNA, 16 nt, Human
acaggugugguguaau

SEQ ID NO: 3371734 - RNA, 18 nt, Human
acagguuacaacagauuu

SEQ ID NO: 3371735 - RNA, 19 nt, Human
acagguuacaacagauuug

SEQ ID NO: 3371736 - RNA, 22 nt, Human
acagguuacaacagauuuguga

SEQ ID NO: 3371737 - RNA, 21 nt, Human
acagguuauuuuaguuucugu

SEQ ID NO: 3371738 - RNA, 16 nt, Human
acagguuggaagagaa

SEQ ID NO: 3371739 - RNA, 20 nt, Human
acagguuggaagagaaucac

SEQ ID NO: 3371740 - RNA, 14 nt, Human
acagguuuuauaau

SEQ ID NO: 3371741 - RNA, 16 nt, Human
acagguuuucacauaa

SEQ ID NO: 3371742 - RNA, 14 nt, Human
acaguaaaaauaaa

SEQ ID NO: 3371743 - RNA, 16 nt, Human
acaguaaaaauaaaau

SEQ ID NO: 3371744 - RNA, 13 nt, Human
acaguaaauaaau

SEQ ID NO: 3371745 - RNA, 19 nt, Human
acaguaacgcaggggaaac

SEQ ID NO: 3371746 - RNA, 15 nt, Human
acaguaacuugguua

SEQ ID NO: 3371747 - RNA, 18 nt, Human
acaguaacuuuaugugua

SEQ ID NO: 3371748 - RNA, 16 nt, Human
acaguaaugucauaaa

SEQ ID NO: 3371749 - RNA, 15 nt, Human
acaguacagcaugug

SEQ ID NO: 3371750 - RNA, 17 nt, Human
acaguacagcaugugcc

SEQ ID NO: 3371751 - RNA, 15 nt, Human
acaguacccaaacug

SEQ ID NO: 3371752 - RNA, 22 nt, Human
acaguaccccucuagcuuuguu

SEQ ID NO: 3371753 - RNA, 19 nt, Human
acaguacccugguugugug

SEQ ID NO: 3371754 - RNA, 13 nt, Human
acaguagaacugu

SEQ ID NO: 3371755 - RNA, 15 nt, Human
acaguagagccagcu

SEQ ID NO: 3371756 - RNA, 13 nt, Human
acaguaggagccc

SEQ ID NO: 3371757 - RNA, 22 nt, Human
acaguaggagcccagcucugaa

SEQ ID NO: 3371758 - RNA, 21 nt, Human
acaguaguaccaaaugcuuua

SEQ ID NO: 3371759 - RNA, 23 nt, Human
acaguaguaccaaaugcuuuaaa

SEQ ID NO: 3371760 - RNA, 13 nt, Human
acaguauaauuaa

SEQ ID NO: 3371761 - RNA, 15 nt, Human
acaguauaauuaaca

SEQ ID NO: 3371762 - RNA, 21 nt, Human
acaguauaauuaacauguuaa

SEQ ID NO: 3371763 - RNA, 18 nt, Human
acauuuuaaaaacauaga

SEQ ID NO: 3371764 - RNA, 14 nt, Human
acauuuuaaauaaa

SEQ ID NO: 3371765 - RNA, 11 nt, Human
acauuuuaaca

SEQ ID NO: 3371766 - RNA, 14 nt, Human
acauuuuaacaaga

SEQ ID NO: 3371767 - RNA, 14 nt, Human
acauuuuacauuaa

SEQ ID NO: 3371768 - RNA, 20 nt, Human
acauuuuauuuuauuaugca

SEQ ID NO: 3371769 - RNA, 19 nt, Human
acauuuuccuuuucaaaua

SEQ ID NO: 3371770 - RNA, 18 nt, Human
acauuuucuaagaaacau

SEQ ID NO: 3371771 - RNA, 13 nt, Human
acauuuucucuua

SEQ ID NO: 3371772 - RNA, 17 nt, Human
acauuuucuuaauccag

SEQ ID NO: 3371773 - RNA, 15 nt, Human
acauuuugagaacaa

SEQ ID NO: 3371774 - RNA, 17 nt, Human
acauuuuggugagaaau

SEQ ID NO: 3371775 - RNA, 11 nt, Human
acauuuuguau

SEQ ID NO: 3371776 - RNA, 13 nt, Human
acauuuuguauaa

SEQ ID NO: 3371777 - RNA, 16 nt, Human
acauuuuguauaauug

SEQ ID NO: 3371778 - RNA, 14 nt, Human
acauuuuguucuua

SEQ ID NO: 3371779 - RNA, 20 nt, Human
acauuuuguucuuacacaua

SEQ ID NO: 3371780 - RNA, 15 nt, Human
acauuuuguuguaaa

SEQ ID NO: 3371781 - RNA, 20 nt, Human
acauuuuguuguaaaaagaa

SEQ ID NO: 3371782 - RNA, 23 nt, Human
acauuuuguuguaaaaagaaaaa

SEQ ID NO: 3371783 - RNA, 22 nt, Human
accauuuugcugucccuuuucc

SEQ ID NO: 3371784 - RNA, 23 nt, Human
accauuuuguuauugacuaacag

SEQ ID NO: 3371785 - RNA, 15 nt, Human
accauuuuuguuacu

SEQ ID NO: 3371786 - RNA, 22 nt, Human
accauuuuuuaaggaaacaaua

SEQ ID NO: 3371787 - RNA, 17 nt, Human
accauuuuuuaauuuac

SEQ ID NO: 3371788 - RNA, 18 nt, Human
acccaaaaacugucuuua

SEQ ID NO: 3371789 - RNA, 15 nt, Human
acccaaaacaagccu

SEQ ID NO: 3371790 - RNA, 14 nt, Human
acccaaaccuggag

SEQ ID NO: 3371791 - RNA, 18 nt, Human
acccaaagaccaauauuc

SEQ ID NO: 3371792 - RNA, 18 nt, Human
acccaaagagguauuuau

SEQ ID NO: 3371793 - RNA, 14 nt, Human
acccaaagcaugga

SEQ ID NO: 3371794 - RNA, 16 nt, Human
acccaaagcauggacu

SEQ ID NO: 3371795 - RNA, 11 nt, Human
acccaaagcug

SEQ ID NO: 3371796 - RNA, 18 nt, Human
acccaaagcugagccugc

SEQ ID NO: 3371797 - RNA, 23 nt, Human
acccaacggcccugcagccagcu

SEQ ID NO: 3371798 - RNA, 14 nt, Human
acccaagcuuggca

SEQ ID NO: 3371799 - RNA, 17 nt, Human
acccaaggacugaggga

SEQ ID NO: 3371800 - RNA, 15 nt, Human
acccaaggagcacag

SEQ ID NO: 3371801 - RNA, 21 nt, Human
acccaaggagcacagguccca

SEQ ID NO: 3371802 - RNA, 16 nt, Human
acccaagggccuggcc

SEQ ID NO: 3371803 - RNA, 23 nt, Human
acccaagggccuggccugagcug

SEQ ID NO: 3371804 - RNA, 16 nt, Human
acccaaguccaagcau

SEQ ID NO: 3371805 - RNA, 16 nt, Human
acccaagugggggcag

SEQ ID NO: 3371806 - RNA, 17 nt, Human
acccaauagcugcccau

SEQ ID NO: 3371807 - RNA, 13 nt, Human
acccaauccaaau

SEQ ID NO: 3371808 - RNA, 20 nt, Human
acccaaugcacacaaaacaa

SEQ ID NO: 3371809 - RNA, 22 nt, Human
acccaauuaaguccuacuuuac

SEQ ID NO: 3371810 - RNA, 20 nt, Human
acccacaaaaguacaauuua

SEQ ID NO: 3371811 - RNA, 17 nt, Human
acccacaagaaaugaaa

SEQ ID NO: 3371812 - RNA, 17 nt, Human
acccacaagugccacug

SEQ ID NO: 3371813 - RNA, 18 nt, Human
acccacacaaauaacaag

SEQ ID NO: 3371814 - RNA, 15 nt, Human
acccacaccucugcc

SEQ ID NO: 3371815 - RNA, 23 nt, Human
acccacacucagauccuccucau

SEQ ID NO: 3371816 - RNA, 14 nt, Human
acccacagaaagag

SEQ ID NO: 3371817 - RNA, 14 nt, Human
acccacaugcucca

SEQ ID NO: 3371818 - RNA, 17 nt, Human
acccaccaacccucagg

SEQ ID NO: 3371819 - RNA, 15 nt, Human
acccaccaccaugcc

SEQ ID NO: 3371820 - RNA, 16 nt, Human
acccacccagcaccca

SEQ ID NO: 3371821 - RNA, 23 nt, Human
acccaccccaccugcagggcugc

SEQ ID NO: 3371822 - RNA, 13 nt, Human
acccaccccugug

SEQ ID NO: 3371823 - RNA, 15 nt, Human
acccaccccugugcu

SEQ ID NO: 3371824 - RNA, 17 nt, Human
acccaccccugugcucc

SEQ ID NO: 3371825 - RNA, 16 nt, Human
acauuuuuauuuauga

SEQ ID NO: 3371826 - RNA, 17 nt, Human
acauuuuuauuuaugaa

SEQ ID NO: 3371827 - RNA, 18 nt, Human
acauuuuuauuuaugaag

SEQ ID NO: 3371828 - RNA, 23 nt, Human
acauuuuuauuuaugaaguuuaa

SEQ ID NO: 3371829 - RNA, 21 nt, Human
acauuuuucagauauaaaaga

SEQ ID NO: 3371830 - RNA, 23 nt, Human
acauuuuucuuagggaaggauac

SEQ ID NO: 3371831 - RNA, 14 nt, Human
acauuuuuuaaaug

SEQ ID NO: 3371832 - RNA, 16 nt, Human
acauuuuuuaaaugca

SEQ ID NO: 3371833 - RNA, 14 nt, Human
acauuuuuucauca

SEQ ID NO: 3371834 - RNA, 13 nt, Human
acauuuuuugaaa

SEQ ID NO: 3371835 - RNA, 13 nt, Human
acauuuuuuucua

SEQ ID NO: 3371836 - RNA, 14 nt, Human
accaaaaagaaaaa

SEQ ID NO: 3371837 - RNA, 13 nt, Human
accaaaagaagua

SEQ ID NO: 3371838 - RNA, 23 nt, Human
accaaaaguuacauguuugcacc

SEQ ID NO: 3371839 - RNA, 13 nt, Human
accaaaauaagaa

SEQ ID NO: 3371840 - RNA, 15 nt, Human
accaaaauaagaaaa

SEQ ID NO: 3371841 - RNA, 16 nt, Human
accaaaauccccuucu

SEQ ID NO: 3371842 - RNA, 17 nt, Human
accaaaauccccuucuc

SEQ ID NO: 3371843 - RNA, 16 nt, Human
accaaaauuauuucag

SEQ ID NO: 3371844 - RNA, 21 nt, Human
accaaaauuugggguauuuau

SEQ ID NO: 3371845 - RNA, 16 nt, Human
accaaacaauuauuua

SEQ ID NO: 3371846 - RNA, 20 nt, Human
accaaacccacccuuucuac

SEQ ID NO: 3371847 - RNA, 14 nt, Human
accaaaccuucuga

SEQ ID NO: 3371848 - RNA, 22 nt, Human
accaaagauauauacacaggau

SEQ ID NO: 3371849 - RNA, 23 nt, Human
accaaagauauauacacaggauc

SEQ ID NO: 3371850 - RNA, 23 nt, Human
accaaagaugaaugaagcaaaug

SEQ ID NO: 3371851 - RNA, 20 nt, Human
accaaagcaccuuagcuggc

SEQ ID NO: 3371852 - RNA, 12 nt, Human
accaaagccacc

SEQ ID NO: 3371853 - RNA, 13 nt, Human
accaaagcugccc

SEQ ID NO: 3371854 - RNA, 18 nt, Human
accaaagcugcccacugu

SEQ ID NO: 3371855 - RNA, 21 nt, Human
accaaaggacauuaugugugc

SEQ ID NO: 3371856 - RNA, 13 nt, Human
accaaaggccagg

SEQ ID NO: 3371857 - RNA, 18 nt, Human
accaaaggugaaggaaua

SEQ ID NO: 3371858 - RNA, 21 nt, Human
accaaaggugaaggaauauau

SEQ ID NO: 3371859 - RNA, 21 nt, Human
accaaaguccuuuuuuuccau

SEQ ID NO: 3371860 - RNA, 14 nt, Human
accaaaguucuaau

SEQ ID NO: 3371861 - RNA, 20 nt, Human
accaaaguucuaauaauuuc

SEQ ID NO: 3371862 - RNA, 21 nt, Human
accaaauaucaccaggacugu

SEQ ID NO: 3371863 - RNA, 20 nt, Human
accaaaucucucaaaucugu

SEQ ID NO: 3371864 - RNA, 15 nt, Human
accaaaucuggaagc

SEQ ID NO: 3371865 - RNA, 12 nt, Human
accaaaugcauc

SEQ ID NO: 3371866 - RNA, 11 nt, Human
accaaaugcuu

SEQ ID NO: 3371867 - RNA, 22 nt, Human
accaaaugcuuuaaaaacuauu

SEQ ID NO: 3371868 - RNA, 15 nt, Human
accaaaugguacaaa

SEQ ID NO: 3371869 - RNA, 18 nt, Human
accaaauguaacuauguu

SEQ ID NO: 3371870 - RNA, 14 nt, Human
accaaauuaucuug

SEQ ID NO: 3371871 - RNA, 17 nt, Human
accaaauuuuucuauca

SEQ ID NO: 3371872 - RNA, 13 nt, Human
accaacaagggca

SEQ ID NO: 3371873 - RNA, 16 nt, Human
accaacaagggcagug

SEQ ID NO: 3371874 - RNA, 21 nt, Human
accaacaccaucacagcuugu

SEQ ID NO: 3371875 - RNA, 14 nt, Human
accaacacgagcag

SEQ ID NO: 3371876 - RNA, 19 nt, Human
accaacacgagcaggcuac

SEQ ID NO: 3371877 - RNA, 22 nt, Human
accaacaggcuguucugcacug

SEQ ID NO: 3371878 - RNA, 16 nt, Human
accaacauacucccau

SEQ ID NO: 3371879 - RNA, 21 nt, Human
accaacaucuacaaaacauua

SEQ ID NO: 3371880 - RNA, 20 nt, Human
accaaccacugcgaccacaa

SEQ ID NO: 3371881 - RNA, 20 nt, Human
accaacccagccgcugcccg

SEQ ID NO: 3371882 - RNA, 22 nt, Human
accaacccaucagaaggagaag

SEQ ID NO: 3371883 - RNA, 14 nt, Human
accaacccucaggg

SEQ ID NO: 3371884 - RNA, 21 nt, Human
accaacccucagggcaaagcc

SEQ ID NO: 3371885 - RNA, 13 nt, Human
accaaccugacca

SEQ ID NO: 3371886 - RNA, 11 nt, Human
accaaccuggg

SEQ ID NO: 3371887 - RNA, 15 nt, Human
accaacuagacauuc

SEQ ID NO: 3371888 - RNA, 17 nt, Human
accaacuagacauucug

SEQ ID NO: 3371889 - RNA, 23 nt, Human
accaacuccuaguucuagaaaaa

SEQ ID NO: 3371890 - RNA, 11 nt, Human
accaacuggaa

SEQ ID NO: 3371891 - RNA, 23 nt, Human
accaacugucacucauugcugag

SEQ ID NO: 3371892 - RNA, 15 nt, Human
accaacugucacugu

SEQ ID NO: 3371893 - RNA, 20 nt, Human
accaacuuguauccaggccu

SEQ ID NO: 3371894 - RNA, 12 nt, Human
accaacuuucaa

SEQ ID NO: 3371895 - RNA, 14 nt, Human
accaacuuucaaga

SEQ ID NO: 3371896 - RNA, 20 nt, Human
accaacuuucaagaacuugu

SEQ ID NO: 3371897 - RNA, 19 nt, Human
accaacuuucuguaaacuc

SEQ ID NO: 3371898 - RNA, 21 nt, Human
accaacuuuucuauuaaaagu

SEQ ID NO: 3371899 - RNA, 22 nt, Human
accaacuuuucuauuaaaagug

SEQ ID NO: 3371900 - RNA, 19 nt, Human
accaagaagccuuuccugu

SEQ ID NO: 3371901 - RNA, 20 nt, Human
accaagaagccuuuccugua

SEQ ID NO: 3371902 - RNA, 13 nt, Human
accaagagagaaa

SEQ ID NO: 3371903 - RNA, 15 nt, Human
accaagagauugcua

SEQ ID NO: 3371904 - RNA, 18 nt, Human
accaagagauugcuaauu

SEQ ID NO: 3371905 - RNA, 12 nt, Human
accaagaggcug

SEQ ID NO: 3371906 - RNA, 14 nt, Human
accaagaucuauaa

SEQ ID NO: 3371907 - RNA, 17 nt, Human
accaagcacagcagccu

SEQ ID NO: 3371908 - RNA, 15 nt, Human
accaagcaggagacg

SEQ ID NO: 3371909 - RNA, 18 nt, Human
accaagcucacaguuccu

SEQ ID NO: 3371910 - RNA, 19 nt, Human
accaagcucacaguuccuc

SEQ ID NO: 3371911 - RNA, 17 nt, Human
accaagcugaguuuccu

SEQ ID NO: 3371912 - RNA, 20 nt, Human
accaagcugugccacccugg

SEQ ID NO: 3371913 - RNA, 20 nt, Human
accaaggaaacgcuaccucu

SEQ ID NO: 3371914 - RNA, 21 nt, Human
accaaggaaacgcuaccucuc

SEQ ID NO: 3371915 - RNA, 17 nt, Human
accaaggagaugaagca

SEQ ID NO: 3371916 - RNA, 16 nt, Human
accaaggcaaggcagg

SEQ ID NO: 3371917 - RNA, 19 nt, Human
accaaggcaaggcaggugc

SEQ ID NO: 3371918 - RNA, 17 nt, Human
accaaggcuuucucuac

SEQ ID NO: 3371919 - RNA, 20 nt, Human
accaagguagaaugaccuug

SEQ ID NO: 3371920 - RNA, 15 nt, Human
accaaguauuuauua

SEQ ID NO: 3371921 - RNA, 16 nt, Human
accaaguggaccuuga

SEQ ID NO: 3371922 - RNA, 15 nt, Human
accaauaaaauuucu

SEQ ID NO: 3371923 - RNA, 17 nt, Human
accaauaaagugacccu

SEQ ID NO: 3371924 - RNA, 13 nt, Human
accaauagauucc

SEQ ID NO: 3371925 - RNA, 23 nt, Human
accaauagggcugagcucucugu

SEQ ID NO: 3371926 - RNA, 14 nt, Human
accaauauuguaca

SEQ ID NO: 3371927 - RNA, 19 nt, Human
accaauauuguacaguuuu

SEQ ID NO: 3371928 - RNA, 20 nt, Human
aauuuagguuuuuauuagua

SEQ ID NO: 3371929 - RNA, 16 nt, Human
aauuuaguaaauguua

SEQ ID NO: 3371930 - RNA, 20 nt, Human
aauuuaguaaauguuaucuu

SEQ ID NO: 3371931 - RNA, 13 nt, Human
aauuuaguauuuu

SEQ ID NO: 3371932 - RNA, 21 nt, Human
aauuuagugaucuuagcauag

SEQ ID NO: 3371933 - RNA, 16 nt, Human
aauuuaguguauccau

SEQ ID NO: 3371934 - RNA, 15 nt, Human
aauuuaguuauugau

SEQ ID NO: 3371935 - RNA, 21 nt, Human
aauuuaguuucauauaaagua

SEQ ID NO: 3371936 - RNA, 18 nt, Human
aauuuaguuuuuguucuu

SEQ ID NO: 3371937 - RNA, 16 nt, Human
aauuuauaaaaaggug

SEQ ID NO: 3371938 - RNA, 16 nt, Human
aauuuauaauuuuaag

SEQ ID NO: 3371939 - RNA, 15 nt, Human
aauuuauacaauauc

SEQ ID NO: 3371940 - RNA, 21 nt, Human
aauuuauaccuaccugugugg

SEQ ID NO: 3371941 - RNA, 21 nt, Human
aauuuauaccucaauuuucac

SEQ ID NO: 3371942 - RNA, 15 nt, Human
aauuuauaguuuaua

SEQ ID NO: 3371943 - RNA, 20 nt, Human
aauuuauauacaaccugcuu

SEQ ID NO: 3371944 - RNA, 16 nt, Human
aauuuauauuguaaau

SEQ ID NO: 3371945 - RNA, 17 nt, Human
aauuuaucagauugcuu

SEQ ID NO: 3371946 - RNA, 20 nt, Human
aauuuaucagauugcuuuug

SEQ ID NO: 3371947 - RNA, 21 nt, Human
aauuuaucuaaauuaaagccu

SEQ ID NO: 3371948 - RNA, 23 nt, Human
aauuuaugaauugaauuaucuug

SEQ ID NO: 3371949 - RNA, 19 nt, Human
aauuuaugaguuuuugaua

SEQ ID NO: 3371950 - RNA, 22 nt, Human
aauuuaugcacuuauaaggugu

SEQ ID NO: 3371951 - RNA, 17 nt, Human
aauuuauuaauugcuuu

SEQ ID NO: 3371952 - RNA, 18 nt, Human
aauuuauuaauugcuuug

SEQ ID NO: 3371953 - RNA, 19 nt, Human
aauuuauuaguuaauauau

SEQ ID NO: 3371954 - RNA, 14 nt, Human
aauuuauuauggca

SEQ ID NO: 3371955 - RNA, 16 nt, Human
aauuuauuauuguucu

SEQ ID NO: 3371956 - RNA, 19 nt, Human
aauuuauugaggaaaaaua

SEQ ID NO: 3371957 - RNA, 21 nt, Human
aauuuauugaggaaaaauaug

SEQ ID NO: 3371958 - RNA, 14 nt, Human
aauuuauugcacaa

SEQ ID NO: 3371959 - RNA, 16 nt, Human
aauuuauugcacaaaa

SEQ ID NO: 3371960 - RNA, 20 nt, Human
aauuuauugcacauuguuca

SEQ ID NO: 3371961 - RNA, 16 nt, Human
aauuuauugcuugaua

SEQ ID NO: 3371962 - RNA, 17 nt, Human
aauuuauuggcuuuucu

SEQ ID NO: 3371963 - RNA, 20 nt, Human
aauuuauuggcuuuucugau

SEQ ID NO: 3371964 - RNA, 23 nt, Human
aauuuauuggcuuuucugaucca

SEQ ID NO: 3371965 - RNA, 22 nt, Human
aauuuauuuccuaguucuguag

SEQ ID NO: 3371966 - RNA, 23 nt, Human
aauuuauuugaaugauuuuucuu

SEQ ID NO: 3371967 - RNA, 22 nt, Human
aauuuauuuuauaagaaaaacu

SEQ ID NO: 3371968 - RNA, 20 nt, Human
aauuuauuuuugcauggcac

SEQ ID NO: 3371969 - RNA, 15 nt, Human
aauuucaaaaauaua

SEQ ID NO: 3371970 - RNA, 20 nt, Human
aauuucaaaagacauguugu

SEQ ID NO: 3371971 - RNA, 12 nt, Human
aauuucaaaaug

SEQ ID NO: 3371972 - RNA, 16 nt, Human
aauuucaaaaugcuuu

SEQ ID NO: 3371973 - RNA, 15 nt, Human
aauuucaagcuuauu

SEQ ID NO: 3371974 - RNA, 18 nt, Human
aauuucaagguucuaacc

SEQ ID NO: 3371975 - RNA, 14 nt, Human
aauuucaauuuguu

SEQ ID NO: 3371976 - RNA, 15 nt, Human
aauuucaauuuguuc

SEQ ID NO: 3371977 - RNA, 21 nt, Human
aauuucaccaccaaaugccaa

SEQ ID NO: 3371978 - RNA, 18 nt, Human
aauuucacgauucauuuu

SEQ ID NO: 3371979 - RNA, 22 nt, Human
aauuucacgucauaggaaguua

SEQ ID NO: 3371980 - RNA, 21 nt, Human
acccacccuuucuacuuccaa

SEQ ID NO: 3371981 - RNA, 19 nt, Human
acccaccgggccacuccuu

SEQ ID NO: 3371982 - RNA, 22 nt, Human
acccaccgggccacuccuuccu

SEQ ID NO: 3371983 - RNA, 20 nt, Human
acccaccguccgcccugcuc

SEQ ID NO: 3371984 - RNA, 22 nt, Human
acccaccguccgcccugcuccu

SEQ ID NO: 3371985 - RNA, 22 nt, Human
acccaccguggaggaggaaggc

SEQ ID NO: 3371986 - RNA, 13 nt, Human
acccaccucagcc

SEQ ID NO: 3371987 - RNA, 16 nt, Human
acccaccucagccucc

SEQ ID NO: 3371988 - RNA, 13 nt, Human
acccaccucccug

SEQ ID NO: 3371989 - RNA, 15 nt, Human
acccaccucccugcc

SEQ ID NO: 3371990 - RNA, 16 nt, Human
acccaccucccugccu

SEQ ID NO: 3371991 - RNA, 18 nt, Human
acccaccucccugccucc

SEQ ID NO: 3371992 - RNA, 12 nt, Human
acccaccugagc

SEQ ID NO: 3371993 - RNA, 19 nt, Human
acccaccugguggccucug

SEQ ID NO: 3371994 - RNA, 13 nt, Human
acccacucagcuc

SEQ ID NO: 3371995 - RNA, 15 nt, Human
acccacucgguccca

SEQ ID NO: 3371996 - RNA, 20 nt, Human
acccacucuccucugccuca

SEQ ID NO: 3371997 - RNA, 11 nt, Human
acccacugcuc

SEQ ID NO: 3371998 - RNA, 14 nt, Human
acccacuggacuca

SEQ ID NO: 3371999 - RNA, 21 nt, Human
acccacuggacucaccucccc

SEQ ID NO: 3372000 - RNA, 14 nt, Human
acccacuucugcac

SEQ ID NO: 3372001 - RNA, 15 nt, Human
acccacuugucacug

SEQ ID NO: 3372002 - RNA, 18 nt, Human
acccagaaugagacaucc

SEQ ID NO: 3372003 - RNA, 15 nt, Human
acccagacauaaagg

SEQ ID NO: 3372004 - RNA, 17 nt, Human
acccagacauaaaggaa

SEQ ID NO: 3372005 - RNA, 18 nt, Human
acccagacauaaaggaaa

SEQ ID NO: 3372006 - RNA, 10 nt, Human
acccagaccc

SEQ ID NO: 3372007 - RNA, 22 nt, Human
acccagaccuguuagcagacag

SEQ ID NO: 3372008 - RNA, 14 nt, Human
acccagagaauaua

SEQ ID NO: 3372009 - RNA, 16 nt, Human
acccagagaauauaua

SEQ ID NO: 3372010 - RNA, 17 nt, Human
acccagagaggaaucag

SEQ ID NO: 3372011 - RNA, 23 nt, Human
acccagagcauuacgugagccag

SEQ ID NO: 3372012 - RNA, 22 nt, Human
acccagaggaaggggccagagg

SEQ ID NO: 3372013 - RNA, 14 nt, Human
acccagaggaggca

SEQ ID NO: 3372014 - RNA, 23 nt, Human
acccagaggaggcagaauaagaa

SEQ ID NO: 3372015 - RNA, 14 nt, Human
acccagauccucac

SEQ ID NO: 3372016 - RNA, 17 nt, Human
acccagcaacuccaacu

SEQ ID NO: 3372017 - RNA, 15 nt, Human
acccagcaguucugu

SEQ ID NO: 3372018 - RNA, 13 nt, Human
acccagccaucug

SEQ ID NO: 3372019 - RNA, 20 nt, Human
acccagccaucugcccaggg

SEQ ID NO: 3372020 - RNA, 17 nt, Human
acccagcccacuucugc

SEQ ID NO: 3372021 - RNA, 23 nt, Human
acccagcccauucucucuccugu

SEQ ID NO: 3372022 - RNA, 13 nt, Human
acccagcccuggu

SEQ ID NO: 3372023 - RNA, 16 nt, Human
acccagcccuggucuc

SEQ ID NO: 3372024 - RNA, 13 nt, Human
acccagccgcugc

SEQ ID NO: 3372025 - RNA, 18 nt, Human
acccagccgcugcccggc

SEQ ID NO: 3372026 - RNA, 17 nt, Human
acccagccucaguccuc

SEQ ID NO: 3372027 - RNA, 11 nt, Human
acccagccugg

SEQ ID NO: 3372028 - RNA, 17 nt, Human
acccagcgagcccuggu

SEQ ID NO: 3372029 - RNA, 23 nt, Human
acccagcgggcagguucugccug

SEQ ID NO: 3372030 - RNA, 22 nt, Human
acccagcuaugguucucucgca

SEQ ID NO: 3372031 - RNA, 20 nt, Human
acccagcucccuucuucccu

SEQ ID NO: 3372032 - RNA, 15 nt, Human
acccagcucuggucc

SEQ ID NO: 3372033 - RNA, 10 nt, Human
acccaggaca

SEQ ID NO: 3372034 - RNA, 18 nt, Human
acccaggacgcuucugaa

SEQ ID NO: 3372035 - RNA, 14 nt, Human
acccaggaggcagg

SEQ ID NO: 3372036 - RNA, 12 nt, Human
acccaggaggcg

SEQ ID NO: 3372037 - RNA, 18 nt, Human
acccaggaggggaacacu

SEQ ID NO: 3372038 - RNA, 21 nt, Human
acccaggaggggaacacugcc

SEQ ID NO: 3372039 - RNA, 11 nt, Human
acccaggaggu

SEQ ID NO: 3372040 - RNA, 15 nt, Human
acccaggcuccgccc

SEQ ID NO: 3372041 - RNA, 19 nt, Human
acccaggcuccgcccuuag

SEQ ID NO: 3372042 - RNA, 21 nt, Human
acccaggcuccgcccuuaguc

SEQ ID NO: 3372043 - RNA, 20 nt, Human
acccaggcuggagugcaaug

SEQ ID NO: 3372044 - RNA, 20 nt, Human
acccaggcuggagugcagug

SEQ ID NO: 3372045 - RNA, 21 nt, Human
acccagggcccaggcaaauca

SEQ ID NO: 3372046 - RNA, 12 nt, Human
acccagggcucu

SEQ ID NO: 3372047 - RNA, 15 nt, Human
acccagggcucugcc

SEQ ID NO: 3372048 - RNA, 21 nt, Human
acccagggcucugccccaguc

SEQ ID NO: 3372049 - RNA, 15 nt, Human
acccagggcucugua

SEQ ID NO: 3372050 - RNA, 21 nt, Human
acccaggggcagccccaggcc

SEQ ID NO: 3372051 - RNA, 13 nt, Human
acccagggguggg

SEQ ID NO: 3372052 - RNA, 14 nt, Human
acccaggugggucc

SEQ ID NO: 3372053 - RNA, 17 nt, Human
acccaguccccgugccc

SEQ ID NO: 3372054 - RNA, 16 nt, Human
acccaguccugcccgc

SEQ ID NO: 3372055 - RNA, 9 nt, Human
acccagugc

SEQ ID NO: 3372056 - RNA, 22 nt, Human
acccagugcccucuccccucag

SEQ ID NO: 3372057 - RNA, 11 nt, Human
acccaguggca

SEQ ID NO: 3372058 - RNA, 13 nt, Human
acccaguggcagg

SEQ ID NO: 3372059 - RNA, 15 nt, Human
acccaguggcagggc

SEQ ID NO: 3372060 - RNA, 17 nt, Human
acccaguugccaucugc

SEQ ID NO: 3372061 - RNA, 18 nt, Human
acccauagaucuucugaa

SEQ ID NO: 3372062 - RNA, 20 nt, Human
acccauaggcccacacacag

SEQ ID NO: 3372063 - RNA, 21 nt, Human
acccauaggcccacacacagg

SEQ ID NO: 3372064 - RNA, 11 nt, Human
acccauauccc

SEQ ID NO: 3372065 - RNA, 14 nt, Human
acccauauguuaaa

SEQ ID NO: 3372066 - RNA, 20 nt, Human
acccauccuaccaaugcaug

SEQ ID NO: 3372067 - RNA, 21 nt, Human
acccaucgguguccauuuaua

SEQ ID NO: 3372068 - RNA, 19 nt, Human
acccaucuaguacuugaaa

SEQ ID NO: 3372069 - RNA, 13 nt, Human
acccaucugggcu

SEQ ID NO: 3372070 - RNA, 16 nt, Human
acccaugaaagaaaac

SEQ ID NO: 3372071 - RNA, 22 nt, Human
acccaugaaagaaaacuuuuau

SEQ ID NO: 3372072 - RNA, 20 nt, Human
acccaugaggcaaugucagg

SEQ ID NO: 3372073 - RNA, 21 nt, Human
accacugcccccugcugccau

SEQ ID NO: 3372074 - RNA, 20 nt, Human
accacuggccaccaggcugg

SEQ ID NO: 3372075 - RNA, 16 nt, Human
accacuggucuguagg

SEQ ID NO: 3372076 - RNA, 15 nt, Human
accacugucuucuuc

SEQ ID NO: 3372077 - RNA, 16 nt, Human
accacuguguauuuaa

SEQ ID NO: 3372078 - RNA, 16 nt, Human
accacuucacugaaag

SEQ ID NO: 3372079 - RNA, 18 nt, Human
accacuucacugaaagac

SEQ ID NO: 3372080 - RNA, 13 nt, Human
accacuucauucu

SEQ ID NO: 3372081 - RNA, 16 nt, Human
accacuugaggccuga

SEQ ID NO: 3372082 - RNA, 16 nt, Human
accacuuguagauuug

SEQ ID NO: 3372083 - RNA, 19 nt, Human
accacuuguagauuugauu

SEQ ID NO: 3372084 - RNA, 12 nt, Human
accacuuuuguu

SEQ ID NO: 3372085 - RNA, 15 nt, Human
accacuuuuugcagc

SEQ ID NO: 3372086 - RNA, 16 nt, Human
accacuuuuugcagcu

SEQ ID NO: 3372087 - RNA, 18 nt, Human
accagaacaguaugaauu

SEQ ID NO: 3372088 - RNA, 14 nt, Human
accagaaccaaacc

SEQ ID NO: 3372089 - RNA, 15 nt, Human
accagaagcaacaga

SEQ ID NO: 3372090 - RNA, 16 nt, Human
accagaagcccagaau

SEQ ID NO: 3372091 - RNA, 14 nt, Human
accagacaagcugu

SEQ ID NO: 3372092 - RNA, 14 nt, Human
accagacaccuuga

SEQ ID NO: 3372093 - RNA, 12 nt, Human
accagacagagg

SEQ ID NO: 3372094 - RNA, 13 nt, Human
accagacagaggg

SEQ ID NO: 3372095 - RNA, 21 nt, Human
accagacuacuugggagcacc

SEQ ID NO: 3372096 - RNA, 22 nt, Human
accagacuagauggaccugccu

SEQ ID NO: 3372097 - RNA, 15 nt, Human
accagacucuugccu

SEQ ID NO: 3372098 - RNA, 18 nt, Human
accagagaaaaagggagg

SEQ ID NO: 3372099 - RNA, 20 nt, Human
accagagaaaaagggagggg

SEQ ID NO: 3372100 - RNA, 18 nt, Human
accagagaccguccucac

SEQ ID NO: 3372101 - RNA, 20 nt, Human
accagagcacuguauacccc

SEQ ID NO: 3372102 - RNA, 16 nt, Human
accagagcagaugcag

SEQ ID NO: 3372103 - RNA, 17 nt, Human
accagagcagaugcaga

SEQ ID NO: 3372104 - RNA, 16 nt, Human
accagagcccaccuug

SEQ ID NO: 3372105 - RNA, 14 nt, Human
accagagccccaca

SEQ ID NO: 3372106 - RNA, 18 nt, Human
accagagcucuggagcca

SEQ ID NO: 3372107 - RNA, 13 nt, Human
accagagcugcca

SEQ ID NO: 3372108 - RNA, 14 nt, Human
accagagcugccac

SEQ ID NO: 3372109 - RNA, 14 nt, Human
accagaggcugcag

SEQ ID NO: 3372110 - RNA, 15 nt, Human
accagaggcugcaga

SEQ ID NO: 3372111 - RNA, 22 nt, Human
accagagugcugaaggaaugga

SEQ ID NO: 3372112 - RNA, 20 nt, Human
accagauaagaaugcugguu

SEQ ID NO: 3372113 - RNA, 18 nt, Human
accagaugagaauuaggc

SEQ ID NO: 3372114 - RNA, 10 nt, Human
accagaugcu

SEQ ID NO: 3372115 - RNA, 12 nt, Human
accagaugcuga

SEQ ID NO: 3372116 - RNA, 14 nt, Human
accagaugcugaaa

SEQ ID NO: 3372117 - RNA, 20 nt, Human
accagaugcugaaagagaaa

SEQ ID NO: 3372118 - RNA, 14 nt, Human
accagaugugacag

SEQ ID NO: 3372119 - RNA, 16 nt, Human
accagcacacucccga

SEQ ID NO: 3372120 - RNA, 14 nt, Human
accagcagaaaugc

SEQ ID NO: 3372121 - RNA, 22 nt, Human
accagcagacagagccaggaga

SEQ ID NO: 3372122 - RNA, 13 nt, Human
accagcagagcac

SEQ ID NO: 3372123 - RNA, 14 nt, Human
accagcagccugga

SEQ ID NO: 3372124 - RNA, 16 nt, Human
accagcaucaccugcc

SEQ ID NO: 3372125 - RNA, 17 nt, Human
accagcaucaccugccu

SEQ ID NO: 3372126 - RNA, 17 nt, Human
accagcauuccuuuuga

SEQ ID NO: 3372127 - RNA, 15 nt, Human
accagccagauccuc

SEQ ID NO: 3372128 - RNA, 22 nt, Human
accagccauacuuaucucucug

SEQ ID NO: 3372129 - RNA, 22 nt, Human
accagcccacgcugacuacagg

SEQ ID NO: 3372130 - RNA, 15 nt, Human
accagcccagauguu

SEQ ID NO: 3372131 - RNA, 18 nt, Human
accagcccauggcccugu

SEQ ID NO: 3372132 - RNA, 19 nt, Human
accagcccauggcccugug

SEQ ID NO: 3372133 - RNA, 20 nt, Human
accagcccauggcccugugc

SEQ ID NO: 3372134 - RNA, 19 nt, Human
accagccccaauccaaaac

SEQ ID NO: 3372135 - RNA, 17 nt, Human
accagccccacugccag

SEQ ID NO: 3372136 - RNA, 20 nt, Human
aauuucagagagaaucaaga

SEQ ID NO: 3372137 - RNA, 20 nt, Human
aauuucagguuuuguaaaga

SEQ ID NO: 3372138 - RNA, 22 nt, Human
aauuucauaccuaucaucuuaa

SEQ ID NO: 3372139 - RNA, 16 nt, Human
aauuucauaugcugua

SEQ ID NO: 3372140 - RNA, 18 nt, Human
aauuucauguaaaacaga

SEQ ID NO: 3372141 - RNA, 15 nt, Human
aauuucauuuauuuu

SEQ ID NO: 3372142 - RNA, 11 nt, Human
aauuuccagag

SEQ ID NO: 3372143 - RNA, 15 nt, Human
aauuuccagagaaga

SEQ ID NO: 3372144 - RNA, 15 nt, Human
aauuuccaguaccuu

SEQ ID NO: 3372145 - RNA, 24 nt, Human
aauuuccagugagcuuaucaugcu

SEQ ID NO: 3372146 - RNA, 14 nt, Human
aauuucccaggacc

SEQ ID NO: 3372147 - RNA, 15 nt, Human
aauuucccaggaccc

SEQ ID NO: 3372148 - RNA, 17 nt, Human
aauuucccaggacccug

SEQ ID NO: 3372149 - RNA, 20 nt, Human
aauuuccccaacagugugaa

SEQ ID NO: 3372150 - RNA, 19 nt, Human
aauuucccccuaaaccaac

SEQ ID NO: 3372151 - RNA, 22 nt, Human
aauuuccuggugugaagguccu

SEQ ID NO: 3372152 - RNA, 20 nt, Human
aauuuccuguuggauuuguu

SEQ ID NO: 3372153 - RNA, 16 nt, Human
aauuuccuuuauauuu

SEQ ID NO: 3372154 - RNA, 14 nt, Human
aauuucgagauuug

SEQ ID NO: 3372155 - RNA, 17 nt, Human
aauuucggauuuuuucc

SEQ ID NO: 3372156 - RNA, 18 nt, Human
aauuucuaccauuucaga

SEQ ID NO: 3372157 - RNA, 22 nt, Human
aauuucuagccugcacuuugau

SEQ ID NO: 3372158 - RNA, 13 nt, Human
aauuucuauuaaa

SEQ ID NO: 3372159 - RNA, 14 nt, Human
aauuucucaucaca

SEQ ID NO: 3372160 - RNA, 11 nt, Human
aauuucucccc

SEQ ID NO: 3372161 - RNA, 19 nt, Human
aauuucuccccagggugga

SEQ ID NO: 3372162 - RNA, 14 nt, Human
aauuucugugaaac

SEQ ID NO: 3372163 - RNA, 21 nt, Human
aauuucuguguugccaagcuc

SEQ ID NO: 3372164 - RNA, 15 nt, Human
aauuucuuaacuucu

SEQ ID NO: 3372165 - RNA, 16 nt, Human
aauuucuuaacuucuu

SEQ ID NO: 3372166 - RNA, 20 nt, Human
aauuucuuaugugacauuaa

SEQ ID NO: 3372167 - RNA, 21 nt, Human
aauuucuugcucuaucucuca

SEQ ID NO: 3372168 - RNA, 11 nt, Human
aauuucuuguu

SEQ ID NO: 3372169 - RNA, 18 nt, Human
aauuucuuugccuguuca

SEQ ID NO: 3372170 - RNA, 13 nt, Human
aauuugaaccaaa

SEQ ID NO: 3372171 - RNA, 23 nt, Human
aauuugaaccaaaacauuccguu

SEQ ID NO: 3372172 - RNA, 17 nt, Human
aauuugaagacuucaaa

SEQ ID NO: 3372173 - RNA, 13 nt, Human
aauuugaaugaaa

SEQ ID NO: 3372174 - RNA, 22 nt, Human
aauuugaauuaucagcaaagaa

SEQ ID NO: 3372175 - RNA, 17 nt, Human
aauuugacuaauuuuac

SEQ ID NO: 3372176 - RNA, 18 nt, Human
aauuugacuuuucuguaa

SEQ ID NO: 3372177 - RNA, 24 nt, Human
aauuugaguaaucugaucguucuu

SEQ ID NO: 3372178 - RNA, 20 nt, Human
aauuugaguuggaucaucua

SEQ ID NO: 3372179 - RNA, 18 nt, Human
aauuugauacauaauaaa

SEQ ID NO: 3372180 - RNA, 21 nt, Human
aauuugauacauaugugaaua

SEQ ID NO: 3372181 - RNA, 13 nt, Human
aauuugauacuua

SEQ ID NO: 3372182 - RNA, 16 nt, Human
aauuugauaugugaac

SEQ ID NO: 3372183 - RNA, 18 nt, Human
aauuugauaugugaacag

SEQ ID NO: 3372184 - RNA, 17 nt, Human
aauuugauuaacaaaua

SEQ ID NO: 3372185 - RNA, 18 nt, Human
aauuugauuaacaaauau

SEQ ID NO: 3372186 - RNA, 12 nt, Human
aauuugauugau

SEQ ID NO: 3372187 - RNA, 13 nt, Human
aauuugauugauu

SEQ ID NO: 3372188 - RNA, 14 nt, Human
aauuugauugauuu

SEQ ID NO: 3372189 - RNA, 17 nt, Human
aauuugauugauuugaa

SEQ ID NO: 3372190 - RNA, 10 nt, Human
aauuugcaaa

SEQ ID NO: 3372191 - RNA, 18 nt, Human
aauuugcaaaguacugua

SEQ ID NO: 3372192 - RNA, 18 nt, Human
aauuugcaagucauggcu

SEQ ID NO: 3372193 - RNA, 22 nt, Human
aauuugcacaucuuggcuaugu

SEQ ID NO: 3372194 - RNA, 20 nt, Human
aauuugcacuaaaucagaga

SEQ ID NO: 3372195 - RNA, 15 nt, Human
aauuugcauuaaauu

SEQ ID NO: 3372196 - RNA, 17 nt, Human
aauuugcauuaaauuac

SEQ ID NO: 3372197 - RNA, 22 nt, Human
aauuugccuguaacaagccaga

SEQ ID NO: 3372198 - RNA, 16 nt, Human
aauuugcuucacucaa

SEQ ID NO: 3372199 - RNA, 21 nt, Human
aauuuggaaacuaauaaaaua

SEQ ID NO: 3372200 - RNA, 23 nt, Human
aauuuggaaacuaauaaaauauu

SEQ ID NO: 3372201 - RNA, 15 nt, Human
aauuuggaauucugu

SEQ ID NO: 3372202 - RNA, 16 nt, Human
aauuuggauugcuaau

SEQ ID NO: 3372203 - RNA, 18 nt, Human
aauuugggacccugcuuu

SEQ ID NO: 3372204 - RNA, 16 nt, Human
aauuugggagauauau

SEQ ID NO: 3372205 - RNA, 24 nt, Human
aauuuggggacagauucagucuug

SEQ ID NO: 3372206 - RNA, 21 nt, Human
aauuugggggacuuacaugau

SEQ ID NO: 3372207 - RNA, 20 nt, Human
aauuuggguaugaacagauu

SEQ ID NO: 3372208 - RNA, 19 nt, Human
aauuugguuuaaaaauaca

SEQ ID NO: 3372209 - RNA, 22 nt, Human
aauuuguaaaaacagcauugcu

SEQ ID NO: 3372210 - RNA, 23 nt, Human
aauuuguaaaaacagcauugcuu

SEQ ID NO: 3372211 - RNA, 13 nt, Human
aauuuguaaguuu

SEQ ID NO: 3372212 - RNA, 23 nt, Human
aauuuguaaguuucaggugacau

SEQ ID NO: 3372213 - RNA, 17 nt, Human
aauuuguaaugucuuga

SEQ ID NO: 3372214 - RNA, 17 nt, Human
aauuuguaggguuucua

SEQ ID NO: 3372215 - RNA, 15 nt, Human
aauuuguaucugaag

SEQ ID NO: 3372216 - RNA, 17 nt, Human
aauuuguaucugaagga

SEQ ID NO: 3372217 - RNA, 22 nt, Human
aauuuguaucugaaggagauuu

SEQ ID NO: 3372218 - RNA, 22 nt, Human
acccaggaggcagggaggcagc

SEQ ID NO: 3372219 - RNA, 23 nt, Human
acccaggaggcagggaggcagcc

SEQ ID NO: 3372220 - RNA, 19 nt, Human
acccaggagggagggggcu

SEQ ID NO: 3372221 - RNA, 21 nt, Human
acccaggagguggagguugca

SEQ ID NO: 3372222 - RNA, 23 nt, Human
acccaggagguggagguugcagu

SEQ ID NO: 3372223 - RNA, 17 nt, Human
acccaggaguguggcca

SEQ ID NO: 3372224 - RNA, 20 nt, Human
acccaggauuugcugggaga

SEQ ID NO: 3372225 - RNA, 19 nt, Human
acccaggccaggcaugugg

SEQ ID NO: 3372226 - RNA, 15 nt, Human
acccaggccgcagcu

SEQ ID NO: 3372227 - RNA, 19 nt, Human
acccaggcuagagugcaau

SEQ ID NO: 3372228 - RNA, 20 nt, Human
acccaggcuggaguacagug

SEQ ID NO: 3372229 - RNA, 19 nt, Human
acccaggcuggagugcagu

SEQ ID NO: 3372230 - RNA, 12 nt, Human
acccaggcuggg

SEQ ID NO: 3372231 - RNA, 13 nt, Human
acccagggaacag

SEQ ID NO: 3372232 - RNA, 13 nt, Human
acccagggcucug

SEQ ID NO: 3372233 - RNA, 17 nt, Human
acccagggcucugcccc

SEQ ID NO: 3372234 - RNA, 18 nt, Human
acccaggguaaucuguac

SEQ ID NO: 3372235 - RNA, 13 nt, Human
acccagguggguc

SEQ ID NO: 3372236 - RNA, 18 nt, Human
acccaggugggucccggc

SEQ ID NO: 3372237 - RNA, 16 nt, Human
acccagguguggccua

SEQ ID NO: 3372238 - RNA, 19 nt, Human
acccagguuggagugcagu

SEQ ID NO: 3372239 - RNA, 20 nt, Human
acccagguuggagugcagug

SEQ ID NO: 3372240 - RNA, 13 nt, Human
acccagucccugg

SEQ ID NO: 3372241 - RNA, 16 nt, Human
acccagucuguucccc

SEQ ID NO: 3372242 - RNA, 12 nt, Human
acccagugcaga

SEQ ID NO: 3372243 - RNA, 18 nt, Human
acccagugcagaauguaa

SEQ ID NO: 3372244 - RNA, 16 nt, Human
acccaguggcagggca

SEQ ID NO: 3372245 - RNA, 24 nt, Human
acccaguggcagggcacagggccu

SEQ ID NO: 3372246 - RNA, 22 nt, Human
acccaguguuuuaggagcauga

SEQ ID NO: 3372247 - RNA, 18 nt, Human
acccaguugccaucugcg

SEQ ID NO: 3372248 - RNA, 16 nt, Human
acccauaauccuuucu

SEQ ID NO: 3372249 - RNA, 14 nt, Human
acccauacaccccc

SEQ ID NO: 3372250 - RNA, 22 nt, Human
acccauagaucuucugaaauga

SEQ ID NO: 3372251 - RNA, 15 nt, Human
acccauagcuuccau

SEQ ID NO: 3372252 - RNA, 16 nt, Human
acccauagcuuccaug

SEQ ID NO: 3372253 - RNA, 15 nt, Human
acccauaggcccaca

SEQ ID NO: 3372254 - RNA, 15 nt, Human
acccauauccccucu

SEQ ID NO: 3372255 - RNA, 19 nt, Human
acccauauccccucucccc

SEQ ID NO: 3372256 - RNA, 21 nt, Human
acccauauccccucucccccc

SEQ ID NO: 3372257 - RNA, 18 nt, Human
acccaucacgccugugca

SEQ ID NO: 3372258 - RNA, 18 nt, Human
acccaucagaaggagaag

SEQ ID NO: 3372259 - RNA, 17 nt, Human
acccauccccgcagugu

SEQ ID NO: 3372260 - RNA, 21 nt, Human
acccauccuaccaaugcaugc

SEQ ID NO: 3372261 - RNA, 14 nt, Human
acccauccuagaga

SEQ ID NO: 3372262 - RNA, 17 nt, Human
acccaucgcuguguguu

SEQ ID NO: 3372263 - RNA, 22 nt, Human
acccaucugcaccccccugggc

SEQ ID NO: 3372264 - RNA, 18 nt, Human
acccaucuguuuuuugua

SEQ ID NO: 3372265 - RNA, 14 nt, Human
acccaucuuaaaaa

SEQ ID NO: 3372266 - RNA, 19 nt, Human
acccaugaagacaggacag

SEQ ID NO: 3372267 - RNA, 20 nt, Human
acccaugaagacaggacagu

SEQ ID NO: 3372268 - RNA, 13 nt, Human
acccaugaggcaa

SEQ ID NO: 3372269 - RNA, 21 nt, Human
acccaugaguuggggucuggc

SEQ ID NO: 3372270 - RNA, 15 nt, Human
acccaugcugcccug

SEQ ID NO: 3372271 - RNA, 16 nt, Human
acccaugcugcccugu

SEQ ID NO: 3372272 - RNA, 17 nt, Human
acccaugggcaggagac

SEQ ID NO: 3372273 - RNA, 14 nt, Human
acccaugggcucug

SEQ ID NO: 3372274 - RNA, 17 nt, Human
acccaugggcucugaca

SEQ ID NO: 3372275 - RNA, 22 nt, Human
acccauucguggugaucaauua

SEQ ID NO: 3372276 - RNA, 19 nt, Human
acccauucuacacagagca

SEQ ID NO: 3372277 - RNA, 17 nt, Human
acccauugcuguugucc

SEQ ID NO: 3372278 - RNA, 20 nt, Human
acccauuuaaauuuuuuucc

SEQ ID NO: 3372279 - RNA, 14 nt, Human
acccauuuucacau

SEQ ID NO: 3372280 - RNA, 17 nt, Human
acccauuuuuccuuuug

SEQ ID NO: 3372281 - RNA, 15 nt, Human
accccaaagagccug

SEQ ID NO: 3372282 - RNA, 21 nt, Human
accccaaagagccuggagaag

SEQ ID NO: 3372283 - RNA, 22 nt, Human
accccaaagagccuggagaagc

SEQ ID NO: 3372284 - RNA, 15 nt, Human
accccaaagccccuu

SEQ ID NO: 3372285 - RNA, 16 nt, Human
accccaaagccccuug

SEQ ID NO: 3372286 - RNA, 18 nt, Human
accccaaagccccuugcu

SEQ ID NO: 3372287 - RNA, 18 nt, Human
accccaaagcuuuccugc

SEQ ID NO: 3372288 - RNA, 15 nt, Human
accccaacaaaccau

SEQ ID NO: 3372289 - RNA, 15 nt, Human
accccaaccugcucu

SEQ ID NO: 3372290 - RNA, 18 nt, Human
accccaaccugcucuccu

SEQ ID NO: 3372291 - RNA, 15 nt, Human
accccaacuccagua

SEQ ID NO: 3372292 - RNA, 16 nt, Human
accccaagacucccau

SEQ ID NO: 3372293 - RNA, 17 nt, Human
accccaagacucccaug

SEQ ID NO: 3372294 - RNA, 13 nt, Human
accccaagagaac

SEQ ID NO: 3372295 - RNA, 16 nt, Human
accccaagagaacucg

SEQ ID NO: 3372296 - RNA, 18 nt, Human
accccaagagaacucgcg

SEQ ID NO: 3372297 - RNA, 16 nt, Human
accccaagcgcccugg

SEQ ID NO: 3372298 - RNA, 19 nt, Human
accccaagcgcccuggccc

SEQ ID NO: 3372299 - RNA, 23 nt, Human
accccaagcgcccuggcccccac

SEQ ID NO: 3372300 - RNA, 20 nt, Human
accccaaguagucugcucac

SEQ ID NO: 3372301 - RNA, 17 nt, Human
accccaauuccuuguag

SEQ ID NO: 3372302 - RNA, 20 nt, Human
accccaauuucggauuuuuu

SEQ ID NO: 3372303 - RNA, 21 nt, Human
accccaauuucggauuuuuuc

SEQ ID NO: 3372304 - RNA, 17 nt, Human
accccacaccaggccgu

SEQ ID NO: 3372305 - RNA, 22 nt, Human
accccacaccaggccguccucc

SEQ ID NO: 3372306 - RNA, 18 nt, Human
accccacacgcuccuccc

SEQ ID NO: 3372307 - RNA, 21 nt, Human
accccacccccuucagugccc

SEQ ID NO: 3372308 - RNA, 13 nt, Human
accccacccuccc

SEQ ID NO: 3372309 - RNA, 19 nt, Human
accccacccucccuggagu

SEQ ID NO: 3372310 - RNA, 15 nt, Human
accccacccuguuug

SEQ ID NO: 3372311 - RNA, 16 nt, Human
accccacccuguuugg

SEQ ID NO: 3372312 - RNA, 12 nt, Human
accccaccugca

SEQ ID NO: 3372313 - RNA, 12 nt, Human
accccacuccca

SEQ ID NO: 3372314 - RNA, 14 nt, Human
accccacucccaca

SEQ ID NO: 3372315 - RNA, 17 nt, Human
accccagagauucccaa

SEQ ID NO: 3372316 - RNA, 13 nt, Human
accccagagccac

SEQ ID NO: 3372317 - RNA, 19 nt, Human
accccagagccacacaugg

SEQ ID NO: 3372318 - RNA, 20 nt, Human
accccagcaauuaugaaaau

SEQ ID NO: 3372319 - RNA, 23 nt, Human
accccagccgcucggaggcccca

SEQ ID NO: 3372320 - RNA, 18 nt, Human
accccagccuggccacgc

SEQ ID NO: 3372321 - RNA, 15 nt, Human
accccagcugggagg

SEQ ID NO: 3372322 - RNA, 20 nt, Human
accccagcugggaggcaaga

SEQ ID NO: 3372323 - RNA, 22 nt, Human
accccagcuggggccaggcugg

SEQ ID NO: 3372324 - RNA, 23 nt, Human
accccagcuggggccaggcuggg

SEQ ID NO: 3372325 - RNA, 20 nt, Human
accccagcugugagccuugg

SEQ ID NO: 3372326 - RNA, 22 nt, Human
accccagcugugagccuuggcu

SEQ ID NO: 3372327 - RNA, 21 nt, Human
accccaggacgccacucauuu

SEQ ID NO: 3372328 - RNA, 18 nt, Human
accccaggcccacucagg

SEQ ID NO: 3372329 - RNA, 14 nt, Human
accccaggccccga

SEQ ID NO: 3372330 - RNA, 20 nt, Human
accccaggcugaagcagguu

SEQ ID NO: 3372331 - RNA, 15 nt, Human
accccagggcacagg

SEQ ID NO: 3372332 - RNA, 19 nt, Human
accccagggcacaggagcu

SEQ ID NO: 3372333 - RNA, 13 nt, Human
accccagggccug

SEQ ID NO: 3372334 - RNA, 23 nt, Human
accccagggcuguaacugccagg

SEQ ID NO: 3372335 - RNA, 16 nt, Human
accccaguggccacuc

SEQ ID NO: 3372336 - RNA, 23 nt, Human
accccaguggccacucagcuucc

SEQ ID NO: 3372337 - RNA, 17 nt, Human
acaauacagauaacauu

SEQ ID NO: 3372338 - RNA, 23 nt, Human
acaauacaucccuuaccugggaa

SEQ ID NO: 3372339 - RNA, 18 nt, Human
acaauacucauaauguga

SEQ ID NO: 3372340 - RNA, 20 nt, Human
acaauacucauaaugugaag

SEQ ID NO: 3372341 - RNA, 20 nt, Human
acaauagcuuuacccucagg

SEQ ID NO: 3372342 - RNA, 22 nt, Human
acaauaggaugggcuucugugc

SEQ ID NO: 3372343 - RNA, 16 nt, Human
acaauauauaaaaaua

SEQ ID NO: 3372344 - RNA, 17 nt, Human
acaauauauaaaaauau

SEQ ID NO: 3372345 - RNA, 17 nt, Human
acaauaucauaucauca

SEQ ID NO: 3372346 - RNA, 19 nt, Human
acaauaugcaaugugaagc

SEQ ID NO: 3372347 - RNA, 10 nt, Human
acaauauuua

SEQ ID NO: 3372348 - RNA, 13 nt, Human
acaauauuuaaaa

SEQ ID NO: 3372349 - RNA, 14 nt, Human
acaauauuuuaagc

SEQ ID NO: 3372350 - RNA, 15 nt, Human
acaauauuuuaagca

SEQ ID NO: 3372351 - RNA, 17 nt, Human
acaauauuuuaagcauu

SEQ ID NO: 3372352 - RNA, 19 nt, Human
acaaucaaaggaaaauagu

SEQ ID NO: 3372353 - RNA, 16 nt, Human
acaaucagaaacucuu

SEQ ID NO: 3372354 - RNA, 18 nt, Human
acaaucagcugcuuuguu

SEQ ID NO: 3372355 - RNA, 18 nt, Human
acaaucaguccccuccca

SEQ ID NO: 3372356 - RNA, 19 nt, Human
acaaucaguccccucccau

SEQ ID NO: 3372357 - RNA, 18 nt, Human
acaaucauugcugaaaau

SEQ ID NO: 3372358 - RNA, 17 nt, Human
acaaucauuguuuugaa

SEQ ID NO: 3372359 - RNA, 21 nt, Human
acaaucauuguuuugaauauu

SEQ ID NO: 3372360 - RNA, 17 nt, Human
acaauccuagugcuuuc

SEQ ID NO: 3372361 - RNA, 23 nt, Human
acaauccuagugcuuuccuuuuu

SEQ ID NO: 3372362 - RNA, 22 nt, Human
accucagucaguauuguuuugg

SEQ ID NO: 3372363 - RNA, 23 nt, Human
accucagugccuuccuguuuuuc

SEQ ID NO: 3372364 - RNA, 19 nt, Human
accucagugucauuuauga

SEQ ID NO: 3372365 - RNA, 20 nt, Human
accucaguucccuuggccuc

SEQ ID NO: 3372366 - RNA, 13 nt, Human
accucauccaaac

SEQ ID NO: 3372367 - RNA, 19 nt, Human
accucaugcaucuccaccu

SEQ ID NO: 3372368 - RNA, 21 nt, Human
accucaugcaucuccaccugc

SEQ ID NO: 3372369 - RNA, 13 nt, Human
accucaugcccac

SEQ ID NO: 3372370 - RNA, 20 nt, Human
accucaugcccacccccugc

SEQ ID NO: 3372371 - RNA, 22 nt, Human
accucaugcccacccccugccc

SEQ ID NO: 3372372 - RNA, 19 nt, Human
accuccaaaacuccugccc

SEQ ID NO: 3372373 - RNA, 21 nt, Human
accuccaaaacuccugccccu

SEQ ID NO: 3372374 - RNA, 19 nt, Human
accuccaaaagcccugagu

SEQ ID NO: 3372375 - RNA, 22 nt, Human
accuccaacccugccgucacca

SEQ ID NO: 3372376 - RNA, 13 nt, Human
accuccacagcuu

SEQ ID NO: 3372377 - RNA, 14 nt, Human
accuccacagcuuc

SEQ ID NO: 3372378 - RNA, 18 nt, Human
accuccacaguucagugg

SEQ ID NO: 3372379 - RNA, 17 nt, Human
accuccaccuccugggu

SEQ ID NO: 3372380 - RNA, 17 nt, Human
accuccagcccgggagc

SEQ ID NO: 3372381 - RNA, 21 nt, Human
accuccagcccgggagccuag

SEQ ID NO: 3372382 - RNA, 22 nt, Human
accuccagcccgggagccuagg

SEQ ID NO: 3372383 - RNA, 21 nt, Human
accuccauucuauuuuagaau

SEQ ID NO: 3372384 - RNA, 19 nt, Human
accucccagagguccagcc

SEQ ID NO: 3372385 - RNA, 21 nt, Human
accucccagagguccagccca

SEQ ID NO: 3372386 - RNA, 22 nt, Human
accucccagagguccagcccau

SEQ ID NO: 3372387 - RNA, 13 nt, Human
accucccagcccc

SEQ ID NO: 3372388 - RNA, 19 nt, Human
accucccagcccuauggau

SEQ ID NO: 3372389 - RNA, 20 nt, Human
accucccagcccuauggaug

SEQ ID NO: 3372390 - RNA, 19 nt, Human
accuccccacgcccucccc

SEQ ID NO: 3372391 - RNA, 20 nt, Human
accuccccacgcccuccccu

SEQ ID NO: 3372392 - RNA, 15 nt, Human
accuccccagcauuc

SEQ ID NO: 3372393 - RNA, 21 nt, Human
accuccccagcauuccagccc

SEQ ID NO: 3372394 - RNA, 12 nt, Human
accuccccagcc

SEQ ID NO: 3372395 - RNA, 13 nt, Human
accuccccagccc

SEQ ID NO: 3372396 - RNA, 16 nt, Human
accuccccagccccua

SEQ ID NO: 3372397 - RNA, 14 nt, Human
accuccccagccug

SEQ ID NO: 3372398 - RNA, 14 nt, Human
accuccccccacug

SEQ ID NO: 3372399 - RNA, 22 nt, Human
accucccccuccuucccagcug

SEQ ID NO: 3372400 - RNA, 17 nt, Human
accuccccuauccaccc

SEQ ID NO: 3372401 - RNA, 19 nt, Human
accuccccuauccacccag

SEQ ID NO: 3372402 - RNA, 17 nt, Human
accuccccuccuugccu

SEQ ID NO: 3372403 - RNA, 20 nt, Human
accuccccuccuugccuccu

SEQ ID NO: 3372404 - RNA, 21 nt, Human
accuccccuccuugccuccug

SEQ ID NO: 3372405 - RNA, 15 nt, Human
accuccccugccuug

SEQ ID NO: 3372406 - RNA, 16 nt, Human
accuccccuugccagc

SEQ ID NO: 3372407 - RNA, 17 nt, Human
accuccccuugccagcu

SEQ ID NO: 3372408 - RNA, 13 nt, Human
accuccccuuggg

SEQ ID NO: 3372409 - RNA, 18 nt, Human
accucccucuuguuuugu

SEQ ID NO: 3372410 - RNA, 15 nt, Human
accucccugaaccau

SEQ ID NO: 3372411 - RNA, 20 nt, Human
accucccugaaccaucccug

SEQ ID NO: 3372412 - RNA, 12 nt, Human
accucccugcaa

SEQ ID NO: 3372413 - RNA, 14 nt, Human
accucccugcaacc

SEQ ID NO: 3372414 - RNA, 13 nt, Human
accucccugcaau

SEQ ID NO: 3372415 - RNA, 14 nt, Human
accucccugcccag

SEQ ID NO: 3372416 - RNA, 13 nt, Human
accucccuuccga

SEQ ID NO: 3372417 - RNA, 21 nt, Human
accuccggccaggugccuccu

SEQ ID NO: 3372418 - RNA, 23 nt, Human
accuccggccaggugccuccuga

SEQ ID NO: 3372419 - RNA, 17 nt, Human
accuccuaaaaggccca

SEQ ID NO: 3372420 - RNA, 19 nt, Human
accuccuauggguugucac

SEQ ID NO: 3372421 - RNA, 14 nt, Human
accuccucagggau

SEQ ID NO: 3372422 - RNA, 15 nt, Human
accuccucauggcag

SEQ ID NO: 3372423 - RNA, 18 nt, Human
accuccucccacugccca

SEQ ID NO: 3372424 - RNA, 23 nt, Human
accuccuccccccuccucugaaa

SEQ ID NO: 3372425 - RNA, 19 nt, Human
accuccucucacuccccag

SEQ ID NO: 3372426 - RNA, 16 nt, Human
accuccucucaguguu

SEQ ID NO: 3372427 - RNA, 12 nt, Human
accuccucugug

SEQ ID NO: 3372428 - RNA, 18 nt, Human
accuccucugugaagcau

SEQ ID NO: 3372429 - RNA, 14 nt, Human
accuccucuucccc

SEQ ID NO: 3372430 - RNA, 15 nt, Human
accuccucuuccccc

SEQ ID NO: 3372431 - RNA, 16 nt, Human
accuccucuucugacg

SEQ ID NO: 3372432 - RNA, 13 nt, Human
accuccugcccag

SEQ ID NO: 3372433 - RNA, 15 nt, Human
accuccugcccagga

SEQ ID NO: 3372434 - RNA, 13 nt, Human
accuccugccucg

SEQ ID NO: 3372435 - RNA, 13 nt, Human
accuccugggcua

SEQ ID NO: 3372436 - RNA, 12 nt, Human
accuccuggggc

SEQ ID NO: 3372437 - RNA, 13 nt, Human
accuccuguggaa

SEQ ID NO: 3372438 - RNA, 13 nt, Human
accuccuucccuc

SEQ ID NO: 3372439 - RNA, 15 nt, Human
accuccuucccucuc

SEQ ID NO: 3372440 - RNA, 19 nt, Human
accuccuucccucucugga

SEQ ID NO: 3372441 - RNA, 19 nt, Human
accuccuuucaucacacug

SEQ ID NO: 3372442 - RNA, 16 nt, Human
accuccuuucucuucu

SEQ ID NO: 3372443 - RNA, 16 nt, Human
accucgaguacugugg

SEQ ID NO: 3372444 - RNA, 18 nt, Human
accucgaguacugugggc

SEQ ID NO: 3372445 - RNA, 19 nt, Human
accucgaguacugugggca

SEQ ID NO: 3372446 - RNA, 13 nt, Human
accucgcccucuc

SEQ ID NO: 3372447 - RNA, 15 nt, Human
accucgcccucuccu

SEQ ID NO: 3372448 - RNA, 18 nt, Human
accucgcuggacucucag

SEQ ID NO: 3372449 - RNA, 17 nt, Human
accucggugccuuccuc

SEQ ID NO: 3372450 - RNA, 14 nt, Human
accucguccucccc

SEQ ID NO: 3372451 - RNA, 18 nt, Human
accucuaaaacaguccuu

SEQ ID NO: 3372452 - RNA, 16 nt, Human
accucuaacagcacca

SEQ ID NO: 3372453 - RNA, 19 nt, Human
accucuaacagcaccaaau

SEQ ID NO: 3372454 - RNA, 20 nt, Human
accucuaauaguauaaaccc

SEQ ID NO: 3372455 - RNA, 19 nt, Human
accucuacccaaacccuag

SEQ ID NO: 3372456 - RNA, 12 nt, Human
accucuagaauu

SEQ ID NO: 3372457 - RNA, 16 nt, Human
accucuagcccugccc

SEQ ID NO: 3372458 - RNA, 18 nt, Human
accucuagcccugcccgg

SEQ ID NO: 3372459 - RNA, 16 nt, Human
accucuaguagcugaa

SEQ ID NO: 3372460 - RNA, 18 nt, Human
accucuauaauugccacu

SEQ ID NO: 3372461 - RNA, 13 nt, Human
accucucacuccc

SEQ ID NO: 3372462 - RNA, 11 nt, Human
accucucccac

SEQ ID NO: 3372463 - RNA, 15 nt, Human
accucucccacggga

SEQ ID NO: 3372464 - RNA, 13 nt, Human
accucucccaggg

SEQ ID NO: 3372465 - RNA, 15 nt, Human
accucucccucaaca

SEQ ID NO: 3372466 - RNA, 15 nt, Human
accucucccuuggau

SEQ ID NO: 3372467 - RNA, 23 nt, Human
accucucccuuggauuguccccg

SEQ ID NO: 3372468 - RNA, 20 nt, Human
accucuccuuuggccauucc

SEQ ID NO: 3372469 - RNA, 22 nt, Human
accucucugucccuugcuguau

SEQ ID NO: 3372470 - RNA, 22 nt, Human
accucugaauuuacuuccuugc

SEQ ID NO: 3372471 - RNA, 13 nt, Human
accucugacagca

SEQ ID NO: 3372472 - RNA, 15 nt, Human
accucugauaccuca

SEQ ID NO: 3372473 - RNA, 21 nt, Human
accucugcacaagcugcaccc

SEQ ID NO: 3372474 - RNA, 15 nt, Human
accucugcagcaaua

SEQ ID NO: 3372475 - RNA, 12 nt, Human
accucugccuca

SEQ ID NO: 3372476 - RNA, 17 nt, Human
accucugccucagaaaa

SEQ ID NO: 3372477 - RNA, 18 nt, Human
accucugccucagaaaac

SEQ ID NO: 3372478 - RNA, 20 nt, Human
accucugccucagaaaacaa

SEQ ID NO: 3372479 - RNA, 23 nt, Human
accucugccugaagucacacagu

SEQ ID NO: 3372480 - RNA, 14 nt, Human
accucugcggaccc

SEQ ID NO: 3372481 - RNA, 19 nt, Human
accucugcggaccccagcu

SEQ ID NO: 3372482 - RNA, 22 nt, Human
accucugcucugaggcuuccag

SEQ ID NO: 3372483 - RNA, 15 nt, Human
accucugcugccucc

SEQ ID NO: 3372484 - RNA, 14 nt, Human
accucugcuuccca

SEQ ID NO: 3372485 - RNA, 16 nt, Human
accucuggacuggcua

SEQ ID NO: 3372486 - RNA, 21 nt, Human
accucuggauuaggucucugu

SEQ ID NO: 3372487 - RNA, 13 nt, Human
accucugggagcu

SEQ ID NO: 3372488 - RNA, 18 nt, Human
accucuggguugggauca

SEQ ID NO: 3372489 - RNA, 13 nt, Human
accucuguaauuu

SEQ ID NO: 3372490 - RNA, 15 nt, Human
accucugucauuugu

SEQ ID NO: 3372491 - RNA, 21 nt, Human
accucugucucauccuccugg

SEQ ID NO: 3372492 - RNA, 14 nt, Human
accucugugaccuc

SEQ ID NO: 3372493 - RNA, 19 nt, Human
accccaguucugcuccucu

SEQ ID NO: 3372494 - RNA, 21 nt, Human
accccauagugaccggcugcu

SEQ ID NO: 3372495 - RNA, 17 nt, Human
accccauccaguucaug

SEQ ID NO: 3372496 - RNA, 17 nt, Human
accccaucccuccccag

SEQ ID NO: 3372497 - RNA, 15 nt, Human
accccaucugcccag

SEQ ID NO: 3372498 - RNA, 19 nt, Human
accccaugcuggccuugcc

SEQ ID NO: 3372499 - RNA, 20 nt, Human
accccaugcuguugauugcu

SEQ ID NO: 3372500 - RNA, 23 nt, Human
accccaugcuguugauugcuaaa

SEQ ID NO: 3372501 - RNA, 19 nt, Human
accccauggagcugggcua

SEQ ID NO: 3372502 - RNA, 22 nt, Human
accccauggcagugggaaaaau

SEQ ID NO: 3372503 - RNA, 14 nt, Human
accccauggccggc

SEQ ID NO: 3372504 - RNA, 20 nt, Human
accccauggccggcuuucag

SEQ ID NO: 3372505 - RNA, 16 nt, Human
acccccaaauuuucuu

SEQ ID NO: 3372506 - RNA, 15 nt, Human
acccccacacacaca

SEQ ID NO: 3372507 - RNA, 18 nt, Human
acccgccucucccgucag

SEQ ID NO: 3372508 - RNA, 19 nt, Human
acccgccuuuuauaaaccu

SEQ ID NO: 3372509 - RNA, 15 nt, Human
acccgcucuggacca

SEQ ID NO: 3372510 - RNA, 18 nt, Human
acccggaggggccuggca

SEQ ID NO: 3372511 - RNA, 22 nt, Human
acccggcacccccugcagcuug

SEQ ID NO: 3372512 - RNA, 13 nt, Human
acccggcuaauuu

SEQ ID NO: 3372513 - RNA, 22 nt, Human
acccgggaaccuccccagccug

SEQ ID NO: 3372514 - RNA, 23 nt, Human
acccgggaaccuccccagccugc

SEQ ID NO: 3372515 - RNA, 22 nt, Human
acccgggaagggggcugggaca

SEQ ID NO: 3372516 - RNA, 12 nt, Human
acccgggcucag

SEQ ID NO: 3372517 - RNA, 14 nt, Human
acccggggcccagg

SEQ ID NO: 3372518 - RNA, 22 nt, Human
acccggggcccagggcaagcuc

SEQ ID NO: 3372519 - RNA, 14 nt, Human
acccgguucagugu

SEQ ID NO: 3372520 - RNA, 16 nt, Human
acccgugagcgccugu

SEQ ID NO: 3372521 - RNA, 19 nt, Human
acccgugagcgccugugca

SEQ ID NO: 3372522 - RNA, 18 nt, Human
acccgugccaaguccagg

SEQ ID NO: 3372523 - RNA, 13 nt, Human
acccguggaggcu

SEQ ID NO: 3372524 - RNA, 16 nt, Human
acccguucacauuuuu

SEQ ID NO: 3372525 - RNA, 17 nt, Human
acccguucaugggggag

SEQ ID NO: 3372526 - RNA, 23 nt, Human
acccguucugcuggccuggaucu

SEQ ID NO: 3372527 - RNA, 21 nt, Human
acccguuuuaugauuuacuca

SEQ ID NO: 3372528 - RNA, 22 nt, Human
acccguuuuaugauuuacucau

SEQ ID NO: 3372529 - RNA, 16 nt, Human
acccuaaaucugagga

SEQ ID NO: 3372530 - RNA, 15 nt, Human
acccuaaccaaguuc

SEQ ID NO: 3372531 - RNA, 16 nt, Human
acccuaagccuccuuu

SEQ ID NO: 3372532 - RNA, 21 nt, Human
acccuaauagacuaaaugaaa

SEQ ID NO: 3372533 - RNA, 13 nt, Human
acccuaaugucuu

SEQ ID NO: 3372534 - RNA, 19 nt, Human
acccuaccaacuuuacugu

SEQ ID NO: 3372535 - RNA, 16 nt, Human
acccuaccugugccug

SEQ ID NO: 3372536 - RNA, 14 nt, Human
acccuacuucuuuu

SEQ ID NO: 3372537 - RNA, 22 nt, Human
acccuagguucccggucccgag

SEQ ID NO: 3372538 - RNA, 16 nt, Human
acccuagguucccugu

SEQ ID NO: 3372539 - RNA, 22 nt, Human
acccuagguucccuguucuucc

SEQ ID NO: 3372540 - RNA, 15 nt, Human
acccuaguucuaccu

SEQ ID NO: 3372541 - RNA, 21 nt, Human
acccuaguucuaccucaggca

SEQ ID NO: 3372542 - RNA, 17 nt, Human
acccuauauguaguaua

SEQ ID NO: 3372543 - RNA, 18 nt, Human
acccuaucuccugacaga

SEQ ID NO: 3372544 - RNA, 14 nt, Human
acccuaugggucua

SEQ ID NO: 3372545 - RNA, 19 nt, Human
acccuaugggucuaggaca

SEQ ID NO: 3372546 - RNA, 23 nt, Human
acccuaugggucuaggacacagu

SEQ ID NO: 3372547 - RNA, 15 nt, Human
acccucacacuggga

SEQ ID NO: 3372548 - RNA, 21 nt, Human
acccucacuggcucuccuggc

SEQ ID NO: 3372549 - RNA, 14 nt, Human
acccucagcacccc

SEQ ID NO: 3372550 - RNA, 17 nt, Human
acccucagcaccccuuc

SEQ ID NO: 3372551 - RNA, 18 nt, Human
acccucagcaccccuucc

SEQ ID NO: 3372552 - RNA, 15 nt, Human
acccucaggcaggug

SEQ ID NO: 3372553 - RNA, 16 nt, Human
acccucaggcaggugg

SEQ ID NO: 3372554 - RNA, 22 nt, Human
acccucaggcauaggccugggu

SEQ ID NO: 3372555 - RNA, 23 nt, Human
acccucaggcauaggccugggug

SEQ ID NO: 3372556 - RNA, 13 nt, Human
acccucaucacca

SEQ ID NO: 3372557 - RNA, 14 nt, Human
acccucaugcugcc

SEQ ID NO: 3372558 - RNA, 16 nt, Human
acccucaugcugccaa

SEQ ID NO: 3372559 - RNA, 15 nt, Human
acccucauguucuua

SEQ ID NO: 3372560 - RNA, 17 nt, Human
acccucauguucuuaau

SEQ ID NO: 3372561 - RNA, 14 nt, Human
acccuccaaggcca

SEQ ID NO: 3372562 - RNA, 23 nt, Human
acccuccacccugucccccagcu

SEQ ID NO: 3372563 - RNA, 21 nt, Human
acccuccacucagcuguccug

SEQ ID NO: 3372564 - RNA, 15 nt, Human
acccuccagagacaa

SEQ ID NO: 3372565 - RNA, 13 nt, Human
acccucccacccc

SEQ ID NO: 3372566 - RNA, 13 nt, Human
acccucccagcuc

SEQ ID NO: 3372567 - RNA, 16 nt, Human
acccucccagcucuga

SEQ ID NO: 3372568 - RNA, 23 nt, Human
acccucccccaggaggucgaccc

SEQ ID NO: 3372569 - RNA, 12 nt, Human
acccuccccucc

SEQ ID NO: 3372570 - RNA, 18 nt, Human
acccuccccucucuugca

SEQ ID NO: 3372571 - RNA, 17 nt, Human
acccuccccuucccagg

SEQ ID NO: 3372572 - RNA, 20 nt, Human
acccuccccuucccagggca

SEQ ID NO: 3372573 - RNA, 17 nt, Human
acccucccucagccccu

SEQ ID NO: 3372574 - RNA, 16 nt, Human
acccucccuccgaucc

SEQ ID NO: 3372575 - RNA, 22 nt, Human
acccucccuccgauccuuccuc

SEQ ID NO: 3372576 - RNA, 23 nt, Human
acccucccuccgauccuuccucc

SEQ ID NO: 3372577 - RNA, 12 nt, Human
acccucccugcu

SEQ ID NO: 3372578 - RNA, 14 nt, Human
acccucccugcugu

SEQ ID NO: 3372579 - RNA, 17 nt, Human
acccuccuguaaauggu

SEQ ID NO: 3372580 - RNA, 18 nt, Human
acccuccugucuucccag

SEQ ID NO: 3372581 - RNA, 21 nt, Human
acccuccugucuucccagggu

SEQ ID NO: 3372582 - RNA, 23 nt, Human
acccuccugucuucccaggguag

SEQ ID NO: 3372583 - RNA, 11 nt, Human
acccuccuguu

SEQ ID NO: 3372584 - RNA, 19 nt, Human
acccuccuguugcacccag

SEQ ID NO: 3372585 - RNA, 23 nt, Human
acccuccuguugcacccagcccu

SEQ ID NO: 3372586 - RNA, 16 nt, Human
acccucgaagcgcgcc

SEQ ID NO: 3372587 - RNA, 20 nt, Human
acccucgaagcgcgccacuc

SEQ ID NO: 3372588 - RNA, 18 nt, Human
acccucgccggacccucu

SEQ ID NO: 3372589 - RNA, 16 nt, Human
acccucgcuggccccc

SEQ ID NO: 3372590 - RNA, 17 nt, Human
acccucgcuggccccca

SEQ ID NO: 3372591 - RNA, 15 nt, Human
acccucgggcccacc

SEQ ID NO: 3372592 - RNA, 17 nt, Human
acccucggggauguguc

SEQ ID NO: 3372593 - RNA, 23 nt, Human
acccucggggauguguccugaca

SEQ ID NO: 3372594 - RNA, 20 nt, Human
acccucguggacaccugccc

SEQ ID NO: 3372595 - RNA, 23 nt, Human
acccucguggacaccugcccugc

SEQ ID NO: 3372596 - RNA, 22 nt, Human
acccucuaaccucgcccucucc

SEQ ID NO: 3372597 - RNA, 19 nt, Human
acccucucaggugaccaaa

SEQ ID NO: 3372598 - RNA, 16 nt, Human
acccucugaaauacau

SEQ ID NO: 3372599 - RNA, 14 nt, Human
acccucugccacca

SEQ ID NO: 3372600 - RNA, 20 nt, Human
acccucuggauucugaaucu

SEQ ID NO: 3372601 - RNA, 11 nt, Human
acccucuggcc

SEQ ID NO: 3372602 - RNA, 15 nt, Human
acccucugggaaccu

SEQ ID NO: 3372603 - RNA, 20 nt, Human
acccucugggaaccucccag

SEQ ID NO: 3372604 - RNA, 21 nt, Human
acccucugggaaccucccaga

SEQ ID NO: 3372605 - RNA, 22 nt, Human
acccucuguaccccaugaccuu

SEQ ID NO: 3372606 - RNA, 14 nt, Human
acccucuuagaaaa

SEQ ID NO: 3372607 - RNA, 23 nt, Human
acccucuugcccauccugacuga

SEQ ID NO: 3372608 - RNA, 16 nt, Human
acccucuuugcugcag

SEQ ID NO: 3372609 - RNA, 12 nt, Human
acccugaaaugu

SEQ ID NO: 3372610 - RNA, 13 nt, Human
acccugaaaugug

SEQ ID NO: 3372611 - RNA, 14 nt, Human
acccugaaaugugu

SEQ ID NO: 3372612 - RNA, 15 nt, Human
acccugaaaugugug

SEQ ID NO: 3372613 - RNA, 22 nt, Human
acccugaaugguuccaugccug

SEQ ID NO: 3372614 - RNA, 21 nt, Human
acccugaauuuggccugcacu

SEQ ID NO: 3372615 - RNA, 17 nt, Human
acccugaccagcucccc

SEQ ID NO: 3372616 - RNA, 13 nt, Human
acccugaccuggc

SEQ ID NO: 3372617 - RNA, 20 nt, Human
acccugaccuggcccccuca

SEQ ID NO: 3372618 - RNA, 11 nt, Human
acccugagccc

SEQ ID NO: 3372619 - RNA, 17 nt, Human
acccugaggagucugag

SEQ ID NO: 3372620 - RNA, 16 nt, Human
acccugaguugcuuuu

SEQ ID NO: 3372621 - RNA, 22 nt, Human
acccugauuuaggagaagccag

SEQ ID NO: 3372622 - RNA, 17 nt, Human
acccugauuucuugcuu

SEQ ID NO: 3372623 - RNA, 18 nt, Human
acccugcaaaggacuguu

SEQ ID NO: 3372624 - RNA, 15 nt, Human
acccugcaaggccca

SEQ ID NO: 3372625 - RNA, 16 nt, Human
acccugcaaggcccac

SEQ ID NO: 3372626 - RNA, 14 nt, Human
acccugccaggcac

SEQ ID NO: 3372627 - RNA, 21 nt, Human
acccugccaggcacaggcagg

SEQ ID NO: 3372628 - RNA, 23 nt, Human
acccugccaggcacaggcagggc

SEQ ID NO: 3372629 - RNA, 22 nt, Human
acccugccauggaacuguuucc

SEQ ID NO: 3372630 - RNA, 17 nt, Human
acccugccccagcuggg

SEQ ID NO: 3372631 - RNA, 18 nt, Human
acccugccccugccccgu

SEQ ID NO: 3372632 - RNA, 12 nt, Human
acccugcccugu

SEQ ID NO: 3372633 - RNA, 13 nt, Human
acccugcccugug

SEQ ID NO: 3372634 - RNA, 21 nt, Human
acccugcccuuguuuggggca

SEQ ID NO: 3372635 - RNA, 23 nt, Human
acccugccucucccaggcagggg

SEQ ID NO: 3372636 - RNA, 18 nt, Human
acccugcgaaggggcccu

SEQ ID NO: 3372637 - RNA, 20 nt, Human
acccugcgaaggggcccugg

SEQ ID NO: 3372638 - RNA, 22 nt, Human
acccugcgaaggggcccugguc
